United States Patent Application Publication US 2008/0318210 A1 - sequence listing, part 5

SEQ ID NO: 160740 - RNA, 12 nt, Human herpesvirus 6
uacauauaguca

SEQ ID NO: 160741 - RNA, 12 nt, Human herpesvirus 6
uacauaagcaaa

SEQ ID NO: 160742 - RNA, 16 nt, Human herpesvirus 6
uacauaauaucuaucu

SEQ ID NO: 160743 - RNA, 16 nt, Human herpesvirus 6
uacauuaaacacuaaa

SEQ ID NO: 160744 - RNA, 14 nt, Human herpesvirus 6
uaccuauagucaau

SEQ ID NO: 160745 - RNA, 18 nt, Human herpesvirus 6
uaccuauagucaauguug

SEQ ID NO: 160746 - RNA, 16 nt, Human herpesvirus 6
uaccguucaucauucc

SEQ ID NO: 160747 - RNA, 12 nt, Human herpesvirus 6
uaccuacauccu

SEQ ID NO: 160748 - RNA, 20 nt, Human herpesvirus 6
uacauucucguaguugcauu

SEQ ID NO: 160749 - RNA, 16 nt, Human herpesvirus 6
uacauucggaauuucu

SEQ ID NO: 160750 - RNA, 16 nt, Human herpesvirus 6
uaccucuaaacccaga

SEQ ID NO: 160751 - RNA, 16 nt, Human herpesvirus 6
uaccugaaagaaaaau

SEQ ID NO: 160752 - RNA, 22 nt, Human herpesvirus 6
uaccuggaaacaacgacuacca

SEQ ID NO: 160753 - RNA, 21 nt, Human herpesvirus 6
uaccuguaaacuggucugcuu

SEQ ID NO: 160754 - RNA, 17 nt, Human herpesvirus 6
uacuucgugcugugaua

SEQ ID NO: 160755 - RNA, 23 nt, Human herpesvirus 6
uacuuauuuuuuuuucuguguau

SEQ ID NO: 160756 - RNA, 21 nt, Human herpesvirus 6
uacuuacaacugaaacuucac

SEQ ID NO: 160757 - RNA, 16 nt, Human herpesvirus 6
uacgaaccucaugagu

SEQ ID NO: 160758 - RNA, 16 nt, Human herpesvirus 6
uacuaaauguuaugaa

SEQ ID NO: 160759 - RNA, 20 nt, Human herpesvirus 6
uacguuucuguccaaugacu

SEQ ID NO: 160760 - RNA, 22 nt, Human herpesvirus 6
uacuaaaaagagucccaucuau

SEQ ID NO: 160761 - RNA, 18 nt, Human herpesvirus 6
uacuagcuaaaacuugaa

SEQ ID NO: 160762 - RNA, 14 nt, Human herpesvirus 6
uacuaucguuuaua

SEQ ID NO: 160763 - RNA, 22 nt, Human herpesvirus 6
uacuauauaugcaagccaugac

SEQ ID NO: 160764 - RNA, 21 nt, Human herpesvirus 6
uaaggacaaaguucaguaaca

SEQ ID NO: 160765 - RNA, 18 nt, Human herpesvirus 6
uaauugcgcaggaacaaa

SEQ ID NO: 160766 - RNA, 14 nt, Human herpesvirus 6
uaauugcacccuau

SEQ ID NO: 160767 - RNA, 15 nt, Human herpesvirus 6
uaauucggaacauug

SEQ ID NO: 160768 - RNA, 13 nt, Human herpesvirus 6
uaauugaacauug

SEQ ID NO: 160769 - RNA, 15 nt, Human herpesvirus 6
uaauugaacauugua

SEQ ID NO: 160770 - RNA, 18 nt, Human herpesvirus 6
uaauuguggauuuucaga

SEQ ID NO: 160771 - RNA, 11 nt, Human herpesvirus 6
uaauuggugcg

SEQ ID NO: 160772 - RNA, 18 nt, Human herpesvirus 6
uaauuguuuuuuacuucc

SEQ ID NO: 160773 - RNA, 13 nt, Human herpesvirus 6
uaacucuuuuugu

SEQ ID NO: 160774 - RNA, 14 nt, Human herpesvirus 6
uaacuuuacauuaa

SEQ ID NO: 160775 - RNA, 15 nt, Human herpesvirus 6
uaagcagcagaacaa

SEQ ID NO: 160776 - RNA, 17 nt, Human herpesvirus 6
uacaauaacaauuauuc

SEQ ID NO: 160777 - RNA, 16 nt, Human herpesvirus 6
uacaagucgacaaauu

SEQ ID NO: 160778 - RNA, 18 nt, Human herpesvirus 6
uaauuuuauuaacuguaa

SEQ ID NO: 160779 - RNA, 19 nt, Human herpesvirus 6
uaauuuuuuugcgugugug

SEQ ID NO: 160780 - RNA, 21 nt, Human herpesvirus 6
uacacaaauugaccagccaga

SEQ ID NO: 160781 - RNA, 20 nt, Human herpesvirus 6
uacaaugacugggagaauaa

SEQ ID NO: 160782 - RNA, 20 nt, Human herpesvirus 6
uacaguuucucgaaaaaaca

SEQ ID NO: 160783 - RNA, 16 nt, Human herpesvirus 6
uacacaccgucuucaa

SEQ ID NO: 160784 - RNA, 13 nt, Human herpesvirus 6
uacagcaccauca

SEQ ID NO: 160785 - RNA, 17 nt, Human herpesvirus 6
uacagcaccaucaauaa

SEQ ID NO: 160786 - RNA, 22 nt, Human herpesvirus 6
gaacgcagcguaaugugcaaag

SEQ ID NO: 160787 - RNA, 15 nt, Human herpesvirus 6
gaagauagcagaaua

SEQ ID NO: 160788 - RNA, 16 nt, Human herpesvirus 6
gaagauagcagaauag

SEQ ID NO: 160789 - RNA, 16 nt, Human herpesvirus 6
gaagaucuaaauuucu

SEQ ID NO: 160790 - RNA, 15 nt, Human herpesvirus 6
gaacgggcacacguc

SEQ ID NO: 160791 - RNA, 22 nt, Human herpesvirus 6
gaacgcccgccggcccauccac

SEQ ID NO: 160792 - RNA, 20 nt, Human herpesvirus 6
gaagauuugacauugcugaa

SEQ ID NO: 160793 - RNA, 13 nt, Human herpesvirus 6
gaagcgccauaaa

SEQ ID NO: 160794 - RNA, 16 nt, Human herpesvirus 6
gaagcuucaagucuaa

SEQ ID NO: 160795 - RNA, 13 nt, Human herpesvirus 6
gaaggagauuuca

SEQ ID NO: 160796 - RNA, 19 nt, Human herpesvirus 6
gaaggucaucaugcuguga

SEQ ID NO: 160797 - RNA, 20 nt, Human herpesvirus 6
gaaggucaucaugcugugag

SEQ ID NO: 160798 - RNA, 22 nt, Human herpesvirus 6
gaaucaaugaaaaaaaaugaag

SEQ ID NO: 160799 - RNA, 21 nt, Human herpesvirus 6
gaauccagaaacuugcuccug

SEQ ID NO: 160800 - RNA, 12 nt, Human herpesvirus 6
gaaucuuauuca

SEQ ID NO: 160801 - RNA, 17 nt, Human herpesvirus 6
gaaucuacugagaucau

SEQ ID NO: 160802 - RNA, 21 nt, Human herpesvirus 6
gaaucuuguguucuaucacau

SEQ ID NO: 160803 - RNA, 19 nt, Human herpesvirus 6
gaauaucugcuaagucuuu

SEQ ID NO: 160804 - RNA, 14 nt, Human herpesvirus 6
gaauauguuuucaa

SEQ ID NO: 160805 - RNA, 13 nt, Human herpesvirus 6
gaagggcucuauu

SEQ ID NO: 160806 - RNA, 12 nt, Human herpesvirus 6
gaaguaaauaca

SEQ ID NO: 160807 - RNA, 17 nt, Human herpesvirus 6
gacaaaaccuaaauaca

SEQ ID NO: 160808 - RNA, 12 nt, Human herpesvirus 6
gacaacaaagga

SEQ ID NO: 160809 - RNA, 16 nt, Human herpesvirus 6
gacaacacgccagaca

SEQ ID NO: 160810 - RNA, 21 nt, Human herpesvirus 6
gacaaaguucaguaacauuua

SEQ ID NO: 160811 - RNA, 22 nt, Human herpesvirus 6
gacaaaguucaguaacauuuaa

SEQ ID NO: 160812 - RNA, 17 nt, Human herpesvirus 6
gaaugaauuuacuguuu

SEQ ID NO: 160813 - RNA, 23 nt, Human herpesvirus 6
gacaaaaaaaaaacgucacguca

SEQ ID NO: 160814 - RNA, 19 nt, Human herpesvirus 6
gacaacgugcucguauaaa

SEQ ID NO: 160815 - RNA, 14 nt, Human herpesvirus 6
gaaauucuauguac

SEQ ID NO: 160816 - RNA, 20 nt, Human herpesvirus 6
gaaauuacaagguacacaau

SEQ ID NO: 160817 - RNA, 19 nt, Human herpesvirus 6
gaaacucuuauaacaagca

SEQ ID NO: 160818 - RNA, 19 nt, Human herpesvirus 6
gaaagaaacgaagucuuug

SEQ ID NO: 160819 - RNA, 15 nt, Human herpesvirus 6
gaaagccggugaccg

SEQ ID NO: 160820 - RNA, 15 nt, Human herpesvirus 6
gaaccgaucugugag

SEQ ID NO: 160821 - RNA, 12 nt, Human herpesvirus 6
gaaccuccaguu

SEQ ID NO: 160822 - RNA, 17 nt, Human herpesvirus 6
gaaauuuuugacugaua

SEQ ID NO: 160823 - RNA, 14 nt, Human herpesvirus 6
gaacaaaaucuucu

SEQ ID NO: 160824 - RNA, 21 nt, Human herpesvirus 6
gaacacauccacccaccuguc

SEQ ID NO: 160825 - RNA, 17 nt, Human herpesvirus 6
gaacaaugacauuauua

SEQ ID NO: 160826 - RNA, 14 nt, Human herpesvirus 6
gaacaauuaucaca

SEQ ID NO: 160827 - RNA, 21 nt, Human herpesvirus 6
gaacaauuaucacaguugaua

SEQ ID NO: 160828 - RNA, 19 nt, Human herpesvirus 6
gaaaauguuucauccaaau

SEQ ID NO: 160829 - RNA, 15 nt, Human herpesvirus 6
gaaaauugaugaugu

SEQ ID NO: 160830 - RNA, 23 nt, Human herpesvirus 6
gaaacagauaguguuuucugauu

SEQ ID NO: 160831 - RNA, 17 nt, Human herpesvirus 6
gaaacaacgacuaccac

SEQ ID NO: 160832 - RNA, 19 nt, Human herpesvirus 6
gaaacaacgacuaccacau

SEQ ID NO: 160833 - RNA, 17 nt, Human herpesvirus 6
gaaaauaacgauggagu

SEQ ID NO: 160834 - RNA, 17 nt, Human herpesvirus 6
gaaacaugaacauugaa

SEQ ID NO: 160835 - RNA, 18 nt, Human herpesvirus 6
gaaacaggaacagucuga

SEQ ID NO: 160836 - RNA, 11 nt, Human herpesvirus 6
gaaacaguaaa

SEQ ID NO: 160837 - RNA, 15 nt, Human herpesvirus 6
gaaacauuugcugau

SEQ ID NO: 160838 - RNA, 12 nt, Human herpesvirus 6
gaaaccaaagca

SEQ ID NO: 160839 - RNA, 19 nt, Human herpesvirus 6
gaaaccaaagcauacucaa

SEQ ID NO: 160840 - RNA, 18 nt, Human herpesvirus 6
gaaacgaucgacccacuc

SEQ ID NO: 160841 - RNA, 16 nt, Human herpesvirus 6
gaaacuccccagagaa

SEQ ID NO: 160842 - RNA, 23 nt, Human herpesvirus 6
gaaacggcgcggagcccaagaag

SEQ ID NO: 160843 - RNA, 23 nt, Human herpesvirus 6
gaaaccauagcuguccaugagau

SEQ ID NO: 160844 - RNA, 16 nt, Human herpesvirus 6
gaaacgaagucuuugg

SEQ ID NO: 160845 - RNA, 15 nt, Human herpesvirus 6
cuguauggcaaaagc

SEQ ID NO: 160846 - RNA, 17 nt, Human herpesvirus 6
cugucuugauaacggcu

SEQ ID NO: 160847 - RNA, 13 nt, Human herpesvirus 6
cugugauaugcaa

SEQ ID NO: 160848 - RNA, 14 nt, Human herpesvirus 6
cugugauaugcaaa

SEQ ID NO: 160849 - RNA, 17 nt, Human herpesvirus 6
cugugacgccuugaugu

SEQ ID NO: 160850 - RNA, 14 nt, Human herpesvirus 6
cuugcaaugugauc

SEQ ID NO: 160851 - RNA, 12 nt, Human herpesvirus 6
cuugugaaagac

SEQ ID NO: 160852 - RNA, 16 nt, Human herpesvirus 6
cuuguguaucugugaa

SEQ ID NO: 160853 - RNA, 21 nt, Human herpesvirus 6
cuugugucauguuuacugcau

SEQ ID NO: 160854 - RNA, 15 nt, Human herpesvirus 6
cuuguguucuaucac

SEQ ID NO: 160855 - RNA, 19 nt, Human herpesvirus 6
cuuguuaucuuauguauau

SEQ ID NO: 160856 - RNA, 16 nt, Human herpesvirus 6
cuuuaaaugaggcuau

SEQ ID NO: 160857 - RNA, 14 nt, Human herpesvirus 6
cuuguugaguuuca

SEQ ID NO: 160858 - RNA, 21 nt, Human herpesvirus 6
cuuuauguacccuaagugaaa

SEQ ID NO: 160859 - RNA, 22 nt, Human herpesvirus 6
cuuucaguucaaacgcagacua

SEQ ID NO: 160860 - RNA, 16 nt, Human herpesvirus 6
cuuuacauuaaacacu

SEQ ID NO: 160861 - RNA, 16 nt, Human herpesvirus 6
cuuuaccgaguaggua

SEQ ID NO: 160862 - RNA, 15 nt, Human herpesvirus 6
gaaaaauaaaaucca

SEQ ID NO: 160863 - RNA, 22 nt, Human herpesvirus 6
gaaaaaguauccuaaauaccaa

SEQ ID NO: 160864 - RNA, 13 nt, Human herpesvirus 6
gaaaagcuggaaa

SEQ ID NO: 160865 - RNA, 22 nt, Human herpesvirus 6
gaaaagaugagcgucagaguac

SEQ ID NO: 160866 - RNA, 17 nt, Human herpesvirus 6
gaaaacaaagaaucaau

SEQ ID NO: 160867 - RNA, 16 nt, Human herpesvirus 6
gaaaacuaugugcauu

SEQ ID NO: 160868 - RNA, 23 nt, Human herpesvirus 6
gaaaaaaaaauaaguacauagaa

SEQ ID NO: 160869 - RNA, 13 nt, Human herpesvirus 6
gaaaaaaaaucua

SEQ ID NO: 160870 - RNA, 14 nt, Human herpesvirus 6
gaaaaaaaaucuau

SEQ ID NO: 160871 - RNA, 16 nt, Human herpesvirus 6
gaaaaaaaaugaaggg

SEQ ID NO: 160872 - RNA, 21 nt, Human herpesvirus 6
gaaaaaaaauugccuuguaaa

SEQ ID NO: 160873 - RNA, 16 nt, Human herpesvirus 6
gaaaaaaacugugaaa

SEQ ID NO: 160874 - RNA, 20 nt, Human herpesvirus 6
gaaaaaacaacgacuaucaa

SEQ ID NO: 160875 - RNA, 21 nt, Human herpesvirus 6
cuuuuucaagagcgagaucua

SEQ ID NO: 160876 - RNA, 19 nt, Human herpesvirus 6
cuuuuugccgucacacucu

SEQ ID NO: 160877 - RNA, 22 nt, Human herpesvirus 6
cuuuuugccgucacacucuuaa

SEQ ID NO: 160878 - RNA, 17 nt, Human herpesvirus 6
cuuuugcuuagucugua

SEQ ID NO: 160879 - RNA, 16 nt, Human herpesvirus 6
cuuuuaaaacaggaag

SEQ ID NO: 160880 - RNA, 22 nt, Human herpesvirus 6
cuuuuagucuuuaccauuugac

SEQ ID NO: 160881 - RNA, 21 nt, Human herpesvirus 6
cuuuuaugagaacaagugacc

SEQ ID NO: 160882 - RNA, 14 nt, Human herpesvirus 6
cuuuuacuuacauc

SEQ ID NO: 160883 - RNA, 20 nt, Human herpesvirus 6
cuuuuaauuguuucacggau

SEQ ID NO: 160884 - RNA, 18 nt, Human herpesvirus 6
cuuugguuucaguaguga

SEQ ID NO: 160885 - RNA, 21 nt, Human herpesvirus 6
cuuugucgcaugcuuauuuca

SEQ ID NO: 160886 - RNA, 18 nt, Human herpesvirus 6
cuuugggaacauguaacu

SEQ ID NO: 160887 - RNA, 13 nt, Human herpesvirus 6
cuuucaugauucu

SEQ ID NO: 160888 - RNA, 18 nt, Human herpesvirus 6
cuuugcgcccauaccugu

SEQ ID NO: 160889 - RNA, 13 nt, Human herpesvirus 6
gauacaugcaauu

SEQ ID NO: 160890 - RNA, 19 nt, Human herpesvirus 6
gauagaccgcuuuuaugag

SEQ ID NO: 160891 - RNA, 19 nt, Human herpesvirus 6
gauacaauaacaauuauuc

SEQ ID NO: 160892 - RNA, 20 nt, Human herpesvirus 6
gauacaauaacaauuauuca

SEQ ID NO: 160893 - RNA, 15 nt, Human herpesvirus 6
gauaauuaugcauuu

SEQ ID NO: 160894 - RNA, 13 nt, Human herpesvirus 6
gauccagauuucu

SEQ ID NO: 160895 - RNA, 15 nt, Human herpesvirus 6
gauccaaaagauuac

SEQ ID NO: 160896 - RNA, 22 nt, Human herpesvirus 6
gaucaauauaucgucuacggca

SEQ ID NO: 160897 - RNA, 17 nt, Human herpesvirus 6
gauguagcuggauauac

SEQ ID NO: 160898 - RNA, 18 nt, Human herpesvirus 6
gauguacucauccaagac

SEQ ID NO: 160899 - RNA, 21 nt, Human herpesvirus 6
gauggugcgaucgagcaacag

SEQ ID NO: 160900 - RNA, 20 nt, Human herpesvirus 6
gaugacggaauaugguucca

SEQ ID NO: 160901 - RNA, 17 nt, Human herpesvirus 6
gaugacaucugcaaaaa

SEQ ID NO: 160902 - RNA, 13 nt, Human herpesvirus 6
gaugagcuuuaau

SEQ ID NO: 160903 - RNA, 14 nt, Human herpesvirus 6
gcaacacacaguga

SEQ ID NO: 160904 - RNA, 13 nt, Human herpesvirus 6
gcaacaauccaug

SEQ ID NO: 160905 - RNA, 19 nt, Human herpesvirus 6
gcaacaauccauguucaua

SEQ ID NO: 160906 - RNA, 13 nt, Human herpesvirus 6
gcaaauguaacuu

SEQ ID NO: 160907 - RNA, 18 nt, Human herpesvirus 6
gcaaaccauaaaaaaucu

SEQ ID NO: 160908 - RNA, 14 nt, Human herpesvirus 6
gcaaacgaaaccau

SEQ ID NO: 160909 - RNA, 13 nt, Human herpesvirus 6
gauugugcaguua

SEQ ID NO: 160910 - RNA, 19 nt, Human herpesvirus 6
gauuguuaauauuagccau

SEQ ID NO: 160911 - RNA, 15 nt, Human herpesvirus 6
gauucgguaucgguu

SEQ ID NO: 160912 - RNA, 14 nt, Human herpesvirus 6
gauucugcauuuau

SEQ ID NO: 160913 - RNA, 20 nt, Human herpesvirus 6
gauugcagacgcugaaauca

SEQ ID NO: 160914 - RNA, 13 nt, Human herpesvirus 6
gauugccaaaggc

SEQ ID NO: 160915 - RNA, 17 nt, Human herpesvirus 6
gauugcggacaugguga

SEQ ID NO: 160916 - RNA, 15 nt, Human herpesvirus 6
gcaaguagccaauga

SEQ ID NO: 160917 - RNA, 16 nt, Human herpesvirus 6
gcacacauguauuuau

SEQ ID NO: 160918 - RNA, 15 nt, Human herpesvirus 6
gcacaaaaccaggaa

SEQ ID NO: 160919 - RNA, 18 nt, Human herpesvirus 6
gcaccuaucuagaucaau

SEQ ID NO: 160920 - RNA, 14 nt, Human herpesvirus 6
gagucuugugugaa

SEQ ID NO: 160921 - RNA, 12 nt, Human herpesvirus 6
gagugcauuaua

SEQ ID NO: 160922 - RNA, 21 nt, Human herpesvirus 6
gagugccucagaggugaguag

SEQ ID NO: 160923 - RNA, 14 nt, Human herpesvirus 6
gagugauugaugaa

SEQ ID NO: 160924 - RNA, 15 nt, Human herpesvirus 6
gagugauugugacaa

SEQ ID NO: 160925 - RNA, 22 nt, Human herpesvirus 6
gagugcaacaaaaagcuuuaaa

SEQ ID NO: 160926 - RNA, 19 nt, Human herpesvirus 6
gagucccaucuauacaccc

SEQ ID NO: 160927 - RNA, 17 nt, Human herpesvirus 6
gauaaacuguaugcaau

SEQ ID NO: 160928 - RNA, 15 nt, Human herpesvirus 6
gauaaaaacucacac

SEQ ID NO: 160929 - RNA, 17 nt, Human herpesvirus 6
gaguuuuuaucggugau

SEQ ID NO: 160930 - RNA, 12 nt, Human herpesvirus 6
gaguuucagguu

SEQ ID NO: 160931 - RNA, 21 nt, Human herpesvirus 6
gaguucuguggccgaagaaga

SEQ ID NO: 160932 - RNA, 19 nt, Human herpesvirus 6
gaguggacauuggucuuug

SEQ ID NO: 160933 - RNA, 13 nt, Human herpesvirus 6
gaguggagauaga

SEQ ID NO: 160934 - RNA, 16 nt, Human herpesvirus 6
gaguggaguccaguua

SEQ ID NO: 160935 - RNA, 21 nt, Human herpesvirus 6
gagugggaugcauuauacuga

SEQ ID NO: 160936 - RNA, 18 nt, Human herpesvirus 6
gagcccucguccaaauca

SEQ ID NO: 160937 - RNA, 17 nt, Human herpesvirus 6
gagccacuugcaaugug

SEQ ID NO: 160938 - RNA, 13 nt, Human herpesvirus 6
gagaggacaguca

SEQ ID NO: 160939 - RNA, 13 nt, Human herpesvirus 6
gagagcgugcaca

SEQ ID NO: 160940 - RNA, 16 nt, Human herpesvirus 6
gagauaaaaaacucaa

SEQ ID NO: 160941 - RNA, 16 nt, Human herpesvirus 6
gagagauuuacuguuu

SEQ ID NO: 160942 - RNA, 16 nt, Human herpesvirus 6
gagagacguuguuuga

SEQ ID NO: 160943 - RNA, 20 nt, Human herpesvirus 6
gagagaggagcauucacaua

SEQ ID NO: 160944 - RNA, 16 nt, Human herpesvirus 6
gagagacauccauuga

SEQ ID NO: 160945 - RNA, 19 nt, Human herpesvirus 6
gacucugacgaaguuuuua

SEQ ID NO: 160946 - RNA, 20 nt, Human herpesvirus 6
gacugaagaugagcagcuuu

SEQ ID NO: 160947 - RNA, 22 nt, Human herpesvirus 6
gacuggaaaacuaugugcauuc

SEQ ID NO: 160948 - RNA, 18 nt, Human herpesvirus 6
gacuucaaacaccucaca

SEQ ID NO: 160949 - RNA, 16 nt, Human herpesvirus 6
gagacagauugaucau

SEQ ID NO: 160950 - RNA, 15 nt, Human herpesvirus 6
gagacaguccauuuc

SEQ ID NO: 160951 - RNA, 16 nt, Human herpesvirus 6
gagacguuguuugacc

SEQ ID NO: 160952 - RNA, 20 nt, Human herpesvirus 6
gagacugccgguaacgcugu

SEQ ID NO: 160953 - RNA, 22 nt, Human herpesvirus 6
gagacuggaaaacuaugugcau

SEQ ID NO: 160954 - RNA, 23 nt, Human herpesvirus 6
gacaaucgucggaucaacagaug

SEQ ID NO: 160955 - RNA, 21 nt, Human herpesvirus 6
gacaaugauacuaaguguaau

SEQ ID NO: 160956 - RNA, 19 nt, Human herpesvirus 6
gacaccucagggucaaaaa

SEQ ID NO: 160957 - RNA, 18 nt, Human herpesvirus 6
gacacgauuucugacucu

SEQ ID NO: 160958 - RNA, 22 nt, Human herpesvirus 6
gacgguuagguuuaauaguuuu

SEQ ID NO: 160959 - RNA, 14 nt, Human herpesvirus 6
cguagacaguaaaa

SEQ ID NO: 160960 - RNA, 19 nt, Human herpesvirus 6
cguagacaguaaaaugugu

SEQ ID NO: 160961 - RNA, 23 nt, Human herpesvirus 6
cguagacagucacacacagggug

SEQ ID NO: 160962 - RNA, 22 nt, Human herpesvirus 6
cguaucacacuuagcaacuacu

SEQ ID NO: 160963 - RNA, 16 nt, Human herpesvirus 6
cguaugaaaguccuca

SEQ ID NO: 160964 - RNA, 16 nt, Human herpesvirus 6
cguauguuuggauaau

SEQ ID NO: 160965 - RNA, 20 nt, Human herpesvirus 6
cgugaauauaucaaauuuac

SEQ ID NO: 160966 - RNA, 16 nt, Human herpesvirus 6
cguaugugaagaucac

SEQ ID NO: 160967 - RNA, 16 nt, Human herpesvirus 6
cggucaccuacauucg

SEQ ID NO: 160968 - RNA, 15 nt, Human herpesvirus 6
cggucagacagugag

SEQ ID NO: 160969 - RNA, 20 nt, Human herpesvirus 6
cggugcagaacaucucagau

SEQ ID NO: 160970 - RNA, 22 nt, Human herpesvirus 6
cgguccguuuuucucugcaaaa

SEQ ID NO: 160971 - RNA, 20 nt, Human herpesvirus 6
cguuagguguaaaucaucaa

SEQ ID NO: 160972 - RNA, 24 nt, Human herpesvirus 6
cguuaacaauaauacgcaguuguc

SEQ ID NO: 160973 - RNA, 17 nt, Human herpesvirus 6
cguuccccaugucuugc

SEQ ID NO: 160974 - RNA, 20 nt, Human herpesvirus 6
cguuccacgcauagacaaac

SEQ ID NO: 160975 - RNA, 19 nt, Human herpesvirus 6
cguuaaaaaaaaugugucu

SEQ ID NO: 160976 - RNA, 21 nt, Human herpesvirus 6
cguuaaaaaaaaugugucuua

SEQ ID NO: 160977 - RNA, 18 nt, Human herpesvirus 6
cguuuaugcgaaucugcc

SEQ ID NO: 160978 - RNA, 14 nt, Human herpesvirus 6
cguucugucugcag

SEQ ID NO: 160979 - RNA, 15 nt, Human herpesvirus 6
cgugccaguucacac

SEQ ID NO: 160980 - RNA, 16 nt, Human herpesvirus 6
cgugcucguauaaaua

SEQ ID NO: 160981 - RNA, 19 nt, Human herpesvirus 6
cgcucugaaauuugagaaa

SEQ ID NO: 160982 - RNA, 17 nt, Human herpesvirus 6
cgcgcgcgacgugccac

SEQ ID NO: 160983 - RNA, 23 nt, Human herpesvirus 6
cgcgggggcacaucuauguguau

SEQ ID NO: 160984 - RNA, 23 nt, Human herpesvirus 6
cgcguaaagauguagcuggauau

SEQ ID NO: 160985 - RNA, 17 nt, Human herpesvirus 6
cggcuaauaugauccga

SEQ ID NO: 160986 - RNA, 18 nt, Human herpesvirus 6
cggcuacgacacgcugga

SEQ ID NO: 160987 - RNA, 13 nt, Human herpesvirus 6
cgggaaauaaaaa

SEQ ID NO: 160988 - RNA, 21 nt, Human herpesvirus 6
cgggaacauagagaaacgaga

SEQ ID NO: 160989 - RNA, 13 nt, Human herpesvirus 6
cgggaaaagauca

SEQ ID NO: 160990 - RNA, 16 nt, Human herpesvirus 6
cggccuggaguacaag

SEQ ID NO: 160991 - RNA, 14 nt, Human herpesvirus 6
cggcaucauaauac

SEQ ID NO: 160992 - RNA, 21 nt, Human herpesvirus 6
cgcuguccgccuguuccacgc

SEQ ID NO: 160993 - RNA, 21 nt, Human herpesvirus 6
cgcuuaaagcguuugcaaaac

SEQ ID NO: 160994 - RNA, 18 nt, Human herpesvirus 6
cgacucgcggaguggagu

SEQ ID NO: 160995 - RNA, 17 nt, Human herpesvirus 6
ccuagaaggagcuuuca

SEQ ID NO: 160996 - RNA, 13 nt, Human herpesvirus 6
cgagaaaaacauc

SEQ ID NO: 160997 - RNA, 17 nt, Human herpesvirus 6
cgagaaccaccagagac

SEQ ID NO: 160998 - RNA, 22 nt, Human herpesvirus 6
ccuaaaaaaguguaacauccca

SEQ ID NO: 160999 - RNA, 21 nt, Human herpesvirus 6
ccuaagaaauuuugcaugcau

SEQ ID NO: 161000 - RNA, 16 nt, Human herpesvirus 6
ccuaauaaacuguguc

SEQ ID NO: 161001 - RNA, 11 nt, Human herpesvirus 6
ccuacauucuc

SEQ ID NO: 161002 - RNA, 21 nt, Human herpesvirus 6
cgauacagcaccaucaauaaa

SEQ ID NO: 161003 - RNA, 14 nt, Human herpesvirus 6
cgauaaaaacucac

SEQ ID NO: 161004 - RNA, 11 nt, Human herpesvirus 6
cgaggggacag

SEQ ID NO: 161005 - RNA, 16 nt, Human herpesvirus 6
cgagcggugugcaguu

SEQ ID NO: 161006 - RNA, 20 nt, Human herpesvirus 6
cgaugccaacgcgacagggu

SEQ ID NO: 161007 - RNA, 12 nt, Human herpesvirus 6
cgauguuuucag

SEQ ID NO: 161008 - RNA, 19 nt, Human herpesvirus 6
cgauauauaaaaaacugca

SEQ ID NO: 161009 - RNA, 18 nt, Human herpesvirus 6
cgccacgggcauuccucg

SEQ ID NO: 161010 - RNA, 19 nt, Human herpesvirus 6
cgccaauuaaaguuuucau

SEQ ID NO: 161011 - RNA, 18 nt, Human herpesvirus 6
cgccauauccuagcauuu

SEQ ID NO: 161012 - RNA, 15 nt, Human herpesvirus 6
cgcccgauccgcccc

SEQ ID NO: 161013 - RNA, 20 nt, Human herpesvirus 6
cgcgacuaaaaauacggaaa

SEQ ID NO: 161014 - RNA, 19 nt, Human herpesvirus 6
cgcgacagggugagucaca

SEQ ID NO: 161015 - RNA, 20 nt, Human herpesvirus 6
cgcgacagggugagucacau

SEQ ID NO: 161016 - RNA, 22 nt, Human herpesvirus 6
cgcgauagaucgaguuuuuacg

SEQ ID NO: 161017 - RNA, 19 nt, Human herpesvirus 6
cgccggaucguaaggcagu

SEQ ID NO: 161018 - RNA, 15 nt, Human herpesvirus 6
cgccuccacaugaca

SEQ ID NO: 161019 - RNA, 14 nt, Human herpesvirus 6
cgccuguuccacgc

SEQ ID NO: 161020 - RNA, 18 nt, Human herpesvirus 6
cgccuguaaagucugaau

SEQ ID NO: 161021 - RNA, 19 nt, Human herpesvirus 6
cgccaaaaaaauacaguau

SEQ ID NO: 161022 - RNA, 21 nt, Human herpesvirus 6
cgcauaggugggucagugcuu

SEQ ID NO: 161023 - RNA, 14 nt, Human herpesvirus 6
cgcaucacacauac

SEQ ID NO: 161024 - RNA, 15 nt, Human herpesvirus 6
cgcauaccuacaucc

SEQ ID NO: 161025 - RNA, 13 nt, Human herpesvirus 6
cgcauagacaaac

SEQ ID NO: 161026 - RNA, 13 nt, Human herpesvirus 6
cgcaggauaauuu

SEQ ID NO: 161027 - RNA, 15 nt, Human herpesvirus 6
cgcaauccccacgaa

SEQ ID NO: 161028 - RNA, 22 nt, Human herpesvirus 6
cgauuuuagaggagaaaugauc

SEQ ID NO: 161029 - RNA, 16 nt, Human herpesvirus 6
cgcacacgcuaacuaa

SEQ ID NO: 161030 - RNA, 12 nt, Human herpesvirus 6
cgcagacuaauc

SEQ ID NO: 161031 - RNA, 17 nt, Human herpesvirus 6
cugccauaucacacauc

SEQ ID NO: 161032 - RNA, 13 nt, Human herpesvirus 6
cugcaaaaaacaa

SEQ ID NO: 161033 - RNA, 12 nt, Human herpesvirus 6
cugcaaaacaaa

SEQ ID NO: 161034 - RNA, 22 nt, Human herpesvirus 6
cugcccgcuaccaacagguuug

SEQ ID NO: 161035 - RNA, 19 nt, Human herpesvirus 6
cugcuggcugagauucacu

SEQ ID NO: 161036 - RNA, 19 nt, Human herpesvirus 6
cugcuuagcauauuuuggc

SEQ ID NO: 161037 - RNA, 19 nt, Human herpesvirus 6
cuggccgaguuuggacaua

SEQ ID NO: 161038 - RNA, 18 nt, Human herpesvirus 6
cuggaaagagaacgagcu

SEQ ID NO: 161039 - RNA, 19 nt, Human herpesvirus 6
cugggagaauaagaucuac

SEQ ID NO: 161040 - RNA, 13 nt, Human herpesvirus 6
cuguagggaugua

SEQ ID NO: 161041 - RNA, 14 nt, Human herpesvirus 6
cuguacaaaaucaa

SEQ ID NO: 161042 - RNA, 22 nt, Human herpesvirus 6
cuguacaaguuugugugccuuu

SEQ ID NO: 161043 - RNA, 14 nt, Human herpesvirus 6
cugaccaccaaaac

SEQ ID NO: 161044 - RNA, 22 nt, Human herpesvirus 6
cugacugguauccaauuaacac

SEQ ID NO: 161045 - RNA, 12 nt, Human herpesvirus 6
cugauuguguca

SEQ ID NO: 161046 - RNA, 16 nt, Human herpesvirus 6
cugaugcgauguggag

SEQ ID NO: 161047 - RNA, 22 nt, Human herpesvirus 6
cugauggcagguaaccaaaaaa

SEQ ID NO: 161048 - RNA, 18 nt, Human herpesvirus 6
cucuucccacaaaccauc

SEQ ID NO: 161049 - RNA, 12 nt, Human herpesvirus 6
cucggugggggc

SEQ ID NO: 161050 - RNA, 18 nt, Human herpesvirus 6
cucguggucauugguguu

SEQ ID NO: 161051 - RNA, 15 nt, Human herpesvirus 6
cucuaaaaacuaaaa

SEQ ID NO: 161052 - RNA, 21 nt, Human herpesvirus 6
cucguuccccaugucuugccu

SEQ ID NO: 161053 - RNA, 16 nt, Human herpesvirus 6
cucgguuuugucccga

SEQ ID NO: 161054 - RNA, 23 nt, Human herpesvirus 6
cucggauauauacuuacuugagu

SEQ ID NO: 161055 - RNA, 20 nt, Human herpesvirus 6
cucuauggugaguaccugua

SEQ ID NO: 161056 - RNA, 23 nt, Human herpesvirus 6
cucucaguaauuuguguaauuua

SEQ ID NO: 161057 - RNA, 11 nt, Human herpesvirus 6
cucuagaaacg

SEQ ID NO: 161058 - RNA, 14 nt, Human herpesvirus 6
cucuaguagccuag

SEQ ID NO: 161059 - RNA, 17 nt, Human herpesvirus 6
cucgaauaauuauccuc

SEQ ID NO: 161060 - RNA, 16 nt, Human herpesvirus 6
cucgccguauaagucu

SEQ ID NO: 161061 - RNA, 23 nt, Human herpesvirus 6
cucgccuaccuucacuuuuucaa

SEQ ID NO: 161062 - RNA, 23 nt, Human herpesvirus 6
cuccuggauuugagagcuaauau

SEQ ID NO: 161063 - RNA, 23 nt, Human herpesvirus 6
cuauuaugugaauguuaagcaaa

SEQ ID NO: 161064 - RNA, 18 nt, Human herpesvirus 6
cuauucagaggugcugau

SEQ ID NO: 161065 - RNA, 20 nt, Human herpesvirus 6
cuauuguaccuagcagcaaa

SEQ ID NO: 161066 - RNA, 15 nt, Human herpesvirus 6
cucacaagcugucca

SEQ ID NO: 161067 - RNA, 15 nt, Human herpesvirus 6
cucacaaucuaauac

SEQ ID NO: 161068 - RNA, 20 nt, Human herpesvirus 6
cucaaugcggguacuauaga

SEQ ID NO: 161069 - RNA, 12 nt, Human herpesvirus 6
cucaauuaauac

SEQ ID NO: 161070 - RNA, 19 nt, Human herpesvirus 6
cucacaucaugauuaucau

SEQ ID NO: 161071 - RNA, 22 nt, Human herpesvirus 6
cucauuguuucacuucuagugu

SEQ ID NO: 161072 - RNA, 14 nt, Human herpesvirus 6
cuauuaacacguac

SEQ ID NO: 161073 - RNA, 18 nt, Human herpesvirus 6
cuauuaacacguacauaa

SEQ ID NO: 161074 - RNA, 19 nt, Human herpesvirus 6
cuaugucguucuuaacuca

SEQ ID NO: 161075 - RNA, 22 nt, Human herpesvirus 6
cuaugucuagaugcaaaucuca

SEQ ID NO: 161076 - RNA, 18 nt, Human herpesvirus 6
cuauuacuauauauugga

SEQ ID NO: 161077 - RNA, 13 nt, Human herpesvirus 6
cuauuaucuggcc

SEQ ID NO: 161078 - RNA, 14 nt, Human herpesvirus 6
cuauuauaagcaaa

SEQ ID NO: 161079 - RNA, 17 nt, Human herpesvirus 6
cuauuauaagcaaacau

SEQ ID NO: 161080 - RNA, 21 nt, Human herpesvirus 6
cuauuauaagcaaacauguau

SEQ ID NO: 161081 - RNA, 19 nt, Human herpesvirus 6
cuaugcaaacgaaaccauc

SEQ ID NO: 161082 - RNA, 20 nt, Human herpesvirus 6
cuaugcaaacgaaaccaucg

SEQ ID NO: 161083 - RNA, 17 nt, Human herpesvirus 6
cuaugacuuuucuauca

SEQ ID NO: 161084 - RNA, 13 nt, Human herpesvirus 6
cuagccaauucau

SEQ ID NO: 161085 - RNA, 15 nt, Human herpesvirus 6
cuagccuacuaugac

SEQ ID NO: 161086 - RNA, 19 nt, Human herpesvirus 6
cuagccuacuaugacuuuu

SEQ ID NO: 161087 - RNA, 17 nt, Human herpesvirus 6
cuagaggugccgaugaa

SEQ ID NO: 161088 - RNA, 23 nt, Human herpesvirus 6
cuaucguccuuaauauauuugca

SEQ ID NO: 161089 - RNA, 18 nt, Human herpesvirus 6
cuaucgucuauaacaauu

SEQ ID NO: 161090 - RNA, 20 nt, Human herpesvirus 6
cuaauaaaugcuacccacau

SEQ ID NO: 161091 - RNA, 14 nt, Human herpesvirus 6
cuaauaaacugugu

SEQ ID NO: 161092 - RNA, 16 nt, Human herpesvirus 6
cuaagugaaauucaaa

SEQ ID NO: 161093 - RNA, 23 nt, Human herpesvirus 6
cuaagugaaauucaaaauaaaua

SEQ ID NO: 161094 - RNA, 14 nt, Human herpesvirus 6
cuagacacacaaaa

SEQ ID NO: 161095 - RNA, 16 nt, Human herpesvirus 6
cuaauaauuacaauac

SEQ ID NO: 161096 - RNA, 14 nt, Human herpesvirus 6
cuaauacauauaaa

SEQ ID NO: 161097 - RNA, 21 nt, Human herpesvirus 6
cuagaaggagcuuucauccau

SEQ ID NO: 161098 - RNA, 23 nt, Human herpesvirus 6
cuaacuuuuuuuuuucuuacaac

SEQ ID NO: 161099 - RNA, 20 nt, Human herpesvirus 6
cuaaacacagaugguuuuaa

SEQ ID NO: 161100 - RNA, 21 nt, Human herpesvirus 6
cguuugaguugggacuuggaa

SEQ ID NO: 161101 - RNA, 22 nt, Human herpesvirus 6
cuaaaaaucaucucgugcaaaa

SEQ ID NO: 161102 - RNA, 15 nt, Human herpesvirus 6
cuaaaacaagacaga

SEQ ID NO: 161103 - RNA, 17 nt, Human herpesvirus 6
cuaaaaaaaaaaacaca

SEQ ID NO: 161104 - RNA, 21 nt, Human herpesvirus 6
cuaaaaaaguguaacauccca

SEQ ID NO: 161105 - RNA, 13 nt, Human herpesvirus 6
aaaaaguguaaca

SEQ ID NO: 161106 - RNA, 18 nt, Human herpesvirus 6
aaaaaguauccuaaauac

SEQ ID NO: 161107 - RNA, 21 nt, Human herpesvirus 6
aaaaagaguugacguuccaaa

SEQ ID NO: 161108 - RNA, 13 nt, Human herpesvirus 6
aaaaagcuaucgu

SEQ ID NO: 161109 - RNA, 12 nt, Human herpesvirus 6
aaaaagcuuuaa

SEQ ID NO: 161110 - RNA, 22 nt, Human herpesvirus 6
aaaaaguuugugcgaauugugu

SEQ ID NO: 161111 - RNA, 18 nt, Human herpesvirus 6
aaaaauaaguacauagaa

SEQ ID NO: 161112 - RNA, 19 nt, Human herpesvirus 6
aaaaaacaacgacuaucaa

SEQ ID NO: 161113 - RNA, 12 nt, Human herpesvirus 6
aaaaaaacugug

SEQ ID NO: 161114 - RNA, 13 nt, Human herpesvirus 6
aaaaaaauuccca

SEQ ID NO: 161115 - RNA, 22 nt, Human herpesvirus 6
aaaaacugugaaaaccuuucaa

SEQ ID NO: 161116 - RNA, 22 nt, Human herpesvirus 6
aaaacgaccugaucacagagaa

SEQ ID NO: 161117 - RNA, 14 nt, Human herpesvirus 6
aaaacgaauagcau

SEQ ID NO: 161118 - RNA, 20 nt, Human herpesvirus 6
aaaagaaugggauugugauu

SEQ ID NO: 161119 - RNA, 23 nt, Human herpesvirus 6
aaaacuuaaccgcaaaaaagcgc

SEQ ID NO: 161120 - RNA, 13 nt, Human herpesvirus 6
aaaacuauugaca

SEQ ID NO: 161121 - RNA, 13 nt, Human herpesvirus 6
aaaacucacacaa

SEQ ID NO: 161122 - RNA, 21 nt, Human herpesvirus 6
aaaacguuccacgcauagaca

SEQ ID NO: 161123 - RNA, 14 nt, Human herpesvirus 6
aaaagacuuacuca

SEQ ID NO: 161124 - RNA, 16 nt, Human herpesvirus 6
aaaacuuucauccuga

SEQ ID NO: 161125 - RNA, 22 nt, Human herpesvirus 6
aaaagagucccaucuauacacc

SEQ ID NO: 161126 - RNA, 20 nt, Human herpesvirus 6
aaaagauguacgaugaacua

SEQ ID NO: 161127 - RNA, 21 nt, Human herpesvirus 6
aaaauaacagcgguucgggcu

SEQ ID NO: 161128 - RNA, 12 nt, Human herpesvirus 6
aaaauaaguaca

SEQ ID NO: 161129 - RNA, 18 nt, Human herpesvirus 6
aaaauaaguacauagaau

SEQ ID NO: 161130 - RNA, 18 nt, Human herpesvirus 6
aaaacaacgaaacaguuc

SEQ ID NO: 161131 - RNA, 13 nt, Human herpesvirus 6
aaaacaagaucca

SEQ ID NO: 161132 - RNA, 18 nt, Human herpesvirus 6
aaaacaagucaucucacu

SEQ ID NO: 161133 - RNA, 21 nt, Human herpesvirus 6
aaaacaguuuaccuauuuaca

SEQ ID NO: 161134 - RNA, 20 nt, Human herpesvirus 6
aaaacauauaaagagaccaa

SEQ ID NO: 161135 - RNA, 15 nt, Human herpesvirus 6
aaaacagacuuuacu

SEQ ID NO: 161136 - RNA, 17 nt, Human herpesvirus 6
aaaaauugacaaugagg

SEQ ID NO: 161137 - RNA, 20 nt, Human herpesvirus 6
aaaaauuuuagccgaugaua

SEQ ID NO: 161138 - RNA, 14 nt, Human herpesvirus 6
aaaaauauuaauua

SEQ ID NO: 161139 - RNA, 17 nt, Human herpesvirus 6
aaaaauauuaauuaccu

SEQ ID NO: 161140 - RNA, 17 nt, Human herpesvirus 6
aaaacacuagccuacua

SEQ ID NO: 161141 - RNA, 19 nt, Human herpesvirus 6
aaaacagacgaaucacauc

SEQ ID NO: 161142 - RNA, 22 nt, Human herpesvirus 6
aaaaaacacuagccuacuauga

SEQ ID NO: 161143 - RNA, 12 nt, Human herpesvirus 6
aaaaaacugcau

SEQ ID NO: 161144 - RNA, 13 nt, Human herpesvirus 6
aaaaaacggccaa

SEQ ID NO: 161145 - RNA, 14 nt, Human herpesvirus 6
aaaaauaucacgga

SEQ ID NO: 161146 - RNA, 23 nt, Human herpesvirus 6
aaaaauaucgaaauaacgagauc

SEQ ID NO: 161147 - RNA, 17 nt, Human herpesvirus 6
aaaaauaaguacauaga

SEQ ID NO: 161148 - RNA, 21 nt, Human herpesvirus 6
aaaaagugcuuuaucuagcca

SEQ ID NO: 161149 - RNA, 20 nt, Human herpesvirus 6
aaaacagacgaaucacaucc

SEQ ID NO: 161150 - RNA, 20 nt, Human herpesvirus 6
aaaacagacuuuacuucuac

SEQ ID NO: 161151 - RNA, 20 nt, Human herpesvirus 6
aaaacaguugauuauuuagu

SEQ ID NO: 161152 - RNA, 13 nt, Human herpesvirus 6
aaaacaguuuacc

SEQ ID NO: 161153 - RNA, 15 nt, Human herpesvirus 6
aaaacaguuuaccua

SEQ ID NO: 161154 - RNA, 14 nt, Human herpesvirus 6
aucaaauccucuac

SEQ ID NO: 161155 - RNA, 20 nt, Human herpesvirus 6
aucaaauccucuacguauga

SEQ ID NO: 161156 - RNA, 17 nt, Human herpesvirus 6
aucaacuacauuaacag

SEQ ID NO: 161157 - RNA, 17 nt, Human herpesvirus 6
aucaacuauuuaacauc

SEQ ID NO: 161158 - RNA, 17 nt, Human herpesvirus 6
aucaauacauuuuucaa

SEQ ID NO: 161159 - RNA, 15 nt, Human herpesvirus 6
aucaauuuuauccau

SEQ ID NO: 161160 - RNA, 18 nt, Human herpesvirus 6
aucaacugacuuauaagu

SEQ ID NO: 161161 - RNA, 21 nt, Human herpesvirus 6
aucacaaaguuuaaguuuuca

SEQ ID NO: 161162 - RNA, 21 nt, Human herpesvirus 6
aucagaauccaccaaugacac

SEQ ID NO: 161163 - RNA, 20 nt, Human herpesvirus 6
aucagacggguaagcagcag

SEQ ID NO: 161164 - RNA, 19 nt, Human herpesvirus 6
aucauaaauaaaugaauag

SEQ ID NO: 161165 - RNA, 19 nt, Human herpesvirus 6
aucagugaaggcugccaug

SEQ ID NO: 161166 - RNA, 16 nt, Human herpesvirus 6
auauugcugcuagaua

SEQ ID NO: 161167 - RNA, 15 nt, Human herpesvirus 6
auauggaugaucacu

SEQ ID NO: 161168 - RNA, 16 nt, Human herpesvirus 6
auauuguguaacucuu

SEQ ID NO: 161169 - RNA, 16 nt, Human herpesvirus 6
auauuugcacuuccuc

SEQ ID NO: 161170 - RNA, 22 nt, Human herpesvirus 6
auauuggcaugugaacggagau

SEQ ID NO: 161171 - RNA, 23 nt, Human herpesvirus 6
auauuuccauaaguuaauuccag

SEQ ID NO: 161172 - RNA, 18 nt, Human herpesvirus 6
aucaaagauguacucauc

SEQ ID NO: 161173 - RNA, 22 nt, Human herpesvirus 6
auagauuguuauuagugauuau

SEQ ID NO: 161174 - RNA, 18 nt, Human herpesvirus 6
auaucugaaacacugagu

SEQ ID NO: 161175 - RNA, 21 nt, Human herpesvirus 6
auaucuauuuaaaauggacuu

SEQ ID NO: 161176 - RNA, 16 nt, Human herpesvirus 6
auaucucaaauuuucc

SEQ ID NO: 161177 - RNA, 22 nt, Human herpesvirus 6
auaugaggcgcuugaaaccacu

SEQ ID NO: 161178 - RNA, 17 nt, Human herpesvirus 6
auaugcaagccaugaca

SEQ ID NO: 161179 - RNA, 16 nt, Human herpesvirus 6
auaugcagacugcuuc

SEQ ID NO: 161180 - RNA, 22 nt, Human herpesvirus 6
auaugcgucagaccuccgucaa

SEQ ID NO: 161181 - RNA, 20 nt, Human herpesvirus 6
auaugcuuauacuguuguaa

SEQ ID NO: 161182 - RNA, 21 nt, Human herpesvirus 6
auccucagaaccaucuguuca

SEQ ID NO: 161183 - RNA, 21 nt, Human herpesvirus 6
auccuaauucaagacuugucg

SEQ ID NO: 161184 - RNA, 20 nt, Human herpesvirus 6
auccugcguguuaaugaaug

SEQ ID NO: 161185 - RNA, 22 nt, Human herpesvirus 6
auccaggucuuauauuucagau

SEQ ID NO: 161186 - RNA, 12 nt, Human herpesvirus 6
aucuaucacagg

SEQ ID NO: 161187 - RNA, 17 nt, Human herpesvirus 6
aucuauuuaaaauggac

SEQ ID NO: 161188 - RNA, 16 nt, Human herpesvirus 6
aucuccgauaacgaaa

SEQ ID NO: 161189 - RNA, 16 nt, Human herpesvirus 6
aucuccgcaaaccacc

SEQ ID NO: 161190 - RNA, 12 nt, Human herpesvirus 6
aucucggacuca

SEQ ID NO: 161191 - RNA, 13 nt, Human herpesvirus 6
aucucggacucau

SEQ ID NO: 161192 - RNA, 20 nt, Human herpesvirus 6
aucuggcaaccuugacagau

SEQ ID NO: 161193 - RNA, 14 nt, Human herpesvirus 6
aucugagacagucc

SEQ ID NO: 161194 - RNA, 16 nt, Human herpesvirus 6
aucugagacaguccau

SEQ ID NO: 161195 - RNA, 18 nt, Human herpesvirus 6
auacauuuguacacuuua

SEQ ID NO: 161196 - RNA, 15 nt, Human herpesvirus 6
auacauucucguagu

SEQ ID NO: 161197 - RNA, 23 nt, Human herpesvirus 6
auacaucaacaaacacgugauuc

SEQ ID NO: 161198 - RNA, 15 nt, Human herpesvirus 6
auaccguuuacuuaa

SEQ ID NO: 161199 - RNA, 18 nt, Human herpesvirus 6
auaccgaucccagcucac

SEQ ID NO: 161200 - RNA, 13 nt, Human herpesvirus 6
auacacacccagc

SEQ ID NO: 161201 - RNA, 16 nt, Human herpesvirus 6
auacaaaaacgaccug

SEQ ID NO: 161202 - RNA, 22 nt, Human herpesvirus 6
auacagauguguauuauguaaa

SEQ ID NO: 161203 - RNA, 14 nt, Human herpesvirus 6
auacagcaccauca

SEQ ID NO: 161204 - RNA, 19 nt, Human herpesvirus 6
auacugcagcucgacucca

SEQ ID NO: 161205 - RNA, 20 nt, Human herpesvirus 6
auacugguuuacagcacuuu

SEQ ID NO: 161206 - RNA, 20 nt, Human herpesvirus 6
auacuauauaugcaagccau

SEQ ID NO: 161207 - RNA, 22 nt, Human herpesvirus 6
auacgugucggugauagcgucu

SEQ ID NO: 161208 - RNA, 16 nt, Human herpesvirus 6
auacguuugccaaagc

SEQ ID NO: 161209 - RNA, 17 nt, Human herpesvirus 6
auacguuugccaaagcu

SEQ ID NO: 161210 - RNA, 13 nt, Human herpesvirus 6
auagauggugcua

SEQ ID NO: 161211 - RNA, 17 nt, Human herpesvirus 6
auagagagauagauaug

SEQ ID NO: 161212 - RNA, 23 nt, Human herpesvirus 6
auagaccgcuuuuaugagaacaa

SEQ ID NO: 161213 - RNA, 21 nt, Human herpesvirus 6
auagacgaaagacguuuucuu

SEQ ID NO: 161214 - RNA, 15 nt, Human herpesvirus 6
auagacaaaccagca

SEQ ID NO: 161215 - RNA, 18 nt, Human herpesvirus 6
auagaauuaagaugucuc

SEQ ID NO: 161216 - RNA, 20 nt, Human herpesvirus 6
auaauuuggguuguguugca

SEQ ID NO: 161217 - RNA, 19 nt, Human herpesvirus 6
auaauuuguuuuuccauaa

SEQ ID NO: 161218 - RNA, 15 nt, Human herpesvirus 6
auaagucuaaugcaa

SEQ ID NO: 161219 - RNA, 14 nt, Human herpesvirus 6
auaauaaaacaaga

SEQ ID NO: 161220 - RNA, 19 nt, Human herpesvirus 6
auaagggacccguccgaga

SEQ ID NO: 161221 - RNA, 10 nt, Human herpesvirus 6
auaaguacau

SEQ ID NO: 161222 - RNA, 12 nt, Human herpesvirus 6
auaaguacauag

SEQ ID NO: 161223 - RNA, 16 nt, Human herpesvirus 6
auaagccuaagaaauu

SEQ ID NO: 161224 - RNA, 16 nt, Human herpesvirus 6
auaagagccaauacca

SEQ ID NO: 161225 - RNA, 15 nt, Human herpesvirus 6
auaagaaccaacaga

SEQ ID NO: 161226 - RNA, 11 nt, Human herpesvirus 6
auaacgaugcu

SEQ ID NO: 161227 - RNA, 14 nt, Human herpesvirus 6
auaacgagaucuac

SEQ ID NO: 161228 - RNA, 21 nt, Human herpesvirus 6
auaaauccgauagccauacca

SEQ ID NO: 161229 - RNA, 21 nt, Human herpesvirus 6
auaaauguagcauacgacaaa

SEQ ID NO: 161230 - RNA, 15 nt, Human herpesvirus 6
auaaaugucaaagaa

SEQ ID NO: 161231 - RNA, 16 nt, Human herpesvirus 6
auaaaugguagcuauu

SEQ ID NO: 161232 - RNA, 22 nt, Human herpesvirus 6
auaaaugguagcuauuauguga

SEQ ID NO: 161233 - RNA, 20 nt, Human herpesvirus 6
auaaacugugucuguucaac

SEQ ID NO: 161234 - RNA, 18 nt, Human herpesvirus 6
auaaaguuugucacacca

SEQ ID NO: 161235 - RNA, 14 nt, Human herpesvirus 6
auaaauacuagcua

SEQ ID NO: 161236 - RNA, 18 nt, Human herpesvirus 6
auaaauacuagcuaaaac

SEQ ID NO: 161237 - RNA, 20 nt, Human herpesvirus 6
aguuucuuacguaugugaag

SEQ ID NO: 161238 - RNA, 16 nt, Human herpesvirus 6
agucuuuagaacagcu

SEQ ID NO: 161239 - RNA, 19 nt, Human herpesvirus 6
agugaaaaagguggcauca

SEQ ID NO: 161240 - RNA, 13 nt, Human herpesvirus 6
agugaacauacaa

SEQ ID NO: 161241 - RNA, 22 nt, Human herpesvirus 6
auaaacuuagaucuauaugcau

SEQ ID NO: 161242 - RNA, 20 nt, Human herpesvirus 6
auaaaacguuccacgcauag

SEQ ID NO: 161243 - RNA, 19 nt, Human herpesvirus 6
auaaaaacucacacaacca

SEQ ID NO: 161244 - RNA, 13 nt, Human herpesvirus 6
auaaaacaagauc

SEQ ID NO: 161245 - RNA, 13 nt, Human herpesvirus 6
auaaaaacaccuc

SEQ ID NO: 161246 - RNA, 13 nt, Human herpesvirus 6
aguuuggauucag

SEQ ID NO: 161247 - RNA, 22 nt, Human herpesvirus 6
aguuuuuaucggugauguggua

SEQ ID NO: 161248 - RNA, 19 nt, Human herpesvirus 6
aguuuuugugcggcacaag

SEQ ID NO: 161249 - RNA, 16 nt, Human herpesvirus 6
auaaaaaaucuuguca

SEQ ID NO: 161250 - RNA, 23 nt, Human herpesvirus 6
aguuuuuuuugaagcaucccuau

SEQ ID NO: 161251 - RNA, 16 nt, Human herpesvirus 6
auaaaaaaaagacauc

SEQ ID NO: 161252 - RNA, 15 nt, Human herpesvirus 6
agguagcguacaagu

SEQ ID NO: 161253 - RNA, 22 nt, Human herpesvirus 6
agguagaauuacuauguggcau

SEQ ID NO: 161254 - RNA, 20 nt, Human herpesvirus 6
aggggaccgcagcagcuaga

SEQ ID NO: 161255 - RNA, 14 nt, Human herpesvirus 6
aguaauaacauuaa

SEQ ID NO: 161256 - RNA, 23 nt, Human herpesvirus 6
aguaauacaucauuaaaauauuc

SEQ ID NO: 161257 - RNA, 15 nt, Human herpesvirus 6
aguaagggcuuuuca

SEQ ID NO: 161258 - RNA, 17 nt, Human herpesvirus 6
aguaauauaggauuucc

SEQ ID NO: 161259 - RNA, 16 nt, Human herpesvirus 6
agucuagcaaccuaau

SEQ ID NO: 161260 - RNA, 20 nt, Human herpesvirus 6
agucagaaaucgugucacau

SEQ ID NO: 161261 - RNA, 16 nt, Human herpesvirus 6
agucacacacagggug

SEQ ID NO: 161262 - RNA, 15 nt, Human herpesvirus 6
agucaguaaugauau

SEQ ID NO: 161263 - RNA, 21 nt, Human herpesvirus 6
aguaugggugagugcauuaua

SEQ ID NO: 161264 - RNA, 20 nt, Human herpesvirus 6
aguaugucuccaaacagaga

SEQ ID NO: 161265 - RNA, 11 nt, Human herpesvirus 6
agucaauguug

SEQ ID NO: 161266 - RNA, 17 nt, Human herpesvirus 6
agucaacgcaauuccac

SEQ ID NO: 161267 - RNA, 12 nt, Human herpesvirus 6
aguauuggugca

SEQ ID NO: 161268 - RNA, 13 nt, Human herpesvirus 6
agcugacuauuca

SEQ ID NO: 161269 - RNA, 17 nt, Human herpesvirus 6
aggaaucuuguguucua

SEQ ID NO: 161270 - RNA, 22 nt, Human herpesvirus 6
aggaugggcaaguagccaauga

SEQ ID NO: 161271 - RNA, 22 nt, Human herpesvirus 6
aggauuaucgauugacucugca

SEQ ID NO: 161272 - RNA, 15 nt, Human herpesvirus 6
aggagcauucacaua

SEQ ID NO: 161273 - RNA, 20 nt, Human herpesvirus 6
aggcauuaaacugaggcaaa

SEQ ID NO: 161274 - RNA, 23 nt, Human herpesvirus 6
aggcagaucaucaaaucggacaa

SEQ ID NO: 161275 - RNA, 18 nt, Human herpesvirus 6
aggcaguaaagccgauga

SEQ ID NO: 161276 - RNA, 23 nt, Human herpesvirus 6
aggccgguacccgugugugagau

SEQ ID NO: 161277 - RNA, 14 nt, Human herpesvirus 6
agggaagauuugua

SEQ ID NO: 161278 - RNA, 19 nt, Human herpesvirus 6
agggauggcagaucuugaa

SEQ ID NO: 161279 - RNA, 19 nt, Human herpesvirus 6
agggccaaacuuguugcaa

SEQ ID NO: 161280 - RNA, 14 nt, Human herpesvirus 6
agauacuacacaaa

SEQ ID NO: 161281 - RNA, 13 nt, Human herpesvirus 6
agauacgagaaca

SEQ ID NO: 161282 - RNA, 17 nt, Human herpesvirus 6
agauacauaaacacccc

SEQ ID NO: 161283 - RNA, 17 nt, Human herpesvirus 6
agauccgucucucagcu

SEQ ID NO: 161284 - RNA, 17 nt, Human herpesvirus 6
agaucgcauuagucaca

SEQ ID NO: 161285 - RNA, 17 nt, Human herpesvirus 6
agauccaaucacaacaa

SEQ ID NO: 161286 - RNA, 20 nt, Human herpesvirus 6
agaucuuuauggagggaauu

SEQ ID NO: 161287 - RNA, 16 nt, Human herpesvirus 6
agcauuuuuguuguga

SEQ ID NO: 161288 - RNA, 15 nt, Human herpesvirus 6
agccaauucauugua

SEQ ID NO: 161289 - RNA, 13 nt, Human herpesvirus 6
agaugacaucugc

SEQ ID NO: 161290 - RNA, 23 nt, Human herpesvirus 6
agcauucuguucuucaucaucac

SEQ ID NO: 161291 - RNA, 19 nt, Human herpesvirus 6
agcauucacauaagacuua

SEQ ID NO: 161292 - RNA, 18 nt, Human herpesvirus 6
agccuacuaugacuuuuc

SEQ ID NO: 161293 - RNA, 23 nt, Human herpesvirus 6
agccgcgaacucguuaauaguua

SEQ ID NO: 161294 - RNA, 20 nt, Human herpesvirus 6
agccgucgauaauaauucag

SEQ ID NO: 161295 - RNA, 16 nt, Human herpesvirus 6
agccagauacuacaca

SEQ ID NO: 161296 - RNA, 19 nt, Human herpesvirus 6
agccagauacuacacaaac

SEQ ID NO: 161297 - RNA, 14 nt, Human herpesvirus 6
agcgaaccaggaca

SEQ ID NO: 161298 - RNA, 17 nt, Human herpesvirus 6
agccuucugccugaaaa

SEQ ID NO: 161299 - RNA, 18 nt, Human herpesvirus 6
agcgauuaguuuguguag

SEQ ID NO: 161300 - RNA, 22 nt, Human herpesvirus 6
agcgccaacgaaaagcaucuca

SEQ ID NO: 161301 - RNA, 23 nt, Human herpesvirus 6
agcgccaacgaaaagcaucucaa

SEQ ID NO: 161302 - RNA, 16 nt, Human herpesvirus 6
agcgccagcauucuua

SEQ ID NO: 161303 - RNA, 13 nt, Human herpesvirus 6
agcgcaucuuuaa

SEQ ID NO: 161304 - RNA, 14 nt, Human herpesvirus 6
agcggugugcaguu

SEQ ID NO: 161305 - RNA, 19 nt, Human herpesvirus 6
agcguaagaauuaaugucc

SEQ ID NO: 161306 - RNA, 14 nt, Human herpesvirus 6
agcguaaugugcaa

SEQ ID NO: 161307 - RNA, 17 nt, Human herpesvirus 6
agcguacaagucgacaa

SEQ ID NO: 161308 - RNA, 18 nt, Human herpesvirus 6
agcggcgacauuguagaa

SEQ ID NO: 161309 - RNA, 19 nt, Human herpesvirus 6
agcucaaacaaauggaaac

SEQ ID NO: 161310 - RNA, 20 nt, Human herpesvirus 6
agcuauaaaaacacacauca

SEQ ID NO: 161311 - RNA, 20 nt, Human herpesvirus 6
agcgugugauucaguaucug

SEQ ID NO: 161312 - RNA, 16 nt, Human herpesvirus 6
agcgucuuugcauauu

SEQ ID NO: 161313 - RNA, 13 nt, Human herpesvirus 6
agcuaauaugaac

SEQ ID NO: 161314 - RNA, 15 nt, Human herpesvirus 6
agcuaaacaccacuu

SEQ ID NO: 161315 - RNA, 20 nt, Human herpesvirus 6
agcguuugcaaaacuguuaa

SEQ ID NO: 161316 - RNA, 17 nt, Human herpesvirus 6
agcuacgccaaaacuac

SEQ ID NO: 161317 - RNA, 11 nt, Human herpesvirus 6
auuaccuauag

SEQ ID NO: 161318 - RNA, 16 nt, Human herpesvirus 6
auuacggcaacauacc

SEQ ID NO: 161319 - RNA, 17 nt, Human herpesvirus 6
auuacggcaacauaccc

SEQ ID NO: 161320 - RNA, 23 nt, Human herpesvirus 6
auuacgcuguccgccuguuccac

SEQ ID NO: 161321 - RNA, 19 nt, Human herpesvirus 6
auuacgucuuuuugugcuu

SEQ ID NO: 161322 - RNA, 23 nt, Human herpesvirus 6
auuaccacacgcuuacacacagg

SEQ ID NO: 161323 - RNA, 15 nt, Human herpesvirus 6
auuacauauagucaa

SEQ ID NO: 161324 - RNA, 17 nt, Human herpesvirus 6
auuacauauagucaaug

SEQ ID NO: 161325 - RNA, 21 nt, Human herpesvirus 6
auuacuagcgaaugaauuuac

SEQ ID NO: 161326 - RNA, 19 nt, Human herpesvirus 6
auuacuaguaauaacauua

SEQ ID NO: 161327 - RNA, 22 nt, Human herpesvirus 6
auuagagcuacgccaaaacuac

SEQ ID NO: 161328 - RNA, 20 nt, Human herpesvirus 6
auuagaaauuacauaagcaa

SEQ ID NO: 161329 - RNA, 14 nt, Human herpesvirus 6
auuagaacaauuau

SEQ ID NO: 161330 - RNA, 15 nt, Human herpesvirus 6
auuacuucguuuauu

SEQ ID NO: 161331 - RNA, 18 nt, Human herpesvirus 6
auucggaguuuucaagau

SEQ ID NO: 161332 - RNA, 19 nt, Human herpesvirus 6
auucggucaccuacauucg

SEQ ID NO: 161333 - RNA, 17 nt, Human herpesvirus 6
auuauauauuugcauac

SEQ ID NO: 161334 - RNA, 17 nt, Human herpesvirus 6
auuaucacaguugauaa

SEQ ID NO: 161335 - RNA, 15 nt, Human herpesvirus 6
auuagcauacagaug

SEQ ID NO: 161336 - RNA, 22 nt, Human herpesvirus 6
auuagaaaaucuuccacugaag

SEQ ID NO: 161337 - RNA, 15 nt, Human herpesvirus 6
auuaguccauuacca

SEQ ID NO: 161338 - RNA, 21 nt, Human herpesvirus 6
auuaguccauuaccacacgcu

SEQ ID NO: 161339 - RNA, 12 nt, Human herpesvirus 6
auucucagacag

SEQ ID NO: 161340 - RNA, 21 nt, Human herpesvirus 6
auucucagacagcuuugcgau

SEQ ID NO: 161341 - RNA, 13 nt, Human herpesvirus 6
auugcacccuauc

SEQ ID NO: 161342 - RNA, 18 nt, Human herpesvirus 6
auugcacccuaucaccuu

SEQ ID NO: 161343 - RNA, 14 nt, Human herpesvirus 6
auugcagaucuaau

SEQ ID NO: 161344 - RNA, 18 nt, Human herpesvirus 6
auugcguuuugucuacua

SEQ ID NO: 161345 - RNA, 23 nt, Human herpesvirus 6
auugcugcuagauaauuaugcau

SEQ ID NO: 161346 - RNA, 21 nt, Human herpesvirus 6
auugcuuucucuuuuuaauuc

SEQ ID NO: 161347 - RNA, 16 nt, Human herpesvirus 6
auuguugucgugauca

SEQ ID NO: 161348 - RNA, 19 nt, Human herpesvirus 6
auuggucucuuugcgucuu

SEQ ID NO: 161349 - RNA, 23 nt, Human herpesvirus 6
auuggucucuuugcgucuucuau

SEQ ID NO: 161350 - RNA, 17 nt, Human herpesvirus 6
auuucuugguuguguau

SEQ ID NO: 161351 - RNA, 14 nt, Human herpesvirus 6
auuucuuacacaaa

SEQ ID NO: 161352 - RNA, 15 nt, Human herpesvirus 6
auuucuuacacaaau

SEQ ID NO: 161353 - RNA, 23 nt, Human herpesvirus 6
auuuacaccuaacgcgggauauu

SEQ ID NO: 161354 - RNA, 20 nt, Human herpesvirus 6
auuuaauaagagccaauacc

SEQ ID NO: 161355 - RNA, 16 nt, Human herpesvirus 6
auuuaauccacugcau

SEQ ID NO: 161356 - RNA, 16 nt, Human herpesvirus 6
auuugcuugucgggcu

SEQ ID NO: 161357 - RNA, 19 nt, Human herpesvirus 6
auuuuggguugaguaugcu

SEQ ID NO: 161358 - RNA, 17 nt, Human herpesvirus 6
auuuugguuucccucag

SEQ ID NO: 161359 - RNA, 15 nt, Human herpesvirus 6
auuuugggacaagau

SEQ ID NO: 161360 - RNA, 14 nt, Human herpesvirus 6
auuuugaugccaaa

SEQ ID NO: 161361 - RNA, 19 nt, Human herpesvirus 6
auuuuuauguugugaucaa

SEQ ID NO: 161362 - RNA, 16 nt, Human herpesvirus 6
auuuuuauucugcuau

SEQ ID NO: 161363 - RNA, 20 nt, Human herpesvirus 6
caaaacagacuuuacuucua

SEQ ID NO: 161364 - RNA, 16 nt, Human herpesvirus 6
caaaacaguugauuau

SEQ ID NO: 161365 - RNA, 18 nt, Human herpesvirus 6
caaaaccuaaauacauuc

SEQ ID NO: 161366 - RNA, 19 nt, Human herpesvirus 6
caaaaccuaaauacauuca

SEQ ID NO: 161367 - RNA, 21 nt, Human herpesvirus 6
caaaaccuaaauacauucaca

SEQ ID NO: 161368 - RNA, 12 nt, Human herpesvirus 6
caaaagauuacg

SEQ ID NO: 161369 - RNA, 21 nt, Human herpesvirus 6
caaaagauuacggcaacauac

SEQ ID NO: 161370 - RNA, 16 nt, Human herpesvirus 6
auguuuucuccucaac

SEQ ID NO: 161371 - RNA, 13 nt, Human herpesvirus 6
auuaacaaugaaa

SEQ ID NO: 161372 - RNA, 19 nt, Human herpesvirus 6
auuaacacauuuuaacgca

SEQ ID NO: 161373 - RNA, 16 nt, Human herpesvirus 6
auuaacacguacauaa

SEQ ID NO: 161374 - RNA, 18 nt, Human herpesvirus 6
auuaaaguuuacugugau

SEQ ID NO: 161375 - RNA, 15 nt, Human herpesvirus 6
auuaaauguuacuga

SEQ ID NO: 161376 - RNA, 14 nt, Human herpesvirus 6
auuacacaccuuaa

SEQ ID NO: 161377 - RNA, 17 nt, Human herpesvirus 6
auuacaagguacacaau

SEQ ID NO: 161378 - RNA, 14 nt, Human herpesvirus 6
auuacaaaacaauc

SEQ ID NO: 161379 - RNA, 20 nt, Human herpesvirus 6
auuaauuuauuaaguagugc

SEQ ID NO: 161380 - RNA, 20 nt, Human herpesvirus 6
auuaauuacauauagucaau

SEQ ID NO: 161381 - RNA, 20 nt, Human herpesvirus 6
auuaauuaccuauagucaau

SEQ ID NO: 161382 - RNA, 22 nt, Human herpesvirus 6
auuaauuaccuauagucaaugu

SEQ ID NO: 161383 - RNA, 17 nt, Human herpesvirus 6
auuaacuaguugcuugu

SEQ ID NO: 161384 - RNA, 11 nt, Human herpesvirus 6
auuaacuguaa

SEQ ID NO: 161385 - RNA, 13 nt, Human herpesvirus 6
auuaacuguaaaa

SEQ ID NO: 161386 - RNA, 13 nt, Human herpesvirus 6
auuaacgcagcaa

SEQ ID NO: 161387 - RNA, 14 nt, Human herpesvirus 6
auguuaacucaggu

SEQ ID NO: 161388 - RNA, 15 nt, Human herpesvirus 6
auguuaaauaacuca

SEQ ID NO: 161389 - RNA, 11 nt, Human herpesvirus 6
auguguucaca

SEQ ID NO: 161390 - RNA, 13 nt, Human herpesvirus 6
auguggugauacg

SEQ ID NO: 161391 - RNA, 15 nt, Human herpesvirus 6
auguucaauuacuca

SEQ ID NO: 161392 - RNA, 15 nt, Human herpesvirus 6
auguuaguauacaga

SEQ ID NO: 161393 - RNA, 19 nt, Human herpesvirus 6
auguugcaauaaaaaaugg

SEQ ID NO: 161394 - RNA, 22 nt, Human herpesvirus 6
auguccgcuguuggguaugcuc

SEQ ID NO: 161395 - RNA, 21 nt, Human herpesvirus 6
augucuagaugcaaaucucac

SEQ ID NO: 161396 - RNA, 18 nt, Human herpesvirus 6
augugcgacuauuugaaa

SEQ ID NO: 161397 - RNA, 18 nt, Human herpesvirus 6
auguggagaagaucuaaa

SEQ ID NO: 161398 - RNA, 19 nt, Human herpesvirus 6
augucuucgaauacuuuca

SEQ ID NO: 161399 - RNA, 19 nt, Human herpesvirus 6
auguagcauacgacaaaua

SEQ ID NO: 161400 - RNA, 22 nt, Human herpesvirus 6
auguaguuaaugcugcugcugu

SEQ ID NO: 161401 - RNA, 15 nt, Human herpesvirus 6
auguaaaguuauauu

SEQ ID NO: 161402 - RNA, 18 nt, Human herpesvirus 6
auguaauacaucaacaaa

SEQ ID NO: 161403 - RNA, 21 nt, Human herpesvirus 6
auguacaguuucucgaaaaaa

SEQ ID NO: 161404 - RNA, 13 nt, Human herpesvirus 6
auggugagcaaaa

SEQ ID NO: 161405 - RNA, 19 nt, Human herpesvirus 6
auggugaaacuugacacau

SEQ ID NO: 161406 - RNA, 15 nt, Human herpesvirus 6
augguuaucaucaca

SEQ ID NO: 161407 - RNA, 15 nt, Human herpesvirus 6
augguaucugaagac

SEQ ID NO: 161408 - RNA, 16 nt, Human herpesvirus 6
augggugagugcauua

SEQ ID NO: 161409 - RNA, 13 nt, Human herpesvirus 6
auggcugcgcuac

SEQ ID NO: 161410 - RNA, 23 nt, Human herpesvirus 6
augggagucugcuuuacaucgaa

SEQ ID NO: 161411 - RNA, 13 nt, Human herpesvirus 6
augggagugauug

SEQ ID NO: 161412 - RNA, 23 nt, Human herpesvirus 6
augggagugauugugacaaggaa

SEQ ID NO: 161413 - RNA, 21 nt, Human herpesvirus 6
aucuuaccuucaaagugauuc

SEQ ID NO: 161414 - RNA, 15 nt, Human herpesvirus 6
aucuuaaaagaccac

SEQ ID NO: 161415 - RNA, 18 nt, Human herpesvirus 6
aucuuaaaagaccacuuu

SEQ ID NO: 161416 - RNA, 23 nt, Human herpesvirus 6
aucuugaaaagcccuuacuugaa

SEQ ID NO: 161417 - RNA, 14 nt, Human herpesvirus 6
auggaucuugauca

SEQ ID NO: 161418 - RNA, 14 nt, Human herpesvirus 6
auggcaugcauuau

SEQ ID NO: 161419 - RNA, 20 nt, Human herpesvirus 6
caaucuaccgagagauuuac

SEQ ID NO: 161420 - RNA, 20 nt, Human herpesvirus 6
caaucgcaaaaacauguugu

SEQ ID NO: 161421 - RNA, 23 nt, Human herpesvirus 6
caaugaaaaaaaaugaaggggaa

SEQ ID NO: 161422 - RNA, 16 nt, Human herpesvirus 6
caaucuguguuuccaa

SEQ ID NO: 161423 - RNA, 13 nt, Human herpesvirus 6
cacacucuuaacu

SEQ ID NO: 161424 - RNA, 19 nt, Human herpesvirus 6
cacacucuuaacuacuucu

SEQ ID NO: 161425 - RNA, 20 nt, Human herpesvirus 6
cacacggguaccggccugac

SEQ ID NO: 161426 - RNA, 15 nt, Human herpesvirus 6
cacacgcuuacacac

SEQ ID NO: 161427 - RNA, 20 nt, Human herpesvirus 6
caccacucuguuuuuuugca

SEQ ID NO: 161428 - RNA, 23 nt, Human herpesvirus 6
caccacucuguuuuuuugcaauu

SEQ ID NO: 161429 - RNA, 14 nt, Human herpesvirus 6
cacagugugaucau

SEQ ID NO: 161430 - RNA, 14 nt, Human herpesvirus 6
caccagcauaacug

SEQ ID NO: 161431 - RNA, 17 nt, Human herpesvirus 6
cacauauuguguuguaa

SEQ ID NO: 161432 - RNA, 20 nt, Human herpesvirus 6
cacaucaugauuaucauaga

SEQ ID NO: 161433 - RNA, 18 nt, Human herpesvirus 6
cacagccuguucuugcua

SEQ ID NO: 161434 - RNA, 18 nt, Human herpesvirus 6
cacaggauuauaaaaaca

SEQ ID NO: 161435 - RNA, 20 nt, Human herpesvirus 6
cacaggauuauaaaaacaca

SEQ ID NO: 161436 - RNA, 15 nt, Human herpesvirus 6
cagaaaguucuaugu

SEQ ID NO: 161437 - RNA, 16 nt, Human herpesvirus 6
cagaacaacagcaugu

SEQ ID NO: 161438 - RNA, 18 nt, Human herpesvirus 6
cagaacaacagcauguaa

SEQ ID NO: 161439 - RNA, 14 nt, Human herpesvirus 6
cagaacacauccac

SEQ ID NO: 161440 - RNA, 13 nt, Human herpesvirus 6
cagaaaucaaaga

SEQ ID NO: 161441 - RNA, 18 nt, Human herpesvirus 6
cacugaaucggaaacuga

SEQ ID NO: 161442 - RNA, 17 nt, Human herpesvirus 6
cacugaccguuguaaga

SEQ ID NO: 161443 - RNA, 14 nt, Human herpesvirus 6
cagaaugaauguaa

SEQ ID NO: 161444 - RNA, 14 nt, Human herpesvirus 6
cagaauccaccaau

SEQ ID NO: 161445 - RNA, 16 nt, Human herpesvirus 6
cagaauccaccaauga

SEQ ID NO: 161446 - RNA, 18 nt, Human herpesvirus 6
cagaauccaccaaugaca

SEQ ID NO: 161447 - RNA, 20 nt, Human herpesvirus 6
cagaaccaucuguucaauua

SEQ ID NO: 161448 - RNA, 12 nt, Human herpesvirus 6
cagaacaucuca

SEQ ID NO: 161449 - RNA, 14 nt, Human herpesvirus 6
cacgucuccuuuau

SEQ ID NO: 161450 - RNA, 19 nt, Human herpesvirus 6
cacgucuccuuuauugcca

SEQ ID NO: 161451 - RNA, 21 nt, Human herpesvirus 6
cacgaacguagacagucacac

SEQ ID NO: 161452 - RNA, 18 nt, Human herpesvirus 6
caccucugaaacacugug

SEQ ID NO: 161453 - RNA, 13 nt, Human herpesvirus 6
caccuuagacuug

SEQ ID NO: 161454 - RNA, 12 nt, Human herpesvirus 6
caccuaauuaca

SEQ ID NO: 161455 - RNA, 18 nt, Human herpesvirus 6
cacucuguuuuuuugcaa

SEQ ID NO: 161456 - RNA, 13 nt, Human herpesvirus 6
cacguuauaucua

SEQ ID NO: 161457 - RNA, 14 nt, Human herpesvirus 6
cacguucaggcauu

SEQ ID NO: 161458 - RNA, 20 nt, Human herpesvirus 6
cacguuuugggaaaucuggc

SEQ ID NO: 161459 - RNA, 12 nt, Human herpesvirus 6
cacuaaauuacc

SEQ ID NO: 161460 - RNA, 16 nt, Human herpesvirus 6
caagcaccuaauuaca

SEQ ID NO: 161461 - RNA, 18 nt, Human herpesvirus 6
caagcaccuaauuacaau

SEQ ID NO: 161462 - RNA, 22 nt, Human herpesvirus 6
caagagauagaccuugaucuau

SEQ ID NO: 161463 - RNA, 17 nt, Human herpesvirus 6
caagaguggauggaucg

SEQ ID NO: 161464 - RNA, 16 nt, Human herpesvirus 6
caagauccaaucacaa

SEQ ID NO: 161465 - RNA, 21 nt, Human herpesvirus 6
caauaaaaaauggauuuggua

SEQ ID NO: 161466 - RNA, 14 nt, Human herpesvirus 6
caaguuucaauaua

SEQ ID NO: 161467 - RNA, 14 nt, Human herpesvirus 6
caaguaagauugca

SEQ ID NO: 161468 - RNA, 16 nt, Human herpesvirus 6
caaguagccaaugauu

SEQ ID NO: 161469 - RNA, 20 nt, Human herpesvirus 6
caaguagccaaugauucuua

SEQ ID NO: 161470 - RNA, 22 nt, Human herpesvirus 6
caaucacauaguuucgaauucu

SEQ ID NO: 161471 - RNA, 16 nt, Human herpesvirus 6
caaucagccugcucag

SEQ ID NO: 161472 - RNA, 17 nt, Human herpesvirus 6
caaucagaaaacacuau

SEQ ID NO: 161473 - RNA, 21 nt, Human herpesvirus 6
caaucauuagcauacagaugu

SEQ ID NO: 161474 - RNA, 17 nt, Human herpesvirus 6
caauccaugcaacacaa

SEQ ID NO: 161475 - RNA, 14 nt, Human herpesvirus 6
caauacaacaauaa

SEQ ID NO: 161476 - RNA, 17 nt, Human herpesvirus 6
caauaacaacaacaaua

SEQ ID NO: 161477 - RNA, 20 nt, Human herpesvirus 6
caauacgguuugucucgcaa

SEQ ID NO: 161478 - RNA, 20 nt, Human herpesvirus 6
caauacgggaaaagaucaag

SEQ ID NO: 161479 - RNA, 19 nt, Human herpesvirus 6
caauagacgaaagacguuu

SEQ ID NO: 161480 - RNA, 14 nt, Human herpesvirus 6
caauaggcaccuau

SEQ ID NO: 161481 - RNA, 22 nt, Human herpesvirus 6
caauaggcaccuaucuagauca

SEQ ID NO: 161482 - RNA, 18 nt, Human herpesvirus 6
caacugacuuauaaguca

SEQ ID NO: 161483 - RNA, 18 nt, Human herpesvirus 6
caacugauuaagauuuuc

SEQ ID NO: 161484 - RNA, 18 nt, Human herpesvirus 6
caacaucuuaaaagacca

SEQ ID NO: 161485 - RNA, 19 nt, Human herpesvirus 6
caacauuaaaaaaaauagc

SEQ ID NO: 161486 - RNA, 12 nt, Human herpesvirus 6
caacauuccaac

SEQ ID NO: 161487 - RNA, 21 nt, Human herpesvirus 6
caaccauccagauaaccucac

SEQ ID NO: 161488 - RNA, 16 nt, Human herpesvirus 6
caaccaaguguuuuau

SEQ ID NO: 161489 - RNA, 16 nt, Human herpesvirus 6
caacaaacacgugauu

SEQ ID NO: 161490 - RNA, 20 nt, Human herpesvirus 6
caaauucuuacauuuuguac

SEQ ID NO: 161491 - RNA, 12 nt, Human herpesvirus 6
caacaaaaagcu

SEQ ID NO: 161492 - RNA, 16 nt, Human herpesvirus 6
caacaaaaagcuuuaa

SEQ ID NO: 161493 - RNA, 12 nt, Human herpesvirus 6
caaacaccucac

SEQ ID NO: 161494 - RNA, 21 nt, Human herpesvirus 6
caaacaccucacaaucuaaua

SEQ ID NO: 161495 - RNA, 20 nt, Human herpesvirus 6
caaauuaugguuaucaucac

SEQ ID NO: 161496 - RNA, 21 nt, Human herpesvirus 6
caaauuaugguuaucaucaca

SEQ ID NO: 161497 - RNA, 12 nt, Human herpesvirus 6
caaaauaaauac

SEQ ID NO: 161498 - RNA, 14 nt, Human herpesvirus 6
caaaacuacaaagu

SEQ ID NO: 161499 - RNA, 19 nt, Human herpesvirus 6
caaaaugaccucaucccuu

SEQ ID NO: 161500 - RNA, 13 nt, Human herpesvirus 6
agaguggggacaa

SEQ ID NO: 161501 - RNA, 17 nt, Human herpesvirus 6
agaguugacguuccaaa

SEQ ID NO: 161502 - RNA, 16 nt, Human herpesvirus 6
agaguguuaugaucua

SEQ ID NO: 161503 - RNA, 22 nt, Human herpesvirus 6
agaguguuaugaucuagcuaua

SEQ ID NO: 161504 - RNA, 12 nt, Human herpesvirus 6
agauaaacaacg

SEQ ID NO: 161505 - RNA, 20 nt, Human herpesvirus 6
agagucccaucuauacaccc

SEQ ID NO: 161506 - RNA, 21 nt, Human herpesvirus 6
agagcuaucgugcugagcgga

SEQ ID NO: 161507 - RNA, 21 nt, Human herpesvirus 6
agagcuaauaugaacaaugac

SEQ ID NO: 161508 - RNA, 18 nt, Human herpesvirus 6
agagcaaauuaugguuau

SEQ ID NO: 161509 - RNA, 13 nt, Human herpesvirus 6
agagauuaacucc

SEQ ID NO: 161510 - RNA, 22 nt, Human herpesvirus 6
agagaucguaccggucugcaac

SEQ ID NO: 161511 - RNA, 16 nt, Human herpesvirus 6
agagaguggggacaaa

SEQ ID NO: 161512 - RNA, 20 nt, Human herpesvirus 6
agagauaaaaagagaggaaa

SEQ ID NO: 161513 - RNA, 24 nt, Human herpesvirus 6
agaccucauauaagaaccaacaga

SEQ ID NO: 161514 - RNA, 16 nt, Human herpesvirus 6
agacgaaaauuguaac

SEQ ID NO: 161515 - RNA, 19 nt, Human herpesvirus 6
agacgaaagcaguuuuaca

SEQ ID NO: 161516 - RNA, 15 nt, Human herpesvirus 6
agaauccaccaauga

SEQ ID NO: 161517 - RNA, 21 nt, Human herpesvirus 6
agaaugacuguacacaagagc

SEQ ID NO: 161518 - RNA, 15 nt, Human herpesvirus 6
agaaucauuacuucg

SEQ ID NO: 161519 - RNA, 13 nt, Human herpesvirus 6
agacacuguaucu

SEQ ID NO: 161520 - RNA, 21 nt, Human herpesvirus 6
agaauguuugggagaacugag

SEQ ID NO: 161521 - RNA, 18 nt, Human herpesvirus 6
agacauucaacauuccaa

SEQ ID NO: 161522 - RNA, 19 nt, Human herpesvirus 6
agacauucaacauuccaac

SEQ ID NO: 161523 - RNA, 23 nt, Human herpesvirus 6
agacauccauugagugugcauca

SEQ ID NO: 161524 - RNA, 12 nt, Human herpesvirus 6
agacagucacac

SEQ ID NO: 161525 - RNA, 21 nt, Human herpesvirus 6
agacaguccauuucuaaagau

SEQ ID NO: 161526 - RNA, 16 nt, Human herpesvirus 6
agacagugagugagua

SEQ ID NO: 161527 - RNA, 14 nt, Human herpesvirus 6
agaccgacaguauu

SEQ ID NO: 161528 - RNA, 20 nt, Human herpesvirus 6
agaaaaacaucguaauggca

SEQ ID NO: 161529 - RNA, 19 nt, Human herpesvirus 6
acuuuuuuuuuucuuacaa

SEQ ID NO: 161530 - RNA, 14 nt, Human herpesvirus 6
agaaaaaaacugug

SEQ ID NO: 161531 - RNA, 17 nt, Human herpesvirus 6
agaaaaaaacugugaaa

SEQ ID NO: 161532 - RNA, 19 nt, Human herpesvirus 6
agaaaaguauagucuagca

SEQ ID NO: 161533 - RNA, 18 nt, Human herpesvirus 6
acuuuuuguagaacuuuu

SEQ ID NO: 161534 - RNA, 14 nt, Human herpesvirus 6
acuuuuuguauuau

SEQ ID NO: 161535 - RNA, 18 nt, Human herpesvirus 6
acuuuuaaaagauuugau

SEQ ID NO: 161536 - RNA, 21 nt, Human herpesvirus 6
acuuuuaaaagauuugaucca

SEQ ID NO: 161537 - RNA, 20 nt, Human herpesvirus 6
acuuauuuuuuuuucugugu

SEQ ID NO: 161538 - RNA, 15 nt, Human herpesvirus 6
acugucgaaauucac

SEQ ID NO: 161539 - RNA, 15 nt, Human herpesvirus 6
acuucgacaacggac

SEQ ID NO: 161540 - RNA, 15 nt, Human herpesvirus 6
acuucaaacaccuca

SEQ ID NO: 161541 - RNA, 14 nt, Human herpesvirus 6
agaaguuuacauag

SEQ ID NO: 161542 - RNA, 16 nt, Human herpesvirus 6
agaaguuuacauagaa

SEQ ID NO: 161543 - RNA, 12 nt, Human herpesvirus 6
agaauaucugcu

SEQ ID NO: 161544 - RNA, 18 nt, Human herpesvirus 6
agaauaucugcuaagucu

SEQ ID NO: 161545 - RNA, 15 nt, Human herpesvirus 6
agaauacgaacagaa

SEQ ID NO: 161546 - RNA, 19 nt, Human herpesvirus 6
agaaggucaucaugcugug

SEQ ID NO: 161547 - RNA, 16 nt, Human herpesvirus 6
agaagagcgaaaugca

SEQ ID NO: 161548 - RNA, 15 nt, Human herpesvirus 6
agaaauggaugucau

SEQ ID NO: 161549 - RNA, 15 nt, Human herpesvirus 6
agaaauuacaaggua

SEQ ID NO: 161550 - RNA, 18 nt, Human herpesvirus 6
agaaauuacauaagcaaa

SEQ ID NO: 161551 - RNA, 13 nt, Human herpesvirus 6
agaacaacagcau

SEQ ID NO: 161552 - RNA, 21 nt, Human herpesvirus 6
acugcauggugagcaaaauaa

SEQ ID NO: 161553 - RNA, 15 nt, Human herpesvirus 6
acugcaguccagaag

SEQ ID NO: 161554 - RNA, 21 nt, Human herpesvirus 6
acugcaagaacugcgacucaa

SEQ ID NO: 161555 - RNA, 15 nt, Human herpesvirus 6
acucucucaguaauu

SEQ ID NO: 161556 - RNA, 20 nt, Human herpesvirus 6
acugguuuacagcacuuugc

SEQ ID NO: 161557 - RNA, 19 nt, Human herpesvirus 6
acuaugcaaacgaaaccau

SEQ ID NO: 161558 - RNA, 13 nt, Human herpesvirus 6
acuaugugcauuc

SEQ ID NO: 161559 - RNA, 20 nt, Human herpesvirus 6
acuauuuguuuaaugcauuc

SEQ ID NO: 161560 - RNA, 21 nt, Human herpesvirus 6
acuauuuguuuaaugcauuca

SEQ ID NO: 161561 - RNA, 15 nt, Human herpesvirus 6
acucaacccaaaaug

SEQ ID NO: 161562 - RNA, 15 nt, Human herpesvirus 6
acuauuuaacaucca

SEQ ID NO: 161563 - RNA, 21 nt, Human herpesvirus 6
acucgcggaguggaguccagu

SEQ ID NO: 161564 - RNA, 18 nt, Human herpesvirus 6
acucaccgcauauaucau

SEQ ID NO: 161565 - RNA, 18 nt, Human herpesvirus 6
acuagcuaaaacuugaaa

SEQ ID NO: 161566 - RNA, 13 nt, Human herpesvirus 6
acuagcaguuacc

SEQ ID NO: 161567 - RNA, 22 nt, Human herpesvirus 6
acuaggugauugggagcucacu

SEQ ID NO: 161568 - RNA, 23 nt, Human herpesvirus 6
acuaggugauugggagcucacug

SEQ ID NO: 161569 - RNA, 17 nt, Human herpesvirus 6
acuaggauuagaacaau

SEQ ID NO: 161570 - RNA, 19 nt, Human herpesvirus 6
acuaggauuagaacaauua

SEQ ID NO: 161571 - RNA, 23 nt, Human herpesvirus 6
acuaggauuagaacaauuaucac

SEQ ID NO: 161572 - RNA, 17 nt, Human herpesvirus 6
acuaauucggaacauug

SEQ ID NO: 161573 - RNA, 21 nt, Human herpesvirus 6
acuaauucggaacauuguucu

SEQ ID NO: 161574 - RNA, 15 nt, Human herpesvirus 6
acuaauaaaugcuac

SEQ ID NO: 161575 - RNA, 16 nt, Human herpesvirus 6
acuacaacauuaucaa

SEQ ID NO: 161576 - RNA, 19 nt, Human herpesvirus 6
acuaccucuaaacccagac

SEQ ID NO: 161577 - RNA, 13 nt, Human herpesvirus 6
acuaccacaucac

SEQ ID NO: 161578 - RNA, 18 nt, Human herpesvirus 6
acuacagcugcaggggug

SEQ ID NO: 161579 - RNA, 19 nt, Human herpesvirus 6
acguggcagucugcucggu

SEQ ID NO: 161580 - RNA, 18 nt, Human herpesvirus 6
acgcgauuuaaacaacac

SEQ ID NO: 161581 - RNA, 22 nt, Human herpesvirus 6
acgccgccgccguccuauucag

SEQ ID NO: 161582 - RNA, 16 nt, Human herpesvirus 6
acgcauuugcaauugu

SEQ ID NO: 161583 - RNA, 22 nt, Human herpesvirus 6
acuaaauuagagcuacgccaaa

SEQ ID NO: 161584 - RNA, 13 nt, Human herpesvirus 6
acuaaaacaucag

SEQ ID NO: 161585 - RNA, 12 nt, Human herpesvirus 6
acguugaugauu

SEQ ID NO: 161586 - RNA, 16 nt, Human herpesvirus 6
acguugaugauuuaca

SEQ ID NO: 161587 - RNA, 16 nt, Human herpesvirus 6
acaacuuuuaaccauu

SEQ ID NO: 161588 - RNA, 14 nt, Human herpesvirus 6
acaagaacagagag

SEQ ID NO: 161589 - RNA, 13 nt, Human herpesvirus 6
acaaauucuuaca

SEQ ID NO: 161590 - RNA, 20 nt, Human herpesvirus 6
acaaaucuucccuuuuacaa

SEQ ID NO: 161591 - RNA, 13 nt, Human herpesvirus 6
acaccgauucaga

SEQ ID NO: 161592 - RNA, 15 nt, Human herpesvirus 6
acacguacauaauuc

SEQ ID NO: 161593 - RNA, 22 nt, Human herpesvirus 6
acacgcgauggaagaaccaaag

SEQ ID NO: 161594 - RNA, 16 nt, Human herpesvirus 6
acacgacaaaacaauc

SEQ ID NO: 161595 - RNA, 22 nt, Human herpesvirus 6
acacgaaaaacauuucuuacac

SEQ ID NO: 161596 - RNA, 21 nt, Human herpesvirus 6
acaccuuaaacauguauauaa

SEQ ID NO: 161597 - RNA, 20 nt, Human herpesvirus 6
acaccucaauuaauacaaaa

SEQ ID NO: 161598 - RNA, 21 nt, Human herpesvirus 6
acagaaccagauaucucuucc

SEQ ID NO: 161599 - RNA, 14 nt, Human herpesvirus 6
acacugaguucugu

SEQ ID NO: 161600 - RNA, 15 nt, Human herpesvirus 6
acacugauaacucac

SEQ ID NO: 161601 - RNA, 16 nt, Human herpesvirus 6
acacucuccacucuac

SEQ ID NO: 161602 - RNA, 22 nt, Human herpesvirus 6
acaugaaaucacguacuaucuu

SEQ ID NO: 161603 - RNA, 23 nt, Human herpesvirus 6
acaucuuaaaagaccacuuuuaa

SEQ ID NO: 161604 - RNA, 20 nt, Human herpesvirus 6
acauuaaacacuaaauuacc

SEQ ID NO: 161605 - RNA, 14 nt, Human herpesvirus 6
acauccuaacaaga

SEQ ID NO: 161606 - RNA, 13 nt, Human herpesvirus 6
acauagucaagua

SEQ ID NO: 161607 - RNA, 15 nt, Human herpesvirus 6
acauagcgaauuuga

SEQ ID NO: 161608 - RNA, 19 nt, Human herpesvirus 6
acauaauucggucaccuac

SEQ ID NO: 161609 - RNA, 16 nt, Human herpesvirus 6
acaguacuaugauuua

SEQ ID NO: 161610 - RNA, 13 nt, Human herpesvirus 6
acaguagauuuca

SEQ ID NO: 161611 - RNA, 21 nt, Human herpesvirus 6
acaguagauuucaagauauau

SEQ ID NO: 161612 - RNA, 22 nt, Human herpesvirus 6
acaguagauuucaagauauauu

SEQ ID NO: 161613 - RNA, 12 nt, Human herpesvirus 6
acauaagacuua

SEQ ID NO: 161614 - RNA, 21 nt, Human herpesvirus 6
acauaagacuuauaauauucc

SEQ ID NO: 161615 - RNA, 22 nt, Human herpesvirus 6
acauaaacuuagaucuauaugc

SEQ ID NO: 161616 - RNA, 19 nt, Human herpesvirus 6
acaggauuauaaaaacaca

SEQ ID NO: 161617 - RNA, 16 nt, Human herpesvirus 6
acagggugagucacau

SEQ ID NO: 161618 - RNA, 14 nt, Human herpesvirus 6
acaggcggggaucg

SEQ ID NO: 161619 - RNA, 15 nt, Human herpesvirus 6
acagagcauccuguu

SEQ ID NO: 161620 - RNA, 19 nt, Human herpesvirus 6
acagagcauccuguuuucc

SEQ ID NO: 161621 - RNA, 23 nt, Human herpesvirus 6
acagagaaggguaugaaacuuua

SEQ ID NO: 161622 - RNA, 20 nt, Human herpesvirus 6
acagagagaggagcauucac

SEQ ID NO: 161623 - RNA, 23 nt, Human herpesvirus 6
acagagaucguaccggucugcaa

SEQ ID NO: 161624 - RNA, 16 nt, Human herpesvirus 6
acagacuuuacuucua

SEQ ID NO: 161625 - RNA, 20 nt, Human herpesvirus 6
acagcuuuauucccaugacg

SEQ ID NO: 161626 - RNA, 20 nt, Human herpesvirus 6
acccagcaugaugaucugcc

SEQ ID NO: 161627 - RNA, 19 nt, Human herpesvirus 6
acccagcgggcuccgucgc

SEQ ID NO: 161628 - RNA, 23 nt, Human herpesvirus 6
accauggcccuacuacaguggau

SEQ ID NO: 161629 - RNA, 21 nt, Human herpesvirus 6
accaugaucaacggccuggag

SEQ ID NO: 161630 - RNA, 15 nt, Human herpesvirus 6
acccauggcgagaaa

SEQ ID NO: 161631 - RNA, 20 nt, Human herpesvirus 6
acccaucuccucaacacucu

SEQ ID NO: 161632 - RNA, 14 nt, Human herpesvirus 6
acccgaaguucucu

SEQ ID NO: 161633 - RNA, 20 nt, Human herpesvirus 6
accccgaguuuacuaaaaag

SEQ ID NO: 161634 - RNA, 21 nt, Human herpesvirus 6
accacggggauuuaguacagu

SEQ ID NO: 161635 - RNA, 16 nt, Human herpesvirus 6
accaccggcuaacccu

SEQ ID NO: 161636 - RNA, 17 nt, Human herpesvirus 6
accacagcagcagcauu

SEQ ID NO: 161637 - RNA, 16 nt, Human herpesvirus 6
accaccaacacaccug

SEQ ID NO: 161638 - RNA, 19 nt, Human herpesvirus 6
accaccaacacaccugccu

SEQ ID NO: 161639 - RNA, 22 nt, Human herpesvirus 6
acauucaaagucuaaugguuga

SEQ ID NO: 161640 - RNA, 23 nt, Human herpesvirus 6
acauuauuaaggccgucaaagac

SEQ ID NO: 161641 - RNA, 18 nt, Human herpesvirus 6
acauucccuuaauguaug

SEQ ID NO: 161642 - RNA, 18 nt, Human herpesvirus 6
acgacaaaaccuaaauac

SEQ ID NO: 161643 - RNA, 20 nt, Human herpesvirus 6
acgaauccggaaaaccggua

SEQ ID NO: 161644 - RNA, 14 nt, Human herpesvirus 6
accuuaaacaugua

SEQ ID NO: 161645 - RNA, 16 nt, Human herpesvirus 6
accuuacggggagcuu

SEQ ID NO: 161646 - RNA, 17 nt, Human herpesvirus 6
acccuaugcaagcucau

SEQ ID NO: 161647 - RNA, 14 nt, Human herpesvirus 6
acccuacaaucugu

SEQ ID NO: 161648 - RNA, 15 nt, Human herpesvirus 6
acccuacaaucuguc

SEQ ID NO: 161649 - RNA, 12 nt, Human herpesvirus 6
acccuaacccua

SEQ ID NO: 161650 - RNA, 13 nt, Human herpesvirus 6
acccuaacccuaa

SEQ ID NO: 161651 - RNA, 14 nt, Human herpesvirus 6
acccuaacccuaac

SEQ ID NO: 161652 - RNA, 17 nt, Human herpesvirus 6
acccuaacccuaacccu

SEQ ID NO: 161653 - RNA, 20 nt, Human herpesvirus 6
acccuaagugaaauucaaaa

SEQ ID NO: 161654 - RNA, 23 nt, Human herpesvirus 6
acccuaagugaaauucaaaauaa

SEQ ID NO: 161655 - RNA, 13 nt, Human herpesvirus 6
accuauagucaau

SEQ ID NO: 161656 - RNA, 18 nt, Human herpesvirus 6
accuauagucaauguugu

SEQ ID NO: 161657 - RNA, 23 nt, Human herpesvirus 6
accuauauuuuuaccgaaccaua

SEQ ID NO: 161658 - RNA, 23 nt, Human herpesvirus 6
accuagauucauuguuuuugcau

SEQ ID NO: 161659 - RNA, 16 nt, Human herpesvirus 6
accuagcagcaaauaa

SEQ ID NO: 161660 - RNA, 15 nt, Human herpesvirus 6
accuauuuacaaugu

SEQ ID NO: 161661 - RNA, 19 nt, Human herpesvirus 6
accuauuuacaauguucaa

SEQ ID NO: 161662 - RNA, 17 nt, Human herpesvirus 6
accgacgguuaaauuua

SEQ ID NO: 161663 - RNA, 14 nt, Human herpesvirus 6
accuaauaaacugu

SEQ ID NO: 161664 - RNA, 16 nt, Human herpesvirus 6
accuaauaauuacaau

SEQ ID NO: 161665 - RNA, 16 nt, Human herpesvirus 6
accuaauuacaauuua

SEQ ID NO: 161666 - RNA, 13 nt, Human herpesvirus 6
aacuugaaagccu

SEQ ID NO: 161667 - RNA, 22 nt, Human herpesvirus 6
aacuucauacccgaaguucucu

SEQ ID NO: 161668 - RNA, 21 nt, Human herpesvirus 6
aagaagaaaaaaacacaaauc

SEQ ID NO: 161669 - RNA, 13 nt, Human herpesvirus 6
aacuuuacauuaa

SEQ ID NO: 161670 - RNA, 16 nt, Human herpesvirus 6
aagaauccuucguucu

SEQ ID NO: 161671 - RNA, 18 nt, Human herpesvirus 6
aagaaugggauugugauu

SEQ ID NO: 161672 - RNA, 19 nt, Human herpesvirus 6
aagaauuaauguccaguga

SEQ ID NO: 161673 - RNA, 14 nt, Human herpesvirus 6
aagaaucaaugaaa

SEQ ID NO: 161674 - RNA, 16 nt, Human herpesvirus 6
aagcaguuuuacauca

SEQ ID NO: 161675 - RNA, 18 nt, Human herpesvirus 6
aagcaucccuaugucgau

SEQ ID NO: 161676 - RNA, 14 nt, Human herpesvirus 6
aagcagucaguaau

SEQ ID NO: 161677 - RNA, 16 nt, Human herpesvirus 6
aagcaggaacccagau

SEQ ID NO: 161678 - RNA, 16 nt, Human herpesvirus 6
aagacaaacgccucca

SEQ ID NO: 161679 - RNA, 14 nt, Human herpesvirus 6
aagcuaucauauca

SEQ ID NO: 161680 - RNA, 21 nt, Human herpesvirus 6
aagcugaugcgcaacugauac

SEQ ID NO: 161681 - RNA, 16 nt, Human herpesvirus 6
aagccgaguuuggcaa

SEQ ID NO: 161682 - RNA, 23 nt, Human herpesvirus 6
aagcgccaacgaaaagcaucuca

SEQ ID NO: 161683 - RNA, 13 nt, Human herpesvirus 6
aagcgccauaaaa

SEQ ID NO: 161684 - RNA, 20 nt, Human herpesvirus 6
aagccuucguaaucauaaaa

SEQ ID NO: 161685 - RNA, 21 nt, Human herpesvirus 6
aagucguugugucaugauuau

SEQ ID NO: 161686 - RNA, 18 nt, Human herpesvirus 6
aaggcuaucacuuagaca

SEQ ID NO: 161687 - RNA, 15 nt, Human herpesvirus 6
aaggcugccaugaaa

SEQ ID NO: 161688 - RNA, 21 nt, Human herpesvirus 6
aaggcugccaugaaacaggaa

SEQ ID NO: 161689 - RNA, 15 nt, Human herpesvirus 6
aagggaagauuugua

SEQ ID NO: 161690 - RNA, 13 nt, Human herpesvirus 6
aagucaucauaua

SEQ ID NO: 161691 - RNA, 14 nt, Human herpesvirus 6
aagucaucucacuc

SEQ ID NO: 161692 - RNA, 14 nt, Human herpesvirus 6
aaggacuacauccc

SEQ ID NO: 161693 - RNA, 16 nt, Human herpesvirus 6
aaggagugagaaauuu

SEQ ID NO: 161694 - RNA, 19 nt, Human herpesvirus 6
aauacauuuccaugcauau

SEQ ID NO: 161695 - RNA, 17 nt, Human herpesvirus 6
aauacauuuuucaauaa

SEQ ID NO: 161696 - RNA, 10 nt, Human herpesvirus 6
aauacaucaa

SEQ ID NO: 161697 - RNA, 13 nt, Human herpesvirus 6
aauacaucauuaa

SEQ ID NO: 161698 - RNA, 14 nt, Human herpesvirus 6
aaguuccauuguuu

SEQ ID NO: 161699 - RNA, 15 nt, Human herpesvirus 6
aaguuuaaguuuuca

SEQ ID NO: 161700 - RNA, 14 nt, Human herpesvirus 6
aaguuuacauagaa

SEQ ID NO: 161701 - RNA, 17 nt, Human herpesvirus 6
aaguuuugggugcuauu

SEQ ID NO: 161702 - RNA, 20 nt, Human herpesvirus 6
aaguuucuguugaauuccag

SEQ ID NO: 161703 - RNA, 14 nt, Human herpesvirus 6
aagugcuuuaucua

SEQ ID NO: 161704 - RNA, 22 nt, Human herpesvirus 6
aagugcgcuggcuuauuaacgc

SEQ ID NO: 161705 - RNA, 15 nt, Human herpesvirus 6
aaguguuugguguga

SEQ ID NO: 161706 - RNA, 12 nt, Human herpesvirus 6
aaguuaauucca

SEQ ID NO: 161707 - RNA, 13 nt, Human herpesvirus 6
aaguuaauuccag

SEQ ID NO: 161708 - RNA, 15 nt, Human herpesvirus 6
aauugauaguacuua

SEQ ID NO: 161709 - RNA, 12 nt, Human herpesvirus 6
aauuaugcauuu

SEQ ID NO: 161710 - RNA, 18 nt, Human herpesvirus 6
aauucaaaacgacaucgc

SEQ ID NO: 161711 - RNA, 14 nt, Human herpesvirus 6
aauuauaucaucuu

SEQ ID NO: 161712 - RNA, 15 nt, Human herpesvirus 6
aauuauaaaaccgau

SEQ ID NO: 161713 - RNA, 21 nt, Human herpesvirus 6
aauuauccuggcgaugcagau

SEQ ID NO: 161714 - RNA, 20 nt, Human herpesvirus 6
aauuaugguuaucaucacaa

SEQ ID NO: 161715 - RNA, 22 nt, Human herpesvirus 6
aauuaugguuaucaucacaaag

SEQ ID NO: 161716 - RNA, 23 nt, Human herpesvirus 6
aauuaugguuaucaucacaaagu

SEQ ID NO: 161717 - RNA, 17 nt, Human herpesvirus 6
aauuacauauagucaau

SEQ ID NO: 161718 - RNA, 19 nt, Human herpesvirus 6
aauuacauauagucaaugu

SEQ ID NO: 161719 - RNA, 23 nt, Human herpesvirus 6
aaugucuguauuuuucuuugcag

SEQ ID NO: 161720 - RNA, 19 nt, Human herpesvirus 6
aauuaccuauagucaaugu

SEQ ID NO: 161721 - RNA, 15 nt, Human herpesvirus 6
aauuacucaacauua

SEQ ID NO: 161722 - RNA, 15 nt, Human herpesvirus 6
aauguaugcaucauc

SEQ ID NO: 161723 - RNA, 21 nt, Human herpesvirus 6
aauguaugccgauuaaugugu

SEQ ID NO: 161724 - RNA, 15 nt, Human herpesvirus 6
aaugggauugugauu

SEQ ID NO: 161725 - RNA, 15 nt, Human herpesvirus 6
aauguaaaguuauau

SEQ ID NO: 161726 - RNA, 22 nt, Human herpesvirus 6
aauugcguuaccgugucuuuaa

SEQ ID NO: 161727 - RNA, 13 nt, Human herpesvirus 6
aauuguaucuuug

SEQ ID NO: 161728 - RNA, 19 nt, Human herpesvirus 6
aauugugcaagcuguauga

SEQ ID NO: 161729 - RNA, 21 nt, Human herpesvirus 6
aauuguguccuuugccuguau

SEQ ID NO: 161730 - RNA, 15 nt, Human herpesvirus 6
aauuuguggaacaau

SEQ ID NO: 161731 - RNA, 16 nt, Human herpesvirus 6
aauuuguggaacaaua

SEQ ID NO: 161732 - RNA, 18 nt, Human herpesvirus 6
aauuuguuuuuccauaaa

SEQ ID NO: 161733 - RNA, 17 nt, Human herpesvirus 6
aauuuuauuaacuguaa

SEQ ID NO: 161734 - RNA, 18 nt, Human herpesvirus 6
aauuuuauuaacuguaaa

SEQ ID NO: 161735 - RNA, 17 nt, Human herpesvirus 6
acaaauaaaagcauuuu

SEQ ID NO: 161736 - RNA, 22 nt, Human herpesvirus 6
acaaagcuuuacuuacaacuga

SEQ ID NO: 161737 - RNA, 15 nt, Human herpesvirus 6
acaaaggagugagaa

SEQ ID NO: 161738 - RNA, 15 nt, Human herpesvirus 6
acaaaaccuaaauac

SEQ ID NO: 161739 - RNA, 20 nt, Human herpesvirus 6
acaaaaccuaaauacauuca

SEQ ID NO: 161740 - RNA, 22 nt, Human herpesvirus 6
acaaaaccaggaauccuauuca

SEQ ID NO: 161741 - RNA, 17 nt, Human herpesvirus 6
acaaagaaucaaugaaa

SEQ ID NO: 161742 - RNA, 14 nt, Human herpesvirus 6
acaaaacaaucuau

SEQ ID NO: 161743 - RNA, 15 nt, Human herpesvirus 6
acaaaacaaucuauc

SEQ ID NO: 161744 - RNA, 22 nt, Human herpesvirus 6
acaaaacauaucgagccaaaga

SEQ ID NO: 161745 - RNA, 14 nt, Human herpesvirus 6
aauaguuacuuuga

SEQ ID NO: 161746 - RNA, 12 nt, Human herpesvirus 6
aauagucuuaau

SEQ ID NO: 161747 - RNA, 20 nt, Human herpesvirus 6
aauaguucuucaacauauca

SEQ ID NO: 161748 - RNA, 14 nt, Human herpesvirus 6
aauauaucaaagau

SEQ ID NO: 161749 - RNA, 18 nt, Human herpesvirus 6
aauauauuugcacuuccu

SEQ ID NO: 161750 - RNA, 20 nt, Human herpesvirus 6
aauagucgcacaucgauaaa

SEQ ID NO: 161751 - RNA, 14 nt, Human herpesvirus 6
aaucuacuguacaa

SEQ ID NO: 161752 - RNA, 20 nt, Human herpesvirus 6
aaucuauccgcuaaaacgac

SEQ ID NO: 161753 - RNA, 20 nt, Human herpesvirus 6
aaucuaucuccgcaaaccac

SEQ ID NO: 161754 - RNA, 21 nt, Human herpesvirus 6
aaucuaucuccgcaaaccacc

SEQ ID NO: 161755 - RNA, 20 nt, Human herpesvirus 6
aaucucaagcacaaaaccag

SEQ ID NO: 161756 - RNA, 17 nt, Human herpesvirus 6
aaucuacugagaucaua

SEQ ID NO: 161757 - RNA, 18 nt, Human herpesvirus 6
aauccuauaaaaaaagca

SEQ ID NO: 161758 - RNA, 23 nt, Human herpesvirus 6
aauccuguuuuguaccauuguau

SEQ ID NO: 161759 - RNA, 23 nt, Human herpesvirus 6
aauccggaguuaaguaaacugcu

SEQ ID NO: 161760 - RNA, 17 nt, Human herpesvirus 6
aaucgcaaaaacauguu

SEQ ID NO: 161761 - RNA, 18 nt, Human herpesvirus 6
aaugcugcugcugugguu

SEQ ID NO: 161762 - RNA, 22 nt, Human herpesvirus 6
aaugcuggcgcugcauagacug

SEQ ID NO: 161763 - RNA, 15 nt, Human herpesvirus 6
aaugcucaaccuaau

SEQ ID NO: 161764 - RNA, 23 nt, Human herpesvirus 6
aauggaccaagcaccuaauuaca

SEQ ID NO: 161765 - RNA, 13 nt, Human herpesvirus 6
aauggcaugcauu

SEQ ID NO: 161766 - RNA, 18 nt, Human herpesvirus 6
aaugauacuaaguguaau

SEQ ID NO: 161767 - RNA, 16 nt, Human herpesvirus 6
aaugaucaauuuuaca

SEQ ID NO: 161768 - RNA, 18 nt, Human herpesvirus 6
aaugacuguacacaagag

SEQ ID NO: 161769 - RNA, 21 nt, Human herpesvirus 6
aaugcaacauccugcguguua

SEQ ID NO: 161770 - RNA, 20 nt, Human herpesvirus 6
aaaagagucccaucuauaca

SEQ ID NO: 161771 - RNA, 16 nt, Human herpesvirus 6
aaaagcugacuauuca

SEQ ID NO: 161772 - RNA, 13 nt, Human herpesvirus 6
aaaaucaaacuca

SEQ ID NO: 161773 - RNA, 15 nt, Human herpesvirus 6
aaaagaaucauuguu

SEQ ID NO: 161774 - RNA, 17 nt, Human herpesvirus 6
aaaauaucgccccuguc

SEQ ID NO: 161775 - RNA, 12 nt, Human herpesvirus 6
aaaaucuuguca

SEQ ID NO: 161776 - RNA, 16 nt, Human herpesvirus 6
aaaaucuugucacucu

SEQ ID NO: 161777 - RNA, 18 nt, Human herpesvirus 6
aaacucuuauaacaagca

SEQ ID NO: 161778 - RNA, 19 nt, Human herpesvirus 6
aaaaugccucuccuauaaa

SEQ ID NO: 161779 - RNA, 23 nt, Human herpesvirus 6
aaacuuuaugaggaacuggugag

SEQ ID NO: 161780 - RNA, 13 nt, Human herpesvirus 6
aaacuugacacau

SEQ ID NO: 161781 - RNA, 12 nt, Human herpesvirus 6
aaacugacugua

SEQ ID NO: 161782 - RNA, 11 nt, Human herpesvirus 6
aaacuuacaag

SEQ ID NO: 161783 - RNA, 22 nt, Human herpesvirus 6
aaagaaacucuuauaacaagca

SEQ ID NO: 161784 - RNA, 14 nt, Human herpesvirus 6
aaagaacaugugac

SEQ ID NO: 161785 - RNA, 14 nt, Human herpesvirus 6
aaagaagauuuucc

SEQ ID NO: 161786 - RNA, 17 nt, Human herpesvirus 6
aaagacaaacgccucca

SEQ ID NO: 161787 - RNA, 19 nt, Human herpesvirus 6
aaagacauucaacauucca

SEQ ID NO: 161788 - RNA, 17 nt, Human herpesvirus 6
aaagauguacucaucca

SEQ ID NO: 161789 - RNA, 18 nt, Human herpesvirus 6
aaagauguacucauccaa

SEQ ID NO: 161790 - RNA, 22 nt, Human herpesvirus 6
aaagaguugacguuccaaagua

SEQ ID NO: 161791 - RNA, 16 nt, Human herpesvirus 6
aaaugcaacgcaucac

SEQ ID NO: 161792 - RNA, 24 nt, Human herpesvirus 6
aaaugcaacgcaucacacauacaa

SEQ ID NO: 161793 - RNA, 17 nt, Human herpesvirus 6
aaaugauuuuacaaaga

SEQ ID NO: 161794 - RNA, 17 nt, Human herpesvirus 6
aaauuauggcgaugacc

SEQ ID NO: 161795 - RNA, 21 nt, Human herpesvirus 6
aaauucaaucaggucgcuaua

SEQ ID NO: 161796 - RNA, 16 nt, Human herpesvirus 6
aaauucaccagauuca

SEQ ID NO: 161797 - RNA, 16 nt, Human herpesvirus 6
aaauugauaguacuua

SEQ ID NO: 161798 - RNA, 19 nt, Human herpesvirus 6
aaaucucgccgaacuagaa

SEQ ID NO: 161799 - RNA, 13 nt, Human herpesvirus 6
aaauauaucaaag

SEQ ID NO: 161800 - RNA, 14 nt, Human herpesvirus 6
aaauauaucaaaga

SEQ ID NO: 161801 - RNA, 17 nt, Human herpesvirus 6
aaauagucuuaauucag

SEQ ID NO: 161802 - RNA, 13 nt, Human herpesvirus 6
aaaucuugucacu

SEQ ID NO: 161803 - RNA, 23 nt, Human herpesvirus 6
aaaugaugaguaauacaucauua

SEQ ID NO: 161804 - RNA, 14 nt, Human herpesvirus 6
aaaugagacuuagc

SEQ ID NO: 161805 - RNA, 17 nt, Human herpesvirus 6
aaaugaauguguucaca

SEQ ID NO: 161806 - RNA, 22 nt, Human herpesvirus 6
aaauagcagaaguuuacauaga

SEQ ID NO: 161807 - RNA, 23 nt, Human herpesvirus 6
aaauagcagaaguuuacauagaa

SEQ ID NO: 161808 - RNA, 17 nt, Human herpesvirus 6
aaauacuagcuaaaacu

SEQ ID NO: 161809 - RNA, 15 nt, Human herpesvirus 6
aaaggaguaugacug

SEQ ID NO: 161810 - RNA, 19 nt, Human herpesvirus 6
aaagcuuuauguacccuaa

SEQ ID NO: 161811 - RNA, 15 nt, Human herpesvirus 6
aaagcugacuauuca

SEQ ID NO: 161812 - RNA, 17 nt, Human herpesvirus 6
aaagcugcucaucuuca

SEQ ID NO: 161813 - RNA, 22 nt, Human herpesvirus 6
aaagcuaaaucaaaugauuuua

SEQ ID NO: 161814 - RNA, 16 nt, Human herpesvirus 6
aaauuuugcaugcauu

SEQ ID NO: 161815 - RNA, 16 nt, Human herpesvirus 6
aacaaagaaucaauga

SEQ ID NO: 161816 - RNA, 14 nt, Human herpesvirus 6
aacaaagcuuuacu

SEQ ID NO: 161817 - RNA, 14 nt, Human herpesvirus 6
aaauuuaucacaaa

SEQ ID NO: 161818 - RNA, 14 nt, Human herpesvirus 6
aaauuguaacuuca

SEQ ID NO: 161819 - RNA, 15 nt, Human herpesvirus 6
aacaacaacaauaac

SEQ ID NO: 161820 - RNA, 17 nt, Human herpesvirus 6
aacaaauucuuacauuu

SEQ ID NO: 161821 - RNA, 24 nt, Human herpesvirus 6
aacaaacuauauugcugcuagaua

SEQ ID NO: 161822 - RNA, 13 nt, Human herpesvirus 6
aacaaaucuccaa

SEQ ID NO: 161823 - RNA, 12 nt, Human herpesvirus 6
aacagcauguaa

SEQ ID NO: 161824 - RNA, 13 nt, Human herpesvirus 6
aacagacuuuacu

SEQ ID NO: 161825 - RNA, 22 nt, Human herpesvirus 6
aacagagaaggguaugaaacuu

SEQ ID NO: 161826 - RNA, 22 nt, Human herpesvirus 6
aacagagagaggagcauucaca

SEQ ID NO: 161827 - RNA, 23 nt, Human herpesvirus 6
aacagcuuuauucccaugacgau

SEQ ID NO: 161828 - RNA, 16 nt, Human herpesvirus 6
aacauccuauugagau

SEQ ID NO: 161829 - RNA, 19 nt, Human herpesvirus 6
aacaucguaauggcauuca

SEQ ID NO: 161830 - RNA, 18 nt, Human herpesvirus 6
aacaucccagauacauaa

SEQ ID NO: 161831 - RNA, 17 nt, Human herpesvirus 6
aacaucaguaacaccgu

SEQ ID NO: 161832 - RNA, 13 nt, Human herpesvirus 6
aacauguacaaac

SEQ ID NO: 161833 - RNA, 22 nt, Human herpesvirus 6
aacauuuaauaaagaacaugug

SEQ ID NO: 161834 - RNA, 23 nt, Human herpesvirus 6
aacauuuaauaaagaacauguga

SEQ ID NO: 161835 - RNA, 17 nt, Human herpesvirus 6
aacauuccaacuuucgu

SEQ ID NO: 161836 - RNA, 17 nt, Human herpesvirus 6
aacauugaaaaaucucu

SEQ ID NO: 161837 - RNA, 17 nt, Human herpesvirus 6
aaccaaaaugacucuaa

SEQ ID NO: 161838 - RNA, 15 nt, Human herpesvirus 6
aaccaaagacauuca

SEQ ID NO: 161839 - RNA, 23 nt, Human herpesvirus 6
aaccaaagacauucaacauucca

SEQ ID NO: 161840 - RNA, 18 nt, Human herpesvirus 6
aacgcugucuuuuuuccc

SEQ ID NO: 161841 - RNA, 14 nt, Human herpesvirus 6
aacgaaaagcaucu

SEQ ID NO: 161842 - RNA, 15 nt, Human herpesvirus 6
aacgaaaauugauga

SEQ ID NO: 161843 - RNA, 14 nt, Human herpesvirus 6
aaccucacuacuga

SEQ ID NO: 161844 - RNA, 23 nt, Human herpesvirus 6
aaccucacuacugaaaccaaagc

SEQ ID NO: 161845 - RNA, 18 nt, Human herpesvirus 6
aaccuccucagaugcaau

SEQ ID NO: 161846 - RNA, 14 nt, Human herpesvirus 6
aaccauucugcaaa

SEQ ID NO: 161847 - RNA, 22 nt, Human herpesvirus 6
aacccaaguucaucagcauuaa

SEQ ID NO: 161848 - RNA, 16 nt, Human herpesvirus 6
aaccuaaauacauuca

SEQ ID NO: 161849 - RNA, 20 nt, Human herpesvirus 6
aaccauagcuguccaugaga

SEQ ID NO: 161850 - RNA, 20 nt, Human herpesvirus 6
aaccauagguguuugcagau

SEQ ID NO: 161851 - RNA, 18 nt, Human herpesvirus 6
aaccaucaauuuuaucca

SEQ ID NO: 161852 - RNA, 17 nt, Human herpesvirus 6
aaccaucuguucaauua

SEQ ID NO: 161853 - RNA, 19 nt, Human herpesvirus 6
aacuuagaucuauaugcau

SEQ ID NO: 161854 - RNA, 21 nt, Human herpesvirus 6
aacuaugcaaacgaaaccauc

SEQ ID NO: 161855 - RNA, 13 nt, Human herpesvirus 6
aacuauauugcug

SEQ ID NO: 161856 - RNA, 23 nt, Human herpesvirus 6
aacuaggugauugggagcucacu

SEQ ID NO: 161857 - RNA, 12 nt, Human herpesvirus 6
aacguugcacua

SEQ ID NO: 161858 - RNA, 22 nt, Human herpesvirus 6
aacuaaaaaaaaaaacacaaac

SEQ ID NO: 161859 - RNA, 16 nt, Human herpesvirus 6
aacguagacagucaca

SEQ ID NO: 161860 - RNA, 18 nt, Human herpesvirus 6
aacggaaaaaugccucuc

SEQ ID NO: 161861 - RNA, 16 nt, Human herpesvirus 6
aacgguuuaaucucac

SEQ ID NO: 161862 - RNA, 18 nt, Human herpesvirus 6
cuuaaagcgugugauuca

SEQ ID NO: 161863 - RNA, 18 nt, Human herpesvirus 6
cuuaaagcguuugcaaaa

SEQ ID NO: 161864 - RNA, 19 nt, Human herpesvirus 6
cuuaaagcguuugcaaaac

SEQ ID NO: 161865 - RNA, 14 nt, Human herpesvirus 6
cuuaacuugcacuc

SEQ ID NO: 161866 - RNA, 15 nt, Human herpesvirus 6
cuuacacgaugugua

SEQ ID NO: 161867 - RNA, 20 nt, Human herpesvirus 6
cuuacacaaauugaccagcc

SEQ ID NO: 161868 - RNA, 22 nt, Human herpesvirus 6
cuuaauauauuugcacuuccuc

SEQ ID NO: 161869 - RNA, 14 nt, Human herpesvirus 6
cuuaauaucugacc

SEQ ID NO: 161870 - RNA, 14 nt, Human herpesvirus 6
cuuucuaaaaucaa

SEQ ID NO: 161871 - RNA, 16 nt, Human herpesvirus 6
cuuucuaaaaucaaaa

SEQ ID NO: 161872 - RNA, 21 nt, Human herpesvirus 6
cuuucucuuuuuaauuccaag

SEQ ID NO: 161873 - RNA, 18 nt, Human herpesvirus 6
cuuucucuuuuuaauucc

SEQ ID NO: 161874 - RNA, 13 nt, Human herpesvirus 6
cuuugacauuuau

SEQ ID NO: 161875 - RNA, 13 nt, Human herpesvirus 6
cuuucauccugac

SEQ ID NO: 161876 - RNA, 16 nt, Human herpesvirus 6
cuuucaguauuaacua

SEQ ID NO: 161877 - RNA, 22 nt, Human herpesvirus 6
cuuaccuucaaagugauuccag

SEQ ID NO: 161878 - RNA, 22 nt, Human herpesvirus 6
cuuuggcuucuauauccaaaga

SEQ ID NO: 161879 - RNA, 12 nt, Human herpesvirus 6
cuuuuaacuucg

SEQ ID NO: 161880 - RNA, 23 nt, Human herpesvirus 6
cuuuuaaaacaggaagcgccaua

SEQ ID NO: 161881 - RNA, 15 nt, Human herpesvirus 6
cuuuguccuuacaaa

SEQ ID NO: 161882 - RNA, 16 nt, Human herpesvirus 6
cuuuucuaucacucau

SEQ ID NO: 161883 - RNA, 17 nt, Human herpesvirus 6
cuuuuccucaauaugau

SEQ ID NO: 161884 - RNA, 18 nt, Human herpesvirus 6
cuuuuacaauacacagaa

SEQ ID NO: 161885 - RNA, 23 nt, Human herpesvirus 6
cuuuuagauggaaaauugcaaau

SEQ ID NO: 161886 - RNA, 12 nt, Human herpesvirus 6
gaaacaugaaca

SEQ ID NO: 161887 - RNA, 14 nt, Human herpesvirus 6
gaaacauuugcuga

SEQ ID NO: 161888 - RNA, 16 nt, Human herpesvirus 6
gaaacauuugcugaug

SEQ ID NO: 161889 - RNA, 22 nt, Human herpesvirus 6
gaaaccauagcuguccaugaga

SEQ ID NO: 161890 - RNA, 20 nt, Human herpesvirus 6
gaaacaacgacuaccacauc

SEQ ID NO: 161891 - RNA, 20 nt, Human herpesvirus 6
gaaaauguuucauccaaaua

SEQ ID NO: 161892 - RNA, 14 nt, Human herpesvirus 6
gaaaauguuuuuca

SEQ ID NO: 161893 - RNA, 17 nt, Human herpesvirus 6
gaaaauugcagaucuaa

SEQ ID NO: 161894 - RNA, 22 nt, Human herpesvirus 6
gaaaauauuuccaugacuguga

SEQ ID NO: 161895 - RNA, 13 nt, Human herpesvirus 6
gaaagaguguuug

SEQ ID NO: 161896 - RNA, 17 nt, Human herpesvirus 6
gaaagaccguagcaaaa

SEQ ID NO: 161897 - RNA, 14 nt, Human herpesvirus 6
gaaacgacaaagaa

SEQ ID NO: 161898 - RNA, 20 nt, Human herpesvirus 6
gaaaccuauuagguguccuu

SEQ ID NO: 161899 - RNA, 15 nt, Human herpesvirus 6
gaaagaauuacgcag

SEQ ID NO: 161900 - RNA, 16 nt, Human herpesvirus 6
gaaaaaaaaaauauca

SEQ ID NO: 161901 - RNA, 19 nt, Human herpesvirus 6
gaaaaaaaaauaaguacau

SEQ ID NO: 161902 - RNA, 22 nt, Human herpesvirus 6
cuuuuucuguguuuuaucuucc

SEQ ID NO: 161903 - RNA, 12 nt, Human herpesvirus 6
cuuuuuaauucc

SEQ ID NO: 161904 - RNA, 15 nt, Human herpesvirus 6
gaaaacacuaucugu

SEQ ID NO: 161905 - RNA, 13 nt, Human herpesvirus 6
gaaaaaugagacu

SEQ ID NO: 161906 - RNA, 23 nt, Human herpesvirus 6
gaaaaagguggcaucagaaucca

SEQ ID NO: 161907 - RNA, 21 nt, Human herpesvirus 6
gaaaaaguaguugcuaagugu

SEQ ID NO: 161908 - RNA, 19 nt, Human herpesvirus 6
gaaaagcaucucaaaaaac

SEQ ID NO: 161909 - RNA, 17 nt, Human herpesvirus 6
gaaaagcccuuacuuga

SEQ ID NO: 161910 - RNA, 14 nt, Human herpesvirus 6
gaaaagcuauugaa

SEQ ID NO: 161911 - RNA, 21 nt, Human herpesvirus 6
gaaaacgacacagaacacauc

SEQ ID NO: 161912 - RNA, 12 nt, Human herpesvirus 6
gaaaacuauuaa

SEQ ID NO: 161913 - RNA, 22 nt, Human herpesvirus 6
gaacugcuggcugagauucacu

SEQ ID NO: 161914 - RNA, 15 nt, Human herpesvirus 6
gaaauccuauauuac

SEQ ID NO: 161915 - RNA, 22 nt, Human herpesvirus 6
gaaaugcaaucuucugcuucuu

SEQ ID NO: 161916 - RNA, 22 nt, Human herpesvirus 6
gaaaugaugaguaauacaucau

SEQ ID NO: 161917 - RNA, 23 nt, Human herpesvirus 6
gaaaucugaauuuaaugcaaaau

SEQ ID NO: 161918 - RNA, 19 nt, Human herpesvirus 6
gaaaugaaugccgacaucu

SEQ ID NO: 161919 - RNA, 22 nt, Human herpesvirus 6
gaaaguuucguacuggagaaua

SEQ ID NO: 161920 - RNA, 16 nt, Human herpesvirus 6
gaaauaaaaaauauua

SEQ ID NO: 161921 - RNA, 16 nt, Human herpesvirus 6
gaagaucugcgugaac

SEQ ID NO: 161922 - RNA, 16 nt, Human herpesvirus 6
gaagaggauggauccc

SEQ ID NO: 161923 - RNA, 19 nt, Human herpesvirus 6
gaaggcuaucacuuagaca

SEQ ID NO: 161924 - RNA, 23 nt, Human herpesvirus 6
gaaggacuaucugagacagucca

SEQ ID NO: 161925 - RNA, 15 nt, Human herpesvirus 6
gaagacgacauacgu

SEQ ID NO: 161926 - RNA, 14 nt, Human herpesvirus 6
gaagaaccaaagac

SEQ ID NO: 161927 - RNA, 19 nt, Human herpesvirus 6
gaagaacccgaaguuuccu

SEQ ID NO: 161928 - RNA, 18 nt, Human herpesvirus 6
gaacuuuguccuuacaaa

SEQ ID NO: 161929 - RNA, 20 nt, Human herpesvirus 6
gaauuccuggacauggugaa

SEQ ID NO: 161930 - RNA, 15 nt, Human herpesvirus 6
gaauucuucugugac

SEQ ID NO: 161931 - RNA, 21 nt, Human herpesvirus 6
aaagagauaaaaagagaggaa

SEQ ID NO: 161932 - RNA, 19 nt, Human herpesvirus 6
aaagacuuacagagcuuuu

SEQ ID NO: 161933 - RNA, 20 nt, Human herpesvirus 6
aaacuuuuaacuucgacaga

SEQ ID NO: 161934 - RNA, 22 nt, Human herpesvirus 6
aaaccguuuaucgaugugcgac

SEQ ID NO: 161935 - RNA, 17 nt, Human herpesvirus 6
aaaccuaaauacauuca

SEQ ID NO: 161936 - RNA, 23 nt, Human herpesvirus 6
aaagacaugcauuuuguauuuau

SEQ ID NO: 161937 - RNA, 12 nt, Human herpesvirus 6
aaagacauucaa

SEQ ID NO: 161938 - RNA, 21 nt, Human herpesvirus 6
aaagaaucgguaaacuucaga

SEQ ID NO: 161939 - RNA, 15 nt, Human herpesvirus 6
aaagaaucugcagau

SEQ ID NO: 161940 - RNA, 22 nt, Human herpesvirus 6
aaaccauaaaaaaucuugucac

SEQ ID NO: 161941 - RNA, 21 nt, Human herpesvirus 6
aaaccauagguguuugcagau

SEQ ID NO: 161942 - RNA, 22 nt, Human herpesvirus 6
aaaccauagguguuugcagaug

SEQ ID NO: 161943 - RNA, 17 nt, Human herpesvirus 6
gaaugugauuaugccaa

SEQ ID NO: 161944 - RNA, 12 nt, Human herpesvirus 6
gaaugugcugau

SEQ ID NO: 161945 - RNA, 13 nt, Human herpesvirus 6
gaaugugcugaug

SEQ ID NO: 161946 - RNA, 17 nt, Human herpesvirus 6
gaauguuaagcaaaaac

SEQ ID NO: 161947 - RNA, 19 nt, Human herpesvirus 6
gaagguaucaaagaacaaa

SEQ ID NO: 161948 - RNA, 22 nt, Human herpesvirus 6
gaagggauggcagaucuugaaa

SEQ ID NO: 161949 - RNA, 16 nt, Human herpesvirus 6
gaagggcucuauuacu

SEQ ID NO: 161950 - RNA, 17 nt, Human herpesvirus 6
gaaugaacgcacuggac

SEQ ID NO: 161951 - RNA, 17 nt, Human herpesvirus 6
gaaucuuauucaaaaau

SEQ ID NO: 161952 - RNA, 21 nt, Human herpesvirus 6
gaaucuuccuuauaacacaca

SEQ ID NO: 161953 - RNA, 22 nt, Human herpesvirus 6
gaguauauaaaaaacuaaaaca

SEQ ID NO: 161954 - RNA, 15 nt, Human herpesvirus 6
gaguaauacaucauu

SEQ ID NO: 161955 - RNA, 20 nt, Human herpesvirus 6
gaguaauugaacauuguaaa

SEQ ID NO: 161956 - RNA, 16 nt, Human herpesvirus 6
gaguaugaaacuuaca

SEQ ID NO: 161957 - RNA, 13 nt, Human herpesvirus 6
gagucgcuucuag

SEQ ID NO: 161958 - RNA, 22 nt, Human herpesvirus 6
gaggaacuggugagaaauaacu

SEQ ID NO: 161959 - RNA, 24 nt, Human herpesvirus 6
gaggaacuggugagaaauaacuua

SEQ ID NO: 161960 - RNA, 18 nt, Human herpesvirus 6
gaggaagauagcagaaua

SEQ ID NO: 161961 - RNA, 18 nt, Human herpesvirus 6
gagcuuguggaucaucuc

SEQ ID NO: 161962 - RNA, 17 nt, Human herpesvirus 6
gagcuuucaguauuaac

SEQ ID NO: 161963 - RNA, 17 nt, Human herpesvirus 6
gauauuaacgacuucga

SEQ ID NO: 161964 - RNA, 20 nt, Human herpesvirus 6
gauauuauuguugucgugau

SEQ ID NO: 161965 - RNA, 15 nt, Human herpesvirus 6
gauauuccagacaau

SEQ ID NO: 161966 - RNA, 16 nt, Human herpesvirus 6
gaucaacagauggugc

SEQ ID NO: 161967 - RNA, 22 nt, Human herpesvirus 6
gauauaauuccgacuguguuac

SEQ ID NO: 161968 - RNA, 17 nt, Human herpesvirus 6
gauauaguuuuugcuua

SEQ ID NO: 161969 - RNA, 15 nt, Human herpesvirus 6
gauauauacuuucaa

SEQ ID NO: 161970 - RNA, 18 nt, Human herpesvirus 6
gauagcgucuuugcauau

SEQ ID NO: 161971 - RNA, 20 nt, Human herpesvirus 6
gauagcgucuuugcauauua

SEQ ID NO: 161972 - RNA, 13 nt, Human herpesvirus 6
gauagccauacca

SEQ ID NO: 161973 - RNA, 16 nt, Human herpesvirus 6
gaguugacguuccaaa

SEQ ID NO: 161974 - RNA, 15 nt, Human herpesvirus 6
gaguguuaugaucua

SEQ ID NO: 161975 - RNA, 12 nt, Human herpesvirus 6
gaguuuggcaau

SEQ ID NO: 161976 - RNA, 14 nt, Human herpesvirus 6
gauagcagaucgca

SEQ ID NO: 161977 - RNA, 18 nt, Human herpesvirus 6
gagcaaagaaaugaccug

SEQ ID NO: 161978 - RNA, 16 nt, Human herpesvirus 6
gagccaagccauggaa

SEQ ID NO: 161979 - RNA, 20 nt, Human herpesvirus 6
gagauguuaguauacagaau

SEQ ID NO: 161980 - RNA, 17 nt, Human herpesvirus 6
gagauguucuaaaggau

SEQ ID NO: 161981 - RNA, 20 nt, Human herpesvirus 6
gagaugacaucugcaaaaaa

SEQ ID NO: 161982 - RNA, 18 nt, Human herpesvirus 6
aacaacaauaacaacaac

SEQ ID NO: 161983 - RNA, 15 nt, Human herpesvirus 6
aacaaaucuccaaaa

SEQ ID NO: 161984 - RNA, 22 nt, Human herpesvirus 6
gacggccuccggccccagagac

SEQ ID NO: 161985 - RNA, 20 nt, Human herpesvirus 6
gacggcgggcagaucuauca

SEQ ID NO: 161986 - RNA, 22 nt, Human herpesvirus 6
gagaagcuggaaaaauucaauc

SEQ ID NO: 161987 - RNA, 17 nt, Human herpesvirus 6
gagaagagcgaaaugca

SEQ ID NO: 161988 - RNA, 19 nt, Human herpesvirus 6
gagaagagcgaaaugcaau

SEQ ID NO: 161989 - RNA, 20 nt, Human herpesvirus 6
gagaagagcgaaaugcaauc

SEQ ID NO: 161990 - RNA, 12 nt, Human herpesvirus 6
gagaacgggcac

SEQ ID NO: 161991 - RNA, 17 nt, Human herpesvirus 6
gacguaauagccaaaca

SEQ ID NO: 161992 - RNA, 16 nt, Human herpesvirus 6
gagaaccaccagagac

SEQ ID NO: 161993 - RNA, 17 nt, Human herpesvirus 6
gagaaccaccagagaca

SEQ ID NO: 161994 - RNA, 22 nt, Human herpesvirus 6
gacgaaagcaguuuuacaucau

SEQ ID NO: 161995 - RNA, 16 nt, Human herpesvirus 6
gacgccuugauguuuc

SEQ ID NO: 161996 - RNA, 13 nt, Human herpesvirus 6
gacgccacgggca

SEQ ID NO: 161997 - RNA, 18 nt, Human herpesvirus 6
gacggacagggggaucga

SEQ ID NO: 161998 - RNA, 20 nt, Human herpesvirus 6
aacaaacacgugauuccuca

SEQ ID NO: 161999 - RNA, 21 nt, Human herpesvirus 6
aacaaacacgugauuccucaa

SEQ ID NO: 162000 - RNA, 15 nt, Human herpesvirus 6
aacaaaaagcuuuaa

SEQ ID NO: 162001 - RNA, 14 nt, Human herpesvirus 6
aacaaaacuuucau

SEQ ID NO: 162002 - RNA, 21 nt, Human herpesvirus 6
aaauuuuuuucaugaucucac

SEQ ID NO: 162003 - RNA, 16 nt, Human herpesvirus 6
aacaaaaaacaacuuu

SEQ ID NO: 162004 - RNA, 22 nt, Human herpesvirus 6
aaauuuucucuggggaguuuca

SEQ ID NO: 162005 - RNA, 21 nt, Human herpesvirus 6
aaauuauccuggcgaugcaga

SEQ ID NO: 162006 - RNA, 19 nt, Human herpesvirus 6
aaauucgauggguuaguga

SEQ ID NO: 162007 - RNA, 20 nt, Human herpesvirus 6
aaauuaugguuaucaucaca

SEQ ID NO: 162008 - RNA, 20 nt, Human herpesvirus 6
aaauucuuacauuuuguaca

SEQ ID NO: 162009 - RNA, 13 nt, Human herpesvirus 6
gaccuggcggaca

SEQ ID NO: 162010 - RNA, 20 nt, Human herpesvirus 6
aaauugccuuguaaaucaaa

SEQ ID NO: 162011 - RNA, 16 nt, Human herpesvirus 6
aaauugacuacagcug

SEQ ID NO: 162012 - RNA, 14 nt, Human herpesvirus 6
aaauugaugauguu

SEQ ID NO: 162013 - RNA, 14 nt, Human herpesvirus 6
aaauguuucaucca

SEQ ID NO: 162014 - RNA, 19 nt, Human herpesvirus 6
aaaugaaggggaaccucca

SEQ ID NO: 162015 - RNA, 19 nt, Human herpesvirus 6
aaaugaaauuuaauaagaa

SEQ ID NO: 162016 - RNA, 22 nt, Human herpesvirus 6
aaaucuacuguacaaaaucaaa

SEQ ID NO: 162017 - RNA, 21 nt, Human herpesvirus 6
aaauccuccuagggaauuuaa

SEQ ID NO: 162018 - RNA, 21 nt, Human herpesvirus 6
aaaucggacaaugcagaacaa

SEQ ID NO: 162019 - RNA, 21 nt, Human herpesvirus 6
gaauuguaucuuuguuccaga

SEQ ID NO: 162020 - RNA, 14 nt, Human herpesvirus 6
gaauuuauuuucaa

SEQ ID NO: 162021 - RNA, 22 nt, Human herpesvirus 6
gaauuuguaaaaaaacauucua

SEQ ID NO: 162022 - RNA, 14 nt, Human herpesvirus 6
gacaaaaccuaaau

SEQ ID NO: 162023 - RNA, 19 nt, Human herpesvirus 6
gacaacaaaggagugagaa

SEQ ID NO: 162024 - RNA, 17 nt, Human herpesvirus 6
gacaaauaaaagcauuu

SEQ ID NO: 162025 - RNA, 15 nt, Human herpesvirus 6
gacagggugagucac

SEQ ID NO: 162026 - RNA, 17 nt, Human herpesvirus 6
gacagggugagucacau

SEQ ID NO: 162027 - RNA, 14 nt, Human herpesvirus 6
gacagugauuagaa

SEQ ID NO: 162028 - RNA, 20 nt, Human herpesvirus 6
gacagucaacacccauggaa

SEQ ID NO: 162029 - RNA, 20 nt, Human herpesvirus 6
gacauggugaaacuugacac

SEQ ID NO: 162030 - RNA, 19 nt, Human herpesvirus 6
gacaucgcgcgcgacgugc

SEQ ID NO: 162031 - RNA, 14 nt, Human herpesvirus 6
aaaucacaccaaug

SEQ ID NO: 162032 - RNA, 21 nt, Human herpesvirus 6
aaaucaguucuccgggcuugc

SEQ ID NO: 162033 - RNA, 16 nt, Human herpesvirus 6
aaaucaucucgugcaa

SEQ ID NO: 162034 - RNA, 20 nt, Human herpesvirus 6
aaaucacaccaauggucaca

SEQ ID NO: 162035 - RNA, 20 nt, Human herpesvirus 6
aaaucauuaccaguagcaca

SEQ ID NO: 162036 - RNA, 21 nt, Human herpesvirus 6
aaaucauuaccaguagcacaa

SEQ ID NO: 162037 - RNA, 13 nt, Human herpesvirus 6
aaauacuagcuaa

SEQ ID NO: 162038 - RNA, 11 nt, Human herpesvirus 6
aaaucaaagac

SEQ ID NO: 162039 - RNA, 18 nt, Human herpesvirus 6
aaauacauucacauuacc

SEQ ID NO: 162040 - RNA, 17 nt, Human herpesvirus 6
aaauaccaauuccuuaa

SEQ ID NO: 162041 - RNA, 22 nt, Human herpesvirus 6
aaauacggaaaaaguauccuaa

SEQ ID NO: 162042 - RNA, 15 nt, Human herpesvirus 6
aaauacggaccgaga

SEQ ID NO: 162043 - RNA, 16 nt, Human herpesvirus 6
aaauacgagagcugac

SEQ ID NO: 162044 - RNA, 16 nt, Human herpesvirus 6
aaauaaguacauagaa

SEQ ID NO: 162045 - RNA, 15 nt, Human herpesvirus 6
aaauaauuacauuaa

SEQ ID NO: 162046 - RNA, 15 nt, Human herpesvirus 6
gacauuggucuuugc

SEQ ID NO: 162047 - RNA, 14 nt, Human herpesvirus 6
gacauugcuuucuc

SEQ ID NO: 162048 - RNA, 22 nt, Human herpesvirus 6
gggcuuuaaaacuuacuaaugu

SEQ ID NO: 162049 - RNA, 16 nt, Human herpesvirus 6
ggggagagacauccau

SEQ ID NO: 162050 - RNA, 22 nt, Human herpesvirus 6
ggggauuuaguacaguaugucu

SEQ ID NO: 162051 - RNA, 13 nt, Human herpesvirus 6
ggggauguguuca

SEQ ID NO: 162052 - RNA, 18 nt, Human herpesvirus 6
ggccuucgguacagugaa

SEQ ID NO: 162053 - RNA, 16 nt, Human herpesvirus 6
ggccucccauguaugc

SEQ ID NO: 162054 - RNA, 19 nt, Human herpesvirus 6
ggccuggaguacaagacca

SEQ ID NO: 162055 - RNA, 13 nt, Human herpesvirus 6
ggcugccaugaaa

SEQ ID NO: 162056 - RNA, 21 nt, Human herpesvirus 6
ggacaaaguucaguaacauuu

SEQ ID NO: 162057 - RNA, 20 nt, Human herpesvirus 6
ggacaaugcagaacaacagc

SEQ ID NO: 162058 - RNA, 22 nt, Human herpesvirus 6
ggacagugauuagaauguuugg

SEQ ID NO: 162059 - RNA, 15 nt, Human herpesvirus 6
ggacacgacaaaaca

SEQ ID NO: 162060 - RNA, 16 nt, Human herpesvirus 6
ggaccaagcaccuaau

SEQ ID NO: 162061 - RNA, 13 nt, Human herpesvirus 6
ggaccaggacaau

SEQ ID NO: 162062 - RNA, 15 nt, Human herpesvirus 6
ggacauggugaaaga

SEQ ID NO: 162063 - RNA, 14 nt, Human herpesvirus 6
ggacgacacguggg

SEQ ID NO: 162064 - RNA, 14 nt, Human herpesvirus 6
ggacccacaggcgg

SEQ ID NO: 162065 - RNA, 22 nt, Human herpesvirus 6
ggaugaagaaaaaaacugugaa

SEQ ID NO: 162066 - RNA, 22 nt, Human herpesvirus 6
ggaugucggucagacagugagu

SEQ ID NO: 162067 - RNA, 22 nt, Human herpesvirus 6
ggauguuuucgcuugaugcaug

SEQ ID NO: 162068 - RNA, 19 nt, Human herpesvirus 6
ggauuguaucgagucuuua

SEQ ID NO: 162069 - RNA, 16 nt, Human herpesvirus 6
ggauugugauucugca

SEQ ID NO: 162070 - RNA, 21 nt, Human herpesvirus 6
ggauugugauucugcauuuau

SEQ ID NO: 162071 - RNA, 15 nt, Human herpesvirus 6
ggaugcggacucuga

SEQ ID NO: 162072 - RNA, 16 nt, Human herpesvirus 6
ggaugcggacucugac

SEQ ID NO: 162073 - RNA, 18 nt, Human herpesvirus 6
ggcaucagaauccagaaa

SEQ ID NO: 162074 - RNA, 21 nt, Human herpesvirus 6
ggcccagagacgguguuuuca

SEQ ID NO: 162075 - RNA, 22 nt, Human herpesvirus 6
ggccagccacugcggaguuuua

SEQ ID NO: 162076 - RNA, 19 nt, Human herpesvirus 6
ggcagcugcaugguccaca

SEQ ID NO: 162077 - RNA, 22 nt, Human herpesvirus 6
gcgcgagacagcggacagcggg

SEQ ID NO: 162078 - RNA, 23 nt, Human herpesvirus 6
gcuaggacuucguucuugacaga

SEQ ID NO: 162079 - RNA, 13 nt, Human herpesvirus 6
gcugacuauucag

SEQ ID NO: 162080 - RNA, 20 nt, Human herpesvirus 6
gcugagcugcagucucggga

SEQ ID NO: 162081 - RNA, 19 nt, Human herpesvirus 6
gcugugacgaagauggaug

SEQ ID NO: 162082 - RNA, 15 nt, Human herpesvirus 6
gcugaacuguuucca

SEQ ID NO: 162083 - RNA, 21 nt, Human herpesvirus 6
gcucuggcggagaaaguuucu

SEQ ID NO: 162084 - RNA, 16 nt, Human herpesvirus 6
gcucguucucuuucca

SEQ ID NO: 162085 - RNA, 16 nt, Human herpesvirus 6
gcuguuuacgaaugau

SEQ ID NO: 162086 - RNA, 22 nt, Human herpesvirus 6
gcuuggccuucgguacagugaa

SEQ ID NO: 162087 - RNA, 13 nt, Human herpesvirus 6
gcuuagucuguaa

SEQ ID NO: 162088 - RNA, 16 nt, Human herpesvirus 6
gcuuucaguauuaacu

SEQ ID NO: 162089 - RNA, 19 nt, Human herpesvirus 6
gcuuuaucuagccaauuca

SEQ ID NO: 162090 - RNA, 15 nt, Human herpesvirus 6
gcuuucauccaugaa

SEQ ID NO: 162091 - RNA, 22 nt, Human herpesvirus 6
ggaaaacccagcaugaugaucu

SEQ ID NO: 162092 - RNA, 17 nt, Human herpesvirus 6
ggaaaacucgcaccucu

SEQ ID NO: 162093 - RNA, 15 nt, Human herpesvirus 6
ggaaaaaaaaucuau

SEQ ID NO: 162094 - RNA, 23 nt, Human herpesvirus 6
gcuuuuuaaaaaaacacuagccu

SEQ ID NO: 162095 - RNA, 23 nt, Human herpesvirus 6
gcuuuuccucaauaugauauaug

SEQ ID NO: 162096 - RNA, 18 nt, Human herpesvirus 6
ggaaauaaaaaauauuaa

SEQ ID NO: 162097 - RNA, 21 nt, Human herpesvirus 6
ggaaauaaaaaauauuaauua

SEQ ID NO: 162098 - RNA, 14 nt, Human herpesvirus 6
ggaaaucugaauuu

SEQ ID NO: 162099 - RNA, 16 nt, Human herpesvirus 6
ggaaagacaugcauuu

SEQ ID NO: 162100 - RNA, 16 nt, Human herpesvirus 6
ggaacgauaugcugcc

SEQ ID NO: 162101 - RNA, 21 nt, Human herpesvirus 6
ggaacauaaacuuagaucuau

SEQ ID NO: 162102 - RNA, 14 nt, Human herpesvirus 6
ggaacauaauugca

SEQ ID NO: 162103 - RNA, 14 nt, Human herpesvirus 6
ggaagggcucuauu

SEQ ID NO: 162104 - RNA, 11 nt, Human herpesvirus 6
ggaacugcugg

SEQ ID NO: 162105 - RNA, 23 nt, Human herpesvirus 6
ggaagaacacgaagacgaagagg

SEQ ID NO: 162106 - RNA, 22 nt, Human herpesvirus 6
ggaagaacaggcggaagaacac

SEQ ID NO: 162107 - RNA, 12 nt, Human herpesvirus 6
ggaagaagauac

SEQ ID NO: 162108 - RNA, 21 nt, Human herpesvirus 6
gcacaaaacaguugauuauuu

SEQ ID NO: 162109 - RNA, 16 nt, Human herpesvirus 6
gcaauuuccugucaug

SEQ ID NO: 162110 - RNA, 15 nt, Human herpesvirus 6
gcacccuacaaucug

SEQ ID NO: 162111 - RNA, 17 nt, Human herpesvirus 6
gcaccucugaaacacug

SEQ ID NO: 162112 - RNA, 16 nt, Human herpesvirus 6
gcaccuuagcccuaau

SEQ ID NO: 162113 - RNA, 22 nt, Human herpesvirus 6
gaucaucaaaucggacaaugca

SEQ ID NO: 162114 - RNA, 23 nt, Human herpesvirus 6
gaucagauugcggacauggugaa

SEQ ID NO: 162115 - RNA, 16 nt, Human herpesvirus 6
gauccaaauccugacu

SEQ ID NO: 162116 - RNA, 18 nt, Human herpesvirus 6
gcaaucaccaccaacaca

SEQ ID NO: 162117 - RNA, 22 nt, Human herpesvirus 6
gcaaucuucugcuucuucagua

SEQ ID NO: 162118 - RNA, 18 nt, Human herpesvirus 6
gcaagucacgggcagcug

SEQ ID NO: 162119 - RNA, 13 nt, Human herpesvirus 6
gcagaacaucuca

SEQ ID NO: 162120 - RNA, 14 nt, Human herpesvirus 6
gcagcaacaaucca

SEQ ID NO: 162121 - RNA, 19 nt, Human herpesvirus 6
gcacuuugcgcccauaccu

SEQ ID NO: 162122 - RNA, 17 nt, Human herpesvirus 6
gcagaacaacagcaugu

SEQ ID NO: 162123 - RNA, 15 nt, Human herpesvirus 6
gcagaaaauguuuca

SEQ ID NO: 162124 - RNA, 13 nt, Human herpesvirus 6
gcagaaguuuaca

SEQ ID NO: 162125 - RNA, 19 nt, Human herpesvirus 6
gcacuugggcaaucgcaaa

SEQ ID NO: 162126 - RNA, 23 nt, Human herpesvirus 6
gcacgguccacacgccaguccgu

SEQ ID NO: 162127 - RNA, 23 nt, Human herpesvirus 6
gcacggugccaaaggaaaccacc

SEQ ID NO: 162128 - RNA, 20 nt, Human herpesvirus 6
gcaguaaaugaauguguuca

SEQ ID NO: 162129 - RNA, 20 nt, Human herpesvirus 6
gcagguauaagaacuggugu

SEQ ID NO: 162130 - RNA, 18 nt, Human herpesvirus 6
gcaggcauugacuauuaa

SEQ ID NO: 162131 - RNA, 15 nt, Human herpesvirus 6
gcagcuuccacgcga

SEQ ID NO: 162132 - RNA, 16 nt, Human herpesvirus 6
gccggcaccuuagccc

SEQ ID NO: 162133 - RNA, 14 nt, Human herpesvirus 6
gccgcguacacgaa

SEQ ID NO: 162134 - RNA, 14 nt, Human herpesvirus 6
gccugcauaugcag

SEQ ID NO: 162135 - RNA, 15 nt, Human herpesvirus 6
gcgauuuaaacaaca

SEQ ID NO: 162136 - RNA, 12 nt, Human herpesvirus 6
gcgauuuacugg

SEQ ID NO: 162137 - RNA, 12 nt, Human herpesvirus 6
gcgacaggguga

SEQ ID NO: 162138 - RNA, 19 nt, Human herpesvirus 6
gcgaauuuguuaagcaacu

SEQ ID NO: 162139 - RNA, 19 nt, Human herpesvirus 6
gcgacucccggcccagaga

SEQ ID NO: 162140 - RNA, 13 nt, Human herpesvirus 6
gcgaaaugcaauc

SEQ ID NO: 162141 - RNA, 18 nt, Human herpesvirus 6
gccuuuuacuuacaucga

SEQ ID NO: 162142 - RNA, 18 nt, Human herpesvirus 6
gccaaaacuacaaaguga

SEQ ID NO: 162143 - RNA, 23 nt, Human herpesvirus 6
gccaaagaaacagauaguguuuu

SEQ ID NO: 162144 - RNA, 21 nt, Human herpesvirus 6
gccaaaaaaauacaguauaua

SEQ ID NO: 162145 - RNA, 14 nt, Human herpesvirus 6
gcaucagaauccag

SEQ ID NO: 162146 - RNA, 19 nt, Human herpesvirus 6
gcauauuauuaacaaugaa

SEQ ID NO: 162147 - RNA, 16 nt, Human herpesvirus 6
gcauaccuacauccuu

SEQ ID NO: 162148 - RNA, 15 nt, Human herpesvirus 6
gcauagcagcaauag

SEQ ID NO: 162149 - RNA, 21 nt, Human herpesvirus 6
gcagucugcuggaugcugaug

SEQ ID NO: 162150 - RNA, 18 nt, Human herpesvirus 6
gcauacagaaaucaaaga

SEQ ID NO: 162151 - RNA, 22 nt, Human herpesvirus 6
gccaaggaaagacaugcauuuu

SEQ ID NO: 162152 - RNA, 23 nt, Human herpesvirus 6
gccaacgaaaagcaucucaaaaa

SEQ ID NO: 162153 - RNA, 20 nt, Human herpesvirus 6
gccaaaggaaaccaccggcu

SEQ ID NO: 162154 - RNA, 22 nt, Human herpesvirus 6
gccaaaggaaaccaccggcuaa

SEQ ID NO: 162155 - RNA, 21 nt, Human herpesvirus 6
gccacuugcaaugugaucaac

SEQ ID NO: 162156 - RNA, 13 nt, Human herpesvirus 6
gcccgagcgcacu

SEQ ID NO: 162157 - RNA, 18 nt, Human herpesvirus 6
gcccggggacggacaggg

SEQ ID NO: 162158 - RNA, 21 nt, Human herpesvirus 6
gccauuauugauagcauuauu

SEQ ID NO: 162159 - RNA, 18 nt, Human herpesvirus 6
gccagcauucuuaucaaa

SEQ ID NO: 162160 - RNA, 14 nt, Human herpesvirus 6
gccagagacgugac

SEQ ID NO: 162161 - RNA, 20 nt, Human herpesvirus 6
cagugcuuuaaucacaauga

SEQ ID NO: 162162 - RNA, 14 nt, Human herpesvirus 6
cagugauauggaaa

SEQ ID NO: 162163 - RNA, 13 nt, Human herpesvirus 6
cagucugcuaaaa

SEQ ID NO: 162164 - RNA, 18 nt, Human herpesvirus 6
caguuucucgaaaaaaca

SEQ ID NO: 162165 - RNA, 18 nt, Human herpesvirus 6
caguuuaccuauuuacaa

SEQ ID NO: 162166 - RNA, 23 nt, Human herpesvirus 6
caguuuaccuaauaauuacaaua

SEQ ID NO: 162167 - RNA, 21 nt, Human herpesvirus 6
cagugucguuagaauguggau

SEQ ID NO: 162168 - RNA, 16 nt, Human herpesvirus 6
cauacguuugccaaag

SEQ ID NO: 162169 - RNA, 13 nt, Human herpesvirus 6
cauacucaaccca

SEQ ID NO: 162170 - RNA, 22 nt, Human herpesvirus 6
cauaccguuuacuuaaacggaa

SEQ ID NO: 162171 - RNA, 23 nt, Human herpesvirus 6
cauaccguuuacuuaaacggaau

SEQ ID NO: 162172 - RNA, 15 nt, Human herpesvirus 6
cauacacacccagca

SEQ ID NO: 162173 - RNA, 17 nt, Human herpesvirus 6
cauacaaaaugaccuca

SEQ ID NO: 162174 - RNA, 23 nt, Human herpesvirus 6
cauaauucggucaccuacauucg

SEQ ID NO: 162175 - RNA, 16 nt, Human herpesvirus 6
cauaauugcacccuau

SEQ ID NO: 162176 - RNA, 17 nt, Human herpesvirus 6
cauaauugcacccuauc

SEQ ID NO: 162177 - RNA, 18 nt, Human herpesvirus 6
cauaauugcacccuauca

SEQ ID NO: 162178 - RNA, 20 nt, Human herpesvirus 6
cauaauaauggcaugcauua

SEQ ID NO: 162179 - RNA, 15 nt, Human herpesvirus 6
cauaauaucuaucuu

SEQ ID NO: 162180 - RNA, 17 nt, Human herpesvirus 6
cauaacuggaaucauga

SEQ ID NO: 162181 - RNA, 15 nt, Human herpesvirus 6
cauaaguuaauucca

SEQ ID NO: 162182 - RNA, 22 nt, Human herpesvirus 6
cauaaguuaauuccagcuuucu

SEQ ID NO: 162183 - RNA, 23 nt, Human herpesvirus 6
cauaaguuaauuccagcuuucuu

SEQ ID NO: 162184 - RNA, 14 nt, Human herpesvirus 6
cauaaaucaaagac

SEQ ID NO: 162185 - RNA, 13 nt, Human herpesvirus 6
cauaaacagacag

SEQ ID NO: 162186 - RNA, 21 nt, Human herpesvirus 6
caguuuuuaaccggaaaaaug

SEQ ID NO: 162187 - RNA, 14 nt, Human herpesvirus 6
cagguugccaauaa

SEQ ID NO: 162188 - RNA, 17 nt, Human herpesvirus 6
caguaauuuguguaauu

SEQ ID NO: 162189 - RNA, 16 nt, Human herpesvirus 6
cagucacacacagggu

SEQ ID NO: 162190 - RNA, 20 nt, Human herpesvirus 6
caguauugaagaaaauugca

SEQ ID NO: 162191 - RNA, 17 nt, Human herpesvirus 6
cagucaacgcaauucca

SEQ ID NO: 162192 - RNA, 21 nt, Human herpesvirus 6
caguaugucuccaaacagaga

SEQ ID NO: 162193 - RNA, 19 nt, Human herpesvirus 6
caguagauuucaagauaua

SEQ ID NO: 162194 - RNA, 15 nt, Human herpesvirus 6
cagggugagucacau

SEQ ID NO: 162195 - RNA, 23 nt, Human herpesvirus 6
cagggaacuugauguugaucuga

SEQ ID NO: 162196 - RNA, 16 nt, Human herpesvirus 6
cagaaugcuauucguu

SEQ ID NO: 162197 - RNA, 14 nt, Human herpesvirus 6
cagacgaaucacau

SEQ ID NO: 162198 - RNA, 14 nt, Human herpesvirus 6
cagacauccagaaa

SEQ ID NO: 162199 - RNA, 20 nt, Human herpesvirus 6
cagacauccagaaaagcaaa

SEQ ID NO: 162200 - RNA, 12 nt, Human herpesvirus 6
cagacagugagu

SEQ ID NO: 162201 - RNA, 16 nt, Human herpesvirus 6
cagacagugagugagu

SEQ ID NO: 162202 - RNA, 20 nt, Human herpesvirus 6
cagacagugagugaguacaa

SEQ ID NO: 162203 - RNA, 21 nt, Human herpesvirus 6
caggcauuaaacugaggcaaa

SEQ ID NO: 162204 - RNA, 18 nt, Human herpesvirus 6
cauuaccacacgcuuaca

SEQ ID NO: 162205 - RNA, 23 nt, Human herpesvirus 6
cauuugccgggaugagcuuuaau

SEQ ID NO: 162206 - RNA, 19 nt, Human herpesvirus 6
ccaaacagagaaggguaug

SEQ ID NO: 162207 - RNA, 17 nt, Human herpesvirus 6
cauuucaaauacaccuc

SEQ ID NO: 162208 - RNA, 21 nt, Human herpesvirus 6
cauuuccggagauuaaaacau

SEQ ID NO: 162209 - RNA, 22 nt, Human herpesvirus 6
cauuucauugaauaacgguguu

SEQ ID NO: 162210 - RNA, 15 nt, Human herpesvirus 6
cauuuccaugcauau

SEQ ID NO: 162211 - RNA, 16 nt, Human herpesvirus 6
cauuuccaugcauauc

SEQ ID NO: 162212 - RNA, 20 nt, Human herpesvirus 6
cauuucuugguuguguauau

SEQ ID NO: 162213 - RNA, 15 nt, Human herpesvirus 6
ccaaauacacuuuca

SEQ ID NO: 162214 - RNA, 16 nt, Human herpesvirus 6
ccaaauacacuuucau

SEQ ID NO: 162215 - RNA, 14 nt, Human herpesvirus 6
ccaaagacauucaa

SEQ ID NO: 162216 - RNA, 21 nt, Human herpesvirus 6
ccaaagacauucaacauucca

SEQ ID NO: 162217 - RNA, 22 nt, Human herpesvirus 6
ccaaaggcacggauuuaaugcg

SEQ ID NO: 162218 - RNA, 21 nt, Human herpesvirus 6
ccaaaguauuggugcaucagu

SEQ ID NO: 162219 - RNA, 13 nt, Human herpesvirus 6
ccaauaaaauauc

SEQ ID NO: 162220 - RNA, 19 nt, Human herpesvirus 6
ccaauuaacacauuuuaac

SEQ ID NO: 162221 - RNA, 14 nt, Human herpesvirus 6
ccaaugacuacuaa

SEQ ID NO: 162222 - RNA, 14 nt, Human herpesvirus 6
cauagaaauuacaa

SEQ ID NO: 162223 - RNA, 14 nt, Human herpesvirus 6
cauagacaaaccag

SEQ ID NO: 162224 - RNA, 13 nt, Human herpesvirus 6
cauagacaaaccg

SEQ ID NO: 162225 - RNA, 13 nt, Human herpesvirus 6
cauagcagcaaua

SEQ ID NO: 162226 - RNA, 13 nt, Human herpesvirus 6
cauauagucaaug

SEQ ID NO: 162227 - RNA, 17 nt, Human herpesvirus 6
cauauagucaauguugu

SEQ ID NO: 162228 - RNA, 12 nt, Human herpesvirus 6
cauauacauuug

SEQ ID NO: 162229 - RNA, 15 nt, Human herpesvirus 6
caucgucuccuacau

SEQ ID NO: 162230 - RNA, 15 nt, Human herpesvirus 6
caucguuuguugaau

SEQ ID NO: 162231 - RNA, 17 nt, Human herpesvirus 6
caucgucauaaccucau

SEQ ID NO: 162232 - RNA, 21 nt, Human herpesvirus 6
cauaugaggaugaaguuucac

SEQ ID NO: 162233 - RNA, 12 nt, Human herpesvirus 6
caucuccaauaa

SEQ ID NO: 162234 - RNA, 15 nt, Human herpesvirus 6
caucucgugcaaaag

SEQ ID NO: 162235 - RNA, 17 nt, Human herpesvirus 6
caucuauuauaagcaaa

SEQ ID NO: 162236 - RNA, 22 nt, Human herpesvirus 6
caucucaaaaaacauauaaaga

SEQ ID NO: 162237 - RNA, 21 nt, Human herpesvirus 6
cauguuuguugugaucuuuac

SEQ ID NO: 162238 - RNA, 22 nt, Human herpesvirus 6
cauguuuauugucaaauagcca

SEQ ID NO: 162239 - RNA, 20 nt, Human herpesvirus 6
cauuaaaauagccagggcau

SEQ ID NO: 162240 - RNA, 22 nt, Human herpesvirus 6
cauuaacccugggugaguuuua

SEQ ID NO: 162241 - RNA, 23 nt, Human herpesvirus 6
cauguggugauacgugaauuuca

SEQ ID NO: 162242 - RNA, 23 nt, Human herpesvirus 6
cauguguagcaucuuaccuucaa

SEQ ID NO: 162243 - RNA, 15 nt, Human herpesvirus 6
caugcguuguguuac

SEQ ID NO: 162244 - RNA, 17 nt, Human herpesvirus 6
caugcuaauaaaauaua

SEQ ID NO: 162245 - RNA, 16 nt, Human herpesvirus 6
ccauuuugaaaaaaca

SEQ ID NO: 162246 - RNA, 20 nt, Human herpesvirus 6
ccauuagguugcuagacuau

SEQ ID NO: 162247 - RNA, 13 nt, Human herpesvirus 6
ccauguguauauu

SEQ ID NO: 162248 - RNA, 14 nt, Human herpesvirus 6
ccaucccuaucucu

SEQ ID NO: 162249 - RNA, 14 nt, Human herpesvirus 6
ccaguagcacaaac

SEQ ID NO: 162250 - RNA, 14 nt, Human herpesvirus 6
ccagacaauaauca

SEQ ID NO: 162251 - RNA, 14 nt, Human herpesvirus 6
ccaggauagaaaaa

SEQ ID NO: 162252 - RNA, 19 nt, Human herpesvirus 6
ccaggucuuauauuucaga

SEQ ID NO: 162253 - RNA, 21 nt, Human herpesvirus 6
ccacaauccgguauccgugaa

SEQ ID NO: 162254 - RNA, 14 nt, Human herpesvirus 6
cccagcuguguuua

SEQ ID NO: 162255 - RNA, 17 nt, Human herpesvirus 6
cccagcgggcuccgucg

SEQ ID NO: 162256 - RNA, 14 nt, Human herpesvirus 6
cccauauuguguaa

SEQ ID NO: 162257 - RNA, 23 nt, Human herpesvirus 6
cccaucgucuccuccaacaaaga

SEQ ID NO: 162258 - RNA, 15 nt, Human herpesvirus 6
cccaugucuugccuc

SEQ ID NO: 162259 - RNA, 17 nt, Human herpesvirus 6
cccauuccuagaggugc

SEQ ID NO: 162260 - RNA, 23 nt, Human herpesvirus 6
cccauuuccggaguugcagugug

SEQ ID NO: 162261 - RNA, 23 nt, Human herpesvirus 6
ccccauuccuagaggugccgaug

SEQ ID NO: 162262 - RNA, 14 nt, Human herpesvirus 6
cccgguaaauuacu

SEQ ID NO: 162263 - RNA, 23 nt, Human herpesvirus 6
cccguaauggaaacgacaaagaa

SEQ ID NO: 162264 - RNA, 20 nt, Human herpesvirus 6
ccccugggaaaagggugaca

SEQ ID NO: 162265 - RNA, 20 nt, Human herpesvirus 6
cccgauauaucgugauccaa

SEQ ID NO: 162266 - RNA, 21 nt, Human herpesvirus 6
cccgacaauguaaaaguugug

SEQ ID NO: 162267 - RNA, 13 nt, Human herpesvirus 6
cccgaaauaacac

SEQ ID NO: 162268 - RNA, 14 nt, Human herpesvirus 6
ccccugucugugau

SEQ ID NO: 162269 - RNA, 14 nt, Human herpesvirus 6
ccggaguugcagug

SEQ ID NO: 162270 - RNA, 17 nt, Human herpesvirus 6
ccggaucguaaggcagu

SEQ ID NO: 162271 - RNA, 14 nt, Human herpesvirus 6
cccucauuuucaaa

SEQ ID NO: 162272 - RNA, 16 nt, Human herpesvirus 6
ccggcgugugcgauuu

SEQ ID NO: 162273 - RNA, 18 nt, Human herpesvirus 6
ccguuuaaacuaugcaaa

SEQ ID NO: 162274 - RNA, 23 nt, Human herpesvirus 6
ccguugagugccucagaggugag

SEQ ID NO: 162275 - RNA, 17 nt, Human herpesvirus 6
ccguuuuucucugcaaa

SEQ ID NO: 162276 - RNA, 19 nt, Human herpesvirus 6
ccguuuuucucugcaaaac

SEQ ID NO: 162277 - RNA, 14 nt, Human herpesvirus 6
ccuaaaaaagugua

SEQ ID NO: 162278 - RNA, 14 nt, Human herpesvirus 6
ccuaaauacauuca

SEQ ID NO: 162279 - RNA, 15 nt, Human herpesvirus 6
ccuaaauacauucac

SEQ ID NO: 162280 - RNA, 16 nt, Human herpesvirus 6
ccuaagugaaauucaa

SEQ ID NO: 162281 - RNA, 12 nt, Human herpesvirus 6
ccuagcauuucc

SEQ ID NO: 162282 - RNA, 15 nt, Human herpesvirus 6
ccuacuauccgcccu

SEQ ID NO: 162283 - RNA, 13 nt, Human herpesvirus 6
ccugcauaugcag

SEQ ID NO: 162284 - RNA, 22 nt, Human herpesvirus 6
ccugcagugauauggaaacacu

SEQ ID NO: 162285 - RNA, 16 nt, Human herpesvirus 6
ccuccggccccagaga

SEQ ID NO: 162286 - RNA, 22 nt, Human herpesvirus 6
ccucauggagaaucggauccaa

SEQ ID NO: 162287 - RNA, 22 nt, Human herpesvirus 6
ccuccaguuuggauucaggcuu

SEQ ID NO: 162288 - RNA, 21 nt, Human herpesvirus 6
ccuccccgagcacgguccaca

SEQ ID NO: 162289 - RNA, 16 nt, Human herpesvirus 6
aaaauugcagaucuaa

SEQ ID NO: 162290 - RNA, 19 nt, Human herpesvirus 6
aaaauugggaaucaugugu

SEQ ID NO: 162291 - RNA, 22 nt, Human herpesvirus 6
aaaauugggcgaagaccuauau

SEQ ID NO: 162292 - RNA, 19 nt, Human herpesvirus 6
ccuguaaacuggucugcuu

SEQ ID NO: 162293 - RNA, 16 nt, Human herpesvirus 6
ccuguccccucggucc

SEQ ID NO: 162294 - RNA, 13 nt, Human herpesvirus 6
ccugucguaucuu

SEQ ID NO: 162295 - RNA, 12 nt, Human herpesvirus 6
aaacaagacaga

SEQ ID NO: 162296 - RNA, 10 nt, Human herpesvirus 6
aaacaaucag

SEQ ID NO: 162297 - RNA, 15 nt, Human herpesvirus 6
aaacaagucaucuca

SEQ ID NO: 162298 - RNA, 21 nt, Human herpesvirus 6
aaacaccagcauaacuggaau

SEQ ID NO: 162299 - RNA, 17 nt, Human herpesvirus 6
aaacacaccaccacaac

SEQ ID NO: 162300 - RNA, 13 nt, Human herpesvirus 6
aaacacaaaccau

SEQ ID NO: 162301 - RNA, 17 nt, Human herpesvirus 6
aaaauuuuuuacaucac

SEQ ID NO: 162302 - RNA, 14 nt, Human herpesvirus 6
aaacaaaacauauc

SEQ ID NO: 162303 - RNA, 17 nt, Human herpesvirus 6
aaacaacgaaacaguuc

SEQ ID NO: 162304 - RNA, 15 nt, Human herpesvirus 6
aaacaacgacuacca

SEQ ID NO: 162305 - RNA, 19 nt, Human herpesvirus 6
aaacaacgacuaccacauc

SEQ ID NO: 162306 - RNA, 16 nt, Human herpesvirus 6
aaacaacgacuaucaa

SEQ ID NO: 162307 - RNA, 17 nt, Human herpesvirus 6
aaaauuuugaugccaaa

SEQ ID NO: 162308 - RNA, 19 nt, Human herpesvirus 6
aaaauuuuagccgaugaua

SEQ ID NO: 162309 - RNA, 18 nt, Human herpesvirus 6
cgccaacgaaaagcaucu

SEQ ID NO: 162310 - RNA, 22 nt, Human herpesvirus 6
cgcauaggugggucagugcuua

SEQ ID NO: 162311 - RNA, 19 nt, Human herpesvirus 6
cgccauauuaaaacccggc

SEQ ID NO: 162312 - RNA, 20 nt, Human herpesvirus 6
ccuguuguguuuacauauac

SEQ ID NO: 162313 - RNA, 18 nt, Human herpesvirus 6
ccuguuaucuuacggugu

SEQ ID NO: 162314 - RNA, 20 nt, Human herpesvirus 6
ccugugugccaggaaagugu

SEQ ID NO: 162315 - RNA, 21 nt, Human herpesvirus 6
ccuuaaaaaaacacaguauuu

SEQ ID NO: 162316 - RNA, 20 nt, Human herpesvirus 6
cgcaagauucuacgaugugu

SEQ ID NO: 162317 - RNA, 16 nt, Human herpesvirus 6
ccuuaauauauuugca

SEQ ID NO: 162318 - RNA, 21 nt, Human herpesvirus 6
ccuuaauguaugcaucaucaa

SEQ ID NO: 162319 - RNA, 23 nt, Human herpesvirus 6
cgcaccuccuuuguauguucacu

SEQ ID NO: 162320 - RNA, 22 nt, Human herpesvirus 6
cgcacgacauccguuaguaaau

SEQ ID NO: 162321 - RNA, 15 nt, Human herpesvirus 6
cgcaggaacaaaacu

SEQ ID NO: 162322 - RNA, 18 nt, Human herpesvirus 6
cgcggagcacgcacgaca

SEQ ID NO: 162323 - RNA, 13 nt, Human herpesvirus 6
cgcggaguggagu

SEQ ID NO: 162324 - RNA, 18 nt, Human herpesvirus 6
cgcggaguggaguccagu

SEQ ID NO: 162325 - RNA, 20 nt, Human herpesvirus 6
cgcuggagcagcuuccacgc

SEQ ID NO: 162326 - RNA, 19 nt, Human herpesvirus 6
cgcuuaaagcguuugcaaa

SEQ ID NO: 162327 - RNA, 13 nt, Human herpesvirus 6
cgcuccauaaccg

SEQ ID NO: 162328 - RNA, 15 nt, Human herpesvirus 6
cgcugcauagacuga

SEQ ID NO: 162329 - RNA, 11 nt, Human herpesvirus 6
aaaccaaagca

SEQ ID NO: 162330 - RNA, 18 nt, Human herpesvirus 6
aaaccaaagcauacucaa

SEQ ID NO: 162331 - RNA, 18 nt, Human herpesvirus 6
aaaccaccccaaccgaaa

SEQ ID NO: 162332 - RNA, 17 nt, Human herpesvirus 6
cgcgcaaaccauaaaaa

SEQ ID NO: 162333 - RNA, 22 nt, Human herpesvirus 6
aaacaucguaauggcauucacc

SEQ ID NO: 162334 - RNA, 14 nt, Human herpesvirus 6
aaacaguaaauuca

SEQ ID NO: 162335 - RNA, 20 nt, Human herpesvirus 6
aaacaguucguagaacggaa

SEQ ID NO: 162336 - RNA, 21 nt, Human herpesvirus 6
aaacaguuuaccuauuuacaa

SEQ ID NO: 162337 - RNA, 14 nt, Human herpesvirus 6
aaacaugaacauug

SEQ ID NO: 162338 - RNA, 16 nt, Human herpesvirus 6
aaacaugaacauugaa

SEQ ID NO: 162339 - RNA, 18 nt, Human herpesvirus 6
aaacaugcguuguguuac

SEQ ID NO: 162340 - RNA, 13 nt, Human herpesvirus 6
cgcgacaggguga

SEQ ID NO: 162341 - RNA, 12 nt, Human herpesvirus 6
cgccuguuccac

SEQ ID NO: 162342 - RNA, 14 nt, Human herpesvirus 6
cgccuuguguaucu

SEQ ID NO: 162343 - RNA, 15 nt, Human herpesvirus 6
aaacagacagaggaa

SEQ ID NO: 162344 - RNA, 14 nt, Human herpesvirus 6
aaacaggaacaguc

SEQ ID NO: 162345 - RNA, 17 nt, Human herpesvirus 6
aaacacgaaauugcuug

SEQ ID NO: 162346 - RNA, 15 nt, Human herpesvirus 6
aaacaccucacaauc

SEQ ID NO: 162347 - RNA, 21 nt, Human herpesvirus 6
aaacaccucacaaucuaauac

SEQ ID NO: 162348 - RNA, 22 nt, Human herpesvirus 6
aaacaccucacaaucuaauaca

SEQ ID NO: 162349 - RNA, 14 nt, Human herpesvirus 6
cgcgagacaaauca

SEQ ID NO: 162350 - RNA, 16 nt, Human herpesvirus 6
aaacacugaguucugu

SEQ ID NO: 162351 - RNA, 19 nt, Human herpesvirus 6
aaacacugugaauccagac

SEQ ID NO: 162352 - RNA, 11 nt, Human herpesvirus 6
cggagaacucg

SEQ ID NO: 162353 - RNA, 13 nt, Human herpesvirus 6
cggaaucuaacuc

SEQ ID NO: 162354 - RNA, 13 nt, Human herpesvirus 6
cggaccaauccau

SEQ ID NO: 162355 - RNA, 13 nt, Human herpesvirus 6
cggacaaugcaga

SEQ ID NO: 162356 - RNA, 17 nt, Human herpesvirus 6
cggacacgcgcagugga

SEQ ID NO: 162357 - RNA, 17 nt, Human herpesvirus 6
cggaaaacgaguaugaa

SEQ ID NO: 162358 - RNA, 13 nt, Human herpesvirus 6
cggaaaagaugag

SEQ ID NO: 162359 - RNA, 11 nt, Human herpesvirus 6
cggaacauaau

SEQ ID NO: 162360 - RNA, 16 nt, Human herpesvirus 6
cggucagacagugagu

SEQ ID NO: 162361 - RNA, 16 nt, Human herpesvirus 6
cgguaacguggauaaa

SEQ ID NO: 162362 - RNA, 16 nt, Human herpesvirus 6
cggucuugcuaagggu

SEQ ID NO: 162363 - RNA, 21 nt, Human herpesvirus 6
cgguccguuuuucucugcaaa

SEQ ID NO: 162364 - RNA, 18 nt, Human herpesvirus 6
cgguccaaggauuaugau

SEQ ID NO: 162365 - RNA, 13 nt, Human herpesvirus 6
cgguauccgugaa

SEQ ID NO: 162366 - RNA, 22 nt, Human herpesvirus 6
cggugauagcgucuuugcauau

SEQ ID NO: 162367 - RNA, 22 nt, Human herpesvirus 6
cguagaacggaaaaaaaaucua

SEQ ID NO: 162368 - RNA, 18 nt, Human herpesvirus 6
cguauaucuacugcaguc

SEQ ID NO: 162369 - RNA, 14 nt, Human herpesvirus 6
cguauauuguguac

SEQ ID NO: 162370 - RNA, 16 nt, Human herpesvirus 6
cguaucacacuuagca

SEQ ID NO: 162371 - RNA, 17 nt, Human herpesvirus 6
cgucaugcaaaacagac

SEQ ID NO: 162372 - RNA, 19 nt, Human herpesvirus 6
cgucgagaaccaccagaga

SEQ ID NO: 162373 - RNA, 16 nt, Human herpesvirus 6
cuacacaccgucuuca

SEQ ID NO: 162374 - RNA, 22 nt, Human herpesvirus 6
cuacauuuauaauuaaaauaga

SEQ ID NO: 162375 - RNA, 17 nt, Human herpesvirus 6
cuaagcaggaacccaga

SEQ ID NO: 162376 - RNA, 16 nt, Human herpesvirus 6
cuaagauugugcaguu

SEQ ID NO: 162377 - RNA, 15 nt, Human herpesvirus 6
cuaagaaauuuugca

SEQ ID NO: 162378 - RNA, 14 nt, Human herpesvirus 6
cuaacgcaacucua

SEQ ID NO: 162379 - RNA, 21 nt, Human herpesvirus 6
cuaauaaacugugucuguuca

SEQ ID NO: 162380 - RNA, 12 nt, Human herpesvirus 6
cuaaacacagau

SEQ ID NO: 162381 - RNA, 12 nt, Human herpesvirus 6
cuaaaaagaguc

SEQ ID NO: 162382 - RNA, 14 nt, Human herpesvirus 6
cuaaaccaugucuu

SEQ ID NO: 162383 - RNA, 12 nt, Human herpesvirus 6
cguuugcaaaac

SEQ ID NO: 162384 - RNA, 17 nt, Human herpesvirus 6
cuaaaacaucagaugaa

SEQ ID NO: 162385 - RNA, 19 nt, Human herpesvirus 6
cguuuuuuaacgaaaacca

SEQ ID NO: 162386 - RNA, 15 nt, Human herpesvirus 6
cguuuuguguuaaaa

SEQ ID NO: 162387 - RNA, 21 nt, Human herpesvirus 6
cguuugcuguuuucaccauca

SEQ ID NO: 162388 - RNA, 16 nt, Human herpesvirus 6
cguguaucggcagugu

SEQ ID NO: 162389 - RNA, 17 nt, Human herpesvirus 6
cguggccgucuguugua

SEQ ID NO: 162390 - RNA, 16 nt, Human herpesvirus 6
cgugcuugucucacaa

SEQ ID NO: 162391 - RNA, 13 nt, Human herpesvirus 6
cguggacaaugau

SEQ ID NO: 162392 - RNA, 17 nt, Human herpesvirus 6
cguggaauuuguggaac

SEQ ID NO: 162393 - RNA, 23 nt, Human herpesvirus 6
cucuauggugaguaccuguacaa

SEQ ID NO: 162394 - RNA, 17 nt, Human herpesvirus 6
cucuaaaacaagacaga

SEQ ID NO: 162395 - RNA, 21 nt, Human herpesvirus 6
cucguuguuucauaaaucaaa

SEQ ID NO: 162396 - RNA, 20 nt, Human herpesvirus 6
cucucucggcugacaacaaa

SEQ ID NO: 162397 - RNA, 22 nt, Human herpesvirus 6
cucuccguggggcacacaugua

SEQ ID NO: 162398 - RNA, 13 nt, Human herpesvirus 6
cucuccacucuac

SEQ ID NO: 162399 - RNA, 17 nt, Human herpesvirus 6
cucucgauuucacuuaa

SEQ ID NO: 162400 - RNA, 19 nt, Human herpesvirus 6
cucggggugaaaucuaucc

SEQ ID NO: 162401 - RNA, 22 nt, Human herpesvirus 6
cucggauauauacuuacuugag

SEQ ID NO: 162402 - RNA, 13 nt, Human herpesvirus 6
cucgcucacaaua

SEQ ID NO: 162403 - RNA, 19 nt, Human herpesvirus 6
cucgcgguauaaugcauga

SEQ ID NO: 162404 - RNA, 15 nt, Human herpesvirus 6
cucgcggaguggagu

SEQ ID NO: 162405 - RNA, 12 nt, Human herpesvirus 6
cucgcaaacagc

SEQ ID NO: 162406 - RNA, 18 nt, Human herpesvirus 6
cucgagcuuucaguauua

SEQ ID NO: 162407 - RNA, 23 nt, Human herpesvirus 6
cucgaaaaaacaacgacuaucaa

SEQ ID NO: 162408 - RNA, 18 nt, Human herpesvirus 6
cuccccauucaacauccu

SEQ ID NO: 162409 - RNA, 16 nt, Human herpesvirus 6
cuccccgggugcuccg

SEQ ID NO: 162410 - RNA, 22 nt, Human herpesvirus 6
cucaacuaaaccaugucuugca

SEQ ID NO: 162411 - RNA, 21 nt, Human herpesvirus 6
cuauugacauaggaauucuua

SEQ ID NO: 162412 - RNA, 20 nt, Human herpesvirus 6
cuauuacuauauauuggaau

SEQ ID NO: 162413 - RNA, 15 nt, Human herpesvirus 6
cuaugugcauuccga

SEQ ID NO: 162414 - RNA, 14 nt, Human herpesvirus 6
cuacaucaacuaca

SEQ ID NO: 162415 - RNA, 18 nt, Human herpesvirus 6
cuacgccaaaacuacaaa

SEQ ID NO: 162416 - RNA, 13 nt, Human herpesvirus 6
cuaccuucacuuu

SEQ ID NO: 162417 - RNA, 20 nt, Human herpesvirus 6
cuccauaccguuuacuuaaa

SEQ ID NO: 162418 - RNA, 13 nt, Human herpesvirus 6
cucaguagauuac

SEQ ID NO: 162419 - RNA, 14 nt, Human herpesvirus 6
cucaguagauuacc

SEQ ID NO: 162420 - RNA, 18 nt, Human herpesvirus 6
cucaguagauuaccuauc

SEQ ID NO: 162421 - RNA, 17 nt, Human herpesvirus 6
cucagggucaaaaaacu

SEQ ID NO: 162422 - RNA, 17 nt, Human herpesvirus 6
cucaauuaauacaaaau

SEQ ID NO: 162423 - RNA, 23 nt, Human herpesvirus 6
cucacaucaugauuaucauagac

SEQ ID NO: 162424 - RNA, 14 nt, Human herpesvirus 6
cucacaauauuuca

SEQ ID NO: 162425 - RNA, 19 nt, Human herpesvirus 6
cucacacaaccauccagau

SEQ ID NO: 162426 - RNA, 17 nt, Human herpesvirus 6
cuguguguuauaaggaa

SEQ ID NO: 162427 - RNA, 22 nt, Human herpesvirus 6
cuguguguuauaaggaagauuc

SEQ ID NO: 162428 - RNA, 18 nt, Human herpesvirus 6
cuguucaacgucuucaaa

SEQ ID NO: 162429 - RNA, 13 nt, Human herpesvirus 6
cugugucuguuca

SEQ ID NO: 162430 - RNA, 15 nt, Human herpesvirus 6
cuguugaauuccaga

SEQ ID NO: 162431 - RNA, 17 nt, Human herpesvirus 6
cuguugaauuccagagg

SEQ ID NO: 162432 - RNA, 16 nt, Human herpesvirus 6
cuguuguuuuugggua

SEQ ID NO: 162433 - RNA, 22 nt, Human herpesvirus 6
cuguuguguuuacauauacauu

SEQ ID NO: 162434 - RNA, 16 nt, Human herpesvirus 6
cuguuuauugccaaua

SEQ ID NO: 162435 - RNA, 23 nt, Human herpesvirus 6
cuguuuuagaaacauuugcugau

SEQ ID NO: 162436 - RNA, 16 nt, Human herpesvirus 6
cuguuuuuuucuuaag

SEQ ID NO: 162437 - RNA, 14 nt, Human herpesvirus 6
cuuaaaaaaacaca

SEQ ID NO: 162438 - RNA, 15 nt, Human herpesvirus 6
cuuaaaaaaacacag

SEQ ID NO: 162439 - RNA, 15 nt, Human herpesvirus 6
cuuaaaacaaucaaa

SEQ ID NO: 162440 - RNA, 22 nt, Human herpesvirus 6
cuguuuuggugaacaccaauaa

SEQ ID NO: 162441 - RNA, 13 nt, Human herpesvirus 6
cuuaaacauguau

SEQ ID NO: 162442 - RNA, 17 nt, Human herpesvirus 6
cugugcaaaaacggguu

SEQ ID NO: 162443 - RNA, 12 nt, Human herpesvirus 6
cugugauaugca

SEQ ID NO: 162444 - RNA, 14 nt, Human herpesvirus 6
cugucuugauaacg

SEQ ID NO: 162445 - RNA, 19 nt, Human herpesvirus 6
cugucucggauauauacuu

SEQ ID NO: 162446 - RNA, 21 nt, Human herpesvirus 6
cuggaugcuuuuagauggaaa

SEQ ID NO: 162447 - RNA, 17 nt, Human herpesvirus 6
cuggcacggugccaaag

SEQ ID NO: 162448 - RNA, 19 nt, Human herpesvirus 6
cuggcacggugccaaagga

SEQ ID NO: 162449 - RNA, 15 nt, Human herpesvirus 6
cucuuaacuacuucu

SEQ ID NO: 162450 - RNA, 22 nt, Human herpesvirus 6
cugauuuuguuuucuacguaga

SEQ ID NO: 162451 - RNA, 21 nt, Human herpesvirus 6
cugauuaguuuucacaaagaa

SEQ ID NO: 162452 - RNA, 22 nt, Human herpesvirus 6
cugcaacucuccaaguuagaaa

SEQ ID NO: 162453 - RNA, 19 nt, Human herpesvirus 6
cuggaucaucaagcaucuc

SEQ ID NO: 162454 - RNA, 13 nt, Human herpesvirus 6
cuggaguacaaga

SEQ ID NO: 162455 - RNA, 24 nt, Human herpesvirus 6
cugcuaaaaaucaucucgugcaaa

SEQ ID NO: 162456 - RNA, 20 nt, Human herpesvirus 6
cugcguccgaguuagcagaa

SEQ ID NO: 162457 - RNA, 20 nt, Human herpesvirus 6
cugcuagauaauuaugcauu

SEQ ID NO: 162458 - RNA, 21 nt, Human herpesvirus 6
cugcuagauaauuaugcauuu

SEQ ID NO: 162459 - RNA, 13 nt, Human herpesvirus 6
ucuggaucucagu

SEQ ID NO: 162460 - RNA, 20 nt, Human herpesvirus 6
ucuggaugaagaggauucac

SEQ ID NO: 162461 - RNA, 22 nt, Human herpesvirus 6
ucuggcacaggcauagcagcaa

SEQ ID NO: 162462 - RNA, 22 nt, Human herpesvirus 6
ucuuauuaauuuccugaucaca

SEQ ID NO: 162463 - RNA, 22 nt, Human herpesvirus 6
ucuuauucaaaaauguugcaug

SEQ ID NO: 162464 - RNA, 17 nt, Human herpesvirus 6
ucuuugcgucuucuaua

SEQ ID NO: 162465 - RNA, 22 nt, Human herpesvirus 6
ucuuacacgauguguagcaaaa

SEQ ID NO: 162466 - RNA, 16 nt, Human herpesvirus 6
ucuuacaacaggcuug

SEQ ID NO: 162467 - RNA, 17 nt, Human herpesvirus 6
ucuuaaggugcuuuuaa

SEQ ID NO: 162468 - RNA, 12 nt, Human herpesvirus 6
ucuccucaugga

SEQ ID NO: 162469 - RNA, 12 nt, Human herpesvirus 6
ucuccuguaaaa

SEQ ID NO: 162470 - RNA, 17 nt, Human herpesvirus 6
ucuccugcgcgucuaua

SEQ ID NO: 162471 - RNA, 21 nt, Human herpesvirus 6
ucucccccuacgcuaacgaac

SEQ ID NO: 162472 - RNA, 22 nt, Human herpesvirus 6
ucucccccuacgcuaacgaaca

SEQ ID NO: 162473 - RNA, 13 nt, Human herpesvirus 6
ucucccuuaaaga

SEQ ID NO: 162474 - RNA, 13 nt, Human herpesvirus 6
ucuccggguuuua

SEQ ID NO: 162475 - RNA, 18 nt, Human herpesvirus 6
ucuauccaugaaacucuu

SEQ ID NO: 162476 - RNA, 15 nt, Human herpesvirus 6
ucuccaaacagagaa

SEQ ID NO: 162477 - RNA, 10 nt, Human herpesvirus 6
ucuccauccu

SEQ ID NO: 162478 - RNA, 17 nt, Human herpesvirus 6
ucucgaaaaaacaacga

SEQ ID NO: 162479 - RNA, 21 nt, Human herpesvirus 6
ucucggacucauagauuucau

SEQ ID NO: 162480 - RNA, 19 nt, Human herpesvirus 6
ucucggauauauacuuacu

SEQ ID NO: 162481 - RNA, 19 nt, Human herpesvirus 6
ucucggcugacaacaaagg

SEQ ID NO: 162482 - RNA, 18 nt, Human herpesvirus 6
ucucgggggcauuagucu

SEQ ID NO: 162483 - RNA, 19 nt, Human herpesvirus 6
ucucgccuaccuucacuuu

SEQ ID NO: 162484 - RNA, 14 nt, Human herpesvirus 6
ucucuacuuguuau

SEQ ID NO: 162485 - RNA, 12 nt, Human herpesvirus 6
ucucucgaugaa

SEQ ID NO: 162486 - RNA, 14 nt, Human herpesvirus 6
ucucucgaugaaag

SEQ ID NO: 162487 - RNA, 13 nt, Human herpesvirus 6
ucuaguagccuag

SEQ ID NO: 162488 - RNA, 16 nt, Human herpesvirus 6
ucuagugcguauucca

SEQ ID NO: 162489 - RNA, 20 nt, Human herpesvirus 6
ucuagaugcaaaucucacug

SEQ ID NO: 162490 - RNA, 15 nt, Human herpesvirus 6
ucuagauucuaauga

SEQ ID NO: 162491 - RNA, 13 nt, Human herpesvirus 6
ucucaguagauua

SEQ ID NO: 162492 - RNA, 14 nt, Human herpesvirus 6
ucucaguagauuac

SEQ ID NO: 162493 - RNA, 20 nt, Human herpesvirus 6
ucggucuugcuaagggugcc

SEQ ID NO: 162494 - RNA, 19 nt, Human herpesvirus 6
ucggugauuauagauagcu

SEQ ID NO: 162495 - RNA, 16 nt, Human herpesvirus 6
ucguuaacaauaauac

SEQ ID NO: 162496 - RNA, 22 nt, Human herpesvirus 6
ucguuuacuccgauuuucuuag

SEQ ID NO: 162497 - RNA, 17 nt, Human herpesvirus 6
ucuaaaacaagacagac

SEQ ID NO: 162498 - RNA, 18 nt, Human herpesvirus 6
ucuaauaucguuagguuu

SEQ ID NO: 162499 - RNA, 21 nt, Human herpesvirus 6
ucuaauaucguuagguuuugu

SEQ ID NO: 162500 - RNA, 14 nt, Human herpesvirus 6
ucgccuaccuucac

SEQ ID NO: 162501 - RNA, 21 nt, Human herpesvirus 6
ucgccuugucaucaugugugc

SEQ ID NO: 162502 - RNA, 17 nt, Human herpesvirus 6
ucggucaccuacauucg

SEQ ID NO: 162503 - RNA, 17 nt, Human herpesvirus 6
ucggucagacagugagu

SEQ ID NO: 162504 - RNA, 14 nt, Human herpesvirus 6
ucgguccaaggauu

SEQ ID NO: 162505 - RNA, 23 nt, Human herpesvirus 6
ucgguccguuuuucucugcaaaa

SEQ ID NO: 162506 - RNA, 20 nt, Human herpesvirus 6
ucgggcuuugugaaauaucg

SEQ ID NO: 162507 - RNA, 15 nt, Human herpesvirus 6
ucggcgaugcaucug

SEQ ID NO: 162508 - RNA, 18 nt, Human herpesvirus 6
ucgggaaauaaaaaauau

SEQ ID NO: 162509 - RNA, 19 nt, Human herpesvirus 6
ucgcaccucugaaacacug

SEQ ID NO: 162510 - RNA, 20 nt, Human herpesvirus 6
ucgcaccucugaaacacugu

SEQ ID NO: 162511 - RNA, 20 nt, Human herpesvirus 6
ucgaugucuugcuauuugca

SEQ ID NO: 162512 - RNA, 14 nt, Human herpesvirus 6
ucgcaaaacuuaac

SEQ ID NO: 162513 - RNA, 20 nt, Human herpesvirus 6
ucgcauuagaaaaucuucca

SEQ ID NO: 162514 - RNA, 20 nt, Human herpesvirus 6
uccuuucagaguagaaacua

SEQ ID NO: 162515 - RNA, 18 nt, Human herpesvirus 6
uccuucggccgacagcaa

SEQ ID NO: 162516 - RNA, 16 nt, Human herpesvirus 6
uccuuuuuuacuaguu

SEQ ID NO: 162517 - RNA, 22 nt, Human herpesvirus 6
uccuuuuuuacuaguuuucaca

SEQ ID NO: 162518 - RNA, 19 nt, Human herpesvirus 6
ucgaaaacagucuacaugu

SEQ ID NO: 162519 - RNA, 23 nt, Human herpesvirus 6
ucgacuccagugcuuuaaucaca

SEQ ID NO: 162520 - RNA, 17 nt, Human herpesvirus 6
ucgagaccgacaguauu

SEQ ID NO: 162521 - RNA, 22 nt, Human herpesvirus 6
ucgaccccuuuauaagauuuac

SEQ ID NO: 162522 - RNA, 14 nt, Human herpesvirus 6
ucgaccauguguau

SEQ ID NO: 162523 - RNA, 15 nt, Human herpesvirus 6
ucgaucgcaccaucu

SEQ ID NO: 162524 - RNA, 21 nt, Human herpesvirus 6
ucgaugucggaaucuacugag

SEQ ID NO: 162525 - RNA, 22 nt, Human herpesvirus 6
ucgauaaacgguuuaaucucac

SEQ ID NO: 162526 - RNA, 19 nt, Human herpesvirus 6
ucgaggcgaaggagauuuc

SEQ ID NO: 162527 - RNA, 12 nt, Human herpesvirus 6
ucccuuuuacaa

SEQ ID NO: 162528 - RNA, 21 nt, Human herpesvirus 6
uccgauacagcaccaucaaua

SEQ ID NO: 162529 - RNA, 17 nt, Human herpesvirus 6
uccgagcggugugcagu

SEQ ID NO: 162530 - RNA, 19 nt, Human herpesvirus 6
uccaggcggcaugaauucc

SEQ ID NO: 162531 - RNA, 21 nt, Human herpesvirus 6
uccauacaguuguguacaaug

SEQ ID NO: 162532 - RNA, 18 nt, Human herpesvirus 6
uccagugcuuuaaucaca

SEQ ID NO: 162533 - RNA, 13 nt, Human herpesvirus 6
ucccacaaaccau

SEQ ID NO: 162534 - RNA, 16 nt, Human herpesvirus 6
ucccaauuuguguuua

SEQ ID NO: 162535 - RNA, 14 nt, Human herpesvirus 6
ucccaauaaauaua

SEQ ID NO: 162536 - RNA, 21 nt, Human herpesvirus 6
uccauccaauccaauauaacu

SEQ ID NO: 162537 - RNA, 17 nt, Human herpesvirus 6
ucccccggaguacacgu

SEQ ID NO: 162538 - RNA, 18 nt, Human herpesvirus 6
ucccaccuaauaaacugu

SEQ ID NO: 162539 - RNA, 18 nt, Human herpesvirus 6
ucccaucuauacacccug

SEQ ID NO: 162540 - RNA, 17 nt, Human herpesvirus 6
uccccaugucuugccuc

SEQ ID NO: 162541 - RNA, 11 nt, Human herpesvirus 6
uccccagagaa

SEQ ID NO: 162542 - RNA, 13 nt, Human herpesvirus 6
ucaucucgugcaa

SEQ ID NO: 162543 - RNA, 19 nt, Human herpesvirus 6
ucaucuauuauaagcaaac

SEQ ID NO: 162544 - RNA, 20 nt, Human herpesvirus 6
ucaucggcaucauaauacua

SEQ ID NO: 162545 - RNA, 19 nt, Human herpesvirus 6
ucaucgccuuuuacuuaca

SEQ ID NO: 162546 - RNA, 16 nt, Human herpesvirus 6
ucaucuucagucuuca

SEQ ID NO: 162547 - RNA, 15 nt, Human herpesvirus 6
uccaaucacaacaaa

SEQ ID NO: 162548 - RNA, 16 nt, Human herpesvirus 6
ucaugagagccuucag

SEQ ID NO: 162549 - RNA, 13 nt, Human herpesvirus 6
uccaauuaacaca

SEQ ID NO: 162550 - RNA, 15 nt, Human herpesvirus 6
uccacacgccagucc

SEQ ID NO: 162551 - RNA, 18 nt, Human herpesvirus 6
uccaccaaugacaccgau

SEQ ID NO: 162552 - RNA, 23 nt, Human herpesvirus 6
uaucacaguugauaaacauuaau

SEQ ID NO: 162553 - RNA, 18 nt, Human herpesvirus 6
uaucaccuuacaaauaau

SEQ ID NO: 162554 - RNA, 17 nt, Human herpesvirus 6
uaucacgauguuaacau

SEQ ID NO: 162555 - RNA, 16 nt, Human herpesvirus 6
uauccaauuaacacau

SEQ ID NO: 162556 - RNA, 19 nt, Human herpesvirus 6
uauccauccaauccaauau

SEQ ID NO: 162557 - RNA, 12 nt, Human herpesvirus 6
uaucauaaucug

SEQ ID NO: 162558 - RNA, 17 nt, Human herpesvirus 6
uauccgcuaaaacgacu

SEQ ID NO: 162559 - RNA, 15 nt, Human herpesvirus 6
uauccucucuggaaa

SEQ ID NO: 162560 - RNA, 18 nt, Human herpesvirus 6
uaucgaccauguguauau

SEQ ID NO: 162561 - RNA, 14 nt, Human herpesvirus 6
uaucgcaaugauuu

SEQ ID NO: 162562 - RNA, 19 nt, Human herpesvirus 6
uaucuggaugguuguguga

SEQ ID NO: 162563 - RNA, 14 nt, Human herpesvirus 6
uaucgucuauaaca

SEQ ID NO: 162564 - RNA, 17 nt, Human herpesvirus 6
uaucguggaauggcugc

SEQ ID NO: 162565 - RNA, 18 nt, Human herpesvirus 6
uaugaggaugaaguuuca

SEQ ID NO: 162566 - RNA, 21 nt, Human herpesvirus 6
uaugaggcgcuugaaaccacu

SEQ ID NO: 162567 - RNA, 17 nt, Human herpesvirus 6
uaugauuuucggauuac

SEQ ID NO: 162568 - RNA, 15 nt, Human herpesvirus 6
uaugaucuagcuaua

SEQ ID NO: 162569 - RNA, 19 nt, Human herpesvirus 6
uaugaguaugaaacuuaca

SEQ ID NO: 162570 - RNA, 14 nt, Human herpesvirus 6
uaugaacaaugaca

SEQ ID NO: 162571 - RNA, 14 nt, Human herpesvirus 6
uauggcuacaacag

SEQ ID NO: 162572 - RNA, 16 nt, Human herpesvirus 6
uaugggugagugcauu

SEQ ID NO: 162573 - RNA, 13 nt, Human herpesvirus 6
uaugggagugauu

SEQ ID NO: 162574 - RNA, 17 nt, Human herpesvirus 6
uaugguuaucaucacaa

SEQ ID NO: 162575 - RNA, 14 nt, Human herpesvirus 6
uaugcuacauuuau

SEQ ID NO: 162576 - RNA, 19 nt, Human herpesvirus 6
uauauaugcaagccaugac

SEQ ID NO: 162577 - RNA, 15 nt, Human herpesvirus 6
uauauauuugcauac

SEQ ID NO: 162578 - RNA, 16 nt, Human herpesvirus 6
uauauauuugcauaca

SEQ ID NO: 162579 - RNA, 16 nt, Human herpesvirus 6
uauaucuaaagucaga

SEQ ID NO: 162580 - RNA, 11 nt, Human herpesvirus 6
uauaucagagc

SEQ ID NO: 162581 - RNA, 18 nt, Human herpesvirus 6
uauauuuaaaugaagaua

SEQ ID NO: 162582 - RNA, 14 nt, Human herpesvirus 6
uauauugcugcuag

SEQ ID NO: 162583 - RNA, 17 nt, Human herpesvirus 6
uauauugcugcuagaua

SEQ ID NO: 162584 - RNA, 16 nt, Human herpesvirus 6
uauauagcuguaaaua

SEQ ID NO: 162585 - RNA, 13 nt, Human herpesvirus 6
uauagucaauguu

SEQ ID NO: 162586 - RNA, 21 nt, Human herpesvirus 6
uauaguaauggaucuugauca

SEQ ID NO: 162587 - RNA, 16 nt, Human herpesvirus 6
uauauaaaaaacugca

SEQ ID NO: 162588 - RNA, 20 nt, Human herpesvirus 6
uauauaaaaaacugcauggu

SEQ ID NO: 162589 - RNA, 21 nt, Human herpesvirus 6
uauagacuuuccccauauugu

SEQ ID NO: 162590 - RNA, 17 nt, Human herpesvirus 6
uauagagcaacucauca

SEQ ID NO: 162591 - RNA, 14 nt, Human herpesvirus 6
uauagaugacugaa

SEQ ID NO: 162592 - RNA, 22 nt, Human herpesvirus 6
uauagauuagaaauuacauaag

SEQ ID NO: 162593 - RNA, 21 nt, Human herpesvirus 6
uauacgaaaauaaaaaaaaca

SEQ ID NO: 162594 - RNA, 20 nt, Human herpesvirus 6
uauacuuacuugagugaugg

SEQ ID NO: 162595 - RNA, 21 nt, Human herpesvirus 6
uauacgccuugggacauguau

SEQ ID NO: 162596 - RNA, 20 nt, Human herpesvirus 6
uagaacagcuuagggccaaa

SEQ ID NO: 162597 - RNA, 15 nt, Human herpesvirus 6
uagaaccgaucugug

SEQ ID NO: 162598 - RNA, 18 nt, Human herpesvirus 6
uagaaauuacaagguaca

SEQ ID NO: 162599 - RNA, 14 nt, Human herpesvirus 6
uagaaauuuuaccu

SEQ ID NO: 162600 - RNA, 15 nt, Human herpesvirus 6
uagaaauucuaugua

SEQ ID NO: 162601 - RNA, 23 nt, Human herpesvirus 6
uacuggaggccuucaugagccag

SEQ ID NO: 162602 - RNA, 13 nt, Human herpesvirus 6
uacuguccauuau

SEQ ID NO: 162603 - RNA, 13 nt, Human herpesvirus 6
ucagccugagaac

SEQ ID NO: 162604 - RNA, 17 nt, Human herpesvirus 6
ucagaauccaccaauga

SEQ ID NO: 162605 - RNA, 21 nt, Human herpesvirus 6
ucagaauccaccaaugacacc

SEQ ID NO: 162606 - RNA, 17 nt, Human herpesvirus 6
ucagacagugagugagu

SEQ ID NO: 162607 - RNA, 13 nt, Human herpesvirus 6
ucacuuggagcuu

SEQ ID NO: 162608 - RNA, 21 nt, Human herpesvirus 6
ucagaaccaucuguucaauua

SEQ ID NO: 162609 - RNA, 22 nt, Human herpesvirus 6
ucacugucgaaauucaccagau

SEQ ID NO: 162610 - RNA, 16 nt, Human herpesvirus 6
ucagcuuucauaagcu

SEQ ID NO: 162611 - RNA, 22 nt, Human herpesvirus 6
ucagcuuccguaucacacuuag

SEQ ID NO: 162612 - RNA, 13 nt, Human herpesvirus 6
ucaccuacauucg

SEQ ID NO: 162613 - RNA, 23 nt, Human herpesvirus 6
ucaccuuagacuuggugaugaug

SEQ ID NO: 162614 - RNA, 22 nt, Human herpesvirus 6
ucaccgauaaaaacucacacaa

SEQ ID NO: 162615 - RNA, 15 nt, Human herpesvirus 6
ucaauuccugugacg

SEQ ID NO: 162616 - RNA, 20 nt, Human herpesvirus 6
ucaaucccuuucaguucaaa

SEQ ID NO: 162617 - RNA, 16 nt, Human herpesvirus 6
ucaaucuguguuucca

SEQ ID NO: 162618 - RNA, 20 nt, Human herpesvirus 6
ucaagauauauuaaauugua

SEQ ID NO: 162619 - RNA, 20 nt, Human herpesvirus 6
ucaaagaaacaguaaaucuc

SEQ ID NO: 162620 - RNA, 20 nt, Human herpesvirus 6
ucaaacaaauggaaacugga

SEQ ID NO: 162621 - RNA, 20 nt, Human herpesvirus 6
uauuucguuugggaugucca

SEQ ID NO: 162622 - RNA, 21 nt, Human herpesvirus 6
uauuuccauaaguuaauucca

SEQ ID NO: 162623 - RNA, 16 nt, Human herpesvirus 6
uauuucuaaacacaga

SEQ ID NO: 162624 - RNA, 18 nt, Human herpesvirus 6
uauuucuuacuaggaaag

SEQ ID NO: 162625 - RNA, 16 nt, Human herpesvirus 6
uauuuagucaguuuaa

SEQ ID NO: 162626 - RNA, 14 nt, Human herpesvirus 6
uauuucacauauug

SEQ ID NO: 162627 - RNA, 21 nt, Human herpesvirus 6
uauuucacauauuguguugua

SEQ ID NO: 162628 - RNA, 17 nt, Human herpesvirus 6
uauuuccacguacuauu

SEQ ID NO: 162629 - RNA, 20 nt, Human herpesvirus 6
uauuuccauaaguuaauucc

SEQ ID NO: 162630 - RNA, 11 nt, Human herpesvirus 6
ucaaccuucau

SEQ ID NO: 162631 - RNA, 15 nt, Human herpesvirus 6
ucaacgugucuauaa

SEQ ID NO: 162632 - RNA, 17 nt, Human herpesvirus 6
ucaacuaaaccaugucu

SEQ ID NO: 162633 - RNA, 21 nt, Human herpesvirus 6
ucaacuaaaccaugucuugca

SEQ ID NO: 162634 - RNA, 23 nt, Human herpesvirus 6
uauuaugugacucggaacauaau

SEQ ID NO: 162635 - RNA, 12 nt, Human herpesvirus 6
uauucauaacag

SEQ ID NO: 162636 - RNA, 20 nt, Human herpesvirus 6
uauugucaaauagccaaaaa

SEQ ID NO: 162637 - RNA, 22 nt, Human herpesvirus 6
uauugucaaauagccaaaaaau

SEQ ID NO: 162638 - RNA, 15 nt, Human herpesvirus 6
uauuguccaacacuu

SEQ ID NO: 162639 - RNA, 13 nt, Human herpesvirus 6
uauugguuugcau

SEQ ID NO: 162640 - RNA, 16 nt, Human herpesvirus 6
uauuccagacaauaau

SEQ ID NO: 162641 - RNA, 14 nt, Human herpesvirus 6
uauuguugucguga

SEQ ID NO: 162642 - RNA, 15 nt, Human herpesvirus 6
uauuuacgguuucag

SEQ ID NO: 162643 - RNA, 22 nt, Human herpesvirus 6
uaugucuguuauaacacaacaa

SEQ ID NO: 162644 - RNA, 24 nt, Human herpesvirus 6
uaugugacucggaacauaauugca

SEQ ID NO: 162645 - RNA, 19 nt, Human herpesvirus 6
uaugucguucuuaacucau

SEQ ID NO: 162646 - RNA, 12 nt, Human herpesvirus 6
uaugugugaugc

SEQ ID NO: 162647 - RNA, 16 nt, Human herpesvirus 6
uauguuaaccaguaga

SEQ ID NO: 162648 - RNA, 20 nt, Human herpesvirus 6
uauuaauuacauauagucaa

SEQ ID NO: 162649 - RNA, 13 nt, Human herpesvirus 6
gugucacacagca

SEQ ID NO: 162650 - RNA, 13 nt, Human herpesvirus 6
gugguuguuguua

SEQ ID NO: 162651 - RNA, 17 nt, Human herpesvirus 6
guguucguggacaauga

SEQ ID NO: 162652 - RNA, 13 nt, Human herpesvirus 6
guguucuaucaca

SEQ ID NO: 162653 - RNA, 14 nt, Human herpesvirus 6
guggaucaucucca

SEQ ID NO: 162654 - RNA, 15 nt, Human herpesvirus 6
guuaauauuagccau

SEQ ID NO: 162655 - RNA, 23 nt, Human herpesvirus 6
guuacaagaaaagaaacaaugcu

SEQ ID NO: 162656 - RNA, 15 nt, Human herpesvirus 6
guuacaauagucauu

SEQ ID NO: 162657 - RNA, 16 nt, Human herpesvirus 6
guuaaaguuucagagg

SEQ ID NO: 162658 - RNA, 21 nt, Human herpesvirus 6
guucgucgagaaccaccagag

SEQ ID NO: 162659 - RNA, 17 nt, Human herpesvirus 6
guuccccaugucuugcc

SEQ ID NO: 162660 - RNA, 17 nt, Human herpesvirus 6
gugaguaccuguacaag

SEQ ID NO: 162661 - RNA, 15 nt, Human herpesvirus 6
gugauaugcaaacug

SEQ ID NO: 162662 - RNA, 16 nt, Human herpesvirus 6
gugauuaugccaaaug

SEQ ID NO: 162663 - RNA, 21 nt, Human herpesvirus 6
gugauuuuucggaaaacagcu

SEQ ID NO: 162664 - RNA, 15 nt, Human herpesvirus 6
gugcagaacaucuca

SEQ ID NO: 162665 - RNA, 18 nt, Human herpesvirus 6
gugcgaucgagcaacagc

SEQ ID NO: 162666 - RNA, 18 nt, Human herpesvirus 6
guggaacauacuggugga

SEQ ID NO: 162667 - RNA, 22 nt, Human herpesvirus 6
guggaacauacugguggauuau

SEQ ID NO: 162668 - RNA, 22 nt, Human herpesvirus 6
gugccguuuaugcgaaucugcc

SEQ ID NO: 162669 - RNA, 19 nt, Human herpesvirus 6
gucuucuugggacuaggaa

SEQ ID NO: 162670 - RNA, 15 nt, Human herpesvirus 6
gucuguuuauugcca

SEQ ID NO: 162671 - RNA, 19 nt, Human herpesvirus 6
gucugucuauuaucuggcc

SEQ ID NO: 162672 - RNA, 20 nt, Human herpesvirus 6
gucuuccgaugagaguggau

SEQ ID NO: 162673 - RNA, 19 nt, Human herpesvirus 6
guccauacaguuguguaca

SEQ ID NO: 162674 - RNA, 17 nt, Human herpesvirus 6
guccauuagguugcuag

SEQ ID NO: 162675 - RNA, 17 nt, Human herpesvirus 6
gucccaucuauacaccc

SEQ ID NO: 162676 - RNA, 21 nt, Human herpesvirus 6
guccguuuuucucugcaaaac

SEQ ID NO: 162677 - RNA, 14 nt, Human herpesvirus 6
guccgcaaguaaaa

SEQ ID NO: 162678 - RNA, 16 nt, Human herpesvirus 6
guagugaugauuuguc

SEQ ID NO: 162679 - RNA, 15 nt, Human herpesvirus 6
guaguauccuuaacg

SEQ ID NO: 162680 - RNA, 12 nt, Human herpesvirus 6
guauaccauucc

SEQ ID NO: 162681 - RNA, 20 nt, Human herpesvirus 6
guagaauuacuauguggcau

SEQ ID NO: 162682 - RNA, 13 nt, Human herpesvirus 6
guacucauccaag

SEQ ID NO: 162683 - RNA, 16 nt, Human herpesvirus 6
guacucauccaagacu

SEQ ID NO: 162684 - RNA, 15 nt, Human herpesvirus 6
guacuaugauuuaua

SEQ ID NO: 162685 - RNA, 21 nt, Human herpesvirus 6
guaccuuguaauuucuaugua

SEQ ID NO: 162686 - RNA, 17 nt, Human herpesvirus 6
gggggaucgacgggcag

SEQ ID NO: 162687 - RNA, 17 nt, Human herpesvirus 6
ggggcggacggggacga

SEQ ID NO: 162688 - RNA, 13 nt, Human herpesvirus 6
gucaguggguguu

SEQ ID NO: 162689 - RNA, 20 nt, Human herpesvirus 6
gucagucaacgcaauuccac

SEQ ID NO: 162690 - RNA, 16 nt, Human herpesvirus 6
gucaguucaacgcugu

SEQ ID NO: 162691 - RNA, 16 nt, Human herpesvirus 6
gucauguuuacugcau

SEQ ID NO: 162692 - RNA, 16 nt, Human herpesvirus 6
guccaaugacuacuaa

SEQ ID NO: 162693 - RNA, 16 nt, Human herpesvirus 6
guccacacgccagucc

SEQ ID NO: 162694 - RNA, 14 nt, Human herpesvirus 6
gucagacagugagu

SEQ ID NO: 162695 - RNA, 17 nt, Human herpesvirus 6
gucacguauaccauucc

SEQ ID NO: 162696 - RNA, 16 nt, Human herpesvirus 6
gucacacacagggugc

SEQ ID NO: 162697 - RNA, 15 nt, Human herpesvirus 6
gucaaaggcgaugaa

SEQ ID NO: 162698 - RNA, 16 nt, Human herpesvirus 6
gucaacacccauggaa

SEQ ID NO: 162699 - RNA, 21 nt, Human herpesvirus 6
guauugaagaaaauugcagau

SEQ ID NO: 162700 - RNA, 21 nt, Human herpesvirus 6
guauugauuauauauuugcau

SEQ ID NO: 162701 - RNA, 17 nt, Human herpesvirus 6
guauuuuuaauuugaau

SEQ ID NO: 162702 - RNA, 23 nt, Human herpesvirus 6
guauccuaaauaccaauuccuua

SEQ ID NO: 162703 - RNA, 20 nt, Human herpesvirus 6
guaucaguggauaggaugau

SEQ ID NO: 162704 - RNA, 15 nt, Human herpesvirus 6
guaucuaguguuucg

SEQ ID NO: 162705 - RNA, 22 nt, Human herpesvirus 6
guauauuuuccuguuguguuua

SEQ ID NO: 162706 - RNA, 12 nt, Human herpesvirus 6
guauauguuaac

SEQ ID NO: 162707 - RNA, 16 nt, Human herpesvirus 6
guauuaaugucuucga

SEQ ID NO: 162708 - RNA, 17 nt, Human herpesvirus 6
uaaaucaucaacguaag

SEQ ID NO: 162709 - RNA, 13 nt, Human herpesvirus 6
uaaaucaaagacg

SEQ ID NO: 162710 - RNA, 21 nt, Human herpesvirus 6
uaacaacaacaauaacaacaa

SEQ ID NO: 162711 - RNA, 16 nt, Human herpesvirus 6
uaacaacaaccacagc

SEQ ID NO: 162712 - RNA, 17 nt, Human herpesvirus 6
uaacaacaaccacagca

SEQ ID NO: 162713 - RNA, 19 nt, Human herpesvirus 6
uaacaagcacugaauuaga

SEQ ID NO: 162714 - RNA, 15 nt, Human herpesvirus 6
uaacacaacaaguaa

SEQ ID NO: 162715 - RNA, 14 nt, Human herpesvirus 6
uaacacgugugaca

SEQ ID NO: 162716 - RNA, 21 nt, Human herpesvirus 6
uaacagacgaggacggaauca

SEQ ID NO: 162717 - RNA, 19 nt, Human herpesvirus 6
uaacgucgggaauguguca

SEQ ID NO: 162718 - RNA, 15 nt, Human herpesvirus 6
uaacuacaucaacua

SEQ ID NO: 162719 - RNA, 16 nt, Human herpesvirus 6
uaacucgcgagacaaa

SEQ ID NO: 162720 - RNA, 21 nt, Human herpesvirus 6
uaacuauggaguccuugucag

SEQ ID NO: 162721 - RNA, 18 nt, Human herpesvirus 6
uaacucuuuuuguugcua

SEQ ID NO: 162722 - RNA, 21 nt, Human herpesvirus 6
uaacucuuuuuguugcuauag

SEQ ID NO: 162723 - RNA, 13 nt, Human herpesvirus 6
uaacuaguugcuu

SEQ ID NO: 162724 - RNA, 16 nt, Human herpesvirus 6
uaacuaguugcuugua

SEQ ID NO: 162725 - RNA, 19 nt, Human herpesvirus 6
uaacuacuucuuucuaaaa

SEQ ID NO: 162726 - RNA, 21 nt, Human herpesvirus 6
uaacuacuucuuucuaaaauc

SEQ ID NO: 162727 - RNA, 18 nt, Human herpesvirus 6
uaacaguacuaugauuua

SEQ ID NO: 162728 - RNA, 15 nt, Human herpesvirus 6
uaacgaaaauugaug

SEQ ID NO: 162729 - RNA, 18 nt, Human herpesvirus 6
uaacgacaaaagacaaaa

SEQ ID NO: 162730 - RNA, 15 nt, Human herpesvirus 6
uaacgcagcaacaau

SEQ ID NO: 162731 - RNA, 16 nt, Human herpesvirus 6
uaacgcagcaacaauc

SEQ ID NO: 162732 - RNA, 17 nt, Human herpesvirus 6
uaacgauggaguauuug

SEQ ID NO: 162733 - RNA, 17 nt, Human herpesvirus 6
uaacugguucagaauuu

SEQ ID NO: 162734 - RNA, 14 nt, Human herpesvirus 6
uaacuguaaaaagu

SEQ ID NO: 162735 - RNA, 13 nt, Human herpesvirus 6
uaagacacugaua

SEQ ID NO: 162736 - RNA, 19 nt, Human herpesvirus 6
uaagagugcaacaaaaagc

SEQ ID NO: 162737 - RNA, 22 nt, Human herpesvirus 6
uaagaugucucgggggcauuag

SEQ ID NO: 162738 - RNA, 22 nt, Human herpesvirus 6
uaagauuuucggugcacaugga

SEQ ID NO: 162739 - RNA, 23 nt, Human herpesvirus 6
uaagauuuucggugcacauggaa

SEQ ID NO: 162740 - RNA, 11 nt, Human herpesvirus 6
uaagcaaaaac

SEQ ID NO: 162741 - RNA, 21 nt, Human herpesvirus 6
uaagcaaauguaacuuuuugu

SEQ ID NO: 162742 - RNA, 16 nt, Human herpesvirus 6
uaagccuaagaaauuu

SEQ ID NO: 162743 - RNA, 21 nt, Human herpesvirus 6
uaaguacauagaauuucuaac

SEQ ID NO: 162744 - RNA, 16 nt, Human herpesvirus 6
uaaagaaucugcagau

SEQ ID NO: 162745 - RNA, 13 nt, Human herpesvirus 6
uaaagaacaugug

SEQ ID NO: 162746 - RNA, 16 nt, Human herpesvirus 6
uaaagucagagauuau

SEQ ID NO: 162747 - RNA, 23 nt, Human herpesvirus 6
uaaaguuaaauugauaguacuua

SEQ ID NO: 162748 - RNA, 16 nt, Human herpesvirus 6
uaaaguuauauucuuc

SEQ ID NO: 162749 - RNA, 15 nt, Human herpesvirus 6
uaaauauaucaaaga

SEQ ID NO: 162750 - RNA, 23 nt, Human herpesvirus 6
uaaauauaucaaagauguacuca

SEQ ID NO: 162751 - RNA, 15 nt, Human herpesvirus 6
uaaauaugcuuauac

SEQ ID NO: 162752 - RNA, 13 nt, Human herpesvirus 6
uaaauauguugaa

SEQ ID NO: 162753 - RNA, 20 nt, Human herpesvirus 6
uaaauauguugaaucuuauu

SEQ ID NO: 162754 - RNA, 16 nt, Human herpesvirus 6
uaaaguuuugugaucc

SEQ ID NO: 162755 - RNA, 14 nt, Human herpesvirus 6
uaaacuuaaaacaa

SEQ ID NO: 162756 - RNA, 20 nt, Human herpesvirus 6
uaaacuuagaucuauaugca

SEQ ID NO: 162757 - RNA, 21 nt, Human herpesvirus 6
uaaacggaauuaacaauucuc

SEQ ID NO: 162758 - RNA, 14 nt, Human herpesvirus 6
uaaaauacacgucu

SEQ ID NO: 162759 - RNA, 16 nt, Human herpesvirus 6
guucuuaacucaucga

SEQ ID NO: 162760 - RNA, 23 nt, Human herpesvirus 6
guucuuacaauguuuuugacaaa

SEQ ID NO: 162761 - RNA, 18 nt, Human herpesvirus 6
guucucuuuccagcccua

SEQ ID NO: 162762 - RNA, 17 nt, Human herpesvirus 6
guucugccacgacgugc

SEQ ID NO: 162763 - RNA, 22 nt, Human herpesvirus 6
guugacuuuuaaaagauuugau

SEQ ID NO: 162764 - RNA, 17 nt, Human herpesvirus 6
guugagaaugauuuuaa

SEQ ID NO: 162765 - RNA, 14 nt, Human herpesvirus 6
guugacguuccaaa

SEQ ID NO: 162766 - RNA, 17 nt, Human herpesvirus 6
guugacguuccaaagua

SEQ ID NO: 162767 - RNA, 13 nt, Human herpesvirus 6
uaaaagcuaaauc

SEQ ID NO: 162768 - RNA, 14 nt, Human herpesvirus 6
uaaaaggaauagca

SEQ ID NO: 162769 - RNA, 20 nt, Human herpesvirus 6
guugcaauaaaaaauggauu

SEQ ID NO: 162770 - RNA, 12 nt, Human herpesvirus 6
guugcacuacuu

SEQ ID NO: 162771 - RNA, 16 nt, Human herpesvirus 6
uaaaacgcucacauca

SEQ ID NO: 162772 - RNA, 19 nt, Human herpesvirus 6
uaaaacuauugacauagga

SEQ ID NO: 162773 - RNA, 14 nt, Human herpesvirus 6
uacauaaacacccc

SEQ ID NO: 162774 - RNA, 12 nt, Human herpesvirus 6
uacauaauaucu

SEQ ID NO: 162775 - RNA, 13 nt, Human herpesvirus 6
uacauauagucaa

SEQ ID NO: 162776 - RNA, 14 nt, Human herpesvirus 6
uacauauagucaau

SEQ ID NO: 162777 - RNA, 15 nt, Human herpesvirus 6
uacagaugucaagua

SEQ ID NO: 162778 - RNA, 12 nt, Human herpesvirus 6
uacaauacacag

SEQ ID NO: 162779 - RNA, 22 nt, Human herpesvirus 6
uacaauacgguuugucucgcaa

SEQ ID NO: 162780 - RNA, 15 nt, Human herpesvirus 6
uacaauagucauuaa

SEQ ID NO: 162781 - RNA, 19 nt, Human herpesvirus 6
uacacacaggacacgacaa

SEQ ID NO: 162782 - RNA, 16 nt, Human herpesvirus 6
uacaauuuaauauauc

SEQ ID NO: 162783 - RNA, 17 nt, Human herpesvirus 6
uacaauuuaauauaucu

SEQ ID NO: 162784 - RNA, 18 nt, Human herpesvirus 6
uacaacccccgauucaga

SEQ ID NO: 162785 - RNA, 23 nt, Human herpesvirus 6
uacaacccccgauucagaccuca

SEQ ID NO: 162786 - RNA, 20 nt, Human herpesvirus 6
uaauaaacugugucuguuca

SEQ ID NO: 162787 - RNA, 24 nt, Human herpesvirus 6
uaauaaagaacaugugacacgauu

SEQ ID NO: 162788 - RNA, 22 nt, Human herpesvirus 6
uaauaagucuuuagaacagcuu

SEQ ID NO: 162789 - RNA, 15 nt, Human herpesvirus 6
uaauaauggcaugca

SEQ ID NO: 162790 - RNA, 11 nt, Human herpesvirus 6
uaauacauuuc

SEQ ID NO: 162791 - RNA, 21 nt, Human herpesvirus 6
uaauacauauaaaagcuaaau

SEQ ID NO: 162792 - RNA, 24 nt, Human herpesvirus 6
uaauacauauaaaagcuaaaucaa

SEQ ID NO: 162793 - RNA, 19 nt, Human herpesvirus 6
uaaggccgucaaagacauu

SEQ ID NO: 162794 - RNA, 17 nt, Human herpesvirus 6
uaaguuuugggugcuau

SEQ ID NO: 162795 - RNA, 18 nt, Human herpesvirus 6
uaaguuuugggugcuauu

SEQ ID NO: 162796 - RNA, 16 nt, Human herpesvirus 6
uaauuguggauuuuca

SEQ ID NO: 162797 - RNA, 21 nt, Human herpesvirus 6
uaauucggucaccuacauucg

SEQ ID NO: 162798 - RNA, 19 nt, Human herpesvirus 6
uaauucuuaaagcguguga

SEQ ID NO: 162799 - RNA, 16 nt, Human herpesvirus 6
uaauugaacauuguaa

SEQ ID NO: 162800 - RNA, 18 nt, Human herpesvirus 6
uaauucaaaugcaguaaa

SEQ ID NO: 162801 - RNA, 17 nt, Human herpesvirus 6
uaauuacauauagucaa

SEQ ID NO: 162802 - RNA, 22 nt, Human herpesvirus 6
uaauuaagugcgcuggcuuauu

SEQ ID NO: 162803 - RNA, 15 nt, Human herpesvirus 6
uaauguugaguaauu

SEQ ID NO: 162804 - RNA, 23 nt, Human herpesvirus 6
uacugauggcagguaaccaaaaa

SEQ ID NO: 162805 - RNA, 19 nt, Human herpesvirus 6
uacugacgguuagguuuaa

SEQ ID NO: 162806 - RNA, 21 nt, Human herpesvirus 6
uacugaaguuaauaggugugg

SEQ ID NO: 162807 - RNA, 16 nt, Human herpesvirus 6
aacaacgucaugcaaa

SEQ ID NO: 162808 - RNA, 13 nt, Human herpesvirus 6
aacaacagcaugu

SEQ ID NO: 162809 - RNA, 11 nt, Human herpesvirus 6
uacucauccaa

SEQ ID NO: 162810 - RNA, 14 nt, Human herpesvirus 6
aacaacgacuacca

SEQ ID NO: 162811 - RNA, 15 nt, Human herpesvirus 6
aacaacgacuaccac

SEQ ID NO: 162812 - RNA, 15 nt, Human herpesvirus 6
uacggcaacauaccc

SEQ ID NO: 162813 - RNA, 21 nt, Human herpesvirus 6
uacguauauuguguaccuugu

SEQ ID NO: 162814 - RNA, 21 nt, Human herpesvirus 6
uacaucagagccgaucagauu

SEQ ID NO: 162815 - RNA, 17 nt, Human herpesvirus 6
uacauuaugaagucuug

SEQ ID NO: 162816 - RNA, 18 nt, Human herpesvirus 6
uaccuagcagcaaauaaa

SEQ ID NO: 162817 - RNA, 19 nt, Human herpesvirus 6
uaccucauuguuucacuuc

SEQ ID NO: 162818 - RNA, 13 nt, Human herpesvirus 6
uaccuauuuacaa

SEQ ID NO: 162819 - RNA, 18 nt, Human herpesvirus 6
uacgacgaaaacuuuuaa

SEQ ID NO: 162820 - RNA, 22 nt, Human herpesvirus 6
uaccuguuuuagaaacauuugc

SEQ ID NO: 162821 - RNA, 19 nt, Human herpesvirus 6
uaccuucaaagugauucca

SEQ ID NO: 162822 - RNA, 22 nt, Human herpesvirus 6
uaccuucaaagugauuccaguu

SEQ ID NO: 162823 - RNA, 17 nt, Human herpesvirus 6
uacgcaguugucuggca

SEQ ID NO: 162824 - RNA, 19 nt, Human herpesvirus 6
uacgaaaauaaaaaaaaca

SEQ ID NO: 162825 - RNA, 21 nt, Human herpesvirus 6
uacgacaaauaaaagcauuuu

SEQ ID NO: 162826 - RNA, 18 nt, Human herpesvirus 6
uuuaugaggaacugguga

SEQ ID NO: 162827 - RNA, 22 nt, Human herpesvirus 6
uuuacccuggcccgaggauuau

SEQ ID NO: 162828 - RNA, 15 nt, Human herpesvirus 6
uuuaccgaaccauaa

SEQ ID NO: 162829 - RNA, 13 nt, Human herpesvirus 6
uuucaauauauga

SEQ ID NO: 162830 - RNA, 14 nt, Human herpesvirus 6
uuucaauauaugau

SEQ ID NO: 162831 - RNA, 15 nt, Human herpesvirus 6
uuucaauauaugauu

SEQ ID NO: 162832 - RNA, 21 nt, Human herpesvirus 6
uuuacaaugagcccgguuuaa

SEQ ID NO: 162833 - RNA, 18 nt, Human herpesvirus 6
uuuacauagaaauuacaa

SEQ ID NO: 162834 - RNA, 19 nt, Human herpesvirus 6
uuuacaaaagacacaaucu

SEQ ID NO: 162835 - RNA, 23 nt, Human herpesvirus 6
uuuaauguugaguaauugaacau

SEQ ID NO: 162836 - RNA, 14 nt, Human herpesvirus 6
uuguguaucuguga

SEQ ID NO: 162837 - RNA, 19 nt, Human herpesvirus 6
uugugucauguuuacugca

SEQ ID NO: 162838 - RNA, 16 nt, Human herpesvirus 6
uugugcaagcuguaug

SEQ ID NO: 162839 - RNA, 17 nt, Human herpesvirus 6
uugugcaagcuguauga

SEQ ID NO: 162840 - RNA, 18 nt, Human herpesvirus 6
uuguauauauagcuguaa

SEQ ID NO: 162841 - RNA, 15 nt, Human herpesvirus 6
uuguauuauguaaua

SEQ ID NO: 162842 - RNA, 16 nt, Human herpesvirus 6
uuguaucacgucuccu

SEQ ID NO: 162843 - RNA, 13 nt, Human herpesvirus 6
uuguaagaagaaa

SEQ ID NO: 162844 - RNA, 19 nt, Human herpesvirus 6
uuguagaguguuaugaucu

SEQ ID NO: 162845 - RNA, 20 nt, Human herpesvirus 6
uugggugugcauugugacag

SEQ ID NO: 162846 - RNA, 21 nt, Human herpesvirus 6
uuggucucuuugcgucuucua

SEQ ID NO: 162847 - RNA, 12 nt, Human herpesvirus 6
uuggugugacau

SEQ ID NO: 162848 - RNA, 16 nt, Human herpesvirus 6
uuggugugacauucaa

SEQ ID NO: 162849 - RNA, 18 nt, Human herpesvirus 6
uuguaaaaaaacauucua

SEQ ID NO: 162850 - RNA, 17 nt, Human herpesvirus 6
uugguguggaacauacu

SEQ ID NO: 162851 - RNA, 23 nt, Human herpesvirus 6
uugguguggaacauacuggugga

SEQ ID NO: 162852 - RNA, 14 nt, Human herpesvirus 6
uugggcgaagaccu

SEQ ID NO: 162853 - RNA, 21 nt, Human herpesvirus 6
uugggcuccgcgccguuucaa

SEQ ID NO: 162854 - RNA, 15 nt, Human herpesvirus 6
uugggacauguauau

SEQ ID NO: 162855 - RNA, 23 nt, Human herpesvirus 6
uuuucauaaaugguagcuauuau

SEQ ID NO: 162856 - RNA, 18 nt, Human herpesvirus 6
aacagcuuagggccaaac

SEQ ID NO: 162857 - RNA, 16 nt, Human herpesvirus 6
aacauaaaacaacaac

SEQ ID NO: 162858 - RNA, 13 nt, Human herpesvirus 6
aacauaaacuuag

SEQ ID NO: 162859 - RNA, 11 nt, Human herpesvirus 6
aacaguuuacc

SEQ ID NO: 162860 - RNA, 13 nt, Human herpesvirus 6
aacauaauugcac

SEQ ID NO: 162861 - RNA, 18 nt, Human herpesvirus 6
aacauaauugcacccuau

SEQ ID NO: 162862 - RNA, 16 nt, Human herpesvirus 6
aacagucugacaugga

SEQ ID NO: 162863 - RNA, 15 nt, Human herpesvirus 6
uuuuagucuauccau

SEQ ID NO: 162864 - RNA, 20 nt, Human herpesvirus 6
uuuuauccauccaauccaau

SEQ ID NO: 162865 - RNA, 20 nt, Human herpesvirus 6
uuuuauuccaaccucuaaau

SEQ ID NO: 162866 - RNA, 19 nt, Human herpesvirus 6
uuuucaccaucaaucucua

SEQ ID NO: 162867 - RNA, 15 nt, Human herpesvirus 6
uuuuaugguugggua

SEQ ID NO: 162868 - RNA, 19 nt, Human herpesvirus 6
uuuuauuucuuacuaggaa

SEQ ID NO: 162869 - RNA, 18 nt, Human herpesvirus 6
uuuguaaauacuaaaugu

SEQ ID NO: 162870 - RNA, 23 nt, Human herpesvirus 6
uuugucggcagguauaagaacug

SEQ ID NO: 162871 - RNA, 13 nt, Human herpesvirus 6
uuuuacuugauaa

SEQ ID NO: 162872 - RNA, 13 nt, Human herpesvirus 6
uuucaagauauau

SEQ ID NO: 162873 - RNA, 15 nt, Human herpesvirus 6
uuucacauauaugau

SEQ ID NO: 162874 - RNA, 20 nt, Human herpesvirus 6
uuucacauauaugaugcugu

SEQ ID NO: 162875 - RNA, 23 nt, Human herpesvirus 6
uuucaccaucaaucucuaugaga

SEQ ID NO: 162876 - RNA, 20 nt, Human herpesvirus 6
uuuccuuuaugauacaugca

SEQ ID NO: 162877 - RNA, 17 nt, Human herpesvirus 6
uuucggugcacauggaa

SEQ ID NO: 162878 - RNA, 15 nt, Human herpesvirus 6
uuucuaaaaggcucu

SEQ ID NO: 162879 - RNA, 21 nt, Human herpesvirus 6
uuucuauguaaacuucugcua

SEQ ID NO: 162880 - RNA, 15 nt, Human herpesvirus 6
uuucuccgcacguua

SEQ ID NO: 162881 - RNA, 17 nt, Human herpesvirus 6
uuucucgaaaaaacaac

SEQ ID NO: 162882 - RNA, 20 nt, Human herpesvirus 6
uuucuccauaccguuuacuu

SEQ ID NO: 162883 - RNA, 18 nt, Human herpesvirus 6
uuuggauaagcagaagag

SEQ ID NO: 162884 - RNA, 13 nt, Human herpesvirus 6
uuugggugcuauu

SEQ ID NO: 162885 - RNA, 15 nt, Human herpesvirus 6
uuuggcuucuauauc

SEQ ID NO: 162886 - RNA, 22 nt, Human herpesvirus 6
uuugggauacauaauaucuauc

SEQ ID NO: 162887 - RNA, 14 nt, Human herpesvirus 6
uuuggauauaaaga

SEQ ID NO: 162888 - RNA, 17 nt, Human herpesvirus 6
uugccucuggacacggu

SEQ ID NO: 162889 - RNA, 22 nt, Human herpesvirus 6
uuggaaaauauuuccaugacug

SEQ ID NO: 162890 - RNA, 23 nt, Human herpesvirus 6
uugcuugucgggcuuugugaaau

SEQ ID NO: 162891 - RNA, 18 nt, Human herpesvirus 6
uugccaguaaaucuucau

SEQ ID NO: 162892 - RNA, 23 nt, Human herpesvirus 6
uugccaaggaaagacaugcauuu

SEQ ID NO: 162893 - RNA, 11 nt, Human herpesvirus 6
uugcaugugau

SEQ ID NO: 162894 - RNA, 20 nt, Human herpesvirus 6
uugcauauuauuaacaauga

SEQ ID NO: 162895 - RNA, 19 nt, Human herpesvirus 6
uugcagaucuaauucacau

SEQ ID NO: 162896 - RNA, 14 nt, Human herpesvirus 6
uugcacccuaucac

SEQ ID NO: 162897 - RNA, 12 nt, Human herpesvirus 6
uugcacuuccuc

SEQ ID NO: 162898 - RNA, 13 nt, Human herpesvirus 6
uugcaaugugauc

SEQ ID NO: 162899 - RNA, 15 nt, Human herpesvirus 6
aacacuaaauuacca

SEQ ID NO: 162900 - RNA, 18 nt, Human herpesvirus 6
aacacuaaauuaccacca

SEQ ID NO: 162901 - RNA, 21 nt, Human herpesvirus 6
aacaccccgaguuuacuaaaa

SEQ ID NO: 162902 - RNA, 19 nt, Human herpesvirus 6
uugaaugaacgcacuggac

SEQ ID NO: 162903 - RNA, 21 nt, Human herpesvirus 6
uugaguaauugaacauuguaa

SEQ ID NO: 162904 - RNA, 19 nt, Human herpesvirus 6
uugagugccucagagguga

SEQ ID NO: 162905 - RNA, 15 nt, Human herpesvirus 6
uugcaaaacuguuaa

SEQ ID NO: 162906 - RNA, 17 nt, Human herpesvirus 6
uugaugauuuacaccua

SEQ ID NO: 162907 - RNA, 17 nt, Human herpesvirus 6
aacacaaaaacagggag

SEQ ID NO: 162908 - RNA, 15 nt, Human herpesvirus 6
aacacagcaugcauu

SEQ ID NO: 162909 - RNA, 23 nt, Human herpesvirus 6
aacaauuucuuguugaguuucag

SEQ ID NO: 162910 - RNA, 14 nt, Human herpesvirus 6
aacacaaaccauca

SEQ ID NO: 162911 - RNA, 20 nt, Human herpesvirus 6
uugauaaacuguaugcaaua

SEQ ID NO: 162912 - RNA, 15 nt, Human herpesvirus 6
uugaguuuccugcaa

SEQ ID NO: 162913 - RNA, 21 nt, Human herpesvirus 6
uugauagacggcgggcagauc

SEQ ID NO: 162914 - RNA, 15 nt, Human herpesvirus 6
uugauccccccaaaa

SEQ ID NO: 162915 - RNA, 13 nt, Human herpesvirus 6
uugaacauuguaa

SEQ ID NO: 162916 - RNA, 22 nt, Human herpesvirus 6
uugaagauauggaugaucacua

SEQ ID NO: 162917 - RNA, 15 nt, Human herpesvirus 6
uugaaucuuauucaa

SEQ ID NO: 162918 - RNA, 13 nt, Human herpesvirus 6
uugaaaaaucucu

SEQ ID NO: 162919 - RNA, 18 nt, Human herpesvirus 6
uugaaaaaacaguuuacc

SEQ ID NO: 162920 - RNA, 19 nt, Human herpesvirus 6
uugaaauaguuguauuuau

SEQ ID NO: 162921 - RNA, 15 nt, Human herpesvirus 6
uugaaaucuacugua

SEQ ID NO: 162922 - RNA, 15 nt, Human herpesvirus 6
uugaaaccacugacc

SEQ ID NO: 162923 - RNA, 18 nt, Human herpesvirus 6
uucagaccguuauuggca

SEQ ID NO: 162924 - RNA, 12 nt, Human herpesvirus 6
uucagagugaau

SEQ ID NO: 162925 - RNA, 13 nt, Human herpesvirus 6
uucagacauccag

SEQ ID NO: 162926 - RNA, 14 nt, Human herpesvirus 6
uucagacauccaga

SEQ ID NO: 162927 - RNA, 14 nt, Human herpesvirus 6
uucagaaaguucua

SEQ ID NO: 162928 - RNA, 22 nt, Human herpesvirus 6
uucagaagagaugaaagacaga

SEQ ID NO: 162929 - RNA, 23 nt, Human herpesvirus 6
uucagaagagaugaaagacagag

SEQ ID NO: 162930 - RNA, 14 nt, Human herpesvirus 6
uucagccugagaac

SEQ ID NO: 162931 - RNA, 21 nt, Human herpesvirus 6
uucaagagcgagaucuauuuc

SEQ ID NO: 162932 - RNA, 13 nt, Human herpesvirus 6
aacuucugcuauu

SEQ ID NO: 162933 - RNA, 16 nt, Human herpesvirus 6
aacuuacuaaugugga

SEQ ID NO: 162934 - RNA, 16 nt, Human herpesvirus 6
aagacuuauaauauuc

SEQ ID NO: 162935 - RNA, 23 nt, Human herpesvirus 6
aagagaccaauuuaugucauuuc

SEQ ID NO: 162936 - RNA, 20 nt, Human herpesvirus 6
aagacgauugcuuuaguagu

SEQ ID NO: 162937 - RNA, 17 nt, Human herpesvirus 6
aagaccuauauguguug

SEQ ID NO: 162938 - RNA, 17 nt, Human herpesvirus 6
aagacaucgauuugcug

SEQ ID NO: 162939 - RNA, 17 nt, Human herpesvirus 6
aagacauguacaucaac

SEQ ID NO: 162940 - RNA, 17 nt, Human herpesvirus 6
aagauguacucauccaa

SEQ ID NO: 162941 - RNA, 19 nt, Human herpesvirus 6
aagauguagcuggauauac

SEQ ID NO: 162942 - RNA, 22 nt, Human herpesvirus 6
aagauuacuucgugcugugaua

SEQ ID NO: 162943 - RNA, 20 nt, Human herpesvirus 6
aagauuauggcuacaacaga

SEQ ID NO: 162944 - RNA, 16 nt, Human herpesvirus 6
aagauguugcaauaaa

SEQ ID NO: 162945 - RNA, 19 nt, Human herpesvirus 6
aagcaccuaauuacaauuu

SEQ ID NO: 162946 - RNA, 17 nt, Human herpesvirus 6
aagagcgaaaugcaauc

SEQ ID NO: 162947 - RNA, 18 nt, Human herpesvirus 6
aagagcgaaaugcaaucu

SEQ ID NO: 162948 - RNA, 18 nt, Human herpesvirus 6
aagaggugcgaaugcuca

SEQ ID NO: 162949 - RNA, 15 nt, Human herpesvirus 6
aagaguuuucucaca

SEQ ID NO: 162950 - RNA, 23 nt, Human herpesvirus 6
aagagugggaugcauuauacuga

SEQ ID NO: 162951 - RNA, 19 nt, Human herpesvirus 6
aagaucuaaauuucuacaa

SEQ ID NO: 162952 - RNA, 18 nt, Human herpesvirus 6
aacgauagcagcucugca

SEQ ID NO: 162953 - RNA, 21 nt, Human herpesvirus 6
aacaugauuguaauaaagugu

SEQ ID NO: 162954 - RNA, 15 nt, Human herpesvirus 6
aacgaauagcauucu

SEQ ID NO: 162955 - RNA, 18 nt, Human herpesvirus 6
aacgauuuguaaauacua

SEQ ID NO: 162956 - RNA, 21 nt, Human herpesvirus 6
aacgcgacagggugagucaca

SEQ ID NO: 162957 - RNA, 21 nt, Human herpesvirus 6
aacgcccgccggcccauccac

SEQ ID NO: 162958 - RNA, 20 nt, Human herpesvirus 6
aacgcccugaaacuaucgga

SEQ ID NO: 162959 - RNA, 16 nt, Human herpesvirus 6
aacgcaucacacauac

SEQ ID NO: 162960 - RNA, 16 nt, Human herpesvirus 6
aacgcagcaacaaucc

SEQ ID NO: 162961 - RNA, 17 nt, Human herpesvirus 6
aacgcagcaacaaucca

SEQ ID NO: 162962 - RNA, 20 nt, Human herpesvirus 6
aacgcagcguaaugugcaaa

SEQ ID NO: 162963 - RNA, 13 nt, Human herpesvirus 6
aacgcaauuccac

SEQ ID NO: 162964 - RNA, 17 nt, Human herpesvirus 6
aacgauuugcaguucuc

SEQ ID NO: 162965 - RNA, 19 nt, Human herpesvirus 6
aacauccuaacaagacaga

SEQ ID NO: 162966 - RNA, 14 nt, Human herpesvirus 6
aacaugaacauuga

SEQ ID NO: 162967 - RNA, 15 nt, Human herpesvirus 6
aacaugaacauugaa

SEQ ID NO: 162968 - RNA, 18 nt, Human herpesvirus 6
aacauagaaaaaugagac

SEQ ID NO: 162969 - RNA, 17 nt, Human herpesvirus 6
aacauagcgaauuugaa

SEQ ID NO: 162970 - RNA, 13 nt, Human herpesvirus 6
uuuuugcauguga

SEQ ID NO: 162971 - RNA, 16 nt, Human herpesvirus 6
aacgcuaaauauauca

SEQ ID NO: 162972 - RNA, 17 nt, Human herpesvirus 6
aacgggcacagugugau

SEQ ID NO: 162973 - RNA, 17 nt, Human herpesvirus 6
aacgguuuaaucucaca

SEQ ID NO: 162974 - RNA, 15 nt, Human herpesvirus 6
aacguacucaaagaa

SEQ ID NO: 162975 - RNA, 21 nt, Human herpesvirus 6
aacguuccacgcauagacaaa

SEQ ID NO: 162976 - RNA, 17 nt, Human herpesvirus 6
aacuauugacauaggaa

SEQ ID NO: 162977 - RNA, 17 nt, Human herpesvirus 6
aacgugcucguauaaau

SEQ ID NO: 162978 - RNA, 16 nt, Human herpesvirus 6
aacucaucgacuucug

SEQ ID NO: 162979 - RNA, 18 nt, Human herpesvirus 6
aacucaaaaaaauuccca

SEQ ID NO: 162980 - RNA, 12 nt, Human herpesvirus 6
aacucacacaac

SEQ ID NO: 162981 - RNA, 20 nt, Human herpesvirus 6
aacucauguugccucuggac

SEQ ID NO: 162982 - RNA, 21 nt, Human herpesvirus 6
aauccacugcauuucauuccc

SEQ ID NO: 162983 - RNA, 19 nt, Human herpesvirus 6
aauccggaguuaaguaaac

SEQ ID NO: 162984 - RNA, 12 nt, Human herpesvirus 6
aauccuaauuca

SEQ ID NO: 162985 - RNA, 20 nt, Human herpesvirus 6
aaucgucggaucaacagaug

SEQ ID NO: 162986 - RNA, 19 nt, Human herpesvirus 6
aaucgauuacaaaacaauc

SEQ ID NO: 162987 - RNA, 20 nt, Human herpesvirus 6
aaucgcgguccaacacagca

SEQ ID NO: 162988 - RNA, 16 nt, Human herpesvirus 6
aaucuacugagaucau

SEQ ID NO: 162989 - RNA, 13 nt, Human herpesvirus 6
aaucuacuguaca

SEQ ID NO: 162990 - RNA, 15 nt, Human herpesvirus 6
aaucuacuguacaaa

SEQ ID NO: 162991 - RNA, 20 nt, Human herpesvirus 6
aaucuagaauaucugcuaag

SEQ ID NO: 162992 - RNA, 13 nt, Human herpesvirus 6
aaucaaucaaggu

SEQ ID NO: 162993 - RNA, 16 nt, Human herpesvirus 6
aaucacaaugaucaau

SEQ ID NO: 162994 - RNA, 18 nt, Human herpesvirus 6
aaucacaccaauggucac

SEQ ID NO: 162995 - RNA, 21 nt, Human herpesvirus 6
aauauugugguugccaguaaa

SEQ ID NO: 162996 - RNA, 19 nt, Human herpesvirus 6
aaucaaaugauuuuacaaa

SEQ ID NO: 162997 - RNA, 16 nt, Human herpesvirus 6
aauaaaguaagcaccu

SEQ ID NO: 162998 - RNA, 18 nt, Human herpesvirus 6
aauaaaguaagcaccuua

SEQ ID NO: 162999 - RNA, 13 nt, Human herpesvirus 6
aauaaacauuuau

SEQ ID NO: 163000 - RNA, 23 nt, Human herpesvirus 6
aauaaaauccacgaacguagaca

SEQ ID NO: 163001 - RNA, 15 nt, Human herpesvirus 6
aagugcugugcucuu

SEQ ID NO: 163002 - RNA, 22 nt, Human herpesvirus 6
aauacuuucaugauucuuuguc

SEQ ID NO: 163003 - RNA, 19 nt, Human herpesvirus 6
aauaaaguuugucacacca

SEQ ID NO: 163004 - RNA, 16 nt, Human herpesvirus 6
aauaacaacaaccaca

SEQ ID NO: 163005 - RNA, 16 nt, Human herpesvirus 6
aauaguuuuacuucac

SEQ ID NO: 163006 - RNA, 18 nt, Human herpesvirus 6
aauaguucuucaacauau

SEQ ID NO: 163007 - RNA, 11 nt, Human herpesvirus 6
aagcuguccau

SEQ ID NO: 163008 - RNA, 15 nt, Human herpesvirus 6
aagcaggaacccaga

SEQ ID NO: 163009 - RNA, 18 nt, Human herpesvirus 6
aagcauacucaacccaaa

SEQ ID NO: 163010 - RNA, 15 nt, Human herpesvirus 6
aagucguugugucau

SEQ ID NO: 163011 - RNA, 16 nt, Human herpesvirus 6
aagucguugugucaug

SEQ ID NO: 163012 - RNA, 18 nt, Human herpesvirus 6
aagucguugugucaugau

SEQ ID NO: 163013 - RNA, 22 nt, Human herpesvirus 6
aagguggcaucagaauccagaa

SEQ ID NO: 163014 - RNA, 19 nt, Human herpesvirus 6
aagguggguuauagaugac

SEQ ID NO: 163015 - RNA, 23 nt, Human herpesvirus 6
aaggacuaucugagacaguccau

SEQ ID NO: 163016 - RNA, 18 nt, Human herpesvirus 6
aaggacaaaguucaguaa

SEQ ID NO: 163017 - RNA, 12 nt, Human herpesvirus 6
ugaugaucugcc

SEQ ID NO: 163018 - RNA, 15 nt, Human herpesvirus 6
ugaucuuuacaaaag

SEQ ID NO: 163019 - RNA, 20 nt, Human herpesvirus 6
ugaucuuuacaaaagacaca

SEQ ID NO: 163020 - RNA, 16 nt, Human herpesvirus 6
ugaugaagaacagaau

SEQ ID NO: 163021 - RNA, 19 nt, Human herpesvirus 6
ugaugaaagcuucauuuau

SEQ ID NO: 163022 - RNA, 17 nt, Human herpesvirus 6
ugauguuaacucaggug

SEQ ID NO: 163023 - RNA, 17 nt, Human herpesvirus 6
ugaugccaaagcuuuau

SEQ ID NO: 163024 - RNA, 22 nt, Human herpesvirus 6
ugauggaguuauuggaccacga

SEQ ID NO: 163025 - RNA, 11 nt, Human herpesvirus 6
ugaucacuauc

SEQ ID NO: 163026 - RNA, 22 nt, Human herpesvirus 6
ugaucaacggccuggaguacaa

SEQ ID NO: 163027 - RNA, 16 nt, Human herpesvirus 6
ugauaucauucucaag

SEQ ID NO: 163028 - RNA, 18 nt, Human herpesvirus 6
ugauauuccagacaauaa

SEQ ID NO: 163029 - RNA, 21 nt, Human herpesvirus 6
ugaucccuuagaagcuuucaa

SEQ ID NO: 163030 - RNA, 15 nt, Human herpesvirus 6
ugaucauaugaggau

SEQ ID NO: 163031 - RNA, 20 nt, Human herpesvirus 6
ugaucaucgggaacauagag

SEQ ID NO: 163032 - RNA, 14 nt, Human herpesvirus 6
ugaucucacgucac

SEQ ID NO: 163033 - RNA, 15 nt, Human herpesvirus 6
ugaucugcuugauau

SEQ ID NO: 163034 - RNA, 16 nt, Human herpesvirus 6
ugauuaucauagacaa

SEQ ID NO: 163035 - RNA, 18 nt, Human herpesvirus 6
ugauuaucauagacaaac

SEQ ID NO: 163036 - RNA, 15 nt, Human herpesvirus 6
ugauuccucaaauga

SEQ ID NO: 163037 - RNA, 19 nt, Human herpesvirus 6
ugauucgacaaaucaucac

SEQ ID NO: 163038 - RNA, 18 nt, Human herpesvirus 6
ugauuuauagaauuaaga

SEQ ID NO: 163039 - RNA, 20 nt, Human herpesvirus 6
ugauugugacaaggaaugaa

SEQ ID NO: 163040 - RNA, 19 nt, Human herpesvirus 6
ugauuguaauaaaguguca

SEQ ID NO: 163041 - RNA, 20 nt, Human herpesvirus 6
ugcaacgcaucacacauaca

SEQ ID NO: 163042 - RNA, 21 nt, Human herpesvirus 6
ugcaacgcaucacacauacaa

SEQ ID NO: 163043 - RNA, 22 nt, Human herpesvirus 6
ugcaacgcaucacacauacaac

SEQ ID NO: 163044 - RNA, 17 nt, Human herpesvirus 6
ugcaagcuguaugauua

SEQ ID NO: 163045 - RNA, 14 nt, Human herpesvirus 6
ugagaccuugucaa

SEQ ID NO: 163046 - RNA, 22 nt, Human herpesvirus 6
ugagacucuacgaucuuauaug

SEQ ID NO: 163047 - RNA, 19 nt, Human herpesvirus 6
ugagacacuguaucuguug

SEQ ID NO: 163048 - RNA, 16 nt, Human herpesvirus 6
ugagaguaaauauuuc

SEQ ID NO: 163049 - RNA, 17 nt, Human herpesvirus 6
ugaaaaaaaauugccuu

SEQ ID NO: 163050 - RNA, 18 nt, Human herpesvirus 6
ugaaaaaguaguugcuaa

SEQ ID NO: 163051 - RNA, 15 nt, Human herpesvirus 6
ucuuuuauugcugcg

SEQ ID NO: 163052 - RNA, 17 nt, Human herpesvirus 6
ucuuuuuaauuccaaga

SEQ ID NO: 163053 - RNA, 16 nt, Human herpesvirus 6
ugaaaagacuuacuca

SEQ ID NO: 163054 - RNA, 14 nt, Human herpesvirus 6
ugaaaaccuuucaa

SEQ ID NO: 163055 - RNA, 14 nt, Human herpesvirus 6
ugagaacguauaaa

SEQ ID NO: 163056 - RNA, 23 nt, Human herpesvirus 6
ugauaaucugaucgaaauacuuc

SEQ ID NO: 163057 - RNA, 13 nt, Human herpesvirus 6
ugagugaguacaa

SEQ ID NO: 163058 - RNA, 22 nt, Human herpesvirus 6
ugauaaauugaugaaauuguga

SEQ ID NO: 163059 - RNA, 21 nt, Human herpesvirus 6
ugauaaacauuaauuuauuaa

SEQ ID NO: 163060 - RNA, 15 nt, Human herpesvirus 6
ugaguuuuucgcaau

SEQ ID NO: 163061 - RNA, 21 nt, Human herpesvirus 6
ugagggguaugucugugcaaa

SEQ ID NO: 163062 - RNA, 13 nt, Human herpesvirus 6
ugagguauaucuc

SEQ ID NO: 163063 - RNA, 14 nt, Human herpesvirus 6
ugagucacauagau

SEQ ID NO: 163064 - RNA, 20 nt, Human herpesvirus 6
ugagcuuguggaucaucucc

SEQ ID NO: 163065 - RNA, 14 nt, Human herpesvirus 6
ugaggaaaucugaa

SEQ ID NO: 163066 - RNA, 22 nt, Human herpesvirus 6
ugcuucuucaguagagacuuua

SEQ ID NO: 163067 - RNA, 17 nt, Human herpesvirus 6
ugcugaugauggacguc

SEQ ID NO: 163068 - RNA, 15 nt, Human herpesvirus 6
uggaauuuguggaac

SEQ ID NO: 163069 - RNA, 18 nt, Human herpesvirus 6
uggacaacgauagggcuc

SEQ ID NO: 163070 - RNA, 21 nt, Human herpesvirus 6
uggacaccgguaaccucgcuc

SEQ ID NO: 163071 - RNA, 21 nt, Human herpesvirus 6
ugcuuucucuuuuuaauucca

SEQ ID NO: 163072 - RNA, 21 nt, Human herpesvirus 6
ugcuuuaaucacaaugaucaa

SEQ ID NO: 163073 - RNA, 16 nt, Human herpesvirus 6
ugcgauauucaaagua

SEQ ID NO: 163074 - RNA, 23 nt, Human herpesvirus 6
ugcgcaggauaauuuauggaaau

SEQ ID NO: 163075 - RNA, 19 nt, Human herpesvirus 6
ugcgcaauucuucucuaca

SEQ ID NO: 163076 - RNA, 23 nt, Human herpesvirus 6
ugcguuaucgaccauguguauau

SEQ ID NO: 163077 - RNA, 13 nt, Human herpesvirus 6
ugcuaauaaaaua

SEQ ID NO: 163078 - RNA, 15 nt, Human herpesvirus 6
ugcucgccguauaag

SEQ ID NO: 163079 - RNA, 21 nt, Human herpesvirus 6
ugcucguauaaauaucgccau

SEQ ID NO: 163080 - RNA, 22 nt, Human herpesvirus 6
ugcauaugucuguuauaacaca

SEQ ID NO: 163081 - RNA, 15 nt, Human herpesvirus 6
ugcauaauaauggca

SEQ ID NO: 163082 - RNA, 17 nt, Human herpesvirus 6
ugcaguuacaauuacua

SEQ ID NO: 163083 - RNA, 18 nt, Human herpesvirus 6
ugcaguuacaauuacuaa

SEQ ID NO: 163084 - RNA, 18 nt, Human herpesvirus 6
ugcaguuaugugcugugu

SEQ ID NO: 163085 - RNA, 17 nt, Human herpesvirus 6
ugcacuuccucacgcaa

SEQ ID NO: 163086 - RNA, 19 nt, Human herpesvirus 6
ugcacuuccucacgcaaac

SEQ ID NO: 163087 - RNA, 23 nt, Human herpesvirus 6
ugcaguaaaugaauguguucaca

SEQ ID NO: 163088 - RNA, 15 nt, Human herpesvirus 6
ugcacuacuugucuu

SEQ ID NO: 163089 - RNA, 23 nt, Human herpesvirus 6
ugccacguaaccgaugcugauuc

SEQ ID NO: 163090 - RNA, 14 nt, Human herpesvirus 6
ugccaucauuauug

SEQ ID NO: 163091 - RNA, 17 nt, Human herpesvirus 6
ugccaguaaaucuucau

SEQ ID NO: 163092 - RNA, 20 nt, Human herpesvirus 6
ugccaaggaaagacaugcau

SEQ ID NO: 163093 - RNA, 19 nt, Human herpesvirus 6
ugccaccgucugggaccca

SEQ ID NO: 163094 - RNA, 16 nt, Human herpesvirus 6
ugcgaaccuagauuca

SEQ ID NO: 163095 - RNA, 21 nt, Human herpesvirus 6
uggucguaaccauucugcaaa

SEQ ID NO: 163096 - RNA, 23 nt, Human herpesvirus 6
uggucugagaugacaucugcaaa

SEQ ID NO: 163097 - RNA, 17 nt, Human herpesvirus 6
ugguagcuauuauguga

SEQ ID NO: 163098 - RNA, 23 nt, Human herpesvirus 6
ugguagcuauuaugugaauguua

SEQ ID NO: 163099 - RNA, 14 nt, Human herpesvirus 6
ugguaucugaagac

SEQ ID NO: 163100 - RNA, 16 nt, Human herpesvirus 6
ugguauuuuagauaua

SEQ ID NO: 163101 - RNA, 22 nt, Human herpesvirus 6
ugguguuguguucguggacaau

SEQ ID NO: 163102 - RNA, 15 nt, Human herpesvirus 6
ugguuaaaaggaaua

SEQ ID NO: 163103 - RNA, 15 nt, Human herpesvirus 6
ugguuaucaucacaa

SEQ ID NO: 163104 - RNA, 16 nt, Human herpesvirus 6
uggugauacgugaauu

SEQ ID NO: 163105 - RNA, 15 nt, Human herpesvirus 6
uggugcaucagugaa

SEQ ID NO: 163106 - RNA, 17 nt, Human herpesvirus 6
uggacauuggucuuugc

SEQ ID NO: 163107 - RNA, 18 nt, Human herpesvirus 6
uggaugccugcauaugca

SEQ ID NO: 163108 - RNA, 19 nt, Human herpesvirus 6
uggaugccugcauaugcag

SEQ ID NO: 163109 - RNA, 19 nt, Human herpesvirus 6
uggaugcugaugaauuuau

SEQ ID NO: 163110 - RNA, 16 nt, Human herpesvirus 6
uggaugcuuuuagaug

SEQ ID NO: 163111 - RNA, 16 nt, Human herpesvirus 6
uggcaauugcugguac

SEQ ID NO: 163112 - RNA, 20 nt, Human herpesvirus 6
uggcaauuucuuuugaggga

SEQ ID NO: 163113 - RNA, 17 nt, Human herpesvirus 6
uggcaaccugaaacucc

SEQ ID NO: 163114 - RNA, 23 nt, Human herpesvirus 6
ugggcgaagaccuauauguguug

SEQ ID NO: 163115 - RNA, 16 nt, Human herpesvirus 6
uggcacggugccaaag

SEQ ID NO: 163116 - RNA, 22 nt, Human herpesvirus 6
ugggccuuuucgcgauagucau

SEQ ID NO: 163117 - RNA, 17 nt, Human herpesvirus 6
ugucccggggggaaucg

SEQ ID NO: 163118 - RNA, 21 nt, Human herpesvirus 6
uguccagugauaacgaugcuu

SEQ ID NO: 163119 - RNA, 15 nt, Human herpesvirus 6
ugucgauguggauau

SEQ ID NO: 163120 - RNA, 18 nt, Human herpesvirus 6
uguaauuaggugcuuggu

SEQ ID NO: 163121 - RNA, 14 nt, Human herpesvirus 6
uguaauuucuaugu

SEQ ID NO: 163122 - RNA, 15 nt, Human herpesvirus 6
uguaauuucuaugua

SEQ ID NO: 163123 - RNA, 21 nt, Human herpesvirus 6
uguacaucaacugacuuauaa

SEQ ID NO: 163124 - RNA, 20 nt, Human herpesvirus 6
uguacaaccgaauguucuca

SEQ ID NO: 163125 - RNA, 18 nt, Human herpesvirus 6
uguacaaaaucaaacuca

SEQ ID NO: 163126 - RNA, 21 nt, Human herpesvirus 6
uguacccuaagugaaauucaa

SEQ ID NO: 163127 - RNA, 23 nt, Human herpesvirus 6
ugugaucaucacaugccaugcaa

SEQ ID NO: 163128 - RNA, 15 nt, Human herpesvirus 6
ugugauaagugcugc

SEQ ID NO: 163129 - RNA, 14 nt, Human herpesvirus 6
ugugacgauagugu

SEQ ID NO: 163130 - RNA, 19 nt, Human herpesvirus 6
ugugacacgauuucugacu

SEQ ID NO: 163131 - RNA, 13 nt, Human herpesvirus 6
ugugaauccagac

SEQ ID NO: 163132 - RNA, 22 nt, Human herpesvirus 6
ugugauucugcauuuauaucaa

SEQ ID NO: 163133 - RNA, 21 nt, Human herpesvirus 6
ugugauuuuagacaaaacugu

SEQ ID NO: 163134 - RNA, 13 nt, Human herpesvirus 6
uguggagacaccu

SEQ ID NO: 163135 - RNA, 21 nt, Human herpesvirus 6
ugugguugccaguaaaucuuc

SEQ ID NO: 163136 - RNA, 16 nt, Human herpesvirus 6
uguguagcaaaaacag

SEQ ID NO: 163137 - RNA, 14 nt, Human herpesvirus 6
uguguagcaucuua

SEQ ID NO: 163138 - RNA, 21 nt, Human herpesvirus 6
uguguagcaucuuaccuucaa

SEQ ID NO: 163139 - RNA, 22 nt, Human herpesvirus 6
uguguauauuuuaauacauuuc

SEQ ID NO: 163140 - RNA, 13 nt, Human herpesvirus 6
uguguaucuguga

SEQ ID NO: 163141 - RNA, 14 nt, Human herpesvirus 6
uguguaucugugaa

SEQ ID NO: 163142 - RNA, 16 nt, Human herpesvirus 6
uguguaucugugaaca

SEQ ID NO: 163143 - RNA, 13 nt, Human herpesvirus 6
ugugucuccgccu

SEQ ID NO: 163144 - RNA, 22 nt, Human herpesvirus 6
uguuuuuacuugauaaacugua

SEQ ID NO: 163145 - RNA, 15 nt, Human herpesvirus 6
uguuuuuagauuccg

SEQ ID NO: 163146 - RNA, 22 nt, Human herpesvirus 6
uguuuuagaaacauuugcugau

SEQ ID NO: 163147 - RNA, 15 nt, Human herpesvirus 6
uuaaaaaaaauagca

SEQ ID NO: 163148 - RNA, 13 nt, Human herpesvirus 6
uguugaguuucag

SEQ ID NO: 163149 - RNA, 18 nt, Human herpesvirus 6
uuaaaauucgagauaaaa

SEQ ID NO: 163150 - RNA, 17 nt, Human herpesvirus 6
uuaaaauagaagucuca

SEQ ID NO: 163151 - RNA, 16 nt, Human herpesvirus 6
uuaacauaaaacaaca

SEQ ID NO: 163152 - RNA, 15 nt, Human herpesvirus 6
uuaacaguacuauga

SEQ ID NO: 163153 - RNA, 21 nt, Human herpesvirus 6
uuaacuaagauugugcaguua

SEQ ID NO: 163154 - RNA, 19 nt, Human herpesvirus 6
uuaacuacaucaacuacau

SEQ ID NO: 163155 - RNA, 21 nt, Human herpesvirus 6
uuaaccuuuucacuuggagcu

SEQ ID NO: 163156 - RNA, 18 nt, Human herpesvirus 6
uuaacgcagcaacaaucc

SEQ ID NO: 163157 - RNA, 22 nt, Human herpesvirus 6
uuaacggagaucuggugaaugu

SEQ ID NO: 163158 - RNA, 20 nt, Human herpesvirus 6
uguucuuuauuaaauguuac

SEQ ID NO: 163159 - RNA, 17 nt, Human herpesvirus 6
uguugaaucuuauucaa

SEQ ID NO: 163160 - RNA, 16 nt, Human herpesvirus 6
uguucguggacaauga

SEQ ID NO: 163161 - RNA, 13 nt, Human herpesvirus 6
uguucuaucacau

SEQ ID NO: 163162 - RNA, 13 nt, Human herpesvirus 6
uguucuaaaggau

SEQ ID NO: 163163 - RNA, 15 nt, Human herpesvirus 6
uguucgguuuagcua

SEQ ID NO: 163164 - RNA, 13 nt, Human herpesvirus 6
uguucgaaaaagu

SEQ ID NO: 163165 - RNA, 19 nt, Human herpesvirus 6
uguucauaggacuaggauu

SEQ ID NO: 163166 - RNA, 19 nt, Human herpesvirus 6
uguuauuucgggacaaaac

SEQ ID NO: 163167 - RNA, 18 nt, Human herpesvirus 6
uguguuagcuuugcgaua

SEQ ID NO: 163168 - RNA, 15 nt, Human herpesvirus 6
uguguuauaaggaag

SEQ ID NO: 163169 - RNA, 15 nt, Human herpesvirus 6
uguguucaagaacac

SEQ ID NO: 163170 - RNA, 20 nt, Human herpesvirus 6
ugugucaugauuaugccguc

SEQ ID NO: 163171 - RNA, 17 nt, Human herpesvirus 6
uguuaauauuagccauu

SEQ ID NO: 163172 - RNA, 16 nt, Human herpesvirus 6
uguuaguauacagaau

SEQ ID NO: 163173 - RNA, 17 nt, Human herpesvirus 6
uguuaugaucuagcuau

SEQ ID NO: 163174 - RNA, 18 nt, Human herpesvirus 6
uguuauguaaagaaauaa

SEQ ID NO: 163175 - RNA, 14 nt, Human herpesvirus 6
uguuacugauggca

SEQ ID NO: 163176 - RNA, 18 nt, Human herpesvirus 6
uuacaacugaaacuucac

SEQ ID NO: 163177 - RNA, 18 nt, Human herpesvirus 6
uuacaaaagacacaaucu

SEQ ID NO: 163178 - RNA, 23 nt, Human herpesvirus 6
uuaauuacauauagucaauguug

SEQ ID NO: 163179 - RNA, 23 nt, Human herpesvirus 6
uuaauuaccuauagucaauguug

SEQ ID NO: 163180 - RNA, 18 nt, Human herpesvirus 6
uuaaugauauauugugau

SEQ ID NO: 163181 - RNA, 17 nt, Human herpesvirus 6
uuacuucgugcugugau

SEQ ID NO: 163182 - RNA, 15 nt, Human herpesvirus 6
uuagaaaaucuucca

SEQ ID NO: 163183 - RNA, 20 nt, Human herpesvirus 6
uuagaaauuacacaccuuaa

SEQ ID NO: 163184 - RNA, 13 nt, Human herpesvirus 6
uuagaaauuacau

SEQ ID NO: 163185 - RNA, 12 nt, Human herpesvirus 6
uuacuugauaaa

SEQ ID NO: 163186 - RNA, 14 nt, Human herpesvirus 6
uuacuacggagaac

SEQ ID NO: 163187 - RNA, 20 nt, Human herpesvirus 6
uuacaauguuuuugacaaau

SEQ ID NO: 163188 - RNA, 14 nt, Human herpesvirus 6
uuacaauacacaga

SEQ ID NO: 163189 - RNA, 15 nt, Human herpesvirus 6
uuauuuucaauauca

SEQ ID NO: 163190 - RNA, 17 nt, Human herpesvirus 6
uuauuguuaacauguac

SEQ ID NO: 163191 - RNA, 21 nt, Human herpesvirus 6
uuauauauuugcauacauucc

SEQ ID NO: 163192 - RNA, 22 nt, Human herpesvirus 6
uucaaagucuaaugguugaaaa

SEQ ID NO: 163193 - RNA, 22 nt, Human herpesvirus 6
uucaaaaaccgccaagagauag

SEQ ID NO: 163194 - RNA, 20 nt, Human herpesvirus 6
uucaaaauaaauacuagcua

SEQ ID NO: 163195 - RNA, 13 nt, Human herpesvirus 6
uucaaaaugguua

SEQ ID NO: 163196 - RNA, 20 nt, Human herpesvirus 6
uucaaacaccucacaaucua

SEQ ID NO: 163197 - RNA, 13 nt, Human herpesvirus 6
uuagaauguuugg

SEQ ID NO: 163198 - RNA, 21 nt, Human herpesvirus 6
uuauagauagcggcacguuga

SEQ ID NO: 163199 - RNA, 13 nt, Human herpesvirus 6
uuauagauagcuc

SEQ ID NO: 163200 - RNA, 14 nt, Human herpesvirus 6
uuauaagcaaacau

SEQ ID NO: 163201 - RNA, 16 nt, Human herpesvirus 6
uuauaagucaucauau

SEQ ID NO: 163202 - RNA, 19 nt, Human herpesvirus 6
uuauaauacggagagcuau

SEQ ID NO: 163203 - RNA, 12 nt, Human herpesvirus 6
ugcguuaucgac

SEQ ID NO: 163204 - RNA, 18 nt, Human herpesvirus 6
guauacagcuaaacgccg

SEQ ID NO: 163205 - RNA, 13 nt, Human herpesvirus 6
gcgcgcgugugug

SEQ ID NO: 163206 - RNA, 19 nt, Human herpesvirus 6
uauauuuuuaccgaaccau

SEQ ID NO: 163207 - RNA, 20 nt, Human herpesvirus 6
uaguacaguaugucuccaaa

SEQ ID NO: 163208 - RNA, 22 nt, Human herpesvirus 6
uaaacuaugcaaacgaaaccau

SEQ ID NO: 163209 - RNA, 14 nt, Human herpesvirus 6
uacacuuuaucgau

SEQ ID NO: 163210 - RNA, 22 nt, Human herpesvirus 6
gucccaucuauacacccugccg

SEQ ID NO: 163211 - RNA, 23 nt, Human herpesvirus 6
guuccccaugucuugccucuccg

SEQ ID NO: 163212 - RNA, 20 nt, Human herpesvirus 6
gccuauacaggcaaccgccg

SEQ ID NO: 163213 - RNA, 19 nt, Human herpesvirus 6
cugauuuuguuuucuacgu

SEQ ID NO: 163214 - RNA, 18 nt, Human herpesvirus 6
cugagaguaaauauuucu

SEQ ID NO: 163215 - RNA, 13 nt, Human herpesvirus 6
cugcacuuucgau

SEQ ID NO: 163216 - RNA, 20 nt, Human herpesvirus 6
cuggcccgaggauuaucgau

SEQ ID NO: 163217 - RNA, 19 nt, Human herpesvirus 6
caggacagcuucuauuacu

SEQ ID NO: 163218 - RNA, 21 nt, Human herpesvirus 6
cagugaaggcugccaugaaac

SEQ ID NO: 163219 - RNA, 20 nt, Human herpesvirus 6
cauaggaauucuuauuuacc

SEQ ID NO: 163220 - RNA, 17 nt, Human herpesvirus 6
caucagaauccagaaac

SEQ ID NO: 163221 - RNA, 23 nt, Human herpesvirus 6
cgacccacuccuacuauccgccc

SEQ ID NO: 163222 - RNA, 14 nt, Human herpesvirus 6
cgcccgauccgccc

SEQ ID NO: 163223 - RNA, 11 nt, Human herpesvirus 6
cgccgugugug

SEQ ID NO: 163224 - RNA, 19 nt, Human herpesvirus 6
cggaauuuugagauuuaca

SEQ ID NO: 163225 - RNA, 19 nt, Human herpesvirus 6
acuaagcaggaacccagau

SEQ ID NO: 163226 - RNA, 15 nt, Human herpesvirus 6
acugcuaguuuuuuu

SEQ ID NO: 163227 - RNA, 17 nt, Human herpesvirus 6
acuuauuuuuuuuucug

SEQ ID NO: 163228 - RNA, 20 nt, Human herpesvirus 6
agcgcgucguucgcuucuua

SEQ ID NO: 163229 - RNA, 19 nt, Human herpesvirus 6
acgugguuuuuuuuuucuu

SEQ ID NO: 163230 - RNA, 23 nt, Human herpesvirus 6
aaauccuccuagggaauuuaauc

SEQ ID NO: 163231 - RNA, 17 nt, Human herpesvirus 6
augaucagcauucacuc

SEQ ID NO: 163232 - RNA, 20 nt, Human herpesvirus 6
auuucuuccuuucucugcgc

SEQ ID NO: 163233 - RNA, 20 nt, Human herpesvirus 6
auucugcauuuauaucaaac

SEQ ID NO: 163234 - RNA, 14 nt, Human herpesvirus 6
auugcauucugggc

SEQ ID NO: 163235 - RNA, 19 nt, Human herpesvirus 6
auuucgguuucgucgcaaa

SEQ ID NO: 163236 - RNA, 13 nt, Human herpesvirus 6
caaaugauuuuac

SEQ ID NO: 163237 - RNA, 20 nt, Human herpesvirus 6
caaauucuuacauuuuguac

SEQ ID NO: 163238 - RNA, 13 nt, Human herpesvirus 6
auucguuacaauc

SEQ ID NO: 163239 - RNA, 16 nt, Human herpesvirus 6
auucguuuuuuuucuu

SEQ ID NO: 163240 - RNA, 14 nt, Human herpesvirus 6
auguucaauuacuc

SEQ ID NO: 163241 - RNA, 14 nt, Human herpesvirus 6
aguuuuugugcggc

SEQ ID NO: 163242 - RNA, 19 nt, Human herpesvirus 6
aucguagguaauuuuuauu

SEQ ID NO: 163243 - RNA, 13 nt, Human herpesvirus 6
caccuuuaucgac

SEQ ID NO: 163244 - RNA, 17 nt, Human herpesvirus 6
uguguuagcuuugcgau

SEQ ID NO: 163245 - RNA, 16 nt, Human herpesvirus 6
uuuaauaguuugccau

SEQ ID NO: 163246 - RNA, 23 nt, Human herpesvirus 6
ugaaccgcguauguuuuaucgag

SEQ ID NO: 163247 - RNA, 19 nt, Human herpesvirus 6
ucuagaauaucugcuaagu

SEQ ID NO: 163248 - RNA, 14 nt, Human herpesvirus 6
cgaaaaucgccagg

SEQ ID NO: 163249 - RNA, 14 nt, Human herpesvirus 6
cgcguacacgaaaa

SEQ ID NO: 163250 - RNA, 18 nt, Human herpesvirus 6
cgguccaaggauuaugau

SEQ ID NO: 163251 - RNA, 17 nt, Human herpesvirus 6
cuauugagauucuccgu

SEQ ID NO: 163252 - RNA, 16 nt, Human herpesvirus 6
cuauccgcccuccccg

SEQ ID NO: 163253 - RNA, 18 nt, Human herpesvirus 6
cucccaucccccuccccg

SEQ ID NO: 163254 - RNA, 18 nt, Human herpesvirus 6
cugguaaauuuuaucgaa

SEQ ID NO: 163255 - RNA, 20 nt, Human herpesvirus 6
gaaauuugagaaaguuguac

SEQ ID NO: 163256 - RNA, 15 nt, Human herpesvirus 6
cuuucaguauuaacu

SEQ ID NO: 163257 - RNA, 17 nt, Human herpesvirus 6
gaaguuagaaauuuuac

SEQ ID NO: 163258 - RNA, 22 nt, Human herpesvirus 6
gaaucagaucacucagauuuca

SEQ ID NO: 163259 - RNA, 18 nt, Human herpesvirus 6
gcuccgcgccccucgccc

SEQ ID NO: 163260 - RNA, 19 nt, Human herpesvirus 6
gcguuccgacucgauuuga

SEQ ID NO: 163261 - RNA, 23 nt, Human herpesvirus 6
gcuuucaaaaccgucaaccgcca

SEQ ID NO: 163262 - RNA, 20 nt, Human herpesvirus 6
ggcauagcagcaauaggcac

SEQ ID NO: 163263 - RNA, 14 nt, Human herpesvirus 6
aauucuuauuuacc

SEQ ID NO: 163264 - RNA, 19 nt, Human herpesvirus 6
accaauuccuuaauucuaa

SEQ ID NO: 163265 - RNA, 22 nt, Human herpesvirus 6
acagucacacacagggugcuua

SEQ ID NO: 163266 - RNA, 20 nt, Human herpesvirus 6
acaguuauacuggcaaagca

SEQ ID NO: 163267 - RNA, 18 nt, Human herpesvirus 6
acaguuuaccuauuuaca

SEQ ID NO: 163268 - RNA, 22 nt, Human herpesvirus 6
accgagagauuuacuguuucuu

SEQ ID NO: 163269 - RNA, 20 nt, Human herpesvirus 6
ccgauuaauguguuuuucuu

SEQ ID NO: 163270 - RNA, 23 nt, Human herpesvirus 6
ccgccuuuucuuauauuuuucug

SEQ ID NO: 163271 - RNA, 14 nt, Human herpesvirus 6
cagaagacuuuaaa

SEQ ID NO: 163272 - RNA, 18 nt, Human herpesvirus 6
caugcauuuuguauuuau

SEQ ID NO: 163273 - RNA, 16 nt, Human herpesvirus 6
cauguauuuauucacu

SEQ ID NO: 163274 - RNA, 14 nt, Human herpesvirus 6
ccaucuauacaccc

SEQ ID NO: 163275 - RNA, 18 nt, Human herpesvirus 6
ccagauacauaaacaccc

SEQ ID NO: 163276 - RNA, 17 nt, Human herpesvirus 6
ccagauacuacacaaac

SEQ ID NO: 163277 - RNA, 20 nt, Human herpesvirus 6B
gugaccguaucccucccugc

SEQ ID NO: 163278 - RNA, 10 nt, Human herpesvirus 6B
uacuuccugu

SEQ ID NO: 163279 - RNA, 13 nt, Homo sapiens
uggagucugucaa

SEQ ID NO: 163280 - RNA, 22 nt, Homo sapiens
agauacacaaucugaaacagcu

SEQ ID NO: 163281 - RNA, 23 nt, Homo sapiens
uaaaaaaaaaaaaaaaagugaug

SEQ ID NO: 163282 - RNA, 19 nt, Homo sapiens
uggaaauagugauuuccac

SEQ ID NO: 163283 - RNA, 23 nt, Homo sapiens
uccugaccucaaguaauccaccu

SEQ ID NO: 163284 - RNA, 13 nt, Homo sapiens
agagcuuuaccua

SEQ ID NO: 163285 - RNA, 16 nt, Homo sapiens
uucccauuaaagaagu

SEQ ID NO: 163286 - RNA, 12 nt, Homo sapiens
cacugccaaaga

SEQ ID NO: 163287 - RNA, 23 nt, Homo sapiens
agucuuguuguuuucccaaagag

SEQ ID NO: 163288 - RNA, 18 nt, Homo sapiens
ccagagcguguagugaau

SEQ ID NO: 163289 - RNA, 11 nt, Homo sapiens
accucaucucc

SEQ ID NO: 163290 - RNA, 18 nt, Homo sapiens
ccaaguccacaguggaac

SEQ ID NO: 163291 - RNA, 23 nt, Homo sapiens
uguuaagccauguguuccaaggc

SEQ ID NO: 163292 - RNA, 14 nt, Homo sapiens
uugcucacaaaagu

SEQ ID NO: 163293 - RNA, 15 nt, Homo sapiens
uugcaauguggcuug

SEQ ID NO: 163294 - RNA, 15 nt, Homo sapiens
gugagaggacucuga

SEQ ID NO: 163295 - RNA, 20 nt, Homo sapiens
auuugcuuagaaagucugau

SEQ ID NO: 163296 - RNA, 21 nt, Homo sapiens
ggcuucagucuuuuccaugaa

SEQ ID NO: 163297 - RNA, 16 nt, Homo sapiens
uuagagcuuuaccuaa

SEQ ID NO: 163298 - RNA, 13 nt, Homo sapiens
cacugauguauga

SEQ ID NO: 163299 - RNA, 17 nt, Homo sapiens
ccagagccucaaaugag

SEQ ID NO: 163300 - RNA, 19 nt, Homo sapiens
gcuucuuugaaacuuguau

SEQ ID NO: 163301 - RNA, 19 nt, Homo sapiens
accgcaggauuugggcucu

SEQ ID NO: 163302 - RNA, 14 nt, Homo sapiens
ugagcaaaaccaaa

SEQ ID NO: 163303 - RNA, 19 nt, Homo sapiens
cacagcaucagcucaagac

SEQ ID NO: 163304 - RNA, 20 nt, Homo sapiens
cucuuggguucaagugauuc

SEQ ID NO: 163305 - RNA, 16 nt, Homo sapiens
aggucagucuucuucc

SEQ ID NO: 163306 - RNA, 16 nt, Homo sapiens
ggggacacagcaucag

SEQ ID NO: 163307 - RNA, 20 nt, Homo sapiens
agcuguuuaugcauagauaa

SEQ ID NO: 163308 - RNA, 16 nt, Homo sapiens
aaguccacaguggaac

SEQ ID NO: 163309 - RNA, 14 nt, Homo sapiens
gucauaacuagaac

SEQ ID NO: 163310 - RNA, 18 nt, Homo sapiens
aauguccuacugagacag

SEQ ID NO: 163311 - RNA, 16 nt, Homo sapiens
acaagaacacugaaaa

SEQ ID NO: 163312 - RNA, 23 nt, Homo sapiens
guugauuucagcaccuacagugu

SEQ ID NO: 163313 - RNA, 16 nt, Homo sapiens
auggcaggacagcucc

SEQ ID NO: 163314 - RNA, 19 nt, Homo sapiens
uacaaaguaagccauguau

SEQ ID NO: 163315 - RNA, 22 nt, Homo sapiens
acagucuuguauuaaguuguua

SEQ ID NO: 163316 - RNA, 21 nt, Homo sapiens
aagggauggaagaaguaaaua

SEQ ID NO: 163317 - RNA, 19 nt, Homo sapiens
ugaccaauauuguacaguu

SEQ ID NO: 163318 - RNA, 18 nt, Homo sapiens
ccucccacugccaaagaa

SEQ ID NO: 163319 - RNA, 15 nt, Homo sapiens
acucaucauuuccau

SEQ ID NO: 163320 - RNA, 13 nt, Homo sapiens
uugucaacaaagu

SEQ ID NO: 163321 - RNA, 19 nt, Homo sapiens
guguacagucuuguauuaa

SEQ ID NO: 163322 - RNA, 20 nt, Homo sapiens
guuaaaauaaaauuguacau

SEQ ID NO: 163323 - RNA, 16 nt, Homo sapiens
augcaguuuuccuuaa

SEQ ID NO: 163324 - RNA, 13 nt, Homo sapiens
uuacuaaucuuuc

SEQ ID NO: 163325 - RNA, 21 nt, Homo sapiens
aauaguuguuauucuguaguu

SEQ ID NO: 163326 - RNA, 13 nt, Homo sapiens
caucauuuccauu

SEQ ID NO: 163327 - RNA, 14 nt, Homo sapiens
uguguuuuuaauaa

SEQ ID NO: 163328 - RNA, 20 nt, Homo sapiens
aguuuccaaauuauggcaaa

SEQ ID NO: 163329 - RNA, 18 nt, Homo sapiens
cucccagccagguucuga

SEQ ID NO: 163330 - RNA, 19 nt, Homo sapiens
uagcggggaggggguuauc

SEQ ID NO: 163331 - RNA, 22 nt, Homo sapiens
ucuuuaaccacuuuucaauguc

SEQ ID NO: 163332 - RNA, 15 nt, Homo sapiens
ccaaauuauggcaaa

SEQ ID NO: 163333 - RNA, 15 nt, Homo sapiens
uuuuccuguucuuaa

SEQ ID NO: 163334 - RNA, 12 nt, Homo sapiens
aaugaaagugag

SEQ ID NO: 163335 - RNA, 17 nt, Homo sapiens
uaaauauagcucaggua

SEQ ID NO: 163336 - RNA, 21 nt, Homo sapiens
uaagaagcagauaaugguguu

SEQ ID NO: 163337 - RNA, 20 nt, Homo sapiens
gaccugccaggcacacugag

SEQ ID NO: 163338 - RNA, 17 nt, Homo sapiens
cuuagccaagcaguuuc

SEQ ID NO: 163339 - RNA, 21 nt, Homo sapiens
gaaauucacuuccccucuagg

SEQ ID NO: 163340 - RNA, 21 nt, Homo sapiens
aauuuuauguuuaguugcaca

SEQ ID NO: 163341 - RNA, 23 nt, Homo sapiens
ccuaggaaagccaguuacauaaa

SEQ ID NO: 163342 - RNA, 18 nt, Homo sapiens
ucacugcaacuucugccu

SEQ ID NO: 163343 - RNA, 15 nt, Homo sapiens
cucuguaauugcaaa

SEQ ID NO: 163344 - RNA, 21 nt, Homo sapiens
aaaauuaagaaauucacuucc

SEQ ID NO: 163345 - RNA, 14 nt, Homo sapiens
ucaucucuuuauuc

SEQ ID NO: 163346 - RNA, 20 nt, Homo sapiens
uacacaaucugaaacagcuu

SEQ ID NO: 163347 - RNA, 14 nt, Homo sapiens
uauacaauauacuu

SEQ ID NO: 163348 - RNA, 21 nt, Homo sapiens
ugagcaaaaccaaauauucca

SEQ ID NO: 163349 - RNA, 17 nt, Homo sapiens
auccuggggaacauaga

SEQ ID NO: 163350 - RNA, 19 nt, Homo sapiens
ccacuauugcuugcacaaa

SEQ ID NO: 163351 - RNA, 14 nt, Homo sapiens
aaacaaucuuguca

SEQ ID NO: 163352 - RNA, 18 nt, Homo sapiens
ccacccucccacugccaa

SEQ ID NO: 163353 - RNA, 20 nt, Homo sapiens
cuauaagaugaaacaucauu

SEQ ID NO: 163354 - RNA, 22 nt, Homo sapiens
aaagccaaucucaaucccucaa

SEQ ID NO: 163355 - RNA, 21 nt, Homo sapiens
ucaaguaauccaccugccucg

SEQ ID NO: 163356 - RNA, 22 nt, Homo sapiens
gugaccugccaggcacacugag

SEQ ID NO: 163357 - RNA, 23 nt, Homo sapiens
aacuuggaaauagugauuuccac

SEQ ID NO: 163358 - RNA, 22 nt, Homo sapiens
gcccagacccuucuccuuagaa

SEQ ID NO: 163359 - RNA, 22 nt, Homo sapiens
uaagcugccuguacacaacuca

SEQ ID NO: 163360 - RNA, 19 nt, Homo sapiens
auuggaccagucagcacag

SEQ ID NO: 163361 - RNA, 23 nt, Homo sapiens
auauacuuauagaauucagucaa

SEQ ID NO: 163362 - RNA, 12 nt, Homo sapiens
uauuuuuacuaa

SEQ ID NO: 163363 - RNA, 22 nt, Homo sapiens
gaaaaagaagguugagggcaau

SEQ ID NO: 163364 - RNA, 13 nt, Homo sapiens
gaauaugcacaaa

SEQ ID NO: 163365 - RNA, 22 nt, Homo sapiens
uagucucuggcaagaugcuuua

SEQ ID NO: 163366 - RNA, 21 nt, Homo sapiens
guaaauuucucuacugucuca

SEQ ID NO: 163367 - RNA, 18 nt, Homo sapiens
cuugacuuuugaaaacaa

SEQ ID NO: 163368 - RNA, 14 nt, Homo sapiens
cuagucaguuggcu

SEQ ID NO: 163369 - RNA, 13 nt, Homo sapiens
cagagcaaacaga

SEQ ID NO: 163370 - RNA, 16 nt, Homo sapiens
ugagucccagagccaa

SEQ ID NO: 163371 - RNA, 19 nt, Homo sapiens
gaguacaaaguaagccaug

SEQ ID NO: 163372 - RNA, 20 nt, Homo sapiens
uagauaaucucuccauuccc

SEQ ID NO: 163373 - RNA, 16 nt, Homo sapiens
ugcaaugacacagucu

SEQ ID NO: 163374 - RNA, 22 nt, Homo sapiens
gcgcaguuggucuuuaaccacu

SEQ ID NO: 163375 - RNA, 19 nt, Homo sapiens
auuaucuaaaaucugcuag

SEQ ID NO: 163376 - RNA, 18 nt, Homo sapiens
uuuaaaugaaagugagac

SEQ ID NO: 163377 - RNA, 14 nt, Homo sapiens
gucugaacaauaua

SEQ ID NO: 163378 - RNA, 21 nt, Homo sapiens
ugcacaaauugggccaaagaa

SEQ ID NO: 163379 - RNA, 22 nt, Homo sapiens
uaggaagaauuuuuauauccac

SEQ ID NO: 163380 - RNA, 19 nt, Homo sapiens
guagaaaagggaacugaac

SEQ ID NO: 163381 - RNA, 14 nt, Homo sapiens
uuugucaacaaagu

SEQ ID NO: 163382 - RNA, 18 nt, Homo sapiens
caaggucuccagagggug

SEQ ID NO: 163383 - RNA, 21 nt, Homo sapiens
cucugauguagcuuauacaaa

SEQ ID NO: 163384 - RNA, 21 nt, Homo sapiens
auuuuacuuuuuccuggcuca

SEQ ID NO: 163385 - RNA, 11 nt, Homo sapiens
aguugcuguau

SEQ ID NO: 163386 - RNA, 23 nt, Homo sapiens
uuacuguucuaaggcugugccau

SEQ ID NO: 163387 - RNA, 21 nt, Homo sapiens
gaauucagucaaagauacaca

SEQ ID NO: 163388 - RNA, 21 nt, Homo sapiens
cuaugauuguccguaggccca

SEQ ID NO: 163389 - RNA, 15 nt, Homo sapiens
cucaggcagaucuca

SEQ ID NO: 163390 - RNA, 16 nt, Homo sapiens
caaauauuccagagac

SEQ ID NO: 163391 - RNA, 15 nt, Homo sapiens
agggagaagagggaa

SEQ ID NO: 163392 - RNA, 18 nt, Homo sapiens
uagcauuugucaacaaag

SEQ ID NO: 163393 - RNA, 14 nt, Homo sapiens
caauagaaauccaa

SEQ ID NO: 163394 - RNA, 20 nt, Homo sapiens
cuccugaccucaaguaaucc

SEQ ID NO: 163395 - RNA, 13 nt, Homo sapiens
gaauuaagcacag

SEQ ID NO: 163396 - RNA, 22 nt, Homo sapiens
guaaaauaaucaguguuuccaa

SEQ ID NO: 163397 - RNA, 22 nt, Homo sapiens
uacugcuggcaguggaacuaag

SEQ ID NO: 163398 - RNA, 21 nt, Homo sapiens
ggucagaguuccgacugccau

SEQ ID NO: 163399 - RNA, 13 nt, Homo sapiens
ccuccaaguccac

SEQ ID NO: 163400 - RNA, 13 nt, Homo sapiens
aucugaacuccuu

SEQ ID NO: 163401 - RNA, 22 nt, Homo sapiens
ucagcaccuacaguguacaguc

SEQ ID NO: 163402 - RNA, 14 nt, Homo sapiens
acguaagacugugu

SEQ ID NO: 163403 - RNA, 19 nt, Homo sapiens
gcuucuuaaaauagccaua

SEQ ID NO: 163404 - RNA, 22 nt, Homo sapiens
ccauuagcauuugucaacaaag

SEQ ID NO: 163405 - RNA, 19 nt, Homo sapiens
ccaaagcccaaagugguau

SEQ ID NO: 163406 - RNA, 14 nt, Homo sapiens
aaaaggcagaguac

SEQ ID NO: 163407 - RNA, 23 nt, Homo sapiens
caguugcagcuguuuuguugaca

SEQ ID NO: 163408 - RNA, 12 nt, Homo sapiens
aauaaagacagg

SEQ ID NO: 163409 - RNA, 17 nt, Homo sapiens
aaauaaucaguguuucc

SEQ ID NO: 163410 - RNA, 23 nt, Homo sapiens
uagugauuuccacagugacucca

SEQ ID NO: 163411 - RNA, 15 nt, Homo sapiens
agagggaaaacagaa

SEQ ID NO: 163412 - RNA, 20 nt, Homo sapiens
gcacaaauugggccaaagaa

SEQ ID NO: 163413 - RNA, 22 nt, Homo sapiens
uagaaccucgagguuucucaaa

SEQ ID NO: 163414 - RNA, 16 nt, Homo sapiens
uauaaaagacugacca

SEQ ID NO: 163415 - RNA, 18 nt, Homo sapiens
uguuguuuucccaaagag

SEQ ID NO: 163416 - RNA, 14 nt, Homo sapiens
uguagaaagugauc

SEQ ID NO: 163417 - RNA, 19 nt, Homo sapiens
gacuuugaggguguauauu

SEQ ID NO: 163418 - RNA, 22 nt, Homo sapiens
gccuaggaaagccaguuacaua

SEQ ID NO: 163419 - RNA, 20 nt, Homo sapiens
gacucuaacaguaguugcaa

SEQ ID NO: 163420 - RNA, 12 nt, Homo sapiens
aaguaagccaug

SEQ ID NO: 163421 - RNA, 11 nt, Homo sapiens
auaguuuccaa

SEQ ID NO: 163422 - RNA, 14 nt, Homo sapiens
uuuauugcuuguug

SEQ ID NO: 163423 - RNA, 15 nt, Homo sapiens
uaauaaagacagggu

SEQ ID NO: 163424 - RNA, 15 nt, Homo sapiens
aauguauuugcuaua

SEQ ID NO: 163425 - RNA, 21 nt, Homo sapiens
gaguucauggauauguuauac

SEQ ID NO: 163426 - RNA, 18 nt, Homo sapiens
acauuuguuuguggucua

SEQ ID NO: 163427 - RNA, 13 nt, Homo sapiens
ugggauuacaggg

SEQ ID NO: 163428 - RNA, 13 nt, Homo sapiens
gcauucucuaguc

SEQ ID NO: 163429 - RNA, 15 nt, Homo sapiens
aaauuucucuacugu

SEQ ID NO: 163430 - RNA, 18 nt, Homo sapiens
ggguuucaccauguuggc

SEQ ID NO: 163431 - RNA, 13 nt, Homo sapiens
cuugcacaaacca

SEQ ID NO: 163432 - RNA, 16 nt, Homo sapiens
uuucauaucacacugu

SEQ ID NO: 163433 - RNA, 13 nt, Homo sapiens
gccauaugaauaa

SEQ ID NO: 163434 - RNA, 22 nt, Homo sapiens
caaagaacuuggaaauagugau

SEQ ID NO: 163435 - RNA, 21 nt, Homo sapiens
guauaguuaaccacuaccgaa

SEQ ID NO: 163436 - RNA, 16 nt, Homo sapiens
aacguaagacugugua

SEQ ID NO: 163437 - RNA, 18 nt, Homo sapiens
uggaaauagugauuucca

SEQ ID NO: 163438 - RNA, 23 nt, Homo sapiens
gagacagcacagccaaccuagcu

SEQ ID NO: 163439 - RNA, 14 nt, Homo sapiens
uuuucuugucuaua

SEQ ID NO: 163440 - RNA, 16 nt, Homo sapiens
aguugcaauguuuuag

SEQ ID NO: 163441 - RNA, 12 nt, Homo sapiens
gccaagcaguuu

SEQ ID NO: 163442 - RNA, 23 nt, Homo sapiens
aagaauuuuuauauccacuaaaa

SEQ ID NO: 163443 - RNA, 20 nt, Homo sapiens
cuccccuguucauucugcau

SEQ ID NO: 163444 - RNA, 18 nt, Homo sapiens
gcgcccagccucaucucu

SEQ ID NO: 163445 - RNA, 22 nt, Homo sapiens
cuguagaaaagggaacugaaca

SEQ ID NO: 163446 - RNA, 11 nt, Homo sapiens
uaaaagccauc

SEQ ID NO: 163447 - RNA, 17 nt, Homo sapiens
gaaaagggaacugaaca

SEQ ID NO: 163448 - RNA, 18 nt, Homo sapiens
uugcacaaauugggccaa

SEQ ID NO: 163449 - RNA, 21 nt, Homo sapiens
ugaugcuggggacacagcauc

SEQ ID NO: 163450 - RNA, 18 nt, Homo sapiens
aauucagggagugggcua

SEQ ID NO: 163451 - RNA, 18 nt, Homo sapiens
aauaugacacucuaguca

SEQ ID NO: 163452 - RNA, 22 nt, Homo sapiens
uguuucaaacaaaaagucauaa

SEQ ID NO: 163453 - RNA, 15 nt, Homo sapiens
uccuccccuguucau

SEQ ID NO: 163454 - RNA, 19 nt, Homo sapiens
caaucaguagccagcaucu

SEQ ID NO: 163455 - RNA, 21 nt, Homo sapiens
aaagcccuuaaaaauaugugu

SEQ ID NO: 163456 - RNA, 15 nt, Homo sapiens
caaauauuccagaga

SEQ ID NO: 163457 - RNA, 23 nt, Homo sapiens
gucaauguccuacugagacagca

SEQ ID NO: 163458 - RNA, 16 nt, Homo sapiens
gaguuccgacugccau

SEQ ID NO: 163459 - RNA, 13 nt, Homo sapiens
ucuuccaucaccu

SEQ ID NO: 163460 - RNA, 17 nt, Homo sapiens
uuaugaauaguuuccaa

SEQ ID NO: 163461 - RNA, 14 nt, Homo sapiens
cuggccuccaaguc

SEQ ID NO: 163462 - RNA, 22 nt, Homo sapiens
caccgcgcccagccucaucucu

SEQ ID NO: 163463 - RNA, 18 nt, Homo sapiens
ugguuuuucaguuuucag

SEQ ID NO: 163464 - RNA, 15 nt, Homo sapiens
acaaaguaagccaug

SEQ ID NO: 163465 - RNA, 17 nt, Homo sapiens
ggcugugccaucagcuc

SEQ ID NO: 163466 - RNA, 11 nt, Homo sapiens
ggcucaucucu

SEQ ID NO: 163467 - RNA, 23 nt, Homo sapiens
gcaaaaccaaauauuccagagac

SEQ ID NO: 163468 - RNA, 18 nt, Homo sapiens
gcccaggcuggagugcaa

SEQ ID NO: 163469 - RNA, 15 nt, Homo sapiens
cagagccucaaauga

SEQ ID NO: 163470 - RNA, 15 nt, Homo sapiens
uaacauggugugcuu

SEQ ID NO: 163471 - RNA, 18 nt, Homo sapiens
cagaguuccgacugccau

SEQ ID NO: 163472 - RNA, 20 nt, Homo sapiens
accaaauacuuuaauguaua

SEQ ID NO: 163473 - RNA, 19 nt, Homo sapiens
cuuaugcaaauaaccauug

SEQ ID NO: 163474 - RNA, 16 nt, Homo sapiens
cauaacaggagugcca

SEQ ID NO: 163475 - RNA, 13 nt, Homo sapiens
aagcauucuucaa

SEQ ID NO: 163476 - RNA, 14 nt, Homo sapiens
ccuggggcuucuga

SEQ ID NO: 163477 - RNA, 17 nt, Homo sapiens
ucuccuuagaaguggaa

SEQ ID NO: 163478 - RNA, 13 nt, Homo sapiens
agucuucuuccau

SEQ ID NO: 163479 - RNA, 19 nt, Homo sapiens
uuggauacgacaacuugca

SEQ ID NO: 163480 - RNA, 14 nt, Homo sapiens
uaguaaaagccauc

SEQ ID NO: 163481 - RNA, 11 nt, Homo sapiens
gccucaucucu

SEQ ID NO: 163482 - RNA, 20 nt, Homo sapiens
cucgugguaggacuguagaa

SEQ ID NO: 163483 - RNA, 16 nt, Homo sapiens
uagaucugaacuccuu

SEQ ID NO: 163484 - RNA, 23 nt, Homo sapiens
gucucauaaugcauguggcacuu

SEQ ID NO: 163485 - RNA, 18 nt, Homo sapiens
gucugauuguagcuauga

SEQ ID NO: 163486 - RNA, 17 nt, Homo sapiens
agucuuagagcuuuacc

SEQ ID NO: 163487 - RNA, 22 nt, Homo sapiens
agauucuaauggcuuuauugca

SEQ ID NO: 163488 - RNA, 17 nt, Homo sapiens
gaauuucuguucuucca

SEQ ID NO: 163489 - RNA, 15 nt, Homo sapiens
gaauguaaugguggc

SEQ ID NO: 163490 - RNA, 21 nt, Homo sapiens
cauucccguggaacguuuuuc

SEQ ID NO: 163491 - RNA, 19 nt, Homo sapiens
caugggagacacugaugua

SEQ ID NO: 163492 - RNA, 21 nt, Homo sapiens
ucaugggguggacucuaacag

SEQ ID NO: 163493 - RNA, 23 nt, Homo sapiens
uuuauacucaggcagaucucagc

SEQ ID NO: 163494 - RNA, 16 nt, Homo sapiens
ugaaguuuaauugacu

SEQ ID NO: 163495 - RNA, 16 nt, Homo sapiens
ucaaacaaaaagucau

SEQ ID NO: 163496 - RNA, 21 nt, Homo sapiens
uuggacucaagcaagauuuca

SEQ ID NO: 163497 - RNA, 12 nt, Homo sapiens
uuugcuguagaa

SEQ ID NO: 163498 - RNA, 20 nt, Homo sapiens
cagcuguuuaugcauagaua

SEQ ID NO: 163499 - RNA, 15 nt, Homo sapiens
ugguuauauguauau

SEQ ID NO: 163500 - RNA, 15 nt, Homo sapiens
ggaccaggucucaua

SEQ ID NO: 163501 - RNA, 15 nt, Homo sapiens
cgacaacuugcacgu

SEQ ID NO: 163502 - RNA, 16 nt, Homo sapiens
cgugauuuugcuguag

SEQ ID NO: 163503 - RNA, 13 nt, Homo sapiens
aagccuugguaaa

SEQ ID NO: 163504 - RNA, 21 nt, Homo sapiens
aagaauuuuuauauccacuaa

SEQ ID NO: 163505 - RNA, 22 nt, Homo sapiens
uaccuuuuauuuuaauguuucc

SEQ ID NO: 163506 - RNA, 24 nt, Homo sapiens
ggacagcuccuggaccaggcccau

SEQ ID NO: 163507 - RNA, 17 nt, Homo sapiens
caggacagcuccuggac

SEQ ID NO: 163508 - RNA, 22 nt, Homo sapiens
uagugaaucacguaaagcuaga

SEQ ID NO: 163509 - RNA, 17 nt, Homo sapiens
caaauugggccaaagaa

SEQ ID NO: 163510 - RNA, 19 nt, Homo sapiens
uagugcacagcacaaauua

SEQ ID NO: 163511 - RNA, 13 nt, Homo sapiens
gucuuguguuucu

SEQ ID NO: 163512 - RNA, 20 nt, Homo sapiens
uuucuugucuauaaagcauu

SEQ ID NO: 163513 - RNA, 17 nt, Homo sapiens
cuaaguguaccagagaa

SEQ ID NO: 163514 - RNA, 23 nt, Homo sapiens
aaaaccguaugagggaacugugu

SEQ ID NO: 163515 - RNA, 15 nt, Homo sapiens
aguuguuaauaaaag

SEQ ID NO: 163516 - RNA, 20 nt, Homo sapiens
aagugagcuccuaagccaug

SEQ ID NO: 163517 - RNA, 21 nt, Homo sapiens
augucuuuauuaaauguagaa

SEQ ID NO: 163518 - RNA, 15 nt, Homo sapiens
uccacagugacucca

SEQ ID NO: 163519 - RNA, 20 nt, Homo sapiens
uguucugguuacuguucuaa

SEQ ID NO: 163520 - RNA, 21 nt, Homo sapiens
gguaaaauaaucaguguuucc

SEQ ID NO: 163521 - RNA, 23 nt, Homo sapiens
cuuuuuuuuuuuuuaaagacaga

SEQ ID NO: 163522 - RNA, 17 nt, Homo sapiens
gacucuuggcacagcau

SEQ ID NO: 163523 - RNA, 14 nt, Homo sapiens
uuaauaaaaguaca

SEQ ID NO: 163524 - RNA, 18 nt, Homo sapiens
cauuuguuuuagucugaa

SEQ ID NO: 163525 - RNA, 16 nt, Homo sapiens
acccuucuccuuagaa

SEQ ID NO: 163526 - RNA, 20 nt, Homo sapiens
ccaggcuggagugcaaugac

SEQ ID NO: 163527 - RNA, 16 nt, Homo sapiens
uuuaauguuuccuuua

SEQ ID NO: 163528 - RNA, 18 nt, Homo sapiens
aaguucuuaguugcugua

SEQ ID NO: 163529 - RNA, 17 nt, Homo sapiens
uggcacuuauaaccaaa

SEQ ID NO: 163530 - RNA, 14 nt, Homo sapiens
ugagaaaaugucuu

SEQ ID NO: 163531 - RNA, 18 nt, Homo sapiens
auuaagaaauucacuucc

SEQ ID NO: 163532 - RNA, 22 nt, Homo sapiens
agcagaugguggagcugaauau

SEQ ID NO: 163533 - RNA, 20 nt, Homo sapiens
uguguuuuuaauaaagacag

SEQ ID NO: 163534 - RNA, 15 nt, Homo sapiens
cuuuauacucaggca

SEQ ID NO: 163535 - RNA, 22 nt, Homo sapiens
cuuuaguuuuugugaaguuuaa

SEQ ID NO: 163536 - RNA, 9 nt, Homo sapiens
aaagugaug

SEQ ID NO: 163537 - RNA, 16 nt, Homo sapiens
agucugauuguagcua

SEQ ID NO: 163538 - RNA, 14 nt, Homo sapiens
auagaauucaguca

SEQ ID NO: 163539 - RNA, 14 nt, Homo sapiens
cucaucauuuccau

SEQ ID NO: 163540 - RNA, 12 nt, Homo sapiens
ugaacauuccag

SEQ ID NO: 163541 - RNA, 16 nt, Homo sapiens
gcuccauucaaaguga

SEQ ID NO: 163542 - RNA, 17 nt, Homo sapiens
uucuuccaugucuauua

SEQ ID NO: 163543 - RNA, 14 nt, Homo sapiens
uguuaacugaaugc

SEQ ID NO: 163544 - RNA, 16 nt, Homo sapiens
uauugaacuuaugcaa

SEQ ID NO: 163545 - RNA, 13 nt, Homo sapiens
aaacaucauuuca

SEQ ID NO: 163546 - RNA, 15 nt, Homo sapiens
augaauaguuuccaa

SEQ ID NO: 163547 - RNA, 13 nt, Homo sapiens
aguaaaagccauc

SEQ ID NO: 163548 - RNA, 19 nt, Homo sapiens
agugauucuccugccucag

SEQ ID NO: 163549 - RNA, 19 nt, Homo sapiens
aguuuauacccguuucaca

SEQ ID NO: 163550 - RNA, 23 nt, Homo sapiens
ucuuaagacgugauuuugcugua

SEQ ID NO: 163551 - RNA, 21 nt, Homo sapiens
ucucccagccagguucugacu

SEQ ID NO: 163552 - RNA, 19 nt, Homo sapiens
auugcuugcacaaaccaau

SEQ ID NO: 163553 - RNA, 15 nt, Homo sapiens
cacagcaucagcuca

SEQ ID NO: 163554 - RNA, 23 nt, Homo sapiens
aaaacuucaacguaagacugugu

SEQ ID NO: 163555 - RNA, 13 nt, Homo sapiens
ccaggggagaccc

SEQ ID NO: 163556 - RNA, 18 nt, Homo sapiens
cagaaagcuagaaagugu

SEQ ID NO: 163557 - RNA, 18 nt, Homo sapiens
cuucuuuacuuaguucaa

SEQ ID NO: 163558 - RNA, 17 nt, Homo sapiens
cacauuuuucagauaua

SEQ ID NO: 163559 - RNA, 16 nt, Homo sapiens
gucagucuucuuccau

SEQ ID NO: 163560 - RNA, 23 nt, Homo sapiens
aauuuuauguuuaguugcacaaa

SEQ ID NO: 163561 - RNA, 18 nt, Homo sapiens
ggagccccugcucuggug

SEQ ID NO: 163562 - RNA, 15 nt, Homo sapiens
augggagacacugau

SEQ ID NO: 163563 - RNA, 15 nt, Homo sapiens
gagggaacuguguag

SEQ ID NO: 163564 - RNA, 20 nt, Homo sapiens
cagagcagagaggcugaaua

SEQ ID NO: 163565 - RNA, 23 nt, Homo sapiens
aacaguaguugcaauguuuuaga

SEQ ID NO: 163566 - RNA, 13 nt, Homo sapiens
gucuauuagcucc

SEQ ID NO: 163567 - RNA, 16 nt, Homo sapiens
cuucuuuuugcuucaa

SEQ ID NO: 163568 - RNA, 21 nt, Homo sapiens
ugugaccauuagcauuuguca

SEQ ID NO: 163569 - RNA, 21 nt, Homo sapiens
auaacuuuuuuuuaaguuaca

SEQ ID NO: 163570 - RNA, 23 nt, Homo sapiens
aaucaguguuuccaaucuguccu

SEQ ID NO: 163571 - RNA, 16 nt, Homo sapiens
uacuauuuuuacuaau

SEQ ID NO: 163572 - RNA, 13 nt, Homo sapiens
ggauuacagggau

SEQ ID NO: 163573 - RNA, 22 nt, Homo sapiens
auauacuuauagaauucaguca

SEQ ID NO: 163574 - RNA, 18 nt, Homo sapiens
accaacuauagaauguau

SEQ ID NO: 163575 - RNA, 10 nt, Homo sapiens
aaacuuguau

SEQ ID NO: 163576 - RNA, 20 nt, Homo sapiens
auuagcauuugucaacaaag

SEQ ID NO: 163577 - RNA, 21 nt, Homo sapiens
cacuucccacuauugcuugca

SEQ ID NO: 163578 - RNA, 21 nt, Homo sapiens
accgcgcccagccucaucucu

SEQ ID NO: 163579 - RNA, 12 nt, Homo sapiens
uuuaaagacaga

SEQ ID NO: 163580 - RNA, 16 nt, Homo sapiens
cacccuccauucugca

SEQ ID NO: 163581 - RNA, 11 nt, Homo sapiens
ccacucagguc

SEQ ID NO: 163582 - RNA, 14 nt, Homo sapiens
gcuaauauugcaau

SEQ ID NO: 163583 - RNA, 13 nt, Homo sapiens
agguugagggcaa

SEQ ID NO: 163584 - RNA, 15 nt, Homo sapiens
aaccguacacugugu

SEQ ID NO: 163585 - RNA, 17 nt, Homo sapiens
acuuacuucucugcuau

SEQ ID NO: 163586 - RNA, 24 nt, Homo sapiens
aaucccucaaaacaaucuugucau

SEQ ID NO: 163587 - RNA, 15 nt, Homo sapiens
gcuaguaaaagccau

SEQ ID NO: 163588 - RNA, 14 nt, Homo sapiens
aacaucauuucaau

SEQ ID NO: 163589 - RNA, 14 nt, Homo sapiens
guccacaguggaac

SEQ ID NO: 163590 - RNA, 13 nt, Homo sapiens
uucuuuucugacu

SEQ ID NO: 163591 - RNA, 13 nt, Homo sapiens
ugcaauguuuuag

SEQ ID NO: 163592 - RNA, 13 nt, Homo sapiens
gggagacacugau

SEQ ID NO: 163593 - RNA, 14 nt, Homo sapiens
ucuaauggcuuuau

SEQ ID NO: 163594 - RNA, 20 nt, Homo sapiens
gcccaggcuggagugcaaug

SEQ ID NO: 163595 - RNA, 18 nt, Homo sapiens
guuuuacuguccaaagac

SEQ ID NO: 163596 - RNA, 14 nt, Homo sapiens
ccagagacugggac

SEQ ID NO: 163597 - RNA, 13 nt, Homo sapiens
cagaaaaagaagg

SEQ ID NO: 163598 - RNA, 17 nt, Homo sapiens
gaaugagcaaaaccaaa

SEQ ID NO: 163599 - RNA, 23 nt, Homo sapiens
agaauauuauuggaaaauucucu

SEQ ID NO: 163600 - RNA, 13 nt, Homo sapiens
gugauauguuggu

SEQ ID NO: 163601 - RNA, 17 nt, Homo sapiens
cuccuggaccaggucuc

SEQ ID NO: 163602 - RNA, 16 nt, Homo sapiens
ucauuguaaaaagccc

SEQ ID NO: 163603 - RNA, 22 nt, Homo sapiens
uggggacacagcaucagcucaa

SEQ ID NO: 163604 - RNA, 14 nt, Homo sapiens
guuuucccaaagag

SEQ ID NO: 163605 - RNA, 15 nt, Homo sapiens
acacaaucugaaaca

SEQ ID NO: 163606 - RNA, 15 nt, Homo sapiens
caaucugaaacagcu

SEQ ID NO: 163607 - RNA, 22 nt, Homo sapiens
aucccucaaaacaaucuuguca

SEQ ID NO: 163608 - RNA, 23 nt, Homo sapiens
cacagccaaccuagcuagcaaca

SEQ ID NO: 163609 - RNA, 15 nt, Homo sapiens
cuagaguucauggau

SEQ ID NO: 163610 - RNA, 13 nt, Homo sapiens
uucagaaucucuc

SEQ ID NO: 163611 - RNA, 22 nt, Homo sapiens
ggcuaagcacgggccauaugaa

SEQ ID NO: 163612 - RNA, 22 nt, Homo sapiens
gaaaagaaucggcaauguuuca

SEQ ID NO: 163613 - RNA, 10 nt, Homo sapiens
aaaagugaug

SEQ ID NO: 163614 - RNA, 19 nt, Homo sapiens
uguuuuuaauaaagacagg

SEQ ID NO: 163615 - RNA, 21 nt, Homo sapiens
accuucaguugucucugaugu

SEQ ID NO: 163616 - RNA, 22 nt, Homo sapiens
agacagcacagccaaccuagcu

SEQ ID NO: 163617 - RNA, 20 nt, Homo sapiens
gaguucauggauauguuaua

SEQ ID NO: 163618 - RNA, 20 nt, Homo sapiens
gucagaguuccgacugccau

SEQ ID NO: 163619 - RNA, 22 nt, Homo sapiens
ggcugucagauauaaguaacuu

SEQ ID NO: 163620 - RNA, 14 nt, Homo sapiens
caauagauauuuac

SEQ ID NO: 163621 - RNA, 20 nt, Homo sapiens
augcuggggacacagcauca

SEQ ID NO: 163622 - RNA, 20 nt, Homo sapiens
uuuuuacuaaucuuucugca

SEQ ID NO: 163623 - RNA, 22 nt, Homo sapiens
uaaccaaagcccaaagugguau

SEQ ID NO: 163624 - RNA, 20 nt, Homo sapiens
ugcccaggcuggagugcaau

SEQ ID NO: 163625 - RNA, 21 nt, Homo sapiens
caugucuauuagcuccacaaa

SEQ ID NO: 163626 - RNA, 17 nt, Homo sapiens
cugcuagggaauaucaa

SEQ ID NO: 163627 - RNA, 19 nt, Homo sapiens
agauaaccucaagucacau

SEQ ID NO: 163628 - RNA, 16 nt, Homo sapiens
ccuggaccaggucuca

SEQ ID NO: 163629 - RNA, 20 nt, Homo sapiens
auaaaggggagggacucauc

SEQ ID NO: 163630 - RNA, 11 nt, Homo sapiens
agaagaugaau

SEQ ID NO: 163631 - RNA, 19 nt, Homo sapiens
gaccugccaggcacacuga

SEQ ID NO: 163632 - RNA, 19 nt, Homo sapiens
ucaaaacaaucuugucaua

SEQ ID NO: 163633 - RNA, 24 nt, Homo sapiens
cuugguaaaauaaucaguguuucc

SEQ ID NO: 163634 - RNA, 19 nt, Homo sapiens
agaugaaacaucauuucaa

SEQ ID NO: 163635 - RNA, 19 nt, Homo sapiens
ugagucccagagccaauca

SEQ ID NO: 163636 - RNA, 17 nt, Homo sapiens
caggcuggagugcaaug

SEQ ID NO: 163637 - RNA, 20 nt, Homo sapiens
gcagaugguggagcugaaua

SEQ ID NO: 163638 - RNA, 20 nt, Homo sapiens
aaccaaauacuuuaauguau

SEQ ID NO: 163639 - RNA, 22 nt, Homo sapiens
ucaagugauucuccugccucag

SEQ ID NO: 163640 - RNA, 20 nt, Homo sapiens
uccuuggcuucuuuacuuag

SEQ ID NO: 163641 - RNA, 18 nt, Homo sapiens
acuuuugaaaacaaaaua

SEQ ID NO: 163642 - RNA, 23 nt, Homo sapiens
ugggucagaguuccgacugccau

SEQ ID NO: 163643 - RNA, 14 nt, Homo sapiens
uccaaagacauguu

SEQ ID NO: 163644 - RNA, 17 nt, Homo sapiens
ucaaaacaaucuuguca

SEQ ID NO: 163645 - RNA, 22 nt, Homo sapiens
ccucaaaugagaaaaugucuuu

SEQ ID NO: 163646 - RNA, 16 nt, Homo sapiens
uaauaaaaguacaugu

SEQ ID NO: 163647 - RNA, 23 nt, Homo sapiens
gauauguuauacugaaccaggcc

SEQ ID NO: 163648 - RNA, 17 nt, Homo sapiens
caaacuccugaccucaa

SEQ ID NO: 163649 - RNA, 21 nt, Homo sapiens
agcuagcaacauuuguuuuag

SEQ ID NO: 163650 - RNA, 16 nt, Homo sapiens
ugcauucucuagucag

SEQ ID NO: 163651 - RNA, 20 nt, Homo sapiens
auuccacaaccugguuugcc

SEQ ID NO: 163652 - RNA, 14 nt, Homo sapiens
gcuccuaagccaug

SEQ ID NO: 163653 - RNA, 22 nt, Homo sapiens
cuguuuugguuuugcucacaaa

SEQ ID NO: 163654 - RNA, 17 nt, Homo sapiens
ugggagacacugaugua

SEQ ID NO: 163655 - RNA, 19 nt, Homo sapiens
ccuuggcuaguaaaagcca

SEQ ID NO: 163656 - RNA, 18 nt, Homo sapiens
caucccgucgacguagaa

SEQ ID NO: 163657 - RNA, 18 nt, Homo sapiens
acaaauugggccaaagaa

SEQ ID NO: 163658 - RNA, 11 nt, Homo sapiens
uucaagugauu

SEQ ID NO: 163659 - RNA, 19 nt, Homo sapiens
cuccuggaccaggucucau

SEQ ID NO: 163660 - RNA, 18 nt, Homo sapiens
gcaaacagaaaaagaagg

SEQ ID NO: 163661 - RNA, 11 nt, Homo sapiens
ugaacauucca

SEQ ID NO: 163662 - RNA, 18 nt, Homo sapiens
uccagagacugggacuaa

SEQ ID NO: 163663 - RNA, 19 nt, Homo sapiens
accaggucucauaaugcau

SEQ ID NO: 163664 - RNA, 15 nt, Homo sapiens
uuuaauagcgucaua

SEQ ID NO: 163665 - RNA, 11 nt, Homo sapiens
aagacugacca

SEQ ID NO: 163666 - RNA, 16 nt, Homo sapiens
acuuacuuaguguuau

SEQ ID NO: 163667 - RNA, 20 nt, Homo sapiens
uacacauuuuucagauauaa

SEQ ID NO: 163668 - RNA, 12 nt, Homo sapiens
acugagccagca

SEQ ID NO: 163669 - RNA, 20 nt, Homo sapiens
aaguaaauauagcucaggua

SEQ ID NO: 163670 - RNA, 21 nt, Homo sapiens
caggguuucaccauguuggcc

SEQ ID NO: 163671 - RNA, 20 nt, Homo sapiens
aaaauaaucaguguuuccaa

SEQ ID NO: 163672 - RNA, 16 nt, Homo sapiens
cuuaaaauagccauaa

SEQ ID NO: 163673 - RNA, 16 nt, Homo sapiens
ucacguaaagcuagaa

SEQ ID NO: 163674 - RNA, 14 nt, Homo sapiens
ugggagacacugau

SEQ ID NO: 163675 - RNA, 22 nt, Homo sapiens
gacucuauuaaaaucuucaaua

SEQ ID NO: 163676 - RNA, 12 nt, Homo sapiens
guucauucugca

SEQ ID NO: 163677 - RNA, 16 nt, Homo sapiens
gcauuugucaacaaag

SEQ ID NO: 163678 - RNA, 19 nt, Homo sapiens
agaaguaaauauagcucag

SEQ ID NO: 163679 - RNA, 23 nt, Homo sapiens
uuaaaaggaaagcagauggugga

SEQ ID NO: 163680 - RNA, 14 nt, Homo sapiens
aucaguguuuccaa

SEQ ID NO: 163681 - RNA, 16 nt, Homo sapiens
caggcuggagugcaau

SEQ ID NO: 163682 - RNA, 15 nt, Homo sapiens
guuuccaaucugucc

SEQ ID NO: 163683 - RNA, 22 nt, Homo sapiens
aguuccgacugccaucuuggac

SEQ ID NO: 163684 - RNA, 16 nt, Homo sapiens
aaagugauccauacuu

SEQ ID NO: 163685 - RNA, 15 nt, Homo sapiens
uggggacacagcauc

SEQ ID NO: 163686 - RNA, 17 nt, Homo sapiens
aggagugccacuucaug

SEQ ID NO: 163687 - RNA, 13 nt, Homo sapiens
augaaacaucauu

SEQ ID NO: 163688 - RNA, 17 nt, Homo sapiens
guucugguuacuguucu

SEQ ID NO: 163689 - RNA, 14 nt, Homo sapiens
uacuuaguucaagc

SEQ ID NO: 163690 - RNA, 14 nt, Homo sapiens
agccucaucucuuu

SEQ ID NO: 163691 - RNA, 19 nt, Homo sapiens
ucagaguuccgacugccau

SEQ ID NO: 163692 - RNA, 11 nt, Homo sapiens
gaaaacagaaa

SEQ ID NO: 163693 - RNA, 17 nt, Homo sapiens
uagcauuugucaacaaa

SEQ ID NO: 163694 - RNA, 17 nt, Homo sapiens
cauacuagaguucaugg

SEQ ID NO: 163695 - RNA, 21 nt, Homo sapiens
acugcauaugaaaggacacua

SEQ ID NO: 163696 - RNA, 23 nt, Homo sapiens
uguaagaucguucucugccucac

SEQ ID NO: 163697 - RNA, 23 nt, Homo sapiens
cuucucugcuaucuagaucugaa

SEQ ID NO: 163698 - RNA, 17 nt, Homo sapiens
gcaauggacaaggaagg

SEQ ID NO: 163699 - RNA, 19 nt, Homo sapiens
uuuucuucuuuuugcuuca

SEQ ID NO: 163700 - RNA, 12 nt, Homo sapiens
gucuuggcucac

SEQ ID NO: 163701 - RNA, 15 nt, Homo sapiens
gauauaaaagacuga

SEQ ID NO: 163702 - RNA, 13 nt, Homo sapiens
gacucuaacagua

SEQ ID NO: 163703 - RNA, 22 nt, Homo sapiens
uuaaauguagaaagugauccau

SEQ ID NO: 163704 - RNA, 22 nt, Homo sapiens
aaguaagccauguaucucagga

SEQ ID NO: 163705 - RNA, 17 nt, Homo sapiens
agggagugggcuaagca

SEQ ID NO: 163706 - RNA, 22 nt, Homo sapiens
agcuggagucugucaauguccu

SEQ ID NO: 163707 - RNA, 16 nt, Homo sapiens
aauuuugucuuuauga

SEQ ID NO: 163708 - RNA, 21 nt, Homo sapiens
ucaagugauucuccugccuca

SEQ ID NO: 163709 - RNA, 13 nt, Homo sapiens
uggcucaucucuu

SEQ ID NO: 163710 - RNA, 22 nt, Homo sapiens
ggagaaauaugguacucauuaa

SEQ ID NO: 163711 - RNA, 21 nt, Homo sapiens
ucugaggcuucuggggcuuca

SEQ ID NO: 163712 - RNA, 23 nt, Homo sapiens
aaucccucaaaacaaucuuguca

SEQ ID NO: 163713 - RNA, 14 nt, Homo sapiens
ugcaauguuuuaga

SEQ ID NO: 163714 - RNA, 16 nt, Homo sapiens
caauauuguacaguuu

SEQ ID NO: 163715 - RNA, 17 nt, Homo sapiens
cacccucccacugccaa

SEQ ID NO: 163716 - RNA, 20 nt, Homo sapiens
agcuuacaagccagcuggag

SEQ ID NO: 163717 - RNA, 13 nt, Homo sapiens
cuaaauaugagcc

SEQ ID NO: 163718 - RNA, 18 nt, Homo sapiens
ucauaaaagucacuuuau

SEQ ID NO: 163719 - RNA, 20 nt, Homo sapiens
uaagaugaaacaucauuuca

SEQ ID NO: 163720 - RNA, 21 nt, Homo sapiens
accucgagguuucucaaagaa

SEQ ID NO: 163721 - RNA, 19 nt, Homo sapiens
accuguggccaaguucuua

SEQ ID NO: 163722 - RNA, 13 nt, Homo sapiens
caaagaagccagc

SEQ ID NO: 163723 - RNA, 22 nt, Homo sapiens
acuuauagaauucagucaaaga

SEQ ID NO: 163724 - RNA, 14 nt, Homo sapiens
aauagugauuucca

SEQ ID NO: 163725 - RNA, 15 nt, Homo sapiens
cugaccaauauugua

SEQ ID NO: 163726 - RNA, 18 nt, Homo sapiens
uguugacauucugaaugc

SEQ ID NO: 163727 - RNA, 20 nt, Homo sapiens
guagaaagugauccauacuu

SEQ ID NO: 163728 - RNA, 20 nt, Homo sapiens
accguaugagggaacugugu

SEQ ID NO: 163729 - RNA, 19 nt, Homo sapiens
cuagcaacauuuguuuuag

SEQ ID NO: 163730 - RNA, 11 nt, Homo sapiens
ccaaggucucc

SEQ ID NO: 163731 - RNA, 21 nt, Homo sapiens
gauacacaaucugaaacagcu

SEQ ID NO: 163732 - RNA, 20 nt, Homo sapiens
ucugaaaaaguauccugcuu

SEQ ID NO: 163733 - RNA, 15 nt, Homo sapiens
cuccuuagaagugga

SEQ ID NO: 163734 - RNA, 14 nt, Homo sapiens
uagcuccacaaagc

SEQ ID NO: 163735 - RNA, 17 nt, Homo sapiens
ucaugagugcaacugug

SEQ ID NO: 163736 - RNA, 16 nt, Homo sapiens
gcuaguaaaagccauc

SEQ ID NO: 163737 - RNA, 20 nt, Homo sapiens
ggcacagcauggagucacag

SEQ ID NO: 163738 - RNA, 22 nt, Homo sapiens
ccauacuagaguucauggauau

SEQ ID NO: 163739 - RNA, 15 nt, Homo sapiens
acaaucuugucauac

SEQ ID NO: 163740 - RNA, 15 nt, Homo sapiens
aauagugauuuccac

SEQ ID NO: 163741 - RNA, 12 nt, Homo sapiens
ucccacugccaa

SEQ ID NO: 163742 - RNA, 22 nt, Homo sapiens
uuaucauuaaaaggaaagcaga

SEQ ID NO: 163743 - RNA, 17 nt, Homo sapiens
acccuucuuuucugacu

SEQ ID NO: 163744 - RNA, 18 nt, Homo sapiens
uggccaggcuggucucaa

SEQ ID NO: 163745 - RNA, 15 nt, Homo sapiens
uuacuguccaaagac

SEQ ID NO: 163746 - RNA, 15 nt, Homo sapiens
cacagucuuggcuca

SEQ ID NO: 163747 - RNA, 18 nt, Homo sapiens
uuaaaccguacacugugu

SEQ ID NO: 163748 - RNA, 22 nt, Homo sapiens
uacuuuuuccuggcucaucucu

SEQ ID NO: 163749 - RNA, 13 nt, Homo sapiens
guccaaggucucc

SEQ ID NO: 163750 - RNA, 13 nt, Homo sapiens
aaaugaaagugag

SEQ ID NO: 163751 - RNA, 18 nt, Homo sapiens
auugcaauagaaauccaa

SEQ ID NO: 163752 - RNA, 14 nt, Homo sapiens
uagaaugagacuua

SEQ ID NO: 163753 - RNA, 15 nt, Homo sapiens
aggcuucuggggcuu

SEQ ID NO: 163754 - RNA, 15 nt, Homo sapiens
cagcauggagucaca

SEQ ID NO: 163755 - RNA, 16 nt, Homo sapiens
cuaaauaugagcccag

SEQ ID NO: 163756 - RNA, 17 nt, Homo sapiens
cuccccuucacucccac

SEQ ID NO: 163757 - RNA, 14 nt, Homo sapiens
gauuuccacaguga

SEQ ID NO: 163758 - RNA, 14 nt, Homo sapiens
gccagcaucugccu

SEQ ID NO: 163759 - RNA, 12 nt, Homo sapiens
ggaaaauucucu

SEQ ID NO: 163760 - RNA, 13 nt, Homo sapiens
accuacaguguac

SEQ ID NO: 163761 - RNA, 12 nt, Homo sapiens
guaaaagccauc

SEQ ID NO: 163762 - RNA, 18 nt, Homo sapiens
aauugggaauaugcacaa

SEQ ID NO: 163763 - RNA, 18 nt, Homo sapiens
auguaagaucguucucug

SEQ ID NO: 163764 - RNA, 18 nt, Homo sapiens
cagugacuccacucugag

SEQ ID NO: 163765 - RNA, 17 nt, Homo sapiens
ugaaagugagacuuuga

SEQ ID NO: 163766 - RNA, 20 nt, Homo sapiens
gaaguuuguuuaaaugacag

SEQ ID NO: 163767 - RNA, 22 nt, Homo sapiens
ucauucugcauucucuagucag

SEQ ID NO: 163768 - RNA, 15 nt, Homo sapiens
aaugacacagucuug

SEQ ID NO: 163769 - RNA, 18 nt, Homo sapiens
uagaaugagacuuacuuc

SEQ ID NO: 163770 - RNA, 15 nt, Homo sapiens
guagaaagugaucca

SEQ ID NO: 163771 - RNA, 23 nt, Homo sapiens
ucaaaugagaaaaugucuuuauu

SEQ ID NO: 163772 - RNA, 15 nt, Homo sapiens
auugaacuuaugcaa

SEQ ID NO: 163773 - RNA, 18 nt, Homo sapiens
cuauuuuuuguaaugugu

SEQ ID NO: 163774 - RNA, 21 nt, Homo sapiens
gucucaaacuccugaccucaa

SEQ ID NO: 163775 - RNA, 24 nt, Homo sapiens
agugagacuuugaggguguauauu

SEQ ID NO: 163776 - RNA, 18 nt, Homo sapiens
acgugauuuugcuguaga

SEQ ID NO: 163777 - RNA, 20 nt, Homo sapiens
ucauauugaugugugucuag

SEQ ID NO: 163778 - RNA, 17 nt, Homo sapiens
uaacaggagugccacuu

SEQ ID NO: 163779 - RNA, 22 nt, Homo sapiens
ucaagacgucacccuccauucu

SEQ ID NO: 163780 - RNA, 22 nt, Homo sapiens
ucaaagaaauuuccacucaggu

SEQ ID NO: 163781 - RNA, 15 nt, Homo sapiens
ccuuugccugguaca

SEQ ID NO: 163782 - RNA, 12 nt, Homo sapiens
agugauuuccac

SEQ ID NO: 163783 - RNA, 16 nt, Homo sapiens
acuauugcuugcacaa

SEQ ID NO: 163784 - RNA, 19 nt, Homo sapiens
agaucguucucugccucac

SEQ ID NO: 163785 - RNA, 21 nt, Homo sapiens
cagaaucucucuucuuuucaa

SEQ ID NO: 163786 - RNA, 16 nt, Homo sapiens
augagcaaaaccaaau

SEQ ID NO: 163787 - RNA, 17 nt, Homo sapiens
auaugacacucuaguca

SEQ ID NO: 163788 - RNA, 17 nt, Homo sapiens
cugauguagcuuauaca

SEQ ID NO: 163789 - RNA, 16 nt, Homo sapiens
ucugcauucucuaguc

SEQ ID NO: 163790 - RNA, 16 nt, Homo sapiens
cauaaaaguuggcuca

SEQ ID NO: 163791 - RNA, 16 nt, Homo sapiens
cuauuagcuccacaaa

SEQ ID NO: 163792 - RNA, 18 nt, Homo sapiens
aacaggaauucugaauua

SEQ ID NO: 163793 - RNA, 16 nt, Homo sapiens
aaucucuccauucccg

SEQ ID NO: 163794 - RNA, 12 nt, Homo sapiens
ugaggguguaua

SEQ ID NO: 163795 - RNA, 22 nt, Homo sapiens
caaaaacauucuuacauuuuac

SEQ ID NO: 163796 - RNA, 22 nt, Homo sapiens
ugucaauguccuacugagacag

SEQ ID NO: 163797 - RNA, 19 nt, Homo sapiens
agccaugggagacacugau

SEQ ID NO: 163798 - RNA, 19 nt, Homo sapiens
cuuuaauuuuuuacuauuu

SEQ ID NO: 163799 - RNA, 22 nt, Homo sapiens
cugucaauguccuacugagaca

SEQ ID NO: 163800 - RNA, 15 nt, Homo sapiens
gccccagccuaggaa

SEQ ID NO: 163801 - RNA, 20 nt, Homo sapiens
cuggauuacaggcaugugcc

SEQ ID NO: 163802 - RNA, 15 nt, Homo sapiens
uggguucaagugauu

SEQ ID NO: 163803 - RNA, 14 nt, Homo sapiens
ugugccaucagcuc

SEQ ID NO: 163804 - RNA, 22 nt, Homo sapiens
caggcaugugccacccacccaa

SEQ ID NO: 163805 - RNA, 20 nt, Homo sapiens
aaaaucaaacaauucaggga

SEQ ID NO: 163806 - RNA, 21 nt, Homo sapiens
uugcccaggcuggagugcaau

SEQ ID NO: 163807 - RNA, 20 nt, Homo sapiens
aaggcugugccaucagcucc

SEQ ID NO: 163808 - RNA, 19 nt, Homo sapiens
ccaagcaguuucuuucaaa

SEQ ID NO: 163809 - RNA, 15 nt, Homo sapiens
cagauuauuauugaa

SEQ ID NO: 163810 - RNA, 17 nt, Homo sapiens
cucaaagaaauuuccac

SEQ ID NO: 163811 - RNA, 17 nt, Homo sapiens
guacauguuaaacuuac

SEQ ID NO: 163812 - RNA, 17 nt, Homo sapiens
uuuaauguuuccuuuaa

SEQ ID NO: 163813 - RNA, 13 nt, Homo sapiens
gcuucuuuacuua

SEQ ID NO: 163814 - RNA, 15 nt, Homo sapiens
augagcaaaaccaaa

SEQ ID NO: 163815 - RNA, 23 nt, Homo sapiens
auacuguuuuacuguccaaagac

SEQ ID NO: 163816 - RNA, 19 nt, Homo sapiens
cuccugaguagcuggauua

SEQ ID NO: 163817 - RNA, 22 nt, Homo sapiens
caucugccuccccuucacuccc

SEQ ID NO: 163818 - RNA, 17 nt, Homo sapiens
uucaacguaagacugug

SEQ ID NO: 163819 - RNA, 16 nt, Homo sapiens
cccuucuuuucugacu

SEQ ID NO: 163820 - RNA, 13 nt, Homo sapiens
accaggucucaua

SEQ ID NO: 163821 - RNA, 13 nt, Homo sapiens
ucaaaaacauucu

SEQ ID NO: 163822 - RNA, 10 nt, Homo sapiens
gaaaacagaa

SEQ ID NO: 163823 - RNA, 18 nt, Homo sapiens
ucagaaaauggcacuugg

SEQ ID NO: 163824 - RNA, 20 nt, Homo sapiens
uguuaauaaaaguacauguu

SEQ ID NO: 163825 - RNA, 23 nt, Homo sapiens
gugagacuuugaggguguauauu

SEQ ID NO: 163826 - RNA, 16 nt, Homo sapiens
accaauauuguacagu

SEQ ID NO: 163827 - RNA, 22 nt, Homo sapiens
uguacaguuuuuauugcuuguu

SEQ ID NO: 163828 - RNA, 16 nt, Homo sapiens
uagcuuauacaaaaca

SEQ ID NO: 163829 - RNA, 17 nt, Homo sapiens
aaccguacacuguguuu

SEQ ID NO: 163830 - RNA, 15 nt, Homo sapiens
gcuagggaauaucaa

SEQ ID NO: 163831 - RNA, 23 nt, Homo sapiens
cuagugcaguuuuuuucuugucu

SEQ ID NO: 163832 - RNA, 19 nt, Homo sapiens
uaaguuacacauuuuucag

SEQ ID NO: 163833 - RNA, 15 nt, Homo sapiens
cccacccaacuaauu

SEQ ID NO: 163834 - RNA, 13 nt, Homo sapiens
uaugcacaaacuu

SEQ ID NO: 163835 - RNA, 19 nt, Homo sapiens
acauuuguuguucuguuaa

SEQ ID NO: 163836 - RNA, 14 nt, Homo sapiens
ugcacguauuuuaa

SEQ ID NO: 163837 - RNA, 13 nt, Homo sapiens
caaaaccaaauau

SEQ ID NO: 163838 - RNA, 15 nt, Homo sapiens
agaaagugauccaua

SEQ ID NO: 163839 - RNA, 18 nt, Homo sapiens
ugugaaguuuaauugacu

SEQ ID NO: 163840 - RNA, 15 nt, Homo sapiens
cuuacuuaguguuau

SEQ ID NO: 163841 - RNA, 22 nt, Homo sapiens
gugcuucuuaaaauagccauaa

SEQ ID NO: 163842 - RNA, 19 nt, Homo sapiens
caaucucaaucccucaaaa

SEQ ID NO: 163843 - RNA, 17 nt, Homo sapiens
uauugaacuuaugcaaa

SEQ ID NO: 163844 - RNA, 18 nt, Homo sapiens
uaaugcauguggcacuua

SEQ ID NO: 163845 - RNA, 20 nt, Homo sapiens
cuaagcacgggccauaugaa

SEQ ID NO: 163846 - RNA, 18 nt, Homo sapiens
ucucgugguaggacugua

SEQ ID NO: 163847 - RNA, 23 nt, Homo sapiens
uucagauauaaaagacugaccaa

SEQ ID NO: 163848 - RNA, 17 nt, Homo sapiens
ugaauuuugucuuuaug

SEQ ID NO: 163849 - RNA, 17 nt, Homo sapiens
uuuaaaugaaagugaga

SEQ ID NO: 163850 - RNA, 19 nt, Homo sapiens
ucaagugauucuccugccu

SEQ ID NO: 163851 - RNA, 17 nt, Homo sapiens
aucguucucugccucac

SEQ ID NO: 163852 - RNA, 19 nt, Homo sapiens
cuggcaguggaacuaagaa

SEQ ID NO: 163853 - RNA, 16 nt, Homo sapiens
cugugccaucagcucc

SEQ ID NO: 163854 - RNA, 13 nt, Homo sapiens
gauaugcuguauu

SEQ ID NO: 163855 - RNA, 14 nt, Homo sapiens
uucuggggcuucag

SEQ ID NO: 163856 - RNA, 19 nt, Homo sapiens
ccucaucuccuaaaaggca

SEQ ID NO: 163857 - RNA, 16 nt, Homo sapiens
acugcaacuucugccu

SEQ ID NO: 163858 - RNA, 18 nt, Homo sapiens
aaggacacuagaagauuu

SEQ ID NO: 163859 - RNA, 22 nt, Homo sapiens
uggcuucuuuacuuaguucaag

SEQ ID NO: 163860 - RNA, 13 nt, Homo sapiens
agaaagugaucca

SEQ ID NO: 163861 - RNA, 13 nt, Homo sapiens
acuguccaaagac

SEQ ID NO: 163862 - RNA, 21 nt, Homo sapiens
ccugaugcuggggacacagca

SEQ ID NO: 163863 - RNA, 20 nt, Homo sapiens
auacuagaguucauggauau

SEQ ID NO: 163864 - RNA, 15 nt, Homo sapiens
cuagucaguuggcua

SEQ ID NO: 163865 - RNA, 23 nt, Homo sapiens
ggcagaguacaaaguaagccaug

SEQ ID NO: 163866 - RNA, 20 nt, Homo sapiens
ucucaaacuccugaccucaa

SEQ ID NO: 163867 - RNA, 20 nt, Homo sapiens
agugcaguuuuuuucuuguc

SEQ ID NO: 163868 - RNA, 13 nt, Homo sapiens
ugaacauugcaau

SEQ ID NO: 163869 - RNA, 13 nt, Homo sapiens
gaaaaguuuugua

SEQ ID NO: 163870 - RNA, 23 nt, Homo sapiens
gaaaagaaucggcaauguuucaa

SEQ ID NO: 163871 - RNA, 18 nt, Homo sapiens
acacaaucugaaacagcu

SEQ ID NO: 163872 - RNA, 22 nt, Homo sapiens
ccugaccucaaguaauccaccu

SEQ ID NO: 163873 - RNA, 22 nt, Homo sapiens
cagucuucuuccaugucuauua

SEQ ID NO: 163874 - RNA, 15 nt, Homo sapiens
gccaguuacauaaaa

SEQ ID NO: 163875 - RNA, 23 nt, Homo sapiens
guggacucuaacaguaguugcaa

SEQ ID NO: 163876 - RNA, 22 nt, Homo sapiens
cuagaguucauggauauguuau

SEQ ID NO: 163877 - RNA, 19 nt, Homo sapiens
agaaccucgagguuucuca

SEQ ID NO: 163878 - RNA, 14 nt, Homo sapiens
ccagccucaucucu

SEQ ID NO: 163879 - RNA, 17 nt, Homo sapiens
cacaaaagucuacuuua

SEQ ID NO: 163880 - RNA, 21 nt, Homo sapiens
aguauauucaaccaaauacuu

SEQ ID NO: 163881 - RNA, 12 nt, Homo sapiens
aaugucuuuauu

SEQ ID NO: 163882 - RNA, 21 nt, Homo sapiens
ucugaacaauauauacuuaua

SEQ ID NO: 163883 - RNA, 16 nt, Homo sapiens
ugagacagcacagcca

SEQ ID NO: 163884 - RNA, 13 nt, Homo sapiens
cauuuguuuucac

SEQ ID NO: 163885 - RNA, 16 nt, Homo sapiens
auuuuaauguuuccuu

SEQ ID NO: 163886 - RNA, 16 nt, Homo sapiens
gacucaucauuuccau

SEQ ID NO: 163887 - RNA, 14 nt, Homo sapiens
gcuucugauaugca

SEQ ID NO: 163888 - RNA, 22 nt, Homo sapiens
ucaaacaaaaagucauaaaagu

SEQ ID NO: 163889 - RNA, 14 nt, Homo sapiens
cagcuccuggacca

SEQ ID NO: 163890 - RNA, 17 nt, Homo sapiens
guacaaaguaagccaug

SEQ ID NO: 163891 - RNA, 16 nt, Homo sapiens
uuccuccccuguucau

SEQ ID NO: 163892 - RNA, 17 nt, Homo sapiens
cuucuuuuugcuucaaa

SEQ ID NO: 163893 - RNA, 15 nt, Homo sapiens
ccugccaggcacacu

SEQ ID NO: 163894 - RNA, 16 nt, Homo sapiens
uacaaaguaagccaug

SEQ ID NO: 163895 - RNA, 21 nt, Homo sapiens
cacugccaaagaacuuggaaa

SEQ ID NO: 163896 - RNA, 16 nt, Homo sapiens
agcuguuuuguugaca

SEQ ID NO: 163897 - RNA, 13 nt, Homo sapiens
cuaaguaaauaca

SEQ ID NO: 163898 - RNA, 23 nt, Homo sapiens
acauuuuacuuuuuccuggcuca

SEQ ID NO: 163899 - RNA, 16 nt, Homo sapiens
uguacagucuuguauu

SEQ ID NO: 163900 - RNA, 19 nt, Homo sapiens
ugcaguuuuuuucuugucu

SEQ ID NO: 163901 - RNA, 22 nt, Homo sapiens
aaaauaugacacucuagucaaa

SEQ ID NO: 163902 - RNA, 17 nt, Homo sapiens
cuaagcacgggccauau

SEQ ID NO: 163903 - RNA, 22 nt, Homo sapiens
guuuaugcauagauaaucucuc

SEQ ID NO: 163904 - RNA, 20 nt, Homo sapiens
ugucuuuggugaacauugca

SEQ ID NO: 163905 - RNA, 15 nt, Homo sapiens
gaaauggggaacuac

SEQ ID NO: 163906 - RNA, 21 nt, Homo sapiens
agccaaccuagcuagcaacau

SEQ ID NO: 163907 - RNA, 16 nt, Homo sapiens
ucaaagccuugguaaa

SEQ ID NO: 163908 - RNA, 13 nt, Homo sapiens
ucccucaaaacaa

SEQ ID NO: 163909 - RNA, 23 nt, Homo sapiens
accagagaagggcuuggacucaa

SEQ ID NO: 163910 - RNA, 18 nt, Homo sapiens
augagaaaaugucuuuau

SEQ ID NO: 163911 - RNA, 19 nt, Homo sapiens
acugggcgcaguuggucuu

SEQ ID NO: 163912 - RNA, 18 nt, Homo sapiens
aucacauucccauuugcu

SEQ ID NO: 163913 - RNA, 21 nt, Homo sapiens
gacagcacagccaaccuagcu

SEQ ID NO: 163914 - RNA, 21 nt, Homo sapiens
ugccacucuguaauugcaaaa

SEQ ID NO: 163915 - RNA, 17 nt, Homo sapiens
gaugcuggggacacagc

SEQ ID NO: 163916 - RNA, 16 nt, Homo sapiens
acugaaccaggccaga

SEQ ID NO: 163917 - RNA, 18 nt, Homo sapiens
accauuagcauuugucaa

SEQ ID NO: 163918 - RNA, 21 nt, Homo sapiens
ucauggauauguuauacugaa

SEQ ID NO: 163919 - RNA, 22 nt, Homo sapiens
guuucauauugaugugugucua

SEQ ID NO: 163920 - RNA, 13 nt, Homo sapiens
auauacuuauaga

SEQ ID NO: 163921 - RNA, 17 nt, Homo sapiens
uaugacacucuagucaa

SEQ ID NO: 163922 - RNA, 21 nt, Homo sapiens
uggcaguggaacuaagaaagc

SEQ ID NO: 163923 - RNA, 22 nt, Homo sapiens
cacuuagguccaaggucuccag

SEQ ID NO: 163924 - RNA, 15 nt, Homo sapiens
cuggagucugucaau

SEQ ID NO: 163925 - RNA, 17 nt, Homo sapiens
ggcucucccagccaggu

SEQ ID NO: 163926 - RNA, 14 nt, Homo sapiens
agcuggagucuguc

SEQ ID NO: 163927 - RNA, 22 nt, Homo sapiens
acagcauggagucacagccacu

SEQ ID NO: 163928 - RNA, 15 nt, Homo sapiens
uuggugaacauugca

SEQ ID NO: 163929 - RNA, 15 nt, Homo sapiens
gauucuccugccuca

SEQ ID NO: 163930 - RNA, 17 nt, Homo sapiens
acauaaaaguuggcuca

SEQ ID NO: 163931 - RNA, 21 nt, Homo sapiens
uuaaauguagaaagugaucca

SEQ ID NO: 163932 - RNA, 13 nt, Homo sapiens
ggguaaauucucu

SEQ ID NO: 163933 - RNA, 12 nt, Homo sapiens
gcuggagugcaa

SEQ ID NO: 163934 - RNA, 18 nt, Homo sapiens
acugaauuuugucuuuau

SEQ ID NO: 163935 - RNA, 15 nt, Homo sapiens
acaauauacuuguau

SEQ ID NO: 163936 - RNA, 20 nt, Homo sapiens
uauacccguuucacaugcuu

SEQ ID NO: 163937 - RNA, 22 nt, Homo sapiens
gaaauagugauuuccacaguga

SEQ ID NO: 163938 - RNA, 16 nt, Homo sapiens
acccucccacugccaa

SEQ ID NO: 163939 - RNA, 19 nt, Homo sapiens
cgugguaggacuguagaaa

SEQ ID NO: 163940 - RNA, 23 nt, Homo sapiens
aagacgucacccuccauucugca

SEQ ID NO: 163941 - RNA, 22 nt, Homo sapiens
uggauuugucuuuggugaacau

SEQ ID NO: 163942 - RNA, 15 nt, Homo sapiens
aaaaguuuuguaaau

SEQ ID NO: 163943 - RNA, 16 nt, Homo sapiens
cucaaagaaauuucca

SEQ ID NO: 163944 - RNA, 18 nt, Homo sapiens
ccuucuuuuuguucuuca

SEQ ID NO: 163945 - RNA, 19 nt, Homo sapiens
caauguuucaaacaaaaag

SEQ ID NO: 163946 - RNA, 14 nt, Homo sapiens
guuccgacugccau

SEQ ID NO: 163947 - RNA, 23 nt, Homo sapiens
aaugagcaaaaccaaauauucca

SEQ ID NO: 163948 - RNA, 15 nt, Homo sapiens
ucauggauauguuau

SEQ ID NO: 163949 - RNA, 19 nt, Homo sapiens
uaaagaaaaguuuuguaaa

SEQ ID NO: 163950 - RNA, 16 nt, Homo sapiens
uaaaccguacacugug

SEQ ID NO: 163951 - RNA, 17 nt, Homo sapiens
ggcacacugagccagca

SEQ ID NO: 163952 - RNA, 13 nt, Homo sapiens
gaauaguuuccaa

SEQ ID NO: 163953 - RNA, 22 nt, Homo sapiens
aauguuuaugaauaguuuccaa

SEQ ID NO: 163954 - RNA, 23 nt, Homo sapiens
uucagucaaagauacacaaucug

SEQ ID NO: 163955 - RNA, 19 nt, Homo sapiens
uugcuugcacaaaccaauu

SEQ ID NO: 163956 - RNA, 17 nt, Homo sapiens
uagcuuauacaaaacau

SEQ ID NO: 163957 - RNA, 19 nt, Homo sapiens
uccuggaggugacacuuga

SEQ ID NO: 163958 - RNA, 12 nt, Homo sapiens
uuuuauauccac

SEQ ID NO: 163959 - RNA, 15 nt, Homo sapiens
uuaaaugaaagugag

SEQ ID NO: 163960 - RNA, 14 nt, Homo sapiens
ugccaaagaacuug

SEQ ID NO: 163961 - RNA, 15 nt, Homo sapiens
auaaagacaggguuu

SEQ ID NO: 163962 - RNA, 18 nt, Homo sapiens
ucugcauucucuagucag

SEQ ID NO: 163963 - RNA, 19 nt, Homo sapiens
guuguuaauaaaaguacau

SEQ ID NO: 163964 - RNA, 23 nt, Homo sapiens
uucauggauauguuauacugaac

SEQ ID NO: 163965 - RNA, 22 nt, Homo sapiens
gaauaacauggugugcuucuua

SEQ ID NO: 163966 - RNA, 14 nt, Homo sapiens
ugcuguaugucucg

SEQ ID NO: 163967 - RNA, 14 nt, Homo sapiens
ccacaguggaacca

SEQ ID NO: 163968 - RNA, 13 nt, Homo sapiens
aguugcuguaugu

SEQ ID NO: 163969 - RNA, 13 nt, Homo sapiens
uaaauguagaaag

SEQ ID NO: 163970 - RNA, 14 nt, Homo sapiens
ucuuuggugaacau

SEQ ID NO: 163971 - RNA, 23 nt, Homo sapiens
ccuaagccaugggagacacugau

SEQ ID NO: 163972 - RNA, 16 nt, Homo sapiens
aaguuuaauugacuua

SEQ ID NO: 163973 - RNA, 13 nt, Homo sapiens
auucugcacucag

SEQ ID NO: 163974 - RNA, 21 nt, Homo sapiens
uacuauuuuuacuaaucuuuc

SEQ ID NO: 163975 - RNA, 14 nt, Homo sapiens
agaauaaauacugu

SEQ ID NO: 163976 - RNA, 21 nt, Homo sapiens
ugaggaauuucuguucuucca

SEQ ID NO: 163977 - RNA, 19 nt, Homo sapiens
aaccaaauauuccagagac

SEQ ID NO: 163978 - RNA, 15 nt, Homo sapiens
uuugaggguguauau

SEQ ID NO: 163979 - RNA, 17 nt, Homo sapiens
acuuuuuccuggcucau

SEQ ID NO: 163980 - RNA, 15 nt, Homo sapiens
ugggauuacagggau

SEQ ID NO: 163981 - RNA, 9 nt, Homo sapiens
aaagacaga

SEQ ID NO: 163982 - RNA, 21 nt, Homo sapiens
ggaauccuggggaacauagaa

SEQ ID NO: 163983 - RNA, 13 nt, Homo sapiens
gaacuuaugcaaa

SEQ ID NO: 163984 - RNA, 19 nt, Homo sapiens
acaaaguaagccauguauc

SEQ ID NO: 163985 - RNA, 13 nt, Homo sapiens
ugcucacaaaagu

SEQ ID NO: 163986 - RNA, 18 nt, Homo sapiens
agggcaauggacaaggaa

SEQ ID NO: 163987 - RNA, 15 nt, Homo sapiens
aacauugcaauagaa

SEQ ID NO: 163988 - RNA, 16 nt, Homo sapiens
uuacauuuuguauauu

SEQ ID NO: 163989 - RNA, 15 nt, Homo sapiens
uccugcuucugauau

SEQ ID NO: 163990 - RNA, 13 nt, Homo sapiens
auguguuccaagg

SEQ ID NO: 163991 - RNA, 11 nt, Homo sapiens
auaaagacagg

SEQ ID NO: 163992 - RNA, 20 nt, Homo sapiens
cuauaaaaugagaagucuca

SEQ ID NO: 163993 - RNA, 18 nt, Homo sapiens
gaugaaacaucauuucaa

SEQ ID NO: 163994 - RNA, 18 nt, Homo sapiens
agcccuuaggaagaauuu

SEQ ID NO: 163995 - RNA, 16 nt, Homo sapiens
cagcauggagucacag

SEQ ID NO: 163996 - RNA, 14 nt, Homo sapiens
gacagaagcguaua

SEQ ID NO: 163997 - RNA, 22 nt, Homo sapiens
ucccucaaaacaaucuugucau

SEQ ID NO: 163998 - RNA, 17 nt, Homo sapiens
caaucuguccuguuaca

SEQ ID NO: 163999 - RNA, 14 nt, Homo sapiens
aauucaucagauaa

SEQ ID NO: 164000 - RNA, 21 nt, Homo sapiens
guccaucccgucgacguagaa

SEQ ID NO: 164001 - RNA, 23 nt, Homo sapiens
uaaaaguacauguuaaacuuacu

SEQ ID NO: 164002 - RNA, 20 nt, Homo sapiens
ugacacucuagucaaagccu

SEQ ID NO: 164003 - RNA, 12 nt, Homo sapiens
aggacuguagaa

SEQ ID NO: 164004 - RNA, 20 nt, Homo sapiens
guuuaugcauagauaaucuc

SEQ ID NO: 164005 - RNA, 21 nt, Homo sapiens
aacaaucuugucauacuugaa

SEQ ID NO: 164006 - RNA, 19 nt, Homo sapiens
uguauuuaaaugaaaguga

SEQ ID NO: 164007 - RNA, 23 nt, Homo sapiens
uuccaaucuguccuguuacaaaa

SEQ ID NO: 164008 - RNA, 19 nt, Homo sapiens
cauuuaagcugccuguaca

SEQ ID NO: 164009 - RNA, 20 nt, Homo sapiens
ucuaaagauggaaaaaccac

SEQ ID NO: 164010 - RNA, 10 nt, Homo sapiens
gaaaagcagg

SEQ ID NO: 164011 - RNA, 13 nt, Homo sapiens
cuuuauugcucau

SEQ ID NO: 164012 - RNA, 15 nt, Homo sapiens
gaccauuagcauuug

SEQ ID NO: 164013 - RNA, 15 nt, Homo sapiens
uucaguuuucaggag

SEQ ID NO: 164014 - RNA, 20 nt, Homo sapiens
uugaaguauauucaaccaaa

SEQ ID NO: 164015 - RNA, 19 nt, Homo sapiens
caguaguggugacuguggg

SEQ ID NO: 164016 - RNA, 21 nt, Homo sapiens
gaguuauuuuuauuuauuuaa

SEQ ID NO: 164017 - RNA, 19 nt, Homo sapiens
uuacuuuuuccuggcucau

SEQ ID NO: 164018 - RNA, 15 nt, Homo sapiens
aaaacaaucuuguca

SEQ ID NO: 164019 - RNA, 11 nt, Homo sapiens
uuuaaccaaga

SEQ ID NO: 164020 - RNA, 23 nt, Homo sapiens
uuacuuuuuccuggcucaucucu

SEQ ID NO: 164021 - RNA, 11 nt, Homo sapiens
caaaaccaaau

SEQ ID NO: 164022 - RNA, 19 nt, Homo sapiens
aaauuucucuacugucuca

SEQ ID NO: 164023 - RNA, 18 nt, Homo sapiens
cauauugaugugugucua

SEQ ID NO: 164024 - RNA, 13 nt, Homo sapiens
guuggcucaggag

SEQ ID NO: 164025 - RNA, 18 nt, Homo sapiens
augcuggggacacagcau

SEQ ID NO: 164026 - RNA, 13 nt, Homo sapiens
agcaaaaccaaau

SEQ ID NO: 164027 - RNA, 20 nt, Homo sapiens
ugaguagcuggauuacaggc

SEQ ID NO: 164028 - RNA, 12 nt, Homo sapiens
caguguuuccaa

SEQ ID NO: 164029 - RNA, 12 nt, Homo sapiens
uuaacugaaugc

SEQ ID NO: 164030 - RNA, 13 nt, Homo sapiens
gcugggauuacag

SEQ ID NO: 164031 - RNA, 21 nt, Homo sapiens
aaaaguuuuguaaauuucucu

SEQ ID NO: 164032 - RNA, 21 nt, Homo sapiens
ccuaaaaggcagaguacaaag

SEQ ID NO: 164033 - RNA, 14 nt, Homo sapiens
agccaguuacauaa

SEQ ID NO: 164034 - RNA, 21 nt, Homo sapiens
uguguuuuuaauaaagacagg

SEQ ID NO: 164035 - RNA, 15 nt, Homo sapiens
cuggaccaggucuca

SEQ ID NO: 164036 - RNA, 20 nt, Homo sapiens
aaagcuggagucugucaaug

SEQ ID NO: 164037 - RNA, 11 nt, Homo sapiens
uugcuguagaa

SEQ ID NO: 164038 - RNA, 19 nt, Homo sapiens
cauugcaauagaaauccaa

SEQ ID NO: 164039 - RNA, 18 nt, Homo sapiens
caaucugaaacagcuuca

SEQ ID NO: 164040 - RNA, 19 nt, Homo sapiens
caauauauacuuauagaau

SEQ ID NO: 164041 - RNA, 15 nt, Homo sapiens
uugagggcaauggac

SEQ ID NO: 164042 - RNA, 13 nt, Homo sapiens
uccacagugacuc

SEQ ID NO: 164043 - RNA, 19 nt, Homo sapiens
aguuuacauuuuguauauu

SEQ ID NO: 164044 - RNA, 15 nt, Homo sapiens
aucuguccuguuaca

SEQ ID NO: 164045 - RNA, 17 nt, Homo sapiens
cuuggguucaagugauu

SEQ ID NO: 164046 - RNA, 23 nt, Homo sapiens
uaguaaaagccaucuauguauau

SEQ ID NO: 164047 - RNA, 16 nt, Homo sapiens
uacagucuuguauuaa

SEQ ID NO: 164048 - RNA, 20 nt, Homo sapiens
aaaugagaagucucacugau

SEQ ID NO: 164049 - RNA, 12 nt, Homo sapiens
uucucugccuca

SEQ ID NO: 164050 - RNA, 20 nt, Homo sapiens
auacuuauagaauucaguca

SEQ ID NO: 164051 - RNA, 18 nt, Homo sapiens
gaucguucucugccucac

SEQ ID NO: 164052 - RNA, 23 nt, Homo sapiens
cauucugcacucagaaaauggca

SEQ ID NO: 164053 - RNA, 15 nt, Homo sapiens
cacaaauuaguugua

SEQ ID NO: 164054 - RNA, 15 nt, Homo sapiens
uguccuguuacaaaa

SEQ ID NO: 164055 - RNA, 13 nt, Homo sapiens
aauagccauaaag

SEQ ID NO: 164056 - RNA, 22 nt, Homo sapiens
ggcuaagaagugacucuugcaa

SEQ ID NO: 164057 - RNA, 20 nt, Homo sapiens
auugcagcgauuaauaacag

SEQ ID NO: 164058 - RNA, 12 nt, Homo sapiens
ggagacacugau

SEQ ID NO: 164059 - RNA, 23 nt, Homo sapiens
cauggauauguuauacugaacca

SEQ ID NO: 164060 - RNA, 15 nt, Homo sapiens
ugcacaaaccaauua

SEQ ID NO: 164061 - RNA, 13 nt, Homo sapiens
ucaaagugagcuc

SEQ ID NO: 164062 - RNA, 17 nt, Homo sapiens
agccccagccuaggaaa

SEQ ID NO: 164063 - RNA, 21 nt, Homo sapiens
cagagucucgcucuguugccc

SEQ ID NO: 164064 - RNA, 22 nt, Homo sapiens
aaacauuuguuuguggucuaua

SEQ ID NO: 164065 - RNA, 13 nt, Homo sapiens
accaauauuguac

SEQ ID NO: 164066 - RNA, 15 nt, Homo sapiens
uacuuuaauguauaa

SEQ ID NO: 164067 - RNA, 15 nt, Homo sapiens
acagcaucagcucaa

SEQ ID NO: 164068 - RNA, 22 nt, Homo sapiens
aaccguaugagggaacugugua

SEQ ID NO: 164069 - RNA, 18 nt, Homo sapiens
uggcuaguaaaagccauc

SEQ ID NO: 164070 - RNA, 20 nt, Homo sapiens
aaucuuucugcagaaacaga

SEQ ID NO: 164071 - RNA, 12 nt, Homo sapiens
uuugucuuuaug

SEQ ID NO: 164072 - RNA, 17 nt, Homo sapiens
gcuccauucaaagugag

SEQ ID NO: 164073 - RNA, 14 nt, Homo sapiens
caauauacuuguau

SEQ ID NO: 164074 - RNA, 12 nt, Homo sapiens
ucugcuagggaa

SEQ ID NO: 164075 - RNA, 21 nt, Homo sapiens
gcagaguacaaaguaagccau

SEQ ID NO: 164076 - RNA, 15 nt, Homo sapiens
guauuaaguuguuaa

SEQ ID NO: 164077 - RNA, 16 nt, Homo sapiens
gccacuguuaagccau

SEQ ID NO: 164078 - RNA, 21 nt, Homo sapiens
aagauuucagauuugugacca

SEQ ID NO: 164079 - RNA, 19 nt, Homo sapiens
ugccaucuuggacuuguca

SEQ ID NO: 164080 - RNA, 16 nt, Homo sapiens
auaaaaguuggcucag

SEQ ID NO: 164081 - RNA, 17 nt, Homo sapiens
ggcaggaccuguggcca

SEQ ID NO: 164082 - RNA, 14 nt, Homo sapiens
ucucugcuaucuag

SEQ ID NO: 164083 - RNA, 18 nt, Homo sapiens
uucugcauucucuaguca

SEQ ID NO: 164084 - RNA, 21 nt, Homo sapiens
aauguggcuugaauguaggua

SEQ ID NO: 164085 - RNA, 23 nt, Homo sapiens
gccuuccuggaggugacacuuga

SEQ ID NO: 164086 - RNA, 18 nt, Homo sapiens
cagggagugggcuaagca

SEQ ID NO: 164087 - RNA, 16 nt, Homo sapiens
ucaauguccuacugag

SEQ ID NO: 164088 - RNA, 15 nt, Homo sapiens
agcugccuguacaca

SEQ ID NO: 164089 - RNA, 15 nt, Homo sapiens
ccacugccaaagaac

SEQ ID NO: 164090 - RNA, 16 nt, Homo sapiens
cccuccauucugcacu

SEQ ID NO: 164091 - RNA, 17 nt, Homo sapiens
uaaaccguacacugugu

SEQ ID NO: 164092 - RNA, 15 nt, Homo sapiens
caaugacacagucuu

SEQ ID NO: 164093 - RNA, 20 nt, Homo sapiens
cccaggcuggagugcaauga

SEQ ID NO: 164094 - RNA, 13 nt, Homo sapiens
aaaagacugacca

SEQ ID NO: 164095 - RNA, 12 nt, Homo sapiens
uuacauugccuu

SEQ ID NO: 164096 - RNA, 17 nt, Homo sapiens
gucaaagccuugguaaa

SEQ ID NO: 164097 - RNA, 17 nt, Homo sapiens
agguuucucaaagaaau

SEQ ID NO: 164098 - RNA, 19 nt, Homo sapiens
accugccaggcacacugag

SEQ ID NO: 164099 - RNA, 22 nt, Homo sapiens
agcaaaaccaaauauuccagag

SEQ ID NO: 164100 - RNA, 15 nt, Homo sapiens
aagccauguaucuca

SEQ ID NO: 164101 - RNA, 20 nt, Homo sapiens
aagaaucggcaauguuucaa

SEQ ID NO: 164102 - RNA, 15 nt, Homo sapiens
uuaaaaauaugugua

SEQ ID NO: 164103 - RNA, 12 nt, Homo sapiens
agccucaucucu

SEQ ID NO: 164104 - RNA, 20 nt, Homo sapiens
cagccuccugaguagcugga

SEQ ID NO: 164105 - RNA, 14 nt, Homo sapiens
acuuauuuauauaa

SEQ ID NO: 164106 - RNA, 13 nt, Homo sapiens
uacuaaucuuucu

SEQ ID NO: 164107 - RNA, 22 nt, Homo sapiens
uaugauuguccguaggcccaua

SEQ ID NO: 164108 - RNA, 11 nt, Homo sapiens
auucaaaguga

SEQ ID NO: 164109 - RNA, 19 nt, Homo sapiens
cacuuagguccaaggucuc

SEQ ID NO: 164110 - RNA, 14 nt, Homo sapiens
gaaacaucauuuca

SEQ ID NO: 164111 - RNA, 14 nt, Homo sapiens
caaaguaagccaug

SEQ ID NO: 164112 - RNA, 20 nt, Homo sapiens
ucaaaaaaaaaaaaauguga

SEQ ID NO: 164113 - RNA, 21 nt, Homo sapiens
ccuuggcuaguaaaagccauc

SEQ ID NO: 164114 - RNA, 21 nt, Homo sapiens
ccaaguucuuaguugcuguau

SEQ ID NO: 164115 - RNA, 22 nt, Homo sapiens
cauuugucaacaaagucaccca

SEQ ID NO: 164116 - RNA, 20 nt, Homo sapiens
uugcccaggcuggagugcaa

SEQ ID NO: 164117 - RNA, 12 nt, Homo sapiens
uguaauugcaaa

SEQ ID NO: 164118 - RNA, 13 nt, Homo sapiens
ucaucauuuccau

SEQ ID NO: 164119 - RNA, 17 nt, Homo sapiens
cuucuaaguaaauacaa

SEQ ID NO: 164120 - RNA, 13 nt, Homo sapiens
guucucugccuca

SEQ ID NO: 164121 - RNA, 18 nt, Homo sapiens
cuuagagcuuuaccuaaa

SEQ ID NO: 164122 - RNA, 21 nt, Homo sapiens
auaacauggugugcuucuuaa

SEQ ID NO: 164123 - RNA, 15 nt, Homo sapiens
aaggcagaguacaaa

SEQ ID NO: 164124 - RNA, 13 nt, Homo sapiens
caaucguaaaauu

SEQ ID NO: 164125 - RNA, 21 nt, Homo sapiens
ucugccuccccuucacuccca

SEQ ID NO: 164126 - RNA, 23 nt, Homo sapiens
cuuuggugaacauugcaauagaa

SEQ ID NO: 164127 - RNA, 22 nt, Homo sapiens
guaagaucguucucugccucac

SEQ ID NO: 164128 - RNA, 18 nt, Homo sapiens
auaggaggccaacccaaa

SEQ ID NO: 164129 - RNA, 20 nt, Homo sapiens
cuuguuguuuucccaaagag

SEQ ID NO: 164130 - RNA, 12 nt, Homo sapiens
ugggccaaagaa

SEQ ID NO: 164131 - RNA, 17 nt, Homo sapiens
ccaggcuggagugcaau

SEQ ID NO: 164132 - RNA, 14 nt, Homo sapiens
ucuuaguugcugua

SEQ ID NO: 164133 - RNA, 15 nt, Homo sapiens
cauucugcacucaga

SEQ ID NO: 164134 - RNA, 20 nt, Homo sapiens
uggggacacagcaucagcuc

SEQ ID NO: 164135 - RNA, 17 nt, Homo sapiens
auuucucuacugucuca

SEQ ID NO: 164136 - RNA, 22 nt, Homo sapiens
cugagucccuuagccaagcagu

SEQ ID NO: 164137 - RNA, 14 nt, Homo sapiens
cacuguuaagccau

SEQ ID NO: 164138 - RNA, 18 nt, Homo sapiens
uugugcauaaaaacaaga

SEQ ID NO: 164139 - RNA, 16 nt, Homo sapiens
aaugccacucuguaau

SEQ ID NO: 164140 - RNA, 19 nt, Homo sapiens
aagggcuuggacucaagca

SEQ ID NO: 164141 - RNA, 18 nt, Homo sapiens
cucaaagaaauuuccacu

SEQ ID NO: 164142 - RNA, 21 nt, Homo sapiens
uaguggugacugugggcucca

SEQ ID NO: 164143 - RNA, 14 nt, Homo sapiens
ccacugccaaagaa

SEQ ID NO: 164144 - RNA, 21 nt, Homo sapiens
uaagaucguucucugccucac

SEQ ID NO: 164145 - RNA, 21 nt, Homo sapiens
gaauuuuuauauccacuaaaa

SEQ ID NO: 164146 - RNA, 16 nt, Homo sapiens
aguagcuggauuacag

SEQ ID NO: 164147 - RNA, 19 nt, Homo sapiens
augugacucaagacuucca

SEQ ID NO: 164148 - RNA, 21 nt, Homo sapiens
ugugcuucuuaaaauagccau

SEQ ID NO: 164149 - RNA, 21 nt, Homo sapiens
uccacucaggucuguuuuccg

SEQ ID NO: 164150 - RNA, 23 nt, Homo sapiens
aauaagcaggcgugaccugccag

SEQ ID NO: 164151 - RNA, 17 nt, Homo sapiens
guuguuuucccaaagag

SEQ ID NO: 164152 - RNA, 12 nt, Homo sapiens
acugugggcucc

SEQ ID NO: 164153 - RNA, 15 nt, Homo sapiens
ucuaaaaacauuugu

SEQ ID NO: 164154 - RNA, 16 nt, Homo sapiens
uuguuuguggucuaua

SEQ ID NO: 164155 - RNA, 24 nt, Homo sapiens
cauguuggccaggcuggucucaaa

SEQ ID NO: 164156 - RNA, 22 nt, Homo sapiens
augaaucaaucaauucauaucu

SEQ ID NO: 164157 - RNA, 16 nt, Homo sapiens
cuggcaagaugcuuua

SEQ ID NO: 164158 - RNA, 16 nt, Homo sapiens
ucaacaaagucaccca

SEQ ID NO: 164159 - RNA, 21 nt, Homo sapiens
cagagaagggcuuggacucaa

SEQ ID NO: 164160 - RNA, 14 nt, Homo sapiens
caguggaacuaaga

SEQ ID NO: 164161 - RNA, 18 nt, Homo sapiens
uugcaauguggcuugaau

SEQ ID NO: 164162 - RNA, 15 nt, Homo sapiens
aagccauguguucca

SEQ ID NO: 164163 - RNA, 17 nt, Homo sapiens
auuugucaacaaaguca

SEQ ID NO: 164164 - RNA, 21 nt, Homo sapiens
gauaggguuucuaaugguuau

SEQ ID NO: 164165 - RNA, 19 nt, Homo sapiens
ccucaaaacaaucuuguca

SEQ ID NO: 164166 - RNA, 17 nt, Homo sapiens
guucuaaggcugugcca

SEQ ID NO: 164167 - RNA, 15 nt, Homo sapiens
auucuguaguuucac

SEQ ID NO: 164168 - RNA, 18 nt, Homo sapiens
cgauuaauaacaggcaaa

SEQ ID NO: 164169 - RNA, 15 nt, Homo sapiens
gaaugagacuuacuu

SEQ ID NO: 164170 - RNA, 20 nt, Homo sapiens
agcaacauuuguuuuagucu

SEQ ID NO: 164171 - RNA, 13 nt, Homo sapiens
auuugucaacaaa

SEQ ID NO: 164172 - RNA, 19 nt, Homo sapiens
agggcuuggacucaagcaa

SEQ ID NO: 164173 - RNA, 14 nt, Homo sapiens
ccaaagugguauag

SEQ ID NO: 164174 - RNA, 17 nt, Homo sapiens
cuucuuuuuguucuuca

SEQ ID NO: 164175 - RNA, 23 nt, Homo sapiens
ucagauauaaaagacugaccaau

SEQ ID NO: 164176 - RNA, 15 nt, Homo sapiens
ucuguucuuccauca

SEQ ID NO: 164177 - RNA, 13 nt, Homo sapiens
uucuccugccuca

SEQ ID NO: 164178 - RNA, 22 nt, Homo sapiens
agagagaaaaguaacuguuuug

SEQ ID NO: 164179 - RNA, 15 nt, Homo sapiens
cccagccucaucucu

SEQ ID NO: 164180 - RNA, 21 nt, Homo sapiens
guauaaauauguauuuuguca

SEQ ID NO: 164181 - RNA, 18 nt, Homo sapiens
aauguagaaagugaucca

SEQ ID NO: 164182 - RNA, 19 nt, Homo sapiens
uagugauuuccacagugac

SEQ ID NO: 164183 - RNA, 17 nt, Homo sapiens
ugcuugcacaaaccaau

SEQ ID NO: 164184 - RNA, 21 nt, Homo sapiens
cccacugccaaagaacuugga

SEQ ID NO: 164185 - RNA, 15 nt, Homo sapiens
gaacugaacauucca

SEQ ID NO: 164186 - RNA, 18 nt, Homo sapiens
auuuuucagauauaaaag

SEQ ID NO: 164187 - RNA, 22 nt, Homo sapiens
uuaaguuacacauuuuucagau

SEQ ID NO: 164188 - RNA, 23 nt, Homo sapiens
cacuguuaagccauguguuccaa

SEQ ID NO: 164189 - RNA, 20 nt, Homo sapiens
aagaugaaacaucauuucaa

SEQ ID NO: 164190 - RNA, 22 nt, Homo sapiens
cuuaagacgugauuuugcugua

SEQ ID NO: 164191 - RNA, 22 nt, Homo sapiens
ucccuucuuuuuguucuucauc

SEQ ID NO: 164192 - RNA, 23 nt, Homo sapiens
aauguaagaucguucucugccuc

SEQ ID NO: 164193 - RNA, 17 nt, Homo sapiens
agucugucaauguccua

SEQ ID NO: 164194 - RNA, 12 nt, Homo sapiens
gcaaaaccaaau

SEQ ID NO: 164195 - RNA, 14 nt, Homo sapiens
ugaauaguuuccaa

SEQ ID NO: 164196 - RNA, 23 nt, Homo sapiens
gucucaguuuacauuuuguauau

SEQ ID NO: 164197 - RNA, 17 nt, Homo sapiens
caguaguggugacugug

SEQ ID NO: 164198 - RNA, 21 nt, Homo sapiens
auagagguucuuuauugcuca

SEQ ID NO: 164199 - RNA, 16 nt, Homo sapiens
cacagccaaccuagcu

SEQ ID NO: 164200 - RNA, 23 nt, Homo sapiens
agccaccgcgcccagccucaucu

SEQ ID NO: 164201 - RNA, 19 nt, Homo sapiens
uuugcuucaaaaacauucu

SEQ ID NO: 164202 - RNA, 19 nt, Homo sapiens
gucugaacaauauauacuu

SEQ ID NO: 164203 - RNA, 15 nt, Homo sapiens
ccaaagacauguuua

SEQ ID NO: 164204 - RNA, 20 nt, Homo sapiens
uuauuaaauguagaaaguga

SEQ ID NO: 164205 - RNA, 14 nt, Homo sapiens
auuucuguucuucc

SEQ ID NO: 164206 - RNA, 23 nt, Homo sapiens
ugauagagguucuuuauugcuca

SEQ ID NO: 164207 - RNA, 20 nt, Homo sapiens
gcuuagcuaauauugcaaug

SEQ ID NO: 164208 - RNA, 12 nt, Homo sapiens
uaaaaguuggcu

SEQ ID NO: 164209 - RNA, 15 nt, Homo sapiens
ucaaaaacauucuua

SEQ ID NO: 164210 - RNA, 15 nt, Homo sapiens
agucugaacaauaua

SEQ ID NO: 164211 - RNA, 22 nt, Homo sapiens
aagaugaaugagcaaaaccaaa

SEQ ID NO: 164212 - RNA, 16 nt, Homo sapiens
acacaaucugaaacag

SEQ ID NO: 164213 - RNA, 15 nt, Homo sapiens
cccgucgacguagaa

SEQ ID NO: 164214 - RNA, 21 nt, Homo sapiens
agugcaguuuuuuucuugucu

SEQ ID NO: 164215 - RNA, 23 nt, Homo sapiens
aaaugcugguuuuucaguuuuca

SEQ ID NO: 164216 - RNA, 23 nt, Homo sapiens
ccaguaguggugacugugggcuc

SEQ ID NO: 164217 - RNA, 17 nt, Homo sapiens
auguagaaagugaucca

SEQ ID NO: 164218 - RNA, 22 nt, Homo sapiens
guucauggauauguuauacuga

SEQ ID NO: 164219 - RNA, 23 nt, Homo sapiens
aauugggccaaagaaacauugcc

SEQ ID NO: 164220 - RNA, 16 nt, Homo sapiens
agcuagcaacauuugu

SEQ ID NO: 164221 - RNA, 16 nt, Homo sapiens
uagaaauccaauugga

SEQ ID NO: 164222 - RNA, 22 nt, Homo sapiens
gucuuggcucacugcaacuucu

SEQ ID NO: 164223 - RNA, 16 nt, Homo sapiens
uaaugguuauauguau

SEQ ID NO: 164224 - RNA, 21 nt, Homo sapiens
cugaccaauauuguacaguuu

SEQ ID NO: 164225 - RNA, 21 nt, Homo sapiens
cuuguuagugcacagcacaaa

SEQ ID NO: 164226 - RNA, 19 nt, Homo sapiens
aggcugugccaucagcucc

SEQ ID NO: 164227 - RNA, 16 nt, Homo sapiens
aaaagggaacugaaca

SEQ ID NO: 164228 - RNA, 16 nt, Homo sapiens
gcagagaggcugaaua

SEQ ID NO: 164229 - RNA, 13 nt, Homo sapiens
gcaaaaccaaaua

SEQ ID NO: 164230 - RNA, 22 nt, Homo sapiens
ucuaaggcugugccaucagcuc

SEQ ID NO: 164231 - RNA, 14 nt, Homo sapiens
ggguucaagugauu

SEQ ID NO: 164232 - RNA, 21 nt, Homo sapiens
acuuuuuccuggcucaucucu

SEQ ID NO: 164233 - RNA, 14 nt, Homo sapiens
gucuuuaaccacuu

SEQ ID NO: 164234 - RNA, 23 nt, Homo sapiens
aaauuuucuuuuuauacuauuaa

SEQ ID NO: 164235 - RNA, 16 nt, Homo sapiens
gcaguggaacuaagaa

SEQ ID NO: 164236 - RNA, 18 nt, Homo sapiens
cuuuuuuuuaaguuacac

SEQ ID NO: 164237 - RNA, 16 nt, Homo sapiens
aaacagaaaaccugau

SEQ ID NO: 164238 - RNA, 20 nt, Homo sapiens
cauaaaaguuggcucaggag

SEQ ID NO: 164239 - RNA, 18 nt, Homo sapiens
gacgugauuuugcuguag

SEQ ID NO: 164240 - RNA, 18 nt, Homo sapiens
gccaaucaguagccagca

SEQ ID NO: 164241 - RNA, 16 nt, Homo sapiens
aagcagguucuuguua

SEQ ID NO: 164242 - RNA, 22 nt, Homo sapiens
uagucugaacaauauauacuua

SEQ ID NO: 164243 - RNA, 17 nt, Homo sapiens
uuagugcacagcacaaa

SEQ ID NO: 164244 - RNA, 16 nt, Homo sapiens
aagguugagggcaaug

SEQ ID NO: 164245 - RNA, 23 nt, Homo sapiens
uucuaaagauggaaaaaccaccc

SEQ ID NO: 164246 - RNA, 12 nt, Homo sapiens
gaaucucucuuc

SEQ ID NO: 164247 - RNA, 20 nt, Homo sapiens
gucugaacaauauauacuua

SEQ ID NO: 164248 - RNA, 21 nt, Homo sapiens
aaccguaugagggaacugugu

SEQ ID NO: 164249 - RNA, 21 nt, Homo sapiens
uguuuaugaauaguuuccaaa

SEQ ID NO: 164250 - RNA, 19 nt, Homo sapiens
cugaguagcuggauuacag

SEQ ID NO: 164251 - RNA, 21 nt, Homo sapiens
guuuuacuguccaaagacaug

SEQ ID NO: 164252 - RNA, 22 nt, Homo sapiens
augaggaauuucuguucuucca

SEQ ID NO: 164253 - RNA, 16 nt, Homo sapiens
ugccaggcacacugag

SEQ ID NO: 164254 - RNA, 15 nt, Homo sapiens
uggcuucuuuacuua

SEQ ID NO: 164255 - RNA, 14 nt, Homo sapiens
aggguaaauucucu

SEQ ID NO: 164256 - RNA, 13 nt, Homo sapiens
cuucuccuuagaa

SEQ ID NO: 164257 - RNA, 14 nt, Homo sapiens
auguaucucaggaa

SEQ ID NO: 164258 - RNA, 21 nt, Homo sapiens
aaaucuuuuuuguucaaagau

SEQ ID NO: 164259 - RNA, 18 nt, Homo sapiens
gaauuuggguaugaacag

SEQ ID NO: 164260 - RNA, 15 nt, Homo sapiens
auagaauucagucaa

SEQ ID NO: 164261 - RNA, 19 nt, Homo sapiens
uuaaauguagaaagugauc

SEQ ID NO: 164262 - RNA, 16 nt, Homo sapiens
aacaaagucacccacu

SEQ ID NO: 164263 - RNA, 11 nt, Homo sapiens
ggaacugugua

SEQ ID NO: 164264 - RNA, 20 nt, Homo sapiens
gaacguuuuuccuguucuua

SEQ ID NO: 164265 - RNA, 19 nt, Homo sapiens
cauggauauguuauacuga

SEQ ID NO: 164266 - RNA, 18 nt, Homo sapiens
uguagaagauggcacuua

SEQ ID NO: 164267 - RNA, 19 nt, Homo sapiens
cugauguagcuuauacaaa

SEQ ID NO: 164268 - RNA, 14 nt, Homo sapiens
uuauggcaaauuca

SEQ ID NO: 164269 - RNA, 15 nt, Homo sapiens
agaaauccaauugga

SEQ ID NO: 164270 - RNA, 13 nt, Homo sapiens
aaaaugugacuca

SEQ ID NO: 164271 - RNA, 20 nt, Homo sapiens
ggacuaaguguaccagagaa

SEQ ID NO: 164272 - RNA, 13 nt, Homo sapiens
cagcuguuuaugc

SEQ ID NO: 164273 - RNA, 18 nt, Homo sapiens
ucuuggguucaagugauu

SEQ ID NO: 164274 - RNA, 16 nt, Homo sapiens
agugauucuccugccu

SEQ ID NO: 164275 - RNA, 18 nt, Homo sapiens
cucuaacaguaguugcaa

SEQ ID NO: 164276 - RNA, 18 nt, Homo sapiens
ggaaauagugauuuccac

SEQ ID NO: 164277 - RNA, 23 nt, Homo sapiens
cgugaccugccaggcacacugag

SEQ ID NO: 164278 - RNA, 15 nt, Homo sapiens
ugaaugccacucugu

SEQ ID NO: 164279 - RNA, 15 nt, Homo sapiens
auucuccugccucag

SEQ ID NO: 164280 - RNA, 14 nt, Homo sapiens
uuaaacuuacuuag

SEQ ID NO: 164281 - RNA, 16 nt, Homo sapiens
uauagaaaugcugguu

SEQ ID NO: 164282 - RNA, 13 nt, Homo sapiens
ucugaaacagcuu

SEQ ID NO: 164283 - RNA, 13 nt, Homo sapiens
cagagacugggac

SEQ ID NO: 164284 - RNA, 11 nt, Homo sapiens
aguugcacaaa

SEQ ID NO: 164285 - RNA, 16 nt, Homo sapiens
gaaguuuaauugacuu

SEQ ID NO: 164286 - RNA, 22 nt, Homo sapiens
gcacaaaccaauuaaacccagu

SEQ ID NO: 164287 - RNA, 16 nt, Homo sapiens
ugaccugccaggcaca

SEQ ID NO: 164288 - RNA, 22 nt, Homo sapiens
cgaauauaucaguaauuucaga

SEQ ID NO: 164289 - RNA, 22 nt, Homo sapiens
aacuuggaaauagugauuucca

SEQ ID NO: 164290 - RNA, 20 nt, Homo sapiens
caggcuggagugcaaugaca

SEQ ID NO: 164291 - RNA, 18 nt, Homo sapiens
uuuuccuggcucaucucu

SEQ ID NO: 164292 - RNA, 19 nt, Homo sapiens
agauaaucucuccauuccc

SEQ ID NO: 164293 - RNA, 19 nt, Homo sapiens
aaaauggcacuugggggac

SEQ ID NO: 164294 - RNA, 19 nt, Homo sapiens
cucugagucccagagccaa

SEQ ID NO: 164295 - RNA, 18 nt, Homo sapiens
uuguuauucuguaguuuc

SEQ ID NO: 164296 - RNA, 15 nt, Homo sapiens
aguucauggauaugu

SEQ ID NO: 164297 - RNA, 15 nt, Homo sapiens
uccuguuacaaaaga

SEQ ID NO: 164298 - RNA, 20 nt, Homo sapiens
cugaacaauauauacuuaua

SEQ ID NO: 164299 - RNA, 22 nt, Homo sapiens
agaagauggcacuuauaaccaa

SEQ ID NO: 164300 - RNA, 16 nt, Homo sapiens
caacauuuguuuuagu

SEQ ID NO: 164301 - RNA, 13 nt, Homo sapiens
cacucagaaaaug

SEQ ID NO: 164302 - RNA, 17 nt, Homo sapiens
gucaauguccuacugag

SEQ ID NO: 164303 - RNA, 17 nt, Homo sapiens
aucccgucgacguagaa

SEQ ID NO: 164304 - RNA, 14 nt, Homo sapiens
aaaaaugugacuca

SEQ ID NO: 164305 - RNA, 13 nt, Homo sapiens
caggcacacugag

SEQ ID NO: 164306 - RNA, 20 nt, Homo sapiens
uaaacuuacuuaguguuaug

SEQ ID NO: 164307 - RNA, 13 nt, Homo sapiens
uggaaccagccca

SEQ ID NO: 164308 - RNA, 19 nt, Homo sapiens
cagucuuggcucacugcaa

SEQ ID NO: 164309 - RNA, 18 nt, Homo sapiens
uuaagccauguguuccaa

SEQ ID NO: 164310 - RNA, 20 nt, Homo sapiens
gaaaagaaucggcaauguuu

SEQ ID NO: 164311 - RNA, 12 nt, Homo sapiens
gaaccaggccag

SEQ ID NO: 164312 - RNA, 18 nt, Homo sapiens
ccgacugccaucuuggac

SEQ ID NO: 164313 - RNA, 14 nt, Homo sapiens
cuuaaaauagccau

SEQ ID NO: 164314 - RNA, 12 nt, Homo sapiens
uccccucuagga

SEQ ID NO: 164315 - RNA, 13 nt, Homo sapiens
cucuuggguucaa

SEQ ID NO: 164316 - RNA, 21 nt, Homo sapiens
uuaaagcagggauaugcugua

SEQ ID NO: 164317 - RNA, 16 nt, Homo sapiens
uuaauaaagacagggu

SEQ ID NO: 164318 - RNA, 18 nt, Homo sapiens
aauuucucuacugucuca

SEQ ID NO: 164319 - RNA, 20 nt, Homo sapiens
ucuacugucucaguuuacau

SEQ ID NO: 164320 - RNA, 15 nt, Homo sapiens
gguccaaggucucca

SEQ ID NO: 164321 - RNA, 12 nt, Homo sapiens
uggcucaucucu

SEQ ID NO: 164322 - RNA, 15 nt, Homo sapiens
aauauagcucaggua

SEQ ID NO: 164323 - RNA, 20 nt, Homo sapiens
acagugacuccacucugagu

SEQ ID NO: 164324 - RNA, 20 nt, Homo sapiens
ucugccuccccuucacuccc

SEQ ID NO: 164325 - RNA, 14 nt, Homo sapiens
uguacagucuugua

SEQ ID NO: 164326 - RNA, 22 nt, Homo sapiens
cccgccacccucccacugccaa

SEQ ID NO: 164327 - RNA, 12 nt, Homo sapiens
uguaccagagaa

SEQ ID NO: 164328 - RNA, 18 nt, Homo sapiens
agcucagguagcacuuua

SEQ ID NO: 164329 - RNA, 21 nt, Homo sapiens
aggacacuagaagauuuugaa

SEQ ID NO: 164330 - RNA, 12 nt, Homo sapiens
uaguugcuguau

SEQ ID NO: 164331 - RNA, 13 nt, Homo sapiens
guaagacugugua

SEQ ID NO: 164332 - RNA, 16 nt, Homo sapiens
acguaagacuguguaa

SEQ ID NO: 164333 - RNA, 12 nt, Homo sapiens
auguaucucagg

SEQ ID NO: 164334 - RNA, 19 nt, Homo sapiens
agucuuagagcuuuaccua

SEQ ID NO: 164335 - RNA, 18 nt, Homo sapiens
cgugaccugccaggcaca

SEQ ID NO: 164336 - RNA, 22 nt, Homo sapiens
aaugccacucuguaauugcaaa

SEQ ID NO: 164337 - RNA, 13 nt, Homo sapiens
uccacaaagccaa

SEQ ID NO: 164338 - RNA, 17 nt, Homo sapiens
ccaaauauuccagagac

SEQ ID NO: 164339 - RNA, 14 nt, Homo sapiens
cauuugucaacaaa

SEQ ID NO: 164340 - RNA, 19 nt, Homo sapiens
cccuguucauucugcauuc

SEQ ID NO: 164341 - RNA, 18 nt, Homo sapiens
cuuagguccaaggucucc

SEQ ID NO: 164342 - RNA, 20 nt, Homo sapiens
gccuccaaguccacagugga

SEQ ID NO: 164343 - RNA, 20 nt, Homo sapiens
ccacagugacuccacucuga

SEQ ID NO: 164344 - RNA, 14 nt, Homo sapiens
uacgacaacuugca

SEQ ID NO: 164345 - RNA, 21 nt, Homo sapiens
gucuuuggugaacauugcaau

SEQ ID NO: 164346 - RNA, 20 nt, Homo sapiens
guauauucaaccaaauacuu

SEQ ID NO: 164347 - RNA, 21 nt, Homo sapiens
aggucuccagagggugaaagc

SEQ ID NO: 164348 - RNA, 13 nt, Homo sapiens
ugacacagucuug

SEQ ID NO: 164349 - RNA, 14 nt, Homo sapiens
acaaaguaagccau

SEQ ID NO: 164350 - RNA, 13 nt, Homo sapiens
cuggcucaucucu

SEQ ID NO: 164351 - RNA, 23 nt, Homo sapiens
gucucgugguaggacuguagaaa

SEQ ID NO: 164352 - RNA, 13 nt, Homo sapiens
ggcaggacagcuc

SEQ ID NO: 164353 - RNA, 22 nt, Homo sapiens
uugcacaaauugggccaaagaa

SEQ ID NO: 164354 - RNA, 16 nt, Homo sapiens
aggcuggagugcaaug

SEQ ID NO: 164355 - RNA, 22 nt, Homo sapiens
ugauuucagcaccuacagugua

SEQ ID NO: 164356 - RNA, 17 nt, Homo sapiens
uuuccaaauuauggcaa

SEQ ID NO: 164357 - RNA, 21 nt, Homo sapiens
ugcccaggcuggagugcaaug

SEQ ID NO: 164358 - RNA, 15 nt, Homo sapiens
ucuaaaaucugcuag

SEQ ID NO: 164359 - RNA, 15 nt, Homo sapiens
cuaacaguaguugca

SEQ ID NO: 164360 - RNA, 13 nt, Homo sapiens
ccuacugagacag

SEQ ID NO: 164361 - RNA, 15 nt, Homo sapiens
aguguaccagagaag

SEQ ID NO: 164362 - RNA, 14 nt, Homo sapiens
caucauuucaaucg

SEQ ID NO: 164363 - RNA, 10 nt, Homo sapiens
uaaagacaga

SEQ ID NO: 164364 - RNA, 15 nt, Homo sapiens
gaaaaguaacuguuu

SEQ ID NO: 164365 - RNA, 10 nt, Homo sapiens
ucauauugau

SEQ ID NO: 164366 - RNA, 16 nt, Homo sapiens
uuaaaauagccauaaa

SEQ ID NO: 164367 - RNA, 18 nt, Homo sapiens
gucacagccacuugggau

SEQ ID NO: 164368 - RNA, 21 nt, Homo sapiens
ucuaaggcugugccaucagcu

SEQ ID NO: 164369 - RNA, 20 nt, Homo sapiens
gacgugauuuugcuguagaa

SEQ ID NO: 164370 - RNA, 12 nt, Homo sapiens
cuguccaaagac

SEQ ID NO: 164371 - RNA, 18 nt, Homo sapiens
gauaaucucuccauuccc

SEQ ID NO: 164372 - RNA, 13 nt, Homo sapiens
uccacaguggaac

SEQ ID NO: 164373 - RNA, 23 nt, Homo sapiens
uaaaaguuggcucaggagucuua

SEQ ID NO: 164374 - RNA, 15 nt, Homo sapiens
cuaguaaaagccauc

SEQ ID NO: 164375 - RNA, 23 nt, Homo sapiens
cagucaaagauacacaaucugaa

SEQ ID NO: 164376 - RNA, 21 nt, Homo sapiens
cacaaucugaaacagcuucau

SEQ ID NO: 164377 - RNA, 19 nt, Homo sapiens
cugggacuaaguguaccag

SEQ ID NO: 164378 - RNA, 13 nt, Homo sapiens
aaaguaagccaug

SEQ ID NO: 164379 - RNA, 19 nt, Homo sapiens
guuucaccauguuggccag

SEQ ID NO: 164380 - RNA, 15 nt, Homo sapiens
gacucaucauuucca

SEQ ID NO: 164381 - RNA, 16 nt, Homo sapiens
uccuggggaacauaga

SEQ ID NO: 164382 - RNA, 22 nt, Homo sapiens
uaaauuucucuacugucucagu

SEQ ID NO: 164383 - RNA, 15 nt, Homo sapiens
cagcaccuacagugu

SEQ ID NO: 164384 - RNA, 21 nt, Homo sapiens
caaguucuuaguugcuguaug

SEQ ID NO: 164385 - RNA, 18 nt, Homo sapiens
ugcaaugacacagucuug

SEQ ID NO: 164386 - RNA, 17 nt, Homo sapiens
ucuggccuccaagucca

SEQ ID NO: 164387 - RNA, 12 nt, Homo sapiens
uuucccaaagag

SEQ ID NO: 164388 - RNA, 21 nt, Homo sapiens
accuaaauaugagcccagaaa

SEQ ID NO: 164389 - RNA, 16 nt, Homo sapiens
augagggaacugugua

SEQ ID NO: 164390 - RNA, 21 nt, Homo sapiens
uggauuacaggcaugugccac

SEQ ID NO: 164391 - RNA, 21 nt, Homo sapiens
aaauuaagaaauucacuuccc

SEQ ID NO: 164392 - RNA, 18 nt, Homo sapiens
uccuccccuguucauucu

SEQ ID NO: 164393 - RNA, 22 nt, Homo sapiens
aacauuuguuuuagucugaaca

SEQ ID NO: 164394 - RNA, 18 nt, Homo sapiens
ccugccaggcacacugag

SEQ ID NO: 164395 - RNA, 19 nt, Homo sapiens
gcccaggcuggagugcaau

SEQ ID NO: 164396 - RNA, 19 nt, Homo sapiens
cgugauuuugcuguagaag

SEQ ID NO: 164397 - RNA, 20 nt, Homo sapiens
gccagguucugacucuuggc

SEQ ID NO: 164398 - RNA, 16 nt, Homo sapiens
acugaauuuugucuuu

SEQ ID NO: 164399 - RNA, 21 nt, Homo sapiens
aguagcuggauuacaggcaug

SEQ ID NO: 164400 - RNA, 18 nt, Homo sapiens
gaaccaggccagagcaaa

SEQ ID NO: 164401 - RNA, 22 nt, Homo sapiens
cugggauuacagggaugagcca

SEQ ID NO: 164402 - RNA, 15 nt, Homo sapiens
agccauguaucucag

SEQ ID NO: 164403 - RNA, 22 nt, Homo sapiens
aaacccaguaguggugacugug

SEQ ID NO: 164404 - RNA, 17 nt, Homo sapiens
ggcuaguaaaagccauc

SEQ ID NO: 164405 - RNA, 20 nt, Homo sapiens
ucauacuugaaaauaugaca

SEQ ID NO: 164406 - RNA, 13 nt, Homo sapiens
ggauuacaggcau

SEQ ID NO: 164407 - RNA, 15 nt, Homo sapiens
agccagguucugacu

SEQ ID NO: 164408 - RNA, 13 nt, Homo sapiens
guguaccagagaa

SEQ ID NO: 164409 - RNA, 12 nt, Homo sapiens
uguagaaaguga

SEQ ID NO: 164410 - RNA, 21 nt, Homo sapiens
uaagcacgggccauaugaaua

SEQ ID NO: 164411 - RNA, 14 nt, Homo sapiens
agaugaaacaucau

SEQ ID NO: 164412 - RNA, 15 nt, Homo sapiens
auacuagaguucaug

SEQ ID NO: 164413 - RNA, 14 nt, Homo sapiens
acugaacauuccag

SEQ ID NO: 164414 - RNA, 14 nt, Homo sapiens
aaaagacugaccaa

SEQ ID NO: 164415 - RNA, 20 nt, Homo sapiens
ucugacucuuggcacagcau

SEQ ID NO: 164416 - RNA, 13 nt, Homo sapiens
cagccucaucucu

SEQ ID NO: 164417 - RNA, 21 nt, Homo sapiens
aauguuuuagaaugagacuua

SEQ ID NO: 164418 - RNA, 22 nt, Homo sapiens
gugggcuaagcacgggccauau

SEQ ID NO: 164419 - RNA, 14 nt, Homo sapiens
cacaaucugaaaca

SEQ ID NO: 164420 - RNA, 19 nt, Homo sapiens
acaaucuugucauacuuga

SEQ ID NO: 164421 - RNA, 14 nt, Homo sapiens
acaaucugaaacag

SEQ ID NO: 164422 - RNA, 20 nt, Homo sapiens
accaauauuguacaguuuuu

SEQ ID NO: 164423 - RNA, 20 nt, Homo sapiens
aagauggcacuuauaaccaa

SEQ ID NO: 164424 - RNA, 17 nt, Homo sapiens
uagugaaucacguaaag

SEQ ID NO: 164425 - RNA, 14 nt, Homo sapiens
aucaguagccagca

SEQ ID NO: 164426 - RNA, 19 nt, Homo sapiens
gacuaaguguaccagagaa

SEQ ID NO: 164427 - RNA, 12 nt, Homo sapiens
guagaaagugau

SEQ ID NO: 164428 - RNA, 15 nt, Homo sapiens
cuuuuuauacuauua

SEQ ID NO: 164429 - RNA, 20 nt, Homo sapiens
gucaaagauacacaaucuga

SEQ ID NO: 164430 - RNA, 13 nt, Homo sapiens
uucuucuuuuugc

SEQ ID NO: 164431 - RNA, 14 nt, Homo sapiens
ccaaauuauggcaa

SEQ ID NO: 164432 - RNA, 13 nt, Homo sapiens
uugaaacuuguau

SEQ ID NO: 164433 - RNA, 13 nt, Homo sapiens
cauuuacauugcc

SEQ ID NO: 164434 - RNA, 22 nt, Homo sapiens
ucugauaugcaguuuuccuuaa

SEQ ID NO: 164435 - RNA, 12 nt, Homo sapiens
aggccagagcaa

SEQ ID NO: 164436 - RNA, 14 nt, Homo sapiens
ucaacaaagucacc

SEQ ID NO: 164437 - RNA, 16 nt, Homo sapiens
gauuuugcuguagaag

SEQ ID NO: 164438 - RNA, 18 nt, Homo sapiens
ggaacuaagaaagcccuu

SEQ ID NO: 164439 - RNA, 20 nt, Homo sapiens
gucaacaaagucacccacuu

SEQ ID NO: 164440 - RNA, 18 nt, Homo sapiens
agcuggagucugucaaug

SEQ ID NO: 164441 - RNA, 19 nt, Homo sapiens
uguuaagccauguguucca

SEQ ID NO: 164442 - RNA, 15 nt, Homo sapiens
aguugggugauaugu

SEQ ID NO: 164443 - RNA, 18 nt, Homo sapiens
auaugacacucuagucaa

SEQ ID NO: 164444 - RNA, 17 nt, Homo sapiens
caacaaagucacccacu

SEQ ID NO: 164445 - RNA, 13 nt, Homo sapiens
gugccaucagcuc

SEQ ID NO: 164446 - RNA, 18 nt, Homo sapiens
aaagucuacuuuaccuaa

SEQ ID NO: 164447 - RNA, 21 nt, Homo sapiens
aauguguucggugauuucaga

SEQ ID NO: 164448 - RNA, 15 nt, Homo sapiens
aaugugacucaagac

SEQ ID NO: 164449 - RNA, 22 nt, Homo sapiens
caaaaccaaauauuccagagac

SEQ ID NO: 164450 - RNA, 21 nt, Homo sapiens
aucugccuccccuucacuccc

SEQ ID NO: 164451 - RNA, 22 nt, Homo sapiens
caauauacuuguauagcaguuu

SEQ ID NO: 164452 - RNA, 21 nt, Homo sapiens
aaaugugacucaagacuucca

SEQ ID NO: 164453 - RNA, 16 nt, Homo sapiens
aaauauaguucacaau

SEQ ID NO: 164454 - RNA, 21 nt, Homo sapiens
acugccaucuuggacuuguca

SEQ ID NO: 164455 - RNA, 12 nt, Homo sapiens
guacacuguguu

SEQ ID NO: 164456 - RNA, 23 nt, Homo sapiens
cuuccuccccuguucauucugca

SEQ ID NO: 164457 - RNA, 14 nt, Homo sapiens
uaaccauugucaua

SEQ ID NO: 164458 - RNA, 18 nt, Homo sapiens
ugaaaauaugacacucua

SEQ ID NO: 164459 - RNA, 19 nt, Homo sapiens
gccacccucccacugccaa

SEQ ID NO: 164460 - RNA, 18 nt, Homo sapiens
ucacagccacuugggaua

SEQ ID NO: 164461 - RNA, 15 nt, Homo sapiens
guaggugguuuugaa

SEQ ID NO: 164462 - RNA, 12 nt, Homo sapiens
uaagaugaaaca

SEQ ID NO: 164463 - RNA, 15 nt, Homo sapiens
uaagaaauucacuuc

SEQ ID NO: 164464 - RNA, 17 nt, Homo sapiens
cauggagucacagccac

SEQ ID NO: 164465 - RNA, 20 nt, Homo sapiens
gcacucagaaaauggcacuu

SEQ ID NO: 164466 - RNA, 22 nt, Homo sapiens
gcaggauuugggcucuuggaau

SEQ ID NO: 164467 - RNA, 19 nt, Homo sapiens
cauaaugcauguggcacuu

SEQ ID NO: 164468 - RNA, 18 nt, Homo sapiens
ccaaagaaacauugccuu

SEQ ID NO: 164469 - RNA, 12 nt, Homo sapiens
uuaagaaauuca

SEQ ID NO: 164470 - RNA, 15 nt, Homo sapiens
agcgauuaauaacag

SEQ ID NO: 164471 - RNA, 14 nt, Homo sapiens
aauaaaauuguaca

SEQ ID NO: 164472 - RNA, 21 nt, Homo sapiens
aaugcugguuuuucaguuuuc

SEQ ID NO: 164473 - RNA, 12 nt, Homo sapiens
ugaaacaucauu

SEQ ID NO: 164474 - RNA, 13 nt, Homo sapiens
gaaacagcuucau

SEQ ID NO: 164475 - RNA, 18 nt, Homo sapiens
uucuuucaaagaagccag

SEQ ID NO: 164476 - RNA, 16 nt, Homo sapiens
aaaugcugguuuuuca

SEQ ID NO: 164477 - RNA, 15 nt, Homo sapiens
uggauuugucuuugg

SEQ ID NO: 164478 - RNA, 21 nt, Homo sapiens
gacgucacccuccauucugca

SEQ ID NO: 164479 - RNA, 14 nt, Homo sapiens
caguguacagucuu

SEQ ID NO: 164480 - RNA, 16 nt, Homo sapiens
gccagagcaaacagaa

SEQ ID NO: 164481 - RNA, 18 nt, Homo sapiens
aaaaguauccugcuucug

SEQ ID NO: 164482 - RNA, 17 nt, Homo sapiens
aaaaaugugacucaaga

SEQ ID NO: 164483 - RNA, 16 nt, Homo sapiens
cuugguaaaauaauca

SEQ ID NO: 164484 - RNA, 11 nt, Homo sapiens
uuuaaagacag

SEQ ID NO: 164485 - RNA, 22 nt, Homo sapiens
ucuuuguaaagaaaguggcuug

SEQ ID NO: 164486 - RNA, 21 nt, Homo sapiens
gacucaagacuuccagagccu

SEQ ID NO: 164487 - RNA, 13 nt, Homo sapiens
agcagauaauggu

SEQ ID NO: 164488 - RNA, 22 nt, Homo sapiens
gcagcgauuaauaacaggcaaa

SEQ ID NO: 164489 - RNA, 15 nt, Homo sapiens
aacugaacauuccag

SEQ ID NO: 164490 - RNA, 14 nt, Homo sapiens
ugaauaugccacuu

SEQ ID NO: 164491 - RNA, 16 nt, Homo sapiens
uggccuggggcuucug

SEQ ID NO: 164492 - RNA, 15 nt, Homo sapiens
aauaaccauugucau

SEQ ID NO: 164493 - RNA, 22 nt, Homo sapiens
gguacaguauggggguuguaaa

SEQ ID NO: 164494 - RNA, 16 nt, Homo sapiens
aauugcuucaagcauu

SEQ ID NO: 164495 - RNA, 22 nt, Homo sapiens
acauuuguuuuagucugaacaa

SEQ ID NO: 164496 - RNA, 15 nt, Homo sapiens
ucguucucugccuca

SEQ ID NO: 164497 - RNA, 20 nt, Homo sapiens
aucugcuagggaauaucaau

SEQ ID NO: 164498 - RNA, 15 nt, Homo sapiens
ugcauguggcacuua

SEQ ID NO: 164499 - RNA, 14 nt, Homo sapiens
uaaaauagccauaa

SEQ ID NO: 164500 - RNA, 22 nt, Homo sapiens
auuaaauguagaaagugaucca

SEQ ID NO: 164501 - RNA, 14 nt, Homo sapiens
ugggauuacaggga

SEQ ID NO: 164502 - RNA, 14 nt, Homo sapiens
aaacaucauuucaa

SEQ ID NO: 164503 - RNA, 19 nt, Homo sapiens
auuuuauguuuaguugcac

SEQ ID NO: 164504 - RNA, 17 nt, Homo sapiens
aagaucguucucugccu

SEQ ID NO: 164505 - RNA, 16 nt, Homo sapiens
acaauauacuuguaua

SEQ ID NO: 164506 - RNA, 13 nt, Homo sapiens
cacuuuucaaugu

SEQ ID NO: 164507 - RNA, 14 nt, Homo sapiens
uuggaaaaucaaga

SEQ ID NO: 164508 - RNA, 21 nt, Homo sapiens
uuauauguauaucacauuccc

SEQ ID NO: 164509 - RNA, 21 nt, Homo sapiens
caaucugaaacagcuucaugg

SEQ ID NO: 164510 - RNA, 18 nt, Homo sapiens
auuagcuccacaaagcca

SEQ ID NO: 164511 - RNA, 20 nt, Homo sapiens
uacaguuuuuauugcuuguu

SEQ ID NO: 164512 - RNA, 23 nt, Homo sapiens
caggcgugaccugccaggcacac

SEQ ID NO: 164513 - RNA, 14 nt, Homo sapiens
ugacucuuggcaca

SEQ ID NO: 164514 - RNA, 18 nt, Homo sapiens
guuuacauuuuguauauu

SEQ ID NO: 164515 - RNA, 15 nt, Homo sapiens
uguuuauagugcucu

SEQ ID NO: 164516 - RNA, 19 nt, Homo sapiens
caccaacuauagaauguau

SEQ ID NO: 164517 - RNA, 16 nt, Homo sapiens
uguuauacugaaccag

SEQ ID NO: 164518 - RNA, 17 nt, Homo sapiens
agguugagggcaaugga

SEQ ID NO: 164519 - RNA, 21 nt, Homo sapiens
uguauuuaaaugaaagugaga

SEQ ID NO: 164520 - RNA, 13 nt, Homo sapiens
uaauaaagacagg

SEQ ID NO: 164521 - RNA, 14 nt, Homo sapiens
caguaguugcaaug

SEQ ID NO: 164522 - RNA, 14 nt, Homo sapiens
auaucacauuccca

SEQ ID NO: 164523 - RNA, 16 nt, Homo sapiens
guggauuggauuuguc

SEQ ID NO: 164524 - RNA, 19 nt, Homo sapiens
ggaauuucuguucuuccau

SEQ ID NO: 164525 - RNA, 11 nt, Homo sapiens
cacaugcuuuu

SEQ ID NO: 164526 - RNA, 19 nt, Homo sapiens
cuccacaaagccaaucuca

SEQ ID NO: 164527 - RNA, 23 nt, Homo sapiens
gaagggcuuggacucaagcaaga

SEQ ID NO: 164528 - RNA, 21 nt, Homo sapiens
ccauuagcauuugucaacaaa

SEQ ID NO: 164529 - RNA, 20 nt, Homo sapiens
guuaaaaguuguguuuugaa

SEQ ID NO: 164530 - RNA, 12 nt, Homo sapiens
gacucaagcaag

SEQ ID NO: 164531 - RNA, 21 nt, Homo sapiens
aaagcuagaaaguguaugugu

SEQ ID NO: 164532 - RNA, 13 nt, Homo sapiens
gguuauauguaua

SEQ ID NO: 164533 - RNA, 21 nt, Homo sapiens
ugaccugccaggcacacugag

SEQ ID NO: 164534 - RNA, 13 nt, Homo sapiens
aaaaacauucuua

SEQ ID NO: 164535 - RNA, 18 nt, Homo sapiens
aaaccugaugcuggggac

SEQ ID NO: 164536 - RNA, 22 nt, Homo sapiens
gccauaaaggggagggacucau

SEQ ID NO: 164537 - RNA, 20 nt, Homo sapiens
cuuuuuccuggcucaucucu

SEQ ID NO: 164538 - RNA, 22 nt, Homo sapiens
gaaaauugggaauaugcacaaa

SEQ ID NO: 164539 - RNA, 19 nt, Homo sapiens
agggaacugaacauuccag

SEQ ID NO: 164540 - RNA, 19 nt, Homo sapiens
ugcuucuuaaaauagccau

SEQ ID NO: 164541 - RNA, 11 nt, Homo sapiens
uuugcuguaga

SEQ ID NO: 164542 - RNA, 10 nt, Homo sapiens
ucccaaagag

SEQ ID NO: 164543 - RNA, 13 nt, Homo sapiens
aauauaucaguaa

SEQ ID NO: 164544 - RNA, 18 nt, Homo sapiens
aaagacaggguuucacca

SEQ ID NO: 164545 - RNA, 16 nt, Homo sapiens
acacagcaucagcuca

SEQ ID NO: 164546 - RNA, 19 nt, Homo sapiens
cucgagguuucucaaagaa

SEQ ID NO: 164547 - RNA, 23 nt, Homo sapiens
ccacccccaaauuuucuuuuuau

SEQ ID NO: 164548 - RNA, 15 nt, Homo sapiens
aauugggccaaagaa

SEQ ID NO: 164549 - RNA, 17 nt, Homo sapiens
cagguucugacucuugg

SEQ ID NO: 164550 - RNA, 16 nt, Homo sapiens
uaacgagaaauagaaa

SEQ ID NO: 164551 - RNA, 15 nt, Homo sapiens
uucugaaaaaguauc

SEQ ID NO: 164552 - RNA, 12 nt, Homo sapiens
acaaucuuguca

SEQ ID NO: 164553 - RNA, 22 nt, Homo sapiens
aauauuccagagacugggacua

SEQ ID NO: 164554 - RNA, 19 nt, Homo sapiens
cacuguguuuuuuuguaua

SEQ ID NO: 164555 - RNA, 15 nt, Homo sapiens
aagaauguuuaugaa

SEQ ID NO: 164556 - RNA, 14 nt, Homo sapiens
ccuggcucaucucu

SEQ ID NO: 164557 - RNA, 22 nt, Homo sapiens
uagagaccaguuuucucuggaa

SEQ ID NO: 164558 - RNA, 17 nt, Homo sapiens
cuguaugucucguggua

SEQ ID NO: 164559 - RNA, 19 nt, Homo sapiens
uauauguauaucacauucc

SEQ ID NO: 164560 - RNA, 12 nt, Homo sapiens
ccaguuacauaa

SEQ ID NO: 164561 - RNA, 23 nt, Homo sapiens
cuuggaauccuggggaacauaga

SEQ ID NO: 164562 - RNA, 22 nt, Homo sapiens
uccuaagccaugggagacacug

SEQ ID NO: 164563 - RNA, 18 nt, Homo sapiens
auacugaaccaggccaga

SEQ ID NO: 164564 - RNA, 19 nt, Homo sapiens
acacagucuuggcucacug

SEQ ID NO: 164565 - RNA, 14 nt, Homo sapiens
acauuuuguauauu

SEQ ID NO: 164566 - RNA, 20 nt, Homo sapiens
uacccguuucacaugcuuuu

SEQ ID NO: 164567 - RNA, 22 nt, Homo sapiens
accagagaagggcuuggacuca

SEQ ID NO: 164568 - RNA, 17 nt, Homo sapiens
uugguuuugcucacaaa

SEQ ID NO: 164569 - RNA, 20 nt, Homo sapiens
ugauauguugguagauucua

SEQ ID NO: 164570 - RNA, 12 nt, Homo sapiens
gguauuuagcca

SEQ ID NO: 164571 - RNA, 22 nt, Homo sapiens
agccuaggaaagccaguuacau

SEQ ID NO: 164572 - RNA, 23 nt, Homo sapiens
caguuggcuaagaagugacucuu

SEQ ID NO: 164573 - RNA, 23 nt, Homo sapiens
ugaaaagaaucggcaauguuuca

SEQ ID NO: 164574 - RNA, 16 nt, Homo sapiens
gaacugaacauuccag

SEQ ID NO: 164575 - RNA, 23 nt, Homo sapiens
uuauucuguaguuucacucucau

SEQ ID NO: 164576 - RNA, 12 nt, Homo sapiens
caaaacauuugu

SEQ ID NO: 164577 - RNA, 13 nt, Homo sapiens
gcaguggaacuaa

SEQ ID NO: 164578 - RNA, 14 nt, Homo sapiens
uacuucucugcuau

SEQ ID NO: 164579 - RNA, 20 nt, Homo sapiens
cugucaauguccuacugaga

SEQ ID NO: 164580 - RNA, 18 nt, Homo sapiens
guugagggcaauggacaa

SEQ ID NO: 164581 - RNA, 18 nt, Homo sapiens
aagagaaguuuucuugac

SEQ ID NO: 164582 - RNA, 17 nt, Homo sapiens
agcuggauuacaggcau

SEQ ID NO: 164583 - RNA, 23 nt, Homo sapiens
cuuagagcuuuaccuaaauauga

SEQ ID NO: 164584 - RNA, 16 nt, Homo sapiens
gugccaucagcuccuu

SEQ ID NO: 164585 - RNA, 18 nt, Homo sapiens
aaguaauccaccugccuc

SEQ ID NO: 164586 - RNA, 22 nt, Homo sapiens
cacagcacaaauuaguuguaua

SEQ ID NO: 164587 - RNA, 17 nt, Homo sapiens
agaaaguggcuugaaau

SEQ ID NO: 164588 - RNA, 23 nt, Homo sapiens
guucauggauauguuauacugaa

SEQ ID NO: 164589 - RNA, 15 nt, Homo sapiens
gagcuccuaagccau

SEQ ID NO: 164590 - RNA, 23 nt, Homo sapiens
acugggacuaaguguaccagaga

SEQ ID NO: 164591 - RNA, 13 nt, Homo sapiens
caaucccucaaaa

SEQ ID NO: 164592 - RNA, 22 nt, Homo sapiens
caauauauacuuauagaauuca

SEQ ID NO: 164593 - RNA, 19 nt, Homo sapiens
agacgugauuuugcuguag

SEQ ID NO: 164594 - RNA, 17 nt, Homo sapiens
augguggccuggggcuu

SEQ ID NO: 164595 - RNA, 14 nt, Homo sapiens
ugaaacaucauuuc

SEQ ID NO: 164596 - RNA, 15 nt, Homo sapiens
acaaagccaaucuca

SEQ ID NO: 164597 - RNA, 14 nt, Homo sapiens
uagaagauggcacu

SEQ ID NO: 164598 - RNA, 22 nt, Homo sapiens
aaucaguguuuccaaucugucc

SEQ ID NO: 164599 - RNA, 21 nt, Homo sapiens
agacgugauuuugcuguagaa

SEQ ID NO: 164600 - RNA, 17 nt, Homo sapiens
accuaaauaugagccca

SEQ ID NO: 164601 - RNA, 18 nt, Homo sapiens
agaagguugagggcaaug

SEQ ID NO: 164602 - RNA, 21 nt, Homo sapiens
ugcuguagaagauggcacuua

SEQ ID NO: 164603 - RNA, 15 nt, Homo sapiens
gagugggcuaagcac

SEQ ID NO: 164604 - RNA, 22 nt, Homo sapiens
uugucaacaaagucacccacuu

SEQ ID NO: 164605 - RNA, 20 nt, Homo sapiens
gccacucuguaauugcaaaa

SEQ ID NO: 164606 - RNA, 21 nt, Homo sapiens
uggggacacagcaucagcuca

SEQ ID NO: 164607 - RNA, 17 nt, Homo sapiens
aagcuggagucugucaa

SEQ ID NO: 164608 - RNA, 16 nt, Homo sapiens
ucaggcagaucucagc

SEQ ID NO: 164609 - RNA, 20 nt, Homo sapiens
ugaaagcuggagucugucaa

SEQ ID NO: 164610 - RNA, 15 nt, Homo sapiens
acaguaguugcaaug

SEQ ID NO: 164611 - RNA, 17 nt, Homo sapiens
aauaaccauugucauaa

SEQ ID NO: 164612 - RNA, 20 nt, Homo sapiens
uuaauaggguaaauucucua

SEQ ID NO: 164613 - RNA, 12 nt, Homo sapiens
gaccaggucuca

SEQ ID NO: 164614 - RNA, 14 nt, Homo sapiens
uuugaggguguaua

SEQ ID NO: 164615 - RNA, 19 nt, Homo sapiens
aauucugaauuaagcacag

SEQ ID NO: 164616 - RNA, 22 nt, Homo sapiens
gccggggaaggaggccguccau

SEQ ID NO: 164617 - RNA, 15 nt, Homo sapiens
uuuucaaugucuaaa

SEQ ID NO: 164618 - RNA, 19 nt, Homo sapiens
uuucuuucaaagaagccag

SEQ ID NO: 164619 - RNA, 13 nt, Homo sapiens
caguaguugcaau

SEQ ID NO: 164620 - RNA, 14 nt, Homo sapiens
uccccuucacuccc

SEQ ID NO: 164621 - RNA, 14 nt, Homo sapiens
caaugucuaaaaac

SEQ ID NO: 164622 - RNA, 17 nt, Homo sapiens
augagggaacuguguag

SEQ ID NO: 164623 - RNA, 17 nt, Homo sapiens
uuaaaccguacacugug

SEQ ID NO: 164624 - RNA, 15 nt, Homo sapiens
ugugggcuccauuca

SEQ ID NO: 164625 - RNA, 13 nt, Homo sapiens
cacacuguuaaaa

SEQ ID NO: 164626 - RNA, 21 nt, Homo sapiens
cugaugcuggggacacagcau

SEQ ID NO: 164627 - RNA, 13 nt, Homo sapiens
aggacuguagaaa

SEQ ID NO: 164628 - RNA, 12 nt, Homo sapiens
acugccaaagaa

SEQ ID NO: 164629 - RNA, 19 nt, Homo sapiens
cuuuaccuaaauaugagcc

SEQ ID NO: 164630 - RNA, 18 nt, Homo sapiens
cacucuguaauugcaaaa

SEQ ID NO: 164631 - RNA, 18 nt, Homo sapiens
ccaggcuggagugcaaug

SEQ ID NO: 164632 - RNA, 23 nt, Homo sapiens
ugucucgugguaggacuguagaa

SEQ ID NO: 164633 - RNA, 15 nt, Homo sapiens
ugcagccacuguuaa

SEQ ID NO: 164634 - RNA, 22 nt, Homo sapiens
ccauaggaggccaacccaaaau

SEQ ID NO: 164635 - RNA, 23 nt, Homo sapiens
acccuucuccuuagaaguggaag

SEQ ID NO: 164636 - RNA, 20 nt, Homo sapiens
aaugacacagucuuggcuca

SEQ ID NO: 164637 - RNA, 16 nt, Homo sapiens
aaaccaaauauuccag

SEQ ID NO: 164638 - RNA, 16 nt, Homo sapiens
uccuuagaaguggaag

SEQ ID NO: 164639 - RNA, 14 nt, Homo sapiens
uacuguccaaagac

SEQ ID NO: 164640 - RNA, 15 nt, Homo sapiens
aucuaaaaucugcua

SEQ ID NO: 164641 - RNA, 22 nt, Homo sapiens
cccucccacugccaaagaacuu

SEQ ID NO: 164642 - RNA, 19 nt, Homo sapiens
gucuuuggugaacauugca

SEQ ID NO: 164643 - RNA, 19 nt, Homo sapiens
cucuugaaaucuguuaaaa

SEQ ID NO: 164644 - RNA, 14 nt, Homo sapiens
auuguagcuaugau

SEQ ID NO: 164645 - RNA, 16 nt, Homo sapiens
ugaaugccacucugua

SEQ ID NO: 164646 - RNA, 14 nt, Homo sapiens
uagaauucagucaa

SEQ ID NO: 164647 - RNA, 14 nt, Homo sapiens
aaugagacuuacuu

SEQ ID NO: 164648 - RNA, 17 nt, Homo sapiens
uguuucaaacaaaaagu

SEQ ID NO: 164649 - RNA, 18 nt, Homo sapiens
ggauacgacaacuugcac

SEQ ID NO: 164650 - RNA, 19 nt, Homo sapiens
ucgugguaggacuguagaa

SEQ ID NO: 164651 - RNA, 20 nt, Homo sapiens
gauuuugaaauuuuuauuaa

SEQ ID NO: 164652 - RNA, 22 nt, Homo sapiens
cuuaaaagaaagagaaguuuuc

SEQ ID NO: 164653 - RNA, 20 nt, Homo sapiens
cuguucuaaggcugugccau

SEQ ID NO: 164654 - RNA, 22 nt, Homo sapiens
aagaaaaguuuuguaaauuucu

SEQ ID NO: 164655 - RNA, 20 nt, Homo sapiens
cagagucucgcucuguugcc

SEQ ID NO: 164656 - RNA, 11 nt, Homo sapiens
aguaagccaug

SEQ ID NO: 164657 - RNA, 14 nt, Homo sapiens
accguacacugugu

SEQ ID NO: 164658 - RNA, 15 nt, Homo sapiens
guugcuguaugucuc

SEQ ID NO: 164659 - RNA, 14 nt, Homo sapiens
ucucucuucuuuuc

SEQ ID NO: 164660 - RNA, 14 nt, Homo sapiens
ucaaaaacauucuu

SEQ ID NO: 164661 - RNA, 17 nt, Homo sapiens
agugagcuccuaagcca

SEQ ID NO: 164662 - RNA, 18 nt, Homo sapiens
gccacccucccacugcca

SEQ ID NO: 164663 - RNA, 20 nt, Homo sapiens
cugaccaauauuguacaguu

SEQ ID NO: 164664 - RNA, 15 nt, Homo sapiens
ccagagcaaacagaa

SEQ ID NO: 164665 - RNA, 19 nt, Homo sapiens
cccaggcuggagugcaaug

SEQ ID NO: 164666 - RNA, 21 nt, Homo sapiens
uaaaauaaucaguguuuccaa

SEQ ID NO: 164667 - RNA, 20 nt, Homo sapiens
ugcagccacuguuaagccau

SEQ ID NO: 164668 - RNA, 15 nt, Homo sapiens
uagaaagaagaugaa

SEQ ID NO: 164669 - RNA, 23 nt, Homo sapiens
caaucaguagccagcaucugccu

SEQ ID NO: 164670 - RNA, 22 nt, Homo sapiens
ucuaaagauggaaaaaccaccc

SEQ ID NO: 164671 - RNA, 10 nt, Homo sapiens
cucacaaaag

SEQ ID NO: 164672 - RNA, 11 nt, Homo sapiens
acccucccacu

SEQ ID NO: 164673 - RNA, 22 nt, Homo sapiens
gggaaggaggccguccaucccg

SEQ ID NO: 164674 - RNA, 19 nt, Homo sapiens
aacugaaugccacucugua

SEQ ID NO: 164675 - RNA, 16 nt, Homo sapiens
ucagggagugggcuaa

SEQ ID NO: 164676 - RNA, 19 nt, Homo sapiens
gcauuugucaacaaaguca

SEQ ID NO: 164677 - RNA, 20 nt, Homo sapiens
caaguucuuaguugcuguau

SEQ ID NO: 164678 - RNA, 14 nt, Homo sapiens
aaagaacuuggaaa

SEQ ID NO: 164679 - RNA, 18 nt, Homo sapiens
cuuucccuuaaauaacac

SEQ ID NO: 164680 - RNA, 15 nt, Homo sapiens
uuaugaauaguuucc

SEQ ID NO: 164681 - RNA, 16 nt, Homo sapiens
uugacauucugaaugc

SEQ ID NO: 164682 - RNA, 13 nt, Homo sapiens
ugauuguagcuau

SEQ ID NO: 164683 - RNA, 20 nt, Homo sapiens
cgccacccucccacugccaa

SEQ ID NO: 164684 - RNA, 22 nt, Homo sapiens
uguuuccuuuaauuuuuuacua

SEQ ID NO: 164685 - RNA, 22 nt, Homo sapiens
caaagauacacaaucugaaaca

SEQ ID NO: 164686 - RNA, 14 nt, Homo sapiens
gcuguagaagaugg

SEQ ID NO: 164687 - RNA, 18 nt, Homo sapiens
cuauaagaugaaacauca

SEQ ID NO: 164688 - RNA, 22 nt, Homo sapiens
uuaaaaaauggacucuugaaau

SEQ ID NO: 164689 - RNA, 16 nt, Homo sapiens
gcaauagaaauccaau

SEQ ID NO: 164690 - RNA, 21 nt, Homo sapiens
acuguuuugguuuugcucaca

SEQ ID NO: 164691 - RNA, 16 nt, Homo sapiens
gauucuccugccucag

SEQ ID NO: 164692 - RNA, 11 nt, Homo sapiens
auaugcacaaa

SEQ ID NO: 164693 - RNA, 15 nt, Homo sapiens
cuguggccaaguucu

SEQ ID NO: 164694 - RNA, 17 nt, Homo sapiens
gaacuccuuggcuucuu

SEQ ID NO: 164695 - RNA, 17 nt, Homo sapiens
agaugcauccuuucaua

SEQ ID NO: 164696 - RNA, 16 nt, Homo sapiens
uacaauauacuuguau

SEQ ID NO: 164697 - RNA, 12 nt, Homo sapiens
gaguagcuggau

SEQ ID NO: 164698 - RNA, 16 nt, Homo sapiens
cuaaguguaccagaga

SEQ ID NO: 164699 - RNA, 21 nt, Homo sapiens
guagagagagaaaaguaacug

SEQ ID NO: 164700 - RNA, 15 nt, Homo sapiens
ccuuagaaguggaag

SEQ ID NO: 164701 - RNA, 14 nt, Homo sapiens
aagaaacauugccu

SEQ ID NO: 164702 - RNA, 20 nt, Homo sapiens
acucuaacaguaguugcaau

SEQ ID NO: 164703 - RNA, 16 nt, Homo sapiens
ggaaagccaguuacau

SEQ ID NO: 164704 - RNA, 18 nt, Homo sapiens
uacuuauagaauucaguc

SEQ ID NO: 164705 - RNA, 22 nt, Homo sapiens
guaacuguuuugguuuugcuca

SEQ ID NO: 164706 - RNA, 16 nt, Homo sapiens
gucuaaaaacauuugu

SEQ ID NO: 164707 - RNA, 17 nt, Homo sapiens
auucuuacauuuuacuu

SEQ ID NO: 164708 - RNA, 22 nt, Homo sapiens
gcuggauuacaggcaugugcca

SEQ ID NO: 164709 - RNA, 22 nt, Homo sapiens
uucagucaaagauacacaaucu

SEQ ID NO: 164710 - RNA, 14 nt, Homo sapiens
acacagcaucagcu

SEQ ID NO: 164711 - RNA, 22 nt, Homo sapiens
ucaaagugagcuccuaagccau

SEQ ID NO: 164712 - RNA, 14 nt, Homo sapiens
uaguggugacugug

SEQ ID NO: 164713 - RNA, 12 nt, Homo sapiens
uaagacugugua

SEQ ID NO: 164714 - RNA, 17 nt, Homo sapiens
cuucagucuuuuccaug

SEQ ID NO: 164715 - RNA, 13 nt, Homo sapiens
ucuuaagacguga

SEQ ID NO: 164716 - RNA, 19 nt, Homo sapiens
cucgugguaggacuguaga

SEQ ID NO: 164717 - RNA, 21 nt, Homo sapiens
guuguuaauaaaaguacaugu

SEQ ID NO: 164718 - RNA, 23 nt, Homo sapiens
uguauauuuucugugcagccacu

SEQ ID NO: 164719 - RNA, 16 nt, Homo sapiens
augacacucuagucaa

SEQ ID NO: 164720 - RNA, 19 nt, Homo sapiens
guaaauauagcucagguag

SEQ ID NO: 164721 - RNA, 21 nt, Homo sapiens
uaaauguagaaagugauccau

SEQ ID NO: 164722 - RNA, 19 nt, Homo sapiens
aauagugauuuccacagug

SEQ ID NO: 164723 - RNA, 16 nt, Homo sapiens
acucaggcagaucuca

SEQ ID NO: 164724 - RNA, 17 nt, Homo sapiens
ucagucuuuuccaugaa

SEQ ID NO: 164725 - RNA, 19 nt, Homo sapiens
ugaacauugcaauagaaau

SEQ ID NO: 164726 - RNA, 21 nt, Homo sapiens
aacuucaacguaagacugugu

SEQ ID NO: 164727 - RNA, 20 nt, Homo sapiens
ugcuggcaguggaacuaaga

SEQ ID NO: 164728 - RNA, 14 nt, Homo sapiens
uggcucaucucuuu

SEQ ID NO: 164729 - RNA, 19 nt, Homo sapiens
ggacuaaguguaccagaga

SEQ ID NO: 164730 - RNA, 21 nt, Homo sapiens
cagguucugacucuuggcaca

SEQ ID NO: 164731 - RNA, 19 nt, Homo sapiens
uccauuuacccuucuuuuc

SEQ ID NO: 164732 - RNA, 19 nt, Homo sapiens
guuuauacccguuucacau

SEQ ID NO: 164733 - RNA, 12 nt, Homo sapiens
agaaagugaucc

SEQ ID NO: 164734 - RNA, 19 nt, Homo sapiens
uccuaagccaugggagaca

SEQ ID NO: 164735 - RNA, 19 nt, Homo sapiens
aguauccugcuucugauau

SEQ ID NO: 164736 - RNA, 18 nt, Homo sapiens
gcaguuuuuuucuugucu

SEQ ID NO: 164737 - RNA, 13 nt, Homo sapiens
agaagaugaauga

SEQ ID NO: 164738 - RNA, 22 nt, Homo sapiens
gcaaaaccaaauauuccagaga

SEQ ID NO: 164739 - RNA, 20 nt, Homo sapiens
caggguuucaccauguuggc

SEQ ID NO: 164740 - RNA, 21 nt, Homo sapiens
ugagacuuacuucucugcuau

SEQ ID NO: 164741 - RNA, 21 nt, Homo sapiens
ugguuuugcucacaaaagucu

SEQ ID NO: 164742 - RNA, 14 nt, Homo sapiens
acagcaucagcuca

SEQ ID NO: 164743 - RNA, 16 nt, Homo sapiens
gaaguuuucuugacuu

SEQ ID NO: 164744 - RNA, 21 nt, Homo sapiens
gaccaauauuguacaguuuuu

SEQ ID NO: 164745 - RNA, 22 nt, Homo sapiens
ccauuugcuuagaaagucugau

SEQ ID NO: 164746 - RNA, 20 nt, Homo sapiens
gucugucaauguccuacuga

SEQ ID NO: 164747 - RNA, 19 nt, Homo sapiens
gagaucuauauauguauaa

SEQ ID NO: 164748 - RNA, 13 nt, Homo sapiens
ucuuuuugcuuca

SEQ ID NO: 164749 - RNA, 21 nt, Homo sapiens
auguccuacugagacagcaca

SEQ ID NO: 164750 - RNA, 13 nt, Homo sapiens
caacuguggcuua

SEQ ID NO: 164751 - RNA, 21 nt, Homo sapiens
ggggacacagcaucagcucaa

SEQ ID NO: 164752 - RNA, 21 nt, Homo sapiens
cuaagaagcagauaauggugu

SEQ ID NO: 164753 - RNA, 14 nt, Homo sapiens
guuuaguugcacaa

SEQ ID NO: 164754 - RNA, 22 nt, Homo sapiens
ugacucaagacuuccagagccu

SEQ ID NO: 164755 - RNA, 17 nt, Homo sapiens
ucggcucuggccuccaa

SEQ ID NO: 164756 - RNA, 21 nt, Homo sapiens
ccacugccaaagaacuuggaa

SEQ ID NO: 164757 - RNA, 17 nt, Homo sapiens
accuaacgagaaauaga

SEQ ID NO: 164758 - RNA, 18 nt, Homo sapiens
gccagagcaaacagaaaa

SEQ ID NO: 164759 - RNA, 19 nt, Homo sapiens
aggauuugggcucuuggaa

SEQ ID NO: 164760 - RNA, 17 nt, Homo sapiens
cuaaaaguuaauagggu

SEQ ID NO: 164761 - RNA, 13 nt, Homo sapiens
gauacgacaacuu

SEQ ID NO: 164762 - RNA, 14 nt, Homo sapiens
ucuuuuccaugaac

SEQ ID NO: 164763 - RNA, 17 nt, Homo sapiens
auucagggagugggcua

SEQ ID NO: 164764 - RNA, 18 nt, Homo sapiens
ugguuguauuaaagcagg

SEQ ID NO: 164765 - RNA, 14 nt, Homo sapiens
accuacaguguaca

SEQ ID NO: 164766 - RNA, 20 nt, Homo sapiens
ugcaguuuuuuucuugucua

SEQ ID NO: 164767 - RNA, 20 nt, Homo sapiens
gacagcuccuggaccaggcc

SEQ ID NO: 164768 - RNA, 18 nt, Homo sapiens
uccugaccucaaguaauc

SEQ ID NO: 164769 - RNA, 16 nt, Homo sapiens
ccaggcuggagugcaa

SEQ ID NO: 164770 - RNA, 16 nt, Homo sapiens
uaugaauaguuuccaa

SEQ ID NO: 164771 - RNA, 16 nt, Homo sapiens
uagaaaagggaacuga

SEQ ID NO: 164772 - RNA, 13 nt, Homo sapiens
agccucaucucuu

SEQ ID NO: 164773 - RNA, 18 nt, Homo sapiens
uuaagaaauucacuuccc

SEQ ID NO: 164774 - RNA, 12 nt, Homo sapiens
augacacagucu

SEQ ID NO: 164775 - RNA, 11 nt, Homo sapiens
agaaguggaag

SEQ ID NO: 164776 - RNA, 18 nt, Homo sapiens
accuaaauaugagcccag

SEQ ID NO: 164777 - RNA, 14 nt, Homo sapiens
cuuccaucaccucc

SEQ ID NO: 164778 - RNA, 17 nt, Homo sapiens
agauuucagauuuguga

SEQ ID NO: 164779 - RNA, 19 nt, Homo sapiens
agcaccuacaguguacagu

SEQ ID NO: 164780 - RNA, 14 nt, Homo sapiens
cuuagaaagucuga

SEQ ID NO: 164781 - RNA, 19 nt, Homo sapiens
ugcuucaaaaacauucuua

SEQ ID NO: 164782 - RNA, 19 nt, Homo sapiens
cuuccuggaggugacacuu

SEQ ID NO: 164783 - RNA, 21 nt, Homo sapiens
cuuuguaaagaaaguggcuug

SEQ ID NO: 164784 - RNA, 23 nt, Homo sapiens
aagacgugauuuugcuguagaag

SEQ ID NO: 164785 - RNA, 19 nt, Homo sapiens
uccugaguagcuggauuac

SEQ ID NO: 164786 - RNA, 18 nt, Homo sapiens
auauguauaucacauucc

SEQ ID NO: 164787 - RNA, 15 nt, Homo sapiens
ccauaugaauaacau

SEQ ID NO: 164788 - RNA, 17 nt, Homo sapiens
gauuugggcucuuggaa

SEQ ID NO: 164789 - RNA, 23 nt, Homo sapiens
aaugucuuuauuaaauguagaaa

SEQ ID NO: 164790 - RNA, 16 nt, Homo sapiens
gcagaguacaaaguaa

SEQ ID NO: 164791 - RNA, 21 nt, Homo sapiens
caaucuguccuguuacaaaag

SEQ ID NO: 164792 - RNA, 18 nt, Homo sapiens
ugaaguuuaauugacuua

SEQ ID NO: 164793 - RNA, 17 nt, Homo sapiens
ucaaacuccugaccuca

SEQ ID NO: 164794 - RNA, 16 nt, Homo sapiens
uaagccauguguucca

SEQ ID NO: 164795 - RNA, 22 nt, Homo sapiens
caaucaauucauaucuauuuau

SEQ ID NO: 164796 - RNA, 22 nt, Homo sapiens
guguuuuuaauaaagacagggu

SEQ ID NO: 164797 - RNA, 15 nt, Homo sapiens
aauguagaaagugau

SEQ ID NO: 164798 - RNA, 20 nt, Homo sapiens
uuguauuuaaaugaaaguga

SEQ ID NO: 164799 - RNA, 14 nt, Homo sapiens
auugggccaaagaa

SEQ ID NO: 164800 - RNA, 15 nt, Homo sapiens
auucucuagucaguu

SEQ ID NO: 164801 - RNA, 13 nt, Homo sapiens
auuuacauugccu

SEQ ID NO: 164802 - RNA, 19 nt, Homo sapiens
uuggcuaguaaaagccauc

SEQ ID NO: 164803 - RNA, 13 nt, Homo sapiens
cagcaucagcuca

SEQ ID NO: 164804 - RNA, 16 nt, Homo sapiens
aagaauguuuaugaau

SEQ ID NO: 164805 - RNA, 13 nt, Homo sapiens
uguguuucuuuag

SEQ ID NO: 164806 - RNA, 13 nt, Homo sapiens
caguguacagucu

SEQ ID NO: 164807 - RNA, 10 nt, Homo sapiens
ugucuuuauu

SEQ ID NO: 164808 - RNA, 14 nt, Homo sapiens
aaauucacuucccc

SEQ ID NO: 164809 - RNA, 23 nt, Homo sapiens
gaaaugcugguuuuucaguuuuc

SEQ ID NO: 164810 - RNA, 22 nt, Homo sapiens
cuccuuggcuucuuuacuuagu

SEQ ID NO: 164811 - RNA, 23 nt, Homo sapiens
agaagguugagggcaauggacaa

SEQ ID NO: 164812 - RNA, 22 nt, Homo sapiens
cuuguuagugcacagcacaaau

SEQ ID NO: 164813 - RNA, 13 nt, Homo sapiens
cuuaguugcugua

SEQ ID NO: 164814 - RNA, 15 nt, Homo sapiens
aaucaguguuuccaa

SEQ ID NO: 164815 - RNA, 18 nt, Homo sapiens
uccuggggaacauagaac

SEQ ID NO: 164816 - RNA, 15 nt, Homo sapiens
uucuuucaaagaagc

SEQ ID NO: 164817 - RNA, 21 nt, Homo sapiens
aaaaagcccuuaaaaauaugu

SEQ ID NO: 164818 - RNA, 22 nt, Homo sapiens
gugccucugggacuggacaauu

SEQ ID NO: 164819 - RNA, 19 nt, Homo sapiens
uuauacaauauacuuguau

SEQ ID NO: 164820 - RNA, 15 nt, Homo sapiens
gcaggacagcuccug

SEQ ID NO: 164821 - RNA, 21 nt, Homo sapiens
uuauuaaauguagaaagugau

SEQ ID NO: 164822 - RNA, 16 nt, Homo sapiens
cagccagguucugacu

SEQ ID NO: 164823 - RNA, 20 nt, Homo sapiens
uaaauuucucuacugucuca

SEQ ID NO: 164824 - RNA, 19 nt, Homo sapiens
cucuggccuccaaguccac

SEQ ID NO: 164825 - RNA, 14 nt, Homo sapiens
acuaagaagcagau

SEQ ID NO: 164826 - RNA, 20 nt, Homo sapiens
uggacucaagcaagauuuca

SEQ ID NO: 164827 - RNA, 21 nt, Homo sapiens
auuugucaacaaagucaccca

SEQ ID NO: 164828 - RNA, 20 nt, Homo sapiens
uguuucaaacaaaaagucau

SEQ ID NO: 164829 - RNA, 21 nt, Homo sapiens
ucaagacgucacccuccauuc

SEQ ID NO: 164830 - RNA, 22 nt, Homo sapiens
ugagacuuugaggguguauauu

SEQ ID NO: 164831 - RNA, 17 nt, Homo sapiens
cugguggggcugccagg

SEQ ID NO: 164832 - RNA, 14 nt, Homo sapiens
aaccuagcuagcaa

SEQ ID NO: 164833 - RNA, 18 nt, Homo sapiens
uaaaccguacacuguguu

SEQ ID NO: 164834 - RNA, 18 nt, Homo sapiens
aaccucgagguuucucaa

SEQ ID NO: 164835 - RNA, 14 nt, Homo sapiens
ucuaaguaaauaca

SEQ ID NO: 164836 - RNA, 15 nt, Homo sapiens
gcaccuacaguguac

SEQ ID NO: 164837 - RNA, 18 nt, Homo sapiens
ggacucaagcaagauuuc

SEQ ID NO: 164838 - RNA, 21 nt, Homo sapiens
ccgccacccucccacugccaa

SEQ ID NO: 164839 - RNA, 15 nt, Homo sapiens
ggcuggagugcaaug

SEQ ID NO: 164840 - RNA, 16 nt, Homo sapiens
uggcaggacagcuccu

SEQ ID NO: 164841 - RNA, 17 nt, Homo sapiens
gacgugauuuugcugua

SEQ ID NO: 164842 - RNA, 18 nt, Homo sapiens
acugccaaagaacuugga

SEQ ID NO: 164843 - RNA, 16 nt, Homo sapiens
uuuacuguccaaagac

SEQ ID NO: 164844 - RNA, 12 nt, Homo sapiens
gagcaaacagaa

SEQ ID NO: 164845 - RNA, 14 nt, Homo sapiens
acagccacuuggga

SEQ ID NO: 164846 - RNA, 15 nt, Homo sapiens
caacaaagucaccca

SEQ ID NO: 164847 - RNA, 20 nt, Homo sapiens
ggcuggagugcaaugacaca

SEQ ID NO: 164848 - RNA, 16 nt, Homo sapiens
auccacuaaaaucaaa

SEQ ID NO: 164849 - RNA, 21 nt, Homo sapiens
uguaaauuucucuacugucuc

SEQ ID NO: 164850 - RNA, 13 nt, Homo sapiens
caaaguaagccau

SEQ ID NO: 164851 - RNA, 19 nt, Homo sapiens
accaaauacuuuaauguau

SEQ ID NO: 164852 - RNA, 16 nt, Homo sapiens
gagggaaaacagaaaa

SEQ ID NO: 164853 - RNA, 17 nt, Homo sapiens
cuagaguucauggauau

SEQ ID NO: 164854 - RNA, 17 nt, Homo sapiens
ucaauguccuacugaga

SEQ ID NO: 164855 - RNA, 16 nt, Homo sapiens
aacuuacuuaguguua

SEQ ID NO: 164856 - RNA, 22 nt, Homo sapiens
aagccuugguaaaauaaucagu

SEQ ID NO: 164857 - RNA, 18 nt, Homo sapiens
aucugaaacagcuucaug

SEQ ID NO: 164858 - RNA, 17 nt, Homo sapiens
auuuucuuuuuauacua

SEQ ID NO: 164859 - RNA, 13 nt, Homo sapiens
caaagaaauuucc

SEQ ID NO: 164860 - RNA, 13 nt, Homo sapiens
gguucaagugauu

SEQ ID NO: 164861 - RNA, 16 nt, Homo sapiens
cuaacaguaguugcaa

SEQ ID NO: 164862 - RNA, 19 nt, Homo sapiens
caaaaccaaauauuccaga

SEQ ID NO: 164863 - RNA, 20 nt, Homo sapiens
gggacuaaguguaccagaga

SEQ ID NO: 164864 - RNA, 13 nt, Homo sapiens
aaagaaauuucca

SEQ ID NO: 164865 - RNA, 21 nt, Homo sapiens
augacacucuagucaaagccu

SEQ ID NO: 164866 - RNA, 16 nt, Homo sapiens
gacacagcaucagcuc

SEQ ID NO: 164867 - RNA, 12 nt, Homo sapiens
uauuccagagac

SEQ ID NO: 164868 - RNA, 17 nt, Homo sapiens
uaagaagugacucuugc

SEQ ID NO: 164869 - RNA, 17 nt, Homo sapiens
uccacagugacuccacu

SEQ ID NO: 164870 - RNA, 16 nt, Homo sapiens
uaaucaguguuuccaa

SEQ ID NO: 164871 - RNA, 16 nt, Homo sapiens
aaagggagaagaggga

SEQ ID NO: 164872 - RNA, 12 nt, Homo sapiens
agcaucagcuca

SEQ ID NO: 164873 - RNA, 13 nt, Homo sapiens
ggaaccagcccag

SEQ ID NO: 164874 - RNA, 16 nt, Homo sapiens
agucuuguauuaaguu

SEQ ID NO: 164875 - RNA, 23 nt, Homo sapiens
uccuggggaacauagaacucaug

SEQ ID NO: 164876 - RNA, 19 nt, Homo sapiens
gaaugagcaaaaccaaaua

SEQ ID NO: 164877 - RNA, 12 nt, Homo sapiens
aaaaugugacuc

SEQ ID NO: 164878 - RNA, 14 nt, Homo sapiens
caauguuuuagaau

SEQ ID NO: 164879 - RNA, 13 nt, Homo sapiens
gagcaaacagaaa

SEQ ID NO: 164880 - RNA, 15 nt, Homo sapiens
uaucuaaaaucugcu

SEQ ID NO: 164881 - RNA, 23 nt, Homo sapiens
ccacuguuaagccauguguucca

SEQ ID NO: 164882 - RNA, 22 nt, Homo sapiens
ggagucuuagagcuuuaccuaa

SEQ ID NO: 164883 - RNA, 19 nt, Homo sapiens
gacgugauuuugcuguaga

SEQ ID NO: 164884 - RNA, 16 nt, Homo sapiens
cugcuucugauaugca

SEQ ID NO: 164885 - RNA, 20 nt, Homo sapiens
ucuaagccuucugguuuuau

SEQ ID NO: 164886 - RNA, 12 nt, Homo sapiens
acacagcaucag

SEQ ID NO: 164887 - RNA, 21 nt, Homo sapiens
auucucuagucaguuggcuaa

SEQ ID NO: 164888 - RNA, 16 nt, Homo sapiens
gcccagccucaucucu

SEQ ID NO: 164889 - RNA, 12 nt, Homo sapiens
aacuucugccuc

SEQ ID NO: 164890 - RNA, 14 nt, Homo sapiens
cauaugaauaacau

SEQ ID NO: 164891 - RNA, 11 nt, Homo sapiens
uguccaaagac

SEQ ID NO: 164892 - RNA, 13 nt, Homo sapiens
uuuugcuguagaa

SEQ ID NO: 164893 - RNA, 22 nt, Homo sapiens
uuaccuuuuauuuuaauguuuc

SEQ ID NO: 164894 - RNA, 15 nt, Homo sapiens
acacagcaucagcuc

SEQ ID NO: 164895 - RNA, 16 nt, Homo sapiens
ucagcaccuacagugu

SEQ ID NO: 164896 - RNA, 17 nt, Homo sapiens
ucaaucccucaaaacaa

SEQ ID NO: 164897 - RNA, 19 nt, Homo sapiens
aagccauguguuccaaggc

SEQ ID NO: 164898 - RNA, 19 nt, Homo sapiens
caaagugcugggauuacag

SEQ ID NO: 164899 - RNA, 18 nt, Homo sapiens
aaguacauguuaaacuua

SEQ ID NO: 164900 - RNA, 23 nt, Homo sapiens
ugcuucuuugaaacuuguaugaa

SEQ ID NO: 164901 - RNA, 13 nt, Homo sapiens
gucacagccacuu

SEQ ID NO: 164902 - RNA, 19 nt, Homo sapiens
gugcugggauuacagggau

SEQ ID NO: 164903 - RNA, 21 nt, Homo sapiens
ccuccaaguccacaguggaac

SEQ ID NO: 164904 - RNA, 15 nt, Homo sapiens
caggcgugaccugcc

SEQ ID NO: 164905 - RNA, 12 nt, Homo sapiens
auugcuugcaca

SEQ ID NO: 164906 - RNA, 17 nt, Homo sapiens
cuucugaaaaaguaucc

SEQ ID NO: 164907 - RNA, 20 nt, Homo sapiens
ucagucuuuuccaugaacuu

SEQ ID NO: 164908 - RNA, 13 nt, Homo sapiens
ucaaguaauccac

SEQ ID NO: 164909 - RNA, 12 nt, Homo sapiens
acuuaguucaag

SEQ ID NO: 164910 - RNA, 12 nt, Homo sapiens
uucacucccacc

SEQ ID NO: 164911 - RNA, 21 nt, Homo sapiens
ccauaaaggggagggacucau

SEQ ID NO: 164912 - RNA, 22 nt, Homo sapiens
acacaaucugaaacagcuucau

SEQ ID NO: 164913 - RNA, 19 nt, Homo sapiens
cccucuaggaggugaugau

SEQ ID NO: 164914 - RNA, 17 nt, Homo sapiens
cuggccuccaaguccac

SEQ ID NO: 164915 - RNA, 22 nt, Homo sapiens
ugaguagcuggauuacaggcau

SEQ ID NO: 164916 - RNA, 15 nt, Homo sapiens
aguuccgacugccau

SEQ ID NO: 164917 - RNA, 16 nt, Homo sapiens
cuuguauagcaguuuc

SEQ ID NO: 164918 - RNA, 16 nt, Homo sapiens
aauaaauucaucagau

SEQ ID NO: 164919 - RNA, 13 nt, Homo sapiens
uguaucucaggaa

SEQ ID NO: 164920 - RNA, 17 nt, Homo sapiens
ucuuaaaauagccauaa

SEQ ID NO: 164921 - RNA, 22 nt, Homo sapiens
uguagagagagaaaaguaacug

SEQ ID NO: 164922 - RNA, 22 nt, Homo sapiens
ucagaugcauccuuucauaaga

SEQ ID NO: 164923 - RNA, 22 nt, Homo sapiens
ugaaaucuuuuuuguucaaaga

SEQ ID NO: 164924 - RNA, 14 nt, Homo sapiens
guccacaguggaac

SEQ ID NO: 164925 - RNA, 22 nt, Homo sapiens
guuaucaaaaaaaaaaaaaugu

SEQ ID NO: 164926 - RNA, 13 nt, Homo sapiens
gguauagaaaugc

SEQ ID NO: 164927 - RNA, 19 nt, Homo sapiens
auguuuuagaaugagacuu

SEQ ID NO: 164928 - RNA, 23 nt, Homo sapiens
auaaccucaagucacaugagaau

SEQ ID NO: 164929 - RNA, 14 nt, Homo sapiens
auacuuauagaauu

SEQ ID NO: 164930 - RNA, 16 nt, Homo sapiens
caguuucuuucaaaga

SEQ ID NO: 164931 - RNA, 21 nt, Homo sapiens
gagccucaaaugagaaaaugu

SEQ ID NO: 164932 - RNA, 23 nt, Homo sapiens
gaaucacguaaagcuagaaauga

SEQ ID NO: 164933 - RNA, 15 nt, Homo sapiens
cgucgacguagaacc

SEQ ID NO: 164934 - RNA, 16 nt, Homo sapiens
agcuguuuaugcauag

SEQ ID NO: 164935 - RNA, 20 nt, Homo sapiens
agugaaucacguaaagcuag

SEQ ID NO: 164936 - RNA, 15 nt, Homo sapiens
aaugcugguuuuuca

SEQ ID NO: 164937 - RNA, 11 nt, Homo sapiens
aacguuuuucc

SEQ ID NO: 164938 - RNA, 14 nt, Human herpesvirus 6
cgcccgauccgccc

SEQ ID NO: 164939 - RNA, 23 nt, Human herpesvirus 6
cgacccacuccuacuauccgccc

SEQ ID NO: 164940 - RNA, 20 nt, Human herpesvirus 6
caaauucuuacauuuuguac

SEQ ID NO: 164941 - RNA, 13 nt, Human herpesvirus 6
caaaugauuuuac

SEQ ID NO: 164942 - RNA, 17 nt, Human herpesvirus 6
gaaguuagaaauuuuac

SEQ ID NO: 164943 - RNA, 20 nt, Human herpesvirus 6
gaaauuugagaaaguuguac

SEQ ID NO: 164944 - RNA, 14 nt, Human herpesvirus 6B
aaaaaaaaguguca

SEQ ID NO: 164945 - RNA, 12 nt, Human herpesvirus 6B
aaaaaaaugugu

SEQ ID NO: 164946 - RNA, 13 nt, Human herpesvirus 6B
aaaaaagauuuau

SEQ ID NO: 164947 - RNA, 13 nt, Human herpesvirus 6B
aaaaaagcgccaa

SEQ ID NO: 164948 - RNA, 13 nt, Human herpesvirus 6B
aaaaaagugucau

SEQ ID NO: 164949 - RNA, 17 nt, Human herpesvirus 6B
aaaaacaaagagaucag

SEQ ID NO: 164950 - RNA, 23 nt, Human herpesvirus 6B
aaaaacaucguaauggcauucac

SEQ ID NO: 164951 - RNA, 21 nt, Human herpesvirus 6B
aaaaacauauaaagaggccaa

SEQ ID NO: 164952 - RNA, 22 nt, Human herpesvirus 6B
aaaaacguuuuuguuauucuca

SEQ ID NO: 164953 - RNA, 11 nt, Human herpesvirus 6B
aaaaacuaaug

SEQ ID NO: 164954 - RNA, 22 nt, Human herpesvirus 6B
aaaaacacacaucauauccuga

SEQ ID NO: 164955 - RNA, 17 nt, Human herpesvirus 6B
aaaaagugcaugaugaa

SEQ ID NO: 164956 - RNA, 21 nt, Human herpesvirus 6B
aaaaaguauacggaagugcau

SEQ ID NO: 164957 - RNA, 16 nt, Human herpesvirus 6B
aaaaagucaccuguau

SEQ ID NO: 164958 - RNA, 11 nt, Human herpesvirus 6B
aaaaagucaua

SEQ ID NO: 164959 - RNA, 23 nt, Human herpesvirus 6B
aaaaagauuuaucaaaagccaga

SEQ ID NO: 164960 - RNA, 22 nt, Human herpesvirus 6B
aaaaacgaccugaucacagaga

SEQ ID NO: 164961 - RNA, 12 nt, Human herpesvirus 6B
aaaaacauauaa

SEQ ID NO: 164962 - RNA, 21 nt, Human herpesvirus 6B
aaaaacaaagcuuuacuuaca

SEQ ID NO: 164963 - RNA, 11 nt, Human herpesvirus 6B
aaaaacauguu

SEQ ID NO: 164964 - RNA, 21 nt, Human herpesvirus 6B
aaaaaccaaaacaacaacuuu

SEQ ID NO: 164965 - RNA, 19 nt, Human herpesvirus 6B
aaaaauauuaauuacauau

SEQ ID NO: 164966 - RNA, 16 nt, Human herpesvirus 6B
aaaaaucaacacugcc

SEQ ID NO: 164967 - RNA, 13 nt, Human herpesvirus 6B
aaaaaucaucucg

SEQ ID NO: 164968 - RNA, 18 nt, Human herpesvirus 6B
aaaaaucgcaaacaggug

SEQ ID NO: 164969 - RNA, 16 nt, Human herpesvirus 6B
aaaaauggcucagaga

SEQ ID NO: 164970 - RNA, 14 nt, Human herpesvirus 6B
aaaaaugcuuuuau

SEQ ID NO: 164971 - RNA, 15 nt, Human herpesvirus 6B
aaaaaugugucuuag

SEQ ID NO: 164972 - RNA, 13 nt, Human herpesvirus 6B
aaaaauuuuguca

SEQ ID NO: 164973 - RNA, 21 nt, Human herpesvirus 6B
aaaaauuuugucacucucaau

SEQ ID NO: 164974 - RNA, 15 nt, Human herpesvirus 6B
aaaacaaaaguagca

SEQ ID NO: 164975 - RNA, 21 nt, Human herpesvirus 6B
aaaaauuugugcgaauugugu

SEQ ID NO: 164976 - RNA, 14 nt, Human herpesvirus 6B
aaaaauuuuacaau

SEQ ID NO: 164977 - RNA, 23 nt, Human herpesvirus 6B
aaaagcgccugccuacacugcga

SEQ ID NO: 164978 - RNA, 17 nt, Human herpesvirus 6B
aaaagccugcauaugau

SEQ ID NO: 164979 - RNA, 14 nt, Human herpesvirus 6B
aaaacuaugugcau

SEQ ID NO: 164980 - RNA, 15 nt, Human herpesvirus 6B
aaaacuaugugcauu

SEQ ID NO: 164981 - RNA, 15 nt, Human herpesvirus 6B
aaaacuguaccugaa

SEQ ID NO: 164982 - RNA, 19 nt, Human herpesvirus 6B
aaaacgcucacaacaugau

SEQ ID NO: 164983 - RNA, 20 nt, Human herpesvirus 6B
aaaacgcucacaacaugauc

SEQ ID NO: 164984 - RNA, 11 nt, Human herpesvirus 6B
aaaaggugauc

SEQ ID NO: 164985 - RNA, 18 nt, Human herpesvirus 6B
aaaauaaacgcugucuca

SEQ ID NO: 164986 - RNA, 21 nt, Human herpesvirus 6B
aaaaguuuguuuuuccauaaa

SEQ ID NO: 164987 - RNA, 19 nt, Human herpesvirus 6B
aaaauaaaaauuuuaccua

SEQ ID NO: 164988 - RNA, 13 nt, Human herpesvirus 6B
aaaagugcuuuau

SEQ ID NO: 164989 - RNA, 13 nt, Human herpesvirus 6B
aaaagucuuauaa

SEQ ID NO: 164990 - RNA, 13 nt, Human herpesvirus 6B
aaaagucaccugu

SEQ ID NO: 164991 - RNA, 22 nt, Human herpesvirus 6B
aaaaguagcacggggauuuagu

SEQ ID NO: 164992 - RNA, 13 nt, Human herpesvirus 6B
aaaagcugcuaac

SEQ ID NO: 164993 - RNA, 14 nt, Human herpesvirus 6B
aaaagcuauugaaa

SEQ ID NO: 164994 - RNA, 21 nt, Human herpesvirus 6B
aaaauagcagaaguuuaccua

SEQ ID NO: 164995 - RNA, 12 nt, Human herpesvirus 6B
aaaauacaguau

SEQ ID NO: 164996 - RNA, 19 nt, Human herpesvirus 6B
aaaauaauugcacccuauc

SEQ ID NO: 164997 - RNA, 19 nt, Human herpesvirus 6B
aaaaguuccauuguuugau

SEQ ID NO: 164998 - RNA, 21 nt, Human herpesvirus 6B
aaaaguauacggaagugcaug

SEQ ID NO: 164999 - RNA, 22 nt, Human herpesvirus 6B
aaaauaaaaaaaaagacaucac

SEQ ID NO: 165000 - RNA, 19 nt, Human herpesvirus 6B
aaaagucuuauaacaccag

SEQ ID NO: 165001 - RNA, 16 nt, Human herpesvirus 6B
aaaagucaccuguaua

SEQ ID NO: 165002 - RNA, 18 nt, Human herpesvirus 6B
aaaagugaggagugcgua

SEQ ID NO: 165003 - RNA, 14 nt, Human herpesvirus 6B
aaaagugcugugcu

SEQ ID NO: 165004 - RNA, 15 nt, Human herpesvirus 6B
aaaagugcugugcuc

SEQ ID NO: 165005 - RNA, 16 nt, Human herpesvirus 6B
aaaagugcugugcucu

SEQ ID NO: 165006 - RNA, 16 nt, Human herpesvirus 6B
aaaauguccauucuca

SEQ ID NO: 165007 - RNA, 16 nt, Human herpesvirus 6B
aaaauuauuugugauu

SEQ ID NO: 165008 - RNA, 13 nt, Human herpesvirus 6B
aaaauuaauucaa

SEQ ID NO: 165009 - RNA, 12 nt, Human herpesvirus 6B
aaaauuaccuca

SEQ ID NO: 165010 - RNA, 17 nt, Human herpesvirus 6B
aaaauuacuaaugugga

SEQ ID NO: 165011 - RNA, 22 nt, Human herpesvirus 6B
aaaauuacugaaagagagucag

SEQ ID NO: 165012 - RNA, 19 nt, Human herpesvirus 6B
aaaauuucagccgaugaua

SEQ ID NO: 165013 - RNA, 15 nt, Human herpesvirus 6B
aaaauuggugugcau

SEQ ID NO: 165014 - RNA, 13 nt, Human herpesvirus 6B
aaaauuuuaccua

SEQ ID NO: 165015 - RNA, 16 nt, Human herpesvirus 6B
aaaauuuugucacucu

SEQ ID NO: 165016 - RNA, 18 nt, Human herpesvirus 6B
aaaauuuugucacucuca

SEQ ID NO: 165017 - RNA, 16 nt, Human herpesvirus 6B
aaacacuaagugccgu

SEQ ID NO: 165018 - RNA, 19 nt, Human herpesvirus 6B
aaacaccucacagucuagu

SEQ ID NO: 165019 - RNA, 13 nt, Human herpesvirus 6B
aaacacgauccaa

SEQ ID NO: 165020 - RNA, 14 nt, Human herpesvirus 6B
aaacaauaaauuac

SEQ ID NO: 165021 - RNA, 14 nt, Human herpesvirus 6B
aaacacaccaucaa

SEQ ID NO: 165022 - RNA, 19 nt, Human herpesvirus 6B
aaacacacuggccuacuau

SEQ ID NO: 165023 - RNA, 15 nt, Human herpesvirus 6B
aaacaccaacaugac

SEQ ID NO: 165024 - RNA, 11 nt, Human herpesvirus 6B
aaacaccacuu

SEQ ID NO: 165025 - RNA, 23 nt, Human herpesvirus 6B
aaacaccacuugaucacaacaua

SEQ ID NO: 165026 - RNA, 18 nt, Human herpesvirus 6B
aaaccagaaccugcaggg

SEQ ID NO: 165027 - RNA, 20 nt, Human herpesvirus 6B
aaaccaauuugucgcacgug

SEQ ID NO: 165028 - RNA, 16 nt, Human herpesvirus 6B
aaaccaucgacuucaa

SEQ ID NO: 165029 - RNA, 20 nt, Human herpesvirus 6B
aaaccauagcuguccaugaa

SEQ ID NO: 165030 - RNA, 21 nt, Human herpesvirus 6B
aaaccgguacgcuucuuucac

SEQ ID NO: 165031 - RNA, 18 nt, Human herpesvirus 6B
aaaccgcuuaaagcguuu

SEQ ID NO: 165032 - RNA, 17 nt, Human herpesvirus 6B
aaaccgaaauacguuca

SEQ ID NO: 165033 - RNA, 19 nt, Human herpesvirus 6B
aaacauccuaauaagacag

SEQ ID NO: 165034 - RNA, 16 nt, Human herpesvirus 6B
aaacaugauuguaaua

SEQ ID NO: 165035 - RNA, 17 nt, Human herpesvirus 6B
aaacauuauaccuauua

SEQ ID NO: 165036 - RNA, 17 nt, Human herpesvirus 6B
auaucaauuccugugau

SEQ ID NO: 165037 - RNA, 13 nt, Human herpesvirus 6B
auaucacacaucg

SEQ ID NO: 165038 - RNA, 16 nt, Human herpesvirus 6B
auaucacagcauuucc

SEQ ID NO: 165039 - RNA, 22 nt, Human herpesvirus 6B
auauaauguguuggucauuuca

SEQ ID NO: 165040 - RNA, 14 nt, Human herpesvirus 6B
auauaacaguagga

SEQ ID NO: 165041 - RNA, 16 nt, Human herpesvirus 6B
auauuaauuacauaua

SEQ ID NO: 165042 - RNA, 18 nt, Human herpesvirus 6B
auauuaauuacauauagu

SEQ ID NO: 165043 - RNA, 18 nt, Human herpesvirus 6B
auaucgcaagcaaaacac

SEQ ID NO: 165044 - RNA, 17 nt, Human herpesvirus 6B
auaucgcgcagaccaua

SEQ ID NO: 165045 - RNA, 13 nt, Human herpesvirus 6B
auaucaugaagaa

SEQ ID NO: 165046 - RNA, 21 nt, Human herpesvirus 6B
auaauccugucuccucaugga

SEQ ID NO: 165047 - RNA, 18 nt, Human herpesvirus 6B
auaaucgauuacaaaaca

SEQ ID NO: 165048 - RNA, 15 nt, Human herpesvirus 6B
auaaucacaaauauc

SEQ ID NO: 165049 - RNA, 19 nt, Human herpesvirus 6B
auaaucacaaauauccuuu

SEQ ID NO: 165050 - RNA, 17 nt, Human herpesvirus 6B
auaaugcucagaugugg

SEQ ID NO: 165051 - RNA, 19 nt, Human herpesvirus 6B
auaaucuuguagcucagug

SEQ ID NO: 165052 - RNA, 21 nt, Human herpesvirus 6B
auaaucugaucgaaauacuuc

SEQ ID NO: 165053 - RNA, 21 nt, Human herpesvirus 6B
auagcauucuguucuucauca

SEQ ID NO: 165054 - RNA, 19 nt, Human herpesvirus 6B
auagcagcucugcaauuug

SEQ ID NO: 165055 - RNA, 15 nt, Human herpesvirus 6B
auagcagaaguuuac

SEQ ID NO: 165056 - RNA, 17 nt, Human herpesvirus 6B
auaaugugaacuaaaua

SEQ ID NO: 165057 - RNA, 18 nt, Human herpesvirus 6B
auagccagggcauucaca

SEQ ID NO: 165058 - RNA, 18 nt, Human herpesvirus 6B
auagguguuugcagauaa

SEQ ID NO: 165059 - RNA, 15 nt, Human herpesvirus 6B
auagguaaacuguuc

SEQ ID NO: 165060 - RNA, 21 nt, Human herpesvirus 6B
auagguaaacuguucuuucaa

SEQ ID NO: 165061 - RNA, 13 nt, Human herpesvirus 6B
auaggcgucucau

SEQ ID NO: 165062 - RNA, 22 nt, Human herpesvirus 6B
auaggcgucucaugcgaucuaa

SEQ ID NO: 165063 - RNA, 17 nt, Human herpesvirus 6B
auaguuuucugauggaa

SEQ ID NO: 165064 - RNA, 20 nt, Human herpesvirus 6B
auaguuuugcguguagaguu

SEQ ID NO: 165065 - RNA, 18 nt, Human herpesvirus 6B
auauaaaaaagugcauga

SEQ ID NO: 165066 - RNA, 14 nt, Human herpesvirus 6B
auagucugcugaua

SEQ ID NO: 165067 - RNA, 16 nt, Human herpesvirus 6B
auagucaauggugugu

SEQ ID NO: 165068 - RNA, 20 nt, Human herpesvirus 6B
aucauauccugaaaauaaac

SEQ ID NO: 165069 - RNA, 21 nt, Human herpesvirus 6B
aucacuaagcgacuuuuuaac

SEQ ID NO: 165070 - RNA, 22 nt, Human herpesvirus 6B
aucacucccuguuuuuguguuc

SEQ ID NO: 165071 - RNA, 20 nt, Human herpesvirus 6B
aucaugugugccuacuuugg

SEQ ID NO: 165072 - RNA, 22 nt, Human herpesvirus 6B
aucaugugugccuacuuuggau

SEQ ID NO: 165073 - RNA, 16 nt, Human herpesvirus 6B
aucaugauugcaacaa

SEQ ID NO: 165074 - RNA, 14 nt, Human herpesvirus 6B
aucaucacaugcca

SEQ ID NO: 165075 - RNA, 17 nt, Human herpesvirus 6B
aucacagagaaaaaaca

SEQ ID NO: 165076 - RNA, 21 nt, Human herpesvirus 6B
aucacagagaaaaaacaaagc

SEQ ID NO: 165077 - RNA, 14 nt, Human herpesvirus 6B
aucacagcauuucc

SEQ ID NO: 165078 - RNA, 13 nt, Human herpesvirus 6B
aucacaauacaca

SEQ ID NO: 165079 - RNA, 14 nt, Human herpesvirus 6B
aucacaauacacag

SEQ ID NO: 165080 - RNA, 13 nt, Human herpesvirus 6B
aucacaacauaaa

SEQ ID NO: 165081 - RNA, 17 nt, Human herpesvirus 6B
auauuauuaacaaugaa

SEQ ID NO: 165082 - RNA, 18 nt, Human herpesvirus 6B
aucgacgaccaggcacca

SEQ ID NO: 165083 - RNA, 20 nt, Human herpesvirus 6B
aucgaaucucacaugcgagc

SEQ ID NO: 165084 - RNA, 23 nt, Human herpesvirus 6B
aucgagaucguuuugcaacuuaa

SEQ ID NO: 165085 - RNA, 11 nt, Human herpesvirus 6B
aucgcaaugau

SEQ ID NO: 165086 - RNA, 13 nt, Human herpesvirus 6B
aucgauccaaaag

SEQ ID NO: 165087 - RNA, 15 nt, Human herpesvirus 6B
aucgcaaaagaacac

SEQ ID NO: 165088 - RNA, 20 nt, Human herpesvirus 6B
auccgcaguuagugcaccga

SEQ ID NO: 165089 - RNA, 14 nt, Human herpesvirus 6B
auccgagacuccua

SEQ ID NO: 165090 - RNA, 14 nt, Human herpesvirus 6B
aucgaaauacuucu

SEQ ID NO: 165091 - RNA, 15 nt, Human herpesvirus 6B
aucgaaauacuucuc

SEQ ID NO: 165092 - RNA, 19 nt, Human herpesvirus 6B
aucgaaauacuucuccgca

SEQ ID NO: 165093 - RNA, 18 nt, Human herpesvirus 6B
aucgaacucuucgaucca

SEQ ID NO: 165094 - RNA, 21 nt, Human herpesvirus 6B
aucgaacucuucgauccaaua

SEQ ID NO: 165095 - RNA, 22 nt, Human herpesvirus 6B
aucccauauuguccagcacuuu

SEQ ID NO: 165096 - RNA, 21 nt, Human herpesvirus 6B
aucccagcucaccaccaucua

SEQ ID NO: 165097 - RNA, 18 nt, Human herpesvirus 6B
aucccuuaaaaaaacaca

SEQ ID NO: 165098 - RNA, 17 nt, Human herpesvirus 6B
auccauggauucguucu

SEQ ID NO: 165099 - RNA, 22 nt, Human herpesvirus 6B
auccauggauucguucugacca

SEQ ID NO: 165100 - RNA, 23 nt, Human herpesvirus 6B
augcacuccguuaaucuaauaaa

SEQ ID NO: 165101 - RNA, 18 nt, Human herpesvirus 6B
augcaguaguuuuuggau

SEQ ID NO: 165102 - RNA, 23 nt, Human herpesvirus 6B
augcagcgccagcauucuuauca

SEQ ID NO: 165103 - RNA, 22 nt, Human herpesvirus 6B
augcagcguuggaaagcuuuau

SEQ ID NO: 165104 - RNA, 15 nt, Human herpesvirus 6B
augcaauaggccaua

SEQ ID NO: 165105 - RNA, 19 nt, Human herpesvirus 6B
augcaacgguguuccagga

SEQ ID NO: 165106 - RNA, 15 nt, Human herpesvirus 6B
augauacuacgugua

SEQ ID NO: 165107 - RNA, 16 nt, Human herpesvirus 6B
augauacuacguguaa

SEQ ID NO: 165108 - RNA, 14 nt, Human herpesvirus 6B
augaucaauacuuu

SEQ ID NO: 165109 - RNA, 15 nt, Human herpesvirus 6B
augauauauugcgau

SEQ ID NO: 165110 - RNA, 22 nt, Human herpesvirus 6B
augaucgccgcuaggcagauca

SEQ ID NO: 165111 - RNA, 15 nt, Human herpesvirus 6B
augaucggcauuugu

SEQ ID NO: 165112 - RNA, 18 nt, Human herpesvirus 6B
augaucgucauaaacaaa

SEQ ID NO: 165113 - RNA, 16 nt, Human herpesvirus 6B
augauugcaaccaaua

SEQ ID NO: 165114 - RNA, 20 nt, Human herpesvirus 6B
augauuggccaugguaggcu

SEQ ID NO: 165115 - RNA, 14 nt, Human herpesvirus 6B
augauucuuaauuc

SEQ ID NO: 165116 - RNA, 16 nt, Human herpesvirus 6B
augauuaauacaucau

SEQ ID NO: 165117 - RNA, 16 nt, Human herpesvirus 6B
augauggugucuuuau

SEQ ID NO: 165118 - RNA, 14 nt, Human herpesvirus 6B
augauggacgucau

SEQ ID NO: 165119 - RNA, 19 nt, Human herpesvirus 6B
augccgacuguuucuuaga

SEQ ID NO: 165120 - RNA, 16 nt, Human herpesvirus 6B
augccgugaacugugu

SEQ ID NO: 165121 - RNA, 16 nt, Human herpesvirus 6B
augccauugaauacac

SEQ ID NO: 165122 - RNA, 16 nt, Human herpesvirus 6B
augcauucacaaggaa

SEQ ID NO: 165123 - RNA, 16 nt, Human herpesvirus 6B
augccauaaagaacac

SEQ ID NO: 165124 - RNA, 21 nt, Human herpesvirus 6B
augcauguggcaagugcuggu

SEQ ID NO: 165125 - RNA, 15 nt, Human herpesvirus 6B
augcuagauaacuca

SEQ ID NO: 165126 - RNA, 23 nt, Human herpesvirus 6B
augcggcagauuuuuuggaagaa

SEQ ID NO: 165127 - RNA, 12 nt, Human herpesvirus 6B
augcgaauguua

SEQ ID NO: 165128 - RNA, 12 nt, Human herpesvirus 6B
augccuugaugu

SEQ ID NO: 165129 - RNA, 14 nt, Human herpesvirus 6B
augccuacauaugc

SEQ ID NO: 165130 - RNA, 14 nt, Human herpesvirus 6B
augaggauuugcuu

SEQ ID NO: 165131 - RNA, 21 nt, Human herpesvirus 6B
augagggguaugucugugcga

SEQ ID NO: 165132 - RNA, 15 nt, Human herpesvirus 6B
augacuggaaucaca

SEQ ID NO: 165133 - RNA, 20 nt, Human herpesvirus 6B
augacuuacggccaugauuu

SEQ ID NO: 165134 - RNA, 20 nt, Human herpesvirus 6B
augaauucaagacgaucuca

SEQ ID NO: 165135 - RNA, 22 nt, Human herpesvirus 6B
augaauucaagacgaucucaua

SEQ ID NO: 165136 - RNA, 13 nt, Human herpesvirus 6B
augaaugaucacu

SEQ ID NO: 165137 - RNA, 15 nt, Human herpesvirus 6B
augaauguaacuggu

SEQ ID NO: 165138 - RNA, 16 nt, Human herpesvirus 6B
augaauuuauguucag

SEQ ID NO: 165139 - RNA, 22 nt, Human herpesvirus 6B
augaacuggcgcgcauguugca

SEQ ID NO: 165140 - RNA, 16 nt, Human herpesvirus 6B
aucggcgaauguacac

SEQ ID NO: 165141 - RNA, 16 nt, Human herpesvirus 6B
aucgcgcagaccauaa

SEQ ID NO: 165142 - RNA, 17 nt, Human herpesvirus 6B
aucgccauagugaaaga

SEQ ID NO: 165143 - RNA, 22 nt, Human herpesvirus 6B
aucgcauuucucuacaugccac

SEQ ID NO: 165144 - RNA, 23 nt, Human herpesvirus 6B
aucgcauuucucuacaugccaca

SEQ ID NO: 165145 - RNA, 18 nt, Human herpesvirus 6B
aucuaauaaaauacacau

SEQ ID NO: 165146 - RNA, 23 nt, Human herpesvirus 6B
aucuaauagcccuucaccgucuc

SEQ ID NO: 165147 - RNA, 23 nt, Human herpesvirus 6B
aucuaauagguagcggcaauuua

SEQ ID NO: 165148 - RNA, 18 nt, Human herpesvirus 6B
aucguuuugcaacuuaaa

SEQ ID NO: 165149 - RNA, 15 nt, Human herpesvirus 6B
aucguuuuuauucau

SEQ ID NO: 165150 - RNA, 16 nt, Human herpesvirus 6B
aucguucuuaacauau

SEQ ID NO: 165151 - RNA, 18 nt, Human herpesvirus 6B
aucguucuuaacauauuc

SEQ ID NO: 165152 - RNA, 20 nt, Human herpesvirus 6B
aucgucccugucugugauuu

SEQ ID NO: 165153 - RNA, 15 nt, Human herpesvirus 6B
aucgucuacccuauc

SEQ ID NO: 165154 - RNA, 16 nt, Human herpesvirus 6B
aucgucuaugacaauu

SEQ ID NO: 165155 - RNA, 17 nt, Human herpesvirus 6B
aucgucuccuccaacaa

SEQ ID NO: 165156 - RNA, 19 nt, Human herpesvirus 6B
aucgucauaccgaucccag

SEQ ID NO: 165157 - RNA, 15 nt, Human herpesvirus 6B
aucgguugacucuac

SEQ ID NO: 165158 - RNA, 16 nt, Human herpesvirus 6B
aucgucauuccagucc

SEQ ID NO: 165159 - RNA, 19 nt, Human herpesvirus 6B
aucgucauuccaguccaau

SEQ ID NO: 165160 - RNA, 16 nt, Human herpesvirus 6B
aucuugaaaucuacca

SEQ ID NO: 165161 - RNA, 19 nt, Human herpesvirus 6B
aucuuguguucuaacacau

SEQ ID NO: 165162 - RNA, 14 nt, Human herpesvirus 6B
aucuuguagcucag

SEQ ID NO: 165163 - RNA, 15 nt, Human herpesvirus 6B
aucuuuccugcuaau

SEQ ID NO: 165164 - RNA, 16 nt, Human herpesvirus 6B
aucuuucugagauuuu

SEQ ID NO: 165165 - RNA, 18 nt, Human herpesvirus 6B
augaaaaaaaaucaacac

SEQ ID NO: 165166 - RNA, 14 nt, Human herpesvirus 6B
augaacgcacuaga

SEQ ID NO: 165167 - RNA, 12 nt, Human herpesvirus 6B
augaacuacuga

SEQ ID NO: 165168 - RNA, 16 nt, Human herpesvirus 6B
agugagguuaucugga

SEQ ID NO: 165169 - RNA, 16 nt, Human herpesvirus 6B
agugcaugaugaacaa

SEQ ID NO: 165170 - RNA, 22 nt, Human herpesvirus 6B
agugcacgaaaguggaugugga

SEQ ID NO: 165171 - RNA, 13 nt, Human herpesvirus 6B
aguacuucaagaa

SEQ ID NO: 165172 - RNA, 16 nt, Human herpesvirus 6B
aguagauggaucggaa

SEQ ID NO: 165173 - RNA, 21 nt, Human herpesvirus 6B
agugggaggagccaacauaca

SEQ ID NO: 165174 - RNA, 15 nt, Human herpesvirus 6B
aguggcuaugaagcc

SEQ ID NO: 165175 - RNA, 16 nt, Human herpesvirus 6B
aguguagaaaacauuc

SEQ ID NO: 165176 - RNA, 14 nt, Human herpesvirus 6B
agugcuucugcucu

SEQ ID NO: 165177 - RNA, 22 nt, Human herpesvirus 6B
agugcuucugcucucgaugaaa

SEQ ID NO: 165178 - RNA, 15 nt, Human herpesvirus 6B
agugguuuuuuggau

SEQ ID NO: 165179 - RNA, 17 nt, Human herpesvirus 6B
aguguuugccaaccaaa

SEQ ID NO: 165180 - RNA, 19 nt, Human herpesvirus 6B
aguguuugccaaccaaaug

SEQ ID NO: 165181 - RNA, 13 nt, Human herpesvirus 6B
aguuaacuaugga

SEQ ID NO: 165182 - RNA, 17 nt, Human herpesvirus 6B
aguguauuauacguguc

SEQ ID NO: 165183 - RNA, 15 nt, Human herpesvirus 6B
agugugcaucagcau

SEQ ID NO: 165184 - RNA, 23 nt, Human herpesvirus 6B
aguuaaucauucgauuaaugcca

SEQ ID NO: 165185 - RNA, 12 nt, Human herpesvirus 6B
aguuacaauuac

SEQ ID NO: 165186 - RNA, 18 nt, Human herpesvirus 6B
aguuacggggaagaucua

SEQ ID NO: 165187 - RNA, 13 nt, Human herpesvirus 6B
aguuagacuacgc

SEQ ID NO: 165188 - RNA, 15 nt, Human herpesvirus 6B
auaaacgcugucuca

SEQ ID NO: 165189 - RNA, 19 nt, Human herpesvirus 6B
auaaacucugccuguucaa

SEQ ID NO: 165190 - RNA, 18 nt, Human herpesvirus 6B
auaaacugacuuauaagu

SEQ ID NO: 165191 - RNA, 17 nt, Human herpesvirus 6B
auaaaaguuccauuguu

SEQ ID NO: 165192 - RNA, 13 nt, Human herpesvirus 6B
auaaacauuucau

SEQ ID NO: 165193 - RNA, 23 nt, Human herpesvirus 6B
auaauauuccugaacuacacgau

SEQ ID NO: 165194 - RNA, 22 nt, Human herpesvirus 6B
auaacacgcaccuaaacaccac

SEQ ID NO: 165195 - RNA, 14 nt, Human herpesvirus 6B
auaacacgcugcug

SEQ ID NO: 165196 - RNA, 16 nt, Human herpesvirus 6B
auaacaccaguacuuc

SEQ ID NO: 165197 - RNA, 18 nt, Human herpesvirus 6B
auaacaccaguacuucaa

SEQ ID NO: 165198 - RNA, 19 nt, Human herpesvirus 6B
aguucaucagccauuucgc

SEQ ID NO: 165199 - RNA, 14 nt, Human herpesvirus 6B
aguucaccuuguca

SEQ ID NO: 165200 - RNA, 18 nt, Human herpesvirus 6B
aguucaucguuauggguu

SEQ ID NO: 165201 - RNA, 13 nt, Human herpesvirus 6B
aguucaguaagau

SEQ ID NO: 165202 - RNA, 18 nt, Human herpesvirus 6B
aguucaguaagauuuaau

SEQ ID NO: 165203 - RNA, 17 nt, Human herpesvirus 6B
aguucacacagaugcaa

SEQ ID NO: 165204 - RNA, 21 nt, Human herpesvirus 6B
aguuccuguuuuucucauaaa

SEQ ID NO: 165205 - RNA, 16 nt, Human herpesvirus 6B
aguuuaaguucucacg

SEQ ID NO: 165206 - RNA, 22 nt, Human herpesvirus 6B
aguuuacauaagaauuacaaua

SEQ ID NO: 165207 - RNA, 18 nt, Human herpesvirus 6B
aguuuauuuugucaguca

SEQ ID NO: 165208 - RNA, 20 nt, Human herpesvirus 6B
aguuucauccugaccgacuu

SEQ ID NO: 165209 - RNA, 15 nt, Human herpesvirus 6B
aguuucaccaugucc

SEQ ID NO: 165210 - RNA, 22 nt, Human herpesvirus 6B
auaaaagaaacucuuauggcaa

SEQ ID NO: 165211 - RNA, 14 nt, Human herpesvirus 6B
aguuguuagaugau

SEQ ID NO: 165212 - RNA, 21 nt, Human herpesvirus 6B
aguuguauuauaaaaacuaau

SEQ ID NO: 165213 - RNA, 20 nt, Human herpesvirus 6B
aguugcggaagggcucuguu

SEQ ID NO: 165214 - RNA, 17 nt, Human herpesvirus 6B
agcaucucaaaaaacau

SEQ ID NO: 165215 - RNA, 12 nt, Human herpesvirus 6B
agcaugaacucu

SEQ ID NO: 165216 - RNA, 14 nt, Human herpesvirus 6B
agcaugaacucuca

SEQ ID NO: 165217 - RNA, 15 nt, Human herpesvirus 6B
agcaugaacucucac

SEQ ID NO: 165218 - RNA, 11 nt, Human herpesvirus 6B
agcaugcauug

SEQ ID NO: 165219 - RNA, 17 nt, Human herpesvirus 6B
agcugcuaaaugugaua

SEQ ID NO: 165220 - RNA, 22 nt, Human herpesvirus 6B
agcugcuaaaugugauacggaa

SEQ ID NO: 165221 - RNA, 14 nt, Human herpesvirus 6B
agcuucagguugcc

SEQ ID NO: 165222 - RNA, 19 nt, Human herpesvirus 6B
agcuguccaucuucagaca

SEQ ID NO: 165223 - RNA, 23 nt, Human herpesvirus 6B
agcuguccaucuucagacaucac

SEQ ID NO: 165224 - RNA, 23 nt, Human herpesvirus 6B
aggaagucugaauuuaaugcaaa

SEQ ID NO: 165225 - RNA, 19 nt, Human herpesvirus 6B
aggaaguaacggaaaaauu

SEQ ID NO: 165226 - RNA, 12 nt, Human herpesvirus 6B
aggaaaugauga

SEQ ID NO: 165227 - RNA, 16 nt, Human herpesvirus 6B
aggaaaugaugauuaa

SEQ ID NO: 165228 - RNA, 12 nt, Human herpesvirus 6B
aggaaaagaaga

SEQ ID NO: 165229 - RNA, 23 nt, Human herpesvirus 6B
agcuuuuuuugaagcaucccuau

SEQ ID NO: 165230 - RNA, 14 nt, Human herpesvirus 6B
agcuuuauucccau

SEQ ID NO: 165231 - RNA, 18 nt, Human herpesvirus 6B
agcuucccgacuuucugu

SEQ ID NO: 165232 - RNA, 18 nt, Human herpesvirus 6B
agcuucuucuacuuuauc

SEQ ID NO: 165233 - RNA, 15 nt, Human herpesvirus 6B
aggcuaaacacugac

SEQ ID NO: 165234 - RNA, 16 nt, Human herpesvirus 6B
aggcuaaacacugacu

SEQ ID NO: 165235 - RNA, 22 nt, Human herpesvirus 6B
aggcgugguaggaaaugaugau

SEQ ID NO: 165236 - RNA, 19 nt, Human herpesvirus 6B
aggcgucucaugcgaucua

SEQ ID NO: 165237 - RNA, 14 nt, Human herpesvirus 6B
aggcuaucacuuag

SEQ ID NO: 165238 - RNA, 22 nt, Human herpesvirus 6B
aggcugaacuguuuccagagca

SEQ ID NO: 165239 - RNA, 17 nt, Human herpesvirus 6B
aggcuggaaaaauuuaa

SEQ ID NO: 165240 - RNA, 15 nt, Human herpesvirus 6B
agggguaugucugug

SEQ ID NO: 165241 - RNA, 23 nt, Human herpesvirus 6B
aggaggucucaggugagauuccg

SEQ ID NO: 165242 - RNA, 18 nt, Human herpesvirus 6B
aggcggagacacauagcc

SEQ ID NO: 165243 - RNA, 18 nt, Human herpesvirus 6B
aggaucgaacucuucgau

SEQ ID NO: 165244 - RNA, 19 nt, Human herpesvirus 6B
aggugcguguuauggggaa

SEQ ID NO: 165245 - RNA, 20 nt, Human herpesvirus 6B
aggugcguguuauggggaag

SEQ ID NO: 165246 - RNA, 15 nt, Human herpesvirus 6B
agguugagaaaacau

SEQ ID NO: 165247 - RNA, 16 nt, Human herpesvirus 6B
agguugagaaugauuu

SEQ ID NO: 165248 - RNA, 22 nt, Human herpesvirus 6B
agguuucuccgcacgcuagcaa

SEQ ID NO: 165249 - RNA, 16 nt, Human herpesvirus 6B
agguuuguaaggacaa

SEQ ID NO: 165250 - RNA, 16 nt, Human herpesvirus 6B
agguuuuugcugucac

SEQ ID NO: 165251 - RNA, 13 nt, Human herpesvirus 6B
aguaaaacaugua

SEQ ID NO: 165252 - RNA, 20 nt, Human herpesvirus 6B
aggguugcgauaggugugcu

SEQ ID NO: 165253 - RNA, 22 nt, Human herpesvirus 6B
aggguugcgauaggugugcuuu

SEQ ID NO: 165254 - RNA, 12 nt, Human herpesvirus 6B
aggugauuugaa

SEQ ID NO: 165255 - RNA, 13 nt, Human herpesvirus 6B
aggugagacaucg

SEQ ID NO: 165256 - RNA, 13 nt, Human herpesvirus 6B
aggugagauuccg

SEQ ID NO: 165257 - RNA, 14 nt, Human herpesvirus 6B
aggugaaacauaaa

SEQ ID NO: 165258 - RNA, 17 nt, Human herpesvirus 6B
aggguuuuuuacaauga

SEQ ID NO: 165259 - RNA, 15 nt, Human herpesvirus 6B
auuuccggaguugca

SEQ ID NO: 165260 - RNA, 17 nt, Human herpesvirus 6B
auuuccggaguugcagu

SEQ ID NO: 165261 - RNA, 22 nt, Human herpesvirus 6B
auuuccauaaguuaauuccagc

SEQ ID NO: 165262 - RNA, 21 nt, Human herpesvirus 6B
auuuccguagcggccgcaaaa

SEQ ID NO: 165263 - RNA, 18 nt, Human herpesvirus 6B
auuuccuuugugugauau

SEQ ID NO: 165264 - RNA, 15 nt, Human herpesvirus 6B
auuucgaaagagaua

SEQ ID NO: 165265 - RNA, 19 nt, Human herpesvirus 6B
auuucgacaauccuaauuc

SEQ ID NO: 165266 - RNA, 21 nt, Human herpesvirus 6B
auuucgacaauccuaauucaa

SEQ ID NO: 165267 - RNA, 13 nt, Human herpesvirus 6B
auuucauacugua

SEQ ID NO: 165268 - RNA, 14 nt, Human herpesvirus 6B
auuucauacuguau

SEQ ID NO: 165269 - RNA, 21 nt, Human herpesvirus 6B
auuucagccgaugauaagauu

SEQ ID NO: 165270 - RNA, 19 nt, Human herpesvirus 6B
auuuccuucaaagugaauu

SEQ ID NO: 165271 - RNA, 20 nt, Human herpesvirus 6B
auuucguucgggauguccau

SEQ ID NO: 165272 - RNA, 15 nt, Human herpesvirus 6B
auuucuaaagauuug

SEQ ID NO: 165273 - RNA, 15 nt, Human herpesvirus 6B
auuucucuacaugcc

SEQ ID NO: 165274 - RNA, 16 nt, Human herpesvirus 6B
auuucucuacaugcca

SEQ ID NO: 165275 - RNA, 19 nt, Human herpesvirus 6B
auuucucuacaugccacag

SEQ ID NO: 165276 - RNA, 11 nt, Human herpesvirus 6B
auuguguuaca

SEQ ID NO: 165277 - RNA, 14 nt, Human herpesvirus 6B
auuuaccaccuguu

SEQ ID NO: 165278 - RNA, 19 nt, Human herpesvirus 6B
auuuacuguuucuuugaca

SEQ ID NO: 165279 - RNA, 19 nt, Human herpesvirus 6B
auuuagauucgagccaaaa

SEQ ID NO: 165280 - RNA, 18 nt, Human herpesvirus 6B
auuuagauuggaauuccg

SEQ ID NO: 165281 - RNA, 21 nt, Human herpesvirus 6B
auuucaacgugaaucuucguc

SEQ ID NO: 165282 - RNA, 15 nt, Human herpesvirus 6B
auuucacgugaaaua

SEQ ID NO: 165283 - RNA, 13 nt, Human herpesvirus 6B
auuuagugcagua

SEQ ID NO: 165284 - RNA, 15 nt, Human herpesvirus 6B
auuuaucaaaagcca

SEQ ID NO: 165285 - RNA, 16 nt, Human herpesvirus 6B
auuuaucaaaagccag

SEQ ID NO: 165286 - RNA, 18 nt, Human herpesvirus 6B
auuuaucaaaagccagau

SEQ ID NO: 165287 - RNA, 21 nt, Human herpesvirus 6B
auucuuggaaaaccuuauaca

SEQ ID NO: 165288 - RNA, 20 nt, Human herpesvirus 6B
auucuuuugugcuuaucaaa

SEQ ID NO: 165289 - RNA, 13 nt, Human herpesvirus 6B
auugaccagccag

SEQ ID NO: 165290 - RNA, 17 nt, Human herpesvirus 6B
auucuguuuucuacgua

SEQ ID NO: 165291 - RNA, 15 nt, Human herpesvirus 6B
auucuguaauuuuga

SEQ ID NO: 165292 - RNA, 19 nt, Human herpesvirus 6B
auucuuauguaaacuaaau

SEQ ID NO: 165293 - RNA, 15 nt, Human herpesvirus 6B
auucgauuaaugcca

SEQ ID NO: 165294 - RNA, 16 nt, Human herpesvirus 6B
auucgauuaaugccac

SEQ ID NO: 165295 - RNA, 17 nt, Human herpesvirus 6B
auucugggacaggaucc

SEQ ID NO: 165296 - RNA, 14 nt, Human herpesvirus 6B
auuguacccagcag

SEQ ID NO: 165297 - RNA, 16 nt, Human herpesvirus 6B
auuguaauuacauuau

SEQ ID NO: 165298 - RNA, 14 nt, Human herpesvirus 6B
auuggugugcauua

SEQ ID NO: 165299 - RNA, 15 nt, Human herpesvirus 6B
auuggugugcauuau

SEQ ID NO: 165300 - RNA, 13 nt, Human herpesvirus 6B
auugugacaaggu

SEQ ID NO: 165301 - RNA, 18 nt, Human herpesvirus 6B
auugucaaauagccacaa

SEQ ID NO: 165302 - RNA, 19 nt, Human herpesvirus 6B
auugugucuuuguuccaga

SEQ ID NO: 165303 - RNA, 15 nt, Human herpesvirus 6B
auucaaacuccgaaa

SEQ ID NO: 165304 - RNA, 18 nt, Human herpesvirus 6B
auucaagacgaucucaua

SEQ ID NO: 165305 - RNA, 19 nt, Human herpesvirus 6B
auucacaaggaaugugcag

SEQ ID NO: 165306 - RNA, 18 nt, Human herpesvirus 6B
auucacaaucgcagucca

SEQ ID NO: 165307 - RNA, 17 nt, Human herpesvirus 6B
auucacaguguuuccaa

SEQ ID NO: 165308 - RNA, 18 nt, Human herpesvirus 6B
auucacucuucggcauaa

SEQ ID NO: 165309 - RNA, 15 nt, Human herpesvirus 6B
auucaggaacagaaa

SEQ ID NO: 165310 - RNA, 21 nt, Human herpesvirus 6B
auucaggaacagaaacuugga

SEQ ID NO: 165311 - RNA, 15 nt, Human herpesvirus 6B
auucagucucagcaa

SEQ ID NO: 165312 - RNA, 16 nt, Human herpesvirus 6B
auucauaguuaugcgu

SEQ ID NO: 165313 - RNA, 15 nt, Human herpesvirus 6B
auucauuguacgaua

SEQ ID NO: 165314 - RNA, 16 nt, Human herpesvirus 6B
auuccagggaacuuga

SEQ ID NO: 165315 - RNA, 22 nt, Human herpesvirus 6B
auuccagggaacuugauguuga

SEQ ID NO: 165316 - RNA, 23 nt, Human herpesvirus 6B
auuccauacggucgaaugagcuu

SEQ ID NO: 165317 - RNA, 13 nt, Human herpesvirus 6B
auuccuucaaugu

SEQ ID NO: 165318 - RNA, 13 nt, Human herpesvirus 6B
auuccgagcuuuu

SEQ ID NO: 165319 - RNA, 21 nt, Human herpesvirus 6B
auuauuuguuuaaugcauuca

SEQ ID NO: 165320 - RNA, 16 nt, Human herpesvirus 6B
auuauuuugucuucgu

SEQ ID NO: 165321 - RNA, 13 nt, Human herpesvirus 6B
auuauugugacaa

SEQ ID NO: 165322 - RNA, 16 nt, Human herpesvirus 6B
auuauucaccauuacu

SEQ ID NO: 165323 - RNA, 12 nt, Human herpesvirus 6B
auuaugugauuc

SEQ ID NO: 165324 - RNA, 17 nt, Human herpesvirus 6B
auuauggcaacauaccc

SEQ ID NO: 165325 - RNA, 12 nt, Human herpesvirus 6B
auuaucuuucau

SEQ ID NO: 165326 - RNA, 15 nt, Human herpesvirus 6B
auuaucgucccuguc

SEQ ID NO: 165327 - RNA, 19 nt, Human herpesvirus 6B
auggagcccgcucggucuc

SEQ ID NO: 165328 - RNA, 22 nt, Human herpesvirus 6B
augcuuugcuguuuacgaauga

SEQ ID NO: 165329 - RNA, 16 nt, Human herpesvirus 6B
augcugccauuauuga

SEQ ID NO: 165330 - RNA, 21 nt, Human herpesvirus 6B
augcuguugcuguuguuguag

SEQ ID NO: 165331 - RNA, 13 nt, Human herpesvirus 6B
augcuuaacuuac

SEQ ID NO: 165332 - RNA, 15 nt, Human herpesvirus 6B
auggaaaccuauuag

SEQ ID NO: 165333 - RNA, 22 nt, Human herpesvirus 6B
auggacaacgguguggagacac

SEQ ID NO: 165334 - RNA, 14 nt, Human herpesvirus 6B
caagaaaucacguu

SEQ ID NO: 165335 - RNA, 20 nt, Human herpesvirus 6B
caagaaaucacguugaaaug

SEQ ID NO: 165336 - RNA, 17 nt, Human herpesvirus 6B
caagaauguaaaagagc

SEQ ID NO: 165337 - RNA, 18 nt, Human herpesvirus 6B
caagaaaaaacacaaaaa

SEQ ID NO: 165338 - RNA, 19 nt, Human herpesvirus 6B
caagaaaacgagagaguuc

SEQ ID NO: 165339 - RNA, 17 nt, Human herpesvirus 6B
caagaaaaucgcaaaag

SEQ ID NO: 165340 - RNA, 20 nt, Human herpesvirus 6B
caacuaaaucaugucuuaca

SEQ ID NO: 165341 - RNA, 14 nt, Human herpesvirus 6B
caaccgcaguuccu

SEQ ID NO: 165342 - RNA, 14 nt, Human herpesvirus 6B
caaccgcaguuucu

SEQ ID NO: 165343 - RNA, 17 nt, Human herpesvirus 6B
caaccuucuaaugacgc

SEQ ID NO: 165344 - RNA, 18 nt, Human herpesvirus 6B
caacgguguggagacacc

SEQ ID NO: 165345 - RNA, 18 nt, Human herpesvirus 6B
caacggaaagcaucucaa

SEQ ID NO: 165346 - RNA, 19 nt, Human herpesvirus 6B
caaaguucaguaagauuua

SEQ ID NO: 165347 - RNA, 22 nt, Human herpesvirus 6B
caaauaauaaaaagucauacag

SEQ ID NO: 165348 - RNA, 17 nt, Human herpesvirus 6B
caaauaccgaaauuaua

SEQ ID NO: 165349 - RNA, 20 nt, Human herpesvirus 6B
caaauacgagagcugacuga

SEQ ID NO: 165350 - RNA, 22 nt, Human herpesvirus 6B
caaauaucgagaccuacacuuu

SEQ ID NO: 165351 - RNA, 16 nt, Human herpesvirus 6B
caaauguagcaaauga

SEQ ID NO: 165352 - RNA, 23 nt, Human herpesvirus 6B
auuuuagaggagaaaugaucaau

SEQ ID NO: 165353 - RNA, 15 nt, Human herpesvirus 6B
auuuuagcuauccau

SEQ ID NO: 165354 - RNA, 21 nt, Human herpesvirus 6B
auuuuaacauuuuuauuccaa

SEQ ID NO: 165355 - RNA, 21 nt, Human herpesvirus 6B
auuuuuuucuccugaucucac

SEQ ID NO: 165356 - RNA, 23 nt, Human herpesvirus 6B
caaaaaaaaaaaacauacuuccu

SEQ ID NO: 165357 - RNA, 21 nt, Human herpesvirus 6B
caaacauccuaauaagacaga

SEQ ID NO: 165358 - RNA, 19 nt, Human herpesvirus 6B
caaacagcuuuauucccau

SEQ ID NO: 165359 - RNA, 14 nt, Human herpesvirus 6B
caaaacaaauaucg

SEQ ID NO: 165360 - RNA, 16 nt, Human herpesvirus 6B
caaaaacgaccugauc

SEQ ID NO: 165361 - RNA, 23 nt, Human herpesvirus 6B
caaaaacgaccugaucacagaga

SEQ ID NO: 165362 - RNA, 21 nt, Human herpesvirus 6B
caaaaagaaugggauugucau

SEQ ID NO: 165363 - RNA, 18 nt, Human herpesvirus 6B
caaaaaacucagccgaua

SEQ ID NO: 165364 - RNA, 12 nt, Human herpesvirus 6B
caaaaaaagagg

SEQ ID NO: 165365 - RNA, 21 nt, Human herpesvirus 6B
caaagaaaguuucguacugga

SEQ ID NO: 165366 - RNA, 15 nt, Human herpesvirus 6B
caaagaaacaguaaa

SEQ ID NO: 165367 - RNA, 17 nt, Human herpesvirus 6B
caaagauagacagugaa

SEQ ID NO: 165368 - RNA, 12 nt, Human herpesvirus 6B
caaagagaucag

SEQ ID NO: 165369 - RNA, 19 nt, Human herpesvirus 6B
caaaggaauuuauuuucaa

SEQ ID NO: 165370 - RNA, 18 nt, Human herpesvirus 6B
caaacccaccgauguuaa

SEQ ID NO: 165371 - RNA, 23 nt, Human herpesvirus 6B
caaaccguagagcaaauucugau

SEQ ID NO: 165372 - RNA, 11 nt, Human herpesvirus 6B
caaaccuuccc

SEQ ID NO: 165373 - RNA, 17 nt, Human herpesvirus 6B
caaaccuucccuaucac

SEQ ID NO: 165374 - RNA, 19 nt, Human herpesvirus 6B
caaaccuucccuaucacaa

SEQ ID NO: 165375 - RNA, 21 nt, Human herpesvirus 6B
caaaccuucccuaucacaaua

SEQ ID NO: 165376 - RNA, 13 nt, Human herpesvirus 6B
caaacaugugauu

SEQ ID NO: 165377 - RNA, 23 nt, Human herpesvirus 6B
caaacaugcaacccgccacucua

SEQ ID NO: 165378 - RNA, 22 nt, Human herpesvirus 6B
caaacgugagcggcgcauaaua

SEQ ID NO: 165379 - RNA, 19 nt, Human herpesvirus 6B
cacuucacguuauuacaua

SEQ ID NO: 165380 - RNA, 21 nt, Human herpesvirus 6B
cacuuucauaggaaguaaaua

SEQ ID NO: 165381 - RNA, 21 nt, Human herpesvirus 6B
cagagauauugcaguuaauca

SEQ ID NO: 165382 - RNA, 14 nt, Human herpesvirus 6B
cagaguaaucucgu

SEQ ID NO: 165383 - RNA, 14 nt, Human herpesvirus 6B
cagaguaaugacua

SEQ ID NO: 165384 - RNA, 20 nt, Human herpesvirus 6B
cagaucaucgccauagugaa

SEQ ID NO: 165385 - RNA, 17 nt, Human herpesvirus 6B
cagaugccaaguauuca

SEQ ID NO: 165386 - RNA, 17 nt, Human herpesvirus 6B
cagaugaauugugcgug

SEQ ID NO: 165387 - RNA, 14 nt, Human herpesvirus 6B
cagauacugcacaa

SEQ ID NO: 165388 - RNA, 15 nt, Human herpesvirus 6B
cagauacugcacaaa

SEQ ID NO: 165389 - RNA, 14 nt, Human herpesvirus 6B
cagcaauaaaauuc

SEQ ID NO: 165390 - RNA, 19 nt, Human herpesvirus 6B
cagcaaucagcagccucau

SEQ ID NO: 165391 - RNA, 19 nt, Human herpesvirus 6B
cagauugcauaugucuguu

SEQ ID NO: 165392 - RNA, 12 nt, Human herpesvirus 6B
cagauguagguu

SEQ ID NO: 165393 - RNA, 21 nt, Human herpesvirus 6B
cagauucgcaagacuacagac

SEQ ID NO: 165394 - RNA, 13 nt, Human herpesvirus 6B
cagauggcacuga

SEQ ID NO: 165395 - RNA, 21 nt, Human herpesvirus 6B
cagcacccucugcaagcucau

SEQ ID NO: 165396 - RNA, 16 nt, Human herpesvirus 6B
cagcaccuuagcucua

SEQ ID NO: 165397 - RNA, 22 nt, Human herpesvirus 6B
cagcaccuuagcucuaaugcua

SEQ ID NO: 165398 - RNA, 22 nt, Human herpesvirus 6B
cagcagaggccggcacauacac

SEQ ID NO: 165399 - RNA, 15 nt, Human herpesvirus 6B
cagcaugaacucuca

SEQ ID NO: 165400 - RNA, 23 nt, Human herpesvirus 6B
cagccuaaacggagacugcacag

SEQ ID NO: 165401 - RNA, 12 nt, Human herpesvirus 6B
cagcauucacuc

SEQ ID NO: 165402 - RNA, 14 nt, Human herpesvirus 6B
cagcgauauggaaa

SEQ ID NO: 165403 - RNA, 23 nt, Human herpesvirus 6B
cagcgcauaaauaaaaugguuuu

SEQ ID NO: 165404 - RNA, 17 nt, Human herpesvirus 6B
cagcgcccgaugccaac

SEQ ID NO: 165405 - RNA, 17 nt, Human herpesvirus 6B
cagcucaccaccaucua

SEQ ID NO: 165406 - RNA, 14 nt, Human herpesvirus 6B
cagcucugcaauuu

SEQ ID NO: 165407 - RNA, 20 nt, Human herpesvirus 6B
caggaauccuauucauaaca

SEQ ID NO: 165408 - RNA, 16 nt, Human herpesvirus 6B
caggaauucacuuuga

SEQ ID NO: 165409 - RNA, 19 nt, Human herpesvirus 6B
caggaaguucuucaaaaaa

SEQ ID NO: 165410 - RNA, 18 nt, Human herpesvirus 6B
caggaagcgccauaaaaa

SEQ ID NO: 165411 - RNA, 20 nt, Human herpesvirus 6B
caggaacaaaguaauaugau

SEQ ID NO: 165412 - RNA, 20 nt, Human herpesvirus 6B
caggaaaauguguucuuaca

SEQ ID NO: 165413 - RNA, 15 nt, Human herpesvirus 6B
caccgccuccgccac

SEQ ID NO: 165414 - RNA, 14 nt, Human herpesvirus 6B
caccggugaugaac

SEQ ID NO: 165415 - RNA, 14 nt, Human herpesvirus 6B
caccgucccucuca

SEQ ID NO: 165416 - RNA, 19 nt, Human herpesvirus 6B
caccgucucugaagcaaaa

SEQ ID NO: 165417 - RNA, 20 nt, Human herpesvirus 6B
caccgucucugaagcaaaag

SEQ ID NO: 165418 - RNA, 18 nt, Human herpesvirus 6B
caccaccgcugacaguca

SEQ ID NO: 165419 - RNA, 15 nt, Human herpesvirus 6B
cacccgcguccucca

SEQ ID NO: 165420 - RNA, 14 nt, Human herpesvirus 6B
caccaaugaucaca

SEQ ID NO: 165421 - RNA, 16 nt, Human herpesvirus 6B
caccaacgucaugcaa

SEQ ID NO: 165422 - RNA, 13 nt, Human herpesvirus 6B
cacauuaccucug

SEQ ID NO: 165423 - RNA, 18 nt, Human herpesvirus 6B
cacauuuuagcuauccau

SEQ ID NO: 165424 - RNA, 22 nt, Human herpesvirus 6B
cacauuuuagcuauccauuuua

SEQ ID NO: 165425 - RNA, 18 nt, Human herpesvirus 6B
cacgcuaaaaacagacga

SEQ ID NO: 165426 - RNA, 15 nt, Human herpesvirus 6B
cacgcuagcaaugau

SEQ ID NO: 165427 - RNA, 18 nt, Human herpesvirus 6B
cacgauccaauuacauca

SEQ ID NO: 165428 - RNA, 19 nt, Human herpesvirus 6B
cacgguaaacgagugugaa

SEQ ID NO: 165429 - RNA, 12 nt, Human herpesvirus 6B
cacuagacauca

SEQ ID NO: 165430 - RNA, 18 nt, Human herpesvirus 6B
caauuuccugucauguga

SEQ ID NO: 165431 - RNA, 18 nt, Human herpesvirus 6B
caauuuaugucauuucau

SEQ ID NO: 165432 - RNA, 13 nt, Human herpesvirus 6B
cacaaaacuguac

SEQ ID NO: 165433 - RNA, 11 nt, Human herpesvirus 6B
cacaaagugag

SEQ ID NO: 165434 - RNA, 12 nt, Human herpesvirus 6B
cacaaacuaauc

SEQ ID NO: 165435 - RNA, 23 nt, Human herpesvirus 6B
cacaaauaauuuuauugacugug

SEQ ID NO: 165436 - RNA, 14 nt, Human herpesvirus 6B
cacaaauauccuuu

SEQ ID NO: 165437 - RNA, 17 nt, Human herpesvirus 6B
cacaaggaaugugcaga

SEQ ID NO: 165438 - RNA, 21 nt, Human herpesvirus 6B
cacacagaaaauugacaauga

SEQ ID NO: 165439 - RNA, 20 nt, Human herpesvirus 6B
cacauuauaagacgcugaua

SEQ ID NO: 165440 - RNA, 15 nt, Human herpesvirus 6B
cacaauacacagaaa

SEQ ID NO: 165441 - RNA, 14 nt, Human herpesvirus 6B
cacaauacacagua

SEQ ID NO: 165442 - RNA, 16 nt, Human herpesvirus 6B
cacaauuucugacucu

SEQ ID NO: 165443 - RNA, 14 nt, Human herpesvirus 6B
caagacgaucucau

SEQ ID NO: 165444 - RNA, 17 nt, Human herpesvirus 6B
caagcuagugaaucaaa

SEQ ID NO: 165445 - RNA, 14 nt, Human herpesvirus 6B
caaggaaugugcag

SEQ ID NO: 165446 - RNA, 16 nt, Human herpesvirus 6B
caaggaacgauaugcu

SEQ ID NO: 165447 - RNA, 16 nt, Human herpesvirus 6B
caauugauugggucuu

SEQ ID NO: 165448 - RNA, 23 nt, Human herpesvirus 6B
caagguacacaauacacaguaga

SEQ ID NO: 165449 - RNA, 22 nt, Human herpesvirus 6B
caauguccauuuuuucccaaaa

SEQ ID NO: 165450 - RNA, 23 nt, Human herpesvirus 6B
caauguccauuuuuucccaaaag

SEQ ID NO: 165451 - RNA, 22 nt, Human herpesvirus 6B
accaggaauccuauucauaaca

SEQ ID NO: 165452 - RNA, 13 nt, Human herpesvirus 6B
accaggaguuuaa

SEQ ID NO: 165453 - RNA, 23 nt, Human herpesvirus 6B
accagcaaguucaucagccauuu

SEQ ID NO: 165454 - RNA, 21 nt, Human herpesvirus 6B
accauuguauuggauaugugu

SEQ ID NO: 165455 - RNA, 16 nt, Human herpesvirus 6B
accaguauuaaugucu

SEQ ID NO: 165456 - RNA, 20 nt, Human herpesvirus 6B
accaguauuaaugucuucga

SEQ ID NO: 165457 - RNA, 18 nt, Human herpesvirus 6B
accaacgucaugcaaaac

SEQ ID NO: 165458 - RNA, 12 nt, Human herpesvirus 6B
accaacaugacu

SEQ ID NO: 165459 - RNA, 21 nt, Human herpesvirus 6B
accaacauguauucuccucaa

SEQ ID NO: 165460 - RNA, 24 nt, Human herpesvirus 6B
accaagucaccaacgucaugcaaa

SEQ ID NO: 165461 - RNA, 17 nt, Human herpesvirus 6B
accacugugauaugcaa

SEQ ID NO: 165462 - RNA, 20 nt, Human herpesvirus 6B
accaauuugucgcacguguu

SEQ ID NO: 165463 - RNA, 14 nt, Human herpesvirus 6B
accagagauucuau

SEQ ID NO: 165464 - RNA, 22 nt, Human herpesvirus 6B
accacuuuauuguuaacaugua

SEQ ID NO: 165465 - RNA, 16 nt, Human herpesvirus 6B
acauuuaccagagaua

SEQ ID NO: 165466 - RNA, 19 nt, Human herpesvirus 6B
acauugauuccaccuuuau

SEQ ID NO: 165467 - RNA, 17 nt, Human herpesvirus 6B
accaaaacgagagucua

SEQ ID NO: 165468 - RNA, 16 nt, Human herpesvirus 6B
acaugcuucacaucuc

SEQ ID NO: 165469 - RNA, 17 nt, Human herpesvirus 6B
acauggacaacuuaucg

SEQ ID NO: 165470 - RNA, 11 nt, Human herpesvirus 6B
acaugccacag

SEQ ID NO: 165471 - RNA, 16 nt, Human herpesvirus 6B
acaugagcuaaaccau

SEQ ID NO: 165472 - RNA, 13 nt, Human herpesvirus 6B
acagugacuuuca

SEQ ID NO: 165473 - RNA, 16 nt, Human herpesvirus 6B
acaguguuuccaauau

SEQ ID NO: 165474 - RNA, 15 nt, Human herpesvirus 6B
acaguuauacuggca

SEQ ID NO: 165475 - RNA, 19 nt, Human herpesvirus 6B
acaguggauguuagaucac

SEQ ID NO: 165476 - RNA, 22 nt, Human herpesvirus 6B
acaguauaacggaaauccuuga

SEQ ID NO: 165477 - RNA, 22 nt, Human herpesvirus 6B
acaucccguaugaaauauuuaa

SEQ ID NO: 165478 - RNA, 19 nt, Human herpesvirus 6B
acaucacgucccauucaca

SEQ ID NO: 165479 - RNA, 16 nt, Human herpesvirus 6B
acaguuuaccuaucaa

SEQ ID NO: 165480 - RNA, 20 nt, Human herpesvirus 6B
acaucaacuauuuaacaucc

SEQ ID NO: 165481 - RNA, 18 nt, Human herpesvirus 6B
acacauuuuagcuaucca

SEQ ID NO: 165482 - RNA, 19 nt, Human herpesvirus 6B
acacauuuuagcuauccau

SEQ ID NO: 165483 - RNA, 19 nt, Human herpesvirus 6B
acacauucuccuuguaaaa

SEQ ID NO: 165484 - RNA, 21 nt, Human herpesvirus 6B
acacauaguuuggaucuucug

SEQ ID NO: 165485 - RNA, 20 nt, Human herpesvirus 6B
acacaucgagcccugcucua

SEQ ID NO: 165486 - RNA, 16 nt, Human herpesvirus 6B
acagcaugaacucuca

SEQ ID NO: 165487 - RNA, 12 nt, Human herpesvirus 6B
acacaccaucaa

SEQ ID NO: 165488 - RNA, 13 nt, Human herpesvirus 6B
acacacagaauac

SEQ ID NO: 165489 - RNA, 19 nt, Human herpesvirus 6B
acacaccccgccugaacac

SEQ ID NO: 165490 - RNA, 13 nt, Human herpesvirus 6B
acacaccugccua

SEQ ID NO: 165491 - RNA, 15 nt, Human herpesvirus 6B
acacaagaacagaga

SEQ ID NO: 165492 - RNA, 15 nt, Human herpesvirus 6B
acacaauacacagua

SEQ ID NO: 165493 - RNA, 17 nt, Human herpesvirus 6B
acacaauacacaguaga

SEQ ID NO: 165494 - RNA, 17 nt, Human herpesvirus 6B
acacacgguaaacgagu

SEQ ID NO: 165495 - RNA, 19 nt, Human herpesvirus 6B
acacacuggccuacuauaa

SEQ ID NO: 165496 - RNA, 17 nt, Human herpesvirus 6B
acacagaauacaaaaac

SEQ ID NO: 165497 - RNA, 15 nt, Human herpesvirus 6B
acacagcaugaacuc

SEQ ID NO: 165498 - RNA, 15 nt, Human herpesvirus 6B
acacauacauaauuc

SEQ ID NO: 165499 - RNA, 21 nt, Human herpesvirus 6B
acacaguagaccgaguaucac

SEQ ID NO: 165500 - RNA, 19 nt, Human herpesvirus 6B
accgccgacccuagcuuuu

SEQ ID NO: 165501 - RNA, 12 nt, Human herpesvirus 6B
accgaugaugau

SEQ ID NO: 165502 - RNA, 17 nt, Human herpesvirus 6B
accgaugaugaucugcu

SEQ ID NO: 165503 - RNA, 19 nt, Human herpesvirus 6B
accgguacgcuucuuucac

SEQ ID NO: 165504 - RNA, 23 nt, Human herpesvirus 6B
accggucugcaacgaugaguuca

SEQ ID NO: 165505 - RNA, 20 nt, Human herpesvirus 6B
accggagcuuauuuaugaaa

SEQ ID NO: 165506 - RNA, 20 nt, Human herpesvirus 6B
accgcuauuauuuguuuaau

SEQ ID NO: 165507 - RNA, 15 nt, Human herpesvirus 6B
accggaauaaugaaa

SEQ ID NO: 165508 - RNA, 21 nt, Human herpesvirus 6B
accucagcaaacaugugauuu

SEQ ID NO: 165509 - RNA, 16 nt, Human herpesvirus 6B
accguucaccauucca

SEQ ID NO: 165510 - RNA, 17 nt, Human herpesvirus 6B
accguucaccauuccag

SEQ ID NO: 165511 - RNA, 18 nt, Human herpesvirus 6B
accgucucugaagcaaaa

SEQ ID NO: 165512 - RNA, 14 nt, Human herpesvirus 6B
accuucaggaacaa

SEQ ID NO: 165513 - RNA, 12 nt, Human herpesvirus 6B
accuuauacaga

SEQ ID NO: 165514 - RNA, 17 nt, Human herpesvirus 6B
accucugcaauagcaga

SEQ ID NO: 165515 - RNA, 16 nt, Human herpesvirus 6B
accuucccuaucacaa

SEQ ID NO: 165516 - RNA, 14 nt, Human herpesvirus 6B
acgaaaaacauuuc

SEQ ID NO: 165517 - RNA, 17 nt, Human herpesvirus 6B
acgaaaauaaaaaacca

SEQ ID NO: 165518 - RNA, 13 nt, Human herpesvirus 6B
acgaaaaagcuau

SEQ ID NO: 165519 - RNA, 14 nt, Human herpesvirus 6B
acgaaaccguccac

SEQ ID NO: 165520 - RNA, 15 nt, Human herpesvirus 6B
acgaacaaaucucca

SEQ ID NO: 165521 - RNA, 17 nt, Human herpesvirus 6B
acgaaccaaaaugacuc

SEQ ID NO: 165522 - RNA, 13 nt, Human herpesvirus 6B
acgauuuugugac

SEQ ID NO: 165523 - RNA, 10 nt, Human herpesvirus 6B
acgaguagau

SEQ ID NO: 165524 - RNA, 23 nt, Human herpesvirus 6B
acgauugcugucuuccugugaga

SEQ ID NO: 165525 - RNA, 16 nt, Human herpesvirus 6B
acgauccaauuacauc

SEQ ID NO: 165526 - RNA, 23 nt, Human herpesvirus 6B
acgaucuuuccacccacguguga

SEQ ID NO: 165527 - RNA, 16 nt, Human herpesvirus 6B
acggaaagcaucucaa

SEQ ID NO: 165528 - RNA, 18 nt, Human herpesvirus 6B
acgcguacaaaaucaaac

SEQ ID NO: 165529 - RNA, 22 nt, Human herpesvirus 6B
acgcguacaaaaucaaacucac

SEQ ID NO: 165530 - RNA, 18 nt, Human herpesvirus 6B
acgcgucaacaaacaauu

SEQ ID NO: 165531 - RNA, 18 nt, Human herpesvirus 6B
acgcgucgguaaacaauu

SEQ ID NO: 165532 - RNA, 17 nt, Human herpesvirus 6B
acguacagagccagaca

SEQ ID NO: 165533 - RNA, 14 nt, Human herpesvirus 6B
acgguuagauuuaa

SEQ ID NO: 165534 - RNA, 17 nt, Human herpesvirus 6B
acgguucaccacuguga

SEQ ID NO: 165535 - RNA, 20 nt, Human herpesvirus 6B
acggguuggagaucaguucu

SEQ ID NO: 165536 - RNA, 23 nt, Human herpesvirus 6B
acgggucacguauaccauuccca

SEQ ID NO: 165537 - RNA, 17 nt, Human herpesvirus 6B
acgggcagggcgggcac

SEQ ID NO: 165538 - RNA, 18 nt, Human herpesvirus 6B
acggggauuuagugcagu

SEQ ID NO: 165539 - RNA, 22 nt, Human herpesvirus 6B
acggggauuuagugcaguaugu

SEQ ID NO: 165540 - RNA, 21 nt, Human herpesvirus 6B
acggccagcaccuuagcucua

SEQ ID NO: 165541 - RNA, 13 nt, Human herpesvirus 6B
acggcauacauuu

SEQ ID NO: 165542 - RNA, 21 nt, Human herpesvirus 6B
acggagaacacuuagaggguu

SEQ ID NO: 165543 - RNA, 17 nt, Human herpesvirus 6B
acggaauuaacaauucu

SEQ ID NO: 165544 - RNA, 21 nt, Human herpesvirus 6B
acggcuucaagaaugccguga

SEQ ID NO: 165545 - RNA, 23 nt, Human herpesvirus 6B
acggcguuccgacucgauuugau

SEQ ID NO: 165546 - RNA, 19 nt, Human herpesvirus 6B
agauuagaaauuacauaag

SEQ ID NO: 165547 - RNA, 17 nt, Human herpesvirus 6B
agauuauggcaacauac

SEQ ID NO: 165548 - RNA, 19 nt, Human herpesvirus 6B
agauucgcaagacuacaga

SEQ ID NO: 165549 - RNA, 18 nt, Human herpesvirus 6B
agauugaucaucucccau

SEQ ID NO: 165550 - RNA, 21 nt, Human herpesvirus 6B
agauugauuccaggugguggu

SEQ ID NO: 165551 - RNA, 19 nt, Human herpesvirus 6B
agauugcaaaauugauaca

SEQ ID NO: 165552 - RNA, 22 nt, Human herpesvirus 6B
agauggugcuauuaacacauac

SEQ ID NO: 165553 - RNA, 22 nt, Human herpesvirus 6B
agauuacccaucguucuuaaca

SEQ ID NO: 165554 - RNA, 14 nt, Human herpesvirus 6B
agauuaaagcauua

SEQ ID NO: 165555 - RNA, 14 nt, Human herpesvirus 6B
agauuaacaacugc

SEQ ID NO: 165556 - RNA, 23 nt, Human herpesvirus 6B
agauguccuuuguauuuuucgag

SEQ ID NO: 165557 - RNA, 12 nt, Human herpesvirus 6B
agcaaacaugca

SEQ ID NO: 165558 - RNA, 13 nt, Human herpesvirus 6B
agcaaacauguau

SEQ ID NO: 165559 - RNA, 14 nt, Human herpesvirus 6B
agcaaacaugugau

SEQ ID NO: 165560 - RNA, 15 nt, Human herpesvirus 6B
agcaaacaugugauu

SEQ ID NO: 165561 - RNA, 20 nt, Human herpesvirus 6B
agcaaauuuaguuaauucuc

SEQ ID NO: 165562 - RNA, 21 nt, Human herpesvirus 6B
agcaaauucugauuauuauca

SEQ ID NO: 165563 - RNA, 14 nt, Human herpesvirus 6B
agauugugcaguuc

SEQ ID NO: 165564 - RNA, 12 nt, Human herpesvirus 6B
agauuuacuguu

SEQ ID NO: 165565 - RNA, 17 nt, Human herpesvirus 6B
agauuuaucaaaagcca

SEQ ID NO: 165566 - RNA, 18 nt, Human herpesvirus 6B
agauuuaucaaaagccag

SEQ ID NO: 165567 - RNA, 13 nt, Human herpesvirus 6B
agauuuuacuucu

SEQ ID NO: 165568 - RNA, 14 nt, Human herpesvirus 6B
agauuuggagguga

SEQ ID NO: 165569 - RNA, 12 nt, Human herpesvirus 6B
agcacuuuuacc

SEQ ID NO: 165570 - RNA, 20 nt, Human herpesvirus 6B
agcagaaaacguuucaucca

SEQ ID NO: 165571 - RNA, 13 nt, Human herpesvirus 6B
agcagaaguuuac

SEQ ID NO: 165572 - RNA, 14 nt, Human herpesvirus 6B
agcagaaguuuacc

SEQ ID NO: 165573 - RNA, 21 nt, Human herpesvirus 6B
agcagaaguuuaccuagagau

SEQ ID NO: 165574 - RNA, 16 nt, Human herpesvirus 6B
agcacgaaccaaaaug

SEQ ID NO: 165575 - RNA, 16 nt, Human herpesvirus 6B
agcaaccgcaguuccu

SEQ ID NO: 165576 - RNA, 22 nt, Human herpesvirus 6B
agcaagcuagugaaucaaauac

SEQ ID NO: 165577 - RNA, 11 nt, Human herpesvirus 6B
agcacaccucg

SEQ ID NO: 165578 - RNA, 21 nt, Human herpesvirus 6B
agcacaccucgcccgacauaa

SEQ ID NO: 165579 - RNA, 21 nt, Human herpesvirus 6B
agcaaguucaucagccauuuc

SEQ ID NO: 165580 - RNA, 19 nt, Human herpesvirus 6B
agcaaucaccaucaacaca

SEQ ID NO: 165581 - RNA, 23 nt, Human herpesvirus 6B
agcaaucaccaucaacacaccug

SEQ ID NO: 165582 - RNA, 16 nt, Human herpesvirus 6B
agagaaugaacgcagc

SEQ ID NO: 165583 - RNA, 15 nt, Human herpesvirus 6B
agacuuagaccaaac

SEQ ID NO: 165584 - RNA, 22 nt, Human herpesvirus 6B
agacuuagcuagacgugucuuc

SEQ ID NO: 165585 - RNA, 18 nt, Human herpesvirus 6B
agacuuacagagcuuuua

SEQ ID NO: 165586 - RNA, 12 nt, Human herpesvirus 6B
agacacggccag

SEQ ID NO: 165587 - RNA, 14 nt, Human herpesvirus 6B
agacacgauuuauc

SEQ ID NO: 165588 - RNA, 18 nt, Human herpesvirus 6B
agacuacagacuccucac

SEQ ID NO: 165589 - RNA, 21 nt, Human herpesvirus 6B
agacuagauuuaggguuuauc

SEQ ID NO: 165590 - RNA, 13 nt, Human herpesvirus 6B
agacuacucuggc

SEQ ID NO: 165591 - RNA, 16 nt, Human herpesvirus 6B
agacgugcugucugca

SEQ ID NO: 165592 - RNA, 13 nt, Human herpesvirus 6B
agacguugcucgu

SEQ ID NO: 165593 - RNA, 18 nt, Human herpesvirus 6B
agacuaaacuuaacuuau

SEQ ID NO: 165594 - RNA, 20 nt, Human herpesvirus 6B
agacucggaagauacacugc

SEQ ID NO: 165595 - RNA, 12 nt, Human herpesvirus 6B
agaucaguacau

SEQ ID NO: 165596 - RNA, 13 nt, Human herpesvirus 6B
agaucaguacaua

SEQ ID NO: 165597 - RNA, 16 nt, Human herpesvirus 6B
agauaugucguuucau

SEQ ID NO: 165598 - RNA, 20 nt, Human herpesvirus 6B
agauagcuccaacggagaaa

SEQ ID NO: 165599 - RNA, 23 nt, Human herpesvirus 6B
agaggccaauuuaugucauuuca

SEQ ID NO: 165600 - RNA, 21 nt, Human herpesvirus 6B
agagguaauaaaaacaccucu

SEQ ID NO: 165601 - RNA, 16 nt, Human herpesvirus 6B
agagggaggagaggga

SEQ ID NO: 165602 - RNA, 11 nt, Human herpesvirus 6B
agaggagacca

SEQ ID NO: 165603 - RNA, 16 nt, Human herpesvirus 6B
agaggagaccaugcca

SEQ ID NO: 165604 - RNA, 14 nt, Human herpesvirus 6B
agaggaucuguuca

SEQ ID NO: 165605 - RNA, 13 nt, Human herpesvirus 6B
agauagacaguga

SEQ ID NO: 165606 - RNA, 14 nt, Human herpesvirus 6B
agauagacagugaa

SEQ ID NO: 165607 - RNA, 20 nt, Human herpesvirus 6B
agauagccagggcauucaca

SEQ ID NO: 165608 - RNA, 12 nt, Human herpesvirus 6B
agaguacuuucg

SEQ ID NO: 165609 - RNA, 16 nt, Human herpesvirus 6B
agaaaauugacaauga

SEQ ID NO: 165610 - RNA, 20 nt, Human herpesvirus 6B
agaaaauaaaaaaaaagaca

SEQ ID NO: 165611 - RNA, 16 nt, Human herpesvirus 6B
agaaaauccagcaauc

SEQ ID NO: 165612 - RNA, 14 nt, Human herpesvirus 6B
agaaaaugaauuca

SEQ ID NO: 165613 - RNA, 18 nt, Human herpesvirus 6B
agaaaaugaauucaagac

SEQ ID NO: 165614 - RNA, 19 nt, Human herpesvirus 6B
agaaaccgauuuaccaccu

SEQ ID NO: 165615 - RNA, 22 nt, Human herpesvirus 6B
acuuucauaggaaguaaauaca

SEQ ID NO: 165616 - RNA, 18 nt, Human herpesvirus 6B
acuuugccgcgagauuuu

SEQ ID NO: 165617 - RNA, 18 nt, Human herpesvirus 6B
acuuucuguggaacuuuu

SEQ ID NO: 165618 - RNA, 18 nt, Human herpesvirus 6B
acuuugaguuguauuuaa

SEQ ID NO: 165619 - RNA, 23 nt, Human herpesvirus 6B
acuuuaaagucguuuuggagaaa

SEQ ID NO: 165620 - RNA, 16 nt, Human herpesvirus 6B
acuugauaaacuguac

SEQ ID NO: 165621 - RNA, 13 nt, Human herpesvirus 6B
acuugaugcaugu

SEQ ID NO: 165622 - RNA, 17 nt, Human herpesvirus 6B
acuugaucacaacauaa

SEQ ID NO: 165623 - RNA, 21 nt, Human herpesvirus 6B
acuuggaagacggaaccauga

SEQ ID NO: 165624 - RNA, 22 nt, Human herpesvirus 6B
acuuggaagacggaaccaugau

SEQ ID NO: 165625 - RNA, 15 nt, Human herpesvirus 6B
agaauuacaauacag

SEQ ID NO: 165626 - RNA, 17 nt, Human herpesvirus 6B
agacaccucaaggucaa

SEQ ID NO: 165627 - RNA, 15 nt, Human herpesvirus 6B
agaacugucuugcag

SEQ ID NO: 165628 - RNA, 18 nt, Human herpesvirus 6B
agacaagggugugaaacu

SEQ ID NO: 165629 - RNA, 22 nt, Human herpesvirus 6B
agaaacuuggagcuauaugcau

SEQ ID NO: 165630 - RNA, 19 nt, Human herpesvirus 6B
agaaaccuucguucugaua

SEQ ID NO: 165631 - RNA, 14 nt, Human herpesvirus 6B
agaaacgcccugaa

SEQ ID NO: 165632 - RNA, 15 nt, Human herpesvirus 6B
agaacagcgcauaaa

SEQ ID NO: 165633 - RNA, 19 nt, Human herpesvirus 6B
agaacaguuuaccuaucaa

SEQ ID NO: 165634 - RNA, 22 nt, Human herpesvirus 6B
agaacaguuuaccuaucaacaa

SEQ ID NO: 165635 - RNA, 17 nt, Human herpesvirus 6B
acugacaaauacgagag

SEQ ID NO: 165636 - RNA, 22 nt, Human herpesvirus 6B
acugaagcaaagcacccugcac

SEQ ID NO: 165637 - RNA, 13 nt, Human herpesvirus 6B
acuguuuacuuaa

SEQ ID NO: 165638 - RNA, 19 nt, Human herpesvirus 6B
acuguuuacuuaaacggaa

SEQ ID NO: 165639 - RNA, 14 nt, Human herpesvirus 6B
acuuacguguguau

SEQ ID NO: 165640 - RNA, 16 nt, Human herpesvirus 6B
acuucuccgcauguau

SEQ ID NO: 165641 - RNA, 20 nt, Human herpesvirus 6B
acuugaaccaagucaccaac

SEQ ID NO: 165642 - RNA, 18 nt, Human herpesvirus 6B
acuugagugauggaguua

SEQ ID NO: 165643 - RNA, 22 nt, Human herpesvirus 6B
acuuaaaauuuuuaaacagauu

SEQ ID NO: 165644 - RNA, 18 nt, Human herpesvirus 6B
acuuaaaagaaucaaaug

SEQ ID NO: 165645 - RNA, 16 nt, Human herpesvirus 6B
acuuacaucgauccaa

SEQ ID NO: 165646 - RNA, 13 nt, Human herpesvirus 6B
acuuaauaucuga

SEQ ID NO: 165647 - RNA, 11 nt, Human herpesvirus 6B
acuuaacuuau

SEQ ID NO: 165648 - RNA, 14 nt, Human herpesvirus 6B
acuuacaacugaaa

SEQ ID NO: 165649 - RNA, 17 nt, Human herpesvirus 6B
acuuacagagcuuuuaa

SEQ ID NO: 165650 - RNA, 17 nt, Human herpesvirus 6B
acucauuuuaacauuuu

SEQ ID NO: 165651 - RNA, 18 nt, Human herpesvirus 6B
acucauccucagucuuca

SEQ ID NO: 165652 - RNA, 16 nt, Human herpesvirus 6B
acucaucuuucugaga

SEQ ID NO: 165653 - RNA, 22 nt, Human herpesvirus 6B
acgugauacucggucuacugug

SEQ ID NO: 165654 - RNA, 17 nt, Human herpesvirus 6B
acgucccauucagucuc

SEQ ID NO: 165655 - RNA, 15 nt, Human herpesvirus 6B
acguauaccauuccc

SEQ ID NO: 165656 - RNA, 19 nt, Human herpesvirus 6B
acgucaacgucucuauaac

SEQ ID NO: 165657 - RNA, 19 nt, Human herpesvirus 6B
acucuucucuaaaaacuaa

SEQ ID NO: 165658 - RNA, 18 nt, Human herpesvirus 6B
acucuguguugaaugaac

SEQ ID NO: 165659 - RNA, 21 nt, Human herpesvirus 6B
acugaaacuccacgaucuaca

SEQ ID NO: 165660 - RNA, 17 nt, Human herpesvirus 6B
acuccgauuaucuuagu

SEQ ID NO: 165661 - RNA, 21 nt, Human herpesvirus 6B
acuccggccuaggacguacag

SEQ ID NO: 165662 - RNA, 19 nt, Human herpesvirus 6B
acuccgggggaaaccucaa

SEQ ID NO: 165663 - RNA, 22 nt, Human herpesvirus 6B
acaacgauagaguucaucuaac

SEQ ID NO: 165664 - RNA, 17 nt, Human herpesvirus 6B
acaagcaugcauugugu

SEQ ID NO: 165665 - RNA, 20 nt, Human herpesvirus 6B
acaaggaacgauaugcugcc

SEQ ID NO: 165666 - RNA, 18 nt, Human herpesvirus 6B
acaagcuguccaucuuca

SEQ ID NO: 165667 - RNA, 16 nt, Human herpesvirus 6B
acaaaaugauuaguua

SEQ ID NO: 165668 - RNA, 15 nt, Human herpesvirus 6B
acaaaaugauugcaa

SEQ ID NO: 165669 - RNA, 18 nt, Human herpesvirus 6B
acaaacugucacuuuccg

SEQ ID NO: 165670 - RNA, 14 nt, Human herpesvirus 6B
acaaacauccaaag

SEQ ID NO: 165671 - RNA, 12 nt, Human herpesvirus 6B
acaaacuaaucg

SEQ ID NO: 165672 - RNA, 15 nt, Human herpesvirus 6B
acaaaccucucgccg

SEQ ID NO: 165673 - RNA, 15 nt, Human herpesvirus 6B
acaaaccugauuuca

SEQ ID NO: 165674 - RNA, 16 nt, Human herpesvirus 6B
acaaaccugauuucag

SEQ ID NO: 165675 - RNA, 12 nt, Human herpesvirus 6B
acaaaccuuccc

SEQ ID NO: 165676 - RNA, 15 nt, Human herpesvirus 6B
acaaaccuucccuau

SEQ ID NO: 165677 - RNA, 20 nt, Human herpesvirus 6B
acaaaccuucccuaucacaa

SEQ ID NO: 165678 - RNA, 20 nt, Human herpesvirus 6B
acaaguuucuuuugugacua

SEQ ID NO: 165679 - RNA, 21 nt, Human herpesvirus 6B
acaauaacaauuauucaccau

SEQ ID NO: 165680 - RNA, 14 nt, Human herpesvirus 6B
acaauccuaauuca

SEQ ID NO: 165681 - RNA, 20 nt, Human herpesvirus 6B
acaaggcggagauucaauac

SEQ ID NO: 165682 - RNA, 15 nt, Human herpesvirus 6B
acaaggaaugugcag

SEQ ID NO: 165683 - RNA, 13 nt, Human herpesvirus 6B
acaagcuuaauaa

SEQ ID NO: 165684 - RNA, 22 nt, Human herpesvirus 6B
acaaugcggaacaccagcaugu

SEQ ID NO: 165685 - RNA, 14 nt, Human herpesvirus 6B
acaaugacuaucaa

SEQ ID NO: 165686 - RNA, 22 nt, Human herpesvirus 6B
acaaugauacuacguguaaugu

SEQ ID NO: 165687 - RNA, 15 nt, Human herpesvirus 6B
acaauguccaauuac

SEQ ID NO: 165688 - RNA, 18 nt, Human herpesvirus 6B
acaauguccaauuacuca

SEQ ID NO: 165689 - RNA, 19 nt, Human herpesvirus 6B
acaauguccaauuacucaa

SEQ ID NO: 165690 - RNA, 19 nt, Human herpesvirus 6B
acaauguucuugacaaaua

SEQ ID NO: 165691 - RNA, 15 nt, Human herpesvirus 6B
acaauuuagccuauu

SEQ ID NO: 165692 - RNA, 18 nt, Human herpesvirus 6B
acacaaaaagacucuauu

SEQ ID NO: 165693 - RNA, 19 nt, Human herpesvirus 6B
aaugugucuuaguguacaa

SEQ ID NO: 165694 - RNA, 13 nt, Human herpesvirus 6B
aauguguugguca

SEQ ID NO: 165695 - RNA, 21 nt, Human herpesvirus 6B
aaugugcuuacgugccguguu

SEQ ID NO: 165696 - RNA, 23 nt, Human herpesvirus 6B
aaugugggcauucgccauauacc

SEQ ID NO: 165697 - RNA, 17 nt, Human herpesvirus 6B
aauguuggcgccaaaaa

SEQ ID NO: 165698 - RNA, 23 nt, Human herpesvirus 6B
aauguucgaugauuauucugucu

SEQ ID NO: 165699 - RNA, 16 nt, Human herpesvirus 6B
aauguucuugacaaau

SEQ ID NO: 165700 - RNA, 18 nt, Human herpesvirus 6B
aauguuuacggauucgau

SEQ ID NO: 165701 - RNA, 15 nt, Human herpesvirus 6B
aauuacacaucuuaa

SEQ ID NO: 165702 - RNA, 19 nt, Human herpesvirus 6B
aauuaaaguuuacugugau

SEQ ID NO: 165703 - RNA, 14 nt, Human herpesvirus 6B
aauuaaaaaagagg

SEQ ID NO: 165704 - RNA, 20 nt, Human herpesvirus 6B
aauuaaaacagaaaggccau

SEQ ID NO: 165705 - RNA, 22 nt, Human herpesvirus 6B
aaucugacaaccuugacagaua

SEQ ID NO: 165706 - RNA, 21 nt, Human herpesvirus 6B
aaucugaucgaaauacuucuc

SEQ ID NO: 165707 - RNA, 22 nt, Human herpesvirus 6B
aaucugaucgaaauacuucucc

SEQ ID NO: 165708 - RNA, 22 nt, Human herpesvirus 6B
aaucuccaaaagcgccugccua

SEQ ID NO: 165709 - RNA, 16 nt, Human herpesvirus 6B
aaucucuaugagacug

SEQ ID NO: 165710 - RNA, 20 nt, Human herpesvirus 6B
aaucugugcaacacaacaaa

SEQ ID NO: 165711 - RNA, 15 nt, Human herpesvirus 6B
aaucuuccacugaag

SEQ ID NO: 165712 - RNA, 18 nt, Human herpesvirus 6B
aaucuuguagcucagugu

SEQ ID NO: 165713 - RNA, 15 nt, Human herpesvirus 6B
aaucuuuccugcuaa

SEQ ID NO: 165714 - RNA, 16 nt, Human herpesvirus 6B
aaucuuuccugcuaau

SEQ ID NO: 165715 - RNA, 20 nt, Human herpesvirus 6B
aaugaauucaagacgaucuc

SEQ ID NO: 165716 - RNA, 17 nt, Human herpesvirus 6B
aaugaacgcacuagaca

SEQ ID NO: 165717 - RNA, 20 nt, Human herpesvirus 6B
aauucuuaccaagaaaucac

SEQ ID NO: 165718 - RNA, 18 nt, Human herpesvirus 6B
aauucuucucuacaucga

SEQ ID NO: 165719 - RNA, 13 nt, Human herpesvirus 6B
aauuccugugaug

SEQ ID NO: 165720 - RNA, 19 nt, Human herpesvirus 6B
aauucugauuauuaucaca

SEQ ID NO: 165721 - RNA, 13 nt, Human herpesvirus 6B
aauucacuuugaa

SEQ ID NO: 165722 - RNA, 20 nt, Human herpesvirus 6B
aauuacauaagcaaauguaa

SEQ ID NO: 165723 - RNA, 16 nt, Human herpesvirus 6B
aauucaggaacagaaa

SEQ ID NO: 165724 - RNA, 18 nt, Human herpesvirus 6B
aauucagucugcuaaaaa

SEQ ID NO: 165725 - RNA, 22 nt, Human herpesvirus 6B
aauucaucaaauccucuacgua

SEQ ID NO: 165726 - RNA, 23 nt, Human herpesvirus 6B
aauuccaugcgaguagauucucc

SEQ ID NO: 165727 - RNA, 16 nt, Human herpesvirus 6B
aauuuggguugugcug

SEQ ID NO: 165728 - RNA, 16 nt, Human herpesvirus 6B
aauuuaugucauuuca

SEQ ID NO: 165729 - RNA, 19 nt, Human herpesvirus 6B
aauuuaggucuuuauccca

SEQ ID NO: 165730 - RNA, 22 nt, Human herpesvirus 6B
aauuuagccuauuaagcagccg

SEQ ID NO: 165731 - RNA, 17 nt, Human herpesvirus 6B
aauuguuucacggaugg

SEQ ID NO: 165732 - RNA, 14 nt, Human herpesvirus 6B
aauaucuugucaaa

SEQ ID NO: 165733 - RNA, 14 nt, Human herpesvirus 6B
aauauucaugcgcu

SEQ ID NO: 165734 - RNA, 16 nt, Human herpesvirus 6B
aauauuaauaguuaaa

SEQ ID NO: 165735 - RNA, 13 nt, Human herpesvirus 6B
aauauuaauuaca

SEQ ID NO: 165736 - RNA, 22 nt, Human herpesvirus 6B
aauaugguuccacuuggaagac

SEQ ID NO: 165737 - RNA, 19 nt, Human herpesvirus 6B
aauaaugcucagaugugga

SEQ ID NO: 165738 - RNA, 21 nt, Human herpesvirus 6B
aauaauugcacccuaucaccu

SEQ ID NO: 165739 - RNA, 14 nt, Human herpesvirus 6B
aauaucgaguuuag

SEQ ID NO: 165740 - RNA, 18 nt, Human herpesvirus 6B
aauaucgcgcagaccaua

SEQ ID NO: 165741 - RNA, 16 nt, Human herpesvirus 6B
aauaaaguuugucaca

SEQ ID NO: 165742 - RNA, 13 nt, Human herpesvirus 6B
aauaaagauuuug

SEQ ID NO: 165743 - RNA, 23 nt, Human herpesvirus 6B
aauaaaggauguuugugacucug

SEQ ID NO: 165744 - RNA, 13 nt, Human herpesvirus 6B
aauaaaugaagcu

SEQ ID NO: 165745 - RNA, 24 nt, Human herpesvirus 6B
aaucaacacugccuuaauguaugc

SEQ ID NO: 165746 - RNA, 19 nt, Human herpesvirus 6B
aauauugcaugcauugcga

SEQ ID NO: 165747 - RNA, 15 nt, Human herpesvirus 6B
aaucaaaaaaaugau

SEQ ID NO: 165748 - RNA, 14 nt, Human herpesvirus 6B
aaucaaauaccuaa

SEQ ID NO: 165749 - RNA, 11 nt, Human herpesvirus 6B
aaucaaugagu

SEQ ID NO: 165750 - RNA, 16 nt, Human herpesvirus 6B
aaucacaaaaugauua

SEQ ID NO: 165751 - RNA, 17 nt, Human herpesvirus 6B
aaucaccgacaaacuac

SEQ ID NO: 165752 - RNA, 16 nt, Human herpesvirus 6B
aauccacugcauuuca

SEQ ID NO: 165753 - RNA, 17 nt, Human herpesvirus 6B
aauccacugcauuucau

SEQ ID NO: 165754 - RNA, 19 nt, Human herpesvirus 6B
aaucauucgauuaaugcca

SEQ ID NO: 165755 - RNA, 17 nt, Human herpesvirus 6B
aauccaggaguaaugau

SEQ ID NO: 165756 - RNA, 20 nt, Human herpesvirus 6B
aauccacugcauuucauuuc

SEQ ID NO: 165757 - RNA, 19 nt, Human herpesvirus 6B
aauccaugaacuacaguga

SEQ ID NO: 165758 - RNA, 21 nt, Human herpesvirus 6B
aaucaucggaggcaccuugug

SEQ ID NO: 165759 - RNA, 18 nt, Human herpesvirus 6B
aaucaugauugcaacaaa

SEQ ID NO: 165760 - RNA, 20 nt, Human herpesvirus 6B
aaucauuaccaguagcacga

SEQ ID NO: 165761 - RNA, 22 nt, Human herpesvirus 6B
aaucauuaccaguagcacgaac

SEQ ID NO: 165762 - RNA, 16 nt, Human herpesvirus 6B
aaggugguugaaauca

SEQ ID NO: 165763 - RNA, 20 nt, Human herpesvirus 6B
aaggugcuuuuagagauuau

SEQ ID NO: 165764 - RNA, 23 nt, Human herpesvirus 6B
aauaaaauguccauucucagaca

SEQ ID NO: 165765 - RNA, 21 nt, Human herpesvirus 6B
aauaaaauguuggcgccaaaa

SEQ ID NO: 165766 - RNA, 12 nt, Human herpesvirus 6B
aauaaaauucac

SEQ ID NO: 165767 - RNA, 16 nt, Human herpesvirus 6B
aauaaacgcugucuca

SEQ ID NO: 165768 - RNA, 13 nt, Human herpesvirus 6B
aaguauuguacuu

SEQ ID NO: 165769 - RNA, 17 nt, Human herpesvirus 6B
aaguauguuuuguacaa

SEQ ID NO: 165770 - RNA, 14 nt, Human herpesvirus 6B
aauaaaaacucaau

SEQ ID NO: 165771 - RNA, 17 nt, Human herpesvirus 6B
aagcaaguuccauuuuc

SEQ ID NO: 165772 - RNA, 17 nt, Human herpesvirus 6B
aagcagcagaugcuuac

SEQ ID NO: 165773 - RNA, 14 nt, Human herpesvirus 6B
aagguacacaauac

SEQ ID NO: 165774 - RNA, 22 nt, Human herpesvirus 6B
aagguacacaauacacaguaga

SEQ ID NO: 165775 - RNA, 16 nt, Human herpesvirus 6B
aaggugacucuucucu

SEQ ID NO: 165776 - RNA, 18 nt, Human herpesvirus 6B
aaggucaaaaaacucagc

SEQ ID NO: 165777 - RNA, 22 nt, Human herpesvirus 6B
aaggucaaaaaacucagccgau

SEQ ID NO: 165778 - RNA, 17 nt, Human herpesvirus 6B
aagauguacgaugaacu

SEQ ID NO: 165779 - RNA, 12 nt, Human herpesvirus 6B
aagaugugauac

SEQ ID NO: 165780 - RNA, 22 nt, Human herpesvirus 6B
aagauguguuaaagaaugcuga

SEQ ID NO: 165781 - RNA, 19 nt, Human herpesvirus 6B
aagauuuaucaaaagccag

SEQ ID NO: 165782 - RNA, 20 nt, Human herpesvirus 6B
aagauuuaucaaaagccaga

SEQ ID NO: 165783 - RNA, 16 nt, Human herpesvirus 6B
aagauuugugugaacg

SEQ ID NO: 165784 - RNA, 17 nt, Human herpesvirus 6B
aagcaaaagucuuauaa

SEQ ID NO: 165785 - RNA, 14 nt, Human herpesvirus 6B
aagcaaacauguau

SEQ ID NO: 165786 - RNA, 16 nt, Human herpesvirus 6B
aagcaaacauguaucc

SEQ ID NO: 165787 - RNA, 18 nt, Human herpesvirus 6B
aaccgauuuaccaccugu

SEQ ID NO: 165788 - RNA, 18 nt, Human herpesvirus 6B
aacccuaaaaucugcuaa

SEQ ID NO: 165789 - RNA, 17 nt, Human herpesvirus 6B
aacccuagacacacaga

SEQ ID NO: 165790 - RNA, 20 nt, Human herpesvirus 6B
aaccgguacgcuucuuucac

SEQ ID NO: 165791 - RNA, 15 nt, Human herpesvirus 6B
aaccgucuacugcac

SEQ ID NO: 165792 - RNA, 13 nt, Human herpesvirus 6B
aaccgcaguuccu

SEQ ID NO: 165793 - RNA, 17 nt, Human herpesvirus 6B
aacccaugcugccuuug

SEQ ID NO: 165794 - RNA, 22 nt, Human herpesvirus 6B
aacccaugcugccuuuggacac

SEQ ID NO: 165795 - RNA, 19 nt, Human herpesvirus 6B
aaccccccacuacuaaagc

SEQ ID NO: 165796 - RNA, 18 nt, Human herpesvirus 6B
aacccauaggugauuuca

SEQ ID NO: 165797 - RNA, 16 nt, Human herpesvirus 6B
aacauaucacuuguau

SEQ ID NO: 165798 - RNA, 17 nt, Human herpesvirus 6B
aacaguuuaccuaucaa

SEQ ID NO: 165799 - RNA, 15 nt, Human herpesvirus 6B
aacauacagaugugu

SEQ ID NO: 165800 - RNA, 12 nt, Human herpesvirus 6B
aacuauuuaaca

SEQ ID NO: 165801 - RNA, 16 nt, Human herpesvirus 6B
aacuauuuaacaucca

SEQ ID NO: 165802 - RNA, 19 nt, Human herpesvirus 6B
aacuauuuaacauccaaaa

SEQ ID NO: 165803 - RNA, 14 nt, Human herpesvirus 6B
aacucccagcauuu

SEQ ID NO: 165804 - RNA, 19 nt, Human herpesvirus 6B
aacuccuuacucauuuuaa

SEQ ID NO: 165805 - RNA, 16 nt, Human herpesvirus 6B
aacucucacggccauu

SEQ ID NO: 165806 - RNA, 18 nt, Human herpesvirus 6B
aacucuaaaaccugcuaa

SEQ ID NO: 165807 - RNA, 19 nt, Human herpesvirus 6B
aacucuuucuauuauguaa

SEQ ID NO: 165808 - RNA, 17 nt, Human herpesvirus 6B
aacgacuuauuacaauu

SEQ ID NO: 165809 - RNA, 19 nt, Human herpesvirus 6B
aacgacaaacauccaaagc

SEQ ID NO: 165810 - RNA, 15 nt, Human herpesvirus 6B
aacgauagaguucau

SEQ ID NO: 165811 - RNA, 20 nt, Human herpesvirus 6B
aacgauagaguucaucuaac

SEQ ID NO: 165812 - RNA, 22 nt, Human herpesvirus 6B
aacgaggcccacuucacguuau

SEQ ID NO: 165813 - RNA, 21 nt, Human herpesvirus 6B
aacgcagcaugaugaucugcu

SEQ ID NO: 165814 - RNA, 19 nt, Human herpesvirus 6B
aacgaucugugaauucuaa

SEQ ID NO: 165815 - RNA, 15 nt, Human herpesvirus 6B
aacgcacuagacauc

SEQ ID NO: 165816 - RNA, 20 nt, Human herpesvirus 6B
aacgcggcaaccgcaguucc

SEQ ID NO: 165817 - RNA, 17 nt, Human herpesvirus 6B
aacuggugucugucuau

SEQ ID NO: 165818 - RNA, 18 nt, Human herpesvirus 6B
aacuggucugcuugcaaa

SEQ ID NO: 165819 - RNA, 23 nt, Human herpesvirus 6B
aacugggugauugggagcucacu

SEQ ID NO: 165820 - RNA, 13 nt, Human herpesvirus 6B
aacuuuugcuuac

SEQ ID NO: 165821 - RNA, 19 nt, Human herpesvirus 6B
aacugacuuauaagucauc

SEQ ID NO: 165822 - RNA, 17 nt, Human herpesvirus 6B
aacugcuggcugagauu

SEQ ID NO: 165823 - RNA, 20 nt, Human herpesvirus 6B
aacugcuggcugagauucac

SEQ ID NO: 165824 - RNA, 24 nt, Human herpesvirus 6B
aacugcuggcugagauucacucua

SEQ ID NO: 165825 - RNA, 19 nt, Human herpesvirus 6B
aacuggcgcgcauguugca

SEQ ID NO: 165826 - RNA, 18 nt, Human herpesvirus 6B
aacugggcgaagaccuau

SEQ ID NO: 165827 - RNA, 17 nt, Human herpesvirus 6B
aagaacaguuuaccuau

SEQ ID NO: 165828 - RNA, 19 nt, Human herpesvirus 6B
aagaacaguuuaccuauca

SEQ ID NO: 165829 - RNA, 18 nt, Human herpesvirus 6B
aagaacagaaucuucuuu

SEQ ID NO: 165830 - RNA, 16 nt, Human herpesvirus 6B
aagaaaaugaauucaa

SEQ ID NO: 165831 - RNA, 16 nt, Human herpesvirus 6B
aagaaaccuucguucu

SEQ ID NO: 165832 - RNA, 13 nt, Human herpesvirus 6B
aagaaaaguuuau

SEQ ID NO: 165833 - RNA, 15 nt, Human herpesvirus 6B
aagauagacagugaa

SEQ ID NO: 165834 - RNA, 18 nt, Human herpesvirus 6B
aagaguuucauccugacc

SEQ ID NO: 165835 - RNA, 17 nt, Human herpesvirus 6B
aagaguuuuccuugaca

SEQ ID NO: 165836 - RNA, 16 nt, Human herpesvirus 6B
aagauacacugcaaga

SEQ ID NO: 165837 - RNA, 22 nt, Human herpesvirus 6B
aagagugcacgaaaguggaugu

SEQ ID NO: 165838 - RNA, 15 nt, Human herpesvirus 6B
aagaggaggaaaaga

SEQ ID NO: 165839 - RNA, 13 nt, Human herpesvirus 6B
aagaggagaccau

SEQ ID NO: 165840 - RNA, 13 nt, Human herpesvirus 6B
aagacguuugcuu

SEQ ID NO: 165841 - RNA, 14 nt, Human herpesvirus 6B
aagacuacagacuc

SEQ ID NO: 165842 - RNA, 20 nt, Human herpesvirus 6B
aagacuacagacuccucacc

SEQ ID NO: 165843 - RNA, 17 nt, Human herpesvirus 6B
aagacgcuugcuguuuu

SEQ ID NO: 165844 - RNA, 14 nt, Human herpesvirus 6B
aagacgaucucaua

SEQ ID NO: 165845 - RNA, 17 nt, Human herpesvirus 6B
aagacauuaauacuggu

SEQ ID NO: 165846 - RNA, 18 nt, Human herpesvirus 6B
aagacauuaauacugguu

SEQ ID NO: 165847 - RNA, 21 nt, Human herpesvirus 6B
aagacuuauaauauuccugaa

SEQ ID NO: 165848 - RNA, 14 nt, Human herpesvirus 6B
aagagauuuacugu

SEQ ID NO: 165849 - RNA, 24 nt, Human herpesvirus 6B
aagagauuuacuguuucuuugaca

SEQ ID NO: 165850 - RNA, 22 nt, Human herpesvirus 6B
aagagagucagaaauuguguca

SEQ ID NO: 165851 - RNA, 18 nt, Human herpesvirus 6B
aagagaauacuacaguga

SEQ ID NO: 165852 - RNA, 18 nt, Human herpesvirus 6B
aaaguuucuguggaauuc

SEQ ID NO: 165853 - RNA, 15 nt, Human herpesvirus 6B
aaauaacaugugaca

SEQ ID NO: 165854 - RNA, 21 nt, Human herpesvirus 6B
aaauaacgguguugaguuuau

SEQ ID NO: 165855 - RNA, 19 nt, Human herpesvirus 6B
aaaucagacagguaagcag

SEQ ID NO: 165856 - RNA, 15 nt, Human herpesvirus 6B
aaauauucuacuuca

SEQ ID NO: 165857 - RNA, 15 nt, Human herpesvirus 6B
aaaguagcacgggga

SEQ ID NO: 165858 - RNA, 20 nt, Human herpesvirus 6B
aaauaaaaaaaaagacauca

SEQ ID NO: 165859 - RNA, 16 nt, Human herpesvirus 6B
aaauaaaacaguauaa

SEQ ID NO: 165860 - RNA, 17 nt, Human herpesvirus 6B
aaaguuuaaguucucac

SEQ ID NO: 165861 - RNA, 16 nt, Human herpesvirus 6B
aaaguucaucuuucaa

SEQ ID NO: 165862 - RNA, 23 nt, Human herpesvirus 6B
aaaguucggaucugugacaauuc

SEQ ID NO: 165863 - RNA, 15 nt, Human herpesvirus 6B
aaaguggauguggau

SEQ ID NO: 165864 - RNA, 20 nt, Human herpesvirus 6B
aaacuccuuacucauuuuaa

SEQ ID NO: 165865 - RNA, 22 nt, Human herpesvirus 6B
aaacucagccgauaaauuugcc

SEQ ID NO: 165866 - RNA, 23 nt, Human herpesvirus 6B
aaacucagccgauaaauuugcca

SEQ ID NO: 165867 - RNA, 17 nt, Human herpesvirus 6B
aaacucgacuucuuuca

SEQ ID NO: 165868 - RNA, 18 nt, Human herpesvirus 6B
aaacucgacuucuuucau

SEQ ID NO: 165869 - RNA, 20 nt, Human herpesvirus 6B
aaacuaugaaaaccuuucaa

SEQ ID NO: 165870 - RNA, 13 nt, Human herpesvirus 6B
aaacucaacugcu

SEQ ID NO: 165871 - RNA, 21 nt, Human herpesvirus 6B
aaacuauuaauaaaccgcuua

SEQ ID NO: 165872 - RNA, 16 nt, Human herpesvirus 6B
aaacuaugugcauucc

SEQ ID NO: 165873 - RNA, 18 nt, Human herpesvirus 6B
aaagguucaaacaaugca

SEQ ID NO: 165874 - RNA, 22 nt, Human herpesvirus 6B
aaaggugaucguggacaguaaa

SEQ ID NO: 165875 - RNA, 14 nt, Human herpesvirus 6B
aaacgguaaauuca

SEQ ID NO: 165876 - RNA, 15 nt, Human herpesvirus 6B
aaacgguaaauucaa

SEQ ID NO: 165877 - RNA, 14 nt, Human herpesvirus 6B
aaacuaacaugaca

SEQ ID NO: 165878 - RNA, 15 nt, Human herpesvirus 6B
aaacgaauagcauuc

SEQ ID NO: 165879 - RNA, 17 nt, Human herpesvirus 6B
aaaccuucguucugaua

SEQ ID NO: 165880 - RNA, 24 nt, Human herpesvirus 6B
aaacgacccgaugguacgguguuu

SEQ ID NO: 165881 - RNA, 21 nt, Human herpesvirus 6B
aaacgaccugaucacagagaa

SEQ ID NO: 165882 - RNA, 19 nt, Human herpesvirus 6B
aaaccucaaaaaugcacaa

SEQ ID NO: 165883 - RNA, 18 nt, Human herpesvirus 6B
aaaccuauuagauguccu

SEQ ID NO: 165884 - RNA, 14 nt, Human herpesvirus 6B
aaaccucaaaaaug

SEQ ID NO: 165885 - RNA, 15 nt, Human herpesvirus 6B
aaaccuucccuauca

SEQ ID NO: 165886 - RNA, 18 nt, Human herpesvirus 6B
aaaccuucccuaucacaa

SEQ ID NO: 165887 - RNA, 23 nt, Human herpesvirus 6B
aaauggcucagagaaguggaacu

SEQ ID NO: 165888 - RNA, 12 nt, Human herpesvirus 6B
aaauguagcaaa

SEQ ID NO: 165889 - RNA, 12 nt, Human herpesvirus 6B
aaaugugucuua

SEQ ID NO: 165890 - RNA, 15 nt, Human herpesvirus 6B
aaaugugaacaguau

SEQ ID NO: 165891 - RNA, 22 nt, Human herpesvirus 6B
aaaugugaacaguauaaauucu

SEQ ID NO: 165892 - RNA, 12 nt, Human herpesvirus 6B
aaauguauugaa

SEQ ID NO: 165893 - RNA, 16 nt, Human herpesvirus 6B
aaaugucgaaucucaa

SEQ ID NO: 165894 - RNA, 12 nt, Human herpesvirus 6B
aaaucaaugagu

SEQ ID NO: 165895 - RNA, 15 nt, Human herpesvirus 6B
aaaucaugucuuaca

SEQ ID NO: 165896 - RNA, 14 nt, Human herpesvirus 6B
aaauccagcaaucc

SEQ ID NO: 165897 - RNA, 16 nt, Human herpesvirus 6B
aaauccagcaauccaa

SEQ ID NO: 165898 - RNA, 17 nt, Human herpesvirus 6B
aaaucgcgccauaucac

SEQ ID NO: 165899 - RNA, 21 nt, Human herpesvirus 6B
aaauguaaacacgaaacugcu

SEQ ID NO: 165900 - RNA, 12 nt, Human herpesvirus 6B
aaauuacauaag

SEQ ID NO: 165901 - RNA, 22 nt, Human herpesvirus 6B
aaauuacaugaaaacauucaga

SEQ ID NO: 165902 - RNA, 12 nt, Human herpesvirus 6B
aaauuaauucaa

SEQ ID NO: 165903 - RNA, 15 nt, Human herpesvirus 6B
aaauuacaauuaugc

SEQ ID NO: 165904 - RNA, 20 nt, Human herpesvirus 6B
aaauuaaaguuuacugugau

SEQ ID NO: 165905 - RNA, 19 nt, Human herpesvirus 6B
aacaacugccgccauauua

SEQ ID NO: 165906 - RNA, 15 nt, Human herpesvirus 6B
aacaagaauguaaaa

SEQ ID NO: 165907 - RNA, 22 nt, Human herpesvirus 6B
aacaccguccuucguucuuuca

SEQ ID NO: 165908 - RNA, 16 nt, Human herpesvirus 6B
aacacgaaaugaacga

SEQ ID NO: 165909 - RNA, 21 nt, Human herpesvirus 6B
aacacgauccaauuacaucaa

SEQ ID NO: 165910 - RNA, 14 nt, Human herpesvirus 6B
aacacaccugccua

SEQ ID NO: 165911 - RNA, 16 nt, Human herpesvirus 6B
aacaccaguacuucaa

SEQ ID NO: 165912 - RNA, 15 nt, Human herpesvirus 6B
aacaauaauugcauu

SEQ ID NO: 165913 - RNA, 18 nt, Human herpesvirus 6B
aacaagguaagcaccuua

SEQ ID NO: 165914 - RNA, 17 nt, Human herpesvirus 6B
aacaaggaacgauaugc

SEQ ID NO: 165915 - RNA, 18 nt, Human herpesvirus 6B
aacaaggaacgauaugcu

SEQ ID NO: 165916 - RNA, 21 nt, Human herpesvirus 6B
aacaaggaacgauaugcugcc

SEQ ID NO: 165917 - RNA, 22 nt, Human herpesvirus 6B
uagcuccuaaauaccauuuuau

SEQ ID NO: 165918 - RNA, 14 nt, Human herpesvirus 6B
uagcucuaaugcua

SEQ ID NO: 165919 - RNA, 15 nt, Human herpesvirus 6B
uagcucuaaugcuag

SEQ ID NO: 165920 - RNA, 23 nt, Human herpesvirus 6B
uagcucuaaugcuagauaacuca

SEQ ID NO: 165921 - RNA, 17 nt, Human herpesvirus 6B
uaggaaaugaugauuaa

SEQ ID NO: 165922 - RNA, 17 nt, Human herpesvirus 6B
uaggaagaucaugacaa

SEQ ID NO: 165923 - RNA, 14 nt, Human herpesvirus 6B
uagcuuugacaaac

SEQ ID NO: 165924 - RNA, 11 nt, Human herpesvirus 6B
uagcuuuucau

SEQ ID NO: 165925 - RNA, 15 nt, Human herpesvirus 6B
uagcuuuucauauga

SEQ ID NO: 165926 - RNA, 21 nt, Human herpesvirus 6B
uagcuuuucauaugaaaagcu

SEQ ID NO: 165927 - RNA, 17 nt, Human herpesvirus 6B
uagcuagacgugucuuc

SEQ ID NO: 165928 - RNA, 12 nt, Human herpesvirus 6B
uaggcuguuuaa

SEQ ID NO: 165929 - RNA, 17 nt, Human herpesvirus 6B
uaggaucgaacucuucg

SEQ ID NO: 165930 - RNA, 22 nt, Human herpesvirus 6B
uaggauguuugggagaucugag

SEQ ID NO: 165931 - RNA, 16 nt, Human herpesvirus 6B
uaggggagagacaucc

SEQ ID NO: 165932 - RNA, 20 nt, Human herpesvirus 6B
uagguaaaauggcugugcua

SEQ ID NO: 165933 - RNA, 13 nt, Human herpesvirus 6B
uaggugauuucaa

SEQ ID NO: 165934 - RNA, 17 nt, Human herpesvirus 6B
uaggucuuuaucccauc

SEQ ID NO: 165935 - RNA, 23 nt, Human herpesvirus 6B
uauaaaaaaaacuaaaacaucag

SEQ ID NO: 165936 - RNA, 12 nt, Human herpesvirus 6B
uauaaaaacaca

SEQ ID NO: 165937 - RNA, 19 nt, Human herpesvirus 6B
uaguuagaugcuuaacuua

SEQ ID NO: 165938 - RNA, 20 nt, Human herpesvirus 6B
uagugcugaggcucuacgau

SEQ ID NO: 165939 - RNA, 21 nt, Human herpesvirus 6B
uagugcucaagcgaagucaug

SEQ ID NO: 165940 - RNA, 18 nt, Human herpesvirus 6B
uagugauuauggugccuc

SEQ ID NO: 165941 - RNA, 13 nt, Human herpesvirus 6B
uagugcaguaugu

SEQ ID NO: 165942 - RNA, 16 nt, Human herpesvirus 6B
uaguaauaauagguua

SEQ ID NO: 165943 - RNA, 13 nt, Human herpesvirus 6B
uagucaugcacuc

SEQ ID NO: 165944 - RNA, 13 nt, Human herpesvirus 6B
uagucaauggugu

SEQ ID NO: 165945 - RNA, 19 nt, Human herpesvirus 6B
uagcagcgcccgaugccaa

SEQ ID NO: 165946 - RNA, 18 nt, Human herpesvirus 6B
uagcaugggugaguguau

SEQ ID NO: 165947 - RNA, 15 nt, Human herpesvirus 6B
uagcagaaguuuacc

SEQ ID NO: 165948 - RNA, 21 nt, Human herpesvirus 6B
uagcccuucaccgucucugaa

SEQ ID NO: 165949 - RNA, 14 nt, Human herpesvirus 6B
uagccacaaaauaa

SEQ ID NO: 165950 - RNA, 17 nt, Human herpesvirus 6B
uagccagggcauucaca

SEQ ID NO: 165951 - RNA, 19 nt, Human herpesvirus 6B
uagauggguaagugccuau

SEQ ID NO: 165952 - RNA, 23 nt, Human herpesvirus 6B
uagauguaacucaucaacguaag

SEQ ID NO: 165953 - RNA, 18 nt, Human herpesvirus 6B
uagaugcuuaacuuacuu

SEQ ID NO: 165954 - RNA, 21 nt, Human herpesvirus 6B
uagaugcuuaacuuacuuaau

SEQ ID NO: 165955 - RNA, 20 nt, Human herpesvirus 6B
uagauggaaaacugcagauu

SEQ ID NO: 165956 - RNA, 22 nt, Human herpesvirus 6B
uagauuaggggagagacauccg

SEQ ID NO: 165957 - RNA, 18 nt, Human herpesvirus 6B
uagauucggaaaccauag

SEQ ID NO: 165958 - RNA, 20 nt, Human herpesvirus 6B
uagauuuauuagccgugaug

SEQ ID NO: 165959 - RNA, 23 nt, Human herpesvirus 6B
uagauuuguccguauacagcuaa

SEQ ID NO: 165960 - RNA, 17 nt, Human herpesvirus 6B
uagauaauuuccaauag

SEQ ID NO: 165961 - RNA, 14 nt, Human herpesvirus 6B
uagaucugccaugg

SEQ ID NO: 165962 - RNA, 16 nt, Human herpesvirus 6B
uagaugaucagcauuc

SEQ ID NO: 165963 - RNA, 18 nt, Human herpesvirus 6B
uagaugaucagcauucac

SEQ ID NO: 165964 - RNA, 16 nt, Human herpesvirus 6B
uagauaagagaguuuc

SEQ ID NO: 165965 - RNA, 21 nt, Human herpesvirus 6B
uacuuguaaacuggucugcuu

SEQ ID NO: 165966 - RNA, 14 nt, Human herpesvirus 6B
uagaaaacucgcca

SEQ ID NO: 165967 - RNA, 15 nt, Human herpesvirus 6B
uagaaaaaagugcaa

SEQ ID NO: 165968 - RNA, 20 nt, Human herpesvirus 6B
aacaauguccaauuacucaa

SEQ ID NO: 165969 - RNA, 20 nt, Human herpesvirus 6B
uacuuaaacggaauuaacaa

SEQ ID NO: 165970 - RNA, 19 nt, Human herpesvirus 6B
uacuuaauaacuacacuua

SEQ ID NO: 165971 - RNA, 20 nt, Human herpesvirus 6B
uacuuaauaacuacacuuau

SEQ ID NO: 165972 - RNA, 13 nt, Human herpesvirus 6B
uacuuacaacuga

SEQ ID NO: 165973 - RNA, 15 nt, Human herpesvirus 6B
uacuuacguguguau

SEQ ID NO: 165974 - RNA, 21 nt, Human herpesvirus 6B
uagagaaaauuauagcuucaa

SEQ ID NO: 165975 - RNA, 17 nt, Human herpesvirus 6B
uagacuaaacuuaacuu

SEQ ID NO: 165976 - RNA, 18 nt, Human herpesvirus 6B
uagacuaaacuuaacuua

SEQ ID NO: 165977 - RNA, 16 nt, Human herpesvirus 6B
uagaccgaguaucacg

SEQ ID NO: 165978 - RNA, 17 nt, Human herpesvirus 6B
uagacauuuugugauuc

SEQ ID NO: 165979 - RNA, 14 nt, Human herpesvirus 6B
uagaccaaccagca

SEQ ID NO: 165980 - RNA, 21 nt, Human herpesvirus 6B
uaccgauaaauccgauagcca

SEQ ID NO: 165981 - RNA, 14 nt, Human herpesvirus 6B
uaccgaugcucuca

SEQ ID NO: 165982 - RNA, 13 nt, Human herpesvirus 6B
uaccauguugcuu

SEQ ID NO: 165983 - RNA, 18 nt, Human herpesvirus 6B
uacccagcagcaaauaaa

SEQ ID NO: 165984 - RNA, 22 nt, Human herpesvirus 6B
uaccaacauguauucuccucaa

SEQ ID NO: 165985 - RNA, 24 nt, Human herpesvirus 6B
uacacuuuuccagugagaacauau

SEQ ID NO: 165986 - RNA, 16 nt, Human herpesvirus 6B
uacacucauuugcaau

SEQ ID NO: 165987 - RNA, 18 nt, Human herpesvirus 6B
uacacucauuugcaauug

SEQ ID NO: 165988 - RNA, 22 nt, Human herpesvirus 6B
uacacucucguagucgcauuug

SEQ ID NO: 165989 - RNA, 12 nt, Human herpesvirus 6B
uacacuaugagu

SEQ ID NO: 165990 - RNA, 20 nt, Human herpesvirus 6B
uacacguauguacuccgggg

SEQ ID NO: 165991 - RNA, 21 nt, Human herpesvirus 6B
uacuaaguuuugagugcuauu

SEQ ID NO: 165992 - RNA, 16 nt, Human herpesvirus 6B
uacuacgugucucagu

SEQ ID NO: 165993 - RNA, 19 nt, Human herpesvirus 6B
uacuaccuauaaacccaga

SEQ ID NO: 165994 - RNA, 22 nt, Human herpesvirus 6B
uacuauauauacaagccaugac

SEQ ID NO: 165995 - RNA, 19 nt, Human herpesvirus 6B
uacuauaacuuuucuauca

SEQ ID NO: 165996 - RNA, 21 nt, Human herpesvirus 6B
uacuauaacuuuucuaucacu

SEQ ID NO: 165997 - RNA, 23 nt, Human herpesvirus 6B
uacuauaacuuuucuaucacuua

SEQ ID NO: 165998 - RNA, 18 nt, Human herpesvirus 6B
aacaauaaauuacugcca

SEQ ID NO: 165999 - RNA, 22 nt, Human herpesvirus 6B
uaacccaugaaaaucauuacca

SEQ ID NO: 166000 - RNA, 19 nt, Human herpesvirus 6B
uaauaguauugucugauau

SEQ ID NO: 166001 - RNA, 13 nt, Human herpesvirus 6B
uaauauaaauucu

SEQ ID NO: 166002 - RNA, 16 nt, Human herpesvirus 6B
uaaucuuguagcucag

SEQ ID NO: 166003 - RNA, 18 nt, Human herpesvirus 6B
uaaucuuguagcucagug

SEQ ID NO: 166004 - RNA, 13 nt, Human herpesvirus 6B
uaauccacugcau

SEQ ID NO: 166005 - RNA, 15 nt, Human herpesvirus 6B
uaauccacugcauuu

SEQ ID NO: 166006 - RNA, 18 nt, Human herpesvirus 6B
uaaucgcaaaaacauguu

SEQ ID NO: 166007 - RNA, 20 nt, Human herpesvirus 6B
uaaucgcaaaaacauguugu

SEQ ID NO: 166008 - RNA, 17 nt, Human herpesvirus 6B
uaaucaugauugcaaca

SEQ ID NO: 166009 - RNA, 19 nt, Human herpesvirus 6B
uaaucaugauugcaacaaa

SEQ ID NO: 166010 - RNA, 15 nt, Human herpesvirus 6B
uaaucaaugucacaa

SEQ ID NO: 166011 - RNA, 22 nt, Human herpesvirus 6B
uacacgccgucuucaaccuguu

SEQ ID NO: 166012 - RNA, 17 nt, Human herpesvirus 6B
uacacgaaaaacauuuc

SEQ ID NO: 166013 - RNA, 19 nt, Human herpesvirus 6B
uacacauucuccuuguaaa

SEQ ID NO: 166014 - RNA, 17 nt, Human herpesvirus 6B
uacaaaaucaaacucac

SEQ ID NO: 166015 - RNA, 21 nt, Human herpesvirus 6B
uacaaaccuucccuaucacaa

SEQ ID NO: 166016 - RNA, 13 nt, Human herpesvirus 6B
uaauuuccaauag

SEQ ID NO: 166017 - RNA, 14 nt, Human herpesvirus 6B
uaauuuuuguagca

SEQ ID NO: 166018 - RNA, 19 nt, Human herpesvirus 6B
uaauuuggguugugcugua

SEQ ID NO: 166019 - RNA, 20 nt, Human herpesvirus 6B
uaauuuuaucaugcccuaau

SEQ ID NO: 166020 - RNA, 15 nt, Human herpesvirus 6B
uaaugcggaacauug

SEQ ID NO: 166021 - RNA, 20 nt, Human herpesvirus 6B
uaauggcauucaccggugau

SEQ ID NO: 166022 - RNA, 17 nt, Human herpesvirus 6B
uaaugcaugauggugcu

SEQ ID NO: 166023 - RNA, 21 nt, Human herpesvirus 6B
uaaugauuggaaucacaaaau

SEQ ID NO: 166024 - RNA, 22 nt, Human herpesvirus 6B
uaaucauucgauuaaugccaca

SEQ ID NO: 166025 - RNA, 22 nt, Human herpesvirus 6B
guuugacgguucaccacuguga

SEQ ID NO: 166026 - RNA, 14 nt, Human herpesvirus 6B
guuucuguuuuucu

SEQ ID NO: 166027 - RNA, 18 nt, Human herpesvirus 6B
guuucuguggaauuccaa

SEQ ID NO: 166028 - RNA, 12 nt, Human herpesvirus 6B
guuuccugcaac

SEQ ID NO: 166029 - RNA, 13 nt, Human herpesvirus 6B
guuucgcugcuau

SEQ ID NO: 166030 - RNA, 15 nt, Human herpesvirus 6B
guuuccgggcauguu

SEQ ID NO: 166031 - RNA, 19 nt, Human herpesvirus 6B
guuucuccgcacgcuagca

SEQ ID NO: 166032 - RNA, 20 nt, Human herpesvirus 6B
guuucucgaaaauacaauga

SEQ ID NO: 166033 - RNA, 16 nt, Human herpesvirus 6B
guuucggcaacugaau

SEQ ID NO: 166034 - RNA, 22 nt, Human herpesvirus 6B
guuucugaaaauaaaguugaau

SEQ ID NO: 166035 - RNA, 16 nt, Human herpesvirus 6B
guuugccaaccaaaug

SEQ ID NO: 166036 - RNA, 17 nt, Human herpesvirus 6B
guuugcgggaugccaua

SEQ ID NO: 166037 - RNA, 20 nt, Human herpesvirus 6B
guuugucuugcaaacagcuu

SEQ ID NO: 166038 - RNA, 14 nt, Human herpesvirus 6B
guuugugacucuga

SEQ ID NO: 166039 - RNA, 14 nt, Human herpesvirus 6B
guuuuaaacauucu

SEQ ID NO: 166040 - RNA, 20 nt, Human herpesvirus 6B
guuuucuguaggcaacuuaa

SEQ ID NO: 166041 - RNA, 17 nt, Human herpesvirus 6B
guuuugggaaaucugac

SEQ ID NO: 166042 - RNA, 15 nt, Human herpesvirus 6B
guuuucaaugugaau

SEQ ID NO: 166043 - RNA, 14 nt, Human herpesvirus 6B
guuuguacauguua

SEQ ID NO: 166044 - RNA, 19 nt, Human herpesvirus 6B
guuuuuacuugaugcaugu

SEQ ID NO: 166045 - RNA, 21 nt, Human herpesvirus 6B
guuuuuucaccccccucuugc

SEQ ID NO: 166046 - RNA, 15 nt, Human herpesvirus 6B
guuuuuucugcaaaa

SEQ ID NO: 166047 - RNA, 21 nt, Human herpesvirus 6B
guuuuugaugugcuacguaac

SEQ ID NO: 166048 - RNA, 15 nt, Human herpesvirus 6B
guuuuuugugcaaac

SEQ ID NO: 166049 - RNA, 22 nt, Human herpesvirus 6B
uaaaaaaaaaaacacaccauca

SEQ ID NO: 166050 - RNA, 13 nt, Human herpesvirus 6B
guuauacuggcaa

SEQ ID NO: 166051 - RNA, 18 nt, Human herpesvirus 6B
guuauacuggcaaagcaa

SEQ ID NO: 166052 - RNA, 18 nt, Human herpesvirus 6B
guuaucgauuuauaccac

SEQ ID NO: 166053 - RNA, 15 nt, Human herpesvirus 6B
guuaucuuauguaua

SEQ ID NO: 166054 - RNA, 16 nt, Human herpesvirus 6B
guuaucggcauugaua

SEQ ID NO: 166055 - RNA, 22 nt, Human herpesvirus 6B
guugcgacaucgucuccuauau

SEQ ID NO: 166056 - RNA, 13 nt, Human herpesvirus 6B
guugcuauagcag

SEQ ID NO: 166057 - RNA, 17 nt, Human herpesvirus 6B
guugcucguagccauau

SEQ ID NO: 166058 - RNA, 20 nt, Human herpesvirus 6B
guuguuucaguuucaaauac

SEQ ID NO: 166059 - RNA, 23 nt, Human herpesvirus 6B
guugucuuuguccuauguuaaca

SEQ ID NO: 166060 - RNA, 11 nt, Human herpesvirus 6B
guugugaucaa

SEQ ID NO: 166061 - RNA, 22 nt, Human herpesvirus 6B
guuguguuugaaacguugugcu

SEQ ID NO: 166062 - RNA, 22 nt, Human herpesvirus 6B
guuuauuuugucagucaaugca

SEQ ID NO: 166063 - RNA, 13 nt, Human herpesvirus 6B
guuucaguuucaa

SEQ ID NO: 166064 - RNA, 15 nt, Human herpesvirus 6B
guuucaccaugucca

SEQ ID NO: 166065 - RNA, 20 nt, Human herpesvirus 6B
guuucacuucuaguguuauu

SEQ ID NO: 166066 - RNA, 20 nt, Human herpesvirus 6B
guuuccaggcagaguuuugu

SEQ ID NO: 166067 - RNA, 19 nt, Human herpesvirus 6B
guuuauugucaaauagcca

SEQ ID NO: 166068 - RNA, 19 nt, Human herpesvirus 6B
guuuaucguuuuuauucau

SEQ ID NO: 166069 - RNA, 14 nt, Human herpesvirus 6B
guuuaaugcauuca

SEQ ID NO: 166070 - RNA, 20 nt, Human herpesvirus 6B
guuuauaugcaggugcugcu

SEQ ID NO: 166071 - RNA, 17 nt, Human herpesvirus 6B
guuuacugugauuucac

SEQ ID NO: 166072 - RNA, 23 nt, Human herpesvirus 6B
uaaaaacuaaugcggaacauugu

SEQ ID NO: 166073 - RNA, 20 nt, Human herpesvirus 6B
uaaaaaagugcaugaugaac

SEQ ID NO: 166074 - RNA, 13 nt, Human herpesvirus 6B
uaaaaacaccucu

SEQ ID NO: 166075 - RNA, 21 nt, Human herpesvirus 6B
uaaaaacacacaucauauccu

SEQ ID NO: 166076 - RNA, 12 nt, Human herpesvirus 6B
uaaaacaagacc

SEQ ID NO: 166077 - RNA, 19 nt, Human herpesvirus 6B
uaaaaauuucagccgauga

SEQ ID NO: 166078 - RNA, 21 nt, Human herpesvirus 6B
uaaaaauuucagccgaugaua

SEQ ID NO: 166079 - RNA, 14 nt, Human herpesvirus 6B
uaaaaaugaucgcc

SEQ ID NO: 166080 - RNA, 15 nt, Human herpesvirus 6B
uaaacaaaccgccuu

SEQ ID NO: 166081 - RNA, 14 nt, Human herpesvirus 6B
uaaacaugauugua

SEQ ID NO: 166082 - RNA, 16 nt, Human herpesvirus 6B
uaaacaucgcuccaua

SEQ ID NO: 166083 - RNA, 23 nt, Human herpesvirus 6B
uaaacaguuauacuggcaaagca

SEQ ID NO: 166084 - RNA, 19 nt, Human herpesvirus 6B
uaaaauuaccucaucccuu

SEQ ID NO: 166085 - RNA, 19 nt, Human herpesvirus 6B
uaaaauuuuuaaacagauu

SEQ ID NO: 166086 - RNA, 23 nt, Human herpesvirus 6B
uaaaaugcuccuagggaauuuaa

SEQ ID NO: 166087 - RNA, 17 nt, Human herpesvirus 6B
uaaaauggcugugcuau

SEQ ID NO: 166088 - RNA, 14 nt, Human herpesvirus 6B
uaaaaucugcuaac

SEQ ID NO: 166089 - RNA, 22 nt, Human herpesvirus 6B
uaaaaucugcuaacggagcaac

SEQ ID NO: 166090 - RNA, 16 nt, Human herpesvirus 6B
uaaagcgugugauuca

SEQ ID NO: 166091 - RNA, 18 nt, Human herpesvirus 6B
uaaagauguagcuggaua

SEQ ID NO: 166092 - RNA, 19 nt, Human herpesvirus 6B
uaaagauuuggaggugaga

SEQ ID NO: 166093 - RNA, 14 nt, Human herpesvirus 6B
uaaaggauguuugu

SEQ ID NO: 166094 - RNA, 20 nt, Human herpesvirus 6B
uaaaggauguuugugacucu

SEQ ID NO: 166095 - RNA, 14 nt, Human herpesvirus 6B
uaaaucaugucuua

SEQ ID NO: 166096 - RNA, 14 nt, Human herpesvirus 6B
uaaaucgccauaau

SEQ ID NO: 166097 - RNA, 18 nt, Human herpesvirus 6B
uaaaucgcgagacagauc

SEQ ID NO: 166098 - RNA, 13 nt, Human herpesvirus 6B
uaaauugaauaca

SEQ ID NO: 166099 - RNA, 20 nt, Human herpesvirus 6B
uaaauugaugaaauugugac

SEQ ID NO: 166100 - RNA, 22 nt, Human herpesvirus 6B
uaaauugaugaaauugugacua

SEQ ID NO: 166101 - RNA, 12 nt, Human herpesvirus 6B
uaaauuugccac

SEQ ID NO: 166102 - RNA, 18 nt, Human herpesvirus 6B
uaaauuugccaccagaua

SEQ ID NO: 166103 - RNA, 14 nt, Human herpesvirus 6B
uaaauuuaacuaag

SEQ ID NO: 166104 - RNA, 22 nt, Human herpesvirus 6B
uaacaaaaugguuaugacaaag

SEQ ID NO: 166105 - RNA, 15 nt, Human herpesvirus 6B
uaaaugucaaagaaa

SEQ ID NO: 166106 - RNA, 14 nt, Human herpesvirus 6B
uaaauucucugcau

SEQ ID NO: 166107 - RNA, 17 nt, Human herpesvirus 6B
uaaauucaaacuccgaa

SEQ ID NO: 166108 - RNA, 18 nt, Human herpesvirus 6B
uaaaugacacagaaucua

SEQ ID NO: 166109 - RNA, 15 nt, Human herpesvirus 6B
gucgcacacacaaga

SEQ ID NO: 166110 - RNA, 19 nt, Human herpesvirus 6B
gucgaaacgaaagcugaua

SEQ ID NO: 166111 - RNA, 20 nt, Human herpesvirus 6B
guccuccauccgucauguaa

SEQ ID NO: 166112 - RNA, 15 nt, Human herpesvirus 6B
guccuauguuaacau

SEQ ID NO: 166113 - RNA, 23 nt, Human herpesvirus 6B
guccuauguuaacauugugagaa

SEQ ID NO: 166114 - RNA, 22 nt, Human herpesvirus 6B
guccugaaauaacacgcugcug

SEQ ID NO: 166115 - RNA, 18 nt, Human herpesvirus 6B
guccuucaugauauucca

SEQ ID NO: 166116 - RNA, 13 nt, Human herpesvirus 6B
guacacaauacac

SEQ ID NO: 166117 - RNA, 14 nt, Human herpesvirus 6B
guacacagucacac

SEQ ID NO: 166118 - RNA, 10 nt, Human herpesvirus 6B
guacagugaa

SEQ ID NO: 166119 - RNA, 13 nt, Human herpesvirus 6B
guaccaacaugua

SEQ ID NO: 166120 - RNA, 14 nt, Human herpesvirus 6B
guaccaacauguau

SEQ ID NO: 166121 - RNA, 13 nt, Human herpesvirus 6B
gucucugucuucc

SEQ ID NO: 166122 - RNA, 22 nt, Human herpesvirus 6B
gucucugugaagaggugcaaau

SEQ ID NO: 166123 - RNA, 23 nt, Human herpesvirus 6B
gucugacaagcuguccaucuuca

SEQ ID NO: 166124 - RNA, 13 nt, Human herpesvirus 6B
gucucucuuugcg

SEQ ID NO: 166125 - RNA, 14 nt, Human herpesvirus 6B
gucugauacuugaa

SEQ ID NO: 166126 - RNA, 20 nt, Human herpesvirus 6B
gucugcaguggucaugaucu

SEQ ID NO: 166127 - RNA, 17 nt, Human herpesvirus 6B
gucugcuaaaaaucauc

SEQ ID NO: 166128 - RNA, 22 nt, Human herpesvirus 6B
gucuacuguguauuguguaccu

SEQ ID NO: 166129 - RNA, 15 nt, Human herpesvirus 6B
gucuacgcauucacu

SEQ ID NO: 166130 - RNA, 15 nt, Human herpesvirus 6B
gucguuguguccuga

SEQ ID NO: 166131 - RNA, 17 nt, Human herpesvirus 6B
gucuaugacaauugcag

SEQ ID NO: 166132 - RNA, 14 nt, Human herpesvirus 6B
gucggcgcguuuau

SEQ ID NO: 166133 - RNA, 17 nt, Human herpesvirus 6B
gugaaucugcugaucuu

SEQ ID NO: 166134 - RNA, 12 nt, Human herpesvirus 6B
gugaauuccugg

SEQ ID NO: 166135 - RNA, 16 nt, Human herpesvirus 6B
gugaagaggugcaaau

SEQ ID NO: 166136 - RNA, 16 nt, Human herpesvirus 6B
gugacaucggcuugga

SEQ ID NO: 166137 - RNA, 16 nt, Human herpesvirus 6B
gugcuauuaacacaua

SEQ ID NO: 166138 - RNA, 18 nt, Human herpesvirus 6B
gugcuauuaacacauaca

SEQ ID NO: 166139 - RNA, 17 nt, Human herpesvirus 6B
gugcuauuugcauuaag

SEQ ID NO: 166140 - RNA, 12 nt, Human herpesvirus 6B
gugcuucugcuc

SEQ ID NO: 166141 - RNA, 22 nt, Human herpesvirus 6B
guggaaaaaagucaccuguaua

SEQ ID NO: 166142 - RNA, 14 nt, Human herpesvirus 6B
guuagaugcuuaac

SEQ ID NO: 166143 - RNA, 15 nt, Human herpesvirus 6B
guuacgauuugcuau

SEQ ID NO: 166144 - RNA, 22 nt, Human herpesvirus 6B
gugugucgaauguuacagauac

SEQ ID NO: 166145 - RNA, 14 nt, Human herpesvirus 6B
guguguguugugcg

SEQ ID NO: 166146 - RNA, 12 nt, Human herpesvirus 6B
guguucgccaua

SEQ ID NO: 166147 - RNA, 15 nt, Human herpesvirus 6B
guguucgccauauaa

SEQ ID NO: 166148 - RNA, 16 nt, Human herpesvirus 6B
gugugccuacuuugga

SEQ ID NO: 166149 - RNA, 20 nt, Human herpesvirus 6B
gugugccuauuaaugcuuau

SEQ ID NO: 166150 - RNA, 14 nt, Human herpesvirus 6B
gugugacuuauaua

SEQ ID NO: 166151 - RNA, 18 nt, Human herpesvirus 6B
uauaagucuaaugcaaag

SEQ ID NO: 166152 - RNA, 20 nt, Human herpesvirus 6B
uauucccauggcgacucaaa

SEQ ID NO: 166153 - RNA, 19 nt, Human herpesvirus 6B
uauuccaggcaauaaucau

SEQ ID NO: 166154 - RNA, 21 nt, Human herpesvirus 6B
uauucucaauauucaugcgcu

SEQ ID NO: 166155 - RNA, 19 nt, Human herpesvirus 6B
uauucuggcgaugcagaug

SEQ ID NO: 166156 - RNA, 12 nt, Human herpesvirus 6B
uauucuaaauac

SEQ ID NO: 166157 - RNA, 18 nt, Human herpesvirus 6B
uauaaaaacacacaucau

SEQ ID NO: 166158 - RNA, 16 nt, Human herpesvirus 6B
uauaaaaacuaaugcg

SEQ ID NO: 166159 - RNA, 15 nt, Human herpesvirus 6B
uauaaaaguccucaa

SEQ ID NO: 166160 - RNA, 18 nt, Human herpesvirus 6B
uauaacaccaguacuuca

SEQ ID NO: 166161 - RNA, 20 nt, Human herpesvirus 6B
uauaaauguagcacacgaca

SEQ ID NO: 166162 - RNA, 22 nt, Human herpesvirus 6B
uauaaauguagcacacgacaaa

SEQ ID NO: 166163 - RNA, 19 nt, Human herpesvirus 6B
uauuuguuuaaugcauuca

SEQ ID NO: 166164 - RNA, 12 nt, Human herpesvirus 6B
uauugcaugcau

SEQ ID NO: 166165 - RNA, 21 nt, Human herpesvirus 6B
uauuuuggcaaaaagacccca

SEQ ID NO: 166166 - RNA, 16 nt, Human herpesvirus 6B
uauuuuuuugugugua

SEQ ID NO: 166167 - RNA, 18 nt, Human herpesvirus 6B
uauuuuuuugugugugua

SEQ ID NO: 166168 - RNA, 22 nt, Human herpesvirus 6B
uauuuucaauaucaccuuacaa

SEQ ID NO: 166169 - RNA, 22 nt, Human herpesvirus 6B
ucaaaaagaaugggauugucau

SEQ ID NO: 166170 - RNA, 13 nt, Human herpesvirus 6B
ucaaaucucgccg

SEQ ID NO: 166171 - RNA, 21 nt, Human herpesvirus 6B
ucaaaacggggguugaaauuu

SEQ ID NO: 166172 - RNA, 14 nt, Human herpesvirus 6B
ucaaaagcaugaaa

SEQ ID NO: 166173 - RNA, 15 nt, Human herpesvirus 6B
ucaacaauguccaau

SEQ ID NO: 166174 - RNA, 16 nt, Human herpesvirus 6B
ucaacacaacgacaaa

SEQ ID NO: 166175 - RNA, 22 nt, Human herpesvirus 6B
ucaacacaacgacaaacaucca

SEQ ID NO: 166176 - RNA, 22 nt, Human herpesvirus 6B
ucaaauuuguguuuauuugcuc

SEQ ID NO: 166177 - RNA, 17 nt, Human herpesvirus 6B
ucaacacgugcgacaaa

SEQ ID NO: 166178 - RNA, 16 nt, Human herpesvirus 6B
ucaauaaacauuucau

SEQ ID NO: 166179 - RNA, 14 nt, Human herpesvirus 6B
ucacacgcauagau

SEQ ID NO: 166180 - RNA, 15 nt, Human herpesvirus 6B
ucacaccaaugauca

SEQ ID NO: 166181 - RNA, 16 nt, Human herpesvirus 6B
ucacaccaaugaucac

SEQ ID NO: 166182 - RNA, 14 nt, Human herpesvirus 6B
ucaauauucaugcg

SEQ ID NO: 166183 - RNA, 15 nt, Human herpesvirus 6B
ucacaugccaugcaa

SEQ ID NO: 166184 - RNA, 13 nt, Human herpesvirus 6B
ucacaguguuucc

SEQ ID NO: 166185 - RNA, 17 nt, Human herpesvirus 6B
ucacaaggaaugugcag

SEQ ID NO: 166186 - RNA, 15 nt, Human herpesvirus 6B
ucacaaaucuguaag

SEQ ID NO: 166187 - RNA, 17 nt, Human herpesvirus 6B
ucacaaaucuguaagau

SEQ ID NO: 166188 - RNA, 18 nt, Human herpesvirus 6B
ucacacacaaugugcuua

SEQ ID NO: 166189 - RNA, 13 nt, Human herpesvirus 6B
ucacaauacacag

SEQ ID NO: 166190 - RNA, 16 nt, Human herpesvirus 6B
ucacaauacacagaaa

SEQ ID NO: 166191 - RNA, 12 nt, Human herpesvirus 6B
ucacaacaugau

SEQ ID NO: 166192 - RNA, 14 nt, Human herpesvirus 6B
ucaauacuacgugu

SEQ ID NO: 166193 - RNA, 17 nt, Human herpesvirus 6B
ucaauaucaccuuacaa

SEQ ID NO: 166194 - RNA, 17 nt, Human herpesvirus 6B
ucagcacccucugcaag

SEQ ID NO: 166195 - RNA, 12 nt, Human herpesvirus 6B
ucagcauucacu

SEQ ID NO: 166196 - RNA, 14 nt, Human herpesvirus 6B
ucagaucaucgcca

SEQ ID NO: 166197 - RNA, 21 nt, Human herpesvirus 6B
ucagauauauacuuacuugag

SEQ ID NO: 166198 - RNA, 21 nt, Human herpesvirus 6B
ucagagaaguggaacugcuug

SEQ ID NO: 166199 - RNA, 16 nt, Human herpesvirus 6B
ucagagcgggcuauaa

SEQ ID NO: 166200 - RNA, 17 nt, Human herpesvirus 6B
ucacguuauuacauaga

SEQ ID NO: 166201 - RNA, 12 nt, Human herpesvirus 6B
ucacuaacuuca

SEQ ID NO: 166202 - RNA, 16 nt, Human herpesvirus 6B
ucacgucccauucaca

SEQ ID NO: 166203 - RNA, 15 nt, Human herpesvirus 6B
ucacgcauagaccaa

SEQ ID NO: 166204 - RNA, 22 nt, Human herpesvirus 6B
ucacggacgaaaguucaucuuu

SEQ ID NO: 166205 - RNA, 14 nt, Human herpesvirus 6B
ucacauuaccucug

SEQ ID NO: 166206 - RNA, 16 nt, Human herpesvirus 6B
ucaccaacauucggaa

SEQ ID NO: 166207 - RNA, 20 nt, Human herpesvirus 6B
ucacgagaucugcucauguc

SEQ ID NO: 166208 - RNA, 15 nt, Human herpesvirus 6B
uccggaguugcagua

SEQ ID NO: 166209 - RNA, 17 nt, Human herpesvirus 6B
uccggaauuguucuuca

SEQ ID NO: 166210 - RNA, 19 nt, Human herpesvirus 6B
ucccuaugucaaugugaau

SEQ ID NO: 166211 - RNA, 23 nt, Human herpesvirus 6B
uccgcagaggcggcgaccacagc

SEQ ID NO: 166212 - RNA, 19 nt, Human herpesvirus 6B
uccccuauauagcuauccu

SEQ ID NO: 166213 - RNA, 17 nt, Human herpesvirus 6B
uccauuuuuucccaaaa

SEQ ID NO: 166214 - RNA, 15 nt, Human herpesvirus 6B
ucccaaaauauaauu

SEQ ID NO: 166215 - RNA, 19 nt, Human herpesvirus 6B
ucccaaaagacuauguagu

SEQ ID NO: 166216 - RNA, 15 nt, Human herpesvirus 6B
uccaugagcacccgc

SEQ ID NO: 166217 - RNA, 16 nt, Human herpesvirus 6B
uccaugcgaguagauu

SEQ ID NO: 166218 - RNA, 16 nt, Human herpesvirus 6B
uccauuaaauccuaga

SEQ ID NO: 166219 - RNA, 20 nt, Human herpesvirus 6B
uccauccgcuaagagauuua

SEQ ID NO: 166220 - RNA, 15 nt, Human herpesvirus 6B
uccagaaguccuuca

SEQ ID NO: 166221 - RNA, 20 nt, Human herpesvirus 6B
uccagaauacgaacagaaau

SEQ ID NO: 166222 - RNA, 17 nt, Human herpesvirus 6B
uccagaaaagcaaacau

SEQ ID NO: 166223 - RNA, 14 nt, Human herpesvirus 6B
uccacugcauuuca

SEQ ID NO: 166224 - RNA, 18 nt, Human herpesvirus 6B
uccaaggauuaugaucau

SEQ ID NO: 166225 - RNA, 17 nt, Human herpesvirus 6B
uccaauaagaaacauua

SEQ ID NO: 166226 - RNA, 18 nt, Human herpesvirus 6B
uccaauaagaaacauuau

SEQ ID NO: 166227 - RNA, 19 nt, Human herpesvirus 6B
uccaauaagaaacauuaua

SEQ ID NO: 166228 - RNA, 20 nt, Human herpesvirus 6B
uccacgugcuugucugacaa

SEQ ID NO: 166229 - RNA, 16 nt, Human herpesvirus 6B
ucauguuuauugucaa

SEQ ID NO: 166230 - RNA, 20 nt, Human herpesvirus 6B
ucauuaaauuguuuuaaaca

SEQ ID NO: 166231 - RNA, 17 nt, Human herpesvirus 6B
ucauuccaguccaauga

SEQ ID NO: 166232 - RNA, 15 nt, Human herpesvirus 6B
ucaugcuucuuuuau

SEQ ID NO: 166233 - RNA, 19 nt, Human herpesvirus 6B
uccaaaagauuauggcaac

SEQ ID NO: 166234 - RNA, 14 nt, Human herpesvirus 6B
uccaaacuacggaa

SEQ ID NO: 166235 - RNA, 15 nt, Human herpesvirus 6B
ucauuguuucacuuc

SEQ ID NO: 166236 - RNA, 12 nt, Human herpesvirus 6B
ucauuugcaauu

SEQ ID NO: 166237 - RNA, 14 nt, Human herpesvirus 6B
ucauuucaaauaca

SEQ ID NO: 166238 - RNA, 18 nt, Human herpesvirus 6B
ucauuucaaauacaccuc

SEQ ID NO: 166239 - RNA, 20 nt, Human herpesvirus 6B
ucauuuacaaaacaaauauc

SEQ ID NO: 166240 - RNA, 16 nt, Human herpesvirus 6B
ucauacaauauuucca

SEQ ID NO: 166241 - RNA, 18 nt, Human herpesvirus 6B
ucauacccgauguucucu

SEQ ID NO: 166242 - RNA, 20 nt, Human herpesvirus 6B
ucauacccgauguucucuca

SEQ ID NO: 166243 - RNA, 21 nt, Human herpesvirus 6B
ucauacagacauugcuuucuc

SEQ ID NO: 166244 - RNA, 13 nt, Human herpesvirus 6B
ucauacauccaga

SEQ ID NO: 166245 - RNA, 15 nt, Human herpesvirus 6B
ucauaacgagaaaga

SEQ ID NO: 166246 - RNA, 15 nt, Human herpesvirus 6B
ucauaacguacauaa

SEQ ID NO: 166247 - RNA, 14 nt, Human herpesvirus 6B
ucauaaacaaaccg

SEQ ID NO: 166248 - RNA, 15 nt, Human herpesvirus 6B
ucagucucagcaauc

SEQ ID NO: 166249 - RNA, 23 nt, Human herpesvirus 6B
ucagucugcuaaaaaucaucucg

SEQ ID NO: 166250 - RNA, 10 nt, Human herpesvirus 6B
ucagucaaug

SEQ ID NO: 166251 - RNA, 20 nt, Human herpesvirus 6B
ucaguguucuggcuugucau

SEQ ID NO: 166252 - RNA, 13 nt, Human herpesvirus 6B
ucagucaaaaucu

SEQ ID NO: 166253 - RNA, 20 nt, Human herpesvirus 6B
ucaguaugucucaguucaaa

SEQ ID NO: 166254 - RNA, 15 nt, Human herpesvirus 6B
ucaucagccauuucg

SEQ ID NO: 166255 - RNA, 23 nt, Human herpesvirus 6B
ucaucagccauuucgccaaaaau

SEQ ID NO: 166256 - RNA, 12 nt, Human herpesvirus 6B
ucaucauacaau

SEQ ID NO: 166257 - RNA, 20 nt, Human herpesvirus 6B
ucaugauauuccaggcaaua

SEQ ID NO: 166258 - RNA, 16 nt, Human herpesvirus 6B
ucaugaucugcuugau

SEQ ID NO: 166259 - RNA, 13 nt, Human herpesvirus 6B
ucaugauugcaac

SEQ ID NO: 166260 - RNA, 16 nt, Human herpesvirus 6B
ucaugcacuccguuaa

SEQ ID NO: 166261 - RNA, 15 nt, Human herpesvirus 6B
ucaucacaugccaug

SEQ ID NO: 166262 - RNA, 19 nt, Human herpesvirus 6B
ucauagauuucauacugua

SEQ ID NO: 166263 - RNA, 15 nt, Human herpesvirus 6B
ucauaggugugcgaa

SEQ ID NO: 166264 - RNA, 14 nt, Human herpesvirus 6B
ucuguguauuguga

SEQ ID NO: 166265 - RNA, 21 nt, Human herpesvirus 6B
ucugugcgucuauuagauaag

SEQ ID NO: 166266 - RNA, 15 nt, Human herpesvirus 6B
ucugugcaacacaac

SEQ ID NO: 166267 - RNA, 17 nt, Human herpesvirus 6B
ucugugcaacacaacaa

SEQ ID NO: 166268 - RNA, 17 nt, Human herpesvirus 6B
ucugugaagaggugcaa

SEQ ID NO: 166269 - RNA, 13 nt, Human herpesvirus 6B
ucuucagacauca

SEQ ID NO: 166270 - RNA, 13 nt, Human herpesvirus 6B
ucugccuguucaa

SEQ ID NO: 166271 - RNA, 16 nt, Human herpesvirus 6B
ucugcaaaaacaaaug

SEQ ID NO: 166272 - RNA, 15 nt, Human herpesvirus 6B
ucugcaaaacaaaag

SEQ ID NO: 166273 - RNA, 13 nt, Human herpesvirus 6B
ucugcaagcucau

SEQ ID NO: 166274 - RNA, 17 nt, Human herpesvirus 6B
ucuguaggcaacuuaag

SEQ ID NO: 166275 - RNA, 16 nt, Human herpesvirus 6B
ucuguaugaauccaga

SEQ ID NO: 166276 - RNA, 13 nt, Human herpesvirus 6B
ucugcucauguca

SEQ ID NO: 166277 - RNA, 21 nt, Human herpesvirus 6B
ucugcugcuucuucuuuuccu

SEQ ID NO: 166278 - RNA, 17 nt, Human herpesvirus 6B
ucugcucucgaugaaag

SEQ ID NO: 166279 - RNA, 21 nt, Human herpesvirus 6B
ucuauuagauaagagaguuuc

SEQ ID NO: 166280 - RNA, 15 nt, Human herpesvirus 6B
ucuauuauguaaaac

SEQ ID NO: 166281 - RNA, 21 nt, Human herpesvirus 6B
ucucaagcacaaaaccaggaa

SEQ ID NO: 166282 - RNA, 14 nt, Human herpesvirus 6B
ucucaagcacaaaa

SEQ ID NO: 166283 - RNA, 22 nt, Human herpesvirus 6B
ucucaaauuuuccaaacauuau

SEQ ID NO: 166284 - RNA, 12 nt, Human herpesvirus 6B
ucucagauauau

SEQ ID NO: 166285 - RNA, 15 nt, Human herpesvirus 6B
ucucaggugagauuc

SEQ ID NO: 166286 - RNA, 21 nt, Human herpesvirus 6B
ucucaaugcggguacuauaga

SEQ ID NO: 166287 - RNA, 20 nt, Human herpesvirus 6B
ucucuuuauagagcaauuca

SEQ ID NO: 166288 - RNA, 14 nt, Human herpesvirus 6B
ucugaaagacauaa

SEQ ID NO: 166289 - RNA, 16 nt, Human herpesvirus 6B
ucugaaagucucuguc

SEQ ID NO: 166290 - RNA, 18 nt, Human herpesvirus 6B
ucugaagcaaaagucuua

SEQ ID NO: 166291 - RNA, 15 nt, Human herpesvirus 6B
ucugaauuuaaugca

SEQ ID NO: 166292 - RNA, 22 nt, Human herpesvirus 6B
ucugacaagcuguccaucuuca

SEQ ID NO: 166293 - RNA, 17 nt, Human herpesvirus 6B
ucugagauuugagaaag

SEQ ID NO: 166294 - RNA, 16 nt, Human herpesvirus 6B
ucugacucucuuucag

SEQ ID NO: 166295 - RNA, 13 nt, Human herpesvirus 6B
ucugauauggcaa

SEQ ID NO: 166296 - RNA, 12 nt, Human herpesvirus 6B
ucugauacuuga

SEQ ID NO: 166297 - RNA, 23 nt, Human herpesvirus 6B
ucugaucccuuagaagcuuucaa

SEQ ID NO: 166298 - RNA, 14 nt, Human herpesvirus 6B
ucugagcagaggua

SEQ ID NO: 166299 - RNA, 17 nt, Human herpesvirus 6B
ucgucauaccgauccca

SEQ ID NO: 166300 - RNA, 20 nt, Human herpesvirus 6B
ucguauaaauuuaacuaaga

SEQ ID NO: 166301 - RNA, 16 nt, Human herpesvirus 6B
ucgguuucgcugcuau

SEQ ID NO: 166302 - RNA, 18 nt, Human herpesvirus 6B
ucguaaccauucugcaga

SEQ ID NO: 166303 - RNA, 22 nt, Human herpesvirus 6B
ucguaauggcauucaccgguga

SEQ ID NO: 166304 - RNA, 22 nt, Human herpesvirus 6B
ucggagcuuccgucacaacauu

SEQ ID NO: 166305 - RNA, 12 nt, Human herpesvirus 6B
ucguaaccauuc

SEQ ID NO: 166306 - RNA, 18 nt, Human herpesvirus 6B
ucgugauccgaauccuga

SEQ ID NO: 166307 - RNA, 14 nt, Human herpesvirus 6B
ucgucuacuccgau

SEQ ID NO: 166308 - RNA, 19 nt, Human herpesvirus 6B
ucguggucguugguguuua

SEQ ID NO: 166309 - RNA, 17 nt, Human herpesvirus 6B
ucguguguguguaugcu

SEQ ID NO: 166310 - RNA, 22 nt, Human herpesvirus 6B
ucguguucgccauauaagucua

SEQ ID NO: 166311 - RNA, 16 nt, Human herpesvirus 6B
ucguguucguugucug

SEQ ID NO: 166312 - RNA, 17 nt, Human herpesvirus 6B
ucgucggauuaaaucau

SEQ ID NO: 166313 - RNA, 21 nt, Human herpesvirus 6B
ucuacguauaaaaguccucaa

SEQ ID NO: 166314 - RNA, 13 nt, Human herpesvirus 6B
ucuauguacugau

SEQ ID NO: 166315 - RNA, 14 nt, Human herpesvirus 6B
ucuauguacugauc

SEQ ID NO: 166316 - RNA, 18 nt, Human herpesvirus 6B
ucuacaccaggaguuuaa

SEQ ID NO: 166317 - RNA, 13 nt, Human herpesvirus 6B
ucuacaugccaca

SEQ ID NO: 166318 - RNA, 14 nt, Human herpesvirus 6B
ucuacaugccacag

SEQ ID NO: 166319 - RNA, 15 nt, Human herpesvirus 6B
uccguauucuugagc

SEQ ID NO: 166320 - RNA, 17 nt, Human herpesvirus 6B
uccgggggaaaccucaa

SEQ ID NO: 166321 - RNA, 15 nt, Human herpesvirus 6B
uccgucucaguguca

SEQ ID NO: 166322 - RNA, 12 nt, Human herpesvirus 6B
uccgucauguaa

SEQ ID NO: 166323 - RNA, 22 nt, Human herpesvirus 6B
uccguuaaucuaauaaaauaca

SEQ ID NO: 166324 - RNA, 17 nt, Human herpesvirus 6B
uccguuuuuucugcaaa

SEQ ID NO: 166325 - RNA, 17 nt, Human herpesvirus 6B
uccgugacacacagaau

SEQ ID NO: 166326 - RNA, 19 nt, Human herpesvirus 6B
uccucaacacucucaaugu

SEQ ID NO: 166327 - RNA, 23 nt, Human herpesvirus 6B
ucgcuaaauugaauacagcugca

SEQ ID NO: 166328 - RNA, 14 nt, Human herpesvirus 6B
uccucaccgaaauc

SEQ ID NO: 166329 - RNA, 14 nt, Human herpesvirus 6B
uccucagucuucaa

SEQ ID NO: 166330 - RNA, 16 nt, Human herpesvirus 6B
ugacauuuaccagaga

SEQ ID NO: 166331 - RNA, 18 nt, Human herpesvirus 6B
ugacaugagcuaaaccau

SEQ ID NO: 166332 - RNA, 23 nt, Human herpesvirus 6B
ugacauugcguuuugacaugagc

SEQ ID NO: 166333 - RNA, 21 nt, Human herpesvirus 6B
ugacaucacgucccauucaca

SEQ ID NO: 166334 - RNA, 22 nt, Human herpesvirus 6B
ugacaucacgucccauucacau

SEQ ID NO: 166335 - RNA, 23 nt, Human herpesvirus 6B
ugaccguaggaagaucaugacaa

SEQ ID NO: 166336 - RNA, 20 nt, Human herpesvirus 6B
ugacgaccauacguggugau

SEQ ID NO: 166337 - RNA, 15 nt, Human herpesvirus 6B
ugacagcgagacaau

SEQ ID NO: 166338 - RNA, 12 nt, Human herpesvirus 6B
ugacacaaucag

SEQ ID NO: 166339 - RNA, 21 nt, Human herpesvirus 6B
ugacacaauuucugacucucu

SEQ ID NO: 166340 - RNA, 14 nt, Human herpesvirus 6B
ugacacacagaaua

SEQ ID NO: 166341 - RNA, 21 nt, Human herpesvirus 6B
ugacacacagaauacaaaaac

SEQ ID NO: 166342 - RNA, 15 nt, Human herpesvirus 6B
ugacaccacauaaca

SEQ ID NO: 166343 - RNA, 16 nt, Human herpesvirus 6B
ugacaccacauaacaa

SEQ ID NO: 166344 - RNA, 24 nt, Human herpesvirus 6B
ugacaaguuucuuuugugacuaua

SEQ ID NO: 166345 - RNA, 21 nt, Human herpesvirus 6B
ugaagaggugcaaaugcucaa

SEQ ID NO: 166346 - RNA, 13 nt, Human herpesvirus 6B
ugaagaugugaua

SEQ ID NO: 166347 - RNA, 18 nt, Human herpesvirus 6B
ugaagaugacagcgagac

SEQ ID NO: 166348 - RNA, 14 nt, Human herpesvirus 6B
ugaagcaaaagucu

SEQ ID NO: 166349 - RNA, 19 nt, Human herpesvirus 6B
ugaagcaucccuaugucaa

SEQ ID NO: 166350 - RNA, 19 nt, Human herpesvirus 6B
ugaagcuuucaucaaucac

SEQ ID NO: 166351 - RNA, 19 nt, Human herpesvirus 6B
ugaaggacuaucugagaca

SEQ ID NO: 166352 - RNA, 24 nt, Human herpesvirus 6B
ugaaggacuaucugagacagucaa

SEQ ID NO: 166353 - RNA, 16 nt, Human herpesvirus 6B
ugaaucaaauaccuaa

SEQ ID NO: 166354 - RNA, 21 nt, Human herpesvirus 6B
ugaaucaaauaccuaauucca

SEQ ID NO: 166355 - RNA, 16 nt, Human herpesvirus 6B
ugaauauuaguauuag

SEQ ID NO: 166356 - RNA, 18 nt, Human herpesvirus 6B
ugaaugaacgcacuagac

SEQ ID NO: 166357 - RNA, 14 nt, Human herpesvirus 6B
ugaauguaugagga

SEQ ID NO: 166358 - RNA, 13 nt, Human herpesvirus 6B
ugaaugaucacua

SEQ ID NO: 166359 - RNA, 15 nt, Human herpesvirus 6B
ugaauggaguaaauu

SEQ ID NO: 166360 - RNA, 23 nt, Human herpesvirus 6B
ugaauuuuuguccgccauugggu

SEQ ID NO: 166361 - RNA, 24 nt, Human herpesvirus 6B
ugacaaauacgagagcugacugaa

SEQ ID NO: 166362 - RNA, 12 nt, Human herpesvirus 6B
ugaauguguuca

SEQ ID NO: 166363 - RNA, 23 nt, Human herpesvirus 6B
ugaauguuucugauuuguucuag

SEQ ID NO: 166364 - RNA, 17 nt, Human herpesvirus 6B
ugaauguuugacuguuc

SEQ ID NO: 166365 - RNA, 17 nt, Human herpesvirus 6B
ugaacgacuuauuacaa

SEQ ID NO: 166366 - RNA, 14 nt, Human herpesvirus 6B
ugaacagagauuuu

SEQ ID NO: 166367 - RNA, 13 nt, Human herpesvirus 6B
ugaacaggugcuu

SEQ ID NO: 166368 - RNA, 15 nt, Human herpesvirus 6B
ugaagaauaagccua

SEQ ID NO: 166369 - RNA, 17 nt, Human herpesvirus 6B
ugaacuacugagugcga

SEQ ID NO: 166370 - RNA, 16 nt, Human herpesvirus 6B
ugaacgcagcguaaua

SEQ ID NO: 166371 - RNA, 19 nt, Human herpesvirus 6B
ugaaagucucugucuuccc

SEQ ID NO: 166372 - RNA, 20 nt, Human herpesvirus 6B
ugaaauuuaauaaaguuugu

SEQ ID NO: 166373 - RNA, 15 nt, Human herpesvirus 6B
ugaaauggcuaacgu

SEQ ID NO: 166374 - RNA, 16 nt, Human herpesvirus 6B
ugaaacguugugcuga

SEQ ID NO: 166375 - RNA, 16 nt, Human herpesvirus 6B
ugaaagcuucauuuau

SEQ ID NO: 166376 - RNA, 15 nt, Human herpesvirus 6B
ugaaagaguaccgaa

SEQ ID NO: 166377 - RNA, 23 nt, Human herpesvirus 6B
ugaaagaacaguuuaccuaucaa

SEQ ID NO: 166378 - RNA, 15 nt, Human herpesvirus 6B
ugaaagcagucagua

SEQ ID NO: 166379 - RNA, 20 nt, Human herpesvirus 6B
ucuucgaauaguuucaugau

SEQ ID NO: 166380 - RNA, 19 nt, Human herpesvirus 6B
ucuuaaagcgugugauuca

SEQ ID NO: 166381 - RNA, 16 nt, Human herpesvirus 6B
ucuucuggauacugau

SEQ ID NO: 166382 - RNA, 18 nt, Human herpesvirus 6B
ucuucuggauacugauga

SEQ ID NO: 166383 - RNA, 19 nt, Human herpesvirus 6B
ucuucuggauacugaugaa

SEQ ID NO: 166384 - RNA, 19 nt, Human herpesvirus 6B
ucuuguguucuaacacaua

SEQ ID NO: 166385 - RNA, 22 nt, Human herpesvirus 6B
ucuuguguucuaacacauaguu

SEQ ID NO: 166386 - RNA, 23 nt, Human herpesvirus 6B
ucuuuagauggaaaacugcagau

SEQ ID NO: 166387 - RNA, 20 nt, Human herpesvirus 6B
ucuuucccgugcucaguaag

SEQ ID NO: 166388 - RNA, 19 nt, Human herpesvirus 6B
ucuuucuauuauguaaaac

SEQ ID NO: 166389 - RNA, 16 nt, Human herpesvirus 6B
ugaaaauaaacaguua

SEQ ID NO: 166390 - RNA, 15 nt, Human herpesvirus 6B
ugaaaauaucauuaa

SEQ ID NO: 166391 - RNA, 18 nt, Human herpesvirus 6B
ugaaacacuaagugccgu

SEQ ID NO: 166392 - RNA, 13 nt, Human herpesvirus 6B
ugaaacauaaaau

SEQ ID NO: 166393 - RNA, 17 nt, Human herpesvirus 6B
uguuucuaacaguugua

SEQ ID NO: 166394 - RNA, 14 nt, Human herpesvirus 6B
uguuuacgaaugau

SEQ ID NO: 166395 - RNA, 13 nt, Human herpesvirus 6B
uguuuagugccua

SEQ ID NO: 166396 - RNA, 20 nt, Human herpesvirus 6B
uguuuauaaauggcauugaa

SEQ ID NO: 166397 - RNA, 15 nt, Human herpesvirus 6B
ugucuugcaaacagc

SEQ ID NO: 166398 - RNA, 13 nt, Human herpesvirus 6B
ugucuuacagcuu

SEQ ID NO: 166399 - RNA, 18 nt, Human herpesvirus 6B
ugucuuagaagcauuugc

SEQ ID NO: 166400 - RNA, 22 nt, Human herpesvirus 6B
ugucuuaguguacaaaccaauu

SEQ ID NO: 166401 - RNA, 23 nt, Human herpesvirus 6B
uguugucucuuuauaaacuuaaa

SEQ ID NO: 166402 - RNA, 22 nt, Human herpesvirus 6B
ugucugauauggcaaauuucaa

SEQ ID NO: 166403 - RNA, 21 nt, Human herpesvirus 6B
ugucucuuuauaaacuuaaaa

SEQ ID NO: 166404 - RNA, 16 nt, Human herpesvirus 6B
ugucuuccugugagaa

SEQ ID NO: 166405 - RNA, 14 nt, Human herpesvirus 6B
ugucuccucaugga

SEQ ID NO: 166406 - RNA, 21 nt, Human herpesvirus 6B
ugucguucguuguauguguaa

SEQ ID NO: 166407 - RNA, 16 nt, Human herpesvirus 6B
ugucaaggaaaacucu

SEQ ID NO: 166408 - RNA, 15 nt, Human herpesvirus 6B
ugucaacacgcauga

SEQ ID NO: 166409 - RNA, 19 nt, Human herpesvirus 6B
ugucacugucgaauaucuu

SEQ ID NO: 166410 - RNA, 15 nt, Human herpesvirus 6B
uuaaagcguuuacaa

SEQ ID NO: 166411 - RNA, 17 nt, Human herpesvirus 6B
uuaaacggaauuaacaa

SEQ ID NO: 166412 - RNA, 16 nt, Human herpesvirus 6B
uuaaaguuuacuguga

SEQ ID NO: 166413 - RNA, 17 nt, Human herpesvirus 6B
uguuugccaaccaaaug

SEQ ID NO: 166414 - RNA, 14 nt, Human herpesvirus 6B
uguuucuuugacau

SEQ ID NO: 166415 - RNA, 23 nt, Human herpesvirus 6B
uguuugacgguucaccacuguga

SEQ ID NO: 166416 - RNA, 18 nt, Human herpesvirus 6B
uuaaaauuuuuaaacaga

SEQ ID NO: 166417 - RNA, 21 nt, Human herpesvirus 6B
uuaaacgaaaacuuuuugccg

SEQ ID NO: 166418 - RNA, 22 nt, Human herpesvirus 6B
uuaagauagccagggcauucac

SEQ ID NO: 166419 - RNA, 18 nt, Human herpesvirus 6B
uuaaaugacacagaaucu

SEQ ID NO: 166420 - RNA, 13 nt, Human herpesvirus 6B
uuaauaacuacac

SEQ ID NO: 166421 - RNA, 12 nt, Human herpesvirus 6B
uuaaguucucac

SEQ ID NO: 166422 - RNA, 22 nt, Human herpesvirus 6B
uuaauaaaauaacaugugacac

SEQ ID NO: 166423 - RNA, 15 nt, Human herpesvirus 6B
uuagaugauguugau

SEQ ID NO: 166424 - RNA, 16 nt, Human herpesvirus 6B
uuagauucgagccaaa

SEQ ID NO: 166425 - RNA, 17 nt, Human herpesvirus 6B
uuagcaacaccguccuu

SEQ ID NO: 166426 - RNA, 17 nt, Human herpesvirus 6B
uuagauggaaaacugca

SEQ ID NO: 166427 - RNA, 18 nt, Human herpesvirus 6B
uuagauguaacucaucaa

SEQ ID NO: 166428 - RNA, 17 nt, Human herpesvirus 6B
uuacggggaagaucuau

SEQ ID NO: 166429 - RNA, 21 nt, Human herpesvirus 6B
uuacuaacgacggaauuuacu

SEQ ID NO: 166430 - RNA, 17 nt, Human herpesvirus 6B
uuaggggacagagccua

SEQ ID NO: 166431 - RNA, 16 nt, Human herpesvirus 6B
uuaggguuaggguuag

SEQ ID NO: 166432 - RNA, 17 nt, Human herpesvirus 6B
uuagcaaucauuaacau

SEQ ID NO: 166433 - RNA, 16 nt, Human herpesvirus 6B
uuagcgcuguauguua

SEQ ID NO: 166434 - RNA, 14 nt, Human herpesvirus 6B
uuagcuagacgugu

SEQ ID NO: 166435 - RNA, 15 nt, Human herpesvirus 6B
uuacauauagucaau

SEQ ID NO: 166436 - RNA, 13 nt, Human herpesvirus 6B
uuacauaagcaaa

SEQ ID NO: 166437 - RNA, 13 nt, Human herpesvirus 6B
uuaaucucacaca

SEQ ID NO: 166438 - RNA, 12 nt, Human herpesvirus 6B
uuacaucaaaaa

SEQ ID NO: 166439 - RNA, 19 nt, Human herpesvirus 6B
uuaccgguaaagaacccau

SEQ ID NO: 166440 - RNA, 19 nt, Human herpesvirus 6B
uuaccuaucaacaaugucc

SEQ ID NO: 166441 - RNA, 21 nt, Human herpesvirus 6B
uuaccuaucaacaauguccaa

SEQ ID NO: 166442 - RNA, 19 nt, Human herpesvirus 6B
uuacgauuugcuaugugua

SEQ ID NO: 166443 - RNA, 14 nt, Human herpesvirus 6B
uuaccuuuuaagag

SEQ ID NO: 166444 - RNA, 23 nt, Human herpesvirus 6B
uuaccuuuuaagagugauucaag

SEQ ID NO: 166445 - RNA, 20 nt, Human herpesvirus 6B
uuaccaccuguuuccaaugu

SEQ ID NO: 166446 - RNA, 15 nt, Human herpesvirus 6B
uuauggcaacauacc

SEQ ID NO: 166447 - RNA, 17 nt, Human herpesvirus 6B
uuauggggaagaucuau

SEQ ID NO: 166448 - RNA, 16 nt, Human herpesvirus 6B
uuauguaauuguuaac

SEQ ID NO: 166449 - RNA, 14 nt, Human herpesvirus 6B
uuauuaaaucuuac

SEQ ID NO: 166450 - RNA, 22 nt, Human herpesvirus 6B
uuauucugguaaaaauguaugu

SEQ ID NO: 166451 - RNA, 17 nt, Human herpesvirus 6B
uuauucaccauuacucu

SEQ ID NO: 166452 - RNA, 19 nt, Human herpesvirus 6B
uuaucuccaauagauuuca

SEQ ID NO: 166453 - RNA, 19 nt, Human herpesvirus 6B
uuaugaaaauugcucuauu

SEQ ID NO: 166454 - RNA, 23 nt, Human herpesvirus 6B
uuauauuguuguaaaauacauac

SEQ ID NO: 166455 - RNA, 15 nt, Human herpesvirus 6B
uuaguauacgaaaua

SEQ ID NO: 166456 - RNA, 17 nt, Human herpesvirus 6B
uuaguuagaugcuuaac

SEQ ID NO: 166457 - RNA, 15 nt, Human herpesvirus 6B
uuaucaacuauacuu

SEQ ID NO: 166458 - RNA, 17 nt, Human herpesvirus 6B
uuaucaacuauacuuaa

SEQ ID NO: 166459 - RNA, 21 nt, Human herpesvirus 6B
uuauauuuggggaaaauaccu

SEQ ID NO: 166460 - RNA, 16 nt, Human herpesvirus 6B
uuaucaaagagguacu

SEQ ID NO: 166461 - RNA, 15 nt, Human herpesvirus 6B
uucaccauguccagg

SEQ ID NO: 166462 - RNA, 19 nt, Human herpesvirus 6B
uucaccacugugauaugca

SEQ ID NO: 166463 - RNA, 13 nt, Human herpesvirus 6B
uucaaugugaauc

SEQ ID NO: 166464 - RNA, 23 nt, Human herpesvirus 6B
uucacauuaccucugcaauagca

SEQ ID NO: 166465 - RNA, 15 nt, Human herpesvirus 6B
uucacacaacuuaac

SEQ ID NO: 166466 - RNA, 16 nt, Human herpesvirus 6B
uucacaguguuuccaa

SEQ ID NO: 166467 - RNA, 22 nt, Human herpesvirus 6B
uucaauagaugaucagcauuca

SEQ ID NO: 166468 - RNA, 22 nt, Human herpesvirus 6B
uucauaacagauggcacugaau

SEQ ID NO: 166469 - RNA, 21 nt, Human herpesvirus 6B
uucauacccgauguucucuca

SEQ ID NO: 166470 - RNA, 16 nt, Human herpesvirus 6B
uucaucauuuacaaaa

SEQ ID NO: 166471 - RNA, 23 nt, Human herpesvirus 6B
uucauaaaaacgacauccaucgu

SEQ ID NO: 166472 - RNA, 16 nt, Human herpesvirus 6B
uucaucaaauccucua

SEQ ID NO: 166473 - RNA, 19 nt, Human herpesvirus 6B
uucaucagccauuucgcca

SEQ ID NO: 166474 - RNA, 14 nt, Human herpesvirus 6B
uucaguaagauuua

SEQ ID NO: 166475 - RNA, 20 nt, Human herpesvirus 6B
uucagucucagcaaucacca

SEQ ID NO: 166476 - RNA, 14 nt, Human herpesvirus 6B
uucaguauagacau

SEQ ID NO: 166477 - RNA, 17 nt, Human herpesvirus 6B
uucagguugccaauaaa

SEQ ID NO: 166478 - RNA, 19 nt, Human herpesvirus 6B
uucaugauauuccaggcaa

SEQ ID NO: 166479 - RNA, 14 nt, Human herpesvirus 6B
uucaugauauucca

SEQ ID NO: 166480 - RNA, 14 nt, Human herpesvirus 6B
uucccuaucacaau

SEQ ID NO: 166481 - RNA, 19 nt, Human herpesvirus 6B
uucccgugcucaguaagaa

SEQ ID NO: 166482 - RNA, 22 nt, Human herpesvirus 6B
uuccaugacugugaggugauuu

SEQ ID NO: 166483 - RNA, 18 nt, Human herpesvirus 6B
uuccagugagaacauaua

SEQ ID NO: 166484 - RNA, 20 nt, Human herpesvirus 6B
uuccagugagaacauauaaa

SEQ ID NO: 166485 - RNA, 19 nt, Human herpesvirus 6B
uuccauaaguuaauuccag

SEQ ID NO: 166486 - RNA, 18 nt, Human herpesvirus 6B
uuccauaaguuaauucca

SEQ ID NO: 166487 - RNA, 21 nt, Human herpesvirus 6B
uuccagggaacuugauguuga

SEQ ID NO: 166488 - RNA, 19 nt, Human herpesvirus 6B
uuccaggcaauaaucauua

SEQ ID NO: 166489 - RNA, 18 nt, Human herpesvirus 6B
uuccacaucuaugaugcu

SEQ ID NO: 166490 - RNA, 15 nt, Human herpesvirus 6B
uucauuuguuccgau

SEQ ID NO: 166491 - RNA, 22 nt, Human herpesvirus 6B
uuccaaacuacggaaaaucuca

SEQ ID NO: 166492 - RNA, 18 nt, Human herpesvirus 6B
uuccuuauuucuaaacac

SEQ ID NO: 166493 - RNA, 21 nt, Human herpesvirus 6B
uuccuguccgugagacaccgc

SEQ ID NO: 166494 - RNA, 15 nt, Human herpesvirus 6B
uuccugugaugccuu

SEQ ID NO: 166495 - RNA, 16 nt, Human herpesvirus 6B
uucgcaaaccguccaa

SEQ ID NO: 166496 - RNA, 17 nt, Human herpesvirus 6B
uucgauguacaguuucu

SEQ ID NO: 166497 - RNA, 16 nt, Human herpesvirus 6B
uuccuuuuuguugacu

SEQ ID NO: 166498 - RNA, 22 nt, Human herpesvirus 6B
uuccuuuaugauacaugcgauu

SEQ ID NO: 166499 - RNA, 22 nt, Human herpesvirus 6B
uucguugccggcuaaacuuuac

SEQ ID NO: 166500 - RNA, 19 nt, Human herpesvirus 6B
uucuacauaaaacaggguu

SEQ ID NO: 166501 - RNA, 14 nt, Human herpesvirus 6B
uucuaauucuagau

SEQ ID NO: 166502 - RNA, 14 nt, Human herpesvirus 6B
uucggggacaguga

SEQ ID NO: 166503 - RNA, 16 nt, Human herpesvirus 6B
uucgucugauacuuga

SEQ ID NO: 166504 - RNA, 20 nt, Human herpesvirus 6B
uucguguguguguaugcuuu

SEQ ID NO: 166505 - RNA, 14 nt, Human herpesvirus 6B
uucgugucugagau

SEQ ID NO: 166506 - RNA, 16 nt, Human herpesvirus 6B
uucgccucucccgccg

SEQ ID NO: 166507 - RNA, 13 nt, Human herpesvirus 6B
uucgccauauaag

SEQ ID NO: 166508 - RNA, 13 nt, Human herpesvirus 6B
uucggcugcuuau

SEQ ID NO: 166509 - RNA, 23 nt, Human herpesvirus 6B
uucggauuuguucgauugccaaa

SEQ ID NO: 166510 - RNA, 17 nt, Human herpesvirus 6B
uucucuaaaaacuaaaa

SEQ ID NO: 166511 - RNA, 15 nt, Human herpesvirus 6B
uucucuacaugccac

SEQ ID NO: 166512 - RNA, 17 nt, Human herpesvirus 6B
uucucugcaugucuuua

SEQ ID NO: 166513 - RNA, 17 nt, Human herpesvirus 6B
uucucuuuuuaauucca

SEQ ID NO: 166514 - RNA, 21 nt, Human herpesvirus 6B
uucucuggggagcuucagguu

SEQ ID NO: 166515 - RNA, 18 nt, Human herpesvirus 6B
uucucgugcgcaguguua

SEQ ID NO: 166516 - RNA, 23 nt, Human herpesvirus 6B
uucuagguacggcgucacacagc

SEQ ID NO: 166517 - RNA, 14 nt, Human herpesvirus 6B
uucuaguguuauuc

SEQ ID NO: 166518 - RNA, 23 nt, Human herpesvirus 6B
uucuagcgaucauaaaacugcca

SEQ ID NO: 166519 - RNA, 16 nt, Human herpesvirus 6B
uucugauuauuaucac

SEQ ID NO: 166520 - RNA, 18 nt, Human herpesvirus 6B
uucugguccguugucgaa

SEQ ID NO: 166521 - RNA, 13 nt, Human herpesvirus 6B
uucugugcgucua

SEQ ID NO: 166522 - RNA, 12 nt, Human herpesvirus 6B
uucuuaaggugc

SEQ ID NO: 166523 - RNA, 17 nt, Human herpesvirus 6B
uucuguaggcaacuuaa

SEQ ID NO: 166524 - RNA, 13 nt, Human herpesvirus 6B
uucugucuugacg

SEQ ID NO: 166525 - RNA, 20 nt, Human herpesvirus 6B
uucuuagaaccaaucuguga

SEQ ID NO: 166526 - RNA, 14 nt, Human herpesvirus 6B
uucuucaacauauc

SEQ ID NO: 166527 - RNA, 18 nt, Human herpesvirus 6B
ugccgcagaagacuuuaa

SEQ ID NO: 166528 - RNA, 15 nt, Human herpesvirus 6B
ugcaugucuuuagau

SEQ ID NO: 166529 - RNA, 15 nt, Human herpesvirus 6B
ugcauuaaacaauaa

SEQ ID NO: 166530 - RNA, 11 nt, Human herpesvirus 6B
ugcaugcauug

SEQ ID NO: 166531 - RNA, 16 nt, Human herpesvirus 6B
ugccguguuacugaca

SEQ ID NO: 166532 - RNA, 14 nt, Human herpesvirus 6B
ugccuacauaugcc

SEQ ID NO: 166533 - RNA, 16 nt, Human herpesvirus 6B
ugccuauccuauaaau

SEQ ID NO: 166534 - RNA, 17 nt, Human herpesvirus 6B
ugccuauuaaugcuuau

SEQ ID NO: 166535 - RNA, 14 nt, Human herpesvirus 6B
ugacucuucucuaa

SEQ ID NO: 166536 - RNA, 19 nt, Human herpesvirus 6B
ugacugaaaguuauauucu

SEQ ID NO: 166537 - RNA, 19 nt, Human herpesvirus 6B
ugacucugaaccgcguaug

SEQ ID NO: 166538 - RNA, 22 nt, Human herpesvirus 6B
ugacugcguuacaagcaugcau

SEQ ID NO: 166539 - RNA, 23 nt, Human herpesvirus 6B
ugacugugaggugauuugaacag

SEQ ID NO: 166540 - RNA, 21 nt, Human herpesvirus 6B
ugacgguucaccacugugaua

SEQ ID NO: 166541 - RNA, 16 nt, Human herpesvirus 6B
ugacuaucaaaauaaa

SEQ ID NO: 166542 - RNA, 21 nt, Human herpesvirus 6B
ugcagcuuacggagacggguu

SEQ ID NO: 166543 - RNA, 22 nt, Human herpesvirus 6B
ugcagaugccuguagggaugua

SEQ ID NO: 166544 - RNA, 15 nt, Human herpesvirus 6B
ugcagauuucacuuu

SEQ ID NO: 166545 - RNA, 16 nt, Human herpesvirus 6B
ugcagaagaacaugaa

SEQ ID NO: 166546 - RNA, 13 nt, Human herpesvirus 6B
ugcuauuaacaca

SEQ ID NO: 166547 - RNA, 15 nt, Human herpesvirus 6B
ugcuaguuguaugac

SEQ ID NO: 166548 - RNA, 15 nt, Human herpesvirus 6B
ugcuggcugagauuc

SEQ ID NO: 166549 - RNA, 21 nt, Human herpesvirus 6B
ugcggaacaccagcaugucau

SEQ ID NO: 166550 - RNA, 23 nt, Human herpesvirus 6B
ugcuacguaaccgaugcugauuc

SEQ ID NO: 166551 - RNA, 13 nt, Human herpesvirus 6B
uggaagaaggaaa

SEQ ID NO: 166552 - RNA, 18 nt, Human herpesvirus 6B
ugcuuacuaaguuuugag

SEQ ID NO: 166553 - RNA, 14 nt, Human herpesvirus 6B
ugcuuaacuugcac

SEQ ID NO: 166554 - RNA, 16 nt, Human herpesvirus 6B
ugcuguaguugaugcu

SEQ ID NO: 166555 - RNA, 16 nt, Human herpesvirus 6B
ugcugucugcagcuua

SEQ ID NO: 166556 - RNA, 14 nt, Human herpesvirus 6B
uggaaaacuauuaa

SEQ ID NO: 166557 - RNA, 22 nt, Human herpesvirus 6B
uggaaacguguuugucuguaug

SEQ ID NO: 166558 - RNA, 18 nt, Human herpesvirus 6B
uggaaacuggagcuagag

SEQ ID NO: 166559 - RNA, 11 nt, Human herpesvirus 6B
uggaaaaccuu

SEQ ID NO: 166560 - RNA, 13 nt, Human herpesvirus 6B
uguaaaagagcca

SEQ ID NO: 166561 - RNA, 15 nt, Human herpesvirus 6B
uguaaaauuaccuca

SEQ ID NO: 166562 - RNA, 20 nt, Human herpesvirus 6B
uguaaaaauggcucagagaa

SEQ ID NO: 166563 - RNA, 15 nt, Human herpesvirus 6B
uguaaaaauucacug

SEQ ID NO: 166564 - RNA, 20 nt, Human herpesvirus 6B
ugguacucuuugucuuagaa

SEQ ID NO: 166565 - RNA, 15 nt, Human herpesvirus 6B
ugggauguaaucaau

SEQ ID NO: 166566 - RNA, 16 nt, Human herpesvirus 6B
ugggauggcagauugc

SEQ ID NO: 166567 - RNA, 17 nt, Human herpesvirus 6B
ugggauggcagauugca

SEQ ID NO: 166568 - RNA, 16 nt, Human herpesvirus 6B
ugggagucugcuuuac

SEQ ID NO: 166569 - RNA, 21 nt, Human herpesvirus 6B
ugggguuucaggcggcaugaa

SEQ ID NO: 166570 - RNA, 15 nt, Human herpesvirus 6B
ugggugaaaucgcau

SEQ ID NO: 166571 - RNA, 21 nt, Human herpesvirus 6B
uggguauucauuuuuucgucc

SEQ ID NO: 166572 - RNA, 14 nt, Human herpesvirus 6B
uguaacucuuuaua

SEQ ID NO: 166573 - RNA, 19 nt, Human herpesvirus 6B
uguaacucuuuauauugcu

SEQ ID NO: 166574 - RNA, 14 nt, Human herpesvirus 6B
uguaacucuuucua

SEQ ID NO: 166575 - RNA, 12 nt, Human herpesvirus 6B
uguaaauaugcu

SEQ ID NO: 166576 - RNA, 15 nt, Human herpesvirus 6B
uguagauaauuucca

SEQ ID NO: 166577 - RNA, 12 nt, Human herpesvirus 6B
uguagcuggaua

SEQ ID NO: 166578 - RNA, 18 nt, Human herpesvirus 6B
uguauuucaacgugaauc

SEQ ID NO: 166579 - RNA, 23 nt, Human herpesvirus 6B
uguauuggaauugggaagcauaa

SEQ ID NO: 166580 - RNA, 15 nt, Human herpesvirus 6B
ugucaaagcuacuca

SEQ ID NO: 166581 - RNA, 15 nt, Human herpesvirus 6B
uguaucaaauuuacc

SEQ ID NO: 166582 - RNA, 16 nt, Human herpesvirus 6B
uguaguugaugcuguu

SEQ ID NO: 166583 - RNA, 13 nt, Human herpesvirus 6B
ugggaggagccaa

SEQ ID NO: 166584 - RNA, 23 nt, Human herpesvirus 6B
ugggaguaauuauugugacaagg

SEQ ID NO: 166585 - RNA, 13 nt, Human herpesvirus 6B
ugggagaucugag

SEQ ID NO: 166586 - RNA, 13 nt, Human herpesvirus 6B
ugggagcucacug

SEQ ID NO: 166587 - RNA, 22 nt, Human herpesvirus 6B
ugggaccuucaggaacaaagua

SEQ ID NO: 166588 - RNA, 15 nt, Human herpesvirus 6B
uggcgaaaagugcug

SEQ ID NO: 166589 - RNA, 19 nt, Human herpesvirus 6B
uggcggcgaaacugccauc

SEQ ID NO: 166590 - RNA, 14 nt, Human herpesvirus 6B
uggcggagaaaguu

SEQ ID NO: 166591 - RNA, 15 nt, Human herpesvirus 6B
uggcuagugugccua

SEQ ID NO: 166592 - RNA, 22 nt, Human herpesvirus 6B
uggauaugagugaauugugcaa

SEQ ID NO: 166593 - RNA, 17 nt, Human herpesvirus 6B
uggccgauuaucuuaau

SEQ ID NO: 166594 - RNA, 22 nt, Human herpesvirus 6B
uggagacgaacgcggaaaauca

SEQ ID NO: 166595 - RNA, 18 nt, Human herpesvirus 6B
uggauagagauauaauga

SEQ ID NO: 166596 - RNA, 15 nt, Human herpesvirus 6B
uuuaaguucucacgu

SEQ ID NO: 166597 - RNA, 19 nt, Human herpesvirus 6B
uuuaauccacugcauuuca

SEQ ID NO: 166598 - RNA, 11 nt, Human herpesvirus 6B
uuuagacagag

SEQ ID NO: 166599 - RNA, 22 nt, Human herpesvirus 6B
uuuaauaaaauaacaugugaca

SEQ ID NO: 166600 - RNA, 16 nt, Human herpesvirus 6B
uuuauagagcaauuca

SEQ ID NO: 166601 - RNA, 20 nt, Human herpesvirus 6B
uuuauagagcaauucaucaa

SEQ ID NO: 166602 - RNA, 15 nt, Human herpesvirus 6B
uuuagcagauccaug

SEQ ID NO: 166603 - RNA, 14 nt, Human herpesvirus 6B
uuuagcaguaggac

SEQ ID NO: 166604 - RNA, 12 nt, Human herpesvirus 6B
uuucaguuucaa

SEQ ID NO: 166605 - RNA, 20 nt, Human herpesvirus 6B
uuucaggcggcaugaauucc

SEQ ID NO: 166606 - RNA, 19 nt, Human herpesvirus 6B
uuuauauugcuauagauua

SEQ ID NO: 166607 - RNA, 18 nt, Human herpesvirus 6B
uuuauauuuggcauuaga

SEQ ID NO: 166608 - RNA, 14 nt, Human herpesvirus 6B
uuuaucaaaagcca

SEQ ID NO: 166609 - RNA, 17 nt, Human herpesvirus 6B
uuuaucaaaagccagau

SEQ ID NO: 166610 - RNA, 15 nt, Human herpesvirus 6B
uuuaucgagaccgac

SEQ ID NO: 166611 - RNA, 16 nt, Human herpesvirus 6B
uuuaucggaacacaua

SEQ ID NO: 166612 - RNA, 17 nt, Human herpesvirus 6B
uuucccacagauugcau

SEQ ID NO: 166613 - RNA, 19 nt, Human herpesvirus 6B
uuucccacagauugcauau

SEQ ID NO: 166614 - RNA, 12 nt, Human herpesvirus 6B
uuucccaccuaa

SEQ ID NO: 166615 - RNA, 17 nt, Human herpesvirus 6B
uuucaugauucuuuguc

SEQ ID NO: 166616 - RNA, 15 nt, Human herpesvirus 6B
uuucauuucuccaca

SEQ ID NO: 166617 - RNA, 13 nt, Human herpesvirus 6B
uuuccaaacauua

SEQ ID NO: 166618 - RNA, 16 nt, Human herpesvirus 6B
uugugacaaguuucuu

SEQ ID NO: 166619 - RNA, 16 nt, Human herpesvirus 6B
uugugacgauaguguu

SEQ ID NO: 166620 - RNA, 13 nt, Human herpesvirus 6B
uuguuuuuuacuu

SEQ ID NO: 166621 - RNA, 17 nt, Human herpesvirus 6B
uugucgccucaacacaa

SEQ ID NO: 166622 - RNA, 13 nt, Human herpesvirus 6B
uuuaaaagcgaua

SEQ ID NO: 166623 - RNA, 19 nt, Human herpesvirus 6B
uuuaaaagugcaacaaaga

SEQ ID NO: 166624 - RNA, 13 nt, Human herpesvirus 6B
uucuucgucuucu

SEQ ID NO: 166625 - RNA, 11 nt, Human herpesvirus 6B
uucuucugggc

SEQ ID NO: 166626 - RNA, 21 nt, Human herpesvirus 6B
uucuuucaaaaugaccagaga

SEQ ID NO: 166627 - RNA, 22 nt, Human herpesvirus 6B
uucuuucaaaaugaccagagau

SEQ ID NO: 166628 - RNA, 23 nt, Human herpesvirus 6B
uucuuucuacgguaggcagggaa

SEQ ID NO: 166629 - RNA, 21 nt, Human herpesvirus 6B
uucuuugugcgucagcuuuga

SEQ ID NO: 166630 - RNA, 14 nt, Human herpesvirus 6B
uucuuugacauuua

SEQ ID NO: 166631 - RNA, 21 nt, Human herpesvirus 6B
uucuuuggagauugauuccag

SEQ ID NO: 166632 - RNA, 20 nt, Human herpesvirus 6B
uugucgcauguuuauuucaa

SEQ ID NO: 166633 - RNA, 14 nt, Human herpesvirus 6B
uugucgcacguguu

SEQ ID NO: 166634 - RNA, 23 nt, Human herpesvirus 6B
uugucauucugcauuuauaucaa

SEQ ID NO: 166635 - RNA, 21 nt, Human herpesvirus 6B
uugucagucaaugcaauucca

SEQ ID NO: 166636 - RNA, 23 nt, Human herpesvirus 6B
uugucagucauaauucucauaga

SEQ ID NO: 166637 - RNA, 14 nt, Human herpesvirus 6B
uucuuuuccuccuc

SEQ ID NO: 166638 - RNA, 21 nt, Human herpesvirus 6B
uugucaaauagccacaaaaua

SEQ ID NO: 166639 - RNA, 13 nt, Human herpesvirus 6B
uuucuucgggaug

SEQ ID NO: 166640 - RNA, 17 nt, Human herpesvirus 6B
uuucuucgggauggaga

SEQ ID NO: 166641 - RNA, 16 nt, Human herpesvirus 6B
uuucuguguauuguga

SEQ ID NO: 166642 - RNA, 12 nt, Human herpesvirus 6B
uuucugucuuua

SEQ ID NO: 166643 - RNA, 14 nt, Human herpesvirus 6B
uuuccagugagaac

SEQ ID NO: 166644 - RNA, 14 nt, Human herpesvirus 6B
uuugauugcaauca

SEQ ID NO: 166645 - RNA, 11 nt, Human herpesvirus 6B
uuugcagauaa

SEQ ID NO: 166646 - RNA, 17 nt, Human herpesvirus 6B
uuugccugccgacagau

SEQ ID NO: 166647 - RNA, 13 nt, Human herpesvirus 6B
uuugccauaauca

SEQ ID NO: 166648 - RNA, 14 nt, Human herpesvirus 6B
uuugccgaagauag

SEQ ID NO: 166649 - RNA, 16 nt, Human herpesvirus 6B
uuugacuccaacgcac

SEQ ID NO: 166650 - RNA, 21 nt, Human herpesvirus 6B
uuugacgucugggaucauugu

SEQ ID NO: 166651 - RNA, 21 nt, Human herpesvirus 6B
uuugacuuugcggaaccauac

SEQ ID NO: 166652 - RNA, 18 nt, Human herpesvirus 6B
uuugacauuuaccagaga

SEQ ID NO: 166653 - RNA, 14 nt, Human herpesvirus 6B
uuuuaauuccaagu

SEQ ID NO: 166654 - RNA, 16 nt, Human herpesvirus 6B
uuugcugucacacucu

SEQ ID NO: 166655 - RNA, 19 nt, Human herpesvirus 6B
uuugcugucacacucugaa

SEQ ID NO: 166656 - RNA, 15 nt, Human herpesvirus 6B
uuuguggaaaaacug

SEQ ID NO: 166657 - RNA, 14 nt, Human herpesvirus 6B
uuugugauggguga

SEQ ID NO: 166658 - RNA, 22 nt, Human herpesvirus 6B
aacagacuacuuuuaaaauacc

SEQ ID NO: 166659 - RNA, 22 nt, Human herpesvirus 6B
aacagagagaggagcauucaca

SEQ ID NO: 166660 - RNA, 22 nt, Human herpesvirus 6B
uuuucuuaugaucggcauuugu

SEQ ID NO: 166661 - RNA, 16 nt, Human herpesvirus 6B
uuuucugaaagucucu

SEQ ID NO: 166662 - RNA, 17 nt, Human herpesvirus 6B
uuuucuguguauuguga

SEQ ID NO: 166663 - RNA, 14 nt, Human herpesvirus 6B
uuuuacaaugagcc

SEQ ID NO: 166664 - RNA, 13 nt, Human herpesvirus 6B
uuuuaaucaugau

SEQ ID NO: 166665 - RNA, 15 nt, Human herpesvirus 6B
uuuuaccauguugcu

SEQ ID NO: 166666 - RNA, 20 nt, Human herpesvirus 6B
uuuuaccauguugcuuauaa

SEQ ID NO: 166667 - RNA, 17 nt, Human herpesvirus 6B
uuuucccaccuaauaaa

SEQ ID NO: 166668 - RNA, 15 nt, Human herpesvirus 6B
uuuucuaucacuuau

SEQ ID NO: 166669 - RNA, 12 nt, Human herpesvirus 6B
uuuucgugugug

SEQ ID NO: 166670 - RNA, 19 nt, Human herpesvirus 6B
uuuucgccaucaaucucua

SEQ ID NO: 166671 - RNA, 13 nt, Human herpesvirus 6B
uuuuccuugacag

SEQ ID NO: 166672 - RNA, 16 nt, Human herpesvirus 6B
aaccaaucuaagauag

SEQ ID NO: 166673 - RNA, 17 nt, Human herpesvirus 6B
aacauucccacuuucgu

SEQ ID NO: 166674 - RNA, 23 nt, Human herpesvirus 6B
uuuuucgaacaugauagggaaua

SEQ ID NO: 166675 - RNA, 17 nt, Human herpesvirus 6B
uuuuucgauguuuccag

SEQ ID NO: 166676 - RNA, 17 nt, Human herpesvirus 6B
aacauggacaacuuauc

SEQ ID NO: 166677 - RNA, 15 nt, Human herpesvirus 6B
uuuugguggacacca

SEQ ID NO: 166678 - RNA, 18 nt, Human herpesvirus 6B
uuuugucuucgugucuga

SEQ ID NO: 166679 - RNA, 20 nt, Human herpesvirus 6B
uuuugucuucgugucugaga

SEQ ID NO: 166680 - RNA, 12 nt, Human herpesvirus 6B
uuuugugacuau

SEQ ID NO: 166681 - RNA, 15 nt, Human herpesvirus 6B
aacagauuuuacuuc

SEQ ID NO: 166682 - RNA, 21 nt, Human herpesvirus 6B
aacagauuuugaggaucacua

SEQ ID NO: 166683 - RNA, 14 nt, Human herpesvirus 6B
uuuugcauuaaaca

SEQ ID NO: 166684 - RNA, 16 nt, Human herpesvirus 6B
uuuugauugcaaucac

SEQ ID NO: 166685 - RNA, 14 nt, Human herpesvirus 6B
uuuugcaacuuaaa

SEQ ID NO: 166686 - RNA, 18 nt, Human herpesvirus 6B
aaccccccacuacuaaag

SEQ ID NO: 166687 - RNA, 18 nt, Human herpesvirus 6B
aacccuagacacacagaa

SEQ ID NO: 166688 - RNA, 13 nt, Human herpesvirus 6B
aaccgcaaaaaag

SEQ ID NO: 166689 - RNA, 16 nt, Human herpesvirus 6B
aacauuuuuauuccaa

SEQ ID NO: 166690 - RNA, 23 nt, Human herpesvirus 6B
aaccaucccuaucucucgcugac

SEQ ID NO: 166691 - RNA, 24 nt, Human herpesvirus 6B
aaccauggcccuacuacaguggau

SEQ ID NO: 166692 - RNA, 22 nt, Human herpesvirus 6B
aaccaguauuaaugucuucgaa

SEQ ID NO: 166693 - RNA, 17 nt, Human herpesvirus 6B
aagaaacaguaaaucuc

SEQ ID NO: 166694 - RNA, 13 nt, Human herpesvirus 6B
aagaaaaucgcaa

SEQ ID NO: 166695 - RNA, 21 nt, Human herpesvirus 6B
aagaaaccgaugaugaucugc

SEQ ID NO: 166696 - RNA, 14 nt, Human herpesvirus 6B
aagaacagaaucuu

SEQ ID NO: 166697 - RNA, 14 nt, Human herpesvirus 6B
aacuguucuuucaa

SEQ ID NO: 166698 - RNA, 20 nt, Human herpesvirus 6B
aacugucuugcagcugucua

SEQ ID NO: 166699 - RNA, 16 nt, Human herpesvirus 6B
aacugguucaggauuu

SEQ ID NO: 166700 - RNA, 13 nt, Human herpesvirus 6B
aacuguaccugaa

SEQ ID NO: 166701 - RNA, 22 nt, Human herpesvirus 6B
aacuggcgcgcauguugcaguu

SEQ ID NO: 166702 - RNA, 21 nt, Human herpesvirus 6B
aacugcuggcugagauucacu

SEQ ID NO: 166703 - RNA, 22 nt, Human herpesvirus 6B
aacugggugauugggagcucac

SEQ ID NO: 166704 - RNA, 17 nt, Human herpesvirus 6B
aaccguugcgauuuccu

SEQ ID NO: 166705 - RNA, 19 nt, Human herpesvirus 6B
aaccuccucagaugcaaug

SEQ ID NO: 166706 - RNA, 22 nt, Human herpesvirus 6B
aaccugauuucagaauugaguu

SEQ ID NO: 166707 - RNA, 16 nt, Human herpesvirus 6B
aaccuucguucugaua

SEQ ID NO: 166708 - RNA, 14 nt, Human herpesvirus 6B
aacgaaaaccauua

SEQ ID NO: 166709 - RNA, 21 nt, Human herpesvirus 6B
aacuaaaucgcgccauaucac

SEQ ID NO: 166710 - RNA, 18 nt, Human herpesvirus 6B
aacuaagauugugcaguu

SEQ ID NO: 166711 - RNA, 12 nt, Human herpesvirus 6B
aacuacacuuau

SEQ ID NO: 166712 - RNA, 14 nt, Human herpesvirus 6B
aacugacugacaaa

SEQ ID NO: 166713 - RNA, 13 nt, Human herpesvirus 6B
aacugacugacaa

SEQ ID NO: 166714 - RNA, 17 nt, Human herpesvirus 6B
aacugacuuauaaguca

SEQ ID NO: 166715 - RNA, 13 nt, Human herpesvirus 6B
aacugagauauuu

SEQ ID NO: 166716 - RNA, 13 nt, Human herpesvirus 6B
aacuaugugcauu

SEQ ID NO: 166717 - RNA, 21 nt, Human herpesvirus 6B
aacuauuaauaaaccgcuuaa

SEQ ID NO: 166718 - RNA, 21 nt, Human herpesvirus 6B
aacuauagccuagcaagcuag

SEQ ID NO: 166719 - RNA, 21 nt, Human herpesvirus 6B
aauaccaauuccuuauuucua

SEQ ID NO: 166720 - RNA, 22 nt, Human herpesvirus 6B
aauacagcugcagggauguggu

SEQ ID NO: 166721 - RNA, 18 nt, Human herpesvirus 6B
aauaauuuggguugugcu

SEQ ID NO: 166722 - RNA, 12 nt, Human herpesvirus 6B
aauacaauagua

SEQ ID NO: 166723 - RNA, 17 nt, Human herpesvirus 6B
aauacaaugacuaucaa

SEQ ID NO: 166724 - RNA, 12 nt, Human herpesvirus 6B
aauaauugaugg

SEQ ID NO: 166725 - RNA, 12 nt, Human herpesvirus 6B
aauaauugcacc

SEQ ID NO: 166726 - RNA, 12 nt, Human herpesvirus 6B
aauaaugcucag

SEQ ID NO: 166727 - RNA, 21 nt, Human herpesvirus 6B
aaguuggggucucaugacuau

SEQ ID NO: 166728 - RNA, 16 nt, Human herpesvirus 6B
aaguuuugagugcuau

SEQ ID NO: 166729 - RNA, 16 nt, Human herpesvirus 6B
aaguuucuuuugugac

SEQ ID NO: 166730 - RNA, 19 nt, Human herpesvirus 6B
aaguuucuuuugugacuau

SEQ ID NO: 166731 - RNA, 20 nt, Human herpesvirus 6B
aaguuucuguggaauuccaa

SEQ ID NO: 166732 - RNA, 13 nt, Human herpesvirus 6B
aaguuuacuguga

SEQ ID NO: 166733 - RNA, 14 nt, Human herpesvirus 6B
aaguuuacugugau

SEQ ID NO: 166734 - RNA, 14 nt, Human herpesvirus 6B
aauaacuacacuua

SEQ ID NO: 166735 - RNA, 19 nt, Human herpesvirus 6B
aauaagaguuucauccuga

SEQ ID NO: 166736 - RNA, 20 nt, Human herpesvirus 6B
aauaagguaucgucauucca

SEQ ID NO: 166737 - RNA, 15 nt, Human herpesvirus 6B
aauaugauggacaaa

SEQ ID NO: 166738 - RNA, 19 nt, Human herpesvirus 6B
aauaucgcagcguugcgac

SEQ ID NO: 166739 - RNA, 19 nt, Human herpesvirus 6B
aauacuacagugacuuuca

SEQ ID NO: 166740 - RNA, 20 nt, Human herpesvirus 6B
aauacuacagugacuuucac

SEQ ID NO: 166741 - RNA, 19 nt, Human herpesvirus 6B
aauacgagagcugacugaa

SEQ ID NO: 166742 - RNA, 13 nt, Human herpesvirus 6B
aauaccauuuuau

SEQ ID NO: 166743 - RNA, 20 nt, Human herpesvirus 6B
aaucacgugcuagcucuguu

SEQ ID NO: 166744 - RNA, 20 nt, Human herpesvirus 6B
aauaugguuccacuuggaag

SEQ ID NO: 166745 - RNA, 17 nt, Human herpesvirus 6B
aaucaugagagccuuua

SEQ ID NO: 166746 - RNA, 16 nt, Human herpesvirus 6B
aaucaugagauacaaa

SEQ ID NO: 166747 - RNA, 15 nt, Human herpesvirus 6B
aaucagauaucugaa

SEQ ID NO: 166748 - RNA, 18 nt, Human herpesvirus 6B
aaucagguuugucuuuug

SEQ ID NO: 166749 - RNA, 22 nt, Human herpesvirus 6B
aagcgccugccuacacugcgaa

SEQ ID NO: 166750 - RNA, 20 nt, Human herpesvirus 6B
aagcguuuacaaaacuguua

SEQ ID NO: 166751 - RNA, 16 nt, Human herpesvirus 6B
aaggauguuugugacu

SEQ ID NO: 166752 - RNA, 19 nt, Human herpesvirus 6B
aagcuauucuaaauaccaa

SEQ ID NO: 166753 - RNA, 17 nt, Human herpesvirus 6B
aaggagcgucguauuaa

SEQ ID NO: 166754 - RNA, 17 nt, Human herpesvirus 6B
aagaaucaaauggaugg

SEQ ID NO: 166755 - RNA, 12 nt, Human herpesvirus 6B
aagaaucguuaa

SEQ ID NO: 166756 - RNA, 16 nt, Human herpesvirus 6B
aagaaugagauguccu

SEQ ID NO: 166757 - RNA, 9 nt, Human herpesvirus 6B
aagaagcau

SEQ ID NO: 166758 - RNA, 14 nt, Human herpesvirus 6B
aagaacaguuuacc

SEQ ID NO: 166759 - RNA, 16 nt, Human herpesvirus 6B
aagaacaguuuaccua

SEQ ID NO: 166760 - RNA, 18 nt, Human herpesvirus 6B
aagacaaaccugauuuca

SEQ ID NO: 166761 - RNA, 18 nt, Human herpesvirus 6B
aagaaugcugacuuugac

SEQ ID NO: 166762 - RNA, 18 nt, Human herpesvirus 6B
aagaaugggauugucauu

SEQ ID NO: 166763 - RNA, 20 nt, Human herpesvirus 6B
aagaauguaaaagagccaga

SEQ ID NO: 166764 - RNA, 18 nt, Human herpesvirus 6B
aagcgaagucaugaauuu

SEQ ID NO: 166765 - RNA, 12 nt, Human herpesvirus 6B
aagcgagucuug

SEQ ID NO: 166766 - RNA, 20 nt, Human herpesvirus 6B
aaguuaacggagagucuuca

SEQ ID NO: 166767 - RNA, 12 nt, Human herpesvirus 6B
aaguuaauucca

SEQ ID NO: 166768 - RNA, 13 nt, Human herpesvirus 6B
aaguuaauuccag

SEQ ID NO: 166769 - RNA, 14 nt, Human herpesvirus 6B
aagucaccuguaua

SEQ ID NO: 166770 - RNA, 16 nt, Human herpesvirus 6B
aaguggauguggauua

SEQ ID NO: 166771 - RNA, 16 nt, Human herpesvirus 6B
aaguauuguacuucau

SEQ ID NO: 166772 - RNA, 17 nt, Human herpesvirus 6B
aaguauacggaagugca

SEQ ID NO: 166773 - RNA, 18 nt, Human herpesvirus 6B
aaguauacggaagugcau

SEQ ID NO: 166774 - RNA, 24 nt, Human herpesvirus 6B
aaguauacggaagugcaugcgaca

SEQ ID NO: 166775 - RNA, 22 nt, Human herpesvirus 6B
aaguauguauaauauaaauucu

SEQ ID NO: 166776 - RNA, 19 nt, Human herpesvirus 6B
aagggucgaagacauucaa

SEQ ID NO: 166777 - RNA, 20 nt, Human herpesvirus 6B
aaggguaguuuuagggaugg

SEQ ID NO: 166778 - RNA, 21 nt, Human herpesvirus 6B
aaggcuucauuggcaucauaa

SEQ ID NO: 166779 - RNA, 19 nt, Human herpesvirus 6B
aaggcggagacacauagcc

SEQ ID NO: 166780 - RNA, 16 nt, Human herpesvirus 6B
aauguuacagauacaa

SEQ ID NO: 166781 - RNA, 16 nt, Human herpesvirus 6B
aauguucgaugauuau

SEQ ID NO: 166782 - RNA, 15 nt, Human herpesvirus 6B
aauguguucuuacaa

SEQ ID NO: 166783 - RNA, 19 nt, Human herpesvirus 6B
aauguguuggucauuucau

SEQ ID NO: 166784 - RNA, 23 nt, Human herpesvirus 6B
aaugugcuuuggaccuugaaugu

SEQ ID NO: 166785 - RNA, 15 nt, Human herpesvirus 6B
aaugugaacuaaaua

SEQ ID NO: 166786 - RNA, 19 nt, Human herpesvirus 6B
aaugugcagaucagucaaa

SEQ ID NO: 166787 - RNA, 16 nt, Human herpesvirus 6B
aauuaaaacucuaaaa

SEQ ID NO: 166788 - RNA, 21 nt, Human herpesvirus 6B
aauuaacaauucucucaaugc

SEQ ID NO: 166789 - RNA, 16 nt, Human herpesvirus 6B
aauuacugaaagagag

SEQ ID NO: 166790 - RNA, 21 nt, Human herpesvirus 6B
aauuagaauaggcgucucaug

SEQ ID NO: 166791 - RNA, 18 nt, Human herpesvirus 6B
aauuacaugaaaacauuc

SEQ ID NO: 166792 - RNA, 18 nt, Human herpesvirus 6B
aauuaagucgucagaaca

SEQ ID NO: 166793 - RNA, 19 nt, Human herpesvirus 6B
aauuauugugacaagguau

SEQ ID NO: 166794 - RNA, 15 nt, Human herpesvirus 6B
aauuaugaaaccgau

SEQ ID NO: 166795 - RNA, 19 nt, Human herpesvirus 6B
aauuaugacugacaaggua

SEQ ID NO: 166796 - RNA, 14 nt, Human herpesvirus 6B
aauucuagaucugc

SEQ ID NO: 166797 - RNA, 17 nt, Human herpesvirus 6B
aauucugauuauuauca

SEQ ID NO: 166798 - RNA, 11 nt, Human herpesvirus 6B
aauucuuacca

SEQ ID NO: 166799 - RNA, 15 nt, Human herpesvirus 6B
aauucuuaccaagaa

SEQ ID NO: 166800 - RNA, 19 nt, Human herpesvirus 6B
aauucuuauguaaacuaaa

SEQ ID NO: 166801 - RNA, 19 nt, Human herpesvirus 6B
aauucuuauuuaccuuccu

SEQ ID NO: 166802 - RNA, 15 nt, Human herpesvirus 6B
aauucuaaauaucau

SEQ ID NO: 166803 - RNA, 17 nt, Human herpesvirus 6B
aauucuaaauaucauga

SEQ ID NO: 166804 - RNA, 15 nt, Human herpesvirus 6B
aauucagucugcuaa

SEQ ID NO: 166805 - RNA, 20 nt, Human herpesvirus 6B
aauucacuguggucaacuca

SEQ ID NO: 166806 - RNA, 20 nt, Human herpesvirus 6B
aauuccuggacauggugaaa

SEQ ID NO: 166807 - RNA, 22 nt, Human herpesvirus 6B
aauuccugugaugccuugaugu

SEQ ID NO: 166808 - RNA, 19 nt, Human herpesvirus 6B
aauucggauuuaaguaaac

SEQ ID NO: 166809 - RNA, 12 nt, Human herpesvirus 6B
aauucuuacaag

SEQ ID NO: 166810 - RNA, 13 nt, Human herpesvirus 6B
aauugacaaugag

SEQ ID NO: 166811 - RNA, 17 nt, Human herpesvirus 6B
aauugaugaaauuguga

SEQ ID NO: 166812 - RNA, 20 nt, Human herpesvirus 6B
aauugaugaaauugugacua

SEQ ID NO: 166813 - RNA, 15 nt, Human herpesvirus 6B
aauuguuugugaugg

SEQ ID NO: 166814 - RNA, 23 nt, Human herpesvirus 6B
aauuguuuuuuuuuuuguuaaca

SEQ ID NO: 166815 - RNA, 18 nt, Human herpesvirus 6B
aauuggucucucuuugcg

SEQ ID NO: 166816 - RNA, 20 nt, Human herpesvirus 6B
aauguaaccaccaaaacgac

SEQ ID NO: 166817 - RNA, 20 nt, Human herpesvirus 6B
aaugggauugucauucugca

SEQ ID NO: 166818 - RNA, 23 nt, Human herpesvirus 6B
aaugucuauccgccugcguguau

SEQ ID NO: 166819 - RNA, 20 nt, Human herpesvirus 6B
aaugcgacaaagcuauucua

SEQ ID NO: 166820 - RNA, 23 nt, Human herpesvirus 6B
aaugcggaacaccagcaugucau

SEQ ID NO: 166821 - RNA, 17 nt, Human herpesvirus 6B
aaugcggguacuauaga

SEQ ID NO: 166822 - RNA, 15 nt, Human herpesvirus 6B
aaugcugacuuugac

SEQ ID NO: 166823 - RNA, 15 nt, Human herpesvirus 6B
aauggcacucugaag

SEQ ID NO: 166824 - RNA, 13 nt, Human herpesvirus 6B
aauggcugugcua

SEQ ID NO: 166825 - RNA, 19 nt, Human herpesvirus 6B
aaucauuaggaucgaacuc

SEQ ID NO: 166826 - RNA, 14 nt, Human herpesvirus 6B
aaucaugucuuaca

SEQ ID NO: 166827 - RNA, 18 nt, Human herpesvirus 6B
aaucauucgauuaaugcc

SEQ ID NO: 166828 - RNA, 17 nt, Human herpesvirus 6B
aaugauagacgacgcag

SEQ ID NO: 166829 - RNA, 19 nt, Human herpesvirus 6B
aaugaugauuaauacauca

SEQ ID NO: 166830 - RNA, 20 nt, Human herpesvirus 6B
aaugaugauuaauacaucau

SEQ ID NO: 166831 - RNA, 18 nt, Human herpesvirus 6B
aaugauacuacguguaau

SEQ ID NO: 166832 - RNA, 23 nt, Human herpesvirus 6B
aaugaucgccccagacuuaucuc

SEQ ID NO: 166833 - RNA, 12 nt, Human herpesvirus 6B
aaugauuaguua

SEQ ID NO: 166834 - RNA, 21 nt, Human herpesvirus 6B
aaugcaacauucugcguguua

SEQ ID NO: 166835 - RNA, 15 nt, Human herpesvirus 6B
aaugcagcaguuuuu

SEQ ID NO: 166836 - RNA, 12 nt, Human herpesvirus 6B
aaugcauucaca

SEQ ID NO: 166837 - RNA, 17 nt, Human herpesvirus 6B
aaugcauucacaaggaa

SEQ ID NO: 166838 - RNA, 23 nt, Human herpesvirus 6B
aaugcccacaccaucuucagcuc

SEQ ID NO: 166839 - RNA, 15 nt, Human herpesvirus 6B
aaugcccacauuucc

SEQ ID NO: 166840 - RNA, 16 nt, Human herpesvirus 6B
aaugcaugauggugcu

SEQ ID NO: 166841 - RNA, 17 nt, Human herpesvirus 6B
aaagucucugucuuccc

SEQ ID NO: 166842 - RNA, 12 nt, Human herpesvirus 6B
aaaguuuacugu

SEQ ID NO: 166843 - RNA, 19 nt, Human herpesvirus 6B
aaagugguuuaauggaaac

SEQ ID NO: 166844 - RNA, 15 nt, Human herpesvirus 6B
aaaguucaucuuuca

SEQ ID NO: 166845 - RNA, 16 nt, Human herpesvirus 6B
aaaguauuguacuuca

SEQ ID NO: 166846 - RNA, 13 nt, Human herpesvirus 6B
aaagguugagaaa

SEQ ID NO: 166847 - RNA, 11 nt, Human herpesvirus 6B
aaaggauguuu

SEQ ID NO: 166848 - RNA, 13 nt, Human herpesvirus 6B
aaagcuuuacuua

SEQ ID NO: 166849 - RNA, 15 nt, Human herpesvirus 6B
aaagcugaccauuca

SEQ ID NO: 166850 - RNA, 19 nt, Human herpesvirus 6B
aaagcagaucgaguuacau

SEQ ID NO: 166851 - RNA, 17 nt, Human herpesvirus 6B
aaagcaucucaaaaaac

SEQ ID NO: 166852 - RNA, 18 nt, Human herpesvirus 6B
aaagcgauagaggaugcu

SEQ ID NO: 166853 - RNA, 18 nt, Human herpesvirus 6B
aaacucuugacauagcaa

SEQ ID NO: 166854 - RNA, 17 nt, Human herpesvirus 6B
aaacuggagcuagagaa

SEQ ID NO: 166855 - RNA, 19 nt, Human herpesvirus 6B
aaacuccacgaucuacacg

SEQ ID NO: 166856 - RNA, 13 nt, Human herpesvirus 6B
aaacuaugugcau

SEQ ID NO: 166857 - RNA, 18 nt, Human herpesvirus 6B
aaacuaaauagguucuau

SEQ ID NO: 166858 - RNA, 14 nt, Human herpesvirus 6B
aaacguugugcuga

SEQ ID NO: 166859 - RNA, 17 nt, Human herpesvirus 6B
gacacacaacacaucua

SEQ ID NO: 166860 - RNA, 14 nt, Human herpesvirus 6B
gacacacagaaaau

SEQ ID NO: 166861 - RNA, 16 nt, Human herpesvirus 6B
gacacaauuucugacu

SEQ ID NO: 166862 - RNA, 19 nt, Human herpesvirus 6B
gacacgagaagaacaugca

SEQ ID NO: 166863 - RNA, 20 nt, Human herpesvirus 6B
gacacgagaagaacaugcag

SEQ ID NO: 166864 - RNA, 20 nt, Human herpesvirus 6B
gacaaugcggaacaccagca

SEQ ID NO: 166865 - RNA, 18 nt, Human herpesvirus 6B
gacaauauaaaagauuug

SEQ ID NO: 166866 - RNA, 15 nt, Human herpesvirus 6B
aaaguuuggaugcaa

SEQ ID NO: 166867 - RNA, 19 nt, Human herpesvirus 6B
gacaaguaagauugcagac

SEQ ID NO: 166868 - RNA, 23 nt, Human herpesvirus 6B
gacaaguuucuuuugugacuaua

SEQ ID NO: 166869 - RNA, 21 nt, Human herpesvirus 6B
gacagagccuagaccaagaau

SEQ ID NO: 166870 - RNA, 23 nt, Human herpesvirus 6B
gacagagguaauaaaaacaccuc

SEQ ID NO: 166871 - RNA, 20 nt, Human herpesvirus 6B
gaccauaaaaaauuuuguca

SEQ ID NO: 166872 - RNA, 17 nt, Human herpesvirus 6B
gacacggugagucgcau

SEQ ID NO: 166873 - RNA, 15 nt, Human herpesvirus 6B
gacacgcgcggugga

SEQ ID NO: 166874 - RNA, 20 nt, Human herpesvirus 6B
gacccuagcuuuucauauga

SEQ ID NO: 166875 - RNA, 22 nt, Human herpesvirus 6B
gaccuacggccagagacaugac

SEQ ID NO: 166876 - RNA, 14 nt, Human herpesvirus 6B
gaccgucaaaucuc

SEQ ID NO: 166877 - RNA, 18 nt, Human herpesvirus 6B
gaccgucaaaucucgccg

SEQ ID NO: 166878 - RNA, 16 nt, Human herpesvirus 6B
gaccguucaccauucc

SEQ ID NO: 166879 - RNA, 18 nt, Human herpesvirus 6B
gaccuaaucacaaaacug

SEQ ID NO: 166880 - RNA, 14 nt, Human herpesvirus 6B
aaauaaaacaguau

SEQ ID NO: 166881 - RNA, 20 nt, Human herpesvirus 6B
aaaguuuguuuuuccauaaa

SEQ ID NO: 166882 - RNA, 22 nt, Human herpesvirus 6B
aaaguuuucgguuucgcugcua

SEQ ID NO: 166883 - RNA, 17 nt, Human herpesvirus 6B
aaauaaacgcugucuca

SEQ ID NO: 166884 - RNA, 16 nt, Human herpesvirus 6B
aaacgagagaguucau

SEQ ID NO: 166885 - RNA, 19 nt, Human herpesvirus 6B
aaacgcucacaacaugauc

SEQ ID NO: 166886 - RNA, 13 nt, Human herpesvirus 6B
aaacgcugucuca

SEQ ID NO: 166887 - RNA, 18 nt, Human herpesvirus 6B
aaacggagacugcacaga

SEQ ID NO: 166888 - RNA, 19 nt, Human herpesvirus 6B
aaacgccguguuucaccaa

SEQ ID NO: 166889 - RNA, 22 nt, Human herpesvirus 6B
aaacgcagacuaauccauauga

SEQ ID NO: 166890 - RNA, 13 nt, Human herpesvirus 6B
aaaccucucgccg

SEQ ID NO: 166891 - RNA, 21 nt, Human herpesvirus 6B
aaaccuucccuaucacaauac

SEQ ID NO: 166892 - RNA, 15 nt, Human herpesvirus 6B
gaaucacauccgcuc

SEQ ID NO: 166893 - RNA, 14 nt, Human herpesvirus 6B
gaaucagaucacuc

SEQ ID NO: 166894 - RNA, 14 nt, Human herpesvirus 6B
gaauaggcgucuca

SEQ ID NO: 166895 - RNA, 22 nt, Human herpesvirus 6B
gaauagaucuucggcgcugauu

SEQ ID NO: 166896 - RNA, 21 nt, Human herpesvirus 6B
gaaucaaauaccuaauuccaa

SEQ ID NO: 166897 - RNA, 16 nt, Human herpesvirus 6B
gaauaauuauggacaa

SEQ ID NO: 166898 - RNA, 13 nt, Human herpesvirus 6B
gaauacaaaaacg

SEQ ID NO: 166899 - RNA, 15 nt, Human herpesvirus 6B
gaauacaaaaacgac

SEQ ID NO: 166900 - RNA, 17 nt, Human herpesvirus 6B
gaauacaagaccaucug

SEQ ID NO: 166901 - RNA, 21 nt, Human herpesvirus 6B
gaauacuacagugacuuucac

SEQ ID NO: 166902 - RNA, 19 nt, Human herpesvirus 6B
gaagucugaauuuaaugca

SEQ ID NO: 166903 - RNA, 13 nt, Human herpesvirus 6B
gaagucucuaguu

SEQ ID NO: 166904 - RNA, 17 nt, Human herpesvirus 6B
gaagcgguaaaauggag

SEQ ID NO: 166905 - RNA, 21 nt, Human herpesvirus 6B
gaagugaaagcagucaguaau

SEQ ID NO: 166906 - RNA, 17 nt, Human herpesvirus 6B
gaagaugacagcgagac

SEQ ID NO: 166907 - RNA, 16 nt, Human herpesvirus 6B
gaagauuugugugaac

SEQ ID NO: 166908 - RNA, 21 nt, Human herpesvirus 6B
gaacgcacuagacaucaacuc

SEQ ID NO: 166909 - RNA, 15 nt, Human herpesvirus 6B
gaacggaaacaugaa

SEQ ID NO: 166910 - RNA, 18 nt, Human herpesvirus 6B
cuugguggcggauggcua

SEQ ID NO: 166911 - RNA, 17 nt, Human herpesvirus 6B
cuugucaauaaacauuu

SEQ ID NO: 166912 - RNA, 19 nt, Human herpesvirus 6B
cuugugugaaaguauugua

SEQ ID NO: 166913 - RNA, 18 nt, Human herpesvirus 6B
cuuguguucuaacacaua

SEQ ID NO: 166914 - RNA, 20 nt, Human herpesvirus 6B
cuuuaaacgguaaauucaaa

SEQ ID NO: 166915 - RNA, 19 nt, Human herpesvirus 6B
cuuuaaagauuagauuagg

SEQ ID NO: 166916 - RNA, 15 nt, Human herpesvirus 6B
cuuucaaaaugacca

SEQ ID NO: 166917 - RNA, 19 nt, Human herpesvirus 6B
cuuucaaaaugaccagaga

SEQ ID NO: 166918 - RNA, 21 nt, Human herpesvirus 6B
cuuucaaaaugaccagagauu

SEQ ID NO: 166919 - RNA, 20 nt, Human herpesvirus 6B
cuuuauuguuaacauguaca

SEQ ID NO: 166920 - RNA, 17 nt, Human herpesvirus 6B
cuuuaucuuuugcaaag

SEQ ID NO: 166921 - RNA, 16 nt, Human herpesvirus 6B
cuuuauggagauuuga

SEQ ID NO: 166922 - RNA, 19 nt, Human herpesvirus 6B
gaaauuauggcgacgaccg

SEQ ID NO: 166923 - RNA, 15 nt, Human herpesvirus 6B
gaaauuuccuuugug

SEQ ID NO: 166924 - RNA, 19 nt, Human herpesvirus 6B
gaaauugugucacauguua

SEQ ID NO: 166925 - RNA, 16 nt, Human herpesvirus 6B
gaacaccagcauguca

SEQ ID NO: 166926 - RNA, 17 nt, Human herpesvirus 6B
gaacaccagcaugucau

SEQ ID NO: 166927 - RNA, 16 nt, Human herpesvirus 6B
gaacaggaagcgccau

SEQ ID NO: 166928 - RNA, 15 nt, Human herpesvirus 6B
gaacaggugcuucuu

SEQ ID NO: 166929 - RNA, 19 nt, Human herpesvirus 6B
gaacagcuaauggcguaua

SEQ ID NO: 166930 - RNA, 14 nt, Human herpesvirus 6B
gaacagaaucuucu

SEQ ID NO: 166931 - RNA, 20 nt, Human herpesvirus 6B
gaacauguaacuaagcagga

SEQ ID NO: 166932 - RNA, 12 nt, Human herpesvirus 6B
gaacaguuuacc

SEQ ID NO: 166933 - RNA, 18 nt, Human herpesvirus 6B
gaaccauagguguuugca

SEQ ID NO: 166934 - RNA, 17 nt, Human herpesvirus 6B
gaaccacguuuuuccau

SEQ ID NO: 166935 - RNA, 16 nt, Human herpesvirus 6B
gaggaugaguagcuuu

SEQ ID NO: 166936 - RNA, 23 nt, Human herpesvirus 6B
gaggggaauacaccggagaccga

SEQ ID NO: 166937 - RNA, 17 nt, Human herpesvirus 6B
gagggugggaacuguca

SEQ ID NO: 166938 - RNA, 18 nt, Human herpesvirus 6B
gagguaauaaaaacaccu

SEQ ID NO: 166939 - RNA, 20 nt, Human herpesvirus 6B
gagguaauaaaaacaccucu

SEQ ID NO: 166940 - RNA, 20 nt, Human herpesvirus 6B
gagggacccacacgcgggga

SEQ ID NO: 166941 - RNA, 14 nt, Human herpesvirus 6B
gacuuuuuaacaaa

SEQ ID NO: 166942 - RNA, 13 nt, Human herpesvirus 6B
gagaaaguuucug

SEQ ID NO: 166943 - RNA, 20 nt, Human herpesvirus 6B
gagacuggaaaacuaugugc

SEQ ID NO: 166944 - RNA, 21 nt, Human herpesvirus 6B
gagacuggaaaacuaugugca

SEQ ID NO: 166945 - RNA, 21 nt, Human herpesvirus 6B
gagcgcgguagucgagaucau

SEQ ID NO: 166946 - RNA, 19 nt, Human herpesvirus 6B
gagccggaaaacaaugcau

SEQ ID NO: 166947 - RNA, 13 nt, Human herpesvirus 6B
gagagagcaaaug

SEQ ID NO: 166948 - RNA, 17 nt, Human herpesvirus 6B
gagagccggaaaacaau

SEQ ID NO: 166949 - RNA, 20 nt, Human herpesvirus 6B
gagagccggaaaacaaugca

SEQ ID NO: 166950 - RNA, 16 nt, Human herpesvirus 6B
gagacucguucguuaa

SEQ ID NO: 166951 - RNA, 24 nt, Human herpesvirus 6B
aaauggaaacuggagcuagagaaa

SEQ ID NO: 166952 - RNA, 15 nt, Human herpesvirus 6B
aaauggcugugcuau

SEQ ID NO: 166953 - RNA, 13 nt, Human herpesvirus 6B
aaaugaugauuaa

SEQ ID NO: 166954 - RNA, 23 nt, Human herpesvirus 6B
aaaugaugauuaauacaucauua

SEQ ID NO: 166955 - RNA, 17 nt, Human herpesvirus 6B
aaaugcgacaaagcuau

SEQ ID NO: 166956 - RNA, 17 nt, Human herpesvirus 6B
aaaugguuaugacaaag

SEQ ID NO: 166957 - RNA, 22 nt, Human herpesvirus 6B
aaauguaaacacgaaacugcuu

SEQ ID NO: 166958 - RNA, 14 nt, Human herpesvirus 6B
aaauguaacucuuu

SEQ ID NO: 166959 - RNA, 13 nt, Human herpesvirus 6B
aaaugucaaagaa

SEQ ID NO: 166960 - RNA, 18 nt, Human herpesvirus 6B
aaauagggucaacuguua

SEQ ID NO: 166961 - RNA, 17 nt, Human herpesvirus 6B
aaauaguuuuaauucag

SEQ ID NO: 166962 - RNA, 19 nt, Human herpesvirus 6B
aaauauaacaguaggagac

SEQ ID NO: 166963 - RNA, 19 nt, Human herpesvirus 6B
aaauaucggauagguagaa

SEQ ID NO: 166964 - RNA, 13 nt, Human herpesvirus 6B
aaauaucauuaaa

SEQ ID NO: 166965 - RNA, 21 nt, Human herpesvirus 6B
aaauaucgagaccuacacuuu

SEQ ID NO: 166966 - RNA, 15 nt, Human herpesvirus 6B
aaauauucuggggua

SEQ ID NO: 166967 - RNA, 16 nt, Human herpesvirus 6B
aaauauugcaugcauu

SEQ ID NO: 166968 - RNA, 13 nt, Human herpesvirus 6B
aaaugaccagaga

SEQ ID NO: 166969 - RNA, 22 nt, Human herpesvirus 6B
aaaugaccagagauucuaugua

SEQ ID NO: 166970 - RNA, 21 nt, Human herpesvirus 6B
aaaugaucgccccagacuuau

SEQ ID NO: 166971 - RNA, 19 nt, Human herpesvirus 6B
gacuguacacaaaaaccgu

SEQ ID NO: 166972 - RNA, 16 nt, Human herpesvirus 6B
gacuguaccauuguca

SEQ ID NO: 166973 - RNA, 15 nt, Human herpesvirus 6B
gacuuauaagucauc

SEQ ID NO: 166974 - RNA, 20 nt, Human herpesvirus 6B
gacuggaaaacuaugugcau

SEQ ID NO: 166975 - RNA, 18 nt, Human herpesvirus 6B
gacuaucugagacaguca

SEQ ID NO: 166976 - RNA, 16 nt, Human herpesvirus 6B
gacuaucaaaauaaaa

SEQ ID NO: 166977 - RNA, 17 nt, Human herpesvirus 6B
gacuacucuggcugaag

SEQ ID NO: 166978 - RNA, 19 nt, Human herpesvirus 6B
gacuacgauugcugucuuc

SEQ ID NO: 166979 - RNA, 14 nt, Human herpesvirus 6B
gacucgccgaugaa

SEQ ID NO: 166980 - RNA, 23 nt, Human herpesvirus 6B
gacuauuaaacuaacaugacaaa

SEQ ID NO: 166981 - RNA, 18 nt, Human herpesvirus 6B
gauuuugaggaucacuaa

SEQ ID NO: 166982 - RNA, 17 nt, Human herpesvirus 6B
gcaaaaaauaguuuuaa

SEQ ID NO: 166983 - RNA, 13 nt, Human herpesvirus 6B
gcaaacagcuuua

SEQ ID NO: 166984 - RNA, 19 nt, Human herpesvirus 6B
gcaaacagguguaaauauu

SEQ ID NO: 166985 - RNA, 18 nt, Human herpesvirus 6B
gcaaacaugcaacccgcc

SEQ ID NO: 166986 - RNA, 15 nt, Human herpesvirus 6B
gcaaacauguauccu

SEQ ID NO: 166987 - RNA, 14 nt, Human herpesvirus 6B
gcaaacucaaagaa

SEQ ID NO: 166988 - RNA, 17 nt, Human herpesvirus 6B
gauuuguucgauugcca

SEQ ID NO: 166989 - RNA, 18 nt, Human herpesvirus 6B
gauuuguucuagugcgua

SEQ ID NO: 166990 - RNA, 22 nt, Human herpesvirus 6B
gauuuggaggugagacaucgag

SEQ ID NO: 166991 - RNA, 14 nt, Human herpesvirus 6B
gauuucagaauuga

SEQ ID NO: 166992 - RNA, 16 nt, Human herpesvirus 6B
gauuuaaugguuucaa

SEQ ID NO: 166993 - RNA, 13 nt, Human herpesvirus 6B
gauugugcaguuc

SEQ ID NO: 166994 - RNA, 15 nt, Human herpesvirus 6B
gauugcagacgcuga

SEQ ID NO: 166995 - RNA, 12 nt, Human herpesvirus 6B
gauugcaaccaa

SEQ ID NO: 166996 - RNA, 20 nt, Human herpesvirus 6B
gauuacacugucuuguagua

SEQ ID NO: 166997 - RNA, 14 nt, Human herpesvirus 6B
gauuaaugccacag

SEQ ID NO: 166998 - RNA, 18 nt, Human herpesvirus 6B
gauuaaagcauuagcaac

SEQ ID NO: 166999 - RNA, 14 nt, Human herpesvirus 6B
gauuaaaucauauc

SEQ ID NO: 167000 - RNA, 20 nt, Human herpesvirus 6B
gauuacgucuuuuuguucag

SEQ ID NO: 167001 - RNA, 18 nt, Human herpesvirus 6B
gauuagcaaucauuaaca

SEQ ID NO: 167002 - RNA, 22 nt, Human herpesvirus 6B
gauuagcaaucauuaacauaca

SEQ ID NO: 167003 - RNA, 17 nt, Human herpesvirus 6B
gauguagcaagggagaa

SEQ ID NO: 167004 - RNA, 21 nt, Human herpesvirus 6B
gauguggaacggaaacaugaa

SEQ ID NO: 167005 - RNA, 14 nt, Human herpesvirus 6B
gauucuccgucuca

SEQ ID NO: 167006 - RNA, 18 nt, Human herpesvirus 6B
gauucgacaaaucaucac

SEQ ID NO: 167007 - RNA, 18 nt, Human herpesvirus 6B
gauuauaaaaacacaccc

SEQ ID NO: 167008 - RNA, 15 nt, Human herpesvirus 6B
gauuauggugccuca

SEQ ID NO: 167009 - RNA, 19 nt, Human herpesvirus 6B
gauuauggugccucagggu

SEQ ID NO: 167010 - RNA, 12 nt, Human herpesvirus 6B
gaugcuguagaa

SEQ ID NO: 167011 - RNA, 16 nt, Human herpesvirus 6B
gaugcguuugccauau

SEQ ID NO: 167012 - RNA, 20 nt, Human herpesvirus 6B
gauggugcuauuaacacaua

SEQ ID NO: 167013 - RNA, 16 nt, Human herpesvirus 6B
gauggucgauauagau

SEQ ID NO: 167014 - RNA, 17 nt, Human herpesvirus 6B
gauguaaucaaugucac

SEQ ID NO: 167015 - RNA, 13 nt, Human herpesvirus 6B
gauguacaguuuc

SEQ ID NO: 167016 - RNA, 16 nt, Human herpesvirus 6B
gauguacgaugaacua

SEQ ID NO: 167017 - RNA, 16 nt, Human herpesvirus 6B
gaugcuuaacuuacuu

SEQ ID NO: 167018 - RNA, 13 nt, Human herpesvirus 6B
gauggaugugcac

SEQ ID NO: 167019 - RNA, 13 nt, Human herpesvirus 6B
gaugaaagcuuca

SEQ ID NO: 167020 - RNA, 18 nt, Human herpesvirus 6B
gaucuucugcuaauucau

SEQ ID NO: 167021 - RNA, 23 nt, Human herpesvirus 6B
gaucuucugcuaauucauaguua

SEQ ID NO: 167022 - RNA, 17 nt, Human herpesvirus 6B
gaugaucagcauucacu

SEQ ID NO: 167023 - RNA, 14 nt, Human herpesvirus 6B
gaugagaguggauu

SEQ ID NO: 167024 - RNA, 12 nt, Human herpesvirus 6B
gauaauuuccaa

SEQ ID NO: 167025 - RNA, 17 nt, Human herpesvirus 6B
gauacaucguuuguuga

SEQ ID NO: 167026 - RNA, 16 nt, Human herpesvirus 6B
gauacuauaaacaauu

SEQ ID NO: 167027 - RNA, 20 nt, Human herpesvirus 6B
gaucggacggugauggguuu

SEQ ID NO: 167028 - RNA, 19 nt, Human herpesvirus 6B
gaucgggccuggggacaga

SEQ ID NO: 167029 - RNA, 17 nt, Human herpesvirus 6B
gaucguuuugcaacuua

SEQ ID NO: 167030 - RNA, 16 nt, Human herpesvirus 6B
gaucuuccccauaaca

SEQ ID NO: 167031 - RNA, 16 nt, Human herpesvirus 6B
gaucucggcagauuac

SEQ ID NO: 167032 - RNA, 13 nt, Human herpesvirus 6B
gauccaugagcac

SEQ ID NO: 167033 - RNA, 17 nt, Human herpesvirus 6B
gauagaggaauugcuuu

SEQ ID NO: 167034 - RNA, 12 nt, Human herpesvirus 6B
gauacugaugaa

SEQ ID NO: 167035 - RNA, 18 nt, Human herpesvirus 6B
gguuauacauaaggcaaa

SEQ ID NO: 167036 - RNA, 22 nt, Human herpesvirus 6B
gguucaccacugugauaugcaa

SEQ ID NO: 167037 - RNA, 22 nt, Human herpesvirus 6B
ggugugcgaauggcacucugaa

SEQ ID NO: 167038 - RNA, 18 nt, Human herpesvirus 6B
gguguggaaaaaagucac

SEQ ID NO: 167039 - RNA, 20 nt, Human herpesvirus 6B
ggugucucaaccuucauuaa

SEQ ID NO: 167040 - RNA, 15 nt, Human herpesvirus 6B
gguuuucuuacacau

SEQ ID NO: 167041 - RNA, 19 nt, Human herpesvirus 6B
gguuuuguccugaaauaac

SEQ ID NO: 167042 - RNA, 18 nt, Human herpesvirus 6B
guaaacacgaaacugcuu

SEQ ID NO: 167043 - RNA, 15 nt, Human herpesvirus 6B
guaaaagagccagag

SEQ ID NO: 167044 - RNA, 17 nt, Human herpesvirus 6B
guaaaagagccagagac

SEQ ID NO: 167045 - RNA, 13 nt, Human herpesvirus 6B
guaaaacauguag

SEQ ID NO: 167046 - RNA, 10 nt, Human herpesvirus 6B
guaaaaccuc

SEQ ID NO: 167047 - RNA, 18 nt, Human herpesvirus 6B
guaaaaauucacuguggu

SEQ ID NO: 167048 - RNA, 16 nt, Human herpesvirus 6B
guaaaaaaacauucua

SEQ ID NO: 167049 - RNA, 22 nt, Human herpesvirus 6B
guaaaaaaagauuuaucaaaag

SEQ ID NO: 167050 - RNA, 15 nt, Human herpesvirus 6B
guaaucaaugucaca

SEQ ID NO: 167051 - RNA, 18 nt, Human herpesvirus 6B
guaaguggguacaaugaa

SEQ ID NO: 167052 - RNA, 23 nt, Human herpesvirus 6B
guaaacgauaucaauuccuguga

SEQ ID NO: 167053 - RNA, 19 nt, Human herpesvirus 6B
guaaaauuaccucaucccu

SEQ ID NO: 167054 - RNA, 17 nt, Human herpesvirus 6B
guaaacggcauacauuu

SEQ ID NO: 167055 - RNA, 15 nt, Human herpesvirus 6B
gguaagcagcaaaac

SEQ ID NO: 167056 - RNA, 23 nt, Human herpesvirus 6B
gguaaaaaaacaccaacaugacu

SEQ ID NO: 167057 - RNA, 18 nt, Human herpesvirus 6B
gguaaacggcauacauuu

SEQ ID NO: 167058 - RNA, 16 nt, Human herpesvirus 6B
gguaaacuguucuuuc

SEQ ID NO: 167059 - RNA, 18 nt, Human herpesvirus 6B
gguaaacuguucuuucaa

SEQ ID NO: 167060 - RNA, 20 nt, Human herpesvirus 6B
gggacagacagggggaucga

SEQ ID NO: 167061 - RNA, 19 nt, Human herpesvirus 6B
gggacagugauuaggaugu

SEQ ID NO: 167062 - RNA, 19 nt, Human herpesvirus 6B
gggacacaucuauguguau

SEQ ID NO: 167063 - RNA, 12 nt, Human herpesvirus 6B
gggaagaucuau

SEQ ID NO: 167064 - RNA, 13 nt, Human herpesvirus 6B
gggaaaaacgaca

SEQ ID NO: 167065 - RNA, 17 nt, Human herpesvirus 6B
ggucaaaaaacucagcc

SEQ ID NO: 167066 - RNA, 18 nt, Human herpesvirus 6B
gguacauuguuucucuaa

SEQ ID NO: 167067 - RNA, 16 nt, Human herpesvirus 6B
gguacgcuucuuucac

SEQ ID NO: 167068 - RNA, 23 nt, Human herpesvirus 6B
gguacugcgguuggggucuuucc

SEQ ID NO: 167069 - RNA, 15 nt, Human herpesvirus 6B
ggugcauaacaucuc

SEQ ID NO: 167070 - RNA, 16 nt, Human herpesvirus 6B
ggugcuauuaacacau

SEQ ID NO: 167071 - RNA, 15 nt, Human herpesvirus 6B
ggugaugaacuggcg

SEQ ID NO: 167072 - RNA, 20 nt, Human herpesvirus 6B
ggugauuucaagauuguguu

SEQ ID NO: 167073 - RNA, 18 nt, Human herpesvirus 6B
gguccguuuuuucugcaa

SEQ ID NO: 167074 - RNA, 22 nt, Human herpesvirus 6B
ggucgaagacauucaacauucc

SEQ ID NO: 167075 - RNA, 18 nt, Human herpesvirus 6B
ggucuuucccgugcucag

SEQ ID NO: 167076 - RNA, 14 nt, Human herpesvirus 6B
ggucuuuccuaccc

SEQ ID NO: 167077 - RNA, 21 nt, Human herpesvirus 6B
ggagauuaaagcauuagcaac

SEQ ID NO: 167078 - RNA, 22 nt, Human herpesvirus 6B
ggagcacccggggaggcgacga

SEQ ID NO: 167079 - RNA, 12 nt, Human herpesvirus 6B
ggaguugcagua

SEQ ID NO: 167080 - RNA, 16 nt, Human herpesvirus 6B
ggagugauugaugaaa

SEQ ID NO: 167081 - RNA, 14 nt, Human herpesvirus 6B
ggaggggaauacac

SEQ ID NO: 167082 - RNA, 23 nt, Human herpesvirus 6B
ggaguaaugauuggaaucacaaa

SEQ ID NO: 167083 - RNA, 23 nt, Human herpesvirus 6B
ggaguaauuauugugacaaggua

SEQ ID NO: 167084 - RNA, 19 nt, Human herpesvirus 6B
ggauaugaauaaucacuaa

SEQ ID NO: 167085 - RNA, 23 nt, Human herpesvirus 6B
ggauaugaggauuugcuugucac

SEQ ID NO: 167086 - RNA, 14 nt, Human herpesvirus 6B
gcuucagguugcca

SEQ ID NO: 167087 - RNA, 17 nt, Human herpesvirus 6B
gcuucaguaugucucag

SEQ ID NO: 167088 - RNA, 17 nt, Human herpesvirus 6B
gcuggcgcugcauagac

SEQ ID NO: 167089 - RNA, 15 nt, Human herpesvirus 6B
ggcacacgucccuau

SEQ ID NO: 167090 - RNA, 13 nt, Human herpesvirus 6B
ggcaacuccccau

SEQ ID NO: 167091 - RNA, 13 nt, Human herpesvirus 6B
ggaucacuaacuu

SEQ ID NO: 167092 - RNA, 16 nt, Human herpesvirus 6B
ggcccuacuacagugg

SEQ ID NO: 167093 - RNA, 17 nt, Human herpesvirus 6B
ggcggcaugaauuccau

SEQ ID NO: 167094 - RNA, 11 nt, Human herpesvirus 6B
ggcggagacac

SEQ ID NO: 167095 - RNA, 19 nt, Human herpesvirus 6B
ggcgcgcauguugcaguuu

SEQ ID NO: 167096 - RNA, 14 nt, Human herpesvirus 6B
ggcggaagugaaag

SEQ ID NO: 167097 - RNA, 21 nt, Human herpesvirus 6B
ggcggaagugaaagcagucag

SEQ ID NO: 167098 - RNA, 16 nt, Human herpesvirus 6B
ggcgcuggugacugug

SEQ ID NO: 167099 - RNA, 15 nt, Human herpesvirus 6B
ggcuaaaaaugcgac

SEQ ID NO: 167100 - RNA, 12 nt, Human herpesvirus 6B
ggcuaaacacug

SEQ ID NO: 167101 - RNA, 22 nt, Human herpesvirus 6B
ggcguuccgacucgauuugaua

SEQ ID NO: 167102 - RNA, 14 nt, Human herpesvirus 6B
ggcuauuugacaau

SEQ ID NO: 167103 - RNA, 15 nt, Human herpesvirus 6B
ggcuauuugacaaua

SEQ ID NO: 167104 - RNA, 15 nt, Human herpesvirus 6B
ggcuaucgcaaugau

SEQ ID NO: 167105 - RNA, 17 nt, Human herpesvirus 6B
gcguuacaagcaugcau

SEQ ID NO: 167106 - RNA, 16 nt, Human herpesvirus 6B
gcguuggaaagcuuua

SEQ ID NO: 167107 - RNA, 17 nt, Human herpesvirus 6B
gcguuggaaagcuuuau

SEQ ID NO: 167108 - RNA, 17 nt, Human herpesvirus 6B
gcguuuuuggugaaaaa

SEQ ID NO: 167109 - RNA, 15 nt, Human herpesvirus 6B
gcuaacgaacaaauc

SEQ ID NO: 167110 - RNA, 13 nt, Human herpesvirus 6B
gcuaagagauuua

SEQ ID NO: 167111 - RNA, 14 nt, Human herpesvirus 6B
gcucauuugugcua

SEQ ID NO: 167112 - RNA, 15 nt, Human herpesvirus 6B
gcucauuugugcuag

SEQ ID NO: 167113 - RNA, 18 nt, Human herpesvirus 6B
gcucagcguggaauuugu

SEQ ID NO: 167114 - RNA, 13 nt, Human herpesvirus 6B
gcucaguguuugc

SEQ ID NO: 167115 - RNA, 22 nt, Human herpesvirus 6B
gcucaguguuugccaaccaaau

SEQ ID NO: 167116 - RNA, 14 nt, Human herpesvirus 6B
gcuacggugcgauu

SEQ ID NO: 167117 - RNA, 19 nt, Human herpesvirus 6B
gcuggaaaaauuuaaucaa

SEQ ID NO: 167118 - RNA, 15 nt, Human herpesvirus 6B
gcugcuaucgucuau

SEQ ID NO: 167119 - RNA, 16 nt, Human herpesvirus 6B
gcugcccgauugcacc

SEQ ID NO: 167120 - RNA, 23 nt, Human herpesvirus 6B
gccuugcgguaaacggcauacau

SEQ ID NO: 167121 - RNA, 16 nt, Human herpesvirus 6B
gccuguccgugacaca

SEQ ID NO: 167122 - RNA, 17 nt, Human herpesvirus 6B
gcgcggccaaggcaacg

SEQ ID NO: 167123 - RNA, 13 nt, Human herpesvirus 6B
gcgcggggacaca

SEQ ID NO: 167124 - RNA, 16 nt, Human herpesvirus 6B
gcgcggaccacucggg

SEQ ID NO: 167125 - RNA, 17 nt, Human herpesvirus 6B
gcggaacaccagcaugu

SEQ ID NO: 167126 - RNA, 13 nt, Human herpesvirus 6B
gcgucacacagca

SEQ ID NO: 167127 - RNA, 20 nt, Human herpesvirus 6B
gcguacaaaaucaaacucac

SEQ ID NO: 167128 - RNA, 20 nt, Human herpesvirus 6B
gcgggcuuaauaaaggaugu

SEQ ID NO: 167129 - RNA, 23 nt, Human herpesvirus 6B
gcgggcuuaauaaaggauguuug

SEQ ID NO: 167130 - RNA, 20 nt, Human herpesvirus 6B
gcgggcauuauuuugucuuc

SEQ ID NO: 167131 - RNA, 16 nt, Human herpesvirus 6B
gcaaagagagaccaau

SEQ ID NO: 167132 - RNA, 16 nt, Human herpesvirus 6B
gcaaagcacccugcac

SEQ ID NO: 167133 - RNA, 18 nt, Human herpesvirus 6B
gcaacaaagagcuuuaaa

SEQ ID NO: 167134 - RNA, 22 nt, Human herpesvirus 6B
gcaaauucugauuauuaucaca

SEQ ID NO: 167135 - RNA, 15 nt, Human herpesvirus 6B
gcaaccgcaguuccu

SEQ ID NO: 167136 - RNA, 14 nt, Human herpesvirus 6B
gcaucgacuauuaa

SEQ ID NO: 167137 - RNA, 15 nt, Human herpesvirus 6B
gcaucgguuguguua

SEQ ID NO: 167138 - RNA, 22 nt, Human herpesvirus 6B
gcauccuguuuucccaccuaau

SEQ ID NO: 167139 - RNA, 15 nt, Human herpesvirus 6B
gcaucccuaugucaa

SEQ ID NO: 167140 - RNA, 23 nt, Human herpesvirus 6B
gcaacuccccauucaacauccua

SEQ ID NO: 167141 - RNA, 16 nt, Human herpesvirus 6B
gcauugaagaugacag

SEQ ID NO: 167142 - RNA, 22 nt, Human herpesvirus 6B
gcauucuguucuucaucaucac

SEQ ID NO: 167143 - RNA, 16 nt, Human herpesvirus 6B
gcauguuuauuucaau

SEQ ID NO: 167144 - RNA, 19 nt, Human herpesvirus 6B
gcauguuuuccccacaaca

SEQ ID NO: 167145 - RNA, 16 nt, Human herpesvirus 6B
gcauuaaacugaggca

SEQ ID NO: 167146 - RNA, 11 nt, Human herpesvirus 6B
gcaugaugaac

SEQ ID NO: 167147 - RNA, 16 nt, Human herpesvirus 6B
gcaugaauuccaugcg

SEQ ID NO: 167148 - RNA, 21 nt, Human herpesvirus 6B
gccacguucuuugaacaguga

SEQ ID NO: 167149 - RNA, 19 nt, Human herpesvirus 6B
gccacauuucgguuuaaua

SEQ ID NO: 167150 - RNA, 14 nt, Human herpesvirus 6B
gcauuucucuacau

SEQ ID NO: 167151 - RNA, 22 nt, Human herpesvirus 6B
gcauuucucuacaugccacaga

SEQ ID NO: 167152 - RNA, 14 nt, Human herpesvirus 6B
gcauuguguuacac

SEQ ID NO: 167153 - RNA, 23 nt, Human herpesvirus 6B
gcauuuaaacucgacuucuuuca

SEQ ID NO: 167154 - RNA, 18 nt, Human herpesvirus 6B
gccaauuuaugucauuuc

SEQ ID NO: 167155 - RNA, 20 nt, Human herpesvirus 6B
gccgaacuagaaaaacaacg

SEQ ID NO: 167156 - RNA, 17 nt, Human herpesvirus 6B
gccccgguuaaagcaga

SEQ ID NO: 167157 - RNA, 15 nt, Human herpesvirus 6B
gccauaaaaauaucg

SEQ ID NO: 167158 - RNA, 17 nt, Human herpesvirus 6B
gccauaauggaagaagg

SEQ ID NO: 167159 - RNA, 22 nt, Human herpesvirus 6B
gccauauaagucuaaugcaaag

SEQ ID NO: 167160 - RNA, 18 nt, Human herpesvirus 6B
gccauaucacagcauuuc

SEQ ID NO: 167161 - RNA, 20 nt, Human herpesvirus 6B
gccuacggcgccacaaaaca

SEQ ID NO: 167162 - RNA, 14 nt, Human herpesvirus 6B
gccuaucuguauuu

SEQ ID NO: 167163 - RNA, 13 nt, Human herpesvirus 6B
gccuacauaugcc

SEQ ID NO: 167164 - RNA, 15 nt, Human herpesvirus 6B
gccguguuacugaca

SEQ ID NO: 167165 - RNA, 16 nt, Human herpesvirus 6B
gccguguuacugacac

SEQ ID NO: 167166 - RNA, 16 nt, Human herpesvirus 6B
gccucccauguaugca

SEQ ID NO: 167167 - RNA, 18 nt, Human herpesvirus 6B
gccuccacggcaacgcuc

SEQ ID NO: 167168 - RNA, 14 nt, Human herpesvirus 6B
gccguccuauucag

SEQ ID NO: 167169 - RNA, 14 nt, Human herpesvirus 6B
gccgugauguuuuc

SEQ ID NO: 167170 - RNA, 17 nt, Human herpesvirus 6B
gccgucuccugcaauuu

SEQ ID NO: 167171 - RNA, 13 nt, Human herpesvirus 6B
gccgacuuauauc

SEQ ID NO: 167172 - RNA, 14 nt, Human herpesvirus 6B
cuagacgugucuuc

SEQ ID NO: 167173 - RNA, 13 nt, Human herpesvirus 6B
cuagacacacaga

SEQ ID NO: 167174 - RNA, 15 nt, Human herpesvirus 6B
cuagacacacagaaa

SEQ ID NO: 167175 - RNA, 14 nt, Human herpesvirus 6B
cuagagauuacaag

SEQ ID NO: 167176 - RNA, 18 nt, Human herpesvirus 6B
cuagauuuaggguuuauc

SEQ ID NO: 167177 - RNA, 12 nt, Human herpesvirus 6B
cuagaucugcca

SEQ ID NO: 167178 - RNA, 17 nt, Human herpesvirus 6B
cuagaucugccauggga

SEQ ID NO: 167179 - RNA, 20 nt, Human herpesvirus 6B
cuaaugcuagauaacucaga

SEQ ID NO: 167180 - RNA, 21 nt, Human herpesvirus 6B
cuaaugcuagauaacucagau

SEQ ID NO: 167181 - RNA, 15 nt, Human herpesvirus 6B
cuaauuccaauuuaa

SEQ ID NO: 167182 - RNA, 22 nt, Human herpesvirus 6B
cuaggaagaugguaucuaaaga

SEQ ID NO: 167183 - RNA, 19 nt, Human herpesvirus 6B
cuagcuuuucauaugaaaa

SEQ ID NO: 167184 - RNA, 20 nt, Human herpesvirus 6B
cuagcuuuucauaugaaaag

SEQ ID NO: 167185 - RNA, 21 nt, Human herpesvirus 6B
cuagcaagcuagugaaucaaa

SEQ ID NO: 167186 - RNA, 22 nt, Human herpesvirus 6B
cuagcgaucauaaaacugccaa

SEQ ID NO: 167187 - RNA, 20 nt, Human herpesvirus 6B
cuagcgauuaguuugugcag

SEQ ID NO: 167188 - RNA, 19 nt, Human herpesvirus 6B
cuauaaacaauuguauucu

SEQ ID NO: 167189 - RNA, 21 nt, Human herpesvirus 6B
cuauaacuuuucuaucacuua

SEQ ID NO: 167190 - RNA, 22 nt, Human herpesvirus 6B
cuauaacuuuucuaucacuuau

SEQ ID NO: 167191 - RNA, 20 nt, Human herpesvirus 6B
cuaguuacggggaagaucua

SEQ ID NO: 167192 - RNA, 18 nt, Human herpesvirus 6B
cuaguuuuuuuucuuuac

SEQ ID NO: 167193 - RNA, 18 nt, Human herpesvirus 6B
cuauaaaaaaagcaaaua

SEQ ID NO: 167194 - RNA, 17 nt, Human herpesvirus 6B
cuauagacgccauaaug

SEQ ID NO: 167195 - RNA, 15 nt, Human herpesvirus 6B
cuauauagcuauccu

SEQ ID NO: 167196 - RNA, 22 nt, Human herpesvirus 6B
cuaucucucgcugaccguucac

SEQ ID NO: 167197 - RNA, 18 nt, Human herpesvirus 6B
cuaugacuggagcagucu

SEQ ID NO: 167198 - RNA, 21 nt, Human herpesvirus 6B
cuaugagaauuaugacugaca

SEQ ID NO: 167199 - RNA, 19 nt, Human herpesvirus 6B
cuaucgucuacccuaucga

SEQ ID NO: 167200 - RNA, 21 nt, Human herpesvirus 6B
cuaucgucuaugacaauugca

SEQ ID NO: 167201 - RNA, 22 nt, Human herpesvirus 6B
cuaucggacaggcgcaccacgg

SEQ ID NO: 167202 - RNA, 16 nt, Human herpesvirus 6B
cuauauuaucuuucau

SEQ ID NO: 167203 - RNA, 16 nt, Human herpesvirus 6B
cuaucacaauacacag

SEQ ID NO: 167204 - RNA, 13 nt, Human herpesvirus 6B
cuaucacuuagac

SEQ ID NO: 167205 - RNA, 17 nt, Human herpesvirus 6B
cuauuuaacauccaaaa

SEQ ID NO: 167206 - RNA, 19 nt, Human herpesvirus 6B
cuauuuaacauccaaaaua

SEQ ID NO: 167207 - RNA, 20 nt, Human herpesvirus 6B
cuauuucuuuuuaaaaucaa

SEQ ID NO: 167208 - RNA, 18 nt, Human herpesvirus 6B
cuauuuaaaaacaucuua

SEQ ID NO: 167209 - RNA, 16 nt, Human herpesvirus 6B
cucaaaaaacauauaa

SEQ ID NO: 167210 - RNA, 20 nt, Human herpesvirus 6B
cuauuucucugucgcuguga

SEQ ID NO: 167211 - RNA, 13 nt, Human herpesvirus 6B
cucaacacucuca

SEQ ID NO: 167212 - RNA, 22 nt, Human herpesvirus 6B
cucagauauauacuuacuugag

SEQ ID NO: 167213 - RNA, 13 nt, Human herpesvirus 6B
cucagauucgcaa

SEQ ID NO: 167214 - RNA, 17 nt, Human herpesvirus 6B
cucagcaaacaugugau

SEQ ID NO: 167215 - RNA, 18 nt, Human herpesvirus 6B
cucagcaaacaugugauu

SEQ ID NO: 167216 - RNA, 18 nt, Human herpesvirus 6B
cucagcaaucaccaucaa

SEQ ID NO: 167217 - RNA, 21 nt, Human herpesvirus 6B
cucauagauuucauacuguau

SEQ ID NO: 167218 - RNA, 16 nt, Human herpesvirus 6B
cucacguuuugggaaa

SEQ ID NO: 167219 - RNA, 24 nt, Human herpesvirus 6B
cucacguuuugggaaaucugacaa

SEQ ID NO: 167220 - RNA, 13 nt, Human herpesvirus 6B
cucaccgcauaua

SEQ ID NO: 167221 - RNA, 22 nt, Human herpesvirus 6B
cucaaaccguagagcaaauucu

SEQ ID NO: 167222 - RNA, 15 nt, Human herpesvirus 6B
cucaugcgaucuaau

SEQ ID NO: 167223 - RNA, 21 nt, Human herpesvirus 6B
cucaugucaguauuucgccuc

SEQ ID NO: 167224 - RNA, 13 nt, Human herpesvirus 6B
cucauuugcaauu

SEQ ID NO: 167225 - RNA, 22 nt, Human herpesvirus 6B
cucaucugcgucaaugcguauu

SEQ ID NO: 167226 - RNA, 15 nt, Human herpesvirus 6B
cuccgaacaugauca

SEQ ID NO: 167227 - RNA, 16 nt, Human herpesvirus 6B
cucauuuuaacauuuu

SEQ ID NO: 167228 - RNA, 18 nt, Human herpesvirus 6B
cuccaacggagaaaacua

SEQ ID NO: 167229 - RNA, 20 nt, Human herpesvirus 6B
cuccaacggagaaaacuaua

SEQ ID NO: 167230 - RNA, 17 nt, Human herpesvirus 6B
cgggaccuggcgggcac

SEQ ID NO: 167231 - RNA, 19 nt, Human herpesvirus 6B
cgggauguuguuguguuga

SEQ ID NO: 167232 - RNA, 14 nt, Human herpesvirus 6B
cggcgucacacagc

SEQ ID NO: 167233 - RNA, 15 nt, Human herpesvirus 6B
cggcuucaagaaugc

SEQ ID NO: 167234 - RNA, 22 nt, Human herpesvirus 6B
cgggcuauaaucacaaauaucc

SEQ ID NO: 167235 - RNA, 23 nt, Human herpesvirus 6B
cgggguccgcucugagauuugag

SEQ ID NO: 167236 - RNA, 17 nt, Human herpesvirus 6B
cgauuguaauuacauua

SEQ ID NO: 167237 - RNA, 19 nt, Human herpesvirus 6B
cgauuuaauuuuaucaugc

SEQ ID NO: 167238 - RNA, 18 nt, Human herpesvirus 6B
cgcaaaaacauguuguuc

SEQ ID NO: 167239 - RNA, 14 nt, Human herpesvirus 6B
cggauggaauccaa

SEQ ID NO: 167240 - RNA, 16 nt, Human herpesvirus 6B
cggcaaccgcaguucc

SEQ ID NO: 167241 - RNA, 13 nt, Human herpesvirus 6B
cggaguugcagua

SEQ ID NO: 167242 - RNA, 13 nt, Human herpesvirus 6B
cggcgaccacagc

SEQ ID NO: 167243 - RNA, 13 nt, Human herpesvirus 6B
cggcaugaauucc

SEQ ID NO: 167244 - RNA, 19 nt, Human herpesvirus 6B
cgugcucgugaaaauaucg

SEQ ID NO: 167245 - RNA, 20 nt, Human herpesvirus 6B
cguguuauggggaagaucua

SEQ ID NO: 167246 - RNA, 17 nt, Human herpesvirus 6B
cguguucgccauauaag

SEQ ID NO: 167247 - RNA, 21 nt, Human herpesvirus 6B
cgugagugcuauuugcauuaa

SEQ ID NO: 167248 - RNA, 21 nt, Human herpesvirus 6B
cgugauacucggucuacugug

SEQ ID NO: 167249 - RNA, 23 nt, Human herpesvirus 6B
cgugccaguucacacagaugcaa

SEQ ID NO: 167250 - RNA, 17 nt, Human herpesvirus 6B
cgugacaucgcuaagau

SEQ ID NO: 167251 - RNA, 19 nt, Human herpesvirus 6B
cgucuuuuauauagacacc

SEQ ID NO: 167252 - RNA, 16 nt, Human herpesvirus 6B
cgugaaauaucggaua

SEQ ID NO: 167253 - RNA, 16 nt, Human herpesvirus 6B
cgugacacacagaaua

SEQ ID NO: 167254 - RNA, 22 nt, Human herpesvirus 6B
cgugacacacagaauacaaaaa

SEQ ID NO: 167255 - RNA, 16 nt, Human herpesvirus 6B
cgguuggggucuuucc

SEQ ID NO: 167256 - RNA, 16 nt, Human herpesvirus 6B
cgguugaagucuuucc

SEQ ID NO: 167257 - RNA, 23 nt, Human herpesvirus 6B
cggguuuuagaaaaaagugcaag

SEQ ID NO: 167258 - RNA, 16 nt, Human herpesvirus 6B
cgguaaaauggaguua

SEQ ID NO: 167259 - RNA, 20 nt, Human herpesvirus 6B
cgguuuauaugcaggugcug

SEQ ID NO: 167260 - RNA, 15 nt, Human herpesvirus 6B
cgguuucgcugcuau

SEQ ID NO: 167261 - RNA, 12 nt, Human herpesvirus 6B
cguaaugugcag

SEQ ID NO: 167262 - RNA, 23 nt, Human herpesvirus 6B
cguaauaugcaacgguguuccag

SEQ ID NO: 167263 - RNA, 15 nt, Human herpesvirus 6B
cuaaauaccauuuua

SEQ ID NO: 167264 - RNA, 13 nt, Human herpesvirus 6B
cuaaauaaucaac

SEQ ID NO: 167265 - RNA, 15 nt, Human herpesvirus 6B
cguuguauguguaau

SEQ ID NO: 167266 - RNA, 16 nt, Human herpesvirus 6B
cguucuaacccaugaa

SEQ ID NO: 167267 - RNA, 18 nt, Human herpesvirus 6B
cguucuuugaacagugac

SEQ ID NO: 167268 - RNA, 20 nt, Human herpesvirus 6B
cguugaaaugucgaaucuca

SEQ ID NO: 167269 - RNA, 14 nt, Human herpesvirus 6B
cguucaccauucca

SEQ ID NO: 167270 - RNA, 18 nt, Human herpesvirus 6B
cguuaugacgaucaauau

SEQ ID NO: 167271 - RNA, 18 nt, Human herpesvirus 6B
cguuaaguaguugcuugu

SEQ ID NO: 167272 - RNA, 18 nt, Human herpesvirus 6B
cguuacaagcaugcauug

SEQ ID NO: 167273 - RNA, 13 nt, Human herpesvirus 6B
cguuaguaaaaag

SEQ ID NO: 167274 - RNA, 20 nt, Human herpesvirus 6B
cguuagauguaacucaucaa

SEQ ID NO: 167275 - RNA, 23 nt, Human herpesvirus 6B
cuaaauuuaucaaagagguacuc

SEQ ID NO: 167276 - RNA, 14 nt, Human herpesvirus 6B
cuaaaucaugucuu

SEQ ID NO: 167277 - RNA, 21 nt, Human herpesvirus 6B
cuaaaucaugucuuacagcuu

SEQ ID NO: 167278 - RNA, 19 nt, Human herpesvirus 6B
cuaaaucgcgccauaucac

SEQ ID NO: 167279 - RNA, 16 nt, Human herpesvirus 6B
cuaacaauaauugcau

SEQ ID NO: 167280 - RNA, 13 nt, Human herpesvirus 6B
cugagacagucaa

SEQ ID NO: 167281 - RNA, 14 nt, Human herpesvirus 6B
cugagacagucaau

SEQ ID NO: 167282 - RNA, 15 nt, Human herpesvirus 6B
cugacucucuuucag

SEQ ID NO: 167283 - RNA, 19 nt, Human herpesvirus 6B
cugacuuauaagucaucau

SEQ ID NO: 167284 - RNA, 15 nt, Human herpesvirus 6B
cugagcacuugucaa

SEQ ID NO: 167285 - RNA, 16 nt, Human herpesvirus 6B
cugagcacuugucaau

SEQ ID NO: 167286 - RNA, 16 nt, Human herpesvirus 6B
cugagauucacucuac

SEQ ID NO: 167287 - RNA, 15 nt, Human herpesvirus 6B
cugaauuuaaugcaa

SEQ ID NO: 167288 - RNA, 15 nt, Human herpesvirus 6B
cugacaagcugucca

SEQ ID NO: 167289 - RNA, 13 nt, Human herpesvirus 6B
cugacacaaucag

SEQ ID NO: 167290 - RNA, 14 nt, Human herpesvirus 6B
cugacaucugcaaa

SEQ ID NO: 167291 - RNA, 17 nt, Human herpesvirus 6B
cugacaucugcaaaaac

SEQ ID NO: 167292 - RNA, 14 nt, Human herpesvirus 6B
cugaccaccaaaac

SEQ ID NO: 167293 - RNA, 15 nt, Human herpesvirus 6B
cugaccaccaaaacg

SEQ ID NO: 167294 - RNA, 17 nt, Human herpesvirus 6B
cugacccgauguggaac

SEQ ID NO: 167295 - RNA, 19 nt, Human herpesvirus 6B
cugaccguucaccauucca

SEQ ID NO: 167296 - RNA, 18 nt, Human herpesvirus 6B
cugaaacuccacgaucua

SEQ ID NO: 167297 - RNA, 13 nt, Human herpesvirus 6B
cugaacacaaaaa

SEQ ID NO: 167298 - RNA, 19 nt, Human herpesvirus 6B
cugaacacaaaaacaggga

SEQ ID NO: 167299 - RNA, 22 nt, Human herpesvirus 6B
cugaacacccgcguccuccauc

SEQ ID NO: 167300 - RNA, 19 nt, Human herpesvirus 6B
cugaagaauaaaaguccau

SEQ ID NO: 167301 - RNA, 17 nt, Human herpesvirus 6B
cuccgccggguaugagc

SEQ ID NO: 167302 - RNA, 14 nt, Human herpesvirus 6B
cuccgcagucaucu

SEQ ID NO: 167303 - RNA, 21 nt, Human herpesvirus 6B
cuccgauuaucuuaguaauuu

SEQ ID NO: 167304 - RNA, 20 nt, Human herpesvirus 6B
cuccucaacuaaaucauguc

SEQ ID NO: 167305 - RNA, 14 nt, Human herpesvirus 6B
cuccucaccgaaau

SEQ ID NO: 167306 - RNA, 18 nt, Human herpesvirus 6B
cucuucccacaaaccauc

SEQ ID NO: 167307 - RNA, 17 nt, Human herpesvirus 6B
cuggucugcuugcaaau

SEQ ID NO: 167308 - RNA, 20 nt, Human herpesvirus 6B
cuggucauuuugaaagaaca

SEQ ID NO: 167309 - RNA, 14 nt, Human herpesvirus 6B
cugguaaaugucaa

SEQ ID NO: 167310 - RNA, 21 nt, Human herpesvirus 6B
cugguaaaugucaaagaaaca

SEQ ID NO: 167311 - RNA, 20 nt, Human herpesvirus 6B
cugggugauugggagcucac

SEQ ID NO: 167312 - RNA, 17 nt, Human herpesvirus 6B
cugggauuauucuggua

SEQ ID NO: 167313 - RNA, 13 nt, Human herpesvirus 6B
cuggcugagauuc

SEQ ID NO: 167314 - RNA, 22 nt, Human herpesvirus 6B
cugggaaggaacauacacucuc

SEQ ID NO: 167315 - RNA, 13 nt, Human herpesvirus 6B
cuggaauacaaga

SEQ ID NO: 167316 - RNA, 17 nt, Human herpesvirus 6B
cuggaaucacaaccgaa

SEQ ID NO: 167317 - RNA, 23 nt, Human herpesvirus 6B
cuggcccuuuucgcgauagucau

SEQ ID NO: 167318 - RNA, 14 nt, Human herpesvirus 6B
cugaucucacguca

SEQ ID NO: 167319 - RNA, 20 nt, Human herpesvirus 6B
cugauauggcaaauuucaaa

SEQ ID NO: 167320 - RNA, 15 nt, Human herpesvirus 6B
cugcaggggaccgau

SEQ ID NO: 167321 - RNA, 14 nt, Human herpesvirus 6B
cugcauuaauguca

SEQ ID NO: 167322 - RNA, 15 nt, Human herpesvirus 6B
cugcauuuauaucaa

SEQ ID NO: 167323 - RNA, 16 nt, Human herpesvirus 6B
cugcauuuauaucaaa

SEQ ID NO: 167324 - RNA, 18 nt, Human herpesvirus 6B
cuggaaaacuaugugcau

SEQ ID NO: 167325 - RNA, 21 nt, Human herpesvirus 6B
cuggaaaacuaugugcauucc

SEQ ID NO: 167326 - RNA, 18 nt, Human herpesvirus 6B
cuggaaaacuauuaauaa

SEQ ID NO: 167327 - RNA, 13 nt, Human herpesvirus 6B
cugcccgauugca

SEQ ID NO: 167328 - RNA, 14 nt, Human herpesvirus 6B
cuucaauaaaaacu

SEQ ID NO: 167329 - RNA, 17 nt, Human herpesvirus 6B
cuucaauaaaaacucaa

SEQ ID NO: 167330 - RNA, 18 nt, Human herpesvirus 6B
cuucaauaaaaacucaau

SEQ ID NO: 167331 - RNA, 20 nt, Human herpesvirus 6B
cuucaagcaaagacaucgau

SEQ ID NO: 167332 - RNA, 14 nt, Human herpesvirus 6B
cuucaacauaucac

SEQ ID NO: 167333 - RNA, 18 nt, Human herpesvirus 6B
cuucaaaaucugcuaacg

SEQ ID NO: 167334 - RNA, 13 nt, Human herpesvirus 6B
cuuauuucuaaac

SEQ ID NO: 167335 - RNA, 18 nt, Human herpesvirus 6B
cuuaugaucggcauuugu

SEQ ID NO: 167336 - RNA, 23 nt, Human herpesvirus 6B
cuuauuuaugaaaauugcucuau

SEQ ID NO: 167337 - RNA, 16 nt, Human herpesvirus 6B
cuuauguaaacuaaau

SEQ ID NO: 167338 - RNA, 12 nt, Human herpesvirus 6B
cuucacaucucg

SEQ ID NO: 167339 - RNA, 22 nt, Human herpesvirus 6B
cuucaaagugaauuccuggaca

SEQ ID NO: 167340 - RNA, 13 nt, Human herpesvirus 6B
cuucaccgucucu

SEQ ID NO: 167341 - RNA, 15 nt, Human herpesvirus 6B
cuucaugauauucca

SEQ ID NO: 167342 - RNA, 22 nt, Human herpesvirus 6B
cuuacgugccguguuacugaca

SEQ ID NO: 167343 - RNA, 16 nt, Human herpesvirus 6B
cugucacacucugaac

SEQ ID NO: 167344 - RNA, 11 nt, Human herpesvirus 6B
cugucaaggaa

SEQ ID NO: 167345 - RNA, 15 nt, Human herpesvirus 6B
cuuagaagcauuugc

SEQ ID NO: 167346 - RNA, 18 nt, Human herpesvirus 6B
cuuauaagucaucauaca

SEQ ID NO: 167347 - RNA, 20 nt, Human herpesvirus 6B
cuuauagacuaaacuuaacu

SEQ ID NO: 167348 - RNA, 18 nt, Human herpesvirus 6B
cuuauaaugugaacuaaa

SEQ ID NO: 167349 - RNA, 20 nt, Human herpesvirus 6B
cuuauaauuggaacuaugaa

SEQ ID NO: 167350 - RNA, 19 nt, Human herpesvirus 6B
cuuaucgaaagacacggcg

SEQ ID NO: 167351 - RNA, 13 nt, Human herpesvirus 6B
cuuauaucugaaa

SEQ ID NO: 167352 - RNA, 19 nt, Human herpesvirus 6B
cuuauauuaaagauugcau

SEQ ID NO: 167353 - RNA, 16 nt, Human herpesvirus 6B
cuuaucaaauuacaau

SEQ ID NO: 167354 - RNA, 19 nt, Human herpesvirus 6B
cuuaucaacuauacuuaac

SEQ ID NO: 167355 - RNA, 12 nt, Human herpesvirus 6B
cuuguagcucag

SEQ ID NO: 167356 - RNA, 15 nt, Human herpesvirus 6B
cuuguagcucagugu

SEQ ID NO: 167357 - RNA, 17 nt, Human herpesvirus 6B
cuugaucacaacauaaa

SEQ ID NO: 167358 - RNA, 13 nt, Human herpesvirus 6B
cuugacaguuccc

SEQ ID NO: 167359 - RNA, 16 nt, Human herpesvirus 6B
cuugauguugaucuga

SEQ ID NO: 167360 - RNA, 13 nt, Human herpesvirus 6B
cuugauaaacugu

SEQ ID NO: 167361 - RNA, 21 nt, Human herpesvirus 6B
cuugcacucgaaaacagucua

SEQ ID NO: 167362 - RNA, 16 nt, Human herpesvirus 6B
cuucuauguauuauca

SEQ ID NO: 167363 - RNA, 23 nt, Human herpesvirus 6B
cuucguugccggcuaaacuuuac

SEQ ID NO: 167364 - RNA, 19 nt, Human herpesvirus 6B
cuucguacguacuacagcu

SEQ ID NO: 167365 - RNA, 13 nt, Human herpesvirus 6B
cuucgucuucuaa

SEQ ID NO: 167366 - RNA, 16 nt, Human herpesvirus 6B
cuuccugaaaucugag

SEQ ID NO: 167367 - RNA, 16 nt, Human herpesvirus 6B
cuucuccgcauguaua

SEQ ID NO: 167368 - RNA, 19 nt, Human herpesvirus 6B
cuucuuuuaguauuuacca

SEQ ID NO: 167369 - RNA, 11 nt, Human herpesvirus 6B
cuucuuugucc

SEQ ID NO: 167370 - RNA, 20 nt, Human herpesvirus 6B
cuucucuacaccaggaguuu

SEQ ID NO: 167371 - RNA, 15 nt, Human herpesvirus 6B
cuucuggauacugau

SEQ ID NO: 167372 - RNA, 18 nt, Human herpesvirus 6B
cuucuggauacugaugaa

SEQ ID NO: 167373 - RNA, 14 nt, Human herpesvirus 6B
aaaauauuauucaa

SEQ ID NO: 167374 - RNA, 16 nt, Human herpesvirus 6B
aaaauauucuacuuca

SEQ ID NO: 167375 - RNA, 21 nt, Human herpesvirus 6B
aaaauacuauguggaaauuaa

SEQ ID NO: 167376 - RNA, 18 nt, Human herpesvirus 6B
aaaauacgcuaagcagaa

SEQ ID NO: 167377 - RNA, 21 nt, Human herpesvirus 6B
aaaaucaucugacucgugcca

SEQ ID NO: 167378 - RNA, 21 nt, Human herpesvirus 6B
ccacauuuccuucaaagugaa

SEQ ID NO: 167379 - RNA, 21 nt, Human herpesvirus 6B
aaaauaccugacuguucugcc

SEQ ID NO: 167380 - RNA, 10 nt, Human herpesvirus 6B
aaaaugcaca

SEQ ID NO: 167381 - RNA, 18 nt, Human herpesvirus 6B
aaaaugcacaauuuagcc

SEQ ID NO: 167382 - RNA, 13 nt, Human herpesvirus 6B
aaaaugacucuaa

SEQ ID NO: 167383 - RNA, 21 nt, Human herpesvirus 6B
aaaaugaucgccccagacuua

SEQ ID NO: 167384 - RNA, 13 nt, Human herpesvirus 6B
aaaaucugcuaac

SEQ ID NO: 167385 - RNA, 17 nt, Human herpesvirus 6B
aaaauguuggcgccaaa

SEQ ID NO: 167386 - RNA, 19 nt, Human herpesvirus 6B
aaaauguuggcgccaaaaa

SEQ ID NO: 167387 - RNA, 16 nt, Human herpesvirus 6B
ccaacgcuaaauuuau

SEQ ID NO: 167388 - RNA, 19 nt, Human herpesvirus 6B
ccaacgcuaaauuuaucaa

SEQ ID NO: 167389 - RNA, 15 nt, Human herpesvirus 6B
ccaacgucaugcaaa

SEQ ID NO: 167390 - RNA, 18 nt, Human herpesvirus 6B
ccaacgcgacacggugag

SEQ ID NO: 167391 - RNA, 23 nt, Human herpesvirus 6B
ccacagauugcauaugucuguua

SEQ ID NO: 167392 - RNA, 17 nt, Human herpesvirus 6B
ccaaaaugacucuaaau

SEQ ID NO: 167393 - RNA, 13 nt, Human herpesvirus 6B
ccaaaauauaauu

SEQ ID NO: 167394 - RNA, 21 nt, Human herpesvirus 6B
cauuuuuuaauccauauuugg

SEQ ID NO: 167395 - RNA, 20 nt, Human herpesvirus 6B
ccaacauguauucuccucaa

SEQ ID NO: 167396 - RNA, 17 nt, Human herpesvirus 6B
ccaaccaguuaccguga

SEQ ID NO: 167397 - RNA, 15 nt, Human herpesvirus 6B
ccauaaagaacacag

SEQ ID NO: 167398 - RNA, 20 nt, Human herpesvirus 6B
ccauggcccuacuacagugg

SEQ ID NO: 167399 - RNA, 10 nt, Human herpesvirus 6B
ccaugccauu

SEQ ID NO: 167400 - RNA, 16 nt, Human herpesvirus 6B
ccacuacuaaagcaau

SEQ ID NO: 167401 - RNA, 17 nt, Human herpesvirus 6B
ccacugaagcaaagcac

SEQ ID NO: 167402 - RNA, 18 nt, Human herpesvirus 6B
ccaccuggaaaaacugac

SEQ ID NO: 167403 - RNA, 21 nt, Human herpesvirus 6B
ccaccuguuuccaauguccau

SEQ ID NO: 167404 - RNA, 19 nt, Human herpesvirus 6B
ccagcaccuuagcucuaau

SEQ ID NO: 167405 - RNA, 18 nt, Human herpesvirus 6B
ccagauucggcugcuuau

SEQ ID NO: 167406 - RNA, 20 nt, Human herpesvirus 6B
ccagauaaacaaaaauccag

SEQ ID NO: 167407 - RNA, 20 nt, Human herpesvirus 6B
ccagauacugcacaaacgaa

SEQ ID NO: 167408 - RNA, 22 nt, Human herpesvirus 6B
cauccagaaaagcaaacaugca

SEQ ID NO: 167409 - RNA, 13 nt, Human herpesvirus 6B
cauccaaauacac

SEQ ID NO: 167410 - RNA, 13 nt, Human herpesvirus 6B
cauccgucaugua

SEQ ID NO: 167411 - RNA, 15 nt, Human herpesvirus 6B
cauccgcuaagagau

SEQ ID NO: 167412 - RNA, 20 nt, Human herpesvirus 6B
caucccuaugucaaugugaa

SEQ ID NO: 167413 - RNA, 22 nt, Human herpesvirus 6B
caucccuaugucaaugugaaua

SEQ ID NO: 167414 - RNA, 18 nt, Human herpesvirus 6B
caucgacuucaaacaccu

SEQ ID NO: 167415 - RNA, 23 nt, Human herpesvirus 6B
caucuuucaaaagcaugaaauuu

SEQ ID NO: 167416 - RNA, 15 nt, Human herpesvirus 6B
caucuuaacagacua

SEQ ID NO: 167417 - RNA, 15 nt, Human herpesvirus 6B
caugaacaucgucau

SEQ ID NO: 167418 - RNA, 20 nt, Human herpesvirus 6B
caugaaaaucauuaccagua

SEQ ID NO: 167419 - RNA, 15 nt, Human herpesvirus 6B
caucuuuucaauuac

SEQ ID NO: 167420 - RNA, 18 nt, Human herpesvirus 6B
caugaaaacauucagaaa

SEQ ID NO: 167421 - RNA, 15 nt, Human herpesvirus 6B
caugaacuacaguga

SEQ ID NO: 167422 - RNA, 17 nt, Human herpesvirus 6B
caucacaugccaugcaa

SEQ ID NO: 167423 - RNA, 20 nt, Human herpesvirus 6B
caucacgcauagaccaacca

SEQ ID NO: 167424 - RNA, 18 nt, Human herpesvirus 6B
caucacgucccauucaca

SEQ ID NO: 167425 - RNA, 19 nt, Human herpesvirus 6B
caucacgucccauucacau

SEQ ID NO: 167426 - RNA, 13 nt, Human herpesvirus 6B
caucaacguaaga

SEQ ID NO: 167427 - RNA, 21 nt, Human herpesvirus 6B
caucaacuauuuaacauccaa

SEQ ID NO: 167428 - RNA, 22 nt, Human herpesvirus 6B
caucagccauuucgccaaaaau

SEQ ID NO: 167429 - RNA, 16 nt, Human herpesvirus 6B
cauucgauuaaugcca

SEQ ID NO: 167430 - RNA, 18 nt, Human herpesvirus 6B
cauucgauuaaugccaca

SEQ ID NO: 167431 - RNA, 13 nt, Human herpesvirus 6B
cauuccgagcuuu

SEQ ID NO: 167432 - RNA, 14 nt, Human herpesvirus 6B
cauucaacauccua

SEQ ID NO: 167433 - RNA, 20 nt, Human herpesvirus 6B
cauucacaaggaaugugcag

SEQ ID NO: 167434 - RNA, 14 nt, Human herpesvirus 6B
cauucacaaucgca

SEQ ID NO: 167435 - RNA, 14 nt, Human herpesvirus 6B
cauucugcauuuau

SEQ ID NO: 167436 - RNA, 13 nt, Human herpesvirus 6B
cauucgccauaua

SEQ ID NO: 167437 - RNA, 23 nt, Human herpesvirus 6B
cauugguaauccaugaacuacag

SEQ ID NO: 167438 - RNA, 18 nt, Human herpesvirus 6B
cauugguacucuuugucu

SEQ ID NO: 167439 - RNA, 14 nt, Human herpesvirus 6B
cauuugugcucgca

SEQ ID NO: 167440 - RNA, 13 nt, Human herpesvirus 6B
cauuguguuacac

SEQ ID NO: 167441 - RNA, 17 nt, Human herpesvirus 6B
cauuguugauagguaaa

SEQ ID NO: 167442 - RNA, 18 nt, Human herpesvirus 6B
caugauugcaacaaaagg

SEQ ID NO: 167443 - RNA, 14 nt, Human herpesvirus 6B
caugauagggaaua

SEQ ID NO: 167444 - RNA, 16 nt, Human herpesvirus 6B
caugauauuccaggca

SEQ ID NO: 167445 - RNA, 18 nt, Human herpesvirus 6B
caugauauuccaggcaau

SEQ ID NO: 167446 - RNA, 16 nt, Human herpesvirus 6B
caugacggacuuggaa

SEQ ID NO: 167447 - RNA, 15 nt, Human herpesvirus 6B
caugagcuaaaccau

SEQ ID NO: 167448 - RNA, 18 nt, Human herpesvirus 6B
caugagccggcucaagau

SEQ ID NO: 167449 - RNA, 21 nt, Human herpesvirus 6B
cauggcgcacgcuaaaaagca

SEQ ID NO: 167450 - RNA, 20 nt, Human herpesvirus 6B
cauggcgucgaagcauugua

SEQ ID NO: 167451 - RNA, 14 nt, Human herpesvirus 6B
cauggcgacucaaa

SEQ ID NO: 167452 - RNA, 19 nt, Human herpesvirus 6B
cauguaaaauuaccucauc

SEQ ID NO: 167453 - RNA, 16 nt, Human herpesvirus 6B
cauuauuuugucuucg

SEQ ID NO: 167454 - RNA, 23 nt, Human herpesvirus 6B
cauguaguggucgucggauuaaa

SEQ ID NO: 167455 - RNA, 19 nt, Human herpesvirus 6B
cauuauccaggcaugugau

SEQ ID NO: 167456 - RNA, 14 nt, Human herpesvirus 6B
ccgaauucuuacca

SEQ ID NO: 167457 - RNA, 17 nt, Human herpesvirus 6B
cccuuguaauccaucag

SEQ ID NO: 167458 - RNA, 17 nt, Human herpesvirus 6B
ccgcaaaaaagcgccaa

SEQ ID NO: 167459 - RNA, 17 nt, Human herpesvirus 6B
ccgagcgggcuccgucg

SEQ ID NO: 167460 - RNA, 18 nt, Human herpesvirus 6B
ccgacccuagcuuuucau

SEQ ID NO: 167461 - RNA, 22 nt, Human herpesvirus 6B
ccgcagcuccuuccgcuaccgc

SEQ ID NO: 167462 - RNA, 22 nt, Human herpesvirus 6B
ccuauaaaaaaagcaaauacua

SEQ ID NO: 167463 - RNA, 19 nt, Human herpesvirus 6B
ccuauaugcgaauguuaaa

SEQ ID NO: 167464 - RNA, 23 nt, Human herpesvirus 6B
ccuauauuuucguugaagaauaa

SEQ ID NO: 167465 - RNA, 17 nt, Human herpesvirus 6B
ccgucucugaagcaaaa

SEQ ID NO: 167466 - RNA, 13 nt, Human herpesvirus 6B
ccgucgagacugg

SEQ ID NO: 167467 - RNA, 15 nt, Human herpesvirus 6B
ccgguuaaagcagaa

SEQ ID NO: 167468 - RNA, 19 nt, Human herpesvirus 6B
ccgguuaaagcagaaggcc

SEQ ID NO: 167469 - RNA, 19 nt, Human herpesvirus 6B
ccguauucuugagcuugua

SEQ ID NO: 167470 - RNA, 19 nt, Human herpesvirus 6B
ccguagcggccgcaaaaac

SEQ ID NO: 167471 - RNA, 19 nt, Human herpesvirus 6B
ccucaacuaaaucaugucu

SEQ ID NO: 167472 - RNA, 23 nt, Human herpesvirus 6B
ccucaacuaaaucaugucuuaca

SEQ ID NO: 167473 - RNA, 18 nt, Human herpesvirus 6B
ccucaaggucaaaaaacu

SEQ ID NO: 167474 - RNA, 18 nt, Human herpesvirus 6B
ccucgucuguugcuguag

SEQ ID NO: 167475 - RNA, 14 nt, Human herpesvirus 6B
ccucugcaauagca

SEQ ID NO: 167476 - RNA, 14 nt, Human herpesvirus 6B
ccugaucacagaga

SEQ ID NO: 167477 - RNA, 18 nt, Human herpesvirus 6B
ccugaucucacgucacag

SEQ ID NO: 167478 - RNA, 13 nt, Human herpesvirus 6B
ccuugauguuucc

SEQ ID NO: 167479 - RNA, 17 nt, Human herpesvirus 6B
ccuugauguuuccugaa

SEQ ID NO: 167480 - RNA, 18 nt, Human herpesvirus 6B
ccuugauguuuccugaau

SEQ ID NO: 167481 - RNA, 15 nt, Human herpesvirus 6B
ccuucgguacaguga

SEQ ID NO: 167482 - RNA, 15 nt, Human herpesvirus 6B
ccuucccuaucacaa

SEQ ID NO: 167483 - RNA, 23 nt, Human herpesvirus 6B
ccuucaugauauuccaggcaaua

SEQ ID NO: 167484 - RNA, 19 nt, Human herpesvirus 6B
ccuggaaaaacugacugac

SEQ ID NO: 167485 - RNA, 20 nt, Human herpesvirus 6B
ccuuugugugauauuauucu

SEQ ID NO: 167486 - RNA, 23 nt, Human herpesvirus 6B
ccuuugugugauauuauucucaa

SEQ ID NO: 167487 - RNA, 15 nt, Human herpesvirus 6B
ccuuuguccuuacaa

SEQ ID NO: 167488 - RNA, 20 nt, Human herpesvirus 6B
ccuuuguccuuacaaaccuu

SEQ ID NO: 167489 - RNA, 16 nt, Human herpesvirus 6B
ccuuucaauagaugau

SEQ ID NO: 167490 - RNA, 17 nt, Human herpesvirus 6B
cgaaaacuuuuugccga

SEQ ID NO: 167491 - RNA, 18 nt, Human herpesvirus 6B
cgaaauacguucacauua

SEQ ID NO: 167492 - RNA, 13 nt, Human herpesvirus 6B
cgaaauacuucuc

SEQ ID NO: 167493 - RNA, 22 nt, Human herpesvirus 6B
cgaaauagggucaacuguuacu

SEQ ID NO: 167494 - RNA, 21 nt, Human herpesvirus 6B
cgaauugugucguuucuguga

SEQ ID NO: 167495 - RNA, 20 nt, Human herpesvirus 6B
cgaauuguugucucuuuaua

SEQ ID NO: 167496 - RNA, 19 nt, Human herpesvirus 6B
cgacaaacuacugaucgcc

SEQ ID NO: 167497 - RNA, 20 nt, Human herpesvirus 6B
cgacaaagcuauucuaaaua

SEQ ID NO: 167498 - RNA, 16 nt, Human herpesvirus 6B
cgaauucuuaccaaga

SEQ ID NO: 167499 - RNA, 23 nt, Human herpesvirus 6B
cgaauguacacagucacacacaa

SEQ ID NO: 167500 - RNA, 18 nt, Human herpesvirus 6B
cgaaugcccacaccaucu

SEQ ID NO: 167501 - RNA, 17 nt, Human herpesvirus 6B
cgaaucuaaauuggucu

SEQ ID NO: 167502 - RNA, 19 nt, Human herpesvirus 6B
cgaaucuaaauuggucucu

SEQ ID NO: 167503 - RNA, 14 nt, Human herpesvirus 6B
cgaagacauuaaua

SEQ ID NO: 167504 - RNA, 17 nt, Human herpesvirus 6B
cgaagccuguccgugac

SEQ ID NO: 167505 - RNA, 17 nt, Human herpesvirus 6B
cgagagcugacugaaag

SEQ ID NO: 167506 - RNA, 21 nt, Human herpesvirus 6B
cgagaucguuuugcaacuuaa

SEQ ID NO: 167507 - RNA, 15 nt, Human herpesvirus 6B
cgagaccgacaguau

SEQ ID NO: 167508 - RNA, 13 nt, Human herpesvirus 6B
cgaccugaucaca

SEQ ID NO: 167509 - RNA, 20 nt, Human herpesvirus 6B
cgacaacgugcucgugaaaa

SEQ ID NO: 167510 - RNA, 16 nt, Human herpesvirus 6B
cgacaauccuaauuca

SEQ ID NO: 167511 - RNA, 14 nt, Human herpesvirus 6B
cgacaugcuucaca

SEQ ID NO: 167512 - RNA, 17 nt, Human herpesvirus 6B
cgauaaauugauaauaa

SEQ ID NO: 167513 - RNA, 14 nt, Human herpesvirus 6B
cgauaaauuugcca

SEQ ID NO: 167514 - RNA, 20 nt, Human herpesvirus 6B
cgauaaauuugccaccagau

SEQ ID NO: 167515 - RNA, 16 nt, Human herpesvirus 6B
cgagucuugugugaaa

SEQ ID NO: 167516 - RNA, 16 nt, Human herpesvirus 6B
cgaguuuagacagagu

SEQ ID NO: 167517 - RNA, 13 nt, Human herpesvirus 6B
cgauauagauuau

SEQ ID NO: 167518 - RNA, 18 nt, Human herpesvirus 6B
cgaucucauaugcaucag

SEQ ID NO: 167519 - RNA, 22 nt, Human herpesvirus 6B
cgaucuuauauuaaagauugca

SEQ ID NO: 167520 - RNA, 16 nt, Human herpesvirus 6B
cgaugaaacugucgaa

SEQ ID NO: 167521 - RNA, 11 nt, Human herpesvirus 6B
cgauugccaaa

SEQ ID NO: 167522 - RNA, 17 nt, Human herpesvirus 6B
cgaugcucucagaucau

SEQ ID NO: 167523 - RNA, 21 nt, Human herpesvirus 6B
cgauuacgucuuuuuguucag

SEQ ID NO: 167524 - RNA, 15 nt, Human herpesvirus 6B
cgauguggaacggaa

SEQ ID NO: 167525 - RNA, 21 nt, Human herpesvirus 6B
cgauuaaugccacagguacau

SEQ ID NO: 167526 - RNA, 11 nt, Human herpesvirus 6B
cgauguucucu

SEQ ID NO: 167527 - RNA, 19 nt, Human herpesvirus 6B
uuugaggcguuuaccggua

SEQ ID NO: 167528 - RNA, 16 nt, Human herpesvirus 6B
uuugagagcuacacau

SEQ ID NO: 167529 - RNA, 22 nt, Human herpesvirus 6B
uuugacgguucaccacugugau

SEQ ID NO: 167530 - RNA, 22 nt, Human herpesvirus 6B
uuugacuauuucgaaagaguua

SEQ ID NO: 167531 - RNA, 16 nt, Human herpesvirus 6B
uuugauugcaaucaca

SEQ ID NO: 167532 - RNA, 17 nt, Human herpesvirus 6B
uuugauugcaaucacau

SEQ ID NO: 167533 - RNA, 11 nt, Human herpesvirus 6B
uuugcaauuug

SEQ ID NO: 167534 - RNA, 17 nt, Human herpesvirus 6B
uuugcagaaugaaugua

SEQ ID NO: 167535 - RNA, 21 nt, Human herpesvirus 6B
uuucuuuuuaaaaucaaaaaa

SEQ ID NO: 167536 - RNA, 15 nt, Human herpesvirus 6B
uuucuuugacauuua

SEQ ID NO: 167537 - RNA, 23 nt, Human herpesvirus 6B
uuucuuugacauuuaccagagau

SEQ ID NO: 167538 - RNA, 18 nt, Human herpesvirus 6B
uuugaauucugcucguuu

SEQ ID NO: 167539 - RNA, 22 nt, Human herpesvirus 6B
uuugaagauaugaaugaucacu

SEQ ID NO: 167540 - RNA, 18 nt, Human herpesvirus 6B
uuucuugaagaugugaua

SEQ ID NO: 167541 - RNA, 20 nt, Human herpesvirus 6B
uuucugagauuuuucuggga

SEQ ID NO: 167542 - RNA, 13 nt, Human herpesvirus 6B
uuucugaagacag

SEQ ID NO: 167543 - RNA, 10 nt, Human herpesvirus 6B
uuucugcaaa

SEQ ID NO: 167544 - RNA, 16 nt, Human herpesvirus 6B
ugccuguagggaugua

SEQ ID NO: 167545 - RNA, 18 nt, Human herpesvirus 6B
ugccuguagggauguaga

SEQ ID NO: 167546 - RNA, 19 nt, Human herpesvirus 6B
ugccuguagggauguagau

SEQ ID NO: 167547 - RNA, 16 nt, Human herpesvirus 6B
ugccuauuaaugcuua

SEQ ID NO: 167548 - RNA, 22 nt, Human herpesvirus 6B
ugccuacauaugccgacuguuu

SEQ ID NO: 167549 - RNA, 15 nt, Human herpesvirus 6B
ugccgacaagcuuuu

SEQ ID NO: 167550 - RNA, 22 nt, Human herpesvirus 6B
ugcccucguuuuccgaaaucaa

SEQ ID NO: 167551 - RNA, 19 nt, Human herpesvirus 6B
ugcguucugcguuguuuca

SEQ ID NO: 167552 - RNA, 15 nt, Human herpesvirus 6B
ugcguuacaagcaug

SEQ ID NO: 167553 - RNA, 17 nt, Human herpesvirus 6B
ugcguaaucgcaagaaa

SEQ ID NO: 167554 - RNA, 21 nt, Human herpesvirus 6B
ugcgucuguuuauuaccagua

SEQ ID NO: 167555 - RNA, 16 nt, Human herpesvirus 6B
ugcggaacaccagcau

SEQ ID NO: 167556 - RNA, 15 nt, Human herpesvirus 6B
ugcggugcauaacau

SEQ ID NO: 167557 - RNA, 12 nt, Human herpesvirus 6B
ugcgguguuuga

SEQ ID NO: 167558 - RNA, 19 nt, Human herpesvirus 6B
ugcgaauguuaaaguaugu

SEQ ID NO: 167559 - RNA, 17 nt, Human herpesvirus 6B
ugcgcaugaaaauauca

SEQ ID NO: 167560 - RNA, 15 nt, Human herpesvirus 6B
ugcgcguucaggcau

SEQ ID NO: 167561 - RNA, 13 nt, Human herpesvirus 6B
ugcauaacaucuc

SEQ ID NO: 167562 - RNA, 14 nt, Human herpesvirus 6B
ugcauaacaucuca

SEQ ID NO: 167563 - RNA, 22 nt, Human herpesvirus 6B
ugcagccuaccauggccaauca

SEQ ID NO: 167564 - RNA, 19 nt, Human herpesvirus 6B
ugcagcgauauggaaacac

SEQ ID NO: 167565 - RNA, 11 nt, Human herpesvirus 6B
ugcaggugcug

SEQ ID NO: 167566 - RNA, 13 nt, Human herpesvirus 6B
ugcaggugcugcu

SEQ ID NO: 167567 - RNA, 14 nt, Human herpesvirus 6B
ugcaggugcugcua

SEQ ID NO: 167568 - RNA, 17 nt, Human herpesvirus 6B
ugcaacacaacaaacau

SEQ ID NO: 167569 - RNA, 13 nt, Human herpesvirus 6B
ugcaaaugcucaa

SEQ ID NO: 167570 - RNA, 17 nt, Human herpesvirus 6B
ugauuucagaauugagu

SEQ ID NO: 167571 - RNA, 22 nt, Human herpesvirus 6B
ugauuuuucugccuauuucucu

SEQ ID NO: 167572 - RNA, 15 nt, Human herpesvirus 6B
ugauuugucgaauca

SEQ ID NO: 167573 - RNA, 16 nt, Human herpesvirus 6B
ugcaaaaacaaaugaa

SEQ ID NO: 167574 - RNA, 15 nt, Human herpesvirus 6B
ugcaaacugacugua

SEQ ID NO: 167575 - RNA, 13 nt, Human herpesvirus 6B
ugccaaccaaaug

SEQ ID NO: 167576 - RNA, 15 nt, Human herpesvirus 6B
ugccaguaagucuuc

SEQ ID NO: 167577 - RNA, 16 nt, Human herpesvirus 6B
ugccagaaaaacuaua

SEQ ID NO: 167578 - RNA, 17 nt, Human herpesvirus 6B
ugcaugcuaauaaaaua

SEQ ID NO: 167579 - RNA, 13 nt, Human herpesvirus 6B
ugcaucucuacuu

SEQ ID NO: 167580 - RNA, 16 nt, Human herpesvirus 6B
ugcauuaucgugagac

SEQ ID NO: 167581 - RNA, 22 nt, Human herpesvirus 6B
ugcauucacaaggaaugugcag

SEQ ID NO: 167582 - RNA, 15 nt, Human herpesvirus 6B
ugcaugucgaacagc

SEQ ID NO: 167583 - RNA, 20 nt, Human herpesvirus 6B
ugcauguggcaagugcuggu

SEQ ID NO: 167584 - RNA, 16 nt, Human herpesvirus 6B
ucugugaaucugcuga

SEQ ID NO: 167585 - RNA, 20 nt, Human herpesvirus 6B
ucugugaauucuaaauauca

SEQ ID NO: 167586 - RNA, 20 nt, Human herpesvirus 6B
ucuguauuuuucuuuacaga

SEQ ID NO: 167587 - RNA, 14 nt, Human herpesvirus 6B
ucuggugaauguuu

SEQ ID NO: 167588 - RNA, 18 nt, Human herpesvirus 6B
ucuuugugcgucagcuuu

SEQ ID NO: 167589 - RNA, 17 nt, Human herpesvirus 6B
ucuuuuaguauuuacca

SEQ ID NO: 167590 - RNA, 20 nt, Human herpesvirus 6B
ucuggccucggaacugcugg

SEQ ID NO: 167591 - RNA, 24 nt, Human herpesvirus 6B
ucugggugaguuuuaucacuuuca

SEQ ID NO: 167592 - RNA, 12 nt, Human herpesvirus 6B
ucuggauacuga

SEQ ID NO: 167593 - RNA, 15 nt, Human herpesvirus 6B
ugaaaagugcuuuau

SEQ ID NO: 167594 - RNA, 12 nt, Human herpesvirus 6B
ugaaaauaucau

SEQ ID NO: 167595 - RNA, 15 nt, Human herpesvirus 6B
ugaaacguugugcug

SEQ ID NO: 167596 - RNA, 22 nt, Human herpesvirus 6B
ugaaaucacaccaaugaucaca

SEQ ID NO: 167597 - RNA, 19 nt, Human herpesvirus 6B
ugaaaucgcauuagucaca

SEQ ID NO: 167598 - RNA, 15 nt, Human herpesvirus 6B
ugaaaucuaccauaa

SEQ ID NO: 167599 - RNA, 17 nt, Human herpesvirus 6B
ugaaaucuuuccugcua

SEQ ID NO: 167600 - RNA, 18 nt, Human herpesvirus 6B
ugaaaucuuuccugcuaa

SEQ ID NO: 167601 - RNA, 19 nt, Human herpesvirus 6B
ugaauacagcugcagggau

SEQ ID NO: 167602 - RNA, 18 nt, Human herpesvirus 6B
ugaaacugagauguaaau

SEQ ID NO: 167603 - RNA, 19 nt, Human herpesvirus 6B
ugaaacuccacgaucuaca

SEQ ID NO: 167604 - RNA, 14 nt, Human herpesvirus 6B
ugaaauaaaguuua

SEQ ID NO: 167605 - RNA, 10 nt, Human herpesvirus 6B
ugaaagcagu

SEQ ID NO: 167606 - RNA, 15 nt, Human herpesvirus 6B
ugaaagcgcgccaca

SEQ ID NO: 167607 - RNA, 20 nt, Human herpesvirus 6B
ugaaagaguuguauauggug

SEQ ID NO: 167608 - RNA, 13 nt, Human herpesvirus 6B
ugacaucuuuuau

SEQ ID NO: 167609 - RNA, 20 nt, Human herpesvirus 6B
ugacaucacgucccauucac

SEQ ID NO: 167610 - RNA, 15 nt, Human herpesvirus 6B
ugacaucgcuaagau

SEQ ID NO: 167611 - RNA, 22 nt, Human herpesvirus 6B
ugacaucggcuuggauagaaau

SEQ ID NO: 167612 - RNA, 11 nt, Human herpesvirus 6B
ugaaugugcuu

SEQ ID NO: 167613 - RNA, 20 nt, Human herpesvirus 6B
ugacagucaccgcauaucac

SEQ ID NO: 167614 - RNA, 15 nt, Human herpesvirus 6B
ugaaugaucacuauc

SEQ ID NO: 167615 - RNA, 19 nt, Human herpesvirus 6B
ugaaugaucacuaucaggg

SEQ ID NO: 167616 - RNA, 13 nt, Human herpesvirus 6B
ugauuaugccaaa

SEQ ID NO: 167617 - RNA, 23 nt, Human herpesvirus 6B
ugauuaggggacagagccuagac

SEQ ID NO: 167618 - RNA, 18 nt, Human herpesvirus 6B
ugauucuguuuucuacgu

SEQ ID NO: 167619 - RNA, 12 nt, Human herpesvirus 6B
ugauugcaacaa

SEQ ID NO: 167620 - RNA, 15 nt, Human herpesvirus 6B
ugauugcaacaaaag

SEQ ID NO: 167621 - RNA, 19 nt, Human herpesvirus 6B
ugauugggagcucacugua

SEQ ID NO: 167622 - RNA, 22 nt, Human herpesvirus 6B
ugauugauuuccguauucuuga

SEQ ID NO: 167623 - RNA, 11 nt, Human herpesvirus 6B
ugauugcaauc

SEQ ID NO: 167624 - RNA, 18 nt, Human herpesvirus 6B
ugagugugcaucagcaua

SEQ ID NO: 167625 - RNA, 11 nt, Human herpesvirus 6B
ugagugcuauu

SEQ ID NO: 167626 - RNA, 17 nt, Human herpesvirus 6B
ugaguuuaucgugcaau

SEQ ID NO: 167627 - RNA, 14 nt, Human herpesvirus 6B
ugaguuuccugcaa

SEQ ID NO: 167628 - RNA, 18 nt, Human herpesvirus 6B
ugaguaauuggacauugu

SEQ ID NO: 167629 - RNA, 15 nt, Human herpesvirus 6B
ugaguagcuuugaca

SEQ ID NO: 167630 - RNA, 21 nt, Human herpesvirus 6B
ugauacggcggcggaagugaa

SEQ ID NO: 167631 - RNA, 15 nt, Human herpesvirus 6B
ugauacuacguguaa

SEQ ID NO: 167632 - RNA, 19 nt, Human herpesvirus 6B
ugauaccgucuuugcauau

SEQ ID NO: 167633 - RNA, 22 nt, Human herpesvirus 6B
ugauaccgucuuugcauauuau

SEQ ID NO: 167634 - RNA, 23 nt, Human herpesvirus 6B
ugagcugacaucugcaaaaacaa

SEQ ID NO: 167635 - RNA, 22 nt, Human herpesvirus 6B
ugagcuuguagauaauuuccaa

SEQ ID NO: 167636 - RNA, 14 nt, Human herpesvirus 6B
ugacggacuuggaa

SEQ ID NO: 167637 - RNA, 15 nt, Human herpesvirus 6B
ugaggaggagggacc

SEQ ID NO: 167638 - RNA, 18 nt, Human herpesvirus 6B
ugaggauuugcuugucac

SEQ ID NO: 167639 - RNA, 14 nt, Human herpesvirus 6B
ugaggugauuugaa

SEQ ID NO: 167640 - RNA, 17 nt, Human herpesvirus 6B
ugacgaggauggaugug

SEQ ID NO: 167641 - RNA, 22 nt, Human herpesvirus 6B
ugaccgcagaggaucuguucau

SEQ ID NO: 167642 - RNA, 18 nt, Human herpesvirus 6B
ugaccguucaccauucca

SEQ ID NO: 167643 - RNA, 22 nt, Human herpesvirus 6B
ugaccguaggaagaucaugaca

SEQ ID NO: 167644 - RNA, 17 nt, Human herpesvirus 6B
ugacccgauguggaacg

SEQ ID NO: 167645 - RNA, 15 nt, Human herpesvirus 6B
ugacauugauuccac

SEQ ID NO: 167646 - RNA, 17 nt, Human herpesvirus 6B
ugacauuuaccagagau

SEQ ID NO: 167647 - RNA, 23 nt, Human herpesvirus 6B
ugaccagagauucuauguacuga

SEQ ID NO: 167648 - RNA, 20 nt, Human herpesvirus 6B
ucucccuacgcuaacgaaca

SEQ ID NO: 167649 - RNA, 13 nt, Human herpesvirus 6B
ucuccugaucuca

SEQ ID NO: 167650 - RNA, 17 nt, Human herpesvirus 6B
ucuccucaacacucuca

SEQ ID NO: 167651 - RNA, 20 nt, Human herpesvirus 6B
ucuccugucauuuuuacuca

SEQ ID NO: 167652 - RNA, 12 nt, Human herpesvirus 6B
ucugaucccuua

SEQ ID NO: 167653 - RNA, 13 nt, Human herpesvirus 6B
ucucauaugcauc

SEQ ID NO: 167654 - RNA, 15 nt, Human herpesvirus 6B
ucucauaugcaucag

SEQ ID NO: 167655 - RNA, 21 nt, Human herpesvirus 6B
ucuccaaaagcgccugccuac

SEQ ID NO: 167656 - RNA, 15 nt, Human herpesvirus 6B
ucuccacccaucucc

SEQ ID NO: 167657 - RNA, 16 nt, Human herpesvirus 6B
ucuccacccaucuccu

SEQ ID NO: 167658 - RNA, 18 nt, Human herpesvirus 6B
ucugccccccuucaucca

SEQ ID NO: 167659 - RNA, 19 nt, Human herpesvirus 6B
ucugccccccuucauccag

SEQ ID NO: 167660 - RNA, 22 nt, Human herpesvirus 6B
ucugcguuguuucaguuucaaa

SEQ ID NO: 167661 - RNA, 17 nt, Human herpesvirus 6B
ucugcuugcaaauauua

SEQ ID NO: 167662 - RNA, 14 nt, Human herpesvirus 6B
ucuaauaaaauaca

SEQ ID NO: 167663 - RNA, 21 nt, Human herpesvirus 6B
ucuauuguuuaaaaggaauag

SEQ ID NO: 167664 - RNA, 21 nt, Human herpesvirus 6B
ucucaaauuuuccaaacauua

SEQ ID NO: 167665 - RNA, 16 nt, Human herpesvirus 6B
ucucacgucacaguuu

SEQ ID NO: 167666 - RNA, 19 nt, Human herpesvirus 6B
ucucagauauauacuuacu

SEQ ID NO: 167667 - RNA, 15 nt, Human herpesvirus 6B
ucguucuuaacauau

SEQ ID NO: 167668 - RNA, 14 nt, Human herpesvirus 6B
ucguucuugacaga

SEQ ID NO: 167669 - RNA, 20 nt, Human herpesvirus 6B
ucguugaagaauaagccuaa

SEQ ID NO: 167670 - RNA, 19 nt, Human herpesvirus 6B
ucguugucugacuuagaua

SEQ ID NO: 167671 - RNA, 16 nt, Human herpesvirus 6B
ucuaaaacaagaccga

SEQ ID NO: 167672 - RNA, 20 nt, Human herpesvirus 6B
ucgugguugucuuuguccua

SEQ ID NO: 167673 - RNA, 16 nt, Human herpesvirus 6B
ucgugugcuacauuua

SEQ ID NO: 167674 - RNA, 15 nt, Human herpesvirus 6B
ucuaaauaucaugaa

SEQ ID NO: 167675 - RNA, 15 nt, Human herpesvirus 6B
ucuaaauuggucucu

SEQ ID NO: 167676 - RNA, 22 nt, Human herpesvirus 6B
ucuaacccaugaaaaucauuac

SEQ ID NO: 167677 - RNA, 13 nt, Human herpesvirus 6B
ucuaagauauuau

SEQ ID NO: 167678 - RNA, 23 nt, Human herpesvirus 6B
ucggugauaccgucuuugcauau

SEQ ID NO: 167679 - RNA, 14 nt, Human herpesvirus 6B
ucggucuacugugu

SEQ ID NO: 167680 - RNA, 22 nt, Human herpesvirus 6B
ucgguccguuuuuucugcaaaa

SEQ ID NO: 167681 - RNA, 14 nt, Human herpesvirus 6B
ucggcaacugaauu

SEQ ID NO: 167682 - RNA, 23 nt, Human herpesvirus 6B
ucggacaaugcggaacaccagca

SEQ ID NO: 167683 - RNA, 16 nt, Human herpesvirus 6B
ucggaagaaaagcuau

SEQ ID NO: 167684 - RNA, 22 nt, Human herpesvirus 6B
ucgugagacauuuucuauaaag

SEQ ID NO: 167685 - RNA, 15 nt, Human herpesvirus 6B
ucgucugauacuuga

SEQ ID NO: 167686 - RNA, 16 nt, Human herpesvirus 6B
ucgucugauacuugaa

SEQ ID NO: 167687 - RNA, 17 nt, Human herpesvirus 6B
ucgagaccgacaguauu

SEQ ID NO: 167688 - RNA, 22 nt, Human herpesvirus 6B
ucgaauguuacagauacaaaga

SEQ ID NO: 167689 - RNA, 14 nt, Human herpesvirus 6B
ucgaaugagcuuau

SEQ ID NO: 167690 - RNA, 20 nt, Human herpesvirus 6B
ucgaaggccuucaugagccg

SEQ ID NO: 167691 - RNA, 17 nt, Human herpesvirus 6B
ucgcucagcguggaauu

SEQ ID NO: 167692 - RNA, 13 nt, Human herpesvirus 6B
ucgacagagauau

SEQ ID NO: 167693 - RNA, 13 nt, Human herpesvirus 6B
ucgcguugauaca

SEQ ID NO: 167694 - RNA, 12 nt, Human herpesvirus 6B
uccugaucucac

SEQ ID NO: 167695 - RNA, 15 nt, Human herpesvirus 6B
uccugaucucacguc

SEQ ID NO: 167696 - RNA, 14 nt, Human herpesvirus 6B
uccugaaaucugag

SEQ ID NO: 167697 - RNA, 14 nt, Human herpesvirus 6B
ucgaaaaagacaag

SEQ ID NO: 167698 - RNA, 13 nt, Human herpesvirus 6B
uccuuucucugcg

SEQ ID NO: 167699 - RNA, 19 nt, Human herpesvirus 6B
ucgaaauaacgcaaucuac

SEQ ID NO: 167700 - RNA, 22 nt, Human herpesvirus 6B
ucgaacagauaggcguugugau

SEQ ID NO: 167701 - RNA, 20 nt, Human herpesvirus 6B
ucccaugguuccgggaugua

SEQ ID NO: 167702 - RNA, 23 nt, Human herpesvirus 6B
ucccaugguuccgggauguagca

SEQ ID NO: 167703 - RNA, 23 nt, Human herpesvirus 6B
ucccauguaugcauuaacucugg

SEQ ID NO: 167704 - RNA, 18 nt, Human herpesvirus 6B
ucccauauuguccagcac

SEQ ID NO: 167705 - RNA, 23 nt, Human herpesvirus 6B
ucccaaccauggcccuacuacag

SEQ ID NO: 167706 - RNA, 14 nt, Human herpesvirus 6B
ucccaccuaauaaa

SEQ ID NO: 167707 - RNA, 15 nt, Human herpesvirus 6B
uccccuauauagcua

SEQ ID NO: 167708 - RNA, 22 nt, Human herpesvirus 6B
uccccuauauagcuauccuuau

SEQ ID NO: 167709 - RNA, 16 nt, Human herpesvirus 6B
uccccucauacaucca

SEQ ID NO: 167710 - RNA, 16 nt, Human herpesvirus 6B
uccuaauaagacagaa

SEQ ID NO: 167711 - RNA, 23 nt, Human herpesvirus 6B
uccucguggaguaaaacgcucac

SEQ ID NO: 167712 - RNA, 18 nt, Human herpesvirus 6B
uccguuuuuucugcaaaa

SEQ ID NO: 167713 - RNA, 18 nt, Human herpesvirus 6B
uccguccauuaaauccua

SEQ ID NO: 167714 - RNA, 19 nt, Human herpesvirus 6B
uccggaauuguucuucaac

SEQ ID NO: 167715 - RNA, 19 nt, Human herpesvirus 6B
uccgcacgcuagcaaugau

SEQ ID NO: 167716 - RNA, 17 nt, Human herpesvirus 6B
uccaagucacguacaua

SEQ ID NO: 167717 - RNA, 16 nt, Human herpesvirus 6B
uccaauagaacauccc

SEQ ID NO: 167718 - RNA, 14 nt, Human herpesvirus 6B
uccaauagauuuca

SEQ ID NO: 167719 - RNA, 21 nt, Human herpesvirus 6B
uccaaguuagaaauuacacau

SEQ ID NO: 167720 - RNA, 14 nt, Human herpesvirus 6B
uccaaggauuauga

SEQ ID NO: 167721 - RNA, 20 nt, Human herpesvirus 6B
ucauuggcaucauaauacua

SEQ ID NO: 167722 - RNA, 23 nt, Human herpesvirus 6B
ucauuggcaucauaauacuagac

SEQ ID NO: 167723 - RNA, 16 nt, Human herpesvirus 6B
ucaugucuuacagcuu

SEQ ID NO: 167724 - RNA, 17 nt, Human herpesvirus 6B
ucaugucuuacagcuug

SEQ ID NO: 167725 - RNA, 18 nt, Human herpesvirus 6B
ucauguuuauugucaaau

SEQ ID NO: 167726 - RNA, 14 nt, Human herpesvirus 6B
ucaugugugccuac

SEQ ID NO: 167727 - RNA, 20 nt, Human herpesvirus 6B
ucauuaaaacucccagcauu

SEQ ID NO: 167728 - RNA, 13 nt, Human herpesvirus 6B
ucauuaacauaca

SEQ ID NO: 167729 - RNA, 20 nt, Human herpesvirus 6B
ucauuaacauacagaugugu

SEQ ID NO: 167730 - RNA, 16 nt, Human herpesvirus 6B
ucauucgauuaaugcc

SEQ ID NO: 167731 - RNA, 18 nt, Human herpesvirus 6B
ucauucgauuaaugccac

SEQ ID NO: 167732 - RNA, 19 nt, Human herpesvirus 6B
ucauucgauuaaugccaca

SEQ ID NO: 167733 - RNA, 20 nt, Human herpesvirus 6B
ucauucgauuaaugccacag

SEQ ID NO: 167734 - RNA, 15 nt, Human herpesvirus 6B
ucauccucagucuuc

SEQ ID NO: 167735 - RNA, 16 nt, Human herpesvirus 6B
ucauccucagucuuca

SEQ ID NO: 167736 - RNA, 14 nt, Human herpesvirus 6B
ucaugauugcaaca

SEQ ID NO: 167737 - RNA, 17 nt, Human herpesvirus 6B
ucaugcccuaaugugau

SEQ ID NO: 167738 - RNA, 20 nt, Human herpesvirus 6B
ucacaaaguuuaaguucuca

SEQ ID NO: 167739 - RNA, 16 nt, Human herpesvirus 6B
ucacaaucgcagucca

SEQ ID NO: 167740 - RNA, 22 nt, Human herpesvirus 6B
ucaucaugugugccuacuuugg

SEQ ID NO: 167741 - RNA, 19 nt, Human herpesvirus 6B
ucaucaucaccaagucuaa

SEQ ID NO: 167742 - RNA, 13 nt, Human herpesvirus 6B
ugguggacaccaa

SEQ ID NO: 167743 - RNA, 21 nt, Human herpesvirus 6B
uggugguuucgggugcaauca

SEQ ID NO: 167744 - RNA, 22 nt, Human herpesvirus 6B
ugguggauguuuuuacuugaug

SEQ ID NO: 167745 - RNA, 22 nt, Human herpesvirus 6B
ugguguuguguuuguggacaau

SEQ ID NO: 167746 - RNA, 15 nt, Human herpesvirus 6B
ugguuccgggaugua

SEQ ID NO: 167747 - RNA, 19 nt, Human herpesvirus 6B
uguagcucaguguuugcca

SEQ ID NO: 167748 - RNA, 13 nt, Human herpesvirus 6B
uguauaauuuaca

SEQ ID NO: 167749 - RNA, 13 nt, Human herpesvirus 6B
uguccgugagaca

SEQ ID NO: 167750 - RNA, 21 nt, Human herpesvirus 6B
ugucaaggaaaacucuugaca

SEQ ID NO: 167751 - RNA, 17 nt, Human herpesvirus 6B
uguauuucaacgugaau

SEQ ID NO: 167752 - RNA, 14 nt, Human herpesvirus 6B
uguauuuaacuuga

SEQ ID NO: 167753 - RNA, 22 nt, Human herpesvirus 6B
uguauggagauguuggauguua

SEQ ID NO: 167754 - RNA, 16 nt, Human herpesvirus 6B
uguaugaacaggugcu

SEQ ID NO: 167755 - RNA, 20 nt, Human herpesvirus 6B
uguaugaauccagauaaaca

SEQ ID NO: 167756 - RNA, 13 nt, Human herpesvirus 6B
uguauucuccuca

SEQ ID NO: 167757 - RNA, 23 nt, Human herpesvirus 6B
ugucaaagaaacaguaaaucucu

SEQ ID NO: 167758 - RNA, 22 nt, Human herpesvirus 6B
ugucgaaucagaucacucagau

SEQ ID NO: 167759 - RNA, 21 nt, Human herpesvirus 6B
ugucggcgaugcguuugccau

SEQ ID NO: 167760 - RNA, 16 nt, Human herpesvirus 6B
ugucgcacguguugaa

SEQ ID NO: 167761 - RNA, 20 nt, Human herpesvirus 6B
ugugauacggaaguugaaaa

SEQ ID NO: 167762 - RNA, 18 nt, Human herpesvirus 6B
ugugauacuauaaacaau

SEQ ID NO: 167763 - RNA, 22 nt, Human herpesvirus 6B
ugucuaauuucgacaauccuaa

SEQ ID NO: 167764 - RNA, 15 nt, Human herpesvirus 6B
ugucguuucauggga

SEQ ID NO: 167765 - RNA, 15 nt, Human herpesvirus 6B
ugucguuucugugaa

SEQ ID NO: 167766 - RNA, 21 nt, Human herpesvirus 6B
uggcacagguguacacuauga

SEQ ID NO: 167767 - RNA, 13 nt, Human herpesvirus 6B
uggcaagcacuga

SEQ ID NO: 167768 - RNA, 16 nt, Human herpesvirus 6B
uggcaagugcugguac

SEQ ID NO: 167769 - RNA, 23 nt, Human herpesvirus 6B
uggcuacguuuuuauacacgaac

SEQ ID NO: 167770 - RNA, 14 nt, Human herpesvirus 6B
uggcugagauucac

SEQ ID NO: 167771 - RNA, 14 nt, Human herpesvirus 6B
uggcugaaggaauc

SEQ ID NO: 167772 - RNA, 13 nt, Human herpesvirus 6B
uggcaacauaccc

SEQ ID NO: 167773 - RNA, 14 nt, Human herpesvirus 6B
ugcuagauaacuca

SEQ ID NO: 167774 - RNA, 16 nt, Human herpesvirus 6B
ugcuaagggugccguu

SEQ ID NO: 167775 - RNA, 23 nt, Human herpesvirus 6B
ugggguagugcggcgguaaacaa

SEQ ID NO: 167776 - RNA, 20 nt, Human herpesvirus 6B
uggggacagacagggggauc

SEQ ID NO: 167777 - RNA, 18 nt, Human herpesvirus 6B
uggcugugcuaucugauu

SEQ ID NO: 167778 - RNA, 16 nt, Human herpesvirus 6B
uguuugccaaccaaau

SEQ ID NO: 167779 - RNA, 19 nt, Human herpesvirus 6B
uguuugaccucgcgggaag

SEQ ID NO: 167780 - RNA, 23 nt, Human herpesvirus 6B
uguuucuuagaaccaaucuguga

SEQ ID NO: 167781 - RNA, 13 nt, Human herpesvirus 6B
uguuucuuugaca

SEQ ID NO: 167782 - RNA, 23 nt, Human herpesvirus 6B
uguuucuuugacauuuaccagag

SEQ ID NO: 167783 - RNA, 14 nt, Human herpesvirus 6B
uguuucgcagagga

SEQ ID NO: 167784 - RNA, 18 nt, Human herpesvirus 6B
uguuguaaaauacauacu

SEQ ID NO: 167785 - RNA, 20 nt, Human herpesvirus 6B
uguuuuugauugcaaucaca

SEQ ID NO: 167786 - RNA, 16 nt, Human herpesvirus 6B
uuaaaaagcaagguga

SEQ ID NO: 167787 - RNA, 20 nt, Human herpesvirus 6B
uuaaaaacaucuuaacagac

SEQ ID NO: 167788 - RNA, 15 nt, Human herpesvirus 6B
uguuuugugcccaac

SEQ ID NO: 167789 - RNA, 22 nt, Human herpesvirus 6B
uguuuuuacuugauaaacugua

SEQ ID NO: 167790 - RNA, 15 nt, Human herpesvirus 6B
uguuuuuccauaaau

SEQ ID NO: 167791 - RNA, 22 nt, Human herpesvirus 6B
uuaaaaaaaaaaacgauauuau

SEQ ID NO: 167792 - RNA, 12 nt, Human herpesvirus 6B
uuaaaauaccga

SEQ ID NO: 167793 - RNA, 13 nt, Human herpesvirus 6B
uuaaaauaccgac

SEQ ID NO: 167794 - RNA, 13 nt, Human herpesvirus 6B
uuaaaagugcaac

SEQ ID NO: 167795 - RNA, 19 nt, Human herpesvirus 6B
uuaaaauggauuagugaaa

SEQ ID NO: 167796 - RNA, 17 nt, Human herpesvirus 6B
uuaaaauuuuuaaacag

SEQ ID NO: 167797 - RNA, 22 nt, Human herpesvirus 6B
uuaaacgguaaauucaaacucc

SEQ ID NO: 167798 - RNA, 13 nt, Human herpesvirus 6B
uguuagcuuuuau

SEQ ID NO: 167799 - RNA, 19 nt, Human herpesvirus 6B
uguuagaucacguucagga

SEQ ID NO: 167800 - RNA, 20 nt, Human herpesvirus 6B
ugugcgaauggcacucugaa

SEQ ID NO: 167801 - RNA, 22 nt, Human herpesvirus 6B
ugugcacaaccgaauguucuca

SEQ ID NO: 167802 - RNA, 21 nt, Human herpesvirus 6B
ugugcaacacaacaaacaucc

SEQ ID NO: 167803 - RNA, 22 nt, Human herpesvirus 6B
ugugcagggugcuuugcuucag

SEQ ID NO: 167804 - RNA, 21 nt, Human herpesvirus 6B
uguuccaggagcccacagcau

SEQ ID NO: 167805 - RNA, 23 nt, Human herpesvirus 6B
uguuccgaauucuuaccaagaaa

SEQ ID NO: 167806 - RNA, 13 nt, Human herpesvirus 6B
uguucacaguuuu

SEQ ID NO: 167807 - RNA, 14 nt, Human herpesvirus 6B
uguucauagagcau

SEQ ID NO: 167808 - RNA, 21 nt, Human herpesvirus 6B
uguuauucucaauauucaugc

SEQ ID NO: 167809 - RNA, 21 nt, Human herpesvirus 6B
uguucgaugauuauucugucu

SEQ ID NO: 167810 - RNA, 14 nt, Human herpesvirus 6B
uguucgauugccaa

SEQ ID NO: 167811 - RNA, 14 nt, Human herpesvirus 6B
uguucgcacaaaau

SEQ ID NO: 167812 - RNA, 14 nt, Human herpesvirus 6B
uguucucagaugua

SEQ ID NO: 167813 - RNA, 17 nt, Human herpesvirus 6B
uguucuuucaaaaugac

SEQ ID NO: 167814 - RNA, 16 nt, Human herpesvirus 6B
uguugaguaauuggac

SEQ ID NO: 167815 - RNA, 12 nt, Human herpesvirus 6B
uguugagucucu

SEQ ID NO: 167816 - RNA, 16 nt, Human herpesvirus 6B
uuaggacaugugguaa

SEQ ID NO: 167817 - RNA, 18 nt, Human herpesvirus 6B
uuagaaccaaucugugag

SEQ ID NO: 167818 - RNA, 15 nt, Human herpesvirus 6B
uuagaaauuacacau

SEQ ID NO: 167819 - RNA, 17 nt, Human herpesvirus 6B
uuagaaaaaagugcaag

SEQ ID NO: 167820 - RNA, 21 nt, Human herpesvirus 6B
uuagucgcacacacaagaaca

SEQ ID NO: 167821 - RNA, 13 nt, Human herpesvirus 6B
uuaguuaauucuc

SEQ ID NO: 167822 - RNA, 22 nt, Human herpesvirus 6B
uuacauaagaauuacaauacag

SEQ ID NO: 167823 - RNA, 18 nt, Human herpesvirus 6B
uuacagcacuuugugccc

SEQ ID NO: 167824 - RNA, 21 nt, Human herpesvirus 6B
uuacuaguaagaacauuaaga

SEQ ID NO: 167825 - RNA, 14 nt, Human herpesvirus 6B
uuacuagugauuau

SEQ ID NO: 167826 - RNA, 22 nt, Human herpesvirus 6B
uuacuaaguuuugagugcuauu

SEQ ID NO: 167827 - RNA, 14 nt, Human herpesvirus 6B
uuacuaauguggau

SEQ ID NO: 167828 - RNA, 20 nt, Human herpesvirus 6B
uuacuguaaacaaauucuua

SEQ ID NO: 167829 - RNA, 14 nt, Human herpesvirus 6B
uuacuaugugacau

SEQ ID NO: 167830 - RNA, 14 nt, Human herpesvirus 6B
uuacaagcaugcau

SEQ ID NO: 167831 - RNA, 16 nt, Human herpesvirus 6B
uuacaagcaugcauug

SEQ ID NO: 167832 - RNA, 17 nt, Human herpesvirus 6B
uuacaacugaaacucca

SEQ ID NO: 167833 - RNA, 19 nt, Human herpesvirus 6B
uuacaaaccuucccuauca

SEQ ID NO: 167834 - RNA, 20 nt, Human herpesvirus 6B
uuacaauguucuugacaaau

SEQ ID NO: 167835 - RNA, 20 nt, Human herpesvirus 6B
uuacaauuaugcgcaugaaa

SEQ ID NO: 167836 - RNA, 21 nt, Human herpesvirus 6B
uuaaccauguuuuuacuugau

SEQ ID NO: 167837 - RNA, 21 nt, Human herpesvirus 6B
uuaacauuuuuauuccaaccu

SEQ ID NO: 167838 - RNA, 17 nt, Human herpesvirus 6B
uuaauuccagcuuucuu

SEQ ID NO: 167839 - RNA, 16 nt, Human herpesvirus 6B
uuacaaaacaaauauc

SEQ ID NO: 167840 - RNA, 15 nt, Human herpesvirus 6B
uuacaaaacaaucua

SEQ ID NO: 167841 - RNA, 15 nt, Human herpesvirus 6B
uuacaaaacuguuaa

SEQ ID NO: 167842 - RNA, 19 nt, Human herpesvirus 6B
uuaacgcgucaacaaacaa

SEQ ID NO: 167843 - RNA, 22 nt, Human herpesvirus 6B
uuaacggaacccuagacacaca

SEQ ID NO: 167844 - RNA, 17 nt, Human herpesvirus 6B
uuaacggagagucuuca

SEQ ID NO: 167845 - RNA, 20 nt, Human herpesvirus 6B
uuaaagaaugcugacuuuga

SEQ ID NO: 167846 - RNA, 22 nt, Human herpesvirus 6B
uuaacagacuacuuuuaaaaua

SEQ ID NO: 167847 - RNA, 12 nt, Human herpesvirus 6B
uuaacagugucu

SEQ ID NO: 167848 - RNA, 18 nt, Human herpesvirus 6B
uuaacauacagaugugua

SEQ ID NO: 167849 - RNA, 20 nt, Human herpesvirus 6B
uuaacaaaaugguuaugaca

SEQ ID NO: 167850 - RNA, 14 nt, Human herpesvirus 6B
uuaaaugacacaga

SEQ ID NO: 167851 - RNA, 15 nt, Human herpesvirus 6B
uuaaaugacacagaa

SEQ ID NO: 167852 - RNA, 18 nt, Human herpesvirus 6B
uuaaaugugaacaguaua

SEQ ID NO: 167853 - RNA, 18 nt, Human herpesvirus 6B
uucuauguacugaucucu

SEQ ID NO: 167854 - RNA, 16 nt, Human herpesvirus 6B
uucuauguauuaucau

SEQ ID NO: 167855 - RNA, 22 nt, Human herpesvirus 6B
uucuagcgaucauaaaacugcc

SEQ ID NO: 167856 - RNA, 18 nt, Human herpesvirus 6B
uucuauucguucagaaug

SEQ ID NO: 167857 - RNA, 14 nt, Human herpesvirus 6B
uucucagacagcuu

SEQ ID NO: 167858 - RNA, 16 nt, Human herpesvirus 6B
uucucgggacuaggaa

SEQ ID NO: 167859 - RNA, 14 nt, Human herpesvirus 6B
uucucggucuugcu

SEQ ID NO: 167860 - RNA, 14 nt, Human herpesvirus 6B
uucuccugaucuca

SEQ ID NO: 167861 - RNA, 11 nt, Human herpesvirus 6B
uucucauaaag

SEQ ID NO: 167862 - RNA, 19 nt, Human herpesvirus 6B
uucucgaaaauacaaugac

SEQ ID NO: 167863 - RNA, 20 nt, Human herpesvirus 6B
uucucgaaaauacaaugacu

SEQ ID NO: 167864 - RNA, 17 nt, Human herpesvirus 6B
uucuuugaacagugaca

SEQ ID NO: 167865 - RNA, 21 nt, Human herpesvirus 6B
uucuuugacauuuaccagaga

SEQ ID NO: 167866 - RNA, 22 nt, Human herpesvirus 6B
uucuuugacauuuaccagagau

SEQ ID NO: 167867 - RNA, 20 nt, Human herpesvirus 6B
uucuuuggagauugauucca

SEQ ID NO: 167868 - RNA, 23 nt, Human herpesvirus 6B
uucuuuuuggguguacauuguga

SEQ ID NO: 167869 - RNA, 18 nt, Human herpesvirus 6B
uucuuuuaguauuuacca

SEQ ID NO: 167870 - RNA, 12 nt, Human herpesvirus 6B
uugaacagugac

SEQ ID NO: 167871 - RNA, 19 nt, Human herpesvirus 6B
uugaaagaguuguauuuau

SEQ ID NO: 167872 - RNA, 19 nt, Human herpesvirus 6B
uugacaugagcuaaaccau

SEQ ID NO: 167873 - RNA, 19 nt, Human herpesvirus 6B
uugaaugaacgcacuagac

SEQ ID NO: 167874 - RNA, 20 nt, Human herpesvirus 6B
uugacgguucaccacuguga

SEQ ID NO: 167875 - RNA, 14 nt, Human herpesvirus 6B
uugacgguuuauau

SEQ ID NO: 167876 - RNA, 19 nt, Human herpesvirus 6B
uugaccagccagauacugc

SEQ ID NO: 167877 - RNA, 15 nt, Human herpesvirus 6B
uugacauugauucca

SEQ ID NO: 167878 - RNA, 23 nt, Human herpesvirus 6B
uugacauugcguuuugacaugag

SEQ ID NO: 167879 - RNA, 14 nt, Human herpesvirus 6B
uugagaaaacauga

SEQ ID NO: 167880 - RNA, 17 nt, Human herpesvirus 6B
uugagaaaguuguacag

SEQ ID NO: 167881 - RNA, 14 nt, Human herpesvirus 6B
uugcacccuaucac

SEQ ID NO: 167882 - RNA, 16 nt, Human herpesvirus 6B
uugcaguuaaucauuc

SEQ ID NO: 167883 - RNA, 20 nt, Human herpesvirus 6B
uugcagcugucuagauucua

SEQ ID NO: 167884 - RNA, 12 nt, Human herpesvirus 6B
uugcaugcauug

SEQ ID NO: 167885 - RNA, 20 nt, Human herpesvirus 6B
uugcuguuuucgccaucaau

SEQ ID NO: 167886 - RNA, 17 nt, Human herpesvirus 6B
uugcugucacacucuga

SEQ ID NO: 167887 - RNA, 13 nt, Human herpesvirus 6B
uugcugucuuccu

SEQ ID NO: 167888 - RNA, 20 nt, Human herpesvirus 6B
uuccuuauuucuaaacacga

SEQ ID NO: 167889 - RNA, 15 nt, Human herpesvirus 6B
uuccuucaaagugaa

SEQ ID NO: 167890 - RNA, 13 nt, Human herpesvirus 6B
uuccugaacuaca

SEQ ID NO: 167891 - RNA, 21 nt, Human herpesvirus 6B
uucgaauaguuucaugauucu

SEQ ID NO: 167892 - RNA, 21 nt, Human herpesvirus 6B
uucgaacaugauagggaauau

SEQ ID NO: 167893 - RNA, 15 nt, Human herpesvirus 6B
uucgauuaaugccac

SEQ ID NO: 167894 - RNA, 14 nt, Human herpesvirus 6B
uucgauugccaaag

SEQ ID NO: 167895 - RNA, 17 nt, Human herpesvirus 6B
uucgcaagacuacagac

SEQ ID NO: 167896 - RNA, 23 nt, Human herpesvirus 6B
uuccguagcggccgcaaaaacaa

SEQ ID NO: 167897 - RNA, 13 nt, Human herpesvirus 6B
uuccccauaacac

SEQ ID NO: 167898 - RNA, 17 nt, Human herpesvirus 6B
uuccccucauacaucca

SEQ ID NO: 167899 - RNA, 23 nt, Human herpesvirus 6B
uuauaaacccauaggugauuuca

SEQ ID NO: 167900 - RNA, 14 nt, Human herpesvirus 6B
uuauaaaaacacac

SEQ ID NO: 167901 - RNA, 20 nt, Human herpesvirus 6B
uuauaacaccaguacuucaa

SEQ ID NO: 167902 - RNA, 17 nt, Human herpesvirus 6B
uuauaacacgacaagua

SEQ ID NO: 167903 - RNA, 23 nt, Human herpesvirus 6B
uucacguccagcgcauccuuaaa

SEQ ID NO: 167904 - RNA, 13 nt, Human herpesvirus 6B
uucacuuccauuu

SEQ ID NO: 167905 - RNA, 22 nt, Human herpesvirus 6B
uucacuggaggcgaacuaagaa

SEQ ID NO: 167906 - RNA, 15 nt, Human herpesvirus 6B
uucagaauguuccaa

SEQ ID NO: 167907 - RNA, 16 nt, Human herpesvirus 6B
uucacuuuuugaagag

SEQ ID NO: 167908 - RNA, 23 nt, Human herpesvirus 6B
uucagaaaauuggugugcauuau

SEQ ID NO: 167909 - RNA, 21 nt, Human herpesvirus 6B
uucaggugucucaaccuucau

SEQ ID NO: 167910 - RNA, 22 nt, Human herpesvirus 6B
uucagggggcgcggggacacau

SEQ ID NO: 167911 - RNA, 21 nt, Human herpesvirus 6B
uucaggcggcaugaauuccau

SEQ ID NO: 167912 - RNA, 17 nt, Human herpesvirus 6B
uucagucucagcaauca

SEQ ID NO: 167913 - RNA, 16 nt, Human herpesvirus 6B
uucaggauuuguaaaa

SEQ ID NO: 167914 - RNA, 17 nt, Human herpesvirus 6B
uucagccguagcgauaa

SEQ ID NO: 167915 - RNA, 19 nt, Human herpesvirus 6B
uucauaacgacaaaagaca

SEQ ID NO: 167916 - RNA, 17 nt, Human herpesvirus 6B
uucauacuguauggcaa

SEQ ID NO: 167917 - RNA, 21 nt, Human herpesvirus 6B
uucauccaaauacacuuucau

SEQ ID NO: 167918 - RNA, 15 nt, Human herpesvirus 6B
uucaugauauuccag

SEQ ID NO: 167919 - RNA, 19 nt, Human herpesvirus 6B
uucauuaaaacucccagca

SEQ ID NO: 167920 - RNA, 12 nt, Human herpesvirus 6B
uugggagcucac

SEQ ID NO: 167921 - RNA, 13 nt, Human herpesvirus 6B
uugggaccuucag

SEQ ID NO: 167922 - RNA, 14 nt, Human herpesvirus 6B
uuggaaucacaaaa

SEQ ID NO: 167923 - RNA, 19 nt, Human herpesvirus 6B
uuggaauugggaagcauaa

SEQ ID NO: 167924 - RNA, 19 nt, Human herpesvirus 6B
uuggaaaauguaaacacga

SEQ ID NO: 167925 - RNA, 13 nt, Human herpesvirus 6B
uugugacaaggua

SEQ ID NO: 167926 - RNA, 14 nt, Human herpesvirus 6B
uugugcagggugcu

SEQ ID NO: 167927 - RNA, 20 nt, Human herpesvirus 6B
uugugcaguucuuacauauu

SEQ ID NO: 167928 - RNA, 16 nt, Human herpesvirus 6B
uugugcucgcauuucu

SEQ ID NO: 167929 - RNA, 19 nt, Human herpesvirus 6B
uugucguuuguacauguua

SEQ ID NO: 167930 - RNA, 22 nt, Human herpesvirus 6B
uugucuucgugucugagaugau

SEQ ID NO: 167931 - RNA, 16 nt, Human herpesvirus 6B
uugucuugcaaacagc

SEQ ID NO: 167932 - RNA, 17 nt, Human herpesvirus 6B
uuguccuuacaaaccuu

SEQ ID NO: 167933 - RNA, 16 nt, Human herpesvirus 6B
uuguaaaaauggcuca

SEQ ID NO: 167934 - RNA, 23 nt, Human herpesvirus 6B
uuguaaaaauucacuguggucaa

SEQ ID NO: 167935 - RNA, 20 nt, Human herpesvirus 6B
uugguacucuuugucuuaga

SEQ ID NO: 167936 - RNA, 16 nt, Human herpesvirus 6B
uuguuccgaauucuua

SEQ ID NO: 167937 - RNA, 18 nt, Human herpesvirus 6B
uuguucgauugccaaagg

SEQ ID NO: 167938 - RNA, 22 nt, Human herpesvirus 6B
uuguucgcacaaaaugauugca

SEQ ID NO: 167939 - RNA, 20 nt, Human herpesvirus 6B
uuguuuuuuagcgcuguaug

SEQ ID NO: 167940 - RNA, 14 nt, Human herpesvirus 6B
uuuaaaagugcaac

SEQ ID NO: 167941 - RNA, 12 nt, Human herpesvirus 6B
uuuaaaauaccg

SEQ ID NO: 167942 - RNA, 14 nt, Human herpesvirus 6B
uuuaaaauaucugu

SEQ ID NO: 167943 - RNA, 18 nt, Human herpesvirus 6B
uuguggacaaugauacua

SEQ ID NO: 167944 - RNA, 21 nt, Human herpesvirus 6B
uuguguuaaaauaaaguucca

SEQ ID NO: 167945 - RNA, 12 nt, Human herpesvirus 6B
uugugucuuugu

SEQ ID NO: 167946 - RNA, 23 nt, Human herpesvirus 6B
uuuaauguugaguaauuggacau

SEQ ID NO: 167947 - RNA, 15 nt, Human herpesvirus 6B
uuuaauauaucuuga

SEQ ID NO: 167948 - RNA, 23 nt, Human herpesvirus 6B
uuuaaucaugauugcaacaaaag

SEQ ID NO: 167949 - RNA, 14 nt, Human herpesvirus 6B
uuuaacuugaugua

SEQ ID NO: 167950 - RNA, 21 nt, Human herpesvirus 6B
uuuaaacucgacuucuuucau

SEQ ID NO: 167951 - RNA, 11 nt, Human herpesvirus 6B
uuuaaagcagc

SEQ ID NO: 167952 - RNA, 14 nt, Human herpesvirus 6B
uuuaacauccaaaa

SEQ ID NO: 167953 - RNA, 17 nt, Human herpesvirus 6B
uuuaacgaaaaccauua

SEQ ID NO: 167954 - RNA, 19 nt, Human herpesvirus 6B
uuuacggcagaagcuugau

SEQ ID NO: 167955 - RNA, 17 nt, Human herpesvirus 6B
uuuacgaauucaauguc

SEQ ID NO: 167956 - RNA, 12 nt, Human herpesvirus 6B
uuuaccuaucaa

SEQ ID NO: 167957 - RNA, 13 nt, Human herpesvirus 6B
uuuacugcaugcu

SEQ ID NO: 167958 - RNA, 14 nt, Human herpesvirus 6B
uuuacacaauccua

SEQ ID NO: 167959 - RNA, 19 nt, Human herpesvirus 6B
uuuacaucaacuauuuaac

SEQ ID NO: 167960 - RNA, 23 nt, Human herpesvirus 6B
uuuacauaagaauuacaauacag

SEQ ID NO: 167961 - RNA, 17 nt, Human herpesvirus 6B
uuuagcaugggugagug

SEQ ID NO: 167962 - RNA, 23 nt, Human herpesvirus 6B
uuuagcaugggugaguguauuau

SEQ ID NO: 167963 - RNA, 21 nt, Human herpesvirus 6B
uuuacuuacaucgauccaaaa

SEQ ID NO: 167964 - RNA, 15 nt, Human herpesvirus 6B
uuuagagauuaugcc

SEQ ID NO: 167965 - RNA, 19 nt, Human herpesvirus 6B
uuuaguaauaauagguuau

SEQ ID NO: 167966 - RNA, 19 nt, Human herpesvirus 6B
uuuauacacgaacuaaaua

SEQ ID NO: 167967 - RNA, 21 nt, Human herpesvirus 6B
uuuauagagcaauucaucaaa

SEQ ID NO: 167968 - RNA, 21 nt, Human herpesvirus 6B
uuuauagcgguuggaugccua

SEQ ID NO: 167969 - RNA, 21 nt, Human herpesvirus 6B
uuuaucggaacacauagugaa

SEQ ID NO: 167970 - RNA, 23 nt, Human herpesvirus 6B
uuuaucccucguacaagcuuaau

SEQ ID NO: 167971 - RNA, 15 nt, Human herpesvirus 6B
uuucaaaagcaugaa

SEQ ID NO: 167972 - RNA, 16 nt, Human herpesvirus 6B
uuuauuaguauccuuc

SEQ ID NO: 167973 - RNA, 16 nt, Human herpesvirus 6B
uuucaggcgucaaaga

SEQ ID NO: 167974 - RNA, 18 nt, Human herpesvirus 6B
uuucacuuuguuuagcuu

SEQ ID NO: 167975 - RNA, 20 nt, Human herpesvirus 6B
uuucagacaugccgcagaag

SEQ ID NO: 167976 - RNA, 20 nt, Human herpesvirus 6B
uuucacacaacuuaaccgca

SEQ ID NO: 167977 - RNA, 21 nt, Human herpesvirus 6B
uuucaagaaugggaugcauua

SEQ ID NO: 167978 - RNA, 16 nt, Human herpesvirus 6B
uuucaagaucugccau

SEQ ID NO: 167979 - RNA, 18 nt, Human herpesvirus 6B
uuuccccagcacaccucg

SEQ ID NO: 167980 - RNA, 13 nt, Human herpesvirus 6B
uuucccaccuaau

SEQ ID NO: 167981 - RNA, 18 nt, Human herpesvirus 6B
uuuccauaaguuaauucc

SEQ ID NO: 167982 - RNA, 13 nt, Human herpesvirus 6B
uuucaucaaucac

SEQ ID NO: 167983 - RNA, 19 nt, Human herpesvirus 6B
uuucaucacaaagugagau

SEQ ID NO: 167984 - RNA, 21 nt, Human herpesvirus 6B
uuucauaggaaguaaauacaa

SEQ ID NO: 167985 - RNA, 14 nt, Human herpesvirus 6B
uuucauuucuccac

SEQ ID NO: 167986 - RNA, 18 nt, Human herpesvirus 6B
uuucuccugaucucacgu

SEQ ID NO: 167987 - RNA, 17 nt, Human herpesvirus 6B
uuucucgaaaauacaau

SEQ ID NO: 167988 - RNA, 17 nt, Human herpesvirus 6B
uuucuauguuauguaaa

SEQ ID NO: 167989 - RNA, 14 nt, Human herpesvirus 6B
uuucggcaacugaa

SEQ ID NO: 167990 - RNA, 19 nt, Human herpesvirus 6B
uuucgaggaaaacucgcac

SEQ ID NO: 167991 - RNA, 18 nt, Human herpesvirus 6B
uuucgcgauagucaugca

SEQ ID NO: 167992 - RNA, 23 nt, Human herpesvirus 6B
uuuccggagauuaaagcauuagc

SEQ ID NO: 167993 - RNA, 14 nt, Human herpesvirus 6B
guacagagccagac

SEQ ID NO: 167994 - RNA, 20 nt, Human herpesvirus 6B
guacacuaugagucccuuga

SEQ ID NO: 167995 - RNA, 18 nt, Human herpesvirus 6B
guacacucauuugcaauu

SEQ ID NO: 167996 - RNA, 11 nt, Human herpesvirus 6B
guacauagaau

SEQ ID NO: 167997 - RNA, 17 nt, Human herpesvirus 6B
guacauauaaacagauu

SEQ ID NO: 167998 - RNA, 20 nt, Human herpesvirus 6B
guacauauaaacagauuuua

SEQ ID NO: 167999 - RNA, 21 nt, Human herpesvirus 6B
guacauaaacuauuguuuaau

SEQ ID NO: 168000 - RNA, 19 nt, Human herpesvirus 6B
guacaaaaucaaacucacc

SEQ ID NO: 168001 - RNA, 18 nt, Human herpesvirus 6B
guaaccaccaaaacgacu

SEQ ID NO: 168002 - RNA, 16 nt, Human herpesvirus 6B
guaaccgaugcugauu

SEQ ID NO: 168003 - RNA, 14 nt, Human herpesvirus 6B
guaaauaugcuuau

SEQ ID NO: 168004 - RNA, 15 nt, Human herpesvirus 6B
guaaaugucaaagaa

SEQ ID NO: 168005 - RNA, 16 nt, Human herpesvirus 6B
guaaaugucaaagaaa

SEQ ID NO: 168006 - RNA, 15 nt, Human herpesvirus 6B
guaaauuaaaguuua

SEQ ID NO: 168007 - RNA, 14 nt, Human herpesvirus 6B
guagauggugcuau

SEQ ID NO: 168008 - RNA, 14 nt, Human herpesvirus 6B
guagcaaaugaaug

SEQ ID NO: 168009 - RNA, 16 nt, Human herpesvirus 6B
gucacucucaauuuca

SEQ ID NO: 168010 - RNA, 18 nt, Human herpesvirus 6B
gucacacacaaugugcuu

SEQ ID NO: 168011 - RNA, 13 nt, Human herpesvirus 6B
gucacacacggua

SEQ ID NO: 168012 - RNA, 18 nt, Human herpesvirus 6B
guauucuuggaaaaccuu

SEQ ID NO: 168013 - RNA, 21 nt, Human herpesvirus 6B
guagguaaaauggcugugcua

SEQ ID NO: 168014 - RNA, 18 nt, Human herpesvirus 6B
guagcucaguguuugcca

SEQ ID NO: 168015 - RNA, 12 nt, Human herpesvirus 6B
guaggcaacuua

SEQ ID NO: 168016 - RNA, 20 nt, Human herpesvirus 6B
guaggcuguuuaaacuuugg

SEQ ID NO: 168017 - RNA, 19 nt, Human herpesvirus 6B
guaugcauuaacucugggu

SEQ ID NO: 168018 - RNA, 20 nt, Human herpesvirus 6B
guauguauaauauaaauucu

SEQ ID NO: 168019 - RNA, 16 nt, Human herpesvirus 6B
guauuaauguuuuuca

SEQ ID NO: 168020 - RNA, 17 nt, Human herpesvirus 6B
guaugucucaguucaaa

SEQ ID NO: 168021 - RNA, 23 nt, Human herpesvirus 6B
guaucugccccccuucauccagc

SEQ ID NO: 168022 - RNA, 19 nt, Human herpesvirus 6B
guaucgucauuccagucca

SEQ ID NO: 168023 - RNA, 20 nt, Human herpesvirus 6B
guaucucugguaaaugucaa

SEQ ID NO: 168024 - RNA, 21 nt, Human herpesvirus 6B
gggguccgcucugagauuuga

SEQ ID NO: 168025 - RNA, 22 nt, Human herpesvirus 6B
gggguccgcucugagauuugag

SEQ ID NO: 168026 - RNA, 19 nt, Human herpesvirus 6B
ggguauucguaaugugcag

SEQ ID NO: 168027 - RNA, 11 nt, Human herpesvirus 6B
ggguaaucgca

SEQ ID NO: 168028 - RNA, 15 nt, Human herpesvirus 6B
gggucucaugacuau

SEQ ID NO: 168029 - RNA, 23 nt, Human herpesvirus 6B
gguaccgcgguugaagucuuucc

SEQ ID NO: 168030 - RNA, 22 nt, Human herpesvirus 6B
ggggauuuagugcaguaugucu

SEQ ID NO: 168031 - RNA, 16 nt, Human herpesvirus 6B
ggcuaucgcaaugauu

SEQ ID NO: 168032 - RNA, 18 nt, Human herpesvirus 6B
ggcuauaaucacaaauau

SEQ ID NO: 168033 - RNA, 21 nt, Human herpesvirus 6B
ggugauuauagauagcuccaa

SEQ ID NO: 168034 - RNA, 13 nt, Human herpesvirus 6B
ggugaauguuucu

SEQ ID NO: 168035 - RNA, 20 nt, Human herpesvirus 6B
ggugagaagauuugugugaa

SEQ ID NO: 168036 - RNA, 20 nt, Human herpesvirus 6B
ggucacguauaccauuccca

SEQ ID NO: 168037 - RNA, 11 nt, Human herpesvirus 6B
gguaugagcug

SEQ ID NO: 168038 - RNA, 20 nt, Human herpesvirus 6B
gguaugagcugacaucugca

SEQ ID NO: 168039 - RNA, 13 nt, Human herpesvirus 6B
gguaugucugugc

SEQ ID NO: 168040 - RNA, 12 nt, Human herpesvirus 6B
ggugcuauuaac

SEQ ID NO: 168041 - RNA, 16 nt, Human herpesvirus 6B
guaaauacaauaguaa

SEQ ID NO: 168042 - RNA, 16 nt, Human herpesvirus 6B
guaaaauacauacuuu

SEQ ID NO: 168043 - RNA, 14 nt, Human herpesvirus 6B
guaaacuuauugag

SEQ ID NO: 168044 - RNA, 14 nt, Human herpesvirus 6B
guaaaagagccaga

SEQ ID NO: 168045 - RNA, 21 nt, Human herpesvirus 6B
guaaaagagccagagacugac

SEQ ID NO: 168046 - RNA, 18 nt, Human herpesvirus 6B
gucauguuuacugcaugc

SEQ ID NO: 168047 - RNA, 14 nt, Human herpesvirus 6B
gucauaauucucau

SEQ ID NO: 168048 - RNA, 10 nt, Human herpesvirus 6B
gucaguuuaa

SEQ ID NO: 168049 - RNA, 14 nt, Human herpesvirus 6B
gucagucaaugcaa

SEQ ID NO: 168050 - RNA, 20 nt, Human herpesvirus 6B
gucagucaaugcaauuccac

SEQ ID NO: 168051 - RNA, 17 nt, Human herpesvirus 6B
gucagucauaauucuca

SEQ ID NO: 168052 - RNA, 12 nt, Human herpesvirus 6B
gucgaaucucaa

SEQ ID NO: 168053 - RNA, 13 nt, Human herpesvirus 6B
gucgaaugagcuu

SEQ ID NO: 168054 - RNA, 17 nt, Human herpesvirus 6B
guccuucguucuuucac

SEQ ID NO: 168055 - RNA, 18 nt, Human herpesvirus 6B
guccuucguucuuucaca

SEQ ID NO: 168056 - RNA, 22 nt, Human herpesvirus 6B
guccuuauaaugugaacuaaau

SEQ ID NO: 168057 - RNA, 19 nt, Human herpesvirus 6B
guccuauguuaacauugug

SEQ ID NO: 168058 - RNA, 20 nt, Human herpesvirus 6B
guccuauguuaacauuguga

SEQ ID NO: 168059 - RNA, 11 nt, Human herpesvirus 6B
guccuauucag

SEQ ID NO: 168060 - RNA, 22 nt, Human herpesvirus 6B
gucguuucugugaaucugcuga

SEQ ID NO: 168061 - RNA, 13 nt, Human herpesvirus 6B
gucuaaugcaaag

SEQ ID NO: 168062 - RNA, 16 nt, Human herpesvirus 6B
gucuaaggugacucuu

SEQ ID NO: 168063 - RNA, 13 nt, Human herpesvirus 6B
gucuacuguguau

SEQ ID NO: 168064 - RNA, 15 nt, Human herpesvirus 6B
gucucaggugagauu

SEQ ID NO: 168065 - RNA, 11 nt, Human herpesvirus 6B
gucgugugauc

SEQ ID NO: 168066 - RNA, 22 nt, Human herpesvirus 6B
gucgguccguuuuuucugcaaa

SEQ ID NO: 168067 - RNA, 13 nt, Human herpesvirus 6B
gucggugauaccg

SEQ ID NO: 168068 - RNA, 20 nt, Human herpesvirus 6B
gucucgcguugauacauccc

SEQ ID NO: 168069 - RNA, 19 nt, Human herpesvirus 6B
gucugaauuuaaugcaaaa

SEQ ID NO: 168070 - RNA, 20 nt, Human herpesvirus 6B
gucugaauuuaaugcaaaau

SEQ ID NO: 168071 - RNA, 18 nt, Human herpesvirus 6B
gucugacaagcuguccau

SEQ ID NO: 168072 - RNA, 13 nt, Human herpesvirus 6B
gucugauacuuga

SEQ ID NO: 168073 - RNA, 15 nt, Human herpesvirus 6B
gugaaauucgaaaua

SEQ ID NO: 168074 - RNA, 18 nt, Human herpesvirus 6B
gucuuguuaucuuaugua

SEQ ID NO: 168075 - RNA, 11 nt, Human herpesvirus 6B
gugaacugugu

SEQ ID NO: 168076 - RNA, 13 nt, Human herpesvirus 6B
gucuguugcugua

SEQ ID NO: 168077 - RNA, 20 nt, Human herpesvirus 6B
gucuucauuaaaacucccag

SEQ ID NO: 168078 - RNA, 14 nt, Human herpesvirus 6B
gucuucaauaaaaa

SEQ ID NO: 168079 - RNA, 16 nt, Human herpesvirus 6B
gucuugcaaacagcuu

SEQ ID NO: 168080 - RNA, 19 nt, Human herpesvirus 6B
gucuucguacguacuacag

SEQ ID NO: 168081 - RNA, 19 nt, Human herpesvirus 6B
gucuucucgggacuaggaa

SEQ ID NO: 168082 - RNA, 14 nt, Human herpesvirus 6B
gucuucccagguac

SEQ ID NO: 168083 - RNA, 19 nt, Human herpesvirus 6B
gugacuauauuaucuuuca

SEQ ID NO: 168084 - RNA, 14 nt, Human herpesvirus 6B
gugagaacauauaa

SEQ ID NO: 168085 - RNA, 11 nt, Human herpesvirus 6B
gugagacaucg

SEQ ID NO: 168086 - RNA, 19 nt, Human herpesvirus 6B
gugaagcgguuagaucugg

SEQ ID NO: 168087 - RNA, 23 nt, Human herpesvirus 6B
gugaaucugcugaucuuucucga

SEQ ID NO: 168088 - RNA, 19 nt, Human herpesvirus 6B
gugaucugauucgacaaau

SEQ ID NO: 168089 - RNA, 22 nt, Human herpesvirus 6B
gugauacucggucuacugugua

SEQ ID NO: 168090 - RNA, 15 nt, Human herpesvirus 6B
gugaggugauuugaa

SEQ ID NO: 168091 - RNA, 21 nt, Human herpesvirus 6B
gugagccagauucggcugcuu

SEQ ID NO: 168092 - RNA, 19 nt, Human herpesvirus 6B
gugaugccuugauguuucc

SEQ ID NO: 168093 - RNA, 16 nt, Human herpesvirus 6B
gugauugggagcucac

SEQ ID NO: 168094 - RNA, 21 nt, Human herpesvirus 6B
gugauugggagcucacuguac

SEQ ID NO: 168095 - RNA, 13 nt, Human herpesvirus 6B
gugcaagcuguac

SEQ ID NO: 168096 - RNA, 15 nt, Human herpesvirus 6B
gugcauaacaucuca

SEQ ID NO: 168097 - RNA, 18 nt, Human herpesvirus 6B
gugcgaauuguguugcua

SEQ ID NO: 168098 - RNA, 16 nt, Human herpesvirus 6B
gugcuuuggaccuuga

SEQ ID NO: 168099 - RNA, 13 nt, Human herpesvirus 6B
gugcuuaucaaau

SEQ ID NO: 168100 - RNA, 20 nt, Human herpesvirus 6B
gcuggugacuguguucgcua

SEQ ID NO: 168101 - RNA, 18 nt, Human herpesvirus 6B
gcuguaguugaugcuguu

SEQ ID NO: 168102 - RNA, 18 nt, Human herpesvirus 6B
ggaaaaccuuauacagau

SEQ ID NO: 168103 - RNA, 22 nt, Human herpesvirus 6B
ggaaaacgcagcaugaugaucu

SEQ ID NO: 168104 - RNA, 18 nt, Human herpesvirus 6B
gcuuggccagccacugcg

SEQ ID NO: 168105 - RNA, 19 nt, Human herpesvirus 6B
gcuugcgauuguucugcga

SEQ ID NO: 168106 - RNA, 14 nt, Human herpesvirus 6B
gcuauuugcauuaa

SEQ ID NO: 168107 - RNA, 15 nt, Human herpesvirus 6B
gcuaauucauaguua

SEQ ID NO: 168108 - RNA, 21 nt, Human herpesvirus 6B
gcucaagcgaagucaugaauu

SEQ ID NO: 168109 - RNA, 14 nt, Human herpesvirus 6B
gcucagauguggaa

SEQ ID NO: 168110 - RNA, 23 nt, Human herpesvirus 6B
gcugauuccuucaauguuuuuca

SEQ ID NO: 168111 - RNA, 15 nt, Human herpesvirus 6B
gcugacaucugcaaa

SEQ ID NO: 168112 - RNA, 17 nt, Human herpesvirus 6B
gcugacaucugcaaaaa

SEQ ID NO: 168113 - RNA, 21 nt, Human herpesvirus 6B
gcucaguguuugccaaccaaa

SEQ ID NO: 168114 - RNA, 16 nt, Human herpesvirus 6B
gccauuauugauagca

SEQ ID NO: 168115 - RNA, 19 nt, Human herpesvirus 6B
gcggaacaccagcauguca

SEQ ID NO: 168116 - RNA, 17 nt, Human herpesvirus 6B
gcggaguuuuauggcug

SEQ ID NO: 168117 - RNA, 18 nt, Human herpesvirus 6B
gcggcaugaauuccaugc

SEQ ID NO: 168118 - RNA, 16 nt, Human herpesvirus 6B
gcggagcugugucgau

SEQ ID NO: 168119 - RNA, 21 nt, Human herpesvirus 6B
gcgggaccuggcgggcaccga

SEQ ID NO: 168120 - RNA, 20 nt, Human herpesvirus 6B
gcggcgaagggacacgagaa

SEQ ID NO: 168121 - RNA, 17 nt, Human herpesvirus 6B
gcguguagaguugaaga

SEQ ID NO: 168122 - RNA, 16 nt, Human herpesvirus 6B
gcguggauaucucaaa

SEQ ID NO: 168123 - RNA, 23 nt, Human herpesvirus 6B
gcgggcuauaaucacaaauaucc

SEQ ID NO: 168124 - RNA, 16 nt, Human herpesvirus 6B
gcuaaacgccgacaac

SEQ ID NO: 168125 - RNA, 22 nt, Human herpesvirus 6B
gcguuuaucaugagagagcaaa

SEQ ID NO: 168126 - RNA, 19 nt, Human herpesvirus 6B
gcguuagauguaacucauc

SEQ ID NO: 168127 - RNA, 21 nt, Human herpesvirus 6B
ggacagugauuaggauguuug

SEQ ID NO: 168128 - RNA, 11 nt, Human herpesvirus 6B
ggaaugugcag

SEQ ID NO: 168129 - RNA, 17 nt, Human herpesvirus 6B
ggaauaugguuccacuu

SEQ ID NO: 168130 - RNA, 16 nt, Human herpesvirus 6B
ggaaaagaagaagcag

SEQ ID NO: 168131 - RNA, 18 nt, Human herpesvirus 6B
ggaaaauguguucuuaca

SEQ ID NO: 168132 - RNA, 20 nt, Human herpesvirus 6B
ggaagggucgaagacauuca

SEQ ID NO: 168133 - RNA, 15 nt, Human herpesvirus 6B
ggaaggaacauacac

SEQ ID NO: 168134 - RNA, 14 nt, Human herpesvirus 6B
ggaaauccuugacu

SEQ ID NO: 168135 - RNA, 22 nt, Human herpesvirus 6B
ggacuaucugagacagucaauu

SEQ ID NO: 168136 - RNA, 22 nt, Human herpesvirus 6B
ggaccauggucguaaccauucu

SEQ ID NO: 168137 - RNA, 19 nt, Human herpesvirus 6B
ggaccaaucugugcaacac

SEQ ID NO: 168138 - RNA, 20 nt, Human herpesvirus 6B
ggacgaucccauauugucca

SEQ ID NO: 168139 - RNA, 16 nt, Human herpesvirus 6B
ggagagcuucuuagga

SEQ ID NO: 168140 - RNA, 18 nt, Human herpesvirus 6B
ggagacucguucguuaaa

SEQ ID NO: 168141 - RNA, 20 nt, Human herpesvirus 6B
ggagaucuggugaauguuuc

SEQ ID NO: 168142 - RNA, 21 nt, Human herpesvirus 6B
ggagaucuggugaauguuucu

SEQ ID NO: 168143 - RNA, 17 nt, Human herpesvirus 6B
ggagcauucacauaaga

SEQ ID NO: 168144 - RNA, 13 nt, Human herpesvirus 6B
ggccucccaugua

SEQ ID NO: 168145 - RNA, 19 nt, Human herpesvirus 6B
ggccuggaauacaagacca

SEQ ID NO: 168146 - RNA, 17 nt, Human herpesvirus 6B
ggccuucgguacaguga

SEQ ID NO: 168147 - RNA, 18 nt, Human herpesvirus 6B
ggccuucgguacagugaa

SEQ ID NO: 168148 - RNA, 20 nt, Human herpesvirus 6B
ggcgaagaccuauauguguu

SEQ ID NO: 168149 - RNA, 21 nt, Human herpesvirus 6B
ggcgugguaggaaaugaugau

SEQ ID NO: 168150 - RNA, 19 nt, Human herpesvirus 6B
ggcgucucaugcgaucuaa

SEQ ID NO: 168151 - RNA, 15 nt, Human herpesvirus 6B
ggcgucacacagcau

SEQ ID NO: 168152 - RNA, 15 nt, Human herpesvirus 6B
ggccggcacauacac

SEQ ID NO: 168153 - RNA, 13 nt, Human herpesvirus 6B
ggccguaaacuua

SEQ ID NO: 168154 - RNA, 19 nt, Human herpesvirus 6B
ggccguauaucuacugcag

SEQ ID NO: 168155 - RNA, 13 nt, Human herpesvirus 6B
ggagugauugaug

SEQ ID NO: 168156 - RNA, 20 nt, Human herpesvirus 6B
ggagcucacuguaccuuuag

SEQ ID NO: 168157 - RNA, 13 nt, Human herpesvirus 6B
ucaaugugaaucg

SEQ ID NO: 168158 - RNA, 15 nt, Human herpesvirus 6B
ucaauuccugugaug

SEQ ID NO: 168159 - RNA, 14 nt, Human herpesvirus 6B
ucaauguuuuucaa

SEQ ID NO: 168160 - RNA, 19 nt, Human herpesvirus 6B
ucaauacuuuuuucaauaa

SEQ ID NO: 168161 - RNA, 21 nt, Human herpesvirus 6B
ucaauacuuuuuucaauaaug

SEQ ID NO: 168162 - RNA, 22 nt, Human herpesvirus 6B
ucaauagaugaucagcauucac

SEQ ID NO: 168163 - RNA, 23 nt, Human herpesvirus 6B
ucaauauagaggacgcaaagaga

SEQ ID NO: 168164 - RNA, 18 nt, Human herpesvirus 6B
ucaauaucaccuuacaaa

SEQ ID NO: 168165 - RNA, 15 nt, Human herpesvirus 6B
ucaaugcaauuccac

SEQ ID NO: 168166 - RNA, 15 nt, Human herpesvirus 6B
ucaagacgaucucau

SEQ ID NO: 168167 - RNA, 10 nt, Human herpesvirus 6B
ucaagaaugg

SEQ ID NO: 168168 - RNA, 23 nt, Human herpesvirus 6B
ucaagauuguguuucugucuuua

SEQ ID NO: 168169 - RNA, 12 nt, Human herpesvirus 6B
ucaagcaaagac

SEQ ID NO: 168170 - RNA, 15 nt, Human herpesvirus 6B
ucaagcaaguuccau

SEQ ID NO: 168171 - RNA, 19 nt, Human herpesvirus 6B
ucaagaggguuuuuuacaa

SEQ ID NO: 168172 - RNA, 14 nt, Human herpesvirus 6B
ucaauaaaaacuca

SEQ ID NO: 168173 - RNA, 21 nt, Human herpesvirus 6B
ucaaacuuuuuuugaagguau

SEQ ID NO: 168174 - RNA, 12 nt, Human herpesvirus 6B
ucaaauggaugg

SEQ ID NO: 168175 - RNA, 19 nt, Human herpesvirus 6B
ucaaauaccgaaauuauau

SEQ ID NO: 168176 - RNA, 22 nt, Human herpesvirus 6B
ucaaaucucgccgaacuagaaa

SEQ ID NO: 168177 - RNA, 17 nt, Human herpesvirus 6B
ucaacacucucaaugua

SEQ ID NO: 168178 - RNA, 18 nt, Human herpesvirus 6B
ucaacacucucaauguaa

SEQ ID NO: 168179 - RNA, 19 nt, Human herpesvirus 6B
ucaaauuuguuucuauugu

SEQ ID NO: 168180 - RNA, 12 nt, Human herpesvirus 6B
ucaaauguagca

SEQ ID NO: 168181 - RNA, 18 nt, Human herpesvirus 6B
ucaaauguagcaaaugaa

SEQ ID NO: 168182 - RNA, 15 nt, Human herpesvirus 6B
ucaaauuuacucucc

SEQ ID NO: 168183 - RNA, 20 nt, Human herpesvirus 6B
ucaaauuuacucuccaccca

SEQ ID NO: 168184 - RNA, 20 nt, Human herpesvirus 6B
ucaaccuguuuccagaauac

SEQ ID NO: 168185 - RNA, 14 nt, Human herpesvirus 6B
ucaacggcguaaaa

SEQ ID NO: 168186 - RNA, 17 nt, Human herpesvirus 6B
ucaacuaaaucaugucu

SEQ ID NO: 168187 - RNA, 21 nt, Human herpesvirus 6B
ucaacuaaaucaugucuuaca

SEQ ID NO: 168188 - RNA, 24 nt, Human herpesvirus 6B
ucaacuaguuuugagaaagccgau

SEQ ID NO: 168189 - RNA, 13 nt, Human herpesvirus 6B
ucaacuauacuua

SEQ ID NO: 168190 - RNA, 15 nt, Human herpesvirus 6B
ucaacuauacuuaac

SEQ ID NO: 168191 - RNA, 17 nt, Human herpesvirus 6B
ucaacuguuacuuucca

SEQ ID NO: 168192 - RNA, 12 nt, Human herpesvirus 6B
ucaacugcuagu

SEQ ID NO: 168193 - RNA, 13 nt, Human herpesvirus 6B
uauucuaauuaua

SEQ ID NO: 168194 - RNA, 18 nt, Human herpesvirus 6B
uauucuggcgaugcagau

SEQ ID NO: 168195 - RNA, 20 nt, Human herpesvirus 6B
uauucuccucaacuaaauca

SEQ ID NO: 168196 - RNA, 14 nt, Human herpesvirus 6B
uauucguaaugugc

SEQ ID NO: 168197 - RNA, 14 nt, Human herpesvirus 6B
uauugcaugcauug

SEQ ID NO: 168198 - RNA, 15 nt, Human herpesvirus 6B
uauugcaugcauugc

SEQ ID NO: 168199 - RNA, 21 nt, Human herpesvirus 6B
uauugcaguuaaucauucgau

SEQ ID NO: 168200 - RNA, 22 nt, Human herpesvirus 6B
uauuguugccguugucguguga

SEQ ID NO: 168201 - RNA, 22 nt, Human herpesvirus 6B
uauuguuguaaaauacauacuu

SEQ ID NO: 168202 - RNA, 18 nt, Human herpesvirus 6B
uauugucugauauggcaa

SEQ ID NO: 168203 - RNA, 16 nt, Human herpesvirus 6B
uauucagaggugcuga

SEQ ID NO: 168204 - RNA, 19 nt, Human herpesvirus 6B
uauucagaggugcugauga

SEQ ID NO: 168205 - RNA, 19 nt, Human herpesvirus 6B
uauucagccguagcgauaa

SEQ ID NO: 168206 - RNA, 15 nt, Human herpesvirus 6B
uauucaaccaaucua

SEQ ID NO: 168207 - RNA, 19 nt, Human herpesvirus 6B
uauucccccgcuguguuua

SEQ ID NO: 168208 - RNA, 16 nt, Human herpesvirus 6B
uauuccaggcaauaau

SEQ ID NO: 168209 - RNA, 15 nt, Human herpesvirus 6B
uauucagaguacuuu

SEQ ID NO: 168210 - RNA, 16 nt, Human herpesvirus 6B
uauuauaaaaacuaau

SEQ ID NO: 168211 - RNA, 15 nt, Human herpesvirus 6B
uauuacaauuugaca

SEQ ID NO: 168212 - RNA, 17 nt, Human herpesvirus 6B
uauuugucgugugcuac

SEQ ID NO: 168213 - RNA, 15 nt, Human herpesvirus 6B
uauuuuaugugugua

SEQ ID NO: 168214 - RNA, 21 nt, Human herpesvirus 6B
uauuuucaauaucaccuuaca

SEQ ID NO: 168215 - RNA, 22 nt, Human herpesvirus 6B
uauuuguuuaaugcauucacaa

SEQ ID NO: 168216 - RNA, 13 nt, Human herpesvirus 6B
uauuuaacaucca

SEQ ID NO: 168217 - RNA, 14 nt, Human herpesvirus 6B
uauuuaacauccaa

SEQ ID NO: 168218 - RNA, 22 nt, Human herpesvirus 6B
uauuuaacgcgucaacaaacaa

SEQ ID NO: 168219 - RNA, 15 nt, Human herpesvirus 6B
uauuuaccauuugac

SEQ ID NO: 168220 - RNA, 20 nt, Human herpesvirus 6B
ucaaaacugggcgaagaccu

SEQ ID NO: 168221 - RNA, 17 nt, Human herpesvirus 6B
ucaaaaugaccagagau

SEQ ID NO: 168222 - RNA, 19 nt, Human herpesvirus 6B
ucaaaaugaccagagauuc

SEQ ID NO: 168223 - RNA, 19 nt, Human herpesvirus 6B
ucaaacucaccgcauauau

SEQ ID NO: 168224 - RNA, 17 nt, Human herpesvirus 6B
ucaaaaaaugcuuuuau

SEQ ID NO: 168225 - RNA, 24 nt, Human herpesvirus 6B
uaugugauucggaaaauaauugca

SEQ ID NO: 168226 - RNA, 16 nt, Human herpesvirus 6B
uauguauuggaauugg

SEQ ID NO: 168227 - RNA, 13 nt, Human herpesvirus 6B
uaugucauuucau

SEQ ID NO: 168228 - RNA, 15 nt, Human herpesvirus 6B
uauguaugaacaggu

SEQ ID NO: 168229 - RNA, 15 nt, Human herpesvirus 6B
uauguaguacacaga

SEQ ID NO: 168230 - RNA, 18 nt, Human herpesvirus 6B
uauguaguacacagaauc

SEQ ID NO: 168231 - RNA, 14 nt, Human herpesvirus 6B
uaugcaacgguguu

SEQ ID NO: 168232 - RNA, 17 nt, Human herpesvirus 6B
uaugcaacgguguucca

SEQ ID NO: 168233 - RNA, 19 nt, Human herpesvirus 6B
uauuaacuaaaauuuggaa

SEQ ID NO: 168234 - RNA, 16 nt, Human herpesvirus 6B
uauuaaagauggaaaa

SEQ ID NO: 168235 - RNA, 22 nt, Human herpesvirus 6B
uaugacuuggagagaacugucu

SEQ ID NO: 168236 - RNA, 15 nt, Human herpesvirus 6B
uaugaucggcauuug

SEQ ID NO: 168237 - RNA, 16 nt, Human herpesvirus 6B
uaugaucggcauuugu

SEQ ID NO: 168238 - RNA, 20 nt, Human herpesvirus 6B
uaugaggauuugcuugucac

SEQ ID NO: 168239 - RNA, 14 nt, Human herpesvirus 6B
uaucgcgcagacca

SEQ ID NO: 168240 - RNA, 15 nt, Human herpesvirus 6B
uaucacuuagacacg

SEQ ID NO: 168241 - RNA, 17 nt, Human herpesvirus 6B
uaucugagacagucaau

SEQ ID NO: 168242 - RNA, 23 nt, Human herpesvirus 6B
uaucugcauacagaaauuggaga

SEQ ID NO: 168243 - RNA, 19 nt, Human herpesvirus 6B
uaucuguauuucguguauc

SEQ ID NO: 168244 - RNA, 22 nt, Human herpesvirus 6B
uaucuuaaaguuggggucucau

SEQ ID NO: 168245 - RNA, 16 nt, Human herpesvirus 6B
uaucuacugcagucca

SEQ ID NO: 168246 - RNA, 14 nt, Human herpesvirus 6B
uaucucaaauuuuc

SEQ ID NO: 168247 - RNA, 21 nt, Human herpesvirus 6B
uaucucaaauuuuccaaacau

SEQ ID NO: 168248 - RNA, 13 nt, Human herpesvirus 6B
uaucaaaagccag

SEQ ID NO: 168249 - RNA, 14 nt, Human herpesvirus 6B
uaucaaaagccaga

SEQ ID NO: 168250 - RNA, 15 nt, Human herpesvirus 6B
uaucaaaagccagau

SEQ ID NO: 168251 - RNA, 21 nt, Human herpesvirus 6B
uauaauguguuggucauuuca

SEQ ID NO: 168252 - RNA, 14 nt, Human herpesvirus 6B
uauaauccugucuc

SEQ ID NO: 168253 - RNA, 16 nt, Human herpesvirus 6B
uauaaucacaaauauc

SEQ ID NO: 168254 - RNA, 17 nt, Human herpesvirus 6B
uauaaucacaaauaucc

SEQ ID NO: 168255 - RNA, 15 nt, Human herpesvirus 6B
uauaauauaaauucu

SEQ ID NO: 168256 - RNA, 22 nt, Human herpesvirus 6B
uaucacaaaguuuaaguucuca

SEQ ID NO: 168257 - RNA, 17 nt, Human herpesvirus 6B
uaucaauuccugugaug

SEQ ID NO: 168258 - RNA, 14 nt, Human herpesvirus 6B
uaucaacaaugucc

SEQ ID NO: 168259 - RNA, 19 nt, Human herpesvirus 6B
uacugacaccacauaacaa

SEQ ID NO: 168260 - RNA, 23 nt, Human herpesvirus 6B
uagcauucuguucuucaucauca

SEQ ID NO: 168261 - RNA, 20 nt, Human herpesvirus 6B
uacugcacuuucgaucacaa

SEQ ID NO: 168262 - RNA, 17 nt, Human herpesvirus 6B
uagcagcucugcaauuu

SEQ ID NO: 168263 - RNA, 19 nt, Human herpesvirus 6B
uagcgauuaguuugugcag

SEQ ID NO: 168264 - RNA, 16 nt, Human herpesvirus 6B
uagccagggcauucac

SEQ ID NO: 168265 - RNA, 18 nt, Human herpesvirus 6B
uagccagggcauucacaa

SEQ ID NO: 168266 - RNA, 23 nt, Human herpesvirus 6B
uaggccuacggcgccacaaaaca

SEQ ID NO: 168267 - RNA, 21 nt, Human herpesvirus 6B
uagcggcacguugaccgcaga

SEQ ID NO: 168268 - RNA, 19 nt, Human herpesvirus 6B
uagggucaacuguuacuuu

SEQ ID NO: 168269 - RNA, 18 nt, Human herpesvirus 6B
uaggguuaggguuagggu

SEQ ID NO: 168270 - RNA, 12 nt, Human herpesvirus 6B
uauaaauucuua

SEQ ID NO: 168271 - RNA, 21 nt, Human herpesvirus 6B
uauaaauucuuaccuuuuaag

SEQ ID NO: 168272 - RNA, 12 nt, Human herpesvirus 6B
uauaaauucuuu

SEQ ID NO: 168273 - RNA, 16 nt, Human herpesvirus 6B
uauaagucaucauaca

SEQ ID NO: 168274 - RNA, 15 nt, Human herpesvirus 6B
uauaaauggcauuga

SEQ ID NO: 168275 - RNA, 15 nt, Human herpesvirus 6B
uauaaagaggccaau

SEQ ID NO: 168276 - RNA, 14 nt, Human herpesvirus 6B
uauaaaaguccuca

SEQ ID NO: 168277 - RNA, 12 nt, Human herpesvirus 6B
uauaaacagauu

SEQ ID NO: 168278 - RNA, 12 nt, Human herpesvirus 6B
uagugugccuau

SEQ ID NO: 168279 - RNA, 14 nt, Human herpesvirus 6B
uaguugaugcuguu

SEQ ID NO: 168280 - RNA, 14 nt, Human herpesvirus 6B
uaguuaaacauacg

SEQ ID NO: 168281 - RNA, 13 nt, Human herpesvirus 6B
uaggugugcuuug

SEQ ID NO: 168282 - RNA, 19 nt, Human herpesvirus 6B
uaguagauuuucauuuuga

SEQ ID NO: 168283 - RNA, 15 nt, Human herpesvirus 6B
uacccgauguucucu

SEQ ID NO: 168284 - RNA, 16 nt, Human herpesvirus 6B
uaccauuugacuccaa

SEQ ID NO: 168285 - RNA, 22 nt, Human herpesvirus 6B
uacccaucguucuuaacauauu

SEQ ID NO: 168286 - RNA, 17 nt, Human herpesvirus 6B
uacgaucucauaugcau

SEQ ID NO: 168287 - RNA, 18 nt, Human herpesvirus 6B
uaccgaucccagcucacc

SEQ ID NO: 168288 - RNA, 22 nt, Human herpesvirus 6B
uacccuuugcggugcauaacau

SEQ ID NO: 168289 - RNA, 14 nt, Human herpesvirus 6B
uaccgaccugacac

SEQ ID NO: 168290 - RNA, 19 nt, Human herpesvirus 6B
uaccgaccugacacaauca

SEQ ID NO: 168291 - RNA, 20 nt, Human herpesvirus 6B
uaccgaccugacacaaucag

SEQ ID NO: 168292 - RNA, 16 nt, Human herpesvirus 6B
uacggucgaaugagcu

SEQ ID NO: 168293 - RNA, 14 nt, Human herpesvirus 6B
uacuaugugacauc

SEQ ID NO: 168294 - RNA, 17 nt, Human herpesvirus 6B
uacgcauugacggguau

SEQ ID NO: 168295 - RNA, 20 nt, Human herpesvirus 6B
uacgcaggauuauaaaaaca

SEQ ID NO: 168296 - RNA, 17 nt, Human herpesvirus 6B
uacacuuauagacuaaa

SEQ ID NO: 168297 - RNA, 19 nt, Human herpesvirus 6B
uacagagauacguagucac

SEQ ID NO: 168298 - RNA, 13 nt, Human herpesvirus 6B
uacagagccagac

SEQ ID NO: 168299 - RNA, 20 nt, Human herpesvirus 6B
uacaacgacugggagaauaa

SEQ ID NO: 168300 - RNA, 16 nt, Human herpesvirus 6B
uacaacugaaacucca

SEQ ID NO: 168301 - RNA, 16 nt, Human herpesvirus 6B
uacaagcaugcauugu

SEQ ID NO: 168302 - RNA, 16 nt, Human herpesvirus 6B
uacaccaggaguuuaa

SEQ ID NO: 168303 - RNA, 23 nt, Human herpesvirus 6B
uaccaguagcacgaaccaaaaug

SEQ ID NO: 168304 - RNA, 20 nt, Human herpesvirus 6B
uaccaguagauggugcuauu

SEQ ID NO: 168305 - RNA, 14 nt, Human herpesvirus 6B
uacagauacaaaga

SEQ ID NO: 168306 - RNA, 12 nt, Human herpesvirus 6B
uaccaacaugua

SEQ ID NO: 168307 - RNA, 12 nt, Human herpesvirus 6B
uaauuacauaua

SEQ ID NO: 168308 - RNA, 23 nt, Human herpesvirus 6B
uacaaaagccugcauaugaucca

SEQ ID NO: 168309 - RNA, 13 nt, Human herpesvirus 6B
uacaaaccuuccc

SEQ ID NO: 168310 - RNA, 19 nt, Human herpesvirus 6B
uacaaaccuucccuaucac

SEQ ID NO: 168311 - RNA, 22 nt, Human herpesvirus 6B
uacaaacgacaaaaccgaaaua

SEQ ID NO: 168312 - RNA, 13 nt, Human herpesvirus 6B
uacaaagauuuua

SEQ ID NO: 168313 - RNA, 14 nt, Human herpesvirus 6B
uacaaagauuuuaa

SEQ ID NO: 168314 - RNA, 22 nt, Human herpesvirus 6B
uaaugucacugucgaauaucuu

SEQ ID NO: 168315 - RNA, 22 nt, Human herpesvirus 6B
uaaugucuucgaauaguuucau

SEQ ID NO: 168316 - RNA, 14 nt, Human herpesvirus 6B
uaaugugaacuaaa

SEQ ID NO: 168317 - RNA, 20 nt, Human herpesvirus 6B
uaauuaaaacagaaaggcca

SEQ ID NO: 168318 - RNA, 18 nt, Human herpesvirus 6B
uaaugauuggaaucacaa

SEQ ID NO: 168319 - RNA, 16 nt, Human herpesvirus 6B
uaaucuacgcauugac

SEQ ID NO: 168320 - RNA, 16 nt, Human herpesvirus 6B
uaaugaaucauugcuu

SEQ ID NO: 168321 - RNA, 14 nt, Human herpesvirus 6B
uaaugaaugugcuu

SEQ ID NO: 168322 - RNA, 12 nt, Human herpesvirus 6B
uaauaagacaga

SEQ ID NO: 168323 - RNA, 21 nt, Human herpesvirus 6B
uaauagcccuucaccgucucu

SEQ ID NO: 168324 - RNA, 22 nt, Human herpesvirus 6B
uaauaaacucugccuguucaac

SEQ ID NO: 168325 - RNA, 14 nt, Human herpesvirus 6B
uaaguuaauuccag

SEQ ID NO: 168326 - RNA, 18 nt, Human herpesvirus 6B
uaaguggguacaaugaaa

SEQ ID NO: 168327 - RNA, 13 nt, Human herpesvirus 6B
uaauaaaauacac

SEQ ID NO: 168328 - RNA, 18 nt, Human herpesvirus 6B
uaauaaaauacacaucug

SEQ ID NO: 168329 - RNA, 19 nt, Human herpesvirus 6B
uaauaaaauacacaucuga

SEQ ID NO: 168330 - RNA, 15 nt, Human herpesvirus 6B
uaauaaaaagucaua

SEQ ID NO: 168331 - RNA, 19 nt, Human herpesvirus 6B
uaauauuccugaacuacac

SEQ ID NO: 168332 - RNA, 14 nt, Human herpesvirus 6B
uaaucgauuacaaa

SEQ ID NO: 168333 - RNA, 17 nt, Human herpesvirus 6B
uaauccaugaacuacag

SEQ ID NO: 168334 - RNA, 19 nt, Human herpesvirus 6B
uaauccaugaacuacagug

SEQ ID NO: 168335 - RNA, 17 nt, Human herpesvirus 6B
uaauagguuauuuacaa

SEQ ID NO: 168336 - RNA, 20 nt, Human herpesvirus 6B
uaauagguuauuuacaaaag

SEQ ID NO: 168337 - RNA, 22 nt, Human herpesvirus 6B
uaauauaucuugaaaucuacca

SEQ ID NO: 168338 - RNA, 16 nt, Human herpesvirus 6B
uaauaugcaacggugu

SEQ ID NO: 168339 - RNA, 22 nt, Human herpesvirus 6B
uaauauuuuuucagcuuucaua

SEQ ID NO: 168340 - RNA, 10 nt, Human herpesvirus 6B
uaaagaaugc

SEQ ID NO: 168341 - RNA, 24 nt, Human herpesvirus 6B
uaaacuguucuuucaaaaugacca

SEQ ID NO: 168342 - RNA, 17 nt, Human herpesvirus 6B
uaaacucugccuguuca

SEQ ID NO: 168343 - RNA, 20 nt, Human herpesvirus 6B
uaaacuggucugcuugcaaa

SEQ ID NO: 168344 - RNA, 19 nt, Human herpesvirus 6B
uaaacuuugguucggagag

SEQ ID NO: 168345 - RNA, 17 nt, Human herpesvirus 6B
uaaacgucgaaacgaaa

SEQ ID NO: 168346 - RNA, 14 nt, Human herpesvirus 6B
uaaacggcauacau

SEQ ID NO: 168347 - RNA, 16 nt, Human herpesvirus 6B
uaaacgguaaauucaa

SEQ ID NO: 168348 - RNA, 18 nt, Human herpesvirus 6B
uaaagauggaaaauuuau

SEQ ID NO: 168349 - RNA, 19 nt, Human herpesvirus 6B
uaaagaaugcugacuuuga

SEQ ID NO: 168350 - RNA, 21 nt, Human herpesvirus 6B
uaaagauuuggaggugagaca

SEQ ID NO: 168351 - RNA, 12 nt, Human herpesvirus 6B
uaaaagcugcua

SEQ ID NO: 168352 - RNA, 13 nt, Human herpesvirus 6B
uaaaagcugcuaa

SEQ ID NO: 168353 - RNA, 14 nt, Human herpesvirus 6B
uaaaagcugcuaac

SEQ ID NO: 168354 - RNA, 15 nt, Human herpesvirus 6B
uaaacgauaucaauu

SEQ ID NO: 168355 - RNA, 21 nt, Human herpesvirus 6B
uaaacgcugucucagauauau

SEQ ID NO: 168356 - RNA, 13 nt, Human herpesvirus 6B
uaaaaucugcuaa

SEQ ID NO: 168357 - RNA, 16 nt, Human herpesvirus 6B
uaaaauggcugugcua

SEQ ID NO: 168358 - RNA, 19 nt, Human herpesvirus 6B
uaaaauggcugugcuaucu

SEQ ID NO: 168359 - RNA, 22 nt, Human herpesvirus 6B
uaaaaugguuuuuuugugugua

SEQ ID NO: 168360 - RNA, 17 nt, Human herpesvirus 6B
gugguaaugacuauucc

SEQ ID NO: 168361 - RNA, 13 nt, Human herpesvirus 6B
gugguaugagcug

SEQ ID NO: 168362 - RNA, 22 nt, Human herpesvirus 6B
gugggcgguagguucacuucca

SEQ ID NO: 168363 - RNA, 17 nt, Human herpesvirus 6B
guggggaugacgagcug

SEQ ID NO: 168364 - RNA, 14 nt, Human herpesvirus 6B
guggaaaugucuau

SEQ ID NO: 168365 - RNA, 15 nt, Human herpesvirus 6B
gugggaacugucaag

SEQ ID NO: 168366 - RNA, 15 nt, Human herpesvirus 6B
uaaaaaaagauuuau

SEQ ID NO: 168367 - RNA, 21 nt, Human herpesvirus 6B
uaaaaaaauaaaacaguauaa

SEQ ID NO: 168368 - RNA, 16 nt, Human herpesvirus 6B
uaaaaaaaaugugucu

SEQ ID NO: 168369 - RNA, 18 nt, Human herpesvirus 6B
uaaaaaaaaugugucuua

SEQ ID NO: 168370 - RNA, 21 nt, Human herpesvirus 6B
uaaaaaagugcaugaugaaca

SEQ ID NO: 168371 - RNA, 20 nt, Human herpesvirus 6B
guuuuuuaggacauguggua

SEQ ID NO: 168372 - RNA, 15 nt, Human herpesvirus 6B
guuuuugaugugcua

SEQ ID NO: 168373 - RNA, 20 nt, Human herpesvirus 6B
guuuuugauugcaaucacau

SEQ ID NO: 168374 - RNA, 23 nt, Human herpesvirus 6B
uaaaaaauuugugcgaauugugu

SEQ ID NO: 168375 - RNA, 16 nt, Human herpesvirus 6B
uaaaaaauuuugucac

SEQ ID NO: 168376 - RNA, 18 nt, Human herpesvirus 6B
uaaaguuucagagcuaag

SEQ ID NO: 168377 - RNA, 23 nt, Human herpesvirus 6B
uaaaguugaauugauaguacuua

SEQ ID NO: 168378 - RNA, 13 nt, Human herpesvirus 6B
uaaauaacggugu

SEQ ID NO: 168379 - RNA, 17 nt, Human herpesvirus 6B
uaacagauggcacugaa

SEQ ID NO: 168380 - RNA, 19 nt, Human herpesvirus 6B
uaaccgaugcugauuccuu

SEQ ID NO: 168381 - RNA, 17 nt, Human herpesvirus 6B
uaacccucgaugcguua

SEQ ID NO: 168382 - RNA, 20 nt, Human herpesvirus 6B
uaaccagaugugcacaaccg

SEQ ID NO: 168383 - RNA, 13 nt, Human herpesvirus 6B
uaacauccaaaau

SEQ ID NO: 168384 - RNA, 14 nt, Human herpesvirus 6B
uaacaucucagauc

SEQ ID NO: 168385 - RNA, 9 nt, Human herpesvirus 6B
uaagaauga

SEQ ID NO: 168386 - RNA, 15 nt, Human herpesvirus 6B
uaagacgcugauaac

SEQ ID NO: 168387 - RNA, 12 nt, Human herpesvirus 6B
uaacgaaaacca

SEQ ID NO: 168388 - RNA, 18 nt, Human herpesvirus 6B
uaacgaacaaaucuccaa

SEQ ID NO: 168389 - RNA, 20 nt, Human herpesvirus 6B
uaacggaaauccuugacuuu

SEQ ID NO: 168390 - RNA, 16 nt, Human herpesvirus 6B
uaacggagagucuuca

SEQ ID NO: 168391 - RNA, 19 nt, Human herpesvirus 6B
uaacgcgucaacaaacaau

SEQ ID NO: 168392 - RNA, 19 nt, Human herpesvirus 6B
uaacgcgucgguaaacaau

SEQ ID NO: 168393 - RNA, 20 nt, Human herpesvirus 6B
uaacgcgucgguaaacaauu

SEQ ID NO: 168394 - RNA, 11 nt, Human herpesvirus 6B
uaagagauuua

SEQ ID NO: 168395 - RNA, 22 nt, Human herpesvirus 6B
uaagacuuagcuagacgugucu

SEQ ID NO: 168396 - RNA, 21 nt, Human herpesvirus 6B
uaagauagccagggcauucac

SEQ ID NO: 168397 - RNA, 22 nt, Human herpesvirus 6B
uaagauagccagggcauucaca

SEQ ID NO: 168398 - RNA, 16 nt, Human herpesvirus 6B
uaagaucuacagagua

SEQ ID NO: 168399 - RNA, 17 nt, Human herpesvirus 6B
uaaguaaacugcuuaac

SEQ ID NO: 168400 - RNA, 18 nt, Human herpesvirus 6B
uaagguaucgucauucca

SEQ ID NO: 168401 - RNA, 16 nt, Human herpesvirus 6B
uaaguaguugcuugua

SEQ ID NO: 168402 - RNA, 13 nt, Human herpesvirus 6B
cuguuacuaugua

SEQ ID NO: 168403 - RNA, 16 nt, Human herpesvirus 6B
cuguccgugacacaca

SEQ ID NO: 168404 - RNA, 20 nt, Human herpesvirus 6B
cuguccgugacacacagaau

SEQ ID NO: 168405 - RNA, 20 nt, Human herpesvirus 6B
cugucgaaugcccacaccau

SEQ ID NO: 168406 - RNA, 14 nt, Human herpesvirus 6B
cuguguauugugau

SEQ ID NO: 168407 - RNA, 21 nt, Human herpesvirus 6B
cuguuuuaauuaaaaaagagg

SEQ ID NO: 168408 - RNA, 23 nt, Human herpesvirus 6B
cuguuuucgccaucaaucucuau

SEQ ID NO: 168409 - RNA, 20 nt, Human herpesvirus 6B
cuguuuugagagcuacacau

SEQ ID NO: 168410 - RNA, 17 nt, Human herpesvirus 6B
cuguuuuuuuucuuaag

SEQ ID NO: 168411 - RNA, 15 nt, Human herpesvirus 6B
cuuaaaaaaacacag

SEQ ID NO: 168412 - RNA, 18 nt, Human herpesvirus 6B
cuuaaaaaaacacaguau

SEQ ID NO: 168413 - RNA, 18 nt, Human herpesvirus 6B
cuuaaagcgugugauuca

SEQ ID NO: 168414 - RNA, 22 nt, Human herpesvirus 6B
cuuaaagcgugugauucaguau

SEQ ID NO: 168415 - RNA, 14 nt, Human herpesvirus 6B
cuguuuccagaaua

SEQ ID NO: 168416 - RNA, 12 nt, Human herpesvirus 6B
cuguuuccagag

SEQ ID NO: 168417 - RNA, 16 nt, Human herpesvirus 6B
cuguucgguuuaauua

SEQ ID NO: 168418 - RNA, 15 nt, Human herpesvirus 6B
cuguucuuucaaaau

SEQ ID NO: 168419 - RNA, 16 nt, Human herpesvirus 6B
cuuauaacaccaguac

SEQ ID NO: 168420 - RNA, 18 nt, Human herpesvirus 6B
cuuauaacaccaguacuu

SEQ ID NO: 168421 - RNA, 21 nt, Human herpesvirus 6B
cuuauaacaccaguacuucaa

SEQ ID NO: 168422 - RNA, 20 nt, Human herpesvirus 6B
cuuauaaugugaacuaaaua

SEQ ID NO: 168423 - RNA, 15 nt, Human herpesvirus 6B
cuuauacgcaggauu

SEQ ID NO: 168424 - RNA, 22 nt, Human herpesvirus 6B
cuuacuguaaacaaauucuuac

SEQ ID NO: 168425 - RNA, 16 nt, Human herpesvirus 6B
cuuagcucuaaugcua

SEQ ID NO: 168426 - RNA, 20 nt, Human herpesvirus 6B
cuuagauaugucguuucaug

SEQ ID NO: 168427 - RNA, 23 nt, Human herpesvirus 6B
cuuacuaaguuuugagugcuauu

SEQ ID NO: 168428 - RNA, 16 nt, Human herpesvirus 6B
cuuagagauaucugca

SEQ ID NO: 168429 - RNA, 17 nt, Human herpesvirus 6B
cuuagagauaucugcau

SEQ ID NO: 168430 - RNA, 15 nt, Human herpesvirus 6B
cuuaaugaaugugcu

SEQ ID NO: 168431 - RNA, 13 nt, Human herpesvirus 6B
cuuacaaaccuuc

SEQ ID NO: 168432 - RNA, 21 nt, Human herpesvirus 6B
cuuacaaaccuucccuaucac

SEQ ID NO: 168433 - RNA, 22 nt, Human herpesvirus 6B
cuuacaaaccuucccuaucaca

SEQ ID NO: 168434 - RNA, 23 nt, Human herpesvirus 6B
cuuacaaaccuucccuaucacaa

SEQ ID NO: 168435 - RNA, 18 nt, Human herpesvirus 6B
cuuacacaugccgcaaga

SEQ ID NO: 168436 - RNA, 17 nt, Human herpesvirus 6B
cuuacaauguucuugac

SEQ ID NO: 168437 - RNA, 15 nt, Human herpesvirus 6B
cuuaccaagaaauca

SEQ ID NO: 168438 - RNA, 17 nt, Human herpesvirus 6B
cuuaaaugacacagaau

SEQ ID NO: 168439 - RNA, 13 nt, Human herpesvirus 6B
cuuaacauauucg

SEQ ID NO: 168440 - RNA, 16 nt, Human herpesvirus 6B
cuuaauaacuacacuu

SEQ ID NO: 168441 - RNA, 14 nt, Human herpesvirus 6B
cuucuggauacuga

SEQ ID NO: 168442 - RNA, 15 nt, Human herpesvirus 6B
cuucucuaaaaacua

SEQ ID NO: 168443 - RNA, 20 nt, Human herpesvirus 6B
cuugaaaagccccugcuuga

SEQ ID NO: 168444 - RNA, 14 nt, Human herpesvirus 6B
cuugaaccaaguca

SEQ ID NO: 168445 - RNA, 15 nt, Human herpesvirus 6B
cuugaagaugugaua

SEQ ID NO: 168446 - RNA, 16 nt, Human herpesvirus 6B
cuugaagaugugauac

SEQ ID NO: 168447 - RNA, 16 nt, Human herpesvirus 6B
cuucuuuuaguauuua

SEQ ID NO: 168448 - RNA, 16 nt, Human herpesvirus 6B
cuuccuguccgugaga

SEQ ID NO: 168449 - RNA, 22 nt, Human herpesvirus 6B
cuuccuguccgugagacaccgc

SEQ ID NO: 168450 - RNA, 22 nt, Human herpesvirus 6B
cuucggaaaaaugggugaaauc

SEQ ID NO: 168451 - RNA, 15 nt, Human herpesvirus 6B
cuucgguacagugaa

SEQ ID NO: 168452 - RNA, 16 nt, Human herpesvirus 6B
cuucuauaugcguguu

SEQ ID NO: 168453 - RNA, 22 nt, Human herpesvirus 6B
cuucuacuuuaucuuuugcaaa

SEQ ID NO: 168454 - RNA, 13 nt, Human herpesvirus 6B
cuuccccauaaca

SEQ ID NO: 168455 - RNA, 13 nt, Human herpesvirus 6B
cuucccuaucaca

SEQ ID NO: 168456 - RNA, 21 nt, Human herpesvirus 6B
cuucaugagccggcucaagau

SEQ ID NO: 168457 - RNA, 20 nt, Human herpesvirus 6B
cuucauacccgauguucucu

SEQ ID NO: 168458 - RNA, 21 nt, Human herpesvirus 6B
cuucagcucagacaaauggaa

SEQ ID NO: 168459 - RNA, 13 nt, Human herpesvirus 6B
cuucaucaucacc

SEQ ID NO: 168460 - RNA, 11 nt, Human herpesvirus 6B
cuuauuacaau

SEQ ID NO: 168461 - RNA, 17 nt, Human herpesvirus 6B
cuuauggcaagcacuga

SEQ ID NO: 168462 - RNA, 17 nt, Human herpesvirus 6B
cuuauguaaacuaaaua

SEQ ID NO: 168463 - RNA, 22 nt, Human herpesvirus 6B
cuuauuucgaaagagauauagc

SEQ ID NO: 168464 - RNA, 17 nt, Human herpesvirus 6B
cuucaaauuuacucucc

SEQ ID NO: 168465 - RNA, 16 nt, Human herpesvirus 6B
cuucaaagugaauucc

SEQ ID NO: 168466 - RNA, 22 nt, Human herpesvirus 6B
cuucaagaaaaucgcaaaagaa

SEQ ID NO: 168467 - RNA, 21 nt, Human herpesvirus 6B
cuucaagaaugccgugaacug

SEQ ID NO: 168468 - RNA, 15 nt, Human herpesvirus 6B
cuucaccgucucuga

SEQ ID NO: 168469 - RNA, 16 nt, Human herpesvirus 6B
cuucaccgucucugaa

SEQ ID NO: 168470 - RNA, 14 nt, Human herpesvirus 6B
cucuccuggguauu

SEQ ID NO: 168471 - RNA, 24 nt, Human herpesvirus 6B
cucugcaagcucaugaacaucguc

SEQ ID NO: 168472 - RNA, 15 nt, Human herpesvirus 6B
cucucuuucaguaau

SEQ ID NO: 168473 - RNA, 14 nt, Human herpesvirus 6B
cucugaagcaaaag

SEQ ID NO: 168474 - RNA, 20 nt, Human herpesvirus 6B
cucugaagcaaaagucuuau

SEQ ID NO: 168475 - RNA, 20 nt, Human herpesvirus 6B
cuccgcacgcuagcaaugau

SEQ ID NO: 168476 - RNA, 16 nt, Human herpesvirus 6B
cucccauguaugcauu

SEQ ID NO: 168477 - RNA, 12 nt, Human herpesvirus 6B
cugagacaguca

SEQ ID NO: 168478 - RNA, 14 nt, Human herpesvirus 6B
cugaggacggugag

SEQ ID NO: 168479 - RNA, 21 nt, Human herpesvirus 6B
cugagugaucugauucgacaa

SEQ ID NO: 168480 - RNA, 13 nt, Human herpesvirus 6B
cugauacuugaaa

SEQ ID NO: 168481 - RNA, 19 nt, Human herpesvirus 6B
cugauauggcaaauuucaa

SEQ ID NO: 168482 - RNA, 20 nt, Human herpesvirus 6B
cugaagcuaucggacaggcg

SEQ ID NO: 168483 - RNA, 11 nt, Human herpesvirus 6B
cugaagacagc

SEQ ID NO: 168484 - RNA, 23 nt, Human herpesvirus 6B
cugaaggaaucgguaaacuucag

SEQ ID NO: 168485 - RNA, 20 nt, Human herpesvirus 6B
cucuuuauagagcaauucau

SEQ ID NO: 168486 - RNA, 15 nt, Human herpesvirus 6B
cucuuuuuaauucca

SEQ ID NO: 168487 - RNA, 16 nt, Human herpesvirus 6B
cucuuuuuaauuccaa

SEQ ID NO: 168488 - RNA, 19 nt, Human herpesvirus 6B
cugcuaaaaaucaucucgu

SEQ ID NO: 168489 - RNA, 15 nt, Human herpesvirus 6B
cugcggaaauaaaaa

SEQ ID NO: 168490 - RNA, 18 nt, Human herpesvirus 6B
cugcauacagaaauugga

SEQ ID NO: 168491 - RNA, 15 nt, Human herpesvirus 6B
cugcagucucaggag

SEQ ID NO: 168492 - RNA, 13 nt, Human herpesvirus 6B
cugcacaaacgaa

SEQ ID NO: 168493 - RNA, 12 nt, Human herpesvirus 6B
cugcacagaauc

SEQ ID NO: 168494 - RNA, 16 nt, Human herpesvirus 6B
cugcagcgauauggaa

SEQ ID NO: 168495 - RNA, 22 nt, Human herpesvirus 6B
cugcagggaugugguaugagcu

SEQ ID NO: 168496 - RNA, 23 nt, Human herpesvirus 6B
cugcagggaugugguaugagcug

SEQ ID NO: 168497 - RNA, 18 nt, Human herpesvirus 6B
cugguaaaugucaaagaa

SEQ ID NO: 168498 - RNA, 12 nt, Human herpesvirus 6B
cugucacacucu

SEQ ID NO: 168499 - RNA, 15 nt, Human herpesvirus 6B
cuggucugcuugcaa

SEQ ID NO: 168500 - RNA, 16 nt, Human herpesvirus 6B
cugucaaggaaaacuc

SEQ ID NO: 168501 - RNA, 17 nt, Human herpesvirus 6B
cuggaggcgaacuaaga

SEQ ID NO: 168502 - RNA, 15 nt, Human herpesvirus 6B
cgugucggugauacc

SEQ ID NO: 168503 - RNA, 13 nt, Human herpesvirus 6B
cguguaauguuuc

SEQ ID NO: 168504 - RNA, 14 nt, Human herpesvirus 6B
cguguaauguuucc

SEQ ID NO: 168505 - RNA, 18 nt, Human herpesvirus 6B
cguggucguugguguuua

SEQ ID NO: 168506 - RNA, 17 nt, Human herpesvirus 6B
cgugaaaauaucgucau

SEQ ID NO: 168507 - RNA, 20 nt, Human herpesvirus 6B
cgucuuaaauggguuuguuc

SEQ ID NO: 168508 - RNA, 19 nt, Human herpesvirus 6B
cgugguaggaaaugaugau

SEQ ID NO: 168509 - RNA, 21 nt, Human herpesvirus 6B
cuaaacacugacuaaacguac

SEQ ID NO: 168510 - RNA, 20 nt, Human herpesvirus 6B
cuaaacggagacugcacaga

SEQ ID NO: 168511 - RNA, 22 nt, Human herpesvirus 6B
cuaaacggagacugcacagaau

SEQ ID NO: 168512 - RNA, 23 nt, Human herpesvirus 6B
cuaaacggagacugcacagaauc

SEQ ID NO: 168513 - RNA, 13 nt, Human herpesvirus 6B
cuaaaugugauac

SEQ ID NO: 168514 - RNA, 13 nt, Human herpesvirus 6B
cuaacccaugaaa

SEQ ID NO: 168515 - RNA, 19 nt, Human herpesvirus 6B
cuaacgaacaaaucuccaa

SEQ ID NO: 168516 - RNA, 20 nt, Human herpesvirus 6B
cuaacgaacaaaucuccaaa

SEQ ID NO: 168517 - RNA, 13 nt, Human herpesvirus 6B
cgguuagaucugg

SEQ ID NO: 168518 - RNA, 21 nt, Human herpesvirus 6B
cguaauagccgaacaaggguu

SEQ ID NO: 168519 - RNA, 13 nt, Human herpesvirus 6B
cguaaccauucug

SEQ ID NO: 168520 - RNA, 16 nt, Human herpesvirus 6B
cguaaccgaugcugau

SEQ ID NO: 168521 - RNA, 15 nt, Human herpesvirus 6B
cgguuuucuuacaca

SEQ ID NO: 168522 - RNA, 22 nt, Human herpesvirus 6B
cgguuuucuuacacaugccgca

SEQ ID NO: 168523 - RNA, 20 nt, Human herpesvirus 6B
cgucuccugggaacucuccc

SEQ ID NO: 168524 - RNA, 16 nt, Human herpesvirus 6B
cgucucaugcgaucua

SEQ ID NO: 168525 - RNA, 22 nt, Human herpesvirus 6B
cgucucugaagcaaaagucuua

SEQ ID NO: 168526 - RNA, 15 nt, Human herpesvirus 6B
cgucugauacuugaa

SEQ ID NO: 168527 - RNA, 20 nt, Human herpesvirus 6B
cgucuacccuaucgauccag

SEQ ID NO: 168528 - RNA, 14 nt, Human herpesvirus 6B
cguacaaaaucaaa

SEQ ID NO: 168529 - RNA, 15 nt, Human herpesvirus 6B
cguacaaaaucaaac

SEQ ID NO: 168530 - RNA, 15 nt, Human herpesvirus 6B
cguaauggcauucac

SEQ ID NO: 168531 - RNA, 22 nt, Human herpesvirus 6B
cguccuguucgauguacaguuu

SEQ ID NO: 168532 - RNA, 23 nt, Human herpesvirus 6B
cggauaugaggauuugcuuguca

SEQ ID NO: 168533 - RNA, 14 nt, Human herpesvirus 6B
cggauagguagaau

SEQ ID NO: 168534 - RNA, 17 nt, Human herpesvirus 6B
cggauggaauccaaugg

SEQ ID NO: 168535 - RNA, 15 nt, Human herpesvirus 6B
cggaugggguuuuga

SEQ ID NO: 168536 - RNA, 14 nt, Human herpesvirus 6B
cgggcagggcgggc

SEQ ID NO: 168537 - RNA, 18 nt, Human herpesvirus 6B
cgggcaccgagggcgggc

SEQ ID NO: 168538 - RNA, 20 nt, Human herpesvirus 6B
cgggcacggugugaucauca

SEQ ID NO: 168539 - RNA, 20 nt, Human herpesvirus 6B
cggauuuguucgauugccaa

SEQ ID NO: 168540 - RNA, 13 nt, Human herpesvirus 6B
cggggacagugau

SEQ ID NO: 168541 - RNA, 18 nt, Human herpesvirus 6B
cggggauuuagugcagua

SEQ ID NO: 168542 - RNA, 14 nt, Human herpesvirus 6B
cggagagucuucau

SEQ ID NO: 168543 - RNA, 17 nt, Human herpesvirus 6B
cggagacacgauuuauc

SEQ ID NO: 168544 - RNA, 18 nt, Human herpesvirus 6B
cggagcaaccgcaguucc

SEQ ID NO: 168545 - RNA, 18 nt, Human herpesvirus 6B
cggagcaaccgcaguuuc

SEQ ID NO: 168546 - RNA, 15 nt, Human herpesvirus 6B
cggagcacuuuuuaa

SEQ ID NO: 168547 - RNA, 14 nt, Human herpesvirus 6B
cggaguuaagacau

SEQ ID NO: 168548 - RNA, 19 nt, Human herpesvirus 6B
cggauaacguucauuccca

SEQ ID NO: 168549 - RNA, 15 nt, Human herpesvirus 6B
cggagcuuccgucac

SEQ ID NO: 168550 - RNA, 20 nt, Human herpesvirus 6B
cggaauuaacaauucucuca

SEQ ID NO: 168551 - RNA, 21 nt, Human herpesvirus 6B
cggaauuaacaauucucucaa

SEQ ID NO: 168552 - RNA, 16 nt, Human herpesvirus 6B
cggaauuuauugucga

SEQ ID NO: 168553 - RNA, 21 nt, Human herpesvirus 6B
cggagaacgggcaacucccca

SEQ ID NO: 168554 - RNA, 19 nt, Human herpesvirus 6B
cgacaugcuucacaucucg

SEQ ID NO: 168555 - RNA, 22 nt, Human herpesvirus 6B
cggaacugcuggcugagauuca

SEQ ID NO: 168556 - RNA, 17 nt, Human herpesvirus 6B
cggaagauacacugcaa

SEQ ID NO: 168557 - RNA, 20 nt, Human herpesvirus 6B
cggaacccuagacacacaga

SEQ ID NO: 168558 - RNA, 15 nt, Human herpesvirus 6B
cggaaauccuugacu

SEQ ID NO: 168559 - RNA, 16 nt, Human herpesvirus 6B
cggaacaccagcaugu

SEQ ID NO: 168560 - RNA, 21 nt, Human herpesvirus 6B
cggaaaaccgguacgcuucuu

SEQ ID NO: 168561 - RNA, 17 nt, Human herpesvirus 6B
cgacccuagcuuuucau

SEQ ID NO: 168562 - RNA, 17 nt, Human herpesvirus 6B
cgaaggaggucucaggu

SEQ ID NO: 168563 - RNA, 17 nt, Human herpesvirus 6B
cgaagugcuucugcucu

SEQ ID NO: 168564 - RNA, 24 nt, Human herpesvirus 6B
cgaauagcauucuguucuucauca

SEQ ID NO: 168565 - RNA, 19 nt, Human herpesvirus 6B
cgaauaguuucaugauucu

SEQ ID NO: 168566 - RNA, 16 nt, Human herpesvirus 6B
cgaaucucaagcacaa

SEQ ID NO: 168567 - RNA, 21 nt, Human herpesvirus 6B
cgaauguuacagauacaaaga

SEQ ID NO: 168568 - RNA, 19 nt, Human herpesvirus 6B
cgaauggcacucugaagaa

SEQ ID NO: 168569 - RNA, 18 nt, Human herpesvirus 6B
cuauaugcgaauguuaaa

SEQ ID NO: 168570 - RNA, 14 nt, Human herpesvirus 6B
cuauuuaacaucca

SEQ ID NO: 168571 - RNA, 15 nt, Human herpesvirus 6B
cuauuuaacauccaa

SEQ ID NO: 168572 - RNA, 22 nt, Human herpesvirus 6B
cucaacuaaaucaugucuuaca

SEQ ID NO: 168573 - RNA, 18 nt, Human herpesvirus 6B
cucaacacucucaaugua

SEQ ID NO: 168574 - RNA, 13 nt, Human herpesvirus 6B
cuauuugcauuaa

SEQ ID NO: 168575 - RNA, 23 nt, Human herpesvirus 6B
cuauuuuuuauuaguauccuucu

SEQ ID NO: 168576 - RNA, 19 nt, Human herpesvirus 6B
cuauuuuuuuaauguugag

SEQ ID NO: 168577 - RNA, 23 nt, Human herpesvirus 6B
cuaguuacggggaagaucuaugg

SEQ ID NO: 168578 - RNA, 23 nt, Human herpesvirus 6B
cuagugugccuauuaaugcuuau

SEQ ID NO: 168579 - RNA, 18 nt, Human herpesvirus 6B
cuauaaaaacacacauca

SEQ ID NO: 168580 - RNA, 18 nt, Human herpesvirus 6B
cuauaaucacaaauaucc

SEQ ID NO: 168581 - RNA, 21 nt, Human herpesvirus 6B
cuauagauuagaaauuacaua

SEQ ID NO: 168582 - RNA, 15 nt, Human herpesvirus 6B
cucauccucagucuu

SEQ ID NO: 168583 - RNA, 18 nt, Human herpesvirus 6B
cucauccucagucuucaa

SEQ ID NO: 168584 - RNA, 16 nt, Human herpesvirus 6B
cucaucugcgucaaug

SEQ ID NO: 168585 - RNA, 22 nt, Human herpesvirus 6B
cucaucccuuaaaaaaacacag

SEQ ID NO: 168586 - RNA, 13 nt, Human herpesvirus 6B
cucauacagaucc

SEQ ID NO: 168587 - RNA, 14 nt, Human herpesvirus 6B
cucauaaaguuaaa

SEQ ID NO: 168588 - RNA, 15 nt, Human herpesvirus 6B
cucauaaaguuaaag

SEQ ID NO: 168589 - RNA, 20 nt, Human herpesvirus 6B
cucauagauuucauacugua

SEQ ID NO: 168590 - RNA, 14 nt, Human herpesvirus 6B
cucaggugagauuc

SEQ ID NO: 168591 - RNA, 12 nt, Human herpesvirus 6B
cucauacaucca

SEQ ID NO: 168592 - RNA, 12 nt, Human herpesvirus 6B
cucagucuucaa

SEQ ID NO: 168593 - RNA, 13 nt, Human herpesvirus 6B
cucaguguuugcc

SEQ ID NO: 168594 - RNA, 20 nt, Human herpesvirus 6B
cucaguguuugccaaccaaa

SEQ ID NO: 168595 - RNA, 14 nt, Human herpesvirus 6B
cucagugucacuua

SEQ ID NO: 168596 - RNA, 15 nt, Human herpesvirus 6B
cucagugucacuuau

SEQ ID NO: 168597 - RNA, 20 nt, Human herpesvirus 6B
cucagugucacuuauauaaa

SEQ ID NO: 168598 - RNA, 15 nt, Human herpesvirus 6B
cucagcaaucaccau

SEQ ID NO: 168599 - RNA, 13 nt, Human herpesvirus 6B
cucagaugcaaug

SEQ ID NO: 168600 - RNA, 23 nt, Human herpesvirus 6B
cucagauauauacuuacuugagu

SEQ ID NO: 168601 - RNA, 14 nt, Human herpesvirus 6B
cucaacugcuaguu

SEQ ID NO: 168602 - RNA, 14 nt, Human herpesvirus 6B
cucaagagugcuga

SEQ ID NO: 168603 - RNA, 23 nt, Human herpesvirus 6B
cuagguacggcgucacacagcau

SEQ ID NO: 168604 - RNA, 17 nt, Human herpesvirus 6B
cuacugaucgccaaaug

SEQ ID NO: 168605 - RNA, 17 nt, Human herpesvirus 6B
cuacgaucucauaugca

SEQ ID NO: 168606 - RNA, 20 nt, Human herpesvirus 6B
cuacucauccucagucuuca

SEQ ID NO: 168607 - RNA, 22 nt, Human herpesvirus 6B
cuacuauaacuuuucuaucacu

SEQ ID NO: 168608 - RNA, 11 nt, Human herpesvirus 6B
cuaaugugauu

SEQ ID NO: 168609 - RNA, 16 nt, Human herpesvirus 6B
cuacacgccgucuuca

SEQ ID NO: 168610 - RNA, 17 nt, Human herpesvirus 6B
cuacacgccgucuucaa

SEQ ID NO: 168611 - RNA, 18 nt, Human herpesvirus 6B
cuacauaaaacaggguug

SEQ ID NO: 168612 - RNA, 15 nt, Human herpesvirus 6B
cuacaugccacagaa

SEQ ID NO: 168613 - RNA, 17 nt, Human herpesvirus 6B
cuacaugccacagaaca

SEQ ID NO: 168614 - RNA, 19 nt, Human herpesvirus 6B
gaccauacguggugaugau

SEQ ID NO: 168615 - RNA, 14 nt, Human herpesvirus 6B
gaccaaucugugca

SEQ ID NO: 168616 - RNA, 18 nt, Human herpesvirus 6B
gaccaaucugugcaacac

SEQ ID NO: 168617 - RNA, 15 nt, Human herpesvirus 6B
gaccagagauucuau

SEQ ID NO: 168618 - RNA, 14 nt, Human herpesvirus 6B
gacauugcuuucuc

SEQ ID NO: 168619 - RNA, 16 nt, Human herpesvirus 6B
gacauuuaccagagau

SEQ ID NO: 168620 - RNA, 18 nt, Human herpesvirus 6B
gacauucaacauucccac

SEQ ID NO: 168621 - RNA, 13 nt, Human herpesvirus 6B
gacaucugcaaaa

SEQ ID NO: 168622 - RNA, 22 nt, Human herpesvirus 6B
gacaucacgucccauucacaua

SEQ ID NO: 168623 - RNA, 12 nt, Human herpesvirus 6B
gacaugcuucac

SEQ ID NO: 168624 - RNA, 23 nt, Human herpesvirus 6B
gacaugccgcagaagacuuuaaa

SEQ ID NO: 168625 - RNA, 21 nt, Human herpesvirus 6B
gaccgcagaggaucuguucau

SEQ ID NO: 168626 - RNA, 21 nt, Human herpesvirus 6B
gaccguaggaagaucaugaca

SEQ ID NO: 168627 - RNA, 17 nt, Human herpesvirus 6B
gaccguucaccauucca

SEQ ID NO: 168628 - RNA, 20 nt, Human herpesvirus 6B
gacgaauaagccuuugcuga

SEQ ID NO: 168629 - RNA, 19 nt, Human herpesvirus 6B
gaccuucuuuuaguauuua

SEQ ID NO: 168630 - RNA, 22 nt, Human herpesvirus 6B
gaccuucuuuuaguauuuacca

SEQ ID NO: 168631 - RNA, 14 nt, Human herpesvirus 6B
gacgauaguguucu

SEQ ID NO: 168632 - RNA, 23 nt, Human herpesvirus 6B
gacgacggaauaugguuccacuu

SEQ ID NO: 168633 - RNA, 13 nt, Human herpesvirus 6B
gacuaaacuuaac

SEQ ID NO: 168634 - RNA, 20 nt, Human herpesvirus 6B
gacuacgauugcugucuucc

SEQ ID NO: 168635 - RNA, 18 nt, Human herpesvirus 6B
gacuacguuuuguguuaa

SEQ ID NO: 168636 - RNA, 15 nt, Human herpesvirus 6B
gagcuuuggcuguga

SEQ ID NO: 168637 - RNA, 14 nt, Human herpesvirus 6B
gaggaaaugcagca

SEQ ID NO: 168638 - RNA, 24 nt, Human herpesvirus 6B
gaggaacugaugagaaaugacuua

SEQ ID NO: 168639 - RNA, 15 nt, Human herpesvirus 6B
gagcugacaucugca

SEQ ID NO: 168640 - RNA, 21 nt, Human herpesvirus 6B
gagcugucgaguaacuguggg

SEQ ID NO: 168641 - RNA, 18 nt, Human herpesvirus 6B
gagcgacauaguggcuau

SEQ ID NO: 168642 - RNA, 23 nt, Human herpesvirus 6B
gagccuuuccccagcacaccucg

SEQ ID NO: 168643 - RNA, 13 nt, Human herpesvirus 6B
gagcacuugucaa

SEQ ID NO: 168644 - RNA, 14 nt, Human herpesvirus 6B
gagcacgucuucuu

SEQ ID NO: 168645 - RNA, 20 nt, Human herpesvirus 6B
gagcacgcacgagaacacgc

SEQ ID NO: 168646 - RNA, 17 nt, Human herpesvirus 6B
gagaucugcucauguca

SEQ ID NO: 168647 - RNA, 20 nt, Human herpesvirus 6B
gagauuuacuguuucuuuga

SEQ ID NO: 168648 - RNA, 18 nt, Human herpesvirus 6B
gagcaaagaaaugacuug

SEQ ID NO: 168649 - RNA, 17 nt, Human herpesvirus 6B
gagaacgcucuugccga

SEQ ID NO: 168650 - RNA, 18 nt, Human herpesvirus 6B
gagaagauuugugugaac

SEQ ID NO: 168651 - RNA, 17 nt, Human herpesvirus 6B
gacuuuaaagucguuuu

SEQ ID NO: 168652 - RNA, 14 nt, Human herpesvirus 6B
gagaaagaaaacca

SEQ ID NO: 168653 - RNA, 18 nt, Human herpesvirus 6B
gagaaagaaaaccaguau

SEQ ID NO: 168654 - RNA, 17 nt, Human herpesvirus 6B
gacuaggaauacguuag

SEQ ID NO: 168655 - RNA, 19 nt, Human herpesvirus 6B
gacuauacgaaauaaucga

SEQ ID NO: 168656 - RNA, 20 nt, Human herpesvirus 6B
gacuccaacgcacaugcuaa

SEQ ID NO: 168657 - RNA, 19 nt, Human herpesvirus 6B
gacuaucugagacagucaa

SEQ ID NO: 168658 - RNA, 17 nt, Human herpesvirus 6B
gacagagccuagaccaa

SEQ ID NO: 168659 - RNA, 16 nt, Human herpesvirus 6B
gaauugauaguacuua

SEQ ID NO: 168660 - RNA, 14 nt, Human herpesvirus 6B
gaauuguugucucu

SEQ ID NO: 168661 - RNA, 22 nt, Human herpesvirus 6B
gaauuuaauccacugcauuuca

SEQ ID NO: 168662 - RNA, 21 nt, Human herpesvirus 6B
gaauuacaauacagcaauaaa

SEQ ID NO: 168663 - RNA, 21 nt, Human herpesvirus 6B
gaauguuuaaaguuuugugau

SEQ ID NO: 168664 - RNA, 15 nt, Human herpesvirus 6B
gaaugggaugcauua

SEQ ID NO: 168665 - RNA, 16 nt, Human herpesvirus 6B
gaauguacacagucac

SEQ ID NO: 168666 - RNA, 16 nt, Human herpesvirus 6B
gaauguaaaagagcca

SEQ ID NO: 168667 - RNA, 19 nt, Human herpesvirus 6B
gaauguaaaagagccagag

SEQ ID NO: 168668 - RNA, 19 nt, Human herpesvirus 6B
gaagugcaugcgacagaca

SEQ ID NO: 168669 - RNA, 14 nt, Human herpesvirus 6B
gaauaaaaguccau

SEQ ID NO: 168670 - RNA, 18 nt, Human herpesvirus 6B
gaauaacggagagcuucu

SEQ ID NO: 168671 - RNA, 21 nt, Human herpesvirus 6B
gaauauauaaaaaaaacuaaa

SEQ ID NO: 168672 - RNA, 14 nt, Human herpesvirus 6B
gaauacaagaccau

SEQ ID NO: 168673 - RNA, 14 nt, Human herpesvirus 6B
gaauacuacaguga

SEQ ID NO: 168674 - RNA, 14 nt, Human herpesvirus 6B
gaauagcauucugu

SEQ ID NO: 168675 - RNA, 19 nt, Human herpesvirus 6B
gaagacggaaccaugauca

SEQ ID NO: 168676 - RNA, 13 nt, Human herpesvirus 6B
gaagacguuucua

SEQ ID NO: 168677 - RNA, 16 nt, Human herpesvirus 6B
gaagaauaaaagucca

SEQ ID NO: 168678 - RNA, 14 nt, Human herpesvirus 6B
gaagaggugcaaau

SEQ ID NO: 168679 - RNA, 20 nt, Human herpesvirus 6B
gaagaaacgucaacgucucu

SEQ ID NO: 168680 - RNA, 17 nt, Human herpesvirus 6B
gaacucgcugauuuguu

SEQ ID NO: 168681 - RNA, 20 nt, Human herpesvirus 6B
gaacugucaaggaaaacucu

SEQ ID NO: 168682 - RNA, 15 nt, Human herpesvirus 6B
gaaccaaucugugag

SEQ ID NO: 168683 - RNA, 16 nt, Human herpesvirus 6B
gaaccaaucugugagc

SEQ ID NO: 168684 - RNA, 22 nt, Human herpesvirus 6B
gaaccauagguguuugcagaua

SEQ ID NO: 168685 - RNA, 17 nt, Human herpesvirus 6B
gaaauaacgcaaucuac

SEQ ID NO: 168686 - RNA, 24 nt, Human herpesvirus 6B
gaaaucugagguuucucucucacc

SEQ ID NO: 168687 - RNA, 20 nt, Human herpesvirus 6B
gaaaucugagugaucugauu

SEQ ID NO: 168688 - RNA, 21 nt, Human herpesvirus 6B
gaaaugaacgacuuauuacaa

SEQ ID NO: 168689 - RNA, 22 nt, Human herpesvirus 6B
gaacagagagaggagcauucac

SEQ ID NO: 168690 - RNA, 15 nt, Human herpesvirus 6B
gaacagugacaguaa

SEQ ID NO: 168691 - RNA, 12 nt, Human herpesvirus 6B
gaacaggugcuu

SEQ ID NO: 168692 - RNA, 14 nt, Human herpesvirus 6B
gaacaggugcuucu

SEQ ID NO: 168693 - RNA, 18 nt, Human herpesvirus 6B
gaacaugauuauaucgca

SEQ ID NO: 168694 - RNA, 17 nt, Human herpesvirus 6B
cuuguaauccaucaggg

SEQ ID NO: 168695 - RNA, 18 nt, Human herpesvirus 6B
cuuggcuaucgcaaugau

SEQ ID NO: 168696 - RNA, 21 nt, Human herpesvirus 6B
cuugggcauaaguccaguaac

SEQ ID NO: 168697 - RNA, 22 nt, Human herpesvirus 6B
gaaaguuucuguggaauuccaa

SEQ ID NO: 168698 - RNA, 22 nt, Human herpesvirus 6B
gaaauaaaaucggcgaauguac

SEQ ID NO: 168699 - RNA, 18 nt, Human herpesvirus 6B
gaaauauugcaugcauug

SEQ ID NO: 168700 - RNA, 13 nt, Human herpesvirus 6B
cuugacauagcaa

SEQ ID NO: 168701 - RNA, 15 nt, Human herpesvirus 6B
cuugcaaacagcuuu

SEQ ID NO: 168702 - RNA, 14 nt, Human herpesvirus 6B
cuuggaaacguguu

SEQ ID NO: 168703 - RNA, 17 nt, Human herpesvirus 6B
cuuggagcuauaugcau

SEQ ID NO: 168704 - RNA, 15 nt, Human herpesvirus 6B
gauauggaaacacuu

SEQ ID NO: 168705 - RNA, 20 nt, Human herpesvirus 6B
gauaugagugaauugugcaa

SEQ ID NO: 168706 - RNA, 19 nt, Human herpesvirus 6B
gauaugcaaacugacugua

SEQ ID NO: 168707 - RNA, 21 nt, Human herpesvirus 6B
gaucccagcucaccaccaucu

SEQ ID NO: 168708 - RNA, 22 nt, Human herpesvirus 6B
gauauauaaaaaagugcaugau

SEQ ID NO: 168709 - RNA, 17 nt, Human herpesvirus 6B
gauauauacuuacuuga

SEQ ID NO: 168710 - RNA, 17 nt, Human herpesvirus 6B
gauagucaugcacuccg

SEQ ID NO: 168711 - RNA, 18 nt, Human herpesvirus 6B
gaguaaugacuacgauug

SEQ ID NO: 168712 - RNA, 21 nt, Human herpesvirus 6B
gaguaauuauugugacaaggu

SEQ ID NO: 168713 - RNA, 22 nt, Human herpesvirus 6B
gauagccagggcauucacaauc

SEQ ID NO: 168714 - RNA, 24 nt, Human herpesvirus 6B
gaguaaaacgcucacaacaugauc

SEQ ID NO: 168715 - RNA, 20 nt, Human herpesvirus 6B
gaggguuuuuucaucauuua

SEQ ID NO: 168716 - RNA, 20 nt, Human herpesvirus 6B
gaggucuuauauuucagaua

SEQ ID NO: 168717 - RNA, 15 nt, Human herpesvirus 6B
gaggggacggacaga

SEQ ID NO: 168718 - RNA, 14 nt, Human herpesvirus 6B
gagggcggccucga

SEQ ID NO: 168719 - RNA, 13 nt, Human herpesvirus 6B
gaggagggaccca

SEQ ID NO: 168720 - RNA, 16 nt, Human herpesvirus 6B
gaucugaggacgguga

SEQ ID NO: 168721 - RNA, 16 nt, Human herpesvirus 6B
gaucucauaugcauca

SEQ ID NO: 168722 - RNA, 23 nt, Human herpesvirus 6B
gaucucgaaauauaaaaccaaaa

SEQ ID NO: 168723 - RNA, 16 nt, Human herpesvirus 6B
gaugaugggaccauug

SEQ ID NO: 168724 - RNA, 16 nt, Human herpesvirus 6B
gaugaucagcauucac

SEQ ID NO: 168725 - RNA, 14 nt, Human herpesvirus 6B
gaugaugaucugcu

SEQ ID NO: 168726 - RNA, 17 nt, Human herpesvirus 6B
gaucuacagaguaccga

SEQ ID NO: 168727 - RNA, 17 nt, Human herpesvirus 6B
gaucuaugggaguaauu

SEQ ID NO: 168728 - RNA, 16 nt, Human herpesvirus 6B
gaucguggacaguaaa

SEQ ID NO: 168729 - RNA, 22 nt, Human herpesvirus 6B
gauuagaaauuacauaagcaaa

SEQ ID NO: 168730 - RNA, 15 nt, Human herpesvirus 6B
gauuaauacaucauu

SEQ ID NO: 168731 - RNA, 15 nt, Human herpesvirus 6B
gauuaaaugugaaca

SEQ ID NO: 168732 - RNA, 21 nt, Human herpesvirus 6B
gaugcaagucgcgaagugcuu

SEQ ID NO: 168733 - RNA, 15 nt, Human herpesvirus 6B
gaugcauguggcaag

SEQ ID NO: 168734 - RNA, 16 nt, Human herpesvirus 6B
gaugccuacauaugcc

SEQ ID NO: 168735 - RNA, 18 nt, Human herpesvirus 6B
gaugccuacauaugccga

SEQ ID NO: 168736 - RNA, 16 nt, Human herpesvirus 6B
gaugccuugauguuuc

SEQ ID NO: 168737 - RNA, 17 nt, Human herpesvirus 6B
gaugccuugauguuucc

SEQ ID NO: 168738 - RNA, 22 nt, Human herpesvirus 6B
gcaagaacugcgacucaauccu

SEQ ID NO: 168739 - RNA, 22 nt, Human herpesvirus 6B
gcacccucugcaagcucaugaa

SEQ ID NO: 168740 - RNA, 18 nt, Human herpesvirus 6B
gcacccuaucaccuuucu

SEQ ID NO: 168741 - RNA, 22 nt, Human herpesvirus 6B
gcacuugucaauaaacauuuca

SEQ ID NO: 168742 - RNA, 17 nt, Human herpesvirus 6B
gcacucugaagaauaaa

SEQ ID NO: 168743 - RNA, 22 nt, Human herpesvirus 6B
gcacuuuuuaacgaaaaccauu

SEQ ID NO: 168744 - RNA, 16 nt, Human herpesvirus 6B
gcaaaaaauaguuuua

SEQ ID NO: 168745 - RNA, 14 nt, Human herpesvirus 6B
gcaaaaacaaauga

SEQ ID NO: 168746 - RNA, 15 nt, Human herpesvirus 6B
gcaaacagcuuuauu

SEQ ID NO: 168747 - RNA, 21 nt, Human herpesvirus 6B
gcaaacagguguaaauauucu

SEQ ID NO: 168748 - RNA, 15 nt, Human herpesvirus 6B
gcaaaaucguguuuu

SEQ ID NO: 168749 - RNA, 18 nt, Human herpesvirus 6B
gcaaccaauaaauggcau

SEQ ID NO: 168750 - RNA, 20 nt, Human herpesvirus 6B
gcaacauucugcguguuaau

SEQ ID NO: 168751 - RNA, 20 nt, Human herpesvirus 6B
gauuuugaggaucacuaacu

SEQ ID NO: 168752 - RNA, 20 nt, Human herpesvirus 6B
gauuuguucgauugccaaag

SEQ ID NO: 168753 - RNA, 17 nt, Human herpesvirus 6B
gauuuggaggugagaca

SEQ ID NO: 168754 - RNA, 15 nt, Human herpesvirus 6B
gauuccuucaauguu

SEQ ID NO: 168755 - RNA, 19 nt, Human herpesvirus 6B
gauuucaggaaguucuuca

SEQ ID NO: 168756 - RNA, 15 nt, Human herpesvirus 6B
gauuaucuuaguaau

SEQ ID NO: 168757 - RNA, 17 nt, Human herpesvirus 6B
gauuauggcaacauacc

SEQ ID NO: 168758 - RNA, 13 nt, Human herpesvirus 6B
gauuauuaucaca

SEQ ID NO: 168759 - RNA, 15 nt, Human herpesvirus 6B
gauuaguuugugcag

SEQ ID NO: 168760 - RNA, 16 nt, Human herpesvirus 6B
gauuauagauagcucc

SEQ ID NO: 168761 - RNA, 20 nt, Human herpesvirus 6B
gauuccccucauacauccag

SEQ ID NO: 168762 - RNA, 18 nt, Human herpesvirus 6B
gcagcgcccgaugccaac

SEQ ID NO: 168763 - RNA, 20 nt, Human herpesvirus 6B
gcagcguuggaaagcuuuau

SEQ ID NO: 168764 - RNA, 18 nt, Human herpesvirus 6B
gcaggcaucgacuauuaa

SEQ ID NO: 168765 - RNA, 21 nt, Human herpesvirus 6B
gcagggaaacuuuguguuuau

SEQ ID NO: 168766 - RNA, 12 nt, Human herpesvirus 6B
gcagucugcucg

SEQ ID NO: 168767 - RNA, 13 nt, Human herpesvirus 6B
gcaguaugccaua

SEQ ID NO: 168768 - RNA, 12 nt, Human herpesvirus 6B
gcaggugcugcu

SEQ ID NO: 168769 - RNA, 24 nt, Human herpesvirus 6B
gcaggugcugcuaaaagcuaugua

SEQ ID NO: 168770 - RNA, 21 nt, Human herpesvirus 6B
gcauacacccugccgaccuga

SEQ ID NO: 168771 - RNA, 20 nt, Human herpesvirus 6B
gcauacauuuuggacaguuu

SEQ ID NO: 168772 - RNA, 21 nt, Human herpesvirus 6B
gcauaaaagggcgcuggugac

SEQ ID NO: 168773 - RNA, 17 nt, Human herpesvirus 6B
gcaguuucuguuuuucu

SEQ ID NO: 168774 - RNA, 14 nt, Human herpesvirus 6B
gcauaacaucucag

SEQ ID NO: 168775 - RNA, 20 nt, Human herpesvirus 6B
gcauaacaucucagaucuag

SEQ ID NO: 168776 - RNA, 17 nt, Human herpesvirus 6B
gcaguuccuguuuuucu

SEQ ID NO: 168777 - RNA, 19 nt, Human herpesvirus 6B
gcaguguuauucagccgua

SEQ ID NO: 168778 - RNA, 12 nt, Human herpesvirus 6B
gcaucucaaaaa

SEQ ID NO: 168779 - RNA, 20 nt, Human herpesvirus 6B
gcaucucaaaaaacauauaa

SEQ ID NO: 168780 - RNA, 21 nt, Human herpesvirus 6B
gcauuucucuacaugccacag

SEQ ID NO: 168781 - RNA, 14 nt, Human herpesvirus 6B
gcauugacggguau

SEQ ID NO: 168782 - RNA, 17 nt, Human herpesvirus 6B
gcauuauuuugucuucg

SEQ ID NO: 168783 - RNA, 21 nt, Human herpesvirus 6B
gcauucacaaggaaugugcag

SEQ ID NO: 168784 - RNA, 14 nt, Human herpesvirus 6B
gcauucuuaucaaa

SEQ ID NO: 168785 - RNA, 17 nt, Human herpesvirus 6B
gcauuauacugaaugga

SEQ ID NO: 168786 - RNA, 16 nt, Human herpesvirus 6B
gcaugggugaguguau

SEQ ID NO: 168787 - RNA, 23 nt, Human herpesvirus 6B
gccaacggaaagcaucucaaaaa

SEQ ID NO: 168788 - RNA, 17 nt, Human herpesvirus 6B
gccaauuuaugucauuu

SEQ ID NO: 168789 - RNA, 20 nt, Human herpesvirus 6B
gccaauuuaugucauuucau

SEQ ID NO: 168790 - RNA, 20 nt, Human herpesvirus 6B
gccaaccuucuaaugacgcu

SEQ ID NO: 168791 - RNA, 20 nt, Human herpesvirus 6B
gccaaauguauugaacuuug

SEQ ID NO: 168792 - RNA, 18 nt, Human herpesvirus 6B
gccaaaaaaauacaguau

SEQ ID NO: 168793 - RNA, 13 nt, Human herpesvirus 6B
gcauuuguguuuu

SEQ ID NO: 168794 - RNA, 20 nt, Human herpesvirus 6B
gccagcaccuuagcucuaau

SEQ ID NO: 168795 - RNA, 17 nt, Human herpesvirus 6B
gccauaucacagcauuu

SEQ ID NO: 168796 - RNA, 19 nt, Human herpesvirus 6B
gccauaucacagcauuucc

SEQ ID NO: 168797 - RNA, 17 nt, Human herpesvirus 6B
gccauaaagaacacagg

SEQ ID NO: 168798 - RNA, 15 nt, Human herpesvirus 6B
gccauccacccauau

SEQ ID NO: 168799 - RNA, 13 nt, Human herpesvirus 6B
gccagggcauuca

SEQ ID NO: 168800 - RNA, 14 nt, Human herpesvirus 6B
gccagggcauucac

SEQ ID NO: 168801 - RNA, 22 nt, Human herpesvirus 6B
gccagcaguaugccauaaagaa

SEQ ID NO: 168802 - RNA, 15 nt, Human herpesvirus 6B
ccaucaugcugugag

SEQ ID NO: 168803 - RNA, 17 nt, Human herpesvirus 6B
cccaucguucuuaacau

SEQ ID NO: 168804 - RNA, 18 nt, Human herpesvirus 6B
cccauggcgagaaacgcc

SEQ ID NO: 168805 - RNA, 22 nt, Human herpesvirus 6B
ccauaacgcguacaaaaucaaa

SEQ ID NO: 168806 - RNA, 16 nt, Human herpesvirus 6B
ccauaaguuaauucca

SEQ ID NO: 168807 - RNA, 14 nt, Human herpesvirus 6B
ccagggaacuugau

SEQ ID NO: 168808 - RNA, 20 nt, Human herpesvirus 6B
ccaucaacacaccugccuag

SEQ ID NO: 168809 - RNA, 12 nt, Human herpesvirus 6B
ccauauaucauc

SEQ ID NO: 168810 - RNA, 14 nt, Human herpesvirus 6B
ccauaucacagcau

SEQ ID NO: 168811 - RNA, 22 nt, Human herpesvirus 6B
ccauagugaaagaguaccgaau

SEQ ID NO: 168812 - RNA, 16 nt, Human herpesvirus 6B
ccauaggugauuucaa

SEQ ID NO: 168813 - RNA, 13 nt, Human herpesvirus 6B
ccccuucauccag

SEQ ID NO: 168814 - RNA, 19 nt, Human herpesvirus 6B
cccgacggcagagguugcg

SEQ ID NO: 168815 - RNA, 13 nt, Human herpesvirus 6B
cccgauguucucu

SEQ ID NO: 168816 - RNA, 16 nt, Human herpesvirus 6B
cccucauacauccaga

SEQ ID NO: 168817 - RNA, 21 nt, Human herpesvirus 6B
cccucuagcgggguugcuaua

SEQ ID NO: 168818 - RNA, 20 nt, Human herpesvirus 6B
ccguaggaagaucaugacaa

SEQ ID NO: 168819 - RNA, 18 nt, Human herpesvirus 6B
ccgguacgcuucuuucac

SEQ ID NO: 168820 - RNA, 20 nt, Human herpesvirus 6B
ccggggagugggaggagcca

SEQ ID NO: 168821 - RNA, 20 nt, Human herpesvirus 6B
ccuagcuuuucauaugaaaa

SEQ ID NO: 168822 - RNA, 14 nt, Human herpesvirus 6B
ccuaucaacaaugu

SEQ ID NO: 168823 - RNA, 22 nt, Human herpesvirus 6B
ccucaaaaaugcacaauuuagc

SEQ ID NO: 168824 - RNA, 21 nt, Human herpesvirus 6B
ccucaaacuuuuagagacuuu

SEQ ID NO: 168825 - RNA, 20 nt, Human herpesvirus 6B
ccuaugauagcauaauccuu

SEQ ID NO: 168826 - RNA, 12 nt, Human herpesvirus 6B
ccuauguuaaca

SEQ ID NO: 168827 - RNA, 18 nt, Human herpesvirus 6B
ccuauguuaacauuguga

SEQ ID NO: 168828 - RNA, 21 nt, Human herpesvirus 6B
cccuucaccgucucugaagca

SEQ ID NO: 168829 - RNA, 15 nt, Human herpesvirus 6B
ccgacauaaaauuua

SEQ ID NO: 168830 - RNA, 16 nt, Human herpesvirus 6B
ccgcuucuauguauua

SEQ ID NO: 168831 - RNA, 23 nt, Human herpesvirus 6B
ccgcguacacgaaaaacauuucu

SEQ ID NO: 168832 - RNA, 13 nt, Human herpesvirus 6B
ccucuugcagugg

SEQ ID NO: 168833 - RNA, 20 nt, Human herpesvirus 6B
ccucaggguuggaguuuagc

SEQ ID NO: 168834 - RNA, 13 nt, Human herpesvirus 6B
ccucauacaucca

SEQ ID NO: 168835 - RNA, 14 nt, Human herpesvirus 6B
ccucauacauccag

SEQ ID NO: 168836 - RNA, 22 nt, Human herpesvirus 6B
ccugcaauuugaauucugcucg

SEQ ID NO: 168837 - RNA, 10 nt, Human herpesvirus 6B
ccugaucuca

SEQ ID NO: 168838 - RNA, 20 nt, Human herpesvirus 6B
ccugaaaucugagugaucug

SEQ ID NO: 168839 - RNA, 21 nt, Human herpesvirus 6B
ccugaacacccgcguccucca

SEQ ID NO: 168840 - RNA, 17 nt, Human herpesvirus 6B
ccuggaaaaacugacug

SEQ ID NO: 168841 - RNA, 16 nt, Human herpesvirus 6B
ccuuugccugcauuaa

SEQ ID NO: 168842 - RNA, 23 nt, Human herpesvirus 6B
ccuuugcggugcauaacaucuca

SEQ ID NO: 168843 - RNA, 20 nt, Human herpesvirus 6B
ccuuguaaucucuagguaaa

SEQ ID NO: 168844 - RNA, 14 nt, Human herpesvirus 6B
ccuucuuuaguaua

SEQ ID NO: 168845 - RNA, 17 nt, Human herpesvirus 6B
ccuucuuuuaguauuua

SEQ ID NO: 168846 - RNA, 23 nt, Human herpesvirus 6B
ccuuuucgcgccgcguacacgaa

SEQ ID NO: 168847 - RNA, 19 nt, Human herpesvirus 6B
cgaaagacguuugcuuuuu

SEQ ID NO: 168848 - RNA, 16 nt, Human herpesvirus 6B
cgaaauauaaaaccaa

SEQ ID NO: 168849 - RNA, 16 nt, Human herpesvirus 6B
cgaacagaaauuucua

SEQ ID NO: 168850 - RNA, 14 nt, Human herpesvirus 6B
cgaaaguucaucuu

SEQ ID NO: 168851 - RNA, 11 nt, Human herpesvirus 6B
cgaaaucaaug

SEQ ID NO: 168852 - RNA, 14 nt, Human herpesvirus 6B
cgaaauccccagaa

SEQ ID NO: 168853 - RNA, 22 nt, Human herpesvirus 6B
cgaaccauagguguuugcagau

SEQ ID NO: 168854 - RNA, 19 nt, Human herpesvirus 6B
cgaagaaaaugaauucaag

SEQ ID NO: 168855 - RNA, 16 nt, Human herpesvirus 6B
ccuucggggacaguga

SEQ ID NO: 168856 - RNA, 17 nt, Human herpesvirus 6B
ccuucggggacagugau

SEQ ID NO: 168857 - RNA, 16 nt, Human herpesvirus 6B
ccuucgguacagugaa

SEQ ID NO: 168858 - RNA, 13 nt, Human herpesvirus 6B
ccuucgauaauaa

SEQ ID NO: 168859 - RNA, 21 nt, Human herpesvirus 6B
ccuuauaaugugaacuaaaua

SEQ ID NO: 168860 - RNA, 15 nt, Human herpesvirus 6B
ccuuaaaaaaacaca

SEQ ID NO: 168861 - RNA, 16 nt, Human herpesvirus 6B
ccuuaaaaaaacacag

SEQ ID NO: 168862 - RNA, 21 nt, Human herpesvirus 6B
ccuuaaaaaaacacaguauuu

SEQ ID NO: 168863 - RNA, 17 nt, Human herpesvirus 6B
ccuuaaaugacacagaa

SEQ ID NO: 168864 - RNA, 17 nt, Human herpesvirus 6B
ccuuagaagcuuucaaa

SEQ ID NO: 168865 - RNA, 18 nt, Human herpesvirus 6B
ccugucauuuuuacucau

SEQ ID NO: 168866 - RNA, 15 nt, Human herpesvirus 6B
ccuguuuccagaaua

SEQ ID NO: 168867 - RNA, 18 nt, Human herpesvirus 6B
ccuguagggauguagaua

SEQ ID NO: 168868 - RNA, 22 nt, Human herpesvirus 6B
ccuguccgugacacacagaaua

SEQ ID NO: 168869 - RNA, 17 nt, Human herpesvirus 6B
cauguuuuuacuugaua

SEQ ID NO: 168870 - RNA, 14 nt, Human herpesvirus 6B
cauuaaaacuccca

SEQ ID NO: 168871 - RNA, 19 nt, Human herpesvirus 6B
cauuaaaauauucuacuuc

SEQ ID NO: 168872 - RNA, 22 nt, Human herpesvirus 6B
cauuaacucugggugaguuuua

SEQ ID NO: 168873 - RNA, 22 nt, Human herpesvirus 6B
cauuaucgugagacauuuucua

SEQ ID NO: 168874 - RNA, 14 nt, Human herpesvirus 6B
cauucuuaaauuca

SEQ ID NO: 168875 - RNA, 21 nt, Human herpesvirus 6B
cauucuuaaauucaauuuaaa

SEQ ID NO: 168876 - RNA, 15 nt, Human herpesvirus 6B
cauucgucuuuuaua

SEQ ID NO: 168877 - RNA, 17 nt, Human herpesvirus 6B
cauucgauuaaugccac

SEQ ID NO: 168878 - RNA, 21 nt, Human herpesvirus 6B
cauucuccuuguaaaaauuca

SEQ ID NO: 168879 - RNA, 21 nt, Human herpesvirus 6B
cauucgccauauaccuuguca

SEQ ID NO: 168880 - RNA, 13 nt, Human herpesvirus 6B
cauucccaguguc

SEQ ID NO: 168881 - RNA, 16 nt, Human herpesvirus 6B
cauucccaaccauccc

SEQ ID NO: 168882 - RNA, 14 nt, Human herpesvirus 6B
cauucacaaggaau

SEQ ID NO: 168883 - RNA, 21 nt, Human herpesvirus 6B
cauucacaaggaaugugcaga

SEQ ID NO: 168884 - RNA, 22 nt, Human herpesvirus 6B
cauucacaaucgcaguccagca

SEQ ID NO: 168885 - RNA, 15 nt, Human herpesvirus 6B
cauuauugauagcau

SEQ ID NO: 168886 - RNA, 13 nt, Human herpesvirus 6B
cauuuuuacucau

SEQ ID NO: 168887 - RNA, 19 nt, Human herpesvirus 6B
ccaaaaaaguuuauuuugu

SEQ ID NO: 168888 - RNA, 18 nt, Human herpesvirus 6B
cauuguuccgaauucuua

SEQ ID NO: 168889 - RNA, 17 nt, Human herpesvirus 6B
cauuguuucucuaaucc

SEQ ID NO: 168890 - RNA, 14 nt, Human herpesvirus 6B
cauuuuuucccaaa

SEQ ID NO: 168891 - RNA, 19 nt, Human herpesvirus 6B
cauuuuuucccaaaagacu

SEQ ID NO: 168892 - RNA, 19 nt, Human herpesvirus 6B
ccaaaacaacaacuuuuaa

SEQ ID NO: 168893 - RNA, 14 nt, Human herpesvirus 6B
ccaacgucaugcaa

SEQ ID NO: 168894 - RNA, 21 nt, Human herpesvirus 6B
ccaacgucaugcaaaacagau

SEQ ID NO: 168895 - RNA, 22 nt, Human herpesvirus 6B
ccaagaaucguuaaaugagaua

SEQ ID NO: 168896 - RNA, 18 nt, Human herpesvirus 6B
ccaagaaaaaacacaaaa

SEQ ID NO: 168897 - RNA, 16 nt, Human herpesvirus 6B
ccaauaaaauguccau

SEQ ID NO: 168898 - RNA, 17 nt, Human herpesvirus 6B
ccaauaaauauauuugu

SEQ ID NO: 168899 - RNA, 13 nt, Human herpesvirus 6B
ccaccgcaagcaa

SEQ ID NO: 168900 - RNA, 15 nt, Human herpesvirus 6B
ccaccuaauaaacuc

SEQ ID NO: 168901 - RNA, 19 nt, Human herpesvirus 6B
ccagcguggauaucucaaa

SEQ ID NO: 168902 - RNA, 22 nt, Human herpesvirus 6B
ccagcguggugugcacuuguag

SEQ ID NO: 168903 - RNA, 18 nt, Human herpesvirus 6B
ccagagacaugaccguag

SEQ ID NO: 168904 - RNA, 21 nt, Human herpesvirus 6B
ccaggaaaauguguucuuaca

SEQ ID NO: 168905 - RNA, 21 nt, Human herpesvirus 6B
ccaggaauccuauucauaaca

SEQ ID NO: 168906 - RNA, 17 nt, Human herpesvirus 6B
ccaggaauucacuuuga

SEQ ID NO: 168907 - RNA, 14 nt, Human herpesvirus 6B
ccaggcaauaauca

SEQ ID NO: 168908 - RNA, 18 nt, Human herpesvirus 6B
ccagaaaagcaaacaugc

SEQ ID NO: 168909 - RNA, 21 nt, Human herpesvirus 6B
ccagacaucucuucccacaaa

SEQ ID NO: 168910 - RNA, 20 nt, Human herpesvirus 6B
ccacugcauuucauuuccca

SEQ ID NO: 168911 - RNA, 13 nt, Human herpesvirus 6B
caguuaccgugau

SEQ ID NO: 168912 - RNA, 15 nt, Human herpesvirus 6B
cauaaaacugccaau

SEQ ID NO: 168913 - RNA, 19 nt, Human herpesvirus 6B
caguguucuggcuugucau

SEQ ID NO: 168914 - RNA, 21 nt, Human herpesvirus 6B
cauaacggaggagaugauuau

SEQ ID NO: 168915 - RNA, 14 nt, Human herpesvirus 6B
cauaacgauagcag

SEQ ID NO: 168916 - RNA, 12 nt, Human herpesvirus 6B
cauaacaucuca

SEQ ID NO: 168917 - RNA, 19 nt, Human herpesvirus 6B
cauaacagauggcacugaa

SEQ ID NO: 168918 - RNA, 21 nt, Human herpesvirus 6B
cauaaacugacuuauaaguca

SEQ ID NO: 168919 - RNA, 16 nt, Human herpesvirus 6B
cauagauuguuacuag

SEQ ID NO: 168920 - RNA, 22 nt, Human herpesvirus 6B
cauagauuguuacuagugauua

SEQ ID NO: 168921 - RNA, 18 nt, Human herpesvirus 6B
cauagauuucauacugua

SEQ ID NO: 168922 - RNA, 21 nt, Human herpesvirus 6B
cauacuuuccccauacugugu

SEQ ID NO: 168923 - RNA, 23 nt, Human herpesvirus 6B
cauaaguuaauuccagcuuucuu

SEQ ID NO: 168924 - RNA, 15 nt, Human herpesvirus 6B
cauaaguuaauucca

SEQ ID NO: 168925 - RNA, 15 nt, Human herpesvirus 6B
cauaagaauuacaau

SEQ ID NO: 168926 - RNA, 22 nt, Human herpesvirus 6B
cauaaucuacgcauugacgggu

SEQ ID NO: 168927 - RNA, 12 nt, Human herpesvirus 6B
cagcacaccucg

SEQ ID NO: 168928 - RNA, 20 nt, Human herpesvirus 6B
cagcaaguucaucagccauu

SEQ ID NO: 168929 - RNA, 16 nt, Human herpesvirus 6B
cagcaaacaugugauu

SEQ ID NO: 168930 - RNA, 19 nt, Human herpesvirus 6B
caguggauaggaugauuga

SEQ ID NO: 168931 - RNA, 12 nt, Human herpesvirus 6B
cagccaaugauu

SEQ ID NO: 168932 - RNA, 17 nt, Human herpesvirus 6B
caucuauguguauaaug

SEQ ID NO: 168933 - RNA, 15 nt, Human herpesvirus 6B
caucuaugaugcugu

SEQ ID NO: 168934 - RNA, 15 nt, Human herpesvirus 6B
caucucgugcaaaag

SEQ ID NO: 168935 - RNA, 14 nt, Human herpesvirus 6B
caucacgcauagac

SEQ ID NO: 168936 - RNA, 19 nt, Human herpesvirus 6B
caucacggccguauaucua

SEQ ID NO: 168937 - RNA, 21 nt, Human herpesvirus 6B
caucacggccguauaucuacu

SEQ ID NO: 168938 - RNA, 22 nt, Human herpesvirus 6B
caucaaucucuaugagacuguu

SEQ ID NO: 168939 - RNA, 21 nt, Human herpesvirus 6B
caucgucuccuccaacaaaga

SEQ ID NO: 168940 - RNA, 17 nt, Human herpesvirus 6B
caucgucuuuuucuuca

SEQ ID NO: 168941 - RNA, 15 nt, Human herpesvirus 6B
caucguuauggguuu

SEQ ID NO: 168942 - RNA, 15 nt, Human herpesvirus 6B
caucguuuguugaau

SEQ ID NO: 168943 - RNA, 16 nt, Human herpesvirus 6B
caucaccacguauggu

SEQ ID NO: 168944 - RNA, 19 nt, Human herpesvirus 6B
caucaacuauuuaacaucc

SEQ ID NO: 168945 - RNA, 20 nt, Human herpesvirus 6B
caucaacuauuuaacaucca

SEQ ID NO: 168946 - RNA, 18 nt, Human herpesvirus 6B
caucaaauccucuacgua

SEQ ID NO: 168947 - RNA, 17 nt, Human herpesvirus 6B
cauauuauuaacaauga

SEQ ID NO: 168948 - RNA, 18 nt, Human herpesvirus 6B
cauauuauuaacaaugaa

SEQ ID NO: 168949 - RNA, 13 nt, Human herpesvirus 6B
caugauauuccag

SEQ ID NO: 168950 - RNA, 19 nt, Human herpesvirus 6B
caugauauuccaggcaaua

SEQ ID NO: 168951 - RNA, 20 nt, Human herpesvirus 6B
caugauauuccaggcaauaa

SEQ ID NO: 168952 - RNA, 14 nt, Human herpesvirus 6B
caugauugcaacaa

SEQ ID NO: 168953 - RNA, 15 nt, Human herpesvirus 6B
caugauugcaacaaa

SEQ ID NO: 168954 - RNA, 11 nt, Human herpesvirus 6B
caucugcaaaa

SEQ ID NO: 168955 - RNA, 23 nt, Human herpesvirus 6B
caugaauuccaugcgaguagauu

SEQ ID NO: 168956 - RNA, 15 nt, Human herpesvirus 6B
caugacaaaucugaa

SEQ ID NO: 168957 - RNA, 18 nt, Human herpesvirus 6B
caugacaagaaagguauu

SEQ ID NO: 168958 - RNA, 20 nt, Human herpesvirus 6B
caugacuauaggaugacuga

SEQ ID NO: 168959 - RNA, 17 nt, Human herpesvirus 6B
caugacuggaaucacaa

SEQ ID NO: 168960 - RNA, 20 nt, Human herpesvirus 6B
caugacuuugugugucgaau

SEQ ID NO: 168961 - RNA, 13 nt, Human herpesvirus 6B
cauguaugcauua

SEQ ID NO: 168962 - RNA, 15 nt, Human herpesvirus 6B
cauguacaaacgaca

SEQ ID NO: 168963 - RNA, 16 nt, Human herpesvirus 6B
cauguacaaacgacaa

SEQ ID NO: 168964 - RNA, 17 nt, Human herpesvirus 6B
cauguaaaauuaccuca

SEQ ID NO: 168965 - RNA, 18 nt, Human herpesvirus 6B
cauguaaaauuaccucau

SEQ ID NO: 168966 - RNA, 20 nt, Human herpesvirus 6B
cauuaaaaaaauagcagaag

SEQ ID NO: 168967 - RNA, 16 nt, Human herpesvirus 6B
cauguuuauugucaaa

SEQ ID NO: 168968 - RNA, 24 nt, Human herpesvirus 6B
cauguuuauugucaaauagccaca

SEQ ID NO: 168969 - RNA, 22 nt, Human herpesvirus 6B
caaauucugauuauuaucacaa

SEQ ID NO: 168970 - RNA, 16 nt, Human herpesvirus 6B
caaauguaacucuuuc

SEQ ID NO: 168971 - RNA, 21 nt, Human herpesvirus 6B
caaauguaacucuuucuauua

SEQ ID NO: 168972 - RNA, 16 nt, Human herpesvirus 6B
caacaauguccaauua

SEQ ID NO: 168973 - RNA, 19 nt, Human herpesvirus 6B
caaacuacggaaaaucuca

SEQ ID NO: 168974 - RNA, 16 nt, Human herpesvirus 6B
caaacuacugaucgcc

SEQ ID NO: 168975 - RNA, 18 nt, Human herpesvirus 6B
caaaccuucccuaucaca

SEQ ID NO: 168976 - RNA, 23 nt, Human herpesvirus 6B
caaaccuucccuaucacaauaca

SEQ ID NO: 168977 - RNA, 16 nt, Human herpesvirus 6B
caaacgcagacuaauc

SEQ ID NO: 168978 - RNA, 22 nt, Human herpesvirus 6B
caaacgcucgccggcccgucca

SEQ ID NO: 168979 - RNA, 13 nt, Human herpesvirus 6B
caaaucuccaaaa

SEQ ID NO: 168980 - RNA, 14 nt, Human herpesvirus 6B
caaaucuccaaaag

SEQ ID NO: 168981 - RNA, 17 nt, Human herpesvirus 6B
caaacuccgaaaaaggu

SEQ ID NO: 168982 - RNA, 21 nt, Human herpesvirus 6B
caaauauuauuuucccacaga

SEQ ID NO: 168983 - RNA, 20 nt, Human herpesvirus 6B
caaaaugauugcaaccaaua

SEQ ID NO: 168984 - RNA, 16 nt, Human herpesvirus 6B
caaaaugguuaugaca

SEQ ID NO: 168985 - RNA, 17 nt, Human herpesvirus 6B
caaaaugaccagagauu

SEQ ID NO: 168986 - RNA, 20 nt, Human herpesvirus 6B
caaaaauccaggaguaauga

SEQ ID NO: 168987 - RNA, 20 nt, Human herpesvirus 6B
caaaacagauuuuacuucua

SEQ ID NO: 168988 - RNA, 20 nt, Human herpesvirus 6B
caaaauuuuucgugccucua

SEQ ID NO: 168989 - RNA, 18 nt, Human herpesvirus 6B
caaaccaauuugucgcac

SEQ ID NO: 168990 - RNA, 11 nt, Human herpesvirus 6B
caaacauguau

SEQ ID NO: 168991 - RNA, 15 nt, Human herpesvirus 6B
caaacauguauccuc

SEQ ID NO: 168992 - RNA, 12 nt, Human herpesvirus 6B
caaacaggugua

SEQ ID NO: 168993 - RNA, 14 nt, Human herpesvirus 6B
auuguccuucaggg

SEQ ID NO: 168994 - RNA, 22 nt, Human herpesvirus 6B
auugugcaguucuuacauauuu

SEQ ID NO: 168995 - RNA, 20 nt, Human herpesvirus 6B
auugugggagcacgucuucu

SEQ ID NO: 168996 - RNA, 19 nt, Human herpesvirus 6B
auuguguuucugucuuuaa

SEQ ID NO: 168997 - RNA, 14 nt, Human herpesvirus 6B
auuguuaacaugua

SEQ ID NO: 168998 - RNA, 15 nt, Human herpesvirus 6B
auuguuaacauguac

SEQ ID NO: 168999 - RNA, 16 nt, Human herpesvirus 6B
auuguuaacauguaca

SEQ ID NO: 169000 - RNA, 21 nt, Human herpesvirus 6B
auuguugccguugucguguga

SEQ ID NO: 169001 - RNA, 19 nt, Human herpesvirus 6B
auuguuuucauucugcuau

SEQ ID NO: 169002 - RNA, 14 nt, Human herpesvirus 6B
auuguaacuucaua

SEQ ID NO: 169003 - RNA, 14 nt, Human herpesvirus 6B
auuuaaaagcgaua

SEQ ID NO: 169004 - RNA, 12 nt, Human herpesvirus 6B
auuuaacaucca

SEQ ID NO: 169005 - RNA, 13 nt, Human herpesvirus 6B
auuuaacauccaa

SEQ ID NO: 169006 - RNA, 19 nt, Human herpesvirus 6B
auuuaacuaagauugugca

SEQ ID NO: 169007 - RNA, 23 nt, Human herpesvirus 6B
auuuaaggugguugaaaucacac

SEQ ID NO: 169008 - RNA, 16 nt, Human herpesvirus 6B
auuuaauccacugcau

SEQ ID NO: 169009 - RNA, 13 nt, Human herpesvirus 6B
auuuaaugcaaaa

SEQ ID NO: 169010 - RNA, 17 nt, Human herpesvirus 6B
auuuacucuccacccau

SEQ ID NO: 169011 - RNA, 18 nt, Human herpesvirus 6B
auuuacucuccacccauc

SEQ ID NO: 169012 - RNA, 17 nt, Human herpesvirus 6B
auuuagccuauuaagca

SEQ ID NO: 169013 - RNA, 13 nt, Human herpesvirus 6B
auuugccgggaug

SEQ ID NO: 169014 - RNA, 23 nt, Human herpesvirus 6B
auuugcugacccgauguggaacg

SEQ ID NO: 169015 - RNA, 18 nt, Human herpesvirus 6B
auuugucgaaucagauca

SEQ ID NO: 169016 - RNA, 13 nt, Human herpesvirus 6B
auuugugauuaua

SEQ ID NO: 169017 - RNA, 16 nt, Human herpesvirus 6B
auuuggguugugcugu

SEQ ID NO: 169018 - RNA, 18 nt, Human herpesvirus 6B
auuucuuuuuaaaaucaa

SEQ ID NO: 169019 - RNA, 12 nt, Human herpesvirus 6B
auuucagccgau

SEQ ID NO: 169020 - RNA, 22 nt, Human herpesvirus 6B
auuucaggaaguucuucaaaaa

SEQ ID NO: 169021 - RNA, 22 nt, Human herpesvirus 6B
auuucauacuguauggcaaaac

SEQ ID NO: 169022 - RNA, 19 nt, Human herpesvirus 6B
auuuaucaaaagccagauc

SEQ ID NO: 169023 - RNA, 18 nt, Human herpesvirus 6B
auuuaugaaaauugcucu

SEQ ID NO: 169024 - RNA, 16 nt, Human herpesvirus 6B
auuuauuagccgugau

SEQ ID NO: 169025 - RNA, 16 nt, Human herpesvirus 6B
auuuauuauaagcaaa

SEQ ID NO: 169026 - RNA, 22 nt, Human herpesvirus 6B
auuagcuauaaaaacacacauc

SEQ ID NO: 169027 - RNA, 18 nt, Human herpesvirus 6B
auuaggcucgagcuuuca

SEQ ID NO: 169028 - RNA, 10 nt, Human herpesvirus 6B
auuacugaaa

SEQ ID NO: 169029 - RNA, 19 nt, Human herpesvirus 6B
auuagaaauuacauaagca

SEQ ID NO: 169030 - RNA, 12 nt, Human herpesvirus 6B
auuauaagcaaa

SEQ ID NO: 169031 - RNA, 14 nt, Human herpesvirus 6B
auuauaaaaacaca

SEQ ID NO: 169032 - RNA, 16 nt, Human herpesvirus 6B
auuauaccuauuagcu

SEQ ID NO: 169033 - RNA, 18 nt, Human herpesvirus 6B
auuccccucauacaucca

SEQ ID NO: 169034 - RNA, 15 nt, Human herpesvirus 6B
auuccuggacauggu

SEQ ID NO: 169035 - RNA, 18 nt, Human herpesvirus 6B
auuccuggacauggugaa

SEQ ID NO: 169036 - RNA, 14 nt, Human herpesvirus 6B
auucgauuaaugcc

SEQ ID NO: 169037 - RNA, 17 nt, Human herpesvirus 6B
auucgauuaaugccaca

SEQ ID NO: 169038 - RNA, 15 nt, Human herpesvirus 6B
auucguaaugugcag

SEQ ID NO: 169039 - RNA, 18 nt, Human herpesvirus 6B
auucucgugcgcaguguu

SEQ ID NO: 169040 - RNA, 14 nt, Human herpesvirus 6B
auucuaaauaccaa

SEQ ID NO: 169041 - RNA, 22 nt, Human herpesvirus 6B
auugggucuuucccgugcucag

SEQ ID NO: 169042 - RNA, 14 nt, Human herpesvirus 6B
auugcugucuuccu

SEQ ID NO: 169043 - RNA, 13 nt, Human herpesvirus 6B
auugcuuuuguua

SEQ ID NO: 169044 - RNA, 19 nt, Human herpesvirus 6B
auuggaauugggaagcaua

SEQ ID NO: 169045 - RNA, 19 nt, Human herpesvirus 6B
auucugcauuuauaucaaa

SEQ ID NO: 169046 - RNA, 16 nt, Human herpesvirus 6B
auucugauuauuauca

SEQ ID NO: 169047 - RNA, 17 nt, Human herpesvirus 6B
auguuaguauacagaau

SEQ ID NO: 169048 - RNA, 15 nt, Human herpesvirus 6B
auguuaacauuguga

SEQ ID NO: 169049 - RNA, 16 nt, Human herpesvirus 6B
auguuaacauugugag

SEQ ID NO: 169050 - RNA, 12 nt, Human herpesvirus 6B
augugugccuac

SEQ ID NO: 169051 - RNA, 21 nt, Human herpesvirus 6B
augugugccuacuuuggauuu

SEQ ID NO: 169052 - RNA, 14 nt, Human herpesvirus 6B
auuaccucugcaau

SEQ ID NO: 169053 - RNA, 18 nt, Human herpesvirus 6B
auuaccaguagcacgaac

SEQ ID NO: 169054 - RNA, 15 nt, Human herpesvirus 6B
auuacauaagcaaau

SEQ ID NO: 169055 - RNA, 18 nt, Human herpesvirus 6B
auuacaugaaaacauuca

SEQ ID NO: 169056 - RNA, 23 nt, Human herpesvirus 6B
auuacauuauccaggcaugugau

SEQ ID NO: 169057 - RNA, 15 nt, Human herpesvirus 6B
auuacaaucauguuu

SEQ ID NO: 169058 - RNA, 16 nt, Human herpesvirus 6B
auuacaagguacacaa

SEQ ID NO: 169059 - RNA, 17 nt, Human herpesvirus 6B
auuacaagguacacaau

SEQ ID NO: 169060 - RNA, 18 nt, Human herpesvirus 6B
auuacaagguacacaaua

SEQ ID NO: 169061 - RNA, 23 nt, Human herpesvirus 6B
auuacaagguacacaauacacag

SEQ ID NO: 169062 - RNA, 15 nt, Human herpesvirus 6B
augugucuuagugua

SEQ ID NO: 169063 - RNA, 19 nt, Human herpesvirus 6B
auguggaacggaaacauga

SEQ ID NO: 169064 - RNA, 15 nt, Human herpesvirus 6B
augugacacaauuuc

SEQ ID NO: 169065 - RNA, 16 nt, Human herpesvirus 6B
augugauuaugccaaa

SEQ ID NO: 169066 - RNA, 13 nt, Human herpesvirus 6B
augucucgaaaaa

SEQ ID NO: 169067 - RNA, 21 nt, Human herpesvirus 6B
augucuucucgggacuaggaa

SEQ ID NO: 169068 - RNA, 19 nt, Human herpesvirus 6B
augugaacuaaauaaucaa

SEQ ID NO: 169069 - RNA, 17 nt, Human herpesvirus 6B
augguuccgggauguag

SEQ ID NO: 169070 - RNA, 23 nt, Human herpesvirus 6B
augguucgauugcgcgauuaggu

SEQ ID NO: 169071 - RNA, 14 nt, Human herpesvirus 6B
auguaaaagagcca

SEQ ID NO: 169072 - RNA, 17 nt, Human herpesvirus 6B
auguaaaagagccagag

SEQ ID NO: 169073 - RNA, 20 nt, Human herpesvirus 6B
auguaaaauuaccucauccc

SEQ ID NO: 169074 - RNA, 15 nt, Human herpesvirus 6B
auguccaauuacuca

SEQ ID NO: 169075 - RNA, 22 nt, Human herpesvirus 6B
augucgaauuuucgucugauac

SEQ ID NO: 169076 - RNA, 12 nt, Human herpesvirus 6B
aucugugcaaca

SEQ ID NO: 169077 - RNA, 15 nt, Human herpesvirus 6B
aucugugcaacacaa

SEQ ID NO: 169078 - RNA, 18 nt, Human herpesvirus 6B
aucugugcaacacaacaa

SEQ ID NO: 169079 - RNA, 14 nt, Human herpesvirus 6B
aucugcucauguca

SEQ ID NO: 169080 - RNA, 17 nt, Human herpesvirus 6B
aucuggugaauguuucu

SEQ ID NO: 169081 - RNA, 21 nt, Human herpesvirus 6B
aucuggaugguugugugaguu

SEQ ID NO: 169082 - RNA, 14 nt, Human herpesvirus 6B
caauguucuugaca

SEQ ID NO: 169083 - RNA, 16 nt, Human herpesvirus 6B
caauguucuugacaaa

SEQ ID NO: 169084 - RNA, 23 nt, Human herpesvirus 6B
caauguuucuguaugaauccaga

SEQ ID NO: 169085 - RNA, 20 nt, Human herpesvirus 6B
caauuacaucaaaaaaugcu

SEQ ID NO: 169086 - RNA, 18 nt, Human herpesvirus 6B
caauguccaauuacucaa

SEQ ID NO: 169087 - RNA, 20 nt, Human herpesvirus 6B
caaugcaugucgaacagcuu

SEQ ID NO: 169088 - RNA, 21 nt, Human herpesvirus 6B
caaugcggaacaccagcaugu

SEQ ID NO: 169089 - RNA, 19 nt, Human herpesvirus 6B
caaugcggguacuauagac

SEQ ID NO: 169090 - RNA, 16 nt, Human herpesvirus 6B
cacacacaagaacaga

SEQ ID NO: 169091 - RNA, 21 nt, Human herpesvirus 6B
cacacacgguaaacgagugug

SEQ ID NO: 169092 - RNA, 23 nt, Human herpesvirus 6B
cacacccauuuccggaguugcag

SEQ ID NO: 169093 - RNA, 17 nt, Human herpesvirus 6B
cacaccaaugaucacac

SEQ ID NO: 169094 - RNA, 12 nt, Human herpesvirus 6B
cacacagcauga

SEQ ID NO: 169095 - RNA, 18 nt, Human herpesvirus 6B
cacaggcgcgugcacgca

SEQ ID NO: 169096 - RNA, 20 nt, Human herpesvirus 6B
cacaguagaccgaguaucac

SEQ ID NO: 169097 - RNA, 15 nt, Human herpesvirus 6B
cacagucacacacaa

SEQ ID NO: 169098 - RNA, 14 nt, Human herpesvirus 6B
cacagguguacacu

SEQ ID NO: 169099 - RNA, 18 nt, Human herpesvirus 6B
cacagguguacacuauga

SEQ ID NO: 169100 - RNA, 15 nt, Human herpesvirus 6B
cacaccccgccugaa

SEQ ID NO: 169101 - RNA, 13 nt, Human herpesvirus 6B
caccaguacuuca

SEQ ID NO: 169102 - RNA, 14 nt, Human herpesvirus 6B
caccaguacuucaa

SEQ ID NO: 169103 - RNA, 22 nt, Human herpesvirus 6B
caccaucaacacaccugccuag

SEQ ID NO: 169104 - RNA, 20 nt, Human herpesvirus 6B
caccauuccagggaacuuga

SEQ ID NO: 169105 - RNA, 12 nt, Human herpesvirus 6B
cacccacgugug

SEQ ID NO: 169106 - RNA, 21 nt, Human herpesvirus 6B
cacccacgugugauuuuacaa

SEQ ID NO: 169107 - RNA, 19 nt, Human herpesvirus 6B
cacccgacaugcuucacau

SEQ ID NO: 169108 - RNA, 22 nt, Human herpesvirus 6B
cacccauuuccggaguugcagu

SEQ ID NO: 169109 - RNA, 12 nt, Human herpesvirus 6B
cacauagugaaa

SEQ ID NO: 169110 - RNA, 13 nt, Human herpesvirus 6B
cacauaaaaucac

SEQ ID NO: 169111 - RNA, 11 nt, Human herpesvirus 6B
cacauacacac

SEQ ID NO: 169112 - RNA, 14 nt, Human herpesvirus 6B
cacaguguuuccaa

SEQ ID NO: 169113 - RNA, 18 nt, Human herpesvirus 6B
caccacugugauaugcaa

SEQ ID NO: 169114 - RNA, 22 nt, Human herpesvirus 6B
caauaaagugguuuaauggaaa

SEQ ID NO: 169115 - RNA, 13 nt, Human herpesvirus 6B
caauaaacaugau

SEQ ID NO: 169116 - RNA, 15 nt, Human herpesvirus 6B
caauaaaauucacag

SEQ ID NO: 169117 - RNA, 13 nt, Human herpesvirus 6B
caauacacagaaa

SEQ ID NO: 169118 - RNA, 15 nt, Human herpesvirus 6B
caauacacaguagac

SEQ ID NO: 169119 - RNA, 22 nt, Human herpesvirus 6B
caauaagccgaguuugauaauu

SEQ ID NO: 169120 - RNA, 20 nt, Human herpesvirus 6B
caaugaguuuuuugcaauuu

SEQ ID NO: 169121 - RNA, 13 nt, Human herpesvirus 6B
caaugauacaucg

SEQ ID NO: 169122 - RNA, 19 nt, Human herpesvirus 6B
caaugaauacuucucuuua

SEQ ID NO: 169123 - RNA, 12 nt, Human herpesvirus 6B
caaucugugagc

SEQ ID NO: 169124 - RNA, 21 nt, Human herpesvirus 6B
caaucugugcaacacaacaaa

SEQ ID NO: 169125 - RNA, 14 nt, Human herpesvirus 6B
caacacaccugccu

SEQ ID NO: 169126 - RNA, 13 nt, Human herpesvirus 6B
caagaguaaaaaa

SEQ ID NO: 169127 - RNA, 17 nt, Human herpesvirus 6B
caagaguaaaaaaagau

SEQ ID NO: 169128 - RNA, 13 nt, Human herpesvirus 6B
caagcaugcauug

SEQ ID NO: 169129 - RNA, 19 nt, Human herpesvirus 6B
caagcaugcauuguguuac

SEQ ID NO: 169130 - RNA, 17 nt, Human herpesvirus 6B
caagcuguccaucuuca

SEQ ID NO: 169131 - RNA, 22 nt, Human herpesvirus 6B
caagcuagcagaagaacagcua

SEQ ID NO: 169132 - RNA, 23 nt, Human herpesvirus 6B
caagcuagugaaucaaauaccua

SEQ ID NO: 169133 - RNA, 16 nt, Human herpesvirus 6B
caaggcuccuguuuac

SEQ ID NO: 169134 - RNA, 14 nt, Human herpesvirus 6B
caagguacacaaua

SEQ ID NO: 169135 - RNA, 15 nt, Human herpesvirus 6B
caaggcggagauuca

SEQ ID NO: 169136 - RNA, 22 nt, Human herpesvirus 6B
cagaaaucguaccggucugcaa

SEQ ID NO: 169137 - RNA, 21 nt, Human herpesvirus 6B
cagaaauugugucacauguua

SEQ ID NO: 169138 - RNA, 18 nt, Human herpesvirus 6B
cagaaaagcaaacaugca

SEQ ID NO: 169139 - RNA, 22 nt, Human herpesvirus 6B
cagaaaaaaaaaaacaaagaga

SEQ ID NO: 169140 - RNA, 15 nt, Human herpesvirus 6B
cacuuucgaucacaa

SEQ ID NO: 169141 - RNA, 19 nt, Human herpesvirus 6B
cagauguagguuucaauca

SEQ ID NO: 169142 - RNA, 17 nt, Human herpesvirus 6B
cagaugugcacaaccga

SEQ ID NO: 169143 - RNA, 14 nt, Human herpesvirus 6B
cagagccagacauc

SEQ ID NO: 169144 - RNA, 15 nt, Human herpesvirus 6B
cagagccagacaucu

SEQ ID NO: 169145 - RNA, 13 nt, Human herpesvirus 6B
cagagacaugacc

SEQ ID NO: 169146 - RNA, 17 nt, Human herpesvirus 6B
cagagagaggagcauuc

SEQ ID NO: 169147 - RNA, 18 nt, Human herpesvirus 6B
cagaaacuuggagcuaua

SEQ ID NO: 169148 - RNA, 19 nt, Human herpesvirus 6B
cacuuauagacuaaacuua

SEQ ID NO: 169149 - RNA, 16 nt, Human herpesvirus 6B
cacuugaucacaacau

SEQ ID NO: 169150 - RNA, 14 nt, Human herpesvirus 6B
cacugugauaugca

SEQ ID NO: 169151 - RNA, 15 nt, Human herpesvirus 6B
cacugugauaugcaa

SEQ ID NO: 169152 - RNA, 13 nt, Human herpesvirus 6B
cacugcauuucau

SEQ ID NO: 169153 - RNA, 16 nt, Human herpesvirus 6B
cacugccuuaauguau

SEQ ID NO: 169154 - RNA, 18 nt, Human herpesvirus 6B
cacugcgaauccgucucc

SEQ ID NO: 169155 - RNA, 18 nt, Human herpesvirus 6B
cacugaauuagaauaauu

SEQ ID NO: 169156 - RNA, 16 nt, Human herpesvirus 6B
cacugucgaauaucuu

SEQ ID NO: 169157 - RNA, 12 nt, Human herpesvirus 6B
cacucucaauuu

SEQ ID NO: 169158 - RNA, 20 nt, Human herpesvirus 6B
cacucucguagucgcauuug

SEQ ID NO: 169159 - RNA, 12 nt, Human herpesvirus 6B
cacucugaagaa

SEQ ID NO: 169160 - RNA, 15 nt, Human herpesvirus 6B
cacucugaagaauaa

SEQ ID NO: 169161 - RNA, 15 nt, Human herpesvirus 6B
cacucauuugcaauu

SEQ ID NO: 169162 - RNA, 16 nt, Human herpesvirus 6B
cacucauuugcaauug

SEQ ID NO: 169163 - RNA, 15 nt, Human herpesvirus 6B
cacucgaaucgcgca

SEQ ID NO: 169164 - RNA, 17 nt, Human herpesvirus 6B
cacuaugagucccuuga

SEQ ID NO: 169165 - RNA, 18 nt, Human herpesvirus 6B
caccuaauaaacucugcc

SEQ ID NO: 169166 - RNA, 18 nt, Human herpesvirus 6B
caccuaaacaccacuuga

SEQ ID NO: 169167 - RNA, 21 nt, Human herpesvirus 6B
caccgucucugaagcaaaagu

SEQ ID NO: 169168 - RNA, 16 nt, Human herpesvirus 6B
caccgacaaacuacug

SEQ ID NO: 169169 - RNA, 22 nt, Human herpesvirus 6B
caccuuagucgcacacacaaga

SEQ ID NO: 169170 - RNA, 21 nt, Human herpesvirus 6B
caccuuagcucuaaugcuaga

SEQ ID NO: 169171 - RNA, 21 nt, Human herpesvirus 6B
caccuuagucgcacacacaag

SEQ ID NO: 169172 - RNA, 23 nt, Human herpesvirus 6B
caccuggaaaaacugacugacaa

SEQ ID NO: 169173 - RNA, 19 nt, Human herpesvirus 6B
cacgucccuaugauagcau

SEQ ID NO: 169174 - RNA, 20 nt, Human herpesvirus 6B
cacuaagcgacuuuuuaaca

SEQ ID NO: 169175 - RNA, 12 nt, Human herpesvirus 6B
cacuacuaaagc

SEQ ID NO: 169176 - RNA, 15 nt, Human herpesvirus 6B
cacgcuaaaaacaga

SEQ ID NO: 169177 - RNA, 16 nt, Human herpesvirus 6B
cacgcuaaaaacagac

SEQ ID NO: 169178 - RNA, 20 nt, Human herpesvirus 6B
cacgccgucuucaaccuguu

SEQ ID NO: 169179 - RNA, 20 nt, Human herpesvirus 6B
cacgccccuccguccaggac

SEQ ID NO: 169180 - RNA, 17 nt, Human herpesvirus 6B
cacgcaccuaaacacca

SEQ ID NO: 169181 - RNA, 15 nt, Human herpesvirus 6B
cacgcuaaaaagcag

SEQ ID NO: 169182 - RNA, 17 nt, Human herpesvirus 6B
agagguaauaaaaacac

SEQ ID NO: 169183 - RNA, 21 nt, Human herpesvirus 6B
agaggccggcacauacacacg

SEQ ID NO: 169184 - RNA, 17 nt, Human herpesvirus 6B
agaggugcaaaugcuca

SEQ ID NO: 169185 - RNA, 21 nt, Human herpesvirus 6B
agcccuucaccgucucugaag

SEQ ID NO: 169186 - RNA, 13 nt, Human herpesvirus 6B
agccuuuccccag

SEQ ID NO: 169187 - RNA, 20 nt, Human herpesvirus 6B
agccuucgauaauaauucag

SEQ ID NO: 169188 - RNA, 15 nt, Human herpesvirus 6B
agcuauugaaacugg

SEQ ID NO: 169189 - RNA, 15 nt, Human herpesvirus 6B
agcucaccaccaucu

SEQ ID NO: 169190 - RNA, 17 nt, Human herpesvirus 6B
agcucacuguaccuuua

SEQ ID NO: 169191 - RNA, 14 nt, Human herpesvirus 6B
agcucagacaaaug

SEQ ID NO: 169192 - RNA, 19 nt, Human herpesvirus 6B
agcucagacaaauggaaac

SEQ ID NO: 169193 - RNA, 21 nt, Human herpesvirus 6B
agcuauguaugaacaggugcu

SEQ ID NO: 169194 - RNA, 18 nt, Human herpesvirus 6B
agcuauaugcaucucuac

SEQ ID NO: 169195 - RNA, 21 nt, Human herpesvirus 6B
agcuauaaaaacacacaucau

SEQ ID NO: 169196 - RNA, 22 nt, Human herpesvirus 6B
agcuauaaaaacacacaucaua

SEQ ID NO: 169197 - RNA, 14 nt, Human herpesvirus 6B
agcuagacgugucu

SEQ ID NO: 169198 - RNA, 23 nt, Human herpesvirus 6B
agcgccaacggaaagcaucucaa

SEQ ID NO: 169199 - RNA, 18 nt, Human herpesvirus 6B
agcgauuaguuugugcag

SEQ ID NO: 169200 - RNA, 19 nt, Human herpesvirus 6B
agcgaucauaaaacugcca

SEQ ID NO: 169201 - RNA, 23 nt, Human herpesvirus 6B
agcuuauuuaugaaaauugcucu

SEQ ID NO: 169202 - RNA, 22 nt, Human herpesvirus 6B
aggacaguuaggauuacacugu

SEQ ID NO: 169203 - RNA, 14 nt, Human herpesvirus 6B
aggagaccaugcca

SEQ ID NO: 169204 - RNA, 20 nt, Human herpesvirus 6B
aggacuaucugagacaguca

SEQ ID NO: 169205 - RNA, 12 nt, Human herpesvirus 6B
agcugacugaaa

SEQ ID NO: 169206 - RNA, 16 nt, Human herpesvirus 6B
agcugacguucccaac

SEQ ID NO: 169207 - RNA, 16 nt, Human herpesvirus 6B
agcugacaucugcaaa

SEQ ID NO: 169208 - RNA, 17 nt, Human herpesvirus 6B
agcugacaucugcaaaa

SEQ ID NO: 169209 - RNA, 18 nt, Human herpesvirus 6B
agcugacaucugcaaaaa

SEQ ID NO: 169210 - RNA, 19 nt, Human herpesvirus 6B
agcugacaucugcaaaaac

SEQ ID NO: 169211 - RNA, 17 nt, Human herpesvirus 6B
agcuggcgaaaagugcu

SEQ ID NO: 169212 - RNA, 16 nt, Human herpesvirus 6B
agcugcuaacggagca

SEQ ID NO: 169213 - RNA, 21 nt, Human herpesvirus 6B
aggcgucucaugcgaucuaau

SEQ ID NO: 169214 - RNA, 17 nt, Human herpesvirus 6B
aggcguguucguuaaaa

SEQ ID NO: 169215 - RNA, 12 nt, Human herpesvirus 6B
aggcguuuaccg

SEQ ID NO: 169216 - RNA, 14 nt, Human herpesvirus 6B
aggcuaaacacuga

SEQ ID NO: 169217 - RNA, 15 nt, Human herpesvirus 6B
aggcuuaaugaaugu

SEQ ID NO: 169218 - RNA, 22 nt, Human herpesvirus 6B
aggcaucgacuauuaaacuaac

SEQ ID NO: 169219 - RNA, 18 nt, Human herpesvirus 6B
aggcagggaaacuuugug

SEQ ID NO: 169220 - RNA, 15 nt, Human herpesvirus 6B
aggcauuaaacugag

SEQ ID NO: 169221 - RNA, 14 nt, Human herpesvirus 6B
aggcacugauuuga

SEQ ID NO: 169222 - RNA, 21 nt, Human herpesvirus 6B
aggcacgacgaaaacuuuuaa

SEQ ID NO: 169223 - RNA, 23 nt, Human herpesvirus 6B
aggcagaucauuaaaucggacaa

SEQ ID NO: 169224 - RNA, 22 nt, Human herpesvirus 6B
aggagcauucacauaagacuua

SEQ ID NO: 169225 - RNA, 16 nt, Human herpesvirus 6B
aggagccaacauacac

SEQ ID NO: 169226 - RNA, 12 nt, Human herpesvirus 6B
agguaaacuguu

SEQ ID NO: 169227 - RNA, 16 nt, Human herpesvirus 6B
agguaaacuguucuuu

SEQ ID NO: 169228 - RNA, 14 nt, Human herpesvirus 6B
agguaagcaccuua

SEQ ID NO: 169229 - RNA, 23 nt, Human herpesvirus 6B
agguaccgaccugacacaaucag

SEQ ID NO: 169230 - RNA, 17 nt, Human herpesvirus 6B
agggugggaacugucaa

SEQ ID NO: 169231 - RNA, 19 nt, Human herpesvirus 6B
agggggcgcggggacacau

SEQ ID NO: 169232 - RNA, 15 nt, Human herpesvirus 6B
agggugacaccuuga

SEQ ID NO: 169233 - RNA, 21 nt, Human herpesvirus 6B
agggucgaagacauucaacau

SEQ ID NO: 169234 - RNA, 13 nt, Human herpesvirus 6B
agggagugauuga

SEQ ID NO: 169235 - RNA, 19 nt, Human herpesvirus 6B
agggagaaacggacacgcg

SEQ ID NO: 169236 - RNA, 15 nt, Human herpesvirus 6B
agggacccacacgcg

SEQ ID NO: 169237 - RNA, 20 nt, Human herpesvirus 6B
agggaaucaugagagccuuu

SEQ ID NO: 169238 - RNA, 16 nt, Human herpesvirus 6B
agggaauugugucuuu

SEQ ID NO: 169239 - RNA, 22 nt, Human herpesvirus 6B
agguaucgucauuccaguccaa

SEQ ID NO: 169240 - RNA, 14 nt, Human herpesvirus 6B
aggucaucguccaa

SEQ ID NO: 169241 - RNA, 15 nt, Human herpesvirus 6B
aggucucaggugaga

SEQ ID NO: 169242 - RNA, 20 nt, Human herpesvirus 6B
aggucucaggugagauuccg

SEQ ID NO: 169243 - RNA, 14 nt, Human herpesvirus 6B
agguuggagacgaa

SEQ ID NO: 169244 - RNA, 16 nt, Human herpesvirus 6B
aguaauaauagguuau

SEQ ID NO: 169245 - RNA, 23 nt, Human herpesvirus 6B
aguaagaaauaaauuuguucgca

SEQ ID NO: 169246 - RNA, 24 nt, Human herpesvirus 6B
aguagcacgaaccaaaaugacucu

SEQ ID NO: 169247 - RNA, 17 nt, Human herpesvirus 6B
aguaauuauugugacaa

SEQ ID NO: 169248 - RNA, 13 nt, Human herpesvirus 6B
aguaguugcuugu

SEQ ID NO: 169249 - RNA, 17 nt, Human herpesvirus 6B
aguauacggaagugcau

SEQ ID NO: 169250 - RNA, 13 nt, Human herpesvirus 6B
auaaaaacacaca

SEQ ID NO: 169251 - RNA, 14 nt, Human herpesvirus 6B
auaaaaacaccucu

SEQ ID NO: 169252 - RNA, 16 nt, Human herpesvirus 6B
auaaaaaauuuuguca

SEQ ID NO: 169253 - RNA, 19 nt, Human herpesvirus 6B
auaaaaaaacacauuuuag

SEQ ID NO: 169254 - RNA, 12 nt, Human herpesvirus 6B
auaaaaaaccaa

SEQ ID NO: 169255 - RNA, 15 nt, Human herpesvirus 6B
auaaaaaagugcaug

SEQ ID NO: 169256 - RNA, 17 nt, Human herpesvirus 6B
aguuuuaucacuuucac

SEQ ID NO: 169257 - RNA, 18 nt, Human herpesvirus 6B
aguuuuaucacuuucaca

SEQ ID NO: 169258 - RNA, 20 nt, Human herpesvirus 6B
aguuugucacaccacucucu

SEQ ID NO: 169259 - RNA, 14 nt, Human herpesvirus 6B
aguuuucugaugga

SEQ ID NO: 169260 - RNA, 17 nt, Human herpesvirus 6B
aguucaguaagauuuaa

SEQ ID NO: 169261 - RNA, 17 nt, Human herpesvirus 6B
aguucaccuugucauca

SEQ ID NO: 169262 - RNA, 22 nt, Human herpesvirus 6B
aguucagaagagaugaaagaca

SEQ ID NO: 169263 - RNA, 21 nt, Human herpesvirus 6B
agugguuuaauggaaaccuau

SEQ ID NO: 169264 - RNA, 17 nt, Human herpesvirus 6B
aguuccaaaacuucuau

SEQ ID NO: 169265 - RNA, 20 nt, Human herpesvirus 6B
aguuccacaucuaugaugcu

SEQ ID NO: 169266 - RNA, 17 nt, Human herpesvirus 6B
aguaugucucgaaaaag

SEQ ID NO: 169267 - RNA, 15 nt, Human herpesvirus 6B
agugacuuucacucc

SEQ ID NO: 169268 - RNA, 16 nt, Human herpesvirus 6B
agugagauacauguuu

SEQ ID NO: 169269 - RNA, 22 nt, Human herpesvirus 6B
aguaugccauaaagaacacagg

SEQ ID NO: 169270 - RNA, 18 nt, Human herpesvirus 6B
aguaugcuuugguaguga

SEQ ID NO: 169271 - RNA, 18 nt, Human herpesvirus 6B
aguaucacguaucucugg

SEQ ID NO: 169272 - RNA, 13 nt, Human herpesvirus 6B
agugcaucuuuaa

SEQ ID NO: 169273 - RNA, 19 nt, Human herpesvirus 6B
agugcacgaaaguggaugu

SEQ ID NO: 169274 - RNA, 15 nt, Human herpesvirus 6B
agugauucaaggugg

SEQ ID NO: 169275 - RNA, 14 nt, Human herpesvirus 6B
agugcuauuugcau

SEQ ID NO: 169276 - RNA, 23 nt, Human herpesvirus 6B
agugcggggagagaauugccgau

SEQ ID NO: 169277 - RNA, 23 nt, Human herpesvirus 6B
agugccgugagugcuauuugcau

SEQ ID NO: 169278 - RNA, 12 nt, Human herpesvirus 6B
agugccuaugac

SEQ ID NO: 169279 - RNA, 17 nt, Human herpesvirus 6B
aguggauguuagaucac

SEQ ID NO: 169280 - RNA, 16 nt, Human herpesvirus 6B
aguggguacaaugaaa

SEQ ID NO: 169281 - RNA, 15 nt, Human herpesvirus 6B
agugggaggagccaa

SEQ ID NO: 169282 - RNA, 18 nt, Human herpesvirus 6B
aucugauucgacaaauca

SEQ ID NO: 169283 - RNA, 22 nt, Human herpesvirus 6B
aucugauucgacaaaucaucac

SEQ ID NO: 169284 - RNA, 16 nt, Human herpesvirus 6B
aucugagacagucaau

SEQ ID NO: 169285 - RNA, 17 nt, Human herpesvirus 6B
aucucuguguguguugu

SEQ ID NO: 169286 - RNA, 23 nt, Human herpesvirus 6B
aucucuguuuugagagcuacaca

SEQ ID NO: 169287 - RNA, 22 nt, Human herpesvirus 6B
aucuccaaaagcgccugccuac

SEQ ID NO: 169288 - RNA, 18 nt, Human herpesvirus 6B
aucuccaauagauuucau

SEQ ID NO: 169289 - RNA, 20 nt, Human herpesvirus 6B
aucucgcucagcguggaauu

SEQ ID NO: 169290 - RNA, 12 nt, Human herpesvirus 6B
aucuccucaaca

SEQ ID NO: 169291 - RNA, 12 nt, Human herpesvirus 6B
aucuaugggagu

SEQ ID NO: 169292 - RNA, 13 nt, Human herpesvirus 6B
aucucaagcacaa

SEQ ID NO: 169293 - RNA, 14 nt, Human herpesvirus 6B
aucucaagcacaaa

SEQ ID NO: 169294 - RNA, 23 nt, Human herpesvirus 6B
aucuaguguuucgcagaggacag

SEQ ID NO: 169295 - RNA, 17 nt, Human herpesvirus 6B
aucguuaaaugagauag

SEQ ID NO: 169296 - RNA, 17 nt, Human herpesvirus 6B
aucguucuuaacauauu

SEQ ID NO: 169297 - RNA, 19 nt, Human herpesvirus 6B
aucuaagauaguuuugcau

SEQ ID NO: 169298 - RNA, 17 nt, Human herpesvirus 6B
auccugaccgacuuuga

SEQ ID NO: 169299 - RNA, 13 nt, Human herpesvirus 6B
aucgaacucuucg

SEQ ID NO: 169300 - RNA, 23 nt, Human herpesvirus 6B
aucgacuauuaaacuaacaugac

SEQ ID NO: 169301 - RNA, 12 nt, Human herpesvirus 6B
aucgauccaaaa

SEQ ID NO: 169302 - RNA, 22 nt, Human herpesvirus 6B
auccuguaauaguauugucuga

SEQ ID NO: 169303 - RNA, 14 nt, Human herpesvirus 6B
auccuguuuuccca

SEQ ID NO: 169304 - RNA, 19 nt, Human herpesvirus 6B
auccuguuuucccaccuaa

SEQ ID NO: 169305 - RNA, 10 nt, Human herpesvirus 6B
auccuaauaa

SEQ ID NO: 169306 - RNA, 13 nt, Human herpesvirus 6B
auccucagucuuc

SEQ ID NO: 169307 - RNA, 14 nt, Human herpesvirus 6B
auccucagucuuca

SEQ ID NO: 169308 - RNA, 16 nt, Human herpesvirus 6B
auccucagucuucaau

SEQ ID NO: 169309 - RNA, 19 nt, Human herpesvirus 6B
auccucagucuucaauaaa

SEQ ID NO: 169310 - RNA, 13 nt, Human herpesvirus 6B
aucgucauuccag

SEQ ID NO: 169311 - RNA, 19 nt, Human herpesvirus 6B
aucguccaacccuauaaaa

SEQ ID NO: 169312 - RNA, 19 nt, Human herpesvirus 6B
aucgucccugucugugauu

SEQ ID NO: 169313 - RNA, 23 nt, Human herpesvirus 6B
aucgugauccgaauccugacuac

SEQ ID NO: 169314 - RNA, 20 nt, Human herpesvirus 6B
aucggcauuuguguuuuuaa

SEQ ID NO: 169315 - RNA, 16 nt, Human herpesvirus 6B
aucgguaaacuucaga

SEQ ID NO: 169316 - RNA, 17 nt, Human herpesvirus 6B
aucgcaaaagaacacaa

SEQ ID NO: 169317 - RNA, 21 nt, Human herpesvirus 6B
aucgcauuucucuacaugcca

SEQ ID NO: 169318 - RNA, 13 nt, Human herpesvirus 6B
aucgcuccauaau

SEQ ID NO: 169319 - RNA, 16 nt, Human herpesvirus 6B
auccaaucaacgugac

SEQ ID NO: 169320 - RNA, 21 nt, Human herpesvirus 6B
auccagaaaagcaaacaugca

SEQ ID NO: 169321 - RNA, 13 nt, Human herpesvirus 6B
aucccagcucacc

SEQ ID NO: 169322 - RNA, 18 nt, Human herpesvirus 6B
auccgcuaagagauuuac

SEQ ID NO: 169323 - RNA, 22 nt, Human herpesvirus 6B
auccguugagugugcaucagca

SEQ ID NO: 169324 - RNA, 16 nt, Human herpesvirus 6B
aucccuuaaaaaaaca

SEQ ID NO: 169325 - RNA, 21 nt, Human herpesvirus 6B
aucccucguacaagcuuaaua

SEQ ID NO: 169326 - RNA, 21 nt, Human herpesvirus 6B
aucccuaugucaaugugaaua

SEQ ID NO: 169327 - RNA, 15 nt, Human herpesvirus 6B
aucaugugugccuac

SEQ ID NO: 169328 - RNA, 19 nt, Human herpesvirus 6B
aucaugugugccuacuuug

SEQ ID NO: 169329 - RNA, 22 nt, Human herpesvirus 6B
aucauuaggaucgaacucuucg

SEQ ID NO: 169330 - RNA, 18 nt, Human herpesvirus 6B
aucauucgauuaaugcca

SEQ ID NO: 169331 - RNA, 20 nt, Human herpesvirus 6B
aucauucgauuaaugccaca

SEQ ID NO: 169332 - RNA, 12 nt, Human herpesvirus 6B
aucauacaauau

SEQ ID NO: 169333 - RNA, 17 nt, Human herpesvirus 6B
aucauacaauauuucca

SEQ ID NO: 169334 - RNA, 23 nt, Human herpesvirus 6B
aucaucuuugggaagucucuagu

SEQ ID NO: 169335 - RNA, 13 nt, Human herpesvirus 6B
aucauacgaggau

SEQ ID NO: 169336 - RNA, 15 nt, Human herpesvirus 6B
aucaugauugcaaca

SEQ ID NO: 169337 - RNA, 21 nt, Human herpesvirus 6B
aucaugcccuaaugugauuau

SEQ ID NO: 169338 - RNA, 17 nt, Human herpesvirus 6B
aucaucgccauagugaa

SEQ ID NO: 169339 - RNA, 20 nt, Human herpesvirus 6B
aucagacagguaagcagcaa

SEQ ID NO: 169340 - RNA, 19 nt, Human herpesvirus 6B
aucaguacauagaaucucu

SEQ ID NO: 169341 - RNA, 15 nt, Human herpesvirus 6B
aucauaaaacugcca

SEQ ID NO: 169342 - RNA, 16 nt, Human herpesvirus 6B
aucauaaaacugccaa

SEQ ID NO: 169343 - RNA, 14 nt, Human herpesvirus 6B
aucagcauucacuc

SEQ ID NO: 169344 - RNA, 22 nt, Human herpesvirus 6B
aucagccauuucgccaaaaauu

SEQ ID NO: 169345 - RNA, 16 nt, Human herpesvirus 6B
auaaauuugccaccag

SEQ ID NO: 169346 - RNA, 21 nt, Human herpesvirus 6B
auaaauguagcacacgacaaa

SEQ ID NO: 169347 - RNA, 12 nt, Human herpesvirus 6B
auaaauuacugc

SEQ ID NO: 169348 - RNA, 14 nt, Human herpesvirus 6B
auaaaaacgacauc

SEQ ID NO: 169349 - RNA, 13 nt, Human herpesvirus 6B
auacacaacuguu

SEQ ID NO: 169350 - RNA, 20 nt, Human herpesvirus 6B
auacacaacuguuaccgaaa

SEQ ID NO: 169351 - RNA, 22 nt, Human herpesvirus 6B
auaacaccaguacuucaagaaa

SEQ ID NO: 169352 - RNA, 19 nt, Human herpesvirus 6B
auaccuauuagcuauaaaa

SEQ ID NO: 169353 - RNA, 13 nt, Human herpesvirus 6B
auacagaaauugg

SEQ ID NO: 169354 - RNA, 17 nt, Human herpesvirus 6B
auacauaaggcaaaaac

SEQ ID NO: 169355 - RNA, 19 nt, Human herpesvirus 6B
auacauaauucggucacca

SEQ ID NO: 169356 - RNA, 18 nt, Human herpesvirus 6B
auacuauuuuaguuacac

SEQ ID NO: 169357 - RNA, 19 nt, Human herpesvirus 6B
auacuauuuuaguuacaca

SEQ ID NO: 169358 - RNA, 16 nt, Human herpesvirus 6B
auacuacgugucucag

SEQ ID NO: 169359 - RNA, 19 nt, Human herpesvirus 6B
auaccuuuguaaugggagu

SEQ ID NO: 169360 - RNA, 15 nt, Human herpesvirus 6B
auagagcauccuguu

SEQ ID NO: 169361 - RNA, 19 nt, Human herpesvirus 6B
auagacuaaacuuaacuua

SEQ ID NO: 169362 - RNA, 19 nt, Human herpesvirus 6B
auagaucuuccccauaaca

SEQ ID NO: 169363 - RNA, 12 nt, Human herpesvirus 6B
auagaugaucag

SEQ ID NO: 169364 - RNA, 16 nt, Human herpesvirus 6B
auagaaucucugguca

SEQ ID NO: 169365 - RNA, 21 nt, Human herpesvirus 6B
auacuuuuuucaauaaugcuc

SEQ ID NO: 169366 - RNA, 17 nt, Human herpesvirus 6B
auacuguguaacucuuu

SEQ ID NO: 169367 - RNA, 11 nt, Human herpesvirus 6B
aucaagacuua

SEQ ID NO: 169368 - RNA, 22 nt, Human herpesvirus 6B
aucaagacuuaauaucugacca

SEQ ID NO: 169369 - RNA, 19 nt, Human herpesvirus 6B
aucaacuauuuaacaucca

SEQ ID NO: 169370 - RNA, 22 nt, Human herpesvirus 6B
aucaacuauuuaacauccaaaa

SEQ ID NO: 169371 - RNA, 16 nt, Human herpesvirus 6B
aucacgcauagaccaa

SEQ ID NO: 169372 - RNA, 17 nt, Human herpesvirus 6B
aucacgucccauucaca

SEQ ID NO: 169373 - RNA, 18 nt, Human herpesvirus 6B
aucacgucccauucacau

SEQ ID NO: 169374 - RNA, 14 nt, Human herpesvirus 6B
aucacuaacuucaa

SEQ ID NO: 169375 - RNA, 14 nt, Human herpesvirus 6B
aucaccaucaacac

SEQ ID NO: 169376 - RNA, 22 nt, Human herpesvirus 6B
aucaacacugccuuaauguaug

SEQ ID NO: 169377 - RNA, 18 nt, Human herpesvirus 6B
aucaacacaccugccuag

SEQ ID NO: 169378 - RNA, 14 nt, Human herpesvirus 6B
aucaaauaccuaau

SEQ ID NO: 169379 - RNA, 17 nt, Human herpesvirus 6B
auauuuguuucgucaga

SEQ ID NO: 169380 - RNA, 14 nt, Human herpesvirus 6B
auauugcaugcauu

SEQ ID NO: 169381 - RNA, 16 nt, Human herpesvirus 6B
auauugcaugcauugc

SEQ ID NO: 169382 - RNA, 19 nt, Human herpesvirus 6B
auauugaucgucauaacga

SEQ ID NO: 169383 - RNA, 19 nt, Human herpesvirus 6B
auauuucauuguuucacuu

SEQ ID NO: 169384 - RNA, 18 nt, Human herpesvirus 6B
auagcagaaguuuaccua

SEQ ID NO: 169385 - RNA, 21 nt, Human herpesvirus 6B
auagcaggcaucgacuauuaa

SEQ ID NO: 169386 - RNA, 22 nt, Human herpesvirus 6B
auagauuguuacuagugauuau

SEQ ID NO: 169387 - RNA, 20 nt, Human herpesvirus 6B
auagauuuauuagccgugau

SEQ ID NO: 169388 - RNA, 14 nt, Human herpesvirus 6B
auauacuuacuuga

SEQ ID NO: 169389 - RNA, 23 nt, Human herpesvirus 6B
auauaauguguuggucauuucau

SEQ ID NO: 169390 - RNA, 15 nt, Human herpesvirus 6B
auaggaaguaaauac

SEQ ID NO: 169391 - RNA, 20 nt, Human herpesvirus 6B
auaggaaucuuguguucuaa

SEQ ID NO: 169392 - RNA, 14 nt, Human herpesvirus 6B
auauauugcgauuc

SEQ ID NO: 169393 - RNA, 24 nt, Human herpesvirus 6B
auauaucuugaaaucuaccauaac

SEQ ID NO: 169394 - RNA, 13 nt, Human herpesvirus 6B
auauagcuauccu

SEQ ID NO: 169395 - RNA, 14 nt, Human herpesvirus 6B
auauucuacuucau

SEQ ID NO: 169396 - RNA, 14 nt, Human herpesvirus 6B
auauucugggguau

SEQ ID NO: 169397 - RNA, 17 nt, Human herpesvirus 6B
auaucacccccauacac

SEQ ID NO: 169398 - RNA, 19 nt, Human herpesvirus 6B
auaucacccccauacacac

SEQ ID NO: 169399 - RNA, 20 nt, Human herpesvirus 6B
auaucacccccauacacacc

SEQ ID NO: 169400 - RNA, 13 nt, Human herpesvirus 6B
auauuaucuuuca

SEQ ID NO: 169401 - RNA, 14 nt, Human herpesvirus 6B
auauuaucuuucau

SEQ ID NO: 169402 - RNA, 20 nt, Human herpesvirus 6B
auauuaugucgauacaauaa

SEQ ID NO: 169403 - RNA, 19 nt, Human herpesvirus 6B
acaggccacauuagcugcu

SEQ ID NO: 169404 - RNA, 23 nt, Human herpesvirus 6B
acaggauuccccucauacaucca

SEQ ID NO: 169405 - RNA, 12 nt, Human herpesvirus 6B
acaguuuaccua

SEQ ID NO: 169406 - RNA, 13 nt, Human herpesvirus 6B
acaguuuaccuau

SEQ ID NO: 169407 - RNA, 14 nt, Human herpesvirus 6B
acaguuucucgaaa

SEQ ID NO: 169408 - RNA, 20 nt, Human herpesvirus 6B
acagugaauaucgaguuuag

SEQ ID NO: 169409 - RNA, 16 nt, Human herpesvirus 6B
acagugauuaggaugu

SEQ ID NO: 169410 - RNA, 18 nt, Human herpesvirus 6B
acagugauuaggauguuu

SEQ ID NO: 169411 - RNA, 18 nt, Human herpesvirus 6B
acagucuauauguccgau

SEQ ID NO: 169412 - RNA, 13 nt, Human herpesvirus 6B
acagcgagacaau

SEQ ID NO: 169413 - RNA, 17 nt, Human herpesvirus 6B
acagcgagacaauaaca

SEQ ID NO: 169414 - RNA, 17 nt, Human herpesvirus 6B
acagccuugauaaucug

SEQ ID NO: 169415 - RNA, 15 nt, Human herpesvirus 6B
acagagccagacauc

SEQ ID NO: 169416 - RNA, 18 nt, Human herpesvirus 6B
acagagacugguugaguu

SEQ ID NO: 169417 - RNA, 20 nt, Human herpesvirus 6B
acagacgaaucacauccgcu

SEQ ID NO: 169418 - RNA, 15 nt, Human herpesvirus 6B
acagacgaaucacau

SEQ ID NO: 169419 - RNA, 17 nt, Human herpesvirus 6B
acagacgaaucacaucc

SEQ ID NO: 169420 - RNA, 13 nt, Human herpesvirus 6B
acagacauugcuu

SEQ ID NO: 169421 - RNA, 13 nt, Human herpesvirus 6B
acagacuccucac

SEQ ID NO: 169422 - RNA, 15 nt, Human herpesvirus 6B
acagaacaccugcuu

SEQ ID NO: 169423 - RNA, 23 nt, Human herpesvirus 6B
acagaaaucguaccggucugcaa

SEQ ID NO: 169424 - RNA, 22 nt, Human herpesvirus 6B
acagaaguuucggcaacugaau

SEQ ID NO: 169425 - RNA, 23 nt, Human herpesvirus 6B
acagaaguuucggcaacugaauu

SEQ ID NO: 169426 - RNA, 15 nt, Human herpesvirus 6B
acacuaacaggauuc

SEQ ID NO: 169427 - RNA, 12 nt, Human herpesvirus 6B
aauuucauagau

SEQ ID NO: 169428 - RNA, 17 nt, Human herpesvirus 6B
aauuuaugucauuucau

SEQ ID NO: 169429 - RNA, 22 nt, Human herpesvirus 6B
aauuuaucaaagagguacucau

SEQ ID NO: 169430 - RNA, 23 nt, Human herpesvirus 6B
aauuuacucuccacccaucuccu

SEQ ID NO: 169431 - RNA, 17 nt, Human herpesvirus 6B
acacggugagucgcaua

SEQ ID NO: 169432 - RNA, 19 nt, Human herpesvirus 6B
acacgcaccuaaacaccac

SEQ ID NO: 169433 - RNA, 14 nt, Human herpesvirus 6B
aauuuccugucaug

SEQ ID NO: 169434 - RNA, 22 nt, Human herpesvirus 6B
aauuuccuuugugugauauuau

SEQ ID NO: 169435 - RNA, 20 nt, Human herpesvirus 6B
acacgauccaauuacaucaa

SEQ ID NO: 169436 - RNA, 13 nt, Human herpesvirus 6B
acacgaaacugcu

SEQ ID NO: 169437 - RNA, 10 nt, Human herpesvirus 6B
accaaaacaa

SEQ ID NO: 169438 - RNA, 14 nt, Human herpesvirus 6B
accaaaacaacaac

SEQ ID NO: 169439 - RNA, 15 nt, Human herpesvirus 6B
accaaaacaacaacu

SEQ ID NO: 169440 - RNA, 12 nt, Human herpesvirus 6B
accaaaacgaga

SEQ ID NO: 169441 - RNA, 22 nt, Human herpesvirus 6B
acauuugccgggaugagcuuca

SEQ ID NO: 169442 - RNA, 12 nt, Human herpesvirus 6B
accaacauguau

SEQ ID NO: 169443 - RNA, 23 nt, Human herpesvirus 6B
accaacauucggaauuucuuccu

SEQ ID NO: 169444 - RNA, 16 nt, Human herpesvirus 6B
accaacgucaugcaaa

SEQ ID NO: 169445 - RNA, 17 nt, Human herpesvirus 6B
accagagauacgugaua

SEQ ID NO: 169446 - RNA, 17 nt, Human herpesvirus 6B
accagagauucuaugua

SEQ ID NO: 169447 - RNA, 12 nt, Human herpesvirus 6B
accacugugaua

SEQ ID NO: 169448 - RNA, 16 nt, Human herpesvirus 6B
accacugugauaugca

SEQ ID NO: 169449 - RNA, 22 nt, Human herpesvirus 6B
accacguauggucgucauuuca

SEQ ID NO: 169450 - RNA, 17 nt, Human herpesvirus 6B
acauguauucuccucaa

SEQ ID NO: 169451 - RNA, 15 nt, Human herpesvirus 6B
acaugcuucacaucu

SEQ ID NO: 169452 - RNA, 21 nt, Human herpesvirus 6B
acauaagacuuauaauauucc

SEQ ID NO: 169453 - RNA, 14 nt, Human herpesvirus 6B
acauaaaaaaacac

SEQ ID NO: 169454 - RNA, 21 nt, Human herpesvirus 6B
acaugccacagaacaccugcu

SEQ ID NO: 169455 - RNA, 21 nt, Human herpesvirus 6B
acaugccaugcaauaggccau

SEQ ID NO: 169456 - RNA, 20 nt, Human herpesvirus 6B
acaugccgcaagauacuggu

SEQ ID NO: 169457 - RNA, 15 nt, Human herpesvirus 6B
acaugauagggaaua

SEQ ID NO: 169458 - RNA, 22 nt, Human herpesvirus 6B
acaucucuucccacaaaccauc

SEQ ID NO: 169459 - RNA, 17 nt, Human herpesvirus 6B
accucuaaaacaagacc

SEQ ID NO: 169460 - RNA, 18 nt, Human herpesvirus 6B
accuaaacaccacuugau

SEQ ID NO: 169461 - RNA, 15 nt, Human herpesvirus 6B
accuucccuaucaca

SEQ ID NO: 169462 - RNA, 17 nt, Human herpesvirus 6B
accugauuucagaauug

SEQ ID NO: 169463 - RNA, 21 nt, Human herpesvirus 6B
accugauuucagaauugaguu

SEQ ID NO: 169464 - RNA, 16 nt, Human herpesvirus 6B
accuugucagucauaa

SEQ ID NO: 169465 - RNA, 22 nt, Human herpesvirus 6B
accuugucagucauaauucuca

SEQ ID NO: 169466 - RNA, 20 nt, Human herpesvirus 6B
accuuucaauagaugaucag

SEQ ID NO: 169467 - RNA, 15 nt, Human herpesvirus 6B
acgcacuagacauca

SEQ ID NO: 169468 - RNA, 18 nt, Human herpesvirus 6B
acgcagacuaauccauau

SEQ ID NO: 169469 - RNA, 20 nt, Human herpesvirus 6B
acgaaauagggucaacuguu

SEQ ID NO: 169470 - RNA, 18 nt, Human herpesvirus 6B
acgaaaguucaucuuuca

SEQ ID NO: 169471 - RNA, 16 nt, Human herpesvirus 6B
acgcaccuaaacacca

SEQ ID NO: 169472 - RNA, 17 nt, Human herpesvirus 6B
acgcucacaacaugauc

SEQ ID NO: 169473 - RNA, 17 nt, Human herpesvirus 6B
acgcucacccgauauau

SEQ ID NO: 169474 - RNA, 14 nt, Human herpesvirus 6B
acgcuucuaacaau

SEQ ID NO: 169475 - RNA, 17 nt, Human herpesvirus 6B
acggaaaaauuuuacaa

SEQ ID NO: 169476 - RNA, 13 nt, Human herpesvirus 6B
acggaaacaugaa

SEQ ID NO: 169477 - RNA, 13 nt, Human herpesvirus 6B
acggaaagcaucu

SEQ ID NO: 169478 - RNA, 15 nt, Human herpesvirus 6B
acggaaagcaucuca

SEQ ID NO: 169479 - RNA, 15 nt, Human herpesvirus 6B
acggaaauccuugac

SEQ ID NO: 169480 - RNA, 23 nt, Human herpesvirus 6B
acggaugggcaagcagccaauga

SEQ ID NO: 169481 - RNA, 18 nt, Human herpesvirus 6B
accauacguggugaugau

SEQ ID NO: 169482 - RNA, 19 nt, Human herpesvirus 6B
accauacguggugaugauu

SEQ ID NO: 169483 - RNA, 18 nt, Human herpesvirus 6B
accauaacgcguacaaaa

SEQ ID NO: 169484 - RNA, 16 nt, Human herpesvirus 6B
accaguagauggugcu

SEQ ID NO: 169485 - RNA, 16 nt, Human herpesvirus 6B
accaucuucagcucag

SEQ ID NO: 169486 - RNA, 17 nt, Human herpesvirus 6B
accaucuucagcucaga

SEQ ID NO: 169487 - RNA, 18 nt, Human herpesvirus 6B
accaucuucagcucagac

SEQ ID NO: 169488 - RNA, 18 nt, Human herpesvirus 6B
accaucaacacaccugcc

SEQ ID NO: 169489 - RNA, 19 nt, Human herpesvirus 6B
accaucaacacaccugccu

SEQ ID NO: 169490 - RNA, 16 nt, Human herpesvirus 6B
acccagcagcaaauaa

SEQ ID NO: 169491 - RNA, 15 nt, Human herpesvirus 6B
accauguugcuuaua

SEQ ID NO: 169492 - RNA, 14 nt, Human herpesvirus 6B
accauuacucugug

SEQ ID NO: 169493 - RNA, 21 nt, Human herpesvirus 6B
acccuccacgccccuccgucc

SEQ ID NO: 169494 - RNA, 17 nt, Human herpesvirus 6B
acccucaagagugcuga

SEQ ID NO: 169495 - RNA, 19 nt, Human herpesvirus 6B
acccucaagagugcugauu

SEQ ID NO: 169496 - RNA, 23 nt, Human herpesvirus 6B
acccucaagagugcugauuggau

SEQ ID NO: 169497 - RNA, 22 nt, Human herpesvirus 6B
acccuagcuuuucauaugaaaa

SEQ ID NO: 169498 - RNA, 16 nt, Human herpesvirus 6B
acccuagacacacaga

SEQ ID NO: 169499 - RNA, 21 nt, Human herpesvirus 6B
acccuaucgauccagauuucu

SEQ ID NO: 169500 - RNA, 22 nt, Human herpesvirus 6B
acccauuuccggaguugcagua

SEQ ID NO: 169501 - RNA, 22 nt, Human herpesvirus 6B
accguaggaagaucaugacaag

SEQ ID NO: 169502 - RNA, 19 nt, Human herpesvirus 6B
accgucuacugcacuuucg

SEQ ID NO: 169503 - RNA, 16 nt, Human herpesvirus 6B
agacacgcuaaaaaca

SEQ ID NO: 169504 - RNA, 16 nt, Human herpesvirus 6B
agacagucaaauugaa

SEQ ID NO: 169505 - RNA, 21 nt, Human herpesvirus 6B
agacagagguaauaaaaacac

SEQ ID NO: 169506 - RNA, 22 nt, Human herpesvirus 6B
agacagagguaauaaaaacacc

SEQ ID NO: 169507 - RNA, 16 nt, Human herpesvirus 6B
agacauuuucuauaaa

SEQ ID NO: 169508 - RNA, 16 nt, Human herpesvirus 6B
agacauuuugugauuc

SEQ ID NO: 169509 - RNA, 18 nt, Human herpesvirus 6B
agaccaagaaucguuaaa

SEQ ID NO: 169510 - RNA, 18 nt, Human herpesvirus 6B
agacauucaacauuccca

SEQ ID NO: 169511 - RNA, 19 nt, Human herpesvirus 6B
agacauucaacauucccac

SEQ ID NO: 169512 - RNA, 14 nt, Human herpesvirus 6B
agaccgaguaucac

SEQ ID NO: 169513 - RNA, 16 nt, Human herpesvirus 6B
agacucgccgaugaaa

SEQ ID NO: 169514 - RNA, 23 nt, Human herpesvirus 6B
agacucggaagauacacugcaag

SEQ ID NO: 169515 - RNA, 19 nt, Human herpesvirus 6B
agacuacucuggcugaagg

SEQ ID NO: 169516 - RNA, 17 nt, Human herpesvirus 6B
agacuacagacuccuca

SEQ ID NO: 169517 - RNA, 17 nt, Human herpesvirus 6B
agacuaaacuuaacuua

SEQ ID NO: 169518 - RNA, 20 nt, Human herpesvirus 6B
agacgucuccgaacaugauc

SEQ ID NO: 169519 - RNA, 17 nt, Human herpesvirus 6B
agacgauuuuagaggag

SEQ ID NO: 169520 - RNA, 22 nt, Human herpesvirus 6B
agacugcccuggggucuaagau

SEQ ID NO: 169521 - RNA, 13 nt, Human herpesvirus 6B
agacuuaucuccg

SEQ ID NO: 169522 - RNA, 21 nt, Human herpesvirus 6B
agacuggaaaacuaugugcau

SEQ ID NO: 169523 - RNA, 22 nt, Human herpesvirus 6B
agacuggccgcauacacccugc

SEQ ID NO: 169524 - RNA, 23 nt, Human herpesvirus 6B
agacugaggaugaguagcuuuga

SEQ ID NO: 169525 - RNA, 15 nt, Human herpesvirus 6B
agacugaacacaaaa

SEQ ID NO: 169526 - RNA, 17 nt, Human herpesvirus 6B
agacugaacacaaaaac

SEQ ID NO: 169527 - RNA, 22 nt, Human herpesvirus 6B
agaggagaccaugccauugaau

SEQ ID NO: 169528 - RNA, 21 nt, Human herpesvirus 6B
agaaacuuggagcuauaugca

SEQ ID NO: 169529 - RNA, 14 nt, Human herpesvirus 6B
agaaagaaaaccag

SEQ ID NO: 169530 - RNA, 16 nt, Human herpesvirus 6B
agaaagaaaaccagua

SEQ ID NO: 169531 - RNA, 20 nt, Human herpesvirus 6B
agaaaccgauuuaccaccug

SEQ ID NO: 169532 - RNA, 21 nt, Human herpesvirus 6B
agaaacguuaauguuuacgga

SEQ ID NO: 169533 - RNA, 20 nt, Human herpesvirus 6B
agaaaggagcgucguauuaa

SEQ ID NO: 169534 - RNA, 19 nt, Human herpesvirus 6B
agaaaguugauugagaauu

SEQ ID NO: 169535 - RNA, 18 nt, Human herpesvirus 6B
agaaauuacacaucuuaa

SEQ ID NO: 169536 - RNA, 18 nt, Human herpesvirus 6B
agaaauuacauaagcaaa

SEQ ID NO: 169537 - RNA, 20 nt, Human herpesvirus 6B
agaaaucacguugaaauguc

SEQ ID NO: 169538 - RNA, 18 nt, Human herpesvirus 6B
agaacaggaagcgccaua

SEQ ID NO: 169539 - RNA, 14 nt, Human herpesvirus 6B
agaacaguuuaccu

SEQ ID NO: 169540 - RNA, 16 nt, Human herpesvirus 6B
agaacaguuuaccuau

SEQ ID NO: 169541 - RNA, 13 nt, Human herpesvirus 6B
agaacacaagagu

SEQ ID NO: 169542 - RNA, 19 nt, Human herpesvirus 6B
agaacacaggacccuuccc

SEQ ID NO: 169543 - RNA, 18 nt, Human herpesvirus 6B
agaauuacuaugugacau

SEQ ID NO: 169544 - RNA, 13 nt, Human herpesvirus 6B
agaauguuccaau

SEQ ID NO: 169545 - RNA, 19 nt, Human herpesvirus 6B
agaauguaaaagagccaga

SEQ ID NO: 169546 - RNA, 16 nt, Human herpesvirus 6B
agaauaggcgucucau

SEQ ID NO: 169547 - RNA, 19 nt, Human herpesvirus 6B
agaaugccgugaacugugu

SEQ ID NO: 169548 - RNA, 21 nt, Human herpesvirus 6B
agaaugcuggcgcugcauaga

SEQ ID NO: 169549 - RNA, 17 nt, Human herpesvirus 6B
agaauaauuauggacaa

SEQ ID NO: 169550 - RNA, 13 nt, Human herpesvirus 6B
agaauacgaacag

SEQ ID NO: 169551 - RNA, 13 nt, Human herpesvirus 6B
agaaucucugguc

SEQ ID NO: 169552 - RNA, 14 nt, Human herpesvirus 6B
agaaucucugguca

SEQ ID NO: 169553 - RNA, 17 nt, Human herpesvirus 6B
agaacugagagaaccgc

SEQ ID NO: 169554 - RNA, 18 nt, Human herpesvirus 6B
agaaggccaucaugcugu

SEQ ID NO: 169555 - RNA, 12 nt, Human herpesvirus 6B
agaagcauuugc

SEQ ID NO: 169556 - RNA, 18 nt, Human herpesvirus 6B
agaaguccuucaugauau

SEQ ID NO: 169557 - RNA, 19 nt, Human herpesvirus 6B
acuagauuuaggguuuauc

SEQ ID NO: 169558 - RNA, 23 nt, Human herpesvirus 6B
acuauagacgccauaauggaaga

SEQ ID NO: 169559 - RNA, 16 nt, Human herpesvirus 6B
acuauaggaugacuga

SEQ ID NO: 169560 - RNA, 18 nt, Human herpesvirus 6B
acuauaacuuuucuauca

SEQ ID NO: 169561 - RNA, 19 nt, Human herpesvirus 6B
acgguucaccacugugaua

SEQ ID NO: 169562 - RNA, 17 nt, Human herpesvirus 6B
acggugugaucaucaca

SEQ ID NO: 169563 - RNA, 17 nt, Human herpesvirus 6B
acggugagaagauuugu

SEQ ID NO: 169564 - RNA, 14 nt, Human herpesvirus 6B
acggugauggguuu

SEQ ID NO: 169565 - RNA, 20 nt, Human herpesvirus 6B
acguccagcgcauccuuaaa

SEQ ID NO: 169566 - RNA, 17 nt, Human herpesvirus 6B
acguauaaaaguccuca

SEQ ID NO: 169567 - RNA, 13 nt, Human herpesvirus 6B
acucauuugcaau

SEQ ID NO: 169568 - RNA, 15 nt, Human herpesvirus 6B
acucauuugcaauug

SEQ ID NO: 169569 - RNA, 22 nt, Human herpesvirus 6B
acucagauucgcaagacuacag

SEQ ID NO: 169570 - RNA, 23 nt, Human herpesvirus 6B
acucagauucgcaagacuacaga

SEQ ID NO: 169571 - RNA, 22 nt, Human herpesvirus 6B
acucuucggcauaaacagagac

SEQ ID NO: 169572 - RNA, 16 nt, Human herpesvirus 6B
acucuugacauagcaa

SEQ ID NO: 169573 - RNA, 21 nt, Human herpesvirus 6B
acucuugacauagcaauucuu

SEQ ID NO: 169574 - RNA, 18 nt, Human herpesvirus 6B
acucggaagaaaagcuau

SEQ ID NO: 169575 - RNA, 21 nt, Human herpesvirus 6B
acucggaagauacacugcaag

SEQ ID NO: 169576 - RNA, 16 nt, Human herpesvirus 6B
acucggucuacugugu

SEQ ID NO: 169577 - RNA, 17 nt, Human herpesvirus 6B
acucggucuacugugua

SEQ ID NO: 169578 - RNA, 11 nt, Human herpesvirus 6B
acucugaagaa

SEQ ID NO: 169579 - RNA, 18 nt, Human herpesvirus 6B
acucucaauuucacuuaa

SEQ ID NO: 169580 - RNA, 15 nt, Human herpesvirus 6B
acuuacagagcuuuu

SEQ ID NO: 169581 - RNA, 22 nt, Human herpesvirus 6B
acuuacuuaauaacuacacuua

SEQ ID NO: 169582 - RNA, 13 nt, Human herpesvirus 6B
acuuaaggcagcu

SEQ ID NO: 169583 - RNA, 20 nt, Human herpesvirus 6B
acugucacuuuccgauauca

SEQ ID NO: 169584 - RNA, 19 nt, Human herpesvirus 6B
acuuaauaacuacacuuau

SEQ ID NO: 169585 - RNA, 20 nt, Human herpesvirus 6B
acuuaauaacuacacuuaua

SEQ ID NO: 169586 - RNA, 17 nt, Human herpesvirus 6B
acuggucugcuugcaaa

SEQ ID NO: 169587 - RNA, 18 nt, Human herpesvirus 6B
acugaacuuuguccuuug

SEQ ID NO: 169588 - RNA, 23 nt, Human herpesvirus 6B
acugacuuauaagucaucauaca

SEQ ID NO: 169589 - RNA, 12 nt, Human herpesvirus 6B
acugaucuguag

SEQ ID NO: 169590 - RNA, 13 nt, Human herpesvirus 6B
acugcacagaauc

SEQ ID NO: 169591 - RNA, 21 nt, Human herpesvirus 6B
acuuggagagaacugucuugc

SEQ ID NO: 169592 - RNA, 21 nt, Human herpesvirus 6B
acuuggagcuauaugcaucuc

SEQ ID NO: 169593 - RNA, 19 nt, Human herpesvirus 6B
acuugaucacaacauaaaa

SEQ ID NO: 169594 - RNA, 12 nt, Human herpesvirus 6B
acuugauguaug

SEQ ID NO: 169595 - RNA, 14 nt, Human herpesvirus 6B
acuuauaagucauc

SEQ ID NO: 169596 - RNA, 18 nt, Human herpesvirus 6B
acuuaucaacuauacuua

SEQ ID NO: 169597 - RNA, 18 nt, Human herpesvirus 6B
acuuauauauauccgaaa

SEQ ID NO: 169598 - RNA, 20 nt, Human herpesvirus 6B
acuucaagaaaaucgcaaaa

SEQ ID NO: 169599 - RNA, 17 nt, Human herpesvirus 6B
acuuaucguucacugac

SEQ ID NO: 169600 - RNA, 21 nt, Human herpesvirus 6B
acuuauugaggaaaugcagca

SEQ ID NO: 169601 - RNA, 23 nt, Human herpesvirus 6B
agaaaagaaacaaugcuuuggga

SEQ ID NO: 169602 - RNA, 14 nt, Human herpesvirus 6B
agaaaagcaaacau

SEQ ID NO: 169603 - RNA, 17 nt, Human herpesvirus 6B
agaaaaucgcaaaagaa

SEQ ID NO: 169604 - RNA, 18 nt, Human herpesvirus 6B
agaaaauugacaaugagg

SEQ ID NO: 169605 - RNA, 17 nt, Human herpesvirus 6B
agaaaauuggugugcau

SEQ ID NO: 169606 - RNA, 22 nt, Human herpesvirus 6B
agaaaacguuucauccaaauac

SEQ ID NO: 169607 - RNA, 17 nt, Human herpesvirus 6B
acuuuaucuuuugcaaa

SEQ ID NO: 169608 - RNA, 20 nt, Human herpesvirus 6B
acuuguaaacuggucugcuu

SEQ ID NO: 169609 - RNA, 19 nt, Human herpesvirus 6B
acuuggccgaguuuagaca

SEQ ID NO: 169610 - RNA, 14 nt, Human herpesvirus 6B
aaaaacuuacucau

SEQ ID NO: 169611 - RNA, 13 nt, Human herpesvirus 6B
aaaaagacaucac

SEQ ID NO: 169612 - RNA, 12 nt, Human herpesvirus 6B
aaaaaacaaaga

SEQ ID NO: 169613 - RNA, 13 nt, Human herpesvirus 6B
aaaaaacaaagag

SEQ ID NO: 169614 - RNA, 18 nt, Human herpesvirus 6B
aaaaauaaacgcugucuc

SEQ ID NO: 169615 - RNA, 20 nt, Human herpesvirus 6B
aaaacagauuuuacuucuac

SEQ ID NO: 169616 - RNA, 21 nt, Human herpesvirus 6B
aaaacaucguaauggcauuca

SEQ ID NO: 169617 - RNA, 13 nt, Human herpesvirus 6B
aaaaauacaguau

SEQ ID NO: 169618 - RNA, 22 nt, Human herpesvirus 6B
aaaaauagcagaaguuuaccua

SEQ ID NO: 169619 - RNA, 19 nt, Human herpesvirus 6B
aaaacagacgaaucacauc

SEQ ID NO: 169620 - RNA, 24 nt, Human herpesvirus 6B
aaaacacgauccaauuacaucaaa

SEQ ID NO: 169621 - RNA, 19 nt, Human herpesvirus 6B
aaaacacacaucauauccu

SEQ ID NO: 169622 - RNA, 19 nt, Human herpesvirus 6B
aaaacacaccccgccugaa

SEQ ID NO: 169623 - RNA, 14 nt, Human herpesvirus 6B
aaaacacaguauuu

SEQ ID NO: 169624 - RNA, 16 nt, Human herpesvirus 6B
aaaaauccgaaauuuc

SEQ ID NO: 169625 - RNA, 16 nt, Human herpesvirus 6B
aaaaauuacugaaaga

SEQ ID NO: 169626 - RNA, 20 nt, Human herpesvirus 6B
aaaaauuucagccgaugaua

SEQ ID NO: 169627 - RNA, 16 nt, Human herpesvirus 6B
aaaacaaagcuuuacu

SEQ ID NO: 169628 - RNA, 12 nt, Human herpesvirus 6B
aaaacaaauauc

SEQ ID NO: 169629 - RNA, 15 nt, Human herpesvirus 6B
aaaacagauuuuacu

SEQ ID NO: 169630 - RNA, 23 nt, Human herpesvirus 6B
aaaacacgauccaauuacaucaa

SEQ ID NO: 169631 - RNA, 20 nt, Human herpesvirus 6B
aaaacaaggaacgauaugcu

SEQ ID NO: 169632 - RNA, 19 nt, Human herpesvirus 6B
aaaacacacuggccuacua

SEQ ID NO: 169633 - RNA, 12 nt, Human herpesvirus 6B
aaaacacaguau

SEQ ID NO: 169634 - RNA, 12 nt, Human herpesvirus 6B
aaaacaaugcau

SEQ ID NO: 169635 - RNA, 13 nt, Human herpesvirus 6B
aaaauaacaugug

SEQ ID NO: 169636 - RNA, 19 nt, Human herpesvirus 6B
aaaagaguugggauuccaa

SEQ ID NO: 169637 - RNA, 20 nt, Human herpesvirus 6B
aaaagaggagaccaugccau

SEQ ID NO: 169638 - RNA, 22 nt, Human herpesvirus 6B
aaaagagggugggaacugucaa

SEQ ID NO: 169639 - RNA, 13 nt, Human herpesvirus 6B
aaaagaacacaag

SEQ ID NO: 169640 - RNA, 19 nt, Human herpesvirus 6B
aaaacuauuaauaaaccgc

SEQ ID NO: 169641 - RNA, 22 nt, Human herpesvirus 6B
aaaacuauuaauaaaccgcuua

SEQ ID NO: 169642 - RNA, 21 nt, Human herpesvirus 6B
aaaacucuaaaaccugcuaac

SEQ ID NO: 169643 - RNA, 18 nt, Human herpesvirus 6B
aaaacucuugacauagca

SEQ ID NO: 169644 - RNA, 19 nt, Human herpesvirus 6B
aaaacucuugacauagcaa

SEQ ID NO: 169645 - RNA, 21 nt, Human herpesvirus 6B
aaaacucuugacauagcaauu

SEQ ID NO: 169646 - RNA, 15 nt, Human herpesvirus 6B
aaaacauuucuuaca

SEQ ID NO: 169647 - RNA, 17 nt, Human herpesvirus 6B
aaaacgagagaguucau

SEQ ID NO: 169648 - RNA, 21 nt, Human herpesvirus 6B
aaaacguggaagacgcugugu

SEQ ID NO: 169649 - RNA, 23 nt, Human herpesvirus 6B
aaaaccaguauuaaugucuucga

SEQ ID NO: 169650 - RNA, 20 nt, Human herpesvirus 6B
aacggccuggaauacaagac

SEQ ID NO: 169651 - RNA, 15 nt, Human herpesvirus 6B
aacggaaacaugaac

SEQ ID NO: 169652 - RNA, 16 nt, Human herpesvirus 6B
aacggaaacaugaacg

SEQ ID NO: 169653 - RNA, 16 nt, Human herpesvirus 6B
aacggaaagcaucuca

SEQ ID NO: 169654 - RNA, 17 nt, Human herpesvirus 6B
aacggaaagcaucucaa

SEQ ID NO: 169655 - RNA, 16 nt, Human herpesvirus 6B
aacggaauuaacaauu

SEQ ID NO: 169656 - RNA, 20 nt, Human herpesvirus 6B
aacggagcaaccgcaguuuc

SEQ ID NO: 169657 - RNA, 13 nt, Human herpesvirus 6B
aacggauaguuaa

SEQ ID NO: 169658 - RNA, 21 nt, Human herpesvirus 6B
aacgugaaucuucgucgggaa

SEQ ID NO: 169659 - RNA, 16 nt, Human herpesvirus 6B
aacguucguccggggu

SEQ ID NO: 169660 - RNA, 17 nt, Human herpesvirus 6B
aacguugaaaaaucucu

SEQ ID NO: 169661 - RNA, 18 nt, Human herpesvirus 6B
aacuaaaucgcgccauau

SEQ ID NO: 169662 - RNA, 20 nt, Human herpesvirus 6B
aacuaaaucgcgccauauca

SEQ ID NO: 169663 - RNA, 13 nt, Human herpesvirus 6B
aacuaacaugaca

SEQ ID NO: 169664 - RNA, 14 nt, Human herpesvirus 6B
aacuaacaugacaa

SEQ ID NO: 169665 - RNA, 21 nt, Human herpesvirus 6B
aacuaacaugacaaaucugaa

SEQ ID NO: 169666 - RNA, 22 nt, Human herpesvirus 6B
aacuauagccuagcaagcuagu

SEQ ID NO: 169667 - RNA, 15 nt, Human herpesvirus 6B
aacuuaucaacuaua

SEQ ID NO: 169668 - RNA, 15 nt, Human herpesvirus 6B
aacuaugugcauucc

SEQ ID NO: 169669 - RNA, 23 nt, Human herpesvirus 6B
aacuuacuuaauaacuacacuua

SEQ ID NO: 169670 - RNA, 16 nt, Human herpesvirus 6B
aacuuaaccgcaaaaa

SEQ ID NO: 169671 - RNA, 22 nt, Human herpesvirus 6B
aacuuaauaaaugcuacccaca

SEQ ID NO: 169672 - RNA, 15 nt, Human herpesvirus 6B
aacuagaaaaacaac

SEQ ID NO: 169673 - RNA, 15 nt, Human herpesvirus 6B
aacuaagauugugca

SEQ ID NO: 169674 - RNA, 17 nt, Human herpesvirus 6B
aaccaucuuuucaauua

SEQ ID NO: 169675 - RNA, 20 nt, Human herpesvirus 6B
aaccaguauuaaugucuucg

SEQ ID NO: 169676 - RNA, 13 nt, Human herpesvirus 6B
aaccauucugcag

SEQ ID NO: 169677 - RNA, 15 nt, Human herpesvirus 6B
aaccauucugcagaa

SEQ ID NO: 169678 - RNA, 17 nt, Human herpesvirus 6B
aaccucaaaaaugcaca

SEQ ID NO: 169679 - RNA, 13 nt, Human herpesvirus 6B
aaccugauuucag

SEQ ID NO: 169680 - RNA, 19 nt, Human herpesvirus 6B
aaccucagcaaacauguga

SEQ ID NO: 169681 - RNA, 17 nt, Human herpesvirus 6B
aacgaaaacuuuuugcc

SEQ ID NO: 169682 - RNA, 22 nt, Human herpesvirus 6B
aaccuucccuaucacaauacac

SEQ ID NO: 169683 - RNA, 16 nt, Human herpesvirus 6B
aaccuuauacagaugc

SEQ ID NO: 169684 - RNA, 14 nt, Human herpesvirus 6B
aaccaaaaugacuc

SEQ ID NO: 169685 - RNA, 17 nt, Human herpesvirus 6B
aacauucuuaaauucaa

SEQ ID NO: 169686 - RNA, 18 nt, Human herpesvirus 6B
aacauucggaauuucuuc

SEQ ID NO: 169687 - RNA, 13 nt, Human herpesvirus 6B
aacauucagaaaa

SEQ ID NO: 169688 - RNA, 22 nt, Human herpesvirus 6B
aacauuauaccuauuagcuaua

SEQ ID NO: 169689 - RNA, 14 nt, Human herpesvirus 6B
aacaugaucgucau

SEQ ID NO: 169690 - RNA, 19 nt, Human herpesvirus 6B
aacauguaacuaagcagga

SEQ ID NO: 169691 - RNA, 12 nt, Human herpesvirus 6B
aacaugacaaau

SEQ ID NO: 169692 - RNA, 21 nt, Human herpesvirus 6B
aacaucgucauaccgauccca

SEQ ID NO: 169693 - RNA, 23 nt, Human herpesvirus 6B
aacagcuaauggcguauagcgca

SEQ ID NO: 169694 - RNA, 17 nt, Human herpesvirus 6B
aacagauggcacugaau

SEQ ID NO: 169695 - RNA, 22 nt, Human herpesvirus 6B
aacaaaguaauaugauggacaa

SEQ ID NO: 169696 - RNA, 19 nt, Human herpesvirus 6B
aacaaauucuuacaaguau

SEQ ID NO: 169697 - RNA, 23 nt, Human herpesvirus 6B
aacagaaucuucuuugugcguca

SEQ ID NO: 169698 - RNA, 12 nt, Human herpesvirus 6B
aaauugugucac

SEQ ID NO: 169699 - RNA, 17 nt, Human herpesvirus 6B
aacaaagcuuuacuuac

SEQ ID NO: 169700 - RNA, 17 nt, Human herpesvirus 6B
aacaaaagguuuucuga

SEQ ID NO: 169701 - RNA, 13 nt, Human herpesvirus 6B
aaauuuuccaaac

SEQ ID NO: 169702 - RNA, 18 nt, Human herpesvirus 6B
aaauuuuuauuaguuaaa

SEQ ID NO: 169703 - RNA, 22 nt, Human herpesvirus 6B
aaauuugugcgaauuguguugc

SEQ ID NO: 169704 - RNA, 18 nt, Human herpesvirus 6B
aaauuuguucgcacaaaa

SEQ ID NO: 169705 - RNA, 13 nt, Human herpesvirus 6B
aaauuuuaccuau

SEQ ID NO: 169706 - RNA, 18 nt, Human herpesvirus 6B
aaagcuacucauccucag

SEQ ID NO: 169707 - RNA, 24 nt, Human herpesvirus 6B
aaagcuacucauccucagucuuca

SEQ ID NO: 169708 - RNA, 18 nt, Human herpesvirus 6B
aaagcuauucuaaauacc

SEQ ID NO: 169709 - RNA, 22 nt, Human herpesvirus 6B
aaagcuuuacuuacaacugaaa

SEQ ID NO: 169710 - RNA, 22 nt, Human herpesvirus 6B
aaagcaucucaaaaaacauaua

SEQ ID NO: 169711 - RNA, 23 nt, Human herpesvirus 6B
aaagccagggcgucgucaacucc

SEQ ID NO: 169712 - RNA, 14 nt, Human herpesvirus 6B
aaagcgauagagga

SEQ ID NO: 169713 - RNA, 23 nt, Human herpesvirus 6B
aaagcgccugccuacacugcgaa

SEQ ID NO: 169714 - RNA, 23 nt, Human herpesvirus 6B
aaaggacaaaguucaguaagauu

SEQ ID NO: 169715 - RNA, 16 nt, Human herpesvirus 6B
aaauaauugcacccua

SEQ ID NO: 169716 - RNA, 20 nt, Human herpesvirus 6B
aaauaauuuuuguagcaauu

SEQ ID NO: 169717 - RNA, 23 nt, Human herpesvirus 6B
aaaggauguuugugacucugaac

SEQ ID NO: 169718 - RNA, 17 nt, Human herpesvirus 6B
aaauaccuaauuccaau

SEQ ID NO: 169719 - RNA, 13 nt, Human herpesvirus 6B
aaauacacuaaca

SEQ ID NO: 169720 - RNA, 15 nt, Human herpesvirus 6B
aaaugaccagagauu

SEQ ID NO: 169721 - RNA, 20 nt, Human herpesvirus 6B
aaaugaugauuaauacauca

SEQ ID NO: 169722 - RNA, 22 nt, Human herpesvirus 6B
aaaucugagcucuccuggguau

SEQ ID NO: 169723 - RNA, 16 nt, Human herpesvirus 6B
aaaucuguaagauuaa

SEQ ID NO: 169724 - RNA, 20 nt, Human herpesvirus 6B
aaauagggucaacuguuacu

SEQ ID NO: 169725 - RNA, 14 nt, Human herpesvirus 6B
aaauaucaugaaga

SEQ ID NO: 169726 - RNA, 20 nt, Human herpesvirus 6B
aaaucucgccgaacuagaaa

SEQ ID NO: 169727 - RNA, 11 nt, Human herpesvirus 6B
aaaucucgccg

SEQ ID NO: 169728 - RNA, 19 nt, Human herpesvirus 6B
aaaucuccugagaggcugg

SEQ ID NO: 169729 - RNA, 22 nt, Human herpesvirus 6B
aaaucuccaaaagcgccugccu

SEQ ID NO: 169730 - RNA, 16 nt, Human herpesvirus 6B
aaauaucgucauuaaa

SEQ ID NO: 169731 - RNA, 15 nt, Human herpesvirus 6B
aaauucucugcaugu

SEQ ID NO: 169732 - RNA, 22 nt, Human herpesvirus 6B
aaauucuuuugugcuuaucaaa

SEQ ID NO: 169733 - RNA, 23 nt, Human herpesvirus 6B
aaauuauucuggcgaugcagaug

SEQ ID NO: 169734 - RNA, 14 nt, Human herpesvirus 6B
aaauggaaacugga

SEQ ID NO: 169735 - RNA, 17 nt, Human herpesvirus 6B
aaauuaucgucccuguc

SEQ ID NO: 169736 - RNA, 15 nt, Human herpesvirus 6B
aaaugcgacaaagcu

SEQ ID NO: 169737 - RNA, 23 nt, Human herpesvirus 6B
aaaugcuacccacauaaaaucac

SEQ ID NO: 169738 - RNA, 20 nt, Human herpesvirus 6B
aaagaucaagcaaguuccau

SEQ ID NO: 169739 - RNA, 21 nt, Human herpesvirus 6B
aaagaucaagcaaguuccauu

SEQ ID NO: 169740 - RNA, 17 nt, Human herpesvirus 6B
aaagauguagcuggaua

SEQ ID NO: 169741 - RNA, 13 nt, Human herpesvirus 6B
aaagaauggaagc

SEQ ID NO: 169742 - RNA, 21 nt, Human herpesvirus 6B
aaagaggccaauuuaugucau

SEQ ID NO: 169743 - RNA, 17 nt, Human herpesvirus 6B
aaagaggcugaacuguu

SEQ ID NO: 169744 - RNA, 20 nt, Human herpesvirus 6B
aaagagaauacuacagugac

SEQ ID NO: 169745 - RNA, 15 nt, Human herpesvirus 6B
aaagagaucaguaca

SEQ ID NO: 169746 - RNA, 22 nt, Human herpesvirus 6B
aaagagaucaguacauagaauc

SEQ ID NO: 169747 - RNA, 18 nt, Human herpesvirus 6B
aaagaaugggauugucau

SEQ ID NO: 169748 - RNA, 12 nt, Human herpesvirus 6B
aaagaacccauc

SEQ ID NO: 169749 - RNA, 14 nt, Human herpesvirus 6B
aaagaacaguuuac

SEQ ID NO: 169750 - RNA, 17 nt, Human herpesvirus 6B
aaagaacaguuuaccua

SEQ ID NO: 169751 - RNA, 22 nt, Human herpesvirus 6B
aaagaacaguuuaccuaucaac

SEQ ID NO: 169752 - RNA, 13 nt, Human herpesvirus 6B
aaacuuaccauau

SEQ ID NO: 169753 - RNA, 21 nt, Human herpesvirus 6B
aaacuuaccauauauuggcac

SEQ ID NO: 169754 - RNA, 15 nt, Human herpesvirus 6B
aaacuguucuuucaa

SEQ ID NO: 169755 - RNA, 16 nt, Human herpesvirus 6B
aaacugaggcagaaau

SEQ ID NO: 169756 - RNA, 13 nt, Human herpesvirus 6B
aaacugggugauu

SEQ ID NO: 169757 - RNA, 13 nt, Human herpesvirus 6B
aaacuggucugcu

SEQ ID NO: 169758 - RNA, 15 nt, Human herpesvirus 6B
aaacugucacuuucc

SEQ ID NO: 169759 - RNA, 15 nt, Human herpesvirus 6B
aaaaugcguuuguca

SEQ ID NO: 169760 - RNA, 12 nt, Human herpesvirus 6B
aaaaucugcuaa

SEQ ID NO: 169761 - RNA, 17 nt, Human herpesvirus 6B
aaaaugauugcaaccaa

SEQ ID NO: 169762 - RNA, 20 nt, Human herpesvirus 6B
aaaaugauugcaaccaauaa

SEQ ID NO: 169763 - RNA, 18 nt, Human herpesvirus 6B
aaacugcuuaacuugcac

SEQ ID NO: 169764 - RNA, 13 nt, Human herpesvirus 6B
aaaauaucauuaa

SEQ ID NO: 169765 - RNA, 23 nt, Human herpesvirus 6B
aaaauaguuuuaauucaggaaca

SEQ ID NO: 169766 - RNA, 19 nt, Human herpesvirus 6B
aaaaucgcaaaagaacaca

SEQ ID NO: 169767 - RNA, 18 nt, Human herpesvirus 6B
aaaaucaucucgugcaaa

SEQ ID NO: 169768 - RNA, 20 nt, Human herpesvirus 6B
aaaaucaucucgugcaaaag

SEQ ID NO: 169769 - RNA, 17 nt, Human herpesvirus 6B
aaaauccagcaauccaa

SEQ ID NO: 169770 - RNA, 13 nt, Human herpesvirus 6B
aaaagacaucaca

SEQ ID NO: 169771 - RNA, 15 nt, Human herpesvirus 6B
aaaagauuuaucaaa

SEQ ID NO: 169772 - RNA, 22 nt, Human herpesvirus 6B
aaaagauuuaucaaaagccaga

SEQ ID NO: 169773 - RNA, 15 nt, Human herpesvirus 6B
aaaagacuauguagu

SEQ ID NO: 169774 - RNA, 23 nt, Human herpesvirus 6B
aaaaucaaacucaccgcauauau

SEQ ID NO: 169775 - RNA, 13 nt, Human herpesvirus 6B
aaaaucaacacug

SEQ ID NO: 169776 - RNA, 20 nt, Human herpesvirus 6B
aaaagcuaucgucuacccua

SEQ ID NO: 169777 - RNA, 13 nt, Human herpesvirus 6B
aaugcaauuccac

SEQ ID NO: 169778 - RNA, 14 nt, Human herpesvirus 6B
aaugcccacaccau

SEQ ID NO: 169779 - RNA, 14 nt, Human herpesvirus 6B
aaugcgacaaagcu

SEQ ID NO: 169780 - RNA, 16 nt, Human herpesvirus 6B
aaugcggaacaccagc

SEQ ID NO: 169781 - RNA, 12 nt, Human herpesvirus 6B
aaugacuaucaa

SEQ ID NO: 169782 - RNA, 16 nt, Human herpesvirus 6B
aaucucaagcacaaaa

SEQ ID NO: 169783 - RNA, 18 nt, Human herpesvirus 6B
aaugagaggacagucaac

SEQ ID NO: 169784 - RNA, 22 nt, Human herpesvirus 6B
aaugagauagaaguuacaagaa

SEQ ID NO: 169785 - RNA, 13 nt, Human herpesvirus 6B
aaugauacuacgu

SEQ ID NO: 169786 - RNA, 19 nt, Human herpesvirus 6B
aaugaguuuuuugcaauuu

SEQ ID NO: 169787 - RNA, 20 nt, Human herpesvirus 6B
aaugauuaguuagaugcuua

SEQ ID NO: 169788 - RNA, 16 nt, Human herpesvirus 6B
aaugauugcaaccaau

SEQ ID NO: 169789 - RNA, 19 nt, Human herpesvirus 6B
aaugcucagauguggaauu

SEQ ID NO: 169790 - RNA, 20 nt, Human herpesvirus 6B
aaugcuaggaagaugguauc

SEQ ID NO: 169791 - RNA, 15 nt, Human herpesvirus 6B
aaugcucaaccuaac

SEQ ID NO: 169792 - RNA, 22 nt, Human herpesvirus 6B
aaugcuccuagggaauuuaauc

SEQ ID NO: 169793 - RNA, 18 nt, Human herpesvirus 6B
aauggaagaaggcuauca

SEQ ID NO: 169794 - RNA, 21 nt, Human herpesvirus 6B
aaugcuuugggaccuucagga

SEQ ID NO: 169795 - RNA, 15 nt, Human herpesvirus 6B
aaucgcaaacaggug

SEQ ID NO: 169796 - RNA, 22 nt, Human herpesvirus 6B
aaucgcauuucucuacaugcca

SEQ ID NO: 169797 - RNA, 16 nt, Human herpesvirus 6B
aaucgcgccauaucac

SEQ ID NO: 169798 - RNA, 22 nt, Human herpesvirus 6B
aauccguuagucuacgcauuca

SEQ ID NO: 169799 - RNA, 20 nt, Human herpesvirus 6B
aauaucaaggcggaguguau

SEQ ID NO: 169800 - RNA, 20 nt, Human herpesvirus 6B
aaucuaaaucgcgagacaga

SEQ ID NO: 169801 - RNA, 18 nt, Human herpesvirus 6B
aaucuaauaaaauacaca

SEQ ID NO: 169802 - RNA, 19 nt, Human herpesvirus 6B
aaucguaccggucugcaac

SEQ ID NO: 169803 - RNA, 16 nt, Human herpesvirus 6B
aaucucacacacaggu

SEQ ID NO: 169804 - RNA, 14 nt, Human herpesvirus 6B
aauaguaacuucuc

SEQ ID NO: 169805 - RNA, 11 nt, Human herpesvirus 6B
aauaguagauu

SEQ ID NO: 169806 - RNA, 22 nt, Human herpesvirus 6B
aauaguagauuuucauuuugau

SEQ ID NO: 169807 - RNA, 19 nt, Human herpesvirus 6B
aauagcauucuguucuuca

SEQ ID NO: 169808 - RNA, 22 nt, Human herpesvirus 6B
aauagcauucuguucuucauca

SEQ ID NO: 169809 - RNA, 21 nt, Human herpesvirus 6B
aauagcagaaguuuaccuaga

SEQ ID NO: 169810 - RNA, 22 nt, Human herpesvirus 6B
aauaguuucaugauucuuuguc

SEQ ID NO: 169811 - RNA, 15 nt, Human herpesvirus 6B
aauaguuugccauaa

SEQ ID NO: 169812 - RNA, 14 nt, Human herpesvirus 6B
aauauaauucugac

SEQ ID NO: 169813 - RNA, 13 nt, Human herpesvirus 6B
acaaaacaaauau

SEQ ID NO: 169814 - RNA, 13 nt, Human herpesvirus 6B
acaaaacaaucua

SEQ ID NO: 169815 - RNA, 17 nt, Human herpesvirus 6B
aauuuucugaagacagc

SEQ ID NO: 169816 - RNA, 16 nt, Human herpesvirus 6B
aauuuuaucaugcccu

SEQ ID NO: 169817 - RNA, 22 nt, Human herpesvirus 6B
acaaaaccaggaauccuauuca

SEQ ID NO: 169818 - RNA, 17 nt, Human herpesvirus 6B
acaaaguuuaaguucuc

SEQ ID NO: 169819 - RNA, 19 nt, Human herpesvirus 6B
acaaaguuuaaguucucac

SEQ ID NO: 169820 - RNA, 13 nt, Human herpesvirus 6B
acaaagagaucag

SEQ ID NO: 169821 - RNA, 12 nt, Human herpesvirus 6B
acaaaguaauau

SEQ ID NO: 169822 - RNA, 20 nt, Human herpesvirus 6B
aauuuuauucaaccaaucua

SEQ ID NO: 169823 - RNA, 18 nt, Human herpesvirus 6B
aauuugugcgaauugugu

SEQ ID NO: 169824 - RNA, 14 nt, Human herpesvirus 6B
aauuguaacuucau

SEQ ID NO: 169825 - RNA, 16 nt, Human herpesvirus 6B
aauuggacauuguuga

SEQ ID NO: 169826 - RNA, 21 nt, Human herpesvirus 6B
aauugcgugggaauaagaguu

SEQ ID NO: 169827 - RNA, 17 nt, Human herpesvirus 6B
aauugauaauaaguccu

SEQ ID NO: 169828 - RNA, 22 nt, Human herpesvirus 6B
aauugccuauccuauaaauacu

SEQ ID NO: 169829 - RNA, 18 nt, Human herpesvirus 6B
aauguaaccaccaaaacg

SEQ ID NO: 169830 - RNA, 21 nt, Human herpesvirus 6B
aauguaacgagaauguaauaa

SEQ ID NO: 169831 - RNA, 12 nt, Human herpesvirus 6B
aaugucaaagaa

SEQ ID NO: 169832 - RNA, 20 nt, Human herpesvirus 6B
aauuacugccagaaaaacua

SEQ ID NO: 169833 - RNA, 11 nt, Human herpesvirus 6B
aauuaccucau

SEQ ID NO: 169834 - RNA, 14 nt, Human herpesvirus 6B
aauuacauuaucca

SEQ ID NO: 169835 - RNA, 18 nt, Human herpesvirus 6B
aaugucgaaucucaagca

SEQ ID NO: 169836 - RNA, 21 nt, Human herpesvirus 6B
aauuacauauagucaauggug

SEQ ID NO: 169837 - RNA, 18 nt, Human herpesvirus 6B
aauuaugacugacaaggu

SEQ ID NO: 169838 - RNA, 20 nt, Human herpesvirus 6B
aauuaugacugacaagguau

SEQ ID NO: 169839 - RNA, 17 nt, Human herpesvirus 6B
aauuauugugacaaggu

SEQ ID NO: 169840 - RNA, 18 nt, Human herpesvirus 6B
aauuauugugacaaggua

SEQ ID NO: 169841 - RNA, 15 nt, Human herpesvirus 6B
aauugauaguacuua

SEQ ID NO: 169842 - RNA, 23 nt, Human herpesvirus 6B
aauugcaaacgaucugugaauuc

SEQ ID NO: 169843 - RNA, 17 nt, Human herpesvirus 6B
aaguuagaaauuacaca

SEQ ID NO: 169844 - RNA, 23 nt, Human herpesvirus 6B
aaguuagaaauuacacaucuuaa

SEQ ID NO: 169845 - RNA, 16 nt, Human herpesvirus 6B
aagugguuuaauggaa

SEQ ID NO: 169846 - RNA, 14 nt, Human herpesvirus 6B
aagugcaugaugaa

SEQ ID NO: 169847 - RNA, 13 nt, Human herpesvirus 6B
aagugcaagggua

SEQ ID NO: 169848 - RNA, 19 nt, Human herpesvirus 6B
aaguuucuguggaauucca

SEQ ID NO: 169849 - RNA, 18 nt, Human herpesvirus 6B
aaguuugucacaccacuc

SEQ ID NO: 169850 - RNA, 13 nt, Human herpesvirus 6B
aaguuucaccaug

SEQ ID NO: 169851 - RNA, 18 nt, Human herpesvirus 6B
aaguuucggcaacugaau

SEQ ID NO: 169852 - RNA, 18 nt, Human herpesvirus 6B
aaguucggaucugugaca

SEQ ID NO: 169853 - RNA, 20 nt, Human herpesvirus 6B
aaguuauauucuucuguaaa

SEQ ID NO: 169854 - RNA, 13 nt, Human herpesvirus 6B
aauaaaaaaccaa

SEQ ID NO: 169855 - RNA, 18 nt, Human herpesvirus 6B
aauaaaaaauuugugcga

SEQ ID NO: 169856 - RNA, 21 nt, Human herpesvirus 6B
aauacuauguggaaauuaaaa

SEQ ID NO: 169857 - RNA, 18 nt, Human herpesvirus 6B
aauaccuaauuccaauuu

SEQ ID NO: 169858 - RNA, 16 nt, Human herpesvirus 6B
aauacuagacucggaa

SEQ ID NO: 169859 - RNA, 23 nt, Human herpesvirus 6B
aaggaguuuaucguuuuuauuca

SEQ ID NO: 169860 - RNA, 16 nt, Human herpesvirus 6B
aaggauaagaugauuu

SEQ ID NO: 169861 - RNA, 16 nt, Human herpesvirus 6B
aaggaaaacucuugac

SEQ ID NO: 169862 - RNA, 21 nt, Human herpesvirus 6B
aaggaaaacucuugacauagc

SEQ ID NO: 169863 - RNA, 13 nt, Human herpesvirus 6B
aaggacaaaguuc

SEQ ID NO: 169864 - RNA, 18 nt, Human herpesvirus 6B
aaggcgcgaguuggugcu

SEQ ID NO: 169865 - RNA, 13 nt, Human herpesvirus 6B
aaggcggagacac

SEQ ID NO: 169866 - RNA, 22 nt, Human herpesvirus 6B
aaggccuucaugagccggcuca

SEQ ID NO: 169867 - RNA, 15 nt, Human herpesvirus 6B
aagucaugcuucuuu

SEQ ID NO: 169868 - RNA, 13 nt, Human herpesvirus 6B
aagucaucauaca

SEQ ID NO: 169869 - RNA, 16 nt, Human herpesvirus 6B
aagucuaaugcaaaga

SEQ ID NO: 169870 - RNA, 23 nt, Human herpesvirus 6B
aagucuuauaacaccaguacuuc

SEQ ID NO: 169871 - RNA, 16 nt, Human herpesvirus 6B
aagugaaagcagucag

SEQ ID NO: 169872 - RNA, 18 nt, Human herpesvirus 6B
aagccugcauaugaucca

SEQ ID NO: 169873 - RNA, 19 nt, Human herpesvirus 6B
aagccuguuuuagauucua

SEQ ID NO: 169874 - RNA, 23 nt, Human herpesvirus 6B
aagccucgacguccaccuggaaa

SEQ ID NO: 169875 - RNA, 23 nt, Human herpesvirus 6B
aagcgccaacggaaagcaucuca

SEQ ID NO: 169876 - RNA, 15 nt, Human herpesvirus 6B
aagcaucugcugcuu

SEQ ID NO: 169877 - RNA, 18 nt, Human herpesvirus 6B
aagcuggaaaacuauuaa

SEQ ID NO: 169878 - RNA, 14 nt, Human herpesvirus 6B
aagcuuucuguacc

SEQ ID NO: 169879 - RNA, 21 nt, Human herpesvirus 6B
aagcuuuacuuacaacugaaa

SEQ ID NO: 169880 - RNA, 17 nt, Human herpesvirus 6B
aagcuguccaucuucag

SEQ ID NO: 169881 - RNA, 22 nt, Human herpesvirus 6B
aagcugauacacaacuguuacc

SEQ ID NO: 169882 - RNA, 13 nt, Human herpesvirus 6B
aagcuauguauga

SEQ ID NO: 169883 - RNA, 17 nt, Human herpesvirus 6B
aagcuagugaaucaaau

SEQ ID NO: 169884 - RNA, 17 nt, Human herpesvirus 6B
aagcuagcagaagaaca

SEQ ID NO: 169885 - RNA, 21 nt, Human herpesvirus 6B
aagcuagcagaagaacagcua

SEQ ID NO: 169886 - RNA, 19 nt, Human herpesvirus 6B
aagcgguuagaucugggga

SEQ ID NO: 169887 - RNA, 18 nt, Human herpesvirus 6B
aagcuacucauccucagu

SEQ ID NO: 169888 - RNA, 18 nt, Human herpesvirus 6B
aagcaucccuaugucaau

SEQ ID NO: 169889 - RNA, 18 nt, Human herpesvirus 6B
aagaaugagauguccuaa

SEQ ID NO: 169890 - RNA, 15 nt, Human herpesvirus 6B
aagaauaaaagucca

SEQ ID NO: 169891 - RNA, 12 nt, Human herpesvirus 6B
aagaauaagccu

SEQ ID NO: 169892 - RNA, 14 nt, Human herpesvirus 6B
aagaauuacaauac

SEQ ID NO: 169893 - RNA, 23 nt, Human herpesvirus 6B
aagaaugccgugaacuguguccu

SEQ ID NO: 169894 - RNA, 23 nt, Human herpesvirus 6B
aagaaugggaugcauuauacuga

SEQ ID NO: 169895 - RNA, 16 nt, Human herpesvirus 6B
aacuuuacaucaagac

SEQ ID NO: 169896 - RNA, 18 nt, Human herpesvirus 6B
aagaaggcuaucacuuag

SEQ ID NO: 169897 - RNA, 21 nt, Human herpesvirus 6B
aagaaggcuaucacuuagaca

SEQ ID NO: 169898 - RNA, 22 nt, Human herpesvirus 6B
aacuucauacccgauguucucu

SEQ ID NO: 169899 - RNA, 22 nt, Human herpesvirus 6B
aacuucgacggacgaucccaua

SEQ ID NO: 169900 - RNA, 19 nt, Human herpesvirus 6B
aacuuggagcuauaugcau

SEQ ID NO: 169901 - RNA, 13 nt, Human herpesvirus 6B
accuaauaaacuc

SEQ ID NO: 169902 - RNA, 17 nt, Human herpesvirus 6B
accuaauaaacucugcc

SEQ ID NO: 169903 - RNA, 14 nt, Human herpesvirus 6B
accuaaacaccacu

SEQ ID NO: 169904 - RNA, 23 nt, Human herpesvirus 6B
accgagagccggaaaacaaugca

SEQ ID NO: 169905 - RNA, 19 nt, Human herpesvirus 6B
accuaucaacaauguccaa

SEQ ID NO: 169906 - RNA, 15 nt, Human herpesvirus 6B
accuagagauuacaa

SEQ ID NO: 169907 - RNA, 14 nt, Human herpesvirus 6B
acccuaucgaucca

SEQ ID NO: 169908 - RNA, 24 nt, Human herpesvirus 6B
acccuaaaaucugcuaacggagca

SEQ ID NO: 169909 - RNA, 17 nt, Human herpesvirus 6B
acccucugcaagcucau

SEQ ID NO: 169910 - RNA, 20 nt, Human herpesvirus 6B
acccucugcaagcucaugaa

SEQ ID NO: 169911 - RNA, 19 nt, Human herpesvirus 6B
accgaauaaaacaaguuaa

SEQ ID NO: 169912 - RNA, 16 nt, Human herpesvirus 6B
accgacaaacuacuga

SEQ ID NO: 169913 - RNA, 16 nt, Human herpesvirus 6B
acgaauagcauucugu

SEQ ID NO: 169914 - RNA, 16 nt, Human herpesvirus 6B
accugucguaucuuaa

SEQ ID NO: 169915 - RNA, 21 nt, Human herpesvirus 6B
accuauuagcuauaaaaacac

SEQ ID NO: 169916 - RNA, 13 nt, Human herpesvirus 6B
accugaucacaga

SEQ ID NO: 169917 - RNA, 15 nt, Human herpesvirus 6B
accugccuucacuuu

SEQ ID NO: 169918 - RNA, 16 nt, Human herpesvirus 6B
accugcuaacggagca

SEQ ID NO: 169919 - RNA, 23 nt, Human herpesvirus 6B
acgagaacccuaaaaucugcuaa

SEQ ID NO: 169920 - RNA, 14 nt, Human herpesvirus 6B
acgagaauguaaua

SEQ ID NO: 169921 - RNA, 22 nt, Human herpesvirus 6B
acgagagccuuaucgaaagaca

SEQ ID NO: 169922 - RNA, 16 nt, Human herpesvirus 6B
acgaggcccacuucac

SEQ ID NO: 169923 - RNA, 16 nt, Human herpesvirus 6B
acgagcugcagucuca

SEQ ID NO: 169924 - RNA, 17 nt, Human herpesvirus 6B
acauuauaagacgcuga

SEQ ID NO: 169925 - RNA, 22 nt, Human herpesvirus 6B
acauuauaccuauuagcuauaa

SEQ ID NO: 169926 - RNA, 23 nt, Human herpesvirus 6B
acauucugcguguuaaugaaugu

SEQ ID NO: 169927 - RNA, 15 nt, Human herpesvirus 6B
accacguuuuuccau

SEQ ID NO: 169928 - RNA, 20 nt, Human herpesvirus 6B
accacguuuuuccaugucuu

SEQ ID NO: 169929 - RNA, 15 nt, Human herpesvirus 6B
accaucuucagcuca

SEQ ID NO: 169930 - RNA, 15 nt, Human herpesvirus 6B
accccccacuacuaa

SEQ ID NO: 169931 - RNA, 18 nt, Human herpesvirus 6B
acccggcgaacugagaua

SEQ ID NO: 169932 - RNA, 20 nt, Human herpesvirus 6B
acccaugcugccuuuggaca

SEQ ID NO: 169933 - RNA, 17 nt, Human herpesvirus 6B
acccaucgacgucccau

SEQ ID NO: 169934 - RNA, 18 nt, Human herpesvirus 6B
accaugccauugaauaca

SEQ ID NO: 169935 - RNA, 21 nt, Human herpesvirus 6B
accaugccauugaauacacgu

SEQ ID NO: 169936 - RNA, 23 nt, Human herpesvirus 6B
accauggcccuacuacaguggau

SEQ ID NO: 169937 - RNA, 16 nt, Human herpesvirus 6B
acagcuuuauucccau

SEQ ID NO: 169938 - RNA, 16 nt, Human herpesvirus 6B
acagauuuuacuucua

SEQ ID NO: 169939 - RNA, 16 nt, Human herpesvirus 6B
acagacgaaucacauc

SEQ ID NO: 169940 - RNA, 13 nt, Human herpesvirus 6B
acagagaugcggc

SEQ ID NO: 169941 - RNA, 16 nt, Human herpesvirus 6B
acagagccuagaccaa

SEQ ID NO: 169942 - RNA, 17 nt, Human herpesvirus 6B
acagagugcaucuuuaa

SEQ ID NO: 169943 - RNA, 16 nt, Human herpesvirus 6B
acaggcggagcugugu

SEQ ID NO: 169944 - RNA, 21 nt, Human herpesvirus 6B
acagguaagcagcaaaacaac

SEQ ID NO: 169945 - RNA, 20 nt, Human herpesvirus 6B
acaggauuccccucauacau

SEQ ID NO: 169946 - RNA, 12 nt, Human herpesvirus 6B
acauaagacuua

SEQ ID NO: 169947 - RNA, 13 nt, Human herpesvirus 6B
acauacagaugug

SEQ ID NO: 169948 - RNA, 12 nt, Human herpesvirus 6B
acauacuuuccc

SEQ ID NO: 169949 - RNA, 21 nt, Human herpesvirus 6B
acauacuuuccccauacugug

SEQ ID NO: 169950 - RNA, 22 nt, Human herpesvirus 6B
acauacuuuccccauacugugu

SEQ ID NO: 169951 - RNA, 17 nt, Human herpesvirus 6B
acaucgcuaaguguuga

SEQ ID NO: 169952 - RNA, 12 nt, Human herpesvirus 6B
acaucgcuccau

SEQ ID NO: 169953 - RNA, 13 nt, Human herpesvirus 6B
acaucgaaucuca

SEQ ID NO: 169954 - RNA, 22 nt, Human herpesvirus 6B
acaucgucauaccgaucccagc

SEQ ID NO: 169955 - RNA, 16 nt, Human herpesvirus 6B
acaucuaugaugcugu

SEQ ID NO: 169956 - RNA, 21 nt, Human herpesvirus 6B
acauguauccucguggaguaa

SEQ ID NO: 169957 - RNA, 16 nt, Human herpesvirus 6B
acauguauucuccuca

SEQ ID NO: 169958 - RNA, 20 nt, Human herpesvirus 6B
acaugugguaauacgugaau

SEQ ID NO: 169959 - RNA, 18 nt, Human herpesvirus 6B
acauguuuuugaugugcu

SEQ ID NO: 169960 - RNA, 23 nt, Human herpesvirus 6B
acaucuuaacagacuacuuuuaa

SEQ ID NO: 169961 - RNA, 22 nt, Human herpesvirus 6B
acaucuauguguauaaugguuu

SEQ ID NO: 169962 - RNA, 11 nt, Human herpesvirus 6B
acaucugcaaa

SEQ ID NO: 169963 - RNA, 16 nt, Human herpesvirus 6B
acaugaaaacauucag

SEQ ID NO: 169964 - RNA, 17 nt, Human herpesvirus 6B
acaugaaaacauucaga

SEQ ID NO: 169965 - RNA, 18 nt, Human herpesvirus 6B
acacugcgaauccgucuc

SEQ ID NO: 169966 - RNA, 15 nt, Human herpesvirus 6B
acacucauuugcaau

SEQ ID NO: 169967 - RNA, 13 nt, Human herpesvirus 6B
acacuaacaggau

SEQ ID NO: 169968 - RNA, 13 nt, Human herpesvirus 6B
acagaaaggccau

SEQ ID NO: 169969 - RNA, 15 nt, Human herpesvirus 6B
acacuuucauaggaa

SEQ ID NO: 169970 - RNA, 22 nt, Human herpesvirus 6B
acagaaaaaaaaaaacaaagag

SEQ ID NO: 169971 - RNA, 23 nt, Human herpesvirus 6B
acaccuugacauugauuccaccu

SEQ ID NO: 169972 - RNA, 19 nt, Human herpesvirus 6B
acaccucgcccgacauaaa

SEQ ID NO: 169973 - RNA, 21 nt, Human herpesvirus 6B
acacgaaaaacauuucuuaca

SEQ ID NO: 169974 - RNA, 13 nt, Human herpesvirus 6B
acacgauuuauca

SEQ ID NO: 169975 - RNA, 14 nt, Human herpesvirus 6B
acacgcggggaucg

SEQ ID NO: 169976 - RNA, 14 nt, Human herpesvirus 6B
acacgccgucuuca

SEQ ID NO: 169977 - RNA, 21 nt, Human herpesvirus 6B
acacguauguacuccggggga

SEQ ID NO: 169978 - RNA, 12 nt, Human herpesvirus 6B
acacgucccuau

SEQ ID NO: 169979 - RNA, 23 nt, Human herpesvirus 6B
acaccaucaauuuuauucaacca

SEQ ID NO: 169980 - RNA, 14 nt, Human herpesvirus 6B
acaccagcauguca

SEQ ID NO: 169981 - RNA, 15 nt, Human herpesvirus 6B
acaccaggaguuuaa

SEQ ID NO: 169982 - RNA, 15 nt, Human herpesvirus 6B
acaccaaugaucaca

SEQ ID NO: 169983 - RNA, 19 nt, Human herpesvirus 6B
acaccaguacuucaagaaa

SEQ ID NO: 169984 - RNA, 22 nt, Human herpesvirus 6B
acaagaguaaaaaaagauuuau

SEQ ID NO: 169985 - RNA, 16 nt, Human herpesvirus 6B
acaaaucugaauguau

SEQ ID NO: 169986 - RNA, 19 nt, Human herpesvirus 6B
acaaaucuguaagauuaaa

SEQ ID NO: 169987 - RNA, 22 nt, Human herpesvirus 6B
acaagaaaacgagagaguucau

SEQ ID NO: 169988 - RNA, 16 nt, Human herpesvirus 6B
acaacuggaugaaucu

SEQ ID NO: 169989 - RNA, 15 nt, Human herpesvirus 6B
acaacugaaacucca

SEQ ID NO: 169990 - RNA, 16 nt, Human herpesvirus 6B
acguugcagucugcuc

SEQ ID NO: 169991 - RNA, 17 nt, Human herpesvirus 6B
acguugcagucugcucg

SEQ ID NO: 169992 - RNA, 18 nt, Human herpesvirus 6B
acguugaaaaaucucuau

SEQ ID NO: 169993 - RNA, 22 nt, Human herpesvirus 6B
acguuugaguugggacuuggaa

SEQ ID NO: 169994 - RNA, 14 nt, Human herpesvirus 6B
acguuaaauaucua

SEQ ID NO: 169995 - RNA, 19 nt, Human herpesvirus 6B
acguuccaucacgcauaga

SEQ ID NO: 169996 - RNA, 17 nt, Human herpesvirus 6B
acuaaaacaucagauga

SEQ ID NO: 169997 - RNA, 22 nt, Human herpesvirus 6B
acuaaaucgcgccauaucacag

SEQ ID NO: 169998 - RNA, 20 nt, Human herpesvirus 6B
acuaacaugacaaaucugaa

SEQ ID NO: 169999 - RNA, 21 nt, Human herpesvirus 6B
acgcgacacggugagucgcau

SEQ ID NO: 170000 - RNA, 15 nt, Human herpesvirus 6B
acgugcuagcucugu

SEQ ID NO: 170001 - RNA, 17 nt, Human herpesvirus 6B
acuacagcuaagauuaa

SEQ ID NO: 170002 - RNA, 16 nt, Human herpesvirus 6B
acuacagacuccucac

SEQ ID NO: 170003 - RNA, 17 nt, Human herpesvirus 6B
acuacaguggauguuag

SEQ ID NO: 170004 - RNA, 15 nt, Human herpesvirus 6B
acuaccgauaaaucc

SEQ ID NO: 170005 - RNA, 16 nt, Human herpesvirus 6B
acuaagauugugcagu

SEQ ID NO: 170006 - RNA, 18 nt, Human herpesvirus 6B
acuacguuuuguguuaaa

SEQ ID NO: 170007 - RNA, 16 nt, Human herpesvirus 6B
acuagacaucaacucc

SEQ ID NO: 170008 - RNA, 15 nt, Human herpesvirus 6B
acuaguaagaacauu

SEQ ID NO: 170009 - RNA, 17 nt, Human herpesvirus 6B
acuaguaagaacauuaa

SEQ ID NO: 170010 - RNA, 17 nt, Human herpesvirus 6B
acuauauuaucuuucau

SEQ ID NO: 170011 - RNA, 14 nt, Human herpesvirus 6B
acuauagacgccau

SEQ ID NO: 170012 - RNA, 14 nt, Human herpesvirus 6B
acucagauucgcaa

SEQ ID NO: 170013 - RNA, 23 nt, Human herpesvirus 6B
acucuauuuuuuauuaguauccu

SEQ ID NO: 170014 - RNA, 18 nt, Human herpesvirus 6B
acucucacggccauuuaa

SEQ ID NO: 170015 - RNA, 21 nt, Human herpesvirus 6B
acucgugccaguucacacaga

SEQ ID NO: 170016 - RNA, 18 nt, Human herpesvirus 6B
acucuaaaaccugcuaac

SEQ ID NO: 170017 - RNA, 18 nt, Human herpesvirus 6B
acucuaaaagcugcuaac

SEQ ID NO: 170018 - RNA, 18 nt, Human herpesvirus 6B
acucggucuacuguguau

SEQ ID NO: 170019 - RNA, 15 nt, Human herpesvirus 6B
acuauuuaacaucca

SEQ ID NO: 170020 - RNA, 16 nt, Human herpesvirus 6B
acuauuuaacauccaa

SEQ ID NO: 170021 - RNA, 18 nt, Human herpesvirus 6B
acuauuuaacauccaaaa

SEQ ID NO: 170022 - RNA, 22 nt, Human herpesvirus 6B
acuauucgaagacauuaauacu

SEQ ID NO: 170023 - RNA, 22 nt, Human herpesvirus 6B
acuauuucuuuuuaaaaucaaa

SEQ ID NO: 170024 - RNA, 14 nt, Human herpesvirus 6B
acucaauucugaaa

SEQ ID NO: 170025 - RNA, 15 nt, Human herpesvirus 6B
acuauuuuaguuaca

SEQ ID NO: 170026 - RNA, 16 nt, Human herpesvirus 6B
acuaugugcauuccga

SEQ ID NO: 170027 - RNA, 15 nt, Human herpesvirus 6B
acuauuaaacuaaca

SEQ ID NO: 170028 - RNA, 17 nt, Human herpesvirus 6B
acuauuaauaaaccgcu

SEQ ID NO: 170029 - RNA, 16 nt, Human herpesvirus 6B
acuaucugagacaguc

SEQ ID NO: 170030 - RNA, 20 nt, Human herpesvirus 6B
acuaugaaccacguuuuucc

SEQ ID NO: 170031 - RNA, 12 nt, Human herpesvirus 6B
acuguaccugaa

SEQ ID NO: 170032 - RNA, 17 nt, Human herpesvirus 6B
acugguucaggauuugu

SEQ ID NO: 170033 - RNA, 24 nt, Human herpesvirus 6B
acugguugaguuuccugcaacucu

SEQ ID NO: 170034 - RNA, 22 nt, Human herpesvirus 6B
acugggugauugggagcucacu

SEQ ID NO: 170035 - RNA, 17 nt, Human herpesvirus 6B
acucucuuucaguaauu

SEQ ID NO: 170036 - RNA, 22 nt, Human herpesvirus 6B
acucugaagaauaaaaguccau

SEQ ID NO: 170037 - RNA, 14 nt, Human herpesvirus 6B
acucugccuguuca

SEQ ID NO: 170038 - RNA, 17 nt, Human herpesvirus 6B
acucuggcugaaggaau

SEQ ID NO: 170039 - RNA, 22 nt, Human herpesvirus 6B
acugcaguccagaaguccuuca

SEQ ID NO: 170040 - RNA, 13 nt, Human herpesvirus 6B
acugcgacucaau

SEQ ID NO: 170041 - RNA, 15 nt, Human herpesvirus 6B
acugccgccauauua

SEQ ID NO: 170042 - RNA, 22 nt, Human herpesvirus 6B
acugcguuacaagcaugcauug

SEQ ID NO: 170043 - RNA, 18 nt, Human herpesvirus 6B
acugcuggcugagauuca

SEQ ID NO: 170044 - RNA, 19 nt, Human herpesvirus 6B
agaaauugugucacauguu

SEQ ID NO: 170045 - RNA, 14 nt, Human herpesvirus 6B
agaaauuacacauc

SEQ ID NO: 170046 - RNA, 24 nt, Human herpesvirus 6B
agaaaggcggagacacauagccuu

SEQ ID NO: 170047 - RNA, 17 nt, Human herpesvirus 6B
agaaauauugcaugcau

SEQ ID NO: 170048 - RNA, 19 nt, Human herpesvirus 6B
agaaauauugcaugcauug

SEQ ID NO: 170049 - RNA, 14 nt, Human herpesvirus 6B
agaaaucacguuga

SEQ ID NO: 170050 - RNA, 13 nt, Human herpesvirus 6B
agaaaugaucaau

SEQ ID NO: 170051 - RNA, 17 nt, Human herpesvirus 6B
agaaaugaucaauacuu

SEQ ID NO: 170052 - RNA, 20 nt, Human herpesvirus 6B
agaaaucguaccggucugca

SEQ ID NO: 170053 - RNA, 23 nt, Human herpesvirus 6B
agaagaguuuuuuaaaagugcaa

SEQ ID NO: 170054 - RNA, 22 nt, Human herpesvirus 6B
agaaauuucuagcgaucauaaa

SEQ ID NO: 170055 - RNA, 22 nt, Human herpesvirus 6B
agaagggcuuuaaaaauuacua

SEQ ID NO: 170056 - RNA, 15 nt, Human herpesvirus 6B
agaagcauuugcuga

SEQ ID NO: 170057 - RNA, 19 nt, Human herpesvirus 6B
agaauacaaaaacgaccug

SEQ ID NO: 170058 - RNA, 16 nt, Human herpesvirus 6B
agaauaaaaguccauu

SEQ ID NO: 170059 - RNA, 20 nt, Human herpesvirus 6B
acuucauacccgauguucuc

SEQ ID NO: 170060 - RNA, 19 nt, Human herpesvirus 6B
acuucgacggacgauccca

SEQ ID NO: 170061 - RNA, 18 nt, Human herpesvirus 6B
acuuccguaucacauuua

SEQ ID NO: 170062 - RNA, 14 nt, Human herpesvirus 6B
acugugauaugcaa

SEQ ID NO: 170063 - RNA, 19 nt, Human herpesvirus 6B
acuuaucaacuauacuuaa

SEQ ID NO: 170064 - RNA, 19 nt, Human herpesvirus 6B
acuuauaagucaucauaca

SEQ ID NO: 170065 - RNA, 17 nt, Human herpesvirus 6B
acuucaaaaucugcuaa

SEQ ID NO: 170066 - RNA, 19 nt, Human herpesvirus 6B
acuuaucguucacugacga

SEQ ID NO: 170067 - RNA, 21 nt, Human herpesvirus 6B
acuuuuaaaaaauuugaucca

SEQ ID NO: 170068 - RNA, 22 nt, Human herpesvirus 6B
acuuugugcccauacuuguaaa

SEQ ID NO: 170069 - RNA, 22 nt, Human herpesvirus 6B
acuuugggugauggaugugcac

SEQ ID NO: 170070 - RNA, 22 nt, Human herpesvirus 6B
acuuuuccagugagaacauaua

SEQ ID NO: 170071 - RNA, 12 nt, Human herpesvirus 6B
acuuuucuauca

SEQ ID NO: 170072 - RNA, 19 nt, Human herpesvirus 6B
acuuuuuaacgaaaaccau

SEQ ID NO: 170073 - RNA, 22 nt, Human herpesvirus 6B
agaaaaaacaaagcuuuacuua

SEQ ID NO: 170074 - RNA, 21 nt, Human herpesvirus 6B
agaaaaaacaucguaauggca

SEQ ID NO: 170075 - RNA, 19 nt, Human herpesvirus 6B
agaaaaaaaaaaacaaaga

SEQ ID NO: 170076 - RNA, 18 nt, Human herpesvirus 6B
agaaaaacuauagccuag

SEQ ID NO: 170077 - RNA, 14 nt, Human herpesvirus 6B
agacagggggaucg

SEQ ID NO: 170078 - RNA, 23 nt, Human herpesvirus 6B
agacagguaagcagcaaaacaac

SEQ ID NO: 170079 - RNA, 23 nt, Human herpesvirus 6B
agacauccguugagugugcauca

SEQ ID NO: 170080 - RNA, 20 nt, Human herpesvirus 6B
agacaucgagauucuuuaaa

SEQ ID NO: 170081 - RNA, 16 nt, Human herpesvirus 6B
agaauguuccaauuga

SEQ ID NO: 170082 - RNA, 12 nt, Human herpesvirus 6B
agaaugcaacau

SEQ ID NO: 170083 - RNA, 14 nt, Human herpesvirus 6B
agaaucuuccacug

SEQ ID NO: 170084 - RNA, 13 nt, Human herpesvirus 6B
agaaugccgugaa

SEQ ID NO: 170085 - RNA, 14 nt, Human herpesvirus 6B
agagauaucugcau

SEQ ID NO: 170086 - RNA, 15 nt, Human herpesvirus 6B
agagauuacaaggua

SEQ ID NO: 170087 - RNA, 18 nt, Human herpesvirus 6B
agagauucuauguacuga

SEQ ID NO: 170088 - RNA, 22 nt, Human herpesvirus 6B
agagauucuauguacugaucuc

SEQ ID NO: 170089 - RNA, 16 nt, Human herpesvirus 6B
agagauuuacuguuuc

SEQ ID NO: 170090 - RNA, 14 nt, Human herpesvirus 6B
agagcugacugaaa

SEQ ID NO: 170091 - RNA, 14 nt, Human herpesvirus 6B
agagcuucuuagga

SEQ ID NO: 170092 - RNA, 24 nt, Human herpesvirus 6B
agaguucgguccaaggauuaugau

SEQ ID NO: 170093 - RNA, 19 nt, Human herpesvirus 6B
caaaaugauugcaaccaau

SEQ ID NO: 170094 - RNA, 17 nt, Human herpesvirus 6B
caaaaugguuaugacaa

SEQ ID NO: 170095 - RNA, 18 nt, Human herpesvirus 6B
caaaaugguuaugacaaa

SEQ ID NO: 170096 - RNA, 14 nt, Human herpesvirus 6B
caaaagcaugaaau

SEQ ID NO: 170097 - RNA, 15 nt, Human herpesvirus 6B
caaaaugaccagaga

SEQ ID NO: 170098 - RNA, 16 nt, Human herpesvirus 6B
caaaaugaccagagau

SEQ ID NO: 170099 - RNA, 21 nt, Human herpesvirus 6B
caaaaugaccagagauucuau

SEQ ID NO: 170100 - RNA, 21 nt, Human herpesvirus 6B
caaacaccucacagucuagua

SEQ ID NO: 170101 - RNA, 13 nt, Human herpesvirus 6B
caaauuacaauua

SEQ ID NO: 170102 - RNA, 19 nt, Human herpesvirus 6B
caaauuuuccaaacauuau

SEQ ID NO: 170103 - RNA, 20 nt, Human herpesvirus 6B
caaauugccuauccuauaaa

SEQ ID NO: 170104 - RNA, 20 nt, Human herpesvirus 6B
caacaacuuuuaacuauccg

SEQ ID NO: 170105 - RNA, 16 nt, Human herpesvirus 6B
caacaacgaaaaagcu

SEQ ID NO: 170106 - RNA, 22 nt, Human herpesvirus 6B
caacaugaucgucauaaacaaa

SEQ ID NO: 170107 - RNA, 13 nt, Human herpesvirus 6B
caacauccuauua

SEQ ID NO: 170108 - RNA, 18 nt, Human herpesvirus 6B
caacugauuaagauuauc

SEQ ID NO: 170109 - RNA, 18 nt, Human herpesvirus 6B
caacuauuuaacauccaa

SEQ ID NO: 170110 - RNA, 16 nt, Human herpesvirus 6B
caacuaguuuugagaa

SEQ ID NO: 170111 - RNA, 14 nt, Human herpesvirus 6B
caagacuuaauauc

SEQ ID NO: 170112 - RNA, 19 nt, Human herpesvirus 6B
caagacuacagacuccuca

SEQ ID NO: 170113 - RNA, 22 nt, Human herpesvirus 6B
caacuuaaaauuuuuaaacaga

SEQ ID NO: 170114 - RNA, 12 nt, Human herpesvirus 6B
caauagauuuca

SEQ ID NO: 170115 - RNA, 20 nt, Human herpesvirus 6B
caaucauguuuauugucaaa

SEQ ID NO: 170116 - RNA, 16 nt, Human herpesvirus 6B
caaucauuaacauaca

SEQ ID NO: 170117 - RNA, 23 nt, Human herpesvirus 6B
caauaguagauuuucauuuugau

SEQ ID NO: 170118 - RNA, 14 nt, Human herpesvirus 6B
caaguaagauugca

SEQ ID NO: 170119 - RNA, 13 nt, Human herpesvirus 6B
caauaaaaacuca

SEQ ID NO: 170120 - RNA, 21 nt, Human herpesvirus 6B
caauaaacaugauuguaauaa

SEQ ID NO: 170121 - RNA, 19 nt, Human herpesvirus 6B
caagauuguguuucugucu

SEQ ID NO: 170122 - RNA, 14 nt, Human herpesvirus 6B
caagcacaaaacca

SEQ ID NO: 170123 - RNA, 18 nt, Human herpesvirus 6B
caagcagccaaugauucu

SEQ ID NO: 170124 - RNA, 13 nt, Human herpesvirus 6B
caagauacugguu

SEQ ID NO: 170125 - RNA, 16 nt, Human herpesvirus 6B
caagguaugaaacgaa

SEQ ID NO: 170126 - RNA, 22 nt, Human herpesvirus 6B
cacguguggcagcaauccaauc

SEQ ID NO: 170127 - RNA, 19 nt, Human herpesvirus 6B
cacucugaagaauaaaagu

SEQ ID NO: 170128 - RNA, 22 nt, Human herpesvirus 6B
cacucugaagaauaaaagucca

SEQ ID NO: 170129 - RNA, 23 nt, Human herpesvirus 6B
cacucugaagaauaaaaguccau

SEQ ID NO: 170130 - RNA, 19 nt, Human herpesvirus 6B
cacgaaccaaaaugacucu

SEQ ID NO: 170131 - RNA, 16 nt, Human herpesvirus 6B
cacgucccauucacau

SEQ ID NO: 170132 - RNA, 20 nt, Human herpesvirus 6B
cagaagaagagccuuuaacc

SEQ ID NO: 170133 - RNA, 21 nt, Human herpesvirus 6B
cagaaucgagaucguuuugca

SEQ ID NO: 170134 - RNA, 16 nt, Human herpesvirus 6B
cagaauacgaacagaa

SEQ ID NO: 170135 - RNA, 17 nt, Human herpesvirus 6B
cagaaggauccauucua

SEQ ID NO: 170136 - RNA, 18 nt, Human herpesvirus 6B
cagaaggauccauucuag

SEQ ID NO: 170137 - RNA, 22 nt, Human herpesvirus 6B
cagaaguuuaccuagagauuac

SEQ ID NO: 170138 - RNA, 20 nt, Human herpesvirus 6B
cagaaguuucggcaacugaa

SEQ ID NO: 170139 - RNA, 16 nt, Human herpesvirus 6B
cagaauaaaaauuuca

SEQ ID NO: 170140 - RNA, 20 nt, Human herpesvirus 6B
cacugacgauggcuacguuu

SEQ ID NO: 170141 - RNA, 14 nt, Human herpesvirus 6B
cacuguaccuuuag

SEQ ID NO: 170142 - RNA, 22 nt, Human herpesvirus 6B
cagaaaggccauuggauuccau

SEQ ID NO: 170143 - RNA, 12 nt, Human herpesvirus 6B
cagaaacugcua

SEQ ID NO: 170144 - RNA, 16 nt, Human herpesvirus 6B
cagaaacuuggagcua

SEQ ID NO: 170145 - RNA, 21 nt, Human herpesvirus 6B
cacacuggccuacuauaacuu

SEQ ID NO: 170146 - RNA, 11 nt, Human herpesvirus 6B
cacaucauauc

SEQ ID NO: 170147 - RNA, 16 nt, Human herpesvirus 6B
cacaggcgcgugcacg

SEQ ID NO: 170148 - RNA, 15 nt, Human herpesvirus 6B
caccagcaugucaua

SEQ ID NO: 170149 - RNA, 15 nt, Human herpesvirus 6B
caccccgccugaaca

SEQ ID NO: 170150 - RNA, 11 nt, Human herpesvirus 6B
cacccaucucc

SEQ ID NO: 170151 - RNA, 15 nt, Human herpesvirus 6B
cacagaauacaaaaa

SEQ ID NO: 170152 - RNA, 19 nt, Human herpesvirus 6B
cacagaauacaaaaacgac

SEQ ID NO: 170153 - RNA, 17 nt, Human herpesvirus 6B
cacagaaucgcaaacag

SEQ ID NO: 170154 - RNA, 11 nt, Human herpesvirus 6B
caaucugugag

SEQ ID NO: 170155 - RNA, 14 nt, Human herpesvirus 6B
caaucugugcaaca

SEQ ID NO: 170156 - RNA, 17 nt, Human herpesvirus 6B
caaucugugcaacacaa

SEQ ID NO: 170157 - RNA, 14 nt, Human herpesvirus 6B
caaugcggaacacc

SEQ ID NO: 170158 - RNA, 23 nt, Human herpesvirus 6B
caaugcggaacaccagcauguca

SEQ ID NO: 170159 - RNA, 15 nt, Human herpesvirus 6B
caaugcguauuugau

SEQ ID NO: 170160 - RNA, 14 nt, Human herpesvirus 6B
caaugcaauuccac

SEQ ID NO: 170161 - RNA, 17 nt, Human herpesvirus 6B
caaugauuuuguuuauu

SEQ ID NO: 170162 - RNA, 17 nt, Human herpesvirus 6B
caaugaguuuuuugcaa

SEQ ID NO: 170163 - RNA, 21 nt, Human herpesvirus 6B
caaugaguuuuuugcaauuug

SEQ ID NO: 170164 - RNA, 14 nt, Human herpesvirus 6B
auggcaacauaccc

SEQ ID NO: 170165 - RNA, 14 nt, Human herpesvirus 6B
auggcacucugaag

SEQ ID NO: 170166 - RNA, 15 nt, Human herpesvirus 6B
auggauguguggaag

SEQ ID NO: 170167 - RNA, 22 nt, Human herpesvirus 6B
aucuuccuuuucaguauagaca

SEQ ID NO: 170168 - RNA, 13 nt, Human herpesvirus 6B
aucuuaacagacu

SEQ ID NO: 170169 - RNA, 15 nt, Human herpesvirus 6B
aucuuccccauaaca

SEQ ID NO: 170170 - RNA, 23 nt, Human herpesvirus 6B
augggaguaauuauugugacaag

SEQ ID NO: 170171 - RNA, 17 nt, Human herpesvirus 6B
augggcaagcagccaau

SEQ ID NO: 170172 - RNA, 19 nt, Human herpesvirus 6B
auggggaagaucuaugaga

SEQ ID NO: 170173 - RNA, 20 nt, Human herpesvirus 6B
auggcgacgaccgauaaauu

SEQ ID NO: 170174 - RNA, 12 nt, Human herpesvirus 6B
auggcgacucaa

SEQ ID NO: 170175 - RNA, 17 nt, Human herpesvirus 6B
auggguuugucuucaag

SEQ ID NO: 170176 - RNA, 15 nt, Human herpesvirus 6B
augguagugcucaag

SEQ ID NO: 170177 - RNA, 15 nt, Human herpesvirus 6B
augguuaugacaaag

SEQ ID NO: 170178 - RNA, 13 nt, Human herpesvirus 6B
augguugugugag

SEQ ID NO: 170179 - RNA, 16 nt, Human herpesvirus 6B
auguaaaauuaccuca

SEQ ID NO: 170180 - RNA, 17 nt, Human herpesvirus 6B
auguaaaauuaccucau

SEQ ID NO: 170181 - RNA, 23 nt, Human herpesvirus 6B
auggugccucaggguuggaguuu

SEQ ID NO: 170182 - RNA, 15 nt, Human herpesvirus 6B
auguacgaugaacua

SEQ ID NO: 170183 - RNA, 15 nt, Human herpesvirus 6B
auguacugaucucuu

SEQ ID NO: 170184 - RNA, 22 nt, Human herpesvirus 6B
auguagcaaaugaauguguuca

SEQ ID NO: 170185 - RNA, 21 nt, Human herpesvirus 6B
auguaacucaucaacguaaga

SEQ ID NO: 170186 - RNA, 14 nt, Human herpesvirus 6B
auguaaacuaaaua

SEQ ID NO: 170187 - RNA, 15 nt, Human herpesvirus 6B
auguauucuccucaa

SEQ ID NO: 170188 - RNA, 23 nt, Human herpesvirus 6B
augugauucggaaaauaauugca

SEQ ID NO: 170189 - RNA, 12 nt, Human herpesvirus 6B
auguggccugua

SEQ ID NO: 170190 - RNA, 21 nt, Human herpesvirus 6B
auguggaacggaaacaugaac

SEQ ID NO: 170191 - RNA, 18 nt, Human herpesvirus 6B
augugcagaucagucaaa

SEQ ID NO: 170192 - RNA, 20 nt, Human herpesvirus 6B
augucgaaucucaagcacaa

SEQ ID NO: 170193 - RNA, 22 nt, Human herpesvirus 6B
augucgugguggucuuguuauc

SEQ ID NO: 170194 - RNA, 21 nt, Human herpesvirus 6B
auguccauucucagacagcuu

SEQ ID NO: 170195 - RNA, 22 nt, Human herpesvirus 6B
auguccauuucuucgagcuuuu

SEQ ID NO: 170196 - RNA, 19 nt, Human herpesvirus 6B
auguccaggaauucacuuu

SEQ ID NO: 170197 - RNA, 21 nt, Human herpesvirus 6B
augucacaaaucuguaagauu

SEQ ID NO: 170198 - RNA, 15 nt, Human herpesvirus 6B
auguucuugacaaau

SEQ ID NO: 170199 - RNA, 22 nt, Human herpesvirus 6B
auguucaaaacugggcgaagac

SEQ ID NO: 170200 - RNA, 12 nt, Human herpesvirus 6B
auguuagaucac

SEQ ID NO: 170201 - RNA, 12 nt, Human herpesvirus 6B
auguucagccuu

SEQ ID NO: 170202 - RNA, 19 nt, Human herpesvirus 6B
auguguuaaagaaugcuga

SEQ ID NO: 170203 - RNA, 12 nt, Human herpesvirus 6B
augugucuuagu

SEQ ID NO: 170204 - RNA, 13 nt, Human herpesvirus 6B
auguguucuuaca

SEQ ID NO: 170205 - RNA, 17 nt, Human herpesvirus 6B
auguuaacucagguggu

SEQ ID NO: 170206 - RNA, 12 nt, Human herpesvirus 6B
auguuacagaua

SEQ ID NO: 170207 - RNA, 16 nt, Human herpesvirus 6B
auuaauaaaccgcuua

SEQ ID NO: 170208 - RNA, 20 nt, Human herpesvirus 6B
auuaauacaucauuaaaaua

SEQ ID NO: 170209 - RNA, 15 nt, Human herpesvirus 6B
auuaacauacagaug

SEQ ID NO: 170210 - RNA, 13 nt, Human herpesvirus 6B
auuaaugccacag

SEQ ID NO: 170211 - RNA, 19 nt, Human herpesvirus 6B
auuacaagggaaauccuau

SEQ ID NO: 170212 - RNA, 14 nt, Human herpesvirus 6B
auuacacaucuuaa

SEQ ID NO: 170213 - RNA, 16 nt, Human herpesvirus 6B
auuaaauuguuuuaaa

SEQ ID NO: 170214 - RNA, 23 nt, Human herpesvirus 6B
auuaaaguuuacugugauuucac

SEQ ID NO: 170215 - RNA, 15 nt, Human herpesvirus 6B
auguuuuuacuugau

SEQ ID NO: 170216 - RNA, 22 nt, Human herpesvirus 6B
auuaacaauucucucaaugcgg

SEQ ID NO: 170217 - RNA, 15 nt, Human herpesvirus 6B
auuaaacuaacauga

SEQ ID NO: 170218 - RNA, 18 nt, Human herpesvirus 6B
auuaaagcauuagcaaca

SEQ ID NO: 170219 - RNA, 20 nt, Human herpesvirus 6B
auguuuuccccacaacaaga

SEQ ID NO: 170220 - RNA, 20 nt, Human herpesvirus 6B
auguuguugaucguguugug

SEQ ID NO: 170221 - RNA, 15 nt, Human herpesvirus 6B
auguuguuguguuga

SEQ ID NO: 170222 - RNA, 21 nt, Human herpesvirus 6B
auguugguaaacuuaccauau

SEQ ID NO: 170223 - RNA, 13 nt, Human herpesvirus 6B
auguuuacugcau

SEQ ID NO: 170224 - RNA, 17 nt, Human herpesvirus 6B
auguugcuuauaagcaa

SEQ ID NO: 170225 - RNA, 19 nt, Human herpesvirus 6B
caaaacgagagucuacaca

SEQ ID NO: 170226 - RNA, 14 nt, Human herpesvirus 6B
caaaacuguuaaaa

SEQ ID NO: 170227 - RNA, 18 nt, Human herpesvirus 6B
caaaacuguuaaaagaga

SEQ ID NO: 170228 - RNA, 15 nt, Human herpesvirus 6B
auuuuuacucauaca

SEQ ID NO: 170229 - RNA, 13 nt, Human herpesvirus 6B
auuuuugacaaaa

SEQ ID NO: 170230 - RNA, 22 nt, Human herpesvirus 6B
auuuuguggcuauuugacaaua

SEQ ID NO: 170231 - RNA, 15 nt, Human herpesvirus 6B
auuuuguguccuuaa

SEQ ID NO: 170232 - RNA, 14 nt, Human herpesvirus 6B
auuuuggcuacaac

SEQ ID NO: 170233 - RNA, 14 nt, Human herpesvirus 6B
auuuggggaaaaua

SEQ ID NO: 170234 - RNA, 18 nt, Human herpesvirus 6B
auuuugaaaagguguugu

SEQ ID NO: 170235 - RNA, 19 nt, Human herpesvirus 6B
auuuugaaaagguguugug

SEQ ID NO: 170236 - RNA, 15 nt, Human herpesvirus 6B
auuuucguggaagac

SEQ ID NO: 170237 - RNA, 17 nt, Human herpesvirus 6B
auuuucguugaagaaua

SEQ ID NO: 170238 - RNA, 20 nt, Human herpesvirus 6B
auuuugaaagaacaguuuac

SEQ ID NO: 170239 - RNA, 22 nt, Human herpesvirus 6B
auuuugaaagaacaguuuaccu

SEQ ID NO: 170240 - RNA, 17 nt, Human herpesvirus 6B
auuuacaaaacaaauau

SEQ ID NO: 170241 - RNA, 14 nt, Human herpesvirus 6B
auuuacaaaagccu

SEQ ID NO: 170242 - RNA, 21 nt, Human herpesvirus 6B
auuuaauaaaauaacauguga

SEQ ID NO: 170243 - RNA, 17 nt, Human herpesvirus 6B
auuucuuuggagggaau

SEQ ID NO: 170244 - RNA, 18 nt, Human herpesvirus 6B
auuucuuauuaugugauu

SEQ ID NO: 170245 - RNA, 16 nt, Human herpesvirus 6B
auuugaauucugcucg

SEQ ID NO: 170246 - RNA, 17 nt, Human herpesvirus 6B
auuguucuucaacauau

SEQ ID NO: 170247 - RNA, 14 nt, Human herpesvirus 6B
auuguuuuuuacuu

SEQ ID NO: 170248 - RNA, 15 nt, Human herpesvirus 6B
auuuaacauccaaaa

SEQ ID NO: 170249 - RNA, 16 nt, Human herpesvirus 6B
auuuaacauccaaaau

SEQ ID NO: 170250 - RNA, 19 nt, Human herpesvirus 6B
auuuaacgcgucaacaaac

SEQ ID NO: 170251 - RNA, 13 nt, Human herpesvirus 6B
auuuaaaugucag

SEQ ID NO: 170252 - RNA, 15 nt, Human herpesvirus 6B
auuuaaaugucagug

SEQ ID NO: 170253 - RNA, 21 nt, Human herpesvirus 6B
auugcuuucucuuuuuaauuc

SEQ ID NO: 170254 - RNA, 23 nt, Human herpesvirus 6B
auugcuuucucuuuuuaauucca

SEQ ID NO: 170255 - RNA, 15 nt, Human herpesvirus 6B
auugcuucguuucuu

SEQ ID NO: 170256 - RNA, 21 nt, Human herpesvirus 6B
auugcgagaugguagugcuca

SEQ ID NO: 170257 - RNA, 13 nt, Human herpesvirus 6B
auugcuauagauu

SEQ ID NO: 170258 - RNA, 18 nt, Human herpesvirus 6B
auugcauaugucuguuau

SEQ ID NO: 170259 - RNA, 13 nt, Human herpesvirus 6B
auugcaugcauug

SEQ ID NO: 170260 - RNA, 18 nt, Human herpesvirus 6B
auugccaaaggcacugau

SEQ ID NO: 170261 - RNA, 15 nt, Human herpesvirus 6B
auugcacgcugggcu

SEQ ID NO: 170262 - RNA, 13 nt, Human herpesvirus 6B
auugcacccuauc

SEQ ID NO: 170263 - RNA, 14 nt, Human herpesvirus 6B
auugcaaccaauaa

SEQ ID NO: 170264 - RNA, 16 nt, Human herpesvirus 6B
auugauuagcaaucau

SEQ ID NO: 170265 - RNA, 15 nt, Human herpesvirus 6B
auugauuccaggugg

SEQ ID NO: 170266 - RNA, 17 nt, Human herpesvirus 6B
auucugacugcguuaca

SEQ ID NO: 170267 - RNA, 21 nt, Human herpesvirus 6B
auucugcagaagguggaaggu

SEQ ID NO: 170268 - RNA, 13 nt, Human herpesvirus 6B
auucugcauuuau

SEQ ID NO: 170269 - RNA, 17 nt, Human herpesvirus 6B
auucucaaguuagacua

SEQ ID NO: 170270 - RNA, 22 nt, Human herpesvirus 6B
auucucgugcgcaguguuauuc

SEQ ID NO: 170271 - RNA, 14 nt, Human herpesvirus 6B
auuaguuugugcag

SEQ ID NO: 170272 - RNA, 20 nt, Human herpesvirus 6B
auuauaaauucucugcaugu

SEQ ID NO: 170273 - RNA, 14 nt, Human herpesvirus 6B
auuauaagcaaaca

SEQ ID NO: 170274 - RNA, 21 nt, Human herpesvirus 6B
auuauaagcaaacauguaucc

SEQ ID NO: 170275 - RNA, 21 nt, Human herpesvirus 6B
auuagcaaucauuaacauaca

SEQ ID NO: 170276 - RNA, 17 nt, Human herpesvirus 6B
auuaggggacagagccu

SEQ ID NO: 170277 - RNA, 19 nt, Human herpesvirus 6B
auuauccaggcaugugauu

SEQ ID NO: 170278 - RNA, 17 nt, Human herpesvirus 6B
auuauagauagcuccaa

SEQ ID NO: 170279 - RNA, 23 nt, Human herpesvirus 6B
auuaucacaaaguuuaaguucuc

SEQ ID NO: 170280 - RNA, 15 nt, Human herpesvirus 6B
auucggaaaccauag

SEQ ID NO: 170281 - RNA, 20 nt, Human herpesvirus 6B
auucguaaguggguacaaug

SEQ ID NO: 170282 - RNA, 16 nt, Human herpesvirus 6B
auucguauacuuccuc

SEQ ID NO: 170283 - RNA, 21 nt, Human herpesvirus 6B
auucgucuuuuauauagacac

SEQ ID NO: 170284 - RNA, 21 nt, Human herpesvirus 6B
auucggcugcuuauaugcagc

SEQ ID NO: 170285 - RNA, 18 nt, Human herpesvirus 6B
auuagaauaauuauggac

SEQ ID NO: 170286 - RNA, 21 nt, Human herpesvirus 6B
auuacuaacgacggaauuuac

SEQ ID NO: 170287 - RNA, 17 nt, Human herpesvirus 6B
auuacuaauguggauuc

SEQ ID NO: 170288 - RNA, 22 nt, Human herpesvirus 6B
auuacacugucuuguaguauau

SEQ ID NO: 170289 - RNA, 23 nt, Human herpesvirus 6B
auuaccaguagauggugcuauua

SEQ ID NO: 170290 - RNA, 21 nt, Human herpesvirus 6B
auuacccaucguucuuaacau

SEQ ID NO: 170291 - RNA, 15 nt, Human herpesvirus 6B
auuaccucugcaaua

SEQ ID NO: 170292 - RNA, 16 nt, Human herpesvirus 6B
agcuagacgugucuuc

SEQ ID NO: 170293 - RNA, 18 nt, Human herpesvirus 6B
agcuagacgugucuucau

SEQ ID NO: 170294 - RNA, 14 nt, Human herpesvirus 6B
agcuagagaaaauu

SEQ ID NO: 170295 - RNA, 23 nt, Human herpesvirus 6B
agcuagagaaaauuauagcuuca

SEQ ID NO: 170296 - RNA, 20 nt, Human herpesvirus 6B
agcguuuacaaaacuguuaa

SEQ ID NO: 170297 - RNA, 22 nt, Human herpesvirus 6B
agcuaaacgccgacaacgugcu

SEQ ID NO: 170298 - RNA, 16 nt, Human herpesvirus 6B
agcgguaaaauggagu

SEQ ID NO: 170299 - RNA, 20 nt, Human herpesvirus 6B
agcgugugauucaguaucug

SEQ ID NO: 170300 - RNA, 15 nt, Human herpesvirus 6B
agcguggauaucuca

SEQ ID NO: 170301 - RNA, 20 nt, Human herpesvirus 6B
agcuauaaaaacacacauca

SEQ ID NO: 170302 - RNA, 19 nt, Human herpesvirus 6B
agcuauaugcaucucuacu

SEQ ID NO: 170303 - RNA, 18 nt, Human herpesvirus 6B
agcucaguguuugccaac

SEQ ID NO: 170304 - RNA, 18 nt, Human herpesvirus 6B
agcucauuugugcuagau

SEQ ID NO: 170305 - RNA, 19 nt, Human herpesvirus 6B
agcggcaguuuuuuuucaa

SEQ ID NO: 170306 - RNA, 14 nt, Human herpesvirus 6B
agcgcccgaugcca

SEQ ID NO: 170307 - RNA, 22 nt, Human herpesvirus 6B
agcgccaacggaaagcaucuca

SEQ ID NO: 170308 - RNA, 14 nt, Human herpesvirus 6B
agcgauauggaaac

SEQ ID NO: 170309 - RNA, 23 nt, Human herpesvirus 6B
agcgagacaauaacaauuauuca

SEQ ID NO: 170310 - RNA, 12 nt, Human herpesvirus 6B
agccuucugucu

SEQ ID NO: 170311 - RNA, 22 nt, Human herpesvirus 6B
agccuuuccccagcacaccucg

SEQ ID NO: 170312 - RNA, 12 nt, Human herpesvirus 6B
agcgaagucaug

SEQ ID NO: 170313 - RNA, 16 nt, Human herpesvirus 6B
agccuuaucgaaagac

SEQ ID NO: 170314 - RNA, 12 nt, Human herpesvirus 6B
agccagacaucu

SEQ ID NO: 170315 - RNA, 16 nt, Human herpesvirus 6B
agccauuucgccaaaa

SEQ ID NO: 170316 - RNA, 14 nt, Human herpesvirus 6B
agccaugacaagaa

SEQ ID NO: 170317 - RNA, 16 nt, Human herpesvirus 6B
agcccggaagugugau

SEQ ID NO: 170318 - RNA, 23 nt, Human herpesvirus 6B
agcccuucaccgucucugaagca

SEQ ID NO: 170319 - RNA, 23 nt, Human herpesvirus 6B
agccuaaacggagacugcacaga

SEQ ID NO: 170320 - RNA, 22 nt, Human herpesvirus 6B
agccgauaaauuugccaccaga

SEQ ID NO: 170321 - RNA, 23 nt, Human herpesvirus 6B
agccuagcgauuaguuugugcag

SEQ ID NO: 170322 - RNA, 15 nt, Human herpesvirus 6B
agccuauuaagcagc

SEQ ID NO: 170323 - RNA, 17 nt, Human herpesvirus 6B
agaugaucagcauucac

SEQ ID NO: 170324 - RNA, 19 nt, Human herpesvirus 6B
agaugaucagcauucacuc

SEQ ID NO: 170325 - RNA, 20 nt, Human herpesvirus 6B
agaugaucagcauucacucu

SEQ ID NO: 170326 - RNA, 13 nt, Human herpesvirus 6B
agccaacauacac

SEQ ID NO: 170327 - RNA, 17 nt, Human herpesvirus 6B
agaucugcucaugucag

SEQ ID NO: 170328 - RNA, 20 nt, Human herpesvirus 6B
agauccccgccugcagcgau

SEQ ID NO: 170329 - RNA, 21 nt, Human herpesvirus 6B
agaucauuaaaucggacaaug

SEQ ID NO: 170330 - RNA, 22 nt, Human herpesvirus 6B
agauccguccauuaaauccuag

SEQ ID NO: 170331 - RNA, 14 nt, Human herpesvirus 6B
agauacacugcaag

SEQ ID NO: 170332 - RNA, 15 nt, Human herpesvirus 6B
agauacgugauacuc

SEQ ID NO: 170333 - RNA, 13 nt, Human herpesvirus 6B
agauaauuuccaa

SEQ ID NO: 170334 - RNA, 14 nt, Human herpesvirus 6B
agauaauuuccaau

SEQ ID NO: 170335 - RNA, 22 nt, Human herpesvirus 6B
agauaacucagauucgcaagac

SEQ ID NO: 170336 - RNA, 15 nt, Human herpesvirus 6B
agauaauaaaacacg

SEQ ID NO: 170337 - RNA, 20 nt, Human herpesvirus 6B
agaguuuuccuugacaguuc

SEQ ID NO: 170338 - RNA, 21 nt, Human herpesvirus 6B
agggaagguuuguaaggacaa

SEQ ID NO: 170339 - RNA, 16 nt, Human herpesvirus 6B
aggccggcacauacac

SEQ ID NO: 170340 - RNA, 18 nt, Human herpesvirus 6B
aggcuuaaugaaugugcu

SEQ ID NO: 170341 - RNA, 11 nt, Human herpesvirus 6B
aggcagaucau

SEQ ID NO: 170342 - RNA, 21 nt, Human herpesvirus 6B
aggccaauuuaugucauuuca

SEQ ID NO: 170343 - RNA, 22 nt, Human herpesvirus 6B
aggccaauuuaugucauuucau

SEQ ID NO: 170344 - RNA, 17 nt, Human herpesvirus 6B
aggccauuggauuccau

SEQ ID NO: 170345 - RNA, 20 nt, Human herpesvirus 6B
aggccgcguaggcaugucug

SEQ ID NO: 170346 - RNA, 15 nt, Human herpesvirus 6B
aggagcauucacaua

SEQ ID NO: 170347 - RNA, 15 nt, Human herpesvirus 6B
aggagccaacauaca

SEQ ID NO: 170348 - RNA, 17 nt, Human herpesvirus 6B
aggagccaacauacaca

SEQ ID NO: 170349 - RNA, 16 nt, Human herpesvirus 6B
aggagcccacagcauc

SEQ ID NO: 170350 - RNA, 20 nt, Human herpesvirus 6B
aggauguuugugacucugaa

SEQ ID NO: 170351 - RNA, 20 nt, Human herpesvirus 6B
aggagcuaguuacggggaag

SEQ ID NO: 170352 - RNA, 18 nt, Human herpesvirus 6B
aggagaccaugccauuga

SEQ ID NO: 170353 - RNA, 13 nt, Human herpesvirus 6B
aggauuugcuugu

SEQ ID NO: 170354 - RNA, 16 nt, Human herpesvirus 6B
aggauuugcuugucac

SEQ ID NO: 170355 - RNA, 12 nt, Human herpesvirus 6B
aggaaugugcag

SEQ ID NO: 170356 - RNA, 15 nt, Human herpesvirus 6B
aggaauucacuuuga

SEQ ID NO: 170357 - RNA, 15 nt, Human herpesvirus 6B
aguauuaaugucuuc

SEQ ID NO: 170358 - RNA, 13 nt, Human herpesvirus 6B
agucaaugcaauu

SEQ ID NO: 170359 - RNA, 17 nt, Human herpesvirus 6B
agucaaugcaauuccac

SEQ ID NO: 170360 - RNA, 12 nt, Human herpesvirus 6B
agucaugcacuc

SEQ ID NO: 170361 - RNA, 14 nt, Human herpesvirus 6B
agucaugcacuccg

SEQ ID NO: 170362 - RNA, 14 nt, Human herpesvirus 6B
agucaugcuucuuu

SEQ ID NO: 170363 - RNA, 13 nt, Human herpesvirus 6B
agucaucauacaa

SEQ ID NO: 170364 - RNA, 15 nt, Human herpesvirus 6B
agucaccgcauauca

SEQ ID NO: 170365 - RNA, 15 nt, Human herpesvirus 6B
agucacguacauaaa

SEQ ID NO: 170366 - RNA, 14 nt, Human herpesvirus 6B
agucguuacaguaa

SEQ ID NO: 170367 - RNA, 14 nt, Human herpesvirus 6B
agucuacgcauuca

SEQ ID NO: 170368 - RNA, 15 nt, Human herpesvirus 6B
agucuacgcauucac

SEQ ID NO: 170369 - RNA, 18 nt, Human herpesvirus 6B
agucguuuuuggauuucu

SEQ ID NO: 170370 - RNA, 14 nt, Human herpesvirus 6B
aguccuucuuuagu

SEQ ID NO: 170371 - RNA, 19 nt, Human herpesvirus 6B
aguccuuguuaguuuauac

SEQ ID NO: 170372 - RNA, 18 nt, Human herpesvirus 6B
aguccagaaguccuucau

SEQ ID NO: 170373 - RNA, 15 nt, Human herpesvirus 6B
aguacauagaaucuc

SEQ ID NO: 170374 - RNA, 16 nt, Human herpesvirus 6B
aguaagucuucauuaa

SEQ ID NO: 170375 - RNA, 19 nt, Human herpesvirus 6B
agguacacaauacacagua

SEQ ID NO: 170376 - RNA, 21 nt, Human herpesvirus 6B
agguacacaauacacaguaga

SEQ ID NO: 170377 - RNA, 21 nt, Human herpesvirus 6B
auaaaaaaaaagacaucacau

SEQ ID NO: 170378 - RNA, 14 nt, Human herpesvirus 6B
auaaaaaaccaaaa

SEQ ID NO: 170379 - RNA, 18 nt, Human herpesvirus 6B
auaaaaaagugcaugaug

SEQ ID NO: 170380 - RNA, 20 nt, Human herpesvirus 6B
auaaaaaagugcaugaugaa

SEQ ID NO: 170381 - RNA, 20 nt, Human herpesvirus 6B
aguuuuuuaaaagugcaaca

SEQ ID NO: 170382 - RNA, 14 nt, Human herpesvirus 6B
aguuuuuugcaauu

SEQ ID NO: 170383 - RNA, 16 nt, Human herpesvirus 6B
aguuuuugaccggaau

SEQ ID NO: 170384 - RNA, 18 nt, Human herpesvirus 6B
aguuuugagaaagccgau

SEQ ID NO: 170385 - RNA, 15 nt, Human herpesvirus 6B
auaaaaacuaaugcg

SEQ ID NO: 170386 - RNA, 23 nt, Human herpesvirus 6B
auaaaaacucaauucugaaauca

SEQ ID NO: 170387 - RNA, 19 nt, Human herpesvirus 6B
agugaaagcagucaguaau

SEQ ID NO: 170388 - RNA, 22 nt, Human herpesvirus 6B
agugaaacggaguuaagacauu

SEQ ID NO: 170389 - RNA, 21 nt, Human herpesvirus 6B
aguuucuguuuuucucauaaa

SEQ ID NO: 170390 - RNA, 18 nt, Human herpesvirus 6B
agugaaucaaauaccuaa

SEQ ID NO: 170391 - RNA, 20 nt, Human herpesvirus 6B
agugacaucuuuuaucgcug

SEQ ID NO: 170392 - RNA, 23 nt, Human herpesvirus 6B
agucuuauaacaccaguacuuca

SEQ ID NO: 170393 - RNA, 17 nt, Human herpesvirus 6B
agucuucaauaaaaacu

SEQ ID NO: 170394 - RNA, 12 nt, Human herpesvirus 6B
agucuucuggau

SEQ ID NO: 170395 - RNA, 20 nt, Human herpesvirus 6B
agucuucuggauacugauga

SEQ ID NO: 170396 - RNA, 21 nt, Human herpesvirus 6B
agucuucuggauacugaugaa

SEQ ID NO: 170397 - RNA, 22 nt, Human herpesvirus 6B
agucugaauuuaaugcaaaauc

SEQ ID NO: 170398 - RNA, 13 nt, Human herpesvirus 6B
agucucugucuuc

SEQ ID NO: 170399 - RNA, 14 nt, Human herpesvirus 6B
agucucugucuucc

SEQ ID NO: 170400 - RNA, 12 nt, Human herpesvirus 6B
agucugcuaaaa

SEQ ID NO: 170401 - RNA, 13 nt, Human herpesvirus 6B
agucuaugcagcg

SEQ ID NO: 170402 - RNA, 19 nt, Human herpesvirus 6B
agucucagcaaucaccauc

SEQ ID NO: 170403 - RNA, 20 nt, Human herpesvirus 6B
agucucagcaaucaccauca

SEQ ID NO: 170404 - RNA, 22 nt, Human herpesvirus 6B
agucucaggagaggaugaagaa

SEQ ID NO: 170405 - RNA, 21 nt, Human herpesvirus 6B
auaaagugccgugagugcuau

SEQ ID NO: 170406 - RNA, 12 nt, Human herpesvirus 6B
auaaaguuaaag

SEQ ID NO: 170407 - RNA, 19 nt, Human herpesvirus 6B
auaaaggcuaaacacugac

SEQ ID NO: 170408 - RNA, 18 nt, Human herpesvirus 6B
auaaauggcauucuugca

SEQ ID NO: 170409 - RNA, 22 nt, Human herpesvirus 6B
auaaauggcauucuugcagauu

SEQ ID NO: 170410 - RNA, 18 nt, Human herpesvirus 6B
auaaauggcggacccgac

SEQ ID NO: 170411 - RNA, 18 nt, Human herpesvirus 6B
auaacgacaaaagacaaa

SEQ ID NO: 170412 - RNA, 20 nt, Human herpesvirus 6B
auaacgagaaagaaaaccag

SEQ ID NO: 170413 - RNA, 14 nt, Human herpesvirus 6B
auaagaaugcuggc

SEQ ID NO: 170414 - RNA, 17 nt, Human herpesvirus 6B
auaagaucuacagagua

SEQ ID NO: 170415 - RNA, 15 nt, Human herpesvirus 6B
auaacuuuucuauca

SEQ ID NO: 170416 - RNA, 20 nt, Human herpesvirus 6B
auaacuuuucuaucacuuau

SEQ ID NO: 170417 - RNA, 16 nt, Human herpesvirus 6B
auaagaaacauuauac

SEQ ID NO: 170418 - RNA, 19 nt, Human herpesvirus 6B
auaagcaaaacucuauucc

SEQ ID NO: 170419 - RNA, 15 nt, Human herpesvirus 6B
auaagcaaacaugua

SEQ ID NO: 170420 - RNA, 16 nt, Human herpesvirus 6B
auaagucaucauacaa

SEQ ID NO: 170421 - RNA, 15 nt, Human herpesvirus 6B
auaaguuaauuccag

SEQ ID NO: 170422 - RNA, 21 nt, Human herpesvirus 6B
auaauuagaauaggcgucuca

SEQ ID NO: 170423 - RNA, 16 nt, Human herpesvirus 6B
auaauuauggacaacg

SEQ ID NO: 170424 - RNA, 17 nt, Human herpesvirus 6B
auaauuggaacuaugaa

SEQ ID NO: 170425 - RNA, 19 nt, Human herpesvirus 6B
auagacgacgcagauuuac

SEQ ID NO: 170426 - RNA, 21 nt, Human herpesvirus 6B
auagacauuuugugauuccuu

SEQ ID NO: 170427 - RNA, 15 nt, Human herpesvirus 6B
auagaccaaccagca

SEQ ID NO: 170428 - RNA, 23 nt, Human herpesvirus 6B
auagaggaugcuuugcuguuuac

SEQ ID NO: 170429 - RNA, 20 nt, Human herpesvirus 6B
auagauggguaagugccuau

SEQ ID NO: 170430 - RNA, 19 nt, Human herpesvirus 6B
auagaugaucagcauucac

SEQ ID NO: 170431 - RNA, 15 nt, Human herpesvirus 6B
auagaguucaucuaa

SEQ ID NO: 170432 - RNA, 16 nt, Human herpesvirus 6B
auacguuaaauaucua

SEQ ID NO: 170433 - RNA, 14 nt, Human herpesvirus 6B
auacggagcacuuu

SEQ ID NO: 170434 - RNA, 16 nt, Human herpesvirus 6B
auacuacagugacuuu

SEQ ID NO: 170435 - RNA, 22 nt, Human herpesvirus 6B
auacuauuuuaguuacacauuc

SEQ ID NO: 170436 - RNA, 21 nt, Human herpesvirus 6B
auacuauaaacaauuguauuc

SEQ ID NO: 170437 - RNA, 20 nt, Human herpesvirus 6B
auacuauauauacaagccau

SEQ ID NO: 170438 - RNA, 14 nt, Human herpesvirus 6B
auacugaugaauuu

SEQ ID NO: 170439 - RNA, 16 nt, Human herpesvirus 6B
auacuguguaacucuu

SEQ ID NO: 170440 - RNA, 22 nt, Human herpesvirus 6B
auacagauguguauuauguaaa

SEQ ID NO: 170441 - RNA, 21 nt, Human herpesvirus 6B
auacagcaauaaaauucacag

SEQ ID NO: 170442 - RNA, 15 nt, Human herpesvirus 6B
auacacucucguagu

SEQ ID NO: 170443 - RNA, 15 nt, Human herpesvirus 6B
auacacuaacaggau

SEQ ID NO: 170444 - RNA, 16 nt, Human herpesvirus 6B
auacaaugacuaucaa

SEQ ID NO: 170445 - RNA, 20 nt, Human herpesvirus 6B
auacaagccaugacaagaaa

SEQ ID NO: 170446 - RNA, 20 nt, Human herpesvirus 6B
auaccgagcgggcuccgucg

SEQ ID NO: 170447 - RNA, 15 nt, Human herpesvirus 6B
auacccgauguucuc

SEQ ID NO: 170448 - RNA, 20 nt, Human herpesvirus 6B
auacgaggaugaaguuccac

SEQ ID NO: 170449 - RNA, 12 nt, Human herpesvirus 6B
auaccauuuuau

SEQ ID NO: 170450 - RNA, 22 nt, Human herpesvirus 6B
auacgcaggauuauaaaaacac

SEQ ID NO: 170451 - RNA, 23 nt, Human herpesvirus 6B
auacgcaggauuauaaaaacaca

SEQ ID NO: 170452 - RNA, 21 nt, Human herpesvirus 6B
auacaucauuaaaauauucua

SEQ ID NO: 170453 - RNA, 14 nt, Human herpesvirus 6B
auaccaauuccuua

SEQ ID NO: 170454 - RNA, 14 nt, Human herpesvirus 6B
aucugagacaguca

SEQ ID NO: 170455 - RNA, 20 nt, Human herpesvirus 6B
aucugacaaccuugacagau

SEQ ID NO: 170456 - RNA, 21 nt, Human herpesvirus 6B
aucugacaaccuugacagaua

SEQ ID NO: 170457 - RNA, 18 nt, Human herpesvirus 6B
aucugagugaucugauuc

SEQ ID NO: 170458 - RNA, 18 nt, Human herpesvirus 6B
aucugaaaucgcauuucu

SEQ ID NO: 170459 - RNA, 13 nt, Human herpesvirus 6B
aucucgugcaaaa

SEQ ID NO: 170460 - RNA, 16 nt, Human herpesvirus 6B
aucuggaugguugugu

SEQ ID NO: 170461 - RNA, 20 nt, Human herpesvirus 6B
aucuguaagauuaaauguga

SEQ ID NO: 170462 - RNA, 16 nt, Human herpesvirus 6B
aucugauucgacaaau

SEQ ID NO: 170463 - RNA, 19 nt, Human herpesvirus 6B
aucugccccccuucaucca

SEQ ID NO: 170464 - RNA, 16 nt, Human herpesvirus 6B
aucugcugcuucuucu

SEQ ID NO: 170465 - RNA, 12 nt, Human herpesvirus 6B
aucucacgucac

SEQ ID NO: 170466 - RNA, 15 nt, Human herpesvirus 6B
aucucauaugcauca

SEQ ID NO: 170467 - RNA, 17 nt, Human herpesvirus 6B
aucucauaugcaucaga

SEQ ID NO: 170468 - RNA, 16 nt, Human herpesvirus 6B
aucucaaaaaacauau

SEQ ID NO: 170469 - RNA, 17 nt, Human herpesvirus 6B
aucucaaaaaacauaua

SEQ ID NO: 170470 - RNA, 20 nt, Human herpesvirus 6B
aucucaaaaaacauauaaag

SEQ ID NO: 170471 - RNA, 22 nt, Human herpesvirus 6B
aucucaaauuuuccaaacauua

SEQ ID NO: 170472 - RNA, 15 nt, Human herpesvirus 6B
auccaauaagaaaca

SEQ ID NO: 170473 - RNA, 12 nt, Human herpesvirus 6B
auccacccauau

SEQ ID NO: 170474 - RNA, 14 nt, Human herpesvirus 6B
auccaacucuacua

SEQ ID NO: 170475 - RNA, 17 nt, Human herpesvirus 6B
auccuuaaaugacacag

SEQ ID NO: 170476 - RNA, 18 nt, Human herpesvirus 6B
auccuuaaaugacacaga

SEQ ID NO: 170477 - RNA, 16 nt, Human herpesvirus 6B
aucuacccaccugucc

SEQ ID NO: 170478 - RNA, 14 nt, Human herpesvirus 6B
auccuauaaauacu

SEQ ID NO: 170479 - RNA, 23 nt, Human herpesvirus 6B
auccuauucauaacagauggcac

SEQ ID NO: 170480 - RNA, 15 nt, Human herpesvirus 6B
auccguugagugugc

SEQ ID NO: 170481 - RNA, 20 nt, Human herpesvirus 6B
auaugcugccauuauugaua

SEQ ID NO: 170482 - RNA, 14 nt, Human herpesvirus 6B
auaugcaggugcug

SEQ ID NO: 170483 - RNA, 21 nt, Human herpesvirus 6B
auaugcaggugcugcuaaaag

SEQ ID NO: 170484 - RNA, 12 nt, Human herpesvirus 6B
auaugcaucucu

SEQ ID NO: 170485 - RNA, 23 nt, Human herpesvirus 6B
auaugaucgccgcuaggcagauc

SEQ ID NO: 170486 - RNA, 14 nt, Human herpesvirus 6B
auaugaaugaucac

SEQ ID NO: 170487 - RNA, 18 nt, Human herpesvirus 6B
auaugaggauuugcuugu

SEQ ID NO: 170488 - RNA, 21 nt, Human herpesvirus 6B
auaucugaaaucgcauuucuc

SEQ ID NO: 170489 - RNA, 21 nt, Human herpesvirus 6B
auaucuugaaaucuaccauaa

SEQ ID NO: 170490 - RNA, 20 nt, Human herpesvirus 6B
auagauuuguccguauacag

SEQ ID NO: 170491 - RNA, 19 nt, Human herpesvirus 6B
auagauuagaaauuacaua

SEQ ID NO: 170492 - RNA, 22 nt, Human herpesvirus 6B
auagauuauacgaaauuccgaa

SEQ ID NO: 170493 - RNA, 20 nt, Human herpesvirus 6B
auaucuacugcaguccagaa

SEQ ID NO: 170494 - RNA, 17 nt, Human herpesvirus 6B
auagauuucauacugua

SEQ ID NO: 170495 - RNA, 18 nt, Human herpesvirus 6B
aucaaagagguacucauc

SEQ ID NO: 170496 - RNA, 22 nt, Human herpesvirus 6B
aucaaaauaaaaauuuuaccua

SEQ ID NO: 170497 - RNA, 18 nt, Human herpesvirus 6B
aucaaaaaaugcuuuuau

SEQ ID NO: 170498 - RNA, 18 nt, Human herpesvirus 6B
auauuuugaaaagguguu

SEQ ID NO: 170499 - RNA, 18 nt, Human herpesvirus 6B
auauuuuuucagcuuuca

SEQ ID NO: 170500 - RNA, 19 nt, Human herpesvirus 6B
auauuuuuucagcuuucau

SEQ ID NO: 170501 - RNA, 14 nt, Human herpesvirus 6B
aucaaaaaaaugau

SEQ ID NO: 170502 - RNA, 23 nt, Human herpesvirus 6B
auauuuccauaaguuaauuccag

SEQ ID NO: 170503 - RNA, 17 nt, Human herpesvirus 6B
auauuuggauggccgau

SEQ ID NO: 170504 - RNA, 19 nt, Human herpesvirus 6B
auauuucguguucgccaua

SEQ ID NO: 170505 - RNA, 18 nt, Human herpesvirus 6B
auauugccuucgcagauu

SEQ ID NO: 170506 - RNA, 21 nt, Human herpesvirus 6B
aucaggguuuuguggaaaaac

SEQ ID NO: 170507 - RNA, 21 nt, Human herpesvirus 6B
aucagcauuuggcagccuaaa

SEQ ID NO: 170508 - RNA, 15 nt, Human herpesvirus 6B
auccaaaauacacua

SEQ ID NO: 170509 - RNA, 17 nt, Human herpesvirus 6B
auccaaaauacacuaac

SEQ ID NO: 170510 - RNA, 20 nt, Human herpesvirus 6B
aucagagcgggcuauaauca

SEQ ID NO: 170511 - RNA, 19 nt, Human herpesvirus 6B
aucagaugaauugugcgug

SEQ ID NO: 170512 - RNA, 12 nt, Human herpesvirus 6B
aucacuuucaca

SEQ ID NO: 170513 - RNA, 12 nt, Human herpesvirus 6B
aucaaucucuau

SEQ ID NO: 170514 - RNA, 16 nt, Human herpesvirus 6B
aucaagcaaguuccau

SEQ ID NO: 170515 - RNA, 16 nt, Human herpesvirus 6B
aucacaaaacuguacc

SEQ ID NO: 170516 - RNA, 19 nt, Human herpesvirus 6B
aucacaaaacuguaccuga

SEQ ID NO: 170517 - RNA, 20 nt, Human herpesvirus 6B
aucacaaaacuguaccugaa

SEQ ID NO: 170518 - RNA, 20 nt, Human herpesvirus 6B
aucaacuauuuaacauccaa

SEQ ID NO: 170519 - RNA, 22 nt, Human herpesvirus 6B
aucaaaguucggaucugugaca

SEQ ID NO: 170520 - RNA, 18 nt, Human herpesvirus 6B
aucaaauaccuaauucca

SEQ ID NO: 170521 - RNA, 21 nt, Human herpesvirus 6B
aucaacaauguccaauuacuc

SEQ ID NO: 170522 - RNA, 19 nt, Human herpesvirus 6B
uuauaaugugaacuaaaua

SEQ ID NO: 170523 - RNA, 23 nt, Human herpesvirus 6B
uuauaauuagaauaggcgucuca

SEQ ID NO: 170524 - RNA, 19 nt, Human herpesvirus 6B
uuauaagucaucauacaau

SEQ ID NO: 170525 - RNA, 14 nt, Human herpesvirus 6B
uuauagacuaaacu

SEQ ID NO: 170526 - RNA, 18 nt, Human herpesvirus 6B
uuauacuggcaaagcaaa

SEQ ID NO: 170527 - RNA, 17 nt, Human herpesvirus 6B
uuauacagaugccaagu

SEQ ID NO: 170528 - RNA, 17 nt, Human herpesvirus 6B
uuagaauaggcgucuca

SEQ ID NO: 170529 - RNA, 14 nt, Human herpesvirus 6B
uuaguuuacauaag

SEQ ID NO: 170530 - RNA, 16 nt, Human herpesvirus 6B
uuauaaaaaacgugga

SEQ ID NO: 170531 - RNA, 13 nt, Human herpesvirus 6B
uuauaaaaacaca

SEQ ID NO: 170532 - RNA, 13 nt, Human herpesvirus 6B
uuauaaaagaagc

SEQ ID NO: 170533 - RNA, 17 nt, Human herpesvirus 6B
uucaaagugaauuccug

SEQ ID NO: 170534 - RNA, 15 nt, Human herpesvirus 6B
uucaaauacaccuca

SEQ ID NO: 170535 - RNA, 21 nt, Human herpesvirus 6B
uucaaagauagacagugaaaa

SEQ ID NO: 170536 - RNA, 15 nt, Human herpesvirus 6B
uucaaauguagcaaa

SEQ ID NO: 170537 - RNA, 19 nt, Human herpesvirus 6B
uuauauacguuaaauaucu

SEQ ID NO: 170538 - RNA, 20 nt, Human herpesvirus 6B
uuauauacguuaaauaucua

SEQ ID NO: 170539 - RNA, 22 nt, Human herpesvirus 6B
uuauuuugggugugacuuauau

SEQ ID NO: 170540 - RNA, 23 nt, Human herpesvirus 6B
uuacaaucauguuuauugucaaa

SEQ ID NO: 170541 - RNA, 22 nt, Human herpesvirus 6B
uuacaaugaguuuuuugcaauu

SEQ ID NO: 170542 - RNA, 17 nt, Human herpesvirus 6B
uuacaauguucuugaca

SEQ ID NO: 170543 - RNA, 13 nt, Human herpesvirus 6B
uuacugacaccac

SEQ ID NO: 170544 - RNA, 20 nt, Human herpesvirus 6B
uuacugacaccacauaacaa

SEQ ID NO: 170545 - RNA, 21 nt, Human herpesvirus 6B
uuacugacaccacauaacaaa

SEQ ID NO: 170546 - RNA, 16 nt, Human herpesvirus 6B
uuagaaaaaagugcaa

SEQ ID NO: 170547 - RNA, 22 nt, Human herpesvirus 6B
uuagaacaggaagcgccauaaa

SEQ ID NO: 170548 - RNA, 23 nt, Human herpesvirus 6B
uuagaacaggaagcgccauaaaa

SEQ ID NO: 170549 - RNA, 15 nt, Human herpesvirus 6B
uuacuuacaacugaa

SEQ ID NO: 170550 - RNA, 12 nt, Human herpesvirus 6B
uuaaugcauuca

SEQ ID NO: 170551 - RNA, 22 nt, Human herpesvirus 6B
uuaaugucacugucgaauaucu

SEQ ID NO: 170552 - RNA, 13 nt, Human herpesvirus 6B
uuaacuuacuuaa

SEQ ID NO: 170553 - RNA, 22 nt, Human herpesvirus 6B
uuaacuuaucaacuauacuuaa

SEQ ID NO: 170554 - RNA, 18 nt, Human herpesvirus 6B
uuaagaagaaacaaguug

SEQ ID NO: 170555 - RNA, 15 nt, Human herpesvirus 6B
uuaauucaaauguag

SEQ ID NO: 170556 - RNA, 10 nt, Human herpesvirus 6B
uuaauuccaa

SEQ ID NO: 170557 - RNA, 17 nt, Human herpesvirus 6B
uuacaaaacaaauaucg

SEQ ID NO: 170558 - RNA, 21 nt, Human herpesvirus 6B
uuacaaaccuucccuaucaca

SEQ ID NO: 170559 - RNA, 18 nt, Human herpesvirus 6B
uuacaacugaaacuccac

SEQ ID NO: 170560 - RNA, 21 nt, Human herpesvirus 6B
uguuauggggaagaucuauga

SEQ ID NO: 170561 - RNA, 22 nt, Human herpesvirus 6B
uguuaaaguauguauaauauaa

SEQ ID NO: 170562 - RNA, 16 nt, Human herpesvirus 6B
uguguuggucauuuca

SEQ ID NO: 170563 - RNA, 18 nt, Human herpesvirus 6B
uguuaaaagagaauacua

SEQ ID NO: 170564 - RNA, 19 nt, Human herpesvirus 6B
uguuaaaauaaaguuccaa

SEQ ID NO: 170565 - RNA, 16 nt, Human herpesvirus 6B
uguguucuaacacaua

SEQ ID NO: 170566 - RNA, 19 nt, Human herpesvirus 6B
uguguucuuacaauguucu

SEQ ID NO: 170567 - RNA, 22 nt, Human herpesvirus 6B
uguucaguguucuggcuuguca

SEQ ID NO: 170568 - RNA, 16 nt, Human herpesvirus 6B
uguucgauguacaguu

SEQ ID NO: 170569 - RNA, 16 nt, Human herpesvirus 6B
uguuccagauguaggu

SEQ ID NO: 170570 - RNA, 18 nt, Human herpesvirus 6B
uguucguugucugacuua

SEQ ID NO: 170571 - RNA, 19 nt, Human herpesvirus 6B
uguucugccuauaugcgaa

SEQ ID NO: 170572 - RNA, 15 nt, Human herpesvirus 6B
uguugaaugcuuacc

SEQ ID NO: 170573 - RNA, 13 nt, Human herpesvirus 6B
uguugacuuuuaa

SEQ ID NO: 170574 - RNA, 19 nt, Human herpesvirus 6B
uguugaguuuaucgugcaa

SEQ ID NO: 170575 - RNA, 22 nt, Human herpesvirus 6B
uuaacuaagauugugcaguucu

SEQ ID NO: 170576 - RNA, 19 nt, Human herpesvirus 6B
uuaacuaagauugugcagu

SEQ ID NO: 170577 - RNA, 16 nt, Human herpesvirus 6B
uuaacaauucucucaa

SEQ ID NO: 170578 - RNA, 13 nt, Human herpesvirus 6B
uuaacauacagau

SEQ ID NO: 170579 - RNA, 13 nt, Human herpesvirus 6B
uuaacacauacau

SEQ ID NO: 170580 - RNA, 16 nt, Human herpesvirus 6B
uuaacauugugagaac

SEQ ID NO: 170581 - RNA, 19 nt, Human herpesvirus 6B
uuaaaacucccagcauuuu

SEQ ID NO: 170582 - RNA, 23 nt, Human herpesvirus 6B
uuaacaaaaugguuaugacaaag

SEQ ID NO: 170583 - RNA, 17 nt, Human herpesvirus 6B
uguugcaguuuaaggau

SEQ ID NO: 170584 - RNA, 21 nt, Human herpesvirus 6B
uguuuuuuuuuuucuguguau

SEQ ID NO: 170585 - RNA, 14 nt, Human herpesvirus 6B
uuaaaaaaauagca

SEQ ID NO: 170586 - RNA, 17 nt, Human herpesvirus 6B
uguuuuuaaagcacaga

SEQ ID NO: 170587 - RNA, 17 nt, Human herpesvirus 6B
ugugucuuuguuccaga

SEQ ID NO: 170588 - RNA, 15 nt, Human herpesvirus 6B
uguguccuuaaauua

SEQ ID NO: 170589 - RNA, 14 nt, Human herpesvirus 6B
ugugucgaugucuu

SEQ ID NO: 170590 - RNA, 13 nt, Human herpesvirus 6B
uguggacaaugau

SEQ ID NO: 170591 - RNA, 20 nt, Human herpesvirus 6B
uguggcagcaauccaaucaa

SEQ ID NO: 170592 - RNA, 11 nt, Human herpesvirus 6B
ugugcagagug

SEQ ID NO: 170593 - RNA, 14 nt, Human herpesvirus 6B
ugugcaguuacaau

SEQ ID NO: 170594 - RNA, 15 nt, Human herpesvirus 6B
ugugcaguucuuaca

SEQ ID NO: 170595 - RNA, 19 nt, Human herpesvirus 6B
ugugcaguucuuacauauu

SEQ ID NO: 170596 - RNA, 22 nt, Human herpesvirus 6B
ugugccuacuuuggauuuugau

SEQ ID NO: 170597 - RNA, 18 nt, Human herpesvirus 6B
ugugcgaauuguguugcu

SEQ ID NO: 170598 - RNA, 19 nt, Human herpesvirus 6B
ugugcugagcacuugucaa

SEQ ID NO: 170599 - RNA, 18 nt, Human herpesvirus 6B
ugugaaucugcugaucuu

SEQ ID NO: 170600 - RNA, 19 nt, Human herpesvirus 6B
ugugacacaauuucugacu

SEQ ID NO: 170601 - RNA, 21 nt, Human herpesvirus 6B
ugugacacaauuucugacucu

SEQ ID NO: 170602 - RNA, 22 nt, Human herpesvirus 6B
ugugacacaauuucugacucuc

SEQ ID NO: 170603 - RNA, 15 nt, Human herpesvirus 6B
ugugaugccuugaug

SEQ ID NO: 170604 - RNA, 14 nt, Human herpesvirus 6B
ugugauuaugccaa

SEQ ID NO: 170605 - RNA, 23 nt, Human herpesvirus 6B
ugugauuccuucggggacaguga

SEQ ID NO: 170606 - RNA, 19 nt, Human herpesvirus 6B
ugucaguuuaauaguuugc

SEQ ID NO: 170607 - RNA, 14 nt, Human herpesvirus 6B
ugucagucaaugca

SEQ ID NO: 170608 - RNA, 22 nt, Human herpesvirus 6B
ugucauucugcauuuauaucaa

SEQ ID NO: 170609 - RNA, 23 nt, Human herpesvirus 6B
ugucauucugcauuuauaucaaa

SEQ ID NO: 170610 - RNA, 20 nt, Human herpesvirus 6B
ugucauucuuucuacauaaa

SEQ ID NO: 170611 - RNA, 14 nt, Human herpesvirus 6B
uguaaucaauguca

SEQ ID NO: 170612 - RNA, 16 nt, Human herpesvirus 6B
uguaaucaaugucaca

SEQ ID NO: 170613 - RNA, 21 nt, Human herpesvirus 6B
ugucgaacacgugggucagau

SEQ ID NO: 170614 - RNA, 13 nt, Human herpesvirus 6B
uguacugaucucu

SEQ ID NO: 170615 - RNA, 23 nt, Human herpesvirus 6B
ugucauuuuuacucauacagauc

SEQ ID NO: 170616 - RNA, 22 nt, Human herpesvirus 6B
ugggcgaagaccuauauguguu

SEQ ID NO: 170617 - RNA, 13 nt, Human herpesvirus 6B
uggcacucugaag

SEQ ID NO: 170618 - RNA, 19 nt, Human herpesvirus 6B
uggaugcagcguuggaaag

SEQ ID NO: 170619 - RNA, 11 nt, Human herpesvirus 6B
uggaugugcac

SEQ ID NO: 170620 - RNA, 17 nt, Human herpesvirus 6B
uggugcuauuaacacau

SEQ ID NO: 170621 - RNA, 11 nt, Human herpesvirus 6B
ugguggauguu

SEQ ID NO: 170622 - RNA, 21 nt, Human herpesvirus 6B
ugguguuugcgggaugccaua

SEQ ID NO: 170623 - RNA, 15 nt, Human herpesvirus 6B
ugguucaggauuugu

SEQ ID NO: 170624 - RNA, 16 nt, Human herpesvirus 6B
uggucugcuugcaaau

SEQ ID NO: 170625 - RNA, 15 nt, Human herpesvirus 6B
uggucguaaccauuc

SEQ ID NO: 170626 - RNA, 16 nt, Human herpesvirus 6B
uggucauuucauuugu

SEQ ID NO: 170627 - RNA, 22 nt, Human herpesvirus 6B
ugccccgguuuuguccugaaau

SEQ ID NO: 170628 - RNA, 17 nt, Human herpesvirus 6B
ugccacagguacauugu

SEQ ID NO: 170629 - RNA, 16 nt, Human herpesvirus 6B
ugccaguucacacaga

SEQ ID NO: 170630 - RNA, 21 nt, Human herpesvirus 6B
ugccaguucacacagaugcaa

SEQ ID NO: 170631 - RNA, 17 nt, Human herpesvirus 6B
ugccauuauugauagca

SEQ ID NO: 170632 - RNA, 20 nt, Human herpesvirus 6B
ugcaguauuaauguuuuuca

SEQ ID NO: 170633 - RNA, 22 nt, Human herpesvirus 6B
ugcauaacaucucagaucuaga

SEQ ID NO: 170634 - RNA, 20 nt, Human herpesvirus 6B
ugcauauuauuaacaaugaa

SEQ ID NO: 170635 - RNA, 16 nt, Human herpesvirus 6B
ugcauaugucuguuau

SEQ ID NO: 170636 - RNA, 20 nt, Human herpesvirus 6B
ugcucggcucuuugcugauu

SEQ ID NO: 170637 - RNA, 19 nt, Human herpesvirus 6B
ugcuccuagggaauuuaau

SEQ ID NO: 170638 - RNA, 15 nt, Human herpesvirus 6B
ugcguguuaugggga

SEQ ID NO: 170639 - RNA, 13 nt, Human herpesvirus 6B
ugcgaucuaauag

SEQ ID NO: 170640 - RNA, 15 nt, Human herpesvirus 6B
ugcgacagacaguca

SEQ ID NO: 170641 - RNA, 14 nt, Human herpesvirus 6B
ugcgacaaagcuau

SEQ ID NO: 170642 - RNA, 21 nt, Human herpesvirus 6B
ugcgguaaacggcauacauuu

SEQ ID NO: 170643 - RNA, 15 nt, Human herpesvirus 6B
ugcgcaguguuauuc

SEQ ID NO: 170644 - RNA, 15 nt, Human herpesvirus 6B
ugcgguuaugugcua

SEQ ID NO: 170645 - RNA, 21 nt, Human herpesvirus 6B
ugcuuucucuuuuuaauucca

SEQ ID NO: 170646 - RNA, 22 nt, Human herpesvirus 6B
uggacaauauaaaagauuugaa

SEQ ID NO: 170647 - RNA, 11 nt, Human herpesvirus 6B
uggacaaugau

SEQ ID NO: 170648 - RNA, 21 nt, Human herpesvirus 6B
uggacaacgguguggagacac

SEQ ID NO: 170649 - RNA, 23 nt, Human herpesvirus 6B
ugcugauuggauagagauauaau

SEQ ID NO: 170650 - RNA, 16 nt, Human herpesvirus 6B
ugcuuaucaaauuaca

SEQ ID NO: 170651 - RNA, 14 nt, Human herpesvirus 6B
ugcucucagaucau

SEQ ID NO: 170652 - RNA, 18 nt, Human herpesvirus 6B
ugcugacccgauguggaa

SEQ ID NO: 170653 - RNA, 23 nt, Human herpesvirus 6B
ugcuugcaaauauuauuuuccca

SEQ ID NO: 170654 - RNA, 16 nt, Human herpesvirus 6B
ugagcugacaucugca

SEQ ID NO: 170655 - RNA, 17 nt, Human herpesvirus 6B
ugaggauuugcuuguca

SEQ ID NO: 170656 - RNA, 16 nt, Human herpesvirus 6B
ugagguuaucuggaug

SEQ ID NO: 170657 - RNA, 21 nt, Human herpesvirus 6B
ugagguugagaaugauuuuaa

SEQ ID NO: 170658 - RNA, 20 nt, Human herpesvirus 6B
ugaggugauuugaacagaga

SEQ ID NO: 170659 - RNA, 15 nt, Human herpesvirus 6B
ugaguuuuuugcaau

SEQ ID NO: 170660 - RNA, 16 nt, Human herpesvirus 6B
ugaguuuuuugcaauu

SEQ ID NO: 170661 - RNA, 17 nt, Human herpesvirus 6B
ugaguuuuuugcaauuu

SEQ ID NO: 170662 - RNA, 15 nt, Human herpesvirus 6B
ugaguuuuuauugaa

SEQ ID NO: 170663 - RNA, 13 nt, Human herpesvirus 6B
ugauaaucuugua

SEQ ID NO: 170664 - RNA, 13 nt, Human herpesvirus 6B
ugauaaacuguac

SEQ ID NO: 170665 - RNA, 24 nt, Human herpesvirus 6B
ugauacaucguuuguugaaugcuu

SEQ ID NO: 170666 - RNA, 22 nt, Human herpesvirus 6B
ugauacucggucuacuguguau

SEQ ID NO: 170667 - RNA, 16 nt, Human herpesvirus 6B
ugaaaaaacuuacuca

SEQ ID NO: 170668 - RNA, 19 nt, Human herpesvirus 6B
ugagauacaaaacauggac

SEQ ID NO: 170669 - RNA, 23 nt, Human herpesvirus 6B
ugagacuguuuauuuucucgaca

SEQ ID NO: 170670 - RNA, 21 nt, Human herpesvirus 6B
ugagaauuaugacugacaagg

SEQ ID NO: 170671 - RNA, 23 nt, Human herpesvirus 6B
ugagaauuaugacugacaaggua

SEQ ID NO: 170672 - RNA, 12 nt, Human herpesvirus 6B
ugagacagucaa

SEQ ID NO: 170673 - RNA, 15 nt, Human herpesvirus 6B
ugagaccuauaaaaa

SEQ ID NO: 170674 - RNA, 12 nt, Human herpesvirus 6B
ugagauucacuc

SEQ ID NO: 170675 - RNA, 14 nt, Human herpesvirus 6B
ugagcacuugucaa

SEQ ID NO: 170676 - RNA, 17 nt, Human herpesvirus 6B
ugcaagcucaugaacau

SEQ ID NO: 170677 - RNA, 22 nt, Human herpesvirus 6B
ugcaacacaacaaacauccuaa

SEQ ID NO: 170678 - RNA, 17 nt, Human herpesvirus 6B
ugcaaauauuauuuucc

SEQ ID NO: 170679 - RNA, 16 nt, Human herpesvirus 6B
ugauugggagcucacu

SEQ ID NO: 170680 - RNA, 15 nt, Human herpesvirus 6B
ugauuuuugacaaaa

SEQ ID NO: 170681 - RNA, 16 nt, Human herpesvirus 6B
ugauuauggugccuca

SEQ ID NO: 170682 - RNA, 14 nt, Human herpesvirus 6B
ugauugcaaccaau

SEQ ID NO: 170683 - RNA, 14 nt, Human herpesvirus 6B
ugauugcaaucaca

SEQ ID NO: 170684 - RNA, 15 nt, Human herpesvirus 6B
ugauugcaaucacau

SEQ ID NO: 170685 - RNA, 17 nt, Human herpesvirus 6B
ugaucgccccagacuua

SEQ ID NO: 170686 - RNA, 14 nt, Human herpesvirus 6B
ugaucagcauucac

SEQ ID NO: 170687 - RNA, 15 nt, Human herpesvirus 6B
ugaucagcauucacu

SEQ ID NO: 170688 - RNA, 14 nt, Human herpesvirus 6B
ugaucaagacuuaa

SEQ ID NO: 170689 - RNA, 17 nt, Human herpesvirus 6B
ugauagcauaauccuuu

SEQ ID NO: 170690 - RNA, 20 nt, Human herpesvirus 6B
ugauguacguggccgucucc

SEQ ID NO: 170691 - RNA, 17 nt, Human herpesvirus 6B
ugauguuaacucaggug

SEQ ID NO: 170692 - RNA, 17 nt, Human herpesvirus 6B
ugauuaauacaucauua

SEQ ID NO: 170693 - RNA, 19 nt, Human herpesvirus 6B
ugauuauagauagcuccaa

SEQ ID NO: 170694 - RNA, 15 nt, Human herpesvirus 6B
ugauuauaucagagc

SEQ ID NO: 170695 - RNA, 20 nt, Human herpesvirus 6B
ugauuauaucgcaagcaaaa

SEQ ID NO: 170696 - RNA, 14 nt, Human herpesvirus 6B
ugaugaacaaaaaa

SEQ ID NO: 170697 - RNA, 11 nt, Human herpesvirus 6B
ugaugaucugc

SEQ ID NO: 170698 - RNA, 18 nt, Human herpesvirus 6B
aaggacuaucugagacag

SEQ ID NO: 170699 - RNA, 22 nt, Human herpesvirus 6B
aaggaauuuauuuucaauauca

SEQ ID NO: 170700 - RNA, 22 nt, Human herpesvirus 6B
aaggaaaacucuugacauagca

SEQ ID NO: 170701 - RNA, 21 nt, Human herpesvirus 6B
aaggugaucguggacaguaaa

SEQ ID NO: 170702 - RNA, 18 nt, Human herpesvirus 6B
aaggugguugaaaucaca

SEQ ID NO: 170703 - RNA, 17 nt, Human herpesvirus 6B
aagguaggcgaaccaua

SEQ ID NO: 170704 - RNA, 23 nt, Human herpesvirus 6B
aagucgcgaagugcuucugcucu

SEQ ID NO: 170705 - RNA, 15 nt, Human herpesvirus 6B
aagugagauacaugu

SEQ ID NO: 170706 - RNA, 22 nt, Human herpesvirus 6B
aagugaggagugcguaaucgca

SEQ ID NO: 170707 - RNA, 14 nt, Human herpesvirus 6B
aagucaugcuucuu

SEQ ID NO: 170708 - RNA, 18 nt, Human herpesvirus 6B
aaguccugucgauuugag

SEQ ID NO: 170709 - RNA, 13 nt, Human herpesvirus 6B
aaguccuucauga

SEQ ID NO: 170710 - RNA, 16 nt, Human herpesvirus 6B
aagcaggaaccgagau

SEQ ID NO: 170711 - RNA, 15 nt, Human herpesvirus 6B
aagcagccaaugauu

SEQ ID NO: 170712 - RNA, 17 nt, Human herpesvirus 6B
aagcauuuuuugaugua

SEQ ID NO: 170713 - RNA, 14 nt, Human herpesvirus 6B
aagcaucucaaaaa

SEQ ID NO: 170714 - RNA, 21 nt, Human herpesvirus 6B
aagcaucucaaaaaacauaua

SEQ ID NO: 170715 - RNA, 22 nt, Human herpesvirus 6B
aagcaucugcugcuucuucuuu

SEQ ID NO: 170716 - RNA, 12 nt, Human herpesvirus 6B
aagcaugcauug

SEQ ID NO: 170717 - RNA, 13 nt, Human herpesvirus 6B
aagcaugcauugu

SEQ ID NO: 170718 - RNA, 15 nt, Human herpesvirus 6B
aagcaugcauugugu

SEQ ID NO: 170719 - RNA, 19 nt, Human herpesvirus 6B
aagcuggaaaacuauuaau

SEQ ID NO: 170720 - RNA, 20 nt, Human herpesvirus 6B
aaggaaaaauaucgaaauaa

SEQ ID NO: 170721 - RNA, 16 nt, Human herpesvirus 6B
aagcuuucaucaauca

SEQ ID NO: 170722 - RNA, 14 nt, Human herpesvirus 6B
aagccgacuuauau

SEQ ID NO: 170723 - RNA, 17 nt, Human herpesvirus 6B
aagccagaucgaagaaa

SEQ ID NO: 170724 - RNA, 15 nt, Human herpesvirus 6B
aauaguaacuucucu

SEQ ID NO: 170725 - RNA, 13 nt, Human herpesvirus 6B
aauaggcgucuca

SEQ ID NO: 170726 - RNA, 19 nt, Human herpesvirus 6B
aauagaugaucagcauuca

SEQ ID NO: 170727 - RNA, 20 nt, Human herpesvirus 6B
aauagaugaucagcauucac

SEQ ID NO: 170728 - RNA, 12 nt, Human herpesvirus 6B
aauagauuucau

SEQ ID NO: 170729 - RNA, 21 nt, Human herpesvirus 6B
aauacuuuuuucaauaaugcu

SEQ ID NO: 170730 - RNA, 15 nt, Human herpesvirus 6B
aagugcugugcucuu

SEQ ID NO: 170731 - RNA, 14 nt, Human herpesvirus 6B
aagugcuucugcuc

SEQ ID NO: 170732 - RNA, 22 nt, Human herpesvirus 6B
aagugccgaggaacucugggaa

SEQ ID NO: 170733 - RNA, 14 nt, Human herpesvirus 6B
aagugcaacaaaga

SEQ ID NO: 170734 - RNA, 15 nt, Human herpesvirus 6B
aauaaaaacaccucu

SEQ ID NO: 170735 - RNA, 12 nt, Human herpesvirus 6B
aauaaacaugau

SEQ ID NO: 170736 - RNA, 13 nt, Human herpesvirus 6B
aauaaacauuuca

SEQ ID NO: 170737 - RNA, 18 nt, Human herpesvirus 6B
aauauuuugaaaaggugu

SEQ ID NO: 170738 - RNA, 22 nt, Human herpesvirus 6B
aauauuuuuucagcuuucauaa

SEQ ID NO: 170739 - RNA, 16 nt, Human herpesvirus 6B
aauauugcaugcauug

SEQ ID NO: 170740 - RNA, 16 nt, Human herpesvirus 6B
aauauaaauucuuacc

SEQ ID NO: 170741 - RNA, 15 nt, Human herpesvirus 6B
aauauucaugcgcuu

SEQ ID NO: 170742 - RNA, 15 nt, Human herpesvirus 6B
aauauucuacuucau

SEQ ID NO: 170743 - RNA, 19 nt, Human herpesvirus 6B
aaucacaccaaugaucaca

SEQ ID NO: 170744 - RNA, 19 nt, Human herpesvirus 6B
aauccaggaguaaugauug

SEQ ID NO: 170745 - RNA, 21 nt, Human herpesvirus 6B
aaucuuguguucuaacacaua

SEQ ID NO: 170746 - RNA, 22 nt, Human herpesvirus 6B
aaucuaccauaacgcguacaaa

SEQ ID NO: 170747 - RNA, 13 nt, Human herpesvirus 6B
aaucuaagauagu

SEQ ID NO: 170748 - RNA, 21 nt, Human herpesvirus 6B
aaucuaauaaaauacacaucu

SEQ ID NO: 170749 - RNA, 22 nt, Human herpesvirus 6B
aaucuaauaaaauacacaucug

SEQ ID NO: 170750 - RNA, 12 nt, Human herpesvirus 6B
aaucgcauuucu

SEQ ID NO: 170751 - RNA, 17 nt, Human herpesvirus 6B
aaucgcauuucucuaca

SEQ ID NO: 170752 - RNA, 15 nt, Human herpesvirus 6B
aaucgcgccauauca

SEQ ID NO: 170753 - RNA, 24 nt, Human herpesvirus 6B
aauccuauauuacuaacgacggaa

SEQ ID NO: 170754 - RNA, 16 nt, Human herpesvirus 6B
aauccgauagccauac

SEQ ID NO: 170755 - RNA, 20 nt, Human herpesvirus 6B
aauccccagaaggauccauu

SEQ ID NO: 170756 - RNA, 15 nt, Human herpesvirus 6B
aauccaugaacuaca

SEQ ID NO: 170757 - RNA, 16 nt, Human herpesvirus 6B
aauccaugaacuacag

SEQ ID NO: 170758 - RNA, 13 nt, Human herpesvirus 6B
aacuccacgaucu

SEQ ID NO: 170759 - RNA, 14 nt, Human herpesvirus 6B
aacuccccauucaa

SEQ ID NO: 170760 - RNA, 19 nt, Human herpesvirus 6B
aacucgacuucuuucauca

SEQ ID NO: 170761 - RNA, 22 nt, Human herpesvirus 6B
aacucgccaauuaaaguuuuca

SEQ ID NO: 170762 - RNA, 13 nt, Human herpesvirus 6B
aacguugugcuga

SEQ ID NO: 170763 - RNA, 20 nt, Human herpesvirus 6B
aacucuuucuauuauguaaa

SEQ ID NO: 170764 - RNA, 22 nt, Human herpesvirus 6B
aacucguuaauaguuacuuuga

SEQ ID NO: 170765 - RNA, 18 nt, Human herpesvirus 6B
aacucuaaaagcugcuaa

SEQ ID NO: 170766 - RNA, 24 nt, Human herpesvirus 6B
aacgucuucaaauuuacucuccac

SEQ ID NO: 170767 - RNA, 16 nt, Human herpesvirus 6B
aacggagaaaacuaua

SEQ ID NO: 170768 - RNA, 20 nt, Human herpesvirus 6B
aacggagcaaccgcaguucc

SEQ ID NO: 170769 - RNA, 21 nt, Human herpesvirus 6B
aacggagcaaccgcaguuccu

SEQ ID NO: 170770 - RNA, 17 nt, Human herpesvirus 6B
aacgcucacaacaugau

SEQ ID NO: 170771 - RNA, 23 nt, Human herpesvirus 6B
uuuuuguaaaaauggcucagaga

SEQ ID NO: 170772 - RNA, 12 nt, Human herpesvirus 6B
uuuuuugcaauu

SEQ ID NO: 170773 - RNA, 13 nt, Human herpesvirus 6B
uuuuuugcaguau

SEQ ID NO: 170774 - RNA, 11 nt, Human herpesvirus 6B
aacaugacugg

SEQ ID NO: 170775 - RNA, 21 nt, Human herpesvirus 6B
aacaugacaaaucugaaugua

SEQ ID NO: 170776 - RNA, 23 nt, Human herpesvirus 6B
aacaucuuaacagacuacuuuua

SEQ ID NO: 170777 - RNA, 22 nt, Human herpesvirus 6B
aacgauaucaauuccugugaug

SEQ ID NO: 170778 - RNA, 14 nt, Human herpesvirus 6B
aacgacugggagaa

SEQ ID NO: 170779 - RNA, 15 nt, Human herpesvirus 6B
aacgacuuauuacaa

SEQ ID NO: 170780 - RNA, 18 nt, Human herpesvirus 6B
aacgagaaagaaaaccag

SEQ ID NO: 170781 - RNA, 21 nt, Human herpesvirus 6B
aagauagccagggcauucaca

SEQ ID NO: 170782 - RNA, 11 nt, Human herpesvirus 6B
aagauagcucu

SEQ ID NO: 170783 - RNA, 13 nt, Human herpesvirus 6B
aagauacacugca

SEQ ID NO: 170784 - RNA, 18 nt, Human herpesvirus 6B
aagaggugcaaaugcuca

SEQ ID NO: 170785 - RNA, 23 nt, Human herpesvirus 6B
aagaggccaauuuaugucauuuc

SEQ ID NO: 170786 - RNA, 16 nt, Human herpesvirus 6B
aagcacccugcacaaa

SEQ ID NO: 170787 - RNA, 14 nt, Human herpesvirus 6B
aagcacaaaaccag

SEQ ID NO: 170788 - RNA, 13 nt, Human herpesvirus 6B
aagcaaagcaccc

SEQ ID NO: 170789 - RNA, 15 nt, Human herpesvirus 6B
aagauugugcaguuc

SEQ ID NO: 170790 - RNA, 20 nt, Human herpesvirus 6B
aagauugugcaguucuuaca

SEQ ID NO: 170791 - RNA, 23 nt, Human herpesvirus 6B
aagauugugcaguucuuacauau

SEQ ID NO: 170792 - RNA, 18 nt, Human herpesvirus 6B
aagauuguguuucugucu

SEQ ID NO: 170793 - RNA, 20 nt, Human herpesvirus 6B
aagauuuggaggugagacau

SEQ ID NO: 170794 - RNA, 14 nt, Human herpesvirus 6B
aagauuacguccac

SEQ ID NO: 170795 - RNA, 17 nt, Human herpesvirus 6B
aagaugucggaggguuu

SEQ ID NO: 170796 - RNA, 18 nt, Human herpesvirus 6B
aagauguucaaaacuggg

SEQ ID NO: 170797 - RNA, 12 nt, Human herpesvirus 6B
aagacgaucuca

SEQ ID NO: 170798 - RNA, 13 nt, Human herpesvirus 6B
aagacgaucucau

SEQ ID NO: 170799 - RNA, 18 nt, Human herpesvirus 6B
aagagaucaguacauaga

SEQ ID NO: 170800 - RNA, 20 nt, Human herpesvirus 6B
aagagaucaguacauagaau

SEQ ID NO: 170801 - RNA, 15 nt, Human herpesvirus 6B
aagagagucagaaau

SEQ ID NO: 170802 - RNA, 19 nt, Human herpesvirus 6B
aacuuaucaacuauacuua

SEQ ID NO: 170803 - RNA, 23 nt, Human herpesvirus 6B
aacuuaucaacuauacuuaacuu

SEQ ID NO: 170804 - RNA, 22 nt, Human herpesvirus 6B
aacuuauugaggaaaugcagca

SEQ ID NO: 170805 - RNA, 21 nt, Human herpesvirus 6B
uucaagaaugggaugcauuau

SEQ ID NO: 170806 - RNA, 21 nt, Human herpesvirus 6B
uucaacgucuucaaauuuacu

SEQ ID NO: 170807 - RNA, 23 nt, Human herpesvirus 6B
uucagcuuucauaagcucuacac

SEQ ID NO: 170808 - RNA, 14 nt, Human herpesvirus 6B
uucagcguauucag

SEQ ID NO: 170809 - RNA, 15 nt, Human herpesvirus 6B
uucagacacgcuaaa

SEQ ID NO: 170810 - RNA, 18 nt, Human herpesvirus 6B
uugaaagaacaguuuacc

SEQ ID NO: 170811 - RNA, 23 nt, Human herpesvirus 6B
uugaaagaacaguuuaccuauca

SEQ ID NO: 170812 - RNA, 12 nt, Human herpesvirus 6B
uugaaaaggugu

SEQ ID NO: 170813 - RNA, 16 nt, Human herpesvirus 6B
uugaaaaaaaacugcc

SEQ ID NO: 170814 - RNA, 14 nt, Human herpesvirus 6B
uucaggaacagaaa

SEQ ID NO: 170815 - RNA, 19 nt, Human herpesvirus 6B
uucaggaaguucuucaaaa

SEQ ID NO: 170816 - RNA, 17 nt, Human herpesvirus 6B
uucaggcauuaaacuga

SEQ ID NO: 170817 - RNA, 21 nt, Human herpesvirus 6B
uugaaugaacgcacuagacau

SEQ ID NO: 170818 - RNA, 17 nt, Human herpesvirus 6B
uugaagaauaagccuaa

SEQ ID NO: 170819 - RNA, 13 nt, Human herpesvirus 6B
uugaagucuuucc

SEQ ID NO: 170820 - RNA, 15 nt, Human herpesvirus 6B
uugaaggaaaugugg

SEQ ID NO: 170821 - RNA, 18 nt, Human herpesvirus 6B
uugauagagaagcacgga

SEQ ID NO: 170822 - RNA, 13 nt, Human herpesvirus 6B
uugauaguacuua

SEQ ID NO: 170823 - RNA, 22 nt, Human herpesvirus 6B
uugauaguacuuacguguguau

SEQ ID NO: 170824 - RNA, 12 nt, Human herpesvirus 6B
uugaugugcuac

SEQ ID NO: 170825 - RNA, 16 nt, Human herpesvirus 6B
uugauguuuccugaau

SEQ ID NO: 170826 - RNA, 18 nt, Human herpesvirus 6B
uugauuaggggacagagc

SEQ ID NO: 170827 - RNA, 11 nt, Human herpesvirus 6B
uugaugguguc

SEQ ID NO: 170828 - RNA, 13 nt, Human herpesvirus 6B
aacacaccugccu

SEQ ID NO: 170829 - RNA, 14 nt, Human herpesvirus 6B
aacaauucucucaa

SEQ ID NO: 170830 - RNA, 17 nt, Human herpesvirus 6B
uugagugugcaucagca

SEQ ID NO: 170831 - RNA, 18 nt, Human herpesvirus 6B
uugagugugcaucagcau

SEQ ID NO: 170832 - RNA, 18 nt, Human herpesvirus 6B
uugaguugggacuuggaa

SEQ ID NO: 170833 - RNA, 20 nt, Human herpesvirus 6B
uugaguuguauuuaacuuga

SEQ ID NO: 170834 - RNA, 20 nt, Human herpesvirus 6B
uugaggaucacuaacuucaa

SEQ ID NO: 170835 - RNA, 17 nt, Human herpesvirus 6B
uugacauagcaauucuu

SEQ ID NO: 170836 - RNA, 14 nt, Human herpesvirus 6B
uugacugaucugua

SEQ ID NO: 170837 - RNA, 21 nt, Human herpesvirus 6B
uugacgguucaccacugugau

SEQ ID NO: 170838 - RNA, 15 nt, Human herpesvirus 6B
aacaccaacaugacu

SEQ ID NO: 170839 - RNA, 10 nt, Human herpesvirus 6B
aacacucuca

SEQ ID NO: 170840 - RNA, 22 nt, Human herpesvirus 6B
aacagaaaaugcguuugucauu

SEQ ID NO: 170841 - RNA, 12 nt, Human herpesvirus 6B
uugcaaucacau

SEQ ID NO: 170842 - RNA, 19 nt, Human herpesvirus 6B
uugcaaauauuauuuuccc

SEQ ID NO: 170843 - RNA, 15 nt, Human herpesvirus 6B
uugcauuaaacaaua

SEQ ID NO: 170844 - RNA, 14 nt, Human herpesvirus 6B
uugccaccagauag

SEQ ID NO: 170845 - RNA, 18 nt, Human herpesvirus 6B
uugccaguaagucuucau

SEQ ID NO: 170846 - RNA, 14 nt, Human herpesvirus 6B
uugccaaccaaaug

SEQ ID NO: 170847 - RNA, 22 nt, Human herpesvirus 6B
uugcuuucucuuuuuaauucca

SEQ ID NO: 170848 - RNA, 11 nt, Human herpesvirus 6B
uugcuugucac

SEQ ID NO: 170849 - RNA, 14 nt, Human herpesvirus 6B
uugcuucguuucuu

SEQ ID NO: 170850 - RNA, 15 nt, Human herpesvirus 6B
uugcuuuuuuaguuu

SEQ ID NO: 170851 - RNA, 15 nt, Human herpesvirus 6B
uuggaaagcuuuaug

SEQ ID NO: 170852 - RNA, 14 nt, Human herpesvirus 6B
uuggaccuugaaug

SEQ ID NO: 170853 - RNA, 19 nt, Human herpesvirus 6B
uuggagcuauaugcaucuc

SEQ ID NO: 170854 - RNA, 20 nt, Human herpesvirus 6B
uuggagcuauaugcaucucu

SEQ ID NO: 170855 - RNA, 20 nt, Human herpesvirus 6B
uuggaggucaucguccaacc

SEQ ID NO: 170856 - RNA, 15 nt, Human herpesvirus 6B
uuggaggugagacau

SEQ ID NO: 170857 - RNA, 21 nt, Human herpesvirus 6B
uuggaugccuacauaugccga

SEQ ID NO: 170858 - RNA, 22 nt, Human herpesvirus 6B
uuggauuccauccgcuaagaga

SEQ ID NO: 170859 - RNA, 17 nt, Human herpesvirus 6B
uugccguugucguguga

SEQ ID NO: 170860 - RNA, 18 nt, Human herpesvirus 6B
uugccguugucgugugau

SEQ ID NO: 170861 - RNA, 20 nt, Human herpesvirus 6B
uugccguugucgugugauca

SEQ ID NO: 170862 - RNA, 14 nt, Human herpesvirus 6B
uugcgggaugccau

SEQ ID NO: 170863 - RNA, 15 nt, Human herpesvirus 6B
uugcgggaugccaua

SEQ ID NO: 170864 - RNA, 22 nt, Human herpesvirus 6B
uugcuuauaagcaaaacucuau

SEQ ID NO: 170865 - RNA, 14 nt, Human herpesvirus 6B
uuuggcuacaacag

SEQ ID NO: 170866 - RNA, 21 nt, Human herpesvirus 6B
uuuggcugugacgaggaugga

SEQ ID NO: 170867 - RNA, 15 nt, Human herpesvirus 6B
uuugggaaaucugac

SEQ ID NO: 170868 - RNA, 12 nt, Human herpesvirus 6B
uuucugcaaaac

SEQ ID NO: 170869 - RNA, 18 nt, Human herpesvirus 6B
uuucucuacaugccacag

SEQ ID NO: 170870 - RNA, 20 nt, Human herpesvirus 6B
uuucucugucgcugugagcc

SEQ ID NO: 170871 - RNA, 14 nt, Human herpesvirus 6B
uuucugaagacagc

SEQ ID NO: 170872 - RNA, 20 nt, Human herpesvirus 6B
uuucuccacacuguuuacuu

SEQ ID NO: 170873 - RNA, 16 nt, Human herpesvirus 6B
uuucgggugcaaucaa

SEQ ID NO: 170874 - RNA, 18 nt, Human herpesvirus 6B
uuucgucugauacuugaa

SEQ ID NO: 170875 - RNA, 17 nt, Human herpesvirus 6B
uuucgguuucgcugcua

SEQ ID NO: 170876 - RNA, 23 nt, Human herpesvirus 6B
uuucgccaucaaucucuaugaga

SEQ ID NO: 170877 - RNA, 23 nt, Human herpesvirus 6B
uuucggauuuguucgauugccaa

SEQ ID NO: 170878 - RNA, 17 nt, Human herpesvirus 6B
uuucaccauguccagga

SEQ ID NO: 170879 - RNA, 21 nt, Human herpesvirus 6B
uuucacacgcauagaugggua

SEQ ID NO: 170880 - RNA, 18 nt, Human herpesvirus 6B
uuucaagauuguguuucu

SEQ ID NO: 170881 - RNA, 22 nt, Human herpesvirus 6B
uuucaagaaugggaugcauuau

SEQ ID NO: 170882 - RNA, 22 nt, Human herpesvirus 6B
uuuuacuuacaucgauccaaaa

SEQ ID NO: 170883 - RNA, 14 nt, Human herpesvirus 6B
uuuguagcaauuuu

SEQ ID NO: 170884 - RNA, 14 nt, Human herpesvirus 6B
uuugucgcacgugu

SEQ ID NO: 170885 - RNA, 22 nt, Human herpesvirus 6B
uuuguaaaaauggcucagagaa

SEQ ID NO: 170886 - RNA, 15 nt, Human herpesvirus 6B
uuuuauuaguauccu

SEQ ID NO: 170887 - RNA, 17 nt, Human herpesvirus 6B
uuuuauaucgucgcaga

SEQ ID NO: 170888 - RNA, 18 nt, Human herpesvirus 6B
uuuuagcagauccaugga

SEQ ID NO: 170889 - RNA, 11 nt, Human herpesvirus 6B
aacagugacag

SEQ ID NO: 170890 - RNA, 12 nt, Human herpesvirus 6B
aacagugacagu

SEQ ID NO: 170891 - RNA, 20 nt, Human herpesvirus 6B
aacaguaggagacgacggaa

SEQ ID NO: 170892 - RNA, 24 nt, Human herpesvirus 6B
aacaguuuaccuaucaacaauguc

SEQ ID NO: 170893 - RNA, 16 nt, Human herpesvirus 6B
aacagcuuuauuccca

SEQ ID NO: 170894 - RNA, 13 nt, Human herpesvirus 6B
uuuuccagugaga

SEQ ID NO: 170895 - RNA, 19 nt, Human herpesvirus 6B
uuuucauuuugauaucgau

SEQ ID NO: 170896 - RNA, 22 nt, Human herpesvirus 6B
uugggagcucacuguaccuuua

SEQ ID NO: 170897 - RNA, 21 nt, Human herpesvirus 6B
uuggguguacauugugacaag

SEQ ID NO: 170898 - RNA, 23 nt, Human herpesvirus 6B
uuggcuacggcuacggugcgauu

SEQ ID NO: 170899 - RNA, 22 nt, Human herpesvirus 6B
uugguguuugcgggaugccaua

SEQ ID NO: 170900 - RNA, 13 nt, Human herpesvirus 6B
uuggugugcauua

SEQ ID NO: 170901 - RNA, 17 nt, Human herpesvirus 6B
uuguagauaauuuccaa

SEQ ID NO: 170902 - RNA, 16 nt, Human herpesvirus 6B
uuguaccaacauguau

SEQ ID NO: 170903 - RNA, 17 nt, Human herpesvirus 6B
uuguaccaacauguauu

SEQ ID NO: 170904 - RNA, 18 nt, Human herpesvirus 6B
uuguagucguuuuuggau

SEQ ID NO: 170905 - RNA, 19 nt, Human herpesvirus 6B
uugugcgaauuguguugcu

SEQ ID NO: 170906 - RNA, 18 nt, Human herpesvirus 6B
uugugaucaagugguguu

SEQ ID NO: 170907 - RNA, 14 nt, Human herpesvirus 6B
uuguggacaaugau

SEQ ID NO: 170908 - RNA, 17 nt, Human herpesvirus 6B
uuuaauuaaaacagaaa

SEQ ID NO: 170909 - RNA, 13 nt, Human herpesvirus 6B
uuuaauucaggaa

SEQ ID NO: 170910 - RNA, 16 nt, Human herpesvirus 6B
uuuacaucgaaucuca

SEQ ID NO: 170911 - RNA, 13 nt, Human herpesvirus 6B
uuuaccagagaua

SEQ ID NO: 170912 - RNA, 19 nt, Human herpesvirus 6B
uuuaccagagauacgugau

SEQ ID NO: 170913 - RNA, 22 nt, Human herpesvirus 6B
uuuacaaugaguuuuuugcaau

SEQ ID NO: 170914 - RNA, 15 nt, Human herpesvirus 6B
uuuacaaaacuguua

SEQ ID NO: 170915 - RNA, 14 nt, Human herpesvirus 6B
uuguguuucugucu

SEQ ID NO: 170916 - RNA, 16 nt, Human herpesvirus 6B
uuguguucuaacacau

SEQ ID NO: 170917 - RNA, 21 nt, Human herpesvirus 6B
uuguuccagauguagguuuca

SEQ ID NO: 170918 - RNA, 18 nt, Human herpesvirus 6B
uuucaaaaugaccagaga

SEQ ID NO: 170919 - RNA, 20 nt, Human herpesvirus 6B
uuuauucaaccaaucuaaga

SEQ ID NO: 170920 - RNA, 18 nt, Human herpesvirus 6B
uuuacuguuucuuugaca

SEQ ID NO: 170921 - RNA, 22 nt, Human herpesvirus 6B
uacgauugcugucuuccuguga

SEQ ID NO: 170922 - RNA, 15 nt, Human herpesvirus 6B
uacgagaggcuuuau

SEQ ID NO: 170923 - RNA, 16 nt, Human herpesvirus 6B
uacgcgccgacucucu

SEQ ID NO: 170924 - RNA, 22 nt, Human herpesvirus 6B
uacgcuaacgaacaaaucucca

SEQ ID NO: 170925 - RNA, 22 nt, Human herpesvirus 6B
uaccugucuuagaagcauuugc

SEQ ID NO: 170926 - RNA, 20 nt, Human herpesvirus 6B
uaccugaaaccgaaaguaua

SEQ ID NO: 170927 - RNA, 15 nt, Human herpesvirus 6B
uaccuagagauuaca

SEQ ID NO: 170928 - RNA, 21 nt, Human herpesvirus 6B
uaccuauuagcuauaaaaaca

SEQ ID NO: 170929 - RNA, 22 nt, Human herpesvirus 6B
uacaucaacuauuuaacaucca

SEQ ID NO: 170930 - RNA, 18 nt, Human herpesvirus 6B
uacaucgauccaaaagau

SEQ ID NO: 170931 - RNA, 16 nt, Human herpesvirus 6B
uacaugaaaacauuca

SEQ ID NO: 170932 - RNA, 17 nt, Human herpesvirus 6B
uacaugaaaacauucag

SEQ ID NO: 170933 - RNA, 12 nt, Human herpesvirus 6B
uacaugccacag

SEQ ID NO: 170934 - RNA, 20 nt, Human herpesvirus 6B
uacguauaaaaguccucaaa

SEQ ID NO: 170935 - RNA, 19 nt, Human herpesvirus 6B
uacggccagagacaugacc

SEQ ID NO: 170936 - RNA, 14 nt, Human herpesvirus 6B
uacggaagaaauca

SEQ ID NO: 170937 - RNA, 21 nt, Human herpesvirus 6B
uacgcuguguuuacauuugcc

SEQ ID NO: 170938 - RNA, 19 nt, Human herpesvirus 6B
uacgcuuauaaucuagaau

SEQ ID NO: 170939 - RNA, 23 nt, Human herpesvirus 6B
uacgugaauuuucugaagacagc

SEQ ID NO: 170940 - RNA, 14 nt, Human herpesvirus 6B
uacucauacagauc

SEQ ID NO: 170941 - RNA, 14 nt, Human herpesvirus 6B
uacguucacauuac

SEQ ID NO: 170942 - RNA, 21 nt, Human herpesvirus 6B
uacguuaguuuuuuguuucag

SEQ ID NO: 170943 - RNA, 19 nt, Human herpesvirus 6B
uacucuccacccaucuccu

SEQ ID NO: 170944 - RNA, 21 nt, Human herpesvirus 6B
uacugagcaaagaaaugacuu

SEQ ID NO: 170945 - RNA, 17 nt, Human herpesvirus 6B
uacucggucuacugugu

SEQ ID NO: 170946 - RNA, 15 nt, Human herpesvirus 6B
uaauguugaguaauu

SEQ ID NO: 170947 - RNA, 20 nt, Human herpesvirus 6B
uaauguguuggucauuucau

SEQ ID NO: 170948 - RNA, 16 nt, Human herpesvirus 6B
uaauuacauauaguca

SEQ ID NO: 170949 - RNA, 18 nt, Human herpesvirus 6B
uaauucaaauguagcaaa

SEQ ID NO: 170950 - RNA, 23 nt, Human herpesvirus 6B
uaauugaugggauguaaucaaug

SEQ ID NO: 170951 - RNA, 15 nt, Human herpesvirus 6B
uaauuggaacuauga

SEQ ID NO: 170952 - RNA, 15 nt, Human herpesvirus 6B
uaauuggacauuguu

SEQ ID NO: 170953 - RNA, 19 nt, Human herpesvirus 6B
uaauuggacauuguugaua

SEQ ID NO: 170954 - RNA, 14 nt, Human herpesvirus 6B
uaauaaaaguucca

SEQ ID NO: 170955 - RNA, 21 nt, Human herpesvirus 6B
uaauaaaauauaacgcuucua

SEQ ID NO: 170956 - RNA, 17 nt, Human herpesvirus 6B
uaaguggguacaaugaa

SEQ ID NO: 170957 - RNA, 15 nt, Human herpesvirus 6B
uaagugccguggcag

SEQ ID NO: 170958 - RNA, 17 nt, Human herpesvirus 6B
uaagucguuguguccug

SEQ ID NO: 170959 - RNA, 17 nt, Human herpesvirus 6B
uaagucuaaugcaaaga

SEQ ID NO: 170960 - RNA, 22 nt, Human herpesvirus 6B
uaauaaaggauguuugugacuc

SEQ ID NO: 170961 - RNA, 14 nt, Human herpesvirus 6B
uaauaaacucugcc

SEQ ID NO: 170962 - RNA, 17 nt, Human herpesvirus 6B
uacaagagugcacgaaa

SEQ ID NO: 170963 - RNA, 22 nt, Human herpesvirus 6B
uacaacugaaacuccacgaucu

SEQ ID NO: 170964 - RNA, 12 nt, Human herpesvirus 6B
uacaagcaugca

SEQ ID NO: 170965 - RNA, 13 nt, Human herpesvirus 6B
uacaagcaugcau

SEQ ID NO: 170966 - RNA, 13 nt, Human herpesvirus 6B
uacacaauacaca

SEQ ID NO: 170967 - RNA, 14 nt, Human herpesvirus 6B
uacacaauacacag

SEQ ID NO: 170968 - RNA, 17 nt, Human herpesvirus 6B
uacaauaguaacuucuc

SEQ ID NO: 170969 - RNA, 16 nt, Human herpesvirus 6B
uacaaugacuaucaaa

SEQ ID NO: 170970 - RNA, 10 nt, Human herpesvirus 6B
uacaaugagu

SEQ ID NO: 170971 - RNA, 21 nt, Human herpesvirus 6B
uacaaugaguuuuuugcaauu

SEQ ID NO: 170972 - RNA, 13 nt, Human herpesvirus 6B
uacagauguguau

SEQ ID NO: 170973 - RNA, 20 nt, Human herpesvirus 6B
uacagauccccuauauagcu

SEQ ID NO: 170974 - RNA, 15 nt, Human herpesvirus 6B
uacagagccagacau

SEQ ID NO: 170975 - RNA, 17 nt, Human herpesvirus 6B
uacagagccagacaucu

SEQ ID NO: 170976 - RNA, 20 nt, Human herpesvirus 6B
uacauauagucaauggugug

SEQ ID NO: 170977 - RNA, 14 nt, Human herpesvirus 6B
uacauaguguagaa

SEQ ID NO: 170978 - RNA, 15 nt, Human herpesvirus 6B
uacauauaaacagau

SEQ ID NO: 170979 - RNA, 17 nt, Human herpesvirus 6B
uacauagaaucucuggu

SEQ ID NO: 170980 - RNA, 20 nt, Human herpesvirus 6B
uaaaacgcucacaacaugau

SEQ ID NO: 170981 - RNA, 13 nt, Human herpesvirus 6B
uaaaaccugcuaa

SEQ ID NO: 170982 - RNA, 14 nt, Human herpesvirus 6B
uaaaaccugcuaac

SEQ ID NO: 170983 - RNA, 14 nt, Human herpesvirus 6B
guugaguaugcuuu

SEQ ID NO: 170984 - RNA, 22 nt, Human herpesvirus 6B
uaaaagcugcuaacggagcaac

SEQ ID NO: 170985 - RNA, 21 nt, Human herpesvirus 6B
uaaaagacgcuugcuguuuuc

SEQ ID NO: 170986 - RNA, 22 nt, Human herpesvirus 6B
guucuuucaaaaugaccagaga

SEQ ID NO: 170987 - RNA, 20 nt, Human herpesvirus 6B
guucuuugaacagugacagu

SEQ ID NO: 170988 - RNA, 19 nt, Human herpesvirus 6B
guucugccuauaugcgaau

SEQ ID NO: 170989 - RNA, 14 nt, Human herpesvirus 6B
guucuuaacauauu

SEQ ID NO: 170990 - RNA, 17 nt, Human herpesvirus 6B
uaaaauacauacuuucc

SEQ ID NO: 170991 - RNA, 12 nt, Human herpesvirus 6B
uaaaagugcaac

SEQ ID NO: 170992 - RNA, 18 nt, Human herpesvirus 6B
uaaaccaucgacuucaaa

SEQ ID NO: 170993 - RNA, 21 nt, Human herpesvirus 6B
uaaaccaucgacuucaaacac

SEQ ID NO: 170994 - RNA, 14 nt, Human herpesvirus 6B
uaaacgagugugaa

SEQ ID NO: 170995 - RNA, 20 nt, Human herpesvirus 6B
uaaacggagacugcacagaa

SEQ ID NO: 170996 - RNA, 14 nt, Human herpesvirus 6B
uaaacuaacaugac

SEQ ID NO: 170997 - RNA, 15 nt, Human herpesvirus 6B
uaaacucgacuucuu

SEQ ID NO: 170998 - RNA, 16 nt, Human herpesvirus 6B
uaaacggaauuaacaa

SEQ ID NO: 170999 - RNA, 15 nt, Human herpesvirus 6B
uaaacggcauacauu

SEQ ID NO: 171000 - RNA, 23 nt, Human herpesvirus 6B
uaaaguuugucacaccacucucu

SEQ ID NO: 171001 - RNA, 16 nt, Human herpesvirus 6B
uaaauauuaacuaaaa

SEQ ID NO: 171002 - RNA, 17 nt, Human herpesvirus 6B
uaaagucguuuuggaga

SEQ ID NO: 171003 - RNA, 22 nt, Human herpesvirus 6B
uaaagaaacaaaauuaauucaa

SEQ ID NO: 171004 - RNA, 17 nt, Human herpesvirus 6B
uaaagaaucugcagauu

SEQ ID NO: 171005 - RNA, 15 nt, Human herpesvirus 6B
uaaggaaaaauaucg

SEQ ID NO: 171006 - RNA, 17 nt, Human herpesvirus 6B
uaagccguacugcuggu

SEQ ID NO: 171007 - RNA, 23 nt, Human herpesvirus 6B
uaagcucaagaggguuuuuuaca

SEQ ID NO: 171008 - RNA, 15 nt, Human herpesvirus 6B
uaagcagcaaaacaa

SEQ ID NO: 171009 - RNA, 14 nt, Human herpesvirus 6B
uaagcaaacaugua

SEQ ID NO: 171010 - RNA, 15 nt, Human herpesvirus 6B
uaagauugugcaguu

SEQ ID NO: 171011 - RNA, 16 nt, Human herpesvirus 6B
uaagacgcugauaacu

SEQ ID NO: 171012 - RNA, 16 nt, Human herpesvirus 6B
uaagaauuacaauaca

SEQ ID NO: 171013 - RNA, 21 nt, Human herpesvirus 6B
uaagaauuacaauacagcaau

SEQ ID NO: 171014 - RNA, 16 nt, Human herpesvirus 6B
uaagaaugagaugucc

SEQ ID NO: 171015 - RNA, 21 nt, Human herpesvirus 6B
uaagaaugcuggcgcugcaua

SEQ ID NO: 171016 - RNA, 17 nt, Human herpesvirus 6B
uaacuguggguuuucag

SEQ ID NO: 171017 - RNA, 19 nt, Human herpesvirus 6B
uaagaaaggcggagacaca

SEQ ID NO: 171018 - RNA, 18 nt, Human herpesvirus 6B
uaagaaauauugcaugca

SEQ ID NO: 171019 - RNA, 19 nt, Human herpesvirus 6B
uaagaaauauugcaugcau

SEQ ID NO: 171020 - RNA, 17 nt, Human herpesvirus 6B
uaacgcgucaacaaaca

SEQ ID NO: 171021 - RNA, 20 nt, Human herpesvirus 6B
uaacgcgucaacaaacaauu

SEQ ID NO: 171022 - RNA, 14 nt, Human herpesvirus 6B
uaacgcuucuaaca

SEQ ID NO: 171023 - RNA, 18 nt, Human herpesvirus 6B
uaacggaaauccuugacu

SEQ ID NO: 171024 - RNA, 21 nt, Human herpesvirus 6B
uaacgagaaagaaaaccagua

SEQ ID NO: 171025 - RNA, 15 nt, Human herpesvirus 6B
uaacaauucucucaa

SEQ ID NO: 171026 - RNA, 14 nt, Human herpesvirus 6B
uaaauauucugggg

SEQ ID NO: 171027 - RNA, 17 nt, Human herpesvirus 6B
guauuauaaaaacuaau

SEQ ID NO: 171028 - RNA, 22 nt, Human herpesvirus 6B
guauggucgucauuucaaauac

SEQ ID NO: 171029 - RNA, 15 nt, Human herpesvirus 6B
guauguauaauauaa

SEQ ID NO: 171030 - RNA, 22 nt, Human herpesvirus 6B
guaucuuaaaguuggggucuca

SEQ ID NO: 171031 - RNA, 23 nt, Human herpesvirus 6B
guaugaauccagauaaacaaaaa

SEQ ID NO: 171032 - RNA, 23 nt, Human herpesvirus 6B
guauccucguggaguaaaacgcu

SEQ ID NO: 171033 - RNA, 18 nt, Human herpesvirus 6B
gucaaaacaguaaauucc

SEQ ID NO: 171034 - RNA, 23 nt, Human herpesvirus 6B
guauucuuggaaaaccuuauaca

SEQ ID NO: 171035 - RNA, 19 nt, Human herpesvirus 6B
guauucuccucaacuaaau

SEQ ID NO: 171036 - RNA, 15 nt, Human herpesvirus 6B
guauucagaguacuu

SEQ ID NO: 171037 - RNA, 16 nt, Human herpesvirus 6B
guauucagaguacuuu

SEQ ID NO: 171038 - RNA, 18 nt, Human herpesvirus 6B
guauuuugauggugucga

SEQ ID NO: 171039 - RNA, 15 nt, Human herpesvirus 6B
gucaaagcuacucau

SEQ ID NO: 171040 - RNA, 14 nt, Human herpesvirus 6B
gucacaaaucugua

SEQ ID NO: 171041 - RNA, 12 nt, Human herpesvirus 6B
gucacaguuuuu

SEQ ID NO: 171042 - RNA, 17 nt, Human herpesvirus 6B
gucacguauaccauucc

SEQ ID NO: 171043 - RNA, 20 nt, Human herpesvirus 6B
gucacguauaccauucccaa

SEQ ID NO: 171044 - RNA, 15 nt, Human herpesvirus 6B
guccaaugaauacuu

SEQ ID NO: 171045 - RNA, 15 nt, Human herpesvirus 6B
gucauuucaaauaca

SEQ ID NO: 171046 - RNA, 18 nt, Human herpesvirus 6B
gucaugaucugcuugauu

SEQ ID NO: 171047 - RNA, 14 nt, Human herpesvirus 6B
gucaucaugugugc

SEQ ID NO: 171048 - RNA, 18 nt, Human herpesvirus 6B
gucaucaugugugccuac

SEQ ID NO: 171049 - RNA, 22 nt, Human herpesvirus 6B
gucauaccgaucccagcucacc

SEQ ID NO: 171050 - RNA, 16 nt, Human herpesvirus 6B
gucagucaaugcaauu

SEQ ID NO: 171051 - RNA, 21 nt, Human herpesvirus 6B
ggggcgucgggcgacgggcag

SEQ ID NO: 171052 - RNA, 15 nt, Human herpesvirus 6B
gggguaugucugugc

SEQ ID NO: 171053 - RNA, 14 nt, Human herpesvirus 6B
guacgcuucuuuca

SEQ ID NO: 171054 - RNA, 16 nt, Human herpesvirus 6B
gggugcaaucaaucuu

SEQ ID NO: 171055 - RNA, 22 nt, Human herpesvirus 6B
guacugcgguuggggucuuucc

SEQ ID NO: 171056 - RNA, 20 nt, Human herpesvirus 6B
guagcucaguguuugccaac

SEQ ID NO: 171057 - RNA, 16 nt, Human herpesvirus 6B
guagcaaaugaaugug

SEQ ID NO: 171058 - RNA, 21 nt, Human herpesvirus 6B
guagcaaaugaauguguucau

SEQ ID NO: 171059 - RNA, 13 nt, Human herpesvirus 6B
guauaccauuccc

SEQ ID NO: 171060 - RNA, 20 nt, Human herpesvirus 6B
guauaaugcaugauggugcu

SEQ ID NO: 171061 - RNA, 17 nt, Human herpesvirus 6B
guagucgagaucaucau

SEQ ID NO: 171062 - RNA, 14 nt, Human herpesvirus 6B
guagucgcauuugu

SEQ ID NO: 171063 - RNA, 17 nt, Human herpesvirus 6B
gucccugucugugauuu

SEQ ID NO: 171064 - RNA, 20 nt, Human herpesvirus 6B
guccguuuuuucugcaaaac

SEQ ID NO: 171065 - RNA, 20 nt, Human herpesvirus 6B
guccagcacagcaugcauuu

SEQ ID NO: 171066 - RNA, 17 nt, Human herpesvirus 6B
gucuuagaagcauuugc

SEQ ID NO: 171067 - RNA, 14 nt, Human herpesvirus 6B
gucuucaagcaaag

SEQ ID NO: 171068 - RNA, 15 nt, Human herpesvirus 6B
gucuucaagcaaaga

SEQ ID NO: 171069 - RNA, 20 nt, Human herpesvirus 6B
gucuucaaauuuacucucca

SEQ ID NO: 171070 - RNA, 18 nt, Human herpesvirus 6B
guccgcucugagauuuga

SEQ ID NO: 171071 - RNA, 23 nt, Human herpesvirus 6B
gucuuauaacaccaguacuucaa

SEQ ID NO: 171072 - RNA, 23 nt, Human herpesvirus 6B
gucuucuaauucuagaucugcca

SEQ ID NO: 171073 - RNA, 16 nt, Human herpesvirus 6B
gugcauaacaucucag

SEQ ID NO: 171074 - RNA, 17 nt, Human herpesvirus 6B
guggaagacgcuguguu

SEQ ID NO: 171075 - RNA, 12 nt, Human herpesvirus 6B
guggacaaugau

SEQ ID NO: 171076 - RNA, 15 nt, Human herpesvirus 6B
guggacaaugauacu

SEQ ID NO: 171077 - RNA, 16 nt, Human herpesvirus 6B
guggacaaugauacua

SEQ ID NO: 171078 - RNA, 13 nt, Human herpesvirus 6B
gugccuacuuugg

SEQ ID NO: 171079 - RNA, 22 nt, Human herpesvirus 6B
gugcacgaaaguggauguggau

SEQ ID NO: 171080 - RNA, 14 nt, Human herpesvirus 6B
gugauuauggugcc

SEQ ID NO: 171081 - RNA, 18 nt, Human herpesvirus 6B
gugauguuuuccuuuaug

SEQ ID NO: 171082 - RNA, 21 nt, Human herpesvirus 6B
gugcaaaagcugaccauucag

SEQ ID NO: 171083 - RNA, 13 nt, Human herpesvirus 6B
gugaugauuuguc

SEQ ID NO: 171084 - RNA, 18 nt, Human herpesvirus 6B
gugaugccuugauguuuc

SEQ ID NO: 171085 - RNA, 18 nt, Human herpesvirus 6B
gugauggaugugcacuuu

SEQ ID NO: 171086 - RNA, 19 nt, Human herpesvirus 6B
gugaucguggacaguaaaa

SEQ ID NO: 171087 - RNA, 20 nt, Human herpesvirus 6B
guuccgaauucuuaccaaga

SEQ ID NO: 171088 - RNA, 14 nt, Human herpesvirus 6B
guuccuguuuuucu

SEQ ID NO: 171089 - RNA, 16 nt, Human herpesvirus 6B
guucgauugccaaagg

SEQ ID NO: 171090 - RNA, 22 nt, Human herpesvirus 6B
guucccaaccaguuaccgugau

SEQ ID NO: 171091 - RNA, 14 nt, Human herpesvirus 6B
guucaucagccauu

SEQ ID NO: 171092 - RNA, 17 nt, Human herpesvirus 6B
guucagaauguuccaau

SEQ ID NO: 171093 - RNA, 21 nt, Human herpesvirus 6B
guucaguguucuggcuuguca

SEQ ID NO: 171094 - RNA, 22 nt, Human herpesvirus 6B
guucaguguucuggcuugucau

SEQ ID NO: 171095 - RNA, 16 nt, Human herpesvirus 6B
guuaaaguuucagagc

SEQ ID NO: 171096 - RNA, 15 nt, Human herpesvirus 6B
guuaaaguauguaua

SEQ ID NO: 171097 - RNA, 16 nt, Human herpesvirus 6B
guuacaagcaugcauu

SEQ ID NO: 171098 - RNA, 21 nt, Human herpesvirus 6B
guuaugcgucuguuuauuacc

SEQ ID NO: 171099 - RNA, 22 nt, Human herpesvirus 6B
guuaugcgucuguuuauuacca

SEQ ID NO: 171100 - RNA, 20 nt, Human herpesvirus 6B
guuaaugaauguuugacugu

SEQ ID NO: 171101 - RNA, 15 nt, Human herpesvirus 6B
guucaccacugugau

SEQ ID NO: 171102 - RNA, 12 nt, Human herpesvirus 6B
guucaccauucc

SEQ ID NO: 171103 - RNA, 14 nt, Human herpesvirus 6B
guucaccauuccag

SEQ ID NO: 171104 - RNA, 14 nt, Human herpesvirus 6B
guucaacgucuuca

SEQ ID NO: 171105 - RNA, 17 nt, Human herpesvirus 6B
guuauuuacaaaagccu

SEQ ID NO: 171106 - RNA, 15 nt, Human herpesvirus 6B
guucaaacaaugcaa

SEQ ID NO: 171107 - RNA, 16 nt, Human herpesvirus 6B
guucaaagauagacag

SEQ ID NO: 171108 - RNA, 20 nt, Human herpesvirus 6B
guucaaagauagacagugaa

SEQ ID NO: 171109 - RNA, 17 nt, Human herpesvirus 6B
guuauggggaagaucua

SEQ ID NO: 171110 - RNA, 13 nt, Human herpesvirus 6B
guggauaucucaa

SEQ ID NO: 171111 - RNA, 13 nt, Human herpesvirus 6B
guggauacgccag

SEQ ID NO: 171112 - RNA, 14 nt, Human herpesvirus 6B
guguugugcgcuag

SEQ ID NO: 171113 - RNA, 14 nt, Human herpesvirus 6B
guguuuagugccua

SEQ ID NO: 171114 - RNA, 15 nt, Human herpesvirus 6B
guguucuaacacaua

SEQ ID NO: 171115 - RNA, 15 nt, Human herpesvirus 6B
guguugcuaguugua

SEQ ID NO: 171116 - RNA, 15 nt, Human herpesvirus 6B
guguuggucauuuca

SEQ ID NO: 171117 - RNA, 16 nt, Human herpesvirus 6B
guguuggucauuucau

SEQ ID NO: 171118 - RNA, 20 nt, Human herpesvirus 6B
guguuuuucauuucauugua

SEQ ID NO: 171119 - RNA, 12 nt, Human herpesvirus 6B
guguuucugucu

SEQ ID NO: 171120 - RNA, 15 nt, Human herpesvirus 6B
guguuugccaaccaa

SEQ ID NO: 171121 - RNA, 16 nt, Human herpesvirus 6B
guuaaagaaacagauc

SEQ ID NO: 171122 - RNA, 19 nt, Human herpesvirus 6B
guuaaaaacguuuuugauu

SEQ ID NO: 171123 - RNA, 21 nt, Human herpesvirus 6B
gugguugccaguaagucuuca

SEQ ID NO: 171124 - RNA, 19 nt, Human herpesvirus 6B
guguauuuuauguguguau

SEQ ID NO: 171125 - RNA, 20 nt, Human herpesvirus 6B
guguauuuuauguguguauu

SEQ ID NO: 171126 - RNA, 21 nt, Human herpesvirus 6B
guguauuuuuuuguguguauu

SEQ ID NO: 171127 - RNA, 22 nt, Human herpesvirus 6B
guguauuuuuuuguguguguau

SEQ ID NO: 171128 - RNA, 16 nt, Human herpesvirus 6B
uauuaauuacauauag

SEQ ID NO: 171129 - RNA, 14 nt, Human herpesvirus 6B
uauguugugaucaa

SEQ ID NO: 171130 - RNA, 17 nt, Human herpesvirus 6B
uaugucguuucauggga

SEQ ID NO: 171131 - RNA, 22 nt, Human herpesvirus 6B
uauggcgcguguacgaguagau

SEQ ID NO: 171132 - RNA, 13 nt, Human herpesvirus 6B
uauguaaaaccuc

SEQ ID NO: 171133 - RNA, 14 nt, Human herpesvirus 6B
uauguacugaucuc

SEQ ID NO: 171134 - RNA, 15 nt, Human herpesvirus 6B
uauguacugaucucu

SEQ ID NO: 171135 - RNA, 14 nt, Human herpesvirus 6B
uauuguuguaaaau

SEQ ID NO: 171136 - RNA, 19 nt, Human herpesvirus 6B
uauuguuguaaaauacaua

SEQ ID NO: 171137 - RNA, 15 nt, Human herpesvirus 6B
uauuggcacguguac

SEQ ID NO: 171138 - RNA, 19 nt, Human herpesvirus 6B
uauugucugauauggcaaa

SEQ ID NO: 171139 - RNA, 18 nt, Human herpesvirus 6B
uauuguguguacaacgac

SEQ ID NO: 171140 - RNA, 15 nt, Human herpesvirus 6B
uauuguccagcacuu

SEQ ID NO: 171141 - RNA, 15 nt, Human herpesvirus 6B
uauuccaaccucuaa

SEQ ID NO: 171142 - RNA, 21 nt, Human herpesvirus 6B
uauuaucauaagcgcacauuu

SEQ ID NO: 171143 - RNA, 18 nt, Human herpesvirus 6B
ucaacuauuuaacaucca

SEQ ID NO: 171144 - RNA, 21 nt, Human herpesvirus 6B
ucaacuauuuaacauccaaaa

SEQ ID NO: 171145 - RNA, 13 nt, Human herpesvirus 6B
ucaacgucuucaa

SEQ ID NO: 171146 - RNA, 11 nt, Human herpesvirus 6B
ucaaccuucau

SEQ ID NO: 171147 - RNA, 15 nt, Human herpesvirus 6B
ucaaauccucuacgu

SEQ ID NO: 171148 - RNA, 20 nt, Human herpesvirus 6B
ucaaauccucuacguauaaa

SEQ ID NO: 171149 - RNA, 18 nt, Human herpesvirus 6B
ucaaauaccuaauuccaa

SEQ ID NO: 171150 - RNA, 15 nt, Human herpesvirus 6B
ucaaagcuacucauc

SEQ ID NO: 171151 - RNA, 22 nt, Human herpesvirus 6B
ucaaagugaauuccuggacaug

SEQ ID NO: 171152 - RNA, 20 nt, Human herpesvirus 6B
uauuuccauaaguuaauucc

SEQ ID NO: 171153 - RNA, 18 nt, Human herpesvirus 6B
uauuucauuguuucacuu

SEQ ID NO: 171154 - RNA, 21 nt, Human herpesvirus 6B
uauuuccauaaguuaauucca

SEQ ID NO: 171155 - RNA, 22 nt, Human herpesvirus 6B
uauuucgguuuugucguuugua

SEQ ID NO: 171156 - RNA, 13 nt, Human herpesvirus 6B
uauuucuaaacac

SEQ ID NO: 171157 - RNA, 13 nt, Human herpesvirus 6B
ucaaaagccagau

SEQ ID NO: 171158 - RNA, 13 nt, Human herpesvirus 6B
ucaaaaucugcua

SEQ ID NO: 171159 - RNA, 15 nt, Human herpesvirus 6B
ucaaaaucugcuaac

SEQ ID NO: 171160 - RNA, 14 nt, Human herpesvirus 6B
ucaagcaaagacau

SEQ ID NO: 171161 - RNA, 19 nt, Human herpesvirus 6B
ucaagcacaaaaccaggaa

SEQ ID NO: 171162 - RNA, 13 nt, Human herpesvirus 6B
ucaaucucuauga

SEQ ID NO: 171163 - RNA, 18 nt, Human herpesvirus 6B
ucaauuccugugaugccu

SEQ ID NO: 171164 - RNA, 17 nt, Human herpesvirus 6B
ucaaugcggguacuaua

SEQ ID NO: 171165 - RNA, 15 nt, Human herpesvirus 6B
ucacccccauacaca

SEQ ID NO: 171166 - RNA, 16 nt, Human herpesvirus 6B
ucaccccccucuugca

SEQ ID NO: 171167 - RNA, 19 nt, Human herpesvirus 6B
ucaccccccucuugcagug

SEQ ID NO: 171168 - RNA, 13 nt, Human herpesvirus 6B
ucacaaaacugua

SEQ ID NO: 171169 - RNA, 14 nt, Human herpesvirus 6B
ucacaaaacuguac

SEQ ID NO: 171170 - RNA, 21 nt, Human herpesvirus 6B
ucacaaaguuuaaguucucac

SEQ ID NO: 171171 - RNA, 12 nt, Human herpesvirus 6B
ucacaaacuguc

SEQ ID NO: 171172 - RNA, 14 nt, Human herpesvirus 6B
ucacaaacugucac

SEQ ID NO: 171173 - RNA, 16 nt, Human herpesvirus 6B
ucacaaacugucacuu

SEQ ID NO: 171174 - RNA, 18 nt, Human herpesvirus 6B
ucacaaacugucacuuuc

SEQ ID NO: 171175 - RNA, 15 nt, Human herpesvirus 6B
ucaccacugugauau

SEQ ID NO: 171176 - RNA, 11 nt, Human herpesvirus 6B
ucaccauucca

SEQ ID NO: 171177 - RNA, 23 nt, Human herpesvirus 6B
ucagcuugagagcgggcacacgu

SEQ ID NO: 171178 - RNA, 20 nt, Human herpesvirus 6B
ucaggaacagaaacuuggag

SEQ ID NO: 171179 - RNA, 22 nt, Human herpesvirus 6B
ucaggugucucaaccuucauua

SEQ ID NO: 171180 - RNA, 21 nt, Human herpesvirus 6B
ucagggggcgcggggacacau

SEQ ID NO: 171181 - RNA, 16 nt, Human herpesvirus 6B
ucaucaugugugccua

SEQ ID NO: 171182 - RNA, 21 nt, Human herpesvirus 6B
ucagacagguaagcagcaaaa

SEQ ID NO: 171183 - RNA, 15 nt, Human herpesvirus 6B
ucagaauguuccaau

SEQ ID NO: 171184 - RNA, 13 nt, Human herpesvirus 6B
ucagcguggaauu

SEQ ID NO: 171185 - RNA, 12 nt, Human herpesvirus 6B
uauaccauuccc

SEQ ID NO: 171186 - RNA, 13 nt, Human herpesvirus 6B
uauaccauuccca

SEQ ID NO: 171187 - RNA, 17 nt, Human herpesvirus 6B
uauacauaaggcaaaaa

SEQ ID NO: 171188 - RNA, 18 nt, Human herpesvirus 6B
uauaauuuacacaauccu

SEQ ID NO: 171189 - RNA, 18 nt, Human herpesvirus 6B
uagaauguggagcaguga

SEQ ID NO: 171190 - RNA, 20 nt, Human herpesvirus 6B
uauagacuaaacuuaacuua

SEQ ID NO: 171191 - RNA, 14 nt, Human herpesvirus 6B
uauaggauuucccu

SEQ ID NO: 171192 - RNA, 18 nt, Human herpesvirus 6B
uauagauagcggcacguu

SEQ ID NO: 171193 - RNA, 17 nt, Human herpesvirus 6B
uauagcgguuggaugcc

SEQ ID NO: 171194 - RNA, 17 nt, Human herpesvirus 6B
uauauaguuuucugaug

SEQ ID NO: 171195 - RNA, 17 nt, Human herpesvirus 6B
uauauuggcacguguac

SEQ ID NO: 171196 - RNA, 20 nt, Human herpesvirus 6B
uauauugaucgucauaacga

SEQ ID NO: 171197 - RNA, 17 nt, Human herpesvirus 6B
uauauugccuucgcaga

SEQ ID NO: 171198 - RNA, 13 nt, Human herpesvirus 6B
uaucaaauuacaa

SEQ ID NO: 171199 - RNA, 17 nt, Human herpesvirus 6B
uaucaacuauacuuaac

SEQ ID NO: 171200 - RNA, 13 nt, Human herpesvirus 6B
uauauuuugaugg

SEQ ID NO: 171201 - RNA, 12 nt, Human herpesvirus 6B
uaucaaaagcca

SEQ ID NO: 171202 - RNA, 15 nt, Human herpesvirus 6B
uauaugcaggugcug

SEQ ID NO: 171203 - RNA, 18 nt, Human herpesvirus 6B
uauaugcaggugcugcua

SEQ ID NO: 171204 - RNA, 15 nt, Human herpesvirus 6B
uauaugcgaauguua

SEQ ID NO: 171205 - RNA, 16 nt, Human herpesvirus 6B
uauauuaaagauugca

SEQ ID NO: 171206 - RNA, 15 nt, Human herpesvirus 6B
uauauuaucuuucau

SEQ ID NO: 171207 - RNA, 23 nt, Human herpesvirus 6B
uauaucaaacuuuuuuugaaggu

SEQ ID NO: 171208 - RNA, 22 nt, Human herpesvirus 6B
uauauauccgaaaccgcuauuu

SEQ ID NO: 171209 - RNA, 16 nt, Human herpesvirus 6B
uaugccaaauguauug

SEQ ID NO: 171210 - RNA, 22 nt, Human herpesvirus 6B
uaugcuuauauuguuguaaaau

SEQ ID NO: 171211 - RNA, 18 nt, Human herpesvirus 6B
uauggacaacggugugga

SEQ ID NO: 171212 - RNA, 15 nt, Human herpesvirus 6B
uauggggaagaucua

SEQ ID NO: 171213 - RNA, 21 nt, Human herpesvirus 6B
uauggaguccuuguuaguuua

SEQ ID NO: 171214 - RNA, 23 nt, Human herpesvirus 6B
uaugaaccacguuuuuccauguc

SEQ ID NO: 171215 - RNA, 15 nt, Human herpesvirus 6B
uaugacaauugcaga

SEQ ID NO: 171216 - RNA, 23 nt, Human herpesvirus 6B
uaugaaaagcuggaaaacuauua

SEQ ID NO: 171217 - RNA, 13 nt, Human herpesvirus 6B
uaugaaaauugcu

SEQ ID NO: 171218 - RNA, 16 nt, Human herpesvirus 6B
uaugacugacaaggua

SEQ ID NO: 171219 - RNA, 15 nt, Human herpesvirus 6B
uaucggucaaaacag

SEQ ID NO: 171220 - RNA, 15 nt, Human herpesvirus 6B
uaucgucuacccuau

SEQ ID NO: 171221 - RNA, 20 nt, Human herpesvirus 6B
uaucuccaauagauuucaua

SEQ ID NO: 171222 - RNA, 21 nt, Human herpesvirus 6B
uaucugccccccuucauccag

SEQ ID NO: 171223 - RNA, 22 nt, Human herpesvirus 6B
uaucugccccccuucauccagc

SEQ ID NO: 171224 - RNA, 16 nt, Human herpesvirus 6B
uaucuguugagucucu

SEQ ID NO: 171225 - RNA, 19 nt, Human herpesvirus 6B
uaucgcgcagaccauaaaa

SEQ ID NO: 171226 - RNA, 16 nt, Human herpesvirus 6B
uaucggcagugcaaag

SEQ ID NO: 171227 - RNA, 12 nt, Human herpesvirus 6B
uaucgcaaugau

SEQ ID NO: 171228 - RNA, 12 nt, Human herpesvirus 6B
uaucgaguuuag

SEQ ID NO: 171229 - RNA, 17 nt, Human herpesvirus 6B
uauccugaaaauaaaca

SEQ ID NO: 171230 - RNA, 14 nt, Human herpesvirus 6B
uauccuauaaauac

SEQ ID NO: 171231 - RNA, 15 nt, Human herpesvirus 6B
uauccggccaauuca

SEQ ID NO: 171232 - RNA, 17 nt, Human herpesvirus 6B
uaucaugagagagcaaa

SEQ ID NO: 171233 - RNA, 17 nt, Human herpesvirus 6B
uauccaggcaugugauu

SEQ ID NO: 171234 - RNA, 17 nt, Human herpesvirus 6B
uaucacguaucucuggu

SEQ ID NO: 171235 - RNA, 13 nt, Human herpesvirus 6B
uaucacaauacac

SEQ ID NO: 171236 - RNA, 14 nt, Human herpesvirus 6B
uaucacaauacaca

SEQ ID NO: 171237 - RNA, 15 nt, Human herpesvirus 6B
uaucacaauacacag

SEQ ID NO: 171238 - RNA, 19 nt, Human herpesvirus 6B
uaucagagcgggcuauaau

SEQ ID NO: 171239 - RNA, 21 nt, Human herpesvirus 6B
uaucacacaucgagcccugcu

SEQ ID NO: 171240 - RNA, 19 nt, Human herpesvirus 6B
uccacacuguuuacuuaaa

SEQ ID NO: 171241 - RNA, 22 nt, Human herpesvirus 6B
uccaauggccuuucuguuuuaa

SEQ ID NO: 171242 - RNA, 14 nt, Human herpesvirus 6B
uccacccacgugug

SEQ ID NO: 171243 - RNA, 17 nt, Human herpesvirus 6B
uccacccacgugugauu

SEQ ID NO: 171244 - RNA, 19 nt, Human herpesvirus 6B
uccaccuggaaaaacugac

SEQ ID NO: 171245 - RNA, 13 nt, Human herpesvirus 6B
uccaauuacauca

SEQ ID NO: 171246 - RNA, 14 nt, Human herpesvirus 6B
uccaauuacaucaa

SEQ ID NO: 171247 - RNA, 14 nt, Human herpesvirus 6B
uccaauuacucaac

SEQ ID NO: 171248 - RNA, 20 nt, Human herpesvirus 6B
uccaauuacucaacauuaaa

SEQ ID NO: 171249 - RNA, 21 nt, Human herpesvirus 6B
uccaauuuaauauaucuugaa

SEQ ID NO: 171250 - RNA, 17 nt, Human herpesvirus 6B
ucaugagauacaaaaca

SEQ ID NO: 171251 - RNA, 18 nt, Human herpesvirus 6B
ucaugagccggcucaaga

SEQ ID NO: 171252 - RNA, 23 nt, Human herpesvirus 6B
ucaucuuugggaagucucuaguu

SEQ ID NO: 171253 - RNA, 14 nt, Human herpesvirus 6B
ucccauucacauaa

SEQ ID NO: 171254 - RNA, 21 nt, Human herpesvirus 6B
ucccauucagucucagcaauc

SEQ ID NO: 171255 - RNA, 20 nt, Human herpesvirus 6B
ucccagcucaccaccaucua

SEQ ID NO: 171256 - RNA, 22 nt, Human herpesvirus 6B
ucccagcauuuucaaaguuuuc

SEQ ID NO: 171257 - RNA, 15 nt, Human herpesvirus 6B
ucccuuaaaaaaaca

SEQ ID NO: 171258 - RNA, 22 nt, Human herpesvirus 6B
ucccuuaaaaaaacacaguauu

SEQ ID NO: 171259 - RNA, 16 nt, Human herpesvirus 6B
ucccccgcuguguuua

SEQ ID NO: 171260 - RNA, 17 nt, Human herpesvirus 6B
uccagugagaacauaua

SEQ ID NO: 171261 - RNA, 20 nt, Human herpesvirus 6B
uccauacggucgaaugagcu

SEQ ID NO: 171262 - RNA, 14 nt, Human herpesvirus 6B
uccagggaacuuga

SEQ ID NO: 171263 - RNA, 16 nt, Human herpesvirus 6B
uccaggcaugugauug

SEQ ID NO: 171264 - RNA, 18 nt, Human herpesvirus 6B
uccgacgguuguucuggu

SEQ ID NO: 171265 - RNA, 20 nt, Human herpesvirus 6B
uccgaaaaagguucaaacaa

SEQ ID NO: 171266 - RNA, 22 nt, Human herpesvirus 6B
uccgaaauuuccuuugugugau

SEQ ID NO: 171267 - RNA, 23 nt, Human herpesvirus 6B
uccucuacguauaaaaguccuca

SEQ ID NO: 171268 - RNA, 15 nt, Human herpesvirus 6B
uccuguucgauguac

SEQ ID NO: 171269 - RNA, 19 nt, Human herpesvirus 6B
uccuuaaaugacacagaau

SEQ ID NO: 171270 - RNA, 16 nt, Human herpesvirus 6B
uccuuacaaaccuucc

SEQ ID NO: 171271 - RNA, 15 nt, Human herpesvirus 6B
uccuuauaucugaaa

SEQ ID NO: 171272 - RNA, 14 nt, Human herpesvirus 6B
uccuucaaagugaa

SEQ ID NO: 171273 - RNA, 13 nt, Human herpesvirus 6B
uccugcaauuuga

SEQ ID NO: 171274 - RNA, 11 nt, Human herpesvirus 6B
uccugaucuca

SEQ ID NO: 171275 - RNA, 22 nt, Human herpesvirus 6B
uccugaucucacgucacaguuu

SEQ ID NO: 171276 - RNA, 18 nt, Human herpesvirus 6B
uccugaacuacacgauga

SEQ ID NO: 171277 - RNA, 17 nt, Human herpesvirus 6B
ucgaugucuugcuauuu

SEQ ID NO: 171278 - RNA, 17 nt, Human herpesvirus 6B
ucgaugauuuuucugcc

SEQ ID NO: 171279 - RNA, 13 nt, Human herpesvirus 6B
ucgauucggagaa

SEQ ID NO: 171280 - RNA, 17 nt, Human herpesvirus 6B
ucgauccaaaagauuau

SEQ ID NO: 171281 - RNA, 22 nt, Human herpesvirus 6B
ucgacacacaaagucaugcuuc

SEQ ID NO: 171282 - RNA, 21 nt, Human herpesvirus 6B
ucgagaccgacaguauuuacu

SEQ ID NO: 171283 - RNA, 23 nt, Human herpesvirus 6B
ucgagaucguuuugcaacuuaaa

SEQ ID NO: 171284 - RNA, 20 nt, Human herpesvirus 6B
ucgagaauacgcuguguuua

SEQ ID NO: 171285 - RNA, 14 nt, Human herpesvirus 6B
ucgagaaucuuccu

SEQ ID NO: 171286 - RNA, 16 nt, Human herpesvirus 6B
ucgacuucaaacaccu

SEQ ID NO: 171287 - RNA, 15 nt, Human herpesvirus 6B
ucgaaaauacaauga

SEQ ID NO: 171288 - RNA, 17 nt, Human herpesvirus 6B
uccuuugugugauauua

SEQ ID NO: 171289 - RNA, 16 nt, Human herpesvirus 6B
uccuuugccugcauua

SEQ ID NO: 171290 - RNA, 18 nt, Human herpesvirus 6B
ucgaaacgaaagcugaua

SEQ ID NO: 171291 - RNA, 16 nt, Human herpesvirus 6B
ucgaaagaguuauuaa

SEQ ID NO: 171292 - RNA, 20 nt, Human herpesvirus 6B
ucgaacucuucgauccaaua

SEQ ID NO: 171293 - RNA, 15 nt, Human herpesvirus 6B
ucgaaucgagaauuu

SEQ ID NO: 171294 - RNA, 22 nt, Human herpesvirus 6B
ucgaaugcuaggaagaugguau

SEQ ID NO: 171295 - RNA, 19 nt, Human herpesvirus 6B
uccuucggggacagugauu

SEQ ID NO: 171296 - RNA, 16 nt, Human herpesvirus 6B
uccuuccacuuguccg

SEQ ID NO: 171297 - RNA, 17 nt, Human herpesvirus 6B
uccuucaugauauucca

SEQ ID NO: 171298 - RNA, 22 nt, Human herpesvirus 6B
ucgcauuucucuacaugccaca

SEQ ID NO: 171299 - RNA, 19 nt, Human herpesvirus 6B
ucgccauagugaaagagua

SEQ ID NO: 171300 - RNA, 21 nt, Human herpesvirus 6B
ucgccgcuccggacccuccac

SEQ ID NO: 171301 - RNA, 17 nt, Human herpesvirus 6B
ucgcaaaagaacacaag

SEQ ID NO: 171302 - RNA, 20 nt, Human herpesvirus 6B
ucgcaaaccguccaaaccga

SEQ ID NO: 171303 - RNA, 16 nt, Human herpesvirus 6B
ucgauuaaugccacag

SEQ ID NO: 171304 - RNA, 20 nt, Human herpesvirus 6B
ucgauuacaaaacaaucuau

SEQ ID NO: 171305 - RNA, 17 nt, Human herpesvirus 6B
ucgauugccaaaggcac

SEQ ID NO: 171306 - RNA, 13 nt, Human herpesvirus 6B
ucgauugugaugu

SEQ ID NO: 171307 - RNA, 22 nt, Human herpesvirus 6B
ucgauuguucgcuugugucaug

SEQ ID NO: 171308 - RNA, 11 nt, Human herpesvirus 6B
ucgcaaugauu

SEQ ID NO: 171309 - RNA, 19 nt, Human herpesvirus 6B
ucgcacaaaaugauugcaa

SEQ ID NO: 171310 - RNA, 13 nt, Human herpesvirus 6B
ucgcaguccagca

SEQ ID NO: 171311 - RNA, 14 nt, Human herpesvirus 6B
ucgggauguccauu

SEQ ID NO: 171312 - RNA, 22 nt, Human herpesvirus 6B
ucggcguacauauaaacagauu

SEQ ID NO: 171313 - RNA, 13 nt, Human herpesvirus 6B
ucggcucuuugcu

SEQ ID NO: 171314 - RNA, 14 nt, Human herpesvirus 6B
ucgcgaagccuguc

SEQ ID NO: 171315 - RNA, 20 nt, Human herpesvirus 6B
ucggcgcaaacguacauggc

SEQ ID NO: 171316 - RNA, 11 nt, Human herpesvirus 6B
ucggcauuugu

SEQ ID NO: 171317 - RNA, 23 nt, Human herpesvirus 6B
ucuaaucaucggaggcaccuugu

SEQ ID NO: 171318 - RNA, 20 nt, Human herpesvirus 6B
ucuaaugcuagauaacucag

SEQ ID NO: 171319 - RNA, 21 nt, Human herpesvirus 6B
ucuaaggugacucuucucuaa

SEQ ID NO: 171320 - RNA, 19 nt, Human herpesvirus 6B
ucuaaaucgcgagacagau

SEQ ID NO: 171321 - RNA, 17 nt, Human herpesvirus 6B
ucuaaacacgaaaugaa

SEQ ID NO: 171322 - RNA, 22 nt, Human herpesvirus 6B
ucguuucugugaaucugcugau

SEQ ID NO: 171323 - RNA, 18 nt, Human herpesvirus 6B
ucguuuguugaaugcuua

SEQ ID NO: 171324 - RNA, 16 nt, Human herpesvirus 6B
ucguuuuaguuguaug

SEQ ID NO: 171325 - RNA, 14 nt, Human herpesvirus 6B
ucguuuuuauucau

SEQ ID NO: 171326 - RNA, 19 nt, Human herpesvirus 6B
ucguucagaauguuccaau

SEQ ID NO: 171327 - RNA, 16 nt, Human herpesvirus 6B
ucggucaccaacauuc

SEQ ID NO: 171328 - RNA, 22 nt, Human herpesvirus 6B
ucguucuugauccccccaaaau

SEQ ID NO: 171329 - RNA, 19 nt, Human herpesvirus 6B
ucuagaucugccaugggau

SEQ ID NO: 171330 - RNA, 20 nt, Human herpesvirus 6B
ucugcuuuacaucgaaucuc

SEQ ID NO: 171331 - RNA, 21 nt, Human herpesvirus 6B
ucugcuuuacaucgaaucuca

SEQ ID NO: 171332 - RNA, 21 nt, Human herpesvirus 6B
ucucuguguguguugugcgcu

SEQ ID NO: 171333 - RNA, 22 nt, Human herpesvirus 6B
ucucuguuuugagagcuacaca

SEQ ID NO: 171334 - RNA, 22 nt, Human herpesvirus 6B
ucucugcaugucuuuagaugga

SEQ ID NO: 171335 - RNA, 23 nt, Human herpesvirus 6B
ucucuaauccguuagucuacgca

SEQ ID NO: 171336 - RNA, 17 nt, Human herpesvirus 6B
ucuccaauagauuucau

SEQ ID NO: 171337 - RNA, 18 nt, Human herpesvirus 6B
ucuccgcccuccugggua

SEQ ID NO: 171338 - RNA, 13 nt, Human herpesvirus 6B
ucuccgcauguau

SEQ ID NO: 171339 - RNA, 19 nt, Human herpesvirus 6B
ucucccuacgcuaacgaac

SEQ ID NO: 171340 - RNA, 14 nt, Human herpesvirus 6B
ucuccugaucucac

SEQ ID NO: 171341 - RNA, 23 nt, Human herpesvirus 6B
ucuccguuacccgggagcuucac

SEQ ID NO: 171342 - RNA, 12 nt, Human herpesvirus 6B
ucuccgucucag

SEQ ID NO: 171343 - RNA, 16 nt, Human herpesvirus 6B
ucuuagaagcauuugc

SEQ ID NO: 171344 - RNA, 18 nt, Human herpesvirus 6B
ucuucaaauuuacucucc

SEQ ID NO: 171345 - RNA, 20 nt, Human herpesvirus 6B
ucuuugacauuuaccagaga

SEQ ID NO: 171346 - RNA, 15 nt, Human herpesvirus 6B
ucuuugaacagugac

SEQ ID NO: 171347 - RNA, 17 nt, Human herpesvirus 6B
ucuuugaacagugacag

SEQ ID NO: 171348 - RNA, 16 nt, Human herpesvirus 6B
ucuuauuaugugauuc

SEQ ID NO: 171349 - RNA, 14 nt, Human herpesvirus 6B
ucuuauuuaccuuc

SEQ ID NO: 171350 - RNA, 15 nt, Human herpesvirus 6B
ucuuauuuaccuucc

SEQ ID NO: 171351 - RNA, 16 nt, Human herpesvirus 6B
ucuggauacugaugaa

SEQ ID NO: 171352 - RNA, 13 nt, Human herpesvirus 6B
ucuggcuugucau

SEQ ID NO: 171353 - RNA, 19 nt, Human herpesvirus 6B
ucugggcgggaagaaaauc

SEQ ID NO: 171354 - RNA, 19 nt, Human herpesvirus 6B
ucuggggagcuucagguug

SEQ ID NO: 171355 - RNA, 18 nt, Human herpesvirus 6B
ucuggggcgggcauuauu

SEQ ID NO: 171356 - RNA, 12 nt, Human herpesvirus 6B
ucuuaacauauu

SEQ ID NO: 171357 - RNA, 16 nt, Human herpesvirus 6B
ucuguaggcaacuuaa

SEQ ID NO: 171358 - RNA, 22 nt, Human herpesvirus 6B
ucuggcgaugcagaugccugua

SEQ ID NO: 171359 - RNA, 20 nt, Human herpesvirus 6B
cugccuguucaacgucuuca

SEQ ID NO: 171360 - RNA, 14 nt, Human herpesvirus 6B
cugccuuaauguau

SEQ ID NO: 171361 - RNA, 13 nt, Human herpesvirus 6B
cugccuucacuuu

SEQ ID NO: 171362 - RNA, 14 nt, Human herpesvirus 6B
cugcucuaaaucag

SEQ ID NO: 171363 - RNA, 13 nt, Human herpesvirus 6B
cugcaagcucaug

SEQ ID NO: 171364 - RNA, 12 nt, Human herpesvirus 6B
cugcaaaacaaa

SEQ ID NO: 171365 - RNA, 15 nt, Human herpesvirus 6B
cugauuauuaucaca

SEQ ID NO: 171366 - RNA, 20 nt, Human herpesvirus 6B
cugauucgacaaaucaucac

SEQ ID NO: 171367 - RNA, 10 nt, Human herpesvirus 6B
cugauuucag

SEQ ID NO: 171368 - RNA, 17 nt, Human herpesvirus 6B
cucuuauggcaagcacu

SEQ ID NO: 171369 - RNA, 20 nt, Human herpesvirus 6B
cucugggaacauguaacuaa

SEQ ID NO: 171370 - RNA, 14 nt, Human herpesvirus 6B
cugguuuccaguac

SEQ ID NO: 171371 - RNA, 20 nt, Human herpesvirus 6B
cuguaagauuaaaugugaac

SEQ ID NO: 171372 - RNA, 14 nt, Human herpesvirus 6B
cugucuuccuguga

SEQ ID NO: 171373 - RNA, 17 nt, Human herpesvirus 6B
cugugaagaggugcaaa

SEQ ID NO: 171374 - RNA, 18 nt, Human herpesvirus 6B
cugugaagaggugcaaau

SEQ ID NO: 171375 - RNA, 13 nt, Human herpesvirus 6B
cugugauaugcaa

SEQ ID NO: 171376 - RNA, 22 nt, Human herpesvirus 6B
cugugagagaaugcaacauucu

SEQ ID NO: 171377 - RNA, 20 nt, Human herpesvirus 6B
cuguaauaguauugucugau

SEQ ID NO: 171378 - RNA, 21 nt, Human herpesvirus 6B
cuguacucuuucaagcagggg

SEQ ID NO: 171379 - RNA, 19 nt, Human herpesvirus 6B
cugucucagauauauacuu

SEQ ID NO: 171380 - RNA, 15 nt, Human herpesvirus 6B
cuuaaaagaaucaaa

SEQ ID NO: 171381 - RNA, 19 nt, Human herpesvirus 6B
cuuaaaaaaacacaguauu

SEQ ID NO: 171382 - RNA, 16 nt, Human herpesvirus 6B
cuguuuacgaaugaug

SEQ ID NO: 171383 - RNA, 17 nt, Human herpesvirus 6B
cuguuuccaauguccau

SEQ ID NO: 171384 - RNA, 22 nt, Human herpesvirus 6B
cuguuggagagacguuguuuga

SEQ ID NO: 171385 - RNA, 15 nt, Human herpesvirus 6B
cuguguauugugaua

SEQ ID NO: 171386 - RNA, 16 nt, Human herpesvirus 6B
cuguguauugugauag

SEQ ID NO: 171387 - RNA, 13 nt, Human herpesvirus 6B
cuguucgguuuaa

SEQ ID NO: 171388 - RNA, 20 nt, Human herpesvirus 6B
cuguucuucaucaucaccaa

SEQ ID NO: 171389 - RNA, 12 nt, Human herpesvirus 6B
cuguucuuucaa

SEQ ID NO: 171390 - RNA, 14 nt, Human herpesvirus 6B
cuguguguguugug

SEQ ID NO: 171391 - RNA, 14 nt, Human herpesvirus 6B
cucacaacaugauc

SEQ ID NO: 171392 - RNA, 16 nt, Human herpesvirus 6B
cuccauggguucuucg

SEQ ID NO: 171393 - RNA, 13 nt, Human herpesvirus 6B
cucauacauccag

SEQ ID NO: 171394 - RNA, 18 nt, Human herpesvirus 6B
cuacgauugcugucuucc

SEQ ID NO: 171395 - RNA, 15 nt, Human herpesvirus 6B
cuacggaaaaucuca

SEQ ID NO: 171396 - RNA, 20 nt, Human herpesvirus 6B
cuacggccagagacaugacc

SEQ ID NO: 171397 - RNA, 22 nt, Human herpesvirus 6B
cuacguuuuuauacacgaacua

SEQ ID NO: 171398 - RNA, 17 nt, Human herpesvirus 6B
cuauguuaacauuguga

SEQ ID NO: 171399 - RNA, 16 nt, Human herpesvirus 6B
cuauguacugaucucu

SEQ ID NO: 171400 - RNA, 20 nt, Human herpesvirus 6B
cuauguaugaacaggugcuu

SEQ ID NO: 171401 - RNA, 15 nt, Human herpesvirus 6B
cuaugucaaugugaa

SEQ ID NO: 171402 - RNA, 14 nt, Human herpesvirus 6B
cuauuaacacauac

SEQ ID NO: 171403 - RNA, 15 nt, Human herpesvirus 6B
cuauuaacacauaca

SEQ ID NO: 171404 - RNA, 16 nt, Human herpesvirus 6B
cuauuaacacauacau

SEQ ID NO: 171405 - RNA, 15 nt, Human herpesvirus 6B
cucaagagugcugau

SEQ ID NO: 171406 - RNA, 16 nt, Human herpesvirus 6B
cucaagauucuaugau

SEQ ID NO: 171407 - RNA, 15 nt, Human herpesvirus 6B
cucaagcacaaaacc

SEQ ID NO: 171408 - RNA, 18 nt, Human herpesvirus 6B
cuccuguuuaccguuuca

SEQ ID NO: 171409 - RNA, 19 nt, Human herpesvirus 6B
cuccuucuaauaucguuag

SEQ ID NO: 171410 - RNA, 14 nt, Human herpesvirus 6B
cucgacuucuuuca

SEQ ID NO: 171411 - RNA, 15 nt, Human herpesvirus 6B
cucucgaugaaaguu

SEQ ID NO: 171412 - RNA, 24 nt, Human herpesvirus 6B
cucuccaaguuagaaauuacacau

SEQ ID NO: 171413 - RNA, 17 nt, Human herpesvirus 6B
cucucaauuucacuuaa

SEQ ID NO: 171414 - RNA, 16 nt, Human herpesvirus 6B
cucucacggccauuua

SEQ ID NO: 171415 - RNA, 22 nt, Human herpesvirus 6B
cucugccuguucaacgucuuca

SEQ ID NO: 171416 - RNA, 13 nt, Human herpesvirus 6B
cucugagauuuga

SEQ ID NO: 171417 - RNA, 17 nt, Human herpesvirus 6B
cucuaaaacaagaccga

SEQ ID NO: 171418 - RNA, 20 nt, Human herpesvirus 6B
cucgugccaguucacacaga

SEQ ID NO: 171419 - RNA, 14 nt, Human herpesvirus 6B
cucuacgaucucau

SEQ ID NO: 171420 - RNA, 20 nt, Human herpesvirus 6B
cucuacgaucucauaugcau

SEQ ID NO: 171421 - RNA, 20 nt, Human herpesvirus 6B
cucuaacuguuguucuugga

SEQ ID NO: 171422 - RNA, 17 nt, Human herpesvirus 6B
cguggaauuuguggaac

SEQ ID NO: 171423 - RNA, 21 nt, Human herpesvirus 6B
cguggugaugauuugucgaau

SEQ ID NO: 171424 - RNA, 23 nt, Human herpesvirus 6B
cguuuucgugguugucuuugucc

SEQ ID NO: 171425 - RNA, 18 nt, Human herpesvirus 6B
cuaaaaaaaaaaacacac

SEQ ID NO: 171426 - RNA, 19 nt, Human herpesvirus 6B
cguuuccaggcagaguuuu

SEQ ID NO: 171427 - RNA, 21 nt, Human herpesvirus 6B
cuaaacggagacugcacagaa

SEQ ID NO: 171428 - RNA, 13 nt, Human herpesvirus 6B
cuaaacacugacu

SEQ ID NO: 171429 - RNA, 16 nt, Human herpesvirus 6B
cuaaaaucugcuaacg

SEQ ID NO: 171430 - RNA, 18 nt, Human herpesvirus 6B
cuaacgaacaaaucucca

SEQ ID NO: 171431 - RNA, 13 nt, Human herpesvirus 6B
cuaaacuuaacuu

SEQ ID NO: 171432 - RNA, 13 nt, Human herpesvirus 6B
cuaaagauuugga

SEQ ID NO: 171433 - RNA, 23 nt, Human herpesvirus 6B
cuaaagauuuggaggugagacau

SEQ ID NO: 171434 - RNA, 20 nt, Human herpesvirus 6B
cuaaguuuugagugcuauuu

SEQ ID NO: 171435 - RNA, 21 nt, Human herpesvirus 6B
cuaauaaacucugccuguuca

SEQ ID NO: 171436 - RNA, 20 nt, Human herpesvirus 6B
cuaauaaaauacacaucuga

SEQ ID NO: 171437 - RNA, 18 nt, Human herpesvirus 6B
cuaaggugacucuucucu

SEQ ID NO: 171438 - RNA, 22 nt, Human herpesvirus 6B
cuaacuaaaucgcgccauauca

SEQ ID NO: 171439 - RNA, 23 nt, Human herpesvirus 6B
cuaacuaaaucgcgccauaucac

SEQ ID NO: 171440 - RNA, 15 nt, Human herpesvirus 6B
cuaagaaauauugca

SEQ ID NO: 171441 - RNA, 16 nt, Human herpesvirus 6B
cuaagaaauauugcau

SEQ ID NO: 171442 - RNA, 16 nt, Human herpesvirus 6B
cuaagauugugcaguu

SEQ ID NO: 171443 - RNA, 21 nt, Human herpesvirus 6B
cuaagauugugcaguucuuac

SEQ ID NO: 171444 - RNA, 18 nt, Human herpesvirus 6B
cuaagacgagauguuucu

SEQ ID NO: 171445 - RNA, 13 nt, Human herpesvirus 6B
cuaagagauuuac

SEQ ID NO: 171446 - RNA, 15 nt, Human herpesvirus 6B
cuaagauaauggauc

SEQ ID NO: 171447 - RNA, 20 nt, Human herpesvirus 6B
cuaagauaguuuugcauuaa

SEQ ID NO: 171448 - RNA, 15 nt, Human herpesvirus 6B
cuaagauugugcagu

SEQ ID NO: 171449 - RNA, 17 nt, Human herpesvirus 6B
cuaagcgacuuuuuaac

SEQ ID NO: 171450 - RNA, 13 nt, Human herpesvirus 6B
cuacauaguguag

SEQ ID NO: 171451 - RNA, 14 nt, Human herpesvirus 6B
cuacauaugccgac

SEQ ID NO: 171452 - RNA, 15 nt, Human herpesvirus 6B
cuacacgaugaacga

SEQ ID NO: 171453 - RNA, 23 nt, Human herpesvirus 6B
cuacagaaguuucggcaacugaa

SEQ ID NO: 171454 - RNA, 21 nt, Human herpesvirus 6B
cuacacugcgaauccgucucc

SEQ ID NO: 171455 - RNA, 14 nt, Human herpesvirus 6B
cuacagacuccuca

SEQ ID NO: 171456 - RNA, 20 nt, Human herpesvirus 6B
cuacagacuccucaccgaaa

SEQ ID NO: 171457 - RNA, 16 nt, Human herpesvirus 6B
cgucauaaacaaaccg

SEQ ID NO: 171458 - RNA, 16 nt, Human herpesvirus 6B
cgucauaccgauccca

SEQ ID NO: 171459 - RNA, 15 nt, Human herpesvirus 6B
cgucuguugcuguag

SEQ ID NO: 171460 - RNA, 22 nt, Human herpesvirus 6B
cgucuauuagauaagagaguuu

SEQ ID NO: 171461 - RNA, 12 nt, Human herpesvirus 6B
cguauacuuccu

SEQ ID NO: 171462 - RNA, 14 nt, Human herpesvirus 6B
cguauuaauaaaga

SEQ ID NO: 171463 - RNA, 17 nt, Human herpesvirus 6B
cguauaaaaguccucaa

SEQ ID NO: 171464 - RNA, 19 nt, Human herpesvirus 6B
cguaggaagaucaugacaa

SEQ ID NO: 171465 - RNA, 15 nt, Human herpesvirus 6B
cguaggcaugucugu

SEQ ID NO: 171466 - RNA, 22 nt, Human herpesvirus 6B
cggugagaagauuugugugaac

SEQ ID NO: 171467 - RNA, 20 nt, Human herpesvirus 6B
cgguccguuuuuucugcaaa

SEQ ID NO: 171468 - RNA, 22 nt, Human herpesvirus 6B
cggugauaccgucuuugcauau

SEQ ID NO: 171469 - RNA, 20 nt, Human herpesvirus 6B
cggucugagguuggagacga

SEQ ID NO: 171470 - RNA, 14 nt, Human herpesvirus 6B
cggucuacugugua

SEQ ID NO: 171471 - RNA, 22 nt, Human herpesvirus 6B
cggucuacuguguauuguguac

SEQ ID NO: 171472 - RNA, 17 nt, Human herpesvirus 6B
cgguacgcuucuuucac

SEQ ID NO: 171473 - RNA, 11 nt, Human herpesvirus 6B
cggagacacau

SEQ ID NO: 171474 - RNA, 15 nt, Human herpesvirus 6B
cggagacacauagcc

SEQ ID NO: 171475 - RNA, 15 nt, Human herpesvirus 6B
cggaacauuguucua

SEQ ID NO: 171476 - RNA, 15 nt, Human herpesvirus 6B
cggaagacguuucua

SEQ ID NO: 171477 - RNA, 17 nt, Human herpesvirus 6B
cggaagggcucuguuac

SEQ ID NO: 171478 - RNA, 22 nt, Human herpesvirus 6B
cggaauuguucuucaacauauc

SEQ ID NO: 171479 - RNA, 13 nt, Human herpesvirus 6B
cggacgaucccau

SEQ ID NO: 171480 - RNA, 22 nt, Human herpesvirus 6B
aaacacgauccaauuacaucaa

SEQ ID NO: 171481 - RNA, 19 nt, Human herpesvirus 6B
aaacacugacuaaacguac

SEQ ID NO: 171482 - RNA, 17 nt, Human herpesvirus 6B
aaacaccucacagucua

SEQ ID NO: 171483 - RNA, 16 nt, Human herpesvirus 6B
aaacaggguugcgaua

SEQ ID NO: 171484 - RNA, 16 nt, Human herpesvirus 6B
aaacagauuuuacuuc

SEQ ID NO: 171485 - RNA, 20 nt, Human herpesvirus 6B
cgccuuguguauuugugaac

SEQ ID NO: 171486 - RNA, 24 nt, Human herpesvirus 6B
aaacaugcaacccgccacucuaca

SEQ ID NO: 171487 - RNA, 17 nt, Human herpesvirus 6B
aaacaugauuguaauaa

SEQ ID NO: 171488 - RNA, 16 nt, Human herpesvirus 6B
aaacauucuuaaauuc

SEQ ID NO: 171489 - RNA, 18 nt, Human herpesvirus 6B
cgcgcaaaggguaguuuu

SEQ ID NO: 171490 - RNA, 19 nt, Human herpesvirus 6B
aaaccaggaauccuauuca

SEQ ID NO: 171491 - RNA, 22 nt, Human herpesvirus 6B
cgcugauuccuguaaggucaaa

SEQ ID NO: 171492 - RNA, 12 nt, Human herpesvirus 6B
cgcucacaacau

SEQ ID NO: 171493 - RNA, 18 nt, Human herpesvirus 6B
cgcgccauaucacagcau

SEQ ID NO: 171494 - RNA, 17 nt, Human herpesvirus 6B
cgcgguauaaugcauga

SEQ ID NO: 171495 - RNA, 23 nt, Human herpesvirus 6B
cgcggggacacaucuauguguau

SEQ ID NO: 171496 - RNA, 18 nt, Human herpesvirus 6B
cgcuaaggugagccagau

SEQ ID NO: 171497 - RNA, 20 nt, Human herpesvirus 6B
cgcagauaaaaaugaucgcc

SEQ ID NO: 171498 - RNA, 21 nt, Human herpesvirus 6B
cgcaguuucuguuuuucucau

SEQ ID NO: 171499 - RNA, 21 nt, Human herpesvirus 6B
cgcaguuccuguuuuucucau

SEQ ID NO: 171500 - RNA, 18 nt, Human herpesvirus 6B
ccuuaucgaaagacacgg

SEQ ID NO: 171501 - RNA, 17 nt, Human herpesvirus 6B
ccuuauaaugugaacua

SEQ ID NO: 171502 - RNA, 20 nt, Human herpesvirus 6B
ccuuauaaugugaacuaaau

SEQ ID NO: 171503 - RNA, 17 nt, Human herpesvirus 6B
ccuucaaagugaauucc

SEQ ID NO: 171504 - RNA, 12 nt, Human herpesvirus 6B
cgccacucuaca

SEQ ID NO: 171505 - RNA, 19 nt, Human herpesvirus 6B
cgcauagaccaaccagcaa

SEQ ID NO: 171506 - RNA, 22 nt, Human herpesvirus 6B
cgcauagauggguaagugccua

SEQ ID NO: 171507 - RNA, 18 nt, Human herpesvirus 6B
cgccaacggaaagcaucu

SEQ ID NO: 171508 - RNA, 14 nt, Human herpesvirus 6B
cgccucccauagag

SEQ ID NO: 171509 - RNA, 22 nt, Human herpesvirus 6B
cgccgcguccgaagaaucugcc

SEQ ID NO: 171510 - RNA, 19 nt, Human herpesvirus 6B
aaaauuugugcgaauugug

SEQ ID NO: 171511 - RNA, 22 nt, Human herpesvirus 6B
aaaauuuucgaggaaaacucgc

SEQ ID NO: 171512 - RNA, 15 nt, Human herpesvirus 6B
aaacaacuggaugaa

SEQ ID NO: 171513 - RNA, 16 nt, Human herpesvirus 6B
aaacaaauucuuacaa

SEQ ID NO: 171514 - RNA, 19 nt, Human herpesvirus 6B
aaacaaauucuuacaagua

SEQ ID NO: 171515 - RNA, 22 nt, Human herpesvirus 6B
aaacaaauucuuacaaguaugu

SEQ ID NO: 171516 - RNA, 15 nt, Human herpesvirus 6B
aaacacaguauuuaa

SEQ ID NO: 171517 - RNA, 16 nt, Human herpesvirus 6B
aaacaccaacaugacu

SEQ ID NO: 171518 - RNA, 21 nt, Human herpesvirus 6B
aaacaccaacaugacuggaau

SEQ ID NO: 171519 - RNA, 13 nt, Human herpesvirus 6B
aaacaccacuuga

SEQ ID NO: 171520 - RNA, 14 nt, Human herpesvirus 6B
aaacaccacuugau

SEQ ID NO: 171521 - RNA, 12 nt, Human herpesvirus 6B
aaacaaauaucg

SEQ ID NO: 171522 - RNA, 17 nt, Human herpesvirus 6B
aaacaagguaagcaccu

SEQ ID NO: 171523 - RNA, 19 nt, Human herpesvirus 6B
ccuguccgugagacaccgc

SEQ ID NO: 171524 - RNA, 22 nt, Human herpesvirus 6B
aaaauuuauaaaagaagcauga

SEQ ID NO: 171525 - RNA, 14 nt, Human herpesvirus 6B
aaaauugacaauga

SEQ ID NO: 171526 - RNA, 11 nt, Human herpesvirus 6B
aaaauucacug

SEQ ID NO: 171527 - RNA, 18 nt, Human herpesvirus 6B
aaaauuacuaauguggau

SEQ ID NO: 171528 - RNA, 13 nt, Human herpesvirus 6B
ccucagucuucaa

SEQ ID NO: 171529 - RNA, 21 nt, Human herpesvirus 6B
ccuauaaaaaaagcaaauacu

SEQ ID NO: 171530 - RNA, 19 nt, Human herpesvirus 6B
ccucagcaaacaugugauu

SEQ ID NO: 171531 - RNA, 13 nt, Human herpesvirus 6B
ccuccaacaaaga

SEQ ID NO: 171532 - RNA, 23 nt, Human herpesvirus 6B
ccuccaacaaagauuacguccac

SEQ ID NO: 171533 - RNA, 15 nt, Human herpesvirus 6B
ccucauuaugaauaa

SEQ ID NO: 171534 - RNA, 16 nt, Human herpesvirus 6B
ccugcacaaacuaauc

SEQ ID NO: 171535 - RNA, 21 nt, Human herpesvirus 6B
ccugccgaccugauccaugag

SEQ ID NO: 171536 - RNA, 16 nt, Human herpesvirus 6B
ccugccuacacugcga

SEQ ID NO: 171537 - RNA, 17 nt, Human herpesvirus 6B
ccugccuacacugcgaa

SEQ ID NO: 171538 - RNA, 22 nt, Human herpesvirus 6B
ccugcagcgauauggaaacacu

SEQ ID NO: 171539 - RNA, 19 nt, Human herpesvirus 6B
ccuacgcuaacgaacaaau

SEQ ID NO: 171540 - RNA, 18 nt, Human herpesvirus 6B
ccuacuuuggauuuugau

SEQ ID NO: 171541 - RNA, 19 nt, Human herpesvirus 6B
ccuagaguuguuuuuagua

SEQ ID NO: 171542 - RNA, 14 nt, Human herpesvirus 6B
ccuaauaagacaga

SEQ ID NO: 171543 - RNA, 13 nt, Human herpesvirus 6B
ccuaauuccaauu

SEQ ID NO: 171544 - RNA, 18 nt, Human herpesvirus 6B
ccuacacuuuuccaguga

SEQ ID NO: 171545 - RNA, 12 nt, Human herpesvirus 6B
ccuacauaugcc

SEQ ID NO: 171546 - RNA, 17 nt, Human herpesvirus 6B
ccuaagaaauauugcau

SEQ ID NO: 171547 - RNA, 14 nt, Human herpesvirus 6B
ccguguuacugaca

SEQ ID NO: 171548 - RNA, 15 nt, Human herpesvirus 6B
ccguucaccauucca

SEQ ID NO: 171549 - RNA, 14 nt, Human herpesvirus 6B
ccggcacauacaca

SEQ ID NO: 171550 - RNA, 14 nt, Human herpesvirus 6B
cccucauacaucca

SEQ ID NO: 171551 - RNA, 15 nt, Human herpesvirus 6B
cccucauacauccag

SEQ ID NO: 171552 - RNA, 23 nt, Human herpesvirus 6B
cccugccgaccugauccaugagc

SEQ ID NO: 171553 - RNA, 14 nt, Human herpesvirus 6B
ccggaguugcagua

SEQ ID NO: 171554 - RNA, 13 nt, Human herpesvirus 6B
cccuucauccagc

SEQ ID NO: 171555 - RNA, 16 nt, Human herpesvirus 6B
ccccucauacauccag

SEQ ID NO: 171556 - RNA, 16 nt, Human herpesvirus 6B
cccuaaaaucugcuaa

SEQ ID NO: 171557 - RNA, 17 nt, Human herpesvirus 6B
cccuaaaaucugcuaac

SEQ ID NO: 171558 - RNA, 16 nt, Human herpesvirus 6B
cccuaacgugggaggu

SEQ ID NO: 171559 - RNA, 16 nt, Human herpesvirus 6B
cccggggaugggaugu

SEQ ID NO: 171560 - RNA, 21 nt, Human herpesvirus 6B
cccggaguacacguauguacu

SEQ ID NO: 171561 - RNA, 23 nt, Human herpesvirus 6B
cccaucgucuccuccaacaaaga

SEQ ID NO: 171562 - RNA, 20 nt, Human herpesvirus 6B
cccaugaaaaucauuaccag

SEQ ID NO: 171563 - RNA, 16 nt, Human herpesvirus 6B
cccagcugaaauagac

SEQ ID NO: 171564 - RNA, 19 nt, Human herpesvirus 6B
cccagaaggauccauucua

SEQ ID NO: 171565 - RNA, 20 nt, Human herpesvirus 6B
cccagaaggauccauucuag

SEQ ID NO: 171566 - RNA, 16 nt, Human herpesvirus 6B
cccauaggugauuuca

SEQ ID NO: 171567 - RNA, 23 nt, Human herpesvirus 6B
ccaauuugucgcacguguugaau

SEQ ID NO: 171568 - RNA, 14 nt, Human herpesvirus 6B
ccacuugaucacaa

SEQ ID NO: 171569 - RNA, 18 nt, Human herpesvirus 6B
ccaggaauucacuuugaa

SEQ ID NO: 171570 - RNA, 13 nt, Human herpesvirus 6B
ccaggcagaguuu

SEQ ID NO: 171571 - RNA, 14 nt, Human herpesvirus 6B
ccagagacaugacc

SEQ ID NO: 171572 - RNA, 16 nt, Human herpesvirus 6B
ccagagauacgugaua

SEQ ID NO: 171573 - RNA, 19 nt, Human herpesvirus 6B
ccagauaaacaaaaaucca

SEQ ID NO: 171574 - RNA, 20 nt, Human herpesvirus 6B
ccaguaagucuucauuaaaa

SEQ ID NO: 171575 - RNA, 20 nt, Human herpesvirus 6B
ccauacggucgaaugagcuu

SEQ ID NO: 171576 - RNA, 16 nt, Human herpesvirus 6B
ccauacuguguaacuc

SEQ ID NO: 171577 - RNA, 18 nt, Human herpesvirus 6B
ccaucauucuugucugca

SEQ ID NO: 171578 - RNA, 15 nt, Human herpesvirus 6B
ccauaucacagcauu

SEQ ID NO: 171579 - RNA, 23 nt, Human herpesvirus 6B
ccauguuuuuacuugauaaacug

SEQ ID NO: 171580 - RNA, 14 nt, Human herpesvirus 6B
ccauccgucaugua

SEQ ID NO: 171581 - RNA, 22 nt, Human herpesvirus 6B
caugcgagcaaaaaauaguuuu

SEQ ID NO: 171582 - RNA, 15 nt, Human herpesvirus 6B
caugucuuacagcuu

SEQ ID NO: 171583 - RNA, 17 nt, Human herpesvirus 6B
caugugauugucuuuuc

SEQ ID NO: 171584 - RNA, 23 nt, Human herpesvirus 6B
caugucgaauuuucgucugauac

SEQ ID NO: 171585 - RNA, 15 nt, Human herpesvirus 6B
cauguauucuccuca

SEQ ID NO: 171586 - RNA, 13 nt, Human herpesvirus 6B
cauuaacauacag

SEQ ID NO: 171587 - RNA, 21 nt, Human herpesvirus 6B
cauuaacauacagauguguau

SEQ ID NO: 171588 - RNA, 12 nt, Human herpesvirus 6B
cauuaaacugag

SEQ ID NO: 171589 - RNA, 18 nt, Human herpesvirus 6B
cauuaaaaaaauagcaga

SEQ ID NO: 171590 - RNA, 12 nt, Human herpesvirus 6B
cauguuguucuu

SEQ ID NO: 171591 - RNA, 11 nt, Human herpesvirus 6B
cauguuuacug

SEQ ID NO: 171592 - RNA, 20 nt, Human herpesvirus 6B
cauguuuacugcaugcuaau

SEQ ID NO: 171593 - RNA, 19 nt, Human herpesvirus 6B
caucucaaaaaacauauaa

SEQ ID NO: 171594 - RNA, 12 nt, Human herpesvirus 6B
caucugcaaaaa

SEQ ID NO: 171595 - RNA, 18 nt, Human herpesvirus 6B
cauaucacccccauacac

SEQ ID NO: 171596 - RNA, 23 nt, Human herpesvirus 6B
cauaguuuggaucuucugcuaau

SEQ ID NO: 171597 - RNA, 23 nt, Human herpesvirus 6B
cauagcaauucuuauuuaccuuc

SEQ ID NO: 171598 - RNA, 18 nt, Human herpesvirus 6B
cauagacugaacacaaaa

SEQ ID NO: 171599 - RNA, 20 nt, Human herpesvirus 6B
cauagaucuuccccauaaca

SEQ ID NO: 171600 - RNA, 20 nt, Human herpesvirus 6B
cauagauggguaagugccua

SEQ ID NO: 171601 - RNA, 23 nt, Human herpesvirus 6B
cauacuuguaaacuggucugcuu

SEQ ID NO: 171602 - RNA, 16 nt, Human herpesvirus 6B
ccaaucugugcaacac

SEQ ID NO: 171603 - RNA, 22 nt, Human herpesvirus 6B
ccaaucugugcaacacaacaaa

SEQ ID NO: 171604 - RNA, 13 nt, Human herpesvirus 6B
ccaauuacaucaa

SEQ ID NO: 171605 - RNA, 19 nt, Human herpesvirus 6B
ccaaggcaacggcacgaga

SEQ ID NO: 171606 - RNA, 18 nt, Human herpesvirus 6B
ccaagucacguacauaaa

SEQ ID NO: 171607 - RNA, 20 nt, Human herpesvirus 6B
ccaagaaaaaacacaaaaag

SEQ ID NO: 171608 - RNA, 22 nt, Human herpesvirus 6B
ccaagaaaaaacacaaaaagac

SEQ ID NO: 171609 - RNA, 17 nt, Human herpesvirus 6B
cauuucucuacaugcca

SEQ ID NO: 171610 - RNA, 13 nt, Human herpesvirus 6B
cauuucauuguau

SEQ ID NO: 171611 - RNA, 14 nt, Human herpesvirus 6B
cauuucauuuauua

SEQ ID NO: 171612 - RNA, 13 nt, Human herpesvirus 6B
cauuuaccagaga

SEQ ID NO: 171613 - RNA, 23 nt, Human herpesvirus 6B
cauuuauuauaagcaaacaugua

SEQ ID NO: 171614 - RNA, 22 nt, Human herpesvirus 6B
cauuugccgggaugagcuucaa

SEQ ID NO: 171615 - RNA, 22 nt, Human herpesvirus 6B
cauuucauuaaauaacgguguu

SEQ ID NO: 171616 - RNA, 14 nt, Human herpesvirus 6B
cauuaauacugguu

SEQ ID NO: 171617 - RNA, 22 nt, Human herpesvirus 6B
cauuaccucugcaauagcagaa

SEQ ID NO: 171618 - RNA, 14 nt, Human herpesvirus 6B
cauuaaugucacug

SEQ ID NO: 171619 - RNA, 20 nt, Human herpesvirus 6B
cauuaaugucacugucgaau

SEQ ID NO: 171620 - RNA, 22 nt, Human herpesvirus 6B
caggcacgacgaaaacuuuuaa

SEQ ID NO: 171621 - RNA, 14 nt, Human herpesvirus 6B
caggauuauaaaaa

SEQ ID NO: 171622 - RNA, 21 nt, Human herpesvirus 6B
cagagaaaaaacaaagcuuua

SEQ ID NO: 171623 - RNA, 12 nt, Human herpesvirus 6B
cagaauguucca

SEQ ID NO: 171624 - RNA, 22 nt, Human herpesvirus 6B
cagacacgcuaaaaacagacga

SEQ ID NO: 171625 - RNA, 23 nt, Human herpesvirus 6B
cagggaacuugauguugaucuga

SEQ ID NO: 171626 - RNA, 14 nt, Human herpesvirus 6B
cagggaacuugaug

SEQ ID NO: 171627 - RNA, 15 nt, Human herpesvirus 6B
cagggugcuuugcuu

SEQ ID NO: 171628 - RNA, 20 nt, Human herpesvirus 6B
cagguaagcagcaaaacaac

SEQ ID NO: 171629 - RNA, 20 nt, Human herpesvirus 6B
cagggggcgcggggacacau

SEQ ID NO: 171630 - RNA, 21 nt, Human herpesvirus 6B
caguauaacggaaauccuuga

SEQ ID NO: 171631 - RNA, 16 nt, Human herpesvirus 6B
caguacauagaaucuc

SEQ ID NO: 171632 - RNA, 22 nt, Human herpesvirus 6B
caguaagucuucauuaaaacuc

SEQ ID NO: 171633 - RNA, 13 nt, Human herpesvirus 6B
caguaagauuuaa

SEQ ID NO: 171634 - RNA, 14 nt, Human herpesvirus 6B
caguaaaacaugua

SEQ ID NO: 171635 - RNA, 23 nt, Human herpesvirus 6B
cagguugccaauaaaauguccau

SEQ ID NO: 171636 - RNA, 21 nt, Human herpesvirus 6B
caggugucucaaccuucauua

SEQ ID NO: 171637 - RNA, 20 nt, Human herpesvirus 6B
cauaaaagggcgcuggugac

SEQ ID NO: 171638 - RNA, 13 nt, Human herpesvirus 6B
cauaacaucucag

SEQ ID NO: 171639 - RNA, 22 nt, Human herpesvirus 6B
cauaaguuaauuccagcuuucu

SEQ ID NO: 171640 - RNA, 16 nt, Human herpesvirus 6B
cauaaguuaauuccag

SEQ ID NO: 171641 - RNA, 15 nt, Human herpesvirus 6B
cauaaggcaaaaacc

SEQ ID NO: 171642 - RNA, 17 nt, Human herpesvirus 6B
cauaagaauuacaauac

SEQ ID NO: 171643 - RNA, 17 nt, Human herpesvirus 6B
cauaacacgcaccuaaa

SEQ ID NO: 171644 - RNA, 11 nt, Human herpesvirus 6B
cauaauccuuu

SEQ ID NO: 171645 - RNA, 22 nt, Human herpesvirus 6B
cauaauucggucaccaacauuc

SEQ ID NO: 171646 - RNA, 22 nt, Human herpesvirus 6B
cauacaauauuuccauaaguua

SEQ ID NO: 171647 - RNA, 19 nt, Human herpesvirus 6B
cauacagacauugcuuucu

SEQ ID NO: 171648 - RNA, 20 nt, Human herpesvirus 6B
cauacauaauucggucacca

SEQ ID NO: 171649 - RNA, 14 nt, Human herpesvirus 6B
cauacauccagaaa

SEQ ID NO: 171650 - RNA, 19 nt, Human herpesvirus 6B
cauacuguguaacucuuua

SEQ ID NO: 171651 - RNA, 14 nt, Human herpesvirus 6B
caguguuuccaaua

SEQ ID NO: 171652 - RNA, 19 nt, Human herpesvirus 6B
caguguuugccaaccaaau

SEQ ID NO: 171653 - RNA, 16 nt, Human herpesvirus 6B
caguuacaauuacuaa

SEQ ID NO: 171654 - RNA, 22 nt, Human herpesvirus 6B
caguucaaaauuuuucuguaag

SEQ ID NO: 171655 - RNA, 19 nt, Human herpesvirus 6B
caguuaggauuacacuguc

SEQ ID NO: 171656 - RNA, 21 nt, Human herpesvirus 6B
caguuagugcaccgagaaaua

SEQ ID NO: 171657 - RNA, 15 nt, Human herpesvirus 6B
caguuuaccuaucaa

SEQ ID NO: 171658 - RNA, 16 nt, Human herpesvirus 6B
caguuccuguuuuucu

SEQ ID NO: 171659 - RNA, 18 nt, Human herpesvirus 6B
caguuucucgaaaauaca

SEQ ID NO: 171660 - RNA, 15 nt, Human herpesvirus 6B
caguuucuguuuuuc

SEQ ID NO: 171661 - RNA, 15 nt, Human herpesvirus 6B
cagucugcuaaaaau

SEQ ID NO: 171662 - RNA, 19 nt, Human herpesvirus 6B
cagucuucaauaaaaacuc

SEQ ID NO: 171663 - RNA, 22 nt, Human herpesvirus 6B
cagucuucaauaaaaacucaau

SEQ ID NO: 171664 - RNA, 16 nt, Human herpesvirus 6B
gccagcauucuuauca

SEQ ID NO: 171665 - RNA, 24 nt, Human herpesvirus 6B
gcccuacuacaguggauguuagau

SEQ ID NO: 171666 - RNA, 22 nt, Human herpesvirus 6B
gcccucuagcgggguugcuaua

SEQ ID NO: 171667 - RNA, 13 nt, Human herpesvirus 6B
gcccacauuuccu

SEQ ID NO: 171668 - RNA, 16 nt, Human herpesvirus 6B
gccagaucgaagaaaa

SEQ ID NO: 171669 - RNA, 15 nt, Human herpesvirus 6B
gccagagacaugacc

SEQ ID NO: 171670 - RNA, 11 nt, Human herpesvirus 6B
gccaaccaaau

SEQ ID NO: 171671 - RNA, 15 nt, Human herpesvirus 6B
gccaaccaaaugccu

SEQ ID NO: 171672 - RNA, 22 nt, Human herpesvirus 6B
gcaguuucuguuuuucucauaa

SEQ ID NO: 171673 - RNA, 19 nt, Human herpesvirus 6B
gcauauuauuaacaaugaa

SEQ ID NO: 171674 - RNA, 22 nt, Human herpesvirus 6B
gccaaaaaaauacaguauauaa

SEQ ID NO: 171675 - RNA, 16 nt, Human herpesvirus 6B
gccaaaaaaguuuauu

SEQ ID NO: 171676 - RNA, 15 nt, Human herpesvirus 6B
gcauuugugcucgca

SEQ ID NO: 171677 - RNA, 15 nt, Human herpesvirus 6B
gccaaaaaaauacag

SEQ ID NO: 171678 - RNA, 12 nt, Human herpesvirus 6B
gcgaacuaagaa

SEQ ID NO: 171679 - RNA, 20 nt, Human herpesvirus 6B
gcgacgacggggacuaccga

SEQ ID NO: 171680 - RNA, 13 nt, Human herpesvirus 6B
gcgacaaagcuau

SEQ ID NO: 171681 - RNA, 16 nt, Human herpesvirus 6B
gcgacauaguggcuau

SEQ ID NO: 171682 - RNA, 19 nt, Human herpesvirus 6B
gcgacacggugagucgcau

SEQ ID NO: 171683 - RNA, 20 nt, Human herpesvirus 6B
gcgcauaaauaaaaugguuu

SEQ ID NO: 171684 - RNA, 13 nt, Human herpesvirus 6B
gcgauaccgagcg

SEQ ID NO: 171685 - RNA, 15 nt, Human herpesvirus 6B
gcgaugcguuugcca

SEQ ID NO: 171686 - RNA, 16 nt, Human herpesvirus 6B
gcgagaaacgcccuga

SEQ ID NO: 171687 - RNA, 18 nt, Human herpesvirus 6B
gccucggcguacauauaa

SEQ ID NO: 171688 - RNA, 14 nt, Human herpesvirus 6B
gccgggaugagcuu

SEQ ID NO: 171689 - RNA, 21 nt, Human herpesvirus 6B
gccguacacucauuugcaauu

SEQ ID NO: 171690 - RNA, 16 nt, Human herpesvirus 6B
gccucggaacugcugg

SEQ ID NO: 171691 - RNA, 15 nt, Human herpesvirus 6B
gccgcguacacgaaa

SEQ ID NO: 171692 - RNA, 15 nt, Human herpesvirus 6B
gccgcguaggcaugu

SEQ ID NO: 171693 - RNA, 13 nt, Human herpesvirus 6B
gcagcugucuaga

SEQ ID NO: 171694 - RNA, 23 nt, Human herpesvirus 6B
gcaggcacgacgaaaacuuuuaa

SEQ ID NO: 171695 - RNA, 15 nt, Human herpesvirus 6B
gcagccaaugauucu

SEQ ID NO: 171696 - RNA, 22 nt, Human herpesvirus 6B
gcaguuccuguuuuucucauaa

SEQ ID NO: 171697 - RNA, 13 nt, Human herpesvirus 6B
gcaguggucauga

SEQ ID NO: 171698 - RNA, 23 nt, Human herpesvirus 6B
gcacuugucaauaaacauuucau

SEQ ID NO: 171699 - RNA, 13 nt, Human herpesvirus 6B
gcagaaguuuacc

SEQ ID NO: 171700 - RNA, 17 nt, Human herpesvirus 6B
gcacuuuuuaacgaaaa

SEQ ID NO: 171701 - RNA, 19 nt, Human herpesvirus 6B
gcagaaaacguuucaucca

SEQ ID NO: 171702 - RNA, 13 nt, Human herpesvirus 6B
gcagaucagucaa

SEQ ID NO: 171703 - RNA, 21 nt, Human herpesvirus 6B
gcaagcucaugaacaucguca

SEQ ID NO: 171704 - RNA, 17 nt, Human herpesvirus 6B
gcaaggugaaacauaaa

SEQ ID NO: 171705 - RNA, 11 nt, Human herpesvirus 6B
gcaagcacuga

SEQ ID NO: 171706 - RNA, 22 nt, Human herpesvirus 6B
gcaauagcagaaaacguuucau

SEQ ID NO: 171707 - RNA, 22 nt, Human herpesvirus 6B
gcaaguucaucagccauuucgc

SEQ ID NO: 171708 - RNA, 17 nt, Human herpesvirus 6B
gaucaucgccauaguga

SEQ ID NO: 171709 - RNA, 21 nt, Human herpesvirus 6B
gaucaucgccauagugaaaga

SEQ ID NO: 171710 - RNA, 18 nt, Human herpesvirus 6B
gaucaucgggaacauaga

SEQ ID NO: 171711 - RNA, 13 nt, Human herpesvirus 6B
gauccagauuucu

SEQ ID NO: 171712 - RNA, 21 nt, Human herpesvirus 6B
gaucaguacauagaaucucug

SEQ ID NO: 171713 - RNA, 15 nt, Human herpesvirus 6B
gaucagucaaaaucu

SEQ ID NO: 171714 - RNA, 14 nt, Human herpesvirus 6B
gaucauaaaacugc

SEQ ID NO: 171715 - RNA, 13 nt, Human herpesvirus 6B
gaucagcauucac

SEQ ID NO: 171716 - RNA, 14 nt, Human herpesvirus 6B
gaucagcauucacu

SEQ ID NO: 171717 - RNA, 15 nt, Human herpesvirus 6B
gaucacaaacuguca

SEQ ID NO: 171718 - RNA, 19 nt, Human herpesvirus 6B
gcaccuuagucgcacacac

SEQ ID NO: 171719 - RNA, 19 nt, Human herpesvirus 6B
gcaauuugaauucugcucg

SEQ ID NO: 171720 - RNA, 23 nt, Human herpesvirus 6B
gcaauuuaggucuuuaucccauc

SEQ ID NO: 171721 - RNA, 17 nt, Human herpesvirus 6B
gcacaaaaugauugcaa

SEQ ID NO: 171722 - RNA, 18 nt, Human herpesvirus 6B
gcaaugauuuuguuuauu

SEQ ID NO: 171723 - RNA, 19 nt, Human herpesvirus 6B
gcaauucaucaaauccucu

SEQ ID NO: 171724 - RNA, 21 nt, Human herpesvirus 6B
gcaauucuuauuuaccuuccu

SEQ ID NO: 171725 - RNA, 13 nt, Human herpesvirus 6B
gcacagaaucgag

SEQ ID NO: 171726 - RNA, 13 nt, Human herpesvirus 6B
ggaagaaauugca

SEQ ID NO: 171727 - RNA, 15 nt, Human herpesvirus 6B
ggaacugucaaggaa

SEQ ID NO: 171728 - RNA, 21 nt, Human herpesvirus 6B
ggaacugucaaggaaaacucu

SEQ ID NO: 171729 - RNA, 20 nt, Human herpesvirus 6B
ggaacuugauguugaucuga

SEQ ID NO: 171730 - RNA, 17 nt, Human herpesvirus 6B
ggaagauacacugcaag

SEQ ID NO: 171731 - RNA, 11 nt, Human herpesvirus 6B
ggaagaucuau

SEQ ID NO: 171732 - RNA, 16 nt, Human herpesvirus 6B
ggaagaucuaugagaa

SEQ ID NO: 171733 - RNA, 15 nt, Human herpesvirus 6B
ggaagaucuauggga

SEQ ID NO: 171734 - RNA, 18 nt, Human herpesvirus 6B
ggaagugaaagcagucag

SEQ ID NO: 171735 - RNA, 22 nt, Human herpesvirus 6B
ggaauacaccggagaccgagcg

SEQ ID NO: 171736 - RNA, 11 nt, Human herpesvirus 6B
ggaaucacaac

SEQ ID NO: 171737 - RNA, 15 nt, Human herpesvirus 6B
ggaauaaugaaauuu

SEQ ID NO: 171738 - RNA, 14 nt, Human herpesvirus 6B
ggaacauguaacua

SEQ ID NO: 171739 - RNA, 13 nt, Human herpesvirus 6B
ggaacccaugcug

SEQ ID NO: 171740 - RNA, 22 nt, Human herpesvirus 6B
ggaaccgagauuuguguucaaa

SEQ ID NO: 171741 - RNA, 20 nt, Human herpesvirus 6B
ggaaacguguuugucuguau

SEQ ID NO: 171742 - RNA, 20 nt, Human herpesvirus 6B
ggaaacuguaacggccacgu

SEQ ID NO: 171743 - RNA, 12 nt, Human herpesvirus 6B
gcuuuuguuauu

SEQ ID NO: 171744 - RNA, 14 nt, Human herpesvirus 6B
gcuuuaucccaaaa

SEQ ID NO: 171745 - RNA, 20 nt, Human herpesvirus 6B
gcuuugacgguuuauaugca

SEQ ID NO: 171746 - RNA, 23 nt, Human herpesvirus 6B
gcuuugcacggcgucaccaagaa

SEQ ID NO: 171747 - RNA, 21 nt, Human herpesvirus 6B
gcuuucucuuuuuaauuccaa

SEQ ID NO: 171748 - RNA, 22 nt, Human herpesvirus 6B
gcuuugggaccuucaggaacaa

SEQ ID NO: 171749 - RNA, 18 nt, Human herpesvirus 6B
gcuuuucaagaucugcca

SEQ ID NO: 171750 - RNA, 14 nt, Human herpesvirus 6B
gcuuuaaagcagcu

SEQ ID NO: 171751 - RNA, 16 nt, Human herpesvirus 6B
gcuuaaugaaugugcu

SEQ ID NO: 171752 - RNA, 18 nt, Human herpesvirus 6B
gcuuaacuuacuuaauaa

SEQ ID NO: 171753 - RNA, 15 nt, Human herpesvirus 6B
gcuguuuacgaauga

SEQ ID NO: 171754 - RNA, 21 nt, Human herpesvirus 6B
gcucuggcggagaaaguuucu

SEQ ID NO: 171755 - RNA, 23 nt, Human herpesvirus 6B
gcucuguuacuauguauuggaau

SEQ ID NO: 171756 - RNA, 18 nt, Human herpesvirus 6B
gcugacccgauguggaac

SEQ ID NO: 171757 - RNA, 19 nt, Human herpesvirus 6B
gcugaccguucaccauucc

SEQ ID NO: 171758 - RNA, 14 nt, Human herpesvirus 6B
gcucuuugcugauu

SEQ ID NO: 171759 - RNA, 19 nt, Human herpesvirus 6B
gcugugacgaggauggaug

SEQ ID NO: 171760 - RNA, 18 nt, Human herpesvirus 6B
gcugauuccuucaauguu

SEQ ID NO: 171761 - RNA, 12 nt, Human herpesvirus 6B
gcugauacacaa

SEQ ID NO: 171762 - RNA, 12 nt, Human herpesvirus 6B
gcuagcaaugau

SEQ ID NO: 171763 - RNA, 21 nt, Human herpesvirus 6B
gcuaguuguaugacuuggaga

SEQ ID NO: 171764 - RNA, 13 nt, Human herpesvirus 6B
gcgcgccgugaca

SEQ ID NO: 171765 - RNA, 16 nt, Human herpesvirus 6B
gcuagauaacucagau

SEQ ID NO: 171766 - RNA, 13 nt, Human herpesvirus 6B
gcuauaugcaucu

SEQ ID NO: 171767 - RNA, 13 nt, Human herpesvirus 6B
gcuaucacuuaga

SEQ ID NO: 171768 - RNA, 14 nt, Human herpesvirus 6B
gcuaucacuuagac

SEQ ID NO: 171769 - RNA, 20 nt, Human herpesvirus 6B
gcuaucacuuagacacggcc

SEQ ID NO: 171770 - RNA, 15 nt, Human herpesvirus 6B
gcuaucgucuacccu

SEQ ID NO: 171771 - RNA, 17 nt, Human herpesvirus 6B
gcuaucgucuacccuau

SEQ ID NO: 171772 - RNA, 14 nt, Human herpesvirus 6B
gcuauccauuuuau

SEQ ID NO: 171773 - RNA, 18 nt, Human herpesvirus 6B
gcuauccuuauaucugaa

SEQ ID NO: 171774 - RNA, 22 nt, Human herpesvirus 6B
gcuaucgcaaugauuuuguuua

SEQ ID NO: 171775 - RNA, 22 nt, Human herpesvirus 6B
gcgcauguugcaguuuaaggau

SEQ ID NO: 171776 - RNA, 22 nt, Human herpesvirus 6B
gcgccaacggaaagcaucucaa

SEQ ID NO: 171777 - RNA, 21 nt, Human herpesvirus 6B
gcgccagcauucuuaucaaau

SEQ ID NO: 171778 - RNA, 16 nt, Human herpesvirus 6B
ggcagaucuugaaaag

SEQ ID NO: 171779 - RNA, 16 nt, Human herpesvirus 6B
ggcagauugcaaaauu

SEQ ID NO: 171780 - RNA, 22 nt, Human herpesvirus 6B
ggcagauugcaaaauugauaca

SEQ ID NO: 171781 - RNA, 19 nt, Human herpesvirus 6B
ggauuuguucgauugccaa

SEQ ID NO: 171782 - RNA, 22 nt, Human herpesvirus 6B
ggcacggugugaucaucacaug

SEQ ID NO: 171783 - RNA, 17 nt, Human herpesvirus 6B
ggccagagacaugaccg

SEQ ID NO: 171784 - RNA, 22 nt, Human herpesvirus 6B
ggcauucacaaucgcaguccag

SEQ ID NO: 171785 - RNA, 20 nt, Human herpesvirus 6B
ggccaauuuaugucauuuca

SEQ ID NO: 171786 - RNA, 23 nt, Human herpesvirus 6B
ggaugcauuauacugaauggagu

SEQ ID NO: 171787 - RNA, 12 nt, Human herpesvirus 6B
ggaugguggaug

SEQ ID NO: 171788 - RNA, 22 nt, Human herpesvirus 6B
ggauguggauuauagaugacug

SEQ ID NO: 171789 - RNA, 19 nt, Human herpesvirus 6B
ggauguccauuucuucgag

SEQ ID NO: 171790 - RNA, 19 nt, Human herpesvirus 6B
ggaugauggugucuuuauu

SEQ ID NO: 171791 - RNA, 15 nt, Human herpesvirus 6B
ggacguugaugaaau

SEQ ID NO: 171792 - RNA, 12 nt, Human herpesvirus 6B
ggaccuucagga

SEQ ID NO: 171793 - RNA, 19 nt, Human herpesvirus 6B
ggacacgagaagaacaugc

SEQ ID NO: 171794 - RNA, 16 nt, Human herpesvirus 6B
ggacacaucuaugugu

SEQ ID NO: 171795 - RNA, 22 nt, Human herpesvirus 6B
ggacagugauuaggauguuugg

SEQ ID NO: 171796 - RNA, 14 nt, Human herpesvirus 6B
ggaauuuguggaac

SEQ ID NO: 171797 - RNA, 16 nt, Human herpesvirus 6B
ggcucuacgaucucau

SEQ ID NO: 171798 - RNA, 15 nt, Human herpesvirus 6B
ggcucuuugcugauu

SEQ ID NO: 171799 - RNA, 16 nt, Human herpesvirus 6B
ggccucccauguaugc

SEQ ID NO: 171800 - RNA, 12 nt, Human herpesvirus 6B
ggccucauagau

SEQ ID NO: 171801 - RNA, 17 nt, Human herpesvirus 6B
ggcgaggggacggacag

SEQ ID NO: 171802 - RNA, 22 nt, Human herpesvirus 6B
gggcuuuaaaaauuacuaaugu

SEQ ID NO: 171803 - RNA, 20 nt, Human herpesvirus 6B
gggcuuggcuaucgcaauga

SEQ ID NO: 171804 - RNA, 21 nt, Human herpesvirus 6B
gggcuuggcuaucgcaaugau

SEQ ID NO: 171805 - RNA, 21 nt, Human herpesvirus 6B
gggcagcugcaugguccacag

SEQ ID NO: 171806 - RNA, 13 nt, Human herpesvirus 6B
gggauguaaucaa

SEQ ID NO: 171807 - RNA, 23 nt, Human herpesvirus 6B
gggcauucacaaucgcaguccag

SEQ ID NO: 171808 - RNA, 22 nt, Human herpesvirus 6B
gggcaguucaucguuauggguu

SEQ ID NO: 171809 - RNA, 21 nt, Human herpesvirus 6B
gggccguacacucauuugcaa

SEQ ID NO: 171810 - RNA, 14 nt, Human herpesvirus 6B
gacauuggacuuug

SEQ ID NO: 171811 - RNA, 20 nt, Human herpesvirus 6B
gacauugauuccaccuuuau

SEQ ID NO: 171812 - RNA, 15 nt, Human herpesvirus 6B
gacauuuaccagaga

SEQ ID NO: 171813 - RNA, 12 nt, Human herpesvirus 6B
aaauaauugcac

SEQ ID NO: 171814 - RNA, 20 nt, Human herpesvirus 6B
aaauaauaaaaagucauaca

SEQ ID NO: 171815 - RNA, 15 nt, Human herpesvirus 6B
aaauaaucaacuguu

SEQ ID NO: 171816 - RNA, 14 nt, Human herpesvirus 6B
aaauaacaugugac

SEQ ID NO: 171817 - RNA, 22 nt, Human herpesvirus 6B
aaauaagacuuagcuagacgug

SEQ ID NO: 171818 - RNA, 16 nt, Human herpesvirus 6B
aaauacgagagcugac

SEQ ID NO: 171819 - RNA, 23 nt, Human herpesvirus 6B
aaauaccugacuguucugccuau

SEQ ID NO: 171820 - RNA, 14 nt, Human herpesvirus 6B
aaauaccuaauucc

SEQ ID NO: 171821 - RNA, 15 nt, Human herpesvirus 6B
aaauaccuaauucca

SEQ ID NO: 171822 - RNA, 23 nt, Human herpesvirus 6B
aaauacagagauacguagucacg

SEQ ID NO: 171823 - RNA, 16 nt, Human herpesvirus 6B
aaauacaauaguaacu

SEQ ID NO: 171824 - RNA, 18 nt, Human herpesvirus 6B
aaauacaaugacuaucaa

SEQ ID NO: 171825 - RNA, 18 nt, Human herpesvirus 6B
aaauacguucacauuacc

SEQ ID NO: 171826 - RNA, 22 nt, Human herpesvirus 6B
aaauacuauuuuaguuacacau

SEQ ID NO: 171827 - RNA, 20 nt, Human herpesvirus 6B
aaaucacaccaaugaucaca

SEQ ID NO: 171828 - RNA, 18 nt, Human herpesvirus 6B
aaaucacguugaaauguc

SEQ ID NO: 171829 - RNA, 23 nt, Human herpesvirus 6B
gacaucgcuaaguguugacugau

SEQ ID NO: 171830 - RNA, 20 nt, Human herpesvirus 6B
gacauccguugagugugcau

SEQ ID NO: 171831 - RNA, 19 nt, Human herpesvirus 6B
gacaucgagauucuuuaaa

SEQ ID NO: 171832 - RNA, 21 nt, Human herpesvirus 6B
gacaucugcaaaaacaaauga

SEQ ID NO: 171833 - RNA, 15 nt, Human herpesvirus 6B
gacaguauuuacuga

SEQ ID NO: 171834 - RNA, 14 nt, Human herpesvirus 6B
gacaucacauuaua

SEQ ID NO: 171835 - RNA, 15 nt, Human herpesvirus 6B
gacaucacauuauaa

SEQ ID NO: 171836 - RNA, 19 nt, Human herpesvirus 6B
gacaucacgucccauucac

SEQ ID NO: 171837 - RNA, 20 nt, Human herpesvirus 6B
gacaucacgucccauucaca

SEQ ID NO: 171838 - RNA, 22 nt, Human herpesvirus 6B
gacaacgauagaguucaucuaa

SEQ ID NO: 171839 - RNA, 23 nt, Human herpesvirus 6B
gacaacgauagaguucaucuaac

SEQ ID NO: 171840 - RNA, 17 nt, Human herpesvirus 6B
gacaaaccugauuucag

SEQ ID NO: 171841 - RNA, 21 nt, Human herpesvirus 6B
gacaaaguucaguaagauuua

SEQ ID NO: 171842 - RNA, 14 nt, Human herpesvirus 6B
gaauuuaaugcaaa

SEQ ID NO: 171843 - RNA, 22 nt, Human herpesvirus 6B
gaauuguucuucaacauaucac

SEQ ID NO: 171844 - RNA, 18 nt, Human herpesvirus 6B
aaaucgcaaaagaacaca

SEQ ID NO: 171845 - RNA, 17 nt, Human herpesvirus 6B
aaaucgcauuagucaca

SEQ ID NO: 171846 - RNA, 22 nt, Human herpesvirus 6B
aaaucucuuagcggauggaauc

SEQ ID NO: 171847 - RNA, 21 nt, Human herpesvirus 6B
aaaucugagcucuccugggua

SEQ ID NO: 171848 - RNA, 16 nt, Human herpesvirus 6B
aaaucuccaaaagcgc

SEQ ID NO: 171849 - RNA, 15 nt, Human herpesvirus 6B
aaaugaacgacuuau

SEQ ID NO: 171850 - RNA, 21 nt, Human herpesvirus 6B
aaauguuuuuuuguaccaaca

SEQ ID NO: 171851 - RNA, 18 nt, Human herpesvirus 6B
aaauuacuaguaagaaca

SEQ ID NO: 171852 - RNA, 19 nt, Human herpesvirus 6B
aaauugaugaaauugugac

SEQ ID NO: 171853 - RNA, 16 nt, Human herpesvirus 6B
aaauugaauacagcug

SEQ ID NO: 171854 - RNA, 14 nt, Human herpesvirus 6B
aaauuggugugcau

SEQ ID NO: 171855 - RNA, 12 nt, Human herpesvirus 6B
aaauugguuuau

SEQ ID NO: 171856 - RNA, 13 nt, Human herpesvirus 6B
aaauugugucaca

SEQ ID NO: 171857 - RNA, 20 nt, Human herpesvirus 6B
aaauucugauuauuaucaca

SEQ ID NO: 171858 - RNA, 18 nt, Human herpesvirus 6B
aaauucuuuugugcuuau

SEQ ID NO: 171859 - RNA, 13 nt, Human herpesvirus 6B
aaauucacagugu

SEQ ID NO: 171860 - RNA, 21 nt, Human herpesvirus 6B
aaauucaaacuccgaaaaagg

SEQ ID NO: 171861 - RNA, 16 nt, Human herpesvirus 6B
aaauuuuacaaugagu

SEQ ID NO: 171862 - RNA, 13 nt, Human herpesvirus 6B
aaauuuugucacu

SEQ ID NO: 171863 - RNA, 18 nt, Human herpesvirus 6B
aaauuuugucacucucaa

SEQ ID NO: 171864 - RNA, 13 nt, Human herpesvirus 6B
aaauuuacucucc

SEQ ID NO: 171865 - RNA, 15 nt, Human herpesvirus 6B
aaauuuacucuccac

SEQ ID NO: 171866 - RNA, 23 nt, Human herpesvirus 6B
aaauuuacucuccacccaucucc

SEQ ID NO: 171867 - RNA, 17 nt, Human herpesvirus 6B
aaauuuauaaaagaagc

SEQ ID NO: 171868 - RNA, 22 nt, Human herpesvirus 6B
aaauuuaauaaaguuugucaca

SEQ ID NO: 171869 - RNA, 13 nt, Human herpesvirus 6B
gacgcacucggaa

SEQ ID NO: 171870 - RNA, 17 nt, Human herpesvirus 6B
gacgauaguguucucug

SEQ ID NO: 171871 - RNA, 22 nt, Human herpesvirus 6B
gacgaaugguucgauugcgcga

SEQ ID NO: 171872 - RNA, 14 nt, Human herpesvirus 6B
gacgacggggacua

SEQ ID NO: 171873 - RNA, 17 nt, Human herpesvirus 6B
gacgagcugcagucuca

SEQ ID NO: 171874 - RNA, 20 nt, Human herpesvirus 6B
gacgucuccgaacaugauca

SEQ ID NO: 171875 - RNA, 21 nt, Human herpesvirus 6B
gagaagcacggauaacguuca

SEQ ID NO: 171876 - RNA, 22 nt, Human herpesvirus 6B
gagaauuaugacugacaaggua

SEQ ID NO: 171877 - RNA, 12 nt, Human herpesvirus 6B
gagaauugccga

SEQ ID NO: 171878 - RNA, 17 nt, Human herpesvirus 6B
gagaaucuuccacugaa

SEQ ID NO: 171879 - RNA, 15 nt, Human herpesvirus 6B
gagaaugcaacauuc

SEQ ID NO: 171880 - RNA, 17 nt, Human herpesvirus 6B
gagaauacuacagugac

SEQ ID NO: 171881 - RNA, 20 nt, Human herpesvirus 6B
gacgguucaccacugugaua

SEQ ID NO: 171882 - RNA, 15 nt, Human herpesvirus 6B
aacaacaacuuuuaa

SEQ ID NO: 171883 - RNA, 21 nt, Human herpesvirus 6B
gacggcgaggggacggacaga

SEQ ID NO: 171884 - RNA, 13 nt, Human herpesvirus 6B
aacaaaucuccaa

SEQ ID NO: 171885 - RNA, 15 nt, Human herpesvirus 6B
aacaaagagcuuuaa

SEQ ID NO: 171886 - RNA, 19 nt, Human herpesvirus 6B
aaauuuuccaaacauuaua

SEQ ID NO: 171887 - RNA, 20 nt, Human herpesvirus 6B
gagaucguuuugcaacuuaa

SEQ ID NO: 171888 - RNA, 16 nt, Human herpesvirus 6B
gagaugaaaaacucaa

SEQ ID NO: 171889 - RNA, 22 nt, Human herpesvirus 6B
gagaucaguacauagaaucucu

SEQ ID NO: 171890 - RNA, 13 nt, Human herpesvirus 6B
gagauaucugcau

SEQ ID NO: 171891 - RNA, 21 nt, Human herpesvirus 6B
gagauguuucugugcgucuau

SEQ ID NO: 171892 - RNA, 22 nt, Human herpesvirus 6B
gagauucuauguacugaucucu

SEQ ID NO: 171893 - RNA, 16 nt, Human herpesvirus 6B
gagaugaugggaccau

SEQ ID NO: 171894 - RNA, 17 nt, Human herpesvirus 6B
gagacauuuucuauaaa

SEQ ID NO: 171895 - RNA, 14 nt, Human herpesvirus 6B
gagacagaucagca

SEQ ID NO: 171896 - RNA, 14 nt, Human herpesvirus 6B
gagaccaugccauu

SEQ ID NO: 171897 - RNA, 20 nt, Human herpesvirus 6B
gagacaauaacaauuauuca

SEQ ID NO: 171898 - RNA, 18 nt, Human herpesvirus 6B
gagacaccucaaggucaa

SEQ ID NO: 171899 - RNA, 13 nt, Human herpesvirus 6B
gagaguucauuug

SEQ ID NO: 171900 - RNA, 17 nt, Human herpesvirus 6B
gagcaaccgcaguuccu

SEQ ID NO: 171901 - RNA, 17 nt, Human herpesvirus 6B
gagcaaccgcaguuucu

SEQ ID NO: 171902 - RNA, 22 nt, Human herpesvirus 6B
gagauuuacuguuucuuugaca

SEQ ID NO: 171903 - RNA, 14 nt, Human herpesvirus 6B
gagauuuguguuca

SEQ ID NO: 171904 - RNA, 22 nt, Human herpesvirus 6B
gauagauuuguccguauacagc

SEQ ID NO: 171905 - RNA, 19 nt, Human herpesvirus 6B
gauagccagggcauucaca

SEQ ID NO: 171906 - RNA, 11 nt, Human herpesvirus 6B
gauagccauac

SEQ ID NO: 171907 - RNA, 22 nt, Human herpesvirus 6B
gaguuguauuauaaaaacuaau

SEQ ID NO: 171908 - RNA, 19 nt, Human herpesvirus 6B
gaguuuuccuugacaguuc

SEQ ID NO: 171909 - RNA, 20 nt, Human herpesvirus 6B
gaguuuuuuaaaagugcaac

SEQ ID NO: 171910 - RNA, 20 nt, Human herpesvirus 6B
gauaaauccgauagccauac

SEQ ID NO: 171911 - RNA, 15 nt, Human herpesvirus 6B
gauaaaacguuccau

SEQ ID NO: 171912 - RNA, 18 nt, Human herpesvirus 6B
gauaaacuccuuacucau

SEQ ID NO: 171913 - RNA, 15 nt, Human herpesvirus 6B
gaguuacauucguau

SEQ ID NO: 171914 - RNA, 18 nt, Human herpesvirus 6B
gaguugcaacuuuugcuu

SEQ ID NO: 171915 - RNA, 23 nt, Human herpesvirus 6B
gaguucgguccaaggauuaugau

SEQ ID NO: 171916 - RNA, 11 nt, Human herpesvirus 6B
gauaguacuua

SEQ ID NO: 171917 - RNA, 20 nt, Human herpesvirus 6B
gauaguacuuacguguguau

SEQ ID NO: 171918 - RNA, 23 nt, Human herpesvirus 6B
gauaacagguucaaagauagaca

SEQ ID NO: 171919 - RNA, 16 nt, Human herpesvirus 6B
gaucaacggccuggaa

SEQ ID NO: 171920 - RNA, 15 nt, Human herpesvirus 6B
gauauuccaggcaau

SEQ ID NO: 171921 - RNA, 22 nt, Human herpesvirus 6B
gauauguguuaagaaugagaug

SEQ ID NO: 171922 - RNA, 15 nt, Human herpesvirus 6B
gauauucagaguaau

SEQ ID NO: 171923 - RNA, 22 nt, Human herpesvirus 6B
gauaugagugaauugugcaagc

SEQ ID NO: 171924 - RNA, 20 nt, Human herpesvirus 6B
gagcuuguagauaauuucca

SEQ ID NO: 171925 - RNA, 13 nt, Human herpesvirus 6B
gagcuucuuagga

SEQ ID NO: 171926 - RNA, 23 nt, Human herpesvirus 6B
gagcugacaucugcaaaaacaaa

SEQ ID NO: 171927 - RNA, 14 nt, Human herpesvirus 6B
gagcugacugaaag

SEQ ID NO: 171928 - RNA, 17 nt, Human herpesvirus 6B
gagcugcagucucagga

SEQ ID NO: 171929 - RNA, 15 nt, Human herpesvirus 6B
gagugauugaugaaa

SEQ ID NO: 171930 - RNA, 22 nt, Human herpesvirus 6B
gagugggaggagccaacauaca

SEQ ID NO: 171931 - RNA, 17 nt, Human herpesvirus 6B
gagugcuauuugcauua

SEQ ID NO: 171932 - RNA, 18 nt, Human herpesvirus 6B
gagugcuauuugcauuaa

SEQ ID NO: 171933 - RNA, 22 nt, Human herpesvirus 6B
gaguaaugauuggaaucacaaa

SEQ ID NO: 171934 - RNA, 23 nt, Human herpesvirus 6B
gaguaauuauugugacaagguau

SEQ ID NO: 171935 - RNA, 22 nt, Human herpesvirus 6B
gaguaauuggacauuguugaua

SEQ ID NO: 171936 - RNA, 15 nt, Human herpesvirus 6B
gaguaccgaauaaaa

SEQ ID NO: 171937 - RNA, 17 nt, Human herpesvirus 6B
gaguaucacguaucucu

SEQ ID NO: 171938 - RNA, 18 nt, Human herpesvirus 6B
gaguaucacguaucucug

SEQ ID NO: 171939 - RNA, 22 nt, Human herpesvirus 6B
gaaucuuguguucuaacacaua

SEQ ID NO: 171940 - RNA, 23 nt, Human herpesvirus 6B
gaaucuuguguucuaacacauag

SEQ ID NO: 171941 - RNA, 19 nt, Human herpesvirus 6B
gaaugaacgcacuagacau

SEQ ID NO: 171942 - RNA, 18 nt, Human herpesvirus 6B
gaaugaucacuaucaggg

SEQ ID NO: 171943 - RNA, 17 nt, Human herpesvirus 6B
gaagggcucuguuacua

SEQ ID NO: 171944 - RNA, 16 nt, Human herpesvirus 6B
gaaucucaagcacaaa

SEQ ID NO: 171945 - RNA, 21 nt, Human herpesvirus 6B
gaaucucacaugcgagcaaaa

SEQ ID NO: 171946 - RNA, 16 nt, Human herpesvirus 6B
gaauuaacaauucucu

SEQ ID NO: 171947 - RNA, 19 nt, Human herpesvirus 6B
gaauguguucauagagcau

SEQ ID NO: 171948 - RNA, 14 nt, Human herpesvirus 6B
gaauguuaaaguau

SEQ ID NO: 171949 - RNA, 19 nt, Human herpesvirus 6B
gaauuaugacugacaaggu

SEQ ID NO: 171950 - RNA, 14 nt, Human herpesvirus 6B
gaauucaagacgau

SEQ ID NO: 171951 - RNA, 14 nt, Human herpesvirus 6B
gaauucacuuugaa

SEQ ID NO: 171952 - RNA, 17 nt, Human herpesvirus 6B
aaaccauagcuguccau

SEQ ID NO: 171953 - RNA, 20 nt, Human herpesvirus 6B
aaaccaucgacuucaaacac

SEQ ID NO: 171954 - RNA, 16 nt, Human herpesvirus 6B
aaagaaucugcagauu

SEQ ID NO: 171955 - RNA, 15 nt, Human herpesvirus 6B
aaagaacaguuuacc

SEQ ID NO: 171956 - RNA, 15 nt, Human herpesvirus 6B
aaagacaaaccugau

SEQ ID NO: 171957 - RNA, 19 nt, Human herpesvirus 6B
aaagaaugcugacuuugac

SEQ ID NO: 171958 - RNA, 14 nt, Human herpesvirus 6B
aaagacacggcgaa

SEQ ID NO: 171959 - RNA, 16 nt, Human herpesvirus 6B
aaaccgaugaugaucu

SEQ ID NO: 171960 - RNA, 17 nt, Human herpesvirus 6B
aaacuuuuuuggcucga

SEQ ID NO: 171961 - RNA, 20 nt, Human herpesvirus 6B
aaacuuggagcuauaugcau

SEQ ID NO: 171962 - RNA, 22 nt, Human herpesvirus 6B
aaagaaagcuccgcgcggccaa

SEQ ID NO: 171963 - RNA, 19 nt, Human herpesvirus 6B
aaagagggugggaacuguc

SEQ ID NO: 171964 - RNA, 21 nt, Human herpesvirus 6B
aaagagggugggaacugucaa

SEQ ID NO: 171965 - RNA, 22 nt, Human herpesvirus 6B
aaagagggugggaacugucaag

SEQ ID NO: 171966 - RNA, 13 nt, Human herpesvirus 6B
aaagaguaccgaa

SEQ ID NO: 171967 - RNA, 23 nt, Human herpesvirus 6B
aaagaggagaccaugccauugaa

SEQ ID NO: 171968 - RNA, 18 nt, Human herpesvirus 6B
aaagauguagcuggauau

SEQ ID NO: 171969 - RNA, 15 nt, Human herpesvirus 6B
gaauucuuaccaaga

SEQ ID NO: 171970 - RNA, 22 nt, Human herpesvirus 6B
gaauucguuacaaucucugugu

SEQ ID NO: 171971 - RNA, 15 nt, Human herpesvirus 6B
gaauugggaagcaua

SEQ ID NO: 171972 - RNA, 16 nt, Human herpesvirus 6B
gaauugggaagcauaa

SEQ ID NO: 171973 - RNA, 16 nt, Human herpesvirus 6B
aaagauuuaucaaaag

SEQ ID NO: 171974 - RNA, 21 nt, Human herpesvirus 6B
aaagauuuaucaaaagccaga

SEQ ID NO: 171975 - RNA, 21 nt, Human herpesvirus 6B
aaagauuuggaggugagacau

SEQ ID NO: 171976 - RNA, 14 nt, Human herpesvirus 6B
gaagaauaagccua

SEQ ID NO: 171977 - RNA, 15 nt, Human herpesvirus 6B
gaagaauaagccuaa

SEQ ID NO: 171978 - RNA, 22 nt, Human herpesvirus 6B
gaagaacuuccugaaaucugag

SEQ ID NO: 171979 - RNA, 16 nt, Human herpesvirus 6B
gaagaccuauaugugu

SEQ ID NO: 171980 - RNA, 20 nt, Human herpesvirus 6B
gaaggccaucaugcugugag

SEQ ID NO: 171981 - RNA, 11 nt, Human herpesvirus 6B
gaagcuuucaa

SEQ ID NO: 171982 - RNA, 13 nt, Human herpesvirus 6B
gaagacgcugugu

SEQ ID NO: 171983 - RNA, 13 nt, Human herpesvirus 6B
gaagaucaugaca

SEQ ID NO: 171984 - RNA, 18 nt, Human herpesvirus 6B
gaagaucuaugagaauua

SEQ ID NO: 171985 - RNA, 21 nt, Human herpesvirus 6B
gaagaucuaugggaguaauua

SEQ ID NO: 171986 - RNA, 15 nt, Human herpesvirus 6B
gaagaggugcaaaug

SEQ ID NO: 171987 - RNA, 23 nt, Human herpesvirus 6B
gaagaguuuuuuaaaagugcaac

SEQ ID NO: 171988 - RNA, 14 nt, Human herpesvirus 6B
gaagauacacugca

SEQ ID NO: 171989 - RNA, 14 nt, Human herpesvirus 6B
gaaaguuuuggaaa

SEQ ID NO: 171990 - RNA, 17 nt, Human herpesvirus 6B
gaaauaaaaaaauauua

SEQ ID NO: 171991 - RNA, 21 nt, Human herpesvirus 6B
gaaauaaucgauuacaaaaca

SEQ ID NO: 171992 - RNA, 18 nt, Human herpesvirus 6B
gaaauauaaaaccaaaaa

SEQ ID NO: 171993 - RNA, 13 nt, Human herpesvirus 6B
gaaauacguucac

SEQ ID NO: 171994 - RNA, 12 nt, Human herpesvirus 6B
gaaauacuucuc

SEQ ID NO: 171995 - RNA, 19 nt, Human herpesvirus 6B
gaaagucucugucuuccca

SEQ ID NO: 171996 - RNA, 16 nt, Human herpesvirus 6B
gaaaguucaucuuuca

SEQ ID NO: 171997 - RNA, 18 nt, Human herpesvirus 6B
gaaaguauuguacuucau

SEQ ID NO: 171998 - RNA, 10 nt, Human herpesvirus 6B
gaaaucugac

SEQ ID NO: 171999 - RNA, 15 nt, Human herpesvirus 6B
gaaaucuaccauaac

SEQ ID NO: 172000 - RNA, 22 nt, Human herpesvirus 6B
gaaaucgcauuucucuacaugc

SEQ ID NO: 172001 - RNA, 21 nt, Human herpesvirus 6B
gaaaucacaccaaugaucaca

SEQ ID NO: 172002 - RNA, 15 nt, Human herpesvirus 6B
gaaaugaugauuaau

SEQ ID NO: 172003 - RNA, 22 nt, Human herpesvirus 6B
gaaaugaugauuaauacaucau

SEQ ID NO: 172004 - RNA, 14 nt, Human herpesvirus 6B
gaacugaugagaaa

SEQ ID NO: 172005 - RNA, 18 nt, Human herpesvirus 6B
gaacucuucgauccaaua

SEQ ID NO: 172006 - RNA, 16 nt, Human herpesvirus 6B
gaacucucacggccau

SEQ ID NO: 172007 - RNA, 17 nt, Human herpesvirus 6B
gaacucucacggccauu

SEQ ID NO: 172008 - RNA, 23 nt, Human herpesvirus 6B
gaaaacgcagcaugaugaucugc

SEQ ID NO: 172009 - RNA, 15 nt, Human herpesvirus 6B
gaaaacuaugugcau

SEQ ID NO: 172010 - RNA, 19 nt, Human herpesvirus 6B
gaaaacuaugugcauuccg

SEQ ID NO: 172011 - RNA, 14 nt, Human herpesvirus 6B
gaaaacucuugaca

SEQ ID NO: 172012 - RNA, 20 nt, Human herpesvirus 6B
gaaaacucuugacauagcaa

SEQ ID NO: 172013 - RNA, 14 nt, Human herpesvirus 6B
gaaaacuuuuugcc

SEQ ID NO: 172014 - RNA, 15 nt, Human herpesvirus 6B
gaaaacuuuuugccg

SEQ ID NO: 172015 - RNA, 18 nt, Human herpesvirus 6B
gaaaagaaacaaugcuuu

SEQ ID NO: 172016 - RNA, 19 nt, Human herpesvirus 6B
gaaaacguuucauccaaau

SEQ ID NO: 172017 - RNA, 20 nt, Human herpesvirus 6B
gaaaacguuucauccaaaua

SEQ ID NO: 172018 - RNA, 22 nt, Human herpesvirus 6B
gaaaacauucagaaaauuggug

SEQ ID NO: 172019 - RNA, 22 nt, Human herpesvirus 6B
gaaaacaugacggacuuggaaa

SEQ ID NO: 172020 - RNA, 19 nt, Human herpesvirus 6B
gaaaagcuauugaaacugg

SEQ ID NO: 172021 - RNA, 17 nt, Human herpesvirus 6B
gaaaagccccugcuuga

SEQ ID NO: 172022 - RNA, 15 nt, Human herpesvirus 6B
gaaaagcaaacaugc

SEQ ID NO: 172023 - RNA, 16 nt, Human herpesvirus 6B
gaaaagcaaacaugca

SEQ ID NO: 172024 - RNA, 22 nt, Human herpesvirus 6B
gaaaaguuuauuuugucaguca

SEQ ID NO: 172025 - RNA, 21 nt, Human herpesvirus 6B
gaaaauaaaaaaccaaaacaa

SEQ ID NO: 172026 - RNA, 19 nt, Human herpesvirus 6B
gaaaauaaacaguuauacu

SEQ ID NO: 172027 - RNA, 15 nt, Human herpesvirus 6B
gaaaaacuauagccu

SEQ ID NO: 172028 - RNA, 19 nt, Human herpesvirus 6B
gaaaacaaggaacgauaug

SEQ ID NO: 172029 - RNA, 19 nt, Human herpesvirus 6B
cuuuuuaaucaugauugca

SEQ ID NO: 172030 - RNA, 19 nt, Human herpesvirus 6B
gaaaaaaaacgaauagcau

SEQ ID NO: 172031 - RNA, 21 nt, Human herpesvirus 6B
gaaaaaacaaguuaacggaga

SEQ ID NO: 172032 - RNA, 21 nt, Human herpesvirus 6B
gaaacguugugcugagcacuu

SEQ ID NO: 172033 - RNA, 18 nt, Human herpesvirus 6B
gaaagacguuugcuuuuu

SEQ ID NO: 172034 - RNA, 19 nt, Human herpesvirus 6B
gaaagaggcugaacuguuu

SEQ ID NO: 172035 - RNA, 14 nt, Human herpesvirus 6B
gaaagaguaccgaa

SEQ ID NO: 172036 - RNA, 19 nt, Human herpesvirus 6B
gaaaauuggugugcauuau

SEQ ID NO: 172037 - RNA, 17 nt, Human herpesvirus 6B
gaaaauugacaaugagg

SEQ ID NO: 172038 - RNA, 21 nt, Human herpesvirus 6B
gaaaauguguucuuacaaugu

SEQ ID NO: 172039 - RNA, 19 nt, Human herpesvirus 6B
gaaacaacuggaugaaucu

SEQ ID NO: 172040 - RNA, 16 nt, Human herpesvirus 6B
gaaacaguaaaucucu

SEQ ID NO: 172041 - RNA, 21 nt, Human herpesvirus 6B
gaaaccauagcuguccaugaa

SEQ ID NO: 172042 - RNA, 17 nt, Human herpesvirus 6B
cuuuuagguccuuauaa

SEQ ID NO: 172043 - RNA, 16 nt, Human herpesvirus 6B
cuuuuauaaacccaua

SEQ ID NO: 172044 - RNA, 15 nt, Human herpesvirus 6B
cuuuuauauagacac

SEQ ID NO: 172045 - RNA, 16 nt, Human herpesvirus 6B
cuuuuagaacaggaag

SEQ ID NO: 172046 - RNA, 23 nt, Human herpesvirus 6B
cuuuuagaacaggaagcgccaua

SEQ ID NO: 172047 - RNA, 13 nt, Human herpesvirus 6B
cuuuuccagugag

SEQ ID NO: 172048 - RNA, 11 nt, Human herpesvirus 6B
cuuuucaauua

SEQ ID NO: 172049 - RNA, 17 nt, Human herpesvirus 6B
cuuuuuaacgaaaacca

SEQ ID NO: 172050 - RNA, 15 nt, Human herpesvirus 6B
cuuuguccuuacaaa

SEQ ID NO: 172051 - RNA, 19 nt, Human herpesvirus 6B
cuuugugcccauacuugua

SEQ ID NO: 172052 - RNA, 17 nt, Human herpesvirus 6B
cuuuggauuuugaugua

SEQ ID NO: 172053 - RNA, 18 nt, Human herpesvirus 6B
cuuugcggugcauaacau

SEQ ID NO: 172054 - RNA, 23 nt, Human herpesvirus 6B
cuuugcggugcauaacaucucag

SEQ ID NO: 172055 - RNA, 15 nt, Human herpesvirus 6B
cuuucauaagcucua

SEQ ID NO: 172056 - RNA, 15 nt, Human herpesvirus 6B
cuuucccgugcucag

SEQ ID NO: 172057 - RNA, 12 nt, Human herpesvirus 6B
cuuugacgguuu

SEQ ID NO: 172058 - RNA, 12 nt, Human herpesvirus 6B
cuuugacauuua

SEQ ID NO: 172059 - RNA, 14 nt, Human herpesvirus 6B
cuuugacauuuacc

SEQ ID NO: 172060 - RNA, 20 nt, Human herpesvirus 6B
cuuugacauuuaccagagau

SEQ ID NO: 172061 - RNA, 13 nt, Human herpesvirus 6B
cuuucuguggaac

SEQ ID NO: 172062 - RNA, 18 nt, Human herpesvirus 6B
cuuucucuuuuuaauucc

SEQ ID NO: 172063 - RNA, 21 nt, Human herpesvirus 6B
cuuucucuuuuuaauuccaag

SEQ ID NO: 172064 - RNA, 22 nt, Human herpesvirus 6B
cuuucguuuacgaauucaaugu

SEQ ID NO: 172065 - RNA, 21 nt, Human herpesvirus 6B
cuuaauaaaugcuacccacau

SEQ ID NO: 172066 - RNA, 18 nt, Human herpesvirus 6B
cuuacaacugaaacucca

SEQ ID NO: 172067 - RNA, 19 nt, Human herpesvirus 6B
cuuacaauguucuugacaa

SEQ ID NO: 172068 - RNA, 17 nt, Human herpesvirus 6B
cuuacaucgauccaaaa

SEQ ID NO: 172069 - RNA, 17 nt, Human herpesvirus 6B
cuuaccaagaaaucacg

SEQ ID NO: 172070 - RNA, 22 nt, Human herpesvirus 6B
cuuaacuuacuuaauaacuaca

SEQ ID NO: 172071 - RNA, 12 nt, Human herpesvirus 6B
cuuaaauucaau

SEQ ID NO: 172072 - RNA, 16 nt, Human herpesvirus 6B
cuuaacagacuacuuu

SEQ ID NO: 172073 - RNA, 17 nt, Human herpesvirus 6B
uuuuguaccaacaugua

SEQ ID NO: 172074 - RNA, 12 nt, Human herpesvirus 6B
uuuuuaauucca

SEQ ID NO: 172075 - RNA, 19 nt, Human herpesvirus 6B
uuuuguccgccauugggua

SEQ ID NO: 172076 - RNA, 17 nt, Human herpesvirus 6B
uuuuggcucgaaucuaa

SEQ ID NO: 172077 - RNA, 17 nt, Human herpesvirus 6B
uuuugggaaaucugaca

SEQ ID NO: 172078 - RNA, 11 nt, Human herpesvirus 6B
uuuugcaauuu

SEQ ID NO: 172079 - RNA, 12 nt, Human herpesvirus 6B
uuuuucugcaaa

SEQ ID NO: 172080 - RNA, 14 nt, Human herpesvirus 6B
uuuuuucccaaaag

SEQ ID NO: 172081 - RNA, 23 nt, Human herpesvirus 6B
uuuuugauugcaaucacauuguu

SEQ ID NO: 172082 - RNA, 12 nt, Human herpesvirus 6B
uuguauagucua

SEQ ID NO: 172083 - RNA, 21 nt, Human herpesvirus 6B
uuuggggcaggaucagauuug

SEQ ID NO: 172084 - RNA, 14 nt, Human herpesvirus 6B
uuugguggacacca

SEQ ID NO: 172085 - RNA, 21 nt, Human herpesvirus 6B
uuguccucgccguguauuuca

SEQ ID NO: 172086 - RNA, 17 nt, Human herpesvirus 6B
uuuggauaagcagaaga

SEQ ID NO: 172087 - RNA, 20 nt, Human herpesvirus 6B
uuugcugacccgauguggaa

SEQ ID NO: 172088 - RNA, 19 nt, Human herpesvirus 6B
uuugcuuuuuuaguuuuga

SEQ ID NO: 172089 - RNA, 16 nt, Human herpesvirus 6B
uuuguuuuuuuaaucc

SEQ ID NO: 172090 - RNA, 15 nt, Human herpesvirus 6B
uuugugcagggugcu

SEQ ID NO: 172091 - RNA, 20 nt, Human herpesvirus 6B
uuugugcgaauuguguugcu

SEQ ID NO: 172092 - RNA, 23 nt, Human herpesvirus 6B
uuugucggcacguauaagaacug

SEQ ID NO: 172093 - RNA, 23 nt, Human herpesvirus 6B
uuuuaauguugaguaauuggaca

SEQ ID NO: 172094 - RNA, 18 nt, Human herpesvirus 6B
uuuuagaggagaaaugau

SEQ ID NO: 172095 - RNA, 13 nt, Human herpesvirus 6B
uuuuauaagcuca

SEQ ID NO: 172096 - RNA, 14 nt, Human herpesvirus 6B
uuuuauaucguguu

SEQ ID NO: 172097 - RNA, 16 nt, Human herpesvirus 6B
uuuuacuugaugcaug

SEQ ID NO: 172098 - RNA, 13 nt, Human herpesvirus 6B
uuuugaugguguc

SEQ ID NO: 172099 - RNA, 13 nt, Human herpesvirus 6B
uuuugcaacuuaa

SEQ ID NO: 172100 - RNA, 19 nt, Human herpesvirus 6B
uuuugaagaacuuccugaa

SEQ ID NO: 172101 - RNA, 16 nt, Human herpesvirus 6B
uuuugaaauugguuua

SEQ ID NO: 172102 - RNA, 14 nt, Human herpesvirus 6B
uuuugagacuuaga

SEQ ID NO: 172103 - RNA, 20 nt, Human herpesvirus 6B
uuuucguauaaaaugguauu

SEQ ID NO: 172104 - RNA, 23 nt, Human herpesvirus 6B
uuuucuuuaaacgguaaauucaa

SEQ ID NO: 172105 - RNA, 20 nt, Human herpesvirus 6B
uuuucaagaaugggaugcau

SEQ ID NO: 172106 - RNA, 12 nt, Human herpesvirus 6B
uuuuccagugag

SEQ ID NO: 172107 - RNA, 12 nt, Human herpesvirus 6B
uuuuccauaaau

SEQ ID NO: 172108 - RNA, 15 nt, Human herpesvirus 6B
uuuucccaccuaaua

SEQ ID NO: 172109 - RNA, 16 nt, Human herpesvirus 6B
uuuucccaccuaauaa

SEQ ID NO: 172110 - RNA, 15 nt, Human herpesvirus 6B
uuuuccccacaacaa

SEQ ID NO: 172111 - RNA, 16 nt, Human herpesvirus 6B
uuuuccaaacauuaua

SEQ ID NO: 172112 - RNA, 23 nt, Human herpesvirus 6B
uuuuauuuauauuuggcauuaga

SEQ ID NO: 172113 - RNA, 20 nt, Human herpesvirus 6B
ugcagagugcgagacuggaa

SEQ ID NO: 172114 - RNA, 14 nt, Human herpesvirus 6B
ugcuaucuguguug

SEQ ID NO: 172115 - RNA, 22 nt, Human herpesvirus 6B
ugcucaagcgaagucaugaauu

SEQ ID NO: 172116 - RNA, 13 nt, Human herpesvirus 6B
ugcucaaccuaac

SEQ ID NO: 172117 - RNA, 15 nt, Human herpesvirus 6B
ugcuauuaacacaua

SEQ ID NO: 172118 - RNA, 16 nt, Human herpesvirus 6B
ugcucaugucaguauu

SEQ ID NO: 172119 - RNA, 19 nt, Human herpesvirus 6B
ugcucugagccgggcaguu

SEQ ID NO: 172120 - RNA, 13 nt, Human herpesvirus 6B
ugcucucagauca

SEQ ID NO: 172121 - RNA, 18 nt, Human herpesvirus 6B
ugcacggcgucaccaaga

SEQ ID NO: 172122 - RNA, 19 nt, Human herpesvirus 6B
ugcacggcgucaccaagaa

SEQ ID NO: 172123 - RNA, 20 nt, Human herpesvirus 6B
ugcacggcgucaccaagaaa

SEQ ID NO: 172124 - RNA, 18 nt, Human herpesvirus 6B
ugcacgaaaguggaugug

SEQ ID NO: 172125 - RNA, 13 nt, Human herpesvirus 6B
ugcagacgcugaa

SEQ ID NO: 172126 - RNA, 19 nt, Human herpesvirus 6B
ugcagaugccuguagggau

SEQ ID NO: 172127 - RNA, 13 nt, Human herpesvirus 6B
ugcagauuuuuaa

SEQ ID NO: 172128 - RNA, 12 nt, Human herpesvirus 6B
ugcuaggacuuc

SEQ ID NO: 172129 - RNA, 19 nt, Human herpesvirus 6B
ugcuucugcucucgaugaa

SEQ ID NO: 172130 - RNA, 20 nt, Human herpesvirus 6B
ugcuuauaagcaaaacucua

SEQ ID NO: 172131 - RNA, 14 nt, Human herpesvirus 6B
ugcuuaacuuacuu

SEQ ID NO: 172132 - RNA, 17 nt, Human herpesvirus 6B
ugcugugagagaaugca

SEQ ID NO: 172133 - RNA, 17 nt, Human herpesvirus 6B
ugcugucacacucugaa

SEQ ID NO: 172134 - RNA, 21 nt, Human herpesvirus 6B
ugcuguauagguaaaaaaaca

SEQ ID NO: 172135 - RNA, 14 nt, Human herpesvirus 6B
ugcuggcugagauu

SEQ ID NO: 172136 - RNA, 18 nt, Human herpesvirus 6B
ugcucuuagagauaucug

SEQ ID NO: 172137 - RNA, 16 nt, Human herpesvirus 6B
ugcugagcacuuguca

SEQ ID NO: 172138 - RNA, 21 nt, Human herpesvirus 6B
ugcugccauuauugauagcau

SEQ ID NO: 172139 - RNA, 23 nt, Human herpesvirus 6B
uggaaaacaaggaacgauaugcu

SEQ ID NO: 172140 - RNA, 20 nt, Human herpesvirus 6B
uggaaaaccuuauacagaug

SEQ ID NO: 172141 - RNA, 17 nt, Human herpesvirus 6B
uggaaaacuaugugcau

SEQ ID NO: 172142 - RNA, 15 nt, Human herpesvirus 6B
uggaaacguguuugu

SEQ ID NO: 172143 - RNA, 20 nt, Human herpesvirus 6B
uggaaacguguuugucugua

SEQ ID NO: 172144 - RNA, 21 nt, Human herpesvirus 6B
uggaaacguguuugucuguau

SEQ ID NO: 172145 - RNA, 17 nt, Human herpesvirus 6B
uggaauugggaagcaua

SEQ ID NO: 172146 - RNA, 14 nt, Human herpesvirus 6B
uggaaucacaaccg

SEQ ID NO: 172147 - RNA, 13 nt, Human herpesvirus 6B
uggacaacggugu

SEQ ID NO: 172148 - RNA, 12 nt, Human herpesvirus 6B
uggacaaugaua

SEQ ID NO: 172149 - RNA, 17 nt, Human herpesvirus 6B
uggaagcgaaucgcuua

SEQ ID NO: 172150 - RNA, 20 nt, Human herpesvirus 6B
uggaguaaaacgcucacaac

SEQ ID NO: 172151 - RNA, 17 nt, Human herpesvirus 6B
uggaggucaucguccaa

SEQ ID NO: 172152 - RNA, 19 nt, Human herpesvirus 6B
uggauaaacaucgcuccau

SEQ ID NO: 172153 - RNA, 20 nt, Human herpesvirus 6B
uggauauacagaaaagaugu

SEQ ID NO: 172154 - RNA, 14 nt, Human herpesvirus 6B
uggagcagugagac

SEQ ID NO: 172155 - RNA, 16 nt, Human herpesvirus 6B
uggagauuugacuuug

SEQ ID NO: 172156 - RNA, 17 nt, Human herpesvirus 6B
uggagauguuggauguu

SEQ ID NO: 172157 - RNA, 23 nt, Human herpesvirus 6B
uggagacgaacgcggaaaaucaa

SEQ ID NO: 172158 - RNA, 14 nt, Human herpesvirus 6B
uggagacaccucaa

SEQ ID NO: 172159 - RNA, 22 nt, Human herpesvirus 6B
uggagaaucggauccaacucua

SEQ ID NO: 172160 - RNA, 18 nt, Human herpesvirus 6B
uggacauuggacuuugcc

SEQ ID NO: 172161 - RNA, 18 nt, Human herpesvirus 6B
uguaaauugauuagcaau

SEQ ID NO: 172162 - RNA, 19 nt, Human herpesvirus 6B
uguaaacaaauucuuacaa

SEQ ID NO: 172163 - RNA, 19 nt, Human herpesvirus 6B
uguaagauuaaaugugaac

SEQ ID NO: 172164 - RNA, 20 nt, Human herpesvirus 6B
uguaagauuaaaugugaaca

SEQ ID NO: 172165 - RNA, 17 nt, Human herpesvirus 6B
uguacaaaccaauuugu

SEQ ID NO: 172166 - RNA, 18 nt, Human herpesvirus 6B
uguaauaagaaaaguuua

SEQ ID NO: 172167 - RNA, 23 nt, Human herpesvirus 6B
uguaaggacaaaggacaaaguuc

SEQ ID NO: 172168 - RNA, 20 nt, Human herpesvirus 6B
uguacgaguagaucguaaua

SEQ ID NO: 172169 - RNA, 23 nt, Human herpesvirus 6B
uguacaguuucucgaaaauacaa

SEQ ID NO: 172170 - RNA, 15 nt, Human herpesvirus 6B
uguacggagaguuua

SEQ ID NO: 172171 - RNA, 14 nt, Human herpesvirus 6B
uguagaguugaaga

SEQ ID NO: 172172 - RNA, 18 nt, Human herpesvirus 6B
ugugaauauuaguauuag

SEQ ID NO: 172173 - RNA, 14 nt, Human herpesvirus 6B
ugugacgauagugu

SEQ ID NO: 172174 - RNA, 19 nt, Human herpesvirus 6B
ugugaacaguauaaauucu

SEQ ID NO: 172175 - RNA, 13 nt, Human herpesvirus 6B
ugugaacaaguua

SEQ ID NO: 172176 - RNA, 19 nt, Human herpesvirus 6B
ugucuugcaaacagcuuua

SEQ ID NO: 172177 - RNA, 18 nt, Human herpesvirus 6B
ugucuugcagcugucuag

SEQ ID NO: 172178 - RNA, 16 nt, Human herpesvirus 6B
ugugcuguaguugcau

SEQ ID NO: 172179 - RNA, 21 nt, Human herpesvirus 6B
ugugcuuaucaaauuacaauu

SEQ ID NO: 172180 - RNA, 14 nt, Human herpesvirus 6B
uguggaaaaacugu

SEQ ID NO: 172181 - RNA, 13 nt, Human herpesvirus 6B
uguggagacaccu

SEQ ID NO: 172182 - RNA, 19 nt, Human herpesvirus 6B
ugucauuuuuuaauccaua

SEQ ID NO: 172183 - RNA, 14 nt, Human herpesvirus 6B
ugucauguuuacug

SEQ ID NO: 172184 - RNA, 12 nt, Human herpesvirus 6B
ugucugugauuu

SEQ ID NO: 172185 - RNA, 19 nt, Human herpesvirus 6B
ugucugcaguggucaugau

SEQ ID NO: 172186 - RNA, 18 nt, Human herpesvirus 6B
uggccuucgguacaguga

SEQ ID NO: 172187 - RNA, 20 nt, Human herpesvirus 6B
uggccgaguuuagacagagu

SEQ ID NO: 172188 - RNA, 18 nt, Human herpesvirus 6B
uggcgcagaaacugcuau

SEQ ID NO: 172189 - RNA, 13 nt, Human herpesvirus 6B
uggcgccaaaaaa

SEQ ID NO: 172190 - RNA, 13 nt, Human herpesvirus 6B
ugggaaaucugac

SEQ ID NO: 172191 - RNA, 13 nt, Human herpesvirus 6B
uggcauucuugca

SEQ ID NO: 172192 - RNA, 15 nt, Human herpesvirus 6B
uggaucuucugcuaa

SEQ ID NO: 172193 - RNA, 20 nt, Human herpesvirus 6B
uggaucuucugcuaauucau

SEQ ID NO: 172194 - RNA, 16 nt, Human herpesvirus 6B
ugguaggaaaugauga

SEQ ID NO: 172195 - RNA, 16 nt, Human herpesvirus 6B
ugggauguaaucaaug

SEQ ID NO: 172196 - RNA, 20 nt, Human herpesvirus 6B
ugggagguuagguauaaaaa

SEQ ID NO: 172197 - RNA, 19 nt, Human herpesvirus 6B
ugggaggagccaacauaca

SEQ ID NO: 172198 - RNA, 21 nt, Human herpesvirus 6B
uggucucucuuugcguccucu

SEQ ID NO: 172199 - RNA, 14 nt, Human herpesvirus 6B
uggucugcuugcaa

SEQ ID NO: 172200 - RNA, 13 nt, Human herpesvirus 6B
uggugaauguuuc

SEQ ID NO: 172201 - RNA, 16 nt, Human herpesvirus 6B
uguaaaagagccagag

SEQ ID NO: 172202 - RNA, 14 nt, Human herpesvirus 6B
uuaccugucuuaga

SEQ ID NO: 172203 - RNA, 20 nt, Human herpesvirus 6B
uuacgaugugucggagacua

SEQ ID NO: 172204 - RNA, 21 nt, Human herpesvirus 6B
uuaccuuuuaagagugauuca

SEQ ID NO: 172205 - RNA, 21 nt, Human herpesvirus 6B
uuacggacaaaccucucgccg

SEQ ID NO: 172206 - RNA, 15 nt, Human herpesvirus 6B
uuaccuaucaacaau

SEQ ID NO: 172207 - RNA, 13 nt, Human herpesvirus 6B
uuaccguuucagg

SEQ ID NO: 172208 - RNA, 13 nt, Human herpesvirus 6B
uuaccauguugcu

SEQ ID NO: 172209 - RNA, 17 nt, Human herpesvirus 6B
uuaccagagauacguga

SEQ ID NO: 172210 - RNA, 17 nt, Human herpesvirus 6B
uuaccaccuguuuccaa

SEQ ID NO: 172211 - RNA, 17 nt, Human herpesvirus 6B
uuaauuccaagucacgu

SEQ ID NO: 172212 - RNA, 14 nt, Human herpesvirus 6B
uuaauuacauauag

SEQ ID NO: 172213 - RNA, 18 nt, Human herpesvirus 6B
uuacaucaagacuacucu

SEQ ID NO: 172214 - RNA, 22 nt, Human herpesvirus 6B
uuacaucaagacuacucuggcu

SEQ ID NO: 172215 - RNA, 18 nt, Human herpesvirus 6B
uuacaugaaaacauucag

SEQ ID NO: 172216 - RNA, 23 nt, Human herpesvirus 6B
uuaauaaagauuuuggcuacaac

SEQ ID NO: 172217 - RNA, 20 nt, Human herpesvirus 6B
uuaauaaggaaaaauaucga

SEQ ID NO: 172218 - RNA, 24 nt, Human herpesvirus 6B
uuaaggugcuuuuagagauuaugc

SEQ ID NO: 172219 - RNA, 15 nt, Human herpesvirus 6B
uuaaggauaagauga

SEQ ID NO: 172220 - RNA, 15 nt, Human herpesvirus 6B
uuaaugcauucacaa

SEQ ID NO: 172221 - RNA, 16 nt, Human herpesvirus 6B
uuaaucucacacacag

SEQ ID NO: 172222 - RNA, 19 nt, Human herpesvirus 6B
uuaaugagaggacagucaa

SEQ ID NO: 172223 - RNA, 18 nt, Human herpesvirus 6B
uuaaugauauauugcgau

SEQ ID NO: 172224 - RNA, 16 nt, Human herpesvirus 6B
uguggcuauuugacaa

SEQ ID NO: 172225 - RNA, 18 nt, Human herpesvirus 6B
uguguaccuuguaaucuc

SEQ ID NO: 172226 - RNA, 22 nt, Human herpesvirus 6B
ugugggguguguauaugugcgc

SEQ ID NO: 172227 - RNA, 20 nt, Human herpesvirus 6B
uguggucgggguuauacaua

SEQ ID NO: 172228 - RNA, 13 nt, Human herpesvirus 6B
uguguugccgcgu

SEQ ID NO: 172229 - RNA, 17 nt, Human herpesvirus 6B
uguguucagucuaugca

SEQ ID NO: 172230 - RNA, 16 nt, Human herpesvirus 6B
uguguauuugugaaca

SEQ ID NO: 172231 - RNA, 20 nt, Human herpesvirus 6B
uguguccugauuaugccguc

SEQ ID NO: 172232 - RNA, 22 nt, Human herpesvirus 6B
ugugugaaaguauuguacuuca

SEQ ID NO: 172233 - RNA, 18 nt, Human herpesvirus 6B
uuaacuuaucaacuauac

SEQ ID NO: 172234 - RNA, 21 nt, Human herpesvirus 6B
uuaagauuaucggugcacaua

SEQ ID NO: 172235 - RNA, 17 nt, Human herpesvirus 6B
uuaacuaagauugugca

SEQ ID NO: 172236 - RNA, 20 nt, Human herpesvirus 6B
uuaacuaagauugugcaguu

SEQ ID NO: 172237 - RNA, 22 nt, Human herpesvirus 6B
uguguuugaaacguugugcuga

SEQ ID NO: 172238 - RNA, 22 nt, Human herpesvirus 6B
uguguuuguggacaaugauacu

SEQ ID NO: 172239 - RNA, 14 nt, Human herpesvirus 6B
uguuaacauguaca

SEQ ID NO: 172240 - RNA, 19 nt, Human herpesvirus 6B
uuagaauguggagcaguga

SEQ ID NO: 172241 - RNA, 20 nt, Human herpesvirus 6B
uuagaauaggcgucucaugc

SEQ ID NO: 172242 - RNA, 16 nt, Human herpesvirus 6B
uuacggggaagaucua

SEQ ID NO: 172243 - RNA, 18 nt, Human herpesvirus 6B
uuagacucgccgaugaaa

SEQ ID NO: 172244 - RNA, 18 nt, Human herpesvirus 6B
uuagcaaucauuaacaua

SEQ ID NO: 172245 - RNA, 13 nt, Human herpesvirus 6B
uuagaugauguug

SEQ ID NO: 172246 - RNA, 15 nt, Human herpesvirus 6B
uuagauguaacucau

SEQ ID NO: 172247 - RNA, 18 nt, Human herpesvirus 6B
uuagcggauggaauccaa

SEQ ID NO: 172248 - RNA, 21 nt, Human herpesvirus 6B
uuauagauagcggcacguuga

SEQ ID NO: 172249 - RNA, 13 nt, Human herpesvirus 6B
uuauaagcucaag

SEQ ID NO: 172250 - RNA, 17 nt, Human herpesvirus 6B
uuauaagacgcugauaa

SEQ ID NO: 172251 - RNA, 18 nt, Human herpesvirus 6B
uuauaugcaggugcugcu

SEQ ID NO: 172252 - RNA, 13 nt, Human herpesvirus 6B
uuaucaugcccua

SEQ ID NO: 172253 - RNA, 13 nt, Human herpesvirus 6B
uuaucaaaagcca

SEQ ID NO: 172254 - RNA, 16 nt, Human herpesvirus 6B
uuaucaaaagccagau

SEQ ID NO: 172255 - RNA, 21 nt, Human herpesvirus 6B
uucaaaacugggcgaagaccu

SEQ ID NO: 172256 - RNA, 17 nt, Human herpesvirus 6B
uuauuuucuguauuaau

SEQ ID NO: 172257 - RNA, 23 nt, Human herpesvirus 6B
uucaaaaagaaugggauugucau

SEQ ID NO: 172258 - RNA, 15 nt, Human herpesvirus 6B
uuauuuugucuucgu

SEQ ID NO: 172259 - RNA, 21 nt, Human herpesvirus 6B
uuauuuuguggcuauuugaca

SEQ ID NO: 172260 - RNA, 20 nt, Human herpesvirus 6B
uuauuuguuuaaugcauuca

SEQ ID NO: 172261 - RNA, 15 nt, Human herpesvirus 6B
uuauuuucaauauca

SEQ ID NO: 172262 - RNA, 14 nt, Human herpesvirus 6B
uuauuucuaaacac

SEQ ID NO: 172263 - RNA, 21 nt, Human herpesvirus 6B
uuauuauaagcaaacauguau

SEQ ID NO: 172264 - RNA, 19 nt, Human herpesvirus 6B
uuauucagccguagcgaua

SEQ ID NO: 172265 - RNA, 22 nt, Human herpesvirus 6B
uuauucauaagagaauagaucu

SEQ ID NO: 172266 - RNA, 14 nt, Human herpesvirus 6B
uuauuggaccacga

SEQ ID NO: 172267 - RNA, 14 nt, Human herpesvirus 6B
uuauucugucuuga

SEQ ID NO: 172268 - RNA, 16 nt, Human herpesvirus 6B
uuauggggaagaucua

SEQ ID NO: 172269 - RNA, 14 nt, Human herpesvirus 6B
uuauuacaauuuga

SEQ ID NO: 172270 - RNA, 17 nt, Human herpesvirus 6B
uuaugaucggcauuugu

SEQ ID NO: 172271 - RNA, 16 nt, Human herpesvirus 6B
uuauggcaacauaccc

SEQ ID NO: 172272 - RNA, 22 nt, Human herpesvirus 6B
uucggagaacucgcugauuugu

SEQ ID NO: 172273 - RNA, 15 nt, Human herpesvirus 6B
uucggcugcuuauau

SEQ ID NO: 172274 - RNA, 16 nt, Human herpesvirus 6B
uucccacagauugcau

SEQ ID NO: 172275 - RNA, 16 nt, Human herpesvirus 6B
uuccagggaacuugau

SEQ ID NO: 172276 - RNA, 21 nt, Human herpesvirus 6B
uuccagguggugguuucgggu

SEQ ID NO: 172277 - RNA, 19 nt, Human herpesvirus 6B
uuccauccgcuaagagauu

SEQ ID NO: 172278 - RNA, 20 nt, Human herpesvirus 6B
uuccagaauacgaacagaaa

SEQ ID NO: 172279 - RNA, 17 nt, Human herpesvirus 6B
uucgggugcaaucaauc

SEQ ID NO: 172280 - RNA, 19 nt, Human herpesvirus 6B
uucguguucgccauauaag

SEQ ID NO: 172281 - RNA, 18 nt, Human herpesvirus 6B
uucguucagaauguucca

SEQ ID NO: 172282 - RNA, 13 nt, Human herpesvirus 6B
uucuaaauaucau

SEQ ID NO: 172283 - RNA, 17 nt, Human herpesvirus 6B
uucgucugauacuugaa

SEQ ID NO: 172284 - RNA, 18 nt, Human herpesvirus 6B
uucucuuuuuaauuccaa

SEQ ID NO: 172285 - RNA, 20 nt, Human herpesvirus 6B
uucucucucaccugccuuca

SEQ ID NO: 172286 - RNA, 22 nt, Human herpesvirus 6B
uuccacaucuaugaugcuguag

SEQ ID NO: 172287 - RNA, 11 nt, Human herpesvirus 6B
uucacaucucg

SEQ ID NO: 172288 - RNA, 16 nt, Human herpesvirus 6B
uucaccgucucugaag

SEQ ID NO: 172289 - RNA, 13 nt, Human herpesvirus 6B
uucaccaugucca

SEQ ID NO: 172290 - RNA, 13 nt, Human herpesvirus 6B
uucaccauuccag

SEQ ID NO: 172291 - RNA, 12 nt, Human herpesvirus 6B
uucacacagaug

SEQ ID NO: 172292 - RNA, 21 nt, Human herpesvirus 6B
uucaauuguuuuuuacuuccg

SEQ ID NO: 172293 - RNA, 19 nt, Human herpesvirus 6B
uucacaaggaaugugcaga

SEQ ID NO: 172294 - RNA, 23 nt, Human herpesvirus 6B
uucacacaacuuaaccgcaaaaa

SEQ ID NO: 172295 - RNA, 16 nt, Human herpesvirus 6B
uucaaauuuacucucc

SEQ ID NO: 172296 - RNA, 17 nt, Human herpesvirus 6B
uucaaauuuacucucca

SEQ ID NO: 172297 - RNA, 22 nt, Human herpesvirus 6B
uucaaauguagcaaaugaaugu

SEQ ID NO: 172298 - RNA, 12 nt, Human herpesvirus 6B
uucaaagugaau

SEQ ID NO: 172299 - RNA, 22 nt, Human herpesvirus 6B
uucaaaaugaccagagauucua

SEQ ID NO: 172300 - RNA, 19 nt, Human herpesvirus 6B
uucaagaaugggaugcauu

SEQ ID NO: 172301 - RNA, 15 nt, Human herpesvirus 6B
uucaagacgaucuca

SEQ ID NO: 172302 - RNA, 15 nt, Human herpesvirus 6B
uucaagcaaagacau

SEQ ID NO: 172303 - RNA, 17 nt, Human herpesvirus 6B
uucaauacuacgugucu

SEQ ID NO: 172304 - RNA, 20 nt, Human herpesvirus 6B
uugauguagacgugcugucu

SEQ ID NO: 172305 - RNA, 23 nt, Human herpesvirus 6B
uugccggcuaaacuuuacaucaa

SEQ ID NO: 172306 - RNA, 13 nt, Human herpesvirus 6B
uugcccucccgca

SEQ ID NO: 172307 - RNA, 19 nt, Human herpesvirus 6B
uuggagauaauaaaacacg

SEQ ID NO: 172308 - RNA, 18 nt, Human herpesvirus 6B
uuggagaucaguucuccg

SEQ ID NO: 172309 - RNA, 20 nt, Human herpesvirus 6B
uuggagagaacugucuugca

SEQ ID NO: 172310 - RNA, 14 nt, Human herpesvirus 6B
uuggagagacguug

SEQ ID NO: 172311 - RNA, 11 nt, Human herpesvirus 6B
uuggaggucau

SEQ ID NO: 172312 - RNA, 23 nt, Human herpesvirus 6B
uugcgugggaauaagaguuucau

SEQ ID NO: 172313 - RNA, 16 nt, Human herpesvirus 6B
uugcggugcauaacau

SEQ ID NO: 172314 - RNA, 16 nt, Human herpesvirus 6B
uugaguaauuggacau

SEQ ID NO: 172315 - RNA, 15 nt, Human herpesvirus 6B
uugauacaaacguga

SEQ ID NO: 172316 - RNA, 15 nt, Human herpesvirus 6B
uugauauaauccugu

SEQ ID NO: 172317 - RNA, 17 nt, Human herpesvirus 6B
uucuugaagaugugaua

SEQ ID NO: 172318 - RNA, 16 nt, Human herpesvirus 6B
uucuugcguucugcgu

SEQ ID NO: 172319 - RNA, 13 nt, Human herpesvirus 6B
uucugauggaaaa

SEQ ID NO: 172320 - RNA, 22 nt, Human herpesvirus 6B
uucugauuuguucuagugcgua

SEQ ID NO: 172321 - RNA, 13 nt, Human herpesvirus 6B
uucugcaaaacaa

SEQ ID NO: 172322 - RNA, 22 nt, Human herpesvirus 6B
uucugcauuuauaucaaacuuu

SEQ ID NO: 172323 - RNA, 17 nt, Human herpesvirus 6B
uucugcucucgaugaaa

SEQ ID NO: 172324 - RNA, 20 nt, Human herpesvirus 6B
uucugggauuauucugguaa

SEQ ID NO: 172325 - RNA, 15 nt, Human herpesvirus 6B
uucuuaaggugcuuu

SEQ ID NO: 172326 - RNA, 20 nt, Human herpesvirus 6B
uucuuaaagcgugugauuca

SEQ ID NO: 172327 - RNA, 13 nt, Human herpesvirus 6B
uucuuacauaaau

SEQ ID NO: 172328 - RNA, 13 nt, Human herpesvirus 6B
uucuuaccaagaa

SEQ ID NO: 172329 - RNA, 18 nt, Human herpesvirus 6B
uucuuaccaagaaaucac

SEQ ID NO: 172330 - RNA, 15 nt, Human herpesvirus 6B
uccaggcaugugauu

SEQ ID NO: 172331 - RNA, 17 nt, Human herpesvirus 6B
uccagcguggugugcac

SEQ ID NO: 172332 - RNA, 19 nt, Human herpesvirus 6B
uccaggaauucacuuugaa

SEQ ID NO: 172333 - RNA, 13 nt, Human herpesvirus 6B
uccagcacuuuua

SEQ ID NO: 172334 - RNA, 14 nt, Human herpesvirus 6B
uccagcacuuuuac

SEQ ID NO: 172335 - RNA, 13 nt, Human herpesvirus 6B
uccagauguaggu

SEQ ID NO: 172336 - RNA, 17 nt, Human herpesvirus 6B
uccagcacagcaugcau

SEQ ID NO: 172337 - RNA, 21 nt, Human herpesvirus 6B
uccagcacagcaugcauuugg

SEQ ID NO: 172338 - RNA, 24 nt, Human herpesvirus 6B
uccagaaguccuucaugauauucc

SEQ ID NO: 172339 - RNA, 15 nt, Human herpesvirus 6B
uccacugcauuucau

SEQ ID NO: 172340 - RNA, 20 nt, Human herpesvirus 6B
uccacucggauucaaagaaa

SEQ ID NO: 172341 - RNA, 13 nt, Human herpesvirus 6B
uccaucuucagac

SEQ ID NO: 172342 - RNA, 19 nt, Human herpesvirus 6B
uccaugcgaguagauucuc

SEQ ID NO: 172343 - RNA, 21 nt, Human herpesvirus 6B
uccauccgcuaagagauuuac

SEQ ID NO: 172344 - RNA, 13 nt, Human herpesvirus 6B
uccaugacuguga

SEQ ID NO: 172345 - RNA, 21 nt, Human herpesvirus 6B
uccauacggucgaaugagcuu

SEQ ID NO: 172346 - RNA, 19 nt, Human herpesvirus 6B
uccagugagaacauauaaa

SEQ ID NO: 172347 - RNA, 17 nt, Human herpesvirus 6B
uccacgccccuccgucc

SEQ ID NO: 172348 - RNA, 20 nt, Human herpesvirus 6B
uccaccuggaaaaacugacu

SEQ ID NO: 172349 - RNA, 23 nt, Human herpesvirus 6B
uccaacgcacaugcuaacuaaau

SEQ ID NO: 172350 - RNA, 13 nt, Human herpesvirus 6B
uccacccauauac

SEQ ID NO: 172351 - RNA, 13 nt, Human herpesvirus 6B
uccacccaucucc

SEQ ID NO: 172352 - RNA, 19 nt, Human herpesvirus 6B
uccaaaagcgccugccuac

SEQ ID NO: 172353 - RNA, 22 nt, Human herpesvirus 6B
uccaaauacacuuucauaggaa

SEQ ID NO: 172354 - RNA, 16 nt, Human herpesvirus 6B
ucauacccgauguucu

SEQ ID NO: 172355 - RNA, 23 nt, Human herpesvirus 6B
ucauacccgauguucucucacgc

SEQ ID NO: 172356 - RNA, 22 nt, Human herpesvirus 6B
ucauaggaaguaaauacaauag

SEQ ID NO: 172357 - RNA, 13 nt, Human herpesvirus 6B
ucauagauuucau

SEQ ID NO: 172358 - RNA, 15 nt, Human herpesvirus 6B
ucauuucaaauacac

SEQ ID NO: 172359 - RNA, 19 nt, Human herpesvirus 6B
ucauuucaaauacaccuca

SEQ ID NO: 172360 - RNA, 20 nt, Human herpesvirus 6B
ucauuucaaauacaccucac

SEQ ID NO: 172361 - RNA, 19 nt, Human herpesvirus 6B
ucauaguuaugcgucuguu

SEQ ID NO: 172362 - RNA, 16 nt, Human herpesvirus 6B
ucauaugaaaagcugg

SEQ ID NO: 172363 - RNA, 16 nt, Human herpesvirus 6B
uccuguuugaauuuua

SEQ ID NO: 172364 - RNA, 19 nt, Human herpesvirus 6B
uccuguuuuucucauaaag

SEQ ID NO: 172365 - RNA, 12 nt, Human herpesvirus 6B
uccuucaugaua

SEQ ID NO: 172366 - RNA, 15 nt, Human herpesvirus 6B
uccuucaaagugaau

SEQ ID NO: 172367 - RNA, 15 nt, Human herpesvirus 6B
uccuuacaaaccuuc

SEQ ID NO: 172368 - RNA, 17 nt, Human herpesvirus 6B
uccuucguucuuucaca

SEQ ID NO: 172369 - RNA, 14 nt, Human herpesvirus 6B
ucgcaaaaacaugu

SEQ ID NO: 172370 - RNA, 20 nt, Human herpesvirus 6B
ucgauuauugccgcuucuau

SEQ ID NO: 172371 - RNA, 15 nt, Human herpesvirus 6B
ucgauuaaugccaca

SEQ ID NO: 172372 - RNA, 15 nt, Human herpesvirus 6B
ucgcaaaccguccaa

SEQ ID NO: 172373 - RNA, 14 nt, Human herpesvirus 6B
ucgauguacaguuu

SEQ ID NO: 172374 - RNA, 18 nt, Human herpesvirus 6B
ucgaugauuauucugucu

SEQ ID NO: 172375 - RNA, 21 nt, Human herpesvirus 6B
ucgaugauuauucugucuuga

SEQ ID NO: 172376 - RNA, 19 nt, Human herpesvirus 6B
uccuuucgcacgcacauau

SEQ ID NO: 172377 - RNA, 15 nt, Human herpesvirus 6B
uccucaacacucuca

SEQ ID NO: 172378 - RNA, 16 nt, Human herpesvirus 6B
uccucaacacucucaa

SEQ ID NO: 172379 - RNA, 13 nt, Human herpesvirus 6B
uccucagucuuca

SEQ ID NO: 172380 - RNA, 15 nt, Human herpesvirus 6B
uccuauaaauacuga

SEQ ID NO: 172381 - RNA, 18 nt, Human herpesvirus 6B
uccgagcggugugcaguu

SEQ ID NO: 172382 - RNA, 16 nt, Human herpesvirus 6B
uccgacucgauuugau

SEQ ID NO: 172383 - RNA, 15 nt, Human herpesvirus 6B
uccgaauucuuacca

SEQ ID NO: 172384 - RNA, 13 nt, Human herpesvirus 6B
ucccaaaagacua

SEQ ID NO: 172385 - RNA, 20 nt, Human herpesvirus 6B
ucccuaugucaaugugaaua

SEQ ID NO: 172386 - RNA, 21 nt, Human herpesvirus 6B
ucccuaugucaaugugaauau

SEQ ID NO: 172387 - RNA, 16 nt, Human herpesvirus 6B
uccgaaaucaaugagu

SEQ ID NO: 172388 - RNA, 13 nt, Human herpesvirus 6B
ucaccauuacucu

SEQ ID NO: 172389 - RNA, 20 nt, Human herpesvirus 6B
ucaccauuacucuguguuga

SEQ ID NO: 172390 - RNA, 17 nt, Human herpesvirus 6B
ucaccccucgugaaaua

SEQ ID NO: 172391 - RNA, 19 nt, Human herpesvirus 6B
ucacccgacaugcuucaca

SEQ ID NO: 172392 - RNA, 12 nt, Human herpesvirus 6B
ucaccacuguga

SEQ ID NO: 172393 - RNA, 19 nt, Human herpesvirus 6B
ucaccacugugauaugcaa

SEQ ID NO: 172394 - RNA, 15 nt, Human herpesvirus 6B
ucaccuguauagauu

SEQ ID NO: 172395 - RNA, 17 nt, Human herpesvirus 6B
ucaccugccuucacuuu

SEQ ID NO: 172396 - RNA, 14 nt, Human herpesvirus 6B
ucaccgucucugaa

SEQ ID NO: 172397 - RNA, 18 nt, Human herpesvirus 6B
ucaccgucucugaagcaa

SEQ ID NO: 172398 - RNA, 22 nt, Human herpesvirus 6B
ucaccgucucugaagcaaaagu

SEQ ID NO: 172399 - RNA, 18 nt, Human herpesvirus 6B
ucacuaacuucaagaauu

SEQ ID NO: 172400 - RNA, 19 nt, Human herpesvirus 6B
ucacucucaauuucacuua

SEQ ID NO: 172401 - RNA, 15 nt, Human herpesvirus 6B
ucacugacgauggcu

SEQ ID NO: 172402 - RNA, 19 nt, Human herpesvirus 6B
ucacgcauagaccaaccag

SEQ ID NO: 172403 - RNA, 17 nt, Human herpesvirus 6B
ucacguauaccauuccc

SEQ ID NO: 172404 - RNA, 23 nt, Human herpesvirus 6B
ucacguaucucugguaaauguca

SEQ ID NO: 172405 - RNA, 15 nt, Human herpesvirus 6B
ucacgucccauucac

SEQ ID NO: 172406 - RNA, 21 nt, Human herpesvirus 6B
ucaccuugucaucaugugugc

SEQ ID NO: 172407 - RNA, 17 nt, Human herpesvirus 6B
ucacgagaucugcucau

SEQ ID NO: 172408 - RNA, 20 nt, Human herpesvirus 6B
ucacauuaccucugcaauag

SEQ ID NO: 172409 - RNA, 21 nt, Human herpesvirus 6B
ucacauuguuccgaauucuua

SEQ ID NO: 172410 - RNA, 12 nt, Human herpesvirus 6B
ucaccaacguca

SEQ ID NO: 172411 - RNA, 17 nt, Human herpesvirus 6B
ucaccaacgucaugcaa

SEQ ID NO: 172412 - RNA, 21 nt, Human herpesvirus 6B
ucaccaacgucaugcaaaaca

SEQ ID NO: 172413 - RNA, 18 nt, Human herpesvirus 6B
ucaccaagaaaaaacaca

SEQ ID NO: 172414 - RNA, 19 nt, Human herpesvirus 6B
ucacagccuugauaaucug

SEQ ID NO: 172415 - RNA, 15 nt, Human herpesvirus 6B
ucacaguguuuccaa

SEQ ID NO: 172416 - RNA, 14 nt, Human herpesvirus 6B
ucacagcauuuccg

SEQ ID NO: 172417 - RNA, 13 nt, Human herpesvirus 6B
uaugggaguaauu

SEQ ID NO: 172418 - RNA, 16 nt, Human herpesvirus 6B
uauggugccucagggu

SEQ ID NO: 172419 - RNA, 12 nt, Human herpesvirus 6B
ucacacucugaa

SEQ ID NO: 172420 - RNA, 14 nt, Human herpesvirus 6B
uauguaaagaaaca

SEQ ID NO: 172421 - RNA, 20 nt, Human herpesvirus 6B
uaucgaaauaacgcaaucua

SEQ ID NO: 172422 - RNA, 14 nt, Human herpesvirus 6B
uaucgaguuuagca

SEQ ID NO: 172423 - RNA, 23 nt, Human herpesvirus 6B
ucaggaaguucuucaaaaaaaga

SEQ ID NO: 172424 - RNA, 16 nt, Human herpesvirus 6B
ucaguguuuguuuuua

SEQ ID NO: 172425 - RNA, 15 nt, Human herpesvirus 6B
ucaguguuugccaac

SEQ ID NO: 172426 - RNA, 16 nt, Human herpesvirus 6B
ucauaaacaaaccgcc

SEQ ID NO: 172427 - RNA, 18 nt, Human herpesvirus 6B
ucauaagcucuacacaga

SEQ ID NO: 172428 - RNA, 21 nt, Human herpesvirus 6B
ucauaacgagaaagaaaacca

SEQ ID NO: 172429 - RNA, 13 nt, Human herpesvirus 6B
ucagucaaugcaa

SEQ ID NO: 172430 - RNA, 22 nt, Human herpesvirus 6B
ucacuuuuugaagagcgagauc

SEQ ID NO: 172431 - RNA, 16 nt, Human herpesvirus 6B
ucagaaaauuggugug

SEQ ID NO: 172432 - RNA, 21 nt, Human herpesvirus 6B
ucagaaaauuggugugcauua

SEQ ID NO: 172433 - RNA, 21 nt, Human herpesvirus 6B
ucagaaccaucuuuucaauua

SEQ ID NO: 172434 - RNA, 20 nt, Human herpesvirus 6B
ucagacaaauggaaacugga

SEQ ID NO: 172435 - RNA, 22 nt, Human herpesvirus 6B
ucagaccguuaucggcauugau

SEQ ID NO: 172436 - RNA, 19 nt, Human herpesvirus 6B
ucagagcgggcuauaauca

SEQ ID NO: 172437 - RNA, 17 nt, Human herpesvirus 6B
ucagcccccagcugaaa

SEQ ID NO: 172438 - RNA, 12 nt, Human herpesvirus 6B
ucagccauuucg

SEQ ID NO: 172439 - RNA, 11 nt, Human herpesvirus 6B
ucagcauucac

SEQ ID NO: 172440 - RNA, 15 nt, Human herpesvirus 6B
ucagcaaacauguga

SEQ ID NO: 172441 - RNA, 17 nt, Human herpesvirus 6B
ucagcaaacaugugauu

SEQ ID NO: 172442 - RNA, 23 nt, Human herpesvirus 6B
ucuuucuacauaaaacaggguug

SEQ ID NO: 172443 - RNA, 19 nt, Human herpesvirus 6B
ucuuucaaaaugaccagag

SEQ ID NO: 172444 - RNA, 20 nt, Human herpesvirus 6B
ucuuucaaaaugaccagaga

SEQ ID NO: 172445 - RNA, 23 nt, Human herpesvirus 6B
ugaaaugucgaaucucaagcaca

SEQ ID NO: 172446 - RNA, 20 nt, Human herpesvirus 6B
ugaagaugugauacuauaaa

SEQ ID NO: 172447 - RNA, 14 nt, Human herpesvirus 6B
ugaagauguucaaa

SEQ ID NO: 172448 - RNA, 17 nt, Human herpesvirus 6B
ugaacucucacggccau

SEQ ID NO: 172449 - RNA, 17 nt, Human herpesvirus 6B
ugaagaauaaaagucca

SEQ ID NO: 172450 - RNA, 18 nt, Human herpesvirus 6B
ugaagaauaaaaguccau

SEQ ID NO: 172451 - RNA, 18 nt, Human herpesvirus 6B
ugaacgcacuagacauca

SEQ ID NO: 172452 - RNA, 17 nt, Human herpesvirus 6B
ugaacuaaauaaucaac

SEQ ID NO: 172453 - RNA, 16 nt, Human herpesvirus 6B
ugaacuacacgaugaa

SEQ ID NO: 172454 - RNA, 17 nt, Human herpesvirus 6B
ugaacuacacgaugaac

SEQ ID NO: 172455 - RNA, 13 nt, Human herpesvirus 6B
ugaagguaucaaa

SEQ ID NO: 172456 - RNA, 19 nt, Human herpesvirus 6B
ugaauuccuggacauggug

SEQ ID NO: 172457 - RNA, 22 nt, Human herpesvirus 6B
ugaauuccuggacauggugaaa

SEQ ID NO: 172458 - RNA, 20 nt, Human herpesvirus 6B
ugaauucaagacgaucucau

SEQ ID NO: 172459 - RNA, 23 nt, Human herpesvirus 6B
ugaagcaaagcacccugcacaaa

SEQ ID NO: 172460 - RNA, 15 nt, Human herpesvirus 6B
ugaauuuucugaaga

SEQ ID NO: 172461 - RNA, 16 nt, Human herpesvirus 6B
ugacaaaucugaaugu

SEQ ID NO: 172462 - RNA, 15 nt, Human herpesvirus 6B
ugacacaauuucuga

SEQ ID NO: 172463 - RNA, 15 nt, Human herpesvirus 6B
ugacacacagaauac

SEQ ID NO: 172464 - RNA, 12 nt, Human herpesvirus 6B
ugacacagaauc

SEQ ID NO: 172465 - RNA, 17 nt, Human herpesvirus 6B
ugaauugauaguacuua

SEQ ID NO: 172466 - RNA, 14 nt, Human herpesvirus 6B
ugaauuuaaugcaa

SEQ ID NO: 172467 - RNA, 18 nt, Human herpesvirus 6B
ugaauugugcaagcugua

SEQ ID NO: 172468 - RNA, 20 nt, Human herpesvirus 6B
ugacuauaggaugacugagc

SEQ ID NO: 172469 - RNA, 19 nt, Human herpesvirus 6B
ugacuauauuaucuuucau

SEQ ID NO: 172470 - RNA, 20 nt, Human herpesvirus 6B
ugacaagcuguccaucuuca

SEQ ID NO: 172471 - RNA, 14 nt, Human herpesvirus 6B
ugacaccacauaac

SEQ ID NO: 172472 - RNA, 19 nt, Human herpesvirus 6B
ugacuuauaagucaucaua

SEQ ID NO: 172473 - RNA, 17 nt, Human herpesvirus 6B
ugacuggagcagucuuc

SEQ ID NO: 172474 - RNA, 14 nt, Human herpesvirus 6B
ugagaaaguuguac

SEQ ID NO: 172475 - RNA, 18 nt, Human herpesvirus 6B
ugacuuugugugucgaau

SEQ ID NO: 172476 - RNA, 15 nt, Human herpesvirus 6B
ugagacuuagaccaa

SEQ ID NO: 172477 - RNA, 15 nt, Human herpesvirus 6B
ugagauacaaaacau

SEQ ID NO: 172478 - RNA, 11 nt, Human herpesvirus 6B
ugagauuugag

SEQ ID NO: 172479 - RNA, 21 nt, Human herpesvirus 6B
ugagauagaaguuacaagaaa

SEQ ID NO: 172480 - RNA, 20 nt, Human herpesvirus 6B
ugagccagauucggcugcuu

SEQ ID NO: 172481 - RNA, 21 nt, Human herpesvirus 6B
ugagccagauucggcugcuua

SEQ ID NO: 172482 - RNA, 22 nt, Human herpesvirus 6B
ugagcgacauaguggcuaugaa

SEQ ID NO: 172483 - RNA, 16 nt, Human herpesvirus 6B
ugauauauugcgauuc

SEQ ID NO: 172484 - RNA, 16 nt, Human herpesvirus 6B
ugaucaucacaugcca

SEQ ID NO: 172485 - RNA, 20 nt, Human herpesvirus 6B
ugauaugcaaacugacugua

SEQ ID NO: 172486 - RNA, 13 nt, Human herpesvirus 6B
ugaucaagacuua

SEQ ID NO: 172487 - RNA, 14 nt, Human herpesvirus 6B
ugauccaauguuuc

SEQ ID NO: 172488 - RNA, 18 nt, Human herpesvirus 6B
ugaucgccccagacuuau

SEQ ID NO: 172489 - RNA, 14 nt, Human herpesvirus 6B
ugcaauaggccaua

SEQ ID NO: 172490 - RNA, 11 nt, Human herpesvirus 6B
ugcaaucaauc

SEQ ID NO: 172491 - RNA, 16 nt, Human herpesvirus 6B
ugaucguggacaguaa

SEQ ID NO: 172492 - RNA, 18 nt, Human herpesvirus 6B
ugaucguguuguggacaa

SEQ ID NO: 172493 - RNA, 20 nt, Human herpesvirus 6B
ugaucucacgucacaguuuu

SEQ ID NO: 172494 - RNA, 20 nt, Human herpesvirus 6B
ugaucugauucgacaaauca

SEQ ID NO: 172495 - RNA, 16 nt, Human herpesvirus 6B
ugaugaaagcuucauu

SEQ ID NO: 172496 - RNA, 16 nt, Human herpesvirus 6B
ugaugaaauugugacu

SEQ ID NO: 172497 - RNA, 16 nt, Human herpesvirus 6B
ugaugaucugcuguug

SEQ ID NO: 172498 - RNA, 23 nt, Human herpesvirus 6B
ugaugauuaauacaucauuaaaa

SEQ ID NO: 172499 - RNA, 19 nt, Human herpesvirus 6B
ugaugcgguucgacagaga

SEQ ID NO: 172500 - RNA, 16 nt, Human herpesvirus 6B
ugaugauuugucgaau

SEQ ID NO: 172501 - RNA, 17 nt, Human herpesvirus 6B
ugaugccuugauguuuc

SEQ ID NO: 172502 - RNA, 22 nt, Human herpesvirus 6B
ugauggaguuauuggaccacga

SEQ ID NO: 172503 - RNA, 15 nt, Human herpesvirus 6B
ugaugggauguaauc

SEQ ID NO: 172504 - RNA, 16 nt, Human herpesvirus 6B
ugaugggauguaauca

SEQ ID NO: 172505 - RNA, 13 nt, Human herpesvirus 6B
ugauguaauugga

SEQ ID NO: 172506 - RNA, 15 nt, Human herpesvirus 6B
ucuuagaagcauuug

SEQ ID NO: 172507 - RNA, 20 nt, Human herpesvirus 6B
ucuuagcggauggaauccaa

SEQ ID NO: 172508 - RNA, 14 nt, Human herpesvirus 6B
ucuuauaacaccag

SEQ ID NO: 172509 - RNA, 22 nt, Human herpesvirus 6B
ucuuauaacaccaguacuucaa

SEQ ID NO: 172510 - RNA, 20 nt, Human herpesvirus 6B
ucugaagaauaaaaguccau

SEQ ID NO: 172511 - RNA, 11 nt, Human herpesvirus 6B
ucugagauuug

SEQ ID NO: 172512 - RNA, 19 nt, Human herpesvirus 6B
ucugagauuuuucugggau

SEQ ID NO: 172513 - RNA, 14 nt, Human herpesvirus 6B
ucugacucgugcca

SEQ ID NO: 172514 - RNA, 15 nt, Human herpesvirus 6B
ucugagacagucaau

SEQ ID NO: 172515 - RNA, 17 nt, Human herpesvirus 6B
ucugagcucuccugggu

SEQ ID NO: 172516 - RNA, 13 nt, Human herpesvirus 6B
ucugauacuugaa

SEQ ID NO: 172517 - RNA, 14 nt, Human herpesvirus 6B
ucuugaagauguga

SEQ ID NO: 172518 - RNA, 15 nt, Human herpesvirus 6B
ucuugcaaacagcuu

SEQ ID NO: 172519 - RNA, 18 nt, Human herpesvirus 6B
ucuugaaaucuaccauaa

SEQ ID NO: 172520 - RNA, 19 nt, Human herpesvirus 6B
ucuucuuugugcgucagcu

SEQ ID NO: 172521 - RNA, 22 nt, Human herpesvirus 6B
ucuugcagcugucuagauucua

SEQ ID NO: 172522 - RNA, 21 nt, Human herpesvirus 6B
ucuuguguucuaacacauagu

SEQ ID NO: 172523 - RNA, 18 nt, Human herpesvirus 6B
ucuugguuuuauaagcuc

SEQ ID NO: 172524 - RNA, 22 nt, Human herpesvirus 6B
ucuucuggauacugaugaauuu

SEQ ID NO: 172525 - RNA, 12 nt, Human herpesvirus 6B
ucuucuguaaac

SEQ ID NO: 172526 - RNA, 20 nt, Human herpesvirus 6B
ucuucugcuaauucauaguu

SEQ ID NO: 172527 - RNA, 16 nt, Human herpesvirus 6B
ucuuccggaauuuuga

SEQ ID NO: 172528 - RNA, 18 nt, Human herpesvirus 6B
ucuuaugaucggcauuug

SEQ ID NO: 172529 - RNA, 16 nt, Human herpesvirus 6B
ucuuauuuaccuuccu

SEQ ID NO: 172530 - RNA, 19 nt, Human herpesvirus 6B
ucuucaaauuuacucucca

SEQ ID NO: 172531 - RNA, 14 nt, Human herpesvirus 6B
ucuucaacauauca

SEQ ID NO: 172532 - RNA, 22 nt, Human herpesvirus 6B
ucuucaaccuguuuccagaaua

SEQ ID NO: 172533 - RNA, 14 nt, Human herpesvirus 6B
ucuucaagcaaaga

SEQ ID NO: 172534 - RNA, 22 nt, Human herpesvirus 6B
ucgccuggccucccauguaugc

SEQ ID NO: 172535 - RNA, 19 nt, Human herpesvirus 6B
ucgccgaugaaacugucga

SEQ ID NO: 172536 - RNA, 16 nt, Human herpesvirus 6B
ucgcgauagucaugca

SEQ ID NO: 172537 - RNA, 21 nt, Human herpesvirus 6B
ucgcgauagucaugcacuccg

SEQ ID NO: 172538 - RNA, 15 nt, Human herpesvirus 6B
ucgcaagacuacaga

SEQ ID NO: 172539 - RNA, 22 nt, Human herpesvirus 6B
ucgcaagacuacagacuccuca

SEQ ID NO: 172540 - RNA, 19 nt, Human herpesvirus 6B
ucgcaguccagcacagcau

SEQ ID NO: 172541 - RNA, 14 nt, Human herpesvirus 6B
ucuacccuaucgau

SEQ ID NO: 172542 - RNA, 15 nt, Human herpesvirus 6B
ucuacaugccacaga

SEQ ID NO: 172543 - RNA, 18 nt, Human herpesvirus 6B
ucuacauaaaacaggguu

SEQ ID NO: 172544 - RNA, 23 nt, Human herpesvirus 6B
ucuacacgccgucuucaaccugu

SEQ ID NO: 172545 - RNA, 15 nt, Human herpesvirus 6B
ucuacguuagcuucc

SEQ ID NO: 172546 - RNA, 14 nt, Human herpesvirus 6B
ucuacuuuaucuuu

SEQ ID NO: 172547 - RNA, 20 nt, Human herpesvirus 6B
ucuacuuuaucuuuugcaaa

SEQ ID NO: 172548 - RNA, 17 nt, Human herpesvirus 6B
ucuacuguguauugugu

SEQ ID NO: 172549 - RNA, 18 nt, Human herpesvirus 6B
ucuacuguguauugugua

SEQ ID NO: 172550 - RNA, 18 nt, Human herpesvirus 6B
ucuagaucugccauggga

SEQ ID NO: 172551 - RNA, 15 nt, Human herpesvirus 6B
ucucuacaucgauga

SEQ ID NO: 172552 - RNA, 21 nt, Human herpesvirus 6B
ucucgcucagcguggaauuug

SEQ ID NO: 172553 - RNA, 14 nt, Human herpesvirus 6B
ucucuggggagcuu

SEQ ID NO: 172554 - RNA, 16 nt, Human herpesvirus 6B
ucucugguaaauguca

SEQ ID NO: 172555 - RNA, 13 nt, Human herpesvirus 6B
ucucugaagcaaa

SEQ ID NO: 172556 - RNA, 17 nt, Human herpesvirus 6B
ucucugaagcaaaaguc

SEQ ID NO: 172557 - RNA, 20 nt, Human herpesvirus 6B
ucucugaagcaaaagucuua

SEQ ID NO: 172558 - RNA, 20 nt, Human herpesvirus 6B
ucucuucccacaaaccauca

SEQ ID NO: 172559 - RNA, 22 nt, Human herpesvirus 6B
ucucuguguguguugugcgcua

SEQ ID NO: 172560 - RNA, 12 nt, Human herpesvirus 6B
ucuaucacuuau

SEQ ID NO: 172561 - RNA, 22 nt, Human herpesvirus 6B
ucuagguacggcgucacacagc

SEQ ID NO: 172562 - RNA, 23 nt, Human herpesvirus 6B
ucuagguacggcgucacacagca

SEQ ID NO: 172563 - RNA, 16 nt, Human herpesvirus 6B
ucuaguguuucgcaga

SEQ ID NO: 172564 - RNA, 22 nt, Human herpesvirus 6B
ucuagcgaucauaaaacugcca

SEQ ID NO: 172565 - RNA, 12 nt, Human herpesvirus 6B
ucuauguauuau

SEQ ID NO: 172566 - RNA, 23 nt, Human herpesvirus 6B
ucuauuauguaaaaccucagcaa

SEQ ID NO: 172567 - RNA, 13 nt, Human herpesvirus 6B
ucucgaaaaagac

SEQ ID NO: 172568 - RNA, 15 nt, Human herpesvirus 6B
ucucgaaaaagacaa

SEQ ID NO: 172569 - RNA, 20 nt, Human herpesvirus 6B
ucuaugcagcgccagcauuc

SEQ ID NO: 172570 - RNA, 16 nt, Human herpesvirus 6B
cuaaaaaucaucucgu

SEQ ID NO: 172571 - RNA, 16 nt, Human herpesvirus 6B
cguuugucaaagcuac

SEQ ID NO: 172572 - RNA, 14 nt, Human herpesvirus 6B
cguuuguacauguu

SEQ ID NO: 172573 - RNA, 22 nt, Human herpesvirus 6B
cguuuuuggauuucuguaaugu

SEQ ID NO: 172574 - RNA, 15 nt, Human herpesvirus 6B
cuaaacaccacuuga

SEQ ID NO: 172575 - RNA, 16 nt, Human herpesvirus 6B
cuaaaagcugcuaacg

SEQ ID NO: 172576 - RNA, 21 nt, Human herpesvirus 6B
cuaagauaguuuugcauuaaa

SEQ ID NO: 172577 - RNA, 14 nt, Human herpesvirus 6B
cuaauagcccuuca

SEQ ID NO: 172578 - RNA, 14 nt, Human herpesvirus 6B
cuagacacacagaa

SEQ ID NO: 172579 - RNA, 16 nt, Human herpesvirus 6B
cuaauaaaauacacau

SEQ ID NO: 172580 - RNA, 21 nt, Human herpesvirus 6B
cuaucggacaggcgcaccacg

SEQ ID NO: 172581 - RNA, 14 nt, Human herpesvirus 6B
cuaucgcaaugauu

SEQ ID NO: 172582 - RNA, 17 nt, Human herpesvirus 6B
cuaucgcgaauaucgca

SEQ ID NO: 172583 - RNA, 22 nt, Human herpesvirus 6B
cuagaguuguuuuuaguaauaa

SEQ ID NO: 172584 - RNA, 23 nt, Human herpesvirus 6B
cuagauccguccauuaaauccua

SEQ ID NO: 172585 - RNA, 11 nt, Human herpesvirus 6B
cuagaucugcc

SEQ ID NO: 172586 - RNA, 22 nt, Human herpesvirus 6B
cuaugagaauuaugacugacaa

SEQ ID NO: 172587 - RNA, 14 nt, Human herpesvirus 6B
cuaugggaguaauu

SEQ ID NO: 172588 - RNA, 17 nt, Human herpesvirus 6B
cuauuauguaaaaccuc

SEQ ID NO: 172589 - RNA, 23 nt, Human herpesvirus 6B
cuauuauguaaaaccucagcaaa

SEQ ID NO: 172590 - RNA, 13 nt, Human herpesvirus 6B
cuaugugcauucc

SEQ ID NO: 172591 - RNA, 14 nt, Human herpesvirus 6B
cuauguauuggaau

SEQ ID NO: 172592 - RNA, 15 nt, Human herpesvirus 6B
cuaugucaagaguuu

SEQ ID NO: 172593 - RNA, 17 nt, Human herpesvirus 6B
cuaugucaagaguuuuc

SEQ ID NO: 172594 - RNA, 18 nt, Human herpesvirus 6B
cuauguaguacacagaau

SEQ ID NO: 172595 - RNA, 13 nt, Human herpesvirus 6B
cuauuaacacaua

SEQ ID NO: 172596 - RNA, 11 nt, Human herpesvirus 6B
cuauguuaaca

SEQ ID NO: 172597 - RNA, 14 nt, Human herpesvirus 6B
cucauuugcaauug

SEQ ID NO: 172598 - RNA, 15 nt, Human herpesvirus 6B
cucacggccauuuaa

SEQ ID NO: 172599 - RNA, 20 nt, Human herpesvirus 6B
cuccacacuguuuacuuaaa

SEQ ID NO: 172600 - RNA, 19 nt, Human herpesvirus 6B
cuccaacgcacaugcuaac

SEQ ID NO: 172601 - RNA, 16 nt, Human herpesvirus 6B
cuccaauagauuucau

SEQ ID NO: 172602 - RNA, 16 nt, Human herpesvirus 6B
cucacaugcgagcaaa

SEQ ID NO: 172603 - RNA, 15 nt, Human herpesvirus 6B
cucacccgacaugcu

SEQ ID NO: 172604 - RNA, 20 nt, Human herpesvirus 6B
cucacccgauauaucgugau

SEQ ID NO: 172605 - RNA, 19 nt, Human herpesvirus 6B
cucaaugcggguacuauag

SEQ ID NO: 172606 - RNA, 20 nt, Human herpesvirus 6B
cucaaugcggguacuauaga

SEQ ID NO: 172607 - RNA, 15 nt, Human herpesvirus 6B
cuauucagaggugcu

SEQ ID NO: 172608 - RNA, 17 nt, Human herpesvirus 6B
cuauucagaggugcuga

SEQ ID NO: 172609 - RNA, 16 nt, Human herpesvirus 6B
cuauucuaaauaccaa

SEQ ID NO: 172610 - RNA, 16 nt, Human herpesvirus 6B
cuccucaacacucuca

SEQ ID NO: 172611 - RNA, 18 nt, Human herpesvirus 6B
cuccuaaauaccauuuua

SEQ ID NO: 172612 - RNA, 22 nt, Human herpesvirus 6B
cuccguuacccgggagcuucac

SEQ ID NO: 172613 - RNA, 17 nt, Human herpesvirus 6B
cuccauccgucauguaa

SEQ ID NO: 172614 - RNA, 22 nt, Human herpesvirus 6B
cuccgggggaaaccucaaaaau

SEQ ID NO: 172615 - RNA, 16 nt, Human herpesvirus 6B
cucgcugaccguucac

SEQ ID NO: 172616 - RNA, 14 nt, Human herpesvirus 6B
cucgaaugccccac

SEQ ID NO: 172617 - RNA, 12 nt, Human herpesvirus 6B
cucgacguccac

SEQ ID NO: 172618 - RNA, 21 nt, Human herpesvirus 6B
cucgacguguaucgauuuaac

SEQ ID NO: 172619 - RNA, 23 nt, Human herpesvirus 6B
cucgaaaauacaaugacuaucaa

SEQ ID NO: 172620 - RNA, 19 nt, Human herpesvirus 6B
cuccuuguaaaaauucacu

SEQ ID NO: 172621 - RNA, 20 nt, Human herpesvirus 6B
cucuacguuuacaucaacua

SEQ ID NO: 172622 - RNA, 22 nt, Human herpesvirus 6B
cucuauuuuuuauuaguauccu

SEQ ID NO: 172623 - RNA, 13 nt, Human herpesvirus 6B
cucuacaugccac

SEQ ID NO: 172624 - RNA, 15 nt, Human herpesvirus 6B
cucuaacuguuguuc

SEQ ID NO: 172625 - RNA, 21 nt, Human herpesvirus 6B
cucucaaugcggguacuauag

SEQ ID NO: 172626 - RNA, 23 nt, Human herpesvirus 6B
cucuccaaguuagaaauuacaca

SEQ ID NO: 172627 - RNA, 20 nt, Human herpesvirus 6B
cucuggucauuuugaaagaa

SEQ ID NO: 172628 - RNA, 23 nt, Human herpesvirus 6B
cucugggaaggaacauacacucu

SEQ ID NO: 172629 - RNA, 17 nt, Human herpesvirus 6B
cucugggugaguuuuau

SEQ ID NO: 172630 - RNA, 16 nt, Human herpesvirus 6B
cucugguaaaugucaa

SEQ ID NO: 172631 - RNA, 20 nt, Human herpesvirus 6B
cucugguaaaugucaaagaa

SEQ ID NO: 172632 - RNA, 21 nt, Human herpesvirus 6B
cucggaagauacacugcaaga

SEQ ID NO: 172633 - RNA, 21 nt, Human herpesvirus 6B
cucggauuccgcacagaaaaa

SEQ ID NO: 172634 - RNA, 15 nt, Human herpesvirus 6B
cucggucuacugugu

SEQ ID NO: 172635 - RNA, 17 nt, Human herpesvirus 6B
cucggcucuuugcugau

SEQ ID NO: 172636 - RNA, 17 nt, Human herpesvirus 6B
cucuaaaaccugcuaac

SEQ ID NO: 172637 - RNA, 18 nt, Human herpesvirus 6B
cucuaaaaccugcuaacg

SEQ ID NO: 172638 - RNA, 16 nt, Human herpesvirus 6B
cucuucgauccaauaa

SEQ ID NO: 172639 - RNA, 21 nt, Human herpesvirus 6B
cucuucggcauaaacagagac

SEQ ID NO: 172640 - RNA, 17 nt, Human herpesvirus 6B
cucuuagagauaucugc

SEQ ID NO: 172641 - RNA, 19 nt, Human herpesvirus 6B
cucuuagagauaucugcau

SEQ ID NO: 172642 - RNA, 21 nt, Human herpesvirus 6B
cucuuagcggauggaauccaa

SEQ ID NO: 172643 - RNA, 16 nt, Human herpesvirus 6B
cugaauuuaaugcaaa

SEQ ID NO: 172644 - RNA, 17 nt, Human herpesvirus 6B
cugacaccacauaacaa

SEQ ID NO: 172645 - RNA, 15 nt, Human herpesvirus 6B
cugacaucugcaaaa

SEQ ID NO: 172646 - RNA, 16 nt, Human herpesvirus 6B
cugacaucugcaaaaa

SEQ ID NO: 172647 - RNA, 19 nt, Human herpesvirus 6B
cugacaucugcaaaaacaa

SEQ ID NO: 172648 - RNA, 21 nt, Human herpesvirus 6B
cugauuuguucucgagcuaga

SEQ ID NO: 172649 - RNA, 17 nt, Human herpesvirus 6B
cugauuauuaucacaaa

SEQ ID NO: 172650 - RNA, 20 nt, Human herpesvirus 6B
cugacugaaaguuauauucu

SEQ ID NO: 172651 - RNA, 15 nt, Human herpesvirus 6B
cuguaggcaacuuaa

SEQ ID NO: 172652 - RNA, 23 nt, Human herpesvirus 6B
cugggaaaagggugacaccuuga

SEQ ID NO: 172653 - RNA, 22 nt, Human herpesvirus 6B
cuguaaaguuuggaugcaaguc

SEQ ID NO: 172654 - RNA, 19 nt, Human herpesvirus 6B
cuggaaaaauuuaaucaag

SEQ ID NO: 172655 - RNA, 14 nt, Human herpesvirus 6B
cuggaaaacuauua

SEQ ID NO: 172656 - RNA, 16 nt, Human herpesvirus 6B
cuggcccgaggauuau

SEQ ID NO: 172657 - RNA, 19 nt, Human herpesvirus 6B
cuggccucccauguaugca

SEQ ID NO: 172658 - RNA, 17 nt, Human herpesvirus 6B
cuggcugagauucacuc

SEQ ID NO: 172659 - RNA, 19 nt, Human herpesvirus 6B
cugcuuagcguauuuuggc

SEQ ID NO: 172660 - RNA, 16 nt, Human herpesvirus 6B
cugcuggcugagauuc

SEQ ID NO: 172661 - RNA, 16 nt, Human herpesvirus 6B
cugccgaucaccaccg

SEQ ID NO: 172662 - RNA, 20 nt, Human herpesvirus 6B
cugccuuuaacccgaugaga

SEQ ID NO: 172663 - RNA, 23 nt, Human herpesvirus 6B
cugcugauaaucuuguagcucag

SEQ ID NO: 172664 - RNA, 16 nt, Human herpesvirus 6B
cugccuacacugcgaa

SEQ ID NO: 172665 - RNA, 23 nt, Human herpesvirus 6B
cugauuccuucaauguuuuucaa

SEQ ID NO: 172666 - RNA, 22 nt, Human herpesvirus 6B
cugcaagaacugcgacucaauc

SEQ ID NO: 172667 - RNA, 15 nt, Human herpesvirus 6B
cugccagaaaaacua

SEQ ID NO: 172668 - RNA, 23 nt, Human herpesvirus 6B
cugcaagcucaugaacaucguca

SEQ ID NO: 172669 - RNA, 12 nt, Human herpesvirus 6B
cgcagacuaauc

SEQ ID NO: 172670 - RNA, 21 nt, Human herpesvirus 6B
cgcagaggcggcgaccacagc

SEQ ID NO: 172671 - RNA, 13 nt, Human herpesvirus 6B
cgcaaaaacaugu

SEQ ID NO: 172672 - RNA, 14 nt, Human herpesvirus 6B
cgcaaacaggugua

SEQ ID NO: 172673 - RNA, 20 nt, Human herpesvirus 6B
cgauugcgcgauuagguuag

SEQ ID NO: 172674 - RNA, 18 nt, Human herpesvirus 6B
cgcaaaggguaguuuuag

SEQ ID NO: 172675 - RNA, 18 nt, Human herpesvirus 6B
cgcaggauuauaaaaaca

SEQ ID NO: 172676 - RNA, 21 nt, Human herpesvirus 6B
cgcaggauuauaaaaacacac

SEQ ID NO: 172677 - RNA, 22 nt, Human herpesvirus 6B
cgcauccuuaaaugacacagaa

SEQ ID NO: 172678 - RNA, 19 nt, Human herpesvirus 6B
cgccaaaaaaauacaguau

SEQ ID NO: 172679 - RNA, 20 nt, Human herpesvirus 6B
cgcauuucucgucuacuccg

SEQ ID NO: 172680 - RNA, 19 nt, Human herpesvirus 6B
cgcauuucucuacaugcca

SEQ ID NO: 172681 - RNA, 14 nt, Human herpesvirus 6B
cgcgcauguugcag

SEQ ID NO: 172682 - RNA, 17 nt, Human herpesvirus 6B
cgcgaacgugacuguau

SEQ ID NO: 172683 - RNA, 23 nt, Human herpesvirus 6B
cgcgaacgugacuguaucaaauu

SEQ ID NO: 172684 - RNA, 14 nt, Human herpesvirus 6B
cgauaguguucucu

SEQ ID NO: 172685 - RNA, 11 nt, Human herpesvirus 6B
cgauagaggaa

SEQ ID NO: 172686 - RNA, 17 nt, Human herpesvirus 6B
cgaucauaaaacugcca

SEQ ID NO: 172687 - RNA, 14 nt, Human herpesvirus 6B
cgauuaaugccaca

SEQ ID NO: 172688 - RNA, 16 nt, Human herpesvirus 6B
cgauuaguuugugcag

SEQ ID NO: 172689 - RNA, 17 nt, Human herpesvirus 6B
cgaugauuauucugucu

SEQ ID NO: 172690 - RNA, 16 nt, Human herpesvirus 6B
cgaugcagaugccugu

SEQ ID NO: 172691 - RNA, 17 nt, Human herpesvirus 6B
cgaugcguuugccauau

SEQ ID NO: 172692 - RNA, 15 nt, Human herpesvirus 6B
cgauguacaguuucu

SEQ ID NO: 172693 - RNA, 18 nt, Human herpesvirus 6B
cgagcugcagucucagga

SEQ ID NO: 172694 - RNA, 11 nt, Human herpesvirus 6B
ccuacacugcg

SEQ ID NO: 172695 - RNA, 21 nt, Human herpesvirus 6B
ccuaagaaauauugcaugcau

SEQ ID NO: 172696 - RNA, 23 nt, Human herpesvirus 6B
ccuaaaacaccgguaagcaucug

SEQ ID NO: 172697 - RNA, 16 nt, Human herpesvirus 6B
ccuaaaaucugcuaac

SEQ ID NO: 172698 - RNA, 16 nt, Human herpesvirus 6B
ccuaaacaccacuuga

SEQ ID NO: 172699 - RNA, 17 nt, Human herpesvirus 6B
ccuaaacaccacuugau

SEQ ID NO: 172700 - RNA, 17 nt, Human herpesvirus 6B
ccuaaauaccauuuuau

SEQ ID NO: 172701 - RNA, 16 nt, Human herpesvirus 6B
ccguuuuuucugcaaa

SEQ ID NO: 172702 - RNA, 18 nt, Human herpesvirus 6B
ccguuuuuucugcaaaac

SEQ ID NO: 172703 - RNA, 13 nt, Human herpesvirus 6B
cgagaaucuuccu

SEQ ID NO: 172704 - RNA, 17 nt, Human herpesvirus 6B
cgacuucaaacaccuca

SEQ ID NO: 172705 - RNA, 14 nt, Human herpesvirus 6B
cgagaaaaaacauc

SEQ ID NO: 172706 - RNA, 20 nt, Human herpesvirus 6B
cgacgucccauucagucuca

SEQ ID NO: 172707 - RNA, 12 nt, Human herpesvirus 6B
cgcuucuuucac

SEQ ID NO: 172708 - RNA, 17 nt, Human herpesvirus 6B
cggcauuuguguuuuua

SEQ ID NO: 172709 - RNA, 23 nt, Human herpesvirus 6B
cggccacguucuuugaacaguga

SEQ ID NO: 172710 - RNA, 21 nt, Human herpesvirus 6B
cggcccguccaccgucccucu

SEQ ID NO: 172711 - RNA, 21 nt, Human herpesvirus 6B
cgggaacauagagaacugaga

SEQ ID NO: 172712 - RNA, 16 nt, Human herpesvirus 6B
cggcuacggugcgauu

SEQ ID NO: 172713 - RNA, 19 nt, Human herpesvirus 6B
cggcucaagauucuaugau

SEQ ID NO: 172714 - RNA, 13 nt, Human herpesvirus 6B
cggcguguuucuu

SEQ ID NO: 172715 - RNA, 21 nt, Human herpesvirus 6B
cgcuaacgaacaaaucuccaa

SEQ ID NO: 172716 - RNA, 17 nt, Human herpesvirus 6B
cgcgugcguaucugcau

SEQ ID NO: 172717 - RNA, 13 nt, Human herpesvirus 6B
cgcgcgccgugac

SEQ ID NO: 172718 - RNA, 19 nt, Human herpesvirus 6B
cgcucugagauuugagaaa

SEQ ID NO: 172719 - RNA, 14 nt, Human herpesvirus 6B
cgcuagcaaugaua

SEQ ID NO: 172720 - RNA, 16 nt, Human herpesvirus 6B
cgcuaagagauuuacu

SEQ ID NO: 172721 - RNA, 18 nt, Human herpesvirus 6B
cgcucagcguggaauuug

SEQ ID NO: 172722 - RNA, 14 nt, Human herpesvirus 6B
cgugcugucugcag

SEQ ID NO: 172723 - RNA, 19 nt, Human herpesvirus 6B
cguguguguguaugcuuuc

SEQ ID NO: 172724 - RNA, 22 nt, Human herpesvirus 6B
cgugccguguuacugacaccac

SEQ ID NO: 172725 - RNA, 19 nt, Human herpesvirus 6B
cgugagcggcgcauaauaa

SEQ ID NO: 172726 - RNA, 18 nt, Human herpesvirus 6B
cguucugcguuguuucag

SEQ ID NO: 172727 - RNA, 22 nt, Human herpesvirus 6B
cguuuaucaugagagagcaaau

SEQ ID NO: 172728 - RNA, 20 nt, Human herpesvirus 6B
cguuguuucaguuucaaaua

SEQ ID NO: 172729 - RNA, 21 nt, Human herpesvirus 6B
cguuaaaaaaaaugugucuua

SEQ ID NO: 172730 - RNA, 18 nt, Human herpesvirus 6B
cguuaaucuaauaaaaua

SEQ ID NO: 172731 - RNA, 16 nt, Human herpesvirus 6B
cguucagaauguucca

SEQ ID NO: 172732 - RNA, 22 nt, Human herpesvirus 6B
cguucacauuaccucugcaaua

SEQ ID NO: 172733 - RNA, 21 nt, Human herpesvirus 6B
cgguccguuuuuucugcaaaa

SEQ ID NO: 172734 - RNA, 16 nt, Human herpesvirus 6B
cggugagaagauuugu

SEQ ID NO: 172735 - RNA, 18 nt, Human herpesvirus 6B
cggugauggguuuggcca

SEQ ID NO: 172736 - RNA, 20 nt, Human herpesvirus 6B
cggugcauaacaucucagau

SEQ ID NO: 172737 - RNA, 22 nt, Human herpesvirus 6B
cgguauaaugcaugauggugcu

SEQ ID NO: 172738 - RNA, 19 nt, Human herpesvirus 6B
cgguccccccucccuccau

SEQ ID NO: 172739 - RNA, 19 nt, Human herpesvirus 6B
cgucaaugcguauuugaua

SEQ ID NO: 172740 - RNA, 20 nt, Human herpesvirus 6B
cgucaccaagaaaaaacaca

SEQ ID NO: 172741 - RNA, 21 nt, Human herpesvirus 6B
cgugaauuuucugaagacagc

SEQ ID NO: 172742 - RNA, 17 nt, Human herpesvirus 6B
cgucccauucagucuca

SEQ ID NO: 172743 - RNA, 16 nt, Human herpesvirus 6B
cgucagcuuugacggu

SEQ ID NO: 172744 - RNA, 14 nt, Human herpesvirus 6B
cguauaccauuccc

SEQ ID NO: 172745 - RNA, 14 nt, Human herpesvirus 6B
cguauuuuggcaaa

SEQ ID NO: 172746 - RNA, 17 nt, Human herpesvirus 6B
cguauucagaguacuuu

SEQ ID NO: 172747 - RNA, 20 nt, Human herpesvirus 6B
cguaugcgguuaugugcuau

SEQ ID NO: 172748 - RNA, 16 nt, Human herpesvirus 6B
cguauaaaaguccuca

SEQ ID NO: 172749 - RNA, 19 nt, Human herpesvirus 6B
cguagcgguuucuagguuu

SEQ ID NO: 172750 - RNA, 18 nt, Human herpesvirus 6B
gacgguucaccacuguga

SEQ ID NO: 172751 - RNA, 19 nt, Human herpesvirus 6B
gacgguucaccacugugau

SEQ ID NO: 172752 - RNA, 17 nt, Human herpesvirus 6B
gacguacagagccagac

SEQ ID NO: 172753 - RNA, 20 nt, Human herpesvirus 6B
gacucgccgaugaaacuguc

SEQ ID NO: 172754 - RNA, 14 nt, Human herpesvirus 6B
gacggcagcgggga

SEQ ID NO: 172755 - RNA, 17 nt, Human herpesvirus 6B
gacggcgaggggacgga

SEQ ID NO: 172756 - RNA, 17 nt, Human herpesvirus 6B
gacaccacauaacaaaa

SEQ ID NO: 172757 - RNA, 13 nt, Human herpesvirus 6B
gacaaugauacua

SEQ ID NO: 172758 - RNA, 19 nt, Human herpesvirus 6B
gacaagcuguccaucuuca

SEQ ID NO: 172759 - RNA, 18 nt, Human herpesvirus 6B
gacacaauuucugacucu

SEQ ID NO: 172760 - RNA, 12 nt, Human herpesvirus 6B
gagaccuauaaa

SEQ ID NO: 172761 - RNA, 15 nt, Human herpesvirus 6B
gagaccaugccauug

SEQ ID NO: 172762 - RNA, 19 nt, Human herpesvirus 6B
gagaccaauuuagauucga

SEQ ID NO: 172763 - RNA, 23 nt, Human herpesvirus 6B
gagaauuaugacugacaagguau

SEQ ID NO: 172764 - RNA, 21 nt, Human herpesvirus 6B
gagacaauaacaauuauucac

SEQ ID NO: 172765 - RNA, 12 nt, Human herpesvirus 6B
gacuucaaacac

SEQ ID NO: 172766 - RNA, 15 nt, Human herpesvirus 6B
gagaaucuuccacug

SEQ ID NO: 172767 - RNA, 20 nt, Human herpesvirus 6B
gacuuauaagucaucauaca

SEQ ID NO: 172768 - RNA, 23 nt, Human herpesvirus 6B
gacuuauaagucaucauacaaua

SEQ ID NO: 172769 - RNA, 15 nt, Human herpesvirus 6B
gacuuauaauauucc

SEQ ID NO: 172770 - RNA, 13 nt, Human herpesvirus 6B
gacugacaaggua

SEQ ID NO: 172771 - RNA, 23 nt, Human herpesvirus 6B
gacugcguuacaagcaugcauug

SEQ ID NO: 172772 - RNA, 23 nt, Human herpesvirus 6B
gacucuacauaguguagaaaaca

SEQ ID NO: 172773 - RNA, 19 nt, Human herpesvirus 6B
gagaggagcauucacauaa

SEQ ID NO: 172774 - RNA, 14 nt, Human herpesvirus 6B
gagccggcucaaga

SEQ ID NO: 172775 - RNA, 20 nt, Human herpesvirus 6B
gaggcggcgaagggacacga

SEQ ID NO: 172776 - RNA, 15 nt, Human herpesvirus 6B
gagugcuauuucucu

SEQ ID NO: 172777 - RNA, 20 nt, Human herpesvirus 6B
gaguucgguccaaggauuau

SEQ ID NO: 172778 - RNA, 13 nt, Human herpesvirus 6B
gaguuuuuugcaa

SEQ ID NO: 172779 - RNA, 15 nt, Human herpesvirus 6B
gaguuuuuugcaauu

SEQ ID NO: 172780 - RNA, 15 nt, Human herpesvirus 6B
gauaaacguuguagc

SEQ ID NO: 172781 - RNA, 18 nt, Human herpesvirus 6B
gauaaacuguacgccaua

SEQ ID NO: 172782 - RNA, 15 nt, Human herpesvirus 6B
gauaaauugaugaaa

SEQ ID NO: 172783 - RNA, 20 nt, Human herpesvirus 6B
gauaaauugaugaaauugug

SEQ ID NO: 172784 - RNA, 13 nt, Human herpesvirus 6B
gauaaauuugcca

SEQ ID NO: 172785 - RNA, 19 nt, Human herpesvirus 6B
gagucucugggaacaugua

SEQ ID NO: 172786 - RNA, 22 nt, Human herpesvirus 6B
gagucaaauguucgaugauuau

SEQ ID NO: 172787 - RNA, 20 nt, Human herpesvirus 6B
gcaccuaaacaccacuugau

SEQ ID NO: 172788 - RNA, 18 nt, Human herpesvirus 6B
gcaccgccuccgccacca

SEQ ID NO: 172789 - RNA, 15 nt, Human herpesvirus 6B
gcacgaucuuuccac

SEQ ID NO: 172790 - RNA, 15 nt, Human herpesvirus 6B
gcacaaaaugauugc

SEQ ID NO: 172791 - RNA, 22 nt, Human herpesvirus 6B
gcacaaaaugauugcaaccaau

SEQ ID NO: 172792 - RNA, 23 nt, Human herpesvirus 6B
gcacaaaaugauugcaaccaaua

SEQ ID NO: 172793 - RNA, 12 nt, Human herpesvirus 6B
gcaauaggccau

SEQ ID NO: 172794 - RNA, 15 nt, Human herpesvirus 6B
gcaauaaaauucaca

SEQ ID NO: 172795 - RNA, 13 nt, Human herpesvirus 6B
gcaaucacauugu

SEQ ID NO: 172796 - RNA, 20 nt, Human herpesvirus 6B
gcaaguucaucagccauuuc

SEQ ID NO: 172797 - RNA, 21 nt, Human herpesvirus 6B
gauugcugucuuccugugaga

SEQ ID NO: 172798 - RNA, 18 nt, Human herpesvirus 6B
gauucuguuuucuacgua

SEQ ID NO: 172799 - RNA, 16 nt, Human herpesvirus 6B
gauucuauguacugau

SEQ ID NO: 172800 - RNA, 14 nt, Human herpesvirus 6B
gauucggcugcuua

SEQ ID NO: 172801 - RNA, 14 nt, Human herpesvirus 6B
gauugcaaucacau

SEQ ID NO: 172802 - RNA, 22 nt, Human herpesvirus 6B
gauuggauagagauauaaugau

SEQ ID NO: 172803 - RNA, 15 nt, Human herpesvirus 6B
gauugggagcucacu

SEQ ID NO: 172804 - RNA, 15 nt, Human herpesvirus 6B
gcaaacugacuguac

SEQ ID NO: 172805 - RNA, 20 nt, Human herpesvirus 6B
gcaaacugacuguaccauug

SEQ ID NO: 172806 - RNA, 21 nt, Human herpesvirus 6B
gauuuacuguuucuuugacau

SEQ ID NO: 172807 - RNA, 21 nt, Human herpesvirus 6B
gcaaaugccgacaagcuuuuu

SEQ ID NO: 172808 - RNA, 13 nt, Human herpesvirus 6B
gcaaaugcucaac

SEQ ID NO: 172809 - RNA, 13 nt, Human herpesvirus 6B
gcaaauguaacuc

SEQ ID NO: 172810 - RNA, 15 nt, Human herpesvirus 6B
gcaaauguaacucuu

SEQ ID NO: 172811 - RNA, 16 nt, Human herpesvirus 6B
gcaaauguaacucuuu

SEQ ID NO: 172812 - RNA, 16 nt, Human herpesvirus 6B
gcaaaggguaguuuua

SEQ ID NO: 172813 - RNA, 15 nt, Human herpesvirus 6B
gcaaagcacccugca

SEQ ID NO: 172814 - RNA, 15 nt, Human herpesvirus 6B
gcaacacaacaaaca

SEQ ID NO: 172815 - RNA, 14 nt, Human herpesvirus 6B
gcaagcaaacgcuc

SEQ ID NO: 172816 - RNA, 15 nt, Human herpesvirus 6B
gcaagcagccaauga

SEQ ID NO: 172817 - RNA, 19 nt, Human herpesvirus 6B
gaugacagcgagacaauaa

SEQ ID NO: 172818 - RNA, 21 nt, Human herpesvirus 6B
gaugacagcgagacaauaaca

SEQ ID NO: 172819 - RNA, 20 nt, Human herpesvirus 6B
gaugaaguuccacaucuaug

SEQ ID NO: 172820 - RNA, 14 nt, Human herpesvirus 6B
gaucugugacaauu

SEQ ID NO: 172821 - RNA, 17 nt, Human herpesvirus 6B
gauggcuagugugccua

SEQ ID NO: 172822 - RNA, 23 nt, Human herpesvirus 6B
gauggguaagugccuaugacugg

SEQ ID NO: 172823 - RNA, 15 nt, Human herpesvirus 6B
gauguaaucaauguc

SEQ ID NO: 172824 - RNA, 19 nt, Human herpesvirus 6B
gauguguggggaugacgag

SEQ ID NO: 172825 - RNA, 13 nt, Human herpesvirus 6B
gauguguuaaaga

SEQ ID NO: 172826 - RNA, 13 nt, Human herpesvirus 6B
gauguucaaaacu

SEQ ID NO: 172827 - RNA, 24 nt, Human herpesvirus 6B
gauuccuucggggacagugauuag

SEQ ID NO: 172828 - RNA, 16 nt, Human herpesvirus 6B
gauagaguucaucuaa

SEQ ID NO: 172829 - RNA, 15 nt, Human herpesvirus 6B
gaucaccgugaucau

SEQ ID NO: 172830 - RNA, 20 nt, Human herpesvirus 6B
gaucacaacauaaaaaaaca

SEQ ID NO: 172831 - RNA, 21 nt, Human herpesvirus 6B
gaucacagagaaaaaacaaag

SEQ ID NO: 172832 - RNA, 22 nt, Human herpesvirus 6B
gaucacagagaaaaaacaaagc

SEQ ID NO: 172833 - RNA, 15 nt, Human herpesvirus 6B
gauccaaaagauuau

SEQ ID NO: 172834 - RNA, 15 nt, Human herpesvirus 6B
gaucaucacaugcca

SEQ ID NO: 172835 - RNA, 19 nt, Human herpesvirus 6B
gaucacucagauuucagga

SEQ ID NO: 172836 - RNA, 20 nt, Human herpesvirus 6B
gauaacuguuuuugucgcau

SEQ ID NO: 172837 - RNA, 20 nt, Human herpesvirus 6B
gauaagccguacugcugguu

SEQ ID NO: 172838 - RNA, 12 nt, Human herpesvirus 6B
gauaaucuugua

SEQ ID NO: 172839 - RNA, 19 nt, Human herpesvirus 6B
gauagacgacgcagauuua

SEQ ID NO: 172840 - RNA, 20 nt, Human herpesvirus 6B
gauacucggucuacugugua

SEQ ID NO: 172841 - RNA, 18 nt, Human herpesvirus 6B
gauacugguuuacagcac

SEQ ID NO: 172842 - RNA, 18 nt, Human herpesvirus 6B
gauaccgucuuugcauau

SEQ ID NO: 172843 - RNA, 23 nt, Human herpesvirus 6B
gauacauguuuuugaugugcuac

SEQ ID NO: 172844 - RNA, 20 nt, Human herpesvirus 6B
gauacggcggcggaagugaa

SEQ ID NO: 172845 - RNA, 19 nt, Human herpesvirus 6B
cuuugacauuuaccagaga

SEQ ID NO: 172846 - RNA, 14 nt, Human herpesvirus 6B
cuuugaaaucugag

SEQ ID NO: 172847 - RNA, 15 nt, Human herpesvirus 6B
cuuugaacagugaca

SEQ ID NO: 172848 - RNA, 22 nt, Human herpesvirus 6B
cuuucauaggaaguaaauacaa

SEQ ID NO: 172849 - RNA, 22 nt, Human herpesvirus 6B
cuuuccgauaucagcacccucu

SEQ ID NO: 172850 - RNA, 22 nt, Human herpesvirus 6B
cuuucuacauaaaacaggguug

SEQ ID NO: 172851 - RNA, 19 nt, Human herpesvirus 6B
cuuucuugaagaugugaua

SEQ ID NO: 172852 - RNA, 23 nt, Human herpesvirus 6B
cuuuuacuuacaucgauccaaaa

SEQ ID NO: 172853 - RNA, 17 nt, Human herpesvirus 6B
cuuuuuguucaguguuc

SEQ ID NO: 172854 - RNA, 12 nt, Human herpesvirus 6B
cuuuuuaauucc

SEQ ID NO: 172855 - RNA, 21 nt, Human herpesvirus 6B
cuuuuuaccgguuugguggua

SEQ ID NO: 172856 - RNA, 15 nt, Human herpesvirus 6B
gaaaaaaacuaugaa

SEQ ID NO: 172857 - RNA, 22 nt, Human herpesvirus 6B
cuuuuuucaauaaugcucagau

SEQ ID NO: 172858 - RNA, 22 nt, Human herpesvirus 6B
gaaaacuauuaauaaaccgcuu

SEQ ID NO: 172859 - RNA, 23 nt, Human herpesvirus 6B
gaaaaccaguauuaaugucuucg

SEQ ID NO: 172860 - RNA, 16 nt, Human herpesvirus 6B
gaaaacuuuuugccga

SEQ ID NO: 172861 - RNA, 17 nt, Human herpesvirus 6B
gaaaagaaacaaugcuu

SEQ ID NO: 172862 - RNA, 19 nt, Human herpesvirus 6B
gaaaagccccugcuugaaa

SEQ ID NO: 172863 - RNA, 21 nt, Human herpesvirus 6B
gaaaagcuggaaaacuauuaa

SEQ ID NO: 172864 - RNA, 17 nt, Human herpesvirus 6B
gaaaaagguucaaacaa

SEQ ID NO: 172865 - RNA, 18 nt, Human herpesvirus 6B
gaaaaauuuuacaaugag

SEQ ID NO: 172866 - RNA, 12 nt, Human herpesvirus 6B
gaaaacaaugca

SEQ ID NO: 172867 - RNA, 21 nt, Human herpesvirus 6B
gaaaaagacaagggugugaaa

SEQ ID NO: 172868 - RNA, 20 nt, Human herpesvirus 6B
cuuuagauggaaaacugcag

SEQ ID NO: 172869 - RNA, 12 nt, Human herpesvirus 6B
cuuuaguauacg

SEQ ID NO: 172870 - RNA, 16 nt, Human herpesvirus 6B
cuuucauaagcucuac

SEQ ID NO: 172871 - RNA, 22 nt, Human herpesvirus 6B
cuuucacacaacuuaaccgcaa

SEQ ID NO: 172872 - RNA, 20 nt, Human herpesvirus 6B
cuuucaaaaugaccagagau

SEQ ID NO: 172873 - RNA, 22 nt, Human herpesvirus 6B
cuuucaagcaggggcuuuucaa

SEQ ID NO: 172874 - RNA, 18 nt, Human herpesvirus 6B
cuuuauccggccaauuca

SEQ ID NO: 172875 - RNA, 18 nt, Human herpesvirus 6B
cuuuauuguuaacaugua

SEQ ID NO: 172876 - RNA, 18 nt, Human herpesvirus 6B
cuuuaaacgguaaauuca

SEQ ID NO: 172877 - RNA, 19 nt, Human herpesvirus 6B
cuuuaaacgguaaauucaa

SEQ ID NO: 172878 - RNA, 14 nt, Human herpesvirus 6B
cuuuaaagauuaga

SEQ ID NO: 172879 - RNA, 22 nt, Human herpesvirus 6B
cuuuaaagcagcuagagaaauu

SEQ ID NO: 172880 - RNA, 15 nt, Human herpesvirus 6B
cuugucuuuuuuacu

SEQ ID NO: 172881 - RNA, 20 nt, Human herpesvirus 6B
cuugucaccccucgugaaau

SEQ ID NO: 172882 - RNA, 13 nt, Human herpesvirus 6B
cuugcagcugucu

SEQ ID NO: 172883 - RNA, 14 nt, Human herpesvirus 6B
cuugcgauguugua

SEQ ID NO: 172884 - RNA, 15 nt, Human herpesvirus 6B
cugugauaugcaaac

SEQ ID NO: 172885 - RNA, 12 nt, Human herpesvirus 6B
cugucuugcagc

SEQ ID NO: 172886 - RNA, 15 nt, Human herpesvirus 6B
cuguaguugaugcug

SEQ ID NO: 172887 - RNA, 17 nt, Human herpesvirus 6B
cugugcgaaaacggguu

SEQ ID NO: 172888 - RNA, 12 nt, Human herpesvirus 6B
gaaaccguccac

SEQ ID NO: 172889 - RNA, 19 nt, Human herpesvirus 6B
gaaacguguuugucuguau

SEQ ID NO: 172890 - RNA, 15 nt, Human herpesvirus 6B
gaaacguugugcuga

SEQ ID NO: 172891 - RNA, 16 nt, Human herpesvirus 6B
gaaacauuauaccuau

SEQ ID NO: 172892 - RNA, 11 nt, Human herpesvirus 6B
gaaacaguaaa

SEQ ID NO: 172893 - RNA, 15 nt, Human herpesvirus 6B
gaaaagugcugugcu

SEQ ID NO: 172894 - RNA, 13 nt, Human herpesvirus 6B
gaaaagggugaca

SEQ ID NO: 172895 - RNA, 20 nt, Human herpesvirus 6B
gaaaauaaaaaaccaaaaca

SEQ ID NO: 172896 - RNA, 24 nt, Human herpesvirus 6B
gaaaaugaauucaagacgaucuca

SEQ ID NO: 172897 - RNA, 11 nt, Human herpesvirus 6B
gaaaaucucaa

SEQ ID NO: 172898 - RNA, 15 nt, Human herpesvirus 6B
gaaacaaagucuuug

SEQ ID NO: 172899 - RNA, 16 nt, Human herpesvirus 6B
gaaaauuauagcuuca

SEQ ID NO: 172900 - RNA, 17 nt, Human herpesvirus 6B
gaaacacuuucuucgcc

SEQ ID NO: 172901 - RNA, 15 nt, Human herpesvirus 6B
gaaaauugacaauga

SEQ ID NO: 172902 - RNA, 18 nt, Human herpesvirus 6B
gaaaauugcucuauugug

SEQ ID NO: 172903 - RNA, 14 nt, Human herpesvirus 6B
gaaaauuggugugc

SEQ ID NO: 172904 - RNA, 16 nt, Human herpesvirus 6B
gaaaauuguaacuuca

SEQ ID NO: 172905 - RNA, 17 nt, Human herpesvirus 6B
gaaaauuguaacuucau

SEQ ID NO: 172906 - RNA, 12 nt, Human herpesvirus 6B
gaacccuagaca

SEQ ID NO: 172907 - RNA, 14 nt, Human herpesvirus 6B
gaacccuagacaca

SEQ ID NO: 172908 - RNA, 18 nt, Human herpesvirus 6B
gaacccuagacacacaga

SEQ ID NO: 172909 - RNA, 12 nt, Human herpesvirus 6B
gaaagcagucag

SEQ ID NO: 172910 - RNA, 18 nt, Human herpesvirus 6B
gaaagcaucucaaaaaac

SEQ ID NO: 172911 - RNA, 16 nt, Human herpesvirus 6B
gaaacucuuauggcaa

SEQ ID NO: 172912 - RNA, 11 nt, Human herpesvirus 6B
gaaagcuuuau

SEQ ID NO: 172913 - RNA, 21 nt, Human herpesvirus 6B
gacaagggugugaaacuauga

SEQ ID NO: 172914 - RNA, 16 nt, Human herpesvirus 6B
gacaaguaagauugca

SEQ ID NO: 172915 - RNA, 18 nt, Human herpesvirus 6B
gaauuuucugaagacagc

SEQ ID NO: 172916 - RNA, 21 nt, Human herpesvirus 6B
gaaugacuguacacaaaaacc

SEQ ID NO: 172917 - RNA, 14 nt, Human herpesvirus 6B
gacaaaacuguccu

SEQ ID NO: 172918 - RNA, 16 nt, Human herpesvirus 6B
gacaaaccucucgccg

SEQ ID NO: 172919 - RNA, 14 nt, Human herpesvirus 6B
gacaaaaccgaaau

SEQ ID NO: 172920 - RNA, 16 nt, Human herpesvirus 6B
gaauauuaguauuagu

SEQ ID NO: 172921 - RNA, 21 nt, Human herpesvirus 6B
gaaucuuguguucuaacacau

SEQ ID NO: 172922 - RNA, 15 nt, Human herpesvirus 6B
gaaucuuccacugaa

SEQ ID NO: 172923 - RNA, 17 nt, Human herpesvirus 6B
gaaucucuggucauuuu

SEQ ID NO: 172924 - RNA, 18 nt, Human herpesvirus 6B
gaauccagauaaacaaaa

SEQ ID NO: 172925 - RNA, 12 nt, Human herpesvirus 6B
gaauccuauuca

SEQ ID NO: 172926 - RNA, 21 nt, Human herpesvirus 6B
gaaucggauccaacucuacua

SEQ ID NO: 172927 - RNA, 18 nt, Human herpesvirus 6B
gaaggacuaucugagaca

SEQ ID NO: 172928 - RNA, 22 nt, Human herpesvirus 6B
gaaggacuaucugagacaguca

SEQ ID NO: 172929 - RNA, 15 nt, Human herpesvirus 6B
gaaggaggucucagg

SEQ ID NO: 172930 - RNA, 18 nt, Human herpesvirus 6B
gaaggaggucucagguga

SEQ ID NO: 172931 - RNA, 19 nt, Human herpesvirus 6B
gaaggcuaucacuuagaca

SEQ ID NO: 172932 - RNA, 17 nt, Human herpesvirus 6B
gaagccuucaacuuuug

SEQ ID NO: 172933 - RNA, 20 nt, Human herpesvirus 6B
gaagccuguuuuagauucua

SEQ ID NO: 172934 - RNA, 19 nt, Human herpesvirus 6B
gaagaugguaucuaaagac

SEQ ID NO: 172935 - RNA, 12 nt, Human herpesvirus 6B
gaagaugugaua

SEQ ID NO: 172936 - RNA, 15 nt, Human herpesvirus 6B
gaagauacacugcaa

SEQ ID NO: 172937 - RNA, 19 nt, Human herpesvirus 6B
gaagaugacagcgagacaa

SEQ ID NO: 172938 - RNA, 15 nt, Human herpesvirus 6B
gaagcaaaagucuua

SEQ ID NO: 172939 - RNA, 19 nt, Human herpesvirus 6B
gaagcagcagaugcuuacc

SEQ ID NO: 172940 - RNA, 17 nt, Human herpesvirus 6B
gaagcaucccuauguca

SEQ ID NO: 172941 - RNA, 16 nt, Human herpesvirus 6B
gaagcaugacuuugug

SEQ ID NO: 172942 - RNA, 16 nt, Human herpesvirus 6B
gaacggaaacaugaac

SEQ ID NO: 172943 - RNA, 12 nt, Human herpesvirus 6B
gaacgauaugcu

SEQ ID NO: 172944 - RNA, 18 nt, Human herpesvirus 6B
gaacgggcaacuccccau

SEQ ID NO: 172945 - RNA, 14 nt, Human herpesvirus 6B
uacagauguguauu

SEQ ID NO: 172946 - RNA, 22 nt, Human herpesvirus 6B
uacacaauccuaucacguuuga

SEQ ID NO: 172947 - RNA, 22 nt, Human herpesvirus 6B
uacacaguagaccgaguaucac

SEQ ID NO: 172948 - RNA, 15 nt, Human herpesvirus 6B
uacauaaaacagggu

SEQ ID NO: 172949 - RNA, 21 nt, Human herpesvirus 6B
uacagugaauaucgaguuuag

SEQ ID NO: 172950 - RNA, 15 nt, Human herpesvirus 6B
uacagugacuuucac

SEQ ID NO: 172951 - RNA, 22 nt, Human herpesvirus 6B
uacaaucauguuuauugucaaa

SEQ ID NO: 172952 - RNA, 22 nt, Human herpesvirus 6B
uacaaugaguuuuuugcaauuu

SEQ ID NO: 172953 - RNA, 14 nt, Human herpesvirus 6B
uacaaugacuauca

SEQ ID NO: 172954 - RNA, 15 nt, Human herpesvirus 6B
uaauuuuaucaugcc

SEQ ID NO: 172955 - RNA, 16 nt, Human herpesvirus 6B
uaauuuuaucaugccc

SEQ ID NO: 172956 - RNA, 11 nt, Human herpesvirus 6B
uacaaaacugu

SEQ ID NO: 172957 - RNA, 16 nt, Human herpesvirus 6B
uaacuucaagaauucu

SEQ ID NO: 172958 - RNA, 19 nt, Human herpesvirus 6B
uaagcaucugcugcuucuu

SEQ ID NO: 172959 - RNA, 16 nt, Human herpesvirus 6B
uaagcagcaaaacaac

SEQ ID NO: 172960 - RNA, 15 nt, Human herpesvirus 6B
uaagcaaacauguau

SEQ ID NO: 172961 - RNA, 22 nt, Human herpesvirus 6B
uaacuucauacccgauguucuc

SEQ ID NO: 172962 - RNA, 13 nt, Human herpesvirus 6B
uaacuuacuuaau

SEQ ID NO: 172963 - RNA, 13 nt, Human herpesvirus 6B
uaauucugacugc

SEQ ID NO: 172964 - RNA, 14 nt, Human herpesvirus 6B
uaauugcacccuau

SEQ ID NO: 172965 - RNA, 17 nt, Human herpesvirus 6B
uaauugaugggauguaa

SEQ ID NO: 172966 - RNA, 20 nt, Human herpesvirus 6B
uaauugaugggauguaauca

SEQ ID NO: 172967 - RNA, 23 nt, Human herpesvirus 6B
uaauuauugugacaagguaugaa

SEQ ID NO: 172968 - RNA, 19 nt, Human herpesvirus 6B
uaauucaaauguagcaaau

SEQ ID NO: 172969 - RNA, 15 nt, Human herpesvirus 6B
uacuauagacgccau

SEQ ID NO: 172970 - RNA, 15 nt, Human herpesvirus 6B
uacuacagugacuuu

SEQ ID NO: 172971 - RNA, 18 nt, Human herpesvirus 6B
uacgugucggugauaccg

SEQ ID NO: 172972 - RNA, 14 nt, Human herpesvirus 6B
uacgugucucaguc

SEQ ID NO: 172973 - RNA, 17 nt, Human herpesvirus 6B
uacuuacaucgauccaa

SEQ ID NO: 172974 - RNA, 19 nt, Human herpesvirus 6B
uacuuacaucgauccaaaa

SEQ ID NO: 172975 - RNA, 20 nt, Human herpesvirus 6B
uacuuacaucgauccaaaag

SEQ ID NO: 172976 - RNA, 16 nt, Human herpesvirus 6B
uacuguuucuuugaca

SEQ ID NO: 172977 - RNA, 22 nt, Human herpesvirus 6B
uacuguguauuguguaccuugu

SEQ ID NO: 172978 - RNA, 22 nt, Human herpesvirus 6B
uacuuacuugagugauggaguu

SEQ ID NO: 172979 - RNA, 13 nt, Human herpesvirus 6B
uacuucauuuugc

SEQ ID NO: 172980 - RNA, 15 nt, Human herpesvirus 6B
uacugcugguucucg

SEQ ID NO: 172981 - RNA, 17 nt, Human herpesvirus 6B
uacuggcaaagcaaaga

SEQ ID NO: 172982 - RNA, 21 nt, Human herpesvirus 6B
uaccugucuuagaagcauuug

SEQ ID NO: 172983 - RNA, 15 nt, Human herpesvirus 6B
uaccuuguaaucucu

SEQ ID NO: 172984 - RNA, 15 nt, Human herpesvirus 6B
uaccucaucccuuaa

SEQ ID NO: 172985 - RNA, 23 nt, Human herpesvirus 6B
uacauuauccaggcaugugauug

SEQ ID NO: 172986 - RNA, 13 nt, Human herpesvirus 6B
uaccuaauuccaa

SEQ ID NO: 172987 - RNA, 15 nt, Human herpesvirus 6B
uaccuaauuccaauu

SEQ ID NO: 172988 - RNA, 17 nt, Human herpesvirus 6B
uaccuaauuccaauuua

SEQ ID NO: 172989 - RNA, 20 nt, Human herpesvirus 6B
uacauguuuuugaugugcua

SEQ ID NO: 172990 - RNA, 15 nt, Human herpesvirus 6B
uacaugccacagaac

SEQ ID NO: 172991 - RNA, 14 nt, Human herpesvirus 6B
uacauaaacuauug

SEQ ID NO: 172992 - RNA, 15 nt, Human herpesvirus 6B
uacauauagucaaug

SEQ ID NO: 172993 - RNA, 13 nt, Human herpesvirus 6B
uacaucaacuauu

SEQ ID NO: 172994 - RNA, 13 nt, Human herpesvirus 6B
uagaagcauuugc

SEQ ID NO: 172995 - RNA, 14 nt, Human herpesvirus 6B
uagaagcuuucaaa

SEQ ID NO: 172996 - RNA, 19 nt, Human herpesvirus 6B
uagaacaggaagcgccaua

SEQ ID NO: 172997 - RNA, 15 nt, Human herpesvirus 6B
uagaaccaaucugug

SEQ ID NO: 172998 - RNA, 18 nt, Human herpesvirus 6B
uagaaccaaucugugagc

SEQ ID NO: 172999 - RNA, 14 nt, Human herpesvirus 6B
uacuuuuaaaauac

SEQ ID NO: 173000 - RNA, 21 nt, Human herpesvirus 6B
uacuuuuuucaauaaugcuca

SEQ ID NO: 173001 - RNA, 22 nt, Human herpesvirus 6B
uagaaaaaaauauuuugaaaag

SEQ ID NO: 173002 - RNA, 23 nt, Human herpesvirus 6B
uagaaaacauuccggauauuuca

SEQ ID NO: 173003 - RNA, 18 nt, Human herpesvirus 6B
uagaauuacuaugugaca

SEQ ID NO: 173004 - RNA, 20 nt, Human herpesvirus 6B
uagaauaauuauggacaacg

SEQ ID NO: 173005 - RNA, 16 nt, Human herpesvirus 6B
uagcuauccauuuuau

SEQ ID NO: 173006 - RNA, 22 nt, Human herpesvirus 6B
uagcguacgagucgacaaauua

SEQ ID NO: 173007 - RNA, 18 nt, Human herpesvirus 6B
uagcgguuucuagguuuc

SEQ ID NO: 173008 - RNA, 16 nt, Human herpesvirus 6B
uagcggccgcaaaaac

SEQ ID NO: 173009 - RNA, 14 nt, Human herpesvirus 6B
uagcagauccaugg

SEQ ID NO: 173010 - RNA, 15 nt, Human herpesvirus 6B
uagcacacgacaaau

SEQ ID NO: 173011 - RNA, 22 nt, Human herpesvirus 6B
uagcacgaaccaaaaugacucu

SEQ ID NO: 173012 - RNA, 15 nt, Human herpesvirus 6B
uagcaaucauuaaca

SEQ ID NO: 173013 - RNA, 22 nt, Human herpesvirus 6B
uagauuuauuagccgugauguu

SEQ ID NO: 173014 - RNA, 23 nt, Human herpesvirus 6B
uagaggaugcuuugcuguuuacg

SEQ ID NO: 173015 - RNA, 16 nt, Human herpesvirus 6B
uagagauauaaugaua

SEQ ID NO: 173016 - RNA, 18 nt, Human herpesvirus 6B
uagagugacaucuuuuau

SEQ ID NO: 173017 - RNA, 21 nt, Human herpesvirus 6B
uagagcauggcgcacgcuaaa

SEQ ID NO: 173018 - RNA, 18 nt, Human herpesvirus 6B
uagagcauccuguuuucc

SEQ ID NO: 173019 - RNA, 20 nt, Human herpesvirus 6B
uagagaaauuggacguugau

SEQ ID NO: 173020 - RNA, 22 nt, Human herpesvirus 6B
uagaucugccaugggauaugaa

SEQ ID NO: 173021 - RNA, 15 nt, Human herpesvirus 6B
uagauucgagccaaa

SEQ ID NO: 173022 - RNA, 20 nt, Human herpesvirus 6B
uagaugcuuaacuuacuuaa

SEQ ID NO: 173023 - RNA, 22 nt, Human herpesvirus 6B
uagauggugcuauuaacacaua

SEQ ID NO: 173024 - RNA, 12 nt, Human herpesvirus 6B
uaggauguuugg

SEQ ID NO: 173025 - RNA, 17 nt, Human herpesvirus 6B
uaggaaaagguugagaa

SEQ ID NO: 173026 - RNA, 14 nt, Human herpesvirus 6B
uaggaaacuuucaa

SEQ ID NO: 173027 - RNA, 23 nt, Human herpesvirus 6B
uaggaaucuuguguucuaacaca

SEQ ID NO: 173028 - RNA, 15 nt, Human herpesvirus 6B
uauacagaugccaag

SEQ ID NO: 173029 - RNA, 20 nt, Human herpesvirus 6B
uauacuuacuugagugaugg

SEQ ID NO: 173030 - RNA, 23 nt, Human herpesvirus 6B
uagucguuuuuggauuucuguaa

SEQ ID NO: 173031 - RNA, 16 nt, Human herpesvirus 6B
uauaugcaggugcugc

SEQ ID NO: 173032 - RNA, 20 nt, Human herpesvirus 6B
uauagauuagaaauuacaua

SEQ ID NO: 173033 - RNA, 21 nt, Human herpesvirus 6B
uauagcagcgcccgaugccaa

SEQ ID NO: 173034 - RNA, 21 nt, Human herpesvirus 6B
uauaggaaucuuguguucuaa

SEQ ID NO: 173035 - RNA, 17 nt, Human herpesvirus 6B
uauacguuaaauaucua

SEQ ID NO: 173036 - RNA, 17 nt, Human herpesvirus 6B
uauaucgaaucaugaga

SEQ ID NO: 173037 - RNA, 14 nt, Human herpesvirus 6B
uauaucuacugcag

SEQ ID NO: 173038 - RNA, 21 nt, Human herpesvirus 6B
uauaucuagauaaacguugua

SEQ ID NO: 173039 - RNA, 20 nt, Human herpesvirus 6B
uauaucagagcgggcuauaa

SEQ ID NO: 173040 - RNA, 20 nt, Human herpesvirus 6B
uauauaguuuucugauggaa

SEQ ID NO: 173041 - RNA, 13 nt, Human herpesvirus 6B
gugugcaucagca

SEQ ID NO: 173042 - RNA, 15 nt, Human herpesvirus 6B
gugucgaauguuaca

SEQ ID NO: 173043 - RNA, 18 nt, Human herpesvirus 6B
gugucgaugucuugcuau

SEQ ID NO: 173044 - RNA, 14 nt, Human herpesvirus 6B
gugucggugauacc

SEQ ID NO: 173045 - RNA, 15 nt, Human herpesvirus 6B
guguucguugucuga

SEQ ID NO: 173046 - RNA, 16 nt, Human herpesvirus 6B
guguucuggcuuguca

SEQ ID NO: 173047 - RNA, 22 nt, Human herpesvirus 6B
guguuauucggaguuuucaaga

SEQ ID NO: 173048 - RNA, 18 nt, Human herpesvirus 6B
guguggggaugacgagcu

SEQ ID NO: 173049 - RNA, 20 nt, Human herpesvirus 6B
guguguaugcuuucgcucac

SEQ ID NO: 173050 - RNA, 17 nt, Human herpesvirus 6B
guguuaaagaaugcuga

SEQ ID NO: 173051 - RNA, 23 nt, Human herpesvirus 6B
guguuauggggaagaucuaugag

SEQ ID NO: 173052 - RNA, 13 nt, Human herpesvirus 6B
guguauugugaua

SEQ ID NO: 173053 - RNA, 20 nt, Human herpesvirus 6B
guguauuuuuuuguguguau

SEQ ID NO: 173054 - RNA, 22 nt, Human herpesvirus 6B
gugucauguuuacugcaugcua

SEQ ID NO: 173055 - RNA, 21 nt, Human herpesvirus 6B
guguaugugugggguguguau

SEQ ID NO: 173056 - RNA, 11 nt, Human herpesvirus 6B
guguaacucuu

SEQ ID NO: 173057 - RNA, 15 nt, Human herpesvirus 6B
guguacacuaugagu

SEQ ID NO: 173058 - RNA, 18 nt, Human herpesvirus 6B
guguaccuuguaaucucu

SEQ ID NO: 173059 - RNA, 15 nt, Human herpesvirus 6B
guguacgaagcaaau

SEQ ID NO: 173060 - RNA, 22 nt, Human herpesvirus 6B
gucaaagaaacaguaaaucucu

SEQ ID NO: 173061 - RNA, 15 nt, Human herpesvirus 6B
gucaaccgccacaau

SEQ ID NO: 173062 - RNA, 11 nt, Human herpesvirus 6B
gucaacaaaca

SEQ ID NO: 173063 - RNA, 20 nt, Human herpesvirus 6B
gucaagaguuuuccuugaca

SEQ ID NO: 173064 - RNA, 12 nt, Human herpesvirus 6B
gucaaugcaauu

SEQ ID NO: 173065 - RNA, 12 nt, Human herpesvirus 6B
guccauucucag

SEQ ID NO: 173066 - RNA, 18 nt, Human herpesvirus 6B
guccaucuucagacauca

SEQ ID NO: 173067 - RNA, 17 nt, Human herpesvirus 6B
guccagcacagcaugca

SEQ ID NO: 173068 - RNA, 16 nt, Human herpesvirus 6B
guuaugugcuaucugu

SEQ ID NO: 173069 - RNA, 11 nt, Human herpesvirus 6B
guucaaacaau

SEQ ID NO: 173070 - RNA, 22 nt, Human herpesvirus 6B
guuagaucuggggagaugcucu

SEQ ID NO: 173071 - RNA, 15 nt, Human herpesvirus 6B
guuacuagugauuau

SEQ ID NO: 173072 - RNA, 18 nt, Human herpesvirus 6B
guuacggggaagaucuau

SEQ ID NO: 173073 - RNA, 20 nt, Human herpesvirus 6B
guuaccgccguucugcuuag

SEQ ID NO: 173074 - RNA, 15 nt, Human herpesvirus 6B
guguuuauuugcucu

SEQ ID NO: 173075 - RNA, 23 nt, Human herpesvirus 6B
guuaaaagagaauacuacaguga

SEQ ID NO: 173076 - RNA, 17 nt, Human herpesvirus 6B
guguuuguggacaauga

SEQ ID NO: 173077 - RNA, 22 nt, Human herpesvirus 6B
guguuugaaacguugugcugag

SEQ ID NO: 173078 - RNA, 18 nt, Human herpesvirus 6B
guuacaagcaugcauugu

SEQ ID NO: 173079 - RNA, 19 nt, Human herpesvirus 6B
guuaacggagaucugguga

SEQ ID NO: 173080 - RNA, 15 nt, Human herpesvirus 6B
guuaacucagguggu

SEQ ID NO: 173081 - RNA, 14 nt, Human herpesvirus 6B
guucuaacccauga

SEQ ID NO: 173082 - RNA, 13 nt, Human herpesvirus 6B
guucuaacacaua

SEQ ID NO: 173083 - RNA, 22 nt, Human herpesvirus 6B
guucgcacaaaaugauugcaac

SEQ ID NO: 173084 - RNA, 23 nt, Human herpesvirus 6B
guucuuucaaaaugaccagagau

SEQ ID NO: 173085 - RNA, 14 nt, Human herpesvirus 6B
guucuuucacacaa

SEQ ID NO: 173086 - RNA, 16 nt, Human herpesvirus 6B
guucuuugaacaguga

SEQ ID NO: 173087 - RNA, 23 nt, Human herpesvirus 6B
guucuuacaauguucuugacaaa

SEQ ID NO: 173088 - RNA, 15 nt, Human herpesvirus 6B
guucucagauguaua

SEQ ID NO: 173089 - RNA, 17 nt, Human herpesvirus 6B
guucaucagccauuucg

SEQ ID NO: 173090 - RNA, 15 nt, Human herpesvirus 6B
guucacacagaugca

SEQ ID NO: 173091 - RNA, 13 nt, Human herpesvirus 6B
guucacauuaccu

SEQ ID NO: 173092 - RNA, 14 nt, Human herpesvirus 6B
guucaccacuguga

SEQ ID NO: 173093 - RNA, 16 nt, Human herpesvirus 6B
guucaccacugugaua

SEQ ID NO: 173094 - RNA, 20 nt, Human herpesvirus 6B
guucaccacugugauaugca

SEQ ID NO: 173095 - RNA, 13 nt, Human herpesvirus 6B
guucaccauucca

SEQ ID NO: 173096 - RNA, 16 nt, Human herpesvirus 6B
guucauuuguuccgau

SEQ ID NO: 173097 - RNA, 17 nt, Human herpesvirus 6B
uaacaccaguacuucaa

SEQ ID NO: 173098 - RNA, 22 nt, Human herpesvirus 6B
uaacuaaaucgcgccauaucac

SEQ ID NO: 173099 - RNA, 14 nt, Human herpesvirus 6B
uaacuacacuuaua

SEQ ID NO: 173100 - RNA, 20 nt, Human herpesvirus 6B
uaaauggcauugaagaugac

SEQ ID NO: 173101 - RNA, 20 nt, Human herpesvirus 6B
uaaauggcggacccgaccuc

SEQ ID NO: 173102 - RNA, 21 nt, Human herpesvirus 6B
uaaauggcauucuugcagauu

SEQ ID NO: 173103 - RNA, 20 nt, Human herpesvirus 6B
uaaauuacaugaaaacauuc

SEQ ID NO: 173104 - RNA, 19 nt, Human herpesvirus 6B
uaaauugaugaaauuguga

SEQ ID NO: 173105 - RNA, 15 nt, Human herpesvirus 6B
uaaaacaucagauga

SEQ ID NO: 173106 - RNA, 16 nt, Human herpesvirus 6B
uaaaacaucagaugaa

SEQ ID NO: 173107 - RNA, 11 nt, Human herpesvirus 6B
uaaaacaugua

SEQ ID NO: 173108 - RNA, 22 nt, Human herpesvirus 6B
uaaaaccugcuaacggagcaac

SEQ ID NO: 173109 - RNA, 22 nt, Human herpesvirus 6B
uaaaaauuauucuggcgaugca

SEQ ID NO: 173110 - RNA, 13 nt, Human herpesvirus 6B
uaaaaauucacug

SEQ ID NO: 173111 - RNA, 23 nt, Human herpesvirus 6B
uaaaacacgauccaauuacauca

SEQ ID NO: 173112 - RNA, 16 nt, Human herpesvirus 6B
uaaaacagaaaggcca

SEQ ID NO: 173113 - RNA, 20 nt, Human herpesvirus 6B
uaaaacucuaaaaccugcua

SEQ ID NO: 173114 - RNA, 17 nt, Human herpesvirus 6B
uaaaauuuaauaaggaa

SEQ ID NO: 173115 - RNA, 21 nt, Human herpesvirus 6B
uaaaagagaauacuacaguga

SEQ ID NO: 173116 - RNA, 13 nt, Human herpesvirus 6B
uaaaagagccaga

SEQ ID NO: 173117 - RNA, 14 nt, Human herpesvirus 6B
uaaaagagccagag

SEQ ID NO: 173118 - RNA, 21 nt, Human herpesvirus 6B
uaaaauuuuuugcaguauuaa

SEQ ID NO: 173119 - RNA, 17 nt, Human herpesvirus 6B
uaaaauuuggaagccug

SEQ ID NO: 173120 - RNA, 16 nt, Human herpesvirus 6B
uaaacacgaaaugaac

SEQ ID NO: 173121 - RNA, 20 nt, Human herpesvirus 6B
uaaacacugacuaaacguac

SEQ ID NO: 173122 - RNA, 19 nt, Human herpesvirus 6B
uaaacaguuauacuggcaa

SEQ ID NO: 173123 - RNA, 13 nt, Human herpesvirus 6B
uaaacauucuuaa

SEQ ID NO: 173124 - RNA, 17 nt, Human herpesvirus 6B
uaaauauaacaguagga

SEQ ID NO: 173125 - RNA, 17 nt, Human herpesvirus 6B
uaaaccaucgacuucaa

SEQ ID NO: 173126 - RNA, 22 nt, Human herpesvirus 6B
uaaaucagacagguaagcagca

SEQ ID NO: 173127 - RNA, 17 nt, Human herpesvirus 6B
uaaaucgcgccauauca

SEQ ID NO: 173128 - RNA, 14 nt, Human herpesvirus 6B
uaaaucggacaaug

SEQ ID NO: 173129 - RNA, 22 nt, Human herpesvirus 6B
guuguauuuaucgauucggaga

SEQ ID NO: 173130 - RNA, 12 nt, Human herpesvirus 6B
guuguacaggaa

SEQ ID NO: 173131 - RNA, 19 nt, Human herpesvirus 6B
guugccaguaagucuucau

SEQ ID NO: 173132 - RNA, 12 nt, Human herpesvirus 6B
guugcaguuuaa

SEQ ID NO: 173133 - RNA, 18 nt, Human herpesvirus 6B
guugaauugauaguacuu

SEQ ID NO: 173134 - RNA, 16 nt, Human herpesvirus 6B
guuguuucaguuucaa

SEQ ID NO: 173135 - RNA, 15 nt, Human herpesvirus 6B
guugugauucuggga

SEQ ID NO: 173136 - RNA, 20 nt, Human herpesvirus 6B
guugucuuuguccuauguua

SEQ ID NO: 173137 - RNA, 16 nt, Human herpesvirus 6B
guuuaaucucacacac

SEQ ID NO: 173138 - RNA, 17 nt, Human herpesvirus 6B
guuuacaaaacuguuaa

SEQ ID NO: 173139 - RNA, 13 nt, Human herpesvirus 6B
guuuaccuaucaa

SEQ ID NO: 173140 - RNA, 13 nt, Human herpesvirus 6B
guuuacgaaugau

SEQ ID NO: 173141 - RNA, 15 nt, Human herpesvirus 6B
guuuacgaauucaau

SEQ ID NO: 173142 - RNA, 18 nt, Human herpesvirus 6B
guuuacgaauucaauguc

SEQ ID NO: 173143 - RNA, 17 nt, Human herpesvirus 6B
guuuauaugcaggugcu

SEQ ID NO: 173144 - RNA, 20 nt, Human herpesvirus 6B
guuuaucaugagagagcaaa

SEQ ID NO: 173145 - RNA, 13 nt, Human herpesvirus 6B
guuuauguuucaa

SEQ ID NO: 173146 - RNA, 17 nt, Human herpesvirus 6B
guuucaaauacucgcau

SEQ ID NO: 173147 - RNA, 23 nt, Human herpesvirus 6B
guuucuuagaaccaaucugugag

SEQ ID NO: 173148 - RNA, 19 nt, Human herpesvirus 6B
guuucugugaaucugcuga

SEQ ID NO: 173149 - RNA, 23 nt, Human herpesvirus 6B
guuucuuugacauuuaccagaga

SEQ ID NO: 173150 - RNA, 19 nt, Human herpesvirus 6B
guuugcgggaugccauaau

SEQ ID NO: 173151 - RNA, 21 nt, Human herpesvirus 6B
guuucuccgcacgcuagcaau

SEQ ID NO: 173152 - RNA, 23 nt, Human herpesvirus 6B
guuucuccgcacgcuagcaauga

SEQ ID NO: 173153 - RNA, 17 nt, Human herpesvirus 6B
guuucucgaaaauacaa

SEQ ID NO: 173154 - RNA, 19 nt, Human herpesvirus 6B
guuucgcagaggacaguua

SEQ ID NO: 173155 - RNA, 19 nt, Human herpesvirus 6B
guuucaccauguccaggaa

SEQ ID NO: 173156 - RNA, 18 nt, Human herpesvirus 6B
guuucaggcgucaaagaa

SEQ ID NO: 173157 - RNA, 22 nt, Human herpesvirus 6B
guuuccagaauacgaacagaaa

SEQ ID NO: 173158 - RNA, 16 nt, Human herpesvirus 6B
guuuugguggacacca

SEQ ID NO: 173159 - RNA, 16 nt, Human herpesvirus 6B
guuuucuuaugcgucu

SEQ ID NO: 173160 - RNA, 19 nt, Human herpesvirus 6B
uaaaaagcaaggugaaaca

SEQ ID NO: 173161 - RNA, 14 nt, Human herpesvirus 6B
uaaaaaucaucucg

SEQ ID NO: 173162 - RNA, 15 nt, Human herpesvirus 6B
guuuugcaacuuaaa

SEQ ID NO: 173163 - RNA, 21 nt, Human herpesvirus 6B
guuuucuguaggcaacuuaag

SEQ ID NO: 173164 - RNA, 14 nt, Human herpesvirus 6B
guuuucuuacacau

SEQ ID NO: 173165 - RNA, 18 nt, Human herpesvirus 6B
guuuuagggaugguggau

SEQ ID NO: 173166 - RNA, 15 nt, Human herpesvirus 6B
guuugucaaagcuac

SEQ ID NO: 173167 - RNA, 17 nt, Human herpesvirus 6B
gcgaauuguguugcuag

SEQ ID NO: 173168 - RNA, 15 nt, Human herpesvirus 6B
gcgacagacagucac

SEQ ID NO: 173169 - RNA, 15 nt, Human herpesvirus 6B
gccuuuuacuuacau

SEQ ID NO: 173170 - RNA, 23 nt, Human herpesvirus 6B
gccuggaauacaagaccaucugc

SEQ ID NO: 173171 - RNA, 17 nt, Human herpesvirus 6B
gccuguacucuuucaag

SEQ ID NO: 173172 - RNA, 18 nt, Human herpesvirus 6B
gccugcauaugauccaau

SEQ ID NO: 173173 - RNA, 16 nt, Human herpesvirus 6B
gccuucgguacaguga

SEQ ID NO: 173174 - RNA, 16 nt, Human herpesvirus 6B
gccuugauaaucugau

SEQ ID NO: 173175 - RNA, 19 nt, Human herpesvirus 6B
gccguguuacugacaccac

SEQ ID NO: 173176 - RNA, 23 nt, Human herpesvirus 6B
gccuaaacggagacugcacagaa

SEQ ID NO: 173177 - RNA, 14 nt, Human herpesvirus 6B
gccgugacacggaa

SEQ ID NO: 173178 - RNA, 16 nt, Human herpesvirus 6B
gccucuaacuguuguu

SEQ ID NO: 173179 - RNA, 22 nt, Human herpesvirus 6B
gccuccgccaccaccgcugaca

SEQ ID NO: 173180 - RNA, 20 nt, Human herpesvirus 6B
gccuccgccggguaugagcc

SEQ ID NO: 173181 - RNA, 15 nt, Human herpesvirus 6B
gccuauuaaugcuua

SEQ ID NO: 173182 - RNA, 16 nt, Human herpesvirus 6B
gcagaggaucuguuca

SEQ ID NO: 173183 - RNA, 19 nt, Human herpesvirus 6B
gcagaggccggcacauaca

SEQ ID NO: 173184 - RNA, 16 nt, Human herpesvirus 6B
gcagaggcggcgacca

SEQ ID NO: 173185 - RNA, 14 nt, Human herpesvirus 6B
gcagaucagucaaa

SEQ ID NO: 173186 - RNA, 12 nt, Human herpesvirus 6B
gcagacuaaucc

SEQ ID NO: 173187 - RNA, 13 nt, Human herpesvirus 6B
gcagacuaaucca

SEQ ID NO: 173188 - RNA, 14 nt, Human herpesvirus 6B
gcagacuaauccau

SEQ ID NO: 173189 - RNA, 17 nt, Human herpesvirus 6B
gcagacuaauccauaug

SEQ ID NO: 173190 - RNA, 16 nt, Human herpesvirus 6B
gcacggauaacguuca

SEQ ID NO: 173191 - RNA, 18 nt, Human herpesvirus 6B
gcagcagaggccggcaca

SEQ ID NO: 173192 - RNA, 16 nt, Human herpesvirus 6B
gccgacucucuccgca

SEQ ID NO: 173193 - RNA, 21 nt, Human herpesvirus 6B
gcccuaaugugauuaugccaa

SEQ ID NO: 173194 - RNA, 15 nt, Human herpesvirus 6B
gcccuacuacagugg

SEQ ID NO: 173195 - RNA, 17 nt, Human herpesvirus 6B
gccggaaaacaaugcau

SEQ ID NO: 173196 - RNA, 22 nt, Human herpesvirus 6B
gccgcgaacucguuaauaguua

SEQ ID NO: 173197 - RNA, 15 nt, Human herpesvirus 6B
gccgaugaaacuguc

SEQ ID NO: 173198 - RNA, 21 nt, Human herpesvirus 6B
gccgccauauuaaaacccggc

SEQ ID NO: 173199 - RNA, 12 nt, Human herpesvirus 6B
gcuguuguugua

SEQ ID NO: 173200 - RNA, 19 nt, Human herpesvirus 6B
gcuuggcuaucgcaaugau

SEQ ID NO: 173201 - RNA, 22 nt, Human herpesvirus 6B
gcuuauauuguuguaaaauaca

SEQ ID NO: 173202 - RNA, 21 nt, Human herpesvirus 6B
gcugcuaaaagcuauguauga

SEQ ID NO: 173203 - RNA, 23 nt, Human herpesvirus 6B
gcugucgaguaacuguggguuuu

SEQ ID NO: 173204 - RNA, 21 nt, Human herpesvirus 6B
gcugcccgauugcaccaucug

SEQ ID NO: 173205 - RNA, 23 nt, Human herpesvirus 6B
gcucuaaugcuagauaacucaga

SEQ ID NO: 173206 - RNA, 16 nt, Human herpesvirus 6B
gcucuaaaucagacag

SEQ ID NO: 173207 - RNA, 20 nt, Human herpesvirus 6B
gcucuauugugugucccgaa

SEQ ID NO: 173208 - RNA, 22 nt, Human herpesvirus 6B
gcucuauugugugucccgaaga

SEQ ID NO: 173209 - RNA, 15 nt, Human herpesvirus 6B
gcucuguuacuaugu

SEQ ID NO: 173210 - RNA, 13 nt, Human herpesvirus 6B
gcuauuaacacau

SEQ ID NO: 173211 - RNA, 20 nt, Human herpesvirus 6B
gcuccuaaauaccauuuuau

SEQ ID NO: 173212 - RNA, 22 nt, Human herpesvirus 6B
gcgcggguacgcgcgugaucaa

SEQ ID NO: 173213 - RNA, 19 nt, Human herpesvirus 6B
gcguccucuauauugaucg

SEQ ID NO: 173214 - RNA, 17 nt, Human herpesvirus 6B
gcgguuggggucuuucc

SEQ ID NO: 173215 - RNA, 17 nt, Human herpesvirus 6B
gcgguugaagucuuucc

SEQ ID NO: 173216 - RNA, 20 nt, Human herpesvirus 6B
gcguacacgaaaaacauuuc

SEQ ID NO: 173217 - RNA, 16 nt, Human herpesvirus 6B
gcgucacacagcauga

SEQ ID NO: 173218 - RNA, 23 nt, Human herpesvirus 6B
gcguaggcaugucugugcguguu

SEQ ID NO: 173219 - RNA, 14 nt, Human herpesvirus 6B
gcuagugaucgcaa

SEQ ID NO: 173220 - RNA, 18 nt, Human herpesvirus 6B
gcgugcguaucugcauca

SEQ ID NO: 173221 - RNA, 17 nt, Human herpesvirus 6B
gcgagucuugugugaaa

SEQ ID NO: 173222 - RNA, 17 nt, Human herpesvirus 6B
gcgauagucaugcacuc

SEQ ID NO: 173223 - RNA, 21 nt, Human herpesvirus 6B
gcgccaacggaaagcaucuca

SEQ ID NO: 173224 - RNA, 15 nt, Human herpesvirus 6B
gcgcauguugcaguu

SEQ ID NO: 173225 - RNA, 16 nt, Human herpesvirus 6B
gcgcauguugcaguuu

SEQ ID NO: 173226 - RNA, 19 nt, Human herpesvirus 6B
ggaacaccagcaugucaua

SEQ ID NO: 173227 - RNA, 20 nt, Human herpesvirus 6B
gcuuucuugaagaugugaua

SEQ ID NO: 173228 - RNA, 13 nt, Human herpesvirus 6B
gcuuuaucccaaa

SEQ ID NO: 173229 - RNA, 19 nt, Human herpesvirus 6B
gcuuuauccggccaauuca

SEQ ID NO: 173230 - RNA, 20 nt, Human herpesvirus 6B
gcuuguuuugguggacacca

SEQ ID NO: 173231 - RNA, 23 nt, Human herpesvirus 6B
ggaagaaaauccagcaauccaau

SEQ ID NO: 173232 - RNA, 16 nt, Human herpesvirus 6B
ggaagauacacugcaa

SEQ ID NO: 173233 - RNA, 13 nt, Human herpesvirus 6B
ggaacccuagaca

SEQ ID NO: 173234 - RNA, 14 nt, Human herpesvirus 6B
ggauagaaauggau

SEQ ID NO: 173235 - RNA, 15 nt, Human herpesvirus 6B
ggauaugagugaauu

SEQ ID NO: 173236 - RNA, 15 nt, Human herpesvirus 6B
ggaagcgccauaaaa

SEQ ID NO: 173237 - RNA, 15 nt, Human herpesvirus 6B
ggaagacgcuguguu

SEQ ID NO: 173238 - RNA, 16 nt, Human herpesvirus 6B
ggcaaccgcaguuccu

SEQ ID NO: 173239 - RNA, 17 nt, Human herpesvirus 6B
ggaugugguaugagcug

SEQ ID NO: 173240 - RNA, 16 nt, Human herpesvirus 6B
ggauugucauucugca

SEQ ID NO: 173241 - RNA, 21 nt, Human herpesvirus 6B
ggauugucauucugcauuuau

SEQ ID NO: 173242 - RNA, 19 nt, Human herpesvirus 6B
ggauguaaucaaugucaca

SEQ ID NO: 173243 - RNA, 19 nt, Human herpesvirus 6B
ggauguuugggagaucuga

SEQ ID NO: 173244 - RNA, 15 nt, Human herpesvirus 6B
ggauguuugugacuc

SEQ ID NO: 173245 - RNA, 18 nt, Human herpesvirus 6B
ggauguuugugacucuga

SEQ ID NO: 173246 - RNA, 22 nt, Human herpesvirus 6B
ggauguuuuuacuugaugcaug

SEQ ID NO: 173247 - RNA, 13 nt, Human herpesvirus 6B
ggaugaugguguc

SEQ ID NO: 173248 - RNA, 16 nt, Human herpesvirus 6B
ggaugauggugucuuu

SEQ ID NO: 173249 - RNA, 20 nt, Human herpesvirus 6B
ggaugaaguuccacaucuau

SEQ ID NO: 173250 - RNA, 12 nt, Human herpesvirus 6B
ggcgcgugcacg

SEQ ID NO: 173251 - RNA, 23 nt, Human herpesvirus 6B
ggcauucgccauauaccuuguca

SEQ ID NO: 173252 - RNA, 21 nt, Human herpesvirus 6B
ggccaauuuaugucauuucau

SEQ ID NO: 173253 - RNA, 18 nt, Human herpesvirus 6B
gggauggcagauugcaaa

SEQ ID NO: 173254 - RNA, 16 nt, Human herpesvirus 6B
gggaugauggugucuu

SEQ ID NO: 173255 - RNA, 22 nt, Human herpesvirus 6B
gggauguaaucaaugucacaaa

SEQ ID NO: 173256 - RNA, 16 nt, Human herpesvirus 6B
gggaagcauaaguccu

SEQ ID NO: 173257 - RNA, 21 nt, Human herpesvirus 6B
ggcuuaauaaaggauguuugu

SEQ ID NO: 173258 - RNA, 20 nt, Human herpesvirus 6B
ggcuucaagaaugccgugaa

SEQ ID NO: 173259 - RNA, 21 nt, Human herpesvirus 6B
ggcuuuaaaaauuacuaaugu

SEQ ID NO: 173260 - RNA, 15 nt, Human herpesvirus 6B
ggucugcuugcaaau

SEQ ID NO: 173261 - RNA, 14 nt, Human herpesvirus 6B
ggucgaaugagcuu

SEQ ID NO: 173262 - RNA, 17 nt, Human herpesvirus 6B
gguccguuuuuucugca

SEQ ID NO: 173263 - RNA, 18 nt, Human herpesvirus 6B
gguguguuuuuuucaaga

SEQ ID NO: 173264 - RNA, 15 nt, Human herpesvirus 6B
gguguuuagugccua

SEQ ID NO: 173265 - RNA, 22 nt, Human herpesvirus 6B
ggugucucaaccuucauuaauu

SEQ ID NO: 173266 - RNA, 13 nt, Human herpesvirus 6B
gguuauuuacaaa

SEQ ID NO: 173267 - RNA, 21 nt, Human herpesvirus 6B
gguucaccacugugauaugca

SEQ ID NO: 173268 - RNA, 17 nt, Human herpesvirus 6B
gguuaggguuaggguua

SEQ ID NO: 173269 - RNA, 20 nt, Human herpesvirus 6B
ggguuauacauaaggcaaaa

SEQ ID NO: 173270 - RNA, 21 nt, Human herpesvirus 6B
gggucuuucccgugcucagua

SEQ ID NO: 173271 - RNA, 17 nt, Human herpesvirus 6B
gggugcaaucaaucuuu

SEQ ID NO: 173272 - RNA, 22 nt, Human herpesvirus 6B
ggguuuuagaaaaaagugcaag

SEQ ID NO: 173273 - RNA, 18 nt, Human herpesvirus 6B
gguaaaauggcugugcua

SEQ ID NO: 173274 - RNA, 16 nt, Human herpesvirus 6B
gguaaacuucugcuau

SEQ ID NO: 173275 - RNA, 15 nt, Human herpesvirus 6B
gggcgcuagugaucg

SEQ ID NO: 173276 - RNA, 12 nt, Human herpesvirus 6B
ggggaagaucua

SEQ ID NO: 173277 - RNA, 23 nt, Human herpesvirus 6B
gggcgccacuuuagcuuugcccu

SEQ ID NO: 173278 - RNA, 17 nt, Human herpesvirus 6B
gggccguacacucauuu

SEQ ID NO: 173279 - RNA, 23 nt, Human herpesvirus 6B
gggccguacacucauuugcaauu

SEQ ID NO: 173280 - RNA, 17 nt, Human herpesvirus 6B
gguucuucgucuucuaa

SEQ ID NO: 173281 - RNA, 13 nt, Human herpesvirus 6B
gguuuauaugcag

SEQ ID NO: 173282 - RNA, 23 nt, Human herpesvirus 6B
gguuuauaugcaggugcugcuaa

SEQ ID NO: 173283 - RNA, 18 nt, Human herpesvirus 6B
gguuugucuucaagcaaa

SEQ ID NO: 173284 - RNA, 14 nt, Human herpesvirus 6B
guaagcaucugcug

SEQ ID NO: 173285 - RNA, 17 nt, Human herpesvirus 6B
guaagcaucugcugcuu

SEQ ID NO: 173286 - RNA, 23 nt, Human herpesvirus 6B
guaagauuaaaugugaacaguau

SEQ ID NO: 173287 - RNA, 13 nt, Human herpesvirus 6B
guaagauugcaga

SEQ ID NO: 173288 - RNA, 20 nt, Human herpesvirus 6B
guaacugguucaggauuugu

SEQ ID NO: 173289 - RNA, 23 nt, Human herpesvirus 6B
guaauucuuauguaaacuaaaua

SEQ ID NO: 173290 - RNA, 21 nt, Human herpesvirus 6B
guaaugugcagaucagucaaa

SEQ ID NO: 173291 - RNA, 16 nt, Human herpesvirus 6B
guaauuggacauuguu

SEQ ID NO: 173292 - RNA, 20 nt, Human herpesvirus 6B
guaccgaccugacacaauca

SEQ ID NO: 173293 - RNA, 22 nt, Human herpesvirus 6B
guaccgcgguugaagucuuucc

SEQ ID NO: 173294 - RNA, 12 nt, Human herpesvirus 6B
guaagugccuau

SEQ ID NO: 173295 - RNA, 18 nt, Human herpesvirus 6B
guacggcgucacacagca

SEQ ID NO: 173296 - RNA, 16 nt, Human herpesvirus 6B
guacuauagacgccau

SEQ ID NO: 173297 - RNA, 22 nt, Human herpesvirus 6B
guagugcucaagcgaagucaug

SEQ ID NO: 173298 - RNA, 18 nt, Human herpesvirus 6B
guauugucugauauggca

SEQ ID NO: 173299 - RNA, 13 nt, Human herpesvirus 6B
guauuugugaaca

SEQ ID NO: 173300 - RNA, 12 nt, Human herpesvirus 6B
guauaccauucc

SEQ ID NO: 173301 - RNA, 15 nt, Human herpesvirus 6B
guauaccauucccaa

SEQ ID NO: 173302 - RNA, 13 nt, Human herpesvirus 6B
guauaagaacugg

SEQ ID NO: 173303 - RNA, 19 nt, Human herpesvirus 6B
guauauggugauguguucu

SEQ ID NO: 173304 - RNA, 20 nt, Human herpesvirus 6B
ccaguagcacgaaccaaaau

SEQ ID NO: 173305 - RNA, 18 nt, Human herpesvirus 6B
ccagugagaacauauaaa

SEQ ID NO: 173306 - RNA, 12 nt, Human herpesvirus 6B
ccaguacuucaa

SEQ ID NO: 173307 - RNA, 17 nt, Human herpesvirus 6B
ccaguacuucaagaaaa

SEQ ID NO: 173308 - RNA, 21 nt, Human herpesvirus 6B
ccaguacuucaagaaaaucgc

SEQ ID NO: 173309 - RNA, 18 nt, Human herpesvirus 6B
ccagcacagcaugcauuu

SEQ ID NO: 173310 - RNA, 17 nt, Human herpesvirus 6B
ccagcaccuuagcucua

SEQ ID NO: 173311 - RNA, 19 nt, Human herpesvirus 6B
ccauaaacggagacacgcc

SEQ ID NO: 173312 - RNA, 16 nt, Human herpesvirus 6B
ccauaaagaacacagg

SEQ ID NO: 173313 - RNA, 19 nt, Human herpesvirus 6B
ccauccgcuaagagauuua

SEQ ID NO: 173314 - RNA, 14 nt, Human herpesvirus 6B
ccaucccuaucucu

SEQ ID NO: 173315 - RNA, 14 nt, Human herpesvirus 6B
ccaucuucagcuca

SEQ ID NO: 173316 - RNA, 20 nt, Human herpesvirus 6B
ccaucuucagcucagacaaa

SEQ ID NO: 173317 - RNA, 15 nt, Human herpesvirus 6B
ccaugacugugaggu

SEQ ID NO: 173318 - RNA, 22 nt, Human herpesvirus 6B
ccacauuuccuucaaagugaau

SEQ ID NO: 173319 - RNA, 15 nt, Human herpesvirus 6B
ccacaucuaugaugc

SEQ ID NO: 173320 - RNA, 22 nt, Human herpesvirus 6B
ccagcaaguucaucagccauuu

SEQ ID NO: 173321 - RNA, 23 nt, Human herpesvirus 6B
ccagauucggcugcuuauaugca

SEQ ID NO: 173322 - RNA, 19 nt, Human herpesvirus 6B
ccagaucgaagaaaaugaa

SEQ ID NO: 173323 - RNA, 23 nt, Human herpesvirus 6B
ccagagguagcccgagaccuaau

SEQ ID NO: 173324 - RNA, 14 nt, Human herpesvirus 6B
ccaaugauucuuaa

SEQ ID NO: 173325 - RNA, 18 nt, Human herpesvirus 6B
ccaaugaucacacacgcg

SEQ ID NO: 173326 - RNA, 14 nt, Human herpesvirus 6B
ccaaucugugcaac

SEQ ID NO: 173327 - RNA, 13 nt, Human herpesvirus 6B
ccaaugaauacuu

SEQ ID NO: 173328 - RNA, 19 nt, Human herpesvirus 6B
ccaauuaaaguuuucauaa

SEQ ID NO: 173329 - RNA, 19 nt, Human herpesvirus 6B
ccaauuacucaacauuaaa

SEQ ID NO: 173330 - RNA, 20 nt, Human herpesvirus 6B
ccaauuuaauauaucuugaa

SEQ ID NO: 173331 - RNA, 22 nt, Human herpesvirus 6B
ccaauaauugaugggauguaau

SEQ ID NO: 173332 - RNA, 16 nt, Human herpesvirus 6B
ccaacgcacaugcuaa

SEQ ID NO: 173333 - RNA, 19 nt, Human herpesvirus 6B
ccaacggagaaaacuauau

SEQ ID NO: 173334 - RNA, 14 nt, Human herpesvirus 6B
ccaaccagcaaguu

SEQ ID NO: 173335 - RNA, 22 nt, Human herpesvirus 6B
cauuuccguagcggccgcaaaa

SEQ ID NO: 173336 - RNA, 20 nt, Human herpesvirus 6B
cauuuauuauaagcaaacau

SEQ ID NO: 173337 - RNA, 16 nt, Human herpesvirus 6B
cauuucuucgagcuuu

SEQ ID NO: 173338 - RNA, 16 nt, Human herpesvirus 6B
cauuucucuacaugcc

SEQ ID NO: 173339 - RNA, 19 nt, Human herpesvirus 6B
cauuucucuacaugccaca

SEQ ID NO: 173340 - RNA, 16 nt, Human herpesvirus 6B
cauuucuuacauaaau

SEQ ID NO: 173341 - RNA, 19 nt, Human herpesvirus 6B
cauuuguuuuuaaagcaca

SEQ ID NO: 173342 - RNA, 14 nt, Human herpesvirus 6B
cauuuaccagagau

SEQ ID NO: 173343 - RNA, 20 nt, Human herpesvirus 6B
cauuuacaaaacaaauaucg

SEQ ID NO: 173344 - RNA, 19 nt, Human herpesvirus 6B
cauggcccuacuacagugg

SEQ ID NO: 173345 - RNA, 17 nt, Human herpesvirus 6B
caugccauugaauacac

SEQ ID NO: 173346 - RNA, 18 nt, Human herpesvirus 6B
caugaaaaucauuaccag

SEQ ID NO: 173347 - RNA, 12 nt, Human herpesvirus 6B
caugaacucuca

SEQ ID NO: 173348 - RNA, 16 nt, Human herpesvirus 6B
caugcaauaggccaua

SEQ ID NO: 173349 - RNA, 21 nt, Human herpesvirus 6B
caugcgaauuaaaacucuaaa

SEQ ID NO: 173350 - RNA, 16 nt, Human herpesvirus 6B
ccauuucgccaaaaau

SEQ ID NO: 173351 - RNA, 16 nt, Human herpesvirus 6B
cccaagugaaauucga

SEQ ID NO: 173352 - RNA, 21 nt, Human herpesvirus 6B
cccaccgauguuaaaguugug

SEQ ID NO: 173353 - RNA, 15 nt, Human herpesvirus 6B
cccacagauugcaua

SEQ ID NO: 173354 - RNA, 23 nt, Human herpesvirus 6B
ccauggcgagaaacgcccugaag

SEQ ID NO: 173355 - RNA, 12 nt, Human herpesvirus 6B
ccauuaaauccu

SEQ ID NO: 173356 - RNA, 13 nt, Human herpesvirus 6B
ccauuaaauccua

SEQ ID NO: 173357 - RNA, 14 nt, Human herpesvirus 6B
ccauguugcuuaua

SEQ ID NO: 173358 - RNA, 23 nt, Human herpesvirus 6B
ccauuguauuggauauguguuaa

SEQ ID NO: 173359 - RNA, 13 nt, Human herpesvirus 6B
cccgcuguguuua

SEQ ID NO: 173360 - RNA, 19 nt, Human herpesvirus 6B
cccccucccccguuuuaua

SEQ ID NO: 173361 - RNA, 15 nt, Human herpesvirus 6B
cccagcauuuucaaa

SEQ ID NO: 173362 - RNA, 21 nt, Human herpesvirus 6B
ccccagaaggauccauucuag

SEQ ID NO: 173363 - RNA, 16 nt, Human herpesvirus 6B
cccacuugaaccaagu

SEQ ID NO: 173364 - RNA, 16 nt, Human herpesvirus 6B
ccggcgaacugagaua

SEQ ID NO: 173365 - RNA, 14 nt, Human herpesvirus 6B
ccgggauguagcaa

SEQ ID NO: 173366 - RNA, 19 nt, Human herpesvirus 6B
ccgugauguuuuccuuuau

SEQ ID NO: 173367 - RNA, 15 nt, Human herpesvirus 6B
ccgugacacacagaa

SEQ ID NO: 173368 - RNA, 21 nt, Human herpesvirus 6B
ccgugagugcuauuugcauua

SEQ ID NO: 173369 - RNA, 14 nt, Human herpesvirus 6B
cccuauauagcuau

SEQ ID NO: 173370 - RNA, 19 nt, Human herpesvirus 6B
ccgagacuccuacaaugcg

SEQ ID NO: 173371 - RNA, 20 nt, Human herpesvirus 6B
cccuaaugugauuaugccaa

SEQ ID NO: 173372 - RNA, 14 nt, Human herpesvirus 6B
cccuacuacagugg

SEQ ID NO: 173373 - RNA, 15 nt, Human herpesvirus 6B
cccuacuacagugga

SEQ ID NO: 173374 - RNA, 18 nt, Human herpesvirus 6B
cccuacuacaguggaugu

SEQ ID NO: 173375 - RNA, 21 nt, Human herpesvirus 6B
ccgauugcaccaucuguugau

SEQ ID NO: 173376 - RNA, 14 nt, Human herpesvirus 6B
ccgauuguccuuca

SEQ ID NO: 173377 - RNA, 23 nt, Human herpesvirus 6B
ccgauguggaacggaaacaugaa

SEQ ID NO: 173378 - RNA, 14 nt, Human herpesvirus 6B
ccgaugaugaucug

SEQ ID NO: 173379 - RNA, 16 nt, Human herpesvirus 6B
caggcaauaaucauua

SEQ ID NO: 173380 - RNA, 18 nt, Human herpesvirus 6B
caggauuccccucauaca

SEQ ID NO: 173381 - RNA, 22 nt, Human herpesvirus 6B
caggauuccccucauacaucca

SEQ ID NO: 173382 - RNA, 17 nt, Human herpesvirus 6B
caggauuauaaaaacac

SEQ ID NO: 173383 - RNA, 19 nt, Human herpesvirus 6B
caggauuauaaaaacacac

SEQ ID NO: 173384 - RNA, 22 nt, Human herpesvirus 6B
caggaaaauguguucuuacaau

SEQ ID NO: 173385 - RNA, 19 nt, Human herpesvirus 6B
caggccacauuagcugcua

SEQ ID NO: 173386 - RNA, 20 nt, Human herpesvirus 6B
cagggaugugguaugagcug

SEQ ID NO: 173387 - RNA, 13 nt, Human herpesvirus 6B
cagggcauucaca

SEQ ID NO: 173388 - RNA, 24 nt, Human herpesvirus 6B
cagcgcuugauauaauccugucuc

SEQ ID NO: 173389 - RNA, 23 nt, Human herpesvirus 6B
cagcgcauccuuaaaugacacag

SEQ ID NO: 173390 - RNA, 19 nt, Human herpesvirus 6B
cagcuaagauuaacaacug

SEQ ID NO: 173391 - RNA, 16 nt, Human herpesvirus 6B
cagcucaccaccaucu

SEQ ID NO: 173392 - RNA, 19 nt, Human herpesvirus 6B
cagcucaccaccaucuaau

SEQ ID NO: 173393 - RNA, 15 nt, Human herpesvirus 6B
cagcuuuauucccau

SEQ ID NO: 173394 - RNA, 22 nt, Human herpesvirus 6B
cagcuuucuugaagaugugaua

SEQ ID NO: 173395 - RNA, 23 nt, Human herpesvirus 6B
cagcuuugacgguuuauaugcag

SEQ ID NO: 173396 - RNA, 17 nt, Human herpesvirus 6B
cagauggcacugaauca

SEQ ID NO: 173397 - RNA, 20 nt, Human herpesvirus 6B
cagauggcacugaaucagaa

SEQ ID NO: 173398 - RNA, 18 nt, Human herpesvirus 6B
cagccagauacugcacaa

SEQ ID NO: 173399 - RNA, 17 nt, Human herpesvirus 6B
cagaucuagaucuggau

SEQ ID NO: 173400 - RNA, 22 nt, Human herpesvirus 6B
cagauccccgccugcagcgaua

SEQ ID NO: 173401 - RNA, 17 nt, Human herpesvirus 6B
cagacuaauccauauga

SEQ ID NO: 173402 - RNA, 15 nt, Human herpesvirus 6B
cagaggugcugauga

SEQ ID NO: 173403 - RNA, 16 nt, Human herpesvirus 6B
cagagugcaucuuuaa

SEQ ID NO: 173404 - RNA, 18 nt, Human herpesvirus 6B
cagauaaacaaaaaucca

SEQ ID NO: 173405 - RNA, 16 nt, Human herpesvirus 6B
cagacgcugaaaucau

SEQ ID NO: 173406 - RNA, 21 nt, Human herpesvirus 6B
cagacgcugaaaucauuucaa

SEQ ID NO: 173407 - RNA, 17 nt, Human herpesvirus 6B
cagaccuucuuuuagua

SEQ ID NO: 173408 - RNA, 13 nt, Human herpesvirus 6B
cagaccauaaaaa

SEQ ID NO: 173409 - RNA, 23 nt, Human herpesvirus 6B
cagacauugcuuucucuuuuuaa

SEQ ID NO: 173410 - RNA, 20 nt, Human herpesvirus 6B
cagaauuuuguguccuuaaa

SEQ ID NO: 173411 - RNA, 14 nt, Human herpesvirus 6B
cagacaaauggaaa

SEQ ID NO: 173412 - RNA, 21 nt, Human herpesvirus 6B
cagaauaaaaauuucagccga

SEQ ID NO: 173413 - RNA, 20 nt, Human herpesvirus 6B
cagaagagaugaaagacaga

SEQ ID NO: 173414 - RNA, 20 nt, Human herpesvirus 6B
cagaaccaucuuuucaauua

SEQ ID NO: 173415 - RNA, 17 nt, Human herpesvirus 6B
caccaacgucaugcaaa

SEQ ID NO: 173416 - RNA, 21 nt, Human herpesvirus 6B
caccaagaaaaaacacaaaaa

SEQ ID NO: 173417 - RNA, 15 nt, Human herpesvirus 6B
cacaugccaugcaau

SEQ ID NO: 173418 - RNA, 16 nt, Human herpesvirus 6B
cacaugccaugcaaua

SEQ ID NO: 173419 - RNA, 16 nt, Human herpesvirus 6B
caccaaugaucacaca

SEQ ID NO: 173420 - RNA, 15 nt, Human herpesvirus 6B
caguuccuguuuuuc

SEQ ID NO: 173421 - RNA, 21 nt, Human herpesvirus 6B
caguuauacuggcaaagcaaa

SEQ ID NO: 173422 - RNA, 21 nt, Human herpesvirus 6B
cagucucagcaaucaccauca

SEQ ID NO: 173423 - RNA, 20 nt, Human herpesvirus 6B
cagucuucaauaaaaacuca

SEQ ID NO: 173424 - RNA, 15 nt, Human herpesvirus 6B
cagucuucuggauac

SEQ ID NO: 173425 - RNA, 22 nt, Human herpesvirus 6B
caguccagaaguccuucaugau

SEQ ID NO: 173426 - RNA, 18 nt, Human herpesvirus 6B
caguucuuacauauuugg

SEQ ID NO: 173427 - RNA, 16 nt, Human herpesvirus 6B
caguuucuguuuuucu

SEQ ID NO: 173428 - RNA, 14 nt, Human herpesvirus 6B
caguugucuggcag

SEQ ID NO: 173429 - RNA, 14 nt, Human herpesvirus 6B
cauaaaacugccaa

SEQ ID NO: 173430 - RNA, 20 nt, Human herpesvirus 6B
caguuuuuaucggaacacau

SEQ ID NO: 173431 - RNA, 18 nt, Human herpesvirus 6B
cauaaaaacgacauccau

SEQ ID NO: 173432 - RNA, 17 nt, Human herpesvirus 6B
cauacaauauuuccaua

SEQ ID NO: 173433 - RNA, 14 nt, Human herpesvirus 6B
caguauuaaugucu

SEQ ID NO: 173434 - RNA, 12 nt, Human herpesvirus 6B
caguaugccaua

SEQ ID NO: 173435 - RNA, 23 nt, Human herpesvirus 6B
caguaugccauaaagaacacagg

SEQ ID NO: 173436 - RNA, 14 nt, Human herpesvirus 6B
cagucaaugcaauu

SEQ ID NO: 173437 - RNA, 17 nt, Human herpesvirus 6B
cagucaaugcaauucca

SEQ ID NO: 173438 - RNA, 22 nt, Human herpesvirus 6B
caguauagacauuuugugauuc

SEQ ID NO: 173439 - RNA, 13 nt, Human herpesvirus 6B
caggggcuuuuca

SEQ ID NO: 173440 - RNA, 22 nt, Human herpesvirus 6B
caggugucucaaccuucauuaa

SEQ ID NO: 173441 - RNA, 12 nt, Human herpesvirus 6B
caucuguugauc

SEQ ID NO: 173442 - RNA, 13 nt, Human herpesvirus 6B
caucugcaaaaac

SEQ ID NO: 173443 - RNA, 19 nt, Human herpesvirus 6B
cauccuuaaaugacacaga

SEQ ID NO: 173444 - RNA, 17 nt, Human herpesvirus 6B
caucgacgucccauuca

SEQ ID NO: 173445 - RNA, 13 nt, Human herpesvirus 6B
caucgacuucaaa

SEQ ID NO: 173446 - RNA, 19 nt, Human herpesvirus 6B
cauccguugagugugcauc

SEQ ID NO: 173447 - RNA, 16 nt, Human herpesvirus 6B
cauccuaauaagacag

SEQ ID NO: 173448 - RNA, 17 nt, Human herpesvirus 6B
cauccuaauaagacaga

SEQ ID NO: 173449 - RNA, 20 nt, Human herpesvirus 6B
cauccuaauaagacagaaga

SEQ ID NO: 173450 - RNA, 19 nt, Human herpesvirus 6B
caucccuuaaaaaaacaca

SEQ ID NO: 173451 - RNA, 21 nt, Human herpesvirus 6B
caucccuaugucaaugugaau

SEQ ID NO: 173452 - RNA, 20 nt, Human herpesvirus 6B
cauccaaaauacacuaacag

SEQ ID NO: 173453 - RNA, 17 nt, Human herpesvirus 6B
cauccaaauacacuuuc

SEQ ID NO: 173454 - RNA, 18 nt, Human herpesvirus 6B
cauccaaauacacuuuca

SEQ ID NO: 173455 - RNA, 11 nt, Human herpesvirus 6B
cauauaagucu

SEQ ID NO: 173456 - RNA, 19 nt, Human herpesvirus 6B
cauacggucgaaugagcuu

SEQ ID NO: 173457 - RNA, 17 nt, Human herpesvirus 6B
cauauauuggcacgugu

SEQ ID NO: 173458 - RNA, 15 nt, Human herpesvirus 6B
cauaucacagcauuu

SEQ ID NO: 173459 - RNA, 16 nt, Human herpesvirus 6B
cauaucacagcauuuc

SEQ ID NO: 173460 - RNA, 17 nt, Human herpesvirus 6B
caucagccauuucgcca

SEQ ID NO: 173461 - RNA, 20 nt, Human herpesvirus 6B
caucagaugaauugugcgug

SEQ ID NO: 173462 - RNA, 15 nt, Human herpesvirus 6B
caucaugugugccua

SEQ ID NO: 173463 - RNA, 19 nt, Human herpesvirus 6B
auuuugagacuuagaccaa

SEQ ID NO: 173464 - RNA, 19 nt, Human herpesvirus 6B
auuuuauugacugugaaaa

SEQ ID NO: 173465 - RNA, 19 nt, Human herpesvirus 6B
auuuuauucaaccaaucua

SEQ ID NO: 173466 - RNA, 17 nt, Human herpesvirus 6B
auuuuagcuauccauuu

SEQ ID NO: 173467 - RNA, 20 nt, Human herpesvirus 6B
auuuuagcuauccauuuuau

SEQ ID NO: 173468 - RNA, 15 nt, Human herpesvirus 6B
auuuuaguuacacau

SEQ ID NO: 173469 - RNA, 19 nt, Human herpesvirus 6B
auuuuagaggagaaaugau

SEQ ID NO: 173470 - RNA, 23 nt, Human herpesvirus 6B
auuuuguuucgucgcuaaauuga

SEQ ID NO: 173471 - RNA, 14 nt, Human herpesvirus 6B
auuuugucagucaa

SEQ ID NO: 173472 - RNA, 20 nt, Human herpesvirus 6B
auuuugggugugacuuauau

SEQ ID NO: 173473 - RNA, 16 nt, Human herpesvirus 6B
caaaaaaauacaguau

SEQ ID NO: 173474 - RNA, 20 nt, Human herpesvirus 6B
caaaaaaauacaguauauaa

SEQ ID NO: 173475 - RNA, 13 nt, Human herpesvirus 6B
auuucuuacauaa

SEQ ID NO: 173476 - RNA, 18 nt, Human herpesvirus 6B
auuucucugucgcuguga

SEQ ID NO: 173477 - RNA, 19 nt, Human herpesvirus 6B
auuucucugucgcugugag

SEQ ID NO: 173478 - RNA, 13 nt, Human herpesvirus 6B
auuucgacaaucc

SEQ ID NO: 173479 - RNA, 16 nt, Human herpesvirus 6B
auuucuccacacuguu

SEQ ID NO: 173480 - RNA, 15 nt, Human herpesvirus 6B
auuucucgucuacuc

SEQ ID NO: 173481 - RNA, 18 nt, Human herpesvirus 6B
auuuccauaaguuaauuc

SEQ ID NO: 173482 - RNA, 23 nt, Human herpesvirus 6B
auuuccguauucuugagcuugua

SEQ ID NO: 173483 - RNA, 17 nt, Human herpesvirus 6B
auuuccuuugugugaua

SEQ ID NO: 173484 - RNA, 21 nt, Human herpesvirus 6B
auuucgguuuugucguuugua

SEQ ID NO: 173485 - RNA, 21 nt, Human herpesvirus 6B
auuucuaaacacgaaaugaac

SEQ ID NO: 173486 - RNA, 17 nt, Human herpesvirus 6B
auugauaguacuuacgu

SEQ ID NO: 173487 - RNA, 11 nt, Human herpesvirus 6B
auugcaaucac

SEQ ID NO: 173488 - RNA, 18 nt, Human herpesvirus 6B
auugcaucgcuggaguua

SEQ ID NO: 173489 - RNA, 16 nt, Human herpesvirus 6B
auugccgcuucuaugu

SEQ ID NO: 173490 - RNA, 21 nt, Human herpesvirus 6B
caaaagauuauggcaacauac

SEQ ID NO: 173491 - RNA, 22 nt, Human herpesvirus 6B
caaaagauuauggcaacauacc

SEQ ID NO: 173492 - RNA, 13 nt, Human herpesvirus 6B
caaaagcaugaaa

SEQ ID NO: 173493 - RNA, 10 nt, Human herpesvirus 6B
caaaagccag

SEQ ID NO: 173494 - RNA, 23 nt, Human herpesvirus 6B
caaaaguagcacggggauuuagu

SEQ ID NO: 173495 - RNA, 23 nt, Human herpesvirus 6B
caaaagacuauguaguacacaga

SEQ ID NO: 173496 - RNA, 12 nt, Human herpesvirus 6B
caaaacuguuaa

SEQ ID NO: 173497 - RNA, 15 nt, Human herpesvirus 6B
caaaacucuauuccc

SEQ ID NO: 173498 - RNA, 14 nt, Human herpesvirus 6B
caaaaucugcuaac

SEQ ID NO: 173499 - RNA, 19 nt, Human herpesvirus 6B
caaagacaucgauuuguug

SEQ ID NO: 173500 - RNA, 17 nt, Human herpesvirus 6B
caaagagaucaguacau

SEQ ID NO: 173501 - RNA, 19 nt, Human herpesvirus 6B
caaagagaucaguacauag

SEQ ID NO: 173502 - RNA, 18 nt, Human herpesvirus 6B
caaagauagacagugaaa

SEQ ID NO: 173503 - RNA, 15 nt, Human herpesvirus 6B
caaagaaaguuucgu

SEQ ID NO: 173504 - RNA, 16 nt, Human herpesvirus 6B
caaagaaacaguaaau

SEQ ID NO: 173505 - RNA, 19 nt, Human herpesvirus 6B
caaagaaaagauguacgau

SEQ ID NO: 173506 - RNA, 17 nt, Human herpesvirus 6B
caaacuuuuuuugaagg

SEQ ID NO: 173507 - RNA, 21 nt, Human herpesvirus 6B
caaagcacccugcacaaacua

SEQ ID NO: 173508 - RNA, 21 nt, Human herpesvirus 6B
caaagcgucucgugguacaau

SEQ ID NO: 173509 - RNA, 19 nt, Human herpesvirus 6B
caaagaugucggaggguuu

SEQ ID NO: 173510 - RNA, 21 nt, Human herpesvirus 6B
caaaggaauuuauuuucaaua

SEQ ID NO: 173511 - RNA, 20 nt, Human herpesvirus 6B
caaagcuauucuaaauacca

SEQ ID NO: 173512 - RNA, 17 nt, Human herpesvirus 6B
caaaguuuaaguucuca

SEQ ID NO: 173513 - RNA, 16 nt, Human herpesvirus 6B
caaauaccuaauucca

SEQ ID NO: 173514 - RNA, 23 nt, Human herpesvirus 6B
caaauacuauuuuaguuacacau

SEQ ID NO: 173515 - RNA, 22 nt, Human herpesvirus 6B
caaauacucgcaugucgauaaa

SEQ ID NO: 173516 - RNA, 20 nt, Human herpesvirus 6B
caaauacacuuucauaggaa

SEQ ID NO: 173517 - RNA, 12 nt, Human herpesvirus 6B
caacauacacac

SEQ ID NO: 173518 - RNA, 18 nt, Human herpesvirus 6B
caacauuaaaaaaauagc

SEQ ID NO: 173519 - RNA, 20 nt, Human herpesvirus 6B
caacaugacuggaaucacaa

SEQ ID NO: 173520 - RNA, 17 nt, Human herpesvirus 6B
caauaucaccuuacaaa

SEQ ID NO: 173521 - RNA, 19 nt, Human herpesvirus 6B
caauauuuccauaaguuaa

SEQ ID NO: 173522 - RNA, 22 nt, Human herpesvirus 6B
caauagaugaucagcauucacu

SEQ ID NO: 173523 - RNA, 17 nt, Human herpesvirus 6B
caauaguagauuuucau

SEQ ID NO: 173524 - RNA, 14 nt, Human herpesvirus 6B
caauaaaaacucaa

SEQ ID NO: 173525 - RNA, 17 nt, Human herpesvirus 6B
caauuuuauucaaccaa

SEQ ID NO: 173526 - RNA, 22 nt, Human herpesvirus 6B
caauuuuauucaaccaaucuaa

SEQ ID NO: 173527 - RNA, 21 nt, Human herpesvirus 6B
caauuucugacucucuuucag

SEQ ID NO: 173528 - RNA, 23 nt, Human herpesvirus 6B
caauuguauucuuggaaaaccuu

SEQ ID NO: 173529 - RNA, 16 nt, Human herpesvirus 6B
caauuuaugucauuuc

SEQ ID NO: 173530 - RNA, 14 nt, Human herpesvirus 6B
caauuccugugaug

SEQ ID NO: 173531 - RNA, 20 nt, Human herpesvirus 6B
caauucuuauuuaccuuccu

SEQ ID NO: 173532 - RNA, 18 nt, Human herpesvirus 6B
caauucaucaaauccucu

SEQ ID NO: 173533 - RNA, 14 nt, Human herpesvirus 6B
caauuauguguuaa

SEQ ID NO: 173534 - RNA, 23 nt, Human herpesvirus 6B
caaucauguuuauugucaaauag

SEQ ID NO: 173535 - RNA, 18 nt, Human herpesvirus 6B
caaucauuaacauacaga

SEQ ID NO: 173536 - RNA, 21 nt, Human herpesvirus 6B
caaucauuaacauacagaugu

SEQ ID NO: 173537 - RNA, 13 nt, Human herpesvirus 6B
cacagauugcaua

SEQ ID NO: 173538 - RNA, 22 nt, Human herpesvirus 6B
cacagaaaaaaaaaaacaaaga

SEQ ID NO: 173539 - RNA, 17 nt, Human herpesvirus 6B
cacagcaugaacucuca

SEQ ID NO: 173540 - RNA, 15 nt, Human herpesvirus 6B
cacagagaaaaaaca

SEQ ID NO: 173541 - RNA, 19 nt, Human herpesvirus 6B
cacagagaaaaaacaaagc

SEQ ID NO: 173542 - RNA, 15 nt, Human herpesvirus 6B
cacagaaucgagauc

SEQ ID NO: 173543 - RNA, 19 nt, Human herpesvirus 6B
cacagaaucgcaaacaguc

SEQ ID NO: 173544 - RNA, 14 nt, Human herpesvirus 6B
cacacucugaacua

SEQ ID NO: 173545 - RNA, 12 nt, Human herpesvirus 6B
cacaauacacag

SEQ ID NO: 173546 - RNA, 16 nt, Human herpesvirus 6B
cacaauacacaguaga

SEQ ID NO: 173547 - RNA, 14 nt, Human herpesvirus 6B
cacaagaacagaga

SEQ ID NO: 173548 - RNA, 16 nt, Human herpesvirus 6B
cacaaggaaugugcag

SEQ ID NO: 173549 - RNA, 19 nt, Human herpesvirus 6B
cacaacauaaaaaaacaca

SEQ ID NO: 173550 - RNA, 20 nt, Human herpesvirus 6B
cacaacuuaaccgcaaaaaa

SEQ ID NO: 173551 - RNA, 12 nt, Human herpesvirus 6B
cacaaacuguca

SEQ ID NO: 173552 - RNA, 20 nt, Human herpesvirus 6B
cacaaaguuuaaguucucac

SEQ ID NO: 173553 - RNA, 17 nt, Human herpesvirus 6B
cacaaaaugauuaguua

SEQ ID NO: 173554 - RNA, 15 nt, Human herpesvirus 6B
cacaaaaugauugca

SEQ ID NO: 173555 - RNA, 18 nt, Human herpesvirus 6B
caaguuagaaauuacaca

SEQ ID NO: 173556 - RNA, 12 nt, Human herpesvirus 6B
caagacuacaga

SEQ ID NO: 173557 - RNA, 16 nt, Human herpesvirus 6B
caagacuuaauaucug

SEQ ID NO: 173558 - RNA, 13 nt, Human herpesvirus 6B
caagacgaucuca

SEQ ID NO: 173559 - RNA, 18 nt, Human herpesvirus 6B
caagaaucguuaaaugag

SEQ ID NO: 173560 - RNA, 14 nt, Human herpesvirus 6B
caagaauguaaaag

SEQ ID NO: 173561 - RNA, 15 nt, Human herpesvirus 6B
caagaaagguauuga

SEQ ID NO: 173562 - RNA, 16 nt, Human herpesvirus 6B
caaccccccacuacua

SEQ ID NO: 173563 - RNA, 15 nt, Human herpesvirus 6B
caaccgcaguuccug

SEQ ID NO: 173564 - RNA, 13 nt, Human herpesvirus 6B
caacgaaaaagcu

SEQ ID NO: 173565 - RNA, 18 nt, Human herpesvirus 6B
caacgaggcccacuucac

SEQ ID NO: 173566 - RNA, 17 nt, Human herpesvirus 6B
caacggaaagcaucuca

SEQ ID NO: 173567 - RNA, 18 nt, Human herpesvirus 6B
caacuaaaucaugucuua

SEQ ID NO: 173568 - RNA, 21 nt, Human herpesvirus 6B
caacuuaauaaaugcuaccca

SEQ ID NO: 173569 - RNA, 15 nt, Human herpesvirus 6B
caacuauacuuaacu

SEQ ID NO: 173570 - RNA, 22 nt, Human herpesvirus 6B
caacucacccgacaugcuucac

SEQ ID NO: 173571 - RNA, 23 nt, Human herpesvirus 6B
caacucacccgacaugcuucaca

SEQ ID NO: 173572 - RNA, 16 nt, Human herpesvirus 6B
auucagucugcuaaaa

SEQ ID NO: 173573 - RNA, 21 nt, Human herpesvirus 6B
auucaucaaauccucuacgua

SEQ ID NO: 173574 - RNA, 23 nt, Human herpesvirus 6B
auuauuuguuuaaugcauucaca

SEQ ID NO: 173575 - RNA, 15 nt, Human herpesvirus 6B
auuauugugacaagg

SEQ ID NO: 173576 - RNA, 14 nt, Human herpesvirus 6B
auucaauacuacgu

SEQ ID NO: 173577 - RNA, 16 nt, Human herpesvirus 6B
auucaagacgaucuca

SEQ ID NO: 173578 - RNA, 15 nt, Human herpesvirus 6B
auucaacauucccac

SEQ ID NO: 173579 - RNA, 17 nt, Human herpesvirus 6B
auucaaccaaucuaaga

SEQ ID NO: 173580 - RNA, 15 nt, Human herpesvirus 6B
auugaccagccagau

SEQ ID NO: 173581 - RNA, 15 nt, Human herpesvirus 6B
auugaauacagcugc

SEQ ID NO: 173582 - RNA, 15 nt, Human herpesvirus 6B
auucuuaccaagaaa

SEQ ID NO: 173583 - RNA, 17 nt, Human herpesvirus 6B
auucuuauguaaacuaa

SEQ ID NO: 173584 - RNA, 20 nt, Human herpesvirus 6B
auucuuauguaaacuaaaua

SEQ ID NO: 173585 - RNA, 18 nt, Human herpesvirus 6B
auucuuaaauucaauuua

SEQ ID NO: 173586 - RNA, 20 nt, Human herpesvirus 6B
auucugcguguuaaugaaug

SEQ ID NO: 173587 - RNA, 21 nt, Human herpesvirus 6B
auuaaaugugaacaguauaaa

SEQ ID NO: 173588 - RNA, 22 nt, Human herpesvirus 6B
auuaaauuacaugaaaacauuc

SEQ ID NO: 173589 - RNA, 21 nt, Human herpesvirus 6B
auuaaauuguuuuaaacauuc

SEQ ID NO: 173590 - RNA, 22 nt, Human herpesvirus 6B
auuaaauuguuuuaaacauucu

SEQ ID NO: 173591 - RNA, 14 nt, Human herpesvirus 6B
auuaacaauucucu

SEQ ID NO: 173592 - RNA, 17 nt, Human herpesvirus 6B
auuaacaauucucucaa

SEQ ID NO: 173593 - RNA, 13 nt, Human herpesvirus 6B
auuaacacauaca

SEQ ID NO: 173594 - RNA, 16 nt, Human herpesvirus 6B
auguuuuccuuuauga

SEQ ID NO: 173595 - RNA, 18 nt, Human herpesvirus 6B
auuaaacuaacaugacaa

SEQ ID NO: 173596 - RNA, 20 nt, Human herpesvirus 6B
auguuuuugaugugcuacgu

SEQ ID NO: 173597 - RNA, 14 nt, Human herpesvirus 6B
auuauagaugacug

SEQ ID NO: 173598 - RNA, 14 nt, Human herpesvirus 6B
auuaaugucuucga

SEQ ID NO: 173599 - RNA, 17 nt, Human herpesvirus 6B
auuauucugguaaaaau

SEQ ID NO: 173600 - RNA, 13 nt, Human herpesvirus 6B
auuauugauagca

SEQ ID NO: 173601 - RNA, 20 nt, Human herpesvirus 6B
auuaugugauucggaaaaua

SEQ ID NO: 173602 - RNA, 15 nt, Human herpesvirus 6B
auuauuaacaaugaa

SEQ ID NO: 173603 - RNA, 20 nt, Human herpesvirus 6B
auuauguaaaaccucagcaa

SEQ ID NO: 173604 - RNA, 18 nt, Human herpesvirus 6B
auuauguaaauaugcuua

SEQ ID NO: 173605 - RNA, 15 nt, Human herpesvirus 6B
auuaugccgucuuau

SEQ ID NO: 173606 - RNA, 18 nt, Human herpesvirus 6B
auuaugcgcaugaaaaua

SEQ ID NO: 173607 - RNA, 19 nt, Human herpesvirus 6B
auuaugcgcaugaaaauau

SEQ ID NO: 173608 - RNA, 16 nt, Human herpesvirus 6B
auuaugacugacaagg

SEQ ID NO: 173609 - RNA, 17 nt, Human herpesvirus 6B
auuaugacugacaaggu

SEQ ID NO: 173610 - RNA, 17 nt, Human herpesvirus 6B
auggggaagaucuauga

SEQ ID NO: 173611 - RNA, 20 nt, Human herpesvirus 6B
auguagacgugcugucugca

SEQ ID NO: 173612 - RNA, 21 nt, Human herpesvirus 6B
auguagacgugcugucugcag

SEQ ID NO: 173613 - RNA, 20 nt, Human herpesvirus 6B
auguaugaacaggugcuucu

SEQ ID NO: 173614 - RNA, 22 nt, Human herpesvirus 6B
augucaagaguuuuccuugaca

SEQ ID NO: 173615 - RNA, 14 nt, Human herpesvirus 6B
augucaaugugaau

SEQ ID NO: 173616 - RNA, 18 nt, Human herpesvirus 6B
augucaaugugaauauua

SEQ ID NO: 173617 - RNA, 16 nt, Human herpesvirus 6B
auguucuugacaaaua

SEQ ID NO: 173618 - RNA, 19 nt, Human herpesvirus 6B
auguugugaucaaguggug

SEQ ID NO: 173619 - RNA, 22 nt, Human herpesvirus 6B
auguucucucacgcgccaacgc

SEQ ID NO: 173620 - RNA, 16 nt, Human herpesvirus 6B
auguuugugacucuga

SEQ ID NO: 173621 - RNA, 21 nt, Human herpesvirus 6B
auguuugggagaucugaggac

SEQ ID NO: 173622 - RNA, 17 nt, Human herpesvirus 6B
auguuuacugcaugcua

SEQ ID NO: 173623 - RNA, 20 nt, Human herpesvirus 6B
auguuuccaugacugugagg

SEQ ID NO: 173624 - RNA, 21 nt, Human herpesvirus 6B
auguuuccaugacugugaggu

SEQ ID NO: 173625 - RNA, 20 nt, Human herpesvirus 6B
auguuucuguaugaauccag

SEQ ID NO: 173626 - RNA, 15 nt, Human herpesvirus 6B
auggacgucauguac

SEQ ID NO: 173627 - RNA, 16 nt, Human herpesvirus 6B
augcuuugguagugag

SEQ ID NO: 173628 - RNA, 14 nt, Human herpesvirus 6B
auggaaaacugcag

SEQ ID NO: 173629 - RNA, 17 nt, Human herpesvirus 6B
auggaaaacugcagauu

SEQ ID NO: 173630 - RNA, 13 nt, Human herpesvirus 6B
auggcgcacgcua

SEQ ID NO: 173631 - RNA, 19 nt, Human herpesvirus 6B
augggaguaauuauuguga

SEQ ID NO: 173632 - RNA, 22 nt, Human herpesvirus 6B
augggaguaauuauugugacaa

SEQ ID NO: 173633 - RNA, 16 nt, Human herpesvirus 6B
auggcaacauacccuu

SEQ ID NO: 173634 - RNA, 23 nt, Human herpesvirus 6B
augcccacaccaucuucagcuca

SEQ ID NO: 173635 - RNA, 14 nt, Human herpesvirus 6B
augccaugcaauag

SEQ ID NO: 173636 - RNA, 20 nt, Human herpesvirus 6B
augccaugcaauaggccaua

SEQ ID NO: 173637 - RNA, 22 nt, Human herpesvirus 6B
augccauugaauacacgugugg

SEQ ID NO: 173638 - RNA, 14 nt, Human herpesvirus 6B
augccauaaucucu

SEQ ID NO: 173639 - RNA, 17 nt, Human herpesvirus 6B
augccacagaacaccug

SEQ ID NO: 173640 - RNA, 20 nt, Human herpesvirus 6B
augccacagaacaccugcuu

SEQ ID NO: 173641 - RNA, 14 nt, Human herpesvirus 6B
augccgacuguuuc

SEQ ID NO: 173642 - RNA, 18 nt, Human herpesvirus 6B
augccuugauguuuccug

SEQ ID NO: 173643 - RNA, 16 nt, Human herpesvirus 6B
augccuguagggaugu

SEQ ID NO: 173644 - RNA, 19 nt, Human herpesvirus 6B
augcgaauuaaaacucuaa

SEQ ID NO: 173645 - RNA, 21 nt, Human herpesvirus 6B
augcgguuaugugcuaucugu

SEQ ID NO: 173646 - RNA, 23 nt, Human herpesvirus 6B
augcgguuaugugcuaucugugu

SEQ ID NO: 173647 - RNA, 15 nt, Human herpesvirus 6B
augcguuugccauau

SEQ ID NO: 173648 - RNA, 15 nt, Human herpesvirus 6B
augcucaaccuaacg

SEQ ID NO: 173649 - RNA, 16 nt, Human herpesvirus 6B
augcucagauguggaa

SEQ ID NO: 173650 - RNA, 13 nt, Human herpesvirus 6B
augcucucagauc

SEQ ID NO: 173651 - RNA, 14 nt, Human herpesvirus 6B
augcugacuuugac

SEQ ID NO: 173652 - RNA, 23 nt, Human herpesvirus 6B
augcuuaccgccuccgcagucau

SEQ ID NO: 173653 - RNA, 17 nt, Human herpesvirus 6B
augcauugcgagauggu

SEQ ID NO: 173654 - RNA, 15 nt, Human herpesvirus 6B
augcagaugccugua

SEQ ID NO: 173655 - RNA, 20 nt, Human herpesvirus 6B
augcagcguuggaaagcuuu

SEQ ID NO: 173656 - RNA, 13 nt, Human herpesvirus 6B
augauugcaacaa

SEQ ID NO: 173657 - RNA, 19 nt, Human herpesvirus 6B
augcaaaaucguguuuucu

SEQ ID NO: 173658 - RNA, 16 nt, Human herpesvirus 6B
augcaaccgaugacaa

SEQ ID NO: 173659 - RNA, 22 nt, Human herpesvirus 6B
augcaacauucugcguguuaau

SEQ ID NO: 173660 - RNA, 21 nt, Human herpesvirus 6B
augagccgccaccucuucucc

SEQ ID NO: 173661 - RNA, 19 nt, Human herpesvirus 6B
augaggaagucugaauuua

SEQ ID NO: 173662 - RNA, 22 nt, Human herpesvirus 6B
augagcugacaucugcaaaaac

SEQ ID NO: 173663 - RNA, 15 nt, Human herpesvirus 6B
augaucgucauaaac

SEQ ID NO: 173664 - RNA, 17 nt, Human herpesvirus 6B
augaucgucauaaacaa

SEQ ID NO: 173665 - RNA, 14 nt, Human herpesvirus 6B
augaucagcauuca

SEQ ID NO: 173666 - RNA, 16 nt, Human herpesvirus 6B
augaucagcauucacu

SEQ ID NO: 173667 - RNA, 17 nt, Human herpesvirus 6B
augaucagcauucacuc

SEQ ID NO: 173668 - RNA, 14 nt, Human herpesvirus 6B
augaguuuuuugca

SEQ ID NO: 173669 - RNA, 18 nt, Human herpesvirus 6B
augaguuuuuugcaauuu

SEQ ID NO: 173670 - RNA, 21 nt, Human herpesvirus 6B
augaauucaagacgaucucau

SEQ ID NO: 173671 - RNA, 13 nt, Human herpesvirus 6B
augagaaaugacu

SEQ ID NO: 173672 - RNA, 23 nt, Human herpesvirus 6B
augagaacuucaaaaucugcuaa

SEQ ID NO: 173673 - RNA, 18 nt, Human herpesvirus 6B
augagaauuaugacugac

SEQ ID NO: 173674 - RNA, 16 nt, Human herpesvirus 6B
augagacgccuauucu

SEQ ID NO: 173675 - RNA, 14 nt, Human herpesvirus 6B
augagacuguuuau

SEQ ID NO: 173676 - RNA, 18 nt, Human herpesvirus 6B
augacaauugcagaauuu

SEQ ID NO: 173677 - RNA, 19 nt, Human herpesvirus 6B
augaauucguuacaaucuc

SEQ ID NO: 173678 - RNA, 13 nt, Human herpesvirus 6B
augaauguguuca

SEQ ID NO: 173679 - RNA, 16 nt, Human herpesvirus 6B
augaauguguucauag

SEQ ID NO: 173680 - RNA, 15 nt, Human herpesvirus 6B
augaauguuugacug

SEQ ID NO: 173681 - RNA, 14 nt, Human herpesvirus 6B
aucuuucugagauu

SEQ ID NO: 173682 - RNA, 13 nt, Human herpesvirus 6B
aucuuauguauau

SEQ ID NO: 173683 - RNA, 22 nt, Human herpesvirus 6B
aucuuauauuaaagauugcauc

SEQ ID NO: 173684 - RNA, 12 nt, Human herpesvirus 6B
aucacagcauuu

SEQ ID NO: 173685 - RNA, 13 nt, Human herpesvirus 6B
aucacagcauuuc

SEQ ID NO: 173686 - RNA, 12 nt, Human herpesvirus 6B
aucuuacugaac

SEQ ID NO: 173687 - RNA, 17 nt, Human herpesvirus 6B
augaaacgaaugccgac

SEQ ID NO: 173688 - RNA, 21 nt, Human herpesvirus 6B
augaacguugaaaaaucucua

SEQ ID NO: 173689 - RNA, 19 nt, Human herpesvirus 6B
augaaaguggauacgccag

SEQ ID NO: 173690 - RNA, 18 nt, Human herpesvirus 6B
augaacaggugcuucuuu

SEQ ID NO: 173691 - RNA, 21 nt, Human herpesvirus 6B
augaacgcacuagacaucaac

SEQ ID NO: 173692 - RNA, 22 nt, Human herpesvirus 6B
augaacgcacuagacaucaacu

SEQ ID NO: 173693 - RNA, 21 nt, Human herpesvirus 6B
augaacgcagcguaauaugca

SEQ ID NO: 173694 - RNA, 11 nt, Human herpesvirus 6B
accgcuuaaag

SEQ ID NO: 173695 - RNA, 18 nt, Human herpesvirus 6B
accuaaucacaaaacugu

SEQ ID NO: 173696 - RNA, 17 nt, Human herpesvirus 6B
accucaaaaaugcacaa

SEQ ID NO: 173697 - RNA, 19 nt, Human herpesvirus 6B
accgcagaggaucuguuca

SEQ ID NO: 173698 - RNA, 22 nt, Human herpesvirus 6B
accgcaguuccuguuuuucuca

SEQ ID NO: 173699 - RNA, 24 nt, Human herpesvirus 6B
accgaugcucucagaucaucgcca

SEQ ID NO: 173700 - RNA, 21 nt, Human herpesvirus 6B
accgauguuaaaguugugauu

SEQ ID NO: 173701 - RNA, 22 nt, Human herpesvirus 6B
accgcaguuucuguuuuucuca

SEQ ID NO: 173702 - RNA, 19 nt, Human herpesvirus 6B
acccuuugcggugcauaac

SEQ ID NO: 173703 - RNA, 19 nt, Human herpesvirus 6B
accgagcgggcuccgucgc

SEQ ID NO: 173704 - RNA, 15 nt, Human herpesvirus 6B
accccccucuugcag

SEQ ID NO: 173705 - RNA, 17 nt, Human herpesvirus 6B
acccgauguucucucac

SEQ ID NO: 173706 - RNA, 15 nt, Human herpesvirus 6B
acccgacaugcuuca

SEQ ID NO: 173707 - RNA, 19 nt, Human herpesvirus 6B
accccuuuauaagauuuac

SEQ ID NO: 173708 - RNA, 22 nt, Human herpesvirus 6B
acauuucgguuuaauagauuuu

SEQ ID NO: 173709 - RNA, 14 nt, Human herpesvirus 6B
acauuuaccagaga

SEQ ID NO: 173710 - RNA, 15 nt, Human herpesvirus 6B
acauuucuuacauaa

SEQ ID NO: 173711 - RNA, 23 nt, Human herpesvirus 6B
accaaucuaagauaguuuugcau

SEQ ID NO: 173712 - RNA, 17 nt, Human herpesvirus 6B
accaaucugugcaacac

SEQ ID NO: 173713 - RNA, 14 nt, Human herpesvirus 6B
accaaugaucacac

SEQ ID NO: 173714 - RNA, 16 nt, Human herpesvirus 6B
acgcuaaggugagcca

SEQ ID NO: 173715 - RNA, 13 nt, Human herpesvirus 6B
acggcgaaagcca

SEQ ID NO: 173716 - RNA, 21 nt, Human herpesvirus 6B
acggccuggaauacaagacca

SEQ ID NO: 173717 - RNA, 15 nt, Human herpesvirus 6B
acgcuaaauuuauca

SEQ ID NO: 173718 - RNA, 12 nt, Human herpesvirus 6B
acgcuaacgaac

SEQ ID NO: 173719 - RNA, 14 nt, Human herpesvirus 6B
acgcuagcaaugau

SEQ ID NO: 173720 - RNA, 15 nt, Human herpesvirus 6B
acgcuagcaaugaua

SEQ ID NO: 173721 - RNA, 20 nt, Human herpesvirus 6B
acgauaucaauuccugugau

SEQ ID NO: 173722 - RNA, 21 nt, Human herpesvirus 6B
acgauaucaauuccugugaug

SEQ ID NO: 173723 - RNA, 15 nt, Human herpesvirus 6B
acgagucgacaaauu

SEQ ID NO: 173724 - RNA, 17 nt, Human herpesvirus 6B
acgauagaguucaucua

SEQ ID NO: 173725 - RNA, 17 nt, Human herpesvirus 6B
acgaugaacuacugagu

SEQ ID NO: 173726 - RNA, 21 nt, Human herpesvirus 6B
acgauaaaacguuccaucacg

SEQ ID NO: 173727 - RNA, 16 nt, Human herpesvirus 6B
acgaugugucggagac

SEQ ID NO: 173728 - RNA, 21 nt, Human herpesvirus 6B
acgccgccgccguccuauuca

SEQ ID NO: 173729 - RNA, 22 nt, Human herpesvirus 6B
acgccgccgccguccuauucag

SEQ ID NO: 173730 - RNA, 17 nt, Human herpesvirus 6B
acgagaacgcucuugcc

SEQ ID NO: 173731 - RNA, 17 nt, Human herpesvirus 6B
acgagagcugacugaaa

SEQ ID NO: 173732 - RNA, 15 nt, Human herpesvirus 6B
acgaaucacauccgc

SEQ ID NO: 173733 - RNA, 18 nt, Human herpesvirus 6B
acgacacacaacacaucu

SEQ ID NO: 173734 - RNA, 20 nt, Human herpesvirus 6B
accuggaaaaacugacugac

SEQ ID NO: 173735 - RNA, 20 nt, Human herpesvirus 6B
accucagcaaacaugugauu

SEQ ID NO: 173736 - RNA, 17 nt, Human herpesvirus 6B
accuguuuccagaauac

SEQ ID NO: 173737 - RNA, 14 nt, Human herpesvirus 6B
acguggccgucucc

SEQ ID NO: 173738 - RNA, 15 nt, Human herpesvirus 6B
acgugaauuuucuga

SEQ ID NO: 173739 - RNA, 16 nt, Human herpesvirus 6B
acguuccaucacgcau

SEQ ID NO: 173740 - RNA, 21 nt, Human herpesvirus 6B
acguuugaguugggacuugga

SEQ ID NO: 173741 - RNA, 19 nt, Human herpesvirus 6B
acguucuuugaacagugac

SEQ ID NO: 173742 - RNA, 17 nt, Human herpesvirus 6B
acguugaaaaaucucua

SEQ ID NO: 173743 - RNA, 19 nt, Human herpesvirus 6B
acguugcagucugcucggu

SEQ ID NO: 173744 - RNA, 23 nt, Human herpesvirus 6B
acguugcucguagccauauauca

SEQ ID NO: 173745 - RNA, 21 nt, Human herpesvirus 6B
acgucuguggcgaggaaccca

SEQ ID NO: 173746 - RNA, 15 nt, Human herpesvirus 6B
acgguaaacgagugu

SEQ ID NO: 173747 - RNA, 23 nt, Human herpesvirus 6B
acgggcuuggcuaucgcaaugau

SEQ ID NO: 173748 - RNA, 15 nt, Human herpesvirus 6B
acggggacuaccgau

SEQ ID NO: 173749 - RNA, 22 nt, Human herpesvirus 6B
acggggaugauggugucuuuau

SEQ ID NO: 173750 - RNA, 23 nt, Human herpesvirus 6B
acgggaaaagaucaagcaaguuc

SEQ ID NO: 173751 - RNA, 13 nt, Human herpesvirus 6B
acuaaaacaucag

SEQ ID NO: 173752 - RNA, 16 nt, Human herpesvirus 6B
acuaaacuuaacuuau

SEQ ID NO: 173753 - RNA, 17 nt, Human herpesvirus 6B
acuaacuucaagaauuc

SEQ ID NO: 173754 - RNA, 14 nt, Human herpesvirus 6B
acuaacaugacaaa

SEQ ID NO: 173755 - RNA, 14 nt, Human herpesvirus 6B
acuaaaucaugucu

SEQ ID NO: 173756 - RNA, 18 nt, Human herpesvirus 6B
acuaaaucaugucuuaca

SEQ ID NO: 173757 - RNA, 20 nt, Human herpesvirus 6B
acuaaaucgcgccauaucac

SEQ ID NO: 173758 - RNA, 14 nt, Human herpesvirus 6B
acuaagauugugca

SEQ ID NO: 173759 - RNA, 17 nt, Human herpesvirus 6B
acuaagauugugcaguu

SEQ ID NO: 173760 - RNA, 14 nt, Human herpesvirus 6B
acuaauccauauga

SEQ ID NO: 173761 - RNA, 17 nt, Human herpesvirus 6B
acuaaugcggaacauug

SEQ ID NO: 173762 - RNA, 12 nt, Human herpesvirus 6B
acuaauguggau

SEQ ID NO: 173763 - RNA, 15 nt, Human herpesvirus 6B
acuacagcuaagauu

SEQ ID NO: 173764 - RNA, 24 nt, Human herpesvirus 6B
acuacagcuaagauuaacaacugc

SEQ ID NO: 173765 - RNA, 16 nt, Human herpesvirus 6B
acuauggaguccuugu

SEQ ID NO: 173766 - RNA, 12 nt, Human herpesvirus 6B
acuaugugcauu

SEQ ID NO: 173767 - RNA, 14 nt, Human herpesvirus 6B
acuaugugcauucc

SEQ ID NO: 173768 - RNA, 14 nt, Human herpesvirus 6B
acuaucugagacag

SEQ ID NO: 173769 - RNA, 15 nt, Human herpesvirus 6B
acuacgugucucagu

SEQ ID NO: 173770 - RNA, 22 nt, Human herpesvirus 6B
acuacagugaauaucgaguuua

SEQ ID NO: 173771 - RNA, 11 nt, Human herpesvirus 6B
acuacuaaagc

SEQ ID NO: 173772 - RNA, 18 nt, Human herpesvirus 6B
acuccaacgcacaugcua

SEQ ID NO: 173773 - RNA, 21 nt, Human herpesvirus 6B
acuccccauucaacauccuau

SEQ ID NO: 173774 - RNA, 22 nt, Human herpesvirus 6B
acuauuaaacuaacaugacaaa

SEQ ID NO: 173775 - RNA, 15 nt, Human herpesvirus 6B
acucgcaugucgaua

SEQ ID NO: 173776 - RNA, 16 nt, Human herpesvirus 6B
acugcaugcuaauaaa

SEQ ID NO: 173777 - RNA, 12 nt, Human herpesvirus 6B
acugcauuucau

SEQ ID NO: 173778 - RNA, 13 nt, Human herpesvirus 6B
acugccgcuuaaa

SEQ ID NO: 173779 - RNA, 20 nt, Human herpesvirus 6B
acugcgguuggggucuuucc

SEQ ID NO: 173780 - RNA, 14 nt, Human herpesvirus 6B
acugcuggcugaga

SEQ ID NO: 173781 - RNA, 20 nt, Human herpesvirus 6B
acugcuggcugagauucacu

SEQ ID NO: 173782 - RNA, 14 nt, Human herpesvirus 6B
acugcuuaacuugc

SEQ ID NO: 173783 - RNA, 19 nt, Human herpesvirus 6B
acuggaaaacuaugugcau

SEQ ID NO: 173784 - RNA, 20 nt, Human herpesvirus 6B
acuggaaaacuaugugcauu

SEQ ID NO: 173785 - RNA, 21 nt, Human herpesvirus 6B
acugugaggugauuugaacag

SEQ ID NO: 173786 - RNA, 13 nt, Human herpesvirus 6B
acuggaugaaucu

SEQ ID NO: 173787 - RNA, 13 nt, Human herpesvirus 6B
acuuaacuuauca

SEQ ID NO: 173788 - RNA, 18 nt, Human herpesvirus 6B
acuguuucuuugacauuu

SEQ ID NO: 173789 - RNA, 11 nt, Human herpesvirus 6B
acuguuuccag

SEQ ID NO: 173790 - RNA, 22 nt, Human herpesvirus 6B
aaugaggucuauuuuggccuca

SEQ ID NO: 173791 - RNA, 17 nt, Human herpesvirus 6B
aaugaccagagauucua

SEQ ID NO: 173792 - RNA, 15 nt, Human herpesvirus 6B
aaugacucuaaauac

SEQ ID NO: 173793 - RNA, 14 nt, Human herpesvirus 6B
aaugacacagaauc

SEQ ID NO: 173794 - RNA, 22 nt, Human herpesvirus 6B
aauuuuauucaaccaaucuaag

SEQ ID NO: 173795 - RNA, 15 nt, Human herpesvirus 6B
aauuuuaucaugccc

SEQ ID NO: 173796 - RNA, 15 nt, Human herpesvirus 6B
aauuuuacaaugagu

SEQ ID NO: 173797 - RNA, 21 nt, Human herpesvirus 6B
aauuuuuuucuccugaucuca

SEQ ID NO: 173798 - RNA, 18 nt, Human herpesvirus 6B
aauuuucgucugauacuu

SEQ ID NO: 173799 - RNA, 12 nt, Human herpesvirus 6B
acaaaacuguac

SEQ ID NO: 173800 - RNA, 17 nt, Human herpesvirus 6B
acaaaacuguaccugaa

SEQ ID NO: 173801 - RNA, 12 nt, Human herpesvirus 6B
acaaaacuguua

SEQ ID NO: 173802 - RNA, 19 nt, Human herpesvirus 6B
acaaaacauggacaacuua

SEQ ID NO: 173803 - RNA, 20 nt, Human herpesvirus 6B
acaaaacauggacaacuuau

SEQ ID NO: 173804 - RNA, 14 nt, Human herpesvirus 6B
acaaaauaaaauac

SEQ ID NO: 173805 - RNA, 11 nt, Human herpesvirus 6B
acaaaagccug

SEQ ID NO: 173806 - RNA, 14 nt, Human herpesvirus 6B
acaaaccaucagcc

SEQ ID NO: 173807 - RNA, 17 nt, Human herpesvirus 6B
acaaacugucacuuucc

SEQ ID NO: 173808 - RNA, 19 nt, Human herpesvirus 6B
acaaagauuacguccacau

SEQ ID NO: 173809 - RNA, 17 nt, Human herpesvirus 6B
acaaagcuuuacuuaca

SEQ ID NO: 173810 - RNA, 23 nt, Human herpesvirus 6B
acaaauaaaaaauuccugaauaa

SEQ ID NO: 173811 - RNA, 23 nt, Human herpesvirus 6B
acaaguuaacggagagucuucau

SEQ ID NO: 173812 - RNA, 22 nt, Human herpesvirus 6B
acaauaaaaauauugguguugu

SEQ ID NO: 173813 - RNA, 18 nt, Human herpesvirus 6B
acaagguacacaauacac

SEQ ID NO: 173814 - RNA, 20 nt, Human herpesvirus 6B
acaagguacacaauacacag

SEQ ID NO: 173815 - RNA, 22 nt, Human herpesvirus 6B
acaaguauguuuuguacaaagg

SEQ ID NO: 173816 - RNA, 19 nt, Human herpesvirus 6B
acaaugaguuuuuugcaau

SEQ ID NO: 173817 - RNA, 14 nt, Human herpesvirus 6B
acaaugcaaucgaa

SEQ ID NO: 173818 - RNA, 16 nt, Human herpesvirus 6B
acaaugcuuugggacc

SEQ ID NO: 173819 - RNA, 21 nt, Human herpesvirus 6B
acaacgauagaguucaucuaa

SEQ ID NO: 173820 - RNA, 21 nt, Human herpesvirus 6B
acaacgugcucgugaaaauau

SEQ ID NO: 173821 - RNA, 23 nt, Human herpesvirus 6B
acaacgguguggagacaccucaa

SEQ ID NO: 173822 - RNA, 23 nt, Human herpesvirus 6B
acaacuuaaccgcaaaaaagcgc

SEQ ID NO: 173823 - RNA, 20 nt, Human herpesvirus 6B
acaacuguuaccgaaaucuc

SEQ ID NO: 173824 - RNA, 14 nt, Human herpesvirus 6B
acaagaacagagag

SEQ ID NO: 173825 - RNA, 22 nt, Human herpesvirus 6B
acaagaauguaaaagagccaga

SEQ ID NO: 173826 - RNA, 13 nt, Human herpesvirus 6B
acaagcuguccau

SEQ ID NO: 173827 - RNA, 20 nt, Human herpesvirus 6B
acaagcuguccaucuucaga

SEQ ID NO: 173828 - RNA, 16 nt, Human herpesvirus 6B
acaagagugcacgaaa

SEQ ID NO: 173829 - RNA, 13 nt, Human herpesvirus 6B
acaaggaaugugc

SEQ ID NO: 173830 - RNA, 13 nt, Human herpesvirus 6B
acaagcaugcauu

SEQ ID NO: 173831 - RNA, 14 nt, Human herpesvirus 6B
acaagcaugcauug

SEQ ID NO: 173832 - RNA, 19 nt, Human herpesvirus 6B
acacaacuuaaccgcaaaa

SEQ ID NO: 173833 - RNA, 11 nt, Human herpesvirus 6B
acacaauacac

SEQ ID NO: 173834 - RNA, 14 nt, Human herpesvirus 6B
acacaagaguaaaa

SEQ ID NO: 173835 - RNA, 14 nt, Human herpesvirus 6B
acacacaaugugcu

SEQ ID NO: 173836 - RNA, 22 nt, Human herpesvirus 6B
acaauuucugacucucuuucag

SEQ ID NO: 173837 - RNA, 24 nt, Human herpesvirus 6B
acacaaaaacagggagugauugau

SEQ ID NO: 173838 - RNA, 13 nt, Human herpesvirus 6B
acaauucucucaa

SEQ ID NO: 173839 - RNA, 18 nt, Human herpesvirus 6B
acacaugccgcaagauac

SEQ ID NO: 173840 - RNA, 14 nt, Human herpesvirus 6B
acaccaggaguuua

SEQ ID NO: 173841 - RNA, 23 nt, Human herpesvirus 6B
acagagguaauaaaaacaccucu

SEQ ID NO: 173842 - RNA, 22 nt, Human herpesvirus 6B
acagaaaauugacaaugagguc

SEQ ID NO: 173843 - RNA, 20 nt, Human herpesvirus 6B
acacugacuaaacguacauc

SEQ ID NO: 173844 - RNA, 13 nt, Human herpesvirus 6B
acaccaucaauuu

SEQ ID NO: 173845 - RNA, 15 nt, Human herpesvirus 6B
acaccaguacuucaa

SEQ ID NO: 173846 - RNA, 16 nt, Human herpesvirus 6B
acaccaguacuucaag

SEQ ID NO: 173847 - RNA, 21 nt, Human herpesvirus 6B
acacccauuuccggaguugca

SEQ ID NO: 173848 - RNA, 13 nt, Human herpesvirus 6B
acaggugcuucuu

SEQ ID NO: 173849 - RNA, 17 nt, Human herpesvirus 6B
acaguaaaacauguagu

SEQ ID NO: 173850 - RNA, 13 nt, Human herpesvirus 6B
acaguaaaucucu

SEQ ID NO: 173851 - RNA, 18 nt, Human herpesvirus 6B
acagucaauuucuaaaga

SEQ ID NO: 173852 - RNA, 14 nt, Human herpesvirus 6B
acaguauuuacuga

SEQ ID NO: 173853 - RNA, 23 nt, Human herpesvirus 6B
acauaguuuggaucuucugcuaa

SEQ ID NO: 173854 - RNA, 17 nt, Human herpesvirus 6B
acauaguggcuaugaag

SEQ ID NO: 173855 - RNA, 21 nt, Human herpesvirus 6B
acauaauucggucaccaacau

SEQ ID NO: 173856 - RNA, 16 nt, Human herpesvirus 6B
acagggagugauugau

SEQ ID NO: 173857 - RNA, 19 nt, Human herpesvirus 6B
acagggagugauugaugaa

SEQ ID NO: 173858 - RNA, 17 nt, Human herpesvirus 6B
acagcaugaacucucac

SEQ ID NO: 173859 - RNA, 23 nt, Human herpesvirus 6B
acagcaugaacucucacggccau

SEQ ID NO: 173860 - RNA, 11 nt, Human herpesvirus 6B
acagcaugcau

SEQ ID NO: 173861 - RNA, 19 nt, Human herpesvirus 6B
acagauggcacugaaucag

SEQ ID NO: 173862 - RNA, 22 nt, Human herpesvirus 6B
acagauggcacugaaucagaaa

SEQ ID NO: 173863 - RNA, 21 nt, Human herpesvirus 6B
acagaugaggaggagggaccc

SEQ ID NO: 173864 - RNA, 15 nt, Human herpesvirus 6B
acaucguaauggcau

SEQ ID NO: 173865 - RNA, 19 nt, Human herpesvirus 6B
acaucguaauggcauucac

SEQ ID NO: 173866 - RNA, 15 nt, Human herpesvirus 6B
acaucgaaucucaca

SEQ ID NO: 173867 - RNA, 14 nt, Human herpesvirus 6B
acaucgauccaaaa

SEQ ID NO: 173868 - RNA, 21 nt, Human herpesvirus 6B
acaucgcuaagauaauggauc

SEQ ID NO: 173869 - RNA, 20 nt, Human herpesvirus 6B
acaucgcuaaguguugacug

SEQ ID NO: 173870 - RNA, 15 nt, Human herpesvirus 6B
acaucuauguguaua

SEQ ID NO: 173871 - RNA, 20 nt, Human herpesvirus 6B
acauuauccaggcaugugau

SEQ ID NO: 173872 - RNA, 22 nt, Human herpesvirus 6B
acauugguaauccaugaacuac

SEQ ID NO: 173873 - RNA, 13 nt, Human herpesvirus 6B
acauugauuccac

SEQ ID NO: 173874 - RNA, 16 nt, Human herpesvirus 6B
acauucuuaaauucaa

SEQ ID NO: 173875 - RNA, 15 nt, Human herpesvirus 6B
acaucauauccugaa

SEQ ID NO: 173876 - RNA, 18 nt, Human herpesvirus 6B
acaucacgucccauucac

SEQ ID NO: 173877 - RNA, 22 nt, Human herpesvirus 6B
acauccagaaaagcaaacaugc

SEQ ID NO: 173878 - RNA, 21 nt, Human herpesvirus 6B
acaucaacuauuuaacaucca

SEQ ID NO: 173879 - RNA, 22 nt, Human herpesvirus 6B
acaucaacuauuuaacauccaa

SEQ ID NO: 173880 - RNA, 22 nt, Human herpesvirus 6B
agaugacagcgagacaauaaca

SEQ ID NO: 173881 - RNA, 20 nt, Human herpesvirus 6B
agaugccuguagggauguag

SEQ ID NO: 173882 - RNA, 18 nt, Human herpesvirus 6B
agaugcaaccgaugacaa

SEQ ID NO: 173883 - RNA, 19 nt, Human herpesvirus 6B
agaugcaaccgaugacaaa

SEQ ID NO: 173884 - RNA, 20 nt, Human herpesvirus 6B
agauggugcuauuaacacau

SEQ ID NO: 173885 - RNA, 14 nt, Human herpesvirus 6B
agaugcuuaacuua

SEQ ID NO: 173886 - RNA, 19 nt, Human herpesvirus 6B
agaugcuuaacuuacuuaa

SEQ ID NO: 173887 - RNA, 18 nt, Human herpesvirus 6B
agauggaaaacugcagau

SEQ ID NO: 173888 - RNA, 20 nt, Human herpesvirus 6B
agauuaggggagagacaucc

SEQ ID NO: 173889 - RNA, 17 nt, Human herpesvirus 6B
agauuacaagguacaca

SEQ ID NO: 173890 - RNA, 13 nt, Human herpesvirus 6B
agauucacucuac

SEQ ID NO: 173891 - RNA, 22 nt, Human herpesvirus 6B
agauuaugccacacccauuucc

SEQ ID NO: 173892 - RNA, 15 nt, Human herpesvirus 6B
agauuauggcaacau

SEQ ID NO: 173893 - RNA, 24 nt, Human herpesvirus 6B
agauucaauacuacgugucucagu

SEQ ID NO: 173894 - RNA, 24 nt, Human herpesvirus 6B
agauguauaauuuacacaauccua

SEQ ID NO: 173895 - RNA, 17 nt, Human herpesvirus 6B
agauguauuucuuccuc

SEQ ID NO: 173896 - RNA, 13 nt, Human herpesvirus 6B
agauuuacuguuu

SEQ ID NO: 173897 - RNA, 15 nt, Human herpesvirus 6B
agauugcacgcuggg

SEQ ID NO: 173898 - RNA, 19 nt, Human herpesvirus 6B
agauugcauaugucuguua

SEQ ID NO: 173899 - RNA, 14 nt, Human herpesvirus 6B
agauuguuacuagu

SEQ ID NO: 173900 - RNA, 17 nt, Human herpesvirus 6B
agauuguuacuagugau

SEQ ID NO: 173901 - RNA, 13 nt, Human herpesvirus 6B
agauuguuuucau

SEQ ID NO: 173902 - RNA, 22 nt, Human herpesvirus 6B
agauuuaauaaaauaacaugug

SEQ ID NO: 173903 - RNA, 17 nt, Human herpesvirus 6B
agauucggggggagaca

SEQ ID NO: 173904 - RNA, 16 nt, Human herpesvirus 6B
agcaaagcacccugca

SEQ ID NO: 173905 - RNA, 15 nt, Human herpesvirus 6B
agcaaauguaacucu

SEQ ID NO: 173906 - RNA, 15 nt, Human herpesvirus 6B
agcaaauaaauacag

SEQ ID NO: 173907 - RNA, 19 nt, Human herpesvirus 6B
agcaaccgcaguuccuguu

SEQ ID NO: 173908 - RNA, 12 nt, Human herpesvirus 6B
agcaaacaugua

SEQ ID NO: 173909 - RNA, 15 nt, Human herpesvirus 6B
agcaaacauguaucc

SEQ ID NO: 173910 - RNA, 17 nt, Human herpesvirus 6B
agcaaaaaauaguuuua

SEQ ID NO: 173911 - RNA, 19 nt, Human herpesvirus 6B
agcaaaagucuuauaacac

SEQ ID NO: 173912 - RNA, 22 nt, Human herpesvirus 6B
agauuuugaggaucacuaacuu

SEQ ID NO: 173913 - RNA, 21 nt, Human herpesvirus 6B
agauuucuuauuaugugauuc

SEQ ID NO: 173914 - RNA, 19 nt, Human herpesvirus 6B
agauuuaucaaaagccaga

SEQ ID NO: 173915 - RNA, 14 nt, Human herpesvirus 6B
agcaaucaccauca

SEQ ID NO: 173916 - RNA, 15 nt, Human herpesvirus 6B
agcaauccaaucaac

SEQ ID NO: 173917 - RNA, 15 nt, Human herpesvirus 6B
agcacagcaugcauu

SEQ ID NO: 173918 - RNA, 17 nt, Human herpesvirus 6B
agcaauucuuauuuacc

SEQ ID NO: 173919 - RNA, 13 nt, Human herpesvirus 6B
agaguucaucuaa

SEQ ID NO: 173920 - RNA, 14 nt, Human herpesvirus 6B
agaguucaucuaac

SEQ ID NO: 173921 - RNA, 17 nt, Human herpesvirus 6B
agagcgggcacacgucc

SEQ ID NO: 173922 - RNA, 21 nt, Human herpesvirus 6B
agagugauucaagguggaggu

SEQ ID NO: 173923 - RNA, 21 nt, Human herpesvirus 6B
agaguucgguccaaggauuau

SEQ ID NO: 173924 - RNA, 22 nt, Human herpesvirus 6B
agauacauguuuuugaugugcu

SEQ ID NO: 173925 - RNA, 23 nt, Human herpesvirus 6B
agauacauguuuuugaugugcua

SEQ ID NO: 173926 - RNA, 17 nt, Human herpesvirus 6B
agauacacugcaagaac

SEQ ID NO: 173927 - RNA, 12 nt, Human herpesvirus 6B
agauaauuucca

SEQ ID NO: 173928 - RNA, 18 nt, Human herpesvirus 6B
agauaauuuccaauagaa

SEQ ID NO: 173929 - RNA, 18 nt, Human herpesvirus 6B
agauaccgcuauuauuug

SEQ ID NO: 173930 - RNA, 22 nt, Human herpesvirus 6B
agaucaucgccauagugaaaga

SEQ ID NO: 173931 - RNA, 18 nt, Human herpesvirus 6B
agaucacguucaggauga

SEQ ID NO: 173932 - RNA, 17 nt, Human herpesvirus 6B
agaucaguacauagaau

SEQ ID NO: 173933 - RNA, 12 nt, Human herpesvirus 6B
agaucaguucuc

SEQ ID NO: 173934 - RNA, 19 nt, Human herpesvirus 6B
agauauuucauuguuucac

SEQ ID NO: 173935 - RNA, 13 nt, Human herpesvirus 6B
agauaguuuugca

SEQ ID NO: 173936 - RNA, 17 nt, Human herpesvirus 6B
agauaguuuugcgugua

SEQ ID NO: 173937 - RNA, 21 nt, Human herpesvirus 6B
agauaugaaugaucacuauca

SEQ ID NO: 173938 - RNA, 18 nt, Human herpesvirus 6B
acuuugauguuaacucag

SEQ ID NO: 173939 - RNA, 22 nt, Human herpesvirus 6B
acuuucgaucacaaacugucac

SEQ ID NO: 173940 - RNA, 18 nt, Human herpesvirus 6B
acuuuccccauacugugu

SEQ ID NO: 173941 - RNA, 18 nt, Human herpesvirus 6B
acuuuggauuuugaugua

SEQ ID NO: 173942 - RNA, 19 nt, Human herpesvirus 6B
acuuugugcccauacuugu

SEQ ID NO: 173943 - RNA, 16 nt, Human herpesvirus 6B
acuuuguuuagcuuua

SEQ ID NO: 173944 - RNA, 17 nt, Human herpesvirus 6B
agagaaucuuccacuga

SEQ ID NO: 173945 - RNA, 23 nt, Human herpesvirus 6B
agaaaaacuauagccuagcaagc

SEQ ID NO: 173946 - RNA, 17 nt, Human herpesvirus 6B
agagugcgagacuggaa

SEQ ID NO: 173947 - RNA, 20 nt, Human herpesvirus 6B
agagugcgagacuggaaaac

SEQ ID NO: 173948 - RNA, 21 nt, Human herpesvirus 6B
agagcugccgagcugagcgga

SEQ ID NO: 173949 - RNA, 18 nt, Human herpesvirus 6B
agagaucaguacauagaa

SEQ ID NO: 173950 - RNA, 20 nt, Human herpesvirus 6B
agagaucaguacauagaauc

SEQ ID NO: 173951 - RNA, 15 nt, Human herpesvirus 6B
agagaggagcauuca

SEQ ID NO: 173952 - RNA, 23 nt, Human herpesvirus 6B
agagagucagaaauugugucaca

SEQ ID NO: 173953 - RNA, 14 nt, Human herpesvirus 6B
agccgugauguuuu

SEQ ID NO: 173954 - RNA, 22 nt, Human herpesvirus 6B
agccuaaacggagacugcacag

SEQ ID NO: 173955 - RNA, 19 nt, Human herpesvirus 6B
agccuaagaaauauugcau

SEQ ID NO: 173956 - RNA, 21 nt, Human herpesvirus 6B
agccuguccgugacacacaga

SEQ ID NO: 173957 - RNA, 14 nt, Human herpesvirus 6B
agccuggaagaagg

SEQ ID NO: 173958 - RNA, 14 nt, Human herpesvirus 6B
agccagggcauuca

SEQ ID NO: 173959 - RNA, 13 nt, Human herpesvirus 6B
agccacaaaauaa

SEQ ID NO: 173960 - RNA, 17 nt, Human herpesvirus 6B
agcauucuguucuucau

SEQ ID NO: 173961 - RNA, 17 nt, Human herpesvirus 6B
agcauucuuaucaaauc

SEQ ID NO: 173962 - RNA, 15 nt, Human herpesvirus 6B
agccaaaaaaguuua

SEQ ID NO: 173963 - RNA, 15 nt, Human herpesvirus 6B
agcagaaguuuaccu

SEQ ID NO: 173964 - RNA, 16 nt, Human herpesvirus 6B
agcagaaguuuaccua

SEQ ID NO: 173965 - RNA, 17 nt, Human herpesvirus 6B
agcagaaguuuaccuag

SEQ ID NO: 173966 - RNA, 22 nt, Human herpesvirus 6B
agcagaggccggcacauacaca

SEQ ID NO: 173967 - RNA, 12 nt, Human herpesvirus 6B
agcacgucuucu

SEQ ID NO: 173968 - RNA, 14 nt, Human herpesvirus 6B
agcacccugcacaa

SEQ ID NO: 173969 - RNA, 18 nt, Human herpesvirus 6B
agcaggaaccgagauuug

SEQ ID NO: 173970 - RNA, 16 nt, Human herpesvirus 6B
agcaguaugccauaaa

SEQ ID NO: 173971 - RNA, 16 nt, Human herpesvirus 6B
agcuuuaaagcagcua

SEQ ID NO: 173972 - RNA, 13 nt, Human herpesvirus 6B
agcuuuauuccca

SEQ ID NO: 173973 - RNA, 22 nt, Human herpesvirus 6B
aggaaaagaagaagcagcagau

SEQ ID NO: 173974 - RNA, 21 nt, Human herpesvirus 6B
aggaaaacgcagcaugaugau

SEQ ID NO: 173975 - RNA, 22 nt, Human herpesvirus 6B
aggaaccgagauuuguguucaa

SEQ ID NO: 173976 - RNA, 13 nt, Human herpesvirus 6B
aggaaaugaugau

SEQ ID NO: 173977 - RNA, 16 nt, Human herpesvirus 6B
agcguggauaucucaa

SEQ ID NO: 173978 - RNA, 12 nt, Human herpesvirus 6B
agcgcuguaugu

SEQ ID NO: 173979 - RNA, 19 nt, Human herpesvirus 6B
agcguauucagaguacuuu

SEQ ID NO: 173980 - RNA, 19 nt, Human herpesvirus 6B
aggaauagcaggcaucgac

SEQ ID NO: 173981 - RNA, 18 nt, Human herpesvirus 6B
aggaagaugguaucuaaa

SEQ ID NO: 173982 - RNA, 14 nt, Human herpesvirus 6B
aggaauccuauuca

SEQ ID NO: 173983 - RNA, 23 nt, Human herpesvirus 6B
aggaaucuuguguucuaacacau

SEQ ID NO: 173984 - RNA, 20 nt, Human herpesvirus 6B
aggaugcuuugcuguuuacg

SEQ ID NO: 173985 - RNA, 18 nt, Human herpesvirus 6B
aggauuacacugucuugu

SEQ ID NO: 173986 - RNA, 17 nt, Human herpesvirus 6B
auaugagugaauugugc

SEQ ID NO: 173987 - RNA, 18 nt, Human herpesvirus 6B
auaugcaggugcugcuaa

SEQ ID NO: 173988 - RNA, 21 nt, Human herpesvirus 6B
auaugaggauuugcuugucac

SEQ ID NO: 173989 - RNA, 15 nt, Human herpesvirus 6B
auaugaaugaucacu

SEQ ID NO: 173990 - RNA, 20 nt, Human herpesvirus 6B
auauggcaaauuucaaaaag

SEQ ID NO: 173991 - RNA, 13 nt, Human herpesvirus 6B
auaugauggacaa

SEQ ID NO: 173992 - RNA, 13 nt, Human herpesvirus 6B
auaugcaucucua

SEQ ID NO: 173993 - RNA, 19 nt, Human herpesvirus 6B
auaugguuccacuuggaag

SEQ ID NO: 173994 - RNA, 17 nt, Human herpesvirus 6B
auauguccgaucugugc

SEQ ID NO: 173995 - RNA, 17 nt, Human herpesvirus 6B
auauuaauuacauauag

SEQ ID NO: 173996 - RNA, 17 nt, Human herpesvirus 6B
aucaaugucacaaaucu

SEQ ID NO: 173997 - RNA, 17 nt, Human herpesvirus 6B
aucaauacuuuuuucaa

SEQ ID NO: 173998 - RNA, 11 nt, Human herpesvirus 6B
aucacaacaua

SEQ ID NO: 173999 - RNA, 19 nt, Human herpesvirus 6B
aucacaacauaaaaaaaca

SEQ ID NO: 174000 - RNA, 21 nt, Human herpesvirus 6B
aucacaccaaugaucacacac

SEQ ID NO: 174001 - RNA, 13 nt, Human herpesvirus 6B
aucacaaauaucc

SEQ ID NO: 174002 - RNA, 15 nt, Human herpesvirus 6B
aucacaaacugucac

SEQ ID NO: 174003 - RNA, 21 nt, Human herpesvirus 6B
aucacaaaguuuaaguucuca

SEQ ID NO: 174004 - RNA, 22 nt, Human herpesvirus 6B
aucacaaaguuuaaguucucac

SEQ ID NO: 174005 - RNA, 21 nt, Human herpesvirus 6B
auaucaucuuugggaagucuc

SEQ ID NO: 174006 - RNA, 23 nt, Human herpesvirus 6B
auaucgaaucaugagauacaaaa

SEQ ID NO: 174007 - RNA, 23 nt, Human herpesvirus 6B
auaucugcauacagaaauuggag

SEQ ID NO: 174008 - RNA, 17 nt, Human herpesvirus 6B
auauaaaaaagugcaug

SEQ ID NO: 174009 - RNA, 21 nt, Human herpesvirus 6B
auaguuuggaucuucugcuaa

SEQ ID NO: 174010 - RNA, 23 nt, Human herpesvirus 6B
auaguuuuauucucggucuugcu

SEQ ID NO: 174011 - RNA, 15 nt, Human herpesvirus 6B
auaucagcacccucu

SEQ ID NO: 174012 - RNA, 19 nt, Human herpesvirus 6B
auaucagcacccucugcaa

SEQ ID NO: 174013 - RNA, 20 nt, Human herpesvirus 6B
auaucagcacccucugcaag

SEQ ID NO: 174014 - RNA, 22 nt, Human herpesvirus 6B
auaucagcacccucugcaagcu

SEQ ID NO: 174015 - RNA, 16 nt, Human herpesvirus 6B
auacccgauguucucu

SEQ ID NO: 174016 - RNA, 17 nt, Human herpesvirus 6B
auacccgauguucucuc

SEQ ID NO: 174017 - RNA, 19 nt, Human herpesvirus 6B
auacccgauguucucucac

SEQ ID NO: 174018 - RNA, 14 nt, Human herpesvirus 6B
auaccgacaagaaa

SEQ ID NO: 174019 - RNA, 15 nt, Human herpesvirus 6B
auaccgaucccagcu

SEQ ID NO: 174020 - RNA, 18 nt, Human herpesvirus 6B
auaccgaucccagcucac

SEQ ID NO: 174021 - RNA, 17 nt, Human herpesvirus 6B
auagguguuugcagaua

SEQ ID NO: 174022 - RNA, 13 nt, Human herpesvirus 6B
auagucaugcacu

SEQ ID NO: 174023 - RNA, 17 nt, Human herpesvirus 6B
auagugaaacggaguua

SEQ ID NO: 174024 - RNA, 19 nt, Human herpesvirus 6B
auagugaaagaguaccgaa

SEQ ID NO: 174025 - RNA, 12 nt, Human herpesvirus 6B
auaguguucucu

SEQ ID NO: 174026 - RNA, 14 nt, Human herpesvirus 6B
auaacggagagcuu

SEQ ID NO: 174027 - RNA, 20 nt, Human herpesvirus 6B
auaacggagagcuucuuagg

SEQ ID NO: 174028 - RNA, 19 nt, Human herpesvirus 6B
auaagacgcugauaacuca

SEQ ID NO: 174029 - RNA, 16 nt, Human herpesvirus 6B
auaaggcaaaaaccag

SEQ ID NO: 174030 - RNA, 23 nt, Human herpesvirus 6B
auaagaacuggugucugucuauu

SEQ ID NO: 174031 - RNA, 17 nt, Human herpesvirus 6B
auaagaauuacaauaca

SEQ ID NO: 174032 - RNA, 16 nt, Human herpesvirus 6B
auaauaaaaagucaua

SEQ ID NO: 174033 - RNA, 18 nt, Human herpesvirus 6B
auaauaaaaagucauaca

SEQ ID NO: 174034 - RNA, 15 nt, Human herpesvirus 6B
auaauaaaaguucca

SEQ ID NO: 174035 - RNA, 16 nt, Human herpesvirus 6B
auaauaaaaguuccau

SEQ ID NO: 174036 - RNA, 10 nt, Human herpesvirus 6B
auaagcucua

SEQ ID NO: 174037 - RNA, 14 nt, Human herpesvirus 6B
auaagcucuacaca

SEQ ID NO: 174038 - RNA, 15 nt, Human herpesvirus 6B
auaagguaucgucau

SEQ ID NO: 174039 - RNA, 14 nt, Human herpesvirus 6B
auaaucacaaauau

SEQ ID NO: 174040 - RNA, 18 nt, Human herpesvirus 6B
auacaagccaugacaaga

SEQ ID NO: 174041 - RNA, 22 nt, Human herpesvirus 6B
auacauguuuuugaugugcuac

SEQ ID NO: 174042 - RNA, 17 nt, Human herpesvirus 6B
auaaucuuguagcucag

SEQ ID NO: 174043 - RNA, 22 nt, Human herpesvirus 6B
auaaucugaucgaaauacuucu

SEQ ID NO: 174044 - RNA, 15 nt, Human herpesvirus 6B
auaaucgauuacaaa

SEQ ID NO: 174045 - RNA, 17 nt, Human herpesvirus 6B
auaauccugucuccuca

SEQ ID NO: 174046 - RNA, 19 nt, Human herpesvirus 6B
auaaugcucagauguggaa

SEQ ID NO: 174047 - RNA, 21 nt, Human herpesvirus 6B
auaauucggucaccaacauuc

SEQ ID NO: 174048 - RNA, 12 nt, Human herpesvirus 6B
auaauucagucu

SEQ ID NO: 174049 - RNA, 19 nt, Human herpesvirus 6B
auaauucagucugcuaaaa

SEQ ID NO: 174050 - RNA, 22 nt, Human herpesvirus 6B
auaauuagaauaggcgucucau

SEQ ID NO: 174051 - RNA, 23 nt, Human herpesvirus 6B
auaauuagaauaggcgucucaug

SEQ ID NO: 174052 - RNA, 13 nt, Human herpesvirus 6B
aguguuugccaac

SEQ ID NO: 174053 - RNA, 16 nt, Human herpesvirus 6B
aguguuugccaaccaa

SEQ ID NO: 174054 - RNA, 15 nt, Human herpesvirus 6B
aguguucgcauuaga

SEQ ID NO: 174055 - RNA, 12 nt, Human herpesvirus 6B
aguuaagacauu

SEQ ID NO: 174056 - RNA, 15 nt, Human herpesvirus 6B
aguuacacauucucc

SEQ ID NO: 174057 - RNA, 19 nt, Human herpesvirus 6B
aguuauacuggcaaagcaa

SEQ ID NO: 174058 - RNA, 14 nt, Human herpesvirus 6B
agucugcuaaaaau

SEQ ID NO: 174059 - RNA, 21 nt, Human herpesvirus 6B
agucugcuaaaaaucaucucg

SEQ ID NO: 174060 - RNA, 22 nt, Human herpesvirus 6B
agucugcuuuacaucgaaucuc

SEQ ID NO: 174061 - RNA, 19 nt, Human herpesvirus 6B
agucugaauuuaaugcaaa

SEQ ID NO: 174062 - RNA, 20 nt, Human herpesvirus 6B
agucugaauuuaaugcaaaa

SEQ ID NO: 174063 - RNA, 20 nt, Human herpesvirus 6B
agucuucaauaaaaacucaa

SEQ ID NO: 174064 - RNA, 14 nt, Human herpesvirus 6B
agugaauugugcaa

SEQ ID NO: 174065 - RNA, 15 nt, Human herpesvirus 6B
agugaauugugcaag

SEQ ID NO: 174066 - RNA, 15 nt, Human herpesvirus 6B
agucuuauaacacca

SEQ ID NO: 174067 - RNA, 17 nt, Human herpesvirus 6B
agucuuauaacaccagu

SEQ ID NO: 174068 - RNA, 18 nt, Human herpesvirus 6B
auaaaauaacaugugaca

SEQ ID NO: 174069 - RNA, 13 nt, Human herpesvirus 6B
auaaaauacacau

SEQ ID NO: 174070 - RNA, 17 nt, Human herpesvirus 6B
auaaaauacacaucuga

SEQ ID NO: 174071 - RNA, 11 nt, Human herpesvirus 6B
auaacaucuca

SEQ ID NO: 174072 - RNA, 12 nt, Human herpesvirus 6B
auaacaucucag

SEQ ID NO: 174073 - RNA, 19 nt, Human herpesvirus 6B
auaaagacuuacagagcuu

SEQ ID NO: 174074 - RNA, 12 nt, Human herpesvirus 6B
auaaacucugcc

SEQ ID NO: 174075 - RNA, 20 nt, Human herpesvirus 6B
auaaacucugccuguucaac

SEQ ID NO: 174076 - RNA, 21 nt, Human herpesvirus 6B
aguuuaccuaucaacaauguc

SEQ ID NO: 174077 - RNA, 15 nt, Human herpesvirus 6B
aguuuaaguucucac

SEQ ID NO: 174078 - RNA, 17 nt, Human herpesvirus 6B
aguuuaauaguuugcca

SEQ ID NO: 174079 - RNA, 19 nt, Human herpesvirus 6B
auaaaacaggguugcgaua

SEQ ID NO: 174080 - RNA, 19 nt, Human herpesvirus 6B
aguuucuguggaauuccaa

SEQ ID NO: 174081 - RNA, 23 nt, Human herpesvirus 6B
agucggugauuauagauagcucc

SEQ ID NO: 174082 - RNA, 19 nt, Human herpesvirus 6B
aguccuucaugauauucca

SEQ ID NO: 174083 - RNA, 16 nt, Human herpesvirus 6B
agucgcauuugugcuc

SEQ ID NO: 174084 - RNA, 20 nt, Human herpesvirus 6B
agucguuguguccugauuau

SEQ ID NO: 174085 - RNA, 22 nt, Human herpesvirus 6B
aguccagaaguccuucaugaua

SEQ ID NO: 174086 - RNA, 22 nt, Human herpesvirus 6B
agucaucauacaauauuuccau

SEQ ID NO: 174087 - RNA, 15 nt, Human herpesvirus 6B
agucauaauucucau

SEQ ID NO: 174088 - RNA, 15 nt, Human herpesvirus 6B
agucaaauugaauac

SEQ ID NO: 174089 - RNA, 14 nt, Human herpesvirus 6B
aggcgcaccacggc

SEQ ID NO: 174090 - RNA, 20 nt, Human herpesvirus 6B
aggcggagauucaauacuac

SEQ ID NO: 174091 - RNA, 22 nt, Human herpesvirus 6B
aggcggcaugaauuccaugcga

SEQ ID NO: 174092 - RNA, 17 nt, Human herpesvirus 6B
aggugcuuuuagagauu

SEQ ID NO: 174093 - RNA, 18 nt, Human herpesvirus 6B
agguguuaaacgaaaacu

SEQ ID NO: 174094 - RNA, 17 nt, Human herpesvirus 6B
agguucaaacaaugcaa

SEQ ID NO: 174095 - RNA, 18 nt, Human herpesvirus 6B
aguacauagaaucucugg

SEQ ID NO: 174096 - RNA, 18 nt, Human herpesvirus 6B
aguacguugguaucagug

SEQ ID NO: 174097 - RNA, 16 nt, Human herpesvirus 6B
uggaguaaaacgcuca

SEQ ID NO: 174098 - RNA, 10 nt, Human herpesvirus 6B
uacuuccugu

SEQ ID NO: 174099 - RNA, 19 nt, Human herpesvirus 6B
uacaaaccuucccuaucac

SEQ ID NO: 174100 - RNA, 9 nt, Human herpesvirus 6B
uaugagaau

SEQ ID NO: 174101 - RNA, 13 nt, Human herpesvirus 6B
ucaauaaauggcg

SEQ ID NO: 174102 - RNA, 14 nt, Human herpesvirus 6B
ucaauuucuaaaga

SEQ ID NO: 174103 - RNA, 23 nt, Human herpesvirus 6B
ucaguguucuggcuugucauucu

SEQ ID NO: 174104 - RNA, 13 nt, Human herpesvirus 6B
ucaguuucaaaua

SEQ ID NO: 174105 - RNA, 20 nt, Human herpesvirus 6B
gugaccguaucccucccugc

SEQ ID NO: 174106 - RNA, 18 nt, Human herpesvirus 6B
gugaaaaacacggcgccu

SEQ ID NO: 174107 - RNA, 16 nt, Human herpesvirus 6B
gucuccugggaacucu

SEQ ID NO: 174108 - RNA, 18 nt, Human herpesvirus 6B
guccuuacaaaccuuccc

SEQ ID NO: 174109 - RNA, 17 nt, Human herpesvirus 6B
guccguugucgaacucu

SEQ ID NO: 174110 - RNA, 22 nt, Human herpesvirus 6B
ggaggggaauacaccggagacc

SEQ ID NO: 174111 - RNA, 16 nt, Human herpesvirus 6B
cgagauucuuuaaaga

SEQ ID NO: 174112 - RNA, 21 nt, Human herpesvirus 6B
cgagacuggccgcauacaccc

SEQ ID NO: 174113 - RNA, 19 nt, Human herpesvirus 6B
cucugguaaaugucaaaga

SEQ ID NO: 174114 - RNA, 19 nt, Human herpesvirus 6B
cucuggucauuuugaaaga

SEQ ID NO: 174115 - RNA, 18 nt, Human herpesvirus 6B
cugacccgauguggaacg

SEQ ID NO: 174116 - RNA, 18 nt, Human herpesvirus 6B
cggggcgcaccggcgaca

SEQ ID NO: 174117 - RNA, 18 nt, Human herpesvirus 6B
auucuuauuuaccuuccu

SEQ ID NO: 174118 - RNA, 15 nt, Human herpesvirus 6B
auuuuaacauuuuua

SEQ ID NO: 174119 - RNA, 21 nt, Human herpesvirus 6B
auuuugucacucucaauuuca

SEQ ID NO: 174120 - RNA, 16 nt, Human herpesvirus 6B
auaaaauguccauucu

SEQ ID NO: 174121 - RNA, 14 nt, Human herpesvirus 6B
agcugaaauagaca

SEQ ID NO: 174122 - RNA, 16 nt, Human herpesvirus 6B
aggaacugaugagaaa

SEQ ID NO: 174123 - RNA, 14 nt, Human herpesvirus 6B
aaagcaucucaaaa

SEQ ID NO: 174124 - RNA, 19 nt, Human herpesvirus 6B
aaaacucgcaccucugaaa

SEQ ID NO: 174125 - RNA, 17 nt, Human herpesvirus 6B
accguagaccguuuuuu

SEQ ID NO: 174126 - RNA, 14 nt, Human herpesvirus 6B
acgaucagauguau

SEQ ID NO: 174127 - RNA, 20 nt, Human herpesvirus 6B
agaacaguuuaccuaucaac

SEQ ID NO: 174128 - RNA, 16 nt, Human herpesvirus 6B
uugacuccaacgcaca

SEQ ID NO: 174129 - RNA, 18 nt, Human herpesvirus 6B
uucgccaaaaauuuucga

SEQ ID NO: 174130 - RNA, 13 nt, Human herpesvirus 6B
uuccauuguuuga

SEQ ID NO: 174131 - RNA, 22 nt, Human herpesvirus 6B
ugccucuaacuguuguucuugg

SEQ ID NO: 174132 - RNA, 16 nt, Human herpesvirus 6B
ugauaaacuguacgcc

SEQ ID NO: 174133 - RNA, 13 nt, Human herpesvirus 6B
ucuuauaacacca

SEQ ID NO: 174134 - RNA, 14 nt, Human herpesvirus 6B
ugaaaauaaaggcu

SEQ ID NO: 174135 - RNA, 21 nt, Human herpesvirus 6B
uccggccaauucauuguacga

SEQ ID NO: 174136 - RNA, 18 nt, Human herpesvirus 6B
gaaaucacguugaaaugu

SEQ ID NO: 174137 - RNA, 15 nt, Human herpesvirus 6B
gaaaauuauagcuuc

SEQ ID NO: 174138 - RNA, 14 nt, Human herpesvirus 6B
gaaacauaaaaugu

SEQ ID NO: 174139 - RNA, 13 nt, Human herpesvirus 6B
gaagauagcucuc

SEQ ID NO: 174140 - RNA, 12 nt, Human herpesvirus 6B
gagcuucuuagg

SEQ ID NO: 174141 - RNA, 15 nt, Human herpesvirus 6B
cuucaauguuuuuca

SEQ ID NO: 174142 - RNA, 20 nt, Human herpesvirus 6B
cuauuggagauaauaaaaca

SEQ ID NO: 174143 - RNA, 15 nt, Human herpesvirus 6B
cggcggauggagccc

SEQ ID NO: 174144 - RNA, 18 nt, Human herpesvirus 6B
cguggaauuuguggaaca

SEQ ID NO: 174145 - RNA, 18 nt, Human herpesvirus 6B
ccugauccaugagcaccc

SEQ ID NO: 174146 - RNA, 14 nt, Human herpesvirus 6B
gcgcaccggcgaca

SEQ ID NO: 174147 - RNA, 11 nt, Human herpesvirus 6B
gauuguucgcu

SEQ ID NO: 174148 - RNA, 12 nt, Human herpesvirus 6B
ccagguuuuuca

SEQ ID NO: 174149 - RNA, 16 nt, Human herpesvirus 6B
ccagcauuuucaaagu

SEQ ID NO: 174150 - RNA, 14 nt, Human herpesvirus 6B
aguauaaauucuuu

SEQ ID NO: 174151 - RNA, 23 nt, Human herpesvirus 6B
aguauguauaauauaaauucuua

SEQ ID NO: 174152 - RNA, 21 nt, Human herpesvirus 6B
agggacccacacgcggggauc

SEQ ID NO: 174153 - RNA, 13 nt, Human herpesvirus 6B
agaggcgcgggac

SEQ ID NO: 174154 - RNA, 20 nt, Human herpesvirus 6B
agaggguuccuccgcgggac

SEQ ID NO: 174155 - RNA, 18 nt, Human herpesvirus 6B
acacgcuaaaaacagacg

SEQ ID NO: 174156 - RNA, 15 nt, Human herpesvirus 6B
acauagcaauucuua

SEQ ID NO: 174157 - RNA, 15 nt, Human herpesvirus 6B
acagacagggggauc

SEQ ID NO: 174158 - RNA, 23 nt, Human herpesvirus 6B
acauguuauuuuauuaaaucuua

SEQ ID NO: 174159 - RNA, 17 nt, Human herpesvirus 6B
aaguuuuugguuuuucg

SEQ ID NO: 174160 - RNA, 20 nt, Human herpesvirus 6B
aaugaucgccccagacuuau

SEQ ID NO: 174161 - RNA, 20 nt, Human herpesvirus 6B
aaugcaaaaucguguuuucu

SEQ ID NO: 174162 - RNA, 17 nt, Human herpesvirus 6B
aaugcagcaguuuuugu

SEQ ID NO: 174163 - RNA, 22 nt, Human herpesvirus 6B
aaucgcaaaaacauguuguucu

SEQ ID NO: 174164 - RNA, 21 nt, Human herpesvirus 6B
aaccgcaguuccuguuuuucu

SEQ ID NO: 174165 - RNA, 21 nt, Human herpesvirus 6B
aaccgcaguuucuguuuuucu

SEQ ID NO: 174166 - RNA, 14 nt, Human herpesvirus 6B
aaccacguuuuucc

SEQ ID NO: 174167 - RNA, 15 nt, Human herpesvirus 6B
aaccauguuuuuacu

SEQ ID NO: 174168 - RNA, 18 nt, Human herpesvirus 6B
aacgauaucguuuuugcu

SEQ ID NO: 174169 - RNA, 15 nt, Human herpesvirus 6B
aacgcgccagacguu

SEQ ID NO: 174170 - RNA, 15 nt, Homo sapiens
cuuacuuaguguuau

SEQ ID NO: 174171 - RNA, 15 nt, Homo sapiens
cuggagucugucaau

SEQ ID NO: 174172 - RNA, 14 nt, Homo sapiens
gauuuccacaguga

SEQ ID NO: 174173 - RNA, 22 nt, Homo sapiens
uuaccuuuuauuuuaauguuuc

SEQ ID NO: 174174 - RNA, 21 nt, Homo sapiens
ccugaugcuggggacacagca

SEQ ID NO: 174175 - RNA, 15 nt, Homo sapiens
ugugggcuccauuca

SEQ ID NO: 174176 - RNA, 17 nt, Homo sapiens
uagcuuauacaaaacau

SEQ ID NO: 174177 - RNA, 13 nt, Homo sapiens
gccauaugaauaa

SEQ ID NO: 174178 - RNA, 23 nt, Homo sapiens
ugaaaagaaucggcaauguuuca

SEQ ID NO: 174179 - RNA, 23 nt, Homo sapiens
caguuggcuaagaagugacucuu

SEQ ID NO: 174180 - RNA, 21 nt, Homo sapiens
ccgccacccucccacugccaa

SEQ ID NO: 174181 - RNA, 23 nt, Homo sapiens
gaagggcuuggacucaagcaaga

SEQ ID NO: 174182 - RNA, 19 nt, Homo sapiens
caaaaccaaauauuccaga

SEQ ID NO: 174183 - RNA, 23 nt, Homo sapiens
aaugagcaaaaccaaauauucca

SEQ ID NO: 174184 - RNA, 18 nt, Homo sapiens
uuaagaaauucacuuccc

SEQ ID NO: 174185 - RNA, 16 nt, Homo sapiens
aaucucuccauucccg

SEQ ID NO: 174186 - RNA, 19 nt, Homo sapiens
aacugaaugccacucugua

SEQ ID NO: 174187 - RNA, 22 nt, Homo sapiens
cuuaaaagaaagagaaguuuuc

SEQ ID NO: 174188 - RNA, 19 nt, Homo sapiens
cuuccuggaggugacacuu

SEQ ID NO: 174189 - RNA, 19 nt, Homo sapiens
uauauguauaucacauucc

SEQ ID NO: 174190 - RNA, 12 nt, Homo sapiens
agugauuuccac

SEQ ID NO: 174191 - RNA, 13 nt, Homo sapiens
agaaagugaucca

SEQ ID NO: 174192 - RNA, 22 nt, Homo sapiens
caucugccuccccuucacuccc

SEQ ID NO: 174193 - RNA, 13 nt, Homo sapiens
cagccucaucucu

SEQ ID NO: 174194 - RNA, 12 nt, Homo sapiens
uauuccagagac

SEQ ID NO: 174195 - RNA, 23 nt, Homo sapiens
cuucucugcuaucuagaucugaa

SEQ ID NO: 174196 - RNA, 13 nt, Homo sapiens
gacucuaacagua

SEQ ID NO: 174197 - RNA, 17 nt, Homo sapiens
auuuucuuuuuauacua

SEQ ID NO: 174198 - RNA, 16 nt, Homo sapiens
uagaaaagggaacuga

SEQ ID NO: 174199 - RNA, 15 nt, Homo sapiens
uuacuguccaaagac

SEQ ID NO: 174200 - RNA, 22 nt, Homo sapiens
ucaaagaaauuuccacucaggu

SEQ ID NO: 174201 - RNA, 19 nt, Homo sapiens
cuccuggaccaggucucau

SEQ ID NO: 174202 - RNA, 21 nt, Homo sapiens
auucucuagucaguuggcuaa

SEQ ID NO: 174203 - RNA, 21 nt, Homo sapiens
cacugccaaagaacuuggaaa

SEQ ID NO: 174204 - RNA, 22 nt, Homo sapiens
guguuuuuaauaaagacagggu

SEQ ID NO: 174205 - RNA, 20 nt, Homo sapiens
uugaaguauauucaaccaaa

SEQ ID NO: 174206 - RNA, 23 nt, Homo sapiens
uuauucuguaguuucacucucau

SEQ ID NO: 174207 - RNA, 14 nt, Homo sapiens
aaaaggcagaguac

SEQ ID NO: 174208 - RNA, 20 nt, Homo sapiens
uaaauuucucuacugucuca

SEQ ID NO: 174209 - RNA, 20 nt, Homo sapiens
ucugacucuuggcacagcau

SEQ ID NO: 174210 - RNA, 22 nt, Homo sapiens
gugcuucuuaaaauagccauaa

SEQ ID NO: 174211 - RNA, 18 nt, Homo sapiens
accaacuauagaauguau

SEQ ID NO: 174212 - RNA, 22 nt, Homo sapiens
aguuccgacugccaucuuggac

SEQ ID NO: 174213 - RNA, 14 nt, Homo sapiens
ugaaacaucauuuc

SEQ ID NO: 174214 - RNA, 19 nt, Homo sapiens
gaccugccaggcacacuga

SEQ ID NO: 174215 - RNA, 13 nt, Homo sapiens
ccuacugagacag

SEQ ID NO: 174216 - RNA, 15 nt, Homo sapiens
ggcuggagugcaaug

SEQ ID NO: 174217 - RNA, 22 nt, Homo sapiens
cagucuucuuccaugucuauua

SEQ ID NO: 174218 - RNA, 12 nt, Homo sapiens
aacuucugccuc

SEQ ID NO: 174219 - RNA, 18 nt, Homo sapiens
ugguuguauuaaagcagg

SEQ ID NO: 174220 - RNA, 21 nt, Homo sapiens
cagagucucgcucuguugccc

SEQ ID NO: 174221 - RNA, 17 nt, Homo sapiens
ucaugagugcaacugug

SEQ ID NO: 174222 - RNA, 13 nt, Homo sapiens
guuggcucaggag

SEQ ID NO: 174223 - RNA, 20 nt, Homo sapiens
agcuuacaagccagcuggag

SEQ ID NO: 174224 - RNA, 17 nt, Homo sapiens
accuaacgagaaauaga

SEQ ID NO: 174225 - RNA, 23 nt, Homo sapiens
aagacgugauuuugcuguagaag

SEQ ID NO: 174226 - RNA, 19 nt, Homo sapiens
guuuauacccguuucacau

SEQ ID NO: 174227 - RNA, 11 nt, Homo sapiens
auaguuuccaa

SEQ ID NO: 174228 - RNA, 22 nt, Homo sapiens
acuuauagaauucagucaaaga

SEQ ID NO: 174229 - RNA, 17 nt, Homo sapiens
agaaaguggcuugaaau

SEQ ID NO: 174230 - RNA, 17 nt, Homo sapiens
ugaaagugagacuuuga

SEQ ID NO: 174231 - RNA, 22 nt, Homo sapiens
uaaauuucucuacugucucagu

SEQ ID NO: 174232 - RNA, 16 nt, Homo sapiens
gauuuugcuguagaag

SEQ ID NO: 174233 - RNA, 15 nt, Homo sapiens
cucaggcagaucuca

SEQ ID NO: 174234 - RNA, 20 nt, Homo sapiens
ccacagugacuccacucuga

SEQ ID NO: 174235 - RNA, 17 nt, Homo sapiens
gacgugauuuugcugua

SEQ ID NO: 174236 - RNA, 13 nt, Homo sapiens
caaaguaagccau

SEQ ID NO: 174237 - RNA, 21 nt, Homo sapiens
auaacuuuuuuuuaaguuaca

SEQ ID NO: 174238 - RNA, 15 nt, Homo sapiens
aauguagaaagugau

SEQ ID NO: 174239 - RNA, 21 nt, Homo sapiens
uugcccaggcuggagugcaau

SEQ ID NO: 174240 - RNA, 23 nt, Homo sapiens
acccuucuccuuagaaguggaag

SEQ ID NO: 174241 - RNA, 16 nt, Homo sapiens
aaguuuaauugacuua

SEQ ID NO: 174242 - RNA, 21 nt, Homo sapiens
ccuaaaaggcagaguacaaag

SEQ ID NO: 174243 - RNA, 23 nt, Homo sapiens
agaagguugagggcaauggacaa

SEQ ID NO: 174244 - RNA, 16 nt, Homo sapiens
acacagcaucagcuca

SEQ ID NO: 174245 - RNA, 18 nt, Homo sapiens
ucauaaaagucacuuuau

SEQ ID NO: 174246 - RNA, 14 nt, Homo sapiens
aucaguguuuccaa

SEQ ID NO: 174247 - RNA, 16 nt, Homo sapiens
aauaaauucaucagau

SEQ ID NO: 174248 - RNA, 17 nt, Homo sapiens
aagaucguucucugccu

SEQ ID NO: 174249 - RNA, 15 nt, Homo sapiens
ccuuugccugguaca

SEQ ID NO: 174250 - RNA, 16 nt, Homo sapiens
aaauauaguucacaau

SEQ ID NO: 174251 - RNA, 17 nt, Homo sapiens
agcuggauuacaggcau

SEQ ID NO: 174252 - RNA, 23 nt, Homo sapiens
uuaaaaggaaagcagauggugga

SEQ ID NO: 174253 - RNA, 19 nt, Homo sapiens
ccaagcaguuucuuucaaa

SEQ ID NO: 174254 - RNA, 15 nt, Homo sapiens
ucaaaaacauucuua

SEQ ID NO: 174255 - RNA, 21 nt, Homo sapiens
aaauuaagaaauucacuuccc

SEQ ID NO: 174256 - RNA, 22 nt, Homo sapiens
ucauucugcauucucuagucag

SEQ ID NO: 174257 - RNA, 17 nt, Homo sapiens
cuaagcacgggccauau

SEQ ID NO: 174258 - RNA, 18 nt, Homo sapiens
aaaccugaugcuggggac

SEQ ID NO: 174259 - RNA, 19 nt, Homo sapiens
cuagcaacauuuguuuuag

SEQ ID NO: 174260 - RNA, 20 nt, Homo sapiens
guagaaagugauccauacuu

SEQ ID NO: 174261 - RNA, 13 nt, Homo sapiens
gaaaaguuuugua

SEQ ID NO: 174262 - RNA, 15 nt, Homo sapiens
aaaacaaucuuguca

SEQ ID NO: 174263 - RNA, 18 nt, Homo sapiens
auguaagaucguucucug

SEQ ID NO: 174264 - RNA, 13 nt, Homo sapiens
agguugagggcaa

SEQ ID NO: 174265 - RNA, 19 nt, Homo sapiens
ugcuucaaaaacauucuua

SEQ ID NO: 174266 - RNA, 23 nt, Homo sapiens
cauucugcacucagaaaauggca

SEQ ID NO: 174267 - RNA, 16 nt, Homo sapiens
uacaaaguaagccaug

SEQ ID NO: 174268 - RNA, 19 nt, Homo sapiens
uugcuugcacaaaccaauu

SEQ ID NO: 174269 - RNA, 22 nt, Homo sapiens
cacuuagguccaaggucuccag

SEQ ID NO: 174270 - RNA, 15 nt, Homo sapiens
ugcagccacuguuaa

SEQ ID NO: 174271 - RNA, 21 nt, Homo sapiens
ucucccagccagguucugacu

SEQ ID NO: 174272 - RNA, 23 nt, Homo sapiens
ccacccccaaauuuucuuuuuau

SEQ ID NO: 174273 - RNA, 14 nt, Homo sapiens
acaaaguaagccau

SEQ ID NO: 174274 - RNA, 22 nt, Homo sapiens
uuaaauguagaaagugauccau

SEQ ID NO: 174275 - RNA, 13 nt, Homo sapiens
cuaaguaaauaca

SEQ ID NO: 174276 - RNA, 20 nt, Homo sapiens
cugaccaauauuguacaguu

SEQ ID NO: 174277 - RNA, 14 nt, Homo sapiens
caaugucuaaaaac

SEQ ID NO: 174278 - RNA, 16 nt, Homo sapiens
gacucaucauuuccau

SEQ ID NO: 174279 - RNA, 23 nt, Homo sapiens
caguugcagcuguuuuguugaca

SEQ ID NO: 174280 - RNA, 15 nt, Homo sapiens
auucucuagucaguu

SEQ ID NO: 174281 - RNA, 13 nt, Homo sapiens
aaaaugugacuca

SEQ ID NO: 174282 - RNA, 12 nt, Homo sapiens
uaagaugaaaca

SEQ ID NO: 174283 - RNA, 18 nt, Homo sapiens
auugcaauagaaauccaa

SEQ ID NO: 174284 - RNA, 20 nt, Homo sapiens
uacccguuucacaugcuuuu

SEQ ID NO: 174285 - RNA, 14 nt, Homo sapiens
guuuucccaaagag

SEQ ID NO: 174286 - RNA, 16 nt, Homo sapiens
caauauuguacaguuu

SEQ ID NO: 174287 - RNA, 20 nt, Homo sapiens
guuaaaaguuguguuuugaa

SEQ ID NO: 174288 - RNA, 14 nt, Homo sapiens
aauaaaauuguaca

SEQ ID NO: 174289 - RNA, 14 nt, Homo sapiens
caucauuucaaucg

SEQ ID NO: 174290 - RNA, 15 nt, Homo sapiens
acacaaucugaaaca

SEQ ID NO: 174291 - RNA, 22 nt, Homo sapiens
gguacaguauggggguuguaaa

SEQ ID NO: 174292 - RNA, 19 nt, Homo sapiens
guuguuaauaaaaguacau

SEQ ID NO: 174293 - RNA, 14 nt, Homo sapiens
aaagaacuuggaaa

SEQ ID NO: 174294 - RNA, 21 nt, Homo sapiens
uaagaagcagauaaugguguu

SEQ ID NO: 174295 - RNA, 14 nt, Homo sapiens
uguguuuuuaauaa

SEQ ID NO: 174296 - RNA, 14 nt, Homo sapiens
ggguucaagugauu

SEQ ID NO: 174297 - RNA, 15 nt, Homo sapiens
acucaucauuuccau

SEQ ID NO: 174298 - RNA, 18 nt, Homo sapiens
aaguacauguuaaacuua

SEQ ID NO: 174299 - RNA, 22 nt, Homo sapiens
acagcauggagucacagccacu

SEQ ID NO: 174300 - RNA, 22 nt, Homo sapiens
guaaaauaaucaguguuuccaa

SEQ ID NO: 174301 - RNA, 14 nt, Homo sapiens
gcuguagaagaugg

SEQ ID NO: 174302 - RNA, 20 nt, Homo sapiens
guuaaaauaaaauuguacau

SEQ ID NO: 174303 - RNA, 15 nt, Homo sapiens
cccgucgacguagaa

SEQ ID NO: 174304 - RNA, 14 nt, Homo sapiens
uuaauaaaaguaca

SEQ ID NO: 174305 - RNA, 21 nt, Homo sapiens
ucugaacaauauauacuuaua

SEQ ID NO: 174306 - RNA, 22 nt, Homo sapiens
uagagaccaguuuucucuggaa

SEQ ID NO: 174307 - RNA, 22 nt, Homo sapiens
gggaaggaggccguccaucccg

SEQ ID NO: 174308 - RNA, 20 nt, Homo sapiens
aaucuuucugcagaaacaga

SEQ ID NO: 174309 - RNA, 15 nt, Homo sapiens
uuaaaaauaugugua

SEQ ID NO: 174310 - RNA, 15 nt, Homo sapiens
acagcaucagcucaa

SEQ ID NO: 174311 - RNA, 14 nt, Homo sapiens
guuccgacugccau

SEQ ID NO: 174312 - RNA, 12 nt, Homo sapiens
uuugcuguagaa

SEQ ID NO: 174313 - RNA, 22 nt, Homo sapiens
guuucauauugaugugugucua

SEQ ID NO: 174314 - RNA, 16 nt, Homo sapiens
gcccagccucaucucu

SEQ ID NO: 174315 - RNA, 18 nt, Homo sapiens
acugaauuuugucuuuau

SEQ ID NO: 174316 - RNA, 20 nt, Homo sapiens
ugucuuuggugaacauugca

SEQ ID NO: 174317 - RNA, 12 nt, Homo sapiens
ucugcuagggaa

SEQ ID NO: 174318 - RNA, 16 nt, Homo sapiens
ucaauguccuacugag

SEQ ID NO: 174319 - RNA, 22 nt, Homo sapiens
caaaaacauucuuacauuuuac

SEQ ID NO: 174320 - RNA, 21 nt, Homo sapiens
acuuuuuccuggcucaucucu

SEQ ID NO: 174321 - RNA, 17 nt, Homo sapiens
gacucuuggcacagcau

SEQ ID NO: 174322 - RNA, 13 nt, Homo sapiens
gucacagccacuu

SEQ ID NO: 174323 - RNA, 15 nt, Homo sapiens
uagaaagaagaugaa

SEQ ID NO: 174324 - RNA, 16 nt, Homo sapiens
ucagcaccuacagugu

SEQ ID NO: 174325 - RNA, 18 nt, Homo sapiens
ucagaaaauggcacuugg

SEQ ID NO: 174326 - RNA, 17 nt, Homo sapiens
uaaauauagcucaggua

SEQ ID NO: 174327 - RNA, 20 nt, Homo sapiens
gaccugccaggcacacugag

SEQ ID NO: 174328 - RNA, 15 nt, Homo sapiens
ccaaauuauggcaaa

SEQ ID NO: 174329 - RNA, 16 nt, Homo sapiens
cccuccauucugcacu

SEQ ID NO: 174330 - RNA, 24 nt, Homo sapiens
agugagacuuugaggguguauauu

SEQ ID NO: 174331 - RNA, 16 nt, Homo sapiens
ucaacaaagucaccca

SEQ ID NO: 174332 - RNA, 17 nt, Homo sapiens
guuguuuucccaaagag

SEQ ID NO: 174333 - RNA, 21 nt, Homo sapiens
acuguuuugguuuugcucaca

SEQ ID NO: 174334 - RNA, 23 nt, Homo sapiens
uaaaaaaaaaaaaaaaagugaug

SEQ ID NO: 174335 - RNA, 14 nt, Homo sapiens
uauacaauauacuu

SEQ ID NO: 174336 - RNA, 13 nt, Homo sapiens
guucucugccuca

SEQ ID NO: 174337 - RNA, 22 nt, Homo sapiens
ugucaauguccuacugagacag

SEQ ID NO: 174338 - RNA, 20 nt, Homo sapiens
uagauaaucucuccauuccc

SEQ ID NO: 174339 - RNA, 24 nt, Homo sapiens
cauguuggccaggcuggucucaaa

SEQ ID NO: 174340 - RNA, 14 nt, Homo sapiens
uagaauucagucaa

SEQ ID NO: 174341 - RNA, 23 nt, Homo sapiens
guucauggauauguuauacugaa

SEQ ID NO: 174342 - RNA, 22 nt, Homo sapiens
gucuuggcucacugcaacuucu

SEQ ID NO: 174343 - RNA, 16 nt, Homo sapiens
ucagggagugggcuaa

SEQ ID NO: 174344 - RNA, 21 nt, Homo sapiens
uaaaauaaucaguguuuccaa

SEQ ID NO: 174345 - RNA, 13 nt, Homo sapiens
uggagucugucaa

SEQ ID NO: 174346 - RNA, 21 nt, Homo sapiens
cugaugcuggggacacagcau

SEQ ID NO: 174347 - RNA, 22 nt, Homo sapiens
uggcuucuuuacuuaguucaag

SEQ ID NO: 174348 - RNA, 22 nt, Homo sapiens
uagucugaacaauauauacuua

SEQ ID NO: 174349 - RNA, 12 nt, Homo sapiens
uuacauugccuu

SEQ ID NO: 174350 - RNA, 22 nt, Homo sapiens
caauauauacuuauagaauuca

SEQ ID NO: 174351 - RNA, 15 nt, Homo sapiens
uaucuaaaaucugcu

SEQ ID NO: 174352 - RNA, 20 nt, Homo sapiens
cuuguuguuuucccaaagag

SEQ ID NO: 174353 - RNA, 19 nt, Homo sapiens
gacgugauuuugcuguaga

SEQ ID NO: 174354 - RNA, 19 nt, Homo sapiens
gcuucuuaaaauagccaua

SEQ ID NO: 174355 - RNA, 14 nt, Homo sapiens
aagaaacauugccu

SEQ ID NO: 174356 - RNA, 16 nt, Homo sapiens
gcaauagaaauccaau

SEQ ID NO: 174357 - RNA, 19 nt, Homo sapiens
guguacagucuuguauuaa

SEQ ID NO: 174358 - RNA, 22 nt, Homo sapiens
aaagccaaucucaaucccucaa

SEQ ID NO: 174359 - RNA, 12 nt, Homo sapiens
augacacagucu

SEQ ID NO: 174360 - RNA, 20 nt, Homo sapiens
gaacguuuuuccuguucuua

SEQ ID NO: 174361 - RNA, 18 nt, Homo sapiens
ucucgugguaggacugua

SEQ ID NO: 174362 - RNA, 15 nt, Homo sapiens
agaaagugauccaua

SEQ ID NO: 174363 - RNA, 16 nt, Homo sapiens
aaacagaaaaccugau

SEQ ID NO: 174364 - RNA, 23 nt, Homo sapiens
gccuuccuggaggugacacuuga

SEQ ID NO: 174365 - RNA, 19 nt, Homo sapiens
gugcugggauuacagggau

SEQ ID NO: 174366 - RNA, 22 nt, Homo sapiens
ucccucaaaacaaucuugucau

SEQ ID NO: 174367 - RNA, 11 nt, Homo sapiens
aguaagccaug

SEQ ID NO: 174368 - RNA, 21 nt, Homo sapiens
aguauauucaaccaaauacuu

SEQ ID NO: 174369 - RNA, 11 nt, Homo sapiens
ggaacugugua

SEQ ID NO: 174370 - RNA, 22 nt, Homo sapiens
guaacuguuuugguuuugcuca

SEQ ID NO: 174371 - RNA, 16 nt, Homo sapiens
augacacucuagucaa

SEQ ID NO: 174372 - RNA, 18 nt, Homo sapiens
aaccucgagguuucucaa

SEQ ID NO: 174373 - RNA, 12 nt, Homo sapiens
aaugaaagugag

SEQ ID NO: 174374 - RNA, 19 nt, Homo sapiens
uuggauacgacaacuugca

SEQ ID NO: 174375 - RNA, 22 nt, Homo sapiens
aagaugaaugagcaaaaccaaa

SEQ ID NO: 174376 - RNA, 21 nt, Homo sapiens
aacuucaacguaagacugugu

SEQ ID NO: 174377 - RNA, 23 nt, Homo sapiens
uaaaaguuggcucaggagucuua

SEQ ID NO: 174378 - RNA, 17 nt, Homo sapiens
acauaaaaguuggcuca

SEQ ID NO: 174379 - RNA, 13 nt, Homo sapiens
caacuguggcuua

SEQ ID NO: 174380 - RNA, 14 nt, Homo sapiens
ugcaauguuuuaga

SEQ ID NO: 174381 - RNA, 13 nt, Homo sapiens
cuuuauugcucau

SEQ ID NO: 174382 - RNA, 17 nt, Homo sapiens
caggacagcuccuggac

SEQ ID NO: 174383 - RNA, 14 nt, Homo sapiens
aauagugauuucca

SEQ ID NO: 174384 - RNA, 13 nt, Homo sapiens
ggaaccagcccag

SEQ ID NO: 174385 - RNA, 12 nt, Homo sapiens
uuuuauauccac

SEQ ID NO: 174386 - RNA, 9 nt, Homo sapiens
aaagugaug

SEQ ID NO: 174387 - RNA, 15 nt, Homo sapiens
uggcuucuuuacuua

SEQ ID NO: 174388 - RNA, 15 nt, Homo sapiens
ggaccaggucucaua

SEQ ID NO: 174389 - RNA, 18 nt, Homo sapiens
gucacagccacuugggau

SEQ ID NO: 174390 - RNA, 21 nt, Homo sapiens
uguuuaugaauaguuuccaaa

SEQ ID NO: 174391 - RNA, 22 nt, Homo sapiens
cccgccacccucccacugccaa

SEQ ID NO: 174392 - RNA, 15 nt, Homo sapiens
auucuccugccucag

SEQ ID NO: 174393 - RNA, 21 nt, Homo sapiens
ugagacuuacuucucugcuau

SEQ ID NO: 174394 - RNA, 13 nt, Homo sapiens
caguaguugcaau

SEQ ID NO: 174395 - RNA, 14 nt, Homo sapiens
acuaagaagcagau

SEQ ID NO: 174396 - RNA, 17 nt, Homo sapiens
caaauugggccaaagaa

SEQ ID NO: 174397 - RNA, 16 nt, Homo sapiens
gcagaguacaaaguaa

SEQ ID NO: 174398 - RNA, 23 nt, Homo sapiens
uccuggggaacauagaacucaug

SEQ ID NO: 174399 - RNA, 19 nt, Homo sapiens
gucugaacaauauauacuu

SEQ ID NO: 174400 - RNA, 13 nt, Homo sapiens
ugggauuacaggg

SEQ ID NO: 174401 - RNA, 13 nt, Homo sapiens
gaacuuaugcaaa

SEQ ID NO: 174402 - RNA, 23 nt, Homo sapiens
ccuaagccaugggagacacugau

SEQ ID NO: 174403 - RNA, 17 nt, Homo sapiens
auucagggagugggcua

SEQ ID NO: 174404 - RNA, 23 nt, Homo sapiens
ggcagaguacaaaguaagccaug

SEQ ID NO: 174405 - RNA, 16 nt, Homo sapiens
acccucccacugccaa

SEQ ID NO: 174406 - RNA, 15 nt, Homo sapiens
aguucauggauaugu

SEQ ID NO: 174407 - RNA, 14 nt, Homo sapiens
acacagcaucagcu

SEQ ID NO: 174408 - RNA, 18 nt, Homo sapiens
aauugggaauaugcacaa

SEQ ID NO: 174409 - RNA, 13 nt, Homo sapiens
cauuuguuuucac

SEQ ID NO: 174410 - RNA, 16 nt, Homo sapiens
gaaguuuaauugacuu

SEQ ID NO: 174411 - RNA, 16 nt, Homo sapiens
cugcuucugauaugca

SEQ ID NO: 174412 - RNA, 16 nt, Homo sapiens
ggggacacagcaucag

SEQ ID NO: 174413 - RNA, 16 nt, Homo sapiens
uaugaauaguuuccaa

SEQ ID NO: 174414 - RNA, 22 nt, Homo sapiens
ucaaacaaaaagucauaaaagu

SEQ ID NO: 174415 - RNA, 14 nt, Homo sapiens
ucucugcuaucuag

SEQ ID NO: 174416 - RNA, 23 nt, Homo sapiens
aagacgucacccuccauucugca

SEQ ID NO: 174417 - RNA, 19 nt, Homo sapiens
gaguacaaaguaagccaug

SEQ ID NO: 174418 - RNA, 14 nt, Homo sapiens
uagcuccacaaagc

SEQ ID NO: 174419 - RNA, 17 nt, Homo sapiens
uaaaccguacacugugu

SEQ ID NO: 174420 - RNA, 21 nt, Homo sapiens
ugccacucuguaauugcaaaa

SEQ ID NO: 174421 - RNA, 19 nt, Homo sapiens
ugaacauugcaauagaaau

SEQ ID NO: 174422 - RNA, 15 nt, Homo sapiens
aguuguuaauaaaag

SEQ ID NO: 174423 - RNA, 22 nt, Homo sapiens
ccauuugcuuagaaagucugau

SEQ ID NO: 174424 - RNA, 19 nt, Homo sapiens
uaaagaaaaguuuuguaaa

SEQ ID NO: 174425 - RNA, 19 nt, Homo sapiens
cuggcaguggaacuaagaa

SEQ ID NO: 174426 - RNA, 17 nt, Homo sapiens
uaugacacucuagucaa

SEQ ID NO: 174427 - RNA, 22 nt, Homo sapiens
uuaaaaaauggacucuugaaau

SEQ ID NO: 174428 - RNA, 14 nt, Homo sapiens
aaugagacuuacuu

SEQ ID NO: 174429 - RNA, 14 nt, Homo sapiens
gcuucugauaugca

SEQ ID NO: 174430 - RNA, 14 nt, Homo sapiens
uaguggugacugug

SEQ ID NO: 174431 - RNA, 21 nt, Homo sapiens
ggcuucagucuuuuccaugaa

SEQ ID NO: 174432 - RNA, 17 nt, Homo sapiens
gauuugggcucuuggaa

SEQ ID NO: 174433 - RNA, 18 nt, Homo sapiens
aucugaaacagcuucaug

SEQ ID NO: 174434 - RNA, 23 nt, Homo sapiens
aaugucuuuauuaaauguagaaa

SEQ ID NO: 174435 - RNA, 23 nt, Homo sapiens
cuuuuuuuuuuuuuaaagacaga

SEQ ID NO: 174436 - RNA, 19 nt, Homo sapiens
uguauuuaaaugaaaguga

SEQ ID NO: 174437 - RNA, 17 nt, Homo sapiens
gucaauguccuacugag

SEQ ID NO: 174438 - RNA, 21 nt, Homo sapiens
ucaagacgucacccuccauuc

SEQ ID NO: 174439 - RNA, 13 nt, Homo sapiens
uaaauguagaaag

SEQ ID NO: 174440 - RNA, 12 nt, Homo sapiens
aauaaagacagg

SEQ ID NO: 174441 - RNA, 20 nt, Homo sapiens
gcuuagcuaauauugcaaug

SEQ ID NO: 174442 - RNA, 22 nt, Homo sapiens
uggauuugucuuuggugaacau

SEQ ID NO: 174443 - RNA, 15 nt, Homo sapiens
aggcuucuggggcuu

SEQ ID NO: 174444 - RNA, 19 nt, Homo sapiens
agacgugauuuugcuguag

SEQ ID NO: 174445 - RNA, 15 nt, Homo sapiens
uguccuguuacaaaa

SEQ ID NO: 174446 - RNA, 20 nt, Homo sapiens
ucagucuuuuccaugaacuu

SEQ ID NO: 174447 - RNA, 10 nt, Homo sapiens
aaaagugaug

SEQ ID NO: 174448 - RNA, 18 nt, Homo sapiens
ccugccaggcacacugag

SEQ ID NO: 174449 - RNA, 21 nt, Homo sapiens
gauaggguuucuaaugguuau

SEQ ID NO: 174450 - RNA, 14 nt, Homo sapiens
gacagaagcguaua

SEQ ID NO: 174451 - RNA, 13 nt, Homo sapiens
caaagaaauuucc

SEQ ID NO: 174452 - RNA, 16 nt, Homo sapiens
cugugccaucagcucc

SEQ ID NO: 174453 - RNA, 21 nt, Homo sapiens
cagaaucucucuucuuuucaa

SEQ ID NO: 174454 - RNA, 18 nt, Homo sapiens
gaugaaacaucauuucaa

SEQ ID NO: 174455 - RNA, 23 nt, Homo sapiens
caaucaguagccagcaucugccu

SEQ ID NO: 174456 - RNA, 14 nt, Homo sapiens
cacuguuaagccau

SEQ ID NO: 174457 - RNA, 14 nt, Homo sapiens
uagaagauggcacu

SEQ ID NO: 174458 - RNA, 15 nt, Homo sapiens
cuuuauacucaggca

SEQ ID NO: 174459 - RNA, 14 nt, Homo sapiens
uugcucacaaaagu

SEQ ID NO: 174460 - RNA, 18 nt, Homo sapiens
acaaauugggccaaagaa

SEQ ID NO: 174461 - RNA, 18 nt, Homo sapiens
uuguuauucuguaguuuc

SEQ ID NO: 174462 - RNA, 16 nt, Homo sapiens
gccacuguuaagccau

SEQ ID NO: 174463 - RNA, 22 nt, Homo sapiens
agagagaaaaguaacuguuuug

SEQ ID NO: 174464 - RNA, 11 nt, Homo sapiens
caaaaccaaau

SEQ ID NO: 174465 - RNA, 15 nt, Homo sapiens
guugcuguaugucuc

SEQ ID NO: 174466 - RNA, 22 nt, Homo sapiens
cgaauauaucaguaauuucaga

SEQ ID NO: 174467 - RNA, 20 nt, Homo sapiens
cuguucuaaggcugugccau

SEQ ID NO: 174468 - RNA, 22 nt, Homo sapiens
guucauggauauguuauacuga

SEQ ID NO: 174469 - RNA, 21 nt, Homo sapiens
aaaaguuuuguaaauuucucu

SEQ ID NO: 174470 - RNA, 16 nt, Homo sapiens
uuaauaaagacagggu

SEQ ID NO: 174471 - RNA, 21 nt, Homo sapiens
uaagaucguucucugccucac

SEQ ID NO: 174472 - RNA, 16 nt, Homo sapiens
ugaccugccaggcaca

SEQ ID NO: 174473 - RNA, 19 nt, Homo sapiens
uuggcuaguaaaagccauc

SEQ ID NO: 174474 - RNA, 12 nt, Homo sapiens
gagcaaacagaa

SEQ ID NO: 174475 - RNA, 17 nt, Homo sapiens
auguagaaagugaucca

SEQ ID NO: 174476 - RNA, 13 nt, Homo sapiens
gaauaguuuccaa

SEQ ID NO: 174477 - RNA, 15 nt, Homo sapiens
cuguggccaaguucu

SEQ ID NO: 174478 - RNA, 12 nt, Homo sapiens
aaaaugugacuc

SEQ ID NO: 174479 - RNA, 15 nt, Homo sapiens
aagccauguguucca

SEQ ID NO: 174480 - RNA, 19 nt, Homo sapiens
ccacuauugcuugcacaaa

SEQ ID NO: 174481 - RNA, 16 nt, Homo sapiens
gcuaguaaaagccauc

SEQ ID NO: 174482 - RNA, 14 nt, Homo sapiens
guuuaguugcacaa

SEQ ID NO: 174483 - RNA, 22 nt, Homo sapiens
gugaccugccaggcacacugag

SEQ ID NO: 174484 - RNA, 20 nt, Homo sapiens
uuguauuuaaaugaaaguga

SEQ ID NO: 174485 - RNA, 18 nt, Homo sapiens
cacucuguaauugcaaaa

SEQ ID NO: 174486 - RNA, 14 nt, Homo sapiens
ccagccucaucucu

SEQ ID NO: 174487 - RNA, 22 nt, Homo sapiens
uacugcuggcaguggaacuaag

SEQ ID NO: 174488 - RNA, 13 nt, Homo sapiens
augaaacaucauu

SEQ ID NO: 174489 - RNA, 20 nt, Homo sapiens
cuauaagaugaaacaucauu

SEQ ID NO: 174490 - RNA, 14 nt, Homo sapiens
agccucaucucuuu

SEQ ID NO: 174491 - RNA, 20 nt, Homo sapiens
ggcuggagugcaaugacaca

SEQ ID NO: 174492 - RNA, 16 nt, Homo sapiens
uaagccauguguucca

SEQ ID NO: 174493 - RNA, 19 nt, Homo sapiens
aagggcuuggacucaagca

SEQ ID NO: 174494 - RNA, 22 nt, Homo sapiens
cuagaguucauggauauguuau

SEQ ID NO: 174495 - RNA, 22 nt, Homo sapiens
gaaaauugggaauaugcacaaa

SEQ ID NO: 174496 - RNA, 12 nt, Homo sapiens
uucacucccacc

SEQ ID NO: 174497 - RNA, 13 nt, Homo sapiens
gguucaagugauu

SEQ ID NO: 174498 - RNA, 20 nt, Homo sapiens
gucugucaauguccuacuga

SEQ ID NO: 174499 - RNA, 17 nt, Homo sapiens
auccuggggaacauaga

SEQ ID NO: 174500 - RNA, 22 nt, Homo sapiens
caaucaauucauaucuauuuau

SEQ ID NO: 174501 - RNA, 16 nt, Homo sapiens
cuaaauaugagcccag

SEQ ID NO: 174502 - RNA, 23 nt, Homo sapiens
auauacuuauagaauucagucaa

SEQ ID NO: 174503 - RNA, 17 nt, Homo sapiens
uagcauuugucaacaaa

SEQ ID NO: 174504 - RNA, 22 nt, Homo sapiens
aagccuugguaaaauaaucagu

SEQ ID NO: 174505 - RNA, 13 nt, Homo sapiens
ggguaaauucucu

SEQ ID NO: 174506 - RNA, 14 nt, Homo sapiens
uacuuaguucaagc

SEQ ID NO: 174507 - RNA, 11 nt, Homo sapiens
auaaagacagg

SEQ ID NO: 174508 - RNA, 20 nt, Homo sapiens
gacucuaacaguaguugcaa

SEQ ID NO: 174509 - RNA, 16 nt, Homo sapiens
cuaacaguaguugcaa

SEQ ID NO: 174510 - RNA, 17 nt, Homo sapiens
agaugcauccuuucaua

SEQ ID NO: 174511 - RNA, 22 nt, Homo sapiens
uguacaguuuuuauugcuuguu

SEQ ID NO: 174512 - RNA, 16 nt, Homo sapiens
cuuaaaauagccauaa

SEQ ID NO: 174513 - RNA, 22 nt, Homo sapiens
gaaaagaaucggcaauguuuca

SEQ ID NO: 174514 - RNA, 14 nt, Homo sapiens
acugaacauuccag

SEQ ID NO: 174515 - RNA, 17 nt, Homo sapiens
auaugacacucuaguca

SEQ ID NO: 174516 - RNA, 13 nt, Homo sapiens
auauacuuauaga

SEQ ID NO: 174517 - RNA, 18 nt, Homo sapiens
aacaggaauucugaauua

SEQ ID NO: 174518 - RNA, 18 nt, Homo sapiens
acgugauuuugcuguaga

SEQ ID NO: 174519 - RNA, 11 nt, Homo sapiens
cacaugcuuuu

SEQ ID NO: 174520 - RNA, 17 nt, Homo sapiens
caaacuccugaccucaa

SEQ ID NO: 174521 - RNA, 14 nt, Homo sapiens
caauguuuuagaau

SEQ ID NO: 174522 - RNA, 19 nt, Homo sapiens
uguuaagccauguguucca

SEQ ID NO: 174523 - RNA, 18 nt, Homo sapiens
uggccaggcuggucucaa

SEQ ID NO: 174524 - RNA, 22 nt, Homo sapiens
ccauuagcauuugucaacaaag

SEQ ID NO: 174525 - RNA, 21 nt, Homo sapiens
guuguuaauaaaaguacaugu

SEQ ID NO: 174526 - RNA, 16 nt, Homo sapiens
uagcuuauacaaaaca

SEQ ID NO: 174527 - RNA, 13 nt, Homo sapiens
aaaguaagccaug

SEQ ID NO: 174528 - RNA, 19 nt, Homo sapiens
cucgagguuucucaaagaa

SEQ ID NO: 174529 - RNA, 18 nt, Homo sapiens
uuaaaccguacacugugu

SEQ ID NO: 174530 - RNA, 14 nt, Homo sapiens
ucaacaaagucacc

SEQ ID NO: 174531 - RNA, 20 nt, Homo sapiens
aaccaaauacuuuaauguau

SEQ ID NO: 174532 - RNA, 11 nt, Homo sapiens
acccucccacu

SEQ ID NO: 174533 - RNA, 22 nt, Homo sapiens
ugauuucagcaccuacagugua

SEQ ID NO: 174534 - RNA, 17 nt, Homo sapiens
uagugaaucacguaaag

SEQ ID NO: 174535 - RNA, 15 nt, Homo sapiens
cacaaauuaguugua

SEQ ID NO: 174536 - RNA, 22 nt, Homo sapiens
aaacccaguaguggugacugug

SEQ ID NO: 174537 - RNA, 21 nt, Homo sapiens
ucuaaggcugugccaucagcu

SEQ ID NO: 174538 - RNA, 15 nt, Homo sapiens
uuugaggguguauau

SEQ ID NO: 174539 - RNA, 20 nt, Homo sapiens
gaaguuuguuuaaaugacag

SEQ ID NO: 174540 - RNA, 21 nt, Homo sapiens
aucugccuccccuucacuccc

SEQ ID NO: 174541 - RNA, 12 nt, Homo sapiens
ccaguuacauaa

SEQ ID NO: 174542 - RNA, 21 nt, Homo sapiens
accgcgcccagccucaucucu

SEQ ID NO: 174543 - RNA, 22 nt, Homo sapiens
ucaagacgucacccuccauucu

SEQ ID NO: 174544 - RNA, 19 nt, Homo sapiens
aguuuacauuuuguauauu

SEQ ID NO: 174545 - RNA, 18 nt, Homo sapiens
uagaaugagacuuacuuc

SEQ ID NO: 174546 - RNA, 18 nt, Homo sapiens
agcuggagucugucaaug

SEQ ID NO: 174547 - RNA, 11 nt, Homo sapiens
uuugcuguaga

SEQ ID NO: 174548 - RNA, 20 nt, Homo sapiens
gucaacaaagucacccacuu

SEQ ID NO: 174549 - RNA, 16 nt, Homo sapiens
accaauauuguacagu

SEQ ID NO: 174550 - RNA, 22 nt, Homo sapiens
aaucaguguuuccaaucugucc

SEQ ID NO: 174551 - RNA, 16 nt, Homo sapiens
aaaugcugguuuuuca

SEQ ID NO: 174552 - RNA, 18 nt, Homo sapiens
uugcaauguggcuugaau

SEQ ID NO: 174553 - RNA, 18 nt, Homo sapiens
accauuagcauuugucaa

SEQ ID NO: 174554 - RNA, 19 nt, Homo sapiens
ugagucccagagccaauca

SEQ ID NO: 174555 - RNA, 12 nt, Homo sapiens
ugaggguguaua

SEQ ID NO: 174556 - RNA, 18 nt, Homo sapiens
guugagggcaauggacaa

SEQ ID NO: 174557 - RNA, 21 nt, Homo sapiens
aauguggcuugaauguaggua

SEQ ID NO: 174558 - RNA, 16 nt, Homo sapiens
uuccuccccuguucau

SEQ ID NO: 174559 - RNA, 23 nt, Homo sapiens
cauggauauguuauacugaacca

SEQ ID NO: 174560 - RNA, 14 nt, Homo sapiens
ugggauuacaggga

SEQ ID NO: 174561 - RNA, 13 nt, Homo sapiens
guguaccagagaa

SEQ ID NO: 174562 - RNA, 15 nt, Homo sapiens
agcgauuaauaacag

SEQ ID NO: 174563 - RNA, 21 nt, Homo sapiens
aaugcugguuuuucaguuuuc

SEQ ID NO: 174564 - RNA, 15 nt, Homo sapiens
ccuuagaaguggaag

SEQ ID NO: 174565 - RNA, 17 nt, Homo sapiens
augguggccuggggcuu

SEQ ID NO: 174566 - RNA, 20 nt, Homo sapiens
auugcagcgauuaauaacag

SEQ ID NO: 174567 - RNA, 17 nt, Homo sapiens
ggcaggaccuguggcca

SEQ ID NO: 174568 - RNA, 17 nt, Homo sapiens
ggcacacugagccagca

SEQ ID NO: 174569 - RNA, 17 nt, Homo sapiens
cuggccuccaaguccac

SEQ ID NO: 174570 - RNA, 12 nt, Homo sapiens
gucuuggcucac

SEQ ID NO: 174571 - RNA, 22 nt, Homo sapiens
ugaguagcuggauuacaggcau

SEQ ID NO: 174572 - RNA, 11 nt, Homo sapiens
ccaaggucucc

SEQ ID NO: 174573 - RNA, 15 nt, Homo sapiens
uucugaaaaaguauc

SEQ ID NO: 174574 - RNA, 15 nt, Homo sapiens
uguuuauagugcucu

SEQ ID NO: 174575 - RNA, 11 nt, Homo sapiens
aagacugacca

SEQ ID NO: 174576 - RNA, 15 nt, Homo sapiens
uucuuucaaagaagc

SEQ ID NO: 174577 - RNA, 15 nt, Homo sapiens
aaugugacucaagac

SEQ ID NO: 174578 - RNA, 21 nt, Homo sapiens
ucugaggcuucuggggcuuca

SEQ ID NO: 174579 - RNA, 14 nt, Homo sapiens
caguguacagucuu

SEQ ID NO: 174580 - RNA, 16 nt, Homo sapiens
agcuguuuuguugaca

SEQ ID NO: 174581 - RNA, 22 nt, Homo sapiens
ggcugucagauauaaguaacuu

SEQ ID NO: 174582 - RNA, 15 nt, Homo sapiens
aaggcagaguacaaa

SEQ ID NO: 174583 - RNA, 22 nt, Homo sapiens
ccugaccucaaguaauccaccu

SEQ ID NO: 174584 - RNA, 18 nt, Homo sapiens
aauguccuacugagacag

SEQ ID NO: 174585 - RNA, 12 nt, Homo sapiens
ugaacauuccag

SEQ ID NO: 174586 - RNA, 21 nt, Homo sapiens
agcuagcaacauuuguuuuag

SEQ ID NO: 174587 - RNA, 18 nt, Homo sapiens
aaguucuuaguugcugua

SEQ ID NO: 174588 - RNA, 15 nt, Homo sapiens
aacugaacauuccag

SEQ ID NO: 174589 - RNA, 13 nt, Homo sapiens
aucugaacuccuu

SEQ ID NO: 174590 - RNA, 13 nt, Homo sapiens
guaagacugugua

SEQ ID NO: 174591 - RNA, 16 nt, Homo sapiens
uaaugguuauauguau

SEQ ID NO: 174592 - RNA, 17 nt, Homo sapiens
agugagcuccuaagcca

SEQ ID NO: 174593 - RNA, 15 nt, Homo sapiens
cccacccaacuaauu

SEQ ID NO: 174594 - RNA, 17 nt, Homo sapiens
agauuucagauuuguga

SEQ ID NO: 174595 - RNA, 23 nt, Homo sapiens
ugucucgugguaggacuguagaa

SEQ ID NO: 174596 - RNA, 21 nt, Homo sapiens
ugugaccauuagcauuuguca

SEQ ID NO: 174597 - RNA, 13 nt, Homo sapiens
gaauuaagcacag

SEQ ID NO: 174598 - RNA, 19 nt, Homo sapiens
uccugaguagcuggauuac

SEQ ID NO: 174599 - RNA, 18 nt, Homo sapiens
uguuguuuucccaaagag

SEQ ID NO: 174600 - RNA, 17 nt, Homo sapiens
uugguuuugcucacaaa

SEQ ID NO: 174601 - RNA, 20 nt, Homo sapiens
caggcuggagugcaaugaca

SEQ ID NO: 174602 - RNA, 18 nt, Homo sapiens
ggagccccugcucuggug

SEQ ID NO: 174603 - RNA, 17 nt, Homo sapiens
uucuuccaugucuauua

SEQ ID NO: 174604 - RNA, 16 nt, Homo sapiens
gaaguuuucuugacuu

SEQ ID NO: 174605 - RNA, 15 nt, Homo sapiens
cagcaccuacagugu

SEQ ID NO: 174606 - RNA, 16 nt, Homo sapiens
aauugcuucaagcauu

SEQ ID NO: 174607 - RNA, 18 nt, Homo sapiens
cagaaagcuagaaagugu

SEQ ID NO: 174608 - RNA, 16 nt, Homo sapiens
gcuccauucaaaguga

SEQ ID NO: 174609 - RNA, 12 nt, Homo sapiens
uaaaaguuggcu

SEQ ID NO: 174610 - RNA, 15 nt, Homo sapiens
gaaaaguaacuguuu

SEQ ID NO: 174611 - RNA, 15 nt, Homo sapiens
gcuagggaauaucaa

SEQ ID NO: 174612 - RNA, 15 nt, Homo sapiens
aguguaccagagaag

SEQ ID NO: 174613 - RNA, 19 nt, Homo sapiens
aaaauggcacuugggggac

SEQ ID NO: 174614 - RNA, 15 nt, Homo sapiens
guaggugguuuugaa

SEQ ID NO: 174615 - RNA, 15 nt, Homo sapiens
aguugggugauaugu

SEQ ID NO: 174616 - RNA, 15 nt, Homo sapiens
uaagaaauucacuuc

SEQ ID NO: 174617 - RNA, 20 nt, Homo sapiens
gcagaugguggagcugaaua

SEQ ID NO: 174618 - RNA, 14 nt, Homo sapiens
accuacaguguaca

SEQ ID NO: 174619 - RNA, 22 nt, Homo sapiens
cuguuuugguuuugcucacaaa

SEQ ID NO: 174620 - RNA, 19 nt, Homo sapiens
caaucaguagccagcaucu

SEQ ID NO: 174621 - RNA, 17 nt, Homo sapiens
cacauuuuucagauaua

SEQ ID NO: 174622 - RNA, 12 nt, Homo sapiens
ugaaacaucauu

SEQ ID NO: 174623 - RNA, 12 nt, Homo sapiens
uuucccaaagag

SEQ ID NO: 174624 - RNA, 20 nt, Homo sapiens
ggacuaaguguaccagagaa

SEQ ID NO: 174625 - RNA, 18 nt, Homo sapiens
auauguauaucacauucc

SEQ ID NO: 174626 - RNA, 20 nt, Homo sapiens
cucgugguaggacuguagaa

SEQ ID NO: 174627 - RNA, 22 nt, Homo sapiens
caccgcgcccagccucaucucu

SEQ ID NO: 174628 - RNA, 12 nt, Homo sapiens
ugggccaaagaa

SEQ ID NO: 174629 - RNA, 18 nt, Homo sapiens
ucacagccacuugggaua

SEQ ID NO: 174630 - RNA, 11 nt, Homo sapiens
gaaaacagaaa

SEQ ID NO: 174631 - RNA, 21 nt, Homo sapiens
ugaugcuggggacacagcauc

SEQ ID NO: 174632 - RNA, 13 nt, Homo sapiens
ucaaaaacauucu

SEQ ID NO: 174633 - RNA, 22 nt, Homo sapiens
aaugccacucuguaauugcaaa

SEQ ID NO: 174634 - RNA, 17 nt, Homo sapiens
gcaauggacaaggaagg

SEQ ID NO: 174635 - RNA, 18 nt, Homo sapiens
ugaaguuuaauugacuua

SEQ ID NO: 174636 - RNA, 15 nt, Homo sapiens
cuagaguucauggau

SEQ ID NO: 174637 - RNA, 15 nt, Homo sapiens
gaauguaaugguggc

SEQ ID NO: 174638 - RNA, 22 nt, Homo sapiens
agauucuaauggcuuuauugca

SEQ ID NO: 174639 - RNA, 15 nt, Homo sapiens
cuaguaaaagccauc

SEQ ID NO: 174640 - RNA, 18 nt, Homo sapiens
uucuuucaaagaagccag

SEQ ID NO: 174641 - RNA, 19 nt, Homo sapiens
ccuuggcuaguaaaagcca

SEQ ID NO: 174642 - RNA, 17 nt, Homo sapiens
ugaauuuugucuuuaug

SEQ ID NO: 174643 - RNA, 13 nt, Homo sapiens
ucuuuuugcuuca

SEQ ID NO: 174644 - RNA, 22 nt, Homo sapiens
aaguaagccauguaucucagga

SEQ ID NO: 174645 - RNA, 22 nt, Homo sapiens
agaagauggcacuuauaaccaa

SEQ ID NO: 174646 - RNA, 23 nt, Homo sapiens
aaaacuucaacguaagacugugu

SEQ ID NO: 174647 - RNA, 20 nt, Homo sapiens
agcaacauuuguuuuagucu

SEQ ID NO: 174648 - RNA, 21 nt, Homo sapiens
ccuuggcuaguaaaagccauc

SEQ ID NO: 174649 - RNA, 12 nt, Homo sapiens
uguaauugcaaa

SEQ ID NO: 174650 - RNA, 16 nt, Homo sapiens
aggcuggagugcaaug

SEQ ID NO: 174651 - RNA, 19 nt, Homo sapiens
accuguggccaaguucuua

SEQ ID NO: 174652 - RNA, 18 nt, Homo sapiens
gaaccaggccagagcaaa

SEQ ID NO: 174653 - RNA, 14 nt, Homo sapiens
auuucuguucuucc

SEQ ID NO: 174654 - RNA, 20 nt, Homo sapiens
uaagaugaaacaucauuuca

SEQ ID NO: 174655 - RNA, 18 nt, Homo sapiens
ccacccucccacugccaa

SEQ ID NO: 174656 - RNA, 22 nt, Homo sapiens
cuuaagacgugauuuugcugua

SEQ ID NO: 174657 - RNA, 14 nt, Homo sapiens
ucucucuucuuuuc

SEQ ID NO: 174658 - RNA, 15 nt, Homo sapiens
uugcaauguggcuug

SEQ ID NO: 174659 - RNA, 17 nt, Homo sapiens
uuaugaauaguuuccaa

SEQ ID NO: 174660 - RNA, 17 nt, Homo sapiens
ucuccuuagaaguggaa

SEQ ID NO: 174661 - RNA, 18 nt, Homo sapiens
gcccaggcuggagugcaa

SEQ ID NO: 174662 - RNA, 21 nt, Homo sapiens
ugcacaaauugggccaaagaa

SEQ ID NO: 174663 - RNA, 20 nt, Homo sapiens
cuggauuacaggcaugugcc

SEQ ID NO: 174664 - RNA, 14 nt, Homo sapiens
ucaaaaacauucuu

SEQ ID NO: 174665 - RNA, 22 nt, Homo sapiens
uaugauuguccguaggcccaua

SEQ ID NO: 174666 - RNA, 16 nt, Homo sapiens
ugaaugccacucugua

SEQ ID NO: 174667 - RNA, 22 nt, Homo sapiens
uaccuuuuauuuuaauguuucc

SEQ ID NO: 174668 - RNA, 17 nt, Homo sapiens
augagggaacuguguag

SEQ ID NO: 174669 - RNA, 17 nt, Homo sapiens
cugauguagcuuauaca

SEQ ID NO: 174670 - RNA, 19 nt, Homo sapiens
uuucuuucaaagaagccag

SEQ ID NO: 174671 - RNA, 14 nt, Homo sapiens
cacaaucugaaaca

SEQ ID NO: 174672 - RNA, 18 nt, Homo sapiens
uugugcauaaaaacaaga

SEQ ID NO: 174673 - RNA, 15 nt, Homo sapiens
cuaacaguaguugca

SEQ ID NO: 174674 - RNA, 14 nt, Homo sapiens
gucuuuaaccacuu

SEQ ID NO: 174675 - RNA, 24 nt, Homo sapiens
ggacagcuccuggaccaggcccau

SEQ ID NO: 174676 - RNA, 22 nt, Homo sapiens
cugucaauguccuacugagaca

SEQ ID NO: 174677 - RNA, 19 nt, Homo sapiens
gacuuugaggguguauauu

SEQ ID NO: 174678 - RNA, 18 nt, Homo sapiens
agaagguugagggcaaug

SEQ ID NO: 174679 - RNA, 14 nt, Homo sapiens
gccagcaucugccu

SEQ ID NO: 174680 - RNA, 15 nt, Homo sapiens
auugaacuuaugcaa

SEQ ID NO: 174681 - RNA, 16 nt, Homo sapiens
ucacguaaagcuagaa

SEQ ID NO: 174682 - RNA, 12 nt, Homo sapiens
aaguaagccaug

SEQ ID NO: 174683 - RNA, 18 nt, Homo sapiens
gauaaucucuccauuccc

SEQ ID NO: 174684 - RNA, 22 nt, Homo sapiens
cccucccacugccaaagaacuu

SEQ ID NO: 174685 - RNA, 23 nt, Homo sapiens
aacuuggaaauagugauuuccac

SEQ ID NO: 174686 - RNA, 15 nt, Homo sapiens
acaguaguugcaaug

SEQ ID NO: 174687 - RNA, 14 nt, Homo sapiens
uccccuucacuccc

SEQ ID NO: 174688 - RNA, 20 nt, Homo sapiens
uguguuuuuaauaaagacag

SEQ ID NO: 174689 - RNA, 22 nt, Homo sapiens
aauauuccagagacugggacua

SEQ ID NO: 174690 - RNA, 18 nt, Homo sapiens
uugcacaaauugggccaa

SEQ ID NO: 174691 - RNA, 17 nt, Homo sapiens
gaaaagggaacugaaca

SEQ ID NO: 174692 - RNA, 20 nt, Homo sapiens
aaaaucaaacaauucaggga

SEQ ID NO: 174693 - RNA, 15 nt, Homo sapiens
gagugggcuaagcac

SEQ ID NO: 174694 - RNA, 20 nt, Homo sapiens
cuccugaccucaaguaaucc

SEQ ID NO: 174695 - RNA, 16 nt, Homo sapiens
acuuacuuaguguuau

SEQ ID NO: 174696 - RNA, 19 nt, Homo sapiens
agccaugggagacacugau

SEQ ID NO: 174697 - RNA, 13 nt, Homo sapiens
gugccaucagcuc

SEQ ID NO: 174698 - RNA, 18 nt, Homo sapiens
cuauuuuuuguaaugugu

SEQ ID NO: 174699 - RNA, 23 nt, Homo sapiens
ucaaaugagaaaaugucuuuauu

SEQ ID NO: 174700 - RNA, 21 nt, Homo sapiens
gaccaauauuguacaguuuuu

SEQ ID NO: 174701 - RNA, 18 nt, Homo sapiens
ccucccacugccaaagaa

SEQ ID NO: 174702 - RNA, 23 nt, Homo sapiens
ccaguaguggugacugugggcuc

SEQ ID NO: 174703 - RNA, 21 nt, Homo sapiens
ugcccaggcuggagugcaaug

SEQ ID NO: 174704 - RNA, 13 nt, Homo sapiens
auuugucaacaaa

SEQ ID NO: 174705 - RNA, 16 nt, Homo sapiens
uccuggggaacauaga

SEQ ID NO: 174706 - RNA, 13 nt, Homo sapiens
guccaaggucucc

SEQ ID NO: 174707 - RNA, 22 nt, Homo sapiens
ucccuucuuuuuguucuucauc

SEQ ID NO: 174708 - RNA, 16 nt, Homo sapiens
uuucauaucacacugu

SEQ ID NO: 174709 - RNA, 22 nt, Homo sapiens
gccuaggaaagccaguuacaua

SEQ ID NO: 174710 - RNA, 13 nt, Homo sapiens
uugucaacaaagu

SEQ ID NO: 174711 - RNA, 14 nt, Homo sapiens
agaauaaauacugu

SEQ ID NO: 174712 - RNA, 20 nt, Homo sapiens
accaaauacuuuaauguaua

SEQ ID NO: 174713 - RNA, 14 nt, Homo sapiens
aaacaaucuuguca

SEQ ID NO: 174714 - RNA, 21 nt, Homo sapiens
uccacucaggucuguuuuccg

SEQ ID NO: 174715 - RNA, 19 nt, Homo sapiens
auuaucuaaaaucugcuag

SEQ ID NO: 174716 - RNA, 16 nt, Homo sapiens
uaaucaguguuuccaa

SEQ ID NO: 174717 - RNA, 18 nt, Homo sapiens
auaugacacucuagucaa

SEQ ID NO: 174718 - RNA, 15 nt, Homo sapiens
gaaugagacuuacuu

SEQ ID NO: 174719 - RNA, 19 nt, Homo sapiens
ucaaaacaaucuugucaua

SEQ ID NO: 174720 - RNA, 16 nt, Homo sapiens
acaagaacacugaaaa

SEQ ID NO: 174721 - RNA, 23 nt, Homo sapiens
cagucaaagauacacaaucugaa

SEQ ID NO: 174722 - RNA, 22 nt, Homo sapiens
ucaagugauucuccugccucag

SEQ ID NO: 174723 - RNA, 22 nt, Homo sapiens
gugggcuaagcacgggccauau

SEQ ID NO: 174724 - RNA, 10 nt, Homo sapiens
ucauauugau

SEQ ID NO: 174725 - RNA, 13 nt, Homo sapiens
aguaaaagccauc

SEQ ID NO: 174726 - RNA, 19 nt, Homo sapiens
auuggaccagucagcacag

SEQ ID NO: 174727 - RNA, 19 nt, Homo sapiens
uuuucuucuuuuugcuuca

SEQ ID NO: 174728 - RNA, 17 nt, Homo sapiens
uaagaagugacucuugc

SEQ ID NO: 174729 - RNA, 17 nt, Homo sapiens
guacaaaguaagccaug

SEQ ID NO: 174730 - RNA, 21 nt, Homo sapiens
cagguucugacucuuggcaca

SEQ ID NO: 174731 - RNA, 18 nt, Homo sapiens
cuugacuuuugaaaacaa

SEQ ID NO: 174732 - RNA, 15 nt, Homo sapiens
ccacugccaaagaac

SEQ ID NO: 174733 - RNA, 22 nt, Homo sapiens
agacagcacagccaaccuagcu

SEQ ID NO: 174734 - RNA, 15 nt, Homo sapiens
acacagcaucagcuc

SEQ ID NO: 174735 - RNA, 16 nt, Homo sapiens
uuguuuguggucuaua

SEQ ID NO: 174736 - RNA, 11 nt, Homo sapiens
ccacucagguc

SEQ ID NO: 174737 - RNA, 21 nt, Homo sapiens
cacaaucugaaacagcuucau

SEQ ID NO: 174738 - RNA, 14 nt, Homo sapiens
caauauacuuguau

SEQ ID NO: 174739 - RNA, 12 nt, Homo sapiens
acugugggcucc

SEQ ID NO: 174740 - RNA, 22 nt, Homo sapiens
uaagcugccuguacacaacuca

SEQ ID NO: 174741 - RNA, 23 nt, Homo sapiens
cuuuggugaacauugcaauagaa

SEQ ID NO: 174742 - RNA, 22 nt, Homo sapiens
guaagaucguucucugccucac

SEQ ID NO: 174743 - RNA, 21 nt, Homo sapiens
gaauuuuuauauccacuaaaa

SEQ ID NO: 174744 - RNA, 15 nt, Homo sapiens
gaaauggggaacuac

SEQ ID NO: 174745 - RNA, 20 nt, Homo sapiens
cagccuccugaguagcugga

SEQ ID NO: 174746 - RNA, 22 nt, Homo sapiens
ugagacuuugaggguguauauu

SEQ ID NO: 174747 - RNA, 17 nt, Homo sapiens
aaaaaugugacucaaga

SEQ ID NO: 174748 - RNA, 15 nt, Homo sapiens
cauucugcacucaga

SEQ ID NO: 174749 - RNA, 13 nt, Homo sapiens
gagcaaacagaaa

SEQ ID NO: 174750 - RNA, 15 nt, Homo sapiens
augggagacacugau

SEQ ID NO: 174751 - RNA, 16 nt, Homo sapiens
aaagugauccauacuu

SEQ ID NO: 174752 - RNA, 19 nt, Homo sapiens
acaaucuugucauacuuga

SEQ ID NO: 174753 - RNA, 12 nt, Homo sapiens
caguguuuccaa

SEQ ID NO: 174754 - RNA, 18 nt, Homo sapiens
auaggaggccaacccaaa

SEQ ID NO: 174755 - RNA, 23 nt, Homo sapiens
gaaaugcugguuuuucaguuuuc

SEQ ID NO: 174756 - RNA, 18 nt, Homo sapiens
gaucguucucugccucac

SEQ ID NO: 174757 - RNA, 16 nt, Homo sapiens
augagggaacugugua

SEQ ID NO: 174758 - RNA, 21 nt, Homo sapiens
accuaaauaugagcccagaaa

SEQ ID NO: 174759 - RNA, 21 nt, Homo sapiens
uguguuuuuaauaaagacagg

SEQ ID NO: 174760 - RNA, 16 nt, Homo sapiens
aaagggagaagaggga

SEQ ID NO: 174761 - RNA, 22 nt, Homo sapiens
auauacuuauagaauucaguca

SEQ ID NO: 174762 - RNA, 20 nt, Homo sapiens
ugacacucuagucaaagccu

SEQ ID NO: 174763 - RNA, 15 nt, Homo sapiens
aucuaaaaucugcua

SEQ ID NO: 174764 - RNA, 20 nt, Homo sapiens
agugcaguuuuuuucuuguc

SEQ ID NO: 174765 - RNA, 18 nt, Homo sapiens
cuucuuuacuuaguucaa

SEQ ID NO: 174766 - RNA, 15 nt, Homo sapiens
gugagaggacucuga

SEQ ID NO: 174767 - RNA, 16 nt, Homo sapiens
cacccuccauucugca

SEQ ID NO: 174768 - RNA, 18 nt, Homo sapiens
gcaguuuuuuucuugucu

SEQ ID NO: 174769 - RNA, 20 nt, Homo sapiens
cuuuuuccuggcucaucucu

SEQ ID NO: 174770 - RNA, 19 nt, Homo sapiens
ggaauuucuguucuuccau

SEQ ID NO: 174771 - RNA, 20 nt, Homo sapiens
cccaggcuggagugcaauga

SEQ ID NO: 174772 - RNA, 19 nt, Homo sapiens
cccucuaggaggugaugau

SEQ ID NO: 174773 - RNA, 18 nt, Homo sapiens
cagugacuccacucugag

SEQ ID NO: 174774 - RNA, 21 nt, Homo sapiens
uguauuuaaaugaaagugaga

SEQ ID NO: 174775 - RNA, 19 nt, Homo sapiens
ucaagugauucuccugccu

SEQ ID NO: 174776 - RNA, 14 nt, Homo sapiens
ugggagacacugau

SEQ ID NO: 174777 - RNA, 22 nt, Homo sapiens
agauacacaaucugaaacagcu

SEQ ID NO: 174778 - RNA, 18 nt, Homo sapiens
caucccgucgacguagaa

SEQ ID NO: 174779 - RNA, 18 nt, Homo sapiens
uacuuauagaauucaguc

SEQ ID NO: 174780 - RNA, 20 nt, Homo sapiens
ugcagccacuguuaagccau

SEQ ID NO: 174781 - RNA, 11 nt, Homo sapiens
agaaguggaag

SEQ ID NO: 174782 - RNA, 17 nt, Homo sapiens
agguuucucaaagaaau

SEQ ID NO: 174783 - RNA, 15 nt, Homo sapiens
agccauguaucucag

SEQ ID NO: 174784 - RNA, 12 nt, Homo sapiens
agccucaucucu

SEQ ID NO: 174785 - RNA, 15 nt, Homo sapiens
agucugaacaauaua

SEQ ID NO: 174786 - RNA, 13 nt, Homo sapiens
aggacuguagaaa

SEQ ID NO: 174787 - RNA, 21 nt, Homo sapiens
uuggacucaagcaagauuuca

SEQ ID NO: 174788 - RNA, 21 nt, Homo sapiens
cauucccguggaacguuuuuc

SEQ ID NO: 174789 - RNA, 22 nt, Homo sapiens
cuguagaaaagggaacugaaca

SEQ ID NO: 174790 - RNA, 22 nt, Homo sapiens
uguuucaaacaaaaagucauaa

SEQ ID NO: 174791 - RNA, 19 nt, Homo sapiens
cuuuaccuaaauaugagcc

SEQ ID NO: 174792 - RNA, 17 nt, Homo sapiens
ucuggccuccaagucca

SEQ ID NO: 174793 - RNA, 23 nt, Homo sapiens
aacaguaguugcaauguuuuaga

SEQ ID NO: 174794 - RNA, 11 nt, Homo sapiens
ugaacauucca

SEQ ID NO: 174795 - RNA, 14 nt, Homo sapiens
cagcuccuggacca

SEQ ID NO: 174796 - RNA, 14 nt, Homo sapiens
accguacacugugu

SEQ ID NO: 174797 - RNA, 16 nt, Homo sapiens
acugaaccaggccaga

SEQ ID NO: 174798 - RNA, 18 nt, Homo sapiens
ucacugcaacuucugccu

SEQ ID NO: 174799 - RNA, 18 nt, Homo sapiens
cuuagagcuuuaccuaaa

SEQ ID NO: 174800 - RNA, 15 nt, Homo sapiens
cacagcaucagcuca

SEQ ID NO: 174801 - RNA, 14 nt, Homo sapiens
uuuauugcuuguug

SEQ ID NO: 174802 - RNA, 16 nt, Homo sapiens
uguacagucuuguauu

SEQ ID NO: 174803 - RNA, 23 nt, Homo sapiens
agccaccgcgcccagccucaucu

SEQ ID NO: 174804 - RNA, 17 nt, Homo sapiens
ggcugugccaucagcuc

SEQ ID NO: 174805 - RNA, 18 nt, Homo sapiens
uccugaccucaaguaauc

SEQ ID NO: 174806 - RNA, 16 nt, Homo sapiens
aaaagggaacugaaca

SEQ ID NO: 174807 - RNA, 19 nt, Homo sapiens
auugcuugcacaaaccaau

SEQ ID NO: 174808 - RNA, 15 nt, Homo sapiens
gagggaacuguguag

SEQ ID NO: 174809 - RNA, 21 nt, Homo sapiens
ucaugggguggacucuaacag

SEQ ID NO: 174810 - RNA, 14 nt, Homo sapiens
uuuucuugucuaua

SEQ ID NO: 174811 - RNA, 16 nt, Homo sapiens
acugcaacuucugccu

SEQ ID NO: 174812 - RNA, 13 nt, Homo sapiens
acuguccaaagac

SEQ ID NO: 174813 - RNA, 16 nt, Homo sapiens
ugcauucucuagucag

SEQ ID NO: 174814 - RNA, 16 nt, Homo sapiens
acacaaucugaaacag

SEQ ID NO: 174815 - RNA, 21 nt, Homo sapiens
ucauggauauguuauacugaa

SEQ ID NO: 174816 - RNA, 19 nt, Homo sapiens
cauaaugcauguggcacuu

SEQ ID NO: 174817 - RNA, 18 nt, Homo sapiens
ggguuucaccauguuggc

SEQ ID NO: 174818 - RNA, 15 nt, Homo sapiens
agccagguucugacu

SEQ ID NO: 174819 - RNA, 21 nt, Homo sapiens
gauacacaaucugaaacagcu

SEQ ID NO: 174820 - RNA, 17 nt, Homo sapiens
ugggagacacugaugua

SEQ ID NO: 174821 - RNA, 18 nt, Homo sapiens
auuaagaaauucacuucc

SEQ ID NO: 174822 - RNA, 18 nt, Homo sapiens
cgauuaauaacaggcaaa

SEQ ID NO: 174823 - RNA, 14 nt, Homo sapiens
uuggaaaaucaaga

SEQ ID NO: 174824 - RNA, 15 nt, Homo sapiens
cuccuuagaagugga

SEQ ID NO: 174825 - RNA, 13 nt, Homo sapiens
gugauauguuggu

SEQ ID NO: 174826 - RNA, 18 nt, Homo sapiens
acacaaucugaaacagcu

SEQ ID NO: 174827 - RNA, 18 nt, Homo sapiens
ugugaaguuuaauugacu

SEQ ID NO: 174828 - RNA, 20 nt, Homo sapiens
auuagcauuugucaacaaag

SEQ ID NO: 174829 - RNA, 21 nt, Homo sapiens
agccaaccuagcuagcaacau

SEQ ID NO: 174830 - RNA, 20 nt, Homo sapiens
cagagucucgcucuguugcc

SEQ ID NO: 174831 - RNA, 13 nt, Homo sapiens
cacacuguuaaaa

SEQ ID NO: 174832 - RNA, 19 nt, Homo sapiens
gcccaggcuggagugcaau

SEQ ID NO: 174833 - RNA, 19 nt, Homo sapiens
cgugauuuugcuguagaag

SEQ ID NO: 174834 - RNA, 16 nt, Homo sapiens
uauaaaagacugacca

SEQ ID NO: 174835 - RNA, 19 nt, Homo sapiens
uccauuuacccuucuuuuc

SEQ ID NO: 174836 - RNA, 18 nt, Homo sapiens
uaaugcauguggcacuua

SEQ ID NO: 174837 - RNA, 23 nt, Homo sapiens
gaaaagaaucggcaauguuucaa

SEQ ID NO: 174838 - RNA, 17 nt, Homo sapiens
uuagugcacagcacaaa

SEQ ID NO: 174839 - RNA, 22 nt, Homo sapiens
gcaggauuugggcucuuggaau

SEQ ID NO: 174840 - RNA, 19 nt, Homo sapiens
agaugaaacaucauuucaa

SEQ ID NO: 174841 - RNA, 17 nt, Homo sapiens
gaauuucuguucuucca

SEQ ID NO: 174842 - RNA, 14 nt, Homo sapiens
uagaaugagacuua

SEQ ID NO: 174843 - RNA, 19 nt, Homo sapiens
aauagugauuuccacagug

SEQ ID NO: 174844 - RNA, 13 nt, Homo sapiens
cuggcucaucucu

SEQ ID NO: 174845 - RNA, 22 nt, Homo sapiens
aacauuuguuuuagucugaaca

SEQ ID NO: 174846 - RNA, 21 nt, Homo sapiens
ccuccaaguccacaguggaac

SEQ ID NO: 174847 - RNA, 15 nt, Homo sapiens
aagccauguaucuca

SEQ ID NO: 174848 - RNA, 10 nt, Homo sapiens
aaacuuguau

SEQ ID NO: 174849 - RNA, 14 nt, Homo sapiens
ccaaagugguauag

SEQ ID NO: 174850 - RNA, 18 nt, Homo sapiens
gcaaacagaaaaagaagg

SEQ ID NO: 174851 - RNA, 10 nt, Homo sapiens
cucacaaaag

SEQ ID NO: 174852 - RNA, 18 nt, Homo sapiens
acauuuguuuguggucua

SEQ ID NO: 174853 - RNA, 16 nt, Homo sapiens
aacuuacuuaguguua

SEQ ID NO: 174854 - RNA, 15 nt, Homo sapiens
auaaagacaggguuu

SEQ ID NO: 174855 - RNA, 15 nt, Homo sapiens
aucuguccuguuaca

SEQ ID NO: 174856 - RNA, 22 nt, Homo sapiens
caaaaccaaauauuccagagac

SEQ ID NO: 174857 - RNA, 18 nt, Homo sapiens
auuagcuccacaaagcca

SEQ ID NO: 174858 - RNA, 23 nt, Homo sapiens
cacuguuaagccauguguuccaa

SEQ ID NO: 174859 - RNA, 16 nt, Homo sapiens
ugagucccagagccaa

SEQ ID NO: 174860 - RNA, 19 nt, Homo sapiens
gacuaaguguaccagagaa

SEQ ID NO: 174861 - RNA, 12 nt, Homo sapiens
cuguccaaagac

SEQ ID NO: 174862 - RNA, 17 nt, Homo sapiens
agccccagccuaggaaa

SEQ ID NO: 174863 - RNA, 15 nt, Homo sapiens
uuuuccuguucuuaa

SEQ ID NO: 174864 - RNA, 14 nt, Homo sapiens
aaauucacuucccc

SEQ ID NO: 174865 - RNA, 15 nt, Homo sapiens
gcaccuacaguguac

SEQ ID NO: 174866 - RNA, 19 nt, Homo sapiens
uccuggaggugacacuuga

SEQ ID NO: 174867 - RNA, 21 nt, Homo sapiens
cagagaagggcuuggacucaa

SEQ ID NO: 174868 - RNA, 21 nt, Homo sapiens
agugcaguuuuuuucuugucu

SEQ ID NO: 174869 - RNA, 22 nt, Homo sapiens
ucugauaugcaguuuuccuuaa

SEQ ID NO: 174870 - RNA, 17 nt, Homo sapiens
acuuuuuccuggcucau

SEQ ID NO: 174871 - RNA, 15 nt, Homo sapiens
gcuaguaaaagccau

SEQ ID NO: 174872 - RNA, 15 nt, Homo sapiens
uucaguuuucaggag

SEQ ID NO: 174873 - RNA, 22 nt, Homo sapiens
gcccagacccuucuccuuagaa

SEQ ID NO: 174874 - RNA, 22 nt, Homo sapiens
gaaaaagaagguugagggcaau

SEQ ID NO: 174875 - RNA, 18 nt, Homo sapiens
cagggagugggcuaagca

SEQ ID NO: 174876 - RNA, 22 nt, Homo sapiens
augaaucaaucaauucauaucu

SEQ ID NO: 174877 - RNA, 13 nt, Homo sapiens
uucuucuuuuugc

SEQ ID NO: 174878 - RNA, 19 nt, Homo sapiens
caaucucaaucccucaaaa

SEQ ID NO: 174879 - RNA, 20 nt, Homo sapiens
aagauggcacuuauaaccaa

SEQ ID NO: 174880 - RNA, 19 nt, Homo sapiens
caguaguggugacuguggg

SEQ ID NO: 174881 - RNA, 16 nt, Homo sapiens
uuagagcuuuaccuaa

SEQ ID NO: 174882 - RNA, 19 nt, Homo sapiens
cucugagucccagagccaa

SEQ ID NO: 174883 - RNA, 20 nt, Homo sapiens
ucauacuugaaaauaugaca

SEQ ID NO: 174884 - RNA, 13 nt, Homo sapiens
auguguuccaagg

SEQ ID NO: 174885 - RNA, 20 nt, Homo sapiens
gucugaacaauauauacuua

SEQ ID NO: 174886 - RNA, 23 nt, Homo sapiens
aauguaagaucguucucugccuc

SEQ ID NO: 174887 - RNA, 19 nt, Homo sapiens
aggcugugccaucagcucc

SEQ ID NO: 174888 - RNA, 20 nt, Homo sapiens
uguucugguuacuguucuaa

SEQ ID NO: 174889 - RNA, 21 nt, Homo sapiens
aauguguucggugauuucaga

SEQ ID NO: 174890 - RNA, 16 nt, Homo sapiens
agucugauuguagcua

SEQ ID NO: 174891 - RNA, 19 nt, Homo sapiens
cugauguagcuuauacaaa

SEQ ID NO: 174892 - RNA, 22 nt, Homo sapiens
aauguuuaugaauaguuuccaa

SEQ ID NO: 174893 - RNA, 13 nt, Homo sapiens
agcagauaauggu

SEQ ID NO: 174894 - RNA, 19 nt, Homo sapiens
cacagcaucagcucaagac

SEQ ID NO: 174895 - RNA, 15 nt, Homo sapiens
uuaaaugaaagugag

SEQ ID NO: 174896 - RNA, 13 nt, Homo sapiens
cuuaguugcugua

SEQ ID NO: 174897 - RNA, 16 nt, Homo sapiens
gccagagcaaacagaa

SEQ ID NO: 174898 - RNA, 14 nt, Homo sapiens
gcuccuaagccaug

SEQ ID NO: 174899 - RNA, 13 nt, Homo sapiens
agaagaugaauga

SEQ ID NO: 174900 - RNA, 14 nt, Homo sapiens
agcuggagucuguc

SEQ ID NO: 174901 - RNA, 15 nt, Homo sapiens
acaaaguaagccaug

SEQ ID NO: 174902 - RNA, 13 nt, Homo sapiens
uguguuucuuuag

SEQ ID NO: 174903 - RNA, 22 nt, Homo sapiens
agcagaugguggagcugaauau

SEQ ID NO: 174904 - RNA, 16 nt, Homo sapiens
uucccauuaaagaagu

SEQ ID NO: 174905 - RNA, 13 nt, Homo sapiens
caucauuuccauu

SEQ ID NO: 174906 - RNA, 21 nt, Homo sapiens
guuuuacuguccaaagacaug

SEQ ID NO: 174907 - RNA, 20 nt, Homo sapiens
uuauuaaauguagaaaguga

SEQ ID NO: 174908 - RNA, 19 nt, Homo sapiens
uuacuuuuuccuggcucau

SEQ ID NO: 174909 - RNA, 16 nt, Homo sapiens
cacagccaaccuagcu

SEQ ID NO: 174910 - RNA, 19 nt, Homo sapiens
aaccaaauauuccagagac

SEQ ID NO: 174911 - RNA, 13 nt, Homo sapiens
ggauuacagggau

SEQ ID NO: 174912 - RNA, 22 nt, Homo sapiens
acagucuuguauuaaguuguua

SEQ ID NO: 174913 - RNA, 21 nt, Homo sapiens
uaguggugacugugggcucca

SEQ ID NO: 174914 - RNA, 18 nt, Homo sapiens
ugguuuuucaguuuucag

SEQ ID NO: 174915 - RNA, 17 nt, Homo sapiens
agucuuagagcuuuacc

SEQ ID NO: 174916 - RNA, 17 nt, Homo sapiens
cugcuagggaauaucaa

SEQ ID NO: 174917 - RNA, 16 nt, Homo sapiens
aggucagucuucuucc

SEQ ID NO: 174918 - RNA, 20 nt, Homo sapiens
auaaaggggagggacucauc

SEQ ID NO: 174919 - RNA, 13 nt, Homo sapiens
gcaaaaccaaaua

SEQ ID NO: 174920 - RNA, 14 nt, Homo sapiens
ugccaaagaacuug

SEQ ID NO: 174921 - RNA, 18 nt, Homo sapiens
uuaagccauguguuccaa

SEQ ID NO: 174922 - RNA, 18 nt, Homo sapiens
ugaaaauaugacacucua

SEQ ID NO: 174923 - RNA, 20 nt, Homo sapiens
agcuguuuaugcauagauaa

SEQ ID NO: 174924 - RNA, 20 nt, Homo sapiens
aagaaucggcaauguuucaa

SEQ ID NO: 174925 - RNA, 16 nt, Homo sapiens
uauugaacuuaugcaa

SEQ ID NO: 174926 - RNA, 15 nt, Homo sapiens
auagaauucagucaa

SEQ ID NO: 174927 - RNA, 11 nt, Homo sapiens
accucaucucc

SEQ ID NO: 174928 - RNA, 21 nt, Homo sapiens
guccaucccgucgacguagaa

SEQ ID NO: 174929 - RNA, 16 nt, Homo sapiens
auggcaggacagcucc

SEQ ID NO: 174930 - RNA, 16 nt, Homo sapiens
aagcagguucuuguua

SEQ ID NO: 174931 - RNA, 14 nt, Homo sapiens
ucuuuggugaacau

SEQ ID NO: 174932 - RNA, 15 nt, Homo sapiens
aauaaccauugucau

SEQ ID NO: 174933 - RNA, 18 nt, Homo sapiens
guuuacauuuuguauauu

SEQ ID NO: 174934 - RNA, 15 nt, Homo sapiens
gguccaaggucucca

SEQ ID NO: 174935 - RNA, 23 nt, Homo sapiens
ucagauauaaaagacugaccaau

SEQ ID NO: 174936 - RNA, 18 nt, Homo sapiens
aauguagaaagugaucca

SEQ ID NO: 174937 - RNA, 18 nt, Homo sapiens
auuuuucagauauaaaag

SEQ ID NO: 174938 - RNA, 18 nt, Homo sapiens
aauuucucuacugucuca

SEQ ID NO: 174939 - RNA, 20 nt, Homo sapiens
uacacauuuuucagauauaa

SEQ ID NO: 174940 - RNA, 16 nt, Homo sapiens
auccacuaaaaucaaa

SEQ ID NO: 174941 - RNA, 18 nt, Homo sapiens
ccgacugccaucuuggac

SEQ ID NO: 174942 - RNA, 20 nt, Homo sapiens
aucugcuagggaauaucaau

SEQ ID NO: 174943 - RNA, 14 nt, Homo sapiens
ccacugccaaagaa

SEQ ID NO: 174944 - RNA, 12 nt, Homo sapiens
aggacuguagaa

SEQ ID NO: 174945 - RNA, 21 nt, Homo sapiens
uuaaagcagggauaugcugua

SEQ ID NO: 174946 - RNA, 19 nt, Homo sapiens
cauggauauguuauacuga

SEQ ID NO: 174947 - RNA, 13 nt, Homo sapiens
uccacaguggaac

SEQ ID NO: 174948 - RNA, 18 nt, Homo sapiens
gaauuuggguaugaacag

SEQ ID NO: 174949 - RNA, 19 nt, Homo sapiens
agugauucuccugccucag

SEQ ID NO: 174950 - RNA, 12 nt, Homo sapiens
gaaucucucuuc

SEQ ID NO: 174951 - RNA, 14 nt, Homo sapiens
cuuaaaauagccau

SEQ ID NO: 174952 - RNA, 21 nt, Homo sapiens
uguaaauuucucuacugucuc

SEQ ID NO: 174953 - RNA, 13 nt, Homo sapiens
agucuucuuccau

SEQ ID NO: 174954 - RNA, 17 nt, Homo sapiens
caaucuguccuguuaca

SEQ ID NO: 174955 - RNA, 18 nt, Homo sapiens
uggaaauagugauuucca

SEQ ID NO: 174956 - RNA, 18 nt, Homo sapiens
uguagaagauggcacuua

SEQ ID NO: 174957 - RNA, 14 nt, Homo sapiens
cucaucauuuccau

SEQ ID NO: 174958 - RNA, 16 nt, Homo sapiens
uggcaggacagcuccu

SEQ ID NO: 174959 - RNA, 15 nt, Homo sapiens
ccaaagacauguuua

SEQ ID NO: 174960 - RNA, 18 nt, Homo sapiens
ggacucaagcaagauuuc

SEQ ID NO: 174961 - RNA, 19 nt, Homo sapiens
accaaauacuuuaauguau

SEQ ID NO: 174962 - RNA, 18 nt, Homo sapiens
ucuuggguucaagugauu

SEQ ID NO: 174963 - RNA, 17 nt, Homo sapiens
caacaaagucacccacu

SEQ ID NO: 174964 - RNA, 11 nt, Homo sapiens
agaagaugaau

SEQ ID NO: 174965 - RNA, 19 nt, Homo sapiens
uuauacaauauacuuguau

SEQ ID NO: 174966 - RNA, 16 nt, Homo sapiens
gucagucuucuuccau

SEQ ID NO: 174967 - RNA, 11 nt, Homo sapiens
aguugcacaaa

SEQ ID NO: 174968 - RNA, 14 nt, Homo sapiens
auagaauucaguca

SEQ ID NO: 174969 - RNA, 15 nt, Homo sapiens
ucuguucuuccauca

SEQ ID NO: 174970 - RNA, 21 nt, Homo sapiens
aauaguuguuauucuguaguu

SEQ ID NO: 174971 - RNA, 13 nt, Homo sapiens
ucugaaacagcuu

SEQ ID NO: 174972 - RNA, 18 nt, Homo sapiens
uagcauuugucaacaaag

SEQ ID NO: 174973 - RNA, 13 nt, Homo sapiens
gaauaugcacaaa

SEQ ID NO: 174974 - RNA, 16 nt, Homo sapiens
cauaacaggagugcca

SEQ ID NO: 174975 - RNA, 20 nt, Homo sapiens
ucaaaaaaaaaaaaauguga

SEQ ID NO: 174976 - RNA, 18 nt, Homo sapiens
cucaaagaaauuuccacu

SEQ ID NO: 174977 - RNA, 14 nt, Homo sapiens
ucaucucuuuauuc

SEQ ID NO: 174978 - RNA, 20 nt, Homo sapiens
cucuuggguucaagugauuc

SEQ ID NO: 174979 - RNA, 16 nt, Homo sapiens
ucaaacaaaaagucau

SEQ ID NO: 174980 - RNA, 16 nt, Homo sapiens
acucaggcagaucuca

SEQ ID NO: 174981 - RNA, 23 nt, Homo sapiens
cgugaccugccaggcacacugag

SEQ ID NO: 174982 - RNA, 21 nt, Homo sapiens
caaucugaaacagcuucaugg

SEQ ID NO: 174983 - RNA, 22 nt, Homo sapiens
gacucuauuaaaaucuucaaua

SEQ ID NO: 174984 - RNA, 17 nt, Homo sapiens
uuuccaaauuauggcaa

SEQ ID NO: 174985 - RNA, 15 nt, Homo sapiens
caaauauuccagaga

SEQ ID NO: 174986 - RNA, 11 nt, Homo sapiens
uugcuguagaa

SEQ ID NO: 174987 - RNA, 14 nt, Homo sapiens
caaaguaagccaug

SEQ ID NO: 174988 - RNA, 14 nt, Homo sapiens
ugaauaguuuccaa

SEQ ID NO: 174989 - RNA, 21 nt, Homo sapiens
gaguuauuuuuauuuauuuaa

SEQ ID NO: 174990 - RNA, 11 nt, Homo sapiens
uaaaagccauc

SEQ ID NO: 174991 - RNA, 21 nt, Homo sapiens
uggauuacaggcaugugccac

SEQ ID NO: 174992 - RNA, 20 nt, Homo sapiens
uggggacacagcaucagcuc

SEQ ID NO: 174993 - RNA, 23 nt, Homo sapiens
uccugaccucaaguaauccaccu

SEQ ID NO: 174994 - RNA, 14 nt, Homo sapiens
uuauggcaaauuca

SEQ ID NO: 174995 - RNA, 23 nt, Homo sapiens
aauaagcaggcgugaccugccag

SEQ ID NO: 174996 - RNA, 17 nt, Homo sapiens
cuucuaaguaaauacaa

SEQ ID NO: 174997 - RNA, 12 nt, Homo sapiens
guucauucugca

SEQ ID NO: 174998 - RNA, 23 nt, Homo sapiens
uguuaagccauguguuccaaggc

SEQ ID NO: 174999 - RNA, 22 nt, Homo sapiens
ucuuuguaaagaaaguggcuug

SEQ ID NO: 175000 - RNA, 16 nt, Homo sapiens
uugacauucugaaugc

SEQ ID NO: 175001 - RNA, 22 nt, Homo sapiens
aagaaaaguuuuguaaauuucu

SEQ ID NO: 175002 - RNA, 14 nt, Homo sapiens
acauuuuguauauu

SEQ ID NO: 175003 - RNA, 13 nt, Homo sapiens
aauauaucaguaa

SEQ ID NO: 175004 - RNA, 12 nt, Homo sapiens
gguauuuagcca

SEQ ID NO: 175005 - RNA, 22 nt, Homo sapiens
agcuggagucugucaauguccu

SEQ ID NO: 175006 - RNA, 23 nt, Homo sapiens
aaucaguguuuccaaucuguccu

SEQ ID NO: 175007 - RNA, 17 nt, Homo sapiens
uccacagugacuccacu

SEQ ID NO: 175008 - RNA, 21 nt, Homo sapiens
aaaaagcccuuaaaaauaugu

SEQ ID NO: 175009 - RNA, 15 nt, Homo sapiens
guagaaagugaucca

SEQ ID NO: 175010 - RNA, 13 nt, Homo sapiens
cuugcacaaacca

SEQ ID NO: 175011 - RNA, 20 nt, Homo sapiens
acagugacuccacucugagu

SEQ ID NO: 175012 - RNA, 19 nt, Homo sapiens
acauuuguuguucuguuaa

SEQ ID NO: 175013 - RNA, 20 nt, Homo sapiens
acucuaacaguaguugcaau

SEQ ID NO: 175014 - RNA, 13 nt, Homo sapiens
uggcucaucucuu

SEQ ID NO: 175015 - RNA, 12 nt, Homo sapiens
uaagacugugua

SEQ ID NO: 175016 - RNA, 16 nt, Homo sapiens
ggaaagccaguuacau

SEQ ID NO: 175017 - RNA, 22 nt, Homo sapiens
caggcaugugccacccacccaa

SEQ ID NO: 175018 - RNA, 16 nt, Homo sapiens
aauuuugucuuuauga

SEQ ID NO: 175019 - RNA, 22 nt, Homo sapiens
accagagaagggcuuggacuca

SEQ ID NO: 175020 - RNA, 16 nt, Homo sapiens
gaacugaacauuccag

SEQ ID NO: 175021 - RNA, 14 nt, Homo sapiens
uccaaagacauguu

SEQ ID NO: 175022 - RNA, 23 nt, Homo sapiens
uuccaaucuguccuguuacaaaa

SEQ ID NO: 175023 - RNA, 14 nt, Homo sapiens
acaaucugaaacag

SEQ ID NO: 175024 - RNA, 22 nt, Homo sapiens
uuaucauuaaaaggaaagcaga

SEQ ID NO: 175025 - RNA, 23 nt, Homo sapiens
uaguaaaagccaucuauguauau

SEQ ID NO: 175026 - RNA, 14 nt, Homo sapiens
ugcacguauuuuaa

SEQ ID NO: 175027 - RNA, 17 nt, Homo sapiens
aagcuggagucugucaa

SEQ ID NO: 175028 - RNA, 13 nt, Homo sapiens
uugaaacuuguau

SEQ ID NO: 175029 - RNA, 18 nt, Homo sapiens
guuuuacuguccaaagac

SEQ ID NO: 175030 - RNA, 15 nt, Homo sapiens
gacucaucauuucca

SEQ ID NO: 175031 - RNA, 13 nt, Homo sapiens
caaucccucaaaa

SEQ ID NO: 175032 - RNA, 21 nt, Homo sapiens
uaagcacgggccauaugaaua

SEQ ID NO: 175033 - RNA, 19 nt, Homo sapiens
cauugcaauagaaauccaa

SEQ ID NO: 175034 - RNA, 19 nt, Homo sapiens
guuucaccauguuggccag

SEQ ID NO: 175035 - RNA, 14 nt, Homo sapiens
uaaaauagccauaa

SEQ ID NO: 175036 - RNA, 18 nt, Homo sapiens
uguugacauucugaaugc

SEQ ID NO: 175037 - RNA, 21 nt, Homo sapiens
cacuucccacuauugcuugca

SEQ ID NO: 175038 - RNA, 16 nt, Homo sapiens
acaauauacuuguaua

SEQ ID NO: 175039 - RNA, 22 nt, Homo sapiens
agccuaggaaagccaguuacau

SEQ ID NO: 175040 - RNA, 17 nt, Homo sapiens
gaugcuggggacacagc

SEQ ID NO: 175041 - RNA, 19 nt, Homo sapiens
caaagugcugggauuacag

SEQ ID NO: 175042 - RNA, 21 nt, Homo sapiens
uggggacacagcaucagcuca

SEQ ID NO: 175043 - RNA, 18 nt, Homo sapiens
ccuucuuuuuguucuuca

SEQ ID NO: 175044 - RNA, 23 nt, Homo sapiens
uagugauuuccacagugacucca

SEQ ID NO: 175045 - RNA, 16 nt, Homo sapiens
ccaggcuggagugcaa

SEQ ID NO: 175046 - RNA, 23 nt, Homo sapiens
cuagugcaguuuuuuucuugucu

SEQ ID NO: 175047 - RNA, 20 nt, Homo sapiens
auacuuauagaauucaguca

SEQ ID NO: 175048 - RNA, 20 nt, Homo sapiens
ugcuggcaguggaacuaaga

SEQ ID NO: 175049 - RNA, 16 nt, Homo sapiens
aguugcaauguuuuag

SEQ ID NO: 175050 - RNA, 14 nt, Homo sapiens
uggcucaucucuuu

SEQ ID NO: 175051 - RNA, 21 nt, Homo sapiens
aguagcuggauuacaggcaug

SEQ ID NO: 175052 - RNA, 13 nt, Homo sapiens
gauaugcuguauu

SEQ ID NO: 175053 - RNA, 15 nt, Homo sapiens
gccccagccuaggaa

SEQ ID NO: 175054 - RNA, 20 nt, Homo sapiens
aaggcugugccaucagcucc

SEQ ID NO: 175055 - RNA, 18 nt, Homo sapiens
aaguaauccaccugccuc

SEQ ID NO: 175056 - RNA, 17 nt, Homo sapiens
ucaaucccucaaaacaa

SEQ ID NO: 175057 - RNA, 21 nt, Homo sapiens
ucaagugauucuccugccuca

SEQ ID NO: 175058 - RNA, 19 nt, Homo sapiens
agggaacugaacauuccag

SEQ ID NO: 175059 - RNA, 23 nt, Homo sapiens
uaaaaguacauguuaaacuuacu

SEQ ID NO: 175060 - RNA, 14 nt, Homo sapiens
ucuaaguaaauaca

SEQ ID NO: 175061 - RNA, 18 nt, Homo sapiens
uccuggggaacauagaac

SEQ ID NO: 175062 - RNA, 19 nt, Homo sapiens
aauucugaauuaagcacag

SEQ ID NO: 175063 - RNA, 17 nt, Homo sapiens
ggcuaguaaaagccauc

SEQ ID NO: 175064 - RNA, 12 nt, Homo sapiens
uaguugcuguau

SEQ ID NO: 175065 - RNA, 21 nt, Homo sapiens
accuucaguugucucugaugu

SEQ ID NO: 175066 - RNA, 23 nt, Homo sapiens
aaaugcugguuuuucaguuuuca

SEQ ID NO: 175067 - RNA, 19 nt, Homo sapiens
accaggucucauaaugcau

SEQ ID NO: 175068 - RNA, 19 nt, Homo sapiens
acugggcgcaguuggucuu

SEQ ID NO: 175069 - RNA, 13 nt, Homo sapiens
ucccucaaaacaa

SEQ ID NO: 175070 - RNA, 13 nt, Homo sapiens
ugaacauugcaau

SEQ ID NO: 175071 - RNA, 17 nt, Homo sapiens
uuaaaccguacacugug

SEQ ID NO: 175072 - RNA, 19 nt, Homo sapiens
ccaaagcccaaagugguau

SEQ ID NO: 175073 - RNA, 15 nt, Homo sapiens
uggggacacagcauc

SEQ ID NO: 175074 - RNA, 14 nt, Homo sapiens
aaaagacugaccaa

SEQ ID NO: 175075 - RNA, 14 nt, Homo sapiens
auaucacauuccca

SEQ ID NO: 175076 - RNA, 21 nt, Homo sapiens
caaguucuuaguugcuguaug

SEQ ID NO: 175077 - RNA, 15 nt, Homo sapiens
gauauaaaagacuga

SEQ ID NO: 175078 - RNA, 21 nt, Homo sapiens
aggacacuagaagauuuugaa

SEQ ID NO: 175079 - RNA, 17 nt, Homo sapiens
cacaaaagucuacuuua

SEQ ID NO: 175080 - RNA, 21 nt, Homo sapiens
ugguuuugcucacaaaagucu

SEQ ID NO: 175081 - RNA, 12 nt, Homo sapiens
aaugucuuuauu

SEQ ID NO: 175082 - RNA, 23 nt, Homo sapiens
cuuccuccccuguucauucugca

SEQ ID NO: 175083 - RNA, 19 nt, Homo sapiens
agcaccuacaguguacagu

SEQ ID NO: 175084 - RNA, 19 nt, Homo sapiens
aggauuugggcucuuggaa

SEQ ID NO: 175085 - RNA, 22 nt, Homo sapiens
uggggacacagcaucagcucaa

SEQ ID NO: 175086 - RNA, 13 nt, Homo sapiens
cacuuuucaaugu

SEQ ID NO: 175087 - RNA, 13 nt, Homo sapiens
gauacgacaacuu

SEQ ID NO: 175088 - RNA, 14 nt, Homo sapiens
uacuguccaaagac

SEQ ID NO: 175089 - RNA, 16 nt, Homo sapiens
guggauuggauuuguc

SEQ ID NO: 175090 - RNA, 17 nt, Homo sapiens
ucaaacuccugaccuca

SEQ ID NO: 175091 - RNA, 14 nt, Homo sapiens
ccagagacugggac

SEQ ID NO: 175092 - RNA, 21 nt, Homo sapiens
ugaccugccaggcacacugag

SEQ ID NO: 175093 - RNA, 19 nt, Homo sapiens
aaauuucucuacugucuca

SEQ ID NO: 175094 - RNA, 18 nt, Homo sapiens
gcgcccagccucaucucu

SEQ ID NO: 175095 - RNA, 15 nt, Homo sapiens
aauagugauuuccac

SEQ ID NO: 175096 - RNA, 21 nt, Homo sapiens
cuaagaagcagauaauggugu

SEQ ID NO: 175097 - RNA, 10 nt, Homo sapiens
ucccaaagag

SEQ ID NO: 175098 - RNA, 14 nt, Homo sapiens
guccacaguggaac

SEQ ID NO: 175099 - RNA, 16 nt, Homo sapiens
cagcauggagucacag

SEQ ID NO: 175100 - RNA, 16 nt, Homo sapiens
uccuuagaaguggaag

SEQ ID NO: 175101 - RNA, 19 nt, Homo sapiens
gagaucuauauauguauaa

SEQ ID NO: 175102 - RNA, 20 nt, Homo sapiens
caggguuucaccauguuggc

SEQ ID NO: 175103 - RNA, 14 nt, Homo sapiens
ccuggcucaucucu

SEQ ID NO: 175104 - RNA, 19 nt, Homo sapiens
uccuaagccaugggagaca

SEQ ID NO: 175105 - RNA, 12 nt, Homo sapiens
uuaagaaauuca

SEQ ID NO: 175106 - RNA, 22 nt, Homo sapiens
uccuaagccaugggagacacug

SEQ ID NO: 175107 - RNA, 12 nt, Homo sapiens
uuuaaagacaga

SEQ ID NO: 175108 - RNA, 16 nt, Homo sapiens
agugauucuccugccu

SEQ ID NO: 175109 - RNA, 17 nt, Homo sapiens
aucguucucugccucac

SEQ ID NO: 175110 - RNA, 23 nt, Homo sapiens
gucucauaaugcauguggcacuu

SEQ ID NO: 175111 - RNA, 15 nt, Homo sapiens
guuuccaaucugucc

SEQ ID NO: 175112 - RNA, 13 nt, Homo sapiens
ucuuccaucaccu

SEQ ID NO: 175113 - RNA, 23 nt, Homo sapiens
accagagaagggcuuggacucaa

SEQ ID NO: 175114 - RNA, 20 nt, Homo sapiens
cuaagcacgggccauaugaa

SEQ ID NO: 175115 - RNA, 18 nt, Homo sapiens
augcuggggacacagcau

SEQ ID NO: 175116 - RNA, 21 nt, Homo sapiens
aacaaucuugucauacuugaa

SEQ ID NO: 175117 - RNA, 16 nt, Homo sapiens
uacuauuuuuacuaau

SEQ ID NO: 175118 - RNA, 15 nt, Homo sapiens
cugaccaauauugua

SEQ ID NO: 175119 - RNA, 17 nt, Homo sapiens
cuccccuucacucccac

SEQ ID NO: 175120 - RNA, 20 nt, Homo sapiens
accguaugagggaacugugu

SEQ ID NO: 175121 - RNA, 14 nt, Homo sapiens
auugggccaaagaa

SEQ ID NO: 175122 - RNA, 17 nt, Homo sapiens
cuagaguucauggauau

SEQ ID NO: 175123 - RNA, 15 nt, Homo sapiens
cagcauggagucaca

SEQ ID NO: 175124 - RNA, 15 nt, Homo sapiens
uccuguuacaaaaga

SEQ ID NO: 175125 - RNA, 10 nt, Homo sapiens
ugucuuuauu

SEQ ID NO: 175126 - RNA, 18 nt, Homo sapiens
aagagaaguuuucuugac

SEQ ID NO: 175127 - RNA, 13 nt, Homo sapiens
agcaaaaccaaau

SEQ ID NO: 175128 - RNA, 20 nt, Homo sapiens
gggacuaaguguaccagaga

SEQ ID NO: 175129 - RNA, 22 nt, Homo sapiens
caaagauacacaaucugaaaca

SEQ ID NO: 175130 - RNA, 19 nt, Homo sapiens
ugcuucuuaaaauagccau

SEQ ID NO: 175131 - RNA, 18 nt, Homo sapiens
ggaacuaagaaagcccuu

SEQ ID NO: 175132 - RNA, 15 nt, Homo sapiens
ucauggauauguuau

SEQ ID NO: 175133 - RNA, 15 nt, Homo sapiens
cucuguaauugcaaa

SEQ ID NO: 175134 - RNA, 18 nt, Homo sapiens
agcccuuaggaagaauuu

SEQ ID NO: 175135 - RNA, 19 nt, Homo sapiens
cacuuagguccaaggucuc

SEQ ID NO: 175136 - RNA, 23 nt, Homo sapiens
gucucaguuuacauuuuguauau

SEQ ID NO: 175137 - RNA, 13 nt, Homo sapiens
caaaaccaaauau

SEQ ID NO: 175138 - RNA, 22 nt, Homo sapiens
cuuuaguuuuugugaaguuuaa

SEQ ID NO: 175139 - RNA, 12 nt, Homo sapiens
guaaaagccauc

SEQ ID NO: 175140 - RNA, 22 nt, Homo sapiens
cuuguuagugcacagcacaaau

SEQ ID NO: 175141 - RNA, 17 nt, Homo sapiens
ggcucucccagccaggu

SEQ ID NO: 175142 - RNA, 14 nt, Homo sapiens
aauucaucagauaa

SEQ ID NO: 175143 - RNA, 15 nt, Homo sapiens
uuggugaacauugca

SEQ ID NO: 175144 - RNA, 16 nt, Homo sapiens
uauagaaaugcugguu

SEQ ID NO: 175145 - RNA, 21 nt, Homo sapiens
ggggacacagcaucagcucaa

SEQ ID NO: 175146 - RNA, 13 nt, Homo sapiens
uccacagugacuc

SEQ ID NO: 175147 - RNA, 21 nt, Homo sapiens
uacuauuuuuacuaaucuuuc

SEQ ID NO: 175148 - RNA, 20 nt, Homo sapiens
gccuccaaguccacagugga

SEQ ID NO: 175149 - RNA, 22 nt, Homo sapiens
gugccucugggacuggacaauu

SEQ ID NO: 175150 - RNA, 13 nt, Homo sapiens
aaacaucauuuca

SEQ ID NO: 175151 - RNA, 13 nt, Homo sapiens
ugauuguagcuau

SEQ ID NO: 175152 - RNA, 23 nt, Homo sapiens
uuacuuuuuccuggcucaucucu

SEQ ID NO: 175153 - RNA, 23 nt, Homo sapiens
gagacagcacagccaaccuagcu

SEQ ID NO: 175154 - RNA, 19 nt, Homo sapiens
gucuuuggugaacauugca

SEQ ID NO: 175155 - RNA, 13 nt, Homo sapiens
aauagccauaaag

SEQ ID NO: 175156 - RNA, 12 nt, Homo sapiens
auugcuugcaca

SEQ ID NO: 175157 - RNA, 12 nt, Homo sapiens
agaaagugaucc

SEQ ID NO: 175158 - RNA, 21 nt, Homo sapiens
gguaaaauaaucaguguuucc

SEQ ID NO: 175159 - RNA, 22 nt, Homo sapiens
aaccguaugagggaacugugua

SEQ ID NO: 175160 - RNA, 13 nt, Homo sapiens
uggaaccagccca

SEQ ID NO: 175161 - RNA, 21 nt, Homo sapiens
ccaaguucuuaguugcuguau

SEQ ID NO: 175162 - RNA, 21 nt, Homo sapiens
uaaauguagaaagugauccau

SEQ ID NO: 175163 - RNA, 11 nt, Homo sapiens
uuuaaccaaga

SEQ ID NO: 175164 - RNA, 18 nt, Homo sapiens
cauauugaugugugucua

SEQ ID NO: 175165 - RNA, 14 nt, Homo sapiens
caguggaacuaaga

SEQ ID NO: 175166 - RNA, 15 nt, Homo sapiens
aaauuucucuacugu

SEQ ID NO: 175167 - RNA, 21 nt, Homo sapiens
gcagaguacaaaguaagccau

SEQ ID NO: 175168 - RNA, 22 nt, Homo sapiens
agcaaaaccaaauauuccagag

SEQ ID NO: 175169 - RNA, 20 nt, Homo sapiens
aagugagcuccuaagccaug

SEQ ID NO: 175170 - RNA, 19 nt, Homo sapiens
uuaaauguagaaagugauc

SEQ ID NO: 175171 - RNA, 10 nt, Homo sapiens
gaaaagcagg

SEQ ID NO: 175172 - RNA, 19 nt, Homo sapiens
acaaaguaagccauguauc

SEQ ID NO: 175173 - RNA, 13 nt, Homo sapiens
cagcaucagcuca

SEQ ID NO: 175174 - RNA, 14 nt, Homo sapiens
aaaaaugugacuca

SEQ ID NO: 175175 - RNA, 23 nt, Homo sapiens
aaucccucaaaacaaucuuguca

SEQ ID NO: 175176 - RNA, 13 nt, Homo sapiens
ucaucauuuccau

SEQ ID NO: 175177 - RNA, 19 nt, Homo sapiens
uagcggggaggggguuauc

SEQ ID NO: 175178 - RNA, 13 nt, Homo sapiens
auuuacauugccu

SEQ ID NO: 175179 - RNA, 17 nt, Homo sapiens
cacccucccacugccaa

SEQ ID NO: 175180 - RNA, 19 nt, Homo sapiens
guaaauauagcucagguag

SEQ ID NO: 175181 - RNA, 21 nt, Homo sapiens
uuaaauguagaaagugaucca

SEQ ID NO: 175182 - RNA, 15 nt, Homo sapiens
ugggauuacagggau

SEQ ID NO: 175183 - RNA, 13 nt, Homo sapiens
uaugcacaaacuu

SEQ ID NO: 175184 - RNA, 17 nt, Homo sapiens
ucaauguccuacugaga

SEQ ID NO: 175185 - RNA, 18 nt, Homo sapiens
agggcaauggacaaggaa

SEQ ID NO: 175186 - RNA, 13 nt, Homo sapiens
cucuuggguucaa

SEQ ID NO: 175187 - RNA, 16 nt, Homo sapiens
ugcaaugacacagucu

SEQ ID NO: 175188 - RNA, 15 nt, Homo sapiens
aaaaguuuuguaaau

SEQ ID NO: 175189 - RNA, 17 nt, Homo sapiens
uauugaacuuaugcaaa

SEQ ID NO: 175190 - RNA, 18 nt, Homo sapiens
gccaaucaguagccagca

SEQ ID NO: 175191 - RNA, 20 nt, Homo sapiens
aaagcuggagucugucaaug

SEQ ID NO: 175192 - RNA, 16 nt, Homo sapiens
uuuaauguuuccuuua

SEQ ID NO: 175193 - RNA, 14 nt, Homo sapiens
cuuccaucaccucc

SEQ ID NO: 175194 - RNA, 16 nt, Homo sapiens
caacauuuguuuuagu

SEQ ID NO: 175195 - RNA, 18 nt, Homo sapiens
uggcuaguaaaagccauc

SEQ ID NO: 175196 - RNA, 20 nt, Homo sapiens
cuauaaaaugagaagucuca

SEQ ID NO: 175197 - RNA, 19 nt, Homo sapiens
gaaugagcaaaaccaaaua

SEQ ID NO: 175198 - RNA, 17 nt, Homo sapiens
cuucugaaaaaguaucc

SEQ ID NO: 175199 - RNA, 20 nt, Homo sapiens
ccaggcuggagugcaaugac

SEQ ID NO: 175200 - RNA, 23 nt, Homo sapiens
ccacuguuaagccauguguucca

SEQ ID NO: 175201 - RNA, 18 nt, Homo sapiens
caaggucuccagagggug

SEQ ID NO: 175202 - RNA, 19 nt, Homo sapiens
uagugauuuccacagugac

SEQ ID NO: 175203 - RNA, 19 nt, Homo sapiens
ggacuaaguguaccagaga

SEQ ID NO: 175204 - RNA, 16 nt, Homo sapiens
gacacagcaucagcuc

SEQ ID NO: 175205 - RNA, 23 nt, Homo sapiens
ugcuucuuugaaacuuguaugaa

SEQ ID NO: 175206 - RNA, 19 nt, Homo sapiens
aagccauguguuccaaggc

SEQ ID NO: 175207 - RNA, 20 nt, Homo sapiens
ucuaagccuucugguuuuau

SEQ ID NO: 175208 - RNA, 22 nt, Homo sapiens
aaaauaugacacucuagucaaa

SEQ ID NO: 175209 - RNA, 12 nt, Homo sapiens
acaaucuuguca

SEQ ID NO: 175210 - RNA, 17 nt, Homo sapiens
cuucuuuuugcuucaaa

SEQ ID NO: 175211 - RNA, 18 nt, Homo sapiens
cuuuuuuuuaaguuacac

SEQ ID NO: 175212 - RNA, 18 nt, Homo sapiens
uuuaaaugaaagugagac

SEQ ID NO: 175213 - RNA, 19 nt, Homo sapiens
caauauauacuuauagaau

SEQ ID NO: 175214 - RNA, 19 nt, Homo sapiens
ucgugguaggacuguagaa

SEQ ID NO: 175215 - RNA, 19 nt, Homo sapiens
aguuuauacccguuucaca

SEQ ID NO: 175216 - RNA, 15 nt, Homo sapiens
agaaauccaauugga

SEQ ID NO: 175217 - RNA, 18 nt, Homo sapiens
gucugauuguagcuauga

SEQ ID NO: 175218 - RNA, 16 nt, Homo sapiens
ugaaguuuaauugacu

SEQ ID NO: 175219 - RNA, 19 nt, Homo sapiens
cccaggcuggagugcaaug

SEQ ID NO: 175220 - RNA, 13 nt, Homo sapiens
auucugcacucag

SEQ ID NO: 175221 - RNA, 12 nt, Homo sapiens
ggagacacugau

SEQ ID NO: 175222 - RNA, 18 nt, Homo sapiens
cuauaagaugaaacauca

SEQ ID NO: 175223 - RNA, 13 nt, Homo sapiens
uguaucucaggaa

SEQ ID NO: 175224 - RNA, 19 nt, Homo sapiens
cagucuuggcucacugcaa

SEQ ID NO: 175225 - RNA, 20 nt, Homo sapiens
cugucaauguccuacugaga

SEQ ID NO: 175226 - RNA, 12 nt, Homo sapiens
gaaccaggccag

SEQ ID NO: 175227 - RNA, 17 nt, Homo sapiens
gaacuccuuggcuucuu

SEQ ID NO: 175228 - RNA, 22 nt, Homo sapiens
augaggaauuucuguucuucca

SEQ ID NO: 175229 - RNA, 17 nt, Homo sapiens
gucaaagccuugguaaa

SEQ ID NO: 175230 - RNA, 23 nt, Homo sapiens
aauugggccaaagaaacauugcc

SEQ ID NO: 175231 - RNA, 21 nt, Homo sapiens
gacagcacagccaaccuagcu

SEQ ID NO: 175232 - RNA, 21 nt, Homo sapiens
aagauuucagauuugugacca

SEQ ID NO: 175233 - RNA, 21 nt, Homo sapiens
agacgugauuuugcuguagaa

SEQ ID NO: 175234 - RNA, 16 nt, Homo sapiens
augagcaaaaccaaau

SEQ ID NO: 175235 - RNA, 12 nt, Homo sapiens
acugccaaagaa

SEQ ID NO: 175236 - RNA, 17 nt, Homo sapiens
cagguucugacucuugg

SEQ ID NO: 175237 - RNA, 18 nt, Homo sapiens
ccaggcuggagugcaaug

SEQ ID NO: 175238 - RNA, 12 nt, Homo sapiens
acacagcaucag

SEQ ID NO: 175239 - RNA, 13 nt, Homo sapiens
aaaagacugacca

SEQ ID NO: 175240 - RNA, 18 nt, Homo sapiens
cucccagccagguucuga

SEQ ID NO: 175241 - RNA, 20 nt, Homo sapiens
gccacucuguaauugcaaaa

SEQ ID NO: 175242 - RNA, 20 nt, Homo sapiens
uuucuugucuauaaagcauu

SEQ ID NO: 175243 - RNA, 23 nt, Homo sapiens
cuuggaauccuggggaacauaga

SEQ ID NO: 175244 - RNA, 16 nt, Homo sapiens
gauucuccugccucag

SEQ ID NO: 175245 - RNA, 21 nt, Homo sapiens
aagggauggaagaaguaaaua

SEQ ID NO: 175246 - RNA, 14 nt, Homo sapiens
acagcaucagcuca

SEQ ID NO: 175247 - RNA, 19 nt, Homo sapiens
uacaaaguaagccauguau

SEQ ID NO: 175248 - RNA, 22 nt, Homo sapiens
uaggaagaauuuuuauauccac

SEQ ID NO: 175249 - RNA, 13 nt, Homo sapiens
uaauaaagacagg

SEQ ID NO: 175250 - RNA, 15 nt, Homo sapiens
aaugacacagucuug

SEQ ID NO: 175251 - RNA, 22 nt, Homo sapiens
ucuaaagauggaaaaaccaccc

SEQ ID NO: 175252 - RNA, 17 nt, Homo sapiens
uuuaauguuuccuuuaa

SEQ ID NO: 175253 - RNA, 19 nt, Homo sapiens
cuccacaaagccaaucuca

SEQ ID NO: 175254 - RNA, 18 nt, Homo sapiens
aucacauucccauuugcu

SEQ ID NO: 175255 - RNA, 23 nt, Homo sapiens
aaauuuucuuuuuauacuauuaa

SEQ ID NO: 175256 - RNA, 20 nt, Homo sapiens
uggacucaagcaagauuuca

SEQ ID NO: 175257 - RNA, 16 nt, Homo sapiens
uguuauacugaaccag

SEQ ID NO: 175258 - RNA, 23 nt, Homo sapiens
gauauguuauacugaaccaggcc

SEQ ID NO: 175259 - RNA, 21 nt, Homo sapiens
cucugauguagcuuauacaaa

SEQ ID NO: 175260 - RNA, 12 nt, Homo sapiens
agcaucagcuca

SEQ ID NO: 175261 - RNA, 21 nt, Homo sapiens
caggguuucaccauguuggcc

SEQ ID NO: 175262 - RNA, 15 nt, Homo sapiens
acaaucuugucauac

SEQ ID NO: 175263 - RNA, 15 nt, Homo sapiens
uuaugaauaguuucc

SEQ ID NO: 175264 - RNA, 21 nt, Homo sapiens
ccauaaaggggagggacucau

SEQ ID NO: 175265 - RNA, 13 nt, Homo sapiens
gguuauauguaua

SEQ ID NO: 175266 - RNA, 15 nt, Homo sapiens
aagaauguuuaugaa

SEQ ID NO: 175267 - RNA, 15 nt, Homo sapiens
cacagucuuggcuca

SEQ ID NO: 175268 - RNA, 17 nt, Homo sapiens
aggagugccacuucaug

SEQ ID NO: 175269 - RNA, 22 nt, Homo sapiens
uucagucaaagauacacaaucu

SEQ ID NO: 175270 - RNA, 13 nt, Homo sapiens
gcugggauuacag

SEQ ID NO: 175271 - RNA, 22 nt, Homo sapiens
uugcacaaauugggccaaagaa

SEQ ID NO: 175272 - RNA, 14 nt, Homo sapiens
cauaugaauaacau

SEQ ID NO: 175273 - RNA, 11 nt, Homo sapiens
uguccaaagac

SEQ ID NO: 175274 - RNA, 16 nt, Homo sapiens
uaacgagaaauagaaa

SEQ ID NO: 175275 - RNA, 14 nt, Homo sapiens
cauuugucaacaaa

SEQ ID NO: 175276 - RNA, 13 nt, Homo sapiens
ugcaauguuuuag

SEQ ID NO: 175277 - RNA, 17 nt, Homo sapiens
accuaaauaugagccca

SEQ ID NO: 175278 - RNA, 17 nt, Homo sapiens
gcuccauucaaagugag

SEQ ID NO: 175279 - RNA, 23 nt, Homo sapiens
cuuagagcuuuaccuaaauauga

SEQ ID NO: 175280 - RNA, 16 nt, Homo sapiens
cuaaguguaccagaga

SEQ ID NO: 175281 - RNA, 22 nt, Homo sapiens
uguuuccuuuaauuuuuuacua

SEQ ID NO: 175282 - RNA, 23 nt, Homo sapiens
acugggacuaaguguaccagaga

SEQ ID NO: 175283 - RNA, 16 nt, Homo sapiens
caggcuggagugcaau

SEQ ID NO: 175284 - RNA, 15 nt, Homo sapiens
uugagggcaauggac

SEQ ID NO: 175285 - RNA, 12 nt, Homo sapiens
acugagccagca

SEQ ID NO: 175286 - RNA, 16 nt, Homo sapiens
aagaauguuuaugaau

SEQ ID NO: 175287 - RNA, 22 nt, Homo sapiens
ccauacuagaguucauggauau

SEQ ID NO: 175288 - RNA, 20 nt, Homo sapiens
uuaauaggguaaauucucua

SEQ ID NO: 175289 - RNA, 13 nt, Homo sapiens
cuaaauaugagcc

SEQ ID NO: 175290 - RNA, 10 nt, Homo sapiens
uaaagacaga

SEQ ID NO: 175291 - RNA, 21 nt, Homo sapiens
gucucaaacuccugaccucaa

SEQ ID NO: 175292 - RNA, 16 nt, Homo sapiens
cauaaaaguuggcuca

SEQ ID NO: 175293 - RNA, 19 nt, Homo sapiens
cuccugaguagcuggauua

SEQ ID NO: 175294 - RNA, 20 nt, Homo sapiens
ugaaagcuggagucugucaa

SEQ ID NO: 175295 - RNA, 14 nt, Homo sapiens
uacuucucugcuau

SEQ ID NO: 175296 - RNA, 16 nt, Homo sapiens
ugagacagcacagcca

SEQ ID NO: 175297 - RNA, 17 nt, Homo sapiens
cugguggggcugccagg

SEQ ID NO: 175298 - RNA, 19 nt, Homo sapiens
gcauuugucaacaaaguca

SEQ ID NO: 175299 - RNA, 16 nt, Homo sapiens
uuuacuguccaaagac

SEQ ID NO: 175300 - RNA, 19 nt, Homo sapiens
cacuguguuuuuuuguaua

SEQ ID NO: 175301 - RNA, 20 nt, Homo sapiens
uguuucaaacaaaaagucau

SEQ ID NO: 175302 - RNA, 17 nt, Homo sapiens
cuguaugucucguggua

SEQ ID NO: 175303 - RNA, 19 nt, Homo sapiens
agauaaccucaagucacau

SEQ ID NO: 175304 - RNA, 19 nt, Homo sapiens
caccaacuauagaauguau

SEQ ID NO: 175305 - RNA, 15 nt, Homo sapiens
ucguucucugccuca

SEQ ID NO: 175306 - RNA, 23 nt, Homo sapiens
agaauauuauuggaaaauucucu

SEQ ID NO: 175307 - RNA, 21 nt, Homo sapiens
ggaauccuggggaacauagaa

SEQ ID NO: 175308 - RNA, 10 nt, Homo sapiens
gaaaacagaa

SEQ ID NO: 175309 - RNA, 17 nt, Homo sapiens
acuuacuucucugcuau

SEQ ID NO: 175310 - RNA, 14 nt, Homo sapiens
gcuaauauugcaau

SEQ ID NO: 175311 - RNA, 20 nt, Homo sapiens
uguuaauaaaaguacauguu

SEQ ID NO: 175312 - RNA, 15 nt, Homo sapiens
agcugccuguacaca

SEQ ID NO: 175313 - RNA, 19 nt, Homo sapiens
cauuuaagcugccuguaca

SEQ ID NO: 175314 - RNA, 17 nt, Homo sapiens
cuaaguguaccagagaa

SEQ ID NO: 175315 - RNA, 15 nt, Homo sapiens
uacuuuaauguauaa

SEQ ID NO: 175316 - RNA, 21 nt, Homo sapiens
ggucagaguuccgacugccau

SEQ ID NO: 175317 - RNA, 22 nt, Homo sapiens
ggcuaagaagugacucuugcaa

SEQ ID NO: 175318 - RNA, 17 nt, Homo sapiens
guacauguuaaacuuac

SEQ ID NO: 175319 - RNA, 22 nt, Homo sapiens
guuuaugcauagauaaucucuc

SEQ ID NO: 175320 - RNA, 22 nt, Homo sapiens
uugucaacaaagucacccacuu

SEQ ID NO: 175321 - RNA, 19 nt, Homo sapiens
cucuugaaaucuguuaaaa

SEQ ID NO: 175322 - RNA, 18 nt, Homo sapiens
auacugaaccaggccaga

SEQ ID NO: 175323 - RNA, 17 nt, Homo sapiens
auucuuacauuuuacuu

SEQ ID NO: 175324 - RNA, 13 nt, Homo sapiens
gaaacagcuucau

SEQ ID NO: 175325 - RNA, 14 nt, Homo sapiens
ugaauaugccacuu

SEQ ID NO: 175326 - RNA, 18 nt, Homo sapiens
cauuuguuuuagucugaa

SEQ ID NO: 175327 - RNA, 15 nt, Homo sapiens
aauauagcucaggua

SEQ ID NO: 175328 - RNA, 13 nt, Homo sapiens
accuacaguguac

SEQ ID NO: 175329 - RNA, 17 nt, Homo sapiens
ucagucuuuuccaugaa

SEQ ID NO: 175330 - RNA, 13 nt, Homo sapiens
uuuugcuguagaa

SEQ ID NO: 175331 - RNA, 22 nt, Homo sapiens
ggagaaauaugguacucauuaa

SEQ ID NO: 175332 - RNA, 12 nt, Homo sapiens
gaccaggucuca

SEQ ID NO: 175333 - RNA, 16 nt, Homo sapiens
ucauuguaaaaagccc

SEQ ID NO: 175334 - RNA, 15 nt, Homo sapiens
aauugggccaaagaa

SEQ ID NO: 175335 - RNA, 16 nt, Homo sapiens
ucugcauucucuaguc

SEQ ID NO: 175336 - RNA, 13 nt, Homo sapiens
ucaaguaauccac

SEQ ID NO: 175337 - RNA, 20 nt, Homo sapiens
uuuuuacuaaucuuucugca

SEQ ID NO: 175338 - RNA, 13 nt, Homo sapiens
caaagaagccagc

SEQ ID NO: 175339 - RNA, 13 nt, Homo sapiens
aaaaacauucuua

SEQ ID NO: 175340 - RNA, 21 nt, Homo sapiens
ucaaguaauccaccugccucg

SEQ ID NO: 175341 - RNA, 20 nt, Homo sapiens
uugcccaggcuggagugcaa

SEQ ID NO: 175342 - RNA, 21 nt, Homo sapiens
auagagguucuuuauugcuca

SEQ ID NO: 175343 - RNA, 16 nt, Homo sapiens
uagaaauccaauugga

SEQ ID NO: 175344 - RNA, 21 nt, Homo sapiens
ugagcaaaaccaaauauucca

SEQ ID NO: 175345 - RNA, 20 nt, Homo sapiens
ugcaguuuuuuucuugucua

SEQ ID NO: 175346 - RNA, 20 nt, Homo sapiens
auacuagaguucauggauau

SEQ ID NO: 175347 - RNA, 12 nt, Homo sapiens
acuuaguucaag

SEQ ID NO: 175348 - RNA, 20 nt, Homo sapiens
ugaguagcuggauuacaggc

SEQ ID NO: 175349 - RNA, 19 nt, Homo sapiens
cgugguaggacuguagaaa

SEQ ID NO: 175350 - RNA, 23 nt, Homo sapiens
gucucgugguaggacuguagaaa

SEQ ID NO: 175351 - RNA, 16 nt, Homo sapiens
gcagagaggcugaaua

SEQ ID NO: 175352 - RNA, 16 nt, Homo sapiens
uaaaccguacacugug

SEQ ID NO: 175353 - RNA, 17 nt, Homo sapiens
ccagagccucaaaugag

SEQ ID NO: 175354 - RNA, 21 nt, Homo sapiens
accucgagguuucucaaagaa

SEQ ID NO: 175355 - RNA, 13 nt, Homo sapiens
caguguacagucu

SEQ ID NO: 175356 - RNA, 22 nt, Homo sapiens
gaaauagugauuuccacaguga

SEQ ID NO: 175357 - RNA, 23 nt, Homo sapiens
uguauauuuucugugcagccacu

SEQ ID NO: 175358 - RNA, 11 nt, Homo sapiens
aguugcuguau

SEQ ID NO: 175359 - RNA, 15 nt, Homo sapiens
uuuaauagcgucaua

SEQ ID NO: 175360 - RNA, 22 nt, Homo sapiens
caaagaacuuggaaauagugau

SEQ ID NO: 175361 - RNA, 20 nt, Homo sapiens
aagaugaaacaucauuucaa

SEQ ID NO: 175362 - RNA, 23 nt, Homo sapiens
gugagacuuugaggguguauauu

SEQ ID NO: 175363 - RNA, 17 nt, Homo sapiens
uaacaggagugccacuu

SEQ ID NO: 175364 - RNA, 19 nt, Homo sapiens
ugccaucuuggacuuguca

SEQ ID NO: 175365 - RNA, 15 nt, Homo sapiens
cuuuuuauacuauua

SEQ ID NO: 175366 - RNA, 15 nt, Homo sapiens
uaauaaagacagggu

SEQ ID NO: 175367 - RNA, 16 nt, Homo sapiens
gugccaucagcuccuu

SEQ ID NO: 175368 - RNA, 14 nt, Homo sapiens
aucaguagccagca

SEQ ID NO: 175369 - RNA, 16 nt, Homo sapiens
ucaaagccuugguaaa

SEQ ID NO: 175370 - RNA, 22 nt, Homo sapiens
gccauaaaggggagggacucau

SEQ ID NO: 175371 - RNA, 18 nt, Homo sapiens
gccagagcaaacagaaaa

SEQ ID NO: 175372 - RNA, 20 nt, Homo sapiens
cuccccuguucauucugcau

SEQ ID NO: 175373 - RNA, 16 nt, Homo sapiens
aaugccacucuguaau

SEQ ID NO: 175374 - RNA, 22 nt, Homo sapiens
gaauaacauggugugcuucuua

SEQ ID NO: 175375 - RNA, 12 nt, Homo sapiens
gcuggagugcaa

SEQ ID NO: 175376 - RNA, 24 nt, Homo sapiens
aaucccucaaaacaaucuugucau

SEQ ID NO: 175377 - RNA, 13 nt, Homo sapiens
cagaaaaagaagg

SEQ ID NO: 175378 - RNA, 19 nt, Homo sapiens
uguuuuuaauaaagacagg

SEQ ID NO: 175379 - RNA, 16 nt, Homo sapiens
aagguugagggcaaug

SEQ ID NO: 175380 - RNA, 17 nt, Homo sapiens
uucaacguaagacugug

SEQ ID NO: 175381 - RNA, 15 nt, Homo sapiens
ugcauguggcacuua

SEQ ID NO: 175382 - RNA, 15 nt, Homo sapiens
cagauuauuauugaa

SEQ ID NO: 175383 - RNA, 14 nt, Homo sapiens
cuuagaaagucuga

SEQ ID NO: 175384 - RNA, 13 nt, Homo sapiens
uacuaaucuuucu

SEQ ID NO: 175385 - RNA, 14 nt, Homo sapiens
aaacaucauuucaa

SEQ ID NO: 175386 - RNA, 12 nt, Homo sapiens
uguaccagagaa

SEQ ID NO: 175387 - RNA, 15 nt, Homo sapiens
aauguauuugcuaua

SEQ ID NO: 175388 - RNA, 11 nt, Homo sapiens
uuuaaagacag

SEQ ID NO: 175389 - RNA, 18 nt, Homo sapiens
cucuaacaguaguugcaa

SEQ ID NO: 175390 - RNA, 21 nt, Homo sapiens
cuuuguaaagaaaguggcuug

SEQ ID NO: 175391 - RNA, 17 nt, Homo sapiens
ucggcucuggccuccaa

SEQ ID NO: 175392 - RNA, 20 nt, Homo sapiens
ucugaaaaaguauccugcuu

SEQ ID NO: 175393 - RNA, 14 nt, Homo sapiens
uucuggggcuucag

SEQ ID NO: 175394 - RNA, 20 nt, Homo sapiens
cagagcagagaggcugaaua

SEQ ID NO: 175395 - RNA, 22 nt, Homo sapiens
gcaaaaccaaauauuccagaga

SEQ ID NO: 175396 - RNA, 13 nt, Homo sapiens
gggagacacugau

SEQ ID NO: 175397 - RNA, 20 nt, Homo sapiens
gaguucauggauauguuaua

SEQ ID NO: 175398 - RNA, 17 nt, Homo sapiens
cauggagucacagccac

SEQ ID NO: 175399 - RNA, 21 nt, Homo sapiens
gaguucauggauauguuauac

SEQ ID NO: 175400 - RNA, 20 nt, Homo sapiens
uccuuggcuucuuuacuuag

SEQ ID NO: 175401 - RNA, 16 nt, Homo sapiens
ugccaggcacacugag

SEQ ID NO: 175402 - RNA, 21 nt, Homo sapiens
auaacauggugugcuucuuaa

SEQ ID NO: 175403 - RNA, 15 nt, Homo sapiens
ccagagcaaacagaa

SEQ ID NO: 175404 - RNA, 19 nt, Homo sapiens
agaaccucgagguuucuca

SEQ ID NO: 175405 - RNA, 13 nt, Homo sapiens
uucuuuucugacu

SEQ ID NO: 175406 - RNA, 23 nt, Homo sapiens
uucuaaagauggaaaaaccaccc

SEQ ID NO: 175407 - RNA, 20 nt, Homo sapiens
gacagcuccuggaccaggcc

SEQ ID NO: 175408 - RNA, 22 nt, Homo sapiens
auuaaauguagaaagugaucca

SEQ ID NO: 175409 - RNA, 13 nt, Homo sapiens
gcuucuuuacuua

SEQ ID NO: 175410 - RNA, 23 nt, Homo sapiens
guggacucuaacaguaguugcaa

SEQ ID NO: 175411 - RNA, 16 nt, Homo sapiens
auuuuaauguuuccuu

SEQ ID NO: 175412 - RNA, 20 nt, Homo sapiens
caaguucuuaguugcuguau

SEQ ID NO: 175413 - RNA, 16 nt, Homo sapiens
aacaaagucacccacu

SEQ ID NO: 175414 - RNA, 16 nt, Homo sapiens
cuucuuuuugcuucaa

SEQ ID NO: 175415 - RNA, 23 nt, Homo sapiens
ucuuaagacgugauuuugcugua

SEQ ID NO: 175416 - RNA, 21 nt, Homo sapiens
ccacugccaaagaacuuggaa

SEQ ID NO: 175417 - RNA, 13 nt, Homo sapiens
aaaugaaagugag

SEQ ID NO: 175418 - RNA, 21 nt, Homo sapiens
caugucuauuagcuccacaaa

SEQ ID NO: 175419 - RNA, 16 nt, Homo sapiens
ccuggaccaggucuca

SEQ ID NO: 175420 - RNA, 21 nt, Homo sapiens
gacgucacccuccauucugca

SEQ ID NO: 175421 - RNA, 15 nt, Homo sapiens
uggauuugucuuugg

SEQ ID NO: 175422 - RNA, 18 nt, Homo sapiens
uccagagacugggacuaa

SEQ ID NO: 175423 - RNA, 13 nt, Homo sapiens
gucuauuagcucc

SEQ ID NO: 175424 - RNA, 21 nt, Homo sapiens
guauaaauauguauuuuguca

SEQ ID NO: 175425 - RNA, 13 nt, Homo sapiens
uucuccugccuca

SEQ ID NO: 175426 - RNA, 16 nt, Homo sapiens
gaguuccgacugccau

SEQ ID NO: 175427 - RNA, 18 nt, Homo sapiens
cgugaccugccaggcaca

SEQ ID NO: 175428 - RNA, 13 nt, Homo sapiens
cagagacugggac

SEQ ID NO: 175429 - RNA, 17 nt, Homo sapiens
aaccguacacuguguuu

SEQ ID NO: 175430 - RNA, 22 nt, Homo sapiens
gcuggauuacaggcaugugcca

SEQ ID NO: 175431 - RNA, 17 nt, Homo sapiens
agggagugggcuaagca

SEQ ID NO: 175432 - RNA, 18 nt, Homo sapiens
aaggacacuagaagauuu

SEQ ID NO: 175433 - RNA, 20 nt, Homo sapiens
ucucaaacuccugaccucaa

SEQ ID NO: 175434 - RNA, 14 nt, Homo sapiens
uuaaacuuacuuag

SEQ ID NO: 175435 - RNA, 14 nt, Homo sapiens
auuguagcuaugau

SEQ ID NO: 175436 - RNA, 13 nt, Homo sapiens
gcauucucuaguc

SEQ ID NO: 175437 - RNA, 22 nt, Homo sapiens
ugacucaagacuuccagagccu

SEQ ID NO: 175438 - RNA, 12 nt, Homo sapiens
gacucaagcaag

SEQ ID NO: 175439 - RNA, 17 nt, Homo sapiens
cucaaagaaauuuccac

SEQ ID NO: 175440 - RNA, 20 nt, Homo sapiens
gccagguucugacucuuggc

SEQ ID NO: 175441 - RNA, 12 nt, Homo sapiens
uauuuuuacuaa

SEQ ID NO: 175442 - RNA, 16 nt, Homo sapiens
aacguaagacugugua

SEQ ID NO: 175443 - RNA, 13 nt, Homo sapiens
uccacaaagccaa

SEQ ID NO: 175444 - RNA, 18 nt, Homo sapiens
ugcaaugacacagucuug

SEQ ID NO: 175445 - RNA, 17 nt, Homo sapiens
uguuucaaacaaaaagu

SEQ ID NO: 175446 - RNA, 12 nt, Homo sapiens
ggaaaauucucu

SEQ ID NO: 175447 - RNA, 17 nt, Homo sapiens
caguaguggugacugug

SEQ ID NO: 175448 - RNA, 17 nt, Homo sapiens
ugcuugcacaaaccaau

SEQ ID NO: 175449 - RNA, 19 nt, Homo sapiens
agaaguaaauauagcucag

SEQ ID NO: 175450 - RNA, 14 nt, Homo sapiens
uguagaaagugauc

SEQ ID NO: 175451 - RNA, 17 nt, Homo sapiens
uuuaaaugaaagugaga

SEQ ID NO: 175452 - RNA, 19 nt, Homo sapiens
agucuuagagcuuuaccua

SEQ ID NO: 175453 - RNA, 15 nt, Homo sapiens
auucuguaguuucac

SEQ ID NO: 175454 - RNA, 21 nt, Homo sapiens
gaauucagucaaagauacaca

SEQ ID NO: 175455 - RNA, 21 nt, Homo sapiens
auuuuacuuuuuccuggcuca

SEQ ID NO: 175456 - RNA, 23 nt, Homo sapiens
auacuguuuuacuguccaaagac

SEQ ID NO: 175457 - RNA, 14 nt, Homo sapiens
cuggccuccaaguc

SEQ ID NO: 175458 - RNA, 19 nt, Homo sapiens
cugggacuaaguguaccag

SEQ ID NO: 175459 - RNA, 20 nt, Homo sapiens
ucauauugaugugugucuag

SEQ ID NO: 175460 - RNA, 17 nt, Homo sapiens
ccaggcuggagugcaau

SEQ ID NO: 175461 - RNA, 21 nt, Homo sapiens
ugcuguagaagauggcacuua

SEQ ID NO: 175462 - RNA, 15 nt, Homo sapiens
gagcuccuaagccau

SEQ ID NO: 175463 - RNA, 23 nt, Homo sapiens
aaaaccguaugagggaacugugu

SEQ ID NO: 175464 - RNA, 23 nt, Homo sapiens
aauuuuauguuuaguugcacaaa

SEQ ID NO: 175465 - RNA, 18 nt, Homo sapiens
cuuagguccaaggucucc

SEQ ID NO: 175466 - RNA, 16 nt, Homo sapiens
aaaccaaauauuccag

SEQ ID NO: 175467 - RNA, 14 nt, Homo sapiens
ugugccaucagcuc

SEQ ID NO: 175468 - RNA, 18 nt, Homo sapiens
aaagacaggguuucacca

SEQ ID NO: 175469 - RNA, 19 nt, Homo sapiens
ccucaucuccuaaaaggca

SEQ ID NO: 175470 - RNA, 20 nt, Homo sapiens
ugauauguugguagauucua

SEQ ID NO: 175471 - RNA, 12 nt, Homo sapiens
ucccacugccaa

SEQ ID NO: 175472 - RNA, 15 nt, Homo sapiens
acaaagccaaucuca

SEQ ID NO: 175473 - RNA, 17 nt, Homo sapiens
auuucucuacugucuca

SEQ ID NO: 175474 - RNA, 23 nt, Homo sapiens
ugggucagaguuccgacugccau

SEQ ID NO: 175475 - RNA, 19 nt, Homo sapiens
cccuguucauucugcauuc

SEQ ID NO: 175476 - RNA, 19 nt, Homo sapiens
ccucaaaacaaucuuguca

SEQ ID NO: 175477 - RNA, 16 nt, Homo sapiens
gcauuugucaacaaag

SEQ ID NO: 175478 - RNA, 19 nt, Homo sapiens
caugggagacacugaugua

SEQ ID NO: 175479 - RNA, 22 nt, Homo sapiens
uaaccaaagcccaaagugguau

SEQ ID NO: 175480 - RNA, 20 nt, Homo sapiens
cauaaaaguuggcucaggag

SEQ ID NO: 175481 - RNA, 21 nt, Homo sapiens
aaagcuagaaaguguaugugu

SEQ ID NO: 175482 - RNA, 14 nt, Homo sapiens
uguuaacugaaugc

SEQ ID NO: 175483 - RNA, 16 nt, Homo sapiens
uagaucugaacuccuu

SEQ ID NO: 175484 - RNA, 22 nt, Homo sapiens
ccauaggaggccaacccaaaau

SEQ ID NO: 175485 - RNA, 14 nt, Homo sapiens
aacaucauuucaau

SEQ ID NO: 175486 - RNA, 23 nt, Homo sapiens
uguaagaucguucucugccucac

SEQ ID NO: 175487 - RNA, 13 nt, Homo sapiens
ccaggggagaccc

SEQ ID NO: 175488 - RNA, 20 nt, Homo sapiens
uaaacuuacuuaguguuaug

SEQ ID NO: 175489 - RNA, 13 nt, Homo sapiens
agccucaucucuu

SEQ ID NO: 175490 - RNA, 20 nt, Homo sapiens
ucugccuccccuucacuccc

SEQ ID NO: 175491 - RNA, 21 nt, Homo sapiens
caaucuguccuguuacaaaag

SEQ ID NO: 175492 - RNA, 23 nt, Homo sapiens
uuacuguucuaaggcugugccau

SEQ ID NO: 175493 - RNA, 16 nt, Homo sapiens
acugaauuuugucuuu

SEQ ID NO: 175494 - RNA, 13 nt, Homo sapiens
cacugauguauga

SEQ ID NO: 175495 - RNA, 21 nt, Homo sapiens
auguccuacugagacagcaca

SEQ ID NO: 175496 - RNA, 15 nt, Homo sapiens
uccacagugacucca

SEQ ID NO: 175497 - RNA, 15 nt, Homo sapiens
ccauaugaauaacau

SEQ ID NO: 175498 - RNA, 18 nt, Homo sapiens
ggaaauagugauuuccac

SEQ ID NO: 175499 - RNA, 17 nt, Homo sapiens
uggcacuuauaaccaaa

SEQ ID NO: 175500 - RNA, 19 nt, Homo sapiens
uggaaauagugauuuccac

SEQ ID NO: 175501 - RNA, 22 nt, Homo sapiens
gccggggaaggaggccguccau

SEQ ID NO: 175502 - RNA, 19 nt, Homo sapiens
agaucguucucugccucac

SEQ ID NO: 175503 - RNA, 17 nt, Homo sapiens
agucugucaauguccua

SEQ ID NO: 175504 - RNA, 19 nt, Homo sapiens
ucagaguuccgacugccau

SEQ ID NO: 175505 - RNA, 15 nt, Homo sapiens
caaucugaaacagcu

SEQ ID NO: 175506 - RNA, 15 nt, Homo sapiens
gaacugaacauucca

SEQ ID NO: 175507 - RNA, 20 nt, Homo sapiens
gucaaagauacacaaucuga

SEQ ID NO: 175508 - RNA, 19 nt, Homo sapiens
uaaguuacacauuuuucag

SEQ ID NO: 175509 - RNA, 15 nt, Homo sapiens
ugaaugccacucugu

SEQ ID NO: 175510 - RNA, 16 nt, Homo sapiens
ucaggcagaucucagc

SEQ ID NO: 175511 - RNA, 21 nt, Homo sapiens
aauuuuauguuuaguugcaca

SEQ ID NO: 175512 - RNA, 20 nt, Homo sapiens
uacacaaucugaaacagcuu

SEQ ID NO: 175513 - RNA, 16 nt, Homo sapiens
acuauugcuugcacaa

SEQ ID NO: 175514 - RNA, 14 nt, Homo sapiens
auguaucucaggaa

SEQ ID NO: 175515 - RNA, 13 nt, Homo sapiens
ggcaggacagcuc

SEQ ID NO: 175516 - RNA, 21 nt, Homo sapiens
cccacugccaaagaacuugga

SEQ ID NO: 175517 - RNA, 21 nt, Homo sapiens
cuaugauuguccguaggccca

SEQ ID NO: 175518 - RNA, 20 nt, Homo sapiens
aaguaaauauagcucaggua

SEQ ID NO: 175519 - RNA, 22 nt, Homo sapiens
ucuuuaaccacuuuucaauguc

SEQ ID NO: 175520 - RNA, 17 nt, Homo sapiens
aaauaaucaguguuucc

SEQ ID NO: 175521 - RNA, 16 nt, Homo sapiens
augcaguuuuccuuaa

SEQ ID NO: 175522 - RNA, 16 nt, Homo sapiens
cuauuagcuccacaaa

SEQ ID NO: 175523 - RNA, 23 nt, Homo sapiens
cacagccaaccuagcuagcaaca

SEQ ID NO: 175524 - RNA, 13 nt, Homo sapiens
uucagaaucucuc

SEQ ID NO: 175525 - RNA, 20 nt, Homo sapiens
ugcccaggcuggagugcaau

SEQ ID NO: 175526 - RNA, 15 nt, Homo sapiens
augaauaguuuccaa

SEQ ID NO: 175527 - RNA, 13 nt, Homo sapiens
agagcuuuaccua

SEQ ID NO: 175528 - RNA, 20 nt, Homo sapiens
gacgugauuuugcuguagaa

SEQ ID NO: 175529 - RNA, 21 nt, Homo sapiens
gaaauucacuuccccucuagg

SEQ ID NO: 175530 - RNA, 12 nt, Homo sapiens
caaaacauuugu

SEQ ID NO: 175531 - RNA, 14 nt, Homo sapiens
uaaccauugucaua

SEQ ID NO: 175532 - RNA, 12 nt, Homo sapiens
auguaucucagg

SEQ ID NO: 175533 - RNA, 22 nt, Homo sapiens
cacagcacaaauuaguuguaua

SEQ ID NO: 175534 - RNA, 21 nt, Homo sapiens
acugccaucuuggacuuguca

SEQ ID NO: 175535 - RNA, 20 nt, Homo sapiens
accaauauuguacaguuuuu

SEQ ID NO: 175536 - RNA, 17 nt, Homo sapiens
acccuucuuuucugacu

SEQ ID NO: 175537 - RNA, 15 nt, Homo sapiens
acaauauacuuguau

SEQ ID NO: 175538 - RNA, 14 nt, Homo sapiens
caguaguugcaaug

SEQ ID NO: 175539 - RNA, 13 nt, Homo sapiens
gcaguggaacuaa

SEQ ID NO: 175540 - RNA, 19 nt, Homo sapiens
ugcaguuuuuuucuugucu

SEQ ID NO: 175541 - RNA, 21 nt, Homo sapiens
acugcauaugaaaggacacua

SEQ ID NO: 175542 - RNA, 14 nt, Homo sapiens
agaugaaacaucau

SEQ ID NO: 175543 - RNA, 13 nt, Homo sapiens
accaggucucaua

SEQ ID NO: 175544 - RNA, 22 nt, Homo sapiens
aaacauuuguuuguggucuaua

SEQ ID NO: 175545 - RNA, 17 nt, Homo sapiens
cuaaaaguuaauagggu

SEQ ID NO: 175546 - RNA, 14 nt, Homo sapiens
uuugaggguguaua

SEQ ID NO: 175547 - RNA, 15 nt, Homo sapiens
uggguucaagugauu

SEQ ID NO: 175548 - RNA, 20 nt, Homo sapiens
guauauucaaccaaauacuu

SEQ ID NO: 175549 - RNA, 13 nt, Homo sapiens
ugacacagucuug

SEQ ID NO: 175550 - RNA, 18 nt, Homo sapiens
uccuccccuguucauucu

SEQ ID NO: 175551 - RNA, 14 nt, Homo sapiens
uaguaaaagccauc

SEQ ID NO: 175552 - RNA, 17 nt, Homo sapiens
aauaaccauugucauaa

SEQ ID NO: 175553 - RNA, 22 nt, Homo sapiens
cugggauuacagggaugagcca

SEQ ID NO: 175554 - RNA, 21 nt, Homo sapiens
aaccguaugagggaacugugu

SEQ ID NO: 175555 - RNA, 14 nt, Homo sapiens
caauagaaauccaa

SEQ ID NO: 175556 - RNA, 22 nt, Homo sapiens
aucccucaaaacaaucuuguca

SEQ ID NO: 175557 - RNA, 23 nt, Homo sapiens
uucagauauaaaagacugaccaa

SEQ ID NO: 175558 - RNA, 16 nt, Homo sapiens
uuaaaauagccauaaa

SEQ ID NO: 175559 - RNA, 17 nt, Homo sapiens
gaaugagcaaaaccaaa

SEQ ID NO: 175560 - RNA, 14 nt, Homo sapiens
aggguaaauucucu

SEQ ID NO: 175561 - RNA, 17 nt, Homo sapiens
ccaaauauuccagagac

SEQ ID NO: 175562 - RNA, 18 nt, Homo sapiens
gccacccucccacugcca

SEQ ID NO: 175563 - RNA, 17 nt, Homo sapiens
agguugagggcaaugga

SEQ ID NO: 175564 - RNA, 18 nt, Homo sapiens
aauaugacacucuaguca

SEQ ID NO: 175565 - RNA, 20 nt, Homo sapiens
aaugacacagucuuggcuca

SEQ ID NO: 175566 - RNA, 23 nt, Homo sapiens
gucaauguccuacugagacagca

SEQ ID NO: 175567 - RNA, 22 nt, Homo sapiens
uagucucuggcaagaugcuuua

SEQ ID NO: 175568 - RNA, 12 nt, Homo sapiens
guagaaagugau

SEQ ID NO: 175569 - RNA, 20 nt, Homo sapiens
ggcacagcauggagucacag

SEQ ID NO: 175570 - RNA, 15 nt, Homo sapiens
uuuucaaugucuaaa

SEQ ID NO: 175571 - RNA, 22 nt, Homo sapiens
uacuuuuuccuggcucaucucu

SEQ ID NO: 175572 - RNA, 21 nt, Homo sapiens
ccauuagcauuugucaacaaa

SEQ ID NO: 175573 - RNA, 18 nt, Homo sapiens
aaagucuacuuuaccuaa

SEQ ID NO: 175574 - RNA, 16 nt, Homo sapiens
uggccuggggcuucug

SEQ ID NO: 175575 - RNA, 21 nt, Homo sapiens
guagagagagaaaaguaacug

SEQ ID NO: 175576 - RNA, 19 nt, Homo sapiens
gccacccucccacugccaa

SEQ ID NO: 175577 - RNA, 15 nt, Homo sapiens
cuagucaguuggcua

SEQ ID NO: 175578 - RNA, 22 nt, Homo sapiens
ucagcaccuacaguguacaguc

SEQ ID NO: 175579 - RNA, 19 nt, Homo sapiens
auuuuauguuuaguugcac

SEQ ID NO: 175580 - RNA, 16 nt, Homo sapiens
uaauaaaaguacaugu

SEQ ID NO: 175581 - RNA, 14 nt, Homo sapiens
agccaguuacauaa

SEQ ID NO: 175582 - RNA, 13 nt, Homo sapiens
cacucagaaaaug

SEQ ID NO: 175583 - RNA, 18 nt, Homo sapiens
aauucagggagugggcua

SEQ ID NO: 175584 - RNA, 13 nt, Homo sapiens
caggcacacugag

SEQ ID NO: 175585 - RNA, 22 nt, Homo sapiens
uguagagagagaaaaguaacug

SEQ ID NO: 175586 - RNA, 19 nt, Homo sapiens
aguauccugcuucugauau

SEQ ID NO: 175587 - RNA, 13 nt, Homo sapiens
ucuuaagacguga

SEQ ID NO: 175588 - RNA, 15 nt, Homo sapiens
guauuaaguuguuaa

SEQ ID NO: 175589 - RNA, 22 nt, Homo sapiens
ccucaaaugagaaaaugucuuu

SEQ ID NO: 175590 - RNA, 15 nt, Homo sapiens
gccaguuacauaaaa

SEQ ID NO: 175591 - RNA, 17 nt, Homo sapiens
cauacuagaguucaugg

SEQ ID NO: 175592 - RNA, 22 nt, Homo sapiens
gcagcgauuaauaacaggcaaa

SEQ ID NO: 175593 - RNA, 15 nt, Homo sapiens
cccagccucaucucu

SEQ ID NO: 175594 - RNA, 16 nt, Homo sapiens
aaguccacaguggaac

SEQ ID NO: 175595 - RNA, 19 nt, Homo sapiens
cuuaugcaaauaaccauug

SEQ ID NO: 175596 - RNA, 19 nt, Homo sapiens
cuuuaauuuuuuacuauuu

SEQ ID NO: 175597 - RNA, 15 nt, Homo sapiens
ccugccaggcacacu

SEQ ID NO: 175598 - RNA, 11 nt, Homo sapiens
ggcucaucucu

SEQ ID NO: 175599 - RNA, 20 nt, Homo sapiens
ucuaaagauggaaaaaccac

SEQ ID NO: 175600 - RNA, 15 nt, Homo sapiens
agggagaagagggaa

SEQ ID NO: 175601 - RNA, 14 nt, Homo sapiens
uguacagucuugua

SEQ ID NO: 175602 - RNA, 15 nt, Homo sapiens
ucuaaaaacauuugu

SEQ ID NO: 175603 - RNA, 16 nt, Homo sapiens
cuggcaagaugcuuua

SEQ ID NO: 175604 - RNA, 14 nt, Homo sapiens
ugacucuuggcaca

SEQ ID NO: 175605 - RNA, 14 nt, Homo sapiens
ccacaguggaacca

SEQ ID NO: 175606 - RNA, 15 nt, Homo sapiens
uccuccccuguucau

SEQ ID NO: 175607 - RNA, 13 nt, Homo sapiens
aguugcuguaugu

SEQ ID NO: 175608 - RNA, 14 nt, Homo sapiens
aaccuagcuagcaa

SEQ ID NO: 175609 - RNA, 18 nt, Homo sapiens
uaaaccguacacuguguu

SEQ ID NO: 175610 - RNA, 20 nt, Homo sapiens
gcacaaauugggccaaagaa

SEQ ID NO: 175611 - RNA, 17 nt, Homo sapiens
guucugguuacuguucu

SEQ ID NO: 175612 - RNA, 22 nt, Homo sapiens
acauuuguuuuagucugaacaa

SEQ ID NO: 175613 - RNA, 13 nt, Homo sapiens
aagcauucuucaa

SEQ ID NO: 175614 - RNA, 15 nt, Homo sapiens
uaacauggugugcuu

SEQ ID NO: 175615 - RNA, 21 nt, Homo sapiens
augucuuuauuaaauguagaa

SEQ ID NO: 175616 - RNA, 17 nt, Homo sapiens
ucaaaacaaucuuguca

SEQ ID NO: 175617 - RNA, 22 nt, Homo sapiens
cuccuuggcuucuuuacuuagu

SEQ ID NO: 175618 - RNA, 19 nt, Homo sapiens
uagugcacagcacaaauua

SEQ ID NO: 175619 - RNA, 22 nt, Homo sapiens
cugagucccuuagccaagcagu

SEQ ID NO: 175620 - RNA, 18 nt, Homo sapiens
ccaaagaaacauugccuu

SEQ ID NO: 175621 - RNA, 20 nt, Homo sapiens
auuccacaaccugguuugcc

SEQ ID NO: 175622 - RNA, 13 nt, Homo sapiens
ggauuacaggcau

SEQ ID NO: 175623 - RNA, 15 nt, Homo sapiens
gauucuccugccuca

SEQ ID NO: 175624 - RNA, 14 nt, Homo sapiens
gaaacaucauuuca

SEQ ID NO: 175625 - RNA, 20 nt, Homo sapiens
cgccacccucccacugccaa

SEQ ID NO: 175626 - RNA, 13 nt, Homo sapiens
accaauauuguac

SEQ ID NO: 175627 - RNA, 19 nt, Homo sapiens
cucgugguaggacuguaga

SEQ ID NO: 175628 - RNA, 20 nt, Homo sapiens
gauuuugaaauuuuuauuaa

SEQ ID NO: 175629 - RNA, 14 nt, Homo sapiens
caauagauauuuac

SEQ ID NO: 175630 - RNA, 21 nt, Homo sapiens
ugaggaauuucuguucuucca

SEQ ID NO: 175631 - RNA, 22 nt, Homo sapiens
acacaaucugaaacagcuucau

SEQ ID NO: 175632 - RNA, 16 nt, Homo sapiens
cccuucuuuucugacu

SEQ ID NO: 175633 - RNA, 17 nt, Homo sapiens
cuccuggaccaggucuc

SEQ ID NO: 175634 - RNA, 14 nt, Homo sapiens
ccaaauuauggcaa

SEQ ID NO: 175635 - RNA, 21 nt, Homo sapiens
aaaauuaagaaauucacuucc

SEQ ID NO: 175636 - RNA, 14 nt, Homo sapiens
acuuauuuauauaa

SEQ ID NO: 175637 - RNA, 18 nt, Homo sapiens
ggauacgacaacuugcac

SEQ ID NO: 175638 - RNA, 23 nt, Homo sapiens
uucauggauauguuauacugaac

SEQ ID NO: 175639 - RNA, 20 nt, Homo sapiens
aaaugagaagucucacugau

SEQ ID NO: 175640 - RNA, 12 nt, Homo sapiens
gaguagcuggau

SEQ ID NO: 175641 - RNA, 17 nt, Homo sapiens
cuuggguucaagugauu

SEQ ID NO: 175642 - RNA, 21 nt, Homo sapiens
gucuuuggugaacauugcaau

SEQ ID NO: 175643 - RNA, 18 nt, Homo sapiens
augagaaaaugucuuuau

SEQ ID NO: 175644 - RNA, 14 nt, Homo sapiens
uuugucaacaaagu

SEQ ID NO: 175645 - RNA, 16 nt, Homo sapiens
uacaauauacuuguau

SEQ ID NO: 175646 - RNA, 18 nt, Homo sapiens
cagaguuccgacugccau

SEQ ID NO: 175647 - RNA, 17 nt, Homo sapiens
cuucuuuuuguucuuca

SEQ ID NO: 175648 - RNA, 15 nt, Homo sapiens
ucuaaaaucugcuag

SEQ ID NO: 175649 - RNA, 19 nt, Homo sapiens
acacagucuuggcucacug

SEQ ID NO: 175650 - RNA, 16 nt, Homo sapiens
agucuuguauuaaguu

SEQ ID NO: 175651 - RNA, 21 nt, Homo sapiens
aauguuuuagaaugagacuua

SEQ ID NO: 175652 - RNA, 16 nt, Homo sapiens
aguagcuggauuacag

SEQ ID NO: 175653 - RNA, 17 nt, Homo sapiens
guucuaaggcugugcca

SEQ ID NO: 175654 - RNA, 20 nt, Homo sapiens
gucagaguuccgacugccau

SEQ ID NO: 175655 - RNA, 19 nt, Homo sapiens
augugacucaagacuucca

SEQ ID NO: 175656 - RNA, 13 nt, Homo sapiens
ugcucacaaaagu

SEQ ID NO: 175657 - RNA, 22 nt, Homo sapiens
gcgcaguuggucuuuaaccacu

SEQ ID NO: 175658 - RNA, 21 nt, Homo sapiens
guauaguuaaccacuaccgaa

SEQ ID NO: 175659 - RNA, 23 nt, Homo sapiens
uucagucaaagauacacaaucug

SEQ ID NO: 175660 - RNA, 14 nt, Homo sapiens
ucuuuuccaugaac

SEQ ID NO: 175661 - RNA, 21 nt, Homo sapiens
cuuguuagugcacagcacaaa

SEQ ID NO: 175662 - RNA, 16 nt, Homo sapiens
cuugguaaaauaauca

SEQ ID NO: 175663 - RNA, 12 nt, Homo sapiens
gcaaaaccaaau

SEQ ID NO: 175664 - RNA, 15 nt, Homo sapiens
gaccauuagcauuug

SEQ ID NO: 175665 - RNA, 15 nt, Homo sapiens
uccugcuucugauau

SEQ ID NO: 175666 - RNA, 21 nt, Homo sapiens
gacucaagacuuccagagccu

SEQ ID NO: 175667 - RNA, 18 nt, Homo sapiens
gacgugauuuugcuguag

SEQ ID NO: 175668 - RNA, 12 nt, Homo sapiens
uuugucuuuaug

SEQ ID NO: 175669 - RNA, 16 nt, Homo sapiens
cagccagguucugacu

SEQ ID NO: 175670 - RNA, 19 nt, Homo sapiens
accugccaggcacacugag

SEQ ID NO: 175671 - RNA, 17 nt, Homo sapiens
ucuuaaaauagccauaa

SEQ ID NO: 175672 - RNA, 11 nt, Homo sapiens
auaugcacaaa

SEQ ID NO: 175673 - RNA, 21 nt, Homo sapiens
guaaauuucucuacugucuca

SEQ ID NO: 175674 - RNA, 17 nt, Homo sapiens
caggcuggagugcaaug

SEQ ID NO: 175675 - RNA, 19 nt, Homo sapiens
uuugcuucaaaaacauucu

SEQ ID NO: 175676 - RNA, 15 nt, Homo sapiens
ugcacaaaccaauua

SEQ ID NO: 175677 - RNA, 13 nt, Homo sapiens
aaagaaauuucca

SEQ ID NO: 175678 - RNA, 18 nt, Homo sapiens
ccagagcguguagugaau

SEQ ID NO: 175679 - RNA, 21 nt, Homo sapiens
uuauauguauaucacauuccc

SEQ ID NO: 175680 - RNA, 15 nt, Homo sapiens
cuggaccaggucuca

SEQ ID NO: 175681 - RNA, 16 nt, Homo sapiens
agcuagcaacauuugu

SEQ ID NO: 175682 - RNA, 18 nt, Homo sapiens
acuuuugaaaacaaaaua

SEQ ID NO: 175683 - RNA, 13 nt, Homo sapiens
cagagcaaacaga

SEQ ID NO: 175684 - RNA, 21 nt, Homo sapiens
uggcaguggaacuaagaaagc

SEQ ID NO: 175685 - RNA, 22 nt, Homo sapiens
ucaaagugagcuccuaagccau

SEQ ID NO: 175686 - RNA, 21 nt, Homo sapiens
aaaucuuuuuuguucaaagau

SEQ ID NO: 175687 - RNA, 20 nt, Homo sapiens
aaaauaaucaguguuuccaa

SEQ ID NO: 175688 - RNA, 11 nt, Homo sapiens
uucaagugauu

SEQ ID NO: 175689 - RNA, 16 nt, Homo sapiens
cgugauuuugcuguag

SEQ ID NO: 175690 - RNA, 14 nt, Homo sapiens
acagccacuuggga

SEQ ID NO: 175691 - RNA, 16 nt, Homo sapiens
uuacauuuuguauauu

SEQ ID NO: 175692 - RNA, 15 nt, Homo sapiens
aacauugcaauagaa

SEQ ID NO: 175693 - RNA, 13 nt, Homo sapiens
gucuuguguuucu

SEQ ID NO: 175694 - RNA, 16 nt, Homo sapiens
acccuucuccuuagaa

SEQ ID NO: 175695 - RNA, 15 nt, Homo sapiens
caaugacacagucuu

SEQ ID NO: 175696 - RNA, 20 nt, Homo sapiens
gcccaggcuggagugcaaug

SEQ ID NO: 175697 - RNA, 19 nt, Homo sapiens
cucuggccuccaaguccac

SEQ ID NO: 175698 - RNA, 16 nt, Homo sapiens
caaauauuccagagac

SEQ ID NO: 175699 - RNA, 15 nt, Homo sapiens
ugguuauauguauau

SEQ ID NO: 175700 - RNA, 16 nt, Homo sapiens
gagggaaaacagaaaa

SEQ ID NO: 175701 - RNA, 23 nt, Homo sapiens
ugauagagguucuuuauugcuca

SEQ ID NO: 175702 - RNA, 15 nt, Homo sapiens
caacaaagucaccca

SEQ ID NO: 175703 - RNA, 18 nt, Homo sapiens
ucugcauucucuagucag

SEQ ID NO: 175704 - RNA, 22 nt, Homo sapiens
caauauacuuguauagcaguuu

SEQ ID NO: 175705 - RNA, 20 nt, Homo sapiens
aguuuccaaauuauggcaaa

SEQ ID NO: 175706 - RNA, 17 nt, Homo sapiens
aucccgucgacguagaa

SEQ ID NO: 175707 - RNA, 21 nt, Homo sapiens
aaaugugacucaagacuucca

SEQ ID NO: 175708 - RNA, 17 nt, Homo sapiens
cuucagucuuuuccaug

SEQ ID NO: 175709 - RNA, 15 nt, Homo sapiens
cgacaacuugcacgu

SEQ ID NO: 175710 - RNA, 18 nt, Homo sapiens
aaaaguauccugcuucug

SEQ ID NO: 175711 - RNA, 18 nt, Homo sapiens
accuaaauaugagcccag

SEQ ID NO: 175712 - RNA, 23 nt, Homo sapiens
uuuauacucaggcagaucucagc

SEQ ID NO: 175713 - RNA, 12 nt, Homo sapiens
gccaagcaguuu

SEQ ID NO: 175714 - RNA, 21 nt, Homo sapiens
auuugucaacaaagucaccca

SEQ ID NO: 175715 - RNA, 19 nt, Homo sapiens
agauaaucucuccauuccc

SEQ ID NO: 175716 - RNA, 18 nt, Homo sapiens
cuuucccuuaaauaacac

SEQ ID NO: 175717 - RNA, 13 nt, Homo sapiens
cuucuccuuagaa

SEQ ID NO: 175718 - RNA, 12 nt, Homo sapiens
uucucugccuca

SEQ ID NO: 175719 - RNA, 12 nt, Homo sapiens
uccccucuagga

SEQ ID NO: 175720 - RNA, 13 nt, Homo sapiens
cagcuguuuaugc

SEQ ID NO: 175721 - RNA, 16 nt, Homo sapiens
cuuguauagcaguuuc

SEQ ID NO: 175722 - RNA, 23 nt, Homo sapiens
aagaauuuuuauauccacuaaaa

SEQ ID NO: 175723 - RNA, 21 nt, Homo sapiens
aagaauuuuuauauccacuaa

SEQ ID NO: 175724 - RNA, 20 nt, Homo sapiens
uacaguuuuuauugcuuguu

SEQ ID NO: 175725 - RNA, 22 nt, Homo sapiens
uuaaguuacacauuuuucagau

SEQ ID NO: 175726 - RNA, 14 nt, Homo sapiens
cuagucaguuggcu

SEQ ID NO: 175727 - RNA, 18 nt, Homo sapiens
caaucugaaacagcuuca

SEQ ID NO: 175728 - RNA, 21 nt, Homo sapiens
aggucuccagagggugaaagc

SEQ ID NO: 175729 - RNA, 23 nt, Homo sapiens
gcaaaaccaaauauuccagagac

SEQ ID NO: 175730 - RNA, 19 nt, Homo sapiens
accgcaggauuugggcucu

SEQ ID NO: 175731 - RNA, 21 nt, Homo sapiens
uuauuaaauguagaaagugau

SEQ ID NO: 175732 - RNA, 20 nt, Homo sapiens
gaaaagaaucggcaauguuu

SEQ ID NO: 175733 - RNA, 14 nt, Homo sapiens
ccuggggcuucuga

SEQ ID NO: 175734 - RNA, 14 nt, Homo sapiens
gucugaacaauaua

SEQ ID NO: 175735 - RNA, 13 nt, Homo sapiens
caaucguaaaauu

SEQ ID NO: 175736 - RNA, 22 nt, Homo sapiens
uagaaccucgagguuucucaaa

SEQ ID NO: 175737 - RNA, 18 nt, Homo sapiens
agcucagguagcacuuua

SEQ ID NO: 175738 - RNA, 13 nt, Homo sapiens
ucaaagugagcuc

SEQ ID NO: 175739 - RNA, 14 nt, Homo sapiens
uacgacaacuugca

SEQ ID NO: 175740 - RNA, 17 nt, Homo sapiens
cuuagccaagcaguuuc

SEQ ID NO: 175741 - RNA, 15 nt, Homo sapiens
agagggaaaacagaa

SEQ ID NO: 175742 - RNA, 21 nt, Homo sapiens
ucugccuccccuucacuccca

SEQ ID NO: 175743 - RNA, 20 nt, Homo sapiens
cagcuguuuaugcauagaua

SEQ ID NO: 175744 - RNA, 11 nt, Homo sapiens
auucaaaguga

SEQ ID NO: 175745 - RNA, 15 nt, Homo sapiens
aaccguacacugugu

SEQ ID NO: 175746 - RNA, 22 nt, Homo sapiens
gcacaaaccaauuaaacccagu

SEQ ID NO: 175747 - RNA, 14 nt, Homo sapiens
ucuaauggcuuuau

SEQ ID NO: 175748 - RNA, 18 nt, Homo sapiens
uuuuccuggcucaucucu

SEQ ID NO: 175749 - RNA, 17 nt, Homo sapiens
auuugucaacaaaguca

SEQ ID NO: 175750 - RNA, 19 nt, Homo sapiens
guagaaaagggaacugaac

SEQ ID NO: 175751 - RNA, 14 nt, Homo sapiens
ugagaaaaugucuu

SEQ ID NO: 175752 - RNA, 20 nt, Homo sapiens
augcuggggacacagcauca

SEQ ID NO: 175753 - RNA, 20 nt, Homo sapiens
uauacccguuucacaugcuu

SEQ ID NO: 175754 - RNA, 14 nt, Homo sapiens
ugagcaaaaccaaa

SEQ ID NO: 175755 - RNA, 20 nt, Homo sapiens
gcacucagaaaauggcacuu

SEQ ID NO: 175756 - RNA, 20 nt, Homo sapiens
cugaacaauauauacuuaua

SEQ ID NO: 175757 - RNA, 21 nt, Homo sapiens
ugugcuucuuaaaauagccau

SEQ ID NO: 175758 - RNA, 12 nt, Homo sapiens
aggccagagcaa

SEQ ID NO: 175759 - RNA, 19 nt, Homo sapiens
caauguuucaaacaaaaag

SEQ ID NO: 175760 - RNA, 13 nt, Homo sapiens
uuacuaaucuuuc

SEQ ID NO: 175761 - RNA, 22 nt, Homo sapiens
ucuaaggcugugccaucagcuc

SEQ ID NO: 175762 - RNA, 16 nt, Homo sapiens
cucaaagaaauuucca

SEQ ID NO: 175763 - RNA, 14 nt, Homo sapiens
ugcuguaugucucg

SEQ ID NO: 175764 - RNA, 20 nt, Homo sapiens
ucuacugucucaguuuacau

SEQ ID NO: 175765 - RNA, 16 nt, Homo sapiens
acguaagacuguguaa

SEQ ID NO: 175766 - RNA, 14 nt, Homo sapiens
acguaagacugugu

SEQ ID NO: 175767 - RNA, 13 nt, Homo sapiens
ccuccaaguccac

SEQ ID NO: 175768 - RNA, 18 nt, Homo sapiens
acugccaaagaacuugga

SEQ ID NO: 175769 - RNA, 15 nt, Homo sapiens
caggcgugaccugcc

SEQ ID NO: 175770 - RNA, 15 nt, Homo sapiens
cagagccucaaauga

SEQ ID NO: 175771 - RNA, 23 nt, Homo sapiens
acauuuuacuuuuuccuggcuca

SEQ ID NO: 175772 - RNA, 15 nt, Homo sapiens
augagcaaaaccaaa

SEQ ID NO: 175773 - RNA, 16 nt, Homo sapiens
auaaaaguuggcucag

SEQ ID NO: 175774 - RNA, 21 nt, Homo sapiens
cugaccaauauuguacaguuu

SEQ ID NO: 175775 - RNA, 12 nt, Homo sapiens
cacugccaaaga

SEQ ID NO: 175776 - RNA, 12 nt, Homo sapiens
uuaacugaaugc

SEQ ID NO: 175777 - RNA, 23 nt, Homo sapiens
agucuuguuguuuucccaaagag

SEQ ID NO: 175778 - RNA, 14 nt, Homo sapiens
gucauaacuagaac

SEQ ID NO: 175779 - RNA, 16 nt, Homo sapiens
gucuaaaaacauuugu

SEQ ID NO: 175780 - RNA, 18 nt, Homo sapiens
ccaaguccacaguggaac

SEQ ID NO: 175781 - RNA, 22 nt, Homo sapiens
ggagucuuagagcuuuaccuaa

SEQ ID NO: 175782 - RNA, 16 nt, Homo sapiens
gcaguggaacuaagaa

SEQ ID NO: 175783 - RNA, 12 nt, Homo sapiens
guacacuguguu

SEQ ID NO: 175784 - RNA, 20 nt, Homo sapiens
auuugcuuagaaagucugau

SEQ ID NO: 175785 - RNA, 19 nt, Homo sapiens
ugaccaauauuguacaguu

SEQ ID NO: 175786 - RNA, 9 nt, Homo sapiens
aaagacaga

SEQ ID NO: 175787 - RNA, 19 nt, Homo sapiens
cugaguagcuggauuacag

SEQ ID NO: 175788 - RNA, 22 nt, Homo sapiens
aacuuggaaauagugauuucca

SEQ ID NO: 175789 - RNA, 24 nt, Homo sapiens
cuugguaaaauaaucaguguuucc

SEQ ID NO: 175790 - RNA, 19 nt, Homo sapiens
gcuucuuugaaacuuguau

SEQ ID NO: 175791 - RNA, 22 nt, Homo sapiens
uagugaaucacguaaagcuaga

SEQ ID NO: 175792 - RNA, 23 nt, Homo sapiens
caggcgugaccugccaggcacac

SEQ ID NO: 175793 - RNA, 14 nt, Homo sapiens
ucuuaguugcugua

SEQ ID NO: 175794 - RNA, 16 nt, Homo sapiens
uacagucuuguauuaa

SEQ ID NO: 175795 - RNA, 15 nt, Homo sapiens
gcaggacagcuccug

SEQ ID NO: 175796 - RNA, 13 nt, Homo sapiens
aagccuugguaaa

SEQ ID NO: 175797 - RNA, 23 nt, Homo sapiens
guugauuucagcaccuacagugu

SEQ ID NO: 175798 - RNA, 13 nt, Homo sapiens
cauuuacauugcc

SEQ ID NO: 175799 - RNA, 12 nt, Homo sapiens
uguagaaaguga

SEQ ID NO: 175800 - RNA, 21 nt, Homo sapiens
augacacucuagucaaagccu

SEQ ID NO: 175801 - RNA, 19 nt, Homo sapiens
agggcuuggacucaagcaa

SEQ ID NO: 175802 - RNA, 15 nt, Homo sapiens
aaucaguguuuccaa

SEQ ID NO: 175803 - RNA, 22 nt, Homo sapiens
ggcuaagcacgggccauaugaa

SEQ ID NO: 175804 - RNA, 18 nt, Homo sapiens
uucugcauucucuaguca

SEQ ID NO: 175805 - RNA, 22 nt, Homo sapiens
cauuugucaacaaagucaccca

SEQ ID NO: 175806 - RNA, 12 nt, Homo sapiens
uggcucaucucu

SEQ ID NO: 175807 - RNA, 23 nt, Homo sapiens
ccuaggaaagccaguuacauaaa

SEQ ID NO: 175808 - RNA, 20 nt, Homo sapiens
guuuaugcauagauaaucuc

SEQ ID NO: 175809 - RNA, 15 nt, Homo sapiens
auacuagaguucaug

SEQ ID NO: 175810 - RNA, 15 nt, Homo sapiens
aguuccgacugccau

SEQ ID NO: 175811 - RNA, 11 nt, Homo sapiens
gccucaucucu

SEQ ID NO: 175812 - RNA, 21 nt, Homo sapiens
aaagcccuuaaaaauaugugu

SEQ ID NO: 175813 - RNA, 15 nt, Homo sapiens
gcccuuaaaaauaug

SEQ ID NO: 175814 - RNA, 18 nt, Homo sapiens
gucauacuugaaaauaug

SEQ ID NO: 175815 - RNA, 12 nt, Homo sapiens
aaaaagucauaa

SEQ ID NO: 175816 - RNA, 20 nt, Homo sapiens
aauguuuccuuuaauuuuuu

SEQ ID NO: 175817 - RNA, 15 nt, Homo sapiens
aauucauaucuauuu

SEQ ID NO: 175818 - RNA, 15 nt, Homo sapiens
aauucucuauuuuuu

SEQ ID NO: 175819 - RNA, 18 nt, Homo sapiens
aguggcuugaaaucuuuu

SEQ ID NO: 175820 - RNA, 19 nt, Homo sapiens
aguggcuugaaaucuuuuu

SEQ ID NO: 175821 - RNA, 13 nt, Homo sapiens
aguucaucuuuug

SEQ ID NO: 175822 - RNA, 20 nt, Homo sapiens
aguuuuuuucuugucuauaa

SEQ ID NO: 175823 - RNA, 19 nt, Homo sapiens
gaauauuauuggaaaauuc

SEQ ID NO: 175824 - RNA, 21 nt, Homo sapiens
gacuuuugaaaacaaaauaug

SEQ ID NO: 175825 - RNA, 22 nt, Homo sapiens
augcaaauaaccauugucauaa

SEQ ID NO: 175826 - RNA, 20 nt, Homo sapiens
auucuuacauuuuacuuuuu

SEQ ID NO: 175827 - RNA, 14 nt, Homo sapiens
auugcucauuuuuu

SEQ ID NO: 175828 - RNA, 17 nt, Homo sapiens
auuuguuuucacuuuuu

SEQ ID NO: 175829 - RNA, 20 nt, Human herpesvirus 7
aaaaagaacuuacauuucaa

SEQ ID NO: 175830 - RNA, 12 nt, Human herpesvirus 7
aaaaauaaauac

SEQ ID NO: 175831 - RNA, 14 nt, Human herpesvirus 7
aaaaauacaacuuc

SEQ ID NO: 175832 - RNA, 21 nt, Human herpesvirus 7
aaaaaaaguacaagaguguua

SEQ ID NO: 175833 - RNA, 13 nt, Human herpesvirus 7
aaaaaaauucauu

SEQ ID NO: 175834 - RNA, 16 nt, Human herpesvirus 7
aaaaaguaccauugcu

SEQ ID NO: 175835 - RNA, 20 nt, Human herpesvirus 7
aaaaaguuuguaucaaugua

SEQ ID NO: 175836 - RNA, 12 nt, Human herpesvirus 7
aaaacauuuaca

SEQ ID NO: 175837 - RNA, 14 nt, Human herpesvirus 7
aaaacgguauguaa

SEQ ID NO: 175838 - RNA, 14 nt, Human herpesvirus 7
aaaaccuacuguua

SEQ ID NO: 175839 - RNA, 19 nt, Human herpesvirus 7
aaaacauugugaguuucua

SEQ ID NO: 175840 - RNA, 21 nt, Human herpesvirus 7
aaaacauuuacaaaaaaaagc

SEQ ID NO: 175841 - RNA, 11 nt, Human herpesvirus 7
aaaacuuugaa

SEQ ID NO: 175842 - RNA, 18 nt, Human herpesvirus 7
aaaacuuugaaaucauuc

SEQ ID NO: 175843 - RNA, 18 nt, Human herpesvirus 7
aaaacuuuuuggaaaaac

SEQ ID NO: 175844 - RNA, 22 nt, Human herpesvirus 7
aaaagaaaauuuauauuugcuu

SEQ ID NO: 175845 - RNA, 14 nt, Human herpesvirus 7
aaaagacauaacaa

SEQ ID NO: 175846 - RNA, 22 nt, Human herpesvirus 7
aaaagaauggcgguuguacugu

SEQ ID NO: 175847 - RNA, 22 nt, Human herpesvirus 7
aaaacaugucuuuuaguuuuca

SEQ ID NO: 175848 - RNA, 23 nt, Human herpesvirus 7
aaaacugaaccaguuuuacuuuu

SEQ ID NO: 175849 - RNA, 20 nt, Human herpesvirus 7
aaaacucuucuuuauaagca

SEQ ID NO: 175850 - RNA, 16 nt, Human herpesvirus 7
aaaacugcaaauccaa

SEQ ID NO: 175851 - RNA, 13 nt, Human herpesvirus 7
aaaacuugauaaa

SEQ ID NO: 175852 - RNA, 20 nt, Human herpesvirus 7
aaaacuuggugaagaucauc

SEQ ID NO: 175853 - RNA, 14 nt, Human herpesvirus 7
aaaacuaacuuauc

SEQ ID NO: 175854 - RNA, 14 nt, Human herpesvirus 7
aaaacuuuucuuuc

SEQ ID NO: 175855 - RNA, 17 nt, Human herpesvirus 7
aaaacuuuucuuucuua

SEQ ID NO: 175856 - RNA, 14 nt, Human herpesvirus 7
aaaagauuccugau

SEQ ID NO: 175857 - RNA, 18 nt, Human herpesvirus 7
aaaagauuccugaugaua

SEQ ID NO: 175858 - RNA, 18 nt, Human herpesvirus 7
aaaagauuuaacaugugu

SEQ ID NO: 175859 - RNA, 19 nt, Human herpesvirus 7
aaaagauuuaacaugugua

SEQ ID NO: 175860 - RNA, 21 nt, Human herpesvirus 7
aaaagauuuaauaacaauuug

SEQ ID NO: 175861 - RNA, 12 nt, Human herpesvirus 7
aaaauaacagga

SEQ ID NO: 175862 - RNA, 19 nt, Human herpesvirus 7
aaaauaacaggaaaccaca

SEQ ID NO: 175863 - RNA, 20 nt, Human herpesvirus 7
aaaauaaguccgugugcaaa

SEQ ID NO: 175864 - RNA, 24 nt, Human herpesvirus 7
aaaacaaugguguuaacaaucuua

SEQ ID NO: 175865 - RNA, 22 nt, Human herpesvirus 7
aaaacaaucaauaagccucuaa

SEQ ID NO: 175866 - RNA, 21 nt, Human herpesvirus 7
aaaacaagacagaaaugaauc

SEQ ID NO: 175867 - RNA, 23 nt, Human herpesvirus 7
aaaacacguccaagaaauaugcu

SEQ ID NO: 175868 - RNA, 15 nt, Human herpesvirus 7
aaaacaucagaccua

SEQ ID NO: 175869 - RNA, 21 nt, Human herpesvirus 7
aaaacauuaucgcguuuucau

SEQ ID NO: 175870 - RNA, 17 nt, Human herpesvirus 7
aaaaauuacuugcuaug

SEQ ID NO: 175871 - RNA, 16 nt, Human herpesvirus 7
aaaaauuuuuuacugu

SEQ ID NO: 175872 - RNA, 18 nt, Human herpesvirus 7
aaaaauuuuuuacugucu

SEQ ID NO: 175873 - RNA, 19 nt, Human herpesvirus 7
aaaaauuuuuuacugucuu

SEQ ID NO: 175874 - RNA, 21 nt, Human herpesvirus 7
aaaacaaaaaaaguaccauug

SEQ ID NO: 175875 - RNA, 20 nt, Human herpesvirus 7
aaaacaaaaaagugaucaaa

SEQ ID NO: 175876 - RNA, 15 nt, Human herpesvirus 7
aaaacaaacuauguc

SEQ ID NO: 175877 - RNA, 20 nt, Human herpesvirus 7
aaaaaucuaauuaaucugca

SEQ ID NO: 175878 - RNA, 12 nt, Human herpesvirus 7
aaaaauccaaaa

SEQ ID NO: 175879 - RNA, 20 nt, Human herpesvirus 7
aaaaauguuuuuguuucuga

SEQ ID NO: 175880 - RNA, 15 nt, Human herpesvirus 7
aaaaauuaacagcuc

SEQ ID NO: 175881 - RNA, 16 nt, Human herpesvirus 7
aaaaauuaacagcucc

SEQ ID NO: 175882 - RNA, 14 nt, Human herpesvirus 7
aaaacaauuuccuu

SEQ ID NO: 175883 - RNA, 12 nt, Human herpesvirus 7
aaaaaaccacaa

SEQ ID NO: 175884 - RNA, 11 nt, Human herpesvirus 7
aaaaaaccauu

SEQ ID NO: 175885 - RNA, 13 nt, Human herpesvirus 7
aaaaaaucaacuu

SEQ ID NO: 175886 - RNA, 14 nt, Human herpesvirus 7
aaaaaaucuauuaa

SEQ ID NO: 175887 - RNA, 13 nt, Human herpesvirus 7
aaaaaaucugaau

SEQ ID NO: 175888 - RNA, 13 nt, Human herpesvirus 7
aaaacaagcuuaa

SEQ ID NO: 175889 - RNA, 14 nt, Human herpesvirus 7
aaaacaagcuuaaa

SEQ ID NO: 175890 - RNA, 11 nt, Human herpesvirus 7
aaaacaaugaa

SEQ ID NO: 175891 - RNA, 18 nt, Human herpesvirus 7
aaaacaauuaagaaucau

SEQ ID NO: 175892 - RNA, 21 nt, Human herpesvirus 7
aaaaauaccucuggcuucaga

SEQ ID NO: 175893 - RNA, 15 nt, Human herpesvirus 7
aaaaauaauaaaugu

SEQ ID NO: 175894 - RNA, 23 nt, Human herpesvirus 7
aaaacaugggucucuugaggaaa

SEQ ID NO: 175895 - RNA, 23 nt, Human herpesvirus 7
aaaaauaagaaaccagcuuuuau

SEQ ID NO: 175896 - RNA, 10 nt, Human herpesvirus 7
aaaacacuuu

SEQ ID NO: 175897 - RNA, 23 nt, Human herpesvirus 7
aaaaaguucuuugaaauaguguc

SEQ ID NO: 175898 - RNA, 17 nt, Human herpesvirus 7
aaaacaucccuuuccaa

SEQ ID NO: 175899 - RNA, 22 nt, Human herpesvirus 7
aucaacagccaucuaauugcag

SEQ ID NO: 175900 - RNA, 21 nt, Human herpesvirus 7
aucaaccaacauucuugucaa

SEQ ID NO: 175901 - RNA, 15 nt, Human herpesvirus 7
aucaauuugaauauu

SEQ ID NO: 175902 - RNA, 23 nt, Human herpesvirus 7
aucaauagguuccacacagggaa

SEQ ID NO: 175903 - RNA, 22 nt, Human herpesvirus 7
aucaagccacgaugacuuccaa

SEQ ID NO: 175904 - RNA, 19 nt, Human herpesvirus 7
aucaagacgcuguaugcaa

SEQ ID NO: 175905 - RNA, 20 nt, Human herpesvirus 7
aucaagucuuauuacucgau

SEQ ID NO: 175906 - RNA, 15 nt, Human herpesvirus 7
aucacuuugcaucaa

SEQ ID NO: 175907 - RNA, 16 nt, Human herpesvirus 7
aucacuuugcaucaaa

SEQ ID NO: 175908 - RNA, 23 nt, Human herpesvirus 7
aucauaccauaaauaccaaaaac

SEQ ID NO: 175909 - RNA, 17 nt, Human herpesvirus 7
aucauaauuacauugca

SEQ ID NO: 175910 - RNA, 17 nt, Human herpesvirus 7
aucaggaaaaucuauca

SEQ ID NO: 175911 - RNA, 18 nt, Human herpesvirus 7
aucaguguaacucugcca

SEQ ID NO: 175912 - RNA, 21 nt, Human herpesvirus 7
auauuggcaugcuuacaguga

SEQ ID NO: 175913 - RNA, 20 nt, Human herpesvirus 7
auauggcaauaaaucuguaa

SEQ ID NO: 175914 - RNA, 14 nt, Human herpesvirus 7
auauuuaaguuccu

SEQ ID NO: 175915 - RNA, 20 nt, Human herpesvirus 7
auauuuauguccgcuuacaa

SEQ ID NO: 175916 - RNA, 18 nt, Human herpesvirus 7
aucaaaaaacacguccaa

SEQ ID NO: 175917 - RNA, 21 nt, Human herpesvirus 7
aucaaaaaacacguccaagaa

SEQ ID NO: 175918 - RNA, 16 nt, Human herpesvirus 7
auauuuuuaaaaucua

SEQ ID NO: 175919 - RNA, 19 nt, Human herpesvirus 7
auauuuucuacaacuaaaa

SEQ ID NO: 175920 - RNA, 20 nt, Human herpesvirus 7
auauuuagagucgucuugca

SEQ ID NO: 175921 - RNA, 17 nt, Human herpesvirus 7
aucaaaaacugaaccag

SEQ ID NO: 175922 - RNA, 13 nt, Human herpesvirus 7
aucaaaacauauc

SEQ ID NO: 175923 - RNA, 14 nt, Human herpesvirus 7
aucaaaacauauca

SEQ ID NO: 175924 - RNA, 18 nt, Human herpesvirus 7
aucaaaauccuggauuuc

SEQ ID NO: 175925 - RNA, 17 nt, Human herpesvirus 7
auagauuucagaauuuc

SEQ ID NO: 175926 - RNA, 22 nt, Human herpesvirus 7
auaucugacugguacaaggugu

SEQ ID NO: 175927 - RNA, 18 nt, Human herpesvirus 7
auaucuuuuucaaaugga

SEQ ID NO: 175928 - RNA, 19 nt, Human herpesvirus 7
auaucuuuuucaaauggau

SEQ ID NO: 175929 - RNA, 13 nt, Human herpesvirus 7
auaugaaucaaau

SEQ ID NO: 175930 - RNA, 19 nt, Human herpesvirus 7
auaugaugacaacaaagca

SEQ ID NO: 175931 - RNA, 15 nt, Human herpesvirus 7
auaugcaugcaauuu

SEQ ID NO: 175932 - RNA, 22 nt, Human herpesvirus 7
auaugcucuagaaaaucuacca

SEQ ID NO: 175933 - RNA, 22 nt, Human herpesvirus 7
auaugcaucaaaacauaucaga

SEQ ID NO: 175934 - RNA, 21 nt, Human herpesvirus 7
auccuaacaauaaaguuucca

SEQ ID NO: 175935 - RNA, 19 nt, Human herpesvirus 7
auccuagaauggcaccccu

SEQ ID NO: 175936 - RNA, 18 nt, Human herpesvirus 7
auccucagaauguacaca

SEQ ID NO: 175937 - RNA, 16 nt, Human herpesvirus 7
auccuccuugccugca

SEQ ID NO: 175938 - RNA, 17 nt, Human herpesvirus 7
aucuaccgcuguacaau

SEQ ID NO: 175939 - RNA, 16 nt, Human herpesvirus 7
aucuaauugcagacua

SEQ ID NO: 175940 - RNA, 16 nt, Human herpesvirus 7
auccuguuaugugguc

SEQ ID NO: 175941 - RNA, 23 nt, Human herpesvirus 7
auccugcuaaggcgaaaaacacu

SEQ ID NO: 175942 - RNA, 22 nt, Human herpesvirus 7
aucauagcaggaagcacaaauc

SEQ ID NO: 175943 - RNA, 22 nt, Human herpesvirus 7
auccaaaaucagacaauuucac

SEQ ID NO: 175944 - RNA, 16 nt, Human herpesvirus 7
auccagcaaagacuug

SEQ ID NO: 175945 - RNA, 20 nt, Human herpesvirus 7
auccagcaaagacuugcaaa

SEQ ID NO: 175946 - RNA, 15 nt, Human herpesvirus 7
auccaguacuugcau

SEQ ID NO: 175947 - RNA, 23 nt, Human herpesvirus 7
auccgucuguguuauacuuauua

SEQ ID NO: 175948 - RNA, 12 nt, Human herpesvirus 7
auccguggaauc

SEQ ID NO: 175949 - RNA, 17 nt, Human herpesvirus 7
aucuauuuaaaauauua

SEQ ID NO: 175950 - RNA, 12 nt, Human herpesvirus 7
aucuauauuuga

SEQ ID NO: 175951 - RNA, 13 nt, Human herpesvirus 7
aucuauauuugau

SEQ ID NO: 175952 - RNA, 19 nt, Human herpesvirus 7
aucuauaguuuguauuuca

SEQ ID NO: 175953 - RNA, 16 nt, Human herpesvirus 7
aucuaugcaaagcaag

SEQ ID NO: 175954 - RNA, 15 nt, Human herpesvirus 7
aucuaggucuuccac

SEQ ID NO: 175955 - RNA, 20 nt, Human herpesvirus 7
aucuaggucuuccacuguug

SEQ ID NO: 175956 - RNA, 14 nt, Human herpesvirus 7
aucuauaaacauuc

SEQ ID NO: 175957 - RNA, 15 nt, Human herpesvirus 7
aucuauaaacauucu

SEQ ID NO: 175958 - RNA, 16 nt, Human herpesvirus 7
aucuggaaucgaauac

SEQ ID NO: 175959 - RNA, 12 nt, Human herpesvirus 7
aucugauuuaua

SEQ ID NO: 175960 - RNA, 15 nt, Human herpesvirus 7
aucugcaaaaaacca

SEQ ID NO: 175961 - RNA, 14 nt, Human herpesvirus 7
aucugcacuaucuc

SEQ ID NO: 175962 - RNA, 22 nt, Human herpesvirus 7
aucugacugguacaagguguuc

SEQ ID NO: 175963 - RNA, 17 nt, Human herpesvirus 7
auacauuuuugcaauau

SEQ ID NO: 175964 - RNA, 19 nt, Human herpesvirus 7
auaccaaaaaccugaaaaa

SEQ ID NO: 175965 - RNA, 20 nt, Human herpesvirus 7
auaccauaaauaccaaaaac

SEQ ID NO: 175966 - RNA, 23 nt, Human herpesvirus 7
auacauuauaaauguaacuuuca

SEQ ID NO: 175967 - RNA, 16 nt, Human herpesvirus 7
auacgaaucaguucaa

SEQ ID NO: 175968 - RNA, 21 nt, Human herpesvirus 7
auacgaaaacggucugagacg

SEQ ID NO: 175969 - RNA, 15 nt, Human herpesvirus 7
auacaauagugaaca

SEQ ID NO: 175970 - RNA, 16 nt, Human herpesvirus 7
auacaaaagacauaac

SEQ ID NO: 175971 - RNA, 17 nt, Human herpesvirus 7
auacaaccacaaccaaa

SEQ ID NO: 175972 - RNA, 14 nt, Human herpesvirus 7
auacaacuaaaaau

SEQ ID NO: 175973 - RNA, 18 nt, Human herpesvirus 7
auacaacuaaaaaucuca

SEQ ID NO: 175974 - RNA, 19 nt, Human herpesvirus 7
auacaacuaaaaaucucag

SEQ ID NO: 175975 - RNA, 12 nt, Human herpesvirus 7
auacaacuuuau

SEQ ID NO: 175976 - RNA, 22 nt, Human herpesvirus 7
auacaacuuuauggaacaugaa

SEQ ID NO: 175977 - RNA, 18 nt, Human herpesvirus 7
auacaaagaagaauucca

SEQ ID NO: 175978 - RNA, 18 nt, Human herpesvirus 7
auacaaauuuaagagaca

SEQ ID NO: 175979 - RNA, 23 nt, Human herpesvirus 7
auacacccagucgucugcucaau

SEQ ID NO: 175980 - RNA, 19 nt, Human herpesvirus 7
auacagauauuuuaauucu

SEQ ID NO: 175981 - RNA, 20 nt, Human herpesvirus 7
auacagauauuuuaauucua

SEQ ID NO: 175982 - RNA, 13 nt, Human herpesvirus 7
auacauaauucaa

SEQ ID NO: 175983 - RNA, 15 nt, Human herpesvirus 7
auacauaauucaaua

SEQ ID NO: 175984 - RNA, 16 nt, Human herpesvirus 7
auacuuuuuuuacuua

SEQ ID NO: 175985 - RNA, 12 nt, Human herpesvirus 7
auacuuguucaa

SEQ ID NO: 175986 - RNA, 15 nt, Human herpesvirus 7
auacuuuaaaacuuu

SEQ ID NO: 175987 - RNA, 16 nt, Human herpesvirus 7
auacuggcaugucuca

SEQ ID NO: 175988 - RNA, 20 nt, Human herpesvirus 7
auacuggcaugucucauaau

SEQ ID NO: 175989 - RNA, 23 nt, Human herpesvirus 7
auacuaauagaaaaauguacaau

SEQ ID NO: 175990 - RNA, 14 nt, Human herpesvirus 7
auacguccaaaaau

SEQ ID NO: 175991 - RNA, 19 nt, Human herpesvirus 7
auagauaaugaaguuuauc

SEQ ID NO: 175992 - RNA, 21 nt, Human herpesvirus 7
auagauacguuaguugcagcu

SEQ ID NO: 175993 - RNA, 20 nt, Human herpesvirus 7
auagaugcagaaaaauccaa

SEQ ID NO: 175994 - RNA, 16 nt, Human herpesvirus 7
auagaugcgaaagcca

SEQ ID NO: 175995 - RNA, 21 nt, Human herpesvirus 7
auagaugcgaaagccacuguu

SEQ ID NO: 175996 - RNA, 19 nt, Human herpesvirus 7
auagauuacgcacaaauuu

SEQ ID NO: 175997 - RNA, 15 nt, Human herpesvirus 7
auagaguacaugugu

SEQ ID NO: 175998 - RNA, 21 nt, Human herpesvirus 7
auagacauuucguuauuccau

SEQ ID NO: 175999 - RNA, 15 nt, Human herpesvirus 7
auagagaaaacauug

SEQ ID NO: 176000 - RNA, 19 nt, Human herpesvirus 7
auagacaaauuaaacaauc

SEQ ID NO: 176001 - RNA, 14 nt, Human herpesvirus 7
auagacacauuuau

SEQ ID NO: 176002 - RNA, 20 nt, Human herpesvirus 7
auagacacauuuauccauca

SEQ ID NO: 176003 - RNA, 15 nt, Human herpesvirus 7
auagaaauuaugaaa

SEQ ID NO: 176004 - RNA, 18 nt, Human herpesvirus 7
auagaaauuauuguacau

SEQ ID NO: 176005 - RNA, 18 nt, Human herpesvirus 7
auaauucauuuguuuaag

SEQ ID NO: 176006 - RNA, 14 nt, Human herpesvirus 7
auaauuuucaugaa

SEQ ID NO: 176007 - RNA, 23 nt, Human herpesvirus 7
auaauuucuauaaucacgaaaua

SEQ ID NO: 176008 - RNA, 14 nt, Human herpesvirus 7
auaauuacauugca

SEQ ID NO: 176009 - RNA, 17 nt, Human herpesvirus 7
auaauuacauugcaguc

SEQ ID NO: 176010 - RNA, 18 nt, Human herpesvirus 7
auaaguucaucauguuug

SEQ ID NO: 176011 - RNA, 17 nt, Human herpesvirus 7
auaaguugacaauguca

SEQ ID NO: 176012 - RNA, 18 nt, Human herpesvirus 7
auaagcaguuauaugaaa

SEQ ID NO: 176013 - RNA, 18 nt, Human herpesvirus 7
auaagccucuaagagcuu

SEQ ID NO: 176014 - RNA, 12 nt, Human herpesvirus 7
auaagaugcuua

SEQ ID NO: 176015 - RNA, 18 nt, Human herpesvirus 7
auaacuuuaucauuacuc

SEQ ID NO: 176016 - RNA, 23 nt, Human herpesvirus 7
auaaaugcuuaaauuuccaucua

SEQ ID NO: 176017 - RNA, 14 nt, Human herpesvirus 7
auaaaggaucucuc

SEQ ID NO: 176018 - RNA, 17 nt, Human herpesvirus 7
auaaagauuacauuugc

SEQ ID NO: 176019 - RNA, 21 nt, Human herpesvirus 7
auaaaguuuauauuuucuaua

SEQ ID NO: 176020 - RNA, 13 nt, Human herpesvirus 7
auaaaguuuccau

SEQ ID NO: 176021 - RNA, 14 nt, Human herpesvirus 7
auaaauaguuucau

SEQ ID NO: 176022 - RNA, 16 nt, Human herpesvirus 7
auaaaucaaccaacau

SEQ ID NO: 176023 - RNA, 19 nt, Human herpesvirus 7
agucuauugacauaaucau

SEQ ID NO: 176024 - RNA, 16 nt, Human herpesvirus 7
agucuccgugucacug

SEQ ID NO: 176025 - RNA, 16 nt, Human herpesvirus 7
agucucagagaacuag

SEQ ID NO: 176026 - RNA, 19 nt, Human herpesvirus 7
agucucugggaagauuuga

SEQ ID NO: 176027 - RNA, 18 nt, Human herpesvirus 7
agucugugacagauuuaa

SEQ ID NO: 176028 - RNA, 22 nt, Human herpesvirus 7
agucuuguuuuuuggauuuccg

SEQ ID NO: 176029 - RNA, 14 nt, Human herpesvirus 7
agugaaugugcuuu

SEQ ID NO: 176030 - RNA, 19 nt, Human herpesvirus 7
aguuucuacauguuuaaca

SEQ ID NO: 176031 - RNA, 17 nt, Human herpesvirus 7
aguuucugcauacucuu

SEQ ID NO: 176032 - RNA, 22 nt, Human herpesvirus 7
aguuucuuuuucauuaacuuuu

SEQ ID NO: 176033 - RNA, 18 nt, Human herpesvirus 7
aguuugaguuucuucuuc

SEQ ID NO: 176034 - RNA, 20 nt, Human herpesvirus 7
agugaaacacauucugucuu

SEQ ID NO: 176035 - RNA, 20 nt, Human herpesvirus 7
agugaacaugugcugaaugu

SEQ ID NO: 176036 - RNA, 22 nt, Human herpesvirus 7
auaaaaagcccaugaacacugc

SEQ ID NO: 176037 - RNA, 14 nt, Human herpesvirus 7
auaaaaauuuccuu

SEQ ID NO: 176038 - RNA, 19 nt, Human herpesvirus 7
auaaaacaugcaacauaau

SEQ ID NO: 176039 - RNA, 15 nt, Human herpesvirus 7
aguuuuaacaaucua

SEQ ID NO: 176040 - RNA, 21 nt, Human herpesvirus 7
aguuuuacagaaauugaugaa

SEQ ID NO: 176041 - RNA, 22 nt, Human herpesvirus 7
aguuuuguuacgucaacuaaaa

SEQ ID NO: 176042 - RNA, 16 nt, Human herpesvirus 7
auaaaaaacaaauaac

SEQ ID NO: 176043 - RNA, 15 nt, Human herpesvirus 7
auaaaaacaagcuua

SEQ ID NO: 176044 - RNA, 19 nt, Human herpesvirus 7
agguaucuuuacuuucaua

SEQ ID NO: 176045 - RNA, 22 nt, Human herpesvirus 7
agguaucuuuacuuucauagcu

SEQ ID NO: 176046 - RNA, 14 nt, Human herpesvirus 7
aggucacaaaagcu

SEQ ID NO: 176047 - RNA, 18 nt, Human herpesvirus 7
aggucaucugaacagguu

SEQ ID NO: 176048 - RNA, 22 nt, Human herpesvirus 7
aguaauguuauuuuucaugccu

SEQ ID NO: 176049 - RNA, 21 nt, Human herpesvirus 7
aguaacuacaggcuuacacua

SEQ ID NO: 176050 - RNA, 13 nt, Human herpesvirus 7
aguaaucaauaaa

SEQ ID NO: 176051 - RNA, 21 nt, Human herpesvirus 7
aguaaucacauuaucuugaca

SEQ ID NO: 176052 - RNA, 16 nt, Human herpesvirus 7
aguacaagaguguuau

SEQ ID NO: 176053 - RNA, 22 nt, Human herpesvirus 7
aguaccgaaaguguaggcaaga

SEQ ID NO: 176054 - RNA, 20 nt, Human herpesvirus 7
agucauuuacagcguggccu

SEQ ID NO: 176055 - RNA, 23 nt, Human herpesvirus 7
aguccuuucauagacgaggccaa

SEQ ID NO: 176056 - RNA, 14 nt, Human herpesvirus 7
aguccgugugcaaa

SEQ ID NO: 176057 - RNA, 22 nt, Human herpesvirus 7
agucuaaaaguaaagggaaaaa

SEQ ID NO: 176058 - RNA, 15 nt, Human herpesvirus 7
agucuacuaugggcu

SEQ ID NO: 176059 - RNA, 15 nt, Human herpesvirus 7
agucuaguaaaccuu

SEQ ID NO: 176060 - RNA, 21 nt, Human herpesvirus 7
agucacguaaaaguguucaaa

SEQ ID NO: 176061 - RNA, 22 nt, Human herpesvirus 7
aguauuuaagaacagaaugaua

SEQ ID NO: 176062 - RNA, 18 nt, Human herpesvirus 7
aguauuucgucuuuccuc

SEQ ID NO: 176063 - RNA, 16 nt, Human herpesvirus 7
aguacgcccacucugg

SEQ ID NO: 176064 - RNA, 17 nt, Human herpesvirus 7
aguauguuuacgcugcu

SEQ ID NO: 176065 - RNA, 17 nt, Human herpesvirus 7
aguaugucagauucucc

SEQ ID NO: 176066 - RNA, 15 nt, Human herpesvirus 7
aguauucuuaugcca

SEQ ID NO: 176067 - RNA, 22 nt, Human herpesvirus 7
agcugauucugccauuacugau

SEQ ID NO: 176068 - RNA, 14 nt, Human herpesvirus 7
agcugcagcugaaa

SEQ ID NO: 176069 - RNA, 15 nt, Human herpesvirus 7
agcugaaaaccauga

SEQ ID NO: 176070 - RNA, 17 nt, Human herpesvirus 7
aggauuuugacaagcgc

SEQ ID NO: 176071 - RNA, 13 nt, Human herpesvirus 7
aggcaaaucucau

SEQ ID NO: 176072 - RNA, 16 nt, Human herpesvirus 7
aggauugaaaguaaaa

SEQ ID NO: 176073 - RNA, 19 nt, Human herpesvirus 7
aggaugcguguguucaaaa

SEQ ID NO: 176074 - RNA, 14 nt, Human herpesvirus 7
aggacugcaguauu

SEQ ID NO: 176075 - RNA, 20 nt, Human herpesvirus 7
aggacgaaucuacauuaaac

SEQ ID NO: 176076 - RNA, 18 nt, Human herpesvirus 7
aggacaaucaaacaugua

SEQ ID NO: 176077 - RNA, 17 nt, Human herpesvirus 7
aggacagggcuaagcau

SEQ ID NO: 176078 - RNA, 18 nt, Human herpesvirus 7
aggccaguucuaucucaa

SEQ ID NO: 176079 - RNA, 18 nt, Human herpesvirus 7
aggcagaccuaaacccag

SEQ ID NO: 176080 - RNA, 18 nt, Human herpesvirus 7
aggcauuuaagaauuuaa

SEQ ID NO: 176081 - RNA, 15 nt, Human herpesvirus 7
agggaagaaacagcu

SEQ ID NO: 176082 - RNA, 20 nt, Human herpesvirus 7
aggccguacuuguaugcuau

SEQ ID NO: 176083 - RNA, 15 nt, Human herpesvirus 7
aggccguuuaugaac

SEQ ID NO: 176084 - RNA, 18 nt, Human herpesvirus 7
agggcaauuguuugauua

SEQ ID NO: 176085 - RNA, 18 nt, Human herpesvirus 7
agauaaaguagguaaaaa

SEQ ID NO: 176086 - RNA, 13 nt, Human herpesvirus 7
agauaaugacaaa

SEQ ID NO: 176087 - RNA, 13 nt, Human herpesvirus 7
agauaauguuaca

SEQ ID NO: 176088 - RNA, 22 nt, Human herpesvirus 7
agaucgaacuguuacaacuuug

SEQ ID NO: 176089 - RNA, 23 nt, Human herpesvirus 7
agccacagauauucuaacaaaua

SEQ ID NO: 176090 - RNA, 18 nt, Human herpesvirus 7
agccacgaugacuuccaa

SEQ ID NO: 176091 - RNA, 20 nt, Human herpesvirus 7
agaugacauuuuuaccucca

SEQ ID NO: 176092 - RNA, 17 nt, Human herpesvirus 7
agaugaaggaagcuuua

SEQ ID NO: 176093 - RNA, 14 nt, Human herpesvirus 7
agaugacaacucaa

SEQ ID NO: 176094 - RNA, 13 nt, Human herpesvirus 7
agcauucaugccu

SEQ ID NO: 176095 - RNA, 20 nt, Human herpesvirus 7
agaugcagaaaaauccaaaa

SEQ ID NO: 176096 - RNA, 23 nt, Human herpesvirus 7
agaugcagaaaaauccaaaauca

SEQ ID NO: 176097 - RNA, 13 nt, Human herpesvirus 7
agaugaucuuacu

SEQ ID NO: 176098 - RNA, 20 nt, Human herpesvirus 7
agaugauguuuccuugccag

SEQ ID NO: 176099 - RNA, 21 nt, Human herpesvirus 7
agaugauguuuccuugccaga

SEQ ID NO: 176100 - RNA, 19 nt, Human herpesvirus 7
agccuauucacauaccugu

SEQ ID NO: 176101 - RNA, 21 nt, Human herpesvirus 7
agccuauucacauaccuguau

SEQ ID NO: 176102 - RNA, 16 nt, Human herpesvirus 7
agccuaggauaccaaa

SEQ ID NO: 176103 - RNA, 21 nt, Human herpesvirus 7
agccuacuuuuaaaauagccg

SEQ ID NO: 176104 - RNA, 20 nt, Human herpesvirus 7
agccucuaagagcuuuugca

SEQ ID NO: 176105 - RNA, 15 nt, Human herpesvirus 7
agccggaaagcaaug

SEQ ID NO: 176106 - RNA, 21 nt, Human herpesvirus 7
agcccagucccaagagacucc

SEQ ID NO: 176107 - RNA, 15 nt, Human herpesvirus 7
agcccaauguugccu

SEQ ID NO: 176108 - RNA, 21 nt, Human herpesvirus 7
agccuguacaaauuucuccac

SEQ ID NO: 176109 - RNA, 14 nt, Human herpesvirus 7
agcgacagguguug

SEQ ID NO: 176110 - RNA, 20 nt, Human herpesvirus 7
agcgaaucaucuuaaaagua

SEQ ID NO: 176111 - RNA, 19 nt, Human herpesvirus 7
agcgauuuaaugucugugu

SEQ ID NO: 176112 - RNA, 12 nt, Human herpesvirus 7
agcgagauuuau

SEQ ID NO: 176113 - RNA, 18 nt, Human herpesvirus 7
agcggagguuugcuauug

SEQ ID NO: 176114 - RNA, 23 nt, Human herpesvirus 7
agcgcugaaauaaauucaaggaa

SEQ ID NO: 176115 - RNA, 15 nt, Human herpesvirus 7
agcuauuauaaugua

SEQ ID NO: 176116 - RNA, 20 nt, Human herpesvirus 7
agcuaucucuacaaacagaa

SEQ ID NO: 176117 - RNA, 22 nt, Human herpesvirus 7
agcuaucucuacaaacagaagc

SEQ ID NO: 176118 - RNA, 15 nt, Human herpesvirus 7
agcguucguaacaaa

SEQ ID NO: 176119 - RNA, 17 nt, Human herpesvirus 7
agcguucguaacaaauu

SEQ ID NO: 176120 - RNA, 18 nt, Human herpesvirus 7
agcuaauucauuguauga

SEQ ID NO: 176121 - RNA, 16 nt, Human herpesvirus 7
agcuaaaacauggagc

SEQ ID NO: 176122 - RNA, 22 nt, Human herpesvirus 7
agcuaaccuuuuaacaacagcc

SEQ ID NO: 176123 - RNA, 22 nt, Human herpesvirus 7
agcuaacgauccaguacuugca

SEQ ID NO: 176124 - RNA, 14 nt, Human herpesvirus 7
agcuacagcuuugg

SEQ ID NO: 176125 - RNA, 21 nt, Human herpesvirus 7
auuacgucaucccugcugaua

SEQ ID NO: 176126 - RNA, 21 nt, Human herpesvirus 7
auuacauuugcuuuaccccaa

SEQ ID NO: 176127 - RNA, 22 nt, Human herpesvirus 7
auuacacaaauugauccugcua

SEQ ID NO: 176128 - RNA, 23 nt, Human herpesvirus 7
auuacucgugaaguaaauucagc

SEQ ID NO: 176129 - RNA, 11 nt, Human herpesvirus 7
auuagaaucag

SEQ ID NO: 176130 - RNA, 17 nt, Human herpesvirus 7
auuacuugucuuaccua

SEQ ID NO: 176131 - RNA, 17 nt, Human herpesvirus 7
auucgcuaacuuugcua

SEQ ID NO: 176132 - RNA, 18 nt, Human herpesvirus 7
auucgcaaggaauaugaa

SEQ ID NO: 176133 - RNA, 21 nt, Human herpesvirus 7
auuauauccaauaaugcauca

SEQ ID NO: 176134 - RNA, 22 nt, Human herpesvirus 7
auuauaucuaaaguggagacaa

SEQ ID NO: 176135 - RNA, 19 nt, Human herpesvirus 7
auuauauaaacacuugcua

SEQ ID NO: 176136 - RNA, 20 nt, Human herpesvirus 7
auuauacuagcagaucucga

SEQ ID NO: 176137 - RNA, 18 nt, Human herpesvirus 7
auuagcuguucauaucaa

SEQ ID NO: 176138 - RNA, 17 nt, Human herpesvirus 7
auuagcgcgugaacaaa

SEQ ID NO: 176139 - RNA, 15 nt, Human herpesvirus 7
auuauacaaauccaa

SEQ ID NO: 176140 - RNA, 16 nt, Human herpesvirus 7
auuauacaaauccaag

SEQ ID NO: 176141 - RNA, 21 nt, Human herpesvirus 7
auuaguuuaacuuacuguuua

SEQ ID NO: 176142 - RNA, 16 nt, Human herpesvirus 7
auucucuacuuaaugg

SEQ ID NO: 176143 - RNA, 18 nt, Human herpesvirus 7
auucucucucuauuacac

SEQ ID NO: 176144 - RNA, 19 nt, Human herpesvirus 7
auucucucucuauuacaca

SEQ ID NO: 176145 - RNA, 15 nt, Human herpesvirus 7
auucucacagcuuau

SEQ ID NO: 176146 - RNA, 18 nt, Human herpesvirus 7
auucucauagauuucaga

SEQ ID NO: 176147 - RNA, 14 nt, Human herpesvirus 7
auucucgcuucaaa

SEQ ID NO: 176148 - RNA, 20 nt, Human herpesvirus 7
auucucgcuucaaagauacc

SEQ ID NO: 176149 - RNA, 14 nt, Human herpesvirus 7
auucuaguuuucuu

SEQ ID NO: 176150 - RNA, 16 nt, Human herpesvirus 7
auucuacacaucuuca

SEQ ID NO: 176151 - RNA, 18 nt, Human herpesvirus 7
auucuacacaucuucaau

SEQ ID NO: 176152 - RNA, 19 nt, Human herpesvirus 7
auucugaaauaaacauuuc

SEQ ID NO: 176153 - RNA, 20 nt, Human herpesvirus 7
auugauccuccuugccugca

SEQ ID NO: 176154 - RNA, 16 nt, Human herpesvirus 7
auugaucguguguuac

SEQ ID NO: 176155 - RNA, 20 nt, Human herpesvirus 7
auugcagacuaauuacagcu

SEQ ID NO: 176156 - RNA, 15 nt, Human herpesvirus 7
auugccgauuccuac

SEQ ID NO: 176157 - RNA, 14 nt, Human herpesvirus 7
auugcuuaacuuuu

SEQ ID NO: 176158 - RNA, 18 nt, Human herpesvirus 7
auugcuuuuagaaaauca

SEQ ID NO: 176159 - RNA, 19 nt, Human herpesvirus 7
auugcuuuuagaaaaucaa

SEQ ID NO: 176160 - RNA, 21 nt, Human herpesvirus 7
auuggauuuucuguaaucaua

SEQ ID NO: 176161 - RNA, 19 nt, Human herpesvirus 7
auuuaaagauugcuugcac

SEQ ID NO: 176162 - RNA, 13 nt, Human herpesvirus 7
auuuaaaguaaga

SEQ ID NO: 176163 - RNA, 17 nt, Human herpesvirus 7
auuuaaaguagcugaau

SEQ ID NO: 176164 - RNA, 13 nt, Human herpesvirus 7
auuuaagaauuua

SEQ ID NO: 176165 - RNA, 19 nt, Human herpesvirus 7
auuuaagaauuuaaucaua

SEQ ID NO: 176166 - RNA, 20 nt, Human herpesvirus 7
auuuaaaaaaaaaaccacaa

SEQ ID NO: 176167 - RNA, 20 nt, Human herpesvirus 7
auuuaaacagcguucaauca

SEQ ID NO: 176168 - RNA, 20 nt, Human herpesvirus 7
auuuaaauacugagagaaua

SEQ ID NO: 176169 - RNA, 17 nt, Human herpesvirus 7
auugggucauacguuau

SEQ ID NO: 176170 - RNA, 20 nt, Human herpesvirus 7
auuggucguugcuuacuuug

SEQ ID NO: 176171 - RNA, 16 nt, Human herpesvirus 7
auuugcauguugcuag

SEQ ID NO: 176172 - RNA, 15 nt, Human herpesvirus 7
auuugcuugcugaau

SEQ ID NO: 176173 - RNA, 20 nt, Human herpesvirus 7
auuucuuauuggagauguca

SEQ ID NO: 176174 - RNA, 17 nt, Human herpesvirus 7
auuugaaugaacaaaua

SEQ ID NO: 176175 - RNA, 13 nt, Human herpesvirus 7
auuugauuccauc

SEQ ID NO: 176176 - RNA, 17 nt, Human herpesvirus 7
auuugauuccaucucac

SEQ ID NO: 176177 - RNA, 12 nt, Human herpesvirus 7
auuugauugauc

SEQ ID NO: 176178 - RNA, 15 nt, Human herpesvirus 7
auuucuggcaacagu

SEQ ID NO: 176179 - RNA, 15 nt, Human herpesvirus 7
auuucuggcaauaaa

SEQ ID NO: 176180 - RNA, 19 nt, Human herpesvirus 7
auuuacagcguggccuucu

SEQ ID NO: 176181 - RNA, 16 nt, Human herpesvirus 7
auuuaagcuucaaaaa

SEQ ID NO: 176182 - RNA, 15 nt, Human herpesvirus 7
auuuaagugaacugu

SEQ ID NO: 176183 - RNA, 19 nt, Human herpesvirus 7
auuuugaauguuuacaugu

SEQ ID NO: 176184 - RNA, 18 nt, Human herpesvirus 7
auuuucuuagcuuucaug

SEQ ID NO: 176185 - RNA, 21 nt, Human herpesvirus 7
auuuucuucgucuaagucaau

SEQ ID NO: 176186 - RNA, 15 nt, Human herpesvirus 7
auuuugaucuuguca

SEQ ID NO: 176187 - RNA, 19 nt, Human herpesvirus 7
auuuucguaucugugacuu

SEQ ID NO: 176188 - RNA, 12 nt, Human herpesvirus 7
auuuugaaaaua

SEQ ID NO: 176189 - RNA, 17 nt, Human herpesvirus 7
auuugguacuguagaua

SEQ ID NO: 176190 - RNA, 23 nt, Human herpesvirus 7
auuugguaucacuuccuguccaa

SEQ ID NO: 176191 - RNA, 20 nt, Human herpesvirus 7
auuuucccagauacagcaua

SEQ ID NO: 176192 - RNA, 20 nt, Human herpesvirus 7
auuuggcgccaaaaaaacac

SEQ ID NO: 176193 - RNA, 23 nt, Human herpesvirus 7
auuuggcgccaaaaaaacacagu

SEQ ID NO: 176194 - RNA, 13 nt, Human herpesvirus 7
auuugggaaaaua

SEQ ID NO: 176195 - RNA, 18 nt, Human herpesvirus 7
auuuugugacccugucac

SEQ ID NO: 176196 - RNA, 20 nt, Human herpesvirus 7
auuuugauuggaaaucaaaa

SEQ ID NO: 176197 - RNA, 23 nt, Human herpesvirus 7
auuuuggcgaaacaauacaugaa

SEQ ID NO: 176198 - RNA, 23 nt, Human herpesvirus 7
auuuuguuuugcauauuuugcua

SEQ ID NO: 176199 - RNA, 15 nt, Human herpesvirus 7
auuuuuaaaacaaga

SEQ ID NO: 176200 - RNA, 13 nt, Human herpesvirus 7
auuuuuaaacuug

SEQ ID NO: 176201 - RNA, 22 nt, Human herpesvirus 7
auuuuuaaguuguucucaauag

SEQ ID NO: 176202 - RNA, 13 nt, Human herpesvirus 7
auuuuugacaggu

SEQ ID NO: 176203 - RNA, 19 nt, Human herpesvirus 7
auuuuugcuacuauacucu

SEQ ID NO: 176204 - RNA, 20 nt, Human herpesvirus 7
auuuuuacucaauauaaaga

SEQ ID NO: 176205 - RNA, 15 nt, Human herpesvirus 7
auuuuucgcugaaga

SEQ ID NO: 176206 - RNA, 19 nt, Human herpesvirus 7
auuuuucuauuaguaugag

SEQ ID NO: 176207 - RNA, 16 nt, Human herpesvirus 7
caaaacauaucagauu

SEQ ID NO: 176208 - RNA, 22 nt, Human herpesvirus 7
auguuuccgcauaaaaaaucua

SEQ ID NO: 176209 - RNA, 19 nt, Human herpesvirus 7
auguuuuaauugagauuau

SEQ ID NO: 176210 - RNA, 19 nt, Human herpesvirus 7
auguuuuaccgugucuucu

SEQ ID NO: 176211 - RNA, 17 nt, Human herpesvirus 7
auguuuuaugacucaga

SEQ ID NO: 176212 - RNA, 21 nt, Human herpesvirus 7
auguuucuggaucugccucug

SEQ ID NO: 176213 - RNA, 21 nt, Human herpesvirus 7
auguuuggcaacaaacaaaua

SEQ ID NO: 176214 - RNA, 22 nt, Human herpesvirus 7
auguuuucuuagaugcauccaa

SEQ ID NO: 176215 - RNA, 17 nt, Human herpesvirus 7
auguuuugcaagcacau

SEQ ID NO: 176216 - RNA, 17 nt, Human herpesvirus 7
auguuuuuuucauacau

SEQ ID NO: 176217 - RNA, 23 nt, Human herpesvirus 7
auuaaaaaaaccaggaacagauu

SEQ ID NO: 176218 - RNA, 12 nt, Human herpesvirus 7
auuaaaaaccac

SEQ ID NO: 176219 - RNA, 16 nt, Human herpesvirus 7
auuaaaggaaacauuu

SEQ ID NO: 176220 - RNA, 13 nt, Human herpesvirus 7
auuaaacuaggcu

SEQ ID NO: 176221 - RNA, 15 nt, Human herpesvirus 7
auuaaacaaucugga

SEQ ID NO: 176222 - RNA, 20 nt, Human herpesvirus 7
auuaaauacuugcaaugcaa

SEQ ID NO: 176223 - RNA, 22 nt, Human herpesvirus 7
auuaaauacuugcaaugcaaac

SEQ ID NO: 176224 - RNA, 22 nt, Human herpesvirus 7
auuacacaggaauugcugucua

SEQ ID NO: 176225 - RNA, 23 nt, Human herpesvirus 7
auuacacaggaauugcugucuau

SEQ ID NO: 176226 - RNA, 23 nt, Human herpesvirus 7
auuaauuuccacguuuuuuagcu

SEQ ID NO: 176227 - RNA, 22 nt, Human herpesvirus 7
auuaauuugguaucacuuccug

SEQ ID NO: 176228 - RNA, 12 nt, Human herpesvirus 7
auuaaugcauug

SEQ ID NO: 176229 - RNA, 17 nt, Human herpesvirus 7
auuaacauuaaccacaa

SEQ ID NO: 176230 - RNA, 15 nt, Human herpesvirus 7
auuaacuauaucauc

SEQ ID NO: 176231 - RNA, 18 nt, Human herpesvirus 7
auuaaguguuugcucuga

SEQ ID NO: 176232 - RNA, 23 nt, Human herpesvirus 7
auuaauaaaaagcccaugaacac

SEQ ID NO: 176233 - RNA, 16 nt, Human herpesvirus 7
auguuaaagaacaaga

SEQ ID NO: 176234 - RNA, 21 nt, Human herpesvirus 7
auguuaaccaaaaugugggau

SEQ ID NO: 176235 - RNA, 13 nt, Human herpesvirus 7
augugugugguaa

SEQ ID NO: 176236 - RNA, 20 nt, Human herpesvirus 7
auguggugcguacacuguaa

SEQ ID NO: 176237 - RNA, 17 nt, Human herpesvirus 7
auguguacuaaagccaa

SEQ ID NO: 176238 - RNA, 13 nt, Human herpesvirus 7
augugucuuacaa

SEQ ID NO: 176239 - RNA, 17 nt, Human herpesvirus 7
auguuauuuuucaugcc

SEQ ID NO: 176240 - RNA, 23 nt, Human herpesvirus 7
auguuccuuauauuaaaaaccac

SEQ ID NO: 176241 - RNA, 23 nt, Human herpesvirus 7
auguucuauucucauagauuuca

SEQ ID NO: 176242 - RNA, 14 nt, Human herpesvirus 7
auguuccauucaau

SEQ ID NO: 176243 - RNA, 18 nt, Human herpesvirus 7
auguugaaguugaacaau

SEQ ID NO: 176244 - RNA, 17 nt, Human herpesvirus 7
auguugacgggaaaaag

SEQ ID NO: 176245 - RNA, 17 nt, Human herpesvirus 7
auguugcucauguugac

SEQ ID NO: 176246 - RNA, 12 nt, Human herpesvirus 7
auguccagugac

SEQ ID NO: 176247 - RNA, 15 nt, Human herpesvirus 7
auguccauaaaacau

SEQ ID NO: 176248 - RNA, 19 nt, Human herpesvirus 7
auguccauaaaacaugcaa

SEQ ID NO: 176249 - RNA, 14 nt, Human herpesvirus 7
augucaauaaucaa

SEQ ID NO: 176250 - RNA, 22 nt, Human herpesvirus 7
augugcgaagguugucuguucu

SEQ ID NO: 176251 - RNA, 15 nt, Human herpesvirus 7
augugcgaccuauua

SEQ ID NO: 176252 - RNA, 19 nt, Human herpesvirus 7
auguggccgaaauucgcaa

SEQ ID NO: 176253 - RNA, 16 nt, Human herpesvirus 7
augugcuuauaucuua

SEQ ID NO: 176254 - RNA, 14 nt, Human herpesvirus 7
augugcaacauaac

SEQ ID NO: 176255 - RNA, 13 nt, Human herpesvirus 7
augucuuuugaua

SEQ ID NO: 176256 - RNA, 21 nt, Human herpesvirus 7
augucuuuugauaagacugaa

SEQ ID NO: 176257 - RNA, 23 nt, Human herpesvirus 7
augugaaaagaaugaacaccgca

SEQ ID NO: 176258 - RNA, 15 nt, Human herpesvirus 7
augucugauucuuau

SEQ ID NO: 176259 - RNA, 21 nt, Human herpesvirus 7
augucucacgagaaagggcau

SEQ ID NO: 176260 - RNA, 16 nt, Human herpesvirus 7
auguauuuuacuggau

SEQ ID NO: 176261 - RNA, 18 nt, Human herpesvirus 7
augucaaauguuccuuau

SEQ ID NO: 176262 - RNA, 15 nt, Human herpesvirus 7
auguauggcaaugca

SEQ ID NO: 176263 - RNA, 12 nt, Human herpesvirus 7
auguauaaucaa

SEQ ID NO: 176264 - RNA, 13 nt, Human herpesvirus 7
auguaggugcugc

SEQ ID NO: 176265 - RNA, 18 nt, Human herpesvirus 7
auguauaaucaagucuua

SEQ ID NO: 176266 - RNA, 21 nt, Human herpesvirus 7
auguauacaaauugguucagc

SEQ ID NO: 176267 - RNA, 20 nt, Human herpesvirus 7
auguaaauuauuagauucca

SEQ ID NO: 176268 - RNA, 13 nt, Human herpesvirus 7
auguaacuuucau

SEQ ID NO: 176269 - RNA, 14 nt, Human herpesvirus 7
auguaacuuucauc

SEQ ID NO: 176270 - RNA, 19 nt, Human herpesvirus 7
auguacucugauugacucg

SEQ ID NO: 176271 - RNA, 14 nt, Human herpesvirus 7
auguacugcucauc

SEQ ID NO: 176272 - RNA, 16 nt, Human herpesvirus 7
auguacuauacaggau

SEQ ID NO: 176273 - RNA, 17 nt, Human herpesvirus 7
auguacauaacucuauc

SEQ ID NO: 176274 - RNA, 18 nt, Human herpesvirus 7
auguacaauuugcauaau

SEQ ID NO: 176275 - RNA, 17 nt, Human herpesvirus 7
augguguuaacaaucuu

SEQ ID NO: 176276 - RNA, 16 nt, Human herpesvirus 7
augguuugaaaaccau

SEQ ID NO: 176277 - RNA, 15 nt, Human herpesvirus 7
augguugugcaauuu

SEQ ID NO: 176278 - RNA, 18 nt, Human herpesvirus 7
augguaccuuagaaucac

SEQ ID NO: 176279 - RNA, 22 nt, Human herpesvirus 7
augguauuuguuagaauaucug

SEQ ID NO: 176280 - RNA, 14 nt, Human herpesvirus 7
auggcgaguuacau

SEQ ID NO: 176281 - RNA, 17 nt, Human herpesvirus 7
auggcgaguuacauuuc

SEQ ID NO: 176282 - RNA, 19 nt, Human herpesvirus 7
auggcgaguuacauuucac

SEQ ID NO: 176283 - RNA, 19 nt, Human herpesvirus 7
aucuucaggaauaucaaga

SEQ ID NO: 176284 - RNA, 16 nt, Human herpesvirus 7
aucuguuuuuuuucuc

SEQ ID NO: 176285 - RNA, 16 nt, Human herpesvirus 7
aucuuacuuccuaauc

SEQ ID NO: 176286 - RNA, 18 nt, Human herpesvirus 7
aucuuaaaugucaaugag

SEQ ID NO: 176287 - RNA, 13 nt, Human herpesvirus 7
aucugugacuuag

SEQ ID NO: 176288 - RNA, 17 nt, Human herpesvirus 7
aucuucugcuaacucau

SEQ ID NO: 176289 - RNA, 22 nt, Human herpesvirus 7
aucuucugcuaacucauaauua

SEQ ID NO: 176290 - RNA, 16 nt, Human herpesvirus 7
auggauuuuaauacaa

SEQ ID NO: 176291 - RNA, 22 nt, Human herpesvirus 7
auggauuuuaauacaacauaua

SEQ ID NO: 176292 - RNA, 18 nt, Human herpesvirus 7
auggcaaugcauuggaaa

SEQ ID NO: 176293 - RNA, 12 nt, Human herpesvirus 7
auggcaucuuau

SEQ ID NO: 176294 - RNA, 14 nt, Human herpesvirus 7
caaugagcaauuca

SEQ ID NO: 176295 - RNA, 14 nt, Human herpesvirus 7
caaugauguuugca

SEQ ID NO: 176296 - RNA, 14 nt, Human herpesvirus 7
caaugcaucuuuaa

SEQ ID NO: 176297 - RNA, 20 nt, Human herpesvirus 7
caaugcauuggaaaaaugcu

SEQ ID NO: 176298 - RNA, 22 nt, Human herpesvirus 7
caaugccaauugaagaagugca

SEQ ID NO: 176299 - RNA, 16 nt, Human herpesvirus 7
caaucuuacaaaaagu

SEQ ID NO: 176300 - RNA, 19 nt, Human herpesvirus 7
caaucuuacaaaaaguaga

SEQ ID NO: 176301 - RNA, 13 nt, Human herpesvirus 7
caaugaacaaguu

SEQ ID NO: 176302 - RNA, 22 nt, Human herpesvirus 7
caaucgguaacaugucuucaac

SEQ ID NO: 176303 - RNA, 16 nt, Human herpesvirus 7
caaucuggacauuuca

SEQ ID NO: 176304 - RNA, 17 nt, Human herpesvirus 7
caaucuggacauuucaa

SEQ ID NO: 176305 - RNA, 13 nt, Human herpesvirus 7
cacagacacacca

SEQ ID NO: 176306 - RNA, 22 nt, Human herpesvirus 7
cacagacacaccauuguucaac

SEQ ID NO: 176307 - RNA, 22 nt, Human herpesvirus 7
cacacuuugaaaacgaaaggaa

SEQ ID NO: 176308 - RNA, 23 nt, Human herpesvirus 7
cacacguuuucugucagaacuuu

SEQ ID NO: 176309 - RNA, 14 nt, Human herpesvirus 7
cacacuuauuccag

SEQ ID NO: 176310 - RNA, 13 nt, Human herpesvirus 7
cacacguacaaua

SEQ ID NO: 176311 - RNA, 20 nt, Human herpesvirus 7
caaugguauaaagugcuguc

SEQ ID NO: 176312 - RNA, 14 nt, Human herpesvirus 7
caauggaacagcaa

SEQ ID NO: 176313 - RNA, 20 nt, Human herpesvirus 7
cacccagucgucugcucaau

SEQ ID NO: 176314 - RNA, 17 nt, Human herpesvirus 7
caccagucucugaauua

SEQ ID NO: 176315 - RNA, 23 nt, Human herpesvirus 7
cacaggaauugcugucuauuuca

SEQ ID NO: 176316 - RNA, 20 nt, Human herpesvirus 7
cacaguccucuagaucaaga

SEQ ID NO: 176317 - RNA, 16 nt, Human herpesvirus 7
cacagauauucuaaca

SEQ ID NO: 176318 - RNA, 19 nt, Human herpesvirus 7
cacagauauucuaacaaau

SEQ ID NO: 176319 - RNA, 21 nt, Human herpesvirus 7
cacagcaauuuuaacgauucc

SEQ ID NO: 176320 - RNA, 18 nt, Human herpesvirus 7
cacagcuuauuauauaug

SEQ ID NO: 176321 - RNA, 20 nt, Human herpesvirus 7
cagaaauugaugaagacagc

SEQ ID NO: 176322 - RNA, 17 nt, Human herpesvirus 7
cacugggagcaaugcau

SEQ ID NO: 176323 - RNA, 22 nt, Human herpesvirus 7
cacugggagcaaugcaugaugc

SEQ ID NO: 176324 - RNA, 20 nt, Human herpesvirus 7
cacugauuucuacaauauga

SEQ ID NO: 176325 - RNA, 22 nt, Human herpesvirus 7
cacugauuuuuaaacuugugaa

SEQ ID NO: 176326 - RNA, 12 nt, Human herpesvirus 7
cacugaauguca

SEQ ID NO: 176327 - RNA, 17 nt, Human herpesvirus 7
cagaaguuucaauuggu

SEQ ID NO: 176328 - RNA, 18 nt, Human herpesvirus 7
cagaaguaacgcagacua

SEQ ID NO: 176329 - RNA, 13 nt, Human herpesvirus 7
cagaauacuacuc

SEQ ID NO: 176330 - RNA, 19 nt, Human herpesvirus 7
cagaauacuacucagaaga

SEQ ID NO: 176331 - RNA, 18 nt, Human herpesvirus 7
cagaaugccagaaauuaa

SEQ ID NO: 176332 - RNA, 15 nt, Human herpesvirus 7
cagaagaaacuugaa

SEQ ID NO: 176333 - RNA, 16 nt, Human herpesvirus 7
cagaagaaacuugaaa

SEQ ID NO: 176334 - RNA, 23 nt, Human herpesvirus 7
cagaagauuuguuccaaacucga

SEQ ID NO: 176335 - RNA, 23 nt, Human herpesvirus 7
cagaacauuuauuuucuuaacaa

SEQ ID NO: 176336 - RNA, 23 nt, Human herpesvirus 7
cagaacuuuuaaaaaagaacuua

SEQ ID NO: 176337 - RNA, 22 nt, Human herpesvirus 7
cagaaauuguuccugugugcaa

SEQ ID NO: 176338 - RNA, 17 nt, Human herpesvirus 7
cacgugucgcagccaug

SEQ ID NO: 176339 - RNA, 14 nt, Human herpesvirus 7
cacgugugacuguu

SEQ ID NO: 176340 - RNA, 15 nt, Human herpesvirus 7
cacucuccugaaaua

SEQ ID NO: 176341 - RNA, 13 nt, Human herpesvirus 7
cacuacaccaaua

SEQ ID NO: 176342 - RNA, 15 nt, Human herpesvirus 7
cacuaaaacaguaga

SEQ ID NO: 176343 - RNA, 21 nt, Human herpesvirus 7
cacuaacauuuuaauauguga

SEQ ID NO: 176344 - RNA, 22 nt, Human herpesvirus 7
cacuaauccaugacagagaauu

SEQ ID NO: 176345 - RNA, 19 nt, Human herpesvirus 7
cacuaaugccgucauccca

SEQ ID NO: 176346 - RNA, 23 nt, Human herpesvirus 7
caagguuaagugaaugugcuuua

SEQ ID NO: 176347 - RNA, 18 nt, Human herpesvirus 7
caaggucuuucaugcauu

SEQ ID NO: 176348 - RNA, 22 nt, Human herpesvirus 7
caaggucuuucaugcauugcau

SEQ ID NO: 176349 - RNA, 12 nt, Human herpesvirus 7
caagcacaugua

SEQ ID NO: 176350 - RNA, 14 nt, Human herpesvirus 7
caagcacauguaca

SEQ ID NO: 176351 - RNA, 14 nt, Human herpesvirus 7
caagcaacacuuaa

SEQ ID NO: 176352 - RNA, 18 nt, Human herpesvirus 7
caauaaagaacaucuuga

SEQ ID NO: 176353 - RNA, 15 nt, Human herpesvirus 7
caaguuaauuuugca

SEQ ID NO: 176354 - RNA, 16 nt, Human herpesvirus 7
caaguuucuucugggu

SEQ ID NO: 176355 - RNA, 15 nt, Human herpesvirus 7
caaguuuuacagaaa

SEQ ID NO: 176356 - RNA, 20 nt, Human herpesvirus 7
caaguuucaaaaagugcaug

SEQ ID NO: 176357 - RNA, 17 nt, Human herpesvirus 7
caaguagccgaaaaaga

SEQ ID NO: 176358 - RNA, 15 nt, Human herpesvirus 7
caagucacaauuaca

SEQ ID NO: 176359 - RNA, 22 nt, Human herpesvirus 7
caagucuuugcuggaucauaga

SEQ ID NO: 176360 - RNA, 19 nt, Human herpesvirus 7
caauagugaacaugugcug

SEQ ID NO: 176361 - RNA, 22 nt, Human herpesvirus 7
caauaguaauuggaguaaucaa

SEQ ID NO: 176362 - RNA, 17 nt, Human herpesvirus 7
caauaucccagaauauc

SEQ ID NO: 176363 - RNA, 18 nt, Human herpesvirus 7
caauaugcaugcaauuuu

SEQ ID NO: 176364 - RNA, 21 nt, Human herpesvirus 7
caauaugcaugcaauuuucac

SEQ ID NO: 176365 - RNA, 14 nt, Human herpesvirus 7
caaucaccaaagag

SEQ ID NO: 176366 - RNA, 15 nt, Human herpesvirus 7
caaucacauacucua

SEQ ID NO: 176367 - RNA, 16 nt, Human herpesvirus 7
caaucaaacauguaau

SEQ ID NO: 176368 - RNA, 12 nt, Human herpesvirus 7
caauaugcucac

SEQ ID NO: 176369 - RNA, 20 nt, Human herpesvirus 7
caaucgauaaacuuugucaa

SEQ ID NO: 176370 - RNA, 15 nt, Human herpesvirus 7
caaucagcauuuacc

SEQ ID NO: 176371 - RNA, 21 nt, Human herpesvirus 7
caauagguuccacacagggaa

SEQ ID NO: 176372 - RNA, 18 nt, Human herpesvirus 7
caauagauuacgcacaaa

SEQ ID NO: 176373 - RNA, 14 nt, Human herpesvirus 7
caauagcauaugcu

SEQ ID NO: 176374 - RNA, 14 nt, Human herpesvirus 7
caauacaugaauua

SEQ ID NO: 176375 - RNA, 16 nt, Human herpesvirus 7
caauacaugaauuauc

SEQ ID NO: 176376 - RNA, 12 nt, Human herpesvirus 7
caauaaucaaug

SEQ ID NO: 176377 - RNA, 19 nt, Human herpesvirus 7
caauaacauuuuguaugaa

SEQ ID NO: 176378 - RNA, 20 nt, Human herpesvirus 7
caauaacauuuuguaugaaa

SEQ ID NO: 176379 - RNA, 21 nt, Human herpesvirus 7
caauacaaauuccugcuugca

SEQ ID NO: 176380 - RNA, 15 nt, Human herpesvirus 7
caauaauuucuauua

SEQ ID NO: 176381 - RNA, 16 nt, Human herpesvirus 7
caauaauuucuauuaa

SEQ ID NO: 176382 - RNA, 21 nt, Human herpesvirus 7
caauaaaguuuuguaacuaua

SEQ ID NO: 176383 - RNA, 16 nt, Human herpesvirus 7
caauaaaucuguaaaa

SEQ ID NO: 176384 - RNA, 14 nt, Human herpesvirus 7
caauaaaucuucau

SEQ ID NO: 176385 - RNA, 22 nt, Human herpesvirus 7
caauaaauuuugaauguuuaca

SEQ ID NO: 176386 - RNA, 15 nt, Human herpesvirus 7
caacuuaugugucac

SEQ ID NO: 176387 - RNA, 13 nt, Human herpesvirus 7
caacugugacaaa

SEQ ID NO: 176388 - RNA, 16 nt, Human herpesvirus 7
caacuucuaguucuga

SEQ ID NO: 176389 - RNA, 15 nt, Human herpesvirus 7
caacuucucuuggag

SEQ ID NO: 176390 - RNA, 20 nt, Human herpesvirus 7
caacucaauaaaaaugucuc

SEQ ID NO: 176391 - RNA, 23 nt, Human herpesvirus 7
caacuagcaaacagugcuguacu

SEQ ID NO: 176392 - RNA, 13 nt, Human herpesvirus 7
caacucuucuuca

SEQ ID NO: 176393 - RNA, 19 nt, Human herpesvirus 7
caacucuucuucagauuca

SEQ ID NO: 176394 - RNA, 16 nt, Human herpesvirus 7
caacaucuuaaauguc

SEQ ID NO: 176395 - RNA, 14 nt, Human herpesvirus 7
caaccacaaccaaa

SEQ ID NO: 176396 - RNA, 15 nt, Human herpesvirus 7
caacaacuaaagaga

SEQ ID NO: 176397 - RNA, 16 nt, Human herpesvirus 7
caacaaggacgaaucu

SEQ ID NO: 176398 - RNA, 23 nt, Human herpesvirus 7
caacaaggacgaaucuacauuaa

SEQ ID NO: 176399 - RNA, 14 nt, Human herpesvirus 7
caacaaacauucca

SEQ ID NO: 176400 - RNA, 19 nt, Human herpesvirus 7
caacaaacaaauaauucaa

SEQ ID NO: 176401 - RNA, 12 nt, Human herpesvirus 7
caacaaaaucua

SEQ ID NO: 176402 - RNA, 21 nt, Human herpesvirus 7
caacaaauuaaauacuugcaa

SEQ ID NO: 176403 - RNA, 16 nt, Human herpesvirus 7
caaauuccugcuugca

SEQ ID NO: 176404 - RNA, 14 nt, Human herpesvirus 7
caacaaagcaugaa

SEQ ID NO: 176405 - RNA, 14 nt, Human herpesvirus 7
caaauuaaauacuu

SEQ ID NO: 176406 - RNA, 13 nt, Human herpesvirus 7
caaauuauuucca

SEQ ID NO: 176407 - RNA, 15 nt, Human herpesvirus 7
caaauucaaccacag

SEQ ID NO: 176408 - RNA, 21 nt, Human herpesvirus 7
caaauuaugcguuaaugucuc

SEQ ID NO: 176409 - RNA, 23 nt, Human herpesvirus 7
caaauuaugcguuaaugucucug

SEQ ID NO: 176410 - RNA, 17 nt, Human herpesvirus 7
caaaauccuggauuuca

SEQ ID NO: 176411 - RNA, 12 nt, Human herpesvirus 7
caaaagccacag

SEQ ID NO: 176412 - RNA, 14 nt, Human herpesvirus 7
caaaagccacagau

SEQ ID NO: 176413 - RNA, 12 nt, Human herpesvirus 7
caaaagcuugaa

SEQ ID NO: 176414 - RNA, 22 nt, Human herpesvirus 7
caaaagcuugaaaacuuaguga

SEQ ID NO: 176415 - RNA, 17 nt, Human herpesvirus 7
caaaagcuuugaucuac

SEQ ID NO: 176416 - RNA, 14 nt, Human herpesvirus 7
caaaauguauacaa

SEQ ID NO: 176417 - RNA, 17 nt, Human herpesvirus 7
caaaauguauucaaugc

SEQ ID NO: 176418 - RNA, 19 nt, Human herpesvirus 7
caaaauucugcuugucucu

SEQ ID NO: 176419 - RNA, 20 nt, Human herpesvirus 7
caaaauucugcuugucucug

SEQ ID NO: 176420 - RNA, 19 nt, Human herpesvirus 7
caaacaaaaauauuuugaa

SEQ ID NO: 176421 - RNA, 21 nt, Human herpesvirus 7
caaacaaauaauucaaaaacu

SEQ ID NO: 176422 - RNA, 22 nt, Human herpesvirus 7
caaacaaugagcaauucaugca

SEQ ID NO: 176423 - RNA, 16 nt, Human herpesvirus 7
agaguuguggcaaaag

SEQ ID NO: 176424 - RNA, 19 nt, Human herpesvirus 7
agagugcuuacgauuuugu

SEQ ID NO: 176425 - RNA, 22 nt, Human herpesvirus 7
agagugcuuacgauuuugugac

SEQ ID NO: 176426 - RNA, 21 nt, Human herpesvirus 7
agagucuauugacauaaucau

SEQ ID NO: 176427 - RNA, 15 nt, Human herpesvirus 7
agagcgcuuugcuua

SEQ ID NO: 176428 - RNA, 18 nt, Human herpesvirus 7
agagccucccaccauggc

SEQ ID NO: 176429 - RNA, 19 nt, Human herpesvirus 7
agagccggaaagcaaugua

SEQ ID NO: 176430 - RNA, 21 nt, Human herpesvirus 7
agagaucauaauuacauugca

SEQ ID NO: 176431 - RNA, 23 nt, Human herpesvirus 7
agagauguuuuaauugagauuau

SEQ ID NO: 176432 - RNA, 15 nt, Human herpesvirus 7
agagauagcauuugu

SEQ ID NO: 176433 - RNA, 19 nt, Human herpesvirus 7
agagauagcauuuguuaca

SEQ ID NO: 176434 - RNA, 23 nt, Human herpesvirus 7
agacggaauuuguaucuaugaca

SEQ ID NO: 176435 - RNA, 16 nt, Human herpesvirus 7
agaccuguacuguugc

SEQ ID NO: 176436 - RNA, 18 nt, Human herpesvirus 7
agaccuguacuguugcua

SEQ ID NO: 176437 - RNA, 19 nt, Human herpesvirus 7
agaccuguacuguugcuaa

SEQ ID NO: 176438 - RNA, 19 nt, Human herpesvirus 7
agacgcuguaugcaagaaa

SEQ ID NO: 176439 - RNA, 20 nt, Human herpesvirus 7
agacgcuguaugcaagaaag

SEQ ID NO: 176440 - RNA, 20 nt, Human herpesvirus 7
agacgccaauaaaucuucau

SEQ ID NO: 176441 - RNA, 22 nt, Human herpesvirus 7
agacgccggggacauuccucau

SEQ ID NO: 176442 - RNA, 16 nt, Human herpesvirus 7
agaccuccuaugucau

SEQ ID NO: 176443 - RNA, 17 nt, Human herpesvirus 7
agaccuauguguuuaca

SEQ ID NO: 176444 - RNA, 16 nt, Human herpesvirus 7
agaaugcguaacuuug

SEQ ID NO: 176445 - RNA, 22 nt, Human herpesvirus 7
agaaucugucugucggcaauac

SEQ ID NO: 176446 - RNA, 15 nt, Human herpesvirus 7
agaaugaacaccgca

SEQ ID NO: 176447 - RNA, 23 nt, Human herpesvirus 7
agaaucauagcaggaagcacaaa

SEQ ID NO: 176448 - RNA, 21 nt, Human herpesvirus 7
agaauauuuauguucaaauau

SEQ ID NO: 176449 - RNA, 19 nt, Human herpesvirus 7
agaauguugagcuaucuga

SEQ ID NO: 176450 - RNA, 17 nt, Human herpesvirus 7
agacagcaacugugcau

SEQ ID NO: 176451 - RNA, 22 nt, Human herpesvirus 7
agacaugaaucaaugauuuggu

SEQ ID NO: 176452 - RNA, 14 nt, Human herpesvirus 7
agacagcuguauau

SEQ ID NO: 176453 - RNA, 19 nt, Human herpesvirus 7
agacauuucguuauuccau

SEQ ID NO: 176454 - RNA, 20 nt, Human herpesvirus 7
agacauuucguuauuccauc

SEQ ID NO: 176455 - RNA, 22 nt, Human herpesvirus 7
agaaaaacuccguuucauuuaa

SEQ ID NO: 176456 - RNA, 22 nt, Human herpesvirus 7
agaaaaacacuagcuuucuguu

SEQ ID NO: 176457 - RNA, 22 nt, Human herpesvirus 7
agaaaaaaacaaaaucuacuuu

SEQ ID NO: 176458 - RNA, 19 nt, Human herpesvirus 7
agaaaaaacuaacuuaucu

SEQ ID NO: 176459 - RNA, 19 nt, Human herpesvirus 7
acuuuuucuguagacauuu

SEQ ID NO: 176460 - RNA, 14 nt, Human herpesvirus 7
acuuugugccugaa

SEQ ID NO: 176461 - RNA, 22 nt, Human herpesvirus 7
acuuugucaugacuggacacaa

SEQ ID NO: 176462 - RNA, 18 nt, Human herpesvirus 7
acuuuuauaauacuggca

SEQ ID NO: 176463 - RNA, 21 nt, Human herpesvirus 7
acuuuuaaagguaggauugaa

SEQ ID NO: 176464 - RNA, 20 nt, Human herpesvirus 7
acuuaucuuuaucuuuguca

SEQ ID NO: 176465 - RNA, 14 nt, Human herpesvirus 7
acuuccuguccaaa

SEQ ID NO: 176466 - RNA, 22 nt, Human herpesvirus 7
acuucgagaaaauuuagcacca

SEQ ID NO: 176467 - RNA, 19 nt, Human herpesvirus 7
acuucaccacgaucccuau

SEQ ID NO: 176468 - RNA, 16 nt, Human herpesvirus 7
agaauacacauuuagu

SEQ ID NO: 176469 - RNA, 20 nt, Human herpesvirus 7
agaauacuacucagaagaca

SEQ ID NO: 176470 - RNA, 15 nt, Human herpesvirus 7
agaauaucuguggcu

SEQ ID NO: 176471 - RNA, 16 nt, Human herpesvirus 7
agaauaucgauuuuuc

SEQ ID NO: 176472 - RNA, 14 nt, Human herpesvirus 7
agaagcugacuuug

SEQ ID NO: 176473 - RNA, 16 nt, Human herpesvirus 7
agaagcugacuuuguc

SEQ ID NO: 176474 - RNA, 17 nt, Human herpesvirus 7
agaagcugacuuuguca

SEQ ID NO: 176475 - RNA, 23 nt, Human herpesvirus 7
agaaggaaaauuauaaguuuccc

SEQ ID NO: 176476 - RNA, 19 nt, Human herpesvirus 7
agaagaugacucaugagac

SEQ ID NO: 176477 - RNA, 18 nt, Human herpesvirus 7
agaagagguaaguguaag

SEQ ID NO: 176478 - RNA, 21 nt, Human herpesvirus 7
agaaaugaaucugcacuaucu

SEQ ID NO: 176479 - RNA, 18 nt, Human herpesvirus 7
agaaauaugcuuccuaaa

SEQ ID NO: 176480 - RNA, 21 nt, Human herpesvirus 7
agaaauaaugaaggauggcgu

SEQ ID NO: 176481 - RNA, 17 nt, Human herpesvirus 7
agaaagucagaacauug

SEQ ID NO: 176482 - RNA, 16 nt, Human herpesvirus 7
agaaaguccaaaguga

SEQ ID NO: 176483 - RNA, 16 nt, Human herpesvirus 7
agaaagggcaugucug

SEQ ID NO: 176484 - RNA, 13 nt, Human herpesvirus 7
agaaauuacagua

SEQ ID NO: 176485 - RNA, 17 nt, Human herpesvirus 7
agaaauuguuaccuaaa

SEQ ID NO: 176486 - RNA, 16 nt, Human herpesvirus 7
agaaauuauacuagca

SEQ ID NO: 176487 - RNA, 21 nt, Human herpesvirus 7
agaaauuuuacagccuguaca

SEQ ID NO: 176488 - RNA, 19 nt, Human herpesvirus 7
agaaauuuugaucuuguca

SEQ ID NO: 176489 - RNA, 23 nt, Human herpesvirus 7
agaacaaacuguacccaaaaaua

SEQ ID NO: 176490 - RNA, 19 nt, Human herpesvirus 7
acugcgcuuggcaaacagu

SEQ ID NO: 176491 - RNA, 13 nt, Human herpesvirus 7
acugcaaauccaa

SEQ ID NO: 176492 - RNA, 21 nt, Human herpesvirus 7
acugcaacuuugugccugaaa

SEQ ID NO: 176493 - RNA, 20 nt, Human herpesvirus 7
acugggagcugauucugcca

SEQ ID NO: 176494 - RNA, 16 nt, Human herpesvirus 7
acuggcaauaucccag

SEQ ID NO: 176495 - RNA, 17 nt, Human herpesvirus 7
acugucacuguccaaaa

SEQ ID NO: 176496 - RNA, 16 nt, Human herpesvirus 7
acuguccaaaacaauc

SEQ ID NO: 176497 - RNA, 18 nt, Human herpesvirus 7
acuguauuuguugaucuu

SEQ ID NO: 176498 - RNA, 21 nt, Human herpesvirus 7
acuguauuuguugaucuucaa

SEQ ID NO: 176499 - RNA, 22 nt, Human herpesvirus 7
acuguauuuguugaucuucaau

SEQ ID NO: 176500 - RNA, 17 nt, Human herpesvirus 7
acuaugaacuggcacau

SEQ ID NO: 176501 - RNA, 18 nt, Human herpesvirus 7
acuaugaacuggcacauu

SEQ ID NO: 176502 - RNA, 21 nt, Human herpesvirus 7
acuaugaacuggcacauuaua

SEQ ID NO: 176503 - RNA, 14 nt, Human herpesvirus 7
acuauucgaaaaua

SEQ ID NO: 176504 - RNA, 12 nt, Human herpesvirus 7
acuaugugcuua

SEQ ID NO: 176505 - RNA, 22 nt, Human herpesvirus 7
acucacaauguuuucucuauga

SEQ ID NO: 176506 - RNA, 15 nt, Human herpesvirus 7
acucacuccuugcau

SEQ ID NO: 176507 - RNA, 22 nt, Human herpesvirus 7
acucgauuagguaauagcuuua

SEQ ID NO: 176508 - RNA, 20 nt, Human herpesvirus 7
acucagagaucauaauuaca

SEQ ID NO: 176509 - RNA, 22 nt, Human herpesvirus 7
acucgaugcuucaauucaccaa

SEQ ID NO: 176510 - RNA, 23 nt, Human herpesvirus 7
acuaucaaauccgagucaguaua

SEQ ID NO: 176511 - RNA, 19 nt, Human herpesvirus 7
acuaguauuucgucuuucc

SEQ ID NO: 176512 - RNA, 18 nt, Human herpesvirus 7
acuauaaauggaauuuaa

SEQ ID NO: 176513 - RNA, 18 nt, Human herpesvirus 7
acuacucagaagacauau

SEQ ID NO: 176514 - RNA, 13 nt, Human herpesvirus 7
acuacaccaauag

SEQ ID NO: 176515 - RNA, 18 nt, Human herpesvirus 7
acgcauauguacgugugc

SEQ ID NO: 176516 - RNA, 12 nt, Human herpesvirus 7
acuaacuuaucu

SEQ ID NO: 176517 - RNA, 22 nt, Human herpesvirus 7
acuaaauuucuuaaagaugucu

SEQ ID NO: 176518 - RNA, 16 nt, Human herpesvirus 7
acuaaaacuacauuua

SEQ ID NO: 176519 - RNA, 18 nt, Human herpesvirus 7
acgugugaaaacaauuaa

SEQ ID NO: 176520 - RNA, 23 nt, Human herpesvirus 7
acguuggggauguucuauucuca

SEQ ID NO: 176521 - RNA, 18 nt, Human herpesvirus 7
acguuucuagcaaaauau

SEQ ID NO: 176522 - RNA, 15 nt, Human herpesvirus 7
acguuucucuguaga

SEQ ID NO: 176523 - RNA, 16 nt, Human herpesvirus 7
acaaauccacucuggc

SEQ ID NO: 176524 - RNA, 20 nt, Human herpesvirus 7
acaacuagaaaauaacuuua

SEQ ID NO: 176525 - RNA, 17 nt, Human herpesvirus 7
acaacuaaaaaucucag

SEQ ID NO: 176526 - RNA, 13 nt, Human herpesvirus 7
acaacugugacaa

SEQ ID NO: 176527 - RNA, 15 nt, Human herpesvirus 7
acaacuucuacuaau

SEQ ID NO: 176528 - RNA, 23 nt, Human herpesvirus 7
acaacuucuacuaauacagguaa

SEQ ID NO: 176529 - RNA, 18 nt, Human herpesvirus 7
acaagaaacacuacacca

SEQ ID NO: 176530 - RNA, 21 nt, Human herpesvirus 7
acaaauuaaacaaucuggaca

SEQ ID NO: 176531 - RNA, 13 nt, Human herpesvirus 7
acaaauuaaauac

SEQ ID NO: 176532 - RNA, 20 nt, Human herpesvirus 7
acaaauuaugcguuaauguc

SEQ ID NO: 176533 - RNA, 16 nt, Human herpesvirus 7
acaaauucaaccacag

SEQ ID NO: 176534 - RNA, 19 nt, Human herpesvirus 7
acaaauucaaccacagaca

SEQ ID NO: 176535 - RNA, 20 nt, Human herpesvirus 7
acaaauucaaccacagacac

SEQ ID NO: 176536 - RNA, 21 nt, Human herpesvirus 7
acaaauucaaccacagacaca

SEQ ID NO: 176537 - RNA, 15 nt, Human herpesvirus 7
acaaauuccauuaaa

SEQ ID NO: 176538 - RNA, 20 nt, Human herpesvirus 7
acaaauuccugcuugcacaa

SEQ ID NO: 176539 - RNA, 21 nt, Human herpesvirus 7
acaaauugauccugcuauuca

SEQ ID NO: 176540 - RNA, 15 nt, Human herpesvirus 7
acaacaaacauucca

SEQ ID NO: 176541 - RNA, 20 nt, Human herpesvirus 7
acaacaaagaaaaaacuaac

SEQ ID NO: 176542 - RNA, 13 nt, Human herpesvirus 7
acaacaacuaaaa

SEQ ID NO: 176543 - RNA, 23 nt, Human herpesvirus 7
acaaauugguucagcgugacaga

SEQ ID NO: 176544 - RNA, 19 nt, Human herpesvirus 7
acaaauuuaggacuuuaca

SEQ ID NO: 176545 - RNA, 22 nt, Human herpesvirus 7
acaagaggacagucaacaaauc

SEQ ID NO: 176546 - RNA, 18 nt, Human herpesvirus 7
acaagaugcgaguccaaa

SEQ ID NO: 176547 - RNA, 15 nt, Human herpesvirus 7
acaccaacaucuguc

SEQ ID NO: 176548 - RNA, 19 nt, Human herpesvirus 7
acaagacagaaaugaaucu

SEQ ID NO: 176549 - RNA, 15 nt, Human herpesvirus 7
acaccauuguucaac

SEQ ID NO: 176550 - RNA, 19 nt, Human herpesvirus 7
acaccgauuccagcacuuu

SEQ ID NO: 176551 - RNA, 13 nt, Human herpesvirus 7
acaccccaaaauc

SEQ ID NO: 176552 - RNA, 13 nt, Human herpesvirus 7
acacguagacuga

SEQ ID NO: 176553 - RNA, 18 nt, Human herpesvirus 7
acacgcauauguacgugu

SEQ ID NO: 176554 - RNA, 16 nt, Human herpesvirus 7
acaccgucauuucgca

SEQ ID NO: 176555 - RNA, 21 nt, Human herpesvirus 7
acaccgccaccuucuuauaau

SEQ ID NO: 176556 - RNA, 19 nt, Human herpesvirus 7
acacuugcuagcugugaua

SEQ ID NO: 176557 - RNA, 15 nt, Human herpesvirus 7
acacuuuaaccgcaa

SEQ ID NO: 176558 - RNA, 14 nt, Human herpesvirus 7
acagaaaucccaaa

SEQ ID NO: 176559 - RNA, 14 nt, Human herpesvirus 7
acagaaacauguau

SEQ ID NO: 176560 - RNA, 19 nt, Human herpesvirus 7
acagaaacauguauccacg

SEQ ID NO: 176561 - RNA, 19 nt, Human herpesvirus 7
acagaagcugacuuuguca

SEQ ID NO: 176562 - RNA, 18 nt, Human herpesvirus 7
acagaauacuacucagaa

SEQ ID NO: 176563 - RNA, 22 nt, Human herpesvirus 7
acagaaugauaauuucuauaau

SEQ ID NO: 176564 - RNA, 17 nt, Human herpesvirus 7
acagaauuuucaagauc

SEQ ID NO: 176565 - RNA, 21 nt, Human herpesvirus 7
acagacacaccauuguucaac

SEQ ID NO: 176566 - RNA, 13 nt, Human herpesvirus 7
acacuagcuuucu

SEQ ID NO: 176567 - RNA, 17 nt, Human herpesvirus 7
acacugauuucuacaau

SEQ ID NO: 176568 - RNA, 21 nt, Human herpesvirus 7
acaugaaacguuucaaaucaa

SEQ ID NO: 176569 - RNA, 15 nt, Human herpesvirus 7
acaugaaaaauaucg

SEQ ID NO: 176570 - RNA, 18 nt, Human herpesvirus 7
acaucugucaggucacaa

SEQ ID NO: 176571 - RNA, 19 nt, Human herpesvirus 7
acaucugucaggucacaaa

SEQ ID NO: 176572 - RNA, 15 nt, Human herpesvirus 7
acauguuccauucaa

SEQ ID NO: 176573 - RNA, 14 nt, Human herpesvirus 7
acauuaauaucaau

SEQ ID NO: 176574 - RNA, 19 nt, Human herpesvirus 7
acauuauaagaaucugucu

SEQ ID NO: 176575 - RNA, 22 nt, Human herpesvirus 7
acauuauaaauguaacuuucau

SEQ ID NO: 176576 - RNA, 23 nt, Human herpesvirus 7
acauuauaaauguaacuuucauc

SEQ ID NO: 176577 - RNA, 14 nt, Human herpesvirus 7
acaucuaugugcuc

SEQ ID NO: 176578 - RNA, 16 nt, Human herpesvirus 7
acaucgagauuccaaa

SEQ ID NO: 176579 - RNA, 19 nt, Human herpesvirus 7
acaucgagauuccaaagag

SEQ ID NO: 176580 - RNA, 22 nt, Human herpesvirus 7
acauaggaaucgcaguguucau

SEQ ID NO: 176581 - RNA, 22 nt, Human herpesvirus 7
acauccuuaaauuuuacaaaga

SEQ ID NO: 176582 - RNA, 22 nt, Human herpesvirus 7
acauacgugcuuagacuuauca

SEQ ID NO: 176583 - RNA, 12 nt, Human herpesvirus 7
acauacugaugu

SEQ ID NO: 176584 - RNA, 21 nt, Human herpesvirus 7
acauaauguguaucaauauuc

SEQ ID NO: 176585 - RNA, 19 nt, Human herpesvirus 7
acauaaguugacaauguca

SEQ ID NO: 176586 - RNA, 19 nt, Human herpesvirus 7
acauaaucauggaaaaugg

SEQ ID NO: 176587 - RNA, 19 nt, Human herpesvirus 7
acauaacaaaaaagguguu

SEQ ID NO: 176588 - RNA, 23 nt, Human herpesvirus 7
acauaacaaaaaagguguugaua

SEQ ID NO: 176589 - RNA, 17 nt, Human herpesvirus 7
acauaaccaaugcugau

SEQ ID NO: 176590 - RNA, 19 nt, Human herpesvirus 7
acauaacucuaucuccuau

SEQ ID NO: 176591 - RNA, 14 nt, Human herpesvirus 7
acaggugcaggcua

SEQ ID NO: 176592 - RNA, 19 nt, Human herpesvirus 7
acagguaaggaaaaccuac

SEQ ID NO: 176593 - RNA, 17 nt, Human herpesvirus 7
acagggaagaaacagcu

SEQ ID NO: 176594 - RNA, 14 nt, Human herpesvirus 7
acagauauugauga

SEQ ID NO: 176595 - RNA, 15 nt, Human herpesvirus 7
acagagcgcuuugcu

SEQ ID NO: 176596 - RNA, 21 nt, Human herpesvirus 7
acagcaaauucacgcucucaa

SEQ ID NO: 176597 - RNA, 14 nt, Human herpesvirus 7
acaggaaaccacag

SEQ ID NO: 176598 - RNA, 18 nt, Human herpesvirus 7
acagauugcuuguuacag

SEQ ID NO: 176599 - RNA, 16 nt, Human herpesvirus 7
acagauugucuuauua

SEQ ID NO: 176600 - RNA, 11 nt, Human herpesvirus 7
accaucugcug

SEQ ID NO: 176601 - RNA, 17 nt, Human herpesvirus 7
acccaugggcacauuug

SEQ ID NO: 176602 - RNA, 23 nt, Human herpesvirus 7
accccgauccucagaauguacac

SEQ ID NO: 176603 - RNA, 18 nt, Human herpesvirus 7
accaugaaaaauaaauac

SEQ ID NO: 176604 - RNA, 19 nt, Human herpesvirus 7
accaugaaaaauaaauacu

SEQ ID NO: 176605 - RNA, 13 nt, Human herpesvirus 7
accauaaauacca

SEQ ID NO: 176606 - RNA, 13 nt, Human herpesvirus 7
accauaugccaau

SEQ ID NO: 176607 - RNA, 16 nt, Human herpesvirus 7
acauugaaaaugcauu

SEQ ID NO: 176608 - RNA, 18 nt, Human herpesvirus 7
acauugaaaaugcauugc

SEQ ID NO: 176609 - RNA, 21 nt, Human herpesvirus 7
acauucucaaaaaugauauga

SEQ ID NO: 176610 - RNA, 21 nt, Human herpesvirus 7
acauuaucgcguuuucaugcu

SEQ ID NO: 176611 - RNA, 11 nt, Human herpesvirus 7
acauuccucau

SEQ ID NO: 176612 - RNA, 18 nt, Human herpesvirus 7
acauuccucaucucccac

SEQ ID NO: 176613 - RNA, 22 nt, Human herpesvirus 7
acauuccucaucucccacuucc

SEQ ID NO: 176614 - RNA, 15 nt, Human herpesvirus 7
acauuauuugcugaa

SEQ ID NO: 176615 - RNA, 17 nt, Human herpesvirus 7
acgcagacacaauggaa

SEQ ID NO: 176616 - RNA, 18 nt, Human herpesvirus 7
acgcagcaauguauauaa

SEQ ID NO: 176617 - RNA, 22 nt, Human herpesvirus 7
acgagauggauugagugcaugc

SEQ ID NO: 176618 - RNA, 22 nt, Human herpesvirus 7
accuuaaguuuuuuauacuuuu

SEQ ID NO: 176619 - RNA, 22 nt, Human herpesvirus 7
accugauaaauacucaugaagg

SEQ ID NO: 176620 - RNA, 16 nt, Human herpesvirus 7
accugaaaaacaugag

SEQ ID NO: 176621 - RNA, 16 nt, Human herpesvirus 7
acccugucacacuuau

SEQ ID NO: 176622 - RNA, 16 nt, Human herpesvirus 7
acccuaauugccauug

SEQ ID NO: 176623 - RNA, 20 nt, Human herpesvirus 7
accuacuguuaagaauucca

SEQ ID NO: 176624 - RNA, 19 nt, Human herpesvirus 7
accuaucaaaauuccauuc

SEQ ID NO: 176625 - RNA, 15 nt, Human herpesvirus 7
accuauuacgccaaa

SEQ ID NO: 176626 - RNA, 17 nt, Human herpesvirus 7
accuaacaaaaaaauac

SEQ ID NO: 176627 - RNA, 15 nt, Human herpesvirus 7
accuacauuuugaua

SEQ ID NO: 176628 - RNA, 14 nt, Human herpesvirus 7
accuacgacuaucg

SEQ ID NO: 176629 - RNA, 14 nt, Human herpesvirus 7
aacuugaaugagcu

SEQ ID NO: 176630 - RNA, 17 nt, Human herpesvirus 7
aacuuggauaaccaaac

SEQ ID NO: 176631 - RNA, 16 nt, Human herpesvirus 7
aacuucuacuaauaca

SEQ ID NO: 176632 - RNA, 17 nt, Human herpesvirus 7
aacuucugauaucuuaa

SEQ ID NO: 176633 - RNA, 19 nt, Human herpesvirus 7
aacuugaaaaucaauccaa

SEQ ID NO: 176634 - RNA, 15 nt, Human herpesvirus 7
aacuucaacauacag

SEQ ID NO: 176635 - RNA, 16 nt, Human herpesvirus 7
aagaagcgagauuuau

SEQ ID NO: 176636 - RNA, 16 nt, Human herpesvirus 7
aagaacuuacauuuca

SEQ ID NO: 176637 - RNA, 18 nt, Human herpesvirus 7
aacuugucaccuauuuca

SEQ ID NO: 176638 - RNA, 20 nt, Human herpesvirus 7
aacuugugaaaauaacagga

SEQ ID NO: 176639 - RNA, 19 nt, Human herpesvirus 7
aacuuuauccaguacgucu

SEQ ID NO: 176640 - RNA, 23 nt, Human herpesvirus 7
aacuuuauccaguacgucuugcu

SEQ ID NO: 176641 - RNA, 14 nt, Human herpesvirus 7
aacuuugaaaucau

SEQ ID NO: 176642 - RNA, 22 nt, Human herpesvirus 7
aagaacuccauucgguuuucaa

SEQ ID NO: 176643 - RNA, 20 nt, Human herpesvirus 7
aagaaccuaucaaaauucca

SEQ ID NO: 176644 - RNA, 18 nt, Human herpesvirus 7
aagaaugggugucagcuu

SEQ ID NO: 176645 - RNA, 21 nt, Human herpesvirus 7
aagaauuaauaaaaguaucau

SEQ ID NO: 176646 - RNA, 16 nt, Human herpesvirus 7
aagaaugcaagccuag

SEQ ID NO: 176647 - RNA, 21 nt, Human herpesvirus 7
aagaauggcgaguuacauuuc

SEQ ID NO: 176648 - RNA, 21 nt, Human herpesvirus 7
aagaauggcgguuguacugua

SEQ ID NO: 176649 - RNA, 17 nt, Human herpesvirus 7
aagaauggcugaugaua

SEQ ID NO: 176650 - RNA, 13 nt, Human herpesvirus 7
aagaaucacauuu

SEQ ID NO: 176651 - RNA, 14 nt, Human herpesvirus 7
aagaaucauuugua

SEQ ID NO: 176652 - RNA, 14 nt, Human herpesvirus 7
aagcauacuuuaaa

SEQ ID NO: 176653 - RNA, 22 nt, Human herpesvirus 7
aagcauacuuuaaaacuuugau

SEQ ID NO: 176654 - RNA, 23 nt, Human herpesvirus 7
aagcauacuuucgcaacaaucaa

SEQ ID NO: 176655 - RNA, 18 nt, Human herpesvirus 7
aagcagcuugaugaauca

SEQ ID NO: 176656 - RNA, 23 nt, Human herpesvirus 7
aagaauuuuuuccuguugucauu

SEQ ID NO: 176657 - RNA, 22 nt, Human herpesvirus 7
aagaauugcgugcgccuuuaaa

SEQ ID NO: 176658 - RNA, 19 nt, Human herpesvirus 7
aagaauuuaaucauaucuu

SEQ ID NO: 176659 - RNA, 17 nt, Human herpesvirus 7
aagcagggaaaaagcau

SEQ ID NO: 176660 - RNA, 17 nt, Human herpesvirus 7
aagcguuucacugggaa

SEQ ID NO: 176661 - RNA, 18 nt, Human herpesvirus 7
aagcuaaaaaacguggaa

SEQ ID NO: 176662 - RNA, 16 nt, Human herpesvirus 7
aagcuaaaauuuugaa

SEQ ID NO: 176663 - RNA, 22 nt, Human herpesvirus 7
aagcuguuuccaucuuaugaua

SEQ ID NO: 176664 - RNA, 17 nt, Human herpesvirus 7
aagcuuuacagcagccu

SEQ ID NO: 176665 - RNA, 14 nt, Human herpesvirus 7
aagcugcagcugaa

SEQ ID NO: 176666 - RNA, 19 nt, Human herpesvirus 7
aagcugauucaacacucga

SEQ ID NO: 176667 - RNA, 15 nt, Human herpesvirus 7
aagcugacuuuguca

SEQ ID NO: 176668 - RNA, 13 nt, Human herpesvirus 7
aagcauggauuuc

SEQ ID NO: 176669 - RNA, 22 nt, Human herpesvirus 7
aagccauaaaauguacaauucc

SEQ ID NO: 176670 - RNA, 12 nt, Human herpesvirus 7
aagcccaugaac

SEQ ID NO: 176671 - RNA, 18 nt, Human herpesvirus 7
aagcgcugagaucuucca

SEQ ID NO: 176672 - RNA, 18 nt, Human herpesvirus 7
aagccuaggauaccaaac

SEQ ID NO: 176673 - RNA, 22 nt, Human herpesvirus 7
aagccuaggauaccaaacaaaa

SEQ ID NO: 176674 - RNA, 13 nt, Human herpesvirus 7
aagugaacuguua

SEQ ID NO: 176675 - RNA, 15 nt, Human herpesvirus 7
aagugaacuguuaca

SEQ ID NO: 176676 - RNA, 14 nt, Human herpesvirus 7
aagugaaugugcuu

SEQ ID NO: 176677 - RNA, 14 nt, Human herpesvirus 7
aagucagaacauug

SEQ ID NO: 176678 - RNA, 18 nt, Human herpesvirus 7
aaggaaccguuugcagcc

SEQ ID NO: 176679 - RNA, 12 nt, Human herpesvirus 7
aaggaaucuuaa

SEQ ID NO: 176680 - RNA, 21 nt, Human herpesvirus 7
aaggaaucuuaaucacgugau

SEQ ID NO: 176681 - RNA, 20 nt, Human herpesvirus 7
aagcuuucguaaucauucaa

SEQ ID NO: 176682 - RNA, 21 nt, Human herpesvirus 7
aagcuuuggcagcuagccuau

SEQ ID NO: 176683 - RNA, 18 nt, Human herpesvirus 7
aaggaucgaucucuguca

SEQ ID NO: 176684 - RNA, 20 nt, Human herpesvirus 7
aaggaucgaucucugucaaa

SEQ ID NO: 176685 - RNA, 22 nt, Human herpesvirus 7
aauacuaguauuucgucuuucc

SEQ ID NO: 176686 - RNA, 19 nt, Human herpesvirus 7
aauaccgucguuugugucu

SEQ ID NO: 176687 - RNA, 22 nt, Human herpesvirus 7
aauaccgucguuugugucuuuu

SEQ ID NO: 176688 - RNA, 16 nt, Human herpesvirus 7
aauacguccaaaaauu

SEQ ID NO: 176689 - RNA, 16 nt, Human herpesvirus 7
aauacuggcaugucuc

SEQ ID NO: 176690 - RNA, 17 nt, Human herpesvirus 7
aauacuggcaugucuca

SEQ ID NO: 176691 - RNA, 22 nt, Human herpesvirus 7
aauacaauagugaacaugugcu

SEQ ID NO: 176692 - RNA, 23 nt, Human herpesvirus 7
aauacacccagucgucugcucaa

SEQ ID NO: 176693 - RNA, 12 nt, Human herpesvirus 7
aauacauucuca

SEQ ID NO: 176694 - RNA, 15 nt, Human herpesvirus 7
aaguuuaucuuggac

SEQ ID NO: 176695 - RNA, 17 nt, Human herpesvirus 7
aaguuuuaacaaucuaa

SEQ ID NO: 176696 - RNA, 19 nt, Human herpesvirus 7
aaguuugguuaaaguguga

SEQ ID NO: 176697 - RNA, 14 nt, Human herpesvirus 7
aaguggaaucucau

SEQ ID NO: 176698 - RNA, 16 nt, Human herpesvirus 7
aaguggagacaaucua

SEQ ID NO: 176699 - RNA, 19 nt, Human herpesvirus 7
aagugugaucuggauucaa

SEQ ID NO: 176700 - RNA, 15 nt, Human herpesvirus 7
aauugcagacuaauu

SEQ ID NO: 176701 - RNA, 20 nt, Human herpesvirus 7
aauuauuuccagaguaugaa

SEQ ID NO: 176702 - RNA, 17 nt, Human herpesvirus 7
aauuauucggugucuuc

SEQ ID NO: 176703 - RNA, 21 nt, Human herpesvirus 7
aauucaaccacagacacacca

SEQ ID NO: 176704 - RNA, 22 nt, Human herpesvirus 7
aauuaugcguuaaugucucugu

SEQ ID NO: 176705 - RNA, 24 nt, Human herpesvirus 7
aauuauguggugcguacacuguaa

SEQ ID NO: 176706 - RNA, 14 nt, Human herpesvirus 7
aauuauacacugug

SEQ ID NO: 176707 - RNA, 15 nt, Human herpesvirus 7
aauuauacacuguga

SEQ ID NO: 176708 - RNA, 16 nt, Human herpesvirus 7
aauuauacacugugaa

SEQ ID NO: 176709 - RNA, 18 nt, Human herpesvirus 7
aauuauagaaacauuccu

SEQ ID NO: 176710 - RNA, 21 nt, Human herpesvirus 7
aaugucugugucuaugaguau

SEQ ID NO: 176711 - RNA, 17 nt, Human herpesvirus 7
aaugucuuugucaugau

SEQ ID NO: 176712 - RNA, 20 nt, Human herpesvirus 7
aaugucuuugucaugaugaa

SEQ ID NO: 176713 - RNA, 18 nt, Human herpesvirus 7
aaugucgaaucuacaucc

SEQ ID NO: 176714 - RNA, 14 nt, Human herpesvirus 7
aauuacauugcagu

SEQ ID NO: 176715 - RNA, 16 nt, Human herpesvirus 7
aauuacauugcaguca

SEQ ID NO: 176716 - RNA, 18 nt, Human herpesvirus 7
aauuacguuauauauuua

SEQ ID NO: 176717 - RNA, 16 nt, Human herpesvirus 7
aaugucagaguuuaaa

SEQ ID NO: 176718 - RNA, 17 nt, Human herpesvirus 7
aaugucauaaaacuuuu

SEQ ID NO: 176719 - RNA, 17 nt, Human herpesvirus 7
aauguauucaaugcuag

SEQ ID NO: 176720 - RNA, 21 nt, Human herpesvirus 7
aauguaaccuuggcuguucaa

SEQ ID NO: 176721 - RNA, 22 nt, Human herpesvirus 7
aauguaaccuuggcuguucaaa

SEQ ID NO: 176722 - RNA, 14 nt, Human herpesvirus 7
aaugguuuuauuuc

SEQ ID NO: 176723 - RNA, 14 nt, Human herpesvirus 7
aauguaaaccaaau

SEQ ID NO: 176724 - RNA, 17 nt, Human herpesvirus 7
aauugccauuguguuaa

SEQ ID NO: 176725 - RNA, 19 nt, Human herpesvirus 7
aauugcccuuguguuguca

SEQ ID NO: 176726 - RNA, 21 nt, Human herpesvirus 7
aauugcccuuguguugucaua

SEQ ID NO: 176727 - RNA, 16 nt, Human herpesvirus 7
aauuggaaauuacugg

SEQ ID NO: 176728 - RNA, 14 nt, Human herpesvirus 7
aauuuuauuuuccc

SEQ ID NO: 176729 - RNA, 15 nt, Human herpesvirus 7
aauuuuaaaacugaa

SEQ ID NO: 176730 - RNA, 18 nt, Human herpesvirus 7
aauuuuaaaacugaagca

SEQ ID NO: 176731 - RNA, 15 nt, Human herpesvirus 7
aauuuuaacgcugaa

SEQ ID NO: 176732 - RNA, 17 nt, Human herpesvirus 7
aauuuuaauugugcauc

SEQ ID NO: 176733 - RNA, 14 nt, Human herpesvirus 7
aauuuuacaaugca

SEQ ID NO: 176734 - RNA, 19 nt, Human herpesvirus 7
aauuuuacaccgauuccag

SEQ ID NO: 176735 - RNA, 17 nt, Human herpesvirus 7
aauuugugcugugucaa

SEQ ID NO: 176736 - RNA, 19 nt, Human herpesvirus 7
aauuuguucaaucacauac

SEQ ID NO: 176737 - RNA, 17 nt, Human herpesvirus 7
aauuuguucaauugcca

SEQ ID NO: 176738 - RNA, 18 nt, Human herpesvirus 7
aauuuguucaauugccac

SEQ ID NO: 176739 - RNA, 23 nt, Human herpesvirus 7
aauuguguuuuuuuuuguuuuau

SEQ ID NO: 176740 - RNA, 21 nt, Human herpesvirus 7
aauuugugauaugacugacau

SEQ ID NO: 176741 - RNA, 21 nt, Human herpesvirus 7
aauugugcaucuccuguaacc

SEQ ID NO: 176742 - RNA, 17 nt, Human herpesvirus 7
aauugugguacaacaaa

SEQ ID NO: 176743 - RNA, 20 nt, Human herpesvirus 7
acaaauauacgaaugccauc

SEQ ID NO: 176744 - RNA, 22 nt, Human herpesvirus 7
acaaauaccaugaaaaauauga

SEQ ID NO: 176745 - RNA, 21 nt, Human herpesvirus 7
acaaagaaaaaacuaacuuau

SEQ ID NO: 176746 - RNA, 23 nt, Human herpesvirus 7
acaaaaaaaguaccauugcugau

SEQ ID NO: 176747 - RNA, 20 nt, Human herpesvirus 7
acaaagcaugaaaagcaacu

SEQ ID NO: 176748 - RNA, 20 nt, Human herpesvirus 7
aauuuuuggcuaacugagaa

SEQ ID NO: 176749 - RNA, 14 nt, Human herpesvirus 7
aauuuuuuguucaa

SEQ ID NO: 176750 - RNA, 19 nt, Human herpesvirus 7
aauuuuuuuuugagugugc

SEQ ID NO: 176751 - RNA, 20 nt, Human herpesvirus 7
aauuuugaucuugucaaaaa

SEQ ID NO: 176752 - RNA, 21 nt, Human herpesvirus 7
aauuuuguaagaaacaucuau

SEQ ID NO: 176753 - RNA, 17 nt, Human herpesvirus 7
aauuuuucgcugaagaa

SEQ ID NO: 176754 - RNA, 15 nt, Human herpesvirus 7
aauuuuucggauaaa

SEQ ID NO: 176755 - RNA, 18 nt, Human herpesvirus 7
acaaaaaagguguugaua

SEQ ID NO: 176756 - RNA, 22 nt, Human herpesvirus 7
acaaaaaagugaucaaaauuaa

SEQ ID NO: 176757 - RNA, 23 nt, Human herpesvirus 7
aauagugucuguuguaacagauu

SEQ ID NO: 176758 - RNA, 16 nt, Human herpesvirus 7
aauaucaaccauucaa

SEQ ID NO: 176759 - RNA, 12 nt, Human herpesvirus 7
aauauauuccaa

SEQ ID NO: 176760 - RNA, 15 nt, Human herpesvirus 7
aauauauuccaacuc

SEQ ID NO: 176761 - RNA, 21 nt, Human herpesvirus 7
aauauaguuugguuauccaag

SEQ ID NO: 176762 - RNA, 22 nt, Human herpesvirus 7
aauauauaagguuuagcagaaa

SEQ ID NO: 176763 - RNA, 23 nt, Human herpesvirus 7
aauauagaugcagaaaaauccaa

SEQ ID NO: 176764 - RNA, 20 nt, Human herpesvirus 7
aauagcagagaauauguuau

SEQ ID NO: 176765 - RNA, 19 nt, Human herpesvirus 7
aauagacaaauuaaacaau

SEQ ID NO: 176766 - RNA, 22 nt, Human herpesvirus 7
aauagacacauuuauccaucaa

SEQ ID NO: 176767 - RNA, 15 nt, Human herpesvirus 7
aauacugagagaaua

SEQ ID NO: 176768 - RNA, 22 nt, Human herpesvirus 7
aauacugagagaauaaguucau

SEQ ID NO: 176769 - RNA, 19 nt, Human herpesvirus 7
aauagccuuucacuugaau

SEQ ID NO: 176770 - RNA, 18 nt, Human herpesvirus 7
aauaggcgaauuggugcu

SEQ ID NO: 176771 - RNA, 20 nt, Human herpesvirus 7
aaucuaugcaaagcaagcau

SEQ ID NO: 176772 - RNA, 17 nt, Human herpesvirus 7
aaucguuggcauuguau

SEQ ID NO: 176773 - RNA, 19 nt, Human herpesvirus 7
aaucuacuguaaucugacu

SEQ ID NO: 176774 - RNA, 15 nt, Human herpesvirus 7
aaucuaccaauaaaa

SEQ ID NO: 176775 - RNA, 17 nt, Human herpesvirus 7
aauccuaugacugagaa

SEQ ID NO: 176776 - RNA, 17 nt, Human herpesvirus 7
aaucgguaacaugucuu

SEQ ID NO: 176777 - RNA, 17 nt, Human herpesvirus 7
aaucgcaguguucauua

SEQ ID NO: 176778 - RNA, 18 nt, Human herpesvirus 7
aaucgagcgacagucacc

SEQ ID NO: 176779 - RNA, 21 nt, Human herpesvirus 7
aauccuggauuucagcauuug

SEQ ID NO: 176780 - RNA, 14 nt, Human herpesvirus 7
aaugcuuugcugca

SEQ ID NO: 176781 - RNA, 22 nt, Human herpesvirus 7
aauggaaaccuggagaagacaa

SEQ ID NO: 176782 - RNA, 17 nt, Human herpesvirus 7
aauggaacagcaaaaag

SEQ ID NO: 176783 - RNA, 13 nt, Human herpesvirus 7
aauggaagaacaa

SEQ ID NO: 176784 - RNA, 14 nt, Human herpesvirus 7
aauggaagaacaac

SEQ ID NO: 176785 - RNA, 17 nt, Human herpesvirus 7
aaugcugcaauguucau

SEQ ID NO: 176786 - RNA, 16 nt, Human herpesvirus 7
aaugcuuaaauuucca

SEQ ID NO: 176787 - RNA, 19 nt, Human herpesvirus 7
aauggcaaauccuauaaaa

SEQ ID NO: 176788 - RNA, 19 nt, Human herpesvirus 7
aauggcgaguuacauuuca

SEQ ID NO: 176789 - RNA, 12 nt, Human herpesvirus 7
aauggcaucuua

SEQ ID NO: 176790 - RNA, 16 nt, Human herpesvirus 7
aaugguauaaagugcu

SEQ ID NO: 176791 - RNA, 21 nt, Human herpesvirus 7
aauggguggguccacauuuaa

SEQ ID NO: 176792 - RNA, 21 nt, Human herpesvirus 7
aaugguaccuuagaaucacaa

SEQ ID NO: 176793 - RNA, 16 nt, Human herpesvirus 7
aaugauaaauacucug

SEQ ID NO: 176794 - RNA, 20 nt, Human herpesvirus 7
aaugauaaauacucuggguc

SEQ ID NO: 176795 - RNA, 19 nt, Human herpesvirus 7
aaugauauaaaguuuauau

SEQ ID NO: 176796 - RNA, 14 nt, Human herpesvirus 7
aaugaugaugacaa

SEQ ID NO: 176797 - RNA, 14 nt, Human herpesvirus 7
aaucuauauuugau

SEQ ID NO: 176798 - RNA, 13 nt, Human herpesvirus 7
aaugacugucagc

SEQ ID NO: 176799 - RNA, 14 nt, Human herpesvirus 7
aaugcagccuacuu

SEQ ID NO: 176800 - RNA, 14 nt, Human herpesvirus 7
aaugcaugaugcac

SEQ ID NO: 176801 - RNA, 12 nt, Human herpesvirus 7
aaugcauugcuu

SEQ ID NO: 176802 - RNA, 14 nt, Human herpesvirus 7
aaaagcuuugaucu

SEQ ID NO: 176803 - RNA, 16 nt, Human herpesvirus 7
aaaaucaacuugcaga

SEQ ID NO: 176804 - RNA, 13 nt, Human herpesvirus 7
aaaaucaauccaa

SEQ ID NO: 176805 - RNA, 16 nt, Human herpesvirus 7
aaaaucacagcauuau

SEQ ID NO: 176806 - RNA, 17 nt, Human herpesvirus 7
aaaagcugcauguguac

SEQ ID NO: 176807 - RNA, 21 nt, Human herpesvirus 7
aaaagcugcauguguacuaaa

SEQ ID NO: 176808 - RNA, 17 nt, Human herpesvirus 7
aaaagcaaaccuuacaa

SEQ ID NO: 176809 - RNA, 11 nt, Human herpesvirus 7
aaaagauguac

SEQ ID NO: 176810 - RNA, 18 nt, Human herpesvirus 7
aaaagauuaaaugggcua

SEQ ID NO: 176811 - RNA, 20 nt, Human herpesvirus 7
aaaagauuuaaaguaagaau

SEQ ID NO: 176812 - RNA, 20 nt, Human herpesvirus 7
aaaagaauugauugaauuug

SEQ ID NO: 176813 - RNA, 19 nt, Human herpesvirus 7
aaaagcagccuucagacuu

SEQ ID NO: 176814 - RNA, 11 nt, Human herpesvirus 7
aaaagaacuua

SEQ ID NO: 176815 - RNA, 12 nt, Human herpesvirus 7
aaaagaacuuac

SEQ ID NO: 176816 - RNA, 19 nt, Human herpesvirus 7
aaaagaacuuacauuucaa

SEQ ID NO: 176817 - RNA, 14 nt, Human herpesvirus 7
aaaaucguguuaag

SEQ ID NO: 176818 - RNA, 20 nt, Human herpesvirus 7
aaaaucuaucaccaagaaca

SEQ ID NO: 176819 - RNA, 13 nt, Human herpesvirus 7
aaaauauauucca

SEQ ID NO: 176820 - RNA, 12 nt, Human herpesvirus 7
aaaauauguuca

SEQ ID NO: 176821 - RNA, 15 nt, Human herpesvirus 7
aaaauauguucagau

SEQ ID NO: 176822 - RNA, 16 nt, Human herpesvirus 7
aaaaucucgaacaguc

SEQ ID NO: 176823 - RNA, 17 nt, Human herpesvirus 7
aaaaugaauaacuauuu

SEQ ID NO: 176824 - RNA, 19 nt, Human herpesvirus 7
aaaaugacaaaacugcaaa

SEQ ID NO: 176825 - RNA, 21 nt, Human herpesvirus 7
aaaaugggcguaacugugacg

SEQ ID NO: 176826 - RNA, 20 nt, Human herpesvirus 7
aaaaugcugcucagcuagaa

SEQ ID NO: 176827 - RNA, 11 nt, Human herpesvirus 7
aaaaugcauug

SEQ ID NO: 176828 - RNA, 21 nt, Human herpesvirus 7
aaaaugauuagcgcgugaaca

SEQ ID NO: 176829 - RNA, 19 nt, Human herpesvirus 7
aaagaaaaaaaguacaaga

SEQ ID NO: 176830 - RNA, 18 nt, Human herpesvirus 7
aaacuuggaaaacaauca

SEQ ID NO: 176831 - RNA, 17 nt, Human herpesvirus 7
aaacuugugaaaauaac

SEQ ID NO: 176832 - RNA, 18 nt, Human herpesvirus 7
aaacuugugaaaauaaca

SEQ ID NO: 176833 - RNA, 20 nt, Human herpesvirus 7
aaacugucacgcaagucaca

SEQ ID NO: 176834 - RNA, 13 nt, Human herpesvirus 7
aaacuggcaauau

SEQ ID NO: 176835 - RNA, 16 nt, Human herpesvirus 7
aaacuguuuuuacuuc

SEQ ID NO: 176836 - RNA, 18 nt, Human herpesvirus 7
aaacuuauguacuauaca

SEQ ID NO: 176837 - RNA, 14 nt, Human herpesvirus 7
aaagaaccuaucaa

SEQ ID NO: 176838 - RNA, 19 nt, Human herpesvirus 7
aaagaacauguaguacaau

SEQ ID NO: 176839 - RNA, 20 nt, Human herpesvirus 7
aaagaaaagcaaaccuuaca

SEQ ID NO: 176840 - RNA, 15 nt, Human herpesvirus 7
aaagacaaacuaugg

SEQ ID NO: 176841 - RNA, 15 nt, Human herpesvirus 7
aaagacauaacaaaa

SEQ ID NO: 176842 - RNA, 17 nt, Human herpesvirus 7
aaagaaugaacaccgca

SEQ ID NO: 176843 - RNA, 22 nt, Human herpesvirus 7
aaagaauggcgguuguacugua

SEQ ID NO: 176844 - RNA, 16 nt, Human herpesvirus 7
aaagaacuuacauuuc

SEQ ID NO: 176845 - RNA, 17 nt, Human herpesvirus 7
aaagaacuuacauuuca

SEQ ID NO: 176846 - RNA, 18 nt, Human herpesvirus 7
aaagaacuuacauuucaa

SEQ ID NO: 176847 - RNA, 22 nt, Human herpesvirus 7
aaagaagaagaaaagaaaaagc

SEQ ID NO: 176848 - RNA, 14 nt, Human herpesvirus 7
aaagagccucccac

SEQ ID NO: 176849 - RNA, 18 nt, Human herpesvirus 7
aaagagucuauugacaua

SEQ ID NO: 176850 - RNA, 14 nt, Human herpesvirus 7
aaagacaugaauca

SEQ ID NO: 176851 - RNA, 22 nt, Human herpesvirus 7
aaagaccuguacuguugcuaau

SEQ ID NO: 176852 - RNA, 24 nt, Human herpesvirus 7
aaagaccuguacuguugcuaauua

SEQ ID NO: 176853 - RNA, 15 nt, Human herpesvirus 7
aaagauuacauuugc

SEQ ID NO: 176854 - RNA, 22 nt, Human herpesvirus 7
aaagaugucuuaauugccgauu

SEQ ID NO: 176855 - RNA, 15 nt, Human herpesvirus 7
aaagauugcuugcac

SEQ ID NO: 176856 - RNA, 23 nt, Human herpesvirus 7
aaagauuuaaaguaagaauggaa

SEQ ID NO: 176857 - RNA, 17 nt, Human herpesvirus 7
aaagauuuaacaugugu

SEQ ID NO: 176858 - RNA, 18 nt, Human herpesvirus 7
aaagauaauguuacauua

SEQ ID NO: 176859 - RNA, 16 nt, Human herpesvirus 7
aaagauggaaaguuua

SEQ ID NO: 176860 - RNA, 17 nt, Human herpesvirus 7
aaagauggaugaaaaac

SEQ ID NO: 176861 - RNA, 23 nt, Human herpesvirus 7
aaagaugauuggauuuucuguaa

SEQ ID NO: 176862 - RNA, 23 nt, Human herpesvirus 7
aaaugcuccgcgcuguucagcuc

SEQ ID NO: 176863 - RNA, 22 nt, Human herpesvirus 7
aaaugcguuuuugucucuuuag

SEQ ID NO: 176864 - RNA, 16 nt, Human herpesvirus 7
aaaugauuuuucuuac

SEQ ID NO: 176865 - RNA, 14 nt, Human herpesvirus 7
aaauuacuugcuau

SEQ ID NO: 176866 - RNA, 16 nt, Human herpesvirus 7
aaauuauuauuaguau

SEQ ID NO: 176867 - RNA, 15 nt, Human herpesvirus 7
aaaugcugcaauguu

SEQ ID NO: 176868 - RNA, 18 nt, Human herpesvirus 7
aaaugcuuaaauuuccau

SEQ ID NO: 176869 - RNA, 20 nt, Human herpesvirus 7
aaauuaguucuaauuuuggc

SEQ ID NO: 176870 - RNA, 17 nt, Human herpesvirus 7
aaauuaguucuugugac

SEQ ID NO: 176871 - RNA, 17 nt, Human herpesvirus 7
aaauuauaccucagcuu

SEQ ID NO: 176872 - RNA, 16 nt, Human herpesvirus 7
aaauucuccaaucaua

SEQ ID NO: 176873 - RNA, 16 nt, Human herpesvirus 7
aaauuccauacaaaga

SEQ ID NO: 176874 - RNA, 20 nt, Human herpesvirus 7
aaauucuuuuucaagauuaa

SEQ ID NO: 176875 - RNA, 12 nt, Human herpesvirus 7
aaauucugugga

SEQ ID NO: 176876 - RNA, 13 nt, Human herpesvirus 7
aaauucuguggag

SEQ ID NO: 176877 - RNA, 16 nt, Human herpesvirus 7
aaauugacagcaccaa

SEQ ID NO: 176878 - RNA, 15 nt, Human herpesvirus 7
aaauauaugcuuuau

SEQ ID NO: 176879 - RNA, 17 nt, Human herpesvirus 7
aaaucucagcucuguaa

SEQ ID NO: 176880 - RNA, 20 nt, Human herpesvirus 7
aaauaugaugaaacuuccaa

SEQ ID NO: 176881 - RNA, 15 nt, Human herpesvirus 7
aaaucucgaacaguc

SEQ ID NO: 176882 - RNA, 23 nt, Human herpesvirus 7
aaauaucccuagaagaugacuca

SEQ ID NO: 176883 - RNA, 16 nt, Human herpesvirus 7
aaauaucgauuuaaca

SEQ ID NO: 176884 - RNA, 13 nt, Human herpesvirus 7
aaauauauuccaa

SEQ ID NO: 176885 - RNA, 12 nt, Human herpesvirus 7
aaaucuguaaaa

SEQ ID NO: 176886 - RNA, 17 nt, Human herpesvirus 7
aaaucugaauagacaca

SEQ ID NO: 176887 - RNA, 18 nt, Human herpesvirus 7
aaaucuuuaucgccauuu

SEQ ID NO: 176888 - RNA, 23 nt, Human herpesvirus 7
aaaucuuucaucuucugaaucug

SEQ ID NO: 176889 - RNA, 22 nt, Human herpesvirus 7
aaaucuuguaucagaaaaucuc

SEQ ID NO: 176890 - RNA, 18 nt, Human herpesvirus 7
aaaugaccgcaugugaaa

SEQ ID NO: 176891 - RNA, 20 nt, Human herpesvirus 7
aaaugaaaagucugugacag

SEQ ID NO: 176892 - RNA, 21 nt, Human herpesvirus 7
aaaugaauuuuaaguggaauc

SEQ ID NO: 176893 - RNA, 20 nt, Human herpesvirus 7
aaauacaaauuuaagagaca

SEQ ID NO: 176894 - RNA, 18 nt, Human herpesvirus 7
aaauaccggaccauuucc

SEQ ID NO: 176895 - RNA, 23 nt, Human herpesvirus 7
aaauacucaugaaggaugcgugu

SEQ ID NO: 176896 - RNA, 14 nt, Human herpesvirus 7
aaauacuacaguua

SEQ ID NO: 176897 - RNA, 21 nt, Human herpesvirus 7
aaauaggcgaauuggugcuca

SEQ ID NO: 176898 - RNA, 20 nt, Human herpesvirus 7
aaaggauuuucgauuccauu

SEQ ID NO: 176899 - RNA, 19 nt, Human herpesvirus 7
aaagcuuugaucuacauau

SEQ ID NO: 176900 - RNA, 16 nt, Human herpesvirus 7
aaaggaaaaaugcugc

SEQ ID NO: 176901 - RNA, 20 nt, Human herpesvirus 7
aaaggaaucuuaaucacgug

SEQ ID NO: 176902 - RNA, 22 nt, Human herpesvirus 7
aaaggaaucuuaaucacgugau

SEQ ID NO: 176903 - RNA, 17 nt, Human herpesvirus 7
aaaggaaauuaguucuu

SEQ ID NO: 176904 - RNA, 13 nt, Human herpesvirus 7
aaagccacuguug

SEQ ID NO: 176905 - RNA, 20 nt, Human herpesvirus 7
aaagccacuguugaugauuu

SEQ ID NO: 176906 - RNA, 20 nt, Human herpesvirus 7
aaagaguauacaaaagacau

SEQ ID NO: 176907 - RNA, 17 nt, Human herpesvirus 7
aaagcaaaagccacaga

SEQ ID NO: 176908 - RNA, 18 nt, Human herpesvirus 7
aaagcuguuuccaucuua

SEQ ID NO: 176909 - RNA, 18 nt, Human herpesvirus 7
aaagcuucaguacuugaa

SEQ ID NO: 176910 - RNA, 19 nt, Human herpesvirus 7
aaagcuucaguacuugaau

SEQ ID NO: 176911 - RNA, 22 nt, Human herpesvirus 7
aaagcugauuauucaugcagaa

SEQ ID NO: 176912 - RNA, 19 nt, Human herpesvirus 7
aaagcugcauguguacuaa

SEQ ID NO: 176913 - RNA, 17 nt, Human herpesvirus 7
aaagcguugguugcuug

SEQ ID NO: 176914 - RNA, 17 nt, Human herpesvirus 7
aaauuuuaauugugcau

SEQ ID NO: 176915 - RNA, 19 nt, Human herpesvirus 7
aaauuuucauagcacucau

SEQ ID NO: 176916 - RNA, 23 nt, Human herpesvirus 7
aaauuugucuguugugcaauuuu

SEQ ID NO: 176917 - RNA, 20 nt, Human herpesvirus 7
aacaaaaaaaguaccauugc

SEQ ID NO: 176918 - RNA, 18 nt, Human herpesvirus 7
aacaaaauguauucaaug

SEQ ID NO: 176919 - RNA, 22 nt, Human herpesvirus 7
aacaaaggaucgaucucuguca

SEQ ID NO: 176920 - RNA, 13 nt, Human herpesvirus 7
aacaaacaaugag

SEQ ID NO: 176921 - RNA, 14 nt, Human herpesvirus 7
aacaaacaaugagc

SEQ ID NO: 176922 - RNA, 16 nt, Human herpesvirus 7
aacaaacaaugagcaa

SEQ ID NO: 176923 - RNA, 14 nt, Human herpesvirus 7
aaauuguuaccuaa

SEQ ID NO: 176924 - RNA, 17 nt, Human herpesvirus 7
aaauuggacaccaguau

SEQ ID NO: 176925 - RNA, 21 nt, Human herpesvirus 7
aaauuucaaacguaaugcaaa

SEQ ID NO: 176926 - RNA, 14 nt, Human herpesvirus 7
aaauuuaagagaca

SEQ ID NO: 176927 - RNA, 18 nt, Human herpesvirus 7
aaauuuaagagacauuga

SEQ ID NO: 176928 - RNA, 16 nt, Human herpesvirus 7
aaauuuaauaacagca

SEQ ID NO: 176929 - RNA, 18 nt, Human herpesvirus 7
aaauuuccuuuaugugau

SEQ ID NO: 176930 - RNA, 21 nt, Human herpesvirus 7
aaauuucuaaauaugaugaaa

SEQ ID NO: 176931 - RNA, 14 nt, Human herpesvirus 7
aaauuucuaucaca

SEQ ID NO: 176932 - RNA, 19 nt, Human herpesvirus 7
aacacuuuuacgugacugu

SEQ ID NO: 176933 - RNA, 20 nt, Human herpesvirus 7
aacagaagcugacuuuguca

SEQ ID NO: 176934 - RNA, 21 nt, Human herpesvirus 7
aacacugcuucucccauucaa

SEQ ID NO: 176935 - RNA, 13 nt, Human herpesvirus 7
aacaaauugugga

SEQ ID NO: 176936 - RNA, 22 nt, Human herpesvirus 7
aacaaauuguggagagauucaa

SEQ ID NO: 176937 - RNA, 23 nt, Human herpesvirus 7
aacaaacucugcuucggaauuug

SEQ ID NO: 176938 - RNA, 18 nt, Human herpesvirus 7
aacaaauucaaccacaga

SEQ ID NO: 176939 - RNA, 16 nt, Human herpesvirus 7
aacaaauuccauuaaa

SEQ ID NO: 176940 - RNA, 12 nt, Human herpesvirus 7
aacaaagugcau

SEQ ID NO: 176941 - RNA, 18 nt, Human herpesvirus 7
aacaaaguucaaguuuuc

SEQ ID NO: 176942 - RNA, 13 nt, Human herpesvirus 7
aacaaauaauuca

SEQ ID NO: 176943 - RNA, 15 nt, Human herpesvirus 7
aacagauuuuauuuc

SEQ ID NO: 176944 - RNA, 21 nt, Human herpesvirus 7
aacagaccuccuaugucauga

SEQ ID NO: 176945 - RNA, 15 nt, Human herpesvirus 7
aacagcgugucaaaa

SEQ ID NO: 176946 - RNA, 16 nt, Human herpesvirus 7
aacagcaauguuuuca

SEQ ID NO: 176947 - RNA, 22 nt, Human herpesvirus 7
aacaucaauuuuaaugugcuua

SEQ ID NO: 176948 - RNA, 12 nt, Human herpesvirus 7
aacaucagaccu

SEQ ID NO: 176949 - RNA, 23 nt, Human herpesvirus 7
aacaucccuuuccaauauagaca

SEQ ID NO: 176950 - RNA, 19 nt, Human herpesvirus 7
aacaugagauaaacuuuua

SEQ ID NO: 176951 - RNA, 13 nt, Human herpesvirus 7
aacaugagugaaa

SEQ ID NO: 176952 - RNA, 16 nt, Human herpesvirus 7
aacaugaaaacuaaca

SEQ ID NO: 176953 - RNA, 14 nt, Human herpesvirus 7
aacaucuaugugcu

SEQ ID NO: 176954 - RNA, 16 nt, Human herpesvirus 7
aacaucuaugugcucu

SEQ ID NO: 176955 - RNA, 14 nt, Human herpesvirus 7
aacaugcaacauaa

SEQ ID NO: 176956 - RNA, 16 nt, Human herpesvirus 7
aacauguuccauucaa

SEQ ID NO: 176957 - RNA, 18 nt, Human herpesvirus 7
aacauguuccauucaaua

SEQ ID NO: 176958 - RNA, 14 nt, Human herpesvirus 7
aacaugucuucaac

SEQ ID NO: 176959 - RNA, 19 nt, Human herpesvirus 7
aacaugucuucaacuucuc

SEQ ID NO: 176960 - RNA, 24 nt, Human herpesvirus 7
aacauuacgucaucccugcugaua

SEQ ID NO: 176961 - RNA, 23 nt, Human herpesvirus 7
aacauugugaguuucuacauguu

SEQ ID NO: 176962 - RNA, 20 nt, Human herpesvirus 7
aacauugucaaagaaugcaa

SEQ ID NO: 176963 - RNA, 22 nt, Human herpesvirus 7
aacauuuuguaugaaaagccca

SEQ ID NO: 176964 - RNA, 18 nt, Human herpesvirus 7
aaccaaaaugugggaugu

SEQ ID NO: 176965 - RNA, 11 nt, Human herpesvirus 7
aaccacagaca

SEQ ID NO: 176966 - RNA, 19 nt, Human herpesvirus 7
aaccuuaacauacugaugu

SEQ ID NO: 176967 - RNA, 15 nt, Human herpesvirus 7
aaccuuacaacaaag

SEQ ID NO: 176968 - RNA, 16 nt, Human herpesvirus 7
aaccuuuuucugaaaa

SEQ ID NO: 176969 - RNA, 15 nt, Human herpesvirus 7
aaccuuuuaacaaca

SEQ ID NO: 176970 - RNA, 17 nt, Human herpesvirus 7
aacgaaaggaaucuuaa

SEQ ID NO: 176971 - RNA, 13 nt, Human herpesvirus 7
aaccuacugaaga

SEQ ID NO: 176972 - RNA, 13 nt, Human herpesvirus 7
aaccuacuguuaa

SEQ ID NO: 176973 - RNA, 18 nt, Human herpesvirus 7
aaccuaucaaaauuccau

SEQ ID NO: 176974 - RNA, 21 nt, Human herpesvirus 7
aaccucgugaaauaagaugcu

SEQ ID NO: 176975 - RNA, 20 nt, Human herpesvirus 7
aacccagaagaaacuugaaa

SEQ ID NO: 176976 - RNA, 19 nt, Human herpesvirus 7
aacuagaaaaacacuagcu

SEQ ID NO: 176977 - RNA, 12 nt, Human herpesvirus 7
aacuuacauuuc

SEQ ID NO: 176978 - RNA, 13 nt, Human herpesvirus 7
aacuuacauuuca

SEQ ID NO: 176979 - RNA, 19 nt, Human herpesvirus 7
aacuauaaauggaauuuaa

SEQ ID NO: 176980 - RNA, 16 nt, Human herpesvirus 7
aacuauguccaaaaau

SEQ ID NO: 176981 - RNA, 15 nt, Human herpesvirus 7
aacuaaaaaucucag

SEQ ID NO: 176982 - RNA, 18 nt, Human herpesvirus 7
aacuaaaacuacauuuaa

SEQ ID NO: 176983 - RNA, 20 nt, Human herpesvirus 7
aacuaaaauugacagcacca

SEQ ID NO: 176984 - RNA, 21 nt, Human herpesvirus 7
aacggccauucaccuguuuga

SEQ ID NO: 176985 - RNA, 14 nt, Human herpesvirus 7
cuuaacauacugau

SEQ ID NO: 176986 - RNA, 16 nt, Human herpesvirus 7
cuuaaauuuccaucua

SEQ ID NO: 176987 - RNA, 15 nt, Human herpesvirus 7
cuuaacgaaggcauc

SEQ ID NO: 176988 - RNA, 19 nt, Human herpesvirus 7
cuuaagacaccccaaaauc

SEQ ID NO: 176989 - RNA, 22 nt, Human herpesvirus 7
cuuaagcuuuuguaaacaugaa

SEQ ID NO: 176990 - RNA, 19 nt, Human herpesvirus 7
cuuaaggcggacaaauaua

SEQ ID NO: 176991 - RNA, 15 nt, Human herpesvirus 7
cuuaauuuguucaau

SEQ ID NO: 176992 - RNA, 13 nt, Human herpesvirus 7
cuuacacuaugag

SEQ ID NO: 176993 - RNA, 21 nt, Human herpesvirus 7
cuuacacuauucucuacuuaa

SEQ ID NO: 176994 - RNA, 14 nt, Human herpesvirus 7
cuuacagcacuuug

SEQ ID NO: 176995 - RNA, 20 nt, Human herpesvirus 7
cuuacagugaaguaauuuau

SEQ ID NO: 176996 - RNA, 19 nt, Human herpesvirus 7
cuuaauaaaguuuaauucu

SEQ ID NO: 176997 - RNA, 16 nt, Human herpesvirus 7
cuuucuaaguacuucu

SEQ ID NO: 176998 - RNA, 13 nt, Human herpesvirus 7
cuuucucaucacu

SEQ ID NO: 176999 - RNA, 14 nt, Human herpesvirus 7
cuuucuaguuccca

SEQ ID NO: 177000 - RNA, 13 nt, Human herpesvirus 7
cuuucugacauug

SEQ ID NO: 177001 - RNA, 22 nt, Human herpesvirus 7
cuuucuucacgugugacuguug

SEQ ID NO: 177002 - RNA, 15 nt, Human herpesvirus 7
cuuugaaaacgaaag

SEQ ID NO: 177003 - RNA, 22 nt, Human herpesvirus 7
cuuucuucuagaaacuaaagaa

SEQ ID NO: 177004 - RNA, 13 nt, Human herpesvirus 7
cuuuccucacaga

SEQ ID NO: 177005 - RNA, 16 nt, Human herpesvirus 7
cuuucaugcauugcau

SEQ ID NO: 177006 - RNA, 18 nt, Human herpesvirus 7
cuuucaugcauugcauuc

SEQ ID NO: 177007 - RNA, 20 nt, Human herpesvirus 7
cuuucaugcauugcauucga

SEQ ID NO: 177008 - RNA, 21 nt, Human herpesvirus 7
cuuucauuauuuguucaaaau

SEQ ID NO: 177009 - RNA, 15 nt, Human herpesvirus 7
cuuuccaucaucacg

SEQ ID NO: 177010 - RNA, 17 nt, Human herpesvirus 7
cuuucaacgaucucaaa

SEQ ID NO: 177011 - RNA, 19 nt, Human herpesvirus 7
cuuucaauucaucaggaca

SEQ ID NO: 177012 - RNA, 18 nt, Human herpesvirus 7
cuuucacuacuacaugaa

SEQ ID NO: 177013 - RNA, 14 nt, Human herpesvirus 7
cuuucacuugaaua

SEQ ID NO: 177014 - RNA, 20 nt, Human herpesvirus 7
cuuuggugggucacguucua

SEQ ID NO: 177015 - RNA, 15 nt, Human herpesvirus 7
cuuugccuguuaaaa

SEQ ID NO: 177016 - RNA, 20 nt, Human herpesvirus 7
cuuugcuauuuaaucuaugc

SEQ ID NO: 177017 - RNA, 13 nt, Human herpesvirus 7
cuuugcugcaaca

SEQ ID NO: 177018 - RNA, 22 nt, Human herpesvirus 7
cuuugcauagauuaaauagcaa

SEQ ID NO: 177019 - RNA, 17 nt, Human herpesvirus 7
cuuugucuuugcucuca

SEQ ID NO: 177020 - RNA, 16 nt, Human herpesvirus 7
cuuugugagaaaugga

SEQ ID NO: 177021 - RNA, 16 nt, Human herpesvirus 7
cuuuguuugagacaau

SEQ ID NO: 177022 - RNA, 17 nt, Human herpesvirus 7
cuuuguuugagacaaua

SEQ ID NO: 177023 - RNA, 15 nt, Human herpesvirus 7
cuuuuaaaaccucgu

SEQ ID NO: 177024 - RNA, 18 nt, Human herpesvirus 7
cuuuuaacaacagccaaa

SEQ ID NO: 177025 - RNA, 15 nt, Human herpesvirus 7
cuuuuaaugaucucu

SEQ ID NO: 177026 - RNA, 16 nt, Human herpesvirus 7
cuuuugcuuuccauca

SEQ ID NO: 177027 - RNA, 14 nt, Human herpesvirus 7
cuuuuggaaugaua

SEQ ID NO: 177028 - RNA, 18 nt, Human herpesvirus 7
cuuuugcgagaaaauacu

SEQ ID NO: 177029 - RNA, 11 nt, Human herpesvirus 7
cuuuucaugcu

SEQ ID NO: 177030 - RNA, 21 nt, Human herpesvirus 7
cuuuucaggcuaugacuuuga

SEQ ID NO: 177031 - RNA, 19 nt, Human herpesvirus 7
cuuuucagugaagcuaaaa

SEQ ID NO: 177032 - RNA, 20 nt, Human herpesvirus 7
cuuuucaaugcaacuuuaau

SEQ ID NO: 177033 - RNA, 21 nt, Human herpesvirus 7
cuuuuauugguagauuuucua

SEQ ID NO: 177034 - RNA, 21 nt, Human herpesvirus 7
cuuuuaggggaagaaucaaga

SEQ ID NO: 177035 - RNA, 16 nt, Human herpesvirus 7
gaaaccagcuuuuauu

SEQ ID NO: 177036 - RNA, 18 nt, Human herpesvirus 7
gaaaccaauuaauauuaa

SEQ ID NO: 177037 - RNA, 16 nt, Human herpesvirus 7
gaaacaucuaugugcu

SEQ ID NO: 177038 - RNA, 22 nt, Human herpesvirus 7
gaaacaucuuuauauguguucg

SEQ ID NO: 177039 - RNA, 23 nt, Human herpesvirus 7
gaaacaagguuuaaaacauuuac

SEQ ID NO: 177040 - RNA, 11 nt, Human herpesvirus 7
gaaacauagcu

SEQ ID NO: 177041 - RNA, 20 nt, Human herpesvirus 7
gaaaauguuuuugcuagaaa

SEQ ID NO: 177042 - RNA, 22 nt, Human herpesvirus 7
gaaacaacacucugcauuccac

SEQ ID NO: 177043 - RNA, 20 nt, Human herpesvirus 7
gaaaauuuauauuugcuugc

SEQ ID NO: 177044 - RNA, 20 nt, Human herpesvirus 7
gaaaauuuauugagcaauug

SEQ ID NO: 177045 - RNA, 21 nt, Human herpesvirus 7
gaaaaguguacggauaugccu

SEQ ID NO: 177046 - RNA, 14 nt, Human herpesvirus 7
gaaaaucuccuuga

SEQ ID NO: 177047 - RNA, 16 nt, Human herpesvirus 7
gaaaaucuccuugaua

SEQ ID NO: 177048 - RNA, 13 nt, Human herpesvirus 7
gaaaaugaugguu

SEQ ID NO: 177049 - RNA, 19 nt, Human herpesvirus 7
gaaaaugaugguugcaaua

SEQ ID NO: 177050 - RNA, 12 nt, Human herpesvirus 7
gaaaaugcauug

SEQ ID NO: 177051 - RNA, 19 nt, Human herpesvirus 7
gaaagcaaaagccacagau

SEQ ID NO: 177052 - RNA, 22 nt, Human herpesvirus 7
gaaagcaaaagccacagauauu

SEQ ID NO: 177053 - RNA, 22 nt, Human herpesvirus 7
gaaagacgugagcaauacaccc

SEQ ID NO: 177054 - RNA, 15 nt, Human herpesvirus 7
gaaagcucauuucau

SEQ ID NO: 177055 - RNA, 13 nt, Human herpesvirus 7
gaaagcaauguau

SEQ ID NO: 177056 - RNA, 20 nt, Human herpesvirus 7
gaaagcaauguaugucaaau

SEQ ID NO: 177057 - RNA, 20 nt, Human herpesvirus 7
gaaacucguuuguguagaaa

SEQ ID NO: 177058 - RNA, 20 nt, Human herpesvirus 7
gaaagacaaacuauggugau

SEQ ID NO: 177059 - RNA, 13 nt, Human herpesvirus 7
gaaacuggcaaua

SEQ ID NO: 177060 - RNA, 15 nt, Human herpesvirus 7
gaaacgucaggaaaa

SEQ ID NO: 177061 - RNA, 17 nt, Human herpesvirus 7
gaaaaaaagauuuaaca

SEQ ID NO: 177062 - RNA, 14 nt, Human herpesvirus 7
gaaaaaaaguacaa

SEQ ID NO: 177063 - RNA, 20 nt, Human herpesvirus 7
gaaaaaaaugcuuagaaucu

SEQ ID NO: 177064 - RNA, 15 nt, Human herpesvirus 7
gaaaaaaacaaugaa

SEQ ID NO: 177065 - RNA, 19 nt, Human herpesvirus 7
cuuuuucuggaauguuggu

SEQ ID NO: 177066 - RNA, 14 nt, Human herpesvirus 7
gaaaacaaucaaua

SEQ ID NO: 177067 - RNA, 19 nt, Human herpesvirus 7
gaaaaauuaauugcagcuu

SEQ ID NO: 177068 - RNA, 18 nt, Human herpesvirus 7
gaaaaaugacaaaacugc

SEQ ID NO: 177069 - RNA, 20 nt, Human herpesvirus 7
gaaaaaugcugcaauguuca

SEQ ID NO: 177070 - RNA, 22 nt, Human herpesvirus 7
gaaaaauaucgauuuaacaaau

SEQ ID NO: 177071 - RNA, 12 nt, Human herpesvirus 7
gaaaaagcauaa

SEQ ID NO: 177072 - RNA, 11 nt, Human herpesvirus 7
gaaaaagccau

SEQ ID NO: 177073 - RNA, 17 nt, Human herpesvirus 7
gaaaaauaaacaauaua

SEQ ID NO: 177074 - RNA, 16 nt, Human herpesvirus 7
gaaaaauaaauacuau

SEQ ID NO: 177075 - RNA, 16 nt, Human herpesvirus 7
gaaaauaaaaguaaaa

SEQ ID NO: 177076 - RNA, 21 nt, Human herpesvirus 7
gaaaauauauuaaucuugaaa

SEQ ID NO: 177077 - RNA, 14 nt, Human herpesvirus 7
gaaaauauguugcu

SEQ ID NO: 177078 - RNA, 13 nt, Human herpesvirus 7
gaaaagauuucua

SEQ ID NO: 177079 - RNA, 18 nt, Human herpesvirus 7
gaaaacuuggaaaacaau

SEQ ID NO: 177080 - RNA, 15 nt, Human herpesvirus 7
gaaaaccuacuguua

SEQ ID NO: 177081 - RNA, 24 nt, Human herpesvirus 7
gaaaacugaauugguaauguuacu

SEQ ID NO: 177082 - RNA, 18 nt, Human herpesvirus 7
gaaaacugcaacuuugug

SEQ ID NO: 177083 - RNA, 16 nt, Human herpesvirus 7
gaaaacgcgauaaugu

SEQ ID NO: 177084 - RNA, 23 nt, Human herpesvirus 7
gaaaacaacacaaagccaaugag

SEQ ID NO: 177085 - RNA, 17 nt, Human herpesvirus 7
gaaauggguuugggaaa

SEQ ID NO: 177086 - RNA, 20 nt, Human herpesvirus 7
gaaaugguuaccuuuguuaa

SEQ ID NO: 177087 - RNA, 14 nt, Human herpesvirus 7
gaaaugagauuucu

SEQ ID NO: 177088 - RNA, 21 nt, Human herpesvirus 7
gaaaugagccugacagucacg

SEQ ID NO: 177089 - RNA, 22 nt, Human herpesvirus 7
gaaaucagauuaaagcuauuuu

SEQ ID NO: 177090 - RNA, 18 nt, Human herpesvirus 7
gaaaucgcuuauuuaaca

SEQ ID NO: 177091 - RNA, 18 nt, Human herpesvirus 7
gaaaugaaaagucuguga

SEQ ID NO: 177092 - RNA, 20 nt, Human herpesvirus 7
gaaaugaaaagucugugaca

SEQ ID NO: 177093 - RNA, 21 nt, Human herpesvirus 7
gaaagucagaacauugucaaa

SEQ ID NO: 177094 - RNA, 23 nt, Human herpesvirus 7
gaaagucaucugaggcuuggaga

SEQ ID NO: 177095 - RNA, 20 nt, Human herpesvirus 7
gaaagggcaugucugccucc

SEQ ID NO: 177096 - RNA, 17 nt, Human herpesvirus 7
gaaagcgcaaaggaaaa

SEQ ID NO: 177097 - RNA, 19 nt, Human herpesvirus 7
gaaauaugcuuccuaaaaa

SEQ ID NO: 177098 - RNA, 21 nt, Human herpesvirus 7
gaaauaauuagaaagcucacu

SEQ ID NO: 177099 - RNA, 15 nt, Human herpesvirus 7
gaaauaaacauuuca

SEQ ID NO: 177100 - RNA, 21 nt, Human herpesvirus 7
gaaauaaacauuucaaaauca

SEQ ID NO: 177101 - RNA, 23 nt, Human herpesvirus 7
gaagaggaguauguugcauauca

SEQ ID NO: 177102 - RNA, 13 nt, Human herpesvirus 7
gaagagacgauua

SEQ ID NO: 177103 - RNA, 23 nt, Human herpesvirus 7
gaagagacugucauaaucugauu

SEQ ID NO: 177104 - RNA, 17 nt, Human herpesvirus 7
gaagagccaaauaugga

SEQ ID NO: 177105 - RNA, 20 nt, Human herpesvirus 7
gaagcuuucguaaucauuca

SEQ ID NO: 177106 - RNA, 22 nt, Human herpesvirus 7
gaagcuuucguaaucauucaag

SEQ ID NO: 177107 - RNA, 17 nt, Human herpesvirus 7
gaagcuugcuagauucu

SEQ ID NO: 177108 - RNA, 22 nt, Human herpesvirus 7
gaagcuugcuuaaaacuuugaa

SEQ ID NO: 177109 - RNA, 17 nt, Human herpesvirus 7
gaagcuuuacagcagcc

SEQ ID NO: 177110 - RNA, 23 nt, Human herpesvirus 7
gaaggagagcccagucccaagag

SEQ ID NO: 177111 - RNA, 16 nt, Human herpesvirus 7
gaaggaugcguguguu

SEQ ID NO: 177112 - RNA, 18 nt, Human herpesvirus 7
gaaggaugcguguguuca

SEQ ID NO: 177113 - RNA, 14 nt, Human herpesvirus 7
gaagacuacauaaa

SEQ ID NO: 177114 - RNA, 16 nt, Human herpesvirus 7
gaagacaaaaccaaac

SEQ ID NO: 177115 - RNA, 18 nt, Human herpesvirus 7
gaagacaacgacuacagg

SEQ ID NO: 177116 - RNA, 15 nt, Human herpesvirus 7
gaagaaacagcugaa

SEQ ID NO: 177117 - RNA, 13 nt, Human herpesvirus 7
gaagaaacuugaa

SEQ ID NO: 177118 - RNA, 18 nt, Human herpesvirus 7
gaagaaacuugaaaauca

SEQ ID NO: 177119 - RNA, 22 nt, Human herpesvirus 7
gaagaacaacaacuaaaacuac

SEQ ID NO: 177120 - RNA, 16 nt, Human herpesvirus 7
gaagaacaacaugaaa

SEQ ID NO: 177121 - RNA, 13 nt, Human herpesvirus 7
gaagaacaagcaa

SEQ ID NO: 177122 - RNA, 14 nt, Human herpesvirus 7
gaagaacaagcaaa

SEQ ID NO: 177123 - RNA, 20 nt, Human herpesvirus 7
aaagauuuuguucuaucaag

SEQ ID NO: 177124 - RNA, 16 nt, Human herpesvirus 7
aaagcaaaagccacag

SEQ ID NO: 177125 - RNA, 17 nt, Human herpesvirus 7
aaagauuucuauugaau

SEQ ID NO: 177126 - RNA, 23 nt, Human herpesvirus 7
aaagauuucuauugaauguggaa

SEQ ID NO: 177127 - RNA, 16 nt, Human herpesvirus 7
aaagauugaucacuuu

SEQ ID NO: 177128 - RNA, 17 nt, Human herpesvirus 7
aaagauugcuugcacug

SEQ ID NO: 177129 - RNA, 14 nt, Human herpesvirus 7
gaauuggugcucaa

SEQ ID NO: 177130 - RNA, 16 nt, Human herpesvirus 7
gaauugaaauuucuaa

SEQ ID NO: 177131 - RNA, 17 nt, Human herpesvirus 7
aaagauccucugagaag

SEQ ID NO: 177132 - RNA, 17 nt, Human herpesvirus 7
aaagaucguuguuaaau

SEQ ID NO: 177133 - RNA, 16 nt, Human herpesvirus 7
aaagaucaaugcacac

SEQ ID NO: 177134 - RNA, 21 nt, Human herpesvirus 7
aaagauaccuucuuagccaga

SEQ ID NO: 177135 - RNA, 23 nt, Human herpesvirus 7
aaagaccuguacuguugcuaauu

SEQ ID NO: 177136 - RNA, 14 nt, Human herpesvirus 7
aaagaacaagagca

SEQ ID NO: 177137 - RNA, 12 nt, Human herpesvirus 7
aaagaaaaagca

SEQ ID NO: 177138 - RNA, 19 nt, Human herpesvirus 7
aaacuuggaaaacaaucaa

SEQ ID NO: 177139 - RNA, 13 nt, Human herpesvirus 7
aaagaaaaaaagu

SEQ ID NO: 177140 - RNA, 17 nt, Human herpesvirus 7
aaagacacuuauuugau

SEQ ID NO: 177141 - RNA, 19 nt, Human herpesvirus 7
aaagaccucgacauucucc

SEQ ID NO: 177142 - RNA, 16 nt, Human herpesvirus 7
aaagacauaacaaaaa

SEQ ID NO: 177143 - RNA, 10 nt, Human herpesvirus 7
aaagaacuua

SEQ ID NO: 177144 - RNA, 23 nt, Human herpesvirus 7
aaagaagaagaaaagaaaaagca

SEQ ID NO: 177145 - RNA, 15 nt, Human herpesvirus 7
aaagaagacauccga

SEQ ID NO: 177146 - RNA, 15 nt, Human herpesvirus 7
aaagaacauguagua

SEQ ID NO: 177147 - RNA, 20 nt, Human herpesvirus 7
aaagaacauuuuucuugcuu

SEQ ID NO: 177148 - RNA, 21 nt, Human herpesvirus 7
aaagaacauuuuucuugcuug

SEQ ID NO: 177149 - RNA, 21 nt, Human herpesvirus 7
aaagaaccuaucaaaauucca

SEQ ID NO: 177150 - RNA, 21 nt, Human herpesvirus 7
aaagaaugcuaaaguuaacau

SEQ ID NO: 177151 - RNA, 16 nt, Human herpesvirus 7
gaauucauuugugaaa

SEQ ID NO: 177152 - RNA, 15 nt, Human herpesvirus 7
gaauuccgauuuaag

SEQ ID NO: 177153 - RNA, 15 nt, Human herpesvirus 7
gaauucaacaccagu

SEQ ID NO: 177154 - RNA, 20 nt, Human herpesvirus 7
gaauggcgguuguacuguaa

SEQ ID NO: 177155 - RNA, 14 nt, Human herpesvirus 7
gaauguacacagcu

SEQ ID NO: 177156 - RNA, 20 nt, Human herpesvirus 7
gaauguucgcaaauguacaa

SEQ ID NO: 177157 - RNA, 23 nt, Human herpesvirus 7
gaagguauuuugauaauuuacaa

SEQ ID NO: 177158 - RNA, 13 nt, Human herpesvirus 7
gaaugcaagcaac

SEQ ID NO: 177159 - RNA, 22 nt, Human herpesvirus 7
gaaugccagaaauuaaauacaa

SEQ ID NO: 177160 - RNA, 15 nt, Human herpesvirus 7
gaaugaacaaauaau

SEQ ID NO: 177161 - RNA, 20 nt, Human herpesvirus 7
gaaucuuuauuauuuacuga

SEQ ID NO: 177162 - RNA, 23 nt, Human herpesvirus 7
gaaucuuuauuauuuacugauuc

SEQ ID NO: 177163 - RNA, 22 nt, Human herpesvirus 7
gaaucuuugacuguaucuccaa

SEQ ID NO: 177164 - RNA, 19 nt, Human herpesvirus 7
gaguauaacucaaaagaca

SEQ ID NO: 177165 - RNA, 23 nt, Human herpesvirus 7
gaguauacaaaagacauaacaaa

SEQ ID NO: 177166 - RNA, 13 nt, Human herpesvirus 7
gaguacgucuuuu

SEQ ID NO: 177167 - RNA, 13 nt, Human herpesvirus 7
gagucgucuugca

SEQ ID NO: 177168 - RNA, 19 nt, Human herpesvirus 7
gagucguucuauguaugaa

SEQ ID NO: 177169 - RNA, 15 nt, Human herpesvirus 7
gagcugauucugcca

SEQ ID NO: 177170 - RNA, 20 nt, Human herpesvirus 7
gagcuguguccacuacagau

SEQ ID NO: 177171 - RNA, 20 nt, Human herpesvirus 7
gauaucuuaaaaacaauggu

SEQ ID NO: 177172 - RNA, 12 nt, Human herpesvirus 7
gauaugacaaau

SEQ ID NO: 177173 - RNA, 20 nt, Human herpesvirus 7
gauaugacaaauuucaggaa

SEQ ID NO: 177174 - RNA, 18 nt, Human herpesvirus 7
gauauuaguuucaaccac

SEQ ID NO: 177175 - RNA, 20 nt, Human herpesvirus 7
gauauuugguacuguagaua

SEQ ID NO: 177176 - RNA, 17 nt, Human herpesvirus 7
gaucaaaagcugcagcu

SEQ ID NO: 177177 - RNA, 19 nt, Human herpesvirus 7
gauauauuggcaugcuuac

SEQ ID NO: 177178 - RNA, 20 nt, Human herpesvirus 7
gauauauuggcaugcuuaca

SEQ ID NO: 177179 - RNA, 20 nt, Human herpesvirus 7
gauauaagaugauagccaua

SEQ ID NO: 177180 - RNA, 22 nt, Human herpesvirus 7
gauagcggucaucucacuucag

SEQ ID NO: 177181 - RNA, 17 nt, Human herpesvirus 7
gaguucugacuaaagcu

SEQ ID NO: 177182 - RNA, 12 nt, Human herpesvirus 7
gaguuguggcaa

SEQ ID NO: 177183 - RNA, 16 nt, Human herpesvirus 7
gaguguuuaucugugu

SEQ ID NO: 177184 - RNA, 15 nt, Human herpesvirus 7
gaguguggugacaga

SEQ ID NO: 177185 - RNA, 19 nt, Human herpesvirus 7
gaguuagcgaggcauuuac

SEQ ID NO: 177186 - RNA, 23 nt, Human herpesvirus 7
gaguguuaauuaaaguugcauug

SEQ ID NO: 177187 - RNA, 22 nt, Human herpesvirus 7
gauaaauuacacucuguuacuu

SEQ ID NO: 177188 - RNA, 20 nt, Human herpesvirus 7
gauaaaaaaagaaaagagaa

SEQ ID NO: 177189 - RNA, 19 nt, Human herpesvirus 7
gaguuugucucauugacau

SEQ ID NO: 177190 - RNA, 20 nt, Human herpesvirus 7
gauagcauuuguuacagcuu

SEQ ID NO: 177191 - RNA, 12 nt, Human herpesvirus 7
gagcaaugcaug

SEQ ID NO: 177192 - RNA, 21 nt, Human herpesvirus 7
gagcaauguaugugcaucaca

SEQ ID NO: 177193 - RNA, 18 nt, Human herpesvirus 7
gagcauuauuggauaaua

SEQ ID NO: 177194 - RNA, 14 nt, Human herpesvirus 7
gagcauucaugccu

SEQ ID NO: 177195 - RNA, 15 nt, Human herpesvirus 7
gagcauucaugccua

SEQ ID NO: 177196 - RNA, 19 nt, Human herpesvirus 7
gagcaucuagcuuguuaaa

SEQ ID NO: 177197 - RNA, 17 nt, Human herpesvirus 7
gagauaguucgcaaugg

SEQ ID NO: 177198 - RNA, 19 nt, Human herpesvirus 7
gagauaguucgcaauggua

SEQ ID NO: 177199 - RNA, 13 nt, Human herpesvirus 7
aacaaacauucca

SEQ ID NO: 177200 - RNA, 14 nt, Human herpesvirus 7
aacaaacauuccaa

SEQ ID NO: 177201 - RNA, 19 nt, Human herpesvirus 7
aacaaauguuuacgaauau

SEQ ID NO: 177202 - RNA, 15 nt, Human herpesvirus 7
aacaaauuaaauacu

SEQ ID NO: 177203 - RNA, 18 nt, Human herpesvirus 7
aacaaauuaaauacuugc

SEQ ID NO: 177204 - RNA, 23 nt, Human herpesvirus 7
aacaaauuguggagagauucaaa

SEQ ID NO: 177205 - RNA, 17 nt, Human herpesvirus 7
aacaaauccacucuggc

SEQ ID NO: 177206 - RNA, 19 nt, Human herpesvirus 7
aacaaauccacucuggcac

SEQ ID NO: 177207 - RNA, 23 nt, Human herpesvirus 7
aacaaaggaucgaucucugucaa

SEQ ID NO: 177208 - RNA, 23 nt, Human herpesvirus 7
aacaacaacuaaaacuacauuua

SEQ ID NO: 177209 - RNA, 17 nt, Human herpesvirus 7
gagaauguucgcaaaug

SEQ ID NO: 177210 - RNA, 20 nt, Human herpesvirus 7
gagaauguucuaucaagaua

SEQ ID NO: 177211 - RNA, 18 nt, Human herpesvirus 7
gagacaagaggacaguca

SEQ ID NO: 177212 - RNA, 18 nt, Human herpesvirus 7
gagaacgaagaauuaaua

SEQ ID NO: 177213 - RNA, 23 nt, Human herpesvirus 7
gacguaacaacagcagcugcuaa

SEQ ID NO: 177214 - RNA, 13 nt, Human herpesvirus 7
gagaaccacguga

SEQ ID NO: 177215 - RNA, 14 nt, Human herpesvirus 7
gagaaccacgugac

SEQ ID NO: 177216 - RNA, 22 nt, Human herpesvirus 7
gagaaccggacccggacuuuga

SEQ ID NO: 177217 - RNA, 21 nt, Human herpesvirus 7
gacgauuaugucuaaggaaug

SEQ ID NO: 177218 - RNA, 13 nt, Human herpesvirus 7
aaauuucauuuaa

SEQ ID NO: 177219 - RNA, 16 nt, Human herpesvirus 7
aaauuugacauuugca

SEQ ID NO: 177220 - RNA, 20 nt, Human herpesvirus 7
aaauuuagcaccaacugaau

SEQ ID NO: 177221 - RNA, 18 nt, Human herpesvirus 7
aaauuuaaaccgagugua

SEQ ID NO: 177222 - RNA, 19 nt, Human herpesvirus 7
aaauuuaaauacugagaga

SEQ ID NO: 177223 - RNA, 16 nt, Human herpesvirus 7
gacgcuaauuugcaua

SEQ ID NO: 177224 - RNA, 19 nt, Human herpesvirus 7
aaauuuuacagccuguaca

SEQ ID NO: 177225 - RNA, 20 nt, Human herpesvirus 7
aaauuuuagacgcaccuuaa

SEQ ID NO: 177226 - RNA, 22 nt, Human herpesvirus 7
aaauuuugaauguuuacaugua

SEQ ID NO: 177227 - RNA, 14 nt, Human herpesvirus 7
aaauuuuacaaaga

SEQ ID NO: 177228 - RNA, 15 nt, Human herpesvirus 7
aacaaaacaguuugu

SEQ ID NO: 177229 - RNA, 13 nt, Human herpesvirus 7
aacaaaauuccaa

SEQ ID NO: 177230 - RNA, 21 nt, Human herpesvirus 7
aaauucaacaucuuucauaac

SEQ ID NO: 177231 - RNA, 22 nt, Human herpesvirus 7
aaauucaacaucuuucauaaca

SEQ ID NO: 177232 - RNA, 15 nt, Human herpesvirus 7
aaauucaaccacaga

SEQ ID NO: 177233 - RNA, 23 nt, Human herpesvirus 7
aaauucaaccacagacacaccau

SEQ ID NO: 177234 - RNA, 22 nt, Human herpesvirus 7
aaauuaugcguuaaugucucug

SEQ ID NO: 177235 - RNA, 18 nt, Human herpesvirus 7
aaauuauacuagcagauc

SEQ ID NO: 177236 - RNA, 20 nt, Human herpesvirus 7
aaauuauacuagcagaucuc

SEQ ID NO: 177237 - RNA, 19 nt, Human herpesvirus 7
aaauuauuaauauuaguau

SEQ ID NO: 177238 - RNA, 17 nt, Human herpesvirus 7
aaauuauuagauuccau

SEQ ID NO: 177239 - RNA, 15 nt, Human herpesvirus 7
aaauugaaaagaaga

SEQ ID NO: 177240 - RNA, 14 nt, Human herpesvirus 7
aaauugaaccuuaa

SEQ ID NO: 177241 - RNA, 22 nt, Human herpesvirus 7
aaauugaaccuuaacauacuga

SEQ ID NO: 177242 - RNA, 12 nt, Human herpesvirus 7
aaauucuaauau

SEQ ID NO: 177243 - RNA, 14 nt, Human herpesvirus 7
aaauucauccaaaa

SEQ ID NO: 177244 - RNA, 15 nt, Human herpesvirus 7
aaauuccauacaaag

SEQ ID NO: 177245 - RNA, 21 nt, Human herpesvirus 7
aaauuguuccugugugcaaug

SEQ ID NO: 177246 - RNA, 23 nt, Human herpesvirus 7
aaauuguuccugugugcaaugau

SEQ ID NO: 177247 - RNA, 19 nt, Human herpesvirus 7
aaauuggacuuggcucuua

SEQ ID NO: 177248 - RNA, 17 nt, Human herpesvirus 7
aaauuguaaauucucca

SEQ ID NO: 177249 - RNA, 15 nt, Human herpesvirus 7
aaauugacaccguuu

SEQ ID NO: 177250 - RNA, 12 nt, Human herpesvirus 7
aaauuaauucaa

SEQ ID NO: 177251 - RNA, 20 nt, Human herpesvirus 7
aaauuaauucaaucaccaaa

SEQ ID NO: 177252 - RNA, 21 nt, Human herpesvirus 7
aaauuaauucaaucaccaaag

SEQ ID NO: 177253 - RNA, 22 nt, Human herpesvirus 7
aaauuaauucaaucaccaaaga

SEQ ID NO: 177254 - RNA, 13 nt, Human herpesvirus 7
aaauuacaguaca

SEQ ID NO: 177255 - RNA, 14 nt, Human herpesvirus 7
aaauuacaguacaa

SEQ ID NO: 177256 - RNA, 20 nt, Human herpesvirus 7
aaauguuuuugcuagaaacc

SEQ ID NO: 177257 - RNA, 22 nt, Human herpesvirus 7
aaauuacuugcuaugcuugaaa

SEQ ID NO: 177258 - RNA, 22 nt, Human herpesvirus 7
aaauuagacgcuuugagucuca

SEQ ID NO: 177259 - RNA, 18 nt, Human herpesvirus 7
aaauuaaauacuugcaau

SEQ ID NO: 177260 - RNA, 21 nt, Human herpesvirus 7
aaaugugucuuacaacuagaa

SEQ ID NO: 177261 - RNA, 11 nt, Human herpesvirus 7
aaaugugcuaa

SEQ ID NO: 177262 - RNA, 19 nt, Human herpesvirus 7
aaauguguaacaauugagu

SEQ ID NO: 177263 - RNA, 20 nt, Human herpesvirus 7
aaauccuaaauuuccuuuau

SEQ ID NO: 177264 - RNA, 13 nt, Human herpesvirus 7
aaaugaaguuugu

SEQ ID NO: 177265 - RNA, 12 nt, Human herpesvirus 7
aaaugugccaau

SEQ ID NO: 177266 - RNA, 22 nt, Human herpesvirus 7
aaaugugcgaagguugucuguu

SEQ ID NO: 177267 - RNA, 15 nt, Human herpesvirus 7
aaaucuugcaagcag

SEQ ID NO: 177268 - RNA, 13 nt, Human herpesvirus 7
aaaucuuugaauc

SEQ ID NO: 177269 - RNA, 23 nt, Human herpesvirus 7
aaaucuuuuauaaauaguuucau

SEQ ID NO: 177270 - RNA, 13 nt, Human herpesvirus 7
aaaugaaauauuc

SEQ ID NO: 177271 - RNA, 14 nt, Human herpesvirus 7
aaaucuccuugaua

SEQ ID NO: 177272 - RNA, 16 nt, Human herpesvirus 7
aaaucugauaaauuac

SEQ ID NO: 177273 - RNA, 17 nt, Human herpesvirus 7
aaaucgcuuauuuaaca

SEQ ID NO: 177274 - RNA, 18 nt, Human herpesvirus 7
aaaucuaauuuaugauac

SEQ ID NO: 177275 - RNA, 19 nt, Human herpesvirus 7
aaaucuaauuuaugauacu

SEQ ID NO: 177276 - RNA, 13 nt, Human herpesvirus 7
gaauuuagauuaa

SEQ ID NO: 177277 - RNA, 15 nt, Human herpesvirus 7
gaauuuagauuaaua

SEQ ID NO: 177278 - RNA, 13 nt, Human herpesvirus 7
gaauuuaaucaua

SEQ ID NO: 177279 - RNA, 19 nt, Human herpesvirus 7
gacaaaacaagaagcgaga

SEQ ID NO: 177280 - RNA, 13 nt, Human herpesvirus 7
gacaaaaccaaac

SEQ ID NO: 177281 - RNA, 19 nt, Human herpesvirus 7
gaauuuguaucuaugacag

SEQ ID NO: 177282 - RNA, 13 nt, Human herpesvirus 7
gaauuuguucaau

SEQ ID NO: 177283 - RNA, 19 nt, Human herpesvirus 7
gaauuugauuccaucucac

SEQ ID NO: 177284 - RNA, 22 nt, Human herpesvirus 7
gaauuuucugcuuuaagugaua

SEQ ID NO: 177285 - RNA, 17 nt, Human herpesvirus 7
gacaacaaagcaugaaa

SEQ ID NO: 177286 - RNA, 17 nt, Human herpesvirus 7
gacaacgacuacaggaa

SEQ ID NO: 177287 - RNA, 19 nt, Human herpesvirus 7
gacaacgguauacauuaau

SEQ ID NO: 177288 - RNA, 21 nt, Human herpesvirus 7
gacaacucaauaaaaaugucu

SEQ ID NO: 177289 - RNA, 23 nt, Human herpesvirus 7
gacaacucaauaaaaaugucucu

SEQ ID NO: 177290 - RNA, 21 nt, Human herpesvirus 7
gacaguccauuccguuuuaaa

SEQ ID NO: 177291 - RNA, 15 nt, Human herpesvirus 7
gacauguuucuggau

SEQ ID NO: 177292 - RNA, 23 nt, Human herpesvirus 7
aaaucaaaguuuuaaaguaugcu

SEQ ID NO: 177293 - RNA, 15 nt, Human herpesvirus 7
aaaucaaccagauuu

SEQ ID NO: 177294 - RNA, 11 nt, Human herpesvirus 7
aaauacaauag

SEQ ID NO: 177295 - RNA, 22 nt, Human herpesvirus 7
aaauacaacuucuacuaauaca

SEQ ID NO: 177296 - RNA, 13 nt, Human herpesvirus 7
aaauaaugaagga

SEQ ID NO: 177297 - RNA, 19 nt, Human herpesvirus 7
aaauaaccaaaccacagau

SEQ ID NO: 177298 - RNA, 21 nt, Human herpesvirus 7
aaauaacugguaucaugaacc

SEQ ID NO: 177299 - RNA, 11 nt, Human herpesvirus 7
aaauaaauuca

SEQ ID NO: 177300 - RNA, 18 nt, Human herpesvirus 7
gacauugaagcuauuaaa

SEQ ID NO: 177301 - RNA, 17 nt, Human herpesvirus 7
gaccaauucuuuuacaa

SEQ ID NO: 177302 - RNA, 20 nt, Human herpesvirus 7
ggccuguuucuugauguaac

SEQ ID NO: 177303 - RNA, 17 nt, Human herpesvirus 7
ggcuuaagcagcagaca

SEQ ID NO: 177304 - RNA, 20 nt, Human herpesvirus 7
ggaauuugauuccaucucac

SEQ ID NO: 177305 - RNA, 13 nt, Human herpesvirus 7
ggacaguuugcaa

SEQ ID NO: 177306 - RNA, 16 nt, Human herpesvirus 7
ggacaguuugcaacaa

SEQ ID NO: 177307 - RNA, 20 nt, Human herpesvirus 7
ggaugauguuauacauaaag

SEQ ID NO: 177308 - RNA, 19 nt, Human herpesvirus 7
ggaugcuggaaaacauuuc

SEQ ID NO: 177309 - RNA, 18 nt, Human herpesvirus 7
ggauggcguguccauuca

SEQ ID NO: 177310 - RNA, 22 nt, Human herpesvirus 7
ggcagaaaugucuuuugauaag

SEQ ID NO: 177311 - RNA, 18 nt, Human herpesvirus 7
ggcagaccuaaacccaga

SEQ ID NO: 177312 - RNA, 11 nt, Human herpesvirus 7
ggauucuuuga

SEQ ID NO: 177313 - RNA, 16 nt, Human herpesvirus 7
ggauuugaagguugcc

SEQ ID NO: 177314 - RNA, 18 nt, Human herpesvirus 7
ggauuugaagguugccaa

SEQ ID NO: 177315 - RNA, 15 nt, Human herpesvirus 7
ggauuuacauuucau

SEQ ID NO: 177316 - RNA, 16 nt, Human herpesvirus 7
ggauuuuauccauuug

SEQ ID NO: 177317 - RNA, 19 nt, Human herpesvirus 7
ggcauauaugaaucaaauu

SEQ ID NO: 177318 - RNA, 20 nt, Human herpesvirus 7
gcuaucucuacaaacagaag

SEQ ID NO: 177319 - RNA, 14 nt, Human herpesvirus 7
gcuaugacuuugaa

SEQ ID NO: 177320 - RNA, 14 nt, Human herpesvirus 7
gcucuaaacaaaca

SEQ ID NO: 177321 - RNA, 16 nt, Human herpesvirus 7
gcuagauugacuauga

SEQ ID NO: 177322 - RNA, 17 nt, Human herpesvirus 7
gcuagauugacuaugaa

SEQ ID NO: 177323 - RNA, 20 nt, Human herpesvirus 7
gcuagaaacgucccugugac

SEQ ID NO: 177324 - RNA, 12 nt, Human herpesvirus 7
gcuagaaugugu

SEQ ID NO: 177325 - RNA, 20 nt, Human herpesvirus 7
gcuagccuauaauucucaca

SEQ ID NO: 177326 - RNA, 18 nt, Human herpesvirus 7
gcugcaucuuuucaguga

SEQ ID NO: 177327 - RNA, 19 nt, Human herpesvirus 7
gcugcaucuuuucagugaa

SEQ ID NO: 177328 - RNA, 13 nt, Human herpesvirus 7
gcugcagcugaaa

SEQ ID NO: 177329 - RNA, 18 nt, Human herpesvirus 7
gcuguacugaaaccaaag

SEQ ID NO: 177330 - RNA, 13 nt, Human herpesvirus 7
gcugaaacaucaa

SEQ ID NO: 177331 - RNA, 15 nt, Human herpesvirus 7
gcugaaacaucaauu

SEQ ID NO: 177332 - RNA, 17 nt, Human herpesvirus 7
gcugaacucugucauca

SEQ ID NO: 177333 - RNA, 17 nt, Human herpesvirus 7
gcugaaauaaauucaag

SEQ ID NO: 177334 - RNA, 15 nt, Human herpesvirus 7
gcugaagaacauuaa

SEQ ID NO: 177335 - RNA, 17 nt, Human herpesvirus 7
gcucuuuacaaaauuca

SEQ ID NO: 177336 - RNA, 17 nt, Human herpesvirus 7
gcucugucuccaaauca

SEQ ID NO: 177337 - RNA, 18 nt, Human herpesvirus 7
gcucuagaaaaucuacca

SEQ ID NO: 177338 - RNA, 22 nt, Human herpesvirus 7
gcucuaugccggccgggugcug

SEQ ID NO: 177339 - RNA, 14 nt, Human herpesvirus 7
gcucucuggccaga

SEQ ID NO: 177340 - RNA, 13 nt, Human herpesvirus 7
gcucucagauuag

SEQ ID NO: 177341 - RNA, 21 nt, Human herpesvirus 7
gcuuaaaaaauacauugaaua

SEQ ID NO: 177342 - RNA, 14 nt, Human herpesvirus 7
gcuuaaaacuuuga

SEQ ID NO: 177343 - RNA, 15 nt, Human herpesvirus 7
gcuuaaaacuuugaa

SEQ ID NO: 177344 - RNA, 22 nt, Human herpesvirus 7
gcuuaaaauuuuacgaugacag

SEQ ID NO: 177345 - RNA, 18 nt, Human herpesvirus 7
gcuguugguuaugcacau

SEQ ID NO: 177346 - RNA, 13 nt, Human herpesvirus 7
gcuuacacuauuc

SEQ ID NO: 177347 - RNA, 14 nt, Human herpesvirus 7
gcuuagacuuauca

SEQ ID NO: 177348 - RNA, 20 nt, Human herpesvirus 7
gcuuagaugcugaaacauca

SEQ ID NO: 177349 - RNA, 22 nt, Human herpesvirus 7
gcuuacagugaaguaauuuaug

SEQ ID NO: 177350 - RNA, 14 nt, Human herpesvirus 7
gcuuuauaugucaa

SEQ ID NO: 177351 - RNA, 19 nt, Human herpesvirus 7
gcuugcuuaaaacuuugaa

SEQ ID NO: 177352 - RNA, 15 nt, Human herpesvirus 7
gcuugcuuugcauag

SEQ ID NO: 177353 - RNA, 23 nt, Human herpesvirus 7
gcuuuucaggcuaugacuuugaa

SEQ ID NO: 177354 - RNA, 17 nt, Human herpesvirus 7
gcuuuacgaaacaauuu

SEQ ID NO: 177355 - RNA, 19 nt, Human herpesvirus 7
gcuuucacuacuacaugaa

SEQ ID NO: 177356 - RNA, 15 nt, Human herpesvirus 7
gcuuucaugauuuca

SEQ ID NO: 177357 - RNA, 17 nt, Human herpesvirus 7
gcuuucaugauuucaau

SEQ ID NO: 177358 - RNA, 18 nt, Human herpesvirus 7
gcuuuuagaaaucuuuca

SEQ ID NO: 177359 - RNA, 16 nt, Human herpesvirus 7
ggaaaaaggauuugaa

SEQ ID NO: 177360 - RNA, 14 nt, Human herpesvirus 7
ggaaaacauuucag

SEQ ID NO: 177361 - RNA, 18 nt, Human herpesvirus 7
ggaaaauggagcauuauu

SEQ ID NO: 177362 - RNA, 17 nt, Human herpesvirus 7
ggaaaugaugauguaug

SEQ ID NO: 177363 - RNA, 16 nt, Human herpesvirus 7
ggaaauugcuuucuaa

SEQ ID NO: 177364 - RNA, 15 nt, Human herpesvirus 7
ggaacagauucucca

SEQ ID NO: 177365 - RNA, 18 nt, Human herpesvirus 7
ggaauuauacacugugaa

SEQ ID NO: 177366 - RNA, 23 nt, Human herpesvirus 7
ggaaucuauaguuuguauuucau

SEQ ID NO: 177367 - RNA, 14 nt, Human herpesvirus 7
ggaaguaaacaaaa

SEQ ID NO: 177368 - RNA, 15 nt, Human herpesvirus 7
ggaagcacaaaucaa

SEQ ID NO: 177369 - RNA, 15 nt, Human herpesvirus 7
ggaagagacugucau

SEQ ID NO: 177370 - RNA, 19 nt, Human herpesvirus 7
ggaagcuuuacagcagccu

SEQ ID NO: 177371 - RNA, 15 nt, Human herpesvirus 7
ggaagauuugacaaa

SEQ ID NO: 177372 - RNA, 20 nt, Human herpesvirus 7
gcacaggcugcaucuuuuca

SEQ ID NO: 177373 - RNA, 21 nt, Human herpesvirus 7
gcacauaaguugacaauguca

SEQ ID NO: 177374 - RNA, 22 nt, Human herpesvirus 7
gcacauaaguugacaaugucaa

SEQ ID NO: 177375 - RNA, 14 nt, Human herpesvirus 7
gcacaaucacguga

SEQ ID NO: 177376 - RNA, 15 nt, Human herpesvirus 7
gcacaaucacgugau

SEQ ID NO: 177377 - RNA, 11 nt, Human herpesvirus 7
gcacacaacag

SEQ ID NO: 177378 - RNA, 14 nt, Human herpesvirus 7
gcacacguacaaua

SEQ ID NO: 177379 - RNA, 17 nt, Human herpesvirus 7
gcacacguacaauauua

SEQ ID NO: 177380 - RNA, 20 nt, Human herpesvirus 7
gcaauuguaaaaauaaagac

SEQ ID NO: 177381 - RNA, 16 nt, Human herpesvirus 7
gcaauguauauaagca

SEQ ID NO: 177382 - RNA, 15 nt, Human herpesvirus 7
gcaauuuucuuaacg

SEQ ID NO: 177383 - RNA, 22 nt, Human herpesvirus 7
gcaauuguuugauuaauuucca

SEQ ID NO: 177384 - RNA, 15 nt, Human herpesvirus 7
gcaccgaaaauggua

SEQ ID NO: 177385 - RNA, 19 nt, Human herpesvirus 7
gcaccaaaaaauaaaaaca

SEQ ID NO: 177386 - RNA, 13 nt, Human herpesvirus 7
gaucaaugcacac

SEQ ID NO: 177387 - RNA, 15 nt, Human herpesvirus 7
gaucacuuugcauca

SEQ ID NO: 177388 - RNA, 15 nt, Human herpesvirus 7
gaucacguuuugcaa

SEQ ID NO: 177389 - RNA, 14 nt, Human herpesvirus 7
gaucauaauuacau

SEQ ID NO: 177390 - RNA, 18 nt, Human herpesvirus 7
gaucauaauuacauugca

SEQ ID NO: 177391 - RNA, 20 nt, Human herpesvirus 7
gaucauaauuacauugcagu

SEQ ID NO: 177392 - RNA, 20 nt, Human herpesvirus 7
gaucauuugcauguugcuag

SEQ ID NO: 177393 - RNA, 20 nt, Human herpesvirus 7
gcaagaaaguccaaagugau

SEQ ID NO: 177394 - RNA, 22 nt, Human herpesvirus 7
gcaacuuugugccugaaauauu

SEQ ID NO: 177395 - RNA, 21 nt, Human herpesvirus 7
gcaagaaggccacgcuguaaa

SEQ ID NO: 177396 - RNA, 23 nt, Human herpesvirus 7
gcaauacaaauuccugcuugcac

SEQ ID NO: 177397 - RNA, 20 nt, Human herpesvirus 7
gcaaugauguuugcauugaa

SEQ ID NO: 177398 - RNA, 13 nt, Human herpesvirus 7
gcaagcaacacuu

SEQ ID NO: 177399 - RNA, 17 nt, Human herpesvirus 7
gcaagucacaauuacac

SEQ ID NO: 177400 - RNA, 18 nt, Human herpesvirus 7
gcagacuaaucacgagaa

SEQ ID NO: 177401 - RNA, 13 nt, Human herpesvirus 7
gcagaaaaaucca

SEQ ID NO: 177402 - RNA, 16 nt, Human herpesvirus 7
gcacuuagcuaauuga

SEQ ID NO: 177403 - RNA, 23 nt, Human herpesvirus 7
gcagugugaccgaauucgcgcga

SEQ ID NO: 177404 - RNA, 21 nt, Human herpesvirus 7
gcagccauguugcgugcacuu

SEQ ID NO: 177405 - RNA, 17 nt, Human herpesvirus 7
gcaggaagcacaaauca

SEQ ID NO: 177406 - RNA, 14 nt, Human herpesvirus 7
gcagcuugaugaau

SEQ ID NO: 177407 - RNA, 20 nt, Human herpesvirus 7
gcagcuugaugaaucaaaau

SEQ ID NO: 177408 - RNA, 15 nt, Human herpesvirus 7
gcccugccaauuuuu

SEQ ID NO: 177409 - RNA, 18 nt, Human herpesvirus 7
gccggggacauuccucau

SEQ ID NO: 177410 - RNA, 21 nt, Human herpesvirus 7
gccucguaguucuacuuggga

SEQ ID NO: 177411 - RNA, 22 nt, Human herpesvirus 7
gccguacuuguaugcuauuaaa

SEQ ID NO: 177412 - RNA, 20 nt, Human herpesvirus 7
gcgaguccaaaaguuguuaa

SEQ ID NO: 177413 - RNA, 17 nt, Human herpesvirus 7
gcgcaaaaaucuuuuau

SEQ ID NO: 177414 - RNA, 19 nt, Human herpesvirus 7
gcgaauuuuaucauuucaa

SEQ ID NO: 177415 - RNA, 19 nt, Human herpesvirus 7
gcgagaaaauacuacaguu

SEQ ID NO: 177416 - RNA, 17 nt, Human herpesvirus 7
gcgaaagccacuguuga

SEQ ID NO: 177417 - RNA, 16 nt, Human herpesvirus 7
gcgaaacaauacauga

SEQ ID NO: 177418 - RNA, 16 nt, Human herpesvirus 7
gccugcguuugaaugu

SEQ ID NO: 177419 - RNA, 18 nt, Human herpesvirus 7
gccaaaaucuauauuuga

SEQ ID NO: 177420 - RNA, 19 nt, Human herpesvirus 7
gcauuuuuaaaacaagaca

SEQ ID NO: 177421 - RNA, 18 nt, Human herpesvirus 7
gccaaaaaaacacaguau

SEQ ID NO: 177422 - RNA, 12 nt, Human herpesvirus 7
gcauauggacuu

SEQ ID NO: 177423 - RNA, 17 nt, Human herpesvirus 7
gcauauggacuuaucaa

SEQ ID NO: 177424 - RNA, 13 nt, Human herpesvirus 7
gcaucaagaaaca

SEQ ID NO: 177425 - RNA, 15 nt, Human herpesvirus 7
gcaucaagaaacaag

SEQ ID NO: 177426 - RNA, 16 nt, Human herpesvirus 7
gcaucaaaacauauca

SEQ ID NO: 177427 - RNA, 14 nt, Human herpesvirus 7
gcauaaaaaaucua

SEQ ID NO: 177428 - RNA, 13 nt, Human herpesvirus 7
gcauaaagcacca

SEQ ID NO: 177429 - RNA, 17 nt, Human herpesvirus 7
gcauaaagcaccaaaaa

SEQ ID NO: 177430 - RNA, 14 nt, Human herpesvirus 7
gcauaacccacuaa

SEQ ID NO: 177431 - RNA, 14 nt, Human herpesvirus 7
gcauacaguuuauu

SEQ ID NO: 177432 - RNA, 18 nt, Human herpesvirus 7
gcauacaguuuauuugaa

SEQ ID NO: 177433 - RNA, 16 nt, Human herpesvirus 7
gccaauaaaucuucau

SEQ ID NO: 177434 - RNA, 17 nt, Human herpesvirus 7
gccacuguugaugauuu

SEQ ID NO: 177435 - RNA, 13 nt, Human herpesvirus 7
gccagaaaucugg

SEQ ID NO: 177436 - RNA, 18 nt, Human herpesvirus 7
gccaaugaacaaguuuca

SEQ ID NO: 177437 - RNA, 17 nt, Human herpesvirus 7
gccagcagugugaccga

SEQ ID NO: 177438 - RNA, 18 nt, Human herpesvirus 7
gccagggacggagcaaug

SEQ ID NO: 177439 - RNA, 19 nt, Human herpesvirus 7
gccauuuucuugagccuug

SEQ ID NO: 177440 - RNA, 21 nt, Human herpesvirus 7
cagugcucuuugucuuugcuc

SEQ ID NO: 177441 - RNA, 14 nt, Human herpesvirus 7
caguuucugcauac

SEQ ID NO: 177442 - RNA, 15 nt, Human herpesvirus 7
caguucuaucucaaa

SEQ ID NO: 177443 - RNA, 16 nt, Human herpesvirus 7
caguucuaucucaaaa

SEQ ID NO: 177444 - RNA, 21 nt, Human herpesvirus 7
caguugaauucguuaagcacc

SEQ ID NO: 177445 - RNA, 22 nt, Human herpesvirus 7
caguuauaugaaauuucaaaaa

SEQ ID NO: 177446 - RNA, 23 nt, Human herpesvirus 7
caguguuuuuuucugguaaaaag

SEQ ID NO: 177447 - RNA, 17 nt, Human herpesvirus 7
caguguuuaaaauguua

SEQ ID NO: 177448 - RNA, 16 nt, Human herpesvirus 7
caguguacuguugaua

SEQ ID NO: 177449 - RNA, 18 nt, Human herpesvirus 7
cagugggaaugcaucuga

SEQ ID NO: 177450 - RNA, 20 nt, Human herpesvirus 7
cauacucuauugggucauac

SEQ ID NO: 177451 - RNA, 16 nt, Human herpesvirus 7
cauacucuuguugacu

SEQ ID NO: 177452 - RNA, 20 nt, Human herpesvirus 7
cauaccauaaauaccaaaaa

SEQ ID NO: 177453 - RNA, 15 nt, Human herpesvirus 7
cauacaaugaauuag

SEQ ID NO: 177454 - RNA, 15 nt, Human herpesvirus 7
cauaauuuucaugaa

SEQ ID NO: 177455 - RNA, 16 nt, Human herpesvirus 7
cauaauuacauugcag

SEQ ID NO: 177456 - RNA, 12 nt, Human herpesvirus 7
cauaauucaaua

SEQ ID NO: 177457 - RNA, 15 nt, Human herpesvirus 7
cauaauucaauauag

SEQ ID NO: 177458 - RNA, 23 nt, Human herpesvirus 7
cauaauccaaaccggccaaugau

SEQ ID NO: 177459 - RNA, 21 nt, Human herpesvirus 7
cauaauccucugacauuugaa

SEQ ID NO: 177460 - RNA, 24 nt, Human herpesvirus 7
cauaauguuguuuggucuauugaa

SEQ ID NO: 177461 - RNA, 15 nt, Human herpesvirus 7
cauaacccacuaaca

SEQ ID NO: 177462 - RNA, 12 nt, Human herpesvirus 7
cauaaaucaugu

SEQ ID NO: 177463 - RNA, 22 nt, Human herpesvirus 7
cauaaaugcuuaaauuuccauc

SEQ ID NO: 177464 - RNA, 21 nt, Human herpesvirus 7
cauaaaccugcuaacaaguau

SEQ ID NO: 177465 - RNA, 13 nt, Human herpesvirus 7
cauaaacuaucaa

SEQ ID NO: 177466 - RNA, 18 nt, Human herpesvirus 7
cauaaaaaaucuaauuaa

SEQ ID NO: 177467 - RNA, 23 nt, Human herpesvirus 7
cauaaaaaauuuuuagcucuaaa

SEQ ID NO: 177468 - RNA, 14 nt, Human herpesvirus 7
caguaaauugcaac

SEQ ID NO: 177469 - RNA, 13 nt, Human herpesvirus 7
caguacuugcauc

SEQ ID NO: 177470 - RNA, 20 nt, Human herpesvirus 7
caguauaucguuuuuaguuc

SEQ ID NO: 177471 - RNA, 14 nt, Human herpesvirus 7
cagucaacaaaucc

SEQ ID NO: 177472 - RNA, 18 nt, Human herpesvirus 7
cagggacguuucuagcaa

SEQ ID NO: 177473 - RNA, 22 nt, Human herpesvirus 7
cagggaaaaagcauaaagcacc

SEQ ID NO: 177474 - RNA, 23 nt, Human herpesvirus 7
cagacaccgucauuucgcaguua

SEQ ID NO: 177475 - RNA, 14 nt, Human herpesvirus 7
cagacacaauggaa

SEQ ID NO: 177476 - RNA, 14 nt, Human herpesvirus 7
cagacagcuguaua

SEQ ID NO: 177477 - RNA, 18 nt, Human herpesvirus 7
cagacagcuguauaucua

SEQ ID NO: 177478 - RNA, 23 nt, Human herpesvirus 7
cagacagcuguauaucuauuaca

SEQ ID NO: 177479 - RNA, 14 nt, Human herpesvirus 7
cagaauguuuauau

SEQ ID NO: 177480 - RNA, 19 nt, Human herpesvirus 7
cagaauguacacagcugga

SEQ ID NO: 177481 - RNA, 20 nt, Human herpesvirus 7
cagaauuuucaagaucgauu

SEQ ID NO: 177482 - RNA, 18 nt, Human herpesvirus 7
cagacgaauuucuuugcg

SEQ ID NO: 177483 - RNA, 18 nt, Human herpesvirus 7
cagacuaaauauggagca

SEQ ID NO: 177484 - RNA, 18 nt, Human herpesvirus 7
caggcagccgauguccac

SEQ ID NO: 177485 - RNA, 19 nt, Human herpesvirus 7
caggcuagaaguuuagaga

SEQ ID NO: 177486 - RNA, 23 nt, Human herpesvirus 7
caggccuguuucuugauguaaca

SEQ ID NO: 177487 - RNA, 19 nt, Human herpesvirus 7
cauuaacuuuuauaaaaua

SEQ ID NO: 177488 - RNA, 23 nt, Human herpesvirus 7
cauuaacuuuuauaaaauaugga

SEQ ID NO: 177489 - RNA, 22 nt, Human herpesvirus 7
cauuaauaaaaagcccaugaac

SEQ ID NO: 177490 - RNA, 15 nt, Human herpesvirus 7
cauuacgaacugaua

SEQ ID NO: 177491 - RNA, 18 nt, Human herpesvirus 7
cauuacgucaucccugcu

SEQ ID NO: 177492 - RNA, 14 nt, Human herpesvirus 7
cauuacugaucccu

SEQ ID NO: 177493 - RNA, 15 nt, Human herpesvirus 7
cauuacugaucccua

SEQ ID NO: 177494 - RNA, 22 nt, Human herpesvirus 7
cauuuaguacuuuuucuggaau

SEQ ID NO: 177495 - RNA, 22 nt, Human herpesvirus 7
cauuauaaauguaacuuucauc

SEQ ID NO: 177496 - RNA, 17 nt, Human herpesvirus 7
cauuauaagaauuugga

SEQ ID NO: 177497 - RNA, 18 nt, Human herpesvirus 7
cauuuaaaaaaaaaacca

SEQ ID NO: 177498 - RNA, 22 nt, Human herpesvirus 7
cauuuaaaaaaaaaaccacaaa

SEQ ID NO: 177499 - RNA, 14 nt, Human herpesvirus 7
cauuugaagauaag

SEQ ID NO: 177500 - RNA, 20 nt, Human herpesvirus 7
cauuugcauguugcuaguau

SEQ ID NO: 177501 - RNA, 18 nt, Human herpesvirus 7
ccaaacgcugacagucau

SEQ ID NO: 177502 - RNA, 21 nt, Human herpesvirus 7
ccaaacaggcauuuaagaauu

SEQ ID NO: 177503 - RNA, 16 nt, Human herpesvirus 7
cauuucaaacaacaua

SEQ ID NO: 177504 - RNA, 21 nt, Human herpesvirus 7
cauuuauguauuuuacuggau

SEQ ID NO: 177505 - RNA, 13 nt, Human herpesvirus 7
cauuucaagaagg

SEQ ID NO: 177506 - RNA, 19 nt, Human herpesvirus 7
cauuucagaugacaacuca

SEQ ID NO: 177507 - RNA, 19 nt, Human herpesvirus 7
cauuucgaauuuguucaau

SEQ ID NO: 177508 - RNA, 21 nt, Human herpesvirus 7
ccaaauaaacguccauugauu

SEQ ID NO: 177509 - RNA, 16 nt, Human herpesvirus 7
ccaaauacaaccacaa

SEQ ID NO: 177510 - RNA, 17 nt, Human herpesvirus 7
ccaaauauguggcacau

SEQ ID NO: 177511 - RNA, 20 nt, Human herpesvirus 7
ccaaagguaaacucacuucu

SEQ ID NO: 177512 - RNA, 17 nt, Human herpesvirus 7
ccaaagaguauacaaaa

SEQ ID NO: 177513 - RNA, 22 nt, Human herpesvirus 7
ccaaagaguauacaaaagacau

SEQ ID NO: 177514 - RNA, 15 nt, Human herpesvirus 7
ccaaacuauauugaa

SEQ ID NO: 177515 - RNA, 19 nt, Human herpesvirus 7
ccaaacuauauugaauuau

SEQ ID NO: 177516 - RNA, 20 nt, Human herpesvirus 7
ccaaguuuuaacaaucuaag

SEQ ID NO: 177517 - RNA, 18 nt, Human herpesvirus 7
ccaaugccaauugaagaa

SEQ ID NO: 177518 - RNA, 18 nt, Human herpesvirus 7
ccaauagaaaacauuaua

SEQ ID NO: 177519 - RNA, 16 nt, Human herpesvirus 7
cauacuuucgcacgaa

SEQ ID NO: 177520 - RNA, 22 nt, Human herpesvirus 7
cauagcuuaaaaaauacauuga

SEQ ID NO: 177521 - RNA, 14 nt, Human herpesvirus 7
cauauaucuuugau

SEQ ID NO: 177522 - RNA, 20 nt, Human herpesvirus 7
cauauaugcauuauauccaa

SEQ ID NO: 177523 - RNA, 22 nt, Human herpesvirus 7
cauaucgcgauguuggcacugu

SEQ ID NO: 177524 - RNA, 23 nt, Human herpesvirus 7
cauaucuugcuuagaugcugaaa

SEQ ID NO: 177525 - RNA, 19 nt, Human herpesvirus 7
caucgguagugucugguag

SEQ ID NO: 177526 - RNA, 21 nt, Human herpesvirus 7
caucgguuuucugagugcuaa

SEQ ID NO: 177527 - RNA, 23 nt, Human herpesvirus 7
caucgguuuucugagugcuaaaa

SEQ ID NO: 177528 - RNA, 17 nt, Human herpesvirus 7
caucuccacaguggugc

SEQ ID NO: 177529 - RNA, 18 nt, Human herpesvirus 7
caucuccuguaaccauuu

SEQ ID NO: 177530 - RNA, 20 nt, Human herpesvirus 7
caucuaggucuuccacuguu

SEQ ID NO: 177531 - RNA, 21 nt, Human herpesvirus 7
caucuaggucuuccacuguug

SEQ ID NO: 177532 - RNA, 18 nt, Human herpesvirus 7
caucuauaaacauucuaa

SEQ ID NO: 177533 - RNA, 17 nt, Human herpesvirus 7
cauguuuuaugacucag

SEQ ID NO: 177534 - RNA, 16 nt, Human herpesvirus 7
cauguuccauucaaua

SEQ ID NO: 177535 - RNA, 14 nt, Human herpesvirus 7
cauuaaaaugauua

SEQ ID NO: 177536 - RNA, 21 nt, Human herpesvirus 7
cauguauugucuuacagcacu

SEQ ID NO: 177537 - RNA, 22 nt, Human herpesvirus 7
cauguauugucuuacagcacuu

SEQ ID NO: 177538 - RNA, 23 nt, Human herpesvirus 7
caugucugccucccgggcacacu

SEQ ID NO: 177539 - RNA, 18 nt, Human herpesvirus 7
cauguguacuaaagccaa

SEQ ID NO: 177540 - RNA, 18 nt, Human herpesvirus 7
caugccuugccaaaagcu

SEQ ID NO: 177541 - RNA, 19 nt, Human herpesvirus 7
caugcggaagaacaagcaa

SEQ ID NO: 177542 - RNA, 20 nt, Human herpesvirus 7
caugcggaagaacaagcaaa

SEQ ID NO: 177543 - RNA, 22 nt, Human herpesvirus 7
caucugguaaugucauaaaacu

SEQ ID NO: 177544 - RNA, 20 nt, Human herpesvirus 7
caucuguguuauuguaucua

SEQ ID NO: 177545 - RNA, 19 nt, Human herpesvirus 7
caugccggacaguuugcaa

SEQ ID NO: 177546 - RNA, 16 nt, Human herpesvirus 7
cauggagcacaauuac

SEQ ID NO: 177547 - RNA, 16 nt, Human herpesvirus 7
cauggacggcauuuaa

SEQ ID NO: 177548 - RNA, 20 nt, Human herpesvirus 7
cauggaaaauggagcauuau

SEQ ID NO: 177549 - RNA, 15 nt, Human herpesvirus 7
caugcuuacagugaa

SEQ ID NO: 177550 - RNA, 16 nt, Human herpesvirus 7
ccauuaagccagauuu

SEQ ID NO: 177551 - RNA, 19 nt, Human herpesvirus 7
ccauuuuuauaacaauauu

SEQ ID NO: 177552 - RNA, 14 nt, Human herpesvirus 7
ccauuugugaugua

SEQ ID NO: 177553 - RNA, 22 nt, Human herpesvirus 7
ccauuugugauguacugcucau

SEQ ID NO: 177554 - RNA, 20 nt, Human herpesvirus 7
ccauucaauaauggcauuac

SEQ ID NO: 177555 - RNA, 22 nt, Human herpesvirus 7
ccauuucaaaagaaaaaaucuu

SEQ ID NO: 177556 - RNA, 23 nt, Human herpesvirus 7
ccauuuaaagggggaaagaacaa

SEQ ID NO: 177557 - RNA, 23 nt, Human herpesvirus 7
cccaaacaggcauuuaagaauuu

SEQ ID NO: 177558 - RNA, 14 nt, Human herpesvirus 7
ccaucacaaaacuc

SEQ ID NO: 177559 - RNA, 17 nt, Human herpesvirus 7
ccagguuuuucaaagac

SEQ ID NO: 177560 - RNA, 15 nt, Human herpesvirus 7
ccaguacgucuugcu

SEQ ID NO: 177561 - RNA, 23 nt, Human herpesvirus 7
ccagaguaugaauugaaauuucu

SEQ ID NO: 177562 - RNA, 18 nt, Human herpesvirus 7
ccagaauaucgauuuuuc

SEQ ID NO: 177563 - RNA, 22 nt, Human herpesvirus 7
ccagaagaauggcgaguuacau

SEQ ID NO: 177564 - RNA, 10 nt, Human herpesvirus 7
ccagaacuug

SEQ ID NO: 177565 - RNA, 22 nt, Human herpesvirus 7
ccagaaauuaaauacaaauuua

SEQ ID NO: 177566 - RNA, 14 nt, Human herpesvirus 7
ccagaaauuucaaa

SEQ ID NO: 177567 - RNA, 19 nt, Human herpesvirus 7
ccagaaauuucaaaggaag

SEQ ID NO: 177568 - RNA, 21 nt, Human herpesvirus 7
cccagucccaagagacuccaa

SEQ ID NO: 177569 - RNA, 13 nt, Human herpesvirus 7
cccagaaauuuca

SEQ ID NO: 177570 - RNA, 22 nt, Human herpesvirus 7
cccagaccgcauaacccacuaa

SEQ ID NO: 177571 - RNA, 16 nt, Human herpesvirus 7
cccaugaacacugcuu

SEQ ID NO: 177572 - RNA, 16 nt, Human herpesvirus 7
cccaugccuauucaaa

SEQ ID NO: 177573 - RNA, 19 nt, Human herpesvirus 7
ccccaaacuguauuuguug

SEQ ID NO: 177574 - RNA, 12 nt, Human herpesvirus 7
cccuauugcauc

SEQ ID NO: 177575 - RNA, 13 nt, Human herpesvirus 7
ccggaccauuucc

SEQ ID NO: 177576 - RNA, 22 nt, Human herpesvirus 7
cccuggcguuacggguggcacu

SEQ ID NO: 177577 - RNA, 15 nt, Human herpesvirus 7
cccugucacacuuau

SEQ ID NO: 177578 - RNA, 15 nt, Human herpesvirus 7
cccucagaacuguuu

SEQ ID NO: 177579 - RNA, 14 nt, Human herpesvirus 7
cccucuaguggcaa

SEQ ID NO: 177580 - RNA, 16 nt, Human herpesvirus 7
ccguuuugaaaaguca

SEQ ID NO: 177581 - RNA, 14 nt, Human herpesvirus 7
ccguuucauuuaaa

SEQ ID NO: 177582 - RNA, 15 nt, Human herpesvirus 7
ccguuuaugaacaag

SEQ ID NO: 177583 - RNA, 18 nt, Human herpesvirus 7
ccguugaguugcugcugu

SEQ ID NO: 177584 - RNA, 12 nt, Human herpesvirus 7
ccguuguuaaaa

SEQ ID NO: 177585 - RNA, 15 nt, Human herpesvirus 7
ccuaggauaccaaac

SEQ ID NO: 177586 - RNA, 16 nt, Human herpesvirus 7
ccuaggauaccaaaca

SEQ ID NO: 177587 - RNA, 23 nt, Human herpesvirus 7
ccuccacucgaaggagagcccag

SEQ ID NO: 177588 - RNA, 17 nt, Human herpesvirus 7
ccucccgggcacacuuu

SEQ ID NO: 177589 - RNA, 15 nt, Human herpesvirus 7
aaaauuauaacuuua

SEQ ID NO: 177590 - RNA, 15 nt, Human herpesvirus 7
aaaauuccauucgau

SEQ ID NO: 177591 - RNA, 18 nt, Human herpesvirus 7
aaaauuaaauaaccaaac

SEQ ID NO: 177592 - RNA, 15 nt, Human herpesvirus 7
aaaauuaacagcucu

SEQ ID NO: 177593 - RNA, 20 nt, Human herpesvirus 7
aaaauucuccggcgcuuaaa

SEQ ID NO: 177594 - RNA, 19 nt, Human herpesvirus 7
aaaauucugcuugucucug

SEQ ID NO: 177595 - RNA, 23 nt, Human herpesvirus 7
aaaauuggacaccaguaugaaau

SEQ ID NO: 177596 - RNA, 14 nt, Human herpesvirus 7
aaaauuuauauuaa

SEQ ID NO: 177597 - RNA, 13 nt, Human herpesvirus 7
aaaauuucauauc

SEQ ID NO: 177598 - RNA, 14 nt, Human herpesvirus 7
aaaauuucauaucu

SEQ ID NO: 177599 - RNA, 15 nt, Human herpesvirus 7
aaaauuucauaucua

SEQ ID NO: 177600 - RNA, 22 nt, Human herpesvirus 7
ccugcuauucauuucacggaaa

SEQ ID NO: 177601 - RNA, 20 nt, Human herpesvirus 7
ccuguauggaaccuacugaa

SEQ ID NO: 177602 - RNA, 20 nt, Human herpesvirus 7
ccugucacacuuauuccaga

SEQ ID NO: 177603 - RNA, 12 nt, Human herpesvirus 7
aaacaagcuuaa

SEQ ID NO: 177604 - RNA, 14 nt, Human herpesvirus 7
aaacaagguuuaaa

SEQ ID NO: 177605 - RNA, 20 nt, Human herpesvirus 7
aaacaaugguguuaacaauc

SEQ ID NO: 177606 - RNA, 23 nt, Human herpesvirus 7
aaacaauuauauaaacacuugcu

SEQ ID NO: 177607 - RNA, 17 nt, Human herpesvirus 7
ccugugugcaaugaugu

SEQ ID NO: 177608 - RNA, 18 nt, Human herpesvirus 7
aaacaaaaaaaguaccau

SEQ ID NO: 177609 - RNA, 15 nt, Human herpesvirus 7
aaacaaaauguauuc

SEQ ID NO: 177610 - RNA, 19 nt, Human herpesvirus 7
aaacaaaauuccaaaaugu

SEQ ID NO: 177611 - RNA, 13 nt, Human herpesvirus 7
aaacaaacaauga

SEQ ID NO: 177612 - RNA, 14 nt, Human herpesvirus 7
aaacaaacuauguc

SEQ ID NO: 177613 - RNA, 14 nt, Human herpesvirus 7
aaaauuuuuagcuc

SEQ ID NO: 177614 - RNA, 15 nt, Human herpesvirus 7
aaacaaaacaguuug

SEQ ID NO: 177615 - RNA, 19 nt, Human herpesvirus 7
aaaauuuuaauugugcauc

SEQ ID NO: 177616 - RNA, 17 nt, Human herpesvirus 7
aaaauuuuauugucuaa

SEQ ID NO: 177617 - RNA, 13 nt, Human herpesvirus 7
aaaauuucuauca

SEQ ID NO: 177618 - RNA, 22 nt, Human herpesvirus 7
aaaauuuagaaaaaaaacauua

SEQ ID NO: 177619 - RNA, 14 nt, Human herpesvirus 7
cgccauaauuugaa

SEQ ID NO: 177620 - RNA, 11 nt, Human herpesvirus 7
ccuuacaacaa

SEQ ID NO: 177621 - RNA, 14 nt, Human herpesvirus 7
ccuuacaacaaaga

SEQ ID NO: 177622 - RNA, 22 nt, Human herpesvirus 7
ccuucaauagcagagaauaugu

SEQ ID NO: 177623 - RNA, 23 nt, Human herpesvirus 7
ccuuagaagcuugcuagauucua

SEQ ID NO: 177624 - RNA, 14 nt, Human herpesvirus 7
ccuuaacauacuga

SEQ ID NO: 177625 - RNA, 18 nt, Human herpesvirus 7
ccuguuugacguaauuac

SEQ ID NO: 177626 - RNA, 15 nt, Human herpesvirus 7
cgcagccauguugcg

SEQ ID NO: 177627 - RNA, 17 nt, Human herpesvirus 7
cgcacgaaagaccugua

SEQ ID NO: 177628 - RNA, 15 nt, Human herpesvirus 7
cgcaccgucauuuaa

SEQ ID NO: 177629 - RNA, 12 nt, Human herpesvirus 7
cgcuaaccaucu

SEQ ID NO: 177630 - RNA, 14 nt, Human herpesvirus 7
cgcguuucuucaaa

SEQ ID NO: 177631 - RNA, 14 nt, Human herpesvirus 7
cgcugaaauuucau

SEQ ID NO: 177632 - RNA, 14 nt, Human herpesvirus 7
cgcugaauucauuu

SEQ ID NO: 177633 - RNA, 22 nt, Human herpesvirus 7
cgcuguaugcaagaaaguccaa

SEQ ID NO: 177634 - RNA, 12 nt, Human herpesvirus 7
cgcugucuuuaa

SEQ ID NO: 177635 - RNA, 16 nt, Human herpesvirus 7
aaaccaggaacagauu

SEQ ID NO: 177636 - RNA, 20 nt, Human herpesvirus 7
aaaccaggaacagauucucc

SEQ ID NO: 177637 - RNA, 21 nt, Human herpesvirus 7
aaaccaggaacagauucucca

SEQ ID NO: 177638 - RNA, 18 nt, Human herpesvirus 7
aaaccaauuaauauuaau

SEQ ID NO: 177639 - RNA, 12 nt, Human herpesvirus 7
aaaccacaaaaa

SEQ ID NO: 177640 - RNA, 14 nt, Human herpesvirus 7
aaaccacaaaaauc

SEQ ID NO: 177641 - RNA, 23 nt, Human herpesvirus 7
aaaccacaaaaaucaaaguaaaa

SEQ ID NO: 177642 - RNA, 15 nt, Human herpesvirus 7
aaacauugaaaaagc

SEQ ID NO: 177643 - RNA, 12 nt, Human herpesvirus 7
aaacauugugag

SEQ ID NO: 177644 - RNA, 23 nt, Human herpesvirus 7
aaacauuucagaugacaacucaa

SEQ ID NO: 177645 - RNA, 13 nt, Human herpesvirus 7
aaacauguuccau

SEQ ID NO: 177646 - RNA, 17 nt, Human herpesvirus 7
aaacauguuccauucaa

SEQ ID NO: 177647 - RNA, 17 nt, Human herpesvirus 7
aaacauuacgaacugau

SEQ ID NO: 177648 - RNA, 16 nt, Human herpesvirus 7
aaacauuagcauugaa

SEQ ID NO: 177649 - RNA, 11 nt, Human herpesvirus 7
aaacaguuuua

SEQ ID NO: 177650 - RNA, 21 nt, Human herpesvirus 7
aaacagugggaaugcaucuga

SEQ ID NO: 177651 - RNA, 17 nt, Human herpesvirus 7
aaacaucuaugugcucu

SEQ ID NO: 177652 - RNA, 21 nt, Human herpesvirus 7
aaacaucaauuuuaaugugcu

SEQ ID NO: 177653 - RNA, 12 nt, Human herpesvirus 7
aaacagcauuuu

SEQ ID NO: 177654 - RNA, 18 nt, Human herpesvirus 7
aaacagcauuuucucuua

SEQ ID NO: 177655 - RNA, 17 nt, Human herpesvirus 7
aaacagcugggauagaa

SEQ ID NO: 177656 - RNA, 18 nt, Human herpesvirus 7
aaacagcugggauagaaa

SEQ ID NO: 177657 - RNA, 20 nt, Human herpesvirus 7
aaacacuugcuagcugugau

SEQ ID NO: 177658 - RNA, 17 nt, Human herpesvirus 7
aaacagaaaacaacaca

SEQ ID NO: 177659 - RNA, 19 nt, Human herpesvirus 7
aaacagaagcugacuuugu

SEQ ID NO: 177660 - RNA, 18 nt, Human herpesvirus 7
cggaauuuguaucuauga

SEQ ID NO: 177661 - RNA, 19 nt, Human herpesvirus 7
cggaauuuguaucuaugac

SEQ ID NO: 177662 - RNA, 12 nt, Human herpesvirus 7
cggaccauuucc

SEQ ID NO: 177663 - RNA, 19 nt, Human herpesvirus 7
cggaaguacuaaucacaag

SEQ ID NO: 177664 - RNA, 22 nt, Human herpesvirus 7
cggaaguacuaaucacaaguua

SEQ ID NO: 177665 - RNA, 19 nt, Human herpesvirus 7
cggaagaacaagcaaacga

SEQ ID NO: 177666 - RNA, 12 nt, Human herpesvirus 7
cgcuuugcuuau

SEQ ID NO: 177667 - RNA, 22 nt, Human herpesvirus 7
cgcuucguaaauauaaucaaaa

SEQ ID NO: 177668 - RNA, 15 nt, Human herpesvirus 7
cggagacguugcuca

SEQ ID NO: 177669 - RNA, 17 nt, Human herpesvirus 7
cgguaacaugucuucaa

SEQ ID NO: 177670 - RNA, 21 nt, Human herpesvirus 7
cgguaacggauuuacauuuca

SEQ ID NO: 177671 - RNA, 21 nt, Human herpesvirus 7
cgguauuuuguuuugcauauu

SEQ ID NO: 177672 - RNA, 14 nt, Human herpesvirus 7
cgguccuuccucaa

SEQ ID NO: 177673 - RNA, 14 nt, Human herpesvirus 7
cguauacauacuaa

SEQ ID NO: 177674 - RNA, 20 nt, Human herpesvirus 7
cgucaucccugcugauacaa

SEQ ID NO: 177675 - RNA, 16 nt, Human herpesvirus 7
cgucuaagucaauuaa

SEQ ID NO: 177676 - RNA, 23 nt, Human herpesvirus 7
cgucuucuucugaguguguuaaa

SEQ ID NO: 177677 - RNA, 21 nt, Human herpesvirus 7
cgucuguguuauacuuauuau

SEQ ID NO: 177678 - RNA, 19 nt, Human herpesvirus 7
cgucucuuugccuguuaaa

SEQ ID NO: 177679 - RNA, 17 nt, Human herpesvirus 7
cuacauagaaaucuuua

SEQ ID NO: 177680 - RNA, 22 nt, Human herpesvirus 7
cuacaguuacuuuuacuccuca

SEQ ID NO: 177681 - RNA, 17 nt, Human herpesvirus 7
cuacaggcuuacacuau

SEQ ID NO: 177682 - RNA, 20 nt, Human herpesvirus 7
cuacaugaauggaucuggua

SEQ ID NO: 177683 - RNA, 18 nt, Human herpesvirus 7
cuaacgcuaaagagcauu

SEQ ID NO: 177684 - RNA, 11 nt, Human herpesvirus 7
cuaacugagaa

SEQ ID NO: 177685 - RNA, 16 nt, Human herpesvirus 7
cuaagucuacaucauc

SEQ ID NO: 177686 - RNA, 18 nt, Human herpesvirus 7
cuaagcuuuucaggcuau

SEQ ID NO: 177687 - RNA, 21 nt, Human herpesvirus 7
cuaaggcgaaaaacacuuuaa

SEQ ID NO: 177688 - RNA, 15 nt, Human herpesvirus 7
cuacaauuucuggca

SEQ ID NO: 177689 - RNA, 19 nt, Human herpesvirus 7
cuacaauuucuggcaauaa

SEQ ID NO: 177690 - RNA, 21 nt, Human herpesvirus 7
cuacaauaugacgacuuugaa

SEQ ID NO: 177691 - RNA, 19 nt, Human herpesvirus 7
cuaaagacacuuauuugau

SEQ ID NO: 177692 - RNA, 18 nt, Human herpesvirus 7
cuaaagagcauucaugcc

SEQ ID NO: 177693 - RNA, 15 nt, Human herpesvirus 7
cuaaagcuacagcuu

SEQ ID NO: 177694 - RNA, 21 nt, Human herpesvirus 7
cuaacgauccaguacuugcau

SEQ ID NO: 177695 - RNA, 14 nt, Human herpesvirus 7
cuaacguuuaucac

SEQ ID NO: 177696 - RNA, 15 nt, Human herpesvirus 7
cuaaaacuacauuua

SEQ ID NO: 177697 - RNA, 12 nt, Human herpesvirus 7
cuaaacccagag

SEQ ID NO: 177698 - RNA, 21 nt, Human herpesvirus 7
cguuucuagcaaaauaugcaa

SEQ ID NO: 177699 - RNA, 13 nt, Human herpesvirus 7
cguuucacuggga

SEQ ID NO: 177700 - RNA, 17 nt, Human herpesvirus 7
cguuuagaaaacgaaag

SEQ ID NO: 177701 - RNA, 15 nt, Human herpesvirus 7
cguuuauaaacucua

SEQ ID NO: 177702 - RNA, 20 nt, Human herpesvirus 7
cguuuauaaacucuauguca

SEQ ID NO: 177703 - RNA, 12 nt, Human herpesvirus 7
cguuuucaugcu

SEQ ID NO: 177704 - RNA, 15 nt, Human herpesvirus 7
cguuuucaugcucau

SEQ ID NO: 177705 - RNA, 22 nt, Human herpesvirus 7
cuaaaaagagaaaucgcuuauu

SEQ ID NO: 177706 - RNA, 22 nt, Human herpesvirus 7
cguggaaauuaaucaaacaauu

SEQ ID NO: 177707 - RNA, 22 nt, Human herpesvirus 7
cgugucaaaaaaaaaacaaucc

SEQ ID NO: 177708 - RNA, 23 nt, Human herpesvirus 7
cgugucaaaaaaaaaacaaucca

SEQ ID NO: 177709 - RNA, 19 nt, Human herpesvirus 7
cguuuaaugaaaaagccau

SEQ ID NO: 177710 - RNA, 20 nt, Human herpesvirus 7
cguuuaaugaaaaagccaua

SEQ ID NO: 177711 - RNA, 15 nt, Human herpesvirus 7
cguggccuucuugcc

SEQ ID NO: 177712 - RNA, 19 nt, Human herpesvirus 7
cucuaagagcuuuugcaaa

SEQ ID NO: 177713 - RNA, 17 nt, Human herpesvirus 7
cucuagaaaaucuacca

SEQ ID NO: 177714 - RNA, 18 nt, Human herpesvirus 7
cucuagaaaaucuaccaa

SEQ ID NO: 177715 - RNA, 12 nt, Human herpesvirus 7
cucuauuacaca

SEQ ID NO: 177716 - RNA, 21 nt, Human herpesvirus 7
cucguuauuuucaaacaugau

SEQ ID NO: 177717 - RNA, 18 nt, Human herpesvirus 7
cucuaaacaaacaaugag

SEQ ID NO: 177718 - RNA, 19 nt, Human herpesvirus 7
cucugauugacucgaauua

SEQ ID NO: 177719 - RNA, 18 nt, Human herpesvirus 7
cucucuauuacacaggaa

SEQ ID NO: 177720 - RNA, 13 nt, Human herpesvirus 7
cucucaaucaaaa

SEQ ID NO: 177721 - RNA, 17 nt, Human herpesvirus 7
cucucgcaacuucugau

SEQ ID NO: 177722 - RNA, 13 nt, Human herpesvirus 7
cucuccugaaaua

SEQ ID NO: 177723 - RNA, 17 nt, Human herpesvirus 7
cucgaugcuucaauuca

SEQ ID NO: 177724 - RNA, 16 nt, Human herpesvirus 7
cuccuugccugcaauu

SEQ ID NO: 177725 - RNA, 14 nt, Human herpesvirus 7
cucgaagaauucau

SEQ ID NO: 177726 - RNA, 18 nt, Human herpesvirus 7
cucgaagaauucaucuua

SEQ ID NO: 177727 - RNA, 16 nt, Human herpesvirus 7
cucgauuaucaucagg

SEQ ID NO: 177728 - RNA, 12 nt, Human herpesvirus 7
cucaagcacaau

SEQ ID NO: 177729 - RNA, 16 nt, Human herpesvirus 7
cucaagcacaaucacg

SEQ ID NO: 177730 - RNA, 17 nt, Human herpesvirus 7
cucaaccggcaaucaua

SEQ ID NO: 177731 - RNA, 22 nt, Human herpesvirus 7
cucaaccggcaaucauaauuca

SEQ ID NO: 177732 - RNA, 21 nt, Human herpesvirus 7
cuauuaagcguucguaacaaa

SEQ ID NO: 177733 - RNA, 17 nt, Human herpesvirus 7
cuauguuuggcaacucu

SEQ ID NO: 177734 - RNA, 16 nt, Human herpesvirus 7
cuauuaaauauuuaga

SEQ ID NO: 177735 - RNA, 18 nt, Human herpesvirus 7
cuauuagauaaugacaaa

SEQ ID NO: 177736 - RNA, 17 nt, Human herpesvirus 7
cuauucggguaaugucu

SEQ ID NO: 177737 - RNA, 14 nt, Human herpesvirus 7
cuauugaaugugga

SEQ ID NO: 177738 - RNA, 17 nt, Human herpesvirus 7
cuauuauuucuacacaa

SEQ ID NO: 177739 - RNA, 16 nt, Human herpesvirus 7
cuauucacgcuuccau

SEQ ID NO: 177740 - RNA, 19 nt, Human herpesvirus 7
cuauuauuaaagcuuucaa

SEQ ID NO: 177741 - RNA, 21 nt, Human herpesvirus 7
cuauuauuaaagcuuucaauu

SEQ ID NO: 177742 - RNA, 14 nt, Human herpesvirus 7
cuaugugcucugaa

SEQ ID NO: 177743 - RNA, 13 nt, Human herpesvirus 7
cuauguguuuaca

SEQ ID NO: 177744 - RNA, 22 nt, Human herpesvirus 7
cuauguguuuacauuacuggau

SEQ ID NO: 177745 - RNA, 17 nt, Human herpesvirus 7
cuacuaaggugucuucg

SEQ ID NO: 177746 - RNA, 14 nt, Human herpesvirus 7
cuacuaaucaugaa

SEQ ID NO: 177747 - RNA, 20 nt, Human herpesvirus 7
cuaccucuuacauuugauuu

SEQ ID NO: 177748 - RNA, 20 nt, Human herpesvirus 7
cucauaaucauaguacaucu

SEQ ID NO: 177749 - RNA, 16 nt, Human herpesvirus 7
cuccauucuaaaccaa

SEQ ID NO: 177750 - RNA, 20 nt, Human herpesvirus 7
cuccagaaauuauacuagca

SEQ ID NO: 177751 - RNA, 17 nt, Human herpesvirus 7
cuccacuaugccacaaa

SEQ ID NO: 177752 - RNA, 23 nt, Human herpesvirus 7
cucaauuuuucgcugaagaacau

SEQ ID NO: 177753 - RNA, 18 nt, Human herpesvirus 7
cucacaccuuacuuuuaa

SEQ ID NO: 177754 - RNA, 18 nt, Human herpesvirus 7
cucaaugaaugcaagcaa

SEQ ID NO: 177755 - RNA, 20 nt, Human herpesvirus 7
cucaauaaagauugaucacu

SEQ ID NO: 177756 - RNA, 23 nt, Human herpesvirus 7
cucaauaguuuuacaaagaacau

SEQ ID NO: 177757 - RNA, 15 nt, Human herpesvirus 7
cucagcucuguaaua

SEQ ID NO: 177758 - RNA, 15 nt, Human herpesvirus 7
cuguuaagaauucca

SEQ ID NO: 177759 - RNA, 17 nt, Human herpesvirus 7
cuguguuauuguaucua

SEQ ID NO: 177760 - RNA, 17 nt, Human herpesvirus 7
cugugugugcaguguuu

SEQ ID NO: 177761 - RNA, 14 nt, Human herpesvirus 7
cugugugcaaugau

SEQ ID NO: 177762 - RNA, 21 nt, Human herpesvirus 7
cugugugcaaugauguuugca

SEQ ID NO: 177763 - RNA, 18 nt, Human herpesvirus 7
cuguugagucgaaugcau

SEQ ID NO: 177764 - RNA, 18 nt, Human herpesvirus 7
cuguugauacaacuaaaa

SEQ ID NO: 177765 - RNA, 19 nt, Human herpesvirus 7
cuguugauacaacuaaaaa

SEQ ID NO: 177766 - RNA, 14 nt, Human herpesvirus 7
cuguuuauuuuggc

SEQ ID NO: 177767 - RNA, 14 nt, Human herpesvirus 7
cuguuucagaguau

SEQ ID NO: 177768 - RNA, 16 nt, Human herpesvirus 7
cuguuuguaaggccaa

SEQ ID NO: 177769 - RNA, 17 nt, Human herpesvirus 7
cuguuuguaaggccaaa

SEQ ID NO: 177770 - RNA, 20 nt, Human herpesvirus 7
cuuaaaaaaaggccuuguaa

SEQ ID NO: 177771 - RNA, 16 nt, Human herpesvirus 7
cuuaaaaacaguaauu

SEQ ID NO: 177772 - RNA, 20 nt, Human herpesvirus 7
cuuaaaaacaguaauuuagu

SEQ ID NO: 177773 - RNA, 14 nt, Human herpesvirus 7
cuuaaaacuuugaa

SEQ ID NO: 177774 - RNA, 13 nt, Human herpesvirus 7
cuuaaaauauguu

SEQ ID NO: 177775 - RNA, 23 nt, Human herpesvirus 7
cuuaaagucuccgugucacuguc

SEQ ID NO: 177776 - RNA, 12 nt, Human herpesvirus 7
cuuaaauaaaga

SEQ ID NO: 177777 - RNA, 13 nt, Human herpesvirus 7
cuuaaaugucaau

SEQ ID NO: 177778 - RNA, 21 nt, Human herpesvirus 7
cuuaaauuacgagauauuauu

SEQ ID NO: 177779 - RNA, 14 nt, Human herpesvirus 7
cuguacuguugcua

SEQ ID NO: 177780 - RNA, 15 nt, Human herpesvirus 7
cuguacuguugcuaa

SEQ ID NO: 177781 - RNA, 22 nt, Human herpesvirus 7
cuguacuuuugaucaaaagcuu

SEQ ID NO: 177782 - RNA, 18 nt, Human herpesvirus 7
cuguagaaaauguuuuga

SEQ ID NO: 177783 - RNA, 12 nt, Human herpesvirus 7
cuguagacauuu

SEQ ID NO: 177784 - RNA, 19 nt, Human herpesvirus 7
cuguaaucauauaugcauu

SEQ ID NO: 177785 - RNA, 20 nt, Human herpesvirus 7
cuguacaaugcugucucuga

SEQ ID NO: 177786 - RNA, 22 nt, Human herpesvirus 7
cuguacaaauuucuccacaguc

SEQ ID NO: 177787 - RNA, 18 nt, Human herpesvirus 7
cugugcaugaaaucuuga

SEQ ID NO: 177788 - RNA, 13 nt, Human herpesvirus 7
cuguaacagaccu

SEQ ID NO: 177789 - RNA, 22 nt, Human herpesvirus 7
cuguaacagaccuccuauguca

SEQ ID NO: 177790 - RNA, 22 nt, Human herpesvirus 7
cuguaaaauuuaaauacugaga

SEQ ID NO: 177791 - RNA, 17 nt, Human herpesvirus 7
cuguaaaagaaaaucuc

SEQ ID NO: 177792 - RNA, 22 nt, Human herpesvirus 7
cuggcacauuauaagaaucugu

SEQ ID NO: 177793 - RNA, 21 nt, Human herpesvirus 7
cuggauuaacauuaaccacaa

SEQ ID NO: 177794 - RNA, 20 nt, Human herpesvirus 7
cuggcaauaucccagaauau

SEQ ID NO: 177795 - RNA, 18 nt, Human herpesvirus 7
cuggcagaaauauaugaa

SEQ ID NO: 177796 - RNA, 18 nt, Human herpesvirus 7
cuggcaugucucauaaua

SEQ ID NO: 177797 - RNA, 12 nt, Human herpesvirus 7
cucugugcauuu

SEQ ID NO: 177798 - RNA, 15 nt, Human herpesvirus 7
cucuguccagccaaa

SEQ ID NO: 177799 - RNA, 16 nt, Human herpesvirus 7
cugauuucuacaauau

SEQ ID NO: 177800 - RNA, 19 nt, Human herpesvirus 7
cugauuuuuaaacuuguga

SEQ ID NO: 177801 - RNA, 15 nt, Human herpesvirus 7
cugauucuuauucua

SEQ ID NO: 177802 - RNA, 19 nt, Human herpesvirus 7
cugauucuuauucuacaca

SEQ ID NO: 177803 - RNA, 18 nt, Human herpesvirus 7
cugcaaagaaaaauuaau

SEQ ID NO: 177804 - RNA, 21 nt, Human herpesvirus 7
cugcaaagaaaaauuaauugc

SEQ ID NO: 177805 - RNA, 15 nt, Human herpesvirus 7
cugcaaaaaaccauu

SEQ ID NO: 177806 - RNA, 17 nt, Human herpesvirus 7
cugcaacaaauuaaaua

SEQ ID NO: 177807 - RNA, 15 nt, Human herpesvirus 7
cugcaagcugauuca

SEQ ID NO: 177808 - RNA, 16 nt, Human herpesvirus 7
cugcaauguucaucaa

SEQ ID NO: 177809 - RNA, 20 nt, Human herpesvirus 7
cugcacauuuuggcgcucuc

SEQ ID NO: 177810 - RNA, 16 nt, Human herpesvirus 7
cugccucccgggcaca

SEQ ID NO: 177811 - RNA, 14 nt, Human herpesvirus 7
cuggauguauaaau

SEQ ID NO: 177812 - RNA, 16 nt, Human herpesvirus 7
cuggaucuucugcuaa

SEQ ID NO: 177813 - RNA, 23 nt, Human herpesvirus 7
cuggagaagacaacgacuacagg

SEQ ID NO: 177814 - RNA, 13 nt, Human herpesvirus 7
cugcucaaaucaa

SEQ ID NO: 177815 - RNA, 21 nt, Human herpesvirus 7
cugcucaaaucaaccagauuu

SEQ ID NO: 177816 - RNA, 16 nt, Human herpesvirus 7
cugcuauucauuucac

SEQ ID NO: 177817 - RNA, 13 nt, Human herpesvirus 7
ucugguaaaaaga

SEQ ID NO: 177818 - RNA, 22 nt, Human herpesvirus 7
ucugguauugucuacaauuucu

SEQ ID NO: 177819 - RNA, 23 nt, Human herpesvirus 7
ucuguaaaauuuaaauacugaga

SEQ ID NO: 177820 - RNA, 22 nt, Human herpesvirus 7
ucuguaauauggaagacgccaa

SEQ ID NO: 177821 - RNA, 12 nt, Human herpesvirus 7
ucuguaaucaua

SEQ ID NO: 177822 - RNA, 22 nt, Human herpesvirus 7
ucuuaacgaaggcaucaagaaa

SEQ ID NO: 177823 - RNA, 14 nt, Human herpesvirus 7
ucuguagaugcaug

SEQ ID NO: 177824 - RNA, 20 nt, Human herpesvirus 7
ucuguagaugcaugcuaaua

SEQ ID NO: 177825 - RNA, 15 nt, Human herpesvirus 7
ucuggaguucaguaa

SEQ ID NO: 177826 - RNA, 13 nt, Human herpesvirus 7
ucuggacauuuca

SEQ ID NO: 177827 - RNA, 23 nt, Human herpesvirus 7
ucuuauaaccgauauaguuuguu

SEQ ID NO: 177828 - RNA, 14 nt, Human herpesvirus 7
ucuuauaauuauga

SEQ ID NO: 177829 - RNA, 23 nt, Human herpesvirus 7
ucuuaugccagguuuuucaaaga

SEQ ID NO: 177830 - RNA, 19 nt, Human herpesvirus 7
ucuuaugucugauucuuau

SEQ ID NO: 177831 - RNA, 22 nt, Human herpesvirus 7
ucuuugaaucgugggacuugau

SEQ ID NO: 177832 - RNA, 22 nt, Human herpesvirus 7
ucuuagcguucgacagcaaauu

SEQ ID NO: 177833 - RNA, 17 nt, Human herpesvirus 7
ucuuacuuccuaaucua

SEQ ID NO: 177834 - RNA, 14 nt, Human herpesvirus 7
ucuuacgucuuuuc

SEQ ID NO: 177835 - RNA, 22 nt, Human herpesvirus 7
ucuuacgucuuuucuaccaaca

SEQ ID NO: 177836 - RNA, 22 nt, Human herpesvirus 7
ucuuaagcuuuuguaaacauga

SEQ ID NO: 177837 - RNA, 15 nt, Human herpesvirus 7
ucuuacacuaugaga

SEQ ID NO: 177838 - RNA, 17 nt, Human herpesvirus 7
ucuuacacuaugagaua

SEQ ID NO: 177839 - RNA, 17 nt, Human herpesvirus 7
ucuuacagcacuuugag

SEQ ID NO: 177840 - RNA, 20 nt, Human herpesvirus 7
ucuuaccgcauaaaucaugu

SEQ ID NO: 177841 - RNA, 18 nt, Human herpesvirus 7
ucuccgugucacugucac

SEQ ID NO: 177842 - RNA, 19 nt, Human herpesvirus 7
ucuccuguaaccauuuauu

SEQ ID NO: 177843 - RNA, 18 nt, Human herpesvirus 7
ucuccaaucauaauuuuc

SEQ ID NO: 177844 - RNA, 17 nt, Human herpesvirus 7
ucucauuuucgacagaa

SEQ ID NO: 177845 - RNA, 13 nt, Human herpesvirus 7
ucucauagcuuaa

SEQ ID NO: 177846 - RNA, 15 nt, Human herpesvirus 7
ucuccaugcauauuu

SEQ ID NO: 177847 - RNA, 21 nt, Human herpesvirus 7
ucuccaugcauauuugaacau

SEQ ID NO: 177848 - RNA, 18 nt, Human herpesvirus 7
ucuccauucuaaaccaaa

SEQ ID NO: 177849 - RNA, 20 nt, Human herpesvirus 7
ucucccauucaauaauggca

SEQ ID NO: 177850 - RNA, 14 nt, Human herpesvirus 7
ucucuaaaauuuuc

SEQ ID NO: 177851 - RNA, 17 nt, Human herpesvirus 7
ucucuaugauccagcaa

SEQ ID NO: 177852 - RNA, 18 nt, Human herpesvirus 7
ucuccuuguuguguuuua

SEQ ID NO: 177853 - RNA, 22 nt, Human herpesvirus 7
ucucugucaaaagacgcuugcu

SEQ ID NO: 177854 - RNA, 15 nt, Human herpesvirus 7
ucucuguccagccaa

SEQ ID NO: 177855 - RNA, 18 nt, Human herpesvirus 7
ucugcuuuaagugauacu

SEQ ID NO: 177856 - RNA, 21 nt, Human herpesvirus 7
ucucucgcaacuucugauauc

SEQ ID NO: 177857 - RNA, 22 nt, Human herpesvirus 7
ucucuccaggcuaaaacuguca

SEQ ID NO: 177858 - RNA, 17 nt, Human herpesvirus 7
ucucugaucauuugcau

SEQ ID NO: 177859 - RNA, 21 nt, Human herpesvirus 7
ucuagcuaaugcuuugcugca

SEQ ID NO: 177860 - RNA, 14 nt, Human herpesvirus 7
ucuagcuuguuaaa

SEQ ID NO: 177861 - RNA, 19 nt, Human herpesvirus 7
ucuaggucuuccacuguug

SEQ ID NO: 177862 - RNA, 20 nt, Human herpesvirus 7
ucuaggucuuccacuguugu

SEQ ID NO: 177863 - RNA, 17 nt, Human herpesvirus 7
ucuagcaaaauaugcaa

SEQ ID NO: 177864 - RNA, 22 nt, Human herpesvirus 7
ucuagagauuacauccugcuaa

SEQ ID NO: 177865 - RNA, 14 nt, Human herpesvirus 7
ucuagagcauauac

SEQ ID NO: 177866 - RNA, 17 nt, Human herpesvirus 7
ucuagagcauauacaau

SEQ ID NO: 177867 - RNA, 12 nt, Human herpesvirus 7
ucuaauugcaga

SEQ ID NO: 177868 - RNA, 23 nt, Human herpesvirus 7
ucuacaaacaauuuuuuguucaa

SEQ ID NO: 177869 - RNA, 14 nt, Human herpesvirus 7
ucuacaaacagaag

SEQ ID NO: 177870 - RNA, 16 nt, Human herpesvirus 7
ucuaugaguauaccua

SEQ ID NO: 177871 - RNA, 13 nt, Human herpesvirus 7
ucuaugaugcauc

SEQ ID NO: 177872 - RNA, 14 nt, Human herpesvirus 7
ucuaucacaaccug

SEQ ID NO: 177873 - RNA, 14 nt, Human herpesvirus 7
ucuaucaccaagaa

SEQ ID NO: 177874 - RNA, 19 nt, Human herpesvirus 7
ucuaucaccaagaacaaua

SEQ ID NO: 177875 - RNA, 12 nt, Human herpesvirus 7
ucuauauuugau

SEQ ID NO: 177876 - RNA, 12 nt, Human herpesvirus 7
ucuauaaacauu

SEQ ID NO: 177877 - RNA, 15 nt, Human herpesvirus 7
ucuauaaacauucua

SEQ ID NO: 177878 - RNA, 21 nt, Human herpesvirus 7
ucuauaugaagaauguaugaa

SEQ ID NO: 177879 - RNA, 19 nt, Human herpesvirus 7
ucguuguuaaauccaauua

SEQ ID NO: 177880 - RNA, 12 nt, Human herpesvirus 7
ucuaaacaaaca

SEQ ID NO: 177881 - RNA, 21 nt, Human herpesvirus 7
ucuaaacaaacaaugagcaau

SEQ ID NO: 177882 - RNA, 19 nt, Human herpesvirus 7
ucuaacaaauaccaugaaa

SEQ ID NO: 177883 - RNA, 19 nt, Human herpesvirus 7
ucuaagagcuuuugcaaag

SEQ ID NO: 177884 - RNA, 12 nt, Human herpesvirus 7
ucuaagguuuag

SEQ ID NO: 177885 - RNA, 13 nt, Human herpesvirus 7
ucuaauacaucua

SEQ ID NO: 177886 - RNA, 22 nt, Human herpesvirus 7
ucuaauagacaaauuaaacaau

SEQ ID NO: 177887 - RNA, 19 nt, Human herpesvirus 7
ucggcacccuaauugccau

SEQ ID NO: 177888 - RNA, 16 nt, Human herpesvirus 7
ucgguaacaugucuuc

SEQ ID NO: 177889 - RNA, 16 nt, Human herpesvirus 7
ucgcagccauguugcg

SEQ ID NO: 177890 - RNA, 19 nt, Human herpesvirus 7
ucgcacgaaagaccuguac

SEQ ID NO: 177891 - RNA, 21 nt, Human herpesvirus 7
ucgcaaugguauaaagugcug

SEQ ID NO: 177892 - RNA, 15 nt, Human herpesvirus 7
ucgcaaauguacaau

SEQ ID NO: 177893 - RNA, 18 nt, Human herpesvirus 7
ucgccaccguugggaaag

SEQ ID NO: 177894 - RNA, 14 nt, Human herpesvirus 7
uccuucuaccucuu

SEQ ID NO: 177895 - RNA, 18 nt, Human herpesvirus 7
uccuuguuguguuuuauc

SEQ ID NO: 177896 - RNA, 20 nt, Human herpesvirus 7
uccuuggaaaaaugaugcuc

SEQ ID NO: 177897 - RNA, 13 nt, Human herpesvirus 7
ucgaacuugucac

SEQ ID NO: 177898 - RNA, 22 nt, Human herpesvirus 7
ucgaagaaauucgaaacacuua

SEQ ID NO: 177899 - RNA, 15 nt, Human herpesvirus 7
ucgaaacuggcaaua

SEQ ID NO: 177900 - RNA, 21 nt, Human herpesvirus 7
uccuuuuguugaaauuguagu

SEQ ID NO: 177901 - RNA, 21 nt, Human herpesvirus 7
ucgaaaccgucagcaucucag

SEQ ID NO: 177902 - RNA, 18 nt, Human herpesvirus 7
ucgacuucuaaaaauaca

SEQ ID NO: 177903 - RNA, 15 nt, Human herpesvirus 7
ucgaauuugugauau

SEQ ID NO: 177904 - RNA, 19 nt, Human herpesvirus 7
ucgaauuuuacaaugcagc

SEQ ID NO: 177905 - RNA, 18 nt, Human herpesvirus 7
ucgaucacguuuugcaaa

SEQ ID NO: 177906 - RNA, 14 nt, Human herpesvirus 7
ucgaucucugucaa

SEQ ID NO: 177907 - RNA, 19 nt, Human herpesvirus 7
ucgaucucugucaaaagac

SEQ ID NO: 177908 - RNA, 14 nt, Human herpesvirus 7
ucgauaaacuuugu

SEQ ID NO: 177909 - RNA, 20 nt, Human herpesvirus 7
uccuggaaagcucauuucau

SEQ ID NO: 177910 - RNA, 17 nt, Human herpesvirus 7
uccugugugcaaugaug

SEQ ID NO: 177911 - RNA, 16 nt, Human herpesvirus 7
uccucuaucucuguaa

SEQ ID NO: 177912 - RNA, 16 nt, Human herpesvirus 7
uccucucguguggccu

SEQ ID NO: 177913 - RNA, 16 nt, Human herpesvirus 7
uccaguacgucuugcu

SEQ ID NO: 177914 - RNA, 17 nt, Human herpesvirus 7
uccaguggcaguacuac

SEQ ID NO: 177915 - RNA, 15 nt, Human herpesvirus 7
uccagugaccuuuua

SEQ ID NO: 177916 - RNA, 19 nt, Human herpesvirus 7
uccauaaauaaaaacaugg

SEQ ID NO: 177917 - RNA, 13 nt, Human herpesvirus 7
uccauacaaagaa

SEQ ID NO: 177918 - RNA, 15 nt, Human herpesvirus 7
uccauacaaagaaga

SEQ ID NO: 177919 - RNA, 22 nt, Human herpesvirus 7
ucccucuaguggcaacgaggaa

SEQ ID NO: 177920 - RNA, 15 nt, Human herpesvirus 7
ucccugcugauacaa

SEQ ID NO: 177921 - RNA, 13 nt, Human herpesvirus 7
uccccauggcuuu

SEQ ID NO: 177922 - RNA, 15 nt, Human herpesvirus 7
ucaugaaaacagugg

SEQ ID NO: 177923 - RNA, 15 nt, Human herpesvirus 7
ucaugaacacaacau

SEQ ID NO: 177924 - RNA, 17 nt, Human herpesvirus 7
ucaucuuaaaaguacaa

SEQ ID NO: 177925 - RNA, 14 nt, Human herpesvirus 7
uccaaucaaaaacu

SEQ ID NO: 177926 - RNA, 23 nt, Human herpesvirus 7
ucaucccaaaccaugauguuaaa

SEQ ID NO: 177927 - RNA, 15 nt, Human herpesvirus 7
ucaucccaauaccgu

SEQ ID NO: 177928 - RNA, 17 nt, Human herpesvirus 7
ucaucccugcugauaca

SEQ ID NO: 177929 - RNA, 20 nt, Human herpesvirus 7
ucaucggguacguccauuuc

SEQ ID NO: 177930 - RNA, 22 nt, Human herpesvirus 7
ucaucgguuuucugagugcuaa

SEQ ID NO: 177931 - RNA, 15 nt, Human herpesvirus 7
ucaucucacuucaga

SEQ ID NO: 177932 - RNA, 15 nt, Human herpesvirus 7
ucaucugaacagguu

SEQ ID NO: 177933 - RNA, 15 nt, Human herpesvirus 7
uccaccgauuacugu

SEQ ID NO: 177934 - RNA, 23 nt, Human herpesvirus 7
uccacacagggaagaaacagcug

SEQ ID NO: 177935 - RNA, 20 nt, Human herpesvirus 7
uccacauacucuagaacaaa

SEQ ID NO: 177936 - RNA, 13 nt, Human herpesvirus 7
uaucagauuuuau

SEQ ID NO: 177937 - RNA, 20 nt, Human herpesvirus 7
uaucaaggucuuucaugcau

SEQ ID NO: 177938 - RNA, 16 nt, Human herpesvirus 7
uaucaccauaugccaa

SEQ ID NO: 177939 - RNA, 17 nt, Human herpesvirus 7
uaucauuucuggaugaa

SEQ ID NO: 177940 - RNA, 15 nt, Human herpesvirus 7
uaucauacguuuaca

SEQ ID NO: 177941 - RNA, 16 nt, Human herpesvirus 7
uaucaguacaacgaca

SEQ ID NO: 177942 - RNA, 19 nt, Human herpesvirus 7
uauccggaagagacuguca

SEQ ID NO: 177943 - RNA, 15 nt, Human herpesvirus 7
uaucgcccacuauuu

SEQ ID NO: 177944 - RNA, 11 nt, Human herpesvirus 7
uaucugucaug

SEQ ID NO: 177945 - RNA, 21 nt, Human herpesvirus 7
uaucuccacgcucccauaaaa

SEQ ID NO: 177946 - RNA, 14 nt, Human herpesvirus 7
uaucucuacaaaca

SEQ ID NO: 177947 - RNA, 16 nt, Human herpesvirus 7
uaucucuacaaacaga

SEQ ID NO: 177948 - RNA, 15 nt, Human herpesvirus 7
uaucuaccgcuguac

SEQ ID NO: 177949 - RNA, 17 nt, Human herpesvirus 7
uaucuaccgcuguacaa

SEQ ID NO: 177950 - RNA, 18 nt, Human herpesvirus 7
uaucuaaaguggagacaa

SEQ ID NO: 177951 - RNA, 13 nt, Human herpesvirus 7
uaucuaacacugc

SEQ ID NO: 177952 - RNA, 22 nt, Human herpesvirus 7
uaugacuuugaaucaacagcca

SEQ ID NO: 177953 - RNA, 23 nt, Human herpesvirus 7
uaugagugcuaugaaaauuuccu

SEQ ID NO: 177954 - RNA, 21 nt, Human herpesvirus 7
uaugauccagcaaagacuugc

SEQ ID NO: 177955 - RNA, 17 nt, Human herpesvirus 7
uaugaugaaacuuccaa

SEQ ID NO: 177956 - RNA, 14 nt, Human herpesvirus 7
uaugaugacgcuaa

SEQ ID NO: 177957 - RNA, 20 nt, Human herpesvirus 7
uaugcaagaaaguccaaagu

SEQ ID NO: 177958 - RNA, 13 nt, Human herpesvirus 7
uaugcacauccaa

SEQ ID NO: 177959 - RNA, 14 nt, Human herpesvirus 7
uaugcacauccaaa

SEQ ID NO: 177960 - RNA, 20 nt, Human herpesvirus 7
uaugaaaaugcccucagaac

SEQ ID NO: 177961 - RNA, 15 nt, Human herpesvirus 7
uaucuuuucaaagga

SEQ ID NO: 177962 - RNA, 15 nt, Human herpesvirus 7
uaucugagagaaccu

SEQ ID NO: 177963 - RNA, 22 nt, Human herpesvirus 7
uaucuuucggagacguugcuca

SEQ ID NO: 177964 - RNA, 14 nt, Human herpesvirus 7
uaugacagaccuau

SEQ ID NO: 177965 - RNA, 15 nt, Human herpesvirus 7
uaugaacuggcacau

SEQ ID NO: 177966 - RNA, 22 nt, Human herpesvirus 7
uaugaagcgcugagaucuucca

SEQ ID NO: 177967 - RNA, 13 nt, Human herpesvirus 7
uaugaaauuucaa

SEQ ID NO: 177968 - RNA, 22 nt, Human herpesvirus 7
uaugaaauuucaaaaauucucc

SEQ ID NO: 177969 - RNA, 18 nt, Human herpesvirus 7
uaugaacaagguucucau

SEQ ID NO: 177970 - RNA, 20 nt, Human herpesvirus 7
uaugguucuuauaacaaagu

SEQ ID NO: 177971 - RNA, 13 nt, Human herpesvirus 7
uauguacgugugc

SEQ ID NO: 177972 - RNA, 18 nt, Human herpesvirus 7
uauguacucugauugacu

SEQ ID NO: 177973 - RNA, 22 nt, Human herpesvirus 7
uaugccagguuuuucaaagacg

SEQ ID NO: 177974 - RNA, 15 nt, Human herpesvirus 7
uaugcaugcaauuuu

SEQ ID NO: 177975 - RNA, 18 nt, Human herpesvirus 7
uaugcaucaaaacauauc

SEQ ID NO: 177976 - RNA, 17 nt, Human herpesvirus 7
uauaucuuuuuauugaa

SEQ ID NO: 177977 - RNA, 19 nt, Human herpesvirus 7
uauaugaaucaaauuucaa

SEQ ID NO: 177978 - RNA, 12 nt, Human herpesvirus 7
uauauuaaucuu

SEQ ID NO: 177979 - RNA, 17 nt, Human herpesvirus 7
uauaugcuuuauuuaau

SEQ ID NO: 177980 - RNA, 14 nt, Human herpesvirus 7
uauauggcaauaaa

SEQ ID NO: 177981 - RNA, 14 nt, Human herpesvirus 7
uaucaaaauuccau

SEQ ID NO: 177982 - RNA, 21 nt, Human herpesvirus 7
uaucaaauccgagucaguaua

SEQ ID NO: 177983 - RNA, 22 nt, Human herpesvirus 7
uauauuggcaugcuuacaguga

SEQ ID NO: 177984 - RNA, 23 nt, Human herpesvirus 7
uauauuggcaugcuuacagugaa

SEQ ID NO: 177985 - RNA, 16 nt, Human herpesvirus 7
uauauugaaggugucu

SEQ ID NO: 177986 - RNA, 18 nt, Human herpesvirus 7
uauauuucuuaucuccau

SEQ ID NO: 177987 - RNA, 13 nt, Human herpesvirus 7
uauauuugcuugc

SEQ ID NO: 177988 - RNA, 18 nt, Human herpesvirus 7
uauauaaguccuucaaua

SEQ ID NO: 177989 - RNA, 14 nt, Human herpesvirus 7
uauagucaggaucu

SEQ ID NO: 177990 - RNA, 20 nt, Human herpesvirus 7
uagaauggcaccccugccag

SEQ ID NO: 177991 - RNA, 16 nt, Human herpesvirus 7
uauacaaaagacauaa

SEQ ID NO: 177992 - RNA, 21 nt, Human herpesvirus 7
uauacaaaagacauaacaaaa

SEQ ID NO: 177993 - RNA, 13 nt, Human herpesvirus 7
uauacaaauccaa

SEQ ID NO: 177994 - RNA, 22 nt, Human herpesvirus 7
uauacaaauuuuaauagucuaa

SEQ ID NO: 177995 - RNA, 13 nt, Human herpesvirus 7
uauacauacuaaa

SEQ ID NO: 177996 - RNA, 21 nt, Human herpesvirus 7
uauacauaaagagaaaguaaa

SEQ ID NO: 177997 - RNA, 18 nt, Human herpesvirus 7
uagaaacuuauguacuau

SEQ ID NO: 177998 - RNA, 13 nt, Human herpesvirus 7
uacuguaauuucu

SEQ ID NO: 177999 - RNA, 15 nt, Human herpesvirus 7
uacuggcaugucuca

SEQ ID NO: 178000 - RNA, 22 nt, Human herpesvirus 7
uagaaauuguuaccuaaaccua

SEQ ID NO: 178001 - RNA, 18 nt, Human herpesvirus 7
uagaaauuauuguacauu

SEQ ID NO: 178002 - RNA, 20 nt, Human herpesvirus 7
uacuguuaagaauuccagau

SEQ ID NO: 178003 - RNA, 14 nt, Human herpesvirus 7
uagaagaaagucau

SEQ ID NO: 178004 - RNA, 21 nt, Human herpesvirus 7
uagaagaaugcaagccuagaa

SEQ ID NO: 178005 - RNA, 21 nt, Human herpesvirus 7
uagaagagauucggcugagua

SEQ ID NO: 178006 - RNA, 16 nt, Human herpesvirus 7
ucagaauguacacagc

SEQ ID NO: 178007 - RNA, 14 nt, Human herpesvirus 7
ucagaccagcacaa

SEQ ID NO: 178008 - RNA, 14 nt, Human herpesvirus 7
ucacuuugcaucaa

SEQ ID NO: 178009 - RNA, 16 nt, Human herpesvirus 7
ucacugcucaaaucaa

SEQ ID NO: 178010 - RNA, 19 nt, Human herpesvirus 7
ucagaacuuuuaaaaaaga

SEQ ID NO: 178011 - RNA, 20 nt, Human herpesvirus 7
ucagaaauaacaaaauugua

SEQ ID NO: 178012 - RNA, 23 nt, Human herpesvirus 7
ucaucaucuuuuugaacagaauu

SEQ ID NO: 178013 - RNA, 14 nt, Human herpesvirus 7
ucaggcaacauuaa

SEQ ID NO: 178014 - RNA, 15 nt, Human herpesvirus 7
ucaggcaacauuaau

SEQ ID NO: 178015 - RNA, 18 nt, Human herpesvirus 7
ucaggcuaugacuuugaa

SEQ ID NO: 178016 - RNA, 19 nt, Human herpesvirus 7
ucaggcuaugacuuugaau

SEQ ID NO: 178017 - RNA, 13 nt, Human herpesvirus 7
ucaggaaucuuuu

SEQ ID NO: 178018 - RNA, 19 nt, Human herpesvirus 7
ucaggacaaucaaacaugu

SEQ ID NO: 178019 - RNA, 14 nt, Human herpesvirus 7
ucaccacacucaua

SEQ ID NO: 178020 - RNA, 23 nt, Human herpesvirus 7
ucaccacgugucgcagccauguu

SEQ ID NO: 178021 - RNA, 16 nt, Human herpesvirus 7
ucacaaaagcuuugau

SEQ ID NO: 178022 - RNA, 17 nt, Human herpesvirus 7
ucacaaaagcuuugauc

SEQ ID NO: 178023 - RNA, 19 nt, Human herpesvirus 7
ucacaaaagcuuugaucua

SEQ ID NO: 178024 - RNA, 20 nt, Human herpesvirus 7
ucacaaaacucuucuuuaua

SEQ ID NO: 178025 - RNA, 13 nt, Human herpesvirus 7
ucaccgaugaauu

SEQ ID NO: 178026 - RNA, 15 nt, Human herpesvirus 7
ucaauggcaucuuau

SEQ ID NO: 178027 - RNA, 15 nt, Human herpesvirus 7
ucaauuaaugcauug

SEQ ID NO: 178028 - RNA, 18 nt, Human herpesvirus 7
ucaauuaaugcauuggaa

SEQ ID NO: 178029 - RNA, 19 nt, Human herpesvirus 7
ucaauuuuucucccgcaga

SEQ ID NO: 178030 - RNA, 17 nt, Human herpesvirus 7
ucaauuuuaaugugcuu

SEQ ID NO: 178031 - RNA, 18 nt, Human herpesvirus 7
ucaaucuacuguacuuuu

SEQ ID NO: 178032 - RNA, 16 nt, Human herpesvirus 7
ucaaucacauacucua

SEQ ID NO: 178033 - RNA, 13 nt, Human herpesvirus 7
ucaaucaccaaag

SEQ ID NO: 178034 - RNA, 14 nt, Human herpesvirus 7
ucaaucaccaaaga

SEQ ID NO: 178035 - RNA, 13 nt, Human herpesvirus 7
ucaagcacaauca

SEQ ID NO: 178036 - RNA, 18 nt, Human herpesvirus 7
ucaagcacaaucacguga

SEQ ID NO: 178037 - RNA, 14 nt, Human herpesvirus 7
ucaagauaagcaau

SEQ ID NO: 178038 - RNA, 21 nt, Human herpesvirus 7
ucaagccacgaugacuuccaa

SEQ ID NO: 178039 - RNA, 19 nt, Human herpesvirus 7
ucaaaauauuuaucugcau

SEQ ID NO: 178040 - RNA, 15 nt, Human herpesvirus 7
ucaaacaacauaucg

SEQ ID NO: 178041 - RNA, 21 nt, Human herpesvirus 7
ucaaacaauacccaauacaua

SEQ ID NO: 178042 - RNA, 15 nt, Human herpesvirus 7
ucaaaauuccauucg

SEQ ID NO: 178043 - RNA, 19 nt, Human herpesvirus 7
ucaaaauuuuauugucuaa

SEQ ID NO: 178044 - RNA, 12 nt, Human herpesvirus 7
ucaaaagcuaaa

SEQ ID NO: 178045 - RNA, 21 nt, Human herpesvirus 7
uauuucgucuuuccucacaga

SEQ ID NO: 178046 - RNA, 16 nt, Human herpesvirus 7
uauuucuuaucuccau

SEQ ID NO: 178047 - RNA, 16 nt, Human herpesvirus 7
uauuucuuauuggaga

SEQ ID NO: 178048 - RNA, 18 nt, Human herpesvirus 7
uauuuccaacgcauucaa

SEQ ID NO: 178049 - RNA, 14 nt, Human herpesvirus 7
uauuuaucugcauu

SEQ ID NO: 178050 - RNA, 21 nt, Human herpesvirus 7
ucaaaguagccuucauuagga

SEQ ID NO: 178051 - RNA, 12 nt, Human herpesvirus 7
ucaaacauguaa

SEQ ID NO: 178052 - RNA, 14 nt, Human herpesvirus 7
ucaaauaucucugu

SEQ ID NO: 178053 - RNA, 14 nt, Human herpesvirus 7
ucaacgaucucaaa

SEQ ID NO: 178054 - RNA, 14 nt, Human herpesvirus 7
ucaagaauggcuga

SEQ ID NO: 178055 - RNA, 16 nt, Human herpesvirus 7
ucaacuucaacauaca

SEQ ID NO: 178056 - RNA, 21 nt, Human herpesvirus 7
uauuaaguguuugcucugaaa

SEQ ID NO: 178057 - RNA, 15 nt, Human herpesvirus 7
uauuagauaaugaca

SEQ ID NO: 178058 - RNA, 19 nt, Human herpesvirus 7
uauuagauuauacaaaucc

SEQ ID NO: 178059 - RNA, 23 nt, Human herpesvirus 7
uauucauuugcuucuucuaauac

SEQ ID NO: 178060 - RNA, 17 nt, Human herpesvirus 7
uauuauuucuacacaaa

SEQ ID NO: 178061 - RNA, 20 nt, Human herpesvirus 7
uauucacgcuuccaucacaa

SEQ ID NO: 178062 - RNA, 22 nt, Human herpesvirus 7
uauucacgcuuccaucacaaaa

SEQ ID NO: 178063 - RNA, 20 nt, Human herpesvirus 7
uauucaaacgcuugaacaaa

SEQ ID NO: 178064 - RNA, 16 nt, Human herpesvirus 7
uauuccagauaugaca

SEQ ID NO: 178065 - RNA, 18 nt, Human herpesvirus 7
uauugguaauuagugaaa

SEQ ID NO: 178066 - RNA, 16 nt, Human herpesvirus 7
uauuuacugauucuau

SEQ ID NO: 178067 - RNA, 15 nt, Human herpesvirus 7
uauuuagcuaauuca

SEQ ID NO: 178068 - RNA, 21 nt, Human herpesvirus 7
uauguauaucuuuuuauugaa

SEQ ID NO: 178069 - RNA, 20 nt, Human herpesvirus 7
uauguauuuuacuggaugau

SEQ ID NO: 178070 - RNA, 19 nt, Human herpesvirus 7
uauguccaaucaaaaacug

SEQ ID NO: 178071 - RNA, 20 nt, Human herpesvirus 7
uauguggugcuuacgugaug

SEQ ID NO: 178072 - RNA, 18 nt, Human herpesvirus 7
uauguuagaugugcuuug

SEQ ID NO: 178073 - RNA, 15 nt, Human herpesvirus 7
uauguguuuacauua

SEQ ID NO: 178074 - RNA, 17 nt, Human herpesvirus 7
uaugugcuuauaucuua

SEQ ID NO: 178075 - RNA, 12 nt, Human herpesvirus 7
uauguggcacau

SEQ ID NO: 178076 - RNA, 13 nt, Human herpesvirus 7
uauguggcacaua

SEQ ID NO: 178077 - RNA, 16 nt, Human herpesvirus 7
uauguuuaaaugaaga

SEQ ID NO: 178078 - RNA, 21 nt, Human herpesvirus 7
uauguugcaaugaaagguuac

SEQ ID NO: 178079 - RNA, 14 nt, Human herpesvirus 7
uauguugcauauca

SEQ ID NO: 178080 - RNA, 15 nt, Human herpesvirus 7
uauguuaucauuuau

SEQ ID NO: 178081 - RNA, 22 nt, Human herpesvirus 7
uauguucagauugaaauuccau

SEQ ID NO: 178082 - RNA, 14 nt, Human herpesvirus 7
uauuaaagcuuuca

SEQ ID NO: 178083 - RNA, 19 nt, Human herpesvirus 7
uauuaaagcuuucaauuca

SEQ ID NO: 178084 - RNA, 18 nt, Human herpesvirus 7
uauguugaaguugaacaa

SEQ ID NO: 178085 - RNA, 17 nt, Human herpesvirus 7
uauuaaaucauaccaua

SEQ ID NO: 178086 - RNA, 18 nt, Human herpesvirus 7
uauuaauacguccaaaaa

SEQ ID NO: 178087 - RNA, 14 nt, Human herpesvirus 7
uauuaaucuugaaa

SEQ ID NO: 178088 - RNA, 23 nt, Human herpesvirus 7
uauuacacaggaauugcugucua

SEQ ID NO: 178089 - RNA, 14 nt, Human herpesvirus 7
guguccacuacaga

SEQ ID NO: 178090 - RNA, 17 nt, Human herpesvirus 7
guguacuaaagccaaug

SEQ ID NO: 178091 - RNA, 22 nt, Human herpesvirus 7
guuaaaagaucuuuuacagaag

SEQ ID NO: 178092 - RNA, 13 nt, Human herpesvirus 7
guuaaagaacaag

SEQ ID NO: 178093 - RNA, 13 nt, Human herpesvirus 7
guguuugaaugac

SEQ ID NO: 178094 - RNA, 19 nt, Human herpesvirus 7
guguuuuaucuaccaucaa

SEQ ID NO: 178095 - RNA, 17 nt, Human herpesvirus 7
guguucuuuaaccagau

SEQ ID NO: 178096 - RNA, 16 nt, Human herpesvirus 7
guggcaaaagauuuaa

SEQ ID NO: 178097 - RNA, 13 nt, Human herpesvirus 7
gugguacaacaaa

SEQ ID NO: 178098 - RNA, 12 nt, Human herpesvirus 7
guggcaguacua

SEQ ID NO: 178099 - RNA, 19 nt, Human herpesvirus 7
guuaauugugguacaacaa

SEQ ID NO: 178100 - RNA, 22 nt, Human herpesvirus 7
guucaaaauauuuaucugcauu

SEQ ID NO: 178101 - RNA, 22 nt, Human herpesvirus 7
guucacgaucgucaucuucucu

SEQ ID NO: 178102 - RNA, 20 nt, Human herpesvirus 7
guucaaauaugcauggagaa

SEQ ID NO: 178103 - RNA, 12 nt, Human herpesvirus 7
guuaauuuugca

SEQ ID NO: 178104 - RNA, 17 nt, Human herpesvirus 7
guuacacugauuucuac

SEQ ID NO: 178105 - RNA, 15 nt, Human herpesvirus 7
guuacacugauuuuu

SEQ ID NO: 178106 - RNA, 16 nt, Human herpesvirus 7
guuaaaggaucaaaag

SEQ ID NO: 178107 - RNA, 13 nt, Human herpesvirus 7
guuaagcaccgaa

SEQ ID NO: 178108 - RNA, 14 nt, Human herpesvirus 7
guucauaaugacac

SEQ ID NO: 178109 - RNA, 12 nt, Human herpesvirus 7
guuccacgucaa

SEQ ID NO: 178110 - RNA, 19 nt, Human herpesvirus 7
guucccauaaauauugaua

SEQ ID NO: 178111 - RNA, 12 nt, Human herpesvirus 7
guuccuuauauu

SEQ ID NO: 178112 - RNA, 18 nt, Human herpesvirus 7
guuccugugugcaaugau

SEQ ID NO: 178113 - RNA, 21 nt, Human herpesvirus 7
guucggcaacggccauucacc

SEQ ID NO: 178114 - RNA, 13 nt, Human herpesvirus 7
guuccgaaaacau

SEQ ID NO: 178115 - RNA, 16 nt, Human herpesvirus 7
guuccgaaaacaucag

SEQ ID NO: 178116 - RNA, 23 nt, Human herpesvirus 7
guuccuaaauaauucacauuuau

SEQ ID NO: 178117 - RNA, 15 nt, Human herpesvirus 7
gugaucuggauucaa

SEQ ID NO: 178118 - RNA, 22 nt, Human herpesvirus 7
gugaucuggauucaagaaauca

SEQ ID NO: 178119 - RNA, 17 nt, Human herpesvirus 7
gugaugccauaauuuca

SEQ ID NO: 178120 - RNA, 21 nt, Human herpesvirus 7
gugauaugacugacauucuuc

SEQ ID NO: 178121 - RNA, 17 nt, Human herpesvirus 7
gugauacugaaucugaa

SEQ ID NO: 178122 - RNA, 23 nt, Human herpesvirus 7
gugaguucacgaucgucaucuuc

SEQ ID NO: 178123 - RNA, 20 nt, Human herpesvirus 7
gugauaauagugggccaaga

SEQ ID NO: 178124 - RNA, 17 nt, Human herpesvirus 7
gugauuuuuuauuccca

SEQ ID NO: 178125 - RNA, 18 nt, Human herpesvirus 7
gugcacacaaaggccagg

SEQ ID NO: 178126 - RNA, 24 nt, Human herpesvirus 7
guggaaucucauaaucauaguaca

SEQ ID NO: 178127 - RNA, 24 nt, Human herpesvirus 7
gugcaucuccuguaaccauuuauu

SEQ ID NO: 178128 - RNA, 15 nt, Human herpesvirus 7
gucuuucaugcauug

SEQ ID NO: 178129 - RNA, 18 nt, Human herpesvirus 7
gucuuucaugcauugcau

SEQ ID NO: 178130 - RNA, 23 nt, Human herpesvirus 7
gucuuuccucacagauuuuccaa

SEQ ID NO: 178131 - RNA, 17 nt, Human herpesvirus 7
gugagcacggcacacaa

SEQ ID NO: 178132 - RNA, 13 nt, Human herpesvirus 7
gucuuugucauga

SEQ ID NO: 178133 - RNA, 15 nt, Human herpesvirus 7
gucuuuuaguuuuca

SEQ ID NO: 178134 - RNA, 13 nt, Human herpesvirus 7
gucuguguuauac

SEQ ID NO: 178135 - RNA, 15 nt, Human herpesvirus 7
gucuuacaacuagaa

SEQ ID NO: 178136 - RNA, 19 nt, Human herpesvirus 7
gucccaaacaggcauuuaa

SEQ ID NO: 178137 - RNA, 23 nt, Human herpesvirus 7
gucccgcagacuuucgugucaca

SEQ ID NO: 178138 - RNA, 20 nt, Human herpesvirus 7
guccggauguaggugcugca

SEQ ID NO: 178139 - RNA, 22 nt, Human herpesvirus 7
guauacaaaagacauaacaaaa

SEQ ID NO: 178140 - RNA, 15 nt, Human herpesvirus 7
guagugugcacacaa

SEQ ID NO: 178141 - RNA, 17 nt, Human herpesvirus 7
guaguuguagugcuguu

SEQ ID NO: 178142 - RNA, 12 nt, Human herpesvirus 7
guauacaacuuu

SEQ ID NO: 178143 - RNA, 14 nt, Human herpesvirus 7
guauaacucaaaag

SEQ ID NO: 178144 - RNA, 23 nt, Human herpesvirus 7
guagaugcaugcuaauauuucca

SEQ ID NO: 178145 - RNA, 16 nt, Human herpesvirus 7
guacuuguaccaauca

SEQ ID NO: 178146 - RNA, 18 nt, Human herpesvirus 7
guacuuguaccaaucaag

SEQ ID NO: 178147 - RNA, 21 nt, Human herpesvirus 7
guacuuguaccaaucaagcca

SEQ ID NO: 178148 - RNA, 14 nt, Human herpesvirus 7
guagaaaaugcugu

SEQ ID NO: 178149 - RNA, 12 nt, Human herpesvirus 7
guagaauguguu

SEQ ID NO: 178150 - RNA, 20 nt, Human herpesvirus 7
guagaaggaaaccaauuaau

SEQ ID NO: 178151 - RNA, 13 nt, Human herpesvirus 7
guacuaaucacaa

SEQ ID NO: 178152 - RNA, 13 nt, Human herpesvirus 7
guacuacauauua

SEQ ID NO: 178153 - RNA, 14 nt, Human herpesvirus 7
guacuaaagccaau

SEQ ID NO: 178154 - RNA, 22 nt, Human herpesvirus 7
guacuccuucuaccucuuacau

SEQ ID NO: 178155 - RNA, 15 nt, Human herpesvirus 7
gggguuuuuuugccu

SEQ ID NO: 178156 - RNA, 22 nt, Human herpesvirus 7
ggggugauuguggggcauucau

SEQ ID NO: 178157 - RNA, 16 nt, Human herpesvirus 7
ggguaauuaaaggaaa

SEQ ID NO: 178158 - RNA, 12 nt, Human herpesvirus 7
gucaugaugaau

SEQ ID NO: 178159 - RNA, 20 nt, Human herpesvirus 7
gucaugaugaauauaacaaa

SEQ ID NO: 178160 - RNA, 12 nt, Human herpesvirus 7
gucaugcuguau

SEQ ID NO: 178161 - RNA, 20 nt, Human herpesvirus 7
gucaugaaucuuugacugua

SEQ ID NO: 178162 - RNA, 20 nt, Human herpesvirus 7
gucaugacuggacacaauca

SEQ ID NO: 178163 - RNA, 21 nt, Human herpesvirus 7
guccaacacaagguacauuuu

SEQ ID NO: 178164 - RNA, 23 nt, Human herpesvirus 7
guccaaaaguuguuaagaaucua

SEQ ID NO: 178165 - RNA, 23 nt, Human herpesvirus 7
guccaauagaaaacaaaucugau

SEQ ID NO: 178166 - RNA, 23 nt, Human herpesvirus 7
guccacuacagauauugaugacg

SEQ ID NO: 178167 - RNA, 22 nt, Human herpesvirus 7
gucacguucuaaaaaacaaaaa

SEQ ID NO: 178168 - RNA, 13 nt, Human herpesvirus 7
gucacugagccau

SEQ ID NO: 178169 - RNA, 14 nt, Human herpesvirus 7
gucacuguccaaaa

SEQ ID NO: 178170 - RNA, 19 nt, Human herpesvirus 7
gucacggauuagcuuucag

SEQ ID NO: 178171 - RNA, 15 nt, Human herpesvirus 7
gucacaauuacacaa

SEQ ID NO: 178172 - RNA, 14 nt, Human herpesvirus 7
gucaauauuuuugc

SEQ ID NO: 178173 - RNA, 16 nt, Human herpesvirus 7
gucacacuuauuccag

SEQ ID NO: 178174 - RNA, 22 nt, Human herpesvirus 7
gucaaauauauauuaagaaaua

SEQ ID NO: 178175 - RNA, 17 nt, Human herpesvirus 7
guauucuuaugccaggu

SEQ ID NO: 178176 - RNA, 20 nt, Human herpesvirus 7
gucaaaaaaaaaacaaucca

SEQ ID NO: 178177 - RNA, 17 nt, Human herpesvirus 7
guauuuguugaucuuca

SEQ ID NO: 178178 - RNA, 18 nt, Human herpesvirus 7
guauuuguugaucuucaa

SEQ ID NO: 178179 - RNA, 15 nt, Human herpesvirus 7
guauuucgucuuucc

SEQ ID NO: 178180 - RNA, 17 nt, Human herpesvirus 7
guaucuagagaauguac

SEQ ID NO: 178181 - RNA, 11 nt, Human herpesvirus 7
guaugaugacg

SEQ ID NO: 178182 - RNA, 14 nt, Human herpesvirus 7
guaugaugacgcua

SEQ ID NO: 178183 - RNA, 14 nt, Human herpesvirus 7
guauuaccauuuau

SEQ ID NO: 178184 - RNA, 15 nt, Human herpesvirus 7
guauucaaacauuau

SEQ ID NO: 178185 - RNA, 20 nt, Human herpesvirus 7
guauuaaaggaaacauuucu

SEQ ID NO: 178186 - RNA, 13 nt, Human herpesvirus 7
uaaauauuuuaca

SEQ ID NO: 178187 - RNA, 12 nt, Human herpesvirus 7
uaaauauucuaa

SEQ ID NO: 178188 - RNA, 18 nt, Human herpesvirus 7
uaaaucaaccaacauucu

SEQ ID NO: 178189 - RNA, 18 nt, Human herpesvirus 7
uaacaacagcagcugcua

SEQ ID NO: 178190 - RNA, 16 nt, Human herpesvirus 7
uaacaaagugcauaaa

SEQ ID NO: 178191 - RNA, 18 nt, Human herpesvirus 7
uaacaaauucaaccacag

SEQ ID NO: 178192 - RNA, 21 nt, Human herpesvirus 7
uaacaauaaaguuuccauaaa

SEQ ID NO: 178193 - RNA, 18 nt, Human herpesvirus 7
uaacgauccaguacuugc

SEQ ID NO: 178194 - RNA, 16 nt, Human herpesvirus 7
uaacgcugaauucauu

SEQ ID NO: 178195 - RNA, 22 nt, Human herpesvirus 7
uaaccuuuuaacaacagccaaa

SEQ ID NO: 178196 - RNA, 18 nt, Human herpesvirus 7
uaacguuuaucaccguaa

SEQ ID NO: 178197 - RNA, 21 nt, Human herpesvirus 7
uaacuaugaacuggcacauua

SEQ ID NO: 178198 - RNA, 17 nt, Human herpesvirus 7
uaacuauaaauggaauu

SEQ ID NO: 178199 - RNA, 15 nt, Human herpesvirus 7
uaacuaucacccaca

SEQ ID NO: 178200 - RNA, 19 nt, Human herpesvirus 7
uaacugagaaaaaugacaa

SEQ ID NO: 178201 - RNA, 21 nt, Human herpesvirus 7
uaacuacaggcuuacacuauu

SEQ ID NO: 178202 - RNA, 16 nt, Human herpesvirus 7
uaagaaaguuguacuc

SEQ ID NO: 178203 - RNA, 15 nt, Human herpesvirus 7
uaagaaacaucuaug

SEQ ID NO: 178204 - RNA, 21 nt, Human herpesvirus 7
uaacuuuaucauuacucgugu

SEQ ID NO: 178205 - RNA, 20 nt, Human herpesvirus 7
uaacuuuuauaaaauaugga

SEQ ID NO: 178206 - RNA, 22 nt, Human herpesvirus 7
uaacuauuuuaggauauugaca

SEQ ID NO: 178207 - RNA, 12 nt, Human herpesvirus 7
uaacuuacuguu

SEQ ID NO: 178208 - RNA, 16 nt, Human herpesvirus 7
uaacuuacuguuuaca

SEQ ID NO: 178209 - RNA, 18 nt, Human herpesvirus 7
uaacuggaauuauacacu

SEQ ID NO: 178210 - RNA, 22 nt, Human herpesvirus 7
uaacuggaauuauacacuguga

SEQ ID NO: 178211 - RNA, 15 nt, Human herpesvirus 7
uaacuggagccugga

SEQ ID NO: 178212 - RNA, 16 nt, Human herpesvirus 7
uaagaacagaaugaua

SEQ ID NO: 178213 - RNA, 13 nt, Human herpesvirus 7
uaagagacauuga

SEQ ID NO: 178214 - RNA, 20 nt, Human herpesvirus 7
uaagagacauugaaaaugca

SEQ ID NO: 178215 - RNA, 12 nt, Human herpesvirus 7
uaagacauuauu

SEQ ID NO: 178216 - RNA, 16 nt, Human herpesvirus 7
uaagacauuauuugcu

SEQ ID NO: 178217 - RNA, 17 nt, Human herpesvirus 7
uaagauccaggcuucuu

SEQ ID NO: 178218 - RNA, 17 nt, Human herpesvirus 7
uaagaugauagccauaa

SEQ ID NO: 178219 - RNA, 19 nt, Human herpesvirus 7
uaagaugauagccauaaau

SEQ ID NO: 178220 - RNA, 17 nt, Human herpesvirus 7
uaagcagcuugaugaau

SEQ ID NO: 178221 - RNA, 15 nt, Human herpesvirus 7
uaagcaauacauucu

SEQ ID NO: 178222 - RNA, 18 nt, Human herpesvirus 7
uaagccuaggauaccaaa

SEQ ID NO: 178223 - RNA, 22 nt, Human herpesvirus 7
uaagcuuuucaggcuaugacuu

SEQ ID NO: 178224 - RNA, 19 nt, Human herpesvirus 7
uaagcuucaaaaauguuua

SEQ ID NO: 178225 - RNA, 18 nt, Human herpesvirus 7
uaaagacacuuauuugau

SEQ ID NO: 178226 - RNA, 20 nt, Human herpesvirus 7
uaaagaagagguaaguguaa

SEQ ID NO: 178227 - RNA, 13 nt, Human herpesvirus 7
uaaagaaguaaua

SEQ ID NO: 178228 - RNA, 14 nt, Human herpesvirus 7
uaaagaaccuauca

SEQ ID NO: 178229 - RNA, 22 nt, Human herpesvirus 7
uaaagaaccuaucaaaauucca

SEQ ID NO: 178230 - RNA, 23 nt, Human herpesvirus 7
uaaagaaccuaucaaaauuccau

SEQ ID NO: 178231 - RNA, 18 nt, Human herpesvirus 7
uaaaguggagacaaucua

SEQ ID NO: 178232 - RNA, 20 nt, Human herpesvirus 7
uaaaguuaacauauguugau

SEQ ID NO: 178233 - RNA, 20 nt, Human herpesvirus 7
uaaauaaacgguagaaugug

SEQ ID NO: 178234 - RNA, 20 nt, Human herpesvirus 7
uaaauaugaugaaacuucca

SEQ ID NO: 178235 - RNA, 17 nt, Human herpesvirus 7
uaaauacucaugaagga

SEQ ID NO: 178236 - RNA, 18 nt, Human herpesvirus 7
uaaauacuugcaaugcaa

SEQ ID NO: 178237 - RNA, 19 nt, Human herpesvirus 7
uaaaguuuuguaacuauaa

SEQ ID NO: 178238 - RNA, 19 nt, Human herpesvirus 7
uaaauacuauuacgaguga

SEQ ID NO: 178239 - RNA, 20 nt, Human herpesvirus 7
uaaauaauccauuccugugu

SEQ ID NO: 178240 - RNA, 14 nt, Human herpesvirus 7
uaaauaccaaaaac

SEQ ID NO: 178241 - RNA, 22 nt, Human herpesvirus 7
uaaauacgcguggaaguguuaa

SEQ ID NO: 178242 - RNA, 16 nt, Human herpesvirus 7
uaaauacggaccaaga

SEQ ID NO: 178243 - RNA, 14 nt, Human herpesvirus 7
uaaacuucuagccu

SEQ ID NO: 178244 - RNA, 14 nt, Human herpesvirus 7
uaaacuugugaaaa

SEQ ID NO: 178245 - RNA, 18 nt, Human herpesvirus 7
uaaacuugugaaaauaac

SEQ ID NO: 178246 - RNA, 22 nt, Human herpesvirus 7
uaaagaacaagagcagauggga

SEQ ID NO: 178247 - RNA, 19 nt, Human herpesvirus 7
uaaaccugcuaacaaguau

SEQ ID NO: 178248 - RNA, 14 nt, Human herpesvirus 7
uaaaccgaguguaa

SEQ ID NO: 178249 - RNA, 22 nt, Human herpesvirus 7
uaaaaguuugguuaaaguguga

SEQ ID NO: 178250 - RNA, 17 nt, Human herpesvirus 7
uaaacauuuguugcuuu

SEQ ID NO: 178251 - RNA, 19 nt, Human herpesvirus 7
uaaacauuuguugcuuuuu

SEQ ID NO: 178252 - RNA, 15 nt, Human herpesvirus 7
uaaaaguguucaaaa

SEQ ID NO: 178253 - RNA, 22 nt, Human herpesvirus 7
guucuccuuguuguguuuuauc

SEQ ID NO: 178254 - RNA, 18 nt, Human herpesvirus 7
guucgauaguaaucacau

SEQ ID NO: 178255 - RNA, 13 nt, Human herpesvirus 7
guucuauucucau

SEQ ID NO: 178256 - RNA, 23 nt, Human herpesvirus 7
guucuugcuggcucaagcacaau

SEQ ID NO: 178257 - RNA, 22 nt, Human herpesvirus 7
guugaaagcguuucacugggaa

SEQ ID NO: 178258 - RNA, 14 nt, Human herpesvirus 7
guugacaaugucaa

SEQ ID NO: 178259 - RNA, 16 nt, Human herpesvirus 7
guugagcuaucugauu

SEQ ID NO: 178260 - RNA, 19 nt, Human herpesvirus 7
uaaaacuuauguacucuga

SEQ ID NO: 178261 - RNA, 13 nt, Human herpesvirus 7
uaaaacuuugaaa

SEQ ID NO: 178262 - RNA, 12 nt, Human herpesvirus 7
uaaaagcauaug

SEQ ID NO: 178263 - RNA, 19 nt, Human herpesvirus 7
uaaaagagaaaauguuuaa

SEQ ID NO: 178264 - RNA, 21 nt, Human herpesvirus 7
uaaaagcuuucuuucucauca

SEQ ID NO: 178265 - RNA, 16 nt, Human herpesvirus 7
uaaaagaucuuuuaca

SEQ ID NO: 178266 - RNA, 18 nt, Human herpesvirus 7
uaaaaggccguuuaugaa

SEQ ID NO: 178267 - RNA, 22 nt, Human herpesvirus 7
uaaaagggcagacacuacuuaa

SEQ ID NO: 178268 - RNA, 14 nt, Human herpesvirus 7
uaaaaguacagugu

SEQ ID NO: 178269 - RNA, 20 nt, Human herpesvirus 7
guugcaauacaaauuccugc

SEQ ID NO: 178270 - RNA, 15 nt, Human herpesvirus 7
guugcaacucuucuu

SEQ ID NO: 178271 - RNA, 14 nt, Human herpesvirus 7
uaaaacuacauuua

SEQ ID NO: 178272 - RNA, 22 nt, Human herpesvirus 7
uacagugcucuuugucuuugcu

SEQ ID NO: 178273 - RNA, 18 nt, Human herpesvirus 7
uacauauuagaauuggga

SEQ ID NO: 178274 - RNA, 15 nt, Human herpesvirus 7
uacagauugcuuguu

SEQ ID NO: 178275 - RNA, 11 nt, Human herpesvirus 7
uacagccugua

SEQ ID NO: 178276 - RNA, 20 nt, Human herpesvirus 7
uacagcauauaucuuugauu

SEQ ID NO: 178277 - RNA, 14 nt, Human herpesvirus 7
uacagcuuucauua

SEQ ID NO: 178278 - RNA, 21 nt, Human herpesvirus 7
uacagcguggccuucuugccu

SEQ ID NO: 178279 - RNA, 21 nt, Human herpesvirus 7
uacaaugcugucguguaagau

SEQ ID NO: 178280 - RNA, 19 nt, Human herpesvirus 7
uacaaugaauuagcuaaau

SEQ ID NO: 178281 - RNA, 22 nt, Human herpesvirus 7
uacaauagugaacaugugcuga

SEQ ID NO: 178282 - RNA, 21 nt, Human herpesvirus 7
uacaaugguuuuuuugacaaa

SEQ ID NO: 178283 - RNA, 19 nt, Human herpesvirus 7
uacaauuucuggcaauaaa

SEQ ID NO: 178284 - RNA, 21 nt, Human herpesvirus 7
uacacaaauugauccugcuau

SEQ ID NO: 178285 - RNA, 15 nt, Human herpesvirus 7
uacaagguguuccuu

SEQ ID NO: 178286 - RNA, 13 nt, Human herpesvirus 7
uacaacuuugcca

SEQ ID NO: 178287 - RNA, 23 nt, Human herpesvirus 7
uacaacuaaaauugacagcacca

SEQ ID NO: 178288 - RNA, 22 nt, Human herpesvirus 7
uacaaccgccauucuuuucaau

SEQ ID NO: 178289 - RNA, 16 nt, Human herpesvirus 7
uacaacgacauugaaa

SEQ ID NO: 178290 - RNA, 21 nt, Human herpesvirus 7
uaauaaaggaaagacaaacua

SEQ ID NO: 178291 - RNA, 16 nt, Human herpesvirus 7
uaauaagauccaggcu

SEQ ID NO: 178292 - RNA, 15 nt, Human herpesvirus 7
uaagugaaugugcuu

SEQ ID NO: 178293 - RNA, 14 nt, Human herpesvirus 7
uaaguggaaucuca

SEQ ID NO: 178294 - RNA, 17 nt, Human herpesvirus 7
uaaguauaaacagucca

SEQ ID NO: 178295 - RNA, 15 nt, Human herpesvirus 7
uaaguuaaaucaguu

SEQ ID NO: 178296 - RNA, 14 nt, Human herpesvirus 7
uaaguugacaaugu

SEQ ID NO: 178297 - RNA, 18 nt, Human herpesvirus 7
uaauaaacggugauugua

SEQ ID NO: 178298 - RNA, 19 nt, Human herpesvirus 7
uaauaaaaagcccaugaac

SEQ ID NO: 178299 - RNA, 15 nt, Human herpesvirus 7
uaauugccgauuccu

SEQ ID NO: 178300 - RNA, 18 nt, Human herpesvirus 7
uaauugcgcaguguuuaa

SEQ ID NO: 178301 - RNA, 21 nt, Human herpesvirus 7
uaauugguuuucgguguguaa

SEQ ID NO: 178302 - RNA, 21 nt, Human herpesvirus 7
uaauuguuuuuuauuuagcua

SEQ ID NO: 178303 - RNA, 21 nt, Human herpesvirus 7
uaauucuucuaaggguuauau

SEQ ID NO: 178304 - RNA, 19 nt, Human herpesvirus 7
uaauucuuucaguucccau

SEQ ID NO: 178305 - RNA, 14 nt, Human herpesvirus 7
uaauuccgggagaa

SEQ ID NO: 178306 - RNA, 15 nt, Human herpesvirus 7
uaauucaguuuacug

SEQ ID NO: 178307 - RNA, 16 nt, Human herpesvirus 7
uaauucauuguaugac

SEQ ID NO: 178308 - RNA, 23 nt, Human herpesvirus 7
uaauuaucuaccccgauccucag

SEQ ID NO: 178309 - RNA, 14 nt, Human herpesvirus 7
uaauuacauugcag

SEQ ID NO: 178310 - RNA, 23 nt, Human herpesvirus 7
uaauuaggaaucagaccagcaca

SEQ ID NO: 178311 - RNA, 13 nt, Human herpesvirus 7
uaauuaacacuca

SEQ ID NO: 178312 - RNA, 14 nt, Human herpesvirus 7
uaauuaaucugcau

SEQ ID NO: 178313 - RNA, 21 nt, Human herpesvirus 7
uaauguuauuuuucaugccuu

SEQ ID NO: 178314 - RNA, 14 nt, Human herpesvirus 7
uacucugauugacu

SEQ ID NO: 178315 - RNA, 15 nt, Human herpesvirus 7
uacucuuucugacau

SEQ ID NO: 178316 - RNA, 14 nt, Human herpesvirus 7
uacugaaaccaaag

SEQ ID NO: 178317 - RNA, 14 nt, Human herpesvirus 7
uacugaagagccaa

SEQ ID NO: 178318 - RNA, 22 nt, Human herpesvirus 7
uacucgaugcuucaauucacca

SEQ ID NO: 178319 - RNA, 22 nt, Human herpesvirus 7
uacugauguaaaauuaauucaa

SEQ ID NO: 178320 - RNA, 17 nt, Human herpesvirus 7
uacugauucuauagaaa

SEQ ID NO: 178321 - RNA, 18 nt, Human herpesvirus 7
uacugaaucugaagaaga

SEQ ID NO: 178322 - RNA, 20 nt, Human herpesvirus 7
uacugagagaauaaguucau

SEQ ID NO: 178323 - RNA, 14 nt, Human herpesvirus 7
aacaacuaaagaga

SEQ ID NO: 178324 - RNA, 20 nt, Human herpesvirus 7
aacaagacagaaaugaaucu

SEQ ID NO: 178325 - RNA, 14 nt, Human herpesvirus 7
uacguguucauuua

SEQ ID NO: 178326 - RNA, 24 nt, Human herpesvirus 7
uacgugaguguuguaacaacuagc

SEQ ID NO: 178327 - RNA, 13 nt, Human herpesvirus 7
uacgugaugccau

SEQ ID NO: 178328 - RNA, 19 nt, Human herpesvirus 7
uacgucuugcuguuuguca

SEQ ID NO: 178329 - RNA, 19 nt, Human herpesvirus 7
uacgugcuuagacuuauca

SEQ ID NO: 178330 - RNA, 16 nt, Human herpesvirus 7
uacguuaguugcagcu

SEQ ID NO: 178331 - RNA, 14 nt, Human herpesvirus 7
uacggcucuaacau

SEQ ID NO: 178332 - RNA, 19 nt, Human herpesvirus 7
uacaucuaggucuuccacu

SEQ ID NO: 178333 - RNA, 22 nt, Human herpesvirus 7
uacaucuaggucuuccacuguu

SEQ ID NO: 178334 - RNA, 19 nt, Human herpesvirus 7
uacauggggcauuaauucu

SEQ ID NO: 178335 - RNA, 12 nt, Human herpesvirus 7
uacauucucaaa

SEQ ID NO: 178336 - RNA, 23 nt, Human herpesvirus 7
uacauuauaaauguaacuuucau

SEQ ID NO: 178337 - RNA, 23 nt, Human herpesvirus 7
uaccguuuaaugaaaaagccaua

SEQ ID NO: 178338 - RNA, 15 nt, Human herpesvirus 7
uaccuucauggcaca

SEQ ID NO: 178339 - RNA, 22 nt, Human herpesvirus 7
uacgaacugauauuaaaucaua

SEQ ID NO: 178340 - RNA, 17 nt, Human herpesvirus 7
uacgaauauucuaggcu

SEQ ID NO: 178341 - RNA, 16 nt, Human herpesvirus 7
uacgccaaaucuaauu

SEQ ID NO: 178342 - RNA, 19 nt, Human herpesvirus 7
uacgccaaaucuaauuuau

SEQ ID NO: 178343 - RNA, 15 nt, Human herpesvirus 7
uacgcacaaauuucu

SEQ ID NO: 178344 - RNA, 16 nt, Human herpesvirus 7
uuuaugcuuuaacugg

SEQ ID NO: 178345 - RNA, 20 nt, Human herpesvirus 7
uuuacuuaaauauuuuacau

SEQ ID NO: 178346 - RNA, 23 nt, Human herpesvirus 7
uuuacuucgagaaaauuuagcac

SEQ ID NO: 178347 - RNA, 17 nt, Human herpesvirus 7
uuuacuuucauagcuua

SEQ ID NO: 178348 - RNA, 12 nt, Human herpesvirus 7
uuuacauuacug

SEQ ID NO: 178349 - RNA, 17 nt, Human herpesvirus 7
uuuacauuucauuccaa

SEQ ID NO: 178350 - RNA, 21 nt, Human herpesvirus 7
uuuaccgucuuuugauuuugc

SEQ ID NO: 178351 - RNA, 15 nt, Human herpesvirus 7
uuuaccuccauauga

SEQ ID NO: 178352 - RNA, 20 nt, Human herpesvirus 7
uuuauugagcaauugauuca

SEQ ID NO: 178353 - RNA, 17 nt, Human herpesvirus 7
uuucaaacaacauaucg

SEQ ID NO: 178354 - RNA, 11 nt, Human herpesvirus 7
uuucaaaagaa

SEQ ID NO: 178355 - RNA, 14 nt, Human herpesvirus 7
uuucaacgaucuca

SEQ ID NO: 178356 - RNA, 21 nt, Human herpesvirus 7
uuguucaaucacauacucuau

SEQ ID NO: 178357 - RNA, 14 nt, Human herpesvirus 7
uuguucauaaaccu

SEQ ID NO: 178358 - RNA, 19 nt, Human herpesvirus 7
uuuacagaagaacauuuau

SEQ ID NO: 178359 - RNA, 21 nt, Human herpesvirus 7
uuuacagcguggccuucuugc

SEQ ID NO: 178360 - RNA, 14 nt, Human herpesvirus 7
uuuacaaaacaaag

SEQ ID NO: 178361 - RNA, 18 nt, Human herpesvirus 7
uuuacaaagaacauguag

SEQ ID NO: 178362 - RNA, 23 nt, Human herpesvirus 7
uuuacaaagaacauguaguacaa

SEQ ID NO: 178363 - RNA, 13 nt, Human herpesvirus 7
uuguggcaaaaga

SEQ ID NO: 178364 - RNA, 15 nt, Human herpesvirus 7
uugugauaugacuga

SEQ ID NO: 178365 - RNA, 12 nt, Human herpesvirus 7
uugugcaauuug

SEQ ID NO: 178366 - RNA, 13 nt, Human herpesvirus 7
uuguauacaacuu

SEQ ID NO: 178367 - RNA, 18 nt, Human herpesvirus 7
uuguaggcagaaaugucu

SEQ ID NO: 178368 - RNA, 20 nt, Human herpesvirus 7
uuguauaugaugacaacaaa

SEQ ID NO: 178369 - RNA, 20 nt, Human herpesvirus 7
uuguauauucuaguuuucuu

SEQ ID NO: 178370 - RNA, 18 nt, Human herpesvirus 7
uuguauuaaaggaaacau

SEQ ID NO: 178371 - RNA, 16 nt, Human herpesvirus 7
uuguacauuuuaccaa

SEQ ID NO: 178372 - RNA, 23 nt, Human herpesvirus 7
uuguaauuucucaaaucuuuaag

SEQ ID NO: 178373 - RNA, 22 nt, Human herpesvirus 7
uuguacuguaauuucucaaauc

SEQ ID NO: 178374 - RNA, 21 nt, Human herpesvirus 7
uuguaaacaugaaaaauaucg

SEQ ID NO: 178375 - RNA, 17 nt, Human herpesvirus 7
uuggucgagaauacaca

SEQ ID NO: 178376 - RNA, 16 nt, Human herpesvirus 7
uugguagaaaugugcg

SEQ ID NO: 178377 - RNA, 14 nt, Human herpesvirus 7
uuggcgccaaaaaa

SEQ ID NO: 178378 - RNA, 23 nt, Human herpesvirus 7
uugggaaagacgugagcaauaca

SEQ ID NO: 178379 - RNA, 13 nt, Human herpesvirus 7
uugggacaugauu

SEQ ID NO: 178380 - RNA, 13 nt, Human herpesvirus 7
uuuucaugguauu

SEQ ID NO: 178381 - RNA, 16 nt, Human herpesvirus 7
uuuucaggcuaugacu

SEQ ID NO: 178382 - RNA, 21 nt, Human herpesvirus 7
uuuucaggcuaugacuuugaa

SEQ ID NO: 178383 - RNA, 20 nt, Human herpesvirus 7
uuuucaguuaugaugauuau

SEQ ID NO: 178384 - RNA, 16 nt, Human herpesvirus 7
aacagcguucaaucaa

SEQ ID NO: 178385 - RNA, 13 nt, Human herpesvirus 7
aacauaaauauuc

SEQ ID NO: 178386 - RNA, 12 nt, Human herpesvirus 7
aacauaaccaau

SEQ ID NO: 178387 - RNA, 16 nt, Human herpesvirus 7
aacagugcuguacuuu

SEQ ID NO: 178388 - RNA, 12 nt, Human herpesvirus 7
aacagguuuguu

SEQ ID NO: 178389 - RNA, 17 nt, Human herpesvirus 7
uuuuauaauuaugucca

SEQ ID NO: 178390 - RNA, 21 nt, Human herpesvirus 7
uuuuauucaaagcuucuacaa

SEQ ID NO: 178391 - RNA, 16 nt, Human herpesvirus 7
uuuuauggccauuuaa

SEQ ID NO: 178392 - RNA, 18 nt, Human herpesvirus 7
uuuucaaugcaacuuuaa

SEQ ID NO: 178393 - RNA, 12 nt, Human herpesvirus 7
uuuuauuuucag

SEQ ID NO: 178394 - RNA, 22 nt, Human herpesvirus 7
uuuucaaacaugauugguaaaa

SEQ ID NO: 178395 - RNA, 19 nt, Human herpesvirus 7
uuuucaaagugugcccggg

SEQ ID NO: 178396 - RNA, 14 nt, Human herpesvirus 7
uuuguaucuaugac

SEQ ID NO: 178397 - RNA, 19 nt, Human herpesvirus 7
uuuguaugaaaagcccaaa

SEQ ID NO: 178398 - RNA, 14 nt, Human herpesvirus 7
uuuguaagaaacau

SEQ ID NO: 178399 - RNA, 16 nt, Human herpesvirus 7
uuuguaagaaacaucu

SEQ ID NO: 178400 - RNA, 13 nt, Human herpesvirus 7
uuuguaaggccaa

SEQ ID NO: 178401 - RNA, 15 nt, Human herpesvirus 7
uuuguacaugccaga

SEQ ID NO: 178402 - RNA, 12 nt, Human herpesvirus 7
uuuguacgugac

SEQ ID NO: 178403 - RNA, 17 nt, Human herpesvirus 7
uuuguacuuguaccaau

SEQ ID NO: 178404 - RNA, 16 nt, Human herpesvirus 7
uuuuacgcaugcuugc

SEQ ID NO: 178405 - RNA, 18 nt, Human herpesvirus 7
uuuuacgcaugcuugcuu

SEQ ID NO: 178406 - RNA, 17 nt, Human herpesvirus 7
uuuuacgugacugucag

SEQ ID NO: 178407 - RNA, 23 nt, Human herpesvirus 7
uuuuagacgacgucuucuucuga

SEQ ID NO: 178408 - RNA, 20 nt, Human herpesvirus 7
uuucaauugguuguucaaaa

SEQ ID NO: 178409 - RNA, 17 nt, Human herpesvirus 7
uuucacacaaugccuuu

SEQ ID NO: 178410 - RNA, 22 nt, Human herpesvirus 7
uuucagaugacaacucaauaaa

SEQ ID NO: 178411 - RNA, 22 nt, Human herpesvirus 7
uuucagcuccaugucucucgca

SEQ ID NO: 178412 - RNA, 17 nt, Human herpesvirus 7
uuucacuacuacaugaa

SEQ ID NO: 178413 - RNA, 19 nt, Human herpesvirus 7
uuucggagacguugcucau

SEQ ID NO: 178414 - RNA, 22 nt, Human herpesvirus 7
uuuccuuuaauuauuaaucuuu

SEQ ID NO: 178415 - RNA, 15 nt, Human herpesvirus 7
uuucguaucugugac

SEQ ID NO: 178416 - RNA, 15 nt, Human herpesvirus 7
uuucuaaauaugaug

SEQ ID NO: 178417 - RNA, 17 nt, Human herpesvirus 7
uuucuaaaucacuaguc

SEQ ID NO: 178418 - RNA, 24 nt, Human herpesvirus 7
uuucuaaaucacuaguccuaaaua

SEQ ID NO: 178419 - RNA, 19 nt, Human herpesvirus 7
uuucuauuagauaaugaca

SEQ ID NO: 178420 - RNA, 21 nt, Human herpesvirus 7
uuucucacaccuuacuuuuaa

SEQ ID NO: 178421 - RNA, 22 nt, Human herpesvirus 7
uuucuagcaaaauaugcaaaac

SEQ ID NO: 178422 - RNA, 18 nt, Human herpesvirus 7
uuucuauaaucacgaaau

SEQ ID NO: 178423 - RNA, 22 nt, Human herpesvirus 7
uuucuacauguuuaacaaacaa

SEQ ID NO: 178424 - RNA, 14 nt, Human herpesvirus 7
uuucucguuuuucu

SEQ ID NO: 178425 - RNA, 22 nt, Human herpesvirus 7
uuucucgcguuucuucaaaguc

SEQ ID NO: 178426 - RNA, 21 nt, Human herpesvirus 7
uuucucgcucgcgugauuuuu

SEQ ID NO: 178427 - RNA, 19 nt, Human herpesvirus 7
uuuggaaaacaacauacau

SEQ ID NO: 178428 - RNA, 16 nt, Human herpesvirus 7
uuuggaaauuguuuga

SEQ ID NO: 178429 - RNA, 21 nt, Human herpesvirus 7
uuuggauaguucguaaaaaga

SEQ ID NO: 178430 - RNA, 13 nt, Human herpesvirus 7
uuucugagugcua

SEQ ID NO: 178431 - RNA, 21 nt, Human herpesvirus 7
uuucugagugcuaaaaacgac

SEQ ID NO: 178432 - RNA, 16 nt, Human herpesvirus 7
uugcuuaaaacuuuga

SEQ ID NO: 178433 - RNA, 23 nt, Human herpesvirus 7
uugcugcaacaaauuaaauacuu

SEQ ID NO: 178434 - RNA, 13 nt, Human herpesvirus 7
uugcugcugucuu

SEQ ID NO: 178435 - RNA, 23 nt, Human herpesvirus 7
uugcucauuuuguuuugcaauau

SEQ ID NO: 178436 - RNA, 20 nt, Human herpesvirus 7
uugcuauuauuaaagcuuuc

SEQ ID NO: 178437 - RNA, 16 nt, Human herpesvirus 7
uugcgagaaaauacua

SEQ ID NO: 178438 - RNA, 18 nt, Human herpesvirus 7
uugccuguuaaaagugaa

SEQ ID NO: 178439 - RNA, 16 nt, Human herpesvirus 7
uugcgaaaaugauaaa

SEQ ID NO: 178440 - RNA, 16 nt, Human herpesvirus 7
uugccauuguguuaaa

SEQ ID NO: 178441 - RNA, 20 nt, Human herpesvirus 7
uuggauuccgguguggaaac

SEQ ID NO: 178442 - RNA, 16 nt, Human herpesvirus 7
uuggcaaacagucuga

SEQ ID NO: 178443 - RNA, 17 nt, Human herpesvirus 7
uuggaaaugagauuucu

SEQ ID NO: 178444 - RNA, 21 nt, Human herpesvirus 7
uuggaaauuacuggcagaaau

SEQ ID NO: 178445 - RNA, 19 nt, Human herpesvirus 7
uuggaaaaaugcugcaaug

SEQ ID NO: 178446 - RNA, 21 nt, Human herpesvirus 7
uuggaagguuuacguuuccua

SEQ ID NO: 178447 - RNA, 16 nt, Human herpesvirus 7
uugcuucuuucuccac

SEQ ID NO: 178448 - RNA, 15 nt, Human herpesvirus 7
uugcuugcacuguaa

SEQ ID NO: 178449 - RNA, 15 nt, Human herpesvirus 7
uugcuuuucaugcuu

SEQ ID NO: 178450 - RNA, 18 nt, Human herpesvirus 7
uugcauguugcuaguaug

SEQ ID NO: 178451 - RNA, 12 nt, Human herpesvirus 7
uugcagcccaau

SEQ ID NO: 178452 - RNA, 14 nt, Human herpesvirus 7
uugcauaauccucu

SEQ ID NO: 178453 - RNA, 16 nt, Human herpesvirus 7
uugcauaauccucuga

SEQ ID NO: 178454 - RNA, 20 nt, Human herpesvirus 7
uugcaaaucaccgaugaauu

SEQ ID NO: 178455 - RNA, 15 nt, Human herpesvirus 7
uugcaacaaaaucua

SEQ ID NO: 178456 - RNA, 15 nt, Human herpesvirus 7
uugcaacaaauucca

SEQ ID NO: 178457 - RNA, 13 nt, Human herpesvirus 7
uugcaagcacaug

SEQ ID NO: 178458 - RNA, 12 nt, Human herpesvirus 7
uugcaauaugcu

SEQ ID NO: 178459 - RNA, 19 nt, Human herpesvirus 7
uugcaaugaaagguuacaa

SEQ ID NO: 178460 - RNA, 18 nt, Human herpesvirus 7
uugcagaaaaaauaauau

SEQ ID NO: 178461 - RNA, 21 nt, Human herpesvirus 7
uugcagacuaauuacagcuaa

SEQ ID NO: 178462 - RNA, 20 nt, Human herpesvirus 7
aacacuugcuagcugugaua

SEQ ID NO: 178463 - RNA, 18 nt, Human herpesvirus 7
aacacguuuccauuaaaa

SEQ ID NO: 178464 - RNA, 22 nt, Human herpesvirus 7
aacacguagaaaaaaacaauga

SEQ ID NO: 178465 - RNA, 17 nt, Human herpesvirus 7
aacaccgcaaacauuuu

SEQ ID NO: 178466 - RNA, 21 nt, Human herpesvirus 7
uugacguaauuuuccauucau

SEQ ID NO: 178467 - RNA, 15 nt, Human herpesvirus 7
uugacucagauucga

SEQ ID NO: 178468 - RNA, 22 nt, Human herpesvirus 7
uugacuggguaggaaaauaagu

SEQ ID NO: 178469 - RNA, 23 nt, Human herpesvirus 7
uugacuuuuucuguagacauuuc

SEQ ID NO: 178470 - RNA, 21 nt, Human herpesvirus 7
uugacaguuccuaaauaauuc

SEQ ID NO: 178471 - RNA, 13 nt, Human herpesvirus 7
uugacaaugucaa

SEQ ID NO: 178472 - RNA, 17 nt, Human herpesvirus 7
uugacaccaacaucugu

SEQ ID NO: 178473 - RNA, 17 nt, Human herpesvirus 7
uugacaagcgcauuugu

SEQ ID NO: 178474 - RNA, 17 nt, Human herpesvirus 7
uugagcuuuucuuuccg

SEQ ID NO: 178475 - RNA, 16 nt, Human herpesvirus 7
uugagcaauugauuca

SEQ ID NO: 178476 - RNA, 14 nt, Human herpesvirus 7
aacaauuucacaga

SEQ ID NO: 178477 - RNA, 20 nt, Human herpesvirus 7
aacaauuacuugucuuaccu

SEQ ID NO: 178478 - RNA, 20 nt, Human herpesvirus 7
aacaauuauauaaacacuug

SEQ ID NO: 178479 - RNA, 14 nt, Human herpesvirus 7
uugauuauuuugau

SEQ ID NO: 178480 - RNA, 14 nt, Human herpesvirus 7
uugauugaauuugu

SEQ ID NO: 178481 - RNA, 21 nt, Human herpesvirus 7
uugauugaucguguguuacua

SEQ ID NO: 178482 - RNA, 13 nt, Human herpesvirus 7
aacacaaagccaa

SEQ ID NO: 178483 - RNA, 19 nt, Human herpesvirus 7
aacaauuugaagaggagaa

SEQ ID NO: 178484 - RNA, 20 nt, Human herpesvirus 7
uugaugaaucaaaauuagac

SEQ ID NO: 178485 - RNA, 17 nt, Human herpesvirus 7
uugauacaacuaaaaau

SEQ ID NO: 178486 - RNA, 18 nt, Human herpesvirus 7
uugaucaaaagcuuacuc

SEQ ID NO: 178487 - RNA, 20 nt, Human herpesvirus 7
uugauguuuugcaagcacau

SEQ ID NO: 178488 - RNA, 20 nt, Human herpesvirus 7
uugauccuccuugccugcaa

SEQ ID NO: 178489 - RNA, 19 nt, Human herpesvirus 7
uugauaagacugaagacaa

SEQ ID NO: 178490 - RNA, 20 nt, Human herpesvirus 7
uugauaagacugaagacaaa

SEQ ID NO: 178491 - RNA, 14 nt, Human herpesvirus 7
uugauaauuuacaa

SEQ ID NO: 178492 - RNA, 19 nt, Human herpesvirus 7
uugauaauuuacaaaacaa

SEQ ID NO: 178493 - RNA, 13 nt, Human herpesvirus 7
uugaacuguugcc

SEQ ID NO: 178494 - RNA, 16 nt, Human herpesvirus 7
uugaagaacaacauga

SEQ ID NO: 178495 - RNA, 19 nt, Human herpesvirus 7
uugaagaacaacaugaaac

SEQ ID NO: 178496 - RNA, 16 nt, Human herpesvirus 7
uugaacauaaauauuc

SEQ ID NO: 178497 - RNA, 19 nt, Human herpesvirus 7
uugaauauugcuagucuca

SEQ ID NO: 178498 - RNA, 16 nt, Human herpesvirus 7
uugaaucaacagccau

SEQ ID NO: 178499 - RNA, 13 nt, Human herpesvirus 7
uugaaucaccugu

SEQ ID NO: 178500 - RNA, 20 nt, Human herpesvirus 7
uugaaucugcuaaggcuaaa

SEQ ID NO: 178501 - RNA, 15 nt, Human herpesvirus 7
uugaauguaugucca

SEQ ID NO: 178502 - RNA, 19 nt, Human herpesvirus 7
uugaauguuuacauguaau

SEQ ID NO: 178503 - RNA, 17 nt, Human herpesvirus 7
uugaauuaauucuagca

SEQ ID NO: 178504 - RNA, 17 nt, Human herpesvirus 7
uucaggaauaucaagaa

SEQ ID NO: 178505 - RNA, 18 nt, Human herpesvirus 7
uugaaaaaacaguucaag

SEQ ID NO: 178506 - RNA, 18 nt, Human herpesvirus 7
uugaaaauauauuccaac

SEQ ID NO: 178507 - RNA, 20 nt, Human herpesvirus 7
uugaaaaugcauugcuuuua

SEQ ID NO: 178508 - RNA, 23 nt, Human herpesvirus 7
uugaaaacgaaaggaaucuuaau

SEQ ID NO: 178509 - RNA, 24 nt, Human herpesvirus 7
uugaaauagugucuguuguaacag

SEQ ID NO: 178510 - RNA, 16 nt, Human herpesvirus 7
uugaaauuccauacaa

SEQ ID NO: 178511 - RNA, 18 nt, Human herpesvirus 7
uugaacaaguagugcuaa

SEQ ID NO: 178512 - RNA, 17 nt, Human herpesvirus 7
uucagcuccaugucucu

SEQ ID NO: 178513 - RNA, 14 nt, Human herpesvirus 7
uucagauucaguau

SEQ ID NO: 178514 - RNA, 22 nt, Human herpesvirus 7
uucagauugaaauuccauacaa

SEQ ID NO: 178515 - RNA, 19 nt, Human herpesvirus 7
uucaacuucaacauacagc

SEQ ID NO: 178516 - RNA, 12 nt, Human herpesvirus 7
uucacgcuucca

SEQ ID NO: 178517 - RNA, 16 nt, Human herpesvirus 7
uucacgcuuccaucac

SEQ ID NO: 178518 - RNA, 13 nt, Human herpesvirus 7
aacuuagugauga

SEQ ID NO: 178519 - RNA, 23 nt, Human herpesvirus 7
aacuuauguacuauacaggauca

SEQ ID NO: 178520 - RNA, 22 nt, Human herpesvirus 7
aacuucucuuggaguuugucuc

SEQ ID NO: 178521 - RNA, 21 nt, Human herpesvirus 7
aacuucuacuaauacagguaa

SEQ ID NO: 178522 - RNA, 19 nt, Human herpesvirus 7
aacuuaucagauucugaca

SEQ ID NO: 178523 - RNA, 15 nt, Human herpesvirus 7
aacugaauuaaggug

SEQ ID NO: 178524 - RNA, 20 nt, Human herpesvirus 7
aacuuacucuucucgaagaa

SEQ ID NO: 178525 - RNA, 21 nt, Human herpesvirus 7
aacuuacauuucaaacaacau

SEQ ID NO: 178526 - RNA, 22 nt, Human herpesvirus 7
aacuuacauuucaaacaacaua

SEQ ID NO: 178527 - RNA, 22 nt, Human herpesvirus 7
aacuuguugaaauagcgacaua

SEQ ID NO: 178528 - RNA, 17 nt, Human herpesvirus 7
aacuuggugaagaucau

SEQ ID NO: 178529 - RNA, 16 nt, Human herpesvirus 7
aagacaccccaaaauc

SEQ ID NO: 178530 - RNA, 22 nt, Human herpesvirus 7
aacuuuauccaguacgucuugc

SEQ ID NO: 178531 - RNA, 18 nt, Human herpesvirus 7
aacuuuauggaacaugaa

SEQ ID NO: 178532 - RNA, 16 nt, Human herpesvirus 7
aacuuuaaauuauuau

SEQ ID NO: 178533 - RNA, 21 nt, Human herpesvirus 7
aagacugaagacaaaaccaaa

SEQ ID NO: 178534 - RNA, 15 nt, Human herpesvirus 7
aagagacugucauaa

SEQ ID NO: 178535 - RNA, 20 nt, Human herpesvirus 7
aagagacugucauaaucuga

SEQ ID NO: 178536 - RNA, 16 nt, Human herpesvirus 7
aagacgccaauaaauc

SEQ ID NO: 178537 - RNA, 17 nt, Human herpesvirus 7
aagaccuguacuguugc

SEQ ID NO: 178538 - RNA, 16 nt, Human herpesvirus 7
aagacauuauuugcug

SEQ ID NO: 178539 - RNA, 21 nt, Human herpesvirus 7
aagacauuauuugcugaacuc

SEQ ID NO: 178540 - RNA, 19 nt, Human herpesvirus 7
aagacauccgauagcauua

SEQ ID NO: 178541 - RNA, 13 nt, Human herpesvirus 7
aagaccaaugaua

SEQ ID NO: 178542 - RNA, 18 nt, Human herpesvirus 7
aagaugucuaaaaguaca

SEQ ID NO: 178543 - RNA, 22 nt, Human herpesvirus 7
aagauuagcuauuauaauguaa

SEQ ID NO: 178544 - RNA, 21 nt, Human herpesvirus 7
aagauucuuaauuuguucaau

SEQ ID NO: 178545 - RNA, 17 nt, Human herpesvirus 7
aagaugcgaguccaaaa

SEQ ID NO: 178546 - RNA, 23 nt, Human herpesvirus 7
aagcaaaaaaagguacuaucuau

SEQ ID NO: 178547 - RNA, 15 nt, Human herpesvirus 7
aagcaaaccuuacaa

SEQ ID NO: 178548 - RNA, 21 nt, Human herpesvirus 7
aagcacacacguuuucuguca

SEQ ID NO: 178549 - RNA, 14 nt, Human herpesvirus 7
aagagcauucaugc

SEQ ID NO: 178550 - RNA, 19 nt, Human herpesvirus 7
aagagccggaaagcaaugu

SEQ ID NO: 178551 - RNA, 20 nt, Human herpesvirus 7
aagagccggaaagcaaugua

SEQ ID NO: 178552 - RNA, 14 nt, Human herpesvirus 7
aagagucucuccag

SEQ ID NO: 178553 - RNA, 14 nt, Human herpesvirus 7
aagauaaguauaaa

SEQ ID NO: 178554 - RNA, 15 nt, Human herpesvirus 7
aagauaauguuacau

SEQ ID NO: 178555 - RNA, 19 nt, Human herpesvirus 7
aacgacguaacaacagcag

SEQ ID NO: 178556 - RNA, 14 nt, Human herpesvirus 7
aacgacuacaggaa

SEQ ID NO: 178557 - RNA, 14 nt, Human herpesvirus 7
aacgaauaaaaagu

SEQ ID NO: 178558 - RNA, 22 nt, Human herpesvirus 7
aacgauuugguguacuacauau

SEQ ID NO: 178559 - RNA, 22 nt, Human herpesvirus 7
aacaucugucaggucacaaaag

SEQ ID NO: 178560 - RNA, 15 nt, Human herpesvirus 7
aacaucugucuauca

SEQ ID NO: 178561 - RNA, 15 nt, Human herpesvirus 7
aacaucuuaaauguc

SEQ ID NO: 178562 - RNA, 15 nt, Human herpesvirus 7
aacaucccuuuccaa

SEQ ID NO: 178563 - RNA, 12 nt, Human herpesvirus 7
uuuuuucauaca

SEQ ID NO: 178564 - RNA, 16 nt, Human herpesvirus 7
aacaucgagauuccaa

SEQ ID NO: 178565 - RNA, 20 nt, Human herpesvirus 7
aacaucgagauuccaaagag

SEQ ID NO: 178566 - RNA, 12 nt, Human herpesvirus 7
uuuuugucuuua

SEQ ID NO: 178567 - RNA, 14 nt, Human herpesvirus 7
uuuuucucugauca

SEQ ID NO: 178568 - RNA, 20 nt, Human herpesvirus 7
aacauacagcaugacgugau

SEQ ID NO: 178569 - RNA, 23 nt, Human herpesvirus 7
aacgcuaaagagcauucaugccu

SEQ ID NO: 178570 - RNA, 21 nt, Human herpesvirus 7
aacggucugagacggacuuau

SEQ ID NO: 178571 - RNA, 20 nt, Human herpesvirus 7
aacgucauaaucaucuuucu

SEQ ID NO: 178572 - RNA, 16 nt, Human herpesvirus 7
aacgguagaauguguu

SEQ ID NO: 178573 - RNA, 19 nt, Human herpesvirus 7
aacguuuuuaucugauaaa

SEQ ID NO: 178574 - RNA, 14 nt, Human herpesvirus 7
aacguucuugguca

SEQ ID NO: 178575 - RNA, 14 nt, Human herpesvirus 7
aacucuaucuccua

SEQ ID NO: 178576 - RNA, 21 nt, Human herpesvirus 7
aacucuuccuguuaauaucua

SEQ ID NO: 178577 - RNA, 13 nt, Human herpesvirus 7
aacucuuccuuuc

SEQ ID NO: 178578 - RNA, 17 nt, Human herpesvirus 7
aacuauuguccuuucaa

SEQ ID NO: 178579 - RNA, 16 nt, Human herpesvirus 7
aacucguagcauugcc

SEQ ID NO: 178580 - RNA, 17 nt, Human herpesvirus 7
aacuccguuucauuuaa

SEQ ID NO: 178581 - RNA, 13 nt, Human herpesvirus 7
aauccaugacaga

SEQ ID NO: 178582 - RNA, 18 nt, Human herpesvirus 7
aauccguaucuagagaau

SEQ ID NO: 178583 - RNA, 20 nt, Human herpesvirus 7
aaucgauaaacuuugucaau

SEQ ID NO: 178584 - RNA, 15 nt, Human herpesvirus 7
aaucgauuaugaugu

SEQ ID NO: 178585 - RNA, 16 nt, Human herpesvirus 7
aaucgcuuauuuaaca

SEQ ID NO: 178586 - RNA, 20 nt, Human herpesvirus 7
aaucgguaacaugucuucaa

SEQ ID NO: 178587 - RNA, 17 nt, Human herpesvirus 7
aaucgugggacuugaua

SEQ ID NO: 178588 - RNA, 21 nt, Human herpesvirus 7
aaucuacauuaaacagcauuu

SEQ ID NO: 178589 - RNA, 18 nt, Human herpesvirus 7
aaucuacuguaaucugac

SEQ ID NO: 178590 - RNA, 16 nt, Human herpesvirus 7
aaucuuuacacuugga

SEQ ID NO: 178591 - RNA, 20 nt, Human herpesvirus 7
aaucaccuuccucguugcca

SEQ ID NO: 178592 - RNA, 14 nt, Human herpesvirus 7
aaucacagcauuau

SEQ ID NO: 178593 - RNA, 14 nt, Human herpesvirus 7
aaucacauacucua

SEQ ID NO: 178594 - RNA, 14 nt, Human herpesvirus 7
aaucaccaaagagu

SEQ ID NO: 178595 - RNA, 17 nt, Human herpesvirus 7
aaucaaugcaucuuuaa

SEQ ID NO: 178596 - RNA, 15 nt, Human herpesvirus 7
aaucaauuuuugaca

SEQ ID NO: 178597 - RNA, 23 nt, Human herpesvirus 7
aaucaagccacgaugacuuccaa

SEQ ID NO: 178598 - RNA, 20 nt, Human herpesvirus 7
aaucaagacgcuguaugcaa

SEQ ID NO: 178599 - RNA, 21 nt, Human herpesvirus 7
aauauuauaucuaaaguggag

SEQ ID NO: 178600 - RNA, 15 nt, Human herpesvirus 7
aauauugauaaccua

SEQ ID NO: 178601 - RNA, 14 nt, Human herpesvirus 7
aauauuuuacauau

SEQ ID NO: 178602 - RNA, 21 nt, Human herpesvirus 7
aauauuuagagucgucuugca

SEQ ID NO: 178603 - RNA, 22 nt, Human herpesvirus 7
aauauuuauguucaaauaugca

SEQ ID NO: 178604 - RNA, 24 nt, Human herpesvirus 7
aauauuuauguucaaauaugcaug

SEQ ID NO: 178605 - RNA, 14 nt, Human herpesvirus 7
aaucaaaaaacacg

SEQ ID NO: 178606 - RNA, 19 nt, Human herpesvirus 7
aaucaaaaaacacguccaa

SEQ ID NO: 178607 - RNA, 22 nt, Human herpesvirus 7
aauauuuugaaaauauauucca

SEQ ID NO: 178608 - RNA, 23 nt, Human herpesvirus 7
aauauuuugaaaauauauuccaa

SEQ ID NO: 178609 - RNA, 20 nt, Human herpesvirus 7
aauauuuuugcccugccaau

SEQ ID NO: 178610 - RNA, 15 nt, Human herpesvirus 7
aaucaaaguaaaaga

SEQ ID NO: 178611 - RNA, 14 nt, Human herpesvirus 7
aaucaaaguuuuaa

SEQ ID NO: 178612 - RNA, 18 nt, Human herpesvirus 7
aaucaaacauguaaucaa

SEQ ID NO: 178613 - RNA, 19 nt, Human herpesvirus 7
aauaaagccagguauucaa

SEQ ID NO: 178614 - RNA, 19 nt, Human herpesvirus 7
aauaaaagggcagacacua

SEQ ID NO: 178615 - RNA, 23 nt, Human herpesvirus 7
aauaaaagcuuucuuucucauca

SEQ ID NO: 178616 - RNA, 22 nt, Human herpesvirus 7
aagugcauguguuaauuguggu

SEQ ID NO: 178617 - RNA, 15 nt, Human herpesvirus 7
aagugcugucuugcu

SEQ ID NO: 178618 - RNA, 22 nt, Human herpesvirus 7
aauagaaaaauguacaauaauu

SEQ ID NO: 178619 - RNA, 15 nt, Human herpesvirus 7
aauagacacauuuau

SEQ ID NO: 178620 - RNA, 16 nt, Human herpesvirus 7
aauacuugcaaugcaa

SEQ ID NO: 178621 - RNA, 13 nt, Human herpesvirus 7
aauaaauguucuu

SEQ ID NO: 178622 - RNA, 21 nt, Human herpesvirus 7
aauagcagagaauauguuauc

SEQ ID NO: 178623 - RNA, 22 nt, Human herpesvirus 7
aauagcagagaauauguuauca

SEQ ID NO: 178624 - RNA, 19 nt, Human herpesvirus 7
aauagcauaugcuggaucu

SEQ ID NO: 178625 - RNA, 17 nt, Human herpesvirus 7
aauauaaaaaauuugaa

SEQ ID NO: 178626 - RNA, 18 nt, Human herpesvirus 7
aagccacgaugacuucca

SEQ ID NO: 178627 - RNA, 15 nt, Human herpesvirus 7
aagccagguauucaa

SEQ ID NO: 178628 - RNA, 13 nt, Human herpesvirus 7
aagcucauuucau

SEQ ID NO: 178629 - RNA, 11 nt, Human herpesvirus 7
aagcuuuucag

SEQ ID NO: 178630 - RNA, 16 nt, Human herpesvirus 7
aaggaaaaaugcugcu

SEQ ID NO: 178631 - RNA, 21 nt, Human herpesvirus 7
aagcuugugaagacuacauaa

SEQ ID NO: 178632 - RNA, 21 nt, Human herpesvirus 7
aagcuugcuuaaaacuuugaa

SEQ ID NO: 178633 - RNA, 14 nt, Human herpesvirus 7
aagcuuuaucccac

SEQ ID NO: 178634 - RNA, 13 nt, Human herpesvirus 7
aagccacuguuga

SEQ ID NO: 178635 - RNA, 18 nt, Human herpesvirus 7
aagccacuguugaugauu

SEQ ID NO: 178636 - RNA, 23 nt, Human herpesvirus 7
aagccacuucuaaauaaacaaga

SEQ ID NO: 178637 - RNA, 17 nt, Human herpesvirus 7
aagccacagauauucua

SEQ ID NO: 178638 - RNA, 21 nt, Human herpesvirus 7
aagccacagauauucuaacaa

SEQ ID NO: 178639 - RNA, 12 nt, Human herpesvirus 7
aagcaccaaaaa

SEQ ID NO: 178640 - RNA, 12 nt, Human herpesvirus 7
aagcagcuugau

SEQ ID NO: 178641 - RNA, 14 nt, Human herpesvirus 7
aagcaguuauauga

SEQ ID NO: 178642 - RNA, 20 nt, Human herpesvirus 7
aaguccuucaauagcagaga

SEQ ID NO: 178643 - RNA, 21 nt, Human herpesvirus 7
aaguaauacauggggcauuaa

SEQ ID NO: 178644 - RNA, 15 nt, Human herpesvirus 7
aaguaaaaacuuuuc

SEQ ID NO: 178645 - RNA, 13 nt, Human herpesvirus 7
aaguaaaagcuag

SEQ ID NO: 178646 - RNA, 21 nt, Human herpesvirus 7
aaguaaauuucucacaccuua

SEQ ID NO: 178647 - RNA, 21 nt, Human herpesvirus 7
aagguucauauacuucuugcc

SEQ ID NO: 178648 - RNA, 19 nt, Human herpesvirus 7
aagguuaagugaaugugcu

SEQ ID NO: 178649 - RNA, 19 nt, Human herpesvirus 7
aagugauacugaaucugaa

SEQ ID NO: 178650 - RNA, 21 nt, Human herpesvirus 7
aagucuuuauaaaggaccaug

SEQ ID NO: 178651 - RNA, 13 nt, Human herpesvirus 7
aaguccuuugaua

SEQ ID NO: 178652 - RNA, 20 nt, Human herpesvirus 7
aagucucauucaugcacagu

SEQ ID NO: 178653 - RNA, 21 nt, Human herpesvirus 7
aaggugguuacauauccaaug

SEQ ID NO: 178654 - RNA, 13 nt, Human herpesvirus 7
aaggugucuucgg

SEQ ID NO: 178655 - RNA, 18 nt, Human herpesvirus 7
aaggucuuucaugcauug

SEQ ID NO: 178656 - RNA, 23 nt, Human herpesvirus 7
aaggucuuucaugcauugcauuc

SEQ ID NO: 178657 - RNA, 13 nt, Human herpesvirus 7
aaggaagcuuuac

SEQ ID NO: 178658 - RNA, 17 nt, Human herpesvirus 7
aaggaagguacaucuuu

SEQ ID NO: 178659 - RNA, 15 nt, Human herpesvirus 7
aaggaccaugggaaa

SEQ ID NO: 178660 - RNA, 19 nt, Human herpesvirus 7
ugaugauuuaauauagaaa

SEQ ID NO: 178661 - RNA, 20 nt, Human herpesvirus 7
ugaugcauuuuuauugcagu

SEQ ID NO: 178662 - RNA, 23 nt, Human herpesvirus 7
ugauggaaagcaaaagccacaga

SEQ ID NO: 178663 - RNA, 17 nt, Human herpesvirus 7
ugaugacaacaaagcau

SEQ ID NO: 178664 - RNA, 22 nt, Human herpesvirus 7
ugaugacaacaaagcaugaaaa

SEQ ID NO: 178665 - RNA, 15 nt, Human herpesvirus 7
ugaugaccacaacag

SEQ ID NO: 178666 - RNA, 17 nt, Human herpesvirus 7
ugauguacugcucauca

SEQ ID NO: 178667 - RNA, 17 nt, Human herpesvirus 7
ugauguuaaagaacaag

SEQ ID NO: 178668 - RNA, 17 nt, Human herpesvirus 7
ugauggauaacuaugaa

SEQ ID NO: 178669 - RNA, 21 nt, Human herpesvirus 7
ugauacauucgcaaggaauau

SEQ ID NO: 178670 - RNA, 14 nt, Human herpesvirus 7
ugauauacuuuuaa

SEQ ID NO: 178671 - RNA, 17 nt, Human herpesvirus 7
ugaucacuuugcaucaa

SEQ ID NO: 178672 - RNA, 19 nt, Human herpesvirus 7
ugaucauuugcauguugcu

SEQ ID NO: 178673 - RNA, 21 nt, Human herpesvirus 7
ugaucguuguugguguguuac

SEQ ID NO: 178674 - RNA, 15 nt, Human herpesvirus 7
ugaucuaaaguaugg

SEQ ID NO: 178675 - RNA, 14 nt, Human herpesvirus 7
ugauugcgaccaaa

SEQ ID NO: 178676 - RNA, 16 nt, Human herpesvirus 7
ugauugcgaccaaaga

SEQ ID NO: 178677 - RNA, 20 nt, Human herpesvirus 7
ugauucgcuaacuuugcuau

SEQ ID NO: 178678 - RNA, 14 nt, Human herpesvirus 7
ugauugacucgaau

SEQ ID NO: 178679 - RNA, 13 nt, Human herpesvirus 7
ugauuccaucuca

SEQ ID NO: 178680 - RNA, 15 nt, Human herpesvirus 7
ugauucacauuguca

SEQ ID NO: 178681 - RNA, 17 nt, Human herpesvirus 7
ugauuuuuuauucccag

SEQ ID NO: 178682 - RNA, 14 nt, Human herpesvirus 7
ugauuuuucugcuu

SEQ ID NO: 178683 - RNA, 17 nt, Human herpesvirus 7
ugcaaaacaaaauaccg

SEQ ID NO: 178684 - RNA, 20 nt, Human herpesvirus 7
ugcaaaauagauuauauuac

SEQ ID NO: 178685 - RNA, 21 nt, Human herpesvirus 7
ugauuguagauggcaccaaua

SEQ ID NO: 178686 - RNA, 17 nt, Human herpesvirus 7
ugauuuuaaauuuacuu

SEQ ID NO: 178687 - RNA, 22 nt, Human herpesvirus 7
ugcaaagcuuuugcgagaaaau

SEQ ID NO: 178688 - RNA, 23 nt, Human herpesvirus 7
ugcaaacgucucguguuuaguga

SEQ ID NO: 178689 - RNA, 22 nt, Human herpesvirus 7
ugcaagcugauucaacacucga

SEQ ID NO: 178690 - RNA, 11 nt, Human herpesvirus 7
ugcaagcacau

SEQ ID NO: 178691 - RNA, 14 nt, Human herpesvirus 7
ugcaagcacaugua

SEQ ID NO: 178692 - RNA, 16 nt, Human herpesvirus 7
ugcaagaaaguccaaa

SEQ ID NO: 178693 - RNA, 14 nt, Human herpesvirus 7
ugcaauaugcucac

SEQ ID NO: 178694 - RNA, 19 nt, Human herpesvirus 7
ugcaaugauguuugcauug

SEQ ID NO: 178695 - RNA, 14 nt, Human herpesvirus 7
ugcaauguucauca

SEQ ID NO: 178696 - RNA, 22 nt, Human herpesvirus 7
ugagcacggcacacaacagcca

SEQ ID NO: 178697 - RNA, 15 nt, Human herpesvirus 7
ugagcaauucaugca

SEQ ID NO: 178698 - RNA, 18 nt, Human herpesvirus 7
ugagcaauugauucacau

SEQ ID NO: 178699 - RNA, 20 nt, Human herpesvirus 7
ugagaccgaauauacuuuag

SEQ ID NO: 178700 - RNA, 15 nt, Human herpesvirus 7
ugaaaaaaucuugca

SEQ ID NO: 178701 - RNA, 23 nt, Human herpesvirus 7
ugaaaaaaagauuuaacaugugu

SEQ ID NO: 178702 - RNA, 17 nt, Human herpesvirus 7
ugaaaaagaauuuucug

SEQ ID NO: 178703 - RNA, 12 nt, Human herpesvirus 7
ugaaaaagccau

SEQ ID NO: 178704 - RNA, 15 nt, Human herpesvirus 7
ucuuuuucaaaugga

SEQ ID NO: 178705 - RNA, 12 nt, Human herpesvirus 7
ucuuuucaguga

SEQ ID NO: 178706 - RNA, 23 nt, Human herpesvirus 7
ucuuuggguacaaguccuuugau

SEQ ID NO: 178707 - RNA, 21 nt, Human herpesvirus 7
ucuuuguaaaaaugaauucaa

SEQ ID NO: 178708 - RNA, 18 nt, Human herpesvirus 7
ucuuugugagaaauggaa

SEQ ID NO: 178709 - RNA, 20 nt, Human herpesvirus 7
ucuuuuauaaauaguuucau

SEQ ID NO: 178710 - RNA, 20 nt, Human herpesvirus 7
ugagaaauuuugaucuuguc

SEQ ID NO: 178711 - RNA, 22 nt, Human herpesvirus 7
ugagaauguugagcuaucugau

SEQ ID NO: 178712 - RNA, 14 nt, Human herpesvirus 7
ugaaaacgaaagga

SEQ ID NO: 178713 - RNA, 22 nt, Human herpesvirus 7
ugaaaacuuggaaaacaaucaa

SEQ ID NO: 178714 - RNA, 12 nt, Human herpesvirus 7
ugaaaacagcug

SEQ ID NO: 178715 - RNA, 22 nt, Human herpesvirus 7
ugaaaacaauuaagaaucauuu

SEQ ID NO: 178716 - RNA, 20 nt, Human herpesvirus 7
ugaaaagcaacuuuucuuaa

SEQ ID NO: 178717 - RNA, 16 nt, Human herpesvirus 7
ugaaaagcuuguuuaa

SEQ ID NO: 178718 - RNA, 21 nt, Human herpesvirus 7
ugaaaagucauuauuuguuaa

SEQ ID NO: 178719 - RNA, 15 nt, Human herpesvirus 7
ugagaaauuacagua

SEQ ID NO: 178720 - RNA, 17 nt, Human herpesvirus 7
ugagaaauuacaguaca

SEQ ID NO: 178721 - RNA, 13 nt, Human herpesvirus 7
ugauagaguacau

SEQ ID NO: 178722 - RNA, 14 nt, Human herpesvirus 7
ugauagaugcgaaa

SEQ ID NO: 178723 - RNA, 13 nt, Human herpesvirus 7
ugauaauuuacaa

SEQ ID NO: 178724 - RNA, 20 nt, Human herpesvirus 7
ugauaagacugaagacaaaa

SEQ ID NO: 178725 - RNA, 15 nt, Human herpesvirus 7
ugaguuugauuguau

SEQ ID NO: 178726 - RNA, 14 nt, Human herpesvirus 7
ugagugaacauuug

SEQ ID NO: 178727 - RNA, 15 nt, Human herpesvirus 7
ugagugaacauuuga

SEQ ID NO: 178728 - RNA, 16 nt, Human herpesvirus 7
ugaguugcugcugucu

SEQ ID NO: 178729 - RNA, 15 nt, Human herpesvirus 7
ugaguuuccauugcu

SEQ ID NO: 178730 - RNA, 17 nt, Human herpesvirus 7
ugaguuuccauugcugu

SEQ ID NO: 178731 - RNA, 22 nt, Human herpesvirus 7
ugaguaaagauuuaacugauaa

SEQ ID NO: 178732 - RNA, 14 nt, Human herpesvirus 7
ugaggaaaugucuu

SEQ ID NO: 178733 - RNA, 14 nt, Human herpesvirus 7
ugagcuaucugauu

SEQ ID NO: 178734 - RNA, 19 nt, Human herpesvirus 7
ugcuugcacuguaauauaa

SEQ ID NO: 178735 - RNA, 11 nt, Human herpesvirus 7
ugcuugcugaa

SEQ ID NO: 178736 - RNA, 20 nt, Human herpesvirus 7
ugcuucuucuaauacaucua

SEQ ID NO: 178737 - RNA, 16 nt, Human herpesvirus 7
ugcuucucccauucaa

SEQ ID NO: 178738 - RNA, 15 nt, Human herpesvirus 7
ugcuucggaauuuga

SEQ ID NO: 178739 - RNA, 20 nt, Human herpesvirus 7
ugcuucggaauuugauucca

SEQ ID NO: 178740 - RNA, 21 nt, Human herpesvirus 7
ugcuucggaauuugauuccau

SEQ ID NO: 178741 - RNA, 15 nt, Human herpesvirus 7
ugcugauacaagaua

SEQ ID NO: 178742 - RNA, 18 nt, Human herpesvirus 7
ugcugaaacaucaauuuu

SEQ ID NO: 178743 - RNA, 19 nt, Human herpesvirus 7
ugcuuaucucucacacuca

SEQ ID NO: 178744 - RNA, 23 nt, Human herpesvirus 7
ugcuuauuuauauauggcaauaa

SEQ ID NO: 178745 - RNA, 18 nt, Human herpesvirus 7
ugcuucaauucaccaauu

SEQ ID NO: 178746 - RNA, 19 nt, Human herpesvirus 7
ugcugcaauguucaucaau

SEQ ID NO: 178747 - RNA, 20 nt, Human herpesvirus 7
uggaauccuaugacugagaa

SEQ ID NO: 178748 - RNA, 16 nt, Human herpesvirus 7
uggaaucgaauacagu

SEQ ID NO: 178749 - RNA, 19 nt, Human herpesvirus 7
ugcuuucuaaguacuucug

SEQ ID NO: 178750 - RNA, 12 nt, Human herpesvirus 7
ugcuuguuacag

SEQ ID NO: 178751 - RNA, 12 nt, Human herpesvirus 7
ugcuuuccauca

SEQ ID NO: 178752 - RNA, 12 nt, Human herpesvirus 7
ugcggcucucug

SEQ ID NO: 178753 - RNA, 20 nt, Human herpesvirus 7
ugcgauaucugacugguaca

SEQ ID NO: 178754 - RNA, 13 nt, Human herpesvirus 7
ugcguuacuucug

SEQ ID NO: 178755 - RNA, 17 nt, Human herpesvirus 7
ugcuaaggcgaaaaaca

SEQ ID NO: 178756 - RNA, 18 nt, Human herpesvirus 7
ugcuaacaaguaugucag

SEQ ID NO: 178757 - RNA, 16 nt, Human herpesvirus 7
ugcuaaccacuguguc

SEQ ID NO: 178758 - RNA, 13 nt, Human herpesvirus 7
ugcguguguucaa

SEQ ID NO: 178759 - RNA, 12 nt, Human herpesvirus 7
ugcguugcuuaa

SEQ ID NO: 178760 - RNA, 23 nt, Human herpesvirus 7
ugcgugcgccuuuaaaauuucau

SEQ ID NO: 178761 - RNA, 22 nt, Human herpesvirus 7
ugcuaauuaccgauggaacuga

SEQ ID NO: 178762 - RNA, 19 nt, Human herpesvirus 7
ugccaauuuuuaacauuac

SEQ ID NO: 178763 - RNA, 18 nt, Human herpesvirus 7
ugcaucaaaacauaucag

SEQ ID NO: 178764 - RNA, 17 nt, Human herpesvirus 7
ugcauauggacuuauca

SEQ ID NO: 178765 - RNA, 19 nt, Human herpesvirus 7
ugcauauggacuuaucaau

SEQ ID NO: 178766 - RNA, 12 nt, Human herpesvirus 7
ugcauaucauga

SEQ ID NO: 178767 - RNA, 18 nt, Human herpesvirus 7
ugcauacaguuuauuuga

SEQ ID NO: 178768 - RNA, 13 nt, Human herpesvirus 7
ugcauagauuaaa

SEQ ID NO: 178769 - RNA, 15 nt, Human herpesvirus 7
ugcauaaacuaucaa

SEQ ID NO: 178770 - RNA, 18 nt, Human herpesvirus 7
ugcauaaacuaucaaauc

SEQ ID NO: 178771 - RNA, 19 nt, Human herpesvirus 7
ugcauaaauaauaacaauu

SEQ ID NO: 178772 - RNA, 17 nt, Human herpesvirus 7
ugcacuaucuccuaaau

SEQ ID NO: 178773 - RNA, 23 nt, Human herpesvirus 7
ugcaggucgcuucguaaauauaa

SEQ ID NO: 178774 - RNA, 15 nt, Human herpesvirus 7
ugcacuguaauauaa

SEQ ID NO: 178775 - RNA, 18 nt, Human herpesvirus 7
ugcacaaagauccucuga

SEQ ID NO: 178776 - RNA, 16 nt, Human herpesvirus 7
ugcaauuuuauuuucc

SEQ ID NO: 178777 - RNA, 15 nt, Human herpesvirus 7
ugccauaauuucagc

SEQ ID NO: 178778 - RNA, 15 nt, Human herpesvirus 7
ugccaccauuucuga

SEQ ID NO: 178779 - RNA, 21 nt, Human herpesvirus 7
ugccacguuuuuuucuucaau

SEQ ID NO: 178780 - RNA, 23 nt, Human herpesvirus 7
ugccacuagagggaguaccgaaa

SEQ ID NO: 178781 - RNA, 16 nt, Human herpesvirus 7
ugcgaaagccacuguu

SEQ ID NO: 178782 - RNA, 20 nt, Human herpesvirus 7
ugccgaagaaugggugucag

SEQ ID NO: 178783 - RNA, 16 nt, Human herpesvirus 7
ugccuuguuugcuggu

SEQ ID NO: 178784 - RNA, 21 nt, Human herpesvirus 7
ugccuugccaaaagcuugaaa

SEQ ID NO: 178785 - RNA, 23 nt, Human herpesvirus 7
ugccuuauuguuuuuuacuuauu

SEQ ID NO: 178786 - RNA, 14 nt, Human herpesvirus 7
ugccuucagucuua

SEQ ID NO: 178787 - RNA, 16 nt, Human herpesvirus 7
ugguccggauguaggu

SEQ ID NO: 178788 - RNA, 22 nt, Human herpesvirus 7
ugguccggauguaggugcugca

SEQ ID NO: 178789 - RNA, 22 nt, Human herpesvirus 7
uggucacugagccaucaaaaaa

SEQ ID NO: 178790 - RNA, 18 nt, Human herpesvirus 7
ugguagugugcacacaaa

SEQ ID NO: 178791 - RNA, 12 nt, Human herpesvirus 7
ugguucauuaca

SEQ ID NO: 178792 - RNA, 21 nt, Human herpesvirus 7
ugguucguacagucauuugca

SEQ ID NO: 178793 - RNA, 13 nt, Human herpesvirus 7
uguaacuuucauc

SEQ ID NO: 178794 - RNA, 16 nt, Human herpesvirus 7
uguaaggccaaaggua

SEQ ID NO: 178795 - RNA, 17 nt, Human herpesvirus 7
ugguuaugcacauccaa

SEQ ID NO: 178796 - RNA, 20 nt, Human herpesvirus 7
ugguguguuacaucauguua

SEQ ID NO: 178797 - RNA, 18 nt, Human herpesvirus 7
uggugcguacacuguaag

SEQ ID NO: 178798 - RNA, 14 nt, Human herpesvirus 7
ugguguacuacaua

SEQ ID NO: 178799 - RNA, 20 nt, Human herpesvirus 7
uggaucguagcaacagagaa

SEQ ID NO: 178800 - RNA, 21 nt, Human herpesvirus 7
uggacacaaucagcauuuacc

SEQ ID NO: 178801 - RNA, 15 nt, Human herpesvirus 7
uggacaccaguauga

SEQ ID NO: 178802 - RNA, 16 nt, Human herpesvirus 7
uggcaauuguaaaaau

SEQ ID NO: 178803 - RNA, 23 nt, Human herpesvirus 7
uggcaauuguaaaaauaaagaca

SEQ ID NO: 178804 - RNA, 19 nt, Human herpesvirus 7
uggauuuuguuuuuagcuu

SEQ ID NO: 178805 - RNA, 13 nt, Human herpesvirus 7
uggcaacaaacaa

SEQ ID NO: 178806 - RNA, 16 nt, Human herpesvirus 7
uggcaacaaacaaaua

SEQ ID NO: 178807 - RNA, 19 nt, Human herpesvirus 7
uggauucaaucuacuguac

SEQ ID NO: 178808 - RNA, 13 nt, Human herpesvirus 7
uggcacuguguau

SEQ ID NO: 178809 - RNA, 19 nt, Human herpesvirus 7
uggggcauuaauucuuuca

SEQ ID NO: 178810 - RNA, 20 nt, Human herpesvirus 7
uggggauguucuauucucau

SEQ ID NO: 178811 - RNA, 13 nt, Human herpesvirus 7
ugucaugaugaau

SEQ ID NO: 178812 - RNA, 23 nt, Human herpesvirus 7
uguccacuaagacggaacuucuu

SEQ ID NO: 178813 - RNA, 13 nt, Human herpesvirus 7
uguccacuacaga

SEQ ID NO: 178814 - RNA, 14 nt, Human herpesvirus 7
uguccacuacagau

SEQ ID NO: 178815 - RNA, 14 nt, Human herpesvirus 7
ugucuuuagaacuu

SEQ ID NO: 178816 - RNA, 19 nt, Human herpesvirus 7
ugugaaaauaacaggaaac

SEQ ID NO: 178817 - RNA, 22 nt, Human herpesvirus 7
ugugaaaagauuucuauugaau

SEQ ID NO: 178818 - RNA, 18 nt, Human herpesvirus 7
uguaaucaaaauuuugga

SEQ ID NO: 178819 - RNA, 17 nt, Human herpesvirus 7
uguaauuucucaaauca

SEQ ID NO: 178820 - RNA, 13 nt, Human herpesvirus 7
uguacagacagaa

SEQ ID NO: 178821 - RNA, 17 nt, Human herpesvirus 7
ugucaucuuauauuccu

SEQ ID NO: 178822 - RNA, 20 nt, Human herpesvirus 7
ugucauagugggaacauaaa

SEQ ID NO: 178823 - RNA, 14 nt, Human herpesvirus 7
ugucaucauauaca

SEQ ID NO: 178824 - RNA, 17 nt, Human herpesvirus 7
uguacauuuuaccaaau

SEQ ID NO: 178825 - RNA, 15 nt, Human herpesvirus 7
uguacgugugcugcg

SEQ ID NO: 178826 - RNA, 13 nt, Human herpesvirus 7
uguacguucugaa

SEQ ID NO: 178827 - RNA, 14 nt, Human herpesvirus 7
ugugagaaauggaa

SEQ ID NO: 178828 - RNA, 18 nt, Human herpesvirus 7
ugugcaugaaaucuugaa

SEQ ID NO: 178829 - RNA, 16 nt, Human herpesvirus 7
ugugcauuucacuugu

SEQ ID NO: 178830 - RNA, 16 nt, Human herpesvirus 7
ugugcaauuuggcucu

SEQ ID NO: 178831 - RNA, 17 nt, Human herpesvirus 7
ugugcacacaaaggcca

SEQ ID NO: 178832 - RNA, 14 nt, Human herpesvirus 7
uguggagagauuca

SEQ ID NO: 178833 - RNA, 19 nt, Human herpesvirus 7
ugugucacguguucaggca

SEQ ID NO: 178834 - RNA, 17 nt, Human herpesvirus 7
uguuuuuuauuuagcua

SEQ ID NO: 178835 - RNA, 18 nt, Human herpesvirus 7
uuaaaaaagaauuuggau

SEQ ID NO: 178836 - RNA, 13 nt, Human herpesvirus 7
uuaaaaaucuuua

SEQ ID NO: 178837 - RNA, 13 nt, Human herpesvirus 7
uuaaaaauuaaca

SEQ ID NO: 178838 - RNA, 16 nt, Human herpesvirus 7
uguuuuagaccuauca

SEQ ID NO: 178839 - RNA, 17 nt, Human herpesvirus 7
uguuuuagaccuaucaa

SEQ ID NO: 178840 - RNA, 16 nt, Human herpesvirus 7
uguuuuaugacucaga

SEQ ID NO: 178841 - RNA, 18 nt, Human herpesvirus 7
uguuuugucucuuuacag

SEQ ID NO: 178842 - RNA, 13 nt, Human herpesvirus 7
uguugcauaucau

SEQ ID NO: 178843 - RNA, 22 nt, Human herpesvirus 7
uguugcaaauguuccacgauca

SEQ ID NO: 178844 - RNA, 13 nt, Human herpesvirus 7
uuaaaauuggacu

SEQ ID NO: 178845 - RNA, 22 nt, Human herpesvirus 7
uuaaaauuggacuuggcucuua

SEQ ID NO: 178846 - RNA, 16 nt, Human herpesvirus 7
uuaaaauuucauaucu

SEQ ID NO: 178847 - RNA, 17 nt, Human herpesvirus 7
uuaaaauuucauaucua

SEQ ID NO: 178848 - RNA, 14 nt, Human herpesvirus 7
uuaaaauauguuca

SEQ ID NO: 178849 - RNA, 18 nt, Human herpesvirus 7
uuaaaauguacauaacuc

SEQ ID NO: 178850 - RNA, 23 nt, Human herpesvirus 7
uuaaaauuauuaauauuaguauu

SEQ ID NO: 178851 - RNA, 17 nt, Human herpesvirus 7
uuaaaacuuggugaaga

SEQ ID NO: 178852 - RNA, 13 nt, Human herpesvirus 7
uuaaaacuuugaa

SEQ ID NO: 178853 - RNA, 16 nt, Human herpesvirus 7
uuaaaacaagacagaa

SEQ ID NO: 178854 - RNA, 12 nt, Human herpesvirus 7
uuaaaaugauua

SEQ ID NO: 178855 - RNA, 13 nt, Human herpesvirus 7
uuaaaaugauuag

SEQ ID NO: 178856 - RNA, 24 nt, Human herpesvirus 7
uuaacaauuauuuuaaauucuaau

SEQ ID NO: 178857 - RNA, 23 nt, Human herpesvirus 7
uuaacuggaauuauacacuguga

SEQ ID NO: 178858 - RNA, 19 nt, Human herpesvirus 7
uuaacgaaggcaucaagaa

SEQ ID NO: 178859 - RNA, 16 nt, Human herpesvirus 7
uuaacgacgaugcugc

SEQ ID NO: 178860 - RNA, 21 nt, Human herpesvirus 7
uguugaaagaaaagauguacg

SEQ ID NO: 178861 - RNA, 14 nt, Human herpesvirus 7
uguugaaguugaac

SEQ ID NO: 178862 - RNA, 22 nt, Human herpesvirus 7
uguugaaguugaacaauggugu

SEQ ID NO: 178863 - RNA, 14 nt, Human herpesvirus 7
uguuccaguugaau

SEQ ID NO: 178864 - RNA, 15 nt, Human herpesvirus 7
uguucccacugggac

SEQ ID NO: 178865 - RNA, 19 nt, Human herpesvirus 7
uguucauuaucaccacaau

SEQ ID NO: 178866 - RNA, 15 nt, Human herpesvirus 7
uguucgcaaauguac

SEQ ID NO: 178867 - RNA, 16 nt, Human herpesvirus 7
uguucauaaaccugcu

SEQ ID NO: 178868 - RNA, 13 nt, Human herpesvirus 7
uguucagcuccag

SEQ ID NO: 178869 - RNA, 13 nt, Human herpesvirus 7
uguucauaucaau

SEQ ID NO: 178870 - RNA, 18 nt, Human herpesvirus 7
uguuauuuuucaugccuu

SEQ ID NO: 178871 - RNA, 16 nt, Human herpesvirus 7
uguucaaauaugcaug

SEQ ID NO: 178872 - RNA, 18 nt, Human herpesvirus 7
uguuauuguaucuaugaa

SEQ ID NO: 178873 - RNA, 19 nt, Human herpesvirus 7
uguucaacuucaacauaca

SEQ ID NO: 178874 - RNA, 17 nt, Human herpesvirus 7
uguguucgguguuuuaa

SEQ ID NO: 178875 - RNA, 16 nt, Human herpesvirus 7
uguuaaaggaucaaaa

SEQ ID NO: 178876 - RNA, 18 nt, Human herpesvirus 7
uguuaauuaaaguugcau

SEQ ID NO: 178877 - RNA, 17 nt, Human herpesvirus 7
uguuacaacuuugccaa

SEQ ID NO: 178878 - RNA, 21 nt, Human herpesvirus 7
uguuaggccaguucuaucuca

SEQ ID NO: 178879 - RNA, 13 nt, Human herpesvirus 7
uuacaacaaagaa

SEQ ID NO: 178880 - RNA, 20 nt, Human herpesvirus 7
uuacaagaugcgaguccaaa

SEQ ID NO: 178881 - RNA, 15 nt, Human herpesvirus 7
uuacaaacauguucc

SEQ ID NO: 178882 - RNA, 22 nt, Human herpesvirus 7
uuacaaacauguuccauucaau

SEQ ID NO: 178883 - RNA, 14 nt, Human herpesvirus 7
uuaauucuuuccac

SEQ ID NO: 178884 - RNA, 13 nt, Human herpesvirus 7
uuacaaaacaaag

SEQ ID NO: 178885 - RNA, 17 nt, Human herpesvirus 7
uuaauugugguacaaca

SEQ ID NO: 178886 - RNA, 21 nt, Human herpesvirus 7
uuaauugugguacaacaaaca

SEQ ID NO: 178887 - RNA, 16 nt, Human herpesvirus 7
uuaaugguaccuuaga

SEQ ID NO: 178888 - RNA, 23 nt, Human herpesvirus 7
uuaauguuuuuccuaugauacaa

SEQ ID NO: 178889 - RNA, 17 nt, Human herpesvirus 7
uuaagaacagaaugaua

SEQ ID NO: 178890 - RNA, 18 nt, Human herpesvirus 7
uuaacuuuuggaaugaua

SEQ ID NO: 178891 - RNA, 15 nt, Human herpesvirus 7
uuaaugucugugucu

SEQ ID NO: 178892 - RNA, 11 nt, Human herpesvirus 7
uuaaugugcuu

SEQ ID NO: 178893 - RNA, 21 nt, Human herpesvirus 7
uuaacauguguauauuugcug

SEQ ID NO: 178894 - RNA, 12 nt, Human herpesvirus 7
uuaagaauucca

SEQ ID NO: 178895 - RNA, 13 nt, Human herpesvirus 7
uuaagaauuccag

SEQ ID NO: 178896 - RNA, 17 nt, Human herpesvirus 7
uuaagacaccccaaaau

SEQ ID NO: 178897 - RNA, 15 nt, Human herpesvirus 7
uuacuuccuaaucua

SEQ ID NO: 178898 - RNA, 23 nt, Human herpesvirus 7
uuacuuccuaaucuaacaguuuc

SEQ ID NO: 178899 - RNA, 21 nt, Human herpesvirus 7
uuacuggcagaaauauaugaa

SEQ ID NO: 178900 - RNA, 16 nt, Human herpesvirus 7
uuagaaacaacacucu

SEQ ID NO: 178901 - RNA, 18 nt, Human herpesvirus 7
uuagaaagcucacuucaa

SEQ ID NO: 178902 - RNA, 21 nt, Human herpesvirus 7
uuagaaaaacgcuaaccaucu

SEQ ID NO: 178903 - RNA, 15 nt, Human herpesvirus 7
uuagaaaaucaaaaa

SEQ ID NO: 178904 - RNA, 20 nt, Human herpesvirus 7
uuacuugcagaaaaaauaau

SEQ ID NO: 178905 - RNA, 15 nt, Human herpesvirus 7
uuacucugugguauu

SEQ ID NO: 178906 - RNA, 15 nt, Human herpesvirus 7
uuacuacgguuuuca

SEQ ID NO: 178907 - RNA, 13 nt, Human herpesvirus 7
uuacagagaauuu

SEQ ID NO: 178908 - RNA, 21 nt, Human herpesvirus 7
uuacagccuguacaaauuucu

SEQ ID NO: 178909 - RNA, 22 nt, Human herpesvirus 7
uuacagcuaucucuacaaacag

SEQ ID NO: 178910 - RNA, 11 nt, Human herpesvirus 7
uuacaguguuu

SEQ ID NO: 178911 - RNA, 20 nt, Human herpesvirus 7
uuauuuuuuccaugucacau

SEQ ID NO: 178912 - RNA, 17 nt, Human herpesvirus 7
uuauuuguuuguucugu

SEQ ID NO: 178913 - RNA, 20 nt, Human herpesvirus 7
uuauuuacugauucuauaga

SEQ ID NO: 178914 - RNA, 13 nt, Human herpesvirus 7
uuauuuagcuaau

SEQ ID NO: 178915 - RNA, 18 nt, Human herpesvirus 7
uuauauauggcaauaaau

SEQ ID NO: 178916 - RNA, 13 nt, Human herpesvirus 7
uuauuuaaacagc

SEQ ID NO: 178917 - RNA, 14 nt, Human herpesvirus 7
uucaaauuauuucc

SEQ ID NO: 178918 - RNA, 14 nt, Human herpesvirus 7
uucaacauacagca

SEQ ID NO: 178919 - RNA, 19 nt, Human herpesvirus 7
uucaacaccagucucugaa

SEQ ID NO: 178920 - RNA, 22 nt, Human herpesvirus 7
uucaacaccagucucugaauua

SEQ ID NO: 178921 - RNA, 22 nt, Human herpesvirus 7
uucaaaauauaucugauguaga

SEQ ID NO: 178922 - RNA, 14 nt, Human herpesvirus 7
uucaaaagcuaaaa

SEQ ID NO: 178923 - RNA, 17 nt, Human herpesvirus 7
uucaaacgcuugaacaa

SEQ ID NO: 178924 - RNA, 21 nt, Human herpesvirus 7
uucaaacgcuugaacaaauua

SEQ ID NO: 178925 - RNA, 20 nt, Human herpesvirus 7
uuauaaaagauggaaaguuu

SEQ ID NO: 178926 - RNA, 21 nt, Human herpesvirus 7
uuauaaaauauggacuuuuaa

SEQ ID NO: 178927 - RNA, 18 nt, Human herpesvirus 7
uuauaaauguaacuuuca

SEQ ID NO: 178928 - RNA, 22 nt, Human herpesvirus 7
uuauaaauguaacuuucaucug

SEQ ID NO: 178929 - RNA, 19 nt, Human herpesvirus 7
uuauaacuuuaucauuacu

SEQ ID NO: 178930 - RNA, 21 nt, Human herpesvirus 7
uuauaagaauuuggauagaua

SEQ ID NO: 178931 - RNA, 13 nt, Human herpesvirus 7
uuagaccuaucaa

SEQ ID NO: 178932 - RNA, 13 nt, Human herpesvirus 7
uuagaauaucugu

SEQ ID NO: 178933 - RNA, 18 nt, Human herpesvirus 7
uuagaaucacaacauaua

SEQ ID NO: 178934 - RNA, 20 nt, Human herpesvirus 7
uuauacuuuuuuuacuuaaa

SEQ ID NO: 178935 - RNA, 18 nt, Human herpesvirus 7
uuauagaacaaguagaaa

SEQ ID NO: 178936 - RNA, 14 nt, Human herpesvirus 7
uuauacacugugaa

SEQ ID NO: 178937 - RNA, 22 nt, Human herpesvirus 7
uuauacauaaagagaaaguaaa

SEQ ID NO: 178938 - RNA, 14 nt, Human herpesvirus 7
uuauaauguaagaa

SEQ ID NO: 178939 - RNA, 17 nt, Human herpesvirus 7
uuuuuguuguuaucuac

SEQ ID NO: 178940 - RNA, 21 nt, Human herpesvirus 7
uuuuuucccagagaccuauga

SEQ ID NO: 178941 - RNA, 13 nt, Human herpesvirus 7
uuuuuugccuuca

SEQ ID NO: 178942 - RNA, 15 nt, Human herpesvirus 7
uuuuucaugccuugc

SEQ ID NO: 178943 - RNA, 16 nt, Human herpesvirus 7
uuuuuauuguaaagga

SEQ ID NO: 178944 - RNA, 14 nt, Human herpesvirus 7
uuuuucgcugaaga

SEQ ID NO: 178945 - RNA, 19 nt, Human herpesvirus 7
uuuugcacaucuagauaaa

SEQ ID NO: 178946 - RNA, 18 nt, Human herpesvirus 7
uuuugcagaaauuguucc

SEQ ID NO: 178947 - RNA, 20 nt, Human herpesvirus 7
uuuugcuuuccaucaucacg

SEQ ID NO: 178948 - RNA, 17 nt, Human herpesvirus 7
uuuuggcgaaacaauac

SEQ ID NO: 178949 - RNA, 16 nt, Human herpesvirus 7
uuuugguaaucugcuc

SEQ ID NO: 178950 - RNA, 15 nt, Human herpesvirus 7
uuuuguaaacaugaa

SEQ ID NO: 178951 - RNA, 18 nt, Human herpesvirus 7
uuuuguaagaaacaucua

SEQ ID NO: 178952 - RNA, 14 nt, Human herpesvirus 7
uuuuguacaggcaa

SEQ ID NO: 178953 - RNA, 23 nt, Human herpesvirus 7
uuuuuaauacaaaauaaagccag

SEQ ID NO: 178954 - RNA, 12 nt, Human herpesvirus 7
uuuuauuucaca

SEQ ID NO: 178955 - RNA, 18 nt, Human herpesvirus 7
uuuuauuuuuuucugaaa

SEQ ID NO: 178956 - RNA, 21 nt, Human herpesvirus 7
uuuuauugcgaaaaugauaaa

SEQ ID NO: 178957 - RNA, 22 nt, Human herpesvirus 7
uuuuauuccgugcuguacugaa

SEQ ID NO: 178958 - RNA, 12 nt, Human herpesvirus 7
uuuucacaucua

SEQ ID NO: 178959 - RNA, 12 nt, Human herpesvirus 7
uuuucgauucca

SEQ ID NO: 178960 - RNA, 13 nt, Human herpesvirus 7
uuuucgauuccau

SEQ ID NO: 178961 - RNA, 14 nt, Human herpesvirus 7
uuuugaaauugaca

SEQ ID NO: 178962 - RNA, 13 nt, Human herpesvirus 7
uuuucuccaugca

SEQ ID NO: 178963 - RNA, 17 nt, Human herpesvirus 7
uuuucugaaauccgcuu

SEQ ID NO: 178964 - RNA, 17 nt, Human herpesvirus 7
uuuucugagugcuaaaa

SEQ ID NO: 178965 - RNA, 22 nt, Human herpesvirus 7
uuuugauaagacugaagacaaa

SEQ ID NO: 178966 - RNA, 16 nt, Human herpesvirus 7
uuuugaacuguugcca

SEQ ID NO: 178967 - RNA, 18 nt, Human herpesvirus 7
uuuugcaauaugcuagaa

SEQ ID NO: 178968 - RNA, 13 nt, Human herpesvirus 7
uuuugauuuugcc

SEQ ID NO: 178969 - RNA, 18 nt, Human herpesvirus 7
uuuugcuagaaaccaagu

SEQ ID NO: 178970 - RNA, 15 nt, Human herpesvirus 7
uuuuacugucuuuag

SEQ ID NO: 178971 - RNA, 23 nt, Human herpesvirus 7
uuuuaucgaugagaauguugagc

SEQ ID NO: 178972 - RNA, 17 nt, Human herpesvirus 7
uuuuaauucuugauccc

SEQ ID NO: 178973 - RNA, 13 nt, Human herpesvirus 7
uuuuaauugugca

SEQ ID NO: 178974 - RNA, 17 nt, Human herpesvirus 7
uuuuacagccuguacaa

SEQ ID NO: 178975 - RNA, 20 nt, Human herpesvirus 7
uuugucucugugcauuucac

SEQ ID NO: 178976 - RNA, 15 nt, Human herpesvirus 7
uuugucucuuuacag

SEQ ID NO: 178977 - RNA, 14 nt, Human herpesvirus 7
uuugucuggucaca

SEQ ID NO: 178978 - RNA, 16 nt, Human herpesvirus 7
uuugucuggucacaua

SEQ ID NO: 178979 - RNA, 21 nt, Human herpesvirus 7
uuugugacucggaaccgagaa

SEQ ID NO: 178980 - RNA, 23 nt, Human herpesvirus 7
uuugugauguacugcucaucaaa

SEQ ID NO: 178981 - RNA, 23 nt, Human herpesvirus 7
uuuuaaaacuuauguacucugau

SEQ ID NO: 178982 - RNA, 19 nt, Human herpesvirus 7
uuuuaaaagguugacauca

SEQ ID NO: 178983 - RNA, 17 nt, Human herpesvirus 7
uuuuaaauaaaccuuaa

SEQ ID NO: 178984 - RNA, 22 nt, Human herpesvirus 7
uuuuaauaaaaugaugaugaca

SEQ ID NO: 178985 - RNA, 14 nt, Human herpesvirus 7
uuuguuaggccagu

SEQ ID NO: 178986 - RNA, 22 nt, Human herpesvirus 7
uuuguuaggccaguucuaucuc

SEQ ID NO: 178987 - RNA, 21 nt, Human herpesvirus 7
uuuguuuaccuucauggcaca

SEQ ID NO: 178988 - RNA, 21 nt, Human herpesvirus 7
uuuguuucaauaugcaugcaa

SEQ ID NO: 178989 - RNA, 15 nt, Human herpesvirus 7
uuuggaaaaacagaa

SEQ ID NO: 178990 - RNA, 19 nt, Human herpesvirus 7
uuuggaaauuguuugauca

SEQ ID NO: 178991 - RNA, 21 nt, Human herpesvirus 7
uuuggagcuugguuuuacaaa

SEQ ID NO: 178992 - RNA, 19 nt, Human herpesvirus 7
uugucauugaaagucgcaa

SEQ ID NO: 178993 - RNA, 18 nt, Human herpesvirus 7
uuguccagacagcuguau

SEQ ID NO: 178994 - RNA, 12 nt, Human herpesvirus 7
uugucauacaau

SEQ ID NO: 178995 - RNA, 13 nt, Human herpesvirus 7
uuuguaacuauaa

SEQ ID NO: 178996 - RNA, 23 nt, Human herpesvirus 7
uuuguaacuauaaauggaauuua

SEQ ID NO: 178997 - RNA, 12 nt, Human herpesvirus 7
uuugucaugaug

SEQ ID NO: 178998 - RNA, 13 nt, Human herpesvirus 7
uuuguauacaacu

SEQ ID NO: 178999 - RNA, 17 nt, Human herpesvirus 7
uuuggcuaacugagaaa

SEQ ID NO: 179000 - RNA, 18 nt, Human herpesvirus 7
uuuggcgaaacaauacau

SEQ ID NO: 179001 - RNA, 20 nt, Human herpesvirus 7
uuuggcgccaaaaaaacaca

SEQ ID NO: 179002 - RNA, 23 nt, Human herpesvirus 7
uuguaugcuauuaaaugauuuca

SEQ ID NO: 179003 - RNA, 14 nt, Human herpesvirus 7
uuguaugucuacaa

SEQ ID NO: 179004 - RNA, 17 nt, Human herpesvirus 7
uuguacuguaauuucuc

SEQ ID NO: 179005 - RNA, 23 nt, Human herpesvirus 7
uuguacuguaauuucucaaauca

SEQ ID NO: 179006 - RNA, 18 nt, Human herpesvirus 7
uuggcgcucucuggccag

SEQ ID NO: 179007 - RNA, 15 nt, Human herpesvirus 7
uuguaccaaucaagc

SEQ ID NO: 179008 - RNA, 22 nt, Human herpesvirus 7
uuguaagaaacaucuaugugcu

SEQ ID NO: 179009 - RNA, 15 nt, Human herpesvirus 7
ucuauuacacaggaa

SEQ ID NO: 179010 - RNA, 22 nt, Human herpesvirus 7
ucuauuacagucuaguaaaccu

SEQ ID NO: 179011 - RNA, 22 nt, Human herpesvirus 7
ucuaucgaucacguuuugcaaa

SEQ ID NO: 179012 - RNA, 14 nt, Human herpesvirus 7
ucuaucgucaucau

SEQ ID NO: 179013 - RNA, 15 nt, Human herpesvirus 7
ucucgaagaauucau

SEQ ID NO: 179014 - RNA, 15 nt, Human herpesvirus 7
ucuauuauuucuaca

SEQ ID NO: 179015 - RNA, 13 nt, Human herpesvirus 7
ucuaggcuugcau

SEQ ID NO: 179016 - RNA, 21 nt, Human herpesvirus 7
ucuagcggaguuugaguuucu

SEQ ID NO: 179017 - RNA, 22 nt, Human herpesvirus 7
ucuagcuaaugcuuugcugcaa

SEQ ID NO: 179018 - RNA, 18 nt, Human herpesvirus 7
ucuagcuuuauaugucaa

SEQ ID NO: 179019 - RNA, 16 nt, Human herpesvirus 7
ucucuugaggaaaugu

SEQ ID NO: 179020 - RNA, 21 nt, Human herpesvirus 7
ucucuguagauauuuugacaa

SEQ ID NO: 179021 - RNA, 15 nt, Human herpesvirus 7
ucucugucaaaagac

SEQ ID NO: 179022 - RNA, 13 nt, Human herpesvirus 7
ucucugugcauuu

SEQ ID NO: 179023 - RNA, 14 nt, Human herpesvirus 7
ucucuguggcuguc

SEQ ID NO: 179024 - RNA, 19 nt, Human herpesvirus 7
ucucugaucauuugcaugu

SEQ ID NO: 179025 - RNA, 19 nt, Human herpesvirus 7
ucucucuauuacacaggaa

SEQ ID NO: 179026 - RNA, 15 nt, Human herpesvirus 7
ucucuaugauccagc

SEQ ID NO: 179027 - RNA, 19 nt, Human herpesvirus 7
ucucuauuacacaggaauu

SEQ ID NO: 179028 - RNA, 13 nt, Human herpesvirus 7
ucuacuucuagua

SEQ ID NO: 179029 - RNA, 16 nt, Human herpesvirus 7
ucuagaaaaucuacca

SEQ ID NO: 179030 - RNA, 22 nt, Human herpesvirus 7
ucuagaacaaacuguacccaaa

SEQ ID NO: 179031 - RNA, 16 nt, Human herpesvirus 7
ucuagaagaaagucau

SEQ ID NO: 179032 - RNA, 20 nt, Human herpesvirus 7
ucuacuguacuuuugaucaa

SEQ ID NO: 179033 - RNA, 22 nt, Human herpesvirus 7
ucuacuguacuuuugaucaaaa

SEQ ID NO: 179034 - RNA, 23 nt, Human herpesvirus 7
ucuaauuuuggcgaaacaauaca

SEQ ID NO: 179035 - RNA, 19 nt, Human herpesvirus 7
ucuacaucaucaacauacg

SEQ ID NO: 179036 - RNA, 14 nt, Human herpesvirus 7
ucuucaauaugcuu

SEQ ID NO: 179037 - RNA, 13 nt, Human herpesvirus 7
ucuucacguguga

SEQ ID NO: 179038 - RNA, 15 nt, Human herpesvirus 7
ucuucauauuuucua

SEQ ID NO: 179039 - RNA, 19 nt, Human herpesvirus 7
ucuucaggaauaucaagaa

SEQ ID NO: 179040 - RNA, 14 nt, Human herpesvirus 7
ucuuccacuguugu

SEQ ID NO: 179041 - RNA, 20 nt, Human herpesvirus 7
ucuucaaagucuaagguuug

SEQ ID NO: 179042 - RNA, 16 nt, Human herpesvirus 7
ucuuauaacaaaguuc

SEQ ID NO: 179043 - RNA, 18 nt, Human herpesvirus 7
ucuuauuacucgaugcuu

SEQ ID NO: 179044 - RNA, 14 nt, Human herpesvirus 7
ucuuauucuacaca

SEQ ID NO: 179045 - RNA, 20 nt, Human herpesvirus 7
ucuuauucuacacaucuuca

SEQ ID NO: 179046 - RNA, 16 nt, Human herpesvirus 7
ucuuccuuucuuugag

SEQ ID NO: 179047 - RNA, 19 nt, Human herpesvirus 7
ucuugugaaguuugcugaa

SEQ ID NO: 179048 - RNA, 18 nt, Human herpesvirus 7
ucuuuaauaaaaacaaag

SEQ ID NO: 179049 - RNA, 13 nt, Human herpesvirus 7
ucuuuacuuucau

SEQ ID NO: 179050 - RNA, 18 nt, Human herpesvirus 7
ucuuuauaaaggaccaug

SEQ ID NO: 179051 - RNA, 13 nt, Human herpesvirus 7
ucuuggaguauua

SEQ ID NO: 179052 - RNA, 22 nt, Human herpesvirus 7
ucuuggaguuugucucauugac

SEQ ID NO: 179053 - RNA, 22 nt, Human herpesvirus 7
ucuucuuuuuuugaacuguugc

SEQ ID NO: 179054 - RNA, 16 nt, Human herpesvirus 7
ucuugauguaacaaag

SEQ ID NO: 179055 - RNA, 14 nt, Human herpesvirus 7
ucugagugcuaaaa

SEQ ID NO: 179056 - RNA, 15 nt, Human herpesvirus 7
ucugugguugaauuu

SEQ ID NO: 179057 - RNA, 16 nt, Human herpesvirus 7
ucuguguuauacuuau

SEQ ID NO: 179058 - RNA, 22 nt, Human herpesvirus 7
ucuguguuauuguaucuaugaa

SEQ ID NO: 179059 - RNA, 14 nt, Human herpesvirus 7
ucugacugguacaa

SEQ ID NO: 179060 - RNA, 18 nt, Human herpesvirus 7
ucugacauuggaacuuua

SEQ ID NO: 179061 - RNA, 18 nt, Human herpesvirus 7
ucugaauccgcauuugag

SEQ ID NO: 179062 - RNA, 16 nt, Human herpesvirus 7
ucugaauagacacauu

SEQ ID NO: 179063 - RNA, 18 nt, Human herpesvirus 7
ucugaaaaucuccuugau

SEQ ID NO: 179064 - RNA, 20 nt, Human herpesvirus 7
ucugaaagccgcugccuucg

SEQ ID NO: 179065 - RNA, 18 nt, Human herpesvirus 7
ucugaaauaaacauuuca

SEQ ID NO: 179066 - RNA, 20 nt, Human herpesvirus 7
ucuuagcguucgacagcaaa

SEQ ID NO: 179067 - RNA, 20 nt, Human herpesvirus 7
ucuuagaugcauccaaagaa

SEQ ID NO: 179068 - RNA, 23 nt, Human herpesvirus 7
ucuuacgucuuuucuaccaacaa

SEQ ID NO: 179069 - RNA, 14 nt, Human herpesvirus 7
ucuuacauuugauu

SEQ ID NO: 179070 - RNA, 14 nt, Human herpesvirus 7
ucuuagaaacuuau

SEQ ID NO: 179071 - RNA, 23 nt, Human herpesvirus 7
ucuguuaguugggcaaacaguuu

SEQ ID NO: 179072 - RNA, 15 nt, Human herpesvirus 7
ucuuacaacuagaaa

SEQ ID NO: 179073 - RNA, 14 nt, Human herpesvirus 7
ucuuacagcacuuu

SEQ ID NO: 179074 - RNA, 19 nt, Human herpesvirus 7
ucuuaauaauuauuugacu

SEQ ID NO: 179075 - RNA, 13 nt, Human herpesvirus 7
ucuguucucaugc

SEQ ID NO: 179076 - RNA, 16 nt, Human herpesvirus 7
ucuuaaaugucaauga

SEQ ID NO: 179077 - RNA, 21 nt, Human herpesvirus 7
ucuuaacgaaggcaucaagaa

SEQ ID NO: 179078 - RNA, 14 nt, Human herpesvirus 7
ugaugguugcaaua

SEQ ID NO: 179079 - RNA, 22 nt, Human herpesvirus 7
ugaugccauaauuucagcacug

SEQ ID NO: 179080 - RNA, 17 nt, Human herpesvirus 7
ugaugauggaaagcaaa

SEQ ID NO: 179081 - RNA, 14 nt, Human herpesvirus 7
ugaucuuacuuccu

SEQ ID NO: 179082 - RNA, 21 nt, Human herpesvirus 7
ugaugacaacaaagcaugaaa

SEQ ID NO: 179083 - RNA, 18 nt, Human herpesvirus 7
ugcaauuuggcucugauc

SEQ ID NO: 179084 - RNA, 15 nt, Human herpesvirus 7
ugcacacaaaggcca

SEQ ID NO: 179085 - RNA, 22 nt, Human herpesvirus 7
ugcacauuuuggcgcucucugg

SEQ ID NO: 179086 - RNA, 18 nt, Human herpesvirus 7
ugauguuuccgcauaaaa

SEQ ID NO: 179087 - RNA, 22 nt, Human herpesvirus 7
ugcaacuuuaauuaacacucaa

SEQ ID NO: 179088 - RNA, 18 nt, Human herpesvirus 7
ugcaagaaaguccaaagu

SEQ ID NO: 179089 - RNA, 21 nt, Human herpesvirus 7
ugauccugcuauucauuucac

SEQ ID NO: 179090 - RNA, 21 nt, Human herpesvirus 7
ugauccauuugugauguacug

SEQ ID NO: 179091 - RNA, 13 nt, Human herpesvirus 7
ugaucauuugcau

SEQ ID NO: 179092 - RNA, 20 nt, Human herpesvirus 7
ugaucacagcuagauugacu

SEQ ID NO: 179093 - RNA, 15 nt, Human herpesvirus 7
ugauauuugguacug

SEQ ID NO: 179094 - RNA, 14 nt, Human herpesvirus 7
ugauagccauaaau

SEQ ID NO: 179095 - RNA, 13 nt, Human herpesvirus 7
ugagcagugauuu

SEQ ID NO: 179096 - RNA, 21 nt, Human herpesvirus 7
ugagauuauucaaaagcuaaa

SEQ ID NO: 179097 - RNA, 17 nt, Human herpesvirus 7
ugagauuugccugccag

SEQ ID NO: 179098 - RNA, 12 nt, Human herpesvirus 7
ugagauuugaaa

SEQ ID NO: 179099 - RNA, 12 nt, Human herpesvirus 7
ugagcaauacac

SEQ ID NO: 179100 - RNA, 20 nt, Human herpesvirus 7
ugagcaauugauucacauug

SEQ ID NO: 179101 - RNA, 20 nt, Human herpesvirus 7
ugagaguuguggcaaaagau

SEQ ID NO: 179102 - RNA, 15 nt, Human herpesvirus 7
ugagacucacuccuu

SEQ ID NO: 179103 - RNA, 19 nt, Human herpesvirus 7
ugagacggacuuaugucca

SEQ ID NO: 179104 - RNA, 18 nt, Human herpesvirus 7
ugagacagcaacugugca

SEQ ID NO: 179105 - RNA, 20 nt, Human herpesvirus 7
ugagacagcaacugugcaug

SEQ ID NO: 179106 - RNA, 23 nt, Human herpesvirus 7
ugagacagcaacugugcaugaaa

SEQ ID NO: 179107 - RNA, 22 nt, Human herpesvirus 7
ugagacauuaugagauuugccu

SEQ ID NO: 179108 - RNA, 13 nt, Human herpesvirus 7
ugacuuccaaguu

SEQ ID NO: 179109 - RNA, 18 nt, Human herpesvirus 7
ugagaaauuacaguacaa

SEQ ID NO: 179110 - RNA, 21 nt, Human herpesvirus 7
ugagaaauuuuacagccugua

SEQ ID NO: 179111 - RNA, 23 nt, Human herpesvirus 7
ugacuuuuucuguagacauuucu

SEQ ID NO: 179112 - RNA, 17 nt, Human herpesvirus 7
ugagaaaaaugacaaaa

SEQ ID NO: 179113 - RNA, 19 nt, Human herpesvirus 7
ugacuuaccgucgggugaa

SEQ ID NO: 179114 - RNA, 22 nt, Human herpesvirus 7
ugacucggaaccgagaauguuc

SEQ ID NO: 179115 - RNA, 16 nt, Human herpesvirus 7
ugacuggacacaauca

SEQ ID NO: 179116 - RNA, 18 nt, Human herpesvirus 7
ugacacgacacugaaugu

SEQ ID NO: 179117 - RNA, 18 nt, Human herpesvirus 7
ugacagagggcauuugua

SEQ ID NO: 179118 - RNA, 22 nt, Human herpesvirus 7
ugaauuuuaaguggaaucucau

SEQ ID NO: 179119 - RNA, 16 nt, Human herpesvirus 7
ugacaacgguauacau

SEQ ID NO: 179120 - RNA, 14 nt, Human herpesvirus 7
ugacaacaaagcau

SEQ ID NO: 179121 - RNA, 20 nt, Human herpesvirus 7
ugaagcgcugagaucuucca

SEQ ID NO: 179122 - RNA, 23 nt, Human herpesvirus 7
ugaauucauuugugaaauugaca

SEQ ID NO: 179123 - RNA, 13 nt, Human herpesvirus 7
ugaaggcugcuuu

SEQ ID NO: 179124 - RNA, 18 nt, Human herpesvirus 7
ugaauuaagguggaaauc

SEQ ID NO: 179125 - RNA, 20 nt, Human herpesvirus 7
ugaauuaauucuagcagcuu

SEQ ID NO: 179126 - RNA, 13 nt, Human herpesvirus 7
ugaauuagcuaaa

SEQ ID NO: 179127 - RNA, 12 nt, Human herpesvirus 7
ugaacuguuaca

SEQ ID NO: 179128 - RNA, 14 nt, Human herpesvirus 7
ugaacuguuacagu

SEQ ID NO: 179129 - RNA, 17 nt, Human herpesvirus 7
ugaacuguuacaguuaa

SEQ ID NO: 179130 - RNA, 13 nt, Human herpesvirus 7
ugaacuguugcca

SEQ ID NO: 179131 - RNA, 20 nt, Human herpesvirus 7
ugaacggaauaaacaaugug

SEQ ID NO: 179132 - RNA, 22 nt, Human herpesvirus 7
ugaacauuugaagauaaguaua

SEQ ID NO: 179133 - RNA, 21 nt, Human herpesvirus 7
ugaagacagcucaaaaguaua

SEQ ID NO: 179134 - RNA, 15 nt, Human herpesvirus 7
ugaagaagugcacau

SEQ ID NO: 179135 - RNA, 12 nt, Human herpesvirus 7
ugaagaacauua

SEQ ID NO: 179136 - RNA, 14 nt, Human herpesvirus 7
ugaagaaauuguga

SEQ ID NO: 179137 - RNA, 18 nt, Human herpesvirus 7
ugaagaacaacaugaaac

SEQ ID NO: 179138 - RNA, 20 nt, Human herpesvirus 7
ugaagauuguuggaaaggga

SEQ ID NO: 179139 - RNA, 16 nt, Human herpesvirus 7
ugaagauaaguauaaa

SEQ ID NO: 179140 - RNA, 20 nt, Human herpesvirus 7
ugaagagauuaaggugauaa

SEQ ID NO: 179141 - RNA, 17 nt, Human herpesvirus 7
ugaagagcguguuuuga

SEQ ID NO: 179142 - RNA, 22 nt, Human herpesvirus 7
ucuuuguacuuguaccaaucaa

SEQ ID NO: 179143 - RNA, 21 nt, Human herpesvirus 7
ucuuucuucaacacaauuuuc

SEQ ID NO: 179144 - RNA, 20 nt, Human herpesvirus 7
ucuuucuccacuaugccaca

SEQ ID NO: 179145 - RNA, 18 nt, Human herpesvirus 7
ucuuugcuggaucauaga

SEQ ID NO: 179146 - RNA, 21 nt, Human herpesvirus 7
ucuuuauugguaauuagugaa

SEQ ID NO: 179147 - RNA, 14 nt, Human herpesvirus 7
ucuuucucaucacu

SEQ ID NO: 179148 - RNA, 14 nt, Human herpesvirus 7
ucuuucaguuccca

SEQ ID NO: 179149 - RNA, 13 nt, Human herpesvirus 7
ucuuucauaacaa

SEQ ID NO: 179150 - RNA, 13 nt, Human herpesvirus 7
ugaacacuuuuac

SEQ ID NO: 179151 - RNA, 17 nt, Human herpesvirus 7
ugaacaaguagugcuaa

SEQ ID NO: 179152 - RNA, 19 nt, Human herpesvirus 7
ugaacaaguagugcuaaua

SEQ ID NO: 179153 - RNA, 18 nt, Human herpesvirus 7
ugaaauuccauacaaaga

SEQ ID NO: 179154 - RNA, 16 nt, Human herpesvirus 7
ugaacaaauaaugagu

SEQ ID NO: 179155 - RNA, 17 nt, Human herpesvirus 7
ugaaauuuaauaacagc

SEQ ID NO: 179156 - RNA, 15 nt, Human herpesvirus 7
ugaaauuucaaaaau

SEQ ID NO: 179157 - RNA, 19 nt, Human herpesvirus 7
ugaaauuucaaaaauucuc

SEQ ID NO: 179158 - RNA, 18 nt, Human herpesvirus 7
ucagcauuuaccauuucg

SEQ ID NO: 179159 - RNA, 19 nt, Human herpesvirus 7
ucagcauuuaccauuucga

SEQ ID NO: 179160 - RNA, 21 nt, Human herpesvirus 7
ucagcaucucagaaguuucaa

SEQ ID NO: 179161 - RNA, 20 nt, Human herpesvirus 7
ucagaugcuaugguggcaua

SEQ ID NO: 179162 - RNA, 13 nt, Human herpesvirus 7
ucagacaaguaaa

SEQ ID NO: 179163 - RNA, 13 nt, Human herpesvirus 7
ucagaacuuuuaa

SEQ ID NO: 179164 - RNA, 18 nt, Human herpesvirus 7
ucagaaaauaaaaguaaa

SEQ ID NO: 179165 - RNA, 19 nt, Human herpesvirus 7
ucagaaaauaaaaguaaaa

SEQ ID NO: 179166 - RNA, 19 nt, Human herpesvirus 7
ucagaacauugucaaagaa

SEQ ID NO: 179167 - RNA, 20 nt, Human herpesvirus 7
ucacuuauuuuagaaaguga

SEQ ID NO: 179168 - RNA, 23 nt, Human herpesvirus 7
ucacuuauuuuagaaagugaaaa

SEQ ID NO: 179169 - RNA, 17 nt, Human herpesvirus 7
ucacuuaaagaacucca

SEQ ID NO: 179170 - RNA, 14 nt, Human herpesvirus 7
ucacugucacuguc

SEQ ID NO: 179171 - RNA, 14 nt, Human herpesvirus 7
ucaguaucacuuaa

SEQ ID NO: 179172 - RNA, 17 nt, Human herpesvirus 7
ucaguguaacucugcca

SEQ ID NO: 179173 - RNA, 19 nt, Human herpesvirus 7
ucaguuggagucguucuau

SEQ ID NO: 179174 - RNA, 13 nt, Human herpesvirus 7
ucaggaaaaucac

SEQ ID NO: 179175 - RNA, 19 nt, Human herpesvirus 7
ucaggaaaaucacagcauu

SEQ ID NO: 179176 - RNA, 19 nt, Human herpesvirus 7
uaugccggccgggugcugc

SEQ ID NO: 179177 - RNA, 20 nt, Human herpesvirus 7
uaugcgguaagaaaaaucau

SEQ ID NO: 179178 - RNA, 20 nt, Human herpesvirus 7
uaugccagguuuuucaaaga

SEQ ID NO: 179179 - RNA, 23 nt, Human herpesvirus 7
uauccguuaauggauaaccaaca

SEQ ID NO: 179180 - RNA, 17 nt, Human herpesvirus 7
uauggcagauuuggggu

SEQ ID NO: 179181 - RNA, 15 nt, Human herpesvirus 7
uauggauacaaggaa

SEQ ID NO: 179182 - RNA, 22 nt, Human herpesvirus 7
uaugcuuuaacuggaauuauac

SEQ ID NO: 179183 - RNA, 22 nt, Human herpesvirus 7
uauggaaccuacugaagagcca

SEQ ID NO: 179184 - RNA, 22 nt, Human herpesvirus 7
uauggaaaaauguuaugugcuu

SEQ ID NO: 179185 - RNA, 13 nt, Human herpesvirus 7
uaugcuaagaaag

SEQ ID NO: 179186 - RNA, 20 nt, Human herpesvirus 7
uaugcuaagaaagaacauuu

SEQ ID NO: 179187 - RNA, 17 nt, Human herpesvirus 7
uaugcucuagaaaaucu

SEQ ID NO: 179188 - RNA, 23 nt, Human herpesvirus 7
uaugguuuaaacauuacgaacug

SEQ ID NO: 179189 - RNA, 17 nt, Human herpesvirus 7
uaugguuugaaaaccau

SEQ ID NO: 179190 - RNA, 18 nt, Human herpesvirus 7
ucacagcauuauuguaua

SEQ ID NO: 179191 - RNA, 22 nt, Human herpesvirus 7
uauguaaauuauuagauuccau

SEQ ID NO: 179192 - RNA, 17 nt, Human herpesvirus 7
ucacagaaaucccaaaa

SEQ ID NO: 179193 - RNA, 13 nt, Human herpesvirus 7
ucacauacucuau

SEQ ID NO: 179194 - RNA, 14 nt, Human herpesvirus 7
ucacauuaucuuga

SEQ ID NO: 179195 - RNA, 22 nt, Human herpesvirus 7
ucacgauauauuggcaugcuua

SEQ ID NO: 179196 - RNA, 22 nt, Human herpesvirus 7
ucacgcaagucacaauuacaca

SEQ ID NO: 179197 - RNA, 21 nt, Human herpesvirus 7
ucacgcucucaaucaaaaucu

SEQ ID NO: 179198 - RNA, 18 nt, Human herpesvirus 7
ucacggauuagcuuucag

SEQ ID NO: 179199 - RNA, 16 nt, Human herpesvirus 7
ucacucgcgacuuuuu

SEQ ID NO: 179200 - RNA, 18 nt, Human herpesvirus 7
ucacucgcgacuuuuugg

SEQ ID NO: 179201 - RNA, 16 nt, Human herpesvirus 7
ucacuacuacaugaau

SEQ ID NO: 179202 - RNA, 23 nt, Human herpesvirus 7
ucacccuuuguuugagacaauau

SEQ ID NO: 179203 - RNA, 19 nt, Human herpesvirus 7
ucaccauaugccaaugaac

SEQ ID NO: 179204 - RNA, 18 nt, Human herpesvirus 7
ucccuagaagaugacuca

SEQ ID NO: 179205 - RNA, 10 nt, Human herpesvirus 7
ucccaaaaua

SEQ ID NO: 179206 - RNA, 19 nt, Human herpesvirus 7
ucccaaaauagcacacaag

SEQ ID NO: 179207 - RNA, 15 nt, Human herpesvirus 7
uccauuucaaaagaa

SEQ ID NO: 179208 - RNA, 16 nt, Human herpesvirus 7
uccgagacagagucaa

SEQ ID NO: 179209 - RNA, 14 nt, Human herpesvirus 7
uccucauagccagg

SEQ ID NO: 179210 - RNA, 13 nt, Human herpesvirus 7
uccuaugauacaa

SEQ ID NO: 179211 - RNA, 14 nt, Human herpesvirus 7
uccuaugauacaau

SEQ ID NO: 179212 - RNA, 17 nt, Human herpesvirus 7
uccucagaauguacaca

SEQ ID NO: 179213 - RNA, 16 nt, Human herpesvirus 7
uccuuguuguguuuua

SEQ ID NO: 179214 - RNA, 16 nt, Human herpesvirus 7
ucgaucuaagucuaca

SEQ ID NO: 179215 - RNA, 18 nt, Human herpesvirus 7
uccuucuaccucuuacau

SEQ ID NO: 179216 - RNA, 20 nt, Human herpesvirus 7
uccuuauauuaaaaaccaca

SEQ ID NO: 179217 - RNA, 12 nt, Human herpesvirus 7
ucauauacuucu

SEQ ID NO: 179218 - RNA, 21 nt, Human herpesvirus 7
ucauuguacauuuuaccaaau

SEQ ID NO: 179219 - RNA, 13 nt, Human herpesvirus 7
ucauuucacggaa

SEQ ID NO: 179220 - RNA, 19 nt, Human herpesvirus 7
ucauuuacagagaauuuua

SEQ ID NO: 179221 - RNA, 12 nt, Human herpesvirus 7
ucauuugcaugu

SEQ ID NO: 179222 - RNA, 18 nt, Human herpesvirus 7
ucauuugugaaauugaca

SEQ ID NO: 179223 - RNA, 20 nt, Human herpesvirus 7
ucauagagaaaacauuguga

SEQ ID NO: 179224 - RNA, 15 nt, Human herpesvirus 7
ucauagugggaacau

SEQ ID NO: 179225 - RNA, 17 nt, Human herpesvirus 7
ucauagcacucauacua

SEQ ID NO: 179226 - RNA, 19 nt, Human herpesvirus 7
ucauagcaggaagcacaaa

SEQ ID NO: 179227 - RNA, 22 nt, Human herpesvirus 7
ucauagcaggaagcacaaauca

SEQ ID NO: 179228 - RNA, 18 nt, Human herpesvirus 7
ucauaauuacauugcagu

SEQ ID NO: 179229 - RNA, 18 nt, Human herpesvirus 7
ucauaauucaaucugcaa

SEQ ID NO: 179230 - RNA, 13 nt, Human herpesvirus 7
ucauaauuuucau

SEQ ID NO: 179231 - RNA, 22 nt, Human herpesvirus 7
ucauaauuuucaugaacacaac

SEQ ID NO: 179232 - RNA, 20 nt, Human herpesvirus 7
ucauaccauaaauaccaaaa

SEQ ID NO: 179233 - RNA, 21 nt, Human herpesvirus 7
uccaacagcuucagaugcuau

SEQ ID NO: 179234 - RNA, 17 nt, Human herpesvirus 7
uccaaaauguaaaccaa

SEQ ID NO: 179235 - RNA, 17 nt, Human herpesvirus 7
uccacgcucccauaaaa

SEQ ID NO: 179236 - RNA, 16 nt, Human herpesvirus 7
uccauaaauaaaaaca

SEQ ID NO: 179237 - RNA, 19 nt, Human herpesvirus 7
uccaguggcaguacuacua

SEQ ID NO: 179238 - RNA, 14 nt, Human herpesvirus 7
uccaguacuugcau

SEQ ID NO: 179239 - RNA, 12 nt, Human herpesvirus 7
uccaucaaaagu

SEQ ID NO: 179240 - RNA, 17 nt, Human herpesvirus 7
uccaucaucacgucaug

SEQ ID NO: 179241 - RNA, 18 nt, Human herpesvirus 7
uccacuacagauauugau

SEQ ID NO: 179242 - RNA, 18 nt, Human herpesvirus 7
uccaggcuaaaacuguca

SEQ ID NO: 179243 - RNA, 19 nt, Human herpesvirus 7
uucuuagaucgaacuguua

SEQ ID NO: 179244 - RNA, 14 nt, Human herpesvirus 7
uucuuagaugcauc

SEQ ID NO: 179245 - RNA, 21 nt, Human herpesvirus 7
uucuuagcuuucaugauuuca

SEQ ID NO: 179246 - RNA, 19 nt, Human herpesvirus 7
uucuuaggugcaauuuuca

SEQ ID NO: 179247 - RNA, 17 nt, Human herpesvirus 7
uucuguggagugagaaa

SEQ ID NO: 179248 - RNA, 17 nt, Human herpesvirus 7
uucuuaauuuguucaau

SEQ ID NO: 179249 - RNA, 18 nt, Human herpesvirus 7
uucuguuuugaguguuaa

SEQ ID NO: 179250 - RNA, 15 nt, Human herpesvirus 7
uucugucagaacuuu

SEQ ID NO: 179251 - RNA, 13 nt, Human herpesvirus 7
uucugucaucuua

SEQ ID NO: 179252 - RNA, 20 nt, Human herpesvirus 7
uucuggcuuaagcagcagac

SEQ ID NO: 179253 - RNA, 15 nt, Human herpesvirus 7
uucugggaacuagaa

SEQ ID NO: 179254 - RNA, 23 nt, Human herpesvirus 7
uucuggaucugccucugccucuu

SEQ ID NO: 179255 - RNA, 22 nt, Human herpesvirus 7
uucuugugacgcuuuaauguaa

SEQ ID NO: 179256 - RNA, 14 nt, Human herpesvirus 7
uucuucuacuucua

SEQ ID NO: 179257 - RNA, 17 nt, Human herpesvirus 7
uucuucuaauacaucua

SEQ ID NO: 179258 - RNA, 23 nt, Human herpesvirus 7
uucuucuaauacaucuaggucuu

SEQ ID NO: 179259 - RNA, 16 nt, Human herpesvirus 7
uucuucuaauugcgca

SEQ ID NO: 179260 - RNA, 16 nt, Human herpesvirus 7
uucuuauaacaaaguu

SEQ ID NO: 179261 - RNA, 13 nt, Human herpesvirus 7
uucuuaucuccau

SEQ ID NO: 179262 - RNA, 19 nt, Human herpesvirus 7
uucuucagauucaguauca

SEQ ID NO: 179263 - RNA, 15 nt, Human herpesvirus 7
uugagugugcaaugg

SEQ ID NO: 179264 - RNA, 21 nt, Human herpesvirus 7
uugauaagacugaagacaaaa

SEQ ID NO: 179265 - RNA, 14 nt, Human herpesvirus 7
uugauaagauuucc

SEQ ID NO: 179266 - RNA, 14 nt, Human herpesvirus 7
uugagucgaaugca

SEQ ID NO: 179267 - RNA, 21 nt, Human herpesvirus 7
uugagucucagagaacuagaa

SEQ ID NO: 179268 - RNA, 12 nt, Human herpesvirus 7
uugaggaaaugu

SEQ ID NO: 179269 - RNA, 19 nt, Human herpesvirus 7
uugaggaaaugucuuuguc

SEQ ID NO: 179270 - RNA, 16 nt, Human herpesvirus 7
uugcuaaccacugugu

SEQ ID NO: 179271 - RNA, 19 nt, Human herpesvirus 7
uugcuaaccacugugucau

SEQ ID NO: 179272 - RNA, 16 nt, Human herpesvirus 7
uugcuauucacgcuuc

SEQ ID NO: 179273 - RNA, 14 nt, Human herpesvirus 7
uugcuagcugugau

SEQ ID NO: 179274 - RNA, 15 nt, Human herpesvirus 7
uugcuagcugugaua

SEQ ID NO: 179275 - RNA, 16 nt, Human herpesvirus 7
uuggagagauagcauu

SEQ ID NO: 179276 - RNA, 18 nt, Human herpesvirus 7
uuggcauuguaucuaccg

SEQ ID NO: 179277 - RNA, 18 nt, Human herpesvirus 7
uuggcaaacagucugaaa

SEQ ID NO: 179278 - RNA, 16 nt, Human herpesvirus 7
uuggcauugaaauucu

SEQ ID NO: 179279 - RNA, 12 nt, Human herpesvirus 7
uugaugaagaca

SEQ ID NO: 179280 - RNA, 13 nt, Human herpesvirus 7
uugaugaagacag

SEQ ID NO: 179281 - RNA, 18 nt, Human herpesvirus 7
uugcaaagucucauucau

SEQ ID NO: 179282 - RNA, 22 nt, Human herpesvirus 7
uugcaacuggcauuccuuggaa

SEQ ID NO: 179283 - RNA, 15 nt, Human herpesvirus 7
uugcaaauguuccac

SEQ ID NO: 179284 - RNA, 18 nt, Human herpesvirus 7
uugcaaauguuccacgau

SEQ ID NO: 179285 - RNA, 22 nt, Human herpesvirus 7
uugcaacaaaaucuaaggguau

SEQ ID NO: 179286 - RNA, 16 nt, Human herpesvirus 7
uugcaacaaauuccau

SEQ ID NO: 179287 - RNA, 16 nt, Human herpesvirus 7
uucaaggaauucugac

SEQ ID NO: 179288 - RNA, 21 nt, Human herpesvirus 7
uucaagauuaauauauuuucc

SEQ ID NO: 179289 - RNA, 14 nt, Human herpesvirus 7
uucaacgaucucaa

SEQ ID NO: 179290 - RNA, 15 nt, Human herpesvirus 7
uucaaacaauaccca

SEQ ID NO: 179291 - RNA, 18 nt, Human herpesvirus 7
uucaaacgcuugaacaaa

SEQ ID NO: 179292 - RNA, 21 nt, Human herpesvirus 7
uucaaaguacacguagacuga

SEQ ID NO: 179293 - RNA, 19 nt, Human herpesvirus 7
uucaaauggauuuuaauac

SEQ ID NO: 179294 - RNA, 18 nt, Human herpesvirus 7
uucaaauguagacguagu

SEQ ID NO: 179295 - RNA, 15 nt, Human herpesvirus 7
uucaaauuauuucca

SEQ ID NO: 179296 - RNA, 16 nt, Human herpesvirus 7
uucaaauuauuuccag

SEQ ID NO: 179297 - RNA, 22 nt, Human herpesvirus 7
uucaacauacagcaugacguga

SEQ ID NO: 179298 - RNA, 13 nt, Human herpesvirus 7
uucaaccacagac

SEQ ID NO: 179299 - RNA, 15 nt, Human herpesvirus 7
uucaaccacagacac

SEQ ID NO: 179300 - RNA, 19 nt, Human herpesvirus 7
uucaaccacagacacacca

SEQ ID NO: 179301 - RNA, 20 nt, Human herpesvirus 7
uucaacaucuuucauaacaa

SEQ ID NO: 179302 - RNA, 21 nt, Human herpesvirus 7
uucaacaucuuucauaacaaa

SEQ ID NO: 179303 - RNA, 13 nt, Human herpesvirus 7
uucacacaaugcc

SEQ ID NO: 179304 - RNA, 19 nt, Human herpesvirus 7
uucaauugguuguucaaaa

SEQ ID NO: 179305 - RNA, 19 nt, Human herpesvirus 7
uucacagaaaucccaaaaa

SEQ ID NO: 179306 - RNA, 20 nt, Human herpesvirus 7
uucaaucguuggcauuguau

SEQ ID NO: 179307 - RNA, 14 nt, Human herpesvirus 7
uucaauuaaugcau

SEQ ID NO: 179308 - RNA, 19 nt, Human herpesvirus 7
uucaauuaaugcauuggaa

SEQ ID NO: 179309 - RNA, 21 nt, Human herpesvirus 7
uucaauucaucaggacaauca

SEQ ID NO: 179310 - RNA, 17 nt, Human herpesvirus 7
uucaaugcaacuuuaau

SEQ ID NO: 179311 - RNA, 12 nt, Human herpesvirus 7
uucacauuguca

SEQ ID NO: 179312 - RNA, 18 nt, Human herpesvirus 7
uucacauugucacugcaa

SEQ ID NO: 179313 - RNA, 17 nt, Human herpesvirus 7
uuccaauauagacauuu

SEQ ID NO: 179314 - RNA, 19 nt, Human herpesvirus 7
uuccaacucaaugaaugca

SEQ ID NO: 179315 - RNA, 22 nt, Human herpesvirus 7
uucucucucuauuacacaggaa

SEQ ID NO: 179316 - RNA, 22 nt, Human herpesvirus 7
uucuaauuuuggcgaaacaaua

SEQ ID NO: 179317 - RNA, 13 nt, Human herpesvirus 7
uucuacaacuaaa

SEQ ID NO: 179318 - RNA, 20 nt, Human herpesvirus 7
uucuacaacuaaaauugaca

SEQ ID NO: 179319 - RNA, 22 nt, Human herpesvirus 7
uucuacaauaugacgacuuuga

SEQ ID NO: 179320 - RNA, 13 nt, Human herpesvirus 7
uucugaaaccuuc

SEQ ID NO: 179321 - RNA, 22 nt, Human herpesvirus 7
uucugaaagugacggaaguacu

SEQ ID NO: 179322 - RNA, 19 nt, Human herpesvirus 7
uucugacauuggaacuuua

SEQ ID NO: 179323 - RNA, 23 nt, Human herpesvirus 7
uucugacauuguacaauuacaaa

SEQ ID NO: 179324 - RNA, 20 nt, Human herpesvirus 7
uucucuuggaguuugucuca

SEQ ID NO: 179325 - RNA, 23 nt, Human herpesvirus 7
uucuaaauaugaugaaacuucca

SEQ ID NO: 179326 - RNA, 20 nt, Human herpesvirus 7
uucuaaaacaguuaaugugu

SEQ ID NO: 179327 - RNA, 17 nt, Human herpesvirus 7
uucgugugucucuagaa

SEQ ID NO: 179328 - RNA, 18 nt, Human herpesvirus 7
uucguguucgauaguaau

SEQ ID NO: 179329 - RNA, 21 nt, Human herpesvirus 7
uucguaacaaauucaaccaca

SEQ ID NO: 179330 - RNA, 23 nt, Human herpesvirus 7
uucguaacaaauucaaccacaga

SEQ ID NO: 179331 - RNA, 14 nt, Human herpesvirus 7
uucguauugccuuu

SEQ ID NO: 179332 - RNA, 12 nt, Human herpesvirus 7
uuccagauauga

SEQ ID NO: 179333 - RNA, 17 nt, Human herpesvirus 7
uuccagauaugacaaau

SEQ ID NO: 179334 - RNA, 21 nt, Human herpesvirus 7
uuccagauaugacaaauuuca

SEQ ID NO: 179335 - RNA, 19 nt, Human herpesvirus 7
uuccaucugguaaugucau

SEQ ID NO: 179336 - RNA, 20 nt, Human herpesvirus 7
uuccauuaagccagauuuca

SEQ ID NO: 179337 - RNA, 18 nt, Human herpesvirus 7
uuccauuuuuugucacug

SEQ ID NO: 179338 - RNA, 17 nt, Human herpesvirus 7
uuccauaaauaaaaaca

SEQ ID NO: 179339 - RNA, 14 nt, Human herpesvirus 7
uucccacugggaca

SEQ ID NO: 179340 - RNA, 18 nt, Human herpesvirus 7
uucccagagaccuaugaa

SEQ ID NO: 179341 - RNA, 14 nt, Human herpesvirus 7
uucgcuguugauaa

SEQ ID NO: 179342 - RNA, 15 nt, Human herpesvirus 7
uucgcugaagaacau

SEQ ID NO: 179343 - RNA, 18 nt, Human herpesvirus 7
uuauguacuauacaggau

SEQ ID NO: 179344 - RNA, 14 nt, Human herpesvirus 7
uuauguacucugau

SEQ ID NO: 179345 - RNA, 17 nt, Human herpesvirus 7
uuauguacucugauuga

SEQ ID NO: 179346 - RNA, 19 nt, Human herpesvirus 7
uuauguacucugauugacu

SEQ ID NO: 179347 - RNA, 11 nt, Human herpesvirus 7
uuaugaugcau

SEQ ID NO: 179348 - RNA, 12 nt, Human herpesvirus 7
uuaugaugcauu

SEQ ID NO: 179349 - RNA, 14 nt, Human herpesvirus 7
uuaugcacauccaa

SEQ ID NO: 179350 - RNA, 16 nt, Human herpesvirus 7
uuaucgcccacuauuu

SEQ ID NO: 179351 - RNA, 18 nt, Human herpesvirus 7
uuaucuaauauuauaucu

SEQ ID NO: 179352 - RNA, 22 nt, Human herpesvirus 7
uuaucuccauucuaaaccaaau

SEQ ID NO: 179353 - RNA, 23 nt, Human herpesvirus 7
uuaucuccauucuaaaccaaaua

SEQ ID NO: 179354 - RNA, 18 nt, Human herpesvirus 7
uuaucgaguucugacuaa

SEQ ID NO: 179355 - RNA, 21 nt, Human herpesvirus 7
uuauccgucuguguuauacuu

SEQ ID NO: 179356 - RNA, 23 nt, Human herpesvirus 7
uuauccgucuguguuauacuuau

SEQ ID NO: 179357 - RNA, 19 nt, Human herpesvirus 7
uuauccguuaauggauaac

SEQ ID NO: 179358 - RNA, 17 nt, Human herpesvirus 7
uuauccuaagcuuuuca

SEQ ID NO: 179359 - RNA, 13 nt, Human herpesvirus 7
uuaucugcauuga

SEQ ID NO: 179360 - RNA, 17 nt, Human herpesvirus 7
uuaucucauagcuuaaa

SEQ ID NO: 179361 - RNA, 19 nt, Human herpesvirus 7
uuauuggagaugucagcaa

SEQ ID NO: 179362 - RNA, 15 nt, Human herpesvirus 7
uuauuggaaaugaga

SEQ ID NO: 179363 - RNA, 19 nt, Human herpesvirus 7
uuauugagcaauugauuca

SEQ ID NO: 179364 - RNA, 22 nt, Human herpesvirus 7
uuauugagcaauugauucacau

SEQ ID NO: 179365 - RNA, 21 nt, Human herpesvirus 7
uuauucauuugcuucuucuaa

SEQ ID NO: 179366 - RNA, 14 nt, Human herpesvirus 7
uuauuagauuccau

SEQ ID NO: 179367 - RNA, 17 nt, Human herpesvirus 7
uuauucaaagcuucuac

SEQ ID NO: 179368 - RNA, 16 nt, Human herpesvirus 7
uuauuuagcuaauuca

SEQ ID NO: 179369 - RNA, 19 nt, Human herpesvirus 7
uuauuuauauauggcaaua

SEQ ID NO: 179370 - RNA, 22 nt, Human herpesvirus 7
uuauuuucccagauacagcaua

SEQ ID NO: 179371 - RNA, 14 nt, Human herpesvirus 7
uuauuuuucaugcc

SEQ ID NO: 179372 - RNA, 19 nt, Human herpesvirus 7
uuauuuuuuccaugucaca

SEQ ID NO: 179373 - RNA, 21 nt, Human herpesvirus 7
uuauuucuuauuggagauguc

SEQ ID NO: 179374 - RNA, 14 nt, Human herpesvirus 7
uucaaaauauaucu

SEQ ID NO: 179375 - RNA, 24 nt, Human herpesvirus 7
uucaaaauauaucugauguagauu

SEQ ID NO: 179376 - RNA, 13 nt, Human herpesvirus 7
uuaucauuuauca

SEQ ID NO: 179377 - RNA, 20 nt, Human herpesvirus 7
uuauaugcaucaaaacauau

SEQ ID NO: 179378 - RNA, 17 nt, Human herpesvirus 7
uuauauccaauaaugca

SEQ ID NO: 179379 - RNA, 14 nt, Human herpesvirus 7
uuauagaaguaccg

SEQ ID NO: 179380 - RNA, 22 nt, Human herpesvirus 7
uuauauauaaccgauacagauc

SEQ ID NO: 179381 - RNA, 16 nt, Human herpesvirus 7
uuauauuuuaaguaau

SEQ ID NO: 179382 - RNA, 18 nt, Human herpesvirus 7
uuauauuuuauuguuacc

SEQ ID NO: 179383 - RNA, 23 nt, Human herpesvirus 7
uuaucaagauagugacauucccu

SEQ ID NO: 179384 - RNA, 21 nt, Human herpesvirus 7
uuauaauacuggcaugucuca

SEQ ID NO: 179385 - RNA, 18 nt, Human herpesvirus 7
uuagcuuucaugauuuca

SEQ ID NO: 179386 - RNA, 22 nt, Human herpesvirus 7
uuagcuuuugaauaaucucaau

SEQ ID NO: 179387 - RNA, 17 nt, Human herpesvirus 7
uuauauaaguccuucaa

SEQ ID NO: 179388 - RNA, 17 nt, Human herpesvirus 7
uuauacuuuuuuuacuu

SEQ ID NO: 179389 - RNA, 16 nt, Human herpesvirus 7
uuauagaaacauuccu

SEQ ID NO: 179390 - RNA, 18 nt, Human herpesvirus 7
uuagcucuaaacaaacaa

SEQ ID NO: 179391 - RNA, 16 nt, Human herpesvirus 7
uuagcgaggcauuuac

SEQ ID NO: 179392 - RNA, 14 nt, Human herpesvirus 7
uuagauuauacaaa

SEQ ID NO: 179393 - RNA, 15 nt, Human herpesvirus 7
uuagauaaugacaaa

SEQ ID NO: 179394 - RNA, 14 nt, Human herpesvirus 7
uuagaugcauccaa

SEQ ID NO: 179395 - RNA, 16 nt, Human herpesvirus 7
uuagaugcauccaaag

SEQ ID NO: 179396 - RNA, 18 nt, Human herpesvirus 7
uuagagucgucuugcaaa

SEQ ID NO: 179397 - RNA, 16 nt, Human herpesvirus 7
uuagagcauauuccau

SEQ ID NO: 179398 - RNA, 18 nt, Human herpesvirus 7
uuacgucuuuucuaccaa

SEQ ID NO: 179399 - RNA, 14 nt, Human herpesvirus 7
uuagaacuugcgaa

SEQ ID NO: 179400 - RNA, 19 nt, Human herpesvirus 7
uuagaaucacaacauauag

SEQ ID NO: 179401 - RNA, 12 nt, Human herpesvirus 7
uuagaaucuuuu

SEQ ID NO: 179402 - RNA, 17 nt, Human herpesvirus 7
uuagaaucuuuugcaca

SEQ ID NO: 179403 - RNA, 15 nt, Human herpesvirus 7
uguuaagaauuccag

SEQ ID NO: 179404 - RNA, 23 nt, Human herpesvirus 7
uguuaaaacuuggauaaccaaac

SEQ ID NO: 179405 - RNA, 21 nt, Human herpesvirus 7
uguuaaaaguucauaaugaca

SEQ ID NO: 179406 - RNA, 18 nt, Human herpesvirus 7
uguuaacaugaguacugu

SEQ ID NO: 179407 - RNA, 17 nt, Human herpesvirus 7
uuaacuauaucaucauc

SEQ ID NO: 179408 - RNA, 21 nt, Human herpesvirus 7
uuaagauacauuuuugcaaua

SEQ ID NO: 179409 - RNA, 15 nt, Human herpesvirus 7
uuaagagacauugaa

SEQ ID NO: 179410 - RNA, 21 nt, Human herpesvirus 7
uuaagagacauugaaaaugca

SEQ ID NO: 179411 - RNA, 18 nt, Human herpesvirus 7
uuaagacauuauuugcug

SEQ ID NO: 179412 - RNA, 12 nt, Human herpesvirus 7
ugugucaucaca

SEQ ID NO: 179413 - RNA, 14 nt, Human herpesvirus 7
uguguccagauaau

SEQ ID NO: 179414 - RNA, 22 nt, Human herpesvirus 7
uguguuaauugugguacaacaa

SEQ ID NO: 179415 - RNA, 19 nt, Human herpesvirus 7
uguguuacaugaucuugua

SEQ ID NO: 179416 - RNA, 20 nt, Human herpesvirus 7
uguggugcguacacuguaag

SEQ ID NO: 179417 - RNA, 13 nt, Human herpesvirus 7
ugugguacaacaa

SEQ ID NO: 179418 - RNA, 20 nt, Human herpesvirus 7
ugugguacaacaaacauucc

SEQ ID NO: 179419 - RNA, 22 nt, Human herpesvirus 7
ugugguauuguauaugcucuag

SEQ ID NO: 179420 - RNA, 18 nt, Human herpesvirus 7
uguguacuaaagccaaug

SEQ ID NO: 179421 - RNA, 23 nt, Human herpesvirus 7
uguguaaauauuuuuaaaaucua

SEQ ID NO: 179422 - RNA, 16 nt, Human herpesvirus 7
uguguaacaauugagu

SEQ ID NO: 179423 - RNA, 21 nt, Human herpesvirus 7
uguggcuuuugcuuuccauca

SEQ ID NO: 179424 - RNA, 13 nt, Human herpesvirus 7
uguggcacauaag

SEQ ID NO: 179425 - RNA, 20 nt, Human herpesvirus 7
uuaaucacgugauugugcuu

SEQ ID NO: 179426 - RNA, 18 nt, Human herpesvirus 7
uuaauauuaauacgucca

SEQ ID NO: 179427 - RNA, 13 nt, Human herpesvirus 7
uuaaucaaacaau

SEQ ID NO: 179428 - RNA, 18 nt, Human herpesvirus 7
uuaauccguaucuagaga

SEQ ID NO: 179429 - RNA, 16 nt, Human herpesvirus 7
uuaauggaagaacaac

SEQ ID NO: 179430 - RNA, 14 nt, Human herpesvirus 7
uuaaugguuggcaa

SEQ ID NO: 179431 - RNA, 21 nt, Human herpesvirus 7
uuaaugguaccuuagaaucac

SEQ ID NO: 179432 - RNA, 19 nt, Human herpesvirus 7
uuaaugucucuguucccac

SEQ ID NO: 179433 - RNA, 17 nt, Human herpesvirus 7
uuaaugaaaaagccaua

SEQ ID NO: 179434 - RNA, 23 nt, Human herpesvirus 7
uuaagcuucaaaaauguuuacaa

SEQ ID NO: 179435 - RNA, 20 nt, Human herpesvirus 7
uuaagccuaggauaccaaac

SEQ ID NO: 179436 - RNA, 16 nt, Human herpesvirus 7
uuaauaacagcaccgu

SEQ ID NO: 179437 - RNA, 16 nt, Human herpesvirus 7
uuaauaaaaugaugau

SEQ ID NO: 179438 - RNA, 23 nt, Human herpesvirus 7
uuaauaaaaugaugaugacaaaa

SEQ ID NO: 179439 - RNA, 14 nt, Human herpesvirus 7
uuaauuaacacuca

SEQ ID NO: 179440 - RNA, 14 nt, Human herpesvirus 7
uuacauccugcuaa

SEQ ID NO: 179441 - RNA, 15 nt, Human herpesvirus 7
uuacauuucaaacaa

SEQ ID NO: 179442 - RNA, 23 nt, Human herpesvirus 7
uuacauuucaaacaacauaucgc

SEQ ID NO: 179443 - RNA, 13 nt, Human herpesvirus 7
uuacauuacugga

SEQ ID NO: 179444 - RNA, 17 nt, Human herpesvirus 7
uuacauuauuauuugac

SEQ ID NO: 179445 - RNA, 21 nt, Human herpesvirus 7
uuacgcaugcuugcuuugcau

SEQ ID NO: 179446 - RNA, 18 nt, Human herpesvirus 7
uuaccuuuuuguuuuuga

SEQ ID NO: 179447 - RNA, 18 nt, Human herpesvirus 7
uuacgaugacagucuacu

SEQ ID NO: 179448 - RNA, 18 nt, Human herpesvirus 7
uuaccuuuaauugauauu

SEQ ID NO: 179449 - RNA, 18 nt, Human herpesvirus 7
ugguuucuguugacuaaa

SEQ ID NO: 179450 - RNA, 16 nt, Human herpesvirus 7
ugguuuuaaaauagaa

SEQ ID NO: 179451 - RNA, 14 nt, Human herpesvirus 7
ugguuucauuugga

SEQ ID NO: 179452 - RNA, 18 nt, Human herpesvirus 7
uggucgagaauacacauu

SEQ ID NO: 179453 - RNA, 14 nt, Human herpesvirus 7
uggucacauaggaa

SEQ ID NO: 179454 - RNA, 21 nt, Human herpesvirus 7
ugguauuuguuagaauaucug

SEQ ID NO: 179455 - RNA, 15 nt, Human herpesvirus 7
ugggagcaaugcaug

SEQ ID NO: 179456 - RNA, 16 nt, Human herpesvirus 7
uggcuuuucacaugaa

SEQ ID NO: 179457 - RNA, 20 nt, Human herpesvirus 7
ugggaagauuugacaaaaca

SEQ ID NO: 179458 - RNA, 20 nt, Human herpesvirus 7
ugguagauuuucuagagcau

SEQ ID NO: 179459 - RNA, 17 nt, Human herpesvirus 7
uggcagaaauauaugaa

SEQ ID NO: 179460 - RNA, 21 nt, Human herpesvirus 7
uggccauaaacggaauacaug

SEQ ID NO: 179461 - RNA, 15 nt, Human herpesvirus 7
ugggaaaguguacac

SEQ ID NO: 179462 - RNA, 21 nt, Human herpesvirus 7
uggcgaauuuuaucauuucaa

SEQ ID NO: 179463 - RNA, 14 nt, Human herpesvirus 7
ugucucuguuccca

SEQ ID NO: 179464 - RNA, 21 nt, Human herpesvirus 7
ugucucucgcaacuucugaua

SEQ ID NO: 179465 - RNA, 13 nt, Human herpesvirus 7
ugucuggucacau

SEQ ID NO: 179466 - RNA, 17 nt, Human herpesvirus 7
ugucuguugugcaauuu

SEQ ID NO: 179467 - RNA, 18 nt, Human herpesvirus 7
ugucuguugugcaauuuu

SEQ ID NO: 179468 - RNA, 16 nt, Human herpesvirus 7
ugucuuaauugccgau

SEQ ID NO: 179469 - RNA, 16 nt, Human herpesvirus 7
ugucuuacaacuagaa

SEQ ID NO: 179470 - RNA, 23 nt, Human herpesvirus 7
ugucuuacaacuagaaaauaacu

SEQ ID NO: 179471 - RNA, 16 nt, Human herpesvirus 7
ugucuuacagcacuuu

SEQ ID NO: 179472 - RNA, 20 nt, Human herpesvirus 7
ugucaugacuggacacaauc

SEQ ID NO: 179473 - RNA, 20 nt, Human herpesvirus 7
ugucaugaugaauauaacaa

SEQ ID NO: 179474 - RNA, 16 nt, Human herpesvirus 7
uguccaaucaaaaacu

SEQ ID NO: 179475 - RNA, 18 nt, Human herpesvirus 7
ugucagccgcuuuacgaa

SEQ ID NO: 179476 - RNA, 20 nt, Human herpesvirus 7
uguccccuucgcugcuguga

SEQ ID NO: 179477 - RNA, 18 nt, Human herpesvirus 7
uguccagacagcuguaua

SEQ ID NO: 179478 - RNA, 22 nt, Human herpesvirus 7
uguccagacagcuguauaucua

SEQ ID NO: 179479 - RNA, 15 nt, Human herpesvirus 7
uguggagggauauga

SEQ ID NO: 179480 - RNA, 21 nt, Human herpesvirus 7
ugugcuuugcuaaccacugug

SEQ ID NO: 179481 - RNA, 23 nt, Human herpesvirus 7
ugugcucugaauaauaugcuuuc

SEQ ID NO: 179482 - RNA, 19 nt, Human herpesvirus 7
ugugaaaauaaacaggaac

SEQ ID NO: 179483 - RNA, 17 nt, Human herpesvirus 7
ugugaagacuacauaaa

SEQ ID NO: 179484 - RNA, 17 nt, Human herpesvirus 7
ugugacagggugugaac

SEQ ID NO: 179485 - RNA, 15 nt, Human herpesvirus 7
ugugacccugucaca

SEQ ID NO: 179486 - RNA, 19 nt, Human herpesvirus 7
ugugacccugucacacuua

SEQ ID NO: 179487 - RNA, 20 nt, Human herpesvirus 7
ugugacccugucacacuuau

SEQ ID NO: 179488 - RNA, 19 nt, Human herpesvirus 7
ugucacugucacuguccaa

SEQ ID NO: 179489 - RNA, 14 nt, Human herpesvirus 7
ugucacuguccaaa

SEQ ID NO: 179490 - RNA, 15 nt, Human herpesvirus 7
ugucacuguccaaaa

SEQ ID NO: 179491 - RNA, 16 nt, Human herpesvirus 7
ugucaucacuuaugau

SEQ ID NO: 179492 - RNA, 14 nt, Human herpesvirus 7
ugucauacaaugaa

SEQ ID NO: 179493 - RNA, 22 nt, Human herpesvirus 7
ugucaggucacaaaagcuuuga

SEQ ID NO: 179494 - RNA, 14 nt, Human herpesvirus 7
uguacuacauauua

SEQ ID NO: 179495 - RNA, 17 nt, Human herpesvirus 7
uguacucagagaucaua

SEQ ID NO: 179496 - RNA, 23 nt, Human herpesvirus 7
uguacucagagaucauaauuaca

SEQ ID NO: 179497 - RNA, 16 nt, Human herpesvirus 7
uguacugaaaccaaag

SEQ ID NO: 179498 - RNA, 15 nt, Human herpesvirus 7
uguacugcucaucaa

SEQ ID NO: 179499 - RNA, 18 nt, Human herpesvirus 7
uguacuguugcuaauuac

SEQ ID NO: 179500 - RNA, 20 nt, Human herpesvirus 7
uguacauaacucuaucuccu

SEQ ID NO: 179501 - RNA, 16 nt, Human herpesvirus 7
uguaaguaaauuuacu

SEQ ID NO: 179502 - RNA, 19 nt, Human herpesvirus 7
uguaaucauauaugcauua

SEQ ID NO: 179503 - RNA, 15 nt, Human herpesvirus 7
uguaauguugcaaau

SEQ ID NO: 179504 - RNA, 15 nt, Human herpesvirus 7
uguacaggcaaugca

SEQ ID NO: 179505 - RNA, 14 nt, Human herpesvirus 7
uguaauuucucaaa

SEQ ID NO: 179506 - RNA, 19 nt, Human herpesvirus 7
uguaauugaaagaccaaau

SEQ ID NO: 179507 - RNA, 15 nt, Human herpesvirus 7
uguaagaaauuuucu

SEQ ID NO: 179508 - RNA, 19 nt, Human herpesvirus 7
uguaaauucuccaaucaua

SEQ ID NO: 179509 - RNA, 15 nt, Human herpesvirus 7
uguaaaauuaauuca

SEQ ID NO: 179510 - RNA, 21 nt, Human herpesvirus 7
uguaacaaaggaucgaucucu

SEQ ID NO: 179511 - RNA, 16 nt, Human herpesvirus 7
uguaacaacuagcaaa

SEQ ID NO: 179512 - RNA, 22 nt, Human herpesvirus 7
uguaacaacuagcaaacagugc

SEQ ID NO: 179513 - RNA, 19 nt, Human herpesvirus 7
uggagaccguuaauguagu

SEQ ID NO: 179514 - RNA, 13 nt, Human herpesvirus 7
uggagagauagca

SEQ ID NO: 179515 - RNA, 11 nt, Human herpesvirus 7
uggacuuuuaa

SEQ ID NO: 179516 - RNA, 18 nt, Human herpesvirus 7
uggacgcuaauuugcaua

SEQ ID NO: 179517 - RNA, 18 nt, Human herpesvirus 7
uggagauaguucgcaaug

SEQ ID NO: 179518 - RNA, 20 nt, Human herpesvirus 7
uggagauaguucgcaauggu

SEQ ID NO: 179519 - RNA, 14 nt, Human herpesvirus 7
uggagcgaagcuuu

SEQ ID NO: 179520 - RNA, 21 nt, Human herpesvirus 7
uggaucauagagaaaacauug

SEQ ID NO: 179521 - RNA, 23 nt, Human herpesvirus 7
uggaguuagcgaggcauuuacaa

SEQ ID NO: 179522 - RNA, 12 nt, Human herpesvirus 7
uggaguucagua

SEQ ID NO: 179523 - RNA, 19 nt, Human herpesvirus 7
uggaacugaaaacaaugca

SEQ ID NO: 179524 - RNA, 21 nt, Human herpesvirus 7
uggaacugaaaacaaugcaga

SEQ ID NO: 179525 - RNA, 19 nt, Human herpesvirus 7
uggaacuucaccacgaucc

SEQ ID NO: 179526 - RNA, 13 nt, Human herpesvirus 7
uggacacaaucag

SEQ ID NO: 179527 - RNA, 17 nt, Human herpesvirus 7
uggacaccaguaugaaa

SEQ ID NO: 179528 - RNA, 14 nt, Human herpesvirus 7
uggaaucgaauaca

SEQ ID NO: 179529 - RNA, 19 nt, Human herpesvirus 7
uggaaucgaauacaguuga

SEQ ID NO: 179530 - RNA, 18 nt, Human herpesvirus 7
uggaauuauacacuguga

SEQ ID NO: 179531 - RNA, 19 nt, Human herpesvirus 7
uggaauuauacacugugaa

SEQ ID NO: 179532 - RNA, 21 nt, Human herpesvirus 7
uggaaagcaaaagccacagau

SEQ ID NO: 179533 - RNA, 15 nt, Human herpesvirus 7
uggaaauucugugua

SEQ ID NO: 179534 - RNA, 19 nt, Human herpesvirus 7
uggaaauuguuugaucaaa

SEQ ID NO: 179535 - RNA, 13 nt, Human herpesvirus 7
uggaaccuacuga

SEQ ID NO: 179536 - RNA, 15 nt, Human herpesvirus 7
uggaaaacauuucag

SEQ ID NO: 179537 - RNA, 15 nt, Human herpesvirus 7
uggaaaaacagaaug

SEQ ID NO: 179538 - RNA, 18 nt, Human herpesvirus 7
ugcuuuuucaauguuucc

SEQ ID NO: 179539 - RNA, 15 nt, Human herpesvirus 7
ugcuuguuacagugu

SEQ ID NO: 179540 - RNA, 13 nt, Human herpesvirus 7
ugcuuuucaugcu

SEQ ID NO: 179541 - RNA, 17 nt, Human herpesvirus 7
ugcugaaucaacagagc

SEQ ID NO: 179542 - RNA, 20 nt, Human herpesvirus 7
ugcugaacucugucaucaaa

SEQ ID NO: 179543 - RNA, 22 nt, Human herpesvirus 7
ugcuguacugaaaccaaagcau

SEQ ID NO: 179544 - RNA, 22 nt, Human herpesvirus 7
ugcuggaucauagagaaaacau

SEQ ID NO: 179545 - RNA, 23 nt, Human herpesvirus 7
ugcuggaaagcuugugaagacua

SEQ ID NO: 179546 - RNA, 20 nt, Human herpesvirus 7
ugcugugauuuuccugaaaa

SEQ ID NO: 179547 - RNA, 22 nt, Human herpesvirus 7
ugcugucguguaagaugucuaa

SEQ ID NO: 179548 - RNA, 14 nt, Human herpesvirus 7
ugcuuagaaucuuu

SEQ ID NO: 179549 - RNA, 22 nt, Human herpesvirus 7
ugcuuaacuuuuggaaugauau

SEQ ID NO: 179550 - RNA, 16 nt, Human herpesvirus 7
ugcuuaaaacuuugaa

SEQ ID NO: 179551 - RNA, 16 nt, Human herpesvirus 7
ugcuucagaaauaaca

SEQ ID NO: 179552 - RNA, 19 nt, Human herpesvirus 7
ugcuuauuuauauauggca

SEQ ID NO: 179553 - RNA, 21 nt, Human herpesvirus 7
ugcuuauuuauauauggcaau

SEQ ID NO: 179554 - RNA, 17 nt, Human herpesvirus 7
ugcuugaaagaauauaa

SEQ ID NO: 179555 - RNA, 15 nt, Human herpesvirus 7
ugcuugcacaaagau

SEQ ID NO: 179556 - RNA, 23 nt, Human herpesvirus 7
ugcuugcuuugcauagauuaaau

SEQ ID NO: 179557 - RNA, 16 nt, Human herpesvirus 7
ugcagaccguaaaaca

SEQ ID NO: 179558 - RNA, 20 nt, Human herpesvirus 7
ugcagaaugcguaacuuugg

SEQ ID NO: 179559 - RNA, 21 nt, Human herpesvirus 7
ugcagaaugcguaacuuuggu

SEQ ID NO: 179560 - RNA, 18 nt, Human herpesvirus 7
ugcuauuaaaugauuuca

SEQ ID NO: 179561 - RNA, 22 nt, Human herpesvirus 7
ugcuauucacgcuuccaucaca

SEQ ID NO: 179562 - RNA, 23 nt, Human herpesvirus 7
ugcuauucacgcuuccaucacaa

SEQ ID NO: 179563 - RNA, 22 nt, Human herpesvirus 7
ugcuaugaaaauuuccuacaaa

SEQ ID NO: 179564 - RNA, 20 nt, Human herpesvirus 7
ugcuaugcuugaaagaauau

SEQ ID NO: 179565 - RNA, 22 nt, Human herpesvirus 7
ugcuaucuccuauguugcaaug

SEQ ID NO: 179566 - RNA, 13 nt, Human herpesvirus 7
aguacgucuugcu

SEQ ID NO: 179567 - RNA, 20 nt, Human herpesvirus 7
aguacaucuuucuaguuccc

SEQ ID NO: 179568 - RNA, 15 nt, Human herpesvirus 7
aguaccauugcugau

SEQ ID NO: 179569 - RNA, 16 nt, Human herpesvirus 7
agguguuguuuccgau

SEQ ID NO: 179570 - RNA, 12 nt, Human herpesvirus 7
aguacaaauguu

SEQ ID NO: 179571 - RNA, 22 nt, Human herpesvirus 7
aguaauuuaugcuuuaacugga

SEQ ID NO: 179572 - RNA, 19 nt, Human herpesvirus 7
agguguuccuuagcuaugu

SEQ ID NO: 179573 - RNA, 15 nt, Human herpesvirus 7
aggugguuacauauc

SEQ ID NO: 179574 - RNA, 16 nt, Human herpesvirus 7
aggugguuacauaucc

SEQ ID NO: 179575 - RNA, 19 nt, Human herpesvirus 7
aguauuuuacaacaauaaa

SEQ ID NO: 179576 - RNA, 21 nt, Human herpesvirus 7
aguagaacuugaaaaaaucuu

SEQ ID NO: 179577 - RNA, 17 nt, Human herpesvirus 7
aguagaaggaaaccaau

SEQ ID NO: 179578 - RNA, 23 nt, Human herpesvirus 7
aguacuccuucuaccucuuacau

SEQ ID NO: 179579 - RNA, 19 nt, Human herpesvirus 7
aguacuuuuucuggaaugu

SEQ ID NO: 179580 - RNA, 13 nt, Human herpesvirus 7
agucaguuaucaa

SEQ ID NO: 179581 - RNA, 17 nt, Human herpesvirus 7
agucagaacauugucaa

SEQ ID NO: 179582 - RNA, 16 nt, Human herpesvirus 7
aguccaauaguaaugu

SEQ ID NO: 179583 - RNA, 19 nt, Human herpesvirus 7
aguccaauaguaauguuau

SEQ ID NO: 179584 - RNA, 16 nt, Human herpesvirus 7
aguccaaagugaugaa

SEQ ID NO: 179585 - RNA, 17 nt, Human herpesvirus 7
agucauuugcaguuauu

SEQ ID NO: 179586 - RNA, 17 nt, Human herpesvirus 7
aguccaaaaguuguuaa

SEQ ID NO: 179587 - RNA, 17 nt, Human herpesvirus 7
agucguucuauguauga

SEQ ID NO: 179588 - RNA, 19 nt, Human herpesvirus 7
agucuacaucaucaacaua

SEQ ID NO: 179589 - RNA, 15 nt, Human herpesvirus 7
aguuucuucuuccac

SEQ ID NO: 179590 - RNA, 13 nt, Human herpesvirus 7
aguuucugcauac

SEQ ID NO: 179591 - RNA, 22 nt, Human herpesvirus 7
aguuucaauugguuguucaaaa

SEQ ID NO: 179592 - RNA, 14 nt, Human herpesvirus 7
aguuucuacauguu

SEQ ID NO: 179593 - RNA, 18 nt, Human herpesvirus 7
aguuuacugccaccauuu

SEQ ID NO: 179594 - RNA, 12 nt, Human herpesvirus 7
aguuuacugugg

SEQ ID NO: 179595 - RNA, 11 nt, Human herpesvirus 7
aguuuccauug

SEQ ID NO: 179596 - RNA, 19 nt, Human herpesvirus 7
aguugugauugcgaccaaa

SEQ ID NO: 179597 - RNA, 19 nt, Human herpesvirus 7
aguuguucucaauagcaua

SEQ ID NO: 179598 - RNA, 17 nt, Human herpesvirus 7
aguuguugggcucaaaa

SEQ ID NO: 179599 - RNA, 13 nt, Human herpesvirus 7
aguuguacucaga

SEQ ID NO: 179600 - RNA, 14 nt, Human herpesvirus 7
aguugggcaaacag

SEQ ID NO: 179601 - RNA, 19 nt, Human herpesvirus 7
auaaagagucuauugacau

SEQ ID NO: 179602 - RNA, 19 nt, Human herpesvirus 7
auaacaggaaaccacagaa

SEQ ID NO: 179603 - RNA, 17 nt, Human herpesvirus 7
auaaaaugaugaugaca

SEQ ID NO: 179604 - RNA, 18 nt, Human herpesvirus 7
auaaaaugguugugcaau

SEQ ID NO: 179605 - RNA, 20 nt, Human herpesvirus 7
auaaaaugguugugcaauuu

SEQ ID NO: 179606 - RNA, 21 nt, Human herpesvirus 7
auaaaaugguugugcaauuug

SEQ ID NO: 179607 - RNA, 17 nt, Human herpesvirus 7
auaaaagcauaugugag

SEQ ID NO: 179608 - RNA, 14 nt, Human herpesvirus 7
auaaacaagauucu

SEQ ID NO: 179609 - RNA, 20 nt, Human herpesvirus 7
auaaaccugcuaacaaguau

SEQ ID NO: 179610 - RNA, 21 nt, Human herpesvirus 7
agucuuauuacucgaugcuuc

SEQ ID NO: 179611 - RNA, 12 nt, Human herpesvirus 7
agucuucauccg

SEQ ID NO: 179612 - RNA, 14 nt, Human herpesvirus 7
agugaaaacuugau

SEQ ID NO: 179613 - RNA, 14 nt, Human herpesvirus 7
agugaacuguuaca

SEQ ID NO: 179614 - RNA, 19 nt, Human herpesvirus 7
agucuguagaugcaugcua

SEQ ID NO: 179615 - RNA, 19 nt, Human herpesvirus 7
agucugaacggauccgcug

SEQ ID NO: 179616 - RNA, 21 nt, Human herpesvirus 7
agucugaacggauccgcugaa

SEQ ID NO: 179617 - RNA, 21 nt, Human herpesvirus 7
aguuauaugaaauuucaaaaa

SEQ ID NO: 179618 - RNA, 17 nt, Human herpesvirus 7
aguugcuuuucaugcuu

SEQ ID NO: 179619 - RNA, 18 nt, Human herpesvirus 7
aguugcuuuucaugcuuu

SEQ ID NO: 179620 - RNA, 20 nt, Human herpesvirus 7
aguugcuuuucaugcuuugu

SEQ ID NO: 179621 - RNA, 17 nt, Human herpesvirus 7
aguguuuaaaauguuau

SEQ ID NO: 179622 - RNA, 19 nt, Human herpesvirus 7
aguguucaaaaaagauucc

SEQ ID NO: 179623 - RNA, 23 nt, Human herpesvirus 7
aguguucaaaaaagauuccugau

SEQ ID NO: 179624 - RNA, 13 nt, Human herpesvirus 7
agugugcacacaa

SEQ ID NO: 179625 - RNA, 14 nt, Human herpesvirus 7
agugugcacacaaa

SEQ ID NO: 179626 - RNA, 13 nt, Human herpesvirus 7
auaauuaugaugu

SEQ ID NO: 179627 - RNA, 17 nt, Human herpesvirus 7
auaauuauguccauaaa

SEQ ID NO: 179628 - RNA, 16 nt, Human herpesvirus 7
auaauucaaucugcaa

SEQ ID NO: 179629 - RNA, 20 nt, Human herpesvirus 7
auaauucaaucugcaaaaaa

SEQ ID NO: 179630 - RNA, 24 nt, Human herpesvirus 7
auaauucauuuguuuaagacauua

SEQ ID NO: 179631 - RNA, 12 nt, Human herpesvirus 7
auaauucucaca

SEQ ID NO: 179632 - RNA, 18 nt, Human herpesvirus 7
auaauguuguuuggucua

SEQ ID NO: 179633 - RNA, 15 nt, Human herpesvirus 7
auaauguuacauuau

SEQ ID NO: 179634 - RNA, 18 nt, Human herpesvirus 7
auaauuacauugcaguca

SEQ ID NO: 179635 - RNA, 15 nt, Human herpesvirus 7
auaauuuacaaaaca

SEQ ID NO: 179636 - RNA, 16 nt, Human herpesvirus 7
auaaugacacgacacu

SEQ ID NO: 179637 - RNA, 14 nt, Human herpesvirus 7
auaaugaaguuuau

SEQ ID NO: 179638 - RNA, 16 nt, Human herpesvirus 7
auaccaaaaaccugaa

SEQ ID NO: 179639 - RNA, 22 nt, Human herpesvirus 7
auaccaaacaaaauuccaaaau

SEQ ID NO: 179640 - RNA, 19 nt, Human herpesvirus 7
auacaauagugaacaugug

SEQ ID NO: 179641 - RNA, 18 nt, Human herpesvirus 7
auacaucuaggucuucca

SEQ ID NO: 179642 - RNA, 22 nt, Human herpesvirus 7
auacaugccggacaguuugcaa

SEQ ID NO: 179643 - RNA, 19 nt, Human herpesvirus 7
auacaacauauagauuuau

SEQ ID NO: 179644 - RNA, 14 nt, Human herpesvirus 7
auacaaaagacaua

SEQ ID NO: 179645 - RNA, 18 nt, Human herpesvirus 7
auacaaaagacauaacaa

SEQ ID NO: 179646 - RNA, 22 nt, Human herpesvirus 7
auacaaauuccugcuugcacaa

SEQ ID NO: 179647 - RNA, 22 nt, Human herpesvirus 7
auacaaauuuaagagacauuga

SEQ ID NO: 179648 - RNA, 15 nt, Human herpesvirus 7
auaaucauaguacau

SEQ ID NO: 179649 - RNA, 13 nt, Human herpesvirus 7
auaaucaucuuuc

SEQ ID NO: 179650 - RNA, 14 nt, Human herpesvirus 7
auaaucaagucuua

SEQ ID NO: 179651 - RNA, 17 nt, Human herpesvirus 7
auaaucaagucuuauua

SEQ ID NO: 179652 - RNA, 14 nt, Human herpesvirus 7
auaauaugcuuuca

SEQ ID NO: 179653 - RNA, 16 nt, Human herpesvirus 7
auaauaugcuuucacu

SEQ ID NO: 179654 - RNA, 19 nt, Human herpesvirus 7
auaauacucagauguggag

SEQ ID NO: 179655 - RNA, 14 nt, Human herpesvirus 7
auaauauagaugca

SEQ ID NO: 179656 - RNA, 16 nt, Human herpesvirus 7
auaauauagaugcaga

SEQ ID NO: 179657 - RNA, 16 nt, Human herpesvirus 7
auaaguauaaacaguc

SEQ ID NO: 179658 - RNA, 23 nt, Human herpesvirus 7
auaaguccgugugcaaaacuggg

SEQ ID NO: 179659 - RNA, 19 nt, Human herpesvirus 7
auaaguugacaaugucaau

SEQ ID NO: 179660 - RNA, 23 nt, Human herpesvirus 7
auaagaaaguuguacucagagau

SEQ ID NO: 179661 - RNA, 16 nt, Human herpesvirus 7
auaagaaaccagcuuu

SEQ ID NO: 179662 - RNA, 18 nt, Human herpesvirus 7
auaagaaaccagcuuuua

SEQ ID NO: 179663 - RNA, 21 nt, Human herpesvirus 7
auaacuucguaguguagagua

SEQ ID NO: 179664 - RNA, 17 nt, Human herpesvirus 7
auaacuuuaucauuacu

SEQ ID NO: 179665 - RNA, 19 nt, Human herpesvirus 7
auaagaugauagccauaaa

SEQ ID NO: 179666 - RNA, 19 nt, Human herpesvirus 7
auaagcaauacauucucaa

SEQ ID NO: 179667 - RNA, 14 nt, Human herpesvirus 7
auaacucaaaagac

SEQ ID NO: 179668 - RNA, 17 nt, Human herpesvirus 7
auaaccaaugcugauuc

SEQ ID NO: 179669 - RNA, 15 nt, Human herpesvirus 7
auaaccgauacagau

SEQ ID NO: 179670 - RNA, 18 nt, Human herpesvirus 7
auaaccgauacagaucau

SEQ ID NO: 179671 - RNA, 15 nt, Human herpesvirus 7
auaguucguaaaaag

SEQ ID NO: 179672 - RNA, 21 nt, Human herpesvirus 7
auagucuacuaaggugucuuc

SEQ ID NO: 179673 - RNA, 11 nt, Human herpesvirus 7
auagguugcua

SEQ ID NO: 179674 - RNA, 13 nt, Human herpesvirus 7
auagguugcuauc

SEQ ID NO: 179675 - RNA, 13 nt, Human herpesvirus 7
auagguaucuuua

SEQ ID NO: 179676 - RNA, 16 nt, Human herpesvirus 7
auaccauaaauaccaa

SEQ ID NO: 179677 - RNA, 18 nt, Human herpesvirus 7
auaccauaaauaccaaaa

SEQ ID NO: 179678 - RNA, 18 nt, Human herpesvirus 7
auaguuuuacaaagaaca

SEQ ID NO: 179679 - RNA, 23 nt, Human herpesvirus 7
auaguuuuacaaagaacauguag

SEQ ID NO: 179680 - RNA, 20 nt, Human herpesvirus 7
auaguugagcgcauggagca

SEQ ID NO: 179681 - RNA, 20 nt, Human herpesvirus 7
auauaaaaaauuugaaaaag

SEQ ID NO: 179682 - RNA, 15 nt, Human herpesvirus 7
auaucuaaaguggag

SEQ ID NO: 179683 - RNA, 14 nt, Human herpesvirus 7
auaucgauuuaaca

SEQ ID NO: 179684 - RNA, 18 nt, Human herpesvirus 7
auaucgcgauguuggcac

SEQ ID NO: 179685 - RNA, 20 nt, Human herpesvirus 7
aucaauugaguuuacugcca

SEQ ID NO: 179686 - RNA, 19 nt, Human herpesvirus 7
aucaauuuauccuaagcuu

SEQ ID NO: 179687 - RNA, 18 nt, Human herpesvirus 7
aucaauuuuaaugugcuu

SEQ ID NO: 179688 - RNA, 15 nt, Human herpesvirus 7
aucaauuuuugacag

SEQ ID NO: 179689 - RNA, 14 nt, Human herpesvirus 7
auauuagaacgaga

SEQ ID NO: 179690 - RNA, 21 nt, Human herpesvirus 7
auauuaauuuggugaagauuc

SEQ ID NO: 179691 - RNA, 20 nt, Human herpesvirus 7
auaugugaaaauaaacagga

SEQ ID NO: 179692 - RNA, 17 nt, Human herpesvirus 7
auauuaaaucauaccau

SEQ ID NO: 179693 - RNA, 18 nt, Human herpesvirus 7
auauuaaaucauaccaua

SEQ ID NO: 179694 - RNA, 19 nt, Human herpesvirus 7
auauuaaaucauaccauaa

SEQ ID NO: 179695 - RNA, 19 nt, Human herpesvirus 7
aucaaguagaauaccagag

SEQ ID NO: 179696 - RNA, 21 nt, Human herpesvirus 7
aucaagccacgaugacuucca

SEQ ID NO: 179697 - RNA, 23 nt, Human herpesvirus 7
aucaagccacgaugacuuccaag

SEQ ID NO: 179698 - RNA, 14 nt, Human herpesvirus 7
auauuaaaaaccac

SEQ ID NO: 179699 - RNA, 15 nt, Human herpesvirus 7
auauuaaaaaccaca

SEQ ID NO: 179700 - RNA, 18 nt, Human herpesvirus 7
auaugguuugaaaaccau

SEQ ID NO: 179701 - RNA, 20 nt, Human herpesvirus 7
auaugucauagugggaacau

SEQ ID NO: 179702 - RNA, 16 nt, Human herpesvirus 7
auaugcaugcaauuuu

SEQ ID NO: 179703 - RNA, 21 nt, Human herpesvirus 7
auaugccaaugaacaaguuuc

SEQ ID NO: 179704 - RNA, 19 nt, Human herpesvirus 7
auauggcaauaaaucugua

SEQ ID NO: 179705 - RNA, 16 nt, Human herpesvirus 7
auaugcuuccuaaaaa

SEQ ID NO: 179706 - RNA, 16 nt, Human herpesvirus 7
auauggaagacgccaa

SEQ ID NO: 179707 - RNA, 17 nt, Human herpesvirus 7
auaugaugaaacuucca

SEQ ID NO: 179708 - RNA, 15 nt, Human herpesvirus 7
auaugaugacaacaa

SEQ ID NO: 179709 - RNA, 13 nt, Human herpesvirus 7
auaugcaucaaaa

SEQ ID NO: 179710 - RNA, 20 nt, Human herpesvirus 7
auaugcaucaaaacauauca

SEQ ID NO: 179711 - RNA, 17 nt, Human herpesvirus 7
auaucuuaaaaacaaug

SEQ ID NO: 179712 - RNA, 19 nt, Human herpesvirus 7
auaucuuaauaaaguuuaa

SEQ ID NO: 179713 - RNA, 15 nt, Human herpesvirus 7
auaugaaucaaauuu

SEQ ID NO: 179714 - RNA, 15 nt, Human herpesvirus 7
auaugacauggccau

SEQ ID NO: 179715 - RNA, 21 nt, Human herpesvirus 7
auaugacauggccaucgcuuu

SEQ ID NO: 179716 - RNA, 23 nt, Human herpesvirus 7
aggauggcguguccauucaacac

SEQ ID NO: 179717 - RNA, 21 nt, Human herpesvirus 7
aggaugcguguguucaaaaac

SEQ ID NO: 179718 - RNA, 15 nt, Human herpesvirus 7
aggauaccaaacaaa

SEQ ID NO: 179719 - RNA, 23 nt, Human herpesvirus 7
aggccuguuucuugauguaacaa

SEQ ID NO: 179720 - RNA, 22 nt, Human herpesvirus 7
aggaaucuuuuuugaacacuuu

SEQ ID NO: 179721 - RNA, 17 nt, Human herpesvirus 7
aggaauugcugucuauu

SEQ ID NO: 179722 - RNA, 18 nt, Human herpesvirus 7
aggaaucgcaguguucau

SEQ ID NO: 179723 - RNA, 20 nt, Human herpesvirus 7
aggaaucuuaaucacgugau

SEQ ID NO: 179724 - RNA, 19 nt, Human herpesvirus 7
aggaagcuuuacagcagcc

SEQ ID NO: 179725 - RNA, 17 nt, Human herpesvirus 7
aggacagucaacaaauc

SEQ ID NO: 179726 - RNA, 16 nt, Human herpesvirus 7
agcgucaauaguaauu

SEQ ID NO: 179727 - RNA, 16 nt, Human herpesvirus 7
agcuaaccuuuuaaca

SEQ ID NO: 179728 - RNA, 20 nt, Human herpesvirus 7
agcuaaccuuuuaacaacag

SEQ ID NO: 179729 - RNA, 20 nt, Human herpesvirus 7
agcuuggccauaaacggaau

SEQ ID NO: 179730 - RNA, 20 nt, Human herpesvirus 7
agcuugcuuaaaacuuugaa

SEQ ID NO: 179731 - RNA, 20 nt, Human herpesvirus 7
aggaaauuaguucuugugac

SEQ ID NO: 179732 - RNA, 14 nt, Human herpesvirus 7
aggaaaccacagaa

SEQ ID NO: 179733 - RNA, 16 nt, Human herpesvirus 7
aggaaaaucacagcau

SEQ ID NO: 179734 - RNA, 13 nt, Human herpesvirus 7
aggaaaauuucau

SEQ ID NO: 179735 - RNA, 19 nt, Human herpesvirus 7
agcuuuugaauaaucucaa

SEQ ID NO: 179736 - RNA, 15 nt, Human herpesvirus 7
agcuuuauaugucaa

SEQ ID NO: 179737 - RNA, 17 nt, Human herpesvirus 7
agcuuguauauacggaa

SEQ ID NO: 179738 - RNA, 17 nt, Human herpesvirus 7
agcagggaaaaagcaua

SEQ ID NO: 179739 - RNA, 14 nt, Human herpesvirus 7
agcauaaagcacca

SEQ ID NO: 179740 - RNA, 16 nt, Human herpesvirus 7
agcauauaucuuugau

SEQ ID NO: 179741 - RNA, 21 nt, Human herpesvirus 7
agcauacuuuaaaacuuugau

SEQ ID NO: 179742 - RNA, 17 nt, Human herpesvirus 7
agcaucccuauugcauc

SEQ ID NO: 179743 - RNA, 20 nt, Human herpesvirus 7
agcaucccuauugcaucaac

SEQ ID NO: 179744 - RNA, 20 nt, Human herpesvirus 7
agcaugcguaaaaaaucaag

SEQ ID NO: 179745 - RNA, 23 nt, Human herpesvirus 7
agcauggaucguagcaacagaga

SEQ ID NO: 179746 - RNA, 15 nt, Human herpesvirus 7
agcaggaagcacaaa

SEQ ID NO: 179747 - RNA, 16 nt, Human herpesvirus 7
agcagcuugaugaauc

SEQ ID NO: 179748 - RNA, 16 nt, Human herpesvirus 7
agcagcuuuuauuccu

SEQ ID NO: 179749 - RNA, 19 nt, Human herpesvirus 7
agcaccgaagcagggaaaa

SEQ ID NO: 179750 - RNA, 17 nt, Human herpesvirus 7
agcaccgugagaaauuu

SEQ ID NO: 179751 - RNA, 19 nt, Human herpesvirus 7
agcacugggagcaaugcau

SEQ ID NO: 179752 - RNA, 18 nt, Human herpesvirus 7
agcacuagauuuuuugaa

SEQ ID NO: 179753 - RNA, 17 nt, Human herpesvirus 7
agcacucauacuaauag

SEQ ID NO: 179754 - RNA, 21 nt, Human herpesvirus 7
agcagaaaauucuuuuucaag

SEQ ID NO: 179755 - RNA, 20 nt, Human herpesvirus 7
agcagaacuguaucuucaag

SEQ ID NO: 179756 - RNA, 16 nt, Human herpesvirus 7
agcagacaaggggcau

SEQ ID NO: 179757 - RNA, 16 nt, Human herpesvirus 7
agcauuuaccauuucg

SEQ ID NO: 179758 - RNA, 21 nt, Human herpesvirus 7
agcauuauuggauaauaucag

SEQ ID NO: 179759 - RNA, 9 nt, Human herpesvirus 7
agcauuaau

SEQ ID NO: 179760 - RNA, 21 nt, Human herpesvirus 7
agcauuaauuugguaucacuu

SEQ ID NO: 179761 - RNA, 22 nt, Human herpesvirus 7
agccaaaugugguaaauuugcu

SEQ ID NO: 179762 - RNA, 23 nt, Human herpesvirus 7
agccaagacgccggggacauucc

SEQ ID NO: 179763 - RNA, 22 nt, Human herpesvirus 7
agccacagauauucuaacaaau

SEQ ID NO: 179764 - RNA, 18 nt, Human herpesvirus 7
agccaucuaauugcagac

SEQ ID NO: 179765 - RNA, 15 nt, Human herpesvirus 7
agccagguauucaaa

SEQ ID NO: 179766 - RNA, 17 nt, Human herpesvirus 7
agccauaaaugcuuaaa

SEQ ID NO: 179767 - RNA, 18 nt, Human herpesvirus 7
agccuggaacuucaccac

SEQ ID NO: 179768 - RNA, 13 nt, Human herpesvirus 7
agccuguacaaau

SEQ ID NO: 179769 - RNA, 18 nt, Human herpesvirus 7
agcgcugagaucuuccaa

SEQ ID NO: 179770 - RNA, 21 nt, Human herpesvirus 7
agccucuaagagcuuuugcaa

SEQ ID NO: 179771 - RNA, 19 nt, Human herpesvirus 7
agccuaggauaccaaacaa

SEQ ID NO: 179772 - RNA, 22 nt, Human herpesvirus 7
agagaucauaauuacauugcag

SEQ ID NO: 179773 - RNA, 11 nt, Human herpesvirus 7
agagcauauac

SEQ ID NO: 179774 - RNA, 14 nt, Human herpesvirus 7
agagauuacauccu

SEQ ID NO: 179775 - RNA, 16 nt, Human herpesvirus 7
agagucaaucugugaa

SEQ ID NO: 179776 - RNA, 16 nt, Human herpesvirus 7
agagcguuucuaugcu

SEQ ID NO: 179777 - RNA, 12 nt, Human herpesvirus 7
agaaaaacuccg

SEQ ID NO: 179778 - RNA, 22 nt, Human herpesvirus 7
agaaaaacagacuuauuauguu

SEQ ID NO: 179779 - RNA, 14 nt, Human herpesvirus 7
agaaaaauguacaa

SEQ ID NO: 179780 - RNA, 22 nt, Human herpesvirus 7
acuuuugaucaaaagcuuacuc

SEQ ID NO: 179781 - RNA, 20 nt, Human herpesvirus 7
acuuuuauucagacaaguaa

SEQ ID NO: 179782 - RNA, 17 nt, Human herpesvirus 7
acuuuuuauuguuucgu

SEQ ID NO: 179783 - RNA, 17 nt, Human herpesvirus 7
acuuuuuuuacuuaaau

SEQ ID NO: 179784 - RNA, 17 nt, Human herpesvirus 7
agaaaaaaacaaugaaa

SEQ ID NO: 179785 - RNA, 16 nt, Human herpesvirus 7
agaaaaaaaguacaag

SEQ ID NO: 179786 - RNA, 19 nt, Human herpesvirus 7
acuuuuaaauaaaccuuaa

SEQ ID NO: 179787 - RNA, 16 nt, Human herpesvirus 7
acuuugccaaugccaa

SEQ ID NO: 179788 - RNA, 17 nt, Human herpesvirus 7
acuuugcggaaguggga

SEQ ID NO: 179789 - RNA, 18 nt, Human herpesvirus 7
acuuugaagagcuuuuua

SEQ ID NO: 179790 - RNA, 21 nt, Human herpesvirus 7
acuuugaaucaacagccaucu

SEQ ID NO: 179791 - RNA, 19 nt, Human herpesvirus 7
agauauuaguuucaaccac

SEQ ID NO: 179792 - RNA, 20 nt, Human herpesvirus 7
agaucauaauuacauugcag

SEQ ID NO: 179793 - RNA, 22 nt, Human herpesvirus 7
agaucaauugaguuuacugcca

SEQ ID NO: 179794 - RNA, 14 nt, Human herpesvirus 7
agaucguucauuga

SEQ ID NO: 179795 - RNA, 15 nt, Human herpesvirus 7
agauaguucgcaaug

SEQ ID NO: 179796 - RNA, 20 nt, Human herpesvirus 7
agauaguucgcaaugguaua

SEQ ID NO: 179797 - RNA, 16 nt, Human herpesvirus 7
agauagcauuuguuac

SEQ ID NO: 179798 - RNA, 17 nt, Human herpesvirus 7
agauagcauuuguuaca

SEQ ID NO: 179799 - RNA, 16 nt, Human herpesvirus 7
agauaaugaaguuuau

SEQ ID NO: 179800 - RNA, 19 nt, Human herpesvirus 7
agauacguuaguugcagcu

SEQ ID NO: 179801 - RNA, 20 nt, Human herpesvirus 7
agauaagcaauacauucuca

SEQ ID NO: 179802 - RNA, 19 nt, Human herpesvirus 7
agaguguuuucaaauaucu

SEQ ID NO: 179803 - RNA, 12 nt, Human herpesvirus 7
agcaaugcauga

SEQ ID NO: 179804 - RNA, 17 nt, Human herpesvirus 7
agcaauguauauaagca

SEQ ID NO: 179805 - RNA, 13 nt, Human herpesvirus 7
agcaauacauucu

SEQ ID NO: 179806 - RNA, 16 nt, Human herpesvirus 7
agauuugccugccaga

SEQ ID NO: 179807 - RNA, 16 nt, Human herpesvirus 7
agauuuuguagguugu

SEQ ID NO: 179808 - RNA, 20 nt, Human herpesvirus 7
agauuucagaauuuccagaa

SEQ ID NO: 179809 - RNA, 17 nt, Human herpesvirus 7
agauuucugaaaaucuc

SEQ ID NO: 179810 - RNA, 18 nt, Human herpesvirus 7
agauuucuggcaacaguu

SEQ ID NO: 179811 - RNA, 22 nt, Human herpesvirus 7
agauuucuggcaacaguucaaa

SEQ ID NO: 179812 - RNA, 22 nt, Human herpesvirus 7
agcaaaccuuacaacaaagaaa

SEQ ID NO: 179813 - RNA, 17 nt, Human herpesvirus 7
agcaacugugcaugaaa

SEQ ID NO: 179814 - RNA, 14 nt, Human herpesvirus 7
agcaaagacuugca

SEQ ID NO: 179815 - RNA, 13 nt, Human herpesvirus 7
agcaacacuuaaa

SEQ ID NO: 179816 - RNA, 13 nt, Human herpesvirus 7
agauucuccagaa

SEQ ID NO: 179817 - RNA, 13 nt, Human herpesvirus 7
agauugacuauga

SEQ ID NO: 179818 - RNA, 15 nt, Human herpesvirus 7
agauugacuaugaau

SEQ ID NO: 179819 - RNA, 19 nt, Human herpesvirus 7
agauucuuaauuuguucaa

SEQ ID NO: 179820 - RNA, 20 nt, Human herpesvirus 7
agauucuuaauuuguucaau

SEQ ID NO: 179821 - RNA, 19 nt, Human herpesvirus 7
agauuuaauaacaauuuga

SEQ ID NO: 179822 - RNA, 15 nt, Human herpesvirus 7
agauugaaauuccau

SEQ ID NO: 179823 - RNA, 19 nt, Human herpesvirus 7
agauugaucacuuugcauc

SEQ ID NO: 179824 - RNA, 19 nt, Human herpesvirus 7
agauugcuugcacuguaau

SEQ ID NO: 179825 - RNA, 21 nt, Human herpesvirus 7
agaugucugcauagacaguaa

SEQ ID NO: 179826 - RNA, 21 nt, Human herpesvirus 7
agauguuuuaauugagauuau

SEQ ID NO: 179827 - RNA, 14 nt, Human herpesvirus 7
agauuaaagcuauu

SEQ ID NO: 179828 - RNA, 20 nt, Human herpesvirus 7
agauuaaauagcaaaguuag

SEQ ID NO: 179829 - RNA, 17 nt, Human herpesvirus 7
agauuauacaaauccaa

SEQ ID NO: 179830 - RNA, 23 nt, Human herpesvirus 7
agauuacauuugcuuuaccccaa

SEQ ID NO: 179831 - RNA, 13 nt, Human herpesvirus 7
agauggaaaguuu

SEQ ID NO: 179832 - RNA, 17 nt, Human herpesvirus 7
agauggcaccaauagaa

SEQ ID NO: 179833 - RNA, 23 nt, Human herpesvirus 7
agaugcagacugcgcuuggcaaa

SEQ ID NO: 179834 - RNA, 15 nt, Human herpesvirus 7
agaugcagaaaaauc

SEQ ID NO: 179835 - RNA, 15 nt, Human herpesvirus 7
agaugcgaaagccac

SEQ ID NO: 179836 - RNA, 20 nt, Human herpesvirus 7
agaugcuaugguggcauaua

SEQ ID NO: 179837 - RNA, 16 nt, Human herpesvirus 7
agaugcaugcuaauau

SEQ ID NO: 179838 - RNA, 16 nt, Human herpesvirus 7
agaugaaggaagcuuu

SEQ ID NO: 179839 - RNA, 15 nt, Human herpesvirus 7
agaugauagccauaa

SEQ ID NO: 179840 - RNA, 23 nt, Human herpesvirus 7
acauauuagauuauacaaaucca

SEQ ID NO: 179841 - RNA, 16 nt, Human herpesvirus 7
acauauagauaaugaa

SEQ ID NO: 179842 - RNA, 14 nt, Human herpesvirus 7
acauauagauuuau

SEQ ID NO: 179843 - RNA, 16 nt, Human herpesvirus 7
acauaucagauuuuau

SEQ ID NO: 179844 - RNA, 15 nt, Human herpesvirus 7
acauugaaaaagcag

SEQ ID NO: 179845 - RNA, 17 nt, Human herpesvirus 7
acauugaaaaugcauug

SEQ ID NO: 179846 - RNA, 20 nt, Human herpesvirus 7
acauugaaacucgaaacugg

SEQ ID NO: 179847 - RNA, 19 nt, Human herpesvirus 7
acauucgcaaggaauauga

SEQ ID NO: 179848 - RNA, 21 nt, Human herpesvirus 7
acauucuagagauuacauccu

SEQ ID NO: 179849 - RNA, 19 nt, Human herpesvirus 7
acauuccaacagcuucaga

SEQ ID NO: 179850 - RNA, 15 nt, Human herpesvirus 7
acauugcuucagaaa

SEQ ID NO: 179851 - RNA, 17 nt, Human herpesvirus 7
acauuguacaauuacaa

SEQ ID NO: 179852 - RNA, 18 nt, Human herpesvirus 7
acauuaucgcguuuucau

SEQ ID NO: 179853 - RNA, 21 nt, Human herpesvirus 7
acauuauuugcugaacucugu

SEQ ID NO: 179854 - RNA, 18 nt, Human herpesvirus 7
acauuaucuugacaggug

SEQ ID NO: 179855 - RNA, 20 nt, Human herpesvirus 7
acauuaucuugacaggugau

SEQ ID NO: 179856 - RNA, 21 nt, Human herpesvirus 7
acauuauuauuugacgaguau

SEQ ID NO: 179857 - RNA, 21 nt, Human herpesvirus 7
acaucuaggucuuccacuguu

SEQ ID NO: 179858 - RNA, 19 nt, Human herpesvirus 7
acaucuaugugcucugaau

SEQ ID NO: 179859 - RNA, 20 nt, Human herpesvirus 7
acaucuaugugcucugaaua

SEQ ID NO: 179860 - RNA, 17 nt, Human herpesvirus 7
acagauuuaagugcaca

SEQ ID NO: 179861 - RNA, 22 nt, Human herpesvirus 7
acagauuuagugcguuuugaca

SEQ ID NO: 179862 - RNA, 23 nt, Human herpesvirus 7
acagauuuagugcguuuugacag

SEQ ID NO: 179863 - RNA, 15 nt, Human herpesvirus 7
acagauuuuauuuca

SEQ ID NO: 179864 - RNA, 14 nt, Human herpesvirus 7
acagcaacugugca

SEQ ID NO: 179865 - RNA, 13 nt, Human herpesvirus 7
acagcauauaucu

SEQ ID NO: 179866 - RNA, 17 nt, Human herpesvirus 7
acagcauuuucucuuau

SEQ ID NO: 179867 - RNA, 22 nt, Human herpesvirus 7
acagcauuuucucuuauuuugu

SEQ ID NO: 179868 - RNA, 21 nt, Human herpesvirus 7
acaggcuuacacuauucucua

SEQ ID NO: 179869 - RNA, 19 nt, Human herpesvirus 7
acagggugugaacccauag

SEQ ID NO: 179870 - RNA, 19 nt, Human herpesvirus 7
acauaauguguaucaauau

SEQ ID NO: 179871 - RNA, 19 nt, Human herpesvirus 7
acauacgugcuuagacuua

SEQ ID NO: 179872 - RNA, 15 nt, Human herpesvirus 7
acauacuaaauuucu

SEQ ID NO: 179873 - RNA, 14 nt, Human herpesvirus 7
acagucaacaaauc

SEQ ID NO: 179874 - RNA, 20 nt, Human herpesvirus 7
acauaaguugacaaugucaa

SEQ ID NO: 179875 - RNA, 21 nt, Human herpesvirus 7
acaguaaauugcaacuggcau

SEQ ID NO: 179876 - RNA, 15 nt, Human herpesvirus 7
acaguagaacgagaa

SEQ ID NO: 179877 - RNA, 17 nt, Human herpesvirus 7
acaccccaaaaucaaaa

SEQ ID NO: 179878 - RNA, 22 nt, Human herpesvirus 7
acaccaguaugaaaucaaaaau

SEQ ID NO: 179879 - RNA, 20 nt, Human herpesvirus 7
acaccuuucuuaagcuuuug

SEQ ID NO: 179880 - RNA, 20 nt, Human herpesvirus 7
acacugcuucucccauucaa

SEQ ID NO: 179881 - RNA, 22 nt, Human herpesvirus 7
acacugcuucucccauucaaua

SEQ ID NO: 179882 - RNA, 14 nt, Human herpesvirus 7
acacugaaugucaa

SEQ ID NO: 179883 - RNA, 15 nt, Human herpesvirus 7
acacugaaugucaac

SEQ ID NO: 179884 - RNA, 18 nt, Human herpesvirus 7
acacucugcauuccacua

SEQ ID NO: 179885 - RNA, 20 nt, Human herpesvirus 7
acagauauucuaacaaauac

SEQ ID NO: 179886 - RNA, 15 nt, Human herpesvirus 7
acagaaaacaacaca

SEQ ID NO: 179887 - RNA, 17 nt, Human herpesvirus 7
acagaaaacaacacaaa

SEQ ID NO: 179888 - RNA, 18 nt, Human herpesvirus 7
acacuuacuuguguugug

SEQ ID NO: 179889 - RNA, 12 nt, Human herpesvirus 7
acacuuauucca

SEQ ID NO: 179890 - RNA, 21 nt, Human herpesvirus 7
acacuuauuccagauaugaca

SEQ ID NO: 179891 - RNA, 22 nt, Human herpesvirus 7
acacuuauuccagauaugacaa

SEQ ID NO: 179892 - RNA, 23 nt, Human herpesvirus 7
acacuuauuccagauaugacaaa

SEQ ID NO: 179893 - RNA, 16 nt, Human herpesvirus 7
acacauuuauccauca

SEQ ID NO: 179894 - RNA, 21 nt, Human herpesvirus 7
acacauuuauccaucaaaagu

SEQ ID NO: 179895 - RNA, 15 nt, Human herpesvirus 7
acacauaauguguau

SEQ ID NO: 179896 - RNA, 12 nt, Human herpesvirus 7
acacaucuucaa

SEQ ID NO: 179897 - RNA, 16 nt, Human herpesvirus 7
acacaggaauugcugu

SEQ ID NO: 179898 - RNA, 24 nt, Human herpesvirus 7
acacaggaauugcugucuauuuca

SEQ ID NO: 179899 - RNA, 17 nt, Human herpesvirus 7
acaauugaguucagguc

SEQ ID NO: 179900 - RNA, 17 nt, Human herpesvirus 7
acacaaacgaguuucaa

SEQ ID NO: 179901 - RNA, 13 nt, Human herpesvirus 7
acaauuucuggca

SEQ ID NO: 179902 - RNA, 18 nt, Human herpesvirus 7
acaauuucuggcaauaaa

SEQ ID NO: 179903 - RNA, 17 nt, Human herpesvirus 7
acacaauuguauuucag

SEQ ID NO: 179904 - RNA, 17 nt, Human herpesvirus 7
acacaauggaacagcaa

SEQ ID NO: 179905 - RNA, 15 nt, Human herpesvirus 7
acacaaucagcauuu

SEQ ID NO: 179906 - RNA, 18 nt, Human herpesvirus 7
acaaggcaacaaugacuu

SEQ ID NO: 179907 - RNA, 20 nt, Human herpesvirus 7
acaaggaaccguuugcagcc

SEQ ID NO: 179908 - RNA, 20 nt, Human herpesvirus 7
acaagaggacagucaacaaa

SEQ ID NO: 179909 - RNA, 14 nt, Human herpesvirus 7
acaagaaacacuac

SEQ ID NO: 179910 - RNA, 18 nt, Human herpesvirus 7
acaagaagcgagauuuau

SEQ ID NO: 179911 - RNA, 20 nt, Human herpesvirus 7
acaacuuuauggaacaugaa

SEQ ID NO: 179912 - RNA, 14 nt, Human herpesvirus 7
acaacugugacaaa

SEQ ID NO: 179913 - RNA, 21 nt, Human herpesvirus 7
acaacuaaaacuacauuuaaa

SEQ ID NO: 179914 - RNA, 20 nt, Human herpesvirus 7
acaacuaaaauugacagcac

SEQ ID NO: 179915 - RNA, 22 nt, Human herpesvirus 7
acaacucaauaaaaaugucucu

SEQ ID NO: 179916 - RNA, 21 nt, Human herpesvirus 7
acaacacucugcauuccacua

SEQ ID NO: 179917 - RNA, 18 nt, Human herpesvirus 7
acaacaugaaacguuuca

SEQ ID NO: 179918 - RNA, 16 nt, Human herpesvirus 7
acaauggugugucugu

SEQ ID NO: 179919 - RNA, 19 nt, Human herpesvirus 7
acaauggugugucuguggu

SEQ ID NO: 179920 - RNA, 22 nt, Human herpesvirus 7
acaaugguguuaacaaucuuac

SEQ ID NO: 179921 - RNA, 11 nt, Human herpesvirus 7
acaaugucaau

SEQ ID NO: 179922 - RNA, 17 nt, Human herpesvirus 7
acaaugucaauaaucaa

SEQ ID NO: 179923 - RNA, 19 nt, Human herpesvirus 7
acaaugcagccuacuuuua

SEQ ID NO: 179924 - RNA, 20 nt, Human herpesvirus 7
acaaugcagccuacuuuuaa

SEQ ID NO: 179925 - RNA, 16 nt, Human herpesvirus 7
acaauggaacagcaaa

SEQ ID NO: 179926 - RNA, 19 nt, Human herpesvirus 7
acaauaugacgacuuugaa

SEQ ID NO: 179927 - RNA, 15 nt, Human herpesvirus 7
acaaugagcaauuca

SEQ ID NO: 179928 - RNA, 19 nt, Human herpesvirus 7
acaaucuauauaaaauauc

SEQ ID NO: 179929 - RNA, 12 nt, Human herpesvirus 7
acaaucuuacaa

SEQ ID NO: 179930 - RNA, 17 nt, Human herpesvirus 7
acaaucuuggcauugaa

SEQ ID NO: 179931 - RNA, 20 nt, Human herpesvirus 7
acaaugaaaguugggaugac

SEQ ID NO: 179932 - RNA, 18 nt, Human herpesvirus 7
acaaucccagaaauuuca

SEQ ID NO: 179933 - RNA, 17 nt, Human herpesvirus 7
acaaucgauaaacuuug

SEQ ID NO: 179934 - RNA, 19 nt, Human herpesvirus 7
acaaucgauugcaguugaa

SEQ ID NO: 179935 - RNA, 14 nt, Human herpesvirus 7
acaaucagcauuua

SEQ ID NO: 179936 - RNA, 17 nt, Human herpesvirus 7
acaaucagcauuuacca

SEQ ID NO: 179937 - RNA, 14 nt, Human herpesvirus 7
acaaucaaacaugu

SEQ ID NO: 179938 - RNA, 17 nt, Human herpesvirus 7
acaaguagugcuaauau

SEQ ID NO: 179939 - RNA, 18 nt, Human herpesvirus 7
acaauaaugcugugauuu

SEQ ID NO: 179940 - RNA, 19 nt, Human herpesvirus 7
acaauagugaacaugugcu

SEQ ID NO: 179941 - RNA, 20 nt, Human herpesvirus 7
acaauauaaaagaaacuuua

SEQ ID NO: 179942 - RNA, 13 nt, Human herpesvirus 7
acaauacaugaau

SEQ ID NO: 179943 - RNA, 14 nt, Human herpesvirus 7
acaauacaugaauu

SEQ ID NO: 179944 - RNA, 21 nt, Human herpesvirus 7
acaaauaaugaguauaacuca

SEQ ID NO: 179945 - RNA, 13 nt, Human herpesvirus 7
acaaauaauucaa

SEQ ID NO: 179946 - RNA, 18 nt, Human herpesvirus 7
acaaaggaucgaucucug

SEQ ID NO: 179947 - RNA, 12 nt, Human herpesvirus 7
acaaaggccagg

SEQ ID NO: 179948 - RNA, 17 nt, Human herpesvirus 7
acaaauauacgaaugcc

SEQ ID NO: 179949 - RNA, 15 nt, Human herpesvirus 7
acaaauuaaacaauc

SEQ ID NO: 179950 - RNA, 16 nt, Human herpesvirus 7
acaaauuaaacaaucu

SEQ ID NO: 179951 - RNA, 17 nt, Human herpesvirus 7
acaaauccacucuggca

SEQ ID NO: 179952 - RNA, 23 nt, Human herpesvirus 7
acaaaucuauuuugugccccaaa

SEQ ID NO: 179953 - RNA, 15 nt, Human herpesvirus 7
acaaaugucuuaucc

SEQ ID NO: 179954 - RNA, 17 nt, Human herpesvirus 7
acaaauugauccugcua

SEQ ID NO: 179955 - RNA, 21 nt, Human herpesvirus 7
acaaauuuaagagacauugaa

SEQ ID NO: 179956 - RNA, 15 nt, Human herpesvirus 7
acaacaaagcaugaa

SEQ ID NO: 179957 - RNA, 16 nt, Human herpesvirus 7
acaacaaagcaugaaa

SEQ ID NO: 179958 - RNA, 15 nt, Human herpesvirus 7
acaaauucaaccaca

SEQ ID NO: 179959 - RNA, 19 nt, Human herpesvirus 7
acaacaauaaaagauuuaa

SEQ ID NO: 179960 - RNA, 18 nt, Human herpesvirus 7
acaacacaaagccaauga

SEQ ID NO: 179961 - RNA, 18 nt, Human herpesvirus 7
acaaagugcgaaacgugu

SEQ ID NO: 179962 - RNA, 15 nt, Human herpesvirus 7
acaaagaacauguag

SEQ ID NO: 179963 - RNA, 13 nt, Human herpesvirus 7
acaaagaagaauu

SEQ ID NO: 179964 - RNA, 23 nt, Human herpesvirus 7
acaaaauaaagccagguauucaa

SEQ ID NO: 179965 - RNA, 12 nt, Human herpesvirus 7
acaaaauuccaa

SEQ ID NO: 179966 - RNA, 21 nt, Human herpesvirus 7
acaaaauucuggcguaaauac

SEQ ID NO: 179967 - RNA, 15 nt, Human herpesvirus 7
acaaacaaugagcaa

SEQ ID NO: 179968 - RNA, 17 nt, Human herpesvirus 7
acaaacauguuccauuc

SEQ ID NO: 179969 - RNA, 20 nt, Human herpesvirus 7
acaaaaaagguguugauaga

SEQ ID NO: 179970 - RNA, 18 nt, Human herpesvirus 7
aauuuuuuccuguuguca

SEQ ID NO: 179971 - RNA, 15 nt, Human herpesvirus 7
aauuuugaucuuguc

SEQ ID NO: 179972 - RNA, 19 nt, Human herpesvirus 7
aauuuuggcgaaacaauac

SEQ ID NO: 179973 - RNA, 21 nt, Human herpesvirus 7
aauuuuggcgaaacaauacau

SEQ ID NO: 179974 - RNA, 15 nt, Human herpesvirus 7
aauuuuacaaugcag

SEQ ID NO: 179975 - RNA, 19 nt, Human herpesvirus 7
aauuuuacaaugcagccua

SEQ ID NO: 179976 - RNA, 20 nt, Human herpesvirus 7
aauuuuacaccgauuccagc

SEQ ID NO: 179977 - RNA, 14 nt, Human herpesvirus 7
aauuuuacgaugac

SEQ ID NO: 179978 - RNA, 18 nt, Human herpesvirus 7
aauuuucuuagcuuucau

SEQ ID NO: 179979 - RNA, 13 nt, Human herpesvirus 7
aauuuuauugucu

SEQ ID NO: 179980 - RNA, 13 nt, Human herpesvirus 7
aauuuuauuuucc

SEQ ID NO: 179981 - RNA, 23 nt, Human herpesvirus 7
aauuuucaccgccgaugauugau

SEQ ID NO: 179982 - RNA, 14 nt, Human herpesvirus 7
aauuuuccauucau

SEQ ID NO: 179983 - RNA, 17 nt, Human herpesvirus 7
aauuuguuuaacuauug

SEQ ID NO: 179984 - RNA, 16 nt, Human herpesvirus 7
aauuuuaaaacugaag

SEQ ID NO: 179985 - RNA, 19 nt, Human herpesvirus 7
aauuuuaauagucuaaaaa

SEQ ID NO: 179986 - RNA, 15 nt, Human herpesvirus 7
aauuuuaaugugcuu

SEQ ID NO: 179987 - RNA, 16 nt, Human herpesvirus 7
aauuuuaauugugcau

SEQ ID NO: 179988 - RNA, 17 nt, Human herpesvirus 7
aauuuguaucuaugaca

SEQ ID NO: 179989 - RNA, 13 nt, Human herpesvirus 7
aauuugugcugug

SEQ ID NO: 179990 - RNA, 16 nt, Human herpesvirus 7
aaugaguauaacucaa

SEQ ID NO: 179991 - RNA, 20 nt, Human herpesvirus 7
aauuuggauagauacauuau

SEQ ID NO: 179992 - RNA, 21 nt, Human herpesvirus 7
aauuuggauagauacauuaua

SEQ ID NO: 179993 - RNA, 17 nt, Human herpesvirus 7
aauuuggcgccaaaaaa

SEQ ID NO: 179994 - RNA, 23 nt, Human herpesvirus 7
aaugaauuuuaaguggaaucuca

SEQ ID NO: 179995 - RNA, 17 nt, Human herpesvirus 7
aaugaaaagucugugac

SEQ ID NO: 179996 - RNA, 18 nt, Human herpesvirus 7
aaugaaaagucugugaca

SEQ ID NO: 179997 - RNA, 14 nt, Human herpesvirus 7
aaugaaauauucua

SEQ ID NO: 179998 - RNA, 22 nt, Human herpesvirus 7
aaugaacaccgcaaacauuuug

SEQ ID NO: 179999 - RNA, 23 nt, Human herpesvirus 7
aaugaacaccgcaaacauuuuga

SEQ ID NO: 180000 - RNA, 22 nt, Human herpesvirus 7
aaucuuugacuguaucuccaaa

SEQ ID NO: 180001 - RNA, 17 nt, Human herpesvirus 7
aaucuuuugcacaucua

SEQ ID NO: 180002 - RNA, 16 nt, Human herpesvirus 7
aaucuuuuugccuuuu

SEQ ID NO: 180003 - RNA, 14 nt, Human herpesvirus 7
aaugaagacucuuu

SEQ ID NO: 180004 - RNA, 19 nt, Human herpesvirus 7
aaugaaguuuaucuuggac

SEQ ID NO: 180005 - RNA, 21 nt, Human herpesvirus 7
aaugagacagcaacugugcau

SEQ ID NO: 180006 - RNA, 21 nt, Human herpesvirus 7
aauuucuuuguuugcuauuau

SEQ ID NO: 180007 - RNA, 23 nt, Human herpesvirus 7
aauuucuuuuugcuuuuggcaua

SEQ ID NO: 180008 - RNA, 15 nt, Human herpesvirus 7
aauuugacauuugca

SEQ ID NO: 180009 - RNA, 18 nt, Human herpesvirus 7
aauuugaggauuuugaca

SEQ ID NO: 180010 - RNA, 17 nt, Human herpesvirus 7
acuguuuguaaggccaa

SEQ ID NO: 180011 - RNA, 21 nt, Human herpesvirus 7
acuguuuucaguuaugaugau

SEQ ID NO: 180012 - RNA, 16 nt, Human herpesvirus 7
acuuaaagaacuccau

SEQ ID NO: 180013 - RNA, 18 nt, Human herpesvirus 7
acuuaaagaacuccauuc

SEQ ID NO: 180014 - RNA, 17 nt, Human herpesvirus 7
acuuaaauauuuuacau

SEQ ID NO: 180015 - RNA, 21 nt, Human herpesvirus 7
acuguccaacacaagguacau

SEQ ID NO: 180016 - RNA, 18 nt, Human herpesvirus 7
acugugccgccuggccag

SEQ ID NO: 180017 - RNA, 12 nt, Human herpesvirus 7
acugugucauca

SEQ ID NO: 180018 - RNA, 14 nt, Human herpesvirus 7
acuucuacuaauac

SEQ ID NO: 180019 - RNA, 12 nt, Human herpesvirus 7
acuucagauuuu

SEQ ID NO: 180020 - RNA, 23 nt, Human herpesvirus 7
acuugaaaaauuuuuuacugucu

SEQ ID NO: 180021 - RNA, 20 nt, Human herpesvirus 7
acuucugucaccacacucau

SEQ ID NO: 180022 - RNA, 18 nt, Human herpesvirus 7
acugcuucucccauucaa

SEQ ID NO: 180023 - RNA, 15 nt, Human herpesvirus 7
acuggacacaaucag

SEQ ID NO: 180024 - RNA, 15 nt, Human herpesvirus 7
acugccaccauuucu

SEQ ID NO: 180025 - RNA, 21 nt, Human herpesvirus 7
acugcauuaggcagcgcuuga

SEQ ID NO: 180026 - RNA, 22 nt, Human herpesvirus 7
acuccuguauuaaguguuugcu

SEQ ID NO: 180027 - RNA, 16 nt, Human herpesvirus 7
acuccuucuaccucuu

SEQ ID NO: 180028 - RNA, 16 nt, Human herpesvirus 7
acuauuugacugggua

SEQ ID NO: 180029 - RNA, 15 nt, Human herpesvirus 7
acuauuuuaggauau

SEQ ID NO: 180030 - RNA, 15 nt, Human herpesvirus 7
acuauuuuauugcga

SEQ ID NO: 180031 - RNA, 14 nt, Human herpesvirus 7
acucaaaagacaga

SEQ ID NO: 180032 - RNA, 13 nt, Human herpesvirus 7
acuacuacaugaa

SEQ ID NO: 180033 - RNA, 13 nt, Human herpesvirus 7
acuacgguuuuca

SEQ ID NO: 180034 - RNA, 14 nt, Human herpesvirus 7
acuacgguuuucag

SEQ ID NO: 180035 - RNA, 21 nt, Human herpesvirus 7
acuacaugaauggaucuggua

SEQ ID NO: 180036 - RNA, 20 nt, Human herpesvirus 7
acuaucgcaacaacuaaaga

SEQ ID NO: 180037 - RNA, 20 nt, Human herpesvirus 7
acuaucuccuaaaugaauuu

SEQ ID NO: 180038 - RNA, 14 nt, Human herpesvirus 7
acuauguccaaaaa

SEQ ID NO: 180039 - RNA, 12 nt, Human herpesvirus 7
acuaaguugaaa

SEQ ID NO: 180040 - RNA, 14 nt, Human herpesvirus 7
acgucuugcuguuu

SEQ ID NO: 180041 - RNA, 16 nt, Human herpesvirus 7
acggguggcacugcgc

SEQ ID NO: 180042 - RNA, 14 nt, Human herpesvirus 7
acguuuacaguuuu

SEQ ID NO: 180043 - RNA, 13 nt, Human herpesvirus 7
acgugagcaauac

SEQ ID NO: 180044 - RNA, 19 nt, Human herpesvirus 7
acgugagcacggcacacaa

SEQ ID NO: 180045 - RNA, 19 nt, Human herpesvirus 7
acgugagggggacaauuau

SEQ ID NO: 180046 - RNA, 18 nt, Human herpesvirus 7
acgugcuuagacuuauca

SEQ ID NO: 180047 - RNA, 18 nt, Human herpesvirus 7
accuuaaguuuuuuauac

SEQ ID NO: 180048 - RNA, 16 nt, Human herpesvirus 7
accuuaauucgugucu

SEQ ID NO: 180049 - RNA, 15 nt, Human herpesvirus 7
accuuacaacaaaga

SEQ ID NO: 180050 - RNA, 14 nt, Human herpesvirus 7
accuguacuguugc

SEQ ID NO: 180051 - RNA, 21 nt, Human herpesvirus 7
accuguauggaaccuacugaa

SEQ ID NO: 180052 - RNA, 18 nt, Human herpesvirus 7
accuggauguaaugaaua

SEQ ID NO: 180053 - RNA, 16 nt, Human herpesvirus 7
accugcuaacaaguau

SEQ ID NO: 180054 - RNA, 19 nt, Human herpesvirus 7
accuuaacauacugaugua

SEQ ID NO: 180055 - RNA, 13 nt, Human herpesvirus 7
accuuagaaucac

SEQ ID NO: 180056 - RNA, 16 nt, Human herpesvirus 7
acgacacugaauguca

SEQ ID NO: 180057 - RNA, 17 nt, Human herpesvirus 7
acgacacugaaugucaa

SEQ ID NO: 180058 - RNA, 18 nt, Human herpesvirus 7
acgacacugaaugucaac

SEQ ID NO: 180059 - RNA, 20 nt, Human herpesvirus 7
acgagauggauugagugcau

SEQ ID NO: 180060 - RNA, 19 nt, Human herpesvirus 7
acgauuaugucuaaggaau

SEQ ID NO: 180061 - RNA, 13 nt, Human herpesvirus 7
acgaguaugucca

SEQ ID NO: 180062 - RNA, 15 nt, Human herpesvirus 7
acgaguauguccaau

SEQ ID NO: 180063 - RNA, 17 nt, Human herpesvirus 7
acgaguauguccaauca

SEQ ID NO: 180064 - RNA, 18 nt, Human herpesvirus 7
acgaguauguccaaucaa

SEQ ID NO: 180065 - RNA, 19 nt, Human herpesvirus 7
acgaguauguccaaucaaa

SEQ ID NO: 180066 - RNA, 23 nt, Human herpesvirus 7
acgaguauguccaaucaaaaacu

SEQ ID NO: 180067 - RNA, 18 nt, Human herpesvirus 7
acgaugacagucuacuau

SEQ ID NO: 180068 - RNA, 19 nt, Human herpesvirus 7
acgauccaguacuugcauc

SEQ ID NO: 180069 - RNA, 19 nt, Human herpesvirus 7
accaauagaaaacauuaua

SEQ ID NO: 180070 - RNA, 22 nt, Human herpesvirus 7
accaauuucuauuagauaauga

SEQ ID NO: 180071 - RNA, 17 nt, Human herpesvirus 7
accacaaaaaucaaagu

SEQ ID NO: 180072 - RNA, 14 nt, Human herpesvirus 7
accaauuaauauua

SEQ ID NO: 180073 - RNA, 13 nt, Human herpesvirus 7
acauugucaaaga

SEQ ID NO: 180074 - RNA, 16 nt, Human herpesvirus 7
acauugucacugcaaa

SEQ ID NO: 180075 - RNA, 15 nt, Human herpesvirus 7
acauuucaaacaaca

SEQ ID NO: 180076 - RNA, 22 nt, Human herpesvirus 7
acauuucagaugacaacucaau

SEQ ID NO: 180077 - RNA, 14 nt, Human herpesvirus 7
acauuucauuccaa

SEQ ID NO: 180078 - RNA, 14 nt, Human herpesvirus 7
accccugccaguaa

SEQ ID NO: 180079 - RNA, 15 nt, Human herpesvirus 7
accccugccaguaac

SEQ ID NO: 180080 - RNA, 17 nt, Human herpesvirus 7
acccuuuguuugagaca

SEQ ID NO: 180081 - RNA, 15 nt, Human herpesvirus 7
accgcaugugaaaau

SEQ ID NO: 180082 - RNA, 17 nt, Human herpesvirus 7
accgccauucuuuucaa

SEQ ID NO: 180083 - RNA, 18 nt, Human herpesvirus 7
accgauuccagcacuuuu

SEQ ID NO: 180084 - RNA, 17 nt, Human herpesvirus 7
accuaucaaaauuccau

SEQ ID NO: 180085 - RNA, 15 nt, Human herpesvirus 7
accggaaguuuuuaa

SEQ ID NO: 180086 - RNA, 14 nt, Human herpesvirus 7
augaacuggcacau

SEQ ID NO: 180087 - RNA, 16 nt, Human herpesvirus 7
augaagaauguaugaa

SEQ ID NO: 180088 - RNA, 16 nt, Human herpesvirus 7
augaagcgcugagauc

SEQ ID NO: 180089 - RNA, 21 nt, Human herpesvirus 7
augaagcgcugagaucuucca

SEQ ID NO: 180090 - RNA, 23 nt, Human herpesvirus 7
augaagcgcugagaucuuccaau

SEQ ID NO: 180091 - RNA, 16 nt, Human herpesvirus 7
augaaggaagcuuuac

SEQ ID NO: 180092 - RNA, 16 nt, Human herpesvirus 7
augaaacuuccaauaa

SEQ ID NO: 180093 - RNA, 16 nt, Human herpesvirus 7
augaacaagguucuca

SEQ ID NO: 180094 - RNA, 19 nt, Human herpesvirus 7
augaaaguugggaugacaa

SEQ ID NO: 180095 - RNA, 13 nt, Human herpesvirus 7
augaaaucuugaa

SEQ ID NO: 180096 - RNA, 13 nt, Human herpesvirus 7
augaaaacagcug

SEQ ID NO: 180097 - RNA, 13 nt, Human herpesvirus 7
augaaaaagccau

SEQ ID NO: 180098 - RNA, 21 nt, Human herpesvirus 7
augaaaaagccauaaaaugua

SEQ ID NO: 180099 - RNA, 16 nt, Human herpesvirus 7
augaaaaauaaauacu

SEQ ID NO: 180100 - RNA, 16 nt, Human herpesvirus 7
aucuuuuacagaagaa

SEQ ID NO: 180101 - RNA, 20 nt, Human herpesvirus 7
aucuuuuauaaauaguuuca

SEQ ID NO: 180102 - RNA, 15 nt, Human herpesvirus 7
augaaaaaaacauua

SEQ ID NO: 180103 - RNA, 12 nt, Human herpesvirus 7
aucuuacuuccu

SEQ ID NO: 180104 - RNA, 22 nt, Human herpesvirus 7
aucuuacuuccuaaucuaacag

SEQ ID NO: 180105 - RNA, 18 nt, Human herpesvirus 7
aucacaguugcuugugaa

SEQ ID NO: 180106 - RNA, 21 nt, Human herpesvirus 7
aucacaguugcuugugaagga

SEQ ID NO: 180107 - RNA, 19 nt, Human herpesvirus 7
aucacagcuagauugacua

SEQ ID NO: 180108 - RNA, 22 nt, Human herpesvirus 7
aucacagcuagauugacuauga

SEQ ID NO: 180109 - RNA, 23 nt, Human herpesvirus 7
aucacagcuagauugacuaugaa

SEQ ID NO: 180110 - RNA, 18 nt, Human herpesvirus 7
aucuuauauuccuuugaa

SEQ ID NO: 180111 - RNA, 17 nt, Human herpesvirus 7
aucuuaaaaguacaaau

SEQ ID NO: 180112 - RNA, 13 nt, Human herpesvirus 7
aucuuucauaaca

SEQ ID NO: 180113 - RNA, 21 nt, Human herpesvirus 7
aucuuucggagacguugcuca

SEQ ID NO: 180114 - RNA, 22 nt, Human herpesvirus 7
aucuuucggagacguugcucau

SEQ ID NO: 180115 - RNA, 23 nt, Human herpesvirus 7
aucuugugaaguuugcugaaaua

SEQ ID NO: 180116 - RNA, 17 nt, Human herpesvirus 7
aucuugagaaauaugaa

SEQ ID NO: 180117 - RNA, 13 nt, Human herpesvirus 7
aucuuggcauuga

SEQ ID NO: 180118 - RNA, 11 nt, Human herpesvirus 7
aucuuuacuuu

SEQ ID NO: 180119 - RNA, 14 nt, Human herpesvirus 7
aucuuuacuuucau

SEQ ID NO: 180120 - RNA, 19 nt, Human herpesvirus 7
aucuuuacuuucauagcuu

SEQ ID NO: 180121 - RNA, 21 nt, Human herpesvirus 7
aucuuuacuuucauagcuuaa

SEQ ID NO: 180122 - RNA, 20 nt, Human herpesvirus 7
aucuuuaucuuugucacuua

SEQ ID NO: 180123 - RNA, 14 nt, Human herpesvirus 7
augaauuaucuaga

SEQ ID NO: 180124 - RNA, 14 nt, Human herpesvirus 7
augaauugaaauuu

SEQ ID NO: 180125 - RNA, 15 nt, Human herpesvirus 7
augaaucaaauuuca

SEQ ID NO: 180126 - RNA, 14 nt, Human herpesvirus 7
augaauaaaaucua

SEQ ID NO: 180127 - RNA, 20 nt, Human herpesvirus 7
augaaugcaagcaacacuua

SEQ ID NO: 180128 - RNA, 11 nt, Human herpesvirus 7
augaauggauc

SEQ ID NO: 180129 - RNA, 16 nt, Human herpesvirus 7
augaauggaucuggua

SEQ ID NO: 180130 - RNA, 22 nt, Human herpesvirus 7
augacacgacacugaaugucaa

SEQ ID NO: 180131 - RNA, 17 nt, Human herpesvirus 7
augaauuugacagucca

SEQ ID NO: 180132 - RNA, 18 nt, Human herpesvirus 7
augaauuugacaguccau

SEQ ID NO: 180133 - RNA, 18 nt, Human herpesvirus 7
augaauuuuaaguggaau

SEQ ID NO: 180134 - RNA, 22 nt, Human herpesvirus 7
augaauuuuaaguggaaucuca

SEQ ID NO: 180135 - RNA, 21 nt, Human herpesvirus 7
augacaaaacugcaaauccaa

SEQ ID NO: 180136 - RNA, 13 nt, Human herpesvirus 7
augacaaauuuca

SEQ ID NO: 180137 - RNA, 17 nt, Human herpesvirus 7
augacaacaaagcauga

SEQ ID NO: 180138 - RNA, 14 nt, Human herpesvirus 7
augacuuugaauca

SEQ ID NO: 180139 - RNA, 14 nt, Human herpesvirus 7
augacugacauucu

SEQ ID NO: 180140 - RNA, 11 nt, Human herpesvirus 7
augacugagaa

SEQ ID NO: 180141 - RNA, 19 nt, Human herpesvirus 7
augacgcuaaguuuuguua

SEQ ID NO: 180142 - RNA, 14 nt, Human herpesvirus 7
augauaaugaaacu

SEQ ID NO: 180143 - RNA, 16 nt, Human herpesvirus 7
augaucuuacuuccua

SEQ ID NO: 180144 - RNA, 21 nt, Human herpesvirus 7
augaucuuacuuccuaaucua

SEQ ID NO: 180145 - RNA, 16 nt, Human herpesvirus 7
augagcaauucaugca

SEQ ID NO: 180146 - RNA, 18 nt, Human herpesvirus 7
augcaagaaaguccaaag

SEQ ID NO: 180147 - RNA, 16 nt, Human herpesvirus 7
augcaagcaacacuua

SEQ ID NO: 180148 - RNA, 22 nt, Human herpesvirus 7
augauuugcagccagaacucaa

SEQ ID NO: 180149 - RNA, 19 nt, Human herpesvirus 7
augauguuuuuugucuuuu

SEQ ID NO: 180150 - RNA, 21 nt, Human herpesvirus 7
augauuggauuuucuguaauc

SEQ ID NO: 180151 - RNA, 15 nt, Human herpesvirus 7
augaugaugacaaaa

SEQ ID NO: 180152 - RNA, 16 nt, Human herpesvirus 7
augaugaauauaacaa

SEQ ID NO: 180153 - RNA, 13 nt, Human herpesvirus 7
augaugguugcaa

SEQ ID NO: 180154 - RNA, 15 nt, Human herpesvirus 7
augaugguugcaaua

SEQ ID NO: 180155 - RNA, 17 nt, Human herpesvirus 7
augauguuaaagaacaa

SEQ ID NO: 180156 - RNA, 18 nt, Human herpesvirus 7
augauguuaaagaacaag

SEQ ID NO: 180157 - RNA, 21 nt, Human herpesvirus 7
augcagacugcgcuuggcaaa

SEQ ID NO: 180158 - RNA, 15 nt, Human herpesvirus 7
augcagaccguaaaa

SEQ ID NO: 180159 - RNA, 16 nt, Human herpesvirus 7
augcagaaaaauccaa

SEQ ID NO: 180160 - RNA, 18 nt, Human herpesvirus 7
augcagaaaaauccaaaa

SEQ ID NO: 180161 - RNA, 20 nt, Human herpesvirus 7
augcagaaaaauccaaaauc

SEQ ID NO: 180162 - RNA, 12 nt, Human herpesvirus 7
augcacauccaa

SEQ ID NO: 180163 - RNA, 13 nt, Human herpesvirus 7
augcaugcaauuu

SEQ ID NO: 180164 - RNA, 19 nt, Human herpesvirus 7
augcaucugaauuuuucac

SEQ ID NO: 180165 - RNA, 18 nt, Human herpesvirus 7
augcaucauagaguagaa

SEQ ID NO: 180166 - RNA, 19 nt, Human herpesvirus 7
augcuuagaaucuuuugca

SEQ ID NO: 180167 - RNA, 14 nt, Human herpesvirus 7
augcuuacagugaa

SEQ ID NO: 180168 - RNA, 16 nt, Human herpesvirus 7
augcucaucgucucca

SEQ ID NO: 180169 - RNA, 14 nt, Human herpesvirus 7
augcuaguguucac

SEQ ID NO: 180170 - RNA, 22 nt, Human herpesvirus 7
augcuaugguggcauauaugaa

SEQ ID NO: 180171 - RNA, 21 nt, Human herpesvirus 7
augcgaaagccacuguugaug

SEQ ID NO: 180172 - RNA, 14 nt, Human herpesvirus 7
augccuguauuaaa

SEQ ID NO: 180173 - RNA, 19 nt, Human herpesvirus 7
augccggccgggugcugcg

SEQ ID NO: 180174 - RNA, 19 nt, Human herpesvirus 7
augccacaaaaaacuuuga

SEQ ID NO: 180175 - RNA, 21 nt, Human herpesvirus 7
augccauaauuucagcacugg

SEQ ID NO: 180176 - RNA, 19 nt, Human herpesvirus 7
augccaucuauaaacauuc

SEQ ID NO: 180177 - RNA, 21 nt, Human herpesvirus 7
augccagaaauuaaauacaaa

SEQ ID NO: 180178 - RNA, 22 nt, Human herpesvirus 7
auggcacaauuguaaauggcaa

SEQ ID NO: 180179 - RNA, 20 nt, Human herpesvirus 7
auggauuucuuagcgaauuu

SEQ ID NO: 180180 - RNA, 14 nt, Human herpesvirus 7
auggccagugaaug

SEQ ID NO: 180181 - RNA, 17 nt, Human herpesvirus 7
auggccagugaaugauu

SEQ ID NO: 180182 - RNA, 20 nt, Human herpesvirus 7
auggcuuugcugucuuggag

SEQ ID NO: 180183 - RNA, 23 nt, Human herpesvirus 7
auggaaaauggagcauuauugga

SEQ ID NO: 180184 - RNA, 17 nt, Human herpesvirus 7
augcuuugucuuacguc

SEQ ID NO: 180185 - RNA, 15 nt, Human herpesvirus 7
augcuuuguugucau

SEQ ID NO: 180186 - RNA, 22 nt, Human herpesvirus 7
augcuuucacuacuacaugaau

SEQ ID NO: 180187 - RNA, 15 nt, Human herpesvirus 7
auggaagaacaacaa

SEQ ID NO: 180188 - RNA, 14 nt, Human herpesvirus 7
auggaauuuaacaa

SEQ ID NO: 180189 - RNA, 13 nt, Human herpesvirus 7
auggacguuuauu

SEQ ID NO: 180190 - RNA, 22 nt, Human herpesvirus 7
auggaggauucggaaguaaaca

SEQ ID NO: 180191 - RNA, 13 nt, Human herpesvirus 7
auggauacaagga

SEQ ID NO: 180192 - RNA, 21 nt, Human herpesvirus 7
auguugcuaguaugucagauu

SEQ ID NO: 180193 - RNA, 16 nt, Human herpesvirus 7
auguuuccgcauaaaa

SEQ ID NO: 180194 - RNA, 20 nt, Human herpesvirus 7
auguuuggcaacucuuccuu

SEQ ID NO: 180195 - RNA, 17 nt, Human herpesvirus 7
auguucgcaaauguaca

SEQ ID NO: 180196 - RNA, 23 nt, Human herpesvirus 7
auguugauucucucucuauuaca

SEQ ID NO: 180197 - RNA, 14 nt, Human herpesvirus 7
auguugaaguugaa

SEQ ID NO: 180198 - RNA, 18 nt, Human herpesvirus 7
augucaaugaguguuuau

SEQ ID NO: 180199 - RNA, 20 nt, Human herpesvirus 7
augucagcaaaucugaaaau

SEQ ID NO: 180200 - RNA, 20 nt, Human herpesvirus 7
auguucuaucaagauaagca

SEQ ID NO: 180201 - RNA, 21 nt, Human herpesvirus 7
auguucuaucaagauaagcaa

SEQ ID NO: 180202 - RNA, 13 nt, Human herpesvirus 7
auguauggcaaug

SEQ ID NO: 180203 - RNA, 12 nt, Human herpesvirus 7
auguauucaaug

SEQ ID NO: 180204 - RNA, 15 nt, Human herpesvirus 7
auguauuuuacugga

SEQ ID NO: 180205 - RNA, 18 nt, Human herpesvirus 7
auguagauuuagauuuaa

SEQ ID NO: 180206 - RNA, 14 nt, Human herpesvirus 7
auguaggugcugca

SEQ ID NO: 180207 - RNA, 13 nt, Human herpesvirus 7
auguaguacaaug

SEQ ID NO: 180208 - RNA, 15 nt, Human herpesvirus 7
auguacauaacucua

SEQ ID NO: 180209 - RNA, 23 nt, Human herpesvirus 7
auguacauaacucuaucuccuau

SEQ ID NO: 180210 - RNA, 22 nt, Human herpesvirus 7
auuaucgcguuuucaugcucau

SEQ ID NO: 180211 - RNA, 13 nt, Human herpesvirus 7
auuauguccauaa

SEQ ID NO: 180212 - RNA, 16 nt, Human herpesvirus 7
auuaauacguccaaaa

SEQ ID NO: 180213 - RNA, 15 nt, Human herpesvirus 7
auuaaucaaacaauu

SEQ ID NO: 180214 - RNA, 13 nt, Human herpesvirus 7
auuaaucugcaua

SEQ ID NO: 180215 - RNA, 16 nt, Human herpesvirus 7
auuaaucugcauauaa

SEQ ID NO: 180216 - RNA, 19 nt, Human herpesvirus 7
auuauauaaguccuucaau

SEQ ID NO: 180217 - RNA, 22 nt, Human herpesvirus 7
auuauaugcaucaaaacauauc

SEQ ID NO: 180218 - RNA, 24 nt, Human herpesvirus 7
auuauaugcaucaaaacauaucag

SEQ ID NO: 180219 - RNA, 18 nt, Human herpesvirus 7
auuauauucccaucguga

SEQ ID NO: 180220 - RNA, 21 nt, Human herpesvirus 7
auuauauucccaucgugaaua

SEQ ID NO: 180221 - RNA, 22 nt, Human herpesvirus 7
auguuuuugcuagaaaccaagu

SEQ ID NO: 180222 - RNA, 16 nt, Human herpesvirus 7
auguuuugcaagcaca

SEQ ID NO: 180223 - RNA, 14 nt, Human herpesvirus 7
auuaaaacaucucu

SEQ ID NO: 180224 - RNA, 22 nt, Human herpesvirus 7
auuaaacaaucuggacauuuca

SEQ ID NO: 180225 - RNA, 23 nt, Human herpesvirus 7
auuaaacaaucuggacauuucaa

SEQ ID NO: 180226 - RNA, 17 nt, Human herpesvirus 7
auuaaaggaaacauuuc

SEQ ID NO: 180227 - RNA, 18 nt, Human herpesvirus 7
auuaaaggaaacauuucu

SEQ ID NO: 180228 - RNA, 15 nt, Human herpesvirus 7
auuaaauacuugcaa

SEQ ID NO: 180229 - RNA, 17 nt, Human herpesvirus 7
auuaaauacuugcaaug

SEQ ID NO: 180230 - RNA, 14 nt, Human herpesvirus 7
auuaacagcucuau

SEQ ID NO: 180231 - RNA, 22 nt, Human herpesvirus 7
auuaauaaaaagcccaugaaca

SEQ ID NO: 180232 - RNA, 14 nt, Human herpesvirus 7
auucugcuugucuc

SEQ ID NO: 180233 - RNA, 17 nt, Human herpesvirus 7
auucugcuugucucugu

SEQ ID NO: 180234 - RNA, 13 nt, Human herpesvirus 7
auucaguuuacug

SEQ ID NO: 180235 - RNA, 23 nt, Human herpesvirus 7
auucugucuuggaagagucucuc

SEQ ID NO: 180236 - RNA, 15 nt, Human herpesvirus 7
auucuuauucuacac

SEQ ID NO: 180237 - RNA, 19 nt, Human herpesvirus 7
auucuuauucuacacaucu

SEQ ID NO: 180238 - RNA, 22 nt, Human herpesvirus 7
auucuuauucuacacaucuuca

SEQ ID NO: 180239 - RNA, 14 nt, Human herpesvirus 7
auugaaaaugcauu

SEQ ID NO: 180240 - RNA, 19 nt, Human herpesvirus 7
auugaauauaaguuuucuu

SEQ ID NO: 180241 - RNA, 15 nt, Human herpesvirus 7
auugaaauuccauac

SEQ ID NO: 180242 - RNA, 17 nt, Human herpesvirus 7
auugaaauuccauacaa

SEQ ID NO: 180243 - RNA, 14 nt, Human herpesvirus 7
auugaauguggaau

SEQ ID NO: 180244 - RNA, 15 nt, Human herpesvirus 7
auugaauguggaauu

SEQ ID NO: 180245 - RNA, 22 nt, Human herpesvirus 7
auugaauguggaauuaaaucca

SEQ ID NO: 180246 - RNA, 13 nt, Human herpesvirus 7
auugacagcacca

SEQ ID NO: 180247 - RNA, 13 nt, Human herpesvirus 7
auugagucuucau

SEQ ID NO: 180248 - RNA, 22 nt, Human herpesvirus 7
auucaacaucuuucauaacaaa

SEQ ID NO: 180249 - RNA, 18 nt, Human herpesvirus 7
auucaacuguguuuuaga

SEQ ID NO: 180250 - RNA, 16 nt, Human herpesvirus 7
auucaaucuacuguac

SEQ ID NO: 180251 - RNA, 15 nt, Human herpesvirus 7
auucaaucugcaaaa

SEQ ID NO: 180252 - RNA, 17 nt, Human herpesvirus 7
auucaaggaauucugac

SEQ ID NO: 180253 - RNA, 20 nt, Human herpesvirus 7
auucaauaaaaagauauaca

SEQ ID NO: 180254 - RNA, 18 nt, Human herpesvirus 7
auucaaagcuucuacaaa

SEQ ID NO: 180255 - RNA, 18 nt, Human herpesvirus 7
auucaaaaacuauccaga

SEQ ID NO: 180256 - RNA, 14 nt, Human herpesvirus 7
auucaacacucgau

SEQ ID NO: 180257 - RNA, 15 nt, Human herpesvirus 7
auucaucaggacaau

SEQ ID NO: 180258 - RNA, 23 nt, Human herpesvirus 7
auucauccaaaaagaaacuuucu

SEQ ID NO: 180259 - RNA, 21 nt, Human herpesvirus 7
auucaguauuuuuuaugaaga

SEQ ID NO: 180260 - RNA, 19 nt, Human herpesvirus 7
auucacgcuuccaucacaa

SEQ ID NO: 180261 - RNA, 21 nt, Human herpesvirus 7
auucacgcuuccaucacaaaa

SEQ ID NO: 180262 - RNA, 18 nt, Human herpesvirus 7
auucacauugucacugca

SEQ ID NO: 180263 - RNA, 15 nt, Human herpesvirus 7
caacucuucuucaga

SEQ ID NO: 180264 - RNA, 22 nt, Human herpesvirus 7
caacuaguucuuuaauaucauu

SEQ ID NO: 180265 - RNA, 15 nt, Human herpesvirus 7
caacuaaaaaucuca

SEQ ID NO: 180266 - RNA, 19 nt, Human herpesvirus 7
caacuaaaacuacauuuaa

SEQ ID NO: 180267 - RNA, 22 nt, Human herpesvirus 7
caacuaaaauugacagcaccaa

SEQ ID NO: 180268 - RNA, 14 nt, Human herpesvirus 7
caacgguauacauu

SEQ ID NO: 180269 - RNA, 17 nt, Human herpesvirus 7
caaccggcaaucauaau

SEQ ID NO: 180270 - RNA, 19 nt, Human herpesvirus 7
caagaaaguccaaagugau

SEQ ID NO: 180271 - RNA, 13 nt, Human herpesvirus 7
caagaacaauaaa

SEQ ID NO: 180272 - RNA, 19 nt, Human herpesvirus 7
caacuucuaguucugaaau

SEQ ID NO: 180273 - RNA, 13 nt, Human herpesvirus 7
caacuuauguguc

SEQ ID NO: 180274 - RNA, 15 nt, Human herpesvirus 7
caacuucaacauaca

SEQ ID NO: 180275 - RNA, 21 nt, Human herpesvirus 7
caagacagaaaugaaucugca

SEQ ID NO: 180276 - RNA, 20 nt, Human herpesvirus 7
caagaacuucagauuuuagu

SEQ ID NO: 180277 - RNA, 19 nt, Human herpesvirus 7
caagacgcuguaugcaaga

SEQ ID NO: 180278 - RNA, 13 nt, Human herpesvirus 7
caagagacuccaa

SEQ ID NO: 180279 - RNA, 20 nt, Human herpesvirus 7
caaguagccgaaaaagaauu

SEQ ID NO: 180280 - RNA, 16 nt, Human herpesvirus 7
caaguagaauaccaga

SEQ ID NO: 180281 - RNA, 12 nt, Human herpesvirus 7
caaguaugucag

SEQ ID NO: 180282 - RNA, 15 nt, Human herpesvirus 7
caagucuuugcugga

SEQ ID NO: 180283 - RNA, 12 nt, Human herpesvirus 7
cacaaaaaucaa

SEQ ID NO: 180284 - RNA, 18 nt, Human herpesvirus 7
caauuuuucgcugaagaa

SEQ ID NO: 180285 - RNA, 22 nt, Human herpesvirus 7
caauuuuucucccgcagagauu

SEQ ID NO: 180286 - RNA, 16 nt, Human herpesvirus 7
cacaaaaaacuuugaa

SEQ ID NO: 180287 - RNA, 20 nt, Human herpesvirus 7
cacaacauccagagucucua

SEQ ID NO: 180288 - RNA, 15 nt, Human herpesvirus 7
cacacguacaauauu

SEQ ID NO: 180289 - RNA, 18 nt, Human herpesvirus 7
cacagaaacgucaggaaa

SEQ ID NO: 180290 - RNA, 18 nt, Human herpesvirus 7
cacacuuauuccagauau

SEQ ID NO: 180291 - RNA, 22 nt, Human herpesvirus 7
cacacuuauuccagauaugaca

SEQ ID NO: 180292 - RNA, 23 nt, Human herpesvirus 7
cacagauauucuaacaaauacca

SEQ ID NO: 180293 - RNA, 20 nt, Human herpesvirus 7
cacagcuagauugacuauga

SEQ ID NO: 180294 - RNA, 21 nt, Human herpesvirus 7
cacagcuagauugacuaugaa

SEQ ID NO: 180295 - RNA, 20 nt, Human herpesvirus 7
caauauuuaaaguagcugaa

SEQ ID NO: 180296 - RNA, 20 nt, Human herpesvirus 7
caauuauagaaacauuccuc

SEQ ID NO: 180297 - RNA, 14 nt, Human herpesvirus 7
caauucuuuuacaa

SEQ ID NO: 180298 - RNA, 20 nt, Human herpesvirus 7
caauuucacacaaugccuuu

SEQ ID NO: 180299 - RNA, 13 nt, Human herpesvirus 7
caauuucuggcaa

SEQ ID NO: 180300 - RNA, 17 nt, Human herpesvirus 7
caauuucuggcaauaaa

SEQ ID NO: 180301 - RNA, 16 nt, Human herpesvirus 7
caauuuuaaugugcuu

SEQ ID NO: 180302 - RNA, 12 nt, Human herpesvirus 7
caauuuucauaa

SEQ ID NO: 180303 - RNA, 22 nt, Human herpesvirus 7
caauuuauccuaagcuuuucag

SEQ ID NO: 180304 - RNA, 18 nt, Human herpesvirus 7
caauugaguuuacugcca

SEQ ID NO: 180305 - RNA, 14 nt, Human herpesvirus 7
caaguuucuucugg

SEQ ID NO: 180306 - RNA, 20 nt, Human herpesvirus 7
caauauaaaagaaacuuuac

SEQ ID NO: 180307 - RNA, 23 nt, Human herpesvirus 7
caauagauuacgcacaaauuucu

SEQ ID NO: 180308 - RNA, 15 nt, Human herpesvirus 7
caauaaaagauuuaa

SEQ ID NO: 180309 - RNA, 14 nt, Human herpesvirus 7
caauaucccagaau

SEQ ID NO: 180310 - RNA, 17 nt, Human herpesvirus 7
caauaugacgacuuuga

SEQ ID NO: 180311 - RNA, 14 nt, Human herpesvirus 7
caauauagacauuu

SEQ ID NO: 180312 - RNA, 23 nt, Human herpesvirus 7
caaucacauacucuauuggguca

SEQ ID NO: 180313 - RNA, 21 nt, Human herpesvirus 7
caaucacaucagauacagaga

SEQ ID NO: 180314 - RNA, 14 nt, Human herpesvirus 7
caaucagcauuuac

SEQ ID NO: 180315 - RNA, 20 nt, Human herpesvirus 7
caaucagcauuuaccauuuc

SEQ ID NO: 180316 - RNA, 15 nt, Human herpesvirus 7
caaucauaauucaau

SEQ ID NO: 180317 - RNA, 22 nt, Human herpesvirus 7
caaucauaauucaaucugcaaa

SEQ ID NO: 180318 - RNA, 16 nt, Human herpesvirus 7
caaucauaauuuucau

SEQ ID NO: 180319 - RNA, 17 nt, Human herpesvirus 7
caaucauaauuuucaug

SEQ ID NO: 180320 - RNA, 17 nt, Human herpesvirus 7
caacaucuuaaauguca

SEQ ID NO: 180321 - RNA, 22 nt, Human herpesvirus 7
caacaucuuaaaugucaaugag

SEQ ID NO: 180322 - RNA, 18 nt, Human herpesvirus 7
caacaugaaacguuucaa

SEQ ID NO: 180323 - RNA, 21 nt, Human herpesvirus 7
caaauaccaugaaaaauauga

SEQ ID NO: 180324 - RNA, 19 nt, Human herpesvirus 7
caaauacuguccaacacaa

SEQ ID NO: 180325 - RNA, 21 nt, Human herpesvirus 7
caacagagaacaccauaguca

SEQ ID NO: 180326 - RNA, 20 nt, Human herpesvirus 7
caacagcuucagaugcuaug

SEQ ID NO: 180327 - RNA, 16 nt, Human herpesvirus 7
caacagcagcugcuaa

SEQ ID NO: 180328 - RNA, 18 nt, Human herpesvirus 7
caaauaaacguccauuga

SEQ ID NO: 180329 - RNA, 13 nt, Human herpesvirus 7
caaagugaugaaa

SEQ ID NO: 180330 - RNA, 17 nt, Human herpesvirus 7
caaaguagaacuugaaa

SEQ ID NO: 180331 - RNA, 12 nt, Human herpesvirus 7
caaaguagccuu

SEQ ID NO: 180332 - RNA, 16 nt, Human herpesvirus 7
caaaggaaaaauuucu

SEQ ID NO: 180333 - RNA, 17 nt, Human herpesvirus 7
caaaggaucgaucucug

SEQ ID NO: 180334 - RNA, 13 nt, Human herpesvirus 7
caaagcaagcaug

SEQ ID NO: 180335 - RNA, 23 nt, Human herpesvirus 7
caaagcaucgauguuuuaucuaa

SEQ ID NO: 180336 - RNA, 19 nt, Human herpesvirus 7
caaagaaaaaaggaugaaa

SEQ ID NO: 180337 - RNA, 19 nt, Human herpesvirus 7
caaagaacauguaguacaa

SEQ ID NO: 180338 - RNA, 13 nt, Human herpesvirus 7
caaagacgcaguc

SEQ ID NO: 180339 - RNA, 17 nt, Human herpesvirus 7
caaaaucuauauuugau

SEQ ID NO: 180340 - RNA, 14 nt, Human herpesvirus 7
caaaauaaagccag

SEQ ID NO: 180341 - RNA, 23 nt, Human herpesvirus 7
caaaauauaucugauguagauuu

SEQ ID NO: 180342 - RNA, 13 nt, Human herpesvirus 7
caaaauaugcaaa

SEQ ID NO: 180343 - RNA, 18 nt, Human herpesvirus 7
caaaauauuuaucugcau

SEQ ID NO: 180344 - RNA, 21 nt, Human herpesvirus 7
caaaauacaauagugaacaug

SEQ ID NO: 180345 - RNA, 16 nt, Human herpesvirus 7
caaaacugcaaaucca

SEQ ID NO: 180346 - RNA, 15 nt, Human herpesvirus 7
caaaagaaaaaaucu

SEQ ID NO: 180347 - RNA, 13 nt, Human herpesvirus 7
caaaagccacaga

SEQ ID NO: 180348 - RNA, 14 nt, Human herpesvirus 7
caaaagccacugau

SEQ ID NO: 180349 - RNA, 23 nt, Human herpesvirus 7
auugcccuuguguugucauacaa

SEQ ID NO: 180350 - RNA, 15 nt, Human herpesvirus 7
auugcauaucaugau

SEQ ID NO: 180351 - RNA, 18 nt, Human herpesvirus 7
auugcauaucaugauuau

SEQ ID NO: 180352 - RNA, 19 nt, Human herpesvirus 7
auugccuuucccagaagaa

SEQ ID NO: 180353 - RNA, 14 nt, Human herpesvirus 7
auugcgaccaaaga

SEQ ID NO: 180354 - RNA, 22 nt, Human herpesvirus 7
auuuccacguuuuuuagcuuuu

SEQ ID NO: 180355 - RNA, 16 nt, Human herpesvirus 7
auuuccaacgcauuca

SEQ ID NO: 180356 - RNA, 17 nt, Human herpesvirus 7
auuuccaacgcauucaa

SEQ ID NO: 180357 - RNA, 16 nt, Human herpesvirus 7
auugaucacuuugcau

SEQ ID NO: 180358 - RNA, 17 nt, Human herpesvirus 7
auugaucacuuugcauc

SEQ ID NO: 180359 - RNA, 21 nt, Human herpesvirus 7
auugauccuccuugccugcaa

SEQ ID NO: 180360 - RNA, 14 nt, Human herpesvirus 7
auugauccugcuau

SEQ ID NO: 180361 - RNA, 17 nt, Human herpesvirus 7
auugauccugcuauuca

SEQ ID NO: 180362 - RNA, 17 nt, Human herpesvirus 7
auugaguucaggucucu

SEQ ID NO: 180363 - RNA, 20 nt, Human herpesvirus 7
auuucuaaauaugaugaaac

SEQ ID NO: 180364 - RNA, 22 nt, Human herpesvirus 7
auuucuauuagauaaugacaaa

SEQ ID NO: 180365 - RNA, 18 nt, Human herpesvirus 7
auuucuauucaguuucuu

SEQ ID NO: 180366 - RNA, 21 nt, Human herpesvirus 7
auuucuauugaauguggaauu

SEQ ID NO: 180367 - RNA, 14 nt, Human herpesvirus 7
auuucggguugcac

SEQ ID NO: 180368 - RNA, 18 nt, Human herpesvirus 7
auuucgaauuuguucaau

SEQ ID NO: 180369 - RNA, 13 nt, Human herpesvirus 7
auuuccgagacag

SEQ ID NO: 180370 - RNA, 22 nt, Human herpesvirus 7
auuucuggcaacaguucaaaaa

SEQ ID NO: 180371 - RNA, 13 nt, Human herpesvirus 7
auuucugucaucu

SEQ ID NO: 180372 - RNA, 16 nt, Human herpesvirus 7
auuucugucaucuuau

SEQ ID NO: 180373 - RNA, 22 nt, Human herpesvirus 7
auuucuuuaaaugaaguuuguu

SEQ ID NO: 180374 - RNA, 19 nt, Human herpesvirus 7
auuuuaaaagguugacauc

SEQ ID NO: 180375 - RNA, 19 nt, Human herpesvirus 7
auuuguuuguucuguuuau

SEQ ID NO: 180376 - RNA, 16 nt, Human herpesvirus 7
caaaaaacacguccaa

SEQ ID NO: 180377 - RNA, 18 nt, Human herpesvirus 7
caaaaaaaauuaguucua

SEQ ID NO: 180378 - RNA, 15 nt, Human herpesvirus 7
caaaaaaacacagua

SEQ ID NO: 180379 - RNA, 12 nt, Human herpesvirus 7
caaaaaaaagcu

SEQ ID NO: 180380 - RNA, 15 nt, Human herpesvirus 7
auuuuuuguacaggc

SEQ ID NO: 180381 - RNA, 14 nt, Human herpesvirus 7
auuuuuuauuccca

SEQ ID NO: 180382 - RNA, 18 nt, Human herpesvirus 7
auuuuuuccaugucacau

SEQ ID NO: 180383 - RNA, 19 nt, Human herpesvirus 7
auuuuuggcuaacugagaa

SEQ ID NO: 180384 - RNA, 18 nt, Human herpesvirus 7
auuuuuaaguuguucuca

SEQ ID NO: 180385 - RNA, 14 nt, Human herpesvirus 7
auuuuuagcucuaa

SEQ ID NO: 180386 - RNA, 22 nt, Human herpesvirus 7
auuuuucccaaaauagcacaca

SEQ ID NO: 180387 - RNA, 18 nt, Human herpesvirus 7
auuuuucgcugaagaaca

SEQ ID NO: 180388 - RNA, 12 nt, Human herpesvirus 7
auuuuucuugcu

SEQ ID NO: 180389 - RNA, 14 nt, Human herpesvirus 7
auuuuguaugaaaa

SEQ ID NO: 180390 - RNA, 19 nt, Human herpesvirus 7
auuuugugacccugucaca

SEQ ID NO: 180391 - RNA, 19 nt, Human herpesvirus 7
auuuuuaaaacaagacaga

SEQ ID NO: 180392 - RNA, 19 nt, Human herpesvirus 7
auuuuuaaacuugugaaaa

SEQ ID NO: 180393 - RNA, 15 nt, Human herpesvirus 7
auuuuguuuugcaau

SEQ ID NO: 180394 - RNA, 18 nt, Human herpesvirus 7
auuuuaauaugugaaaau

SEQ ID NO: 180395 - RNA, 19 nt, Human herpesvirus 7
auuuuaauaugugaaaaua

SEQ ID NO: 180396 - RNA, 19 nt, Human herpesvirus 7
auuuuacaacaauaaaaga

SEQ ID NO: 180397 - RNA, 13 nt, Human herpesvirus 7
auuuuacauauua

SEQ ID NO: 180398 - RNA, 14 nt, Human herpesvirus 7
auuuuaaugugcuu

SEQ ID NO: 180399 - RNA, 22 nt, Human herpesvirus 7
auuuuauccguuaauggauaac

SEQ ID NO: 180400 - RNA, 15 nt, Human herpesvirus 7
auuuucaaguuucuu

SEQ ID NO: 180401 - RNA, 13 nt, Human herpesvirus 7
auuuuccugaaaa

SEQ ID NO: 180402 - RNA, 21 nt, Human herpesvirus 7
auuuucgacagaaacauguau

SEQ ID NO: 180403 - RNA, 14 nt, Human herpesvirus 7
auuuucgauuccau

SEQ ID NO: 180404 - RNA, 12 nt, Human herpesvirus 7
auuuucauaaag

SEQ ID NO: 180405 - RNA, 14 nt, Human herpesvirus 7
auuuucguaucugu

SEQ ID NO: 180406 - RNA, 14 nt, Human herpesvirus 7
auuuucuacaacua

SEQ ID NO: 180407 - RNA, 15 nt, Human herpesvirus 7
auuuucuuagcuuuc

SEQ ID NO: 180408 - RNA, 16 nt, Human herpesvirus 7
auuuucuuagcuuuca

SEQ ID NO: 180409 - RNA, 16 nt, Human herpesvirus 7
auuuucuugagccuug

SEQ ID NO: 180410 - RNA, 18 nt, Human herpesvirus 7
auuuucuagagcauauac

SEQ ID NO: 180411 - RNA, 17 nt, Human herpesvirus 7
auuuuggcgaaacaaua

SEQ ID NO: 180412 - RNA, 22 nt, Human herpesvirus 7
auuuuggcgcucucuggccaga

SEQ ID NO: 180413 - RNA, 23 nt, Human herpesvirus 7
auuuugccguugaguugcugcug

SEQ ID NO: 180414 - RNA, 14 nt, Human herpesvirus 7
caucauugaagaaa

SEQ ID NO: 180415 - RNA, 14 nt, Human herpesvirus 7
caucaucacgucau

SEQ ID NO: 180416 - RNA, 21 nt, Human herpesvirus 7
caucauauacaauaaugcugu

SEQ ID NO: 180417 - RNA, 16 nt, Human herpesvirus 7
caucagaccuaacaaa

SEQ ID NO: 180418 - RNA, 12 nt, Human herpesvirus 7
cauaucuaugau

SEQ ID NO: 180419 - RNA, 20 nt, Human herpesvirus 7
cauauccgggggguugaaua

SEQ ID NO: 180420 - RNA, 18 nt, Human herpesvirus 7
cauauaucuuugauuacu

SEQ ID NO: 180421 - RNA, 21 nt, Human herpesvirus 7
cauacgugcuuagacuuauca

SEQ ID NO: 180422 - RNA, 15 nt, Human herpesvirus 7
cauauacaauaaugc

SEQ ID NO: 180423 - RNA, 18 nt, Human herpesvirus 7
cauauagauaaugaaguu

SEQ ID NO: 180424 - RNA, 13 nt, Human herpesvirus 7
cauauagauuuau

SEQ ID NO: 180425 - RNA, 21 nt, Human herpesvirus 7
cauauaauaaaggaaagacaa

SEQ ID NO: 180426 - RNA, 22 nt, Human herpesvirus 7
cauagucuguagaugcaugcua

SEQ ID NO: 180427 - RNA, 20 nt, Human herpesvirus 7
cauacauagaacgacuccaa

SEQ ID NO: 180428 - RNA, 21 nt, Human herpesvirus 7
caucccaaaccaugauguuaa

SEQ ID NO: 180429 - RNA, 23 nt, Human herpesvirus 7
caucccaaaccaugauguuaaag

SEQ ID NO: 180430 - RNA, 20 nt, Human herpesvirus 7
caucgaauuuuacaaugcag

SEQ ID NO: 180431 - RNA, 23 nt, Human herpesvirus 7
caucuuaaguaaggaagguacau

SEQ ID NO: 180432 - RNA, 16 nt, Human herpesvirus 7
caucugucaggucaca

SEQ ID NO: 180433 - RNA, 18 nt, Human herpesvirus 7
caucuuucguauugccuu

SEQ ID NO: 180434 - RNA, 11 nt, Human herpesvirus 7
caucuuucuag

SEQ ID NO: 180435 - RNA, 20 nt, Human herpesvirus 7
caucuuucuuauaucugaga

SEQ ID NO: 180436 - RNA, 19 nt, Human herpesvirus 7
caucuucugaaucugcaaa

SEQ ID NO: 180437 - RNA, 14 nt, Human herpesvirus 7
caucuucaauguuc

SEQ ID NO: 180438 - RNA, 16 nt, Human herpesvirus 7
caucuucaauguucga

SEQ ID NO: 180439 - RNA, 15 nt, Human herpesvirus 7
caugaaaaauaugag

SEQ ID NO: 180440 - RNA, 18 nt, Human herpesvirus 7
caugaaaacagugggaau

SEQ ID NO: 180441 - RNA, 15 nt, Human herpesvirus 7
caugaaaagcaacuu

SEQ ID NO: 180442 - RNA, 19 nt, Human herpesvirus 7
caugaacacugcuucuccc

SEQ ID NO: 180443 - RNA, 13 nt, Human herpesvirus 7
caugaaaucuuga

SEQ ID NO: 180444 - RNA, 19 nt, Human herpesvirus 7
caggugacgucuagacauu

SEQ ID NO: 180445 - RNA, 15 nt, Human herpesvirus 7
caggugauauucuuu

SEQ ID NO: 180446 - RNA, 20 nt, Human herpesvirus 7
caggugcucuaaauaucccu

SEQ ID NO: 180447 - RNA, 16 nt, Human herpesvirus 7
caguacuugcaucgaa

SEQ ID NO: 180448 - RNA, 16 nt, Human herpesvirus 7
caguaugaaaucaaaa

SEQ ID NO: 180449 - RNA, 17 nt, Human herpesvirus 7
caguaugaaaucaaaaa

SEQ ID NO: 180450 - RNA, 12 nt, Human herpesvirus 7
cauaaaacaaga

SEQ ID NO: 180451 - RNA, 14 nt, Human herpesvirus 7
cauaaaacaugcaa

SEQ ID NO: 180452 - RNA, 15 nt, Human herpesvirus 7
cauaauuacauugca

SEQ ID NO: 180453 - RNA, 21 nt, Human herpesvirus 7
cauaauuacauugcagucaaa

SEQ ID NO: 180454 - RNA, 18 nt, Human herpesvirus 7
cauaauucaaucugcaaa

SEQ ID NO: 180455 - RNA, 23 nt, Human herpesvirus 7
caguuucuuuuucauuaacuuuu

SEQ ID NO: 180456 - RNA, 19 nt, Human herpesvirus 7
cauaaaaaaucuaauuaau

SEQ ID NO: 180457 - RNA, 19 nt, Human herpesvirus 7
caguuugcaacaaauucca

SEQ ID NO: 180458 - RNA, 14 nt, Human herpesvirus 7
cagucgucaaauau

SEQ ID NO: 180459 - RNA, 18 nt, Human herpesvirus 7
cagucgucugcucaaugg

SEQ ID NO: 180460 - RNA, 14 nt, Human herpesvirus 7
caguucaaccuuuu

SEQ ID NO: 180461 - RNA, 22 nt, Human herpesvirus 7
caguucccauaaauauugauaa

SEQ ID NO: 180462 - RNA, 14 nt, Human herpesvirus 7
caguuaugaugauu

SEQ ID NO: 180463 - RNA, 12 nt, Human herpesvirus 7
cagugauuggua

SEQ ID NO: 180464 - RNA, 18 nt, Human herpesvirus 7
cagaaauuuuuaaagaga

SEQ ID NO: 180465 - RNA, 17 nt, Human herpesvirus 7
cacauugucacugcaaa

SEQ ID NO: 180466 - RNA, 20 nt, Human herpesvirus 7
cacauuuaaaaaaaaaacca

SEQ ID NO: 180467 - RNA, 16 nt, Human herpesvirus 7
cacauuuauccaucaa

SEQ ID NO: 180468 - RNA, 21 nt, Human herpesvirus 7
caccaagggcguagaggcaga

SEQ ID NO: 180469 - RNA, 12 nt, Human herpesvirus 7
caccaauccuuu

SEQ ID NO: 180470 - RNA, 15 nt, Human herpesvirus 7
cagaaguuucaauug

SEQ ID NO: 180471 - RNA, 21 nt, Human herpesvirus 7
cagaaguaacgcagacuaauc

SEQ ID NO: 180472 - RNA, 22 nt, Human herpesvirus 7
cagaaguaacgcagacuaauca

SEQ ID NO: 180473 - RNA, 17 nt, Human herpesvirus 7
cagaaugauaauuucua

SEQ ID NO: 180474 - RNA, 19 nt, Human herpesvirus 7
cagaaugauaauuucuaua

SEQ ID NO: 180475 - RNA, 15 nt, Human herpesvirus 7
cagaauuuccagaag

SEQ ID NO: 180476 - RNA, 20 nt, Human herpesvirus 7
cagacaccgucauuucgcag

SEQ ID NO: 180477 - RNA, 13 nt, Human herpesvirus 7
cagaccagcacaa

SEQ ID NO: 180478 - RNA, 16 nt, Human herpesvirus 7
cagaccuaaacccaga

SEQ ID NO: 180479 - RNA, 15 nt, Human herpesvirus 7
cagacuaaauaugga

SEQ ID NO: 180480 - RNA, 15 nt, Human herpesvirus 7
cagaccuccuauguc

SEQ ID NO: 180481 - RNA, 18 nt, Human herpesvirus 7
cagagucaaaaagauuaa

SEQ ID NO: 180482 - RNA, 23 nt, Human herpesvirus 7
cagaugacuuucuucuagaaacu

SEQ ID NO: 180483 - RNA, 21 nt, Human herpesvirus 7
cagauauucuaacaaauacca

SEQ ID NO: 180484 - RNA, 23 nt, Human herpesvirus 7
cagauauucuaacaaauaccaug

SEQ ID NO: 180485 - RNA, 18 nt, Human herpesvirus 7
cagauauuuuaauucuaa

SEQ ID NO: 180486 - RNA, 17 nt, Human herpesvirus 7
cagauccaucuguaaca

SEQ ID NO: 180487 - RNA, 13 nt, Human herpesvirus 7
cagauacagcaua

SEQ ID NO: 180488 - RNA, 15 nt, Human herpesvirus 7
cagauauuaguuuca

SEQ ID NO: 180489 - RNA, 21 nt, Human herpesvirus 7
cagccgcuuuacgaaacaauu

SEQ ID NO: 180490 - RNA, 24 nt, Human herpesvirus 7
cagccuacuuuuaaaauagccgau

SEQ ID NO: 180491 - RNA, 13 nt, Human herpesvirus 7
cagccuauucaca

SEQ ID NO: 180492 - RNA, 14 nt, Human herpesvirus 7
cagcuuuuggaauu

SEQ ID NO: 180493 - RNA, 15 nt, Human herpesvirus 7
caggaaaaucuauca

SEQ ID NO: 180494 - RNA, 17 nt, Human herpesvirus 7
caggaaaaucuaucacc

SEQ ID NO: 180495 - RNA, 21 nt, Human herpesvirus 7
caggaauaucaagaauuugag

SEQ ID NO: 180496 - RNA, 17 nt, Human herpesvirus 7
cagcuugaugaaucaaa

SEQ ID NO: 180497 - RNA, 18 nt, Human herpesvirus 7
cagcuucuaaaugugcua

SEQ ID NO: 180498 - RNA, 12 nt, Human herpesvirus 7
cagcugugauau

SEQ ID NO: 180499 - RNA, 17 nt, Human herpesvirus 7
cagcuguauaucuauua

SEQ ID NO: 180500 - RNA, 13 nt, Human herpesvirus 7
cagcugcuaaaac

SEQ ID NO: 180501 - RNA, 21 nt, Human herpesvirus 7
cagcuagauugacuaugaauu

SEQ ID NO: 180502 - RNA, 13 nt, Human herpesvirus 7
cagcuccagccaa

SEQ ID NO: 180503 - RNA, 15 nt, Human herpesvirus 7
cagcuccaugucucu

SEQ ID NO: 180504 - RNA, 23 nt, Human herpesvirus 7
cagcuaacgauccaguacuugca

SEQ ID NO: 180505 - RNA, 15 nt, Human herpesvirus 7
cagcguucgugcuuu

SEQ ID NO: 180506 - RNA, 19 nt, Human herpesvirus 7
cagggacguuucuagcaaa

SEQ ID NO: 180507 - RNA, 14 nt, Human herpesvirus 7
caggcuuacacuau

SEQ ID NO: 180508 - RNA, 15 nt, Human herpesvirus 7
caggcuucuucugca

SEQ ID NO: 180509 - RNA, 22 nt, Human herpesvirus 7
caggcagccgauguccacgacc

SEQ ID NO: 180510 - RNA, 21 nt, Human herpesvirus 7
caggaucuccuggaaagcuca

SEQ ID NO: 180511 - RNA, 22 nt, Human herpesvirus 7
caggcaaaucucauaaugucuc

SEQ ID NO: 180512 - RNA, 13 nt, Human herpesvirus 7
caggacaaucaaa

SEQ ID NO: 180513 - RNA, 16 nt, Human herpesvirus 7
ccgaucuaaagacacu

SEQ ID NO: 180514 - RNA, 21 nt, Human herpesvirus 7
ccgauaagaaaguuguacuca

SEQ ID NO: 180515 - RNA, 14 nt, Human herpesvirus 7
ccgauggaacugaa

SEQ ID NO: 180516 - RNA, 23 nt, Human herpesvirus 7
ccgauggaacugaaaacaaugca

SEQ ID NO: 180517 - RNA, 13 nt, Human herpesvirus 7
ccgcauaaaucau

SEQ ID NO: 180518 - RNA, 23 nt, Human herpesvirus 7
ccgcagacuuucgugucacagau

SEQ ID NO: 180519 - RNA, 18 nt, Human herpesvirus 7
ccgucuuuugauuuugcc

SEQ ID NO: 180520 - RNA, 17 nt, Human herpesvirus 7
ccgugugcaaaacuggg

SEQ ID NO: 180521 - RNA, 18 nt, Human herpesvirus 7
ccggauguaggugcugca

SEQ ID NO: 180522 - RNA, 21 nt, Human herpesvirus 7
ccggauguaggugcugcagca

SEQ ID NO: 180523 - RNA, 19 nt, Human herpesvirus 7
ccgccuggccagcagugug

SEQ ID NO: 180524 - RNA, 21 nt, Human herpesvirus 7
cccacuuccccuccacucgaa

SEQ ID NO: 180525 - RNA, 12 nt, Human herpesvirus 7
cccagaagaaug

SEQ ID NO: 180526 - RNA, 19 nt, Human herpesvirus 7
cccagagcuaaaacaugga

SEQ ID NO: 180527 - RNA, 14 nt, Human herpesvirus 7
ccccuaaacaauua

SEQ ID NO: 180528 - RNA, 18 nt, Human herpesvirus 7
ccauuuauuuacagauuu

SEQ ID NO: 180529 - RNA, 20 nt, Human herpesvirus 7
ccauuuauuuacagauuuua

SEQ ID NO: 180530 - RNA, 13 nt, Human herpesvirus 7
ccauucgaucuaa

SEQ ID NO: 180531 - RNA, 22 nt, Human herpesvirus 7
ccauucaauaauggcauuacua

SEQ ID NO: 180532 - RNA, 20 nt, Human herpesvirus 7
ccaugucuuguuaucuccac

SEQ ID NO: 180533 - RNA, 22 nt, Human herpesvirus 7
ccauuuuauucaaagcuucuac

SEQ ID NO: 180534 - RNA, 19 nt, Human herpesvirus 7
ccauuuucagaaaaguuga

SEQ ID NO: 180535 - RNA, 14 nt, Human herpesvirus 7
ccauucauuuccuc

SEQ ID NO: 180536 - RNA, 15 nt, Human herpesvirus 7
ccauuuccucuggaa

SEQ ID NO: 180537 - RNA, 24 nt, Human herpesvirus 7
cccaaaaauaaguccgugugcaaa

SEQ ID NO: 180538 - RNA, 12 nt, Human herpesvirus 7
cccaaacuguau

SEQ ID NO: 180539 - RNA, 19 nt, Human herpesvirus 7
caugccuagagggcacguu

SEQ ID NO: 180540 - RNA, 18 nt, Human herpesvirus 7
caugccuauucaaacgcu

SEQ ID NO: 180541 - RNA, 16 nt, Human herpesvirus 7
cauggcuaacgcuaaa

SEQ ID NO: 180542 - RNA, 13 nt, Human herpesvirus 7
cauggagcacaau

SEQ ID NO: 180543 - RNA, 16 nt, Human herpesvirus 7
caugggcacauuugua

SEQ ID NO: 180544 - RNA, 22 nt, Human herpesvirus 7
ccaaagaucguuguuaaaucca

SEQ ID NO: 180545 - RNA, 23 nt, Human herpesvirus 7
ccaaagcaucgauguuuuaucua

SEQ ID NO: 180546 - RNA, 14 nt, Human herpesvirus 7
ccaaagugaugaaa

SEQ ID NO: 180547 - RNA, 14 nt, Human herpesvirus 7
cauuuguaugucua

SEQ ID NO: 180548 - RNA, 20 nt, Human herpesvirus 7
cauuuuaaaaaagacaccuu

SEQ ID NO: 180549 - RNA, 13 nt, Human herpesvirus 7
cauuuucagaaaa

SEQ ID NO: 180550 - RNA, 19 nt, Human herpesvirus 7
cauuuucagaaaaguugaa

SEQ ID NO: 180551 - RNA, 18 nt, Human herpesvirus 7
cauuuguuuaagacauua

SEQ ID NO: 180552 - RNA, 16 nt, Human herpesvirus 7
cauuugugauguacug

SEQ ID NO: 180553 - RNA, 20 nt, Human herpesvirus 7
cauuucugaaaccuucgcaa

SEQ ID NO: 180554 - RNA, 20 nt, Human herpesvirus 7
cauuuccucuggaaaaggga

SEQ ID NO: 180555 - RNA, 17 nt, Human herpesvirus 7
cauuugcaguuauuucu

SEQ ID NO: 180556 - RNA, 19 nt, Human herpesvirus 7
cauuucaaacaacauaucg

SEQ ID NO: 180557 - RNA, 22 nt, Human herpesvirus 7
cauuucacucauuagaaacaau

SEQ ID NO: 180558 - RNA, 20 nt, Human herpesvirus 7
cauuucagaugacaacucaa

SEQ ID NO: 180559 - RNA, 22 nt, Human herpesvirus 7
cauuucagaugacaacucaaua

SEQ ID NO: 180560 - RNA, 15 nt, Human herpesvirus 7
ccaaaucuaauuuau

SEQ ID NO: 180561 - RNA, 22 nt, Human herpesvirus 7
ccaaauauaugcuuuauuuaau

SEQ ID NO: 180562 - RNA, 18 nt, Human herpesvirus 7
ccaacaaggacgaaucua

SEQ ID NO: 180563 - RNA, 21 nt, Human herpesvirus 7
ccaauaccgucgcaccgucau

SEQ ID NO: 180564 - RNA, 22 nt, Human herpesvirus 7
ccaauagaaaacauuauauucc

SEQ ID NO: 180565 - RNA, 13 nt, Human herpesvirus 7
ccaauguugccuu

SEQ ID NO: 180566 - RNA, 17 nt, Human herpesvirus 7
ccaaugaacaaguuuca

SEQ ID NO: 180567 - RNA, 19 nt, Human herpesvirus 7
ccaaugaacaaguuucaaa

SEQ ID NO: 180568 - RNA, 21 nt, Human herpesvirus 7
ccaaugcucgauauacaugua

SEQ ID NO: 180569 - RNA, 21 nt, Human herpesvirus 7
ccaaucauaauuuucaugaac

SEQ ID NO: 180570 - RNA, 22 nt, Human herpesvirus 7
ccacacagggaagaaacagcug

SEQ ID NO: 180571 - RNA, 15 nt, Human herpesvirus 7
ccacagaugcuuaca

SEQ ID NO: 180572 - RNA, 18 nt, Human herpesvirus 7
ccagaucguucauugauu

SEQ ID NO: 180573 - RNA, 15 nt, Human herpesvirus 7
ccagauuucuggcaa

SEQ ID NO: 180574 - RNA, 21 nt, Human herpesvirus 7
ccacauuuaaaaaaaaaacca

SEQ ID NO: 180575 - RNA, 20 nt, Human herpesvirus 7
ccaugauagaaauuaugaaa

SEQ ID NO: 180576 - RNA, 20 nt, Human herpesvirus 7
ccauaaacggaauacaugcc

SEQ ID NO: 180577 - RNA, 22 nt, Human herpesvirus 7
ccaugaaaaauaaauacuauua

SEQ ID NO: 180578 - RNA, 20 nt, Human herpesvirus 7
ccaugauguuaaagaacaag

SEQ ID NO: 180579 - RNA, 21 nt, Human herpesvirus 7
ccaugauguuaaagaacaaga

SEQ ID NO: 180580 - RNA, 19 nt, Human herpesvirus 7
ccaugcauauuugaacaua

SEQ ID NO: 180581 - RNA, 14 nt, Human herpesvirus 7
ccaguucuaucuca

SEQ ID NO: 180582 - RNA, 23 nt, Human herpesvirus 7
ccaguugaaugaggacugcagua

SEQ ID NO: 180583 - RNA, 14 nt, Human herpesvirus 7
ccaguacuugcauc

SEQ ID NO: 180584 - RNA, 16 nt, Human herpesvirus 7
ccagucucuaaacuuc

SEQ ID NO: 180585 - RNA, 21 nt, Human herpesvirus 7
guauauucuaguuuucuuugu

SEQ ID NO: 180586 - RNA, 11 nt, Human herpesvirus 7
guauaaugcac

SEQ ID NO: 180587 - RNA, 23 nt, Human herpesvirus 7
guauacaaaagacauaacaaaaa

SEQ ID NO: 180588 - RNA, 18 nt, Human herpesvirus 7
guauuuuguuuugcauau

SEQ ID NO: 180589 - RNA, 17 nt, Human herpesvirus 7
gucaaaaaaaauuaaau

SEQ ID NO: 180590 - RNA, 15 nt, Human herpesvirus 7
guauauuugcuguuu

SEQ ID NO: 180591 - RNA, 19 nt, Human herpesvirus 7
guaguuauuuguuccaguu

SEQ ID NO: 180592 - RNA, 16 nt, Human herpesvirus 7
guaguuguagugcugu

SEQ ID NO: 180593 - RNA, 16 nt, Human herpesvirus 7
guacuucuggcuuaag

SEQ ID NO: 180594 - RNA, 15 nt, Human herpesvirus 7
guacuuuugaucaaa

SEQ ID NO: 180595 - RNA, 16 nt, Human herpesvirus 7
guagaaaaugcuguuu

SEQ ID NO: 180596 - RNA, 12 nt, Human herpesvirus 7
guaggugcugca

SEQ ID NO: 180597 - RNA, 12 nt, Human herpesvirus 7
guacgucuugcu

SEQ ID NO: 180598 - RNA, 17 nt, Human herpesvirus 7
guacuccuucuaccucu

SEQ ID NO: 180599 - RNA, 21 nt, Human herpesvirus 7
guaauaauuuaaaauuauuaa

SEQ ID NO: 180600 - RNA, 17 nt, Human herpesvirus 7
guaaucauucaagaaga

SEQ ID NO: 180601 - RNA, 19 nt, Human herpesvirus 7
guaaucuagaacuguuaaa

SEQ ID NO: 180602 - RNA, 13 nt, Human herpesvirus 7
guaaucacauuau

SEQ ID NO: 180603 - RNA, 17 nt, Human herpesvirus 7
guaaucauauaugcauu

SEQ ID NO: 180604 - RNA, 15 nt, Human herpesvirus 7
guaauuagugaaaac

SEQ ID NO: 180605 - RNA, 22 nt, Human herpesvirus 7
guaauuuaugcuuuaacuggaa

SEQ ID NO: 180606 - RNA, 23 nt, Human herpesvirus 7
guaauuuaugcuuuaacuggaau

SEQ ID NO: 180607 - RNA, 23 nt, Human herpesvirus 7
guaccuuagaaucacaacauaua

SEQ ID NO: 180608 - RNA, 19 nt, Human herpesvirus 7
guaacuguuuuucaaaaac

SEQ ID NO: 180609 - RNA, 20 nt, Human herpesvirus 7
guaacuguuuuucaaaaacg

SEQ ID NO: 180610 - RNA, 20 nt, Human herpesvirus 7
guaacuuucaucuguguuau

SEQ ID NO: 180611 - RNA, 21 nt, Human herpesvirus 7
guaagaaacaucuaugugcuc

SEQ ID NO: 180612 - RNA, 13 nt, Human herpesvirus 7
gguugucuguucu

SEQ ID NO: 180613 - RNA, 22 nt, Human herpesvirus 7
guaagaugcagacugcgcuugg

SEQ ID NO: 180614 - RNA, 15 nt, Human herpesvirus 7
gguuuuauuucacau

SEQ ID NO: 180615 - RNA, 21 nt, Human herpesvirus 7
gguuucuaggcuucauuggca

SEQ ID NO: 180616 - RNA, 22 nt, Human herpesvirus 7
guaaaaauaaagacaugaauca

SEQ ID NO: 180617 - RNA, 23 nt, Human herpesvirus 7
gguuguucaaaaguagaggccga

SEQ ID NO: 180618 - RNA, 22 nt, Human herpesvirus 7
gguucggcaacggccauucacc

SEQ ID NO: 180619 - RNA, 19 nt, Human herpesvirus 7
gguugcuuggcugacauac

SEQ ID NO: 180620 - RNA, 15 nt, Human herpesvirus 7
ggggaagaaucaaga

SEQ ID NO: 180621 - RNA, 17 nt, Human herpesvirus 7
gguaaagaaccuaucaa

SEQ ID NO: 180622 - RNA, 20 nt, Human herpesvirus 7
gguaagaaaaaucauuuuua

SEQ ID NO: 180623 - RNA, 19 nt, Human herpesvirus 7
gguaaauccuucguaacau

SEQ ID NO: 180624 - RNA, 16 nt, Human herpesvirus 7
gguacaagguguuccu

SEQ ID NO: 180625 - RNA, 20 nt, Human herpesvirus 7
gguucauauacuucuugccc

SEQ ID NO: 180626 - RNA, 16 nt, Human herpesvirus 7
gguccaauagaaaaca

SEQ ID NO: 180627 - RNA, 16 nt, Human herpesvirus 7
ggucugacuucaauuu

SEQ ID NO: 180628 - RNA, 14 nt, Human herpesvirus 7
ggucuuccacuguu

SEQ ID NO: 180629 - RNA, 22 nt, Human herpesvirus 7
ggcuuaaaauuuuacgaugaca

SEQ ID NO: 180630 - RNA, 23 nt, Human herpesvirus 7
ggcuuagaauauuuauguucaaa

SEQ ID NO: 180631 - RNA, 19 nt, Human herpesvirus 7
gggaagaaacagcugaaaa

SEQ ID NO: 180632 - RNA, 18 nt, Human herpesvirus 7
gggauguucuauucucau

SEQ ID NO: 180633 - RNA, 14 nt, Human herpesvirus 7
gggauucuuugaau

SEQ ID NO: 180634 - RNA, 13 nt, Human herpesvirus 7
ggcugcagcgaga

SEQ ID NO: 180635 - RNA, 13 nt, Human herpesvirus 7
ggcugaugauaau

SEQ ID NO: 180636 - RNA, 23 nt, Human herpesvirus 7
ggauuuauuauuuguuuguucug

SEQ ID NO: 180637 - RNA, 14 nt, Human herpesvirus 7
ggcaaacaguuuua

SEQ ID NO: 180638 - RNA, 17 nt, Human herpesvirus 7
ggauucaaucuacugua

SEQ ID NO: 180639 - RNA, 18 nt, Human herpesvirus 7
ggauucaaucuacuguac

SEQ ID NO: 180640 - RNA, 16 nt, Human herpesvirus 7
ggauguucuauucuca

SEQ ID NO: 180641 - RNA, 15 nt, Human herpesvirus 7
ggauuuucuguaauc

SEQ ID NO: 180642 - RNA, 13 nt, Human herpesvirus 7
ggcauauaugaau

SEQ ID NO: 180643 - RNA, 18 nt, Human herpesvirus 7
ggcauauaugaaucaaau

SEQ ID NO: 180644 - RNA, 14 nt, Human herpesvirus 7
ggcaucaagaaaca

SEQ ID NO: 180645 - RNA, 19 nt, Human herpesvirus 7
ggcauucauugagucuuca

SEQ ID NO: 180646 - RNA, 23 nt, Human herpesvirus 7
ggaguuugaguuucuucuuccac

SEQ ID NO: 180647 - RNA, 23 nt, Human herpesvirus 7
ggaguuuuggguuuaugaugcau

SEQ ID NO: 180648 - RNA, 21 nt, Human herpesvirus 7
ggaagcuuucguaaucauuca

SEQ ID NO: 180649 - RNA, 16 nt, Human herpesvirus 7
ggaagacgccaauaaa

SEQ ID NO: 180650 - RNA, 13 nt, Human herpesvirus 7
ggaagaaacagcu

SEQ ID NO: 180651 - RNA, 14 nt, Human herpesvirus 7
ggaagaaacagcug

SEQ ID NO: 180652 - RNA, 18 nt, Human herpesvirus 7
gcuuuaagugauacugaa

SEQ ID NO: 180653 - RNA, 21 nt, Human herpesvirus 7
gcuuuagaguaugaguuugau

SEQ ID NO: 180654 - RNA, 17 nt, Human herpesvirus 7
gcuuucguaaucauuca

SEQ ID NO: 180655 - RNA, 13 nt, Human herpesvirus 7
ggaacaugagaua

SEQ ID NO: 180656 - RNA, 16 nt, Human herpesvirus 7
ggaaauuuucauagca

SEQ ID NO: 180657 - RNA, 14 nt, Human herpesvirus 7
gcgauguuggcacu

SEQ ID NO: 180658 - RNA, 16 nt, Human herpesvirus 7
gcuagaaaccaaguuu

SEQ ID NO: 180659 - RNA, 12 nt, Human herpesvirus 7
gcuagaagacug

SEQ ID NO: 180660 - RNA, 15 nt, Human herpesvirus 7
gcuagccucauggcu

SEQ ID NO: 180661 - RNA, 16 nt, Human herpesvirus 7
gcuaucugauuuauau

SEQ ID NO: 180662 - RNA, 11 nt, Human herpesvirus 7
gcuaguguuca

SEQ ID NO: 180663 - RNA, 16 nt, Human herpesvirus 7
gcucgauauacaugua

SEQ ID NO: 180664 - RNA, 13 nt, Human herpesvirus 7
gcuaugacuuuga

SEQ ID NO: 180665 - RNA, 21 nt, Human herpesvirus 7
gcuaugcuugaaagaauauaa

SEQ ID NO: 180666 - RNA, 15 nt, Human herpesvirus 7
gcuauguauaaucaa

SEQ ID NO: 180667 - RNA, 19 nt, Human herpesvirus 7
gcuauguauaaucaagucu

SEQ ID NO: 180668 - RNA, 19 nt, Human herpesvirus 7
gcucauuuuguuuugcaau

SEQ ID NO: 180669 - RNA, 17 nt, Human herpesvirus 7
gcucuaaacaaacaaug

SEQ ID NO: 180670 - RNA, 22 nt, Human herpesvirus 7
gcugcauguguacuaaagccaa

SEQ ID NO: 180671 - RNA, 18 nt, Human herpesvirus 7
gcugugagugaacauuug

SEQ ID NO: 180672 - RNA, 15 nt, Human herpesvirus 7
gcugcucagcuagaa

SEQ ID NO: 180673 - RNA, 22 nt, Human herpesvirus 7
gcuuauuuauauauggcaauaa

SEQ ID NO: 180674 - RNA, 22 nt, Human herpesvirus 7
gcuucaaaaauguuuacaaaca

SEQ ID NO: 180675 - RNA, 16 nt, Human herpesvirus 7
gcuuguauauacggaa

SEQ ID NO: 180676 - RNA, 17 nt, Human herpesvirus 7
gcuuguauauacggaau

SEQ ID NO: 180677 - RNA, 13 nt, Human herpesvirus 7
gcuguugguuaug

SEQ ID NO: 180678 - RNA, 23 nt, Human herpesvirus 7
gcuguuugaacaaguagugcuaa

SEQ ID NO: 180679 - RNA, 14 nt, Human herpesvirus 7
gcuguuugucaucg

SEQ ID NO: 180680 - RNA, 21 nt, Human herpesvirus 7
gcuguucagcuccagccaaga

SEQ ID NO: 180681 - RNA, 15 nt, Human herpesvirus 7
gcuuaaaaacaguaa

SEQ ID NO: 180682 - RNA, 15 nt, Human herpesvirus 7
gcuuaaauuuccauc

SEQ ID NO: 180683 - RNA, 18 nt, Human herpesvirus 7
gcuuagacuuaucaccau

SEQ ID NO: 180684 - RNA, 22 nt, Human herpesvirus 7
gcuuaagacaccccaaaaucaa

SEQ ID NO: 180685 - RNA, 17 nt, Human herpesvirus 7
gcuuacucuuucugaca

SEQ ID NO: 180686 - RNA, 17 nt, Human herpesvirus 7
gcccugaauuuuacacc

SEQ ID NO: 180687 - RNA, 17 nt, Human herpesvirus 7
gcccuuguguugucaua

SEQ ID NO: 180688 - RNA, 23 nt, Human herpesvirus 7
gcccuuuuauugguagauuuucu

SEQ ID NO: 180689 - RNA, 20 nt, Human herpesvirus 7
gcagauuuggggucugacuu

SEQ ID NO: 180690 - RNA, 15 nt, Human herpesvirus 7
gcagacuaauuacag

SEQ ID NO: 180691 - RNA, 22 nt, Human herpesvirus 7
gcagagauuaccugcauacuuu

SEQ ID NO: 180692 - RNA, 19 nt, Human herpesvirus 7
gcagacuuucgugucacag

SEQ ID NO: 180693 - RNA, 18 nt, Human herpesvirus 7
gccucccgggcacacuuu

SEQ ID NO: 180694 - RNA, 16 nt, Human herpesvirus 7
gccucugccucuuggc

SEQ ID NO: 180695 - RNA, 13 nt, Human herpesvirus 7
gccguuuaugaac

SEQ ID NO: 180696 - RNA, 13 nt, Human herpesvirus 7
gccgggugcugcg

SEQ ID NO: 180697 - RNA, 19 nt, Human herpesvirus 7
gccuucuugccuacacuuu

SEQ ID NO: 180698 - RNA, 19 nt, Human herpesvirus 7
gccuugccaaaagcuugaa

SEQ ID NO: 180699 - RNA, 20 nt, Human herpesvirus 7
gccuugccaaaagcuugaaa

SEQ ID NO: 180700 - RNA, 13 nt, Human herpesvirus 7
gccuucauuuaca

SEQ ID NO: 180701 - RNA, 22 nt, Human herpesvirus 7
gccuuuuuucuuccuagcauua

SEQ ID NO: 180702 - RNA, 18 nt, Human herpesvirus 7
gcgaaacagcgugucaaa

SEQ ID NO: 180703 - RNA, 15 nt, Human herpesvirus 7
gcgaaagccacuguu

SEQ ID NO: 180704 - RNA, 18 nt, Human herpesvirus 7
gcgaaagccacuguugau

SEQ ID NO: 180705 - RNA, 17 nt, Human herpesvirus 7
gccuugcuagcaccgaa

SEQ ID NO: 180706 - RNA, 12 nt, Human herpesvirus 7
gccuuguuugcu

SEQ ID NO: 180707 - RNA, 15 nt, Human herpesvirus 7
gccuuuaaaauuuca

SEQ ID NO: 180708 - RNA, 15 nt, Human herpesvirus 7
gcgaauuugugcugu

SEQ ID NO: 180709 - RNA, 19 nt, Human herpesvirus 7
gcgacauuauaaaagaugg

SEQ ID NO: 180710 - RNA, 14 nt, Human herpesvirus 7
guuugucaucguaa

SEQ ID NO: 180711 - RNA, 15 nt, Human herpesvirus 7
guuuuaaauagugaa

SEQ ID NO: 180712 - RNA, 20 nt, Human herpesvirus 7
guuuuaaauagugaaucaua

SEQ ID NO: 180713 - RNA, 20 nt, Human herpesvirus 7
guuuguaaggccaaagguaa

SEQ ID NO: 180714 - RNA, 16 nt, Human herpesvirus 7
guuuuaucuaacacug

SEQ ID NO: 180715 - RNA, 21 nt, Human herpesvirus 7
guuuuaucuaacacugcaagc

SEQ ID NO: 180716 - RNA, 21 nt, Human herpesvirus 7
guuuuagggaauguaauuccg

SEQ ID NO: 180717 - RNA, 13 nt, Human herpesvirus 7
guuuuaauuugga

SEQ ID NO: 180718 - RNA, 16 nt, Human herpesvirus 7
guuuucugagugcuaa

SEQ ID NO: 180719 - RNA, 19 nt, Human herpesvirus 7
guuuucaaauuauuuccag

SEQ ID NO: 180720 - RNA, 18 nt, Human herpesvirus 7
guuuucuuagaugcaucc

SEQ ID NO: 180721 - RNA, 11 nt, Human herpesvirus 7
guuuucuuaua

SEQ ID NO: 180722 - RNA, 18 nt, Human herpesvirus 7
guuuugcaauaugcucac

SEQ ID NO: 180723 - RNA, 14 nt, Human herpesvirus 7
guuuugcuauucac

SEQ ID NO: 180724 - RNA, 20 nt, Human herpesvirus 7
guuuugaaaagucauuauuu

SEQ ID NO: 180725 - RNA, 15 nt, Human herpesvirus 7
uaaaaagcccaugaa

SEQ ID NO: 180726 - RNA, 21 nt, Human herpesvirus 7
uaaaaagcccaugaacacugc

SEQ ID NO: 180727 - RNA, 12 nt, Human herpesvirus 7
guuucauuuaaa

SEQ ID NO: 180728 - RNA, 17 nt, Human herpesvirus 7
guuuccauaaauaaaaa

SEQ ID NO: 180729 - RNA, 19 nt, Human herpesvirus 7
guuuccauaaauaaaaaca

SEQ ID NO: 180730 - RNA, 22 nt, Human herpesvirus 7
guuucguguucgauaguaauca

SEQ ID NO: 180731 - RNA, 13 nt, Human herpesvirus 7
guuucuacauguu

SEQ ID NO: 180732 - RNA, 13 nt, Human herpesvirus 7
guuucuagcaaaa

SEQ ID NO: 180733 - RNA, 23 nt, Human herpesvirus 7
guuugaucgaggaagcuuucgua

SEQ ID NO: 180734 - RNA, 20 nt, Human herpesvirus 7
guuuggcaacaaacaaauaa

SEQ ID NO: 180735 - RNA, 13 nt, Human herpesvirus 7
guuuccuugccag

SEQ ID NO: 180736 - RNA, 19 nt, Human herpesvirus 7
guuucaauaugcaugcaau

SEQ ID NO: 180737 - RNA, 14 nt, Human herpesvirus 7
guuuaugaugcauu

SEQ ID NO: 180738 - RNA, 16 nt, Human herpesvirus 7
guuuaugaacaagguu

SEQ ID NO: 180739 - RNA, 16 nt, Human herpesvirus 7
guuuacuuauguguua

SEQ ID NO: 180740 - RNA, 22 nt, Human herpesvirus 7
guuuauacgaaaauauguugcu

SEQ ID NO: 180741 - RNA, 20 nt, Human herpesvirus 7
guuuaaaacauuuacaaaaa

SEQ ID NO: 180742 - RNA, 22 nt, Human herpesvirus 7
guuguguuuuaucuaccaucaa

SEQ ID NO: 180743 - RNA, 19 nt, Human herpesvirus 7
guuguuaagaaucuauuua

SEQ ID NO: 180744 - RNA, 23 nt, Human herpesvirus 7
guugacgggaaaaaggauuugaa

SEQ ID NO: 180745 - RNA, 22 nt, Human herpesvirus 7
guugcaaauguuccacgaucau

SEQ ID NO: 180746 - RNA, 12 nt, Human herpesvirus 7
guugcucauguu

SEQ ID NO: 180747 - RNA, 15 nt, Human herpesvirus 7
uaaaugacugucagc

SEQ ID NO: 180748 - RNA, 20 nt, Human herpesvirus 7
uaaaugauuuuaaauuuacu

SEQ ID NO: 180749 - RNA, 14 nt, Human herpesvirus 7
uaaaucauaccaua

SEQ ID NO: 180750 - RNA, 16 nt, Human herpesvirus 7
uaaaucauaccauaaa

SEQ ID NO: 180751 - RNA, 14 nt, Human herpesvirus 7
uaaaucauguuuaa

SEQ ID NO: 180752 - RNA, 23 nt, Human herpesvirus 7
uaaacccagagcuaaaacaugga

SEQ ID NO: 180753 - RNA, 13 nt, Human herpesvirus 7
uaaacauuucaaa

SEQ ID NO: 180754 - RNA, 18 nt, Human herpesvirus 7
uaaacauuucaaaaucag

SEQ ID NO: 180755 - RNA, 18 nt, Human herpesvirus 7
uaaauaugacuuguugaa

SEQ ID NO: 180756 - RNA, 21 nt, Human herpesvirus 7
uaaauaugaugaaacuuccaa

SEQ ID NO: 180757 - RNA, 17 nt, Human herpesvirus 7
uaaacauguugaaagaa

SEQ ID NO: 180758 - RNA, 18 nt, Human herpesvirus 7
uaaacauuuuugaagcuu

SEQ ID NO: 180759 - RNA, 14 nt, Human herpesvirus 7
uaaacaugauuuau

SEQ ID NO: 180760 - RNA, 18 nt, Human herpesvirus 7
uaaacacuugcuagcugu

SEQ ID NO: 180761 - RNA, 20 nt, Human herpesvirus 7
uaaacacuugcuagcuguga

SEQ ID NO: 180762 - RNA, 21 nt, Human herpesvirus 7
uaaacacuugcuagcugugau

SEQ ID NO: 180763 - RNA, 22 nt, Human herpesvirus 7
uaaacacuugcuagcugugaua

SEQ ID NO: 180764 - RNA, 18 nt, Human herpesvirus 7
uaaacagcguucaaucaa

SEQ ID NO: 180765 - RNA, 19 nt, Human herpesvirus 7
uaaacagcguucaaucaaa

SEQ ID NO: 180766 - RNA, 17 nt, Human herpesvirus 7
uaaaauuuucuuagcuu

SEQ ID NO: 180767 - RNA, 18 nt, Human herpesvirus 7
uaaaauuuucuuagcuuu

SEQ ID NO: 180768 - RNA, 14 nt, Human herpesvirus 7
uaaacaaacaauga

SEQ ID NO: 180769 - RNA, 20 nt, Human herpesvirus 7
uaaacaaucuggacauuuca

SEQ ID NO: 180770 - RNA, 14 nt, Human herpesvirus 7
uaaaacgugugaaa

SEQ ID NO: 180771 - RNA, 12 nt, Human herpesvirus 7
uaaaacuuugaa

SEQ ID NO: 180772 - RNA, 22 nt, Human herpesvirus 7
uaaaacaagacagaaaugaauc

SEQ ID NO: 180773 - RNA, 11 nt, Human herpesvirus 7
uaaaacaaacu

SEQ ID NO: 180774 - RNA, 16 nt, Human herpesvirus 7
uaaaacaaacuauguc

SEQ ID NO: 180775 - RNA, 14 nt, Human herpesvirus 7
uaaaaaucucagcu

SEQ ID NO: 180776 - RNA, 15 nt, Human herpesvirus 7
uaaaacuacauuuaa

SEQ ID NO: 180777 - RNA, 15 nt, Human herpesvirus 7
uaaaacucaauguaa

SEQ ID NO: 180778 - RNA, 13 nt, Human herpesvirus 7
uaaaacaguagaa

SEQ ID NO: 180779 - RNA, 23 nt, Human herpesvirus 7
uaaaugugucuuacaacuagaaa

SEQ ID NO: 180780 - RNA, 16 nt, Human herpesvirus 7
uaaaugugucuuccau

SEQ ID NO: 180781 - RNA, 18 nt, Human herpesvirus 7
uaaaugugucuuccauau

SEQ ID NO: 180782 - RNA, 19 nt, Human herpesvirus 7
uaaaugguuuuauuucaca

SEQ ID NO: 180783 - RNA, 19 nt, Human herpesvirus 7
uaacaaauucaaccacaga

SEQ ID NO: 180784 - RNA, 21 nt, Human herpesvirus 7
uaacaaauucaaccacagaca

SEQ ID NO: 180785 - RNA, 17 nt, Human herpesvirus 7
uaaauuuaaagauugcu

SEQ ID NO: 180786 - RNA, 18 nt, Human herpesvirus 7
uaacaaaaaaauaccucu

SEQ ID NO: 180787 - RNA, 15 nt, Human herpesvirus 7
uaaauuugcuugcuu

SEQ ID NO: 180788 - RNA, 23 nt, Human herpesvirus 7
uaaauuuugaauguuuacaugua

SEQ ID NO: 180789 - RNA, 19 nt, Human herpesvirus 7
uaacaaaauuguaaguaaa

SEQ ID NO: 180790 - RNA, 20 nt, Human herpesvirus 7
uaacaaacaauaaauuuuga

SEQ ID NO: 180791 - RNA, 19 nt, Human herpesvirus 7
uaacuauaauagccuuuca

SEQ ID NO: 180792 - RNA, 11 nt, Human herpesvirus 7
uaacuaugaac

SEQ ID NO: 180793 - RNA, 16 nt, Human herpesvirus 7
uaacuaugaacuggca

SEQ ID NO: 180794 - RNA, 18 nt, Human herpesvirus 7
uaacuaugaacuggcaca

SEQ ID NO: 180795 - RNA, 23 nt, Human herpesvirus 7
uaacuaugaacuggcacauuaua

SEQ ID NO: 180796 - RNA, 13 nt, Human herpesvirus 7
uaacucaaaagac

SEQ ID NO: 180797 - RNA, 19 nt, Human herpesvirus 7
uaacaacagcagcugcuaa

SEQ ID NO: 180798 - RNA, 20 nt, Human herpesvirus 7
uaacaauauuuaaaguagcu

SEQ ID NO: 180799 - RNA, 13 nt, Human herpesvirus 7
uaacaaucuuaca

SEQ ID NO: 180800 - RNA, 17 nt, Human herpesvirus 7
uaacaaucuuacaaaaa

SEQ ID NO: 180801 - RNA, 14 nt, Human herpesvirus 7
uaacaaguauguca

SEQ ID NO: 180802 - RNA, 15 nt, Human herpesvirus 7
uaacaaguaugucag

SEQ ID NO: 180803 - RNA, 21 nt, Human herpesvirus 7
uaacacguagaaaaaaacaau

SEQ ID NO: 180804 - RNA, 12 nt, Human herpesvirus 7
guuccacacagg

SEQ ID NO: 180805 - RNA, 19 nt, Human herpesvirus 7
guucauauacuucuugccc

SEQ ID NO: 180806 - RNA, 19 nt, Human herpesvirus 7
guucagauugaaauuccau

SEQ ID NO: 180807 - RNA, 18 nt, Human herpesvirus 7
guucagcgugacagagaa

SEQ ID NO: 180808 - RNA, 14 nt, Human herpesvirus 7
guucugaaacaguc

SEQ ID NO: 180809 - RNA, 22 nt, Human herpesvirus 7
guucuugcuggcucaagcacaa

SEQ ID NO: 180810 - RNA, 15 nt, Human herpesvirus 7
guucuuuaauaucau

SEQ ID NO: 180811 - RNA, 20 nt, Human herpesvirus 7
guugaauucguuaagcaccg

SEQ ID NO: 180812 - RNA, 18 nt, Human herpesvirus 7
guugaaacauagcuagaa

SEQ ID NO: 180813 - RNA, 17 nt, Human herpesvirus 7
guuccuuauauuaaaaa

SEQ ID NO: 180814 - RNA, 23 nt, Human herpesvirus 7
guucuaauuuuggcgaaacaaua

SEQ ID NO: 180815 - RNA, 22 nt, Human herpesvirus 7
guuaauguaguuguagugcugu

SEQ ID NO: 180816 - RNA, 17 nt, Human herpesvirus 7
guuaaugucucuguucc

SEQ ID NO: 180817 - RNA, 22 nt, Human herpesvirus 7
guuacacugauuucuacaauau

SEQ ID NO: 180818 - RNA, 16 nt, Human herpesvirus 7
guuaacauauguugau

SEQ ID NO: 180819 - RNA, 14 nt, Human herpesvirus 7
guuaacaaucuuac

SEQ ID NO: 180820 - RNA, 19 nt, Human herpesvirus 7
guuaacaaucuuacaaaaa

SEQ ID NO: 180821 - RNA, 17 nt, Human herpesvirus 7
guuaaaaaaaugaauaa

SEQ ID NO: 180822 - RNA, 19 nt, Human herpesvirus 7
guuaaaacuuggauaacca

SEQ ID NO: 180823 - RNA, 19 nt, Human herpesvirus 7
guuaaagacggaauuugua

SEQ ID NO: 180824 - RNA, 21 nt, Human herpesvirus 7
guguuguaauaauucauuugu

SEQ ID NO: 180825 - RNA, 15 nt, Human herpesvirus 7
guuacggguggcacu

SEQ ID NO: 180826 - RNA, 17 nt, Human herpesvirus 7
guuacguguucauuuau

SEQ ID NO: 180827 - RNA, 19 nt, Human herpesvirus 7
guuacuauuugacugggua

SEQ ID NO: 180828 - RNA, 16 nt, Human herpesvirus 7
guuaggccaguucuau

SEQ ID NO: 180829 - RNA, 21 nt, Human herpesvirus 7
guuaggccaguucuaucucaa

SEQ ID NO: 180830 - RNA, 18 nt, Human herpesvirus 7
guuaguugggcaaacagu

SEQ ID NO: 180831 - RNA, 19 nt, Human herpesvirus 7
guuaguugggcaaacaguu

SEQ ID NO: 180832 - RNA, 23 nt, Human herpesvirus 7
guuauuucuuauuggagauguca

SEQ ID NO: 180833 - RNA, 23 nt, Human herpesvirus 7
guuauuccaucugguaaugucau

SEQ ID NO: 180834 - RNA, 21 nt, Human herpesvirus 7
guuaucauacguuuacaguuu

SEQ ID NO: 180835 - RNA, 17 nt, Human herpesvirus 7
gucccaagagacuccaa

SEQ ID NO: 180836 - RNA, 17 nt, Human herpesvirus 7
gucaaucugugaacuga

SEQ ID NO: 180837 - RNA, 16 nt, Human herpesvirus 7
gucaacuaaaauauau

SEQ ID NO: 180838 - RNA, 21 nt, Human herpesvirus 7
gucaacaaauccacucuggca

SEQ ID NO: 180839 - RNA, 16 nt, Human herpesvirus 7
gucaaauguuccuuau

SEQ ID NO: 180840 - RNA, 21 nt, Human herpesvirus 7
guggaauccuaugacugagaa

SEQ ID NO: 180841 - RNA, 14 nt, Human herpesvirus 7
guggagagauucaa

SEQ ID NO: 180842 - RNA, 15 nt, Human herpesvirus 7
guguacuaaagccaa

SEQ ID NO: 180843 - RNA, 14 nt, Human herpesvirus 7
guguacuacauauu

SEQ ID NO: 180844 - RNA, 16 nt, Human herpesvirus 7
guggcaguacuacuaa

SEQ ID NO: 180845 - RNA, 16 nt, Human herpesvirus 7
guguuauuguaucuau

SEQ ID NO: 180846 - RNA, 13 nt, Human herpesvirus 7
guguucauuauca

SEQ ID NO: 180847 - RNA, 22 nt, Human herpesvirus 7
guguucugguuucuguugacua

SEQ ID NO: 180848 - RNA, 16 nt, Human herpesvirus 7
guguucuuuaaccaga

SEQ ID NO: 180849 - RNA, 15 nt, Human herpesvirus 7
gugucuuguguucaa

SEQ ID NO: 180850 - RNA, 18 nt, Human herpesvirus 7
gugucuuuuaaugaucuc

SEQ ID NO: 180851 - RNA, 15 nt, Human herpesvirus 7
gugucuagcuuuaua

SEQ ID NO: 180852 - RNA, 12 nt, Human herpesvirus 7
gugugcaaugau

SEQ ID NO: 180853 - RNA, 20 nt, Human herpesvirus 7
guguggagggauaugaggaa

SEQ ID NO: 180854 - RNA, 14 nt, Human herpesvirus 7
uauaucaucaucuu

SEQ ID NO: 180855 - RNA, 14 nt, Human herpesvirus 7
uauauccaauaaug

SEQ ID NO: 180856 - RNA, 19 nt, Human herpesvirus 7
uauauccaauaaugcauca

SEQ ID NO: 180857 - RNA, 18 nt, Human herpesvirus 7
uauaucuauuacagucua

SEQ ID NO: 180858 - RNA, 20 nt, Human herpesvirus 7
uauaguuuguauuucauugu

SEQ ID NO: 180859 - RNA, 13 nt, Human herpesvirus 7
uauauaaacacuu

SEQ ID NO: 180860 - RNA, 17 nt, Human herpesvirus 7
uauagucaggaucuccu

SEQ ID NO: 180861 - RNA, 14 nt, Human herpesvirus 7
uauacuucuugccc

SEQ ID NO: 180862 - RNA, 23 nt, Human herpesvirus 7
uauacuuuagcgcugaaauuuca

SEQ ID NO: 180863 - RNA, 21 nt, Human herpesvirus 7
uauagaaaacaucccuuucca

SEQ ID NO: 180864 - RNA, 16 nt, Human herpesvirus 7
uauagccuggaauauu

SEQ ID NO: 180865 - RNA, 21 nt, Human herpesvirus 7
uauaugcaucaaaacauauca

SEQ ID NO: 180866 - RNA, 18 nt, Human herpesvirus 7
uauaucuuuuuauugaau

SEQ ID NO: 180867 - RNA, 13 nt, Human herpesvirus 7
uauaugaaucaaa

SEQ ID NO: 180868 - RNA, 14 nt, Human herpesvirus 7
uauauuaaucuuga

SEQ ID NO: 180869 - RNA, 22 nt, Human herpesvirus 7
uaucccaccgguccuuccucaa

SEQ ID NO: 180870 - RNA, 17 nt, Human herpesvirus 7
uaucauuacucguguug

SEQ ID NO: 180871 - RNA, 15 nt, Human herpesvirus 7
uauccaauaaugcau

SEQ ID NO: 180872 - RNA, 22 nt, Human herpesvirus 7
uauccaguacgucuugcuguuu

SEQ ID NO: 180873 - RNA, 13 nt, Human herpesvirus 7
uauccaucaaaag

SEQ ID NO: 180874 - RNA, 18 nt, Human herpesvirus 7
uauccaucaaaagucuug

SEQ ID NO: 180875 - RNA, 14 nt, Human herpesvirus 7
uagugaaacacauu

SEQ ID NO: 180876 - RNA, 19 nt, Human herpesvirus 7
uagugauagaguacaugug

SEQ ID NO: 180877 - RNA, 20 nt, Human herpesvirus 7
uagugacauucccuuccuaa

SEQ ID NO: 180878 - RNA, 16 nt, Human herpesvirus 7
uagugggaacauaaaa

SEQ ID NO: 180879 - RNA, 21 nt, Human herpesvirus 7
uaguguccccuucgcugcugu

SEQ ID NO: 180880 - RNA, 22 nt, Human herpesvirus 7
uaguguccccuucgcugcugug

SEQ ID NO: 180881 - RNA, 14 nt, Human herpesvirus 7
uauaccuacgacua

SEQ ID NO: 180882 - RNA, 12 nt, Human herpesvirus 7
uauacaauaaug

SEQ ID NO: 180883 - RNA, 18 nt, Human herpesvirus 7
uauacauaauucaauaua

SEQ ID NO: 180884 - RNA, 22 nt, Human herpesvirus 7
uaggaaucgcaguguucauuau

SEQ ID NO: 180885 - RNA, 16 nt, Human herpesvirus 7
uaggauaccaaacaaa

SEQ ID NO: 180886 - RNA, 17 nt, Human herpesvirus 7
uaggauaccaaacaaaa

SEQ ID NO: 180887 - RNA, 19 nt, Human herpesvirus 7
uagcuuucaugauuucaau

SEQ ID NO: 180888 - RNA, 19 nt, Human herpesvirus 7
uagcuuuugaauaaucuca

SEQ ID NO: 180889 - RNA, 21 nt, Human herpesvirus 7
uagcuuuugaauaaucucaau

SEQ ID NO: 180890 - RNA, 21 nt, Human herpesvirus 7
uagcuuaaaaaauacauugaa

SEQ ID NO: 180891 - RNA, 15 nt, Human herpesvirus 7
uagaugcugaaacau

SEQ ID NO: 180892 - RNA, 18 nt, Human herpesvirus 7
uagaugcugaaacaucaa

SEQ ID NO: 180893 - RNA, 15 nt, Human herpesvirus 7
uagaucuugacucag

SEQ ID NO: 180894 - RNA, 17 nt, Human herpesvirus 7
uagaucuugacucagau

SEQ ID NO: 180895 - RNA, 21 nt, Human herpesvirus 7
uagaucuugacucagauucga

SEQ ID NO: 180896 - RNA, 16 nt, Human herpesvirus 7
uagauauuuugacaau

SEQ ID NO: 180897 - RNA, 19 nt, Human herpesvirus 7
uagauauuuugacaaucuu

SEQ ID NO: 180898 - RNA, 22 nt, Human herpesvirus 7
uagaugcagaaaaauccaaaau

SEQ ID NO: 180899 - RNA, 18 nt, Human herpesvirus 7
uagaugcauccaaagaaa

SEQ ID NO: 180900 - RNA, 14 nt, Human herpesvirus 7
uagaugcaugcuaa

SEQ ID NO: 180901 - RNA, 16 nt, Human herpesvirus 7
uagaugcgaaagccac

SEQ ID NO: 180902 - RNA, 20 nt, Human herpesvirus 7
uagaugcgaaagccacuguu

SEQ ID NO: 180903 - RNA, 22 nt, Human herpesvirus 7
uagaugcgaaagccacuguuga

SEQ ID NO: 180904 - RNA, 19 nt, Human herpesvirus 7
uagagauuacauccugcua

SEQ ID NO: 180905 - RNA, 19 nt, Human herpesvirus 7
uagaggccgaaaaucuagc

SEQ ID NO: 180906 - RNA, 14 nt, Human herpesvirus 7
uagaguacaugugu

SEQ ID NO: 180907 - RNA, 21 nt, Human herpesvirus 7
uagaguaucuccgugacaaag

SEQ ID NO: 180908 - RNA, 14 nt, Human herpesvirus 7
uagauugacuauga

SEQ ID NO: 180909 - RNA, 23 nt, Human herpesvirus 7
uagcagaucucgaacuucuuucu

SEQ ID NO: 180910 - RNA, 19 nt, Human herpesvirus 7
uagcuaaugcuuugcugca

SEQ ID NO: 180911 - RNA, 22 nt, Human herpesvirus 7
uagcucuaaacaaacaaugagc

SEQ ID NO: 180912 - RNA, 14 nt, Human herpesvirus 7
uagaagaugacuca

SEQ ID NO: 180913 - RNA, 14 nt, Human herpesvirus 7
uagaaucacaacau

SEQ ID NO: 180914 - RNA, 17 nt, Human herpesvirus 7
uagaaucacaacauaua

SEQ ID NO: 180915 - RNA, 21 nt, Human herpesvirus 7
uagaauggcaccccugccagu

SEQ ID NO: 180916 - RNA, 18 nt, Human herpesvirus 7
uagacaaauuaaacaauc

SEQ ID NO: 180917 - RNA, 20 nt, Human herpesvirus 7
uagacaaauuaaacaaucug

SEQ ID NO: 180918 - RNA, 21 nt, Human herpesvirus 7
uagacaaauuaaacaaucugg

SEQ ID NO: 180919 - RNA, 19 nt, Human herpesvirus 7
uagagacuggcagaguuac

SEQ ID NO: 180920 - RNA, 22 nt, Human herpesvirus 7
uagacgaggccaaucugcacau

SEQ ID NO: 180921 - RNA, 21 nt, Human herpesvirus 7
uagacgcuuugagucucagag

SEQ ID NO: 180922 - RNA, 19 nt, Human herpesvirus 7
uagaccuaucaaauuuauc

SEQ ID NO: 180923 - RNA, 20 nt, Human herpesvirus 7
uagaaaacaucccuuuccaa

SEQ ID NO: 180924 - RNA, 21 nt, Human herpesvirus 7
uagaaacaaucccagaaauuu

SEQ ID NO: 180925 - RNA, 14 nt, Human herpesvirus 7
uagaaacaucuguu

SEQ ID NO: 180926 - RNA, 17 nt, Human herpesvirus 7
uagaaaaacgcuaacca

SEQ ID NO: 180927 - RNA, 14 nt, Human herpesvirus 7
uacuuguaugcuau

SEQ ID NO: 180928 - RNA, 20 nt, Human herpesvirus 7
uacuuuacguauaucgaucu

SEQ ID NO: 180929 - RNA, 14 nt, Human herpesvirus 7
uagaaggaaaccaa

SEQ ID NO: 180930 - RNA, 18 nt, Human herpesvirus 7
uagaaauuguuaccuaaa

SEQ ID NO: 180931 - RNA, 22 nt, Human herpesvirus 7
uagaacaaguagaaaaugcugu

SEQ ID NO: 180932 - RNA, 13 nt, Human herpesvirus 7
uagaaauuaugaa

SEQ ID NO: 180933 - RNA, 19 nt, Human herpesvirus 7
uacauccuuaaauuuuaca

SEQ ID NO: 180934 - RNA, 16 nt, Human herpesvirus 7
uacauagaaaucuuua

SEQ ID NO: 180935 - RNA, 17 nt, Human herpesvirus 7
uacauaacucuaucucc

SEQ ID NO: 180936 - RNA, 13 nt, Human herpesvirus 7
uacauaauucaau

SEQ ID NO: 180937 - RNA, 16 nt, Human herpesvirus 7
uacaugaucuuguaau

SEQ ID NO: 180938 - RNA, 17 nt, Human herpesvirus 7
uacaugaauuaucuaga

SEQ ID NO: 180939 - RNA, 23 nt, Human herpesvirus 7
uacaugccggacaguuugcaaca

SEQ ID NO: 180940 - RNA, 16 nt, Human herpesvirus 7
uacauggggcauuaau

SEQ ID NO: 180941 - RNA, 21 nt, Human herpesvirus 7
uacauggggcauuaauucuuu

SEQ ID NO: 180942 - RNA, 21 nt, Human herpesvirus 7
uacauguaacuguuuuucaaa

SEQ ID NO: 180943 - RNA, 21 nt, Human herpesvirus 7
uacauguaauucgcuuaccuu

SEQ ID NO: 180944 - RNA, 14 nt, Human herpesvirus 7
uaccgguacauuua

SEQ ID NO: 180945 - RNA, 14 nt, Human herpesvirus 7
uacauuacuggaug

SEQ ID NO: 180946 - RNA, 23 nt, Human herpesvirus 7
uacauucgcaaggaauaugaaga

SEQ ID NO: 180947 - RNA, 20 nt, Human herpesvirus 7
uaccgucuuuugauuuugcc

SEQ ID NO: 180948 - RNA, 14 nt, Human herpesvirus 7
uaccuuagaaucac

SEQ ID NO: 180949 - RNA, 22 nt, Human herpesvirus 7
uaccuuagaaucacaacauaua

SEQ ID NO: 180950 - RNA, 16 nt, Human herpesvirus 7
uacuguaaucugacuu

SEQ ID NO: 180951 - RNA, 17 nt, Human herpesvirus 7
uacuguaauuucucaaa

SEQ ID NO: 180952 - RNA, 18 nt, Human herpesvirus 7
uacuguugcuaauuaccg

SEQ ID NO: 180953 - RNA, 13 nt, Human herpesvirus 7
uacuggauguaua

SEQ ID NO: 180954 - RNA, 14 nt, Human herpesvirus 7
uacugcucaucaaa

SEQ ID NO: 180955 - RNA, 19 nt, Human herpesvirus 7
uacuuauguguuacaugau

SEQ ID NO: 180956 - RNA, 18 nt, Human herpesvirus 7
uacuucuuugacaaaaau

SEQ ID NO: 180957 - RNA, 19 nt, Human herpesvirus 7
uacuuaaauauuuuacaua

SEQ ID NO: 180958 - RNA, 20 nt, Human herpesvirus 7
uacgugcuuagacuuaucac

SEQ ID NO: 180959 - RNA, 20 nt, Human herpesvirus 7
uacgugagcacggcacacaa

SEQ ID NO: 180960 - RNA, 21 nt, Human herpesvirus 7
uacgugaugccauaauuucag

SEQ ID NO: 180961 - RNA, 23 nt, Human herpesvirus 7
uacguuaguugcagcugugauau

SEQ ID NO: 180962 - RNA, 17 nt, Human herpesvirus 7
uacguucugaaacaguc

SEQ ID NO: 180963 - RNA, 12 nt, Human herpesvirus 7
uacuaaagccaa

SEQ ID NO: 180964 - RNA, 13 nt, Human herpesvirus 7
uacuaaagccaau

SEQ ID NO: 180965 - RNA, 15 nt, Human herpesvirus 7
uacuagcagaucucg

SEQ ID NO: 180966 - RNA, 13 nt, Human herpesvirus 7
uacuacucagaag

SEQ ID NO: 180967 - RNA, 22 nt, Human herpesvirus 7
uacuacucagaagacauauuag

SEQ ID NO: 180968 - RNA, 16 nt, Human herpesvirus 7
uaauucaaucaccaaa

SEQ ID NO: 180969 - RNA, 18 nt, Human herpesvirus 7
uaauucaaucaccaaaga

SEQ ID NO: 180970 - RNA, 15 nt, Human herpesvirus 7
uaaggcgaaaaacac

SEQ ID NO: 180971 - RNA, 20 nt, Human herpesvirus 7
uaaggaaaaccuacuguuaa

SEQ ID NO: 180972 - RNA, 18 nt, Human herpesvirus 7
uaauugccauuguguuaa

SEQ ID NO: 180973 - RNA, 18 nt, Human herpesvirus 7
uaauuuacaaaacaaaga

SEQ ID NO: 180974 - RNA, 17 nt, Human herpesvirus 7
uaauuucuauaaucacg

SEQ ID NO: 180975 - RNA, 19 nt, Human herpesvirus 7
uaauuucucaaaucaaagu

SEQ ID NO: 180976 - RNA, 23 nt, Human herpesvirus 7
uaacuuacuguuuacacauuaua

SEQ ID NO: 180977 - RNA, 16 nt, Human herpesvirus 7
uaacuuucaucugugu

SEQ ID NO: 180978 - RNA, 12 nt, Human herpesvirus 7
uaacucugccag

SEQ ID NO: 180979 - RNA, 19 nt, Human herpesvirus 7
uaacucugccagucucuaa

SEQ ID NO: 180980 - RNA, 13 nt, Human herpesvirus 7
uaacucauaauua

SEQ ID NO: 180981 - RNA, 16 nt, Human herpesvirus 7
uaacugguaucaugaa

SEQ ID NO: 180982 - RNA, 17 nt, Human herpesvirus 7
uaagccucuaagagcuu

SEQ ID NO: 180983 - RNA, 21 nt, Human herpesvirus 7
uaagcaccgaagcagggaaaa

SEQ ID NO: 180984 - RNA, 21 nt, Human herpesvirus 7
uaagcagcuugaugaaucaaa

SEQ ID NO: 180985 - RNA, 20 nt, Human herpesvirus 7
uaagcaguuauaugaaauuu

SEQ ID NO: 180986 - RNA, 13 nt, Human herpesvirus 7
uaagcucaaaaag

SEQ ID NO: 180987 - RNA, 17 nt, Human herpesvirus 7
uacaaaagacauaacaa

SEQ ID NO: 180988 - RNA, 16 nt, Human herpesvirus 7
uacaaguccuuugaua

SEQ ID NO: 180989 - RNA, 15 nt, Human herpesvirus 7
uacaaaaaaaagcuu

SEQ ID NO: 180990 - RNA, 21 nt, Human herpesvirus 7
uaauuuuggcgaaacaauaca

SEQ ID NO: 180991 - RNA, 18 nt, Human herpesvirus 7
uaauuuuguucuaucuag

SEQ ID NO: 180992 - RNA, 20 nt, Human herpesvirus 7
uaauuuuguucuaucuagga

SEQ ID NO: 180993 - RNA, 13 nt, Human herpesvirus 7
uaauuuguucaau

SEQ ID NO: 180994 - RNA, 14 nt, Human herpesvirus 7
uaauuuguucaauc

SEQ ID NO: 180995 - RNA, 20 nt, Human herpesvirus 7
uacacaaauugauccugcua

SEQ ID NO: 180996 - RNA, 16 nt, Human herpesvirus 7
uacaguaaauugcaac

SEQ ID NO: 180997 - RNA, 19 nt, Human herpesvirus 7
uacagcguggccuucuugc

SEQ ID NO: 180998 - RNA, 14 nt, Human herpesvirus 7
uacagcucauguaa

SEQ ID NO: 180999 - RNA, 15 nt, Human herpesvirus 7
uacagcuuucauuau

SEQ ID NO: 181000 - RNA, 21 nt, Human herpesvirus 7
uacacaggaauugcugucuau

SEQ ID NO: 181001 - RNA, 20 nt, Human herpesvirus 7
gaacggaauaaacaaugugu

SEQ ID NO: 181002 - RNA, 20 nt, Human herpesvirus 7
gaagaguucuuguuuggaaa

SEQ ID NO: 181003 - RNA, 18 nt, Human herpesvirus 7
gaagauuuguuccaaacu

SEQ ID NO: 181004 - RNA, 19 nt, Human herpesvirus 7
gaagcgcugagaucuucca

SEQ ID NO: 181005 - RNA, 15 nt, Human herpesvirus 7
gaagcuugcuagauu

SEQ ID NO: 181006 - RNA, 18 nt, Human herpesvirus 7
gaagcuugcuagauucua

SEQ ID NO: 181007 - RNA, 19 nt, Human herpesvirus 7
gaaggaugcguguguucaa

SEQ ID NO: 181008 - RNA, 21 nt, Human herpesvirus 7
gaagcuuucguaaucauucaa

SEQ ID NO: 181009 - RNA, 14 nt, Human herpesvirus 7
gaagguugucuguu

SEQ ID NO: 181010 - RNA, 17 nt, Human herpesvirus 7
gaagguugucuguucuc

SEQ ID NO: 181011 - RNA, 14 nt, Human herpesvirus 7
gaaggcugcuuuuu

SEQ ID NO: 181012 - RNA, 14 nt, Human herpesvirus 7
gaaucugaagaaga

SEQ ID NO: 181013 - RNA, 16 nt, Human herpesvirus 7
gaaucucauaaucaua

SEQ ID NO: 181014 - RNA, 21 nt, Human herpesvirus 7
gaaucuuugacuguaucucca

SEQ ID NO: 181015 - RNA, 20 nt, Human herpesvirus 7
gaaucuuuuuugaacacuuu

SEQ ID NO: 181016 - RNA, 23 nt, Human herpesvirus 7
gaauauguuaucauuuaucaggu

SEQ ID NO: 181017 - RNA, 20 nt, Human herpesvirus 7
gaaucauagcaggaagcaca

SEQ ID NO: 181018 - RNA, 21 nt, Human herpesvirus 7
gaaucaucuuaaaaguacaaa

SEQ ID NO: 181019 - RNA, 17 nt, Human herpesvirus 7
gaauauuuauguucaaa

SEQ ID NO: 181020 - RNA, 20 nt, Human herpesvirus 7
gaaguacuaaucacaaguua

SEQ ID NO: 181021 - RNA, 22 nt, Human herpesvirus 7
gaauaucgauuuuucacagaaa

SEQ ID NO: 181022 - RNA, 22 nt, Human herpesvirus 7
gaauaucguuguguggcaacau

SEQ ID NO: 181023 - RNA, 18 nt, Human herpesvirus 7
gacaaauauacgaaugcc

SEQ ID NO: 181024 - RNA, 17 nt, Human herpesvirus 7
gaauuuucugcuuuaag

SEQ ID NO: 181025 - RNA, 23 nt, Human herpesvirus 7
gaauuugauuccaucucacuuau

SEQ ID NO: 181026 - RNA, 15 nt, Human herpesvirus 7
gaauuuuaacacugu

SEQ ID NO: 181027 - RNA, 15 nt, Human herpesvirus 7
gaauuuuacaaugca

SEQ ID NO: 181028 - RNA, 16 nt, Human herpesvirus 7
gaaauguaaauuaugu

SEQ ID NO: 181029 - RNA, 23 nt, Human herpesvirus 7
gaaaugucuuugucaugaugaau

SEQ ID NO: 181030 - RNA, 19 nt, Human herpesvirus 7
gaaagcuucaguacuugaa

SEQ ID NO: 181031 - RNA, 17 nt, Human herpesvirus 7
gaaauuaaaaggucauc

SEQ ID NO: 181032 - RNA, 19 nt, Human herpesvirus 7
gaaauuuuacagccuguac

SEQ ID NO: 181033 - RNA, 22 nt, Human herpesvirus 7
gaaauuucuaaauaugaugaaa

SEQ ID NO: 181034 - RNA, 19 nt, Human herpesvirus 7
gaaagaauuuuguaagaaa

SEQ ID NO: 181035 - RNA, 20 nt, Human herpesvirus 7
gaaacuuucuaugauuuguu

SEQ ID NO: 181036 - RNA, 21 nt, Human herpesvirus 7
gaaagacccagaccgcauaac

SEQ ID NO: 181037 - RNA, 18 nt, Human herpesvirus 7
gaaagcguuucacuggga

SEQ ID NO: 181038 - RNA, 14 nt, Human herpesvirus 7
gaaagccacuguug

SEQ ID NO: 181039 - RNA, 17 nt, Human herpesvirus 7
gaaagccacuguugaug

SEQ ID NO: 181040 - RNA, 15 nt, Human herpesvirus 7
gaaagccgcugccuu

SEQ ID NO: 181041 - RNA, 14 nt, Human herpesvirus 7
gaacaauaaauuca

SEQ ID NO: 181042 - RNA, 21 nt, Human herpesvirus 7
gaacaagauagcagaauauca

SEQ ID NO: 181043 - RNA, 16 nt, Human herpesvirus 7
gaacaaguagaaaaug

SEQ ID NO: 181044 - RNA, 16 nt, Human herpesvirus 7
gaacaaguuucaaaaa

SEQ ID NO: 181045 - RNA, 17 nt, Human herpesvirus 7
gaacaaguuucaaaaag

SEQ ID NO: 181046 - RNA, 17 nt, Human herpesvirus 7
gaaaauuuauauuugcu

SEQ ID NO: 181047 - RNA, 22 nt, Human herpesvirus 7
gaaaauuuauauuugcuugcug

SEQ ID NO: 181048 - RNA, 21 nt, Human herpesvirus 7
gaaaauuucuaucacaaccug

SEQ ID NO: 181049 - RNA, 22 nt, Human herpesvirus 7
gaaaauuucuaucacaaccugg

SEQ ID NO: 181050 - RNA, 17 nt, Human herpesvirus 7
gaaaaugucagaguuua

SEQ ID NO: 181051 - RNA, 19 nt, Human herpesvirus 7
gaaaauguuuaaauuacag

SEQ ID NO: 181052 - RNA, 20 nt, Human herpesvirus 7
gaaaauguuuaaauuacagu

SEQ ID NO: 181053 - RNA, 19 nt, Human herpesvirus 7
gaaacacuuacuuguguug

SEQ ID NO: 181054 - RNA, 12 nt, Human herpesvirus 7
gaaacaacacuc

SEQ ID NO: 181055 - RNA, 15 nt, Human herpesvirus 7
gaaaaucucgaacag

SEQ ID NO: 181056 - RNA, 13 nt, Human herpesvirus 7
gaaaaucuuugaa

SEQ ID NO: 181057 - RNA, 21 nt, Human herpesvirus 7
gaaaaucuuugaaucugcuaa

SEQ ID NO: 181058 - RNA, 19 nt, Human herpesvirus 7
gaaaaucacagcauuauug

SEQ ID NO: 181059 - RNA, 16 nt, Human herpesvirus 7
gaaaauauauuaaucu

SEQ ID NO: 181060 - RNA, 15 nt, Human herpesvirus 7
gaaaauauauuccaa

SEQ ID NO: 181061 - RNA, 16 nt, Human herpesvirus 7
gaaaagggagaucaau

SEQ ID NO: 181062 - RNA, 14 nt, Human herpesvirus 7
gaaaauaacuuuaa

SEQ ID NO: 181063 - RNA, 20 nt, Human herpesvirus 7
gaaaauaaacauguugaaag

SEQ ID NO: 181064 - RNA, 14 nt, Human herpesvirus 7
gaaaauaacaggaa

SEQ ID NO: 181065 - RNA, 16 nt, Human herpesvirus 7
gaaaauaacaggaaac

SEQ ID NO: 181066 - RNA, 22 nt, Human herpesvirus 7
gaaacaucaauuuuaaugugcu

SEQ ID NO: 181067 - RNA, 19 nt, Human herpesvirus 7
gaaacagcgugucaaaaaa

SEQ ID NO: 181068 - RNA, 13 nt, Human herpesvirus 7
gaaacauuccuca

SEQ ID NO: 181069 - RNA, 14 nt, Human herpesvirus 7
gaaacauuccucau

SEQ ID NO: 181070 - RNA, 22 nt, Human herpesvirus 7
gaaacguguuuuugaugugcaa

SEQ ID NO: 181071 - RNA, 19 nt, Human herpesvirus 7
gaaaccuucgcaacaauua

SEQ ID NO: 181072 - RNA, 21 nt, Human herpesvirus 7
gaaacggcuguugagucgaau

SEQ ID NO: 181073 - RNA, 17 nt, Human herpesvirus 7
gaaacgucccugugaca

SEQ ID NO: 181074 - RNA, 18 nt, Human herpesvirus 7
gaaacgucccugugacag

SEQ ID NO: 181075 - RNA, 12 nt, Human herpesvirus 7
cugugggugcaa

SEQ ID NO: 181076 - RNA, 16 nt, Human herpesvirus 7
cuguggagugagaaau

SEQ ID NO: 181077 - RNA, 19 nt, Human herpesvirus 7
cuguaugcaagaaagucca

SEQ ID NO: 181078 - RNA, 22 nt, Human herpesvirus 7
cuguaugcaagaaaguccaaag

SEQ ID NO: 181079 - RNA, 17 nt, Human herpesvirus 7
cugucuuggaguauuac

SEQ ID NO: 181080 - RNA, 15 nt, Human herpesvirus 7
cugugauauuuggua

SEQ ID NO: 181081 - RNA, 17 nt, Human herpesvirus 7
cuugccugcaauucuau

SEQ ID NO: 181082 - RNA, 16 nt, Human herpesvirus 7
cuugcgaauacuuguu

SEQ ID NO: 181083 - RNA, 16 nt, Human herpesvirus 7
cuugcuagcugugaua

SEQ ID NO: 181084 - RNA, 19 nt, Human herpesvirus 7
cuugcuguuugucaucgua

SEQ ID NO: 181085 - RNA, 17 nt, Human herpesvirus 7
cuugcuggcucaagcac

SEQ ID NO: 181086 - RNA, 20 nt, Human herpesvirus 7
cuugcuggcucaagcacaau

SEQ ID NO: 181087 - RNA, 12 nt, Human herpesvirus 7
cuugcauacagu

SEQ ID NO: 181088 - RNA, 15 nt, Human herpesvirus 7
cuugcauacaguuua

SEQ ID NO: 181089 - RNA, 14 nt, Human herpesvirus 7
cuugcacuguaaua

SEQ ID NO: 181090 - RNA, 16 nt, Human herpesvirus 7
cuugcagaaacugggg

SEQ ID NO: 181091 - RNA, 11 nt, Human herpesvirus 7
cuugcauuucc

SEQ ID NO: 181092 - RNA, 12 nt, Human herpesvirus 7
cuugcauuuccg

SEQ ID NO: 181093 - RNA, 17 nt, Human herpesvirus 7
cuugcacaaagauccuc

SEQ ID NO: 181094 - RNA, 16 nt, Human herpesvirus 7
cuugucaccuauuuca

SEQ ID NO: 181095 - RNA, 18 nt, Human herpesvirus 7
cuugugaaguuugcugaa

SEQ ID NO: 181096 - RNA, 17 nt, Human herpesvirus 7
cuugcuuguaggcagaa

SEQ ID NO: 181097 - RNA, 21 nt, Human herpesvirus 7
cuuguaccaaucaagccacga

SEQ ID NO: 181098 - RNA, 22 nt, Human herpesvirus 7
cuuuaaauuauuauuaguauug

SEQ ID NO: 181099 - RNA, 23 nt, Human herpesvirus 7
cuuguuuggaaaacaacauacau

SEQ ID NO: 181100 - RNA, 24 nt, Human herpesvirus 7
cuuguugaauuuuuguagugucua

SEQ ID NO: 181101 - RNA, 16 nt, Human herpesvirus 7
cuuguguugucauaca

SEQ ID NO: 181102 - RNA, 14 nt, Human herpesvirus 7
cuuguuacaguguu

SEQ ID NO: 181103 - RNA, 21 nt, Human herpesvirus 7
cuuuauuuaagcuucaaaaau

SEQ ID NO: 181104 - RNA, 14 nt, Human herpesvirus 7
cuuuauuuaauaac

SEQ ID NO: 181105 - RNA, 20 nt, Human herpesvirus 7
cuuuaucgccauuuucuuga

SEQ ID NO: 181106 - RNA, 22 nt, Human herpesvirus 7
cuuuaugugggauuugaaugaa

SEQ ID NO: 181107 - RNA, 22 nt, Human herpesvirus 7
cuuuauagaucgcucaacuuau

SEQ ID NO: 181108 - RNA, 22 nt, Human herpesvirus 7
cuuuagcgcugaaauuucauga

SEQ ID NO: 181109 - RNA, 12 nt, Human herpesvirus 7
cuuuacuuucau

SEQ ID NO: 181110 - RNA, 19 nt, Human herpesvirus 7
cuuuacuuucauagcuuaa

SEQ ID NO: 181111 - RNA, 23 nt, Human herpesvirus 7
cuuuaauuaacacucaaaacaga

SEQ ID NO: 181112 - RNA, 15 nt, Human herpesvirus 7
gaaaaaggauuugaa

SEQ ID NO: 181113 - RNA, 14 nt, Human herpesvirus 7
gaaaaagcaacaaa

SEQ ID NO: 181114 - RNA, 12 nt, Human herpesvirus 7
gaaaacaauuaa

SEQ ID NO: 181115 - RNA, 21 nt, Human herpesvirus 7
gaaaacaauuaagaaucauuu

SEQ ID NO: 181116 - RNA, 17 nt, Human herpesvirus 7
gaaaaauuuuuuacugu

SEQ ID NO: 181117 - RNA, 17 nt, Human herpesvirus 7
gaaaaaugcugcaaugu

SEQ ID NO: 181118 - RNA, 20 nt, Human herpesvirus 7
gaaaagaaaaagcaacaaau

SEQ ID NO: 181119 - RNA, 18 nt, Human herpesvirus 7
gaaaagaaugaacaccgc

SEQ ID NO: 181120 - RNA, 14 nt, Human herpesvirus 7
gaaaacaucccuuu

SEQ ID NO: 181121 - RNA, 22 nt, Human herpesvirus 7
gaaaacaucccuuuccaauaua

SEQ ID NO: 181122 - RNA, 19 nt, Human herpesvirus 7
gaaaacauuagcauugaaa

SEQ ID NO: 181123 - RNA, 17 nt, Human herpesvirus 7
gaaaacggucugagacg

SEQ ID NO: 181124 - RNA, 21 nt, Human herpesvirus 7
gaaaacguuuuuaucugauaa

SEQ ID NO: 181125 - RNA, 13 nt, Human herpesvirus 7
gaaaaaaaaauca

SEQ ID NO: 181126 - RNA, 15 nt, Human herpesvirus 7
gaaaaaaaguacaag

SEQ ID NO: 181127 - RNA, 17 nt, Human herpesvirus 7
gaaaaaaacaaaaucua

SEQ ID NO: 181128 - RNA, 21 nt, Human herpesvirus 7
gaaaaaaacaaaaucuacuuu

SEQ ID NO: 181129 - RNA, 14 nt, Human herpesvirus 7
gaaaaaaacaauga

SEQ ID NO: 181130 - RNA, 14 nt, Human herpesvirus 7
cuuuuuauaauaau

SEQ ID NO: 181131 - RNA, 13 nt, Human herpesvirus 7
cuuuuucugaaaa

SEQ ID NO: 181132 - RNA, 15 nt, Human herpesvirus 7
cuuuuucuguagaca

SEQ ID NO: 181133 - RNA, 18 nt, Human herpesvirus 7
cuuuugagcgcugaaaua

SEQ ID NO: 181134 - RNA, 22 nt, Human herpesvirus 7
cuuuugcgggaaaaaacgucua

SEQ ID NO: 181135 - RNA, 21 nt, Human herpesvirus 7
cuuuuuaaaaaaucuauuaaa

SEQ ID NO: 181136 - RNA, 18 nt, Human herpesvirus 7
cuuuucaggcuaugacuu

SEQ ID NO: 181137 - RNA, 22 nt, Human herpesvirus 7
cuuuucaggcuaugacuuugaa

SEQ ID NO: 181138 - RNA, 18 nt, Human herpesvirus 7
cuuuugaauaaucucaau

SEQ ID NO: 181139 - RNA, 14 nt, Human herpesvirus 7
cuuuuacagaagaa

SEQ ID NO: 181140 - RNA, 19 nt, Human herpesvirus 7
cuuuguuuuuucuugggua

SEQ ID NO: 181141 - RNA, 15 nt, Human herpesvirus 7
cuuuuauaauacugg

SEQ ID NO: 181142 - RNA, 18 nt, Human herpesvirus 7
cuuugcuaaccacugugu

SEQ ID NO: 181143 - RNA, 18 nt, Human herpesvirus 7
cuuuggcagcuagccuau

SEQ ID NO: 181144 - RNA, 17 nt, Human herpesvirus 7
cuuugucugcugguaau

SEQ ID NO: 181145 - RNA, 17 nt, Human herpesvirus 7
cuuugugagaaauggaa

SEQ ID NO: 181146 - RNA, 21 nt, Human herpesvirus 7
cuuuguaaaaaugaauucaac

SEQ ID NO: 181147 - RNA, 23 nt, Human herpesvirus 7
cuuuggugggucacguucuaaaa

SEQ ID NO: 181148 - RNA, 13 nt, Human herpesvirus 7
cuuugucacuuaa

SEQ ID NO: 181149 - RNA, 18 nt, Human herpesvirus 7
cuuugucaugaugaauau

SEQ ID NO: 181150 - RNA, 17 nt, Human herpesvirus 7
cuuucuuauaucugaga

SEQ ID NO: 181151 - RNA, 20 nt, Human herpesvirus 7
cuuucguaaucauucaagaa

SEQ ID NO: 181152 - RNA, 14 nt, Human herpesvirus 7
cuuucauagcuuaa

SEQ ID NO: 181153 - RNA, 18 nt, Human herpesvirus 7
cuuuccaucaucacguca

SEQ ID NO: 181154 - RNA, 19 nt, Human herpesvirus 7
cuuuccaucaucacgucau

SEQ ID NO: 181155 - RNA, 17 nt, Human herpesvirus 7
cuuucaugauuucaaua

SEQ ID NO: 181156 - RNA, 18 nt, Human herpesvirus 7
cuuugaaaucauucugaa

SEQ ID NO: 181157 - RNA, 20 nt, Human herpesvirus 7
cuuugacaaaaauguuaaag

SEQ ID NO: 181158 - RNA, 17 nt, Human herpesvirus 7
cuuugcgccgauuuacu

SEQ ID NO: 181159 - RNA, 17 nt, Human herpesvirus 7
cuuugcgcuguugguua

SEQ ID NO: 181160 - RNA, 12 nt, Human herpesvirus 7
cuuugcaaucau

SEQ ID NO: 181161 - RNA, 14 nt, Human herpesvirus 7
cuuugcaaucauug

SEQ ID NO: 181162 - RNA, 21 nt, Human herpesvirus 7
cuuugcauagauuaaauagca

SEQ ID NO: 181163 - RNA, 19 nt, Human herpesvirus 7
gauacauuuuugcaauaug

SEQ ID NO: 181164 - RNA, 15 nt, Human herpesvirus 7
gauacugaaucugaa

SEQ ID NO: 181165 - RNA, 17 nt, Human herpesvirus 7
gauaauuuacaaaacaa

SEQ ID NO: 181166 - RNA, 12 nt, Human herpesvirus 7
gauacaacuaaa

SEQ ID NO: 181167 - RNA, 19 nt, Human herpesvirus 7
gauacaacuaaaaaucuca

SEQ ID NO: 181168 - RNA, 20 nt, Human herpesvirus 7
gauacaaucgauaaacuuug

SEQ ID NO: 181169 - RNA, 22 nt, Human herpesvirus 7
gauacaaucgauaaacuuuguc

SEQ ID NO: 181170 - RNA, 19 nt, Human herpesvirus 7
gauaacuaugaacuggcac

SEQ ID NO: 181171 - RNA, 22 nt, Human herpesvirus 7
gauaaccaacagauugucuuau

SEQ ID NO: 181172 - RNA, 13 nt, Human herpesvirus 7
gauaagaaaguug

SEQ ID NO: 181173 - RNA, 18 nt, Human herpesvirus 7
gauaagaaaguuguacuc

SEQ ID NO: 181174 - RNA, 19 nt, Human herpesvirus 7
gauaagacugaagacaaaa

SEQ ID NO: 181175 - RNA, 14 nt, Human herpesvirus 7
gaucacuuugcauc

SEQ ID NO: 181176 - RNA, 16 nt, Human herpesvirus 7
gaucaucauugguaag

SEQ ID NO: 181177 - RNA, 21 nt, Human herpesvirus 7
gauccagcaaagacuugcaaa

SEQ ID NO: 181178 - RNA, 20 nt, Human herpesvirus 7
gauccaguacuugcaucgaa

SEQ ID NO: 181179 - RNA, 21 nt, Human herpesvirus 7
gaucacgcuagccucauggcu

SEQ ID NO: 181180 - RNA, 15 nt, Human herpesvirus 7
gauagaguacaugug

SEQ ID NO: 181181 - RNA, 17 nt, Human herpesvirus 7
gauagaguacauguguc

SEQ ID NO: 181182 - RNA, 17 nt, Human herpesvirus 7
gauucgacuucuaaaaa

SEQ ID NO: 181183 - RNA, 16 nt, Human herpesvirus 7
gauguucuauucucau

SEQ ID NO: 181184 - RNA, 21 nt, Human herpesvirus 7
gauguauccaccgauuacugu

SEQ ID NO: 181185 - RNA, 17 nt, Human herpesvirus 7
gauguaauguugcaaau

SEQ ID NO: 181186 - RNA, 15 nt, Human herpesvirus 7
gauggauaacuauga

SEQ ID NO: 181187 - RNA, 22 nt, Human herpesvirus 7
gauggaugccagccuauucaca

SEQ ID NO: 181188 - RNA, 14 nt, Human herpesvirus 7
gaucuggauucaag

SEQ ID NO: 181189 - RNA, 19 nt, Human herpesvirus 7
gaucuuccaauucuuugua

SEQ ID NO: 181190 - RNA, 13 nt, Human herpesvirus 7
gaugaaacuucca

SEQ ID NO: 181191 - RNA, 17 nt, Human herpesvirus 7
gaugaaacuuccaauaa

SEQ ID NO: 181192 - RNA, 19 nt, Human herpesvirus 7
gaugaauuaauucuuucca

SEQ ID NO: 181193 - RNA, 15 nt, Human herpesvirus 7
gaugacaacucaaua

SEQ ID NO: 181194 - RNA, 23 nt, Human herpesvirus 7
gaugacauuuuuaccuccauaug

SEQ ID NO: 181195 - RNA, 14 nt, Human herpesvirus 7
gcaacaaacaaaua

SEQ ID NO: 181196 - RNA, 19 nt, Human herpesvirus 7
gcaacaaauuaaauacuug

SEQ ID NO: 181197 - RNA, 14 nt, Human herpesvirus 7
gcaacaaauuccau

SEQ ID NO: 181198 - RNA, 14 nt, Human herpesvirus 7
gcaaagacuugcaa

SEQ ID NO: 181199 - RNA, 21 nt, Human herpesvirus 7
gcaaagcuuuugcgagaaaau

SEQ ID NO: 181200 - RNA, 21 nt, Human herpesvirus 7
gcaaaucucauaaugucucac

SEQ ID NO: 181201 - RNA, 13 nt, Human herpesvirus 7
gauuuacauuuca

SEQ ID NO: 181202 - RNA, 22 nt, Human herpesvirus 7
gcaaacucacuaaugccgucau

SEQ ID NO: 181203 - RNA, 12 nt, Human herpesvirus 7
gauuuagauuua

SEQ ID NO: 181204 - RNA, 15 nt, Human herpesvirus 7
gauugguagugugca

SEQ ID NO: 181205 - RNA, 14 nt, Human herpesvirus 7
gauuggccagugug

SEQ ID NO: 181206 - RNA, 15 nt, Human herpesvirus 7
gauuuaaaguaagaa

SEQ ID NO: 181207 - RNA, 18 nt, Human herpesvirus 7
gauucuccagaaauuaua

SEQ ID NO: 181208 - RNA, 16 nt, Human herpesvirus 7
gcaaugcaugaugcac

SEQ ID NO: 181209 - RNA, 16 nt, Human herpesvirus 7
gcaauacuaguauuuc

SEQ ID NO: 181210 - RNA, 18 nt, Human herpesvirus 7
gcaauaucccagaauauc

SEQ ID NO: 181211 - RNA, 19 nt, Human herpesvirus 7
gcaauaucccagaauaucg

SEQ ID NO: 181212 - RNA, 22 nt, Human herpesvirus 7
gcaauagauuacgcacaaauuu

SEQ ID NO: 181213 - RNA, 14 nt, Human herpesvirus 7
gcacacauuuuugc

SEQ ID NO: 181214 - RNA, 19 nt, Human herpesvirus 7
gcacacacguuuucuguca

SEQ ID NO: 181215 - RNA, 15 nt, Human herpesvirus 7
gcaccgucauuuaau

SEQ ID NO: 181216 - RNA, 21 nt, Human herpesvirus 7
gaggcuuuuagaaaucuuuca

SEQ ID NO: 181217 - RNA, 17 nt, Human herpesvirus 7
gauaaacuuuuauucag

SEQ ID NO: 181218 - RNA, 15 nt, Human herpesvirus 7
gaguuucuucuucca

SEQ ID NO: 181219 - RNA, 16 nt, Human herpesvirus 7
gaguuucuucuuccac

SEQ ID NO: 181220 - RNA, 14 nt, Human herpesvirus 7
gaguuugauuguau

SEQ ID NO: 181221 - RNA, 16 nt, Human herpesvirus 7
gaguugcacuccuaga

SEQ ID NO: 181222 - RNA, 23 nt, Human herpesvirus 7
gaguuucaaaauuuuauugucua

SEQ ID NO: 181223 - RNA, 21 nt, Human herpesvirus 7
gaggccguacuuguaugcuau

SEQ ID NO: 181224 - RNA, 18 nt, Human herpesvirus 7
gagccggaaagcaaugua

SEQ ID NO: 181225 - RNA, 14 nt, Human herpesvirus 7
gaggaguauguugc

SEQ ID NO: 181226 - RNA, 18 nt, Human herpesvirus 7
gagagcccagucccaaga

SEQ ID NO: 181227 - RNA, 14 nt, Human herpesvirus 7
gacugaagacaaaa

SEQ ID NO: 181228 - RNA, 20 nt, Human herpesvirus 7
gacuuaucaccauaugccaa

SEQ ID NO: 181229 - RNA, 21 nt, Human herpesvirus 7
gacuuaucaccauaugccaau

SEQ ID NO: 181230 - RNA, 16 nt, Human herpesvirus 7
gacugguacaaggugu

SEQ ID NO: 181231 - RNA, 14 nt, Human herpesvirus 7
gacuucgaaaaaga

SEQ ID NO: 181232 - RNA, 22 nt, Human herpesvirus 7
gagaauuucuuuguuugcuauu

SEQ ID NO: 181233 - RNA, 17 nt, Human herpesvirus 7
gagaccgaauauacuuu

SEQ ID NO: 181234 - RNA, 24 nt, Human herpesvirus 7
gagaccgcacaggcugcaucuuuu

SEQ ID NO: 181235 - RNA, 16 nt, Human herpesvirus 7
gagacucacuccuugc

SEQ ID NO: 181236 - RNA, 19 nt, Human herpesvirus 7
gacacaccaaauacaacca

SEQ ID NO: 181237 - RNA, 18 nt, Human herpesvirus 7
gacaacgguauacauuaa

SEQ ID NO: 181238 - RNA, 20 nt, Human herpesvirus 7
gacaauaacauuuuguauga

SEQ ID NO: 181239 - RNA, 21 nt, Human herpesvirus 7
gacaauaacauuuuguaugaa

SEQ ID NO: 181240 - RNA, 16 nt, Human herpesvirus 7
gacaccaguaugaaau

SEQ ID NO: 181241 - RNA, 14 nt, Human herpesvirus 7
gacacauuuaucca

SEQ ID NO: 181242 - RNA, 13 nt, Human herpesvirus 7
gacacgacacuga

SEQ ID NO: 181243 - RNA, 19 nt, Human herpesvirus 7
gacaccccaaaaucaaaaa

SEQ ID NO: 181244 - RNA, 13 nt, Human herpesvirus 7
gacggcauuuaac

SEQ ID NO: 181245 - RNA, 16 nt, Human herpesvirus 7
gacgcuguaugcaaga

SEQ ID NO: 181246 - RNA, 19 nt, Human herpesvirus 7
gacgugagcaauacaccca

SEQ ID NO: 181247 - RNA, 15 nt, Human herpesvirus 7
cguauacauacuaaa

SEQ ID NO: 181248 - RNA, 18 nt, Human herpesvirus 7
cgucaugcggaagaacaa

SEQ ID NO: 181249 - RNA, 13 nt, Human herpesvirus 7
cgguagaaugugu

SEQ ID NO: 181250 - RNA, 11 nt, Human herpesvirus 7
cgguagcacua

SEQ ID NO: 181251 - RNA, 21 nt, Human herpesvirus 7
cgguacucccucuaguggcaa

SEQ ID NO: 181252 - RNA, 20 nt, Human herpesvirus 7
cgguaaagaaccuaucaaaa

SEQ ID NO: 181253 - RNA, 20 nt, Human herpesvirus 7
cggugaauguagaaguugau

SEQ ID NO: 181254 - RNA, 15 nt, Human herpesvirus 7
cguucuaaaaaacaa

SEQ ID NO: 181255 - RNA, 19 nt, Human herpesvirus 7
cguuacuucugucaccaca

SEQ ID NO: 181256 - RNA, 14 nt, Human herpesvirus 7
cguuuauaaacucu

SEQ ID NO: 181257 - RNA, 19 nt, Human herpesvirus 7
cguuguugguguguuacau

SEQ ID NO: 181258 - RNA, 13 nt, Human herpesvirus 7
cguuguaugauga

SEQ ID NO: 181259 - RNA, 14 nt, Human herpesvirus 7
cguuucacugggaa

SEQ ID NO: 181260 - RNA, 23 nt, Human herpesvirus 7
cguugcucauuuuguuuugcaau

SEQ ID NO: 181261 - RNA, 21 nt, Human herpesvirus 7
cgugacagagaaagauuaauu

SEQ ID NO: 181262 - RNA, 19 nt, Human herpesvirus 7
cguguucaggcaacauuaa

SEQ ID NO: 181263 - RNA, 23 nt, Human herpesvirus 7
cguguggccuuccggcgcugagu

SEQ ID NO: 181264 - RNA, 13 nt, Human herpesvirus 7
cgugcuuagacuu

SEQ ID NO: 181265 - RNA, 16 nt, Human herpesvirus 7
cgcugaaauaaauuca

SEQ ID NO: 181266 - RNA, 21 nt, Human herpesvirus 7
cgcuaaagagcauucaugccu

SEQ ID NO: 181267 - RNA, 19 nt, Human herpesvirus 7
cgcgguccauuuuuacuca

SEQ ID NO: 181268 - RNA, 11 nt, Human herpesvirus 7
cggcacacaac

SEQ ID NO: 181269 - RNA, 22 nt, Human herpesvirus 7
cgcuucaaagauaccuucuuag

SEQ ID NO: 181270 - RNA, 23 nt, Human herpesvirus 7
cgcuguaugcaagaaaguccaaa

SEQ ID NO: 181271 - RNA, 17 nt, Human herpesvirus 7
cgagaauguucuaucaa

SEQ ID NO: 181272 - RNA, 20 nt, Human herpesvirus 7
cgagauggauugagugcaug

SEQ ID NO: 181273 - RNA, 18 nt, Human herpesvirus 7
cgagauuccaaagagccu

SEQ ID NO: 181274 - RNA, 20 nt, Human herpesvirus 7
ccguuuaaugaaaaagccau

SEQ ID NO: 181275 - RNA, 13 nt, Human herpesvirus 7
ccguuucauuuaa

SEQ ID NO: 181276 - RNA, 12 nt, Human herpesvirus 7
ccguuugcagcc

SEQ ID NO: 181277 - RNA, 20 nt, Human herpesvirus 7
ccguuugcagcccaauguug

SEQ ID NO: 181278 - RNA, 19 nt, Human herpesvirus 7
ccuaacaauaaaguuucca

SEQ ID NO: 181279 - RNA, 16 nt, Human herpesvirus 7
ccuaaucuaacaguuu

SEQ ID NO: 181280 - RNA, 19 nt, Human herpesvirus 7
ccuaagcuuuucaggcuau

SEQ ID NO: 181281 - RNA, 20 nt, Human herpesvirus 7
cgagcuguguccacuacaga

SEQ ID NO: 181282 - RNA, 21 nt, Human herpesvirus 7
cgagucaguuaucaaguagaa

SEQ ID NO: 181283 - RNA, 15 nt, Human herpesvirus 7
cgaugagcaugaaaa

SEQ ID NO: 181284 - RNA, 14 nt, Human herpesvirus 7
cgauuauauucaaa

SEQ ID NO: 181285 - RNA, 17 nt, Human herpesvirus 7
cgauuauauucaaauaa

SEQ ID NO: 181286 - RNA, 22 nt, Human herpesvirus 7
cgaucccuaucgagacgccaga

SEQ ID NO: 181287 - RNA, 19 nt, Human herpesvirus 7
cgauccucagaauguacac

SEQ ID NO: 181288 - RNA, 21 nt, Human herpesvirus 7
cgauauauuggcaugcuuaca

SEQ ID NO: 181289 - RNA, 17 nt, Human herpesvirus 7
cgauccaguacuugcau

SEQ ID NO: 181290 - RNA, 18 nt, Human herpesvirus 7
cgauccaguacuugcauc

SEQ ID NO: 181291 - RNA, 18 nt, Human herpesvirus 7
cgccauguauugucuuac

SEQ ID NO: 181292 - RNA, 17 nt, Human herpesvirus 7
cgccauaauuugaauua

SEQ ID NO: 181293 - RNA, 15 nt, Human herpesvirus 7
cgccaaaaaaacaca

SEQ ID NO: 181294 - RNA, 18 nt, Human herpesvirus 7
cgcauggagcacaauuac

SEQ ID NO: 181295 - RNA, 23 nt, Human herpesvirus 7
cgcaugugaaaaugaugguugca

SEQ ID NO: 181296 - RNA, 23 nt, Human herpesvirus 7
cgcauaacccacuaacauuuuaa

SEQ ID NO: 181297 - RNA, 18 nt, Human herpesvirus 7
cgcauaaaaaaucuaauu

SEQ ID NO: 181298 - RNA, 15 nt, Human herpesvirus 7
cgcaguguucauuau

SEQ ID NO: 181299 - RNA, 13 nt, Human herpesvirus 7
cgcagcaauguau

SEQ ID NO: 181300 - RNA, 17 nt, Human herpesvirus 7
cgcagcaauguauauaa

SEQ ID NO: 181301 - RNA, 22 nt, Human herpesvirus 7
cgauuugguguacuacauauua

SEQ ID NO: 181302 - RNA, 21 nt, Human herpesvirus 7
cgauuuaagugaacuguuaca

SEQ ID NO: 181303 - RNA, 14 nt, Human herpesvirus 7
cgcaaacauuuuga

SEQ ID NO: 181304 - RNA, 21 nt, Human herpesvirus 7
cgcaaaggaaaaaugcugcuc

SEQ ID NO: 181305 - RNA, 23 nt, Human herpesvirus 7
cgcaaugguauaaagugcugucu

SEQ ID NO: 181306 - RNA, 19 nt, Human herpesvirus 7
cugccagagaaccacguga

SEQ ID NO: 181307 - RNA, 22 nt, Human herpesvirus 7
cugcaacuuugugccugaaaua

SEQ ID NO: 181308 - RNA, 16 nt, Human herpesvirus 7
cugcaacaaauuaaau

SEQ ID NO: 181309 - RNA, 24 nt, Human herpesvirus 7
cugcaaccugauaaauacucauga

SEQ ID NO: 181310 - RNA, 12 nt, Human herpesvirus 7
cugcaaauccaa

SEQ ID NO: 181311 - RNA, 22 nt, Human herpesvirus 7
cugcaaauuguaaauucuccaa

SEQ ID NO: 181312 - RNA, 21 nt, Human herpesvirus 7
cugccucccgggcacacuuug

SEQ ID NO: 181313 - RNA, 22 nt, Human herpesvirus 7
cugccucccgggcacacuuuga

SEQ ID NO: 181314 - RNA, 13 nt, Human herpesvirus 7
cugccauuacuga

SEQ ID NO: 181315 - RNA, 14 nt, Human herpesvirus 7
cugccauuacugau

SEQ ID NO: 181316 - RNA, 19 nt, Human herpesvirus 7
cugcuggaaagcuugugaa

SEQ ID NO: 181317 - RNA, 22 nt, Human herpesvirus 7
cugcugugagugaacauuugaa

SEQ ID NO: 181318 - RNA, 19 nt, Human herpesvirus 7
cugcuuuuucaauguuucc

SEQ ID NO: 181319 - RNA, 16 nt, Human herpesvirus 7
cugcuuaaauguaauu

SEQ ID NO: 181320 - RNA, 12 nt, Human herpesvirus 7
cugcuugcacaa

SEQ ID NO: 181321 - RNA, 18 nt, Human herpesvirus 7
cuggcucaagcacaauca

SEQ ID NO: 181322 - RNA, 14 nt, Human herpesvirus 7
cuggcagaaauaua

SEQ ID NO: 181323 - RNA, 16 nt, Human herpesvirus 7
cuggcaacaguucaaa

SEQ ID NO: 181324 - RNA, 24 nt, Human herpesvirus 7
cuggcaauaucccagaauaucgau

SEQ ID NO: 181325 - RNA, 15 nt, Human herpesvirus 7
cuggaaaacauuuca

SEQ ID NO: 181326 - RNA, 16 nt, Human herpesvirus 7
cuggaaaacauuucag

SEQ ID NO: 181327 - RNA, 19 nt, Human herpesvirus 7
cuggaaaugucaagaacuu

SEQ ID NO: 181328 - RNA, 21 nt, Human herpesvirus 7
cugguguuuuguauacaacuu

SEQ ID NO: 181329 - RNA, 18 nt, Human herpesvirus 7
cugggagcaaugcaugau

SEQ ID NO: 181330 - RNA, 22 nt, Human herpesvirus 7
cugggagcaaugcaugaugcac

SEQ ID NO: 181331 - RNA, 19 nt, Human herpesvirus 7
cuguagaugcaugcuaaua

SEQ ID NO: 181332 - RNA, 17 nt, Human herpesvirus 7
cuguacuguugcuaauu

SEQ ID NO: 181333 - RNA, 15 nt, Human herpesvirus 7
cuguacuuuugauca

SEQ ID NO: 181334 - RNA, 18 nt, Human herpesvirus 7
cuguacuuuugaucaaaa

SEQ ID NO: 181335 - RNA, 13 nt, Human herpesvirus 7
cuguaaucauaua

SEQ ID NO: 181336 - RNA, 18 nt, Human herpesvirus 7
cuguacugaaaccaaagc

SEQ ID NO: 181337 - RNA, 21 nt, Human herpesvirus 7
cugacuccuuuuuuucugcuc

SEQ ID NO: 181338 - RNA, 15 nt, Human herpesvirus 7
cugauucugccauua

SEQ ID NO: 181339 - RNA, 18 nt, Human herpesvirus 7
cugauucuuauucuacac

SEQ ID NO: 181340 - RNA, 15 nt, Human herpesvirus 7
cugauucaacacucg

SEQ ID NO: 181341 - RNA, 23 nt, Human herpesvirus 7
cugacauuggaacuuuaugcaaa

SEQ ID NO: 181342 - RNA, 17 nt, Human herpesvirus 7
cugaauagacacauuua

SEQ ID NO: 181343 - RNA, 19 nt, Human herpesvirus 7
cucuugaagaacaacauga

SEQ ID NO: 181344 - RNA, 20 nt, Human herpesvirus 7
cucuugaagaacaacaugaa

SEQ ID NO: 181345 - RNA, 18 nt, Human herpesvirus 7
cucuguucccacugggac

SEQ ID NO: 181346 - RNA, 20 nt, Human herpesvirus 7
cucuguucccacugggacaa

SEQ ID NO: 181347 - RNA, 23 nt, Human herpesvirus 7
cucuacaaacagaagcugacuuu

SEQ ID NO: 181348 - RNA, 17 nt, Human herpesvirus 7
cucuagaacaaacugua

SEQ ID NO: 181349 - RNA, 23 nt, Human herpesvirus 7
cucuaugccggccgggugcugcg

SEQ ID NO: 181350 - RNA, 16 nt, Human herpesvirus 7
cucuauaccgcuucuu

SEQ ID NO: 181351 - RNA, 20 nt, Human herpesvirus 7
cucuaucgucaucaucccaa

SEQ ID NO: 181352 - RNA, 17 nt, Human herpesvirus 7
cucuaugauccagcaaa

SEQ ID NO: 181353 - RNA, 12 nt, Human herpesvirus 7
cucgaaacuggc

SEQ ID NO: 181354 - RNA, 23 nt, Human herpesvirus 7
cucgaaggagagcccagucccaa

SEQ ID NO: 181355 - RNA, 16 nt, Human herpesvirus 7
cucgcaacuucugaua

SEQ ID NO: 181356 - RNA, 20 nt, Human herpesvirus 7
cuccucaaccggcaaucaua

SEQ ID NO: 181357 - RNA, 18 nt, Human herpesvirus 7
cuauucucauagauuuca

SEQ ID NO: 181358 - RNA, 15 nt, Human herpesvirus 7
cuauugacauaauca

SEQ ID NO: 181359 - RNA, 17 nt, Human herpesvirus 7
cuauuauuaaagcuuuc

SEQ ID NO: 181360 - RNA, 18 nt, Human herpesvirus 7
cuauuauuaaagcuuuca

SEQ ID NO: 181361 - RNA, 18 nt, Human herpesvirus 7
cuauuauuucuacacaaa

SEQ ID NO: 181362 - RNA, 20 nt, Human herpesvirus 7
cuauucacgcuuccaucaca

SEQ ID NO: 181363 - RNA, 22 nt, Human herpesvirus 7
cuauucacgcuuccaucacaaa

SEQ ID NO: 181364 - RNA, 22 nt, Human herpesvirus 7
cucaauaguuuuacaaagaaca

SEQ ID NO: 181365 - RNA, 15 nt, Human herpesvirus 7
cucaaugguaagcaa

SEQ ID NO: 181366 - RNA, 13 nt, Human herpesvirus 7
cucaauuaaaaca

SEQ ID NO: 181367 - RNA, 22 nt, Human herpesvirus 7
cucaauuuuucgcugaagaaca

SEQ ID NO: 181368 - RNA, 19 nt, Human herpesvirus 7
cucacaauguuuucucuau

SEQ ID NO: 181369 - RNA, 24 nt, Human herpesvirus 7
cuccaaucgagcgacagucaccaa

SEQ ID NO: 181370 - RNA, 24 nt, Human herpesvirus 7
cuccaguggcaguacuacuaauca

SEQ ID NO: 181371 - RNA, 18 nt, Human herpesvirus 7
cuccaaaguagaacuuga

SEQ ID NO: 181372 - RNA, 18 nt, Human herpesvirus 7
cuauguauaaucaagucu

SEQ ID NO: 181373 - RNA, 23 nt, Human herpesvirus 7
cuaugguggcauauaugaaucaa

SEQ ID NO: 181374 - RNA, 23 nt, Human herpesvirus 7
cuauuaguaugagugcuaugaaa

SEQ ID NO: 181375 - RNA, 11 nt, Human herpesvirus 7
cuauuacacag

SEQ ID NO: 181376 - RNA, 19 nt, Human herpesvirus 7
cuauuacacaggaauugcu

SEQ ID NO: 181377 - RNA, 20 nt, Human herpesvirus 7
cuaugccggccgggugcugc

SEQ ID NO: 181378 - RNA, 21 nt, Human herpesvirus 7
cuaugccggccgggugcugcg

SEQ ID NO: 181379 - RNA, 16 nt, Human herpesvirus 7
cuaugaacuggcacau

SEQ ID NO: 181380 - RNA, 13 nt, Human herpesvirus 7
cuaugaguauacc

SEQ ID NO: 181381 - RNA, 23 nt, Human herpesvirus 7
cuaugaauuugacaguccauucc

SEQ ID NO: 181382 - RNA, 20 nt, Human herpesvirus 7
cuaugacugagaaaaacaga

SEQ ID NO: 181383 - RNA, 13 nt, Human herpesvirus 7
cuaugacuuugaa

SEQ ID NO: 181384 - RNA, 19 nt, Human herpesvirus 7
cuaugacuuugaaucaaca

SEQ ID NO: 181385 - RNA, 17 nt, Human herpesvirus 7
cuaucuccuauguugca

SEQ ID NO: 181386 - RNA, 17 nt, Human herpesvirus 7
cuaucucuacaaacaga

SEQ ID NO: 181387 - RNA, 21 nt, Human herpesvirus 7
cuaucugauuuauauagcaau

SEQ ID NO: 181388 - RNA, 21 nt, Human herpesvirus 7
cuagauaaaguagguaaaaaa

SEQ ID NO: 181389 - RNA, 21 nt, Human herpesvirus 7
cuagcagcuuuuauuccuucc

SEQ ID NO: 181390 - RNA, 15 nt, Human herpesvirus 7
cuaucgcaacaacua

SEQ ID NO: 181391 - RNA, 13 nt, Human herpesvirus 7
cuaucgacaaaca

SEQ ID NO: 181392 - RNA, 18 nt, Human herpesvirus 7
cuaucgucaucaucccaa

SEQ ID NO: 181393 - RNA, 18 nt, Human herpesvirus 7
cuaucagcgacagguguu

SEQ ID NO: 181394 - RNA, 14 nt, Human herpesvirus 7
cuaagucuacauca

SEQ ID NO: 181395 - RNA, 19 nt, Human herpesvirus 7
cuaaguuuuguuacgucaa

SEQ ID NO: 181396 - RNA, 18 nt, Human herpesvirus 7
cuaagguuuuuacauaaa

SEQ ID NO: 181397 - RNA, 22 nt, Human herpesvirus 7
cuaagagauuguggcaauguaa

SEQ ID NO: 181398 - RNA, 13 nt, Human herpesvirus 7
cuagagcauauac

SEQ ID NO: 181399 - RNA, 21 nt, Human herpesvirus 7
cuagagggcacguuuagaaaa

SEQ ID NO: 181400 - RNA, 13 nt, Human herpesvirus 7
cuagaaguuuaga

SEQ ID NO: 181401 - RNA, 23 nt, Human herpesvirus 7
cuaacugggagcugauucugcca

SEQ ID NO: 181402 - RNA, 22 nt, Human herpesvirus 7
cuaaaagcaccgugagaaauuu

SEQ ID NO: 181403 - RNA, 15 nt, Human herpesvirus 7
cuaaaaguacagugu

SEQ ID NO: 181404 - RNA, 22 nt, Human herpesvirus 7
cuaaaauuuucuuagcuuucau

SEQ ID NO: 181405 - RNA, 16 nt, Human herpesvirus 7
cuaaacaaacaaugag

SEQ ID NO: 181406 - RNA, 16 nt, Human herpesvirus 7
cguuuuaaauagugaa

SEQ ID NO: 181407 - RNA, 19 nt, Human herpesvirus 7
cuaaaaauccuaaauuucc

SEQ ID NO: 181408 - RNA, 13 nt, Human herpesvirus 7
cuaaaaaucucag

SEQ ID NO: 181409 - RNA, 16 nt, Human herpesvirus 7
cuaaaacuacauuuaa

SEQ ID NO: 181410 - RNA, 17 nt, Human herpesvirus 7
cuaaaacugucacgcaa

SEQ ID NO: 181411 - RNA, 23 nt, Human herpesvirus 7
cuaaaacugucacgcaagucaca

SEQ ID NO: 181412 - RNA, 19 nt, Human herpesvirus 7
cuaaaaaaauucauuuagu

SEQ ID NO: 181413 - RNA, 16 nt, Human herpesvirus 7
cuaaaaauacaacuuc

SEQ ID NO: 181414 - RNA, 16 nt, Human herpesvirus 7
cguuuuuuugcaucag

SEQ ID NO: 181415 - RNA, 17 nt, Human herpesvirus 7
uuucugagugcuaaaaa

SEQ ID NO: 181416 - RNA, 19 nt, Human herpesvirus 7
uuucuggcaacaguucaaa

SEQ ID NO: 181417 - RNA, 22 nt, Human herpesvirus 7
uuucucuguagauauuuugaca

SEQ ID NO: 181418 - RNA, 12 nt, Human herpesvirus 7
uuucuugaugua

SEQ ID NO: 181419 - RNA, 12 nt, Human herpesvirus 7
uuucuuggguaa

SEQ ID NO: 181420 - RNA, 20 nt, Human herpesvirus 7
uuucuuagaugcauccaaag

SEQ ID NO: 181421 - RNA, 19 nt, Human herpesvirus 7
uuucuucaaagucuaaggu

SEQ ID NO: 181422 - RNA, 19 nt, Human herpesvirus 7
uuugaagagcguguuuuga

SEQ ID NO: 181423 - RNA, 19 nt, Human herpesvirus 7
uuugaacgagauggauuga

SEQ ID NO: 181424 - RNA, 22 nt, Human herpesvirus 7
uuugaacggaauaaacaaugug

SEQ ID NO: 181425 - RNA, 22 nt, Human herpesvirus 7
uuugaaucgugggacuugauaa

SEQ ID NO: 181426 - RNA, 23 nt, Human herpesvirus 7
uuugaaguguuuuuauuaauuuc

SEQ ID NO: 181427 - RNA, 20 nt, Human herpesvirus 7
uuugaauguauguccacuaa

SEQ ID NO: 181428 - RNA, 12 nt, Human herpesvirus 7
uuugacaggugc

SEQ ID NO: 181429 - RNA, 12 nt, Human herpesvirus 7
uuugaaaaccau

SEQ ID NO: 181430 - RNA, 13 nt, Human herpesvirus 7
uuugaaaaccauu

SEQ ID NO: 181431 - RNA, 22 nt, Human herpesvirus 7
uuugaaaacgaaaggaaucuua

SEQ ID NO: 181432 - RNA, 22 nt, Human herpesvirus 7
uuugaaaaggcaucgcauauag

SEQ ID NO: 181433 - RNA, 15 nt, Human herpesvirus 7
uuugccuguuaaaag

SEQ ID NO: 181434 - RNA, 12 nt, Human herpesvirus 7
uuugagcaguga

SEQ ID NO: 181435 - RNA, 14 nt, Human herpesvirus 7
uuugauuugagaaa

SEQ ID NO: 181436 - RNA, 19 nt, Human herpesvirus 7
uuugcagccagaacucaau

SEQ ID NO: 181437 - RNA, 17 nt, Human herpesvirus 7
uuugcauaaacuaucaa

SEQ ID NO: 181438 - RNA, 22 nt, Human herpesvirus 7
uuugcaucaggaaaaucuauca

SEQ ID NO: 181439 - RNA, 19 nt, Human herpesvirus 7
uuugagaauuuuauggaua

SEQ ID NO: 181440 - RNA, 12 nt, Human herpesvirus 7
uuugagucucag

SEQ ID NO: 181441 - RNA, 23 nt, Human herpesvirus 7
uuugauacagauauuuuaauucu

SEQ ID NO: 181442 - RNA, 19 nt, Human herpesvirus 7
uuugcaaagucucauucau

SEQ ID NO: 181443 - RNA, 22 nt, Human herpesvirus 7
uuugcaagcacauguacagaca

SEQ ID NO: 181444 - RNA, 14 nt, Human herpesvirus 7
uuugcaauaugcua

SEQ ID NO: 181445 - RNA, 16 nt, Human herpesvirus 7
uuugcaauaugcucac

SEQ ID NO: 181446 - RNA, 16 nt, Human herpesvirus 7
uuugauuccaucucac

SEQ ID NO: 181447 - RNA, 14 nt, Human herpesvirus 7
uuugaugugcaaca

SEQ ID NO: 181448 - RNA, 13 nt, Human herpesvirus 7
uuugauuaauuuc

SEQ ID NO: 181449 - RNA, 20 nt, Human herpesvirus 7
uuugauagggauucuuugaa

SEQ ID NO: 181450 - RNA, 20 nt, Human herpesvirus 7
uuuccuuuaugugauauacu

SEQ ID NO: 181451 - RNA, 23 nt, Human herpesvirus 7
uuucgaacuugucaccuauuuca

SEQ ID NO: 181452 - RNA, 13 nt, Human herpesvirus 7
uuuccuugccaga

SEQ ID NO: 181453 - RNA, 20 nt, Human herpesvirus 7
uuuccgcauaaaaaaucuaa

SEQ ID NO: 181454 - RNA, 19 nt, Human herpesvirus 7
uuuccguuguaugaugacg

SEQ ID NO: 181455 - RNA, 14 nt, Human herpesvirus 7
uuuccuaugauaca

SEQ ID NO: 181456 - RNA, 12 nt, Human herpesvirus 7
uuucgauuccau

SEQ ID NO: 181457 - RNA, 15 nt, Human herpesvirus 7
uuucuaauagacaaa

SEQ ID NO: 181458 - RNA, 12 nt, Human herpesvirus 7
uuucuccaugca

SEQ ID NO: 181459 - RNA, 15 nt, Human herpesvirus 7
uuucauagguugcua

SEQ ID NO: 181460 - RNA, 12 nt, Human herpesvirus 7
uuucauagcuua

SEQ ID NO: 181461 - RNA, 13 nt, Human herpesvirus 7
uuuccaucuaccg

SEQ ID NO: 181462 - RNA, 13 nt, Human herpesvirus 7
uuucccagaagaa

SEQ ID NO: 181463 - RNA, 18 nt, Human herpesvirus 7
uuucccagagaccuauga

SEQ ID NO: 181464 - RNA, 15 nt, Human herpesvirus 7
uuucccagauacagc

SEQ ID NO: 181465 - RNA, 22 nt, Human herpesvirus 7
uuucaaauggauuuuaauacaa

SEQ ID NO: 181466 - RNA, 17 nt, Human herpesvirus 7
uuucaauuaaugcauug

SEQ ID NO: 181467 - RNA, 14 nt, Human herpesvirus 7
uuucauacauagaa

SEQ ID NO: 181468 - RNA, 19 nt, Human herpesvirus 7
uuucagaugacaacucaau

SEQ ID NO: 181469 - RNA, 16 nt, Human herpesvirus 7
uuuauugccuuguuug

SEQ ID NO: 181470 - RNA, 11 nt, Human herpesvirus 7
uuucaaacaac

SEQ ID NO: 181471 - RNA, 14 nt, Human herpesvirus 7
uuuaucuuggacug

SEQ ID NO: 181472 - RNA, 19 nt, Human herpesvirus 7
uuuauguauuuuacuggau

SEQ ID NO: 181473 - RNA, 16 nt, Human herpesvirus 7
uuuauccaucaaaagu

SEQ ID NO: 181474 - RNA, 17 nt, Human herpesvirus 7
uuuauauauggcaauaa

SEQ ID NO: 181475 - RNA, 12 nt, Human herpesvirus 7
uuuauauuugcu

SEQ ID NO: 181476 - RNA, 12 nt, Human herpesvirus 7
uuuauaugucaa

SEQ ID NO: 181477 - RNA, 15 nt, Human herpesvirus 7
uuuagaccuaucaaa

SEQ ID NO: 181478 - RNA, 21 nt, Human herpesvirus 7
uuuacuuauguguuacaugau

SEQ ID NO: 181479 - RNA, 21 nt, Human herpesvirus 7
uuuagcgcugaaauuucauga

SEQ ID NO: 181480 - RNA, 20 nt, Human herpesvirus 7
uuuagcggagguuugcuauu

SEQ ID NO: 181481 - RNA, 11 nt, Human herpesvirus 7
uuuagcucuaa

SEQ ID NO: 181482 - RNA, 23 nt, Human herpesvirus 7
uuuagucggcacacguacaauau

SEQ ID NO: 181483 - RNA, 21 nt, Human herpesvirus 7
uuuagcuuuugaauaaucuca

SEQ ID NO: 181484 - RNA, 15 nt, Human herpesvirus 7
uuuacauuacuggau

SEQ ID NO: 181485 - RNA, 20 nt, Human herpesvirus 7
uuuaccaaauauguggcaca

SEQ ID NO: 181486 - RNA, 16 nt, Human herpesvirus 7
uuuacagagaauuuua

SEQ ID NO: 181487 - RNA, 13 nt, Human herpesvirus 7
uuuaccuccauau

SEQ ID NO: 181488 - RNA, 22 nt, Human herpesvirus 7
uuuaacgguaacggauuuacau

SEQ ID NO: 181489 - RNA, 11 nt, Human herpesvirus 7
uuuaacuauug

SEQ ID NO: 181490 - RNA, 20 nt, Human herpesvirus 7
uuuaacuauuguccuuucaa

SEQ ID NO: 181491 - RNA, 14 nt, Human herpesvirus 7
uuuaaaguaugcuu

SEQ ID NO: 181492 - RNA, 16 nt, Human herpesvirus 7
uuuaaaagguugacau

SEQ ID NO: 181493 - RNA, 16 nt, Human herpesvirus 7
uuuaaauuauuauuag

SEQ ID NO: 181494 - RNA, 17 nt, Human herpesvirus 7
uuuaacaacagccaaau

SEQ ID NO: 181495 - RNA, 13 nt, Human herpesvirus 7
uuuaacaaucuaa

SEQ ID NO: 181496 - RNA, 22 nt, Human herpesvirus 7
uuuaaaauuaauaauauuagua

SEQ ID NO: 181497 - RNA, 20 nt, Human herpesvirus 7
uuuaaaauuauuaauauuag

SEQ ID NO: 181498 - RNA, 13 nt, Human herpesvirus 7
uuuaaaauuucau

SEQ ID NO: 181499 - RNA, 18 nt, Human herpesvirus 7
uuuaaacagcguucaauc

SEQ ID NO: 181500 - RNA, 17 nt, Human herpesvirus 7
uuuaauccguaucuaga

SEQ ID NO: 181501 - RNA, 17 nt, Human herpesvirus 7
uuuaaugaaaaagccau

SEQ ID NO: 181502 - RNA, 13 nt, Human herpesvirus 7
uuuaagugaacug

SEQ ID NO: 181503 - RNA, 14 nt, Human herpesvirus 7
uuuaagugaacugu

SEQ ID NO: 181504 - RNA, 19 nt, Human herpesvirus 7
uuuaauggaagaacaacaa

SEQ ID NO: 181505 - RNA, 20 nt, Human herpesvirus 7
uuuaauacaaaauaaagcca

SEQ ID NO: 181506 - RNA, 17 nt, Human herpesvirus 7
uuuacaaacauguucca

SEQ ID NO: 181507 - RNA, 18 nt, Human herpesvirus 7
uuuaauugagauuauuca

SEQ ID NO: 181508 - RNA, 22 nt, Human herpesvirus 7
uuguucaaaauauuuaucugca

SEQ ID NO: 181509 - RNA, 15 nt, Human herpesvirus 7
uuguuaccuaaaccu

SEQ ID NO: 181510 - RNA, 15 nt, Human herpesvirus 7
uuguuagaauaucug

SEQ ID NO: 181511 - RNA, 22 nt, Human herpesvirus 7
uuguuaggccaguucuaucuca

SEQ ID NO: 181512 - RNA, 14 nt, Human herpesvirus 7
uugugguacaacaa

SEQ ID NO: 181513 - RNA, 12 nt, Human herpesvirus 7
uuuaaaaucuac

SEQ ID NO: 181514 - RNA, 16 nt, Human herpesvirus 7
uuuaaaacugaagcau

SEQ ID NO: 181515 - RNA, 22 nt, Human herpesvirus 7
uuguuucaauaugcaugcaauu

SEQ ID NO: 181516 - RNA, 20 nt, Human herpesvirus 7
uuuaaaaaaaaaaccacaaa

SEQ ID NO: 181517 - RNA, 17 nt, Human herpesvirus 7
uuuaaaaaaucuauuaa

SEQ ID NO: 181518 - RNA, 15 nt, Human herpesvirus 7
uuuaaaaaccaugaa

SEQ ID NO: 181519 - RNA, 15 nt, Human herpesvirus 7
uuguuuaagacauua

SEQ ID NO: 181520 - RNA, 19 nt, Human herpesvirus 7
uugguuaugcacauccaaa

SEQ ID NO: 181521 - RNA, 17 nt, Human herpesvirus 7
uuguaacaacuagcaaa

SEQ ID NO: 181522 - RNA, 13 nt, Human herpesvirus 7
uuguaaacaugaa

SEQ ID NO: 181523 - RNA, 15 nt, Human herpesvirus 7
uuguaaaaauaaaga

SEQ ID NO: 181524 - RNA, 17 nt, Human herpesvirus 7
uugugaagacuacauaa

SEQ ID NO: 181525 - RNA, 11 nt, Human herpesvirus 7
uugugcaauuu

SEQ ID NO: 181526 - RNA, 20 nt, Human herpesvirus 7
uugugcaauuuggcucugau

SEQ ID NO: 181527 - RNA, 17 nt, Human herpesvirus 7
uugugcugugucaauaa

SEQ ID NO: 181528 - RNA, 18 nt, Human herpesvirus 7
uugugaguuucuacaugu

SEQ ID NO: 181529 - RNA, 21 nt, Human herpesvirus 7
uuggaacuuuaugcaaacuca

SEQ ID NO: 181530 - RNA, 14 nt, Human herpesvirus 7
uugcuuuccaucau

SEQ ID NO: 181531 - RNA, 23 nt, Human herpesvirus 7
uugcuggaucauagagaaaacau

SEQ ID NO: 181532 - RNA, 17 nt, Human herpesvirus 7
uugcuuggcugacauac

SEQ ID NO: 181533 - RNA, 20 nt, Human herpesvirus 7
uuggguaauuuuaaaacuga

SEQ ID NO: 181534 - RNA, 15 nt, Human herpesvirus 7
uugguaauguuacua

SEQ ID NO: 181535 - RNA, 15 nt, Human herpesvirus 7
uucauguuuuaugac

SEQ ID NO: 181536 - RNA, 16 nt, Human herpesvirus 7
uucauguuuuaugacu

SEQ ID NO: 181537 - RNA, 13 nt, Human herpesvirus 7
uucaugcauugca

SEQ ID NO: 181538 - RNA, 16 nt, Human herpesvirus 7
uucaugccuugccaaa

SEQ ID NO: 181539 - RNA, 15 nt, Human herpesvirus 7
uucauggcacauaua

SEQ ID NO: 181540 - RNA, 13 nt, Human herpesvirus 7
uucauuccaaaau

SEQ ID NO: 181541 - RNA, 17 nt, Human herpesvirus 7
uucauuaucaccacaau

SEQ ID NO: 181542 - RNA, 19 nt, Human herpesvirus 7
uucauagcacucauacuaa

SEQ ID NO: 181543 - RNA, 14 nt, Human herpesvirus 7
uucauagguugcua

SEQ ID NO: 181544 - RNA, 17 nt, Human herpesvirus 7
uucauaaugacacgaca

SEQ ID NO: 181545 - RNA, 21 nt, Human herpesvirus 7
uucauaaugacacgacacuga

SEQ ID NO: 181546 - RNA, 13 nt, Human herpesvirus 7
uucauaucuauga

SEQ ID NO: 181547 - RNA, 23 nt, Human herpesvirus 7
uucagcacugggagcaaugcaug

SEQ ID NO: 181548 - RNA, 19 nt, Human herpesvirus 7
uucaguacauucuagagau

SEQ ID NO: 181549 - RNA, 16 nt, Human herpesvirus 7
uucaguuuacugugga

SEQ ID NO: 181550 - RNA, 16 nt, Human herpesvirus 7
uucaguucccauaaau

SEQ ID NO: 181551 - RNA, 18 nt, Human herpesvirus 7
uucaguucccauaaauau

SEQ ID NO: 181552 - RNA, 23 nt, Human herpesvirus 7
uucacugggaaguauguuucauc

SEQ ID NO: 181553 - RNA, 18 nt, Human herpesvirus 7
uucacgcuuccaucacaa

SEQ ID NO: 181554 - RNA, 20 nt, Human herpesvirus 7
uuccccuggaacguccucug

SEQ ID NO: 181555 - RNA, 16 nt, Human herpesvirus 7
uucauugagucuucau

SEQ ID NO: 181556 - RNA, 19 nt, Human herpesvirus 7
uuccggaggucuacuggac

SEQ ID NO: 181557 - RNA, 15 nt, Human herpesvirus 7
uuccuaugauacaau

SEQ ID NO: 181558 - RNA, 15 nt, Human herpesvirus 7
uuccgauuuaaguga

SEQ ID NO: 181559 - RNA, 19 nt, Human herpesvirus 7
uuccgauuuaagugaacug

SEQ ID NO: 181560 - RNA, 23 nt, Human herpesvirus 7
uuccucaauuuuucgcugaagaa

SEQ ID NO: 181561 - RNA, 19 nt, Human herpesvirus 7
uuccucacagauuuuccaa

SEQ ID NO: 181562 - RNA, 13 nt, Human herpesvirus 7
uucgcaacaauca

SEQ ID NO: 181563 - RNA, 13 nt, Human herpesvirus 7
uucgcaacaauua

SEQ ID NO: 181564 - RNA, 18 nt, Human herpesvirus 7
uucgcaacaauuacuugu

SEQ ID NO: 181565 - RNA, 21 nt, Human herpesvirus 7
uucgaucuaagucuacaucau

SEQ ID NO: 181566 - RNA, 16 nt, Human herpesvirus 7
uucgagucaguuauca

SEQ ID NO: 181567 - RNA, 20 nt, Human herpesvirus 7
uucgcaguuagucugcugga

SEQ ID NO: 181568 - RNA, 22 nt, Human herpesvirus 7
uucgacuucuaaaaauacaacu

SEQ ID NO: 181569 - RNA, 21 nt, Human herpesvirus 7
uuccuuucguuuucaaagugu

SEQ ID NO: 181570 - RNA, 20 nt, Human herpesvirus 7
uuccucuggaaaagggagau

SEQ ID NO: 181571 - RNA, 17 nt, Human herpesvirus 7
uugccccuaaacaauua

SEQ ID NO: 181572 - RNA, 22 nt, Human herpesvirus 7
uugcugaaauaauagcggcuaa

SEQ ID NO: 181573 - RNA, 17 nt, Human herpesvirus 7
uugcugaacucugucau

SEQ ID NO: 181574 - RNA, 15 nt, Human herpesvirus 7
uugcauugcauauca

SEQ ID NO: 181575 - RNA, 17 nt, Human herpesvirus 7
uugccaaaagcuugaaa

SEQ ID NO: 181576 - RNA, 14 nt, Human herpesvirus 7
uugcagcugugaua

SEQ ID NO: 181577 - RNA, 22 nt, Human herpesvirus 7
uugcagcuucuaaaugugcuaa

SEQ ID NO: 181578 - RNA, 11 nt, Human herpesvirus 7
uugcauaucau

SEQ ID NO: 181579 - RNA, 21 nt, Human herpesvirus 7
uugcaucaggaaaaucuauca

SEQ ID NO: 181580 - RNA, 22 nt, Human herpesvirus 7
uugcaucgaauuuuacaaugca

SEQ ID NO: 181581 - RNA, 17 nt, Human herpesvirus 7
uugcacaucuagauaaa

SEQ ID NO: 181582 - RNA, 13 nt, Human herpesvirus 7
uugcagaggacca

SEQ ID NO: 181583 - RNA, 13 nt, Human herpesvirus 7
uugcagaaauugu

SEQ ID NO: 181584 - RNA, 18 nt, Human herpesvirus 7
uugcagccagaacucaau

SEQ ID NO: 181585 - RNA, 21 nt, Human herpesvirus 7
uugagcaauugauucacauug

SEQ ID NO: 181586 - RNA, 14 nt, Human herpesvirus 7
uugcaaugaaaggu

SEQ ID NO: 181587 - RNA, 20 nt, Human herpesvirus 7
uugcaaugcaaacuucugau

SEQ ID NO: 181588 - RNA, 14 nt, Human herpesvirus 7
uugagaaauaugaa

SEQ ID NO: 181589 - RNA, 18 nt, Human herpesvirus 7
uugaauauauacgcuuaa

SEQ ID NO: 181590 - RNA, 14 nt, Human herpesvirus 7
uugaaguugaacaa

SEQ ID NO: 181591 - RNA, 17 nt, Human herpesvirus 7
uugaagauaaguauaaa

SEQ ID NO: 181592 - RNA, 22 nt, Human herpesvirus 7
uugaauuccgauuuaagugaac

SEQ ID NO: 181593 - RNA, 13 nt, Human herpesvirus 7
uugacaaucuugg

SEQ ID NO: 181594 - RNA, 14 nt, Human herpesvirus 7
uugaauguggaauu

SEQ ID NO: 181595 - RNA, 16 nt, Human herpesvirus 7
uugaauguuuacaugu

SEQ ID NO: 181596 - RNA, 18 nt, Human herpesvirus 7
uugaauuaauucuagcag

SEQ ID NO: 181597 - RNA, 14 nt, Human herpesvirus 7
uugaaaaugcauug

SEQ ID NO: 181598 - RNA, 14 nt, Human herpesvirus 7
uugaaaagucauua

SEQ ID NO: 181599 - RNA, 16 nt, Human herpesvirus 7
uugaaaagucauuauu

SEQ ID NO: 181600 - RNA, 14 nt, Human herpesvirus 7
uugaaccuuaacau

SEQ ID NO: 181601 - RNA, 14 nt, Human herpesvirus 7
uugaacaauggugu

SEQ ID NO: 181602 - RNA, 23 nt, Human herpesvirus 7
uugaaauucuguggagugagaaa

SEQ ID NO: 181603 - RNA, 12 nt, Human herpesvirus 7
uugaaaguaaaa

SEQ ID NO: 181604 - RNA, 19 nt, Human herpesvirus 7
uugaaauaaaggaucucuc

SEQ ID NO: 181605 - RNA, 19 nt, Human herpesvirus 7
uugaaauauuuaugccuuu

SEQ ID NO: 181606 - RNA, 15 nt, Human herpesvirus 7
uugaaaucauucuga

SEQ ID NO: 181607 - RNA, 19 nt, Human herpesvirus 7
uugaaaucauucugaauaa

SEQ ID NO: 181608 - RNA, 22 nt, Human herpesvirus 7
uugaaaaaaagauuuaacaugu

SEQ ID NO: 181609 - RNA, 16 nt, Human herpesvirus 7
uugaaaaaacaguuca

SEQ ID NO: 181610 - RNA, 20 nt, Human herpesvirus 7
uucucguuauuuucaaacau

SEQ ID NO: 181611 - RNA, 23 nt, Human herpesvirus 7
uucucguuauuuucaaacaugau

SEQ ID NO: 181612 - RNA, 15 nt, Human herpesvirus 7
uucuccgcacuaaaa

SEQ ID NO: 181613 - RNA, 19 nt, Human herpesvirus 7
uucucacaccuuacuuuua

SEQ ID NO: 181614 - RNA, 21 nt, Human herpesvirus 7
uucuauuuuaaaaaccaugaa

SEQ ID NO: 181615 - RNA, 20 nt, Human herpesvirus 7
uucucaaaaaugauaugaca

SEQ ID NO: 181616 - RNA, 21 nt, Human herpesvirus 7
uucucaaaaaugauaugacau

SEQ ID NO: 181617 - RNA, 22 nt, Human herpesvirus 7
uucuccaugcauauuugaacau

SEQ ID NO: 181618 - RNA, 14 nt, Human herpesvirus 7
uucucccauucaau

SEQ ID NO: 181619 - RNA, 23 nt, Human herpesvirus 7
uucuccacaguccucuagaucaa

SEQ ID NO: 181620 - RNA, 19 nt, Human herpesvirus 7
uucuccaguggcaguacua

SEQ ID NO: 181621 - RNA, 15 nt, Human herpesvirus 7
uucuaggcuugcauu

SEQ ID NO: 181622 - RNA, 17 nt, Human herpesvirus 7
uucuauagaucuugacu

SEQ ID NO: 181623 - RNA, 22 nt, Human herpesvirus 7
uucuauagaucuugacucagau

SEQ ID NO: 181624 - RNA, 16 nt, Human herpesvirus 7
uucuaucucaaaacaa

SEQ ID NO: 181625 - RNA, 20 nt, Human herpesvirus 7
uucuauuagauaaugacaaa

SEQ ID NO: 181626 - RNA, 13 nt, Human herpesvirus 7
uucuauguaugaa

SEQ ID NO: 181627 - RNA, 16 nt, Human herpesvirus 7
uuaaauguguaacaau

SEQ ID NO: 181628 - RNA, 15 nt, Human herpesvirus 7
uuaaaugugucuuac

SEQ ID NO: 181629 - RNA, 12 nt, Human herpesvirus 7
uuaaagugugau

SEQ ID NO: 181630 - RNA, 14 nt, Human herpesvirus 7
uuaaauuuacuuac

SEQ ID NO: 181631 - RNA, 16 nt, Human herpesvirus 7
uuaaauuuccaucuac

SEQ ID NO: 181632 - RNA, 20 nt, Human herpesvirus 7
uuaacauguguauauuugcu

SEQ ID NO: 181633 - RNA, 22 nt, Human herpesvirus 7
uuaacauuaaccacaacuguga

SEQ ID NO: 181634 - RNA, 18 nt, Human herpesvirus 7
uuaacagcucuaucguca

SEQ ID NO: 181635 - RNA, 23 nt, Human herpesvirus 7
uuaacaacagccaaaugugguaa

SEQ ID NO: 181636 - RNA, 13 nt, Human herpesvirus 7
uuaaagaacucca

SEQ ID NO: 181637 - RNA, 20 nt, Human herpesvirus 7
uuaaacuugugaaaauaaca

SEQ ID NO: 181638 - RNA, 20 nt, Human herpesvirus 7
uuaaagaugucuuaauugcc

SEQ ID NO: 181639 - RNA, 17 nt, Human herpesvirus 7
uuaaagcgagcuuucuu

SEQ ID NO: 181640 - RNA, 17 nt, Human herpesvirus 7
uuaaagacggaauuugu

SEQ ID NO: 181641 - RNA, 13 nt, Human herpesvirus 7
uuaaagggggaaa

SEQ ID NO: 181642 - RNA, 12 nt, Human herpesvirus 7
uuaaagcuauuu

SEQ ID NO: 181643 - RNA, 18 nt, Human herpesvirus 7
uuaaaggugguuacauau

SEQ ID NO: 181644 - RNA, 18 nt, Human herpesvirus 7
uuaaauaaccaaaccaca

SEQ ID NO: 181645 - RNA, 19 nt, Human herpesvirus 7
uuaaauacuugcaaugcaa

SEQ ID NO: 181646 - RNA, 18 nt, Human herpesvirus 7
uuaaaucaguuguuggaa

SEQ ID NO: 181647 - RNA, 15 nt, Human herpesvirus 7
uuaaaucauaccaua

SEQ ID NO: 181648 - RNA, 17 nt, Human herpesvirus 7
uuaaaucauaccauaaa

SEQ ID NO: 181649 - RNA, 13 nt, Human herpesvirus 7
uuaacgcugaauu

SEQ ID NO: 181650 - RNA, 15 nt, Human herpesvirus 7
uuaauucuagcagcu

SEQ ID NO: 181651 - RNA, 20 nt, Human herpesvirus 7
uuaauugccgauuccuacaa

SEQ ID NO: 181652 - RNA, 11 nt, Human herpesvirus 7
uuacaaaaaga

SEQ ID NO: 181653 - RNA, 19 nt, Human herpesvirus 7
uuaauugugguacaacaaa

SEQ ID NO: 181654 - RNA, 21 nt, Human herpesvirus 7
uuaauuguuuuuuauuuagcu

SEQ ID NO: 181655 - RNA, 18 nt, Human herpesvirus 7
uuaaccacaacugugaca

SEQ ID NO: 181656 - RNA, 20 nt, Human herpesvirus 7
uuaacgaaacgcuagaaucu

SEQ ID NO: 181657 - RNA, 17 nt, Human herpesvirus 7
uuacagaggacuugaaa

SEQ ID NO: 181658 - RNA, 19 nt, Human herpesvirus 7
uuacaaaaugaguguaauu

SEQ ID NO: 181659 - RNA, 22 nt, Human herpesvirus 7
uuacaacaaagaaaaaacuaac

SEQ ID NO: 181660 - RNA, 15 nt, Human herpesvirus 7
uuacaaggugacaga

SEQ ID NO: 181661 - RNA, 15 nt, Human herpesvirus 7
uuacaacuuugccaa

SEQ ID NO: 181662 - RNA, 22 nt, Human herpesvirus 7
uuacaaugcagccuacuuuuaa

SEQ ID NO: 181663 - RNA, 13 nt, Human herpesvirus 7
uuacuauuugacu

SEQ ID NO: 181664 - RNA, 15 nt, Human herpesvirus 7
uuacuauuugacugg

SEQ ID NO: 181665 - RNA, 17 nt, Human herpesvirus 7
uuacucgaugcuucaau

SEQ ID NO: 181666 - RNA, 23 nt, Human herpesvirus 7
uuacuggaugauguuauacauaa

SEQ ID NO: 181667 - RNA, 22 nt, Human herpesvirus 7
uuacuuggaaacaaauugugga

SEQ ID NO: 181668 - RNA, 20 nt, Human herpesvirus 7
uuacuuauuuuaaauuuuuc

SEQ ID NO: 181669 - RNA, 11 nt, Human herpesvirus 7
uuacuuucaua

SEQ ID NO: 181670 - RNA, 12 nt, Human herpesvirus 7
uuacacaggaau

SEQ ID NO: 181671 - RNA, 18 nt, Human herpesvirus 7
uuacaguaaauugcaacu

SEQ ID NO: 181672 - RNA, 17 nt, Human herpesvirus 7
uuacgugaugccauaau

SEQ ID NO: 181673 - RNA, 21 nt, Human herpesvirus 7
uuacgugaugccauaauuuca

SEQ ID NO: 181674 - RNA, 17 nt, Human herpesvirus 7
uuaguucuaauuuuggc

SEQ ID NO: 181675 - RNA, 19 nt, Human herpesvirus 7
uuagugauagaguacaugu

SEQ ID NO: 181676 - RNA, 18 nt, Human herpesvirus 7
uuagguaauagcuuuaaa

SEQ ID NO: 181677 - RNA, 13 nt, Human herpesvirus 7
uuagaaaucuuuc

SEQ ID NO: 181678 - RNA, 13 nt, Human herpesvirus 7
uuaggacuuuaca

SEQ ID NO: 181679 - RNA, 15 nt, Human herpesvirus 7
uuagggaauguaauu

SEQ ID NO: 181680 - RNA, 18 nt, Human herpesvirus 7
uuaggaaucagaccagca

SEQ ID NO: 181681 - RNA, 18 nt, Human herpesvirus 7
uuaggcagcgcuugauac

SEQ ID NO: 181682 - RNA, 14 nt, Human herpesvirus 7
uguugaucuucaau

SEQ ID NO: 181683 - RNA, 12 nt, Human herpesvirus 7
uguugauucucu

SEQ ID NO: 181684 - RNA, 22 nt, Human herpesvirus 7
uguugacuauauuuuguuaaga

SEQ ID NO: 181685 - RNA, 19 nt, Human herpesvirus 7
uguugagcuuuucuuuccg

SEQ ID NO: 181686 - RNA, 20 nt, Human herpesvirus 7
uguucgguguuuuaagauac

SEQ ID NO: 181687 - RNA, 15 nt, Human herpesvirus 7
uguucucaauagcau

SEQ ID NO: 181688 - RNA, 17 nt, Human herpesvirus 7
uguucgcaaauguacaa

SEQ ID NO: 181689 - RNA, 17 nt, Human herpesvirus 7
uguuauuguaucuauga

SEQ ID NO: 181690 - RNA, 23 nt, Human herpesvirus 7
uguucaaaaaagauuccugauga

SEQ ID NO: 181691 - RNA, 18 nt, Human herpesvirus 7
uguucaggcaacauuaau

SEQ ID NO: 181692 - RNA, 15 nt, Human herpesvirus 7
uguucaaucacauac

SEQ ID NO: 181693 - RNA, 13 nt, Human herpesvirus 7
uguucauuaucac

SEQ ID NO: 181694 - RNA, 13 nt, Human herpesvirus 7
ugugauguacugc

SEQ ID NO: 181695 - RNA, 12 nt, Human herpesvirus 7
uguuaauaucua

SEQ ID NO: 181696 - RNA, 21 nt, Human herpesvirus 7
uguuacuauuugacuggguag

SEQ ID NO: 181697 - RNA, 19 nt, Human herpesvirus 7
uuaaacagcguucaaucaa

SEQ ID NO: 181698 - RNA, 20 nt, Human herpesvirus 7
uuaaaaugggaauguuaacc

SEQ ID NO: 181699 - RNA, 15 nt, Human herpesvirus 7
uuaaaacuuggugaa

SEQ ID NO: 181700 - RNA, 23 nt, Human herpesvirus 7
uuaaaauuaauaauauuaguauu

SEQ ID NO: 181701 - RNA, 15 nt, Human herpesvirus 7
uuaaaauucaguauu

SEQ ID NO: 181702 - RNA, 15 nt, Human herpesvirus 7
uuaaaaucuacugua

SEQ ID NO: 181703 - RNA, 20 nt, Human herpesvirus 7
uuaaaaaaaaaaccacaaaa

SEQ ID NO: 181704 - RNA, 18 nt, Human herpesvirus 7
uguuuugacuuauggugu

SEQ ID NO: 181705 - RNA, 15 nt, Human herpesvirus 7
uguuuucagcgccaa

SEQ ID NO: 181706 - RNA, 15 nt, Human herpesvirus 7
uguuuuuuucauaca

SEQ ID NO: 181707 - RNA, 14 nt, Human herpesvirus 7
uuaaaaauaucaga

SEQ ID NO: 181708 - RNA, 14 nt, Human herpesvirus 7
uuaaaaauuaacag

SEQ ID NO: 181709 - RNA, 15 nt, Human herpesvirus 7
uuaaaaaccaugaaa

SEQ ID NO: 181710 - RNA, 23 nt, Human herpesvirus 7
uguuguagguaauuucuuauaau

SEQ ID NO: 181711 - RNA, 22 nt, Human herpesvirus 7
uguuguccagacagcuguauau

SEQ ID NO: 181712 - RNA, 21 nt, Human herpesvirus 7
uguuuaaaugaagagaauuua

SEQ ID NO: 181713 - RNA, 13 nt, Human herpesvirus 7
uguuuaagacauu

SEQ ID NO: 181714 - RNA, 20 nt, Human herpesvirus 7
uguuuacaaacauguuccau

SEQ ID NO: 181715 - RNA, 23 nt, Human herpesvirus 7
uguuuccgaucuaaagacacuua

SEQ ID NO: 181716 - RNA, 23 nt, Human herpesvirus 7
uguuucaagaauggcugaugaua

SEQ ID NO: 181717 - RNA, 13 nt, Human herpesvirus 7
uguuucagcuuuu

SEQ ID NO: 181718 - RNA, 9 nt, Human herpesvirus 7
uguuugauc

SEQ ID NO: 181719 - RNA, 13 nt, Human herpesvirus 7
uguuugaucaaaa

SEQ ID NO: 181720 - RNA, 18 nt, Human herpesvirus 7
uggcucugaucuaaagua

SEQ ID NO: 181721 - RNA, 23 nt, Human herpesvirus 7
uggcuuaaguuuuuaaacuuauc

SEQ ID NO: 181722 - RNA, 12 nt, Human herpesvirus 7
ugggcacauuug

SEQ ID NO: 181723 - RNA, 14 nt, Human herpesvirus 7
ugggcguaacugug

SEQ ID NO: 181724 - RNA, 16 nt, Human herpesvirus 7
ugggcguaacugugac

SEQ ID NO: 181725 - RNA, 18 nt, Human herpesvirus 7
ugggcguaacugugacgu

SEQ ID NO: 181726 - RNA, 12 nt, Human herpesvirus 7
ugguaaugucau

SEQ ID NO: 181727 - RNA, 18 nt, Human herpesvirus 7
ugguaauuaauaaacagc

SEQ ID NO: 181728 - RNA, 19 nt, Human herpesvirus 7
ugguaaaaaauuacuugcu

SEQ ID NO: 181729 - RNA, 21 nt, Human herpesvirus 7
ugguaaaaaauuacuugcuau

SEQ ID NO: 181730 - RNA, 20 nt, Human herpesvirus 7
ugcuaaaaacgacguaacaa

SEQ ID NO: 181731 - RNA, 17 nt, Human herpesvirus 7
ugcuaacaaguauguca

SEQ ID NO: 181732 - RNA, 22 nt, Human herpesvirus 7
ugcuagaaacgucccugugaca

SEQ ID NO: 181733 - RNA, 23 nt, Human herpesvirus 7
ugcuagaaacgucccugugacag

SEQ ID NO: 181734 - RNA, 21 nt, Human herpesvirus 7
ugcuagaagacugcaaccuga

SEQ ID NO: 181735 - RNA, 15 nt, Human herpesvirus 7
uggcaaacagucuga

SEQ ID NO: 181736 - RNA, 16 nt, Human herpesvirus 7
uggcaacaguucaaaa

SEQ ID NO: 181737 - RNA, 15 nt, Human herpesvirus 7
uggcaaaagauuuaa

SEQ ID NO: 181738 - RNA, 21 nt, Human herpesvirus 7
uggauuuucuguaaucauaua

SEQ ID NO: 181739 - RNA, 17 nt, Human herpesvirus 7
uggaugcuggaaaacau

SEQ ID NO: 181740 - RNA, 16 nt, Human herpesvirus 7
uggauucuacauagaa

SEQ ID NO: 181741 - RNA, 22 nt, Human herpesvirus 7
uggcucaagcacaaucacguga

SEQ ID NO: 181742 - RNA, 22 nt, Human herpesvirus 7
uggcaacucuuccuuucuuuga

SEQ ID NO: 181743 - RNA, 21 nt, Human herpesvirus 7
uggcacauaaguugacaaugu

SEQ ID NO: 181744 - RNA, 14 nt, Human herpesvirus 7
uggcaauuguaaaa

SEQ ID NO: 181745 - RNA, 16 nt, Human herpesvirus 7
ugucuaaaaguacagu

SEQ ID NO: 181746 - RNA, 20 nt, Human herpesvirus 7
ugucuacaauuucuggcaau

SEQ ID NO: 181747 - RNA, 22 nt, Human herpesvirus 7
ugucuacaauuucuggcaauaa

SEQ ID NO: 181748 - RNA, 13 nt, Human herpesvirus 7
ugucuaucauuuc

SEQ ID NO: 181749 - RNA, 18 nt, Human herpesvirus 7
ugugacucggaaccgaga

SEQ ID NO: 181750 - RNA, 13 nt, Human herpesvirus 7
ugugaguuucuac

SEQ ID NO: 181751 - RNA, 12 nt, Human herpesvirus 7
uguaugcaagaa

SEQ ID NO: 181752 - RNA, 19 nt, Human herpesvirus 7
uguaugcaagaaaguccaa

SEQ ID NO: 181753 - RNA, 17 nt, Human herpesvirus 7
uguaugucuacaauggu

SEQ ID NO: 181754 - RNA, 13 nt, Human herpesvirus 7
ugucaacuuugcg

SEQ ID NO: 181755 - RNA, 17 nt, Human herpesvirus 7
ugucaauaaucaauaaa

SEQ ID NO: 181756 - RNA, 15 nt, Human herpesvirus 7
ugucacacuuauucc

SEQ ID NO: 181757 - RNA, 13 nt, Human herpesvirus 7
uguauacaacuuu

SEQ ID NO: 181758 - RNA, 14 nt, Human herpesvirus 7
uguauaaucaaguc

SEQ ID NO: 181759 - RNA, 16 nt, Human herpesvirus 7
uguagauggcaccaau

SEQ ID NO: 181760 - RNA, 17 nt, Human herpesvirus 7
ugguucagcgugacaga

SEQ ID NO: 181761 - RNA, 12 nt, Human herpesvirus 7
ugguugugcaau

SEQ ID NO: 181762 - RNA, 18 nt, Human herpesvirus 7
ugguuauuggaaaugaga

SEQ ID NO: 181763 - RNA, 15 nt, Human herpesvirus 7
ugguuacauauccaa

SEQ ID NO: 181764 - RNA, 17 nt, Human herpesvirus 7
ugguggcauauaugaau

SEQ ID NO: 181765 - RNA, 15 nt, Human herpesvirus 7
uggugcuuacgugau

SEQ ID NO: 181766 - RNA, 14 nt, Human herpesvirus 7
ugguacaacaaaca

SEQ ID NO: 181767 - RNA, 19 nt, Human herpesvirus 7
ugguacaacaaacauucca

SEQ ID NO: 181768 - RNA, 22 nt, Human herpesvirus 7
ucaucauauacaauaaugcugu

SEQ ID NO: 181769 - RNA, 14 nt, Human herpesvirus 7
ucaucccugcugau

SEQ ID NO: 181770 - RNA, 13 nt, Human herpesvirus 7
ucacacaaugccu

SEQ ID NO: 181771 - RNA, 19 nt, Human herpesvirus 7
ucaauugaguuuacugcca

SEQ ID NO: 181772 - RNA, 23 nt, Human herpesvirus 7
ucacaacauauagauaaugaagu

SEQ ID NO: 181773 - RNA, 18 nt, Human herpesvirus 7
ucacaaguuaauuuugca

SEQ ID NO: 181774 - RNA, 19 nt, Human herpesvirus 7
ucacaaguuaauuuugcag

SEQ ID NO: 181775 - RNA, 22 nt, Human herpesvirus 7
ucacaaaagcuuugaucuacau

SEQ ID NO: 181776 - RNA, 21 nt, Human herpesvirus 7
ucaugcgauaucugacuggua

SEQ ID NO: 181777 - RNA, 14 nt, Human herpesvirus 7
ucauggacggcauu

SEQ ID NO: 181778 - RNA, 20 nt, Human herpesvirus 7
ucauggaaaauggagcauua

SEQ ID NO: 181779 - RNA, 13 nt, Human herpesvirus 7
ucaugcauugcau

SEQ ID NO: 181780 - RNA, 14 nt, Human herpesvirus 7
ucaugcauugcauu

SEQ ID NO: 181781 - RNA, 18 nt, Human herpesvirus 7
ucaugcauugcauucgau

SEQ ID NO: 181782 - RNA, 16 nt, Human herpesvirus 7
ucaugacgcagcaucc

SEQ ID NO: 181783 - RNA, 19 nt, Human herpesvirus 7
ucaugacuggacacaauca

SEQ ID NO: 181784 - RNA, 20 nt, Human herpesvirus 7
ucaugacuggacacaaucag

SEQ ID NO: 181785 - RNA, 21 nt, Human herpesvirus 7
ucaucuuucuuauaucugaga

SEQ ID NO: 181786 - RNA, 15 nt, Human herpesvirus 7
ucauuauuuguucaa

SEQ ID NO: 181787 - RNA, 14 nt, Human herpesvirus 7
ucauuaacuuuuau

SEQ ID NO: 181788 - RNA, 19 nt, Human herpesvirus 7
ucauuaaaaaaaccaggaa

SEQ ID NO: 181789 - RNA, 16 nt, Human herpesvirus 7
ucauuacagauugcuu

SEQ ID NO: 181790 - RNA, 22 nt, Human herpesvirus 7
ucauuacgccuuaaagucuccg

SEQ ID NO: 181791 - RNA, 19 nt, Human herpesvirus 7
ucauuacucguguugcaaa

SEQ ID NO: 181792 - RNA, 15 nt, Human herpesvirus 7
ucauguuuuaugacu

SEQ ID NO: 181793 - RNA, 20 nt, Human herpesvirus 7
ucauguaauuaggaaucaga

SEQ ID NO: 181794 - RNA, 14 nt, Human herpesvirus 7
ucauuccuauuaag

SEQ ID NO: 181795 - RNA, 19 nt, Human herpesvirus 7
ucauugauccuccuugccu

SEQ ID NO: 181796 - RNA, 22 nt, Human herpesvirus 7
ucauugauccuccuugccugca

SEQ ID NO: 181797 - RNA, 23 nt, Human herpesvirus 7
ucauugauccuccuugccugcaa

SEQ ID NO: 181798 - RNA, 21 nt, Human herpesvirus 7
uccaaguuuuaacaaucuaag

SEQ ID NO: 181799 - RNA, 18 nt, Human herpesvirus 7
uccaaguuuuacagaaau

SEQ ID NO: 181800 - RNA, 13 nt, Human herpesvirus 7
uccaauaaugcau

SEQ ID NO: 181801 - RNA, 15 nt, Human herpesvirus 7
uccaauaaugcauca

SEQ ID NO: 181802 - RNA, 21 nt, Human herpesvirus 7
uccaaucauaauuuucaugaa

SEQ ID NO: 181803 - RNA, 15 nt, Human herpesvirus 7
uccacaguccucuag

SEQ ID NO: 181804 - RNA, 20 nt, Human herpesvirus 7
uccacaguccucuagaucaa

SEQ ID NO: 181805 - RNA, 18 nt, Human herpesvirus 7
uccggaagagacugucau

SEQ ID NO: 181806 - RNA, 19 nt, Human herpesvirus 7
uccggguaacgcaucucca

SEQ ID NO: 181807 - RNA, 15 nt, Human herpesvirus 7
uccguaacugcauua

SEQ ID NO: 181808 - RNA, 22 nt, Human herpesvirus 7
uccgugacaaagcauacuuuaa

SEQ ID NO: 181809 - RNA, 19 nt, Human herpesvirus 7
uccuaaauacggaccaaga

SEQ ID NO: 181810 - RNA, 13 nt, Human herpesvirus 7
uccuaacuauaau

SEQ ID NO: 181811 - RNA, 15 nt, Human herpesvirus 7
uccuaagcuuuucag

SEQ ID NO: 181812 - RNA, 12 nt, Human herpesvirus 7
uccucuggaucg

SEQ ID NO: 181813 - RNA, 16 nt, Human herpesvirus 7
uccuagaaacacggaa

SEQ ID NO: 181814 - RNA, 17 nt, Human herpesvirus 7
ucccgcagagauuaccu

SEQ ID NO: 181815 - RNA, 15 nt, Human herpesvirus 7
ucccauucaauaaug

SEQ ID NO: 181816 - RNA, 17 nt, Human herpesvirus 7
ucccagagaccuaugaa

SEQ ID NO: 181817 - RNA, 15 nt, Human herpesvirus 7
ucccagaaauuucaa

SEQ ID NO: 181818 - RNA, 16 nt, Human herpesvirus 7
ucccagaaauuucaaa

SEQ ID NO: 181819 - RNA, 21 nt, Human herpesvirus 7
ucgaacuguuacaacuuugcc

SEQ ID NO: 181820 - RNA, 18 nt, Human herpesvirus 7
ucgaaaugaaauauucua

SEQ ID NO: 181821 - RNA, 21 nt, Human herpesvirus 7
uccuuugaaaaggcaucgcau

SEQ ID NO: 181822 - RNA, 17 nt, Human herpesvirus 7
uccuggauuucagcauu

SEQ ID NO: 181823 - RNA, 16 nt, Human herpesvirus 7
uccugcuugcacaaag

SEQ ID NO: 181824 - RNA, 22 nt, Human herpesvirus 7
ucgcugaagaacauuaauauca

SEQ ID NO: 181825 - RNA, 13 nt, Human herpesvirus 7
ucgcugucuuuaa

SEQ ID NO: 181826 - RNA, 19 nt, Human herpesvirus 7
ucgaauuuguucaauugcc

SEQ ID NO: 181827 - RNA, 17 nt, Human herpesvirus 7
ucgacagaaacauguau

SEQ ID NO: 181828 - RNA, 18 nt, Human herpesvirus 7
ucgugcuuuagaguauga

SEQ ID NO: 181829 - RNA, 19 nt, Human herpesvirus 7
ucguauagucaggaucucc

SEQ ID NO: 181830 - RNA, 16 nt, Human herpesvirus 7
ucggugucuucuugca

SEQ ID NO: 181831 - RNA, 22 nt, Human herpesvirus 7
ucguaacaaauucaaccacaga

SEQ ID NO: 181832 - RNA, 20 nt, Human herpesvirus 7
ucggaauuugauuccaucuc

SEQ ID NO: 181833 - RNA, 18 nt, Human herpesvirus 7
ucggcaauacuaguauuu

SEQ ID NO: 181834 - RNA, 19 nt, Human herpesvirus 7
ucuaaggaauguggcuuaa

SEQ ID NO: 181835 - RNA, 18 nt, Human herpesvirus 7
ucuaagagcuuuugcaaa

SEQ ID NO: 181836 - RNA, 19 nt, Human herpesvirus 7
ucuaagguuuuuacauaaa

SEQ ID NO: 181837 - RNA, 14 nt, Human herpesvirus 7
ucuaaguacuucug

SEQ ID NO: 181838 - RNA, 14 nt, Human herpesvirus 7
ucuaagucaauuaa

SEQ ID NO: 181839 - RNA, 23 nt, Human herpesvirus 7
ucuaagucuacaucaucaacaua

SEQ ID NO: 181840 - RNA, 14 nt, Human herpesvirus 7
ucuaaauucuuuaa

SEQ ID NO: 181841 - RNA, 22 nt, Human herpesvirus 7
ucuaaauaugaugaaacuucca

SEQ ID NO: 181842 - RNA, 20 nt, Human herpesvirus 7
ucuaaaucacuaguccuaaa

SEQ ID NO: 181843 - RNA, 22 nt, Human herpesvirus 7
ucuaaaauuuucuuagcuuuca

SEQ ID NO: 181844 - RNA, 20 nt, Human herpesvirus 7
ucuaaaguggagacaaucua

SEQ ID NO: 181845 - RNA, 17 nt, Human herpesvirus 7
ucguucauugauuauau

SEQ ID NO: 181846 - RNA, 21 nt, Human herpesvirus 7
ucguuguugguguguuacauc

SEQ ID NO: 181847 - RNA, 16 nt, Human herpesvirus 7
ucucagcucuguaaua

SEQ ID NO: 181848 - RNA, 22 nt, Human herpesvirus 7
ucucacuuauuuuagaaaguga

SEQ ID NO: 181849 - RNA, 12 nt, Human herpesvirus 7
ucucauagcuua

SEQ ID NO: 181850 - RNA, 23 nt, Human herpesvirus 7
ucucaaguagccgaaaaagaauu

SEQ ID NO: 181851 - RNA, 13 nt, Human herpesvirus 7
ucucaaucaaaau

SEQ ID NO: 181852 - RNA, 21 nt, Human herpesvirus 7
ucucaaaacaaacucugcuuc

SEQ ID NO: 181853 - RNA, 21 nt, Human herpesvirus 7
ucuauuucaauuaaugcauug

SEQ ID NO: 181854 - RNA, 19 nt, Human herpesvirus 7
ucucaaaauuauaacuuua

SEQ ID NO: 181855 - RNA, 20 nt, Human herpesvirus 7
ucucaaaauuauaacuuuau

SEQ ID NO: 181856 - RNA, 23 nt, Human herpesvirus 7
ucuaauuuaugauacuuguucaa

SEQ ID NO: 181857 - RNA, 13 nt, Human herpesvirus 7
ucuaauuaaucug

SEQ ID NO: 181858 - RNA, 15 nt, Human herpesvirus 7
ucuaauuaaucugca

SEQ ID NO: 181859 - RNA, 15 nt, Human herpesvirus 7
ucugcacuaucuccu

SEQ ID NO: 181860 - RNA, 21 nt, Human herpesvirus 7
ucugauucuuauucuacacau

SEQ ID NO: 181861 - RNA, 12 nt, Human herpesvirus 7
ucugcauauaau

SEQ ID NO: 181862 - RNA, 18 nt, Human herpesvirus 7
ucuccaagccucagauga

SEQ ID NO: 181863 - RNA, 22 nt, Human herpesvirus 7
ucuccaaaucaaaaugagauuu

SEQ ID NO: 181864 - RNA, 17 nt, Human herpesvirus 7
ucucauugacauguuuc

SEQ ID NO: 181865 - RNA, 16 nt, Human herpesvirus 7
ucucaucacucuuuuc

SEQ ID NO: 181866 - RNA, 21 nt, Human herpesvirus 7
ucucaugcgauaucugacugg

SEQ ID NO: 181867 - RNA, 13 nt, Human herpesvirus 7
ucuccaugcauau

SEQ ID NO: 181868 - RNA, 17 nt, Human herpesvirus 7
ucuccuggaaagcucau

SEQ ID NO: 181869 - RNA, 21 nt, Human herpesvirus 7
ucuccuggaaagcucauuuca

SEQ ID NO: 181870 - RNA, 19 nt, Human herpesvirus 7
ugacauuguacaauuacaa

SEQ ID NO: 181871 - RNA, 23 nt, Human herpesvirus 7
ugacauuuuuaccuccauaugaa

SEQ ID NO: 181872 - RNA, 14 nt, Human herpesvirus 7
ugaccgcaugugaa

SEQ ID NO: 181873 - RNA, 23 nt, Human herpesvirus 7
ugaggaagauaagcucaaaaagu

SEQ ID NO: 181874 - RNA, 22 nt, Human herpesvirus 7
ugaggaaaugucuuugucauga

SEQ ID NO: 181875 - RNA, 20 nt, Human herpesvirus 7
ugacgggaaaaaggauuuga

SEQ ID NO: 181876 - RNA, 17 nt, Human herpesvirus 7
ugacuaaagcuacagcu

SEQ ID NO: 181877 - RNA, 16 nt, Human herpesvirus 7
ugauacaaucgauaaa

SEQ ID NO: 181878 - RNA, 18 nt, Human herpesvirus 7
ugauaauaagauguguug

SEQ ID NO: 181879 - RNA, 20 nt, Human herpesvirus 7
ugaguguuguaacaacuagc

SEQ ID NO: 181880 - RNA, 16 nt, Human herpesvirus 7
ugauucuuauucuaca

SEQ ID NO: 181881 - RNA, 13 nt, Human herpesvirus 7
ugauugaauuugu

SEQ ID NO: 181882 - RNA, 12 nt, Human herpesvirus 7
ugauucugccau

SEQ ID NO: 181883 - RNA, 14 nt, Human herpesvirus 7
ugauucugccauua

SEQ ID NO: 181884 - RNA, 20 nt, Human herpesvirus 7
ugauucucucucuauuacac

SEQ ID NO: 181885 - RNA, 21 nt, Human herpesvirus 7
ugauucgcuaacuuugcuauu

SEQ ID NO: 181886 - RNA, 21 nt, Human herpesvirus 7
ugauuauuauaacuuguaauu

SEQ ID NO: 181887 - RNA, 14 nt, Human herpesvirus 7
ugauuccaucucac

SEQ ID NO: 181888 - RNA, 18 nt, Human herpesvirus 7
ugauuccaucucacuuau

SEQ ID NO: 181889 - RNA, 19 nt, Human herpesvirus 7
ugauuagcgcgugaacaaa

SEQ ID NO: 181890 - RNA, 22 nt, Human herpesvirus 7
ugauagaguacaugugucguca

SEQ ID NO: 181891 - RNA, 18 nt, Human herpesvirus 7
ugauacauucgcaaggaa

SEQ ID NO: 181892 - RNA, 15 nt, Human herpesvirus 7
ugaaucugcaaagaa

SEQ ID NO: 181893 - RNA, 18 nt, Human herpesvirus 7
ugaaucugcuaaggcuaa

SEQ ID NO: 181894 - RNA, 17 nt, Human herpesvirus 7
ugaaucauauuuuagua

SEQ ID NO: 181895 - RNA, 23 nt, Human herpesvirus 7
ugaauagguaucuuuacuuucau

SEQ ID NO: 181896 - RNA, 11 nt, Human herpesvirus 7
ugaaucaaauu

SEQ ID NO: 181897 - RNA, 15 nt, Human herpesvirus 7
ugaaucaacagccau

SEQ ID NO: 181898 - RNA, 13 nt, Human herpesvirus 7
ugacaguccauuc

SEQ ID NO: 181899 - RNA, 22 nt, Human herpesvirus 7
ugacaguuccuaaauaauucac

SEQ ID NO: 181900 - RNA, 21 nt, Human herpesvirus 7
ugacauaaucauggaaaaugg

SEQ ID NO: 181901 - RNA, 21 nt, Human herpesvirus 7
ugaaugugcuuuagaauuaga

SEQ ID NO: 181902 - RNA, 13 nt, Human herpesvirus 7
ugaauuaaggugg

SEQ ID NO: 181903 - RNA, 17 nt, Human herpesvirus 7
ugacauucuuccagaaa

SEQ ID NO: 181904 - RNA, 16 nt, Human herpesvirus 7
ugacauugaagcuauu

SEQ ID NO: 181905 - RNA, 16 nt, Human herpesvirus 7
ugaaacucgaaacugg

SEQ ID NO: 181906 - RNA, 22 nt, Human herpesvirus 7
ugaauaacgucauaaucaucuu

SEQ ID NO: 181907 - RNA, 14 nt, Human herpesvirus 7
ugaaguuugcugaa

SEQ ID NO: 181908 - RNA, 22 nt, Human herpesvirus 7
ugaauaaagauuagcuauuaua

SEQ ID NO: 181909 - RNA, 16 nt, Human herpesvirus 7
ugaaauaaacauuuca

SEQ ID NO: 181910 - RNA, 18 nt, Human herpesvirus 7
ugaaacguuucaaaucaa

SEQ ID NO: 181911 - RNA, 20 nt, Human herpesvirus 7
ugaaacguuucaaaucaaug

SEQ ID NO: 181912 - RNA, 22 nt, Human herpesvirus 7
ugaaacacauucugucuuggaa

SEQ ID NO: 181913 - RNA, 19 nt, Human herpesvirus 7
ugaaaauauauuccaacuc

SEQ ID NO: 181914 - RNA, 21 nt, Human herpesvirus 7
ugaaaaugcccucagaacugu

SEQ ID NO: 181915 - RNA, 13 nt, Human herpesvirus 7
ugaaaaucuccuu

SEQ ID NO: 181916 - RNA, 16 nt, Human herpesvirus 7
ugaaaagucugugaca

SEQ ID NO: 181917 - RNA, 11 nt, Human herpesvirus 7
ugaaaauaaca

SEQ ID NO: 181918 - RNA, 20 nt, Human herpesvirus 7
ugaaaaaacaguucaagaaa

SEQ ID NO: 181919 - RNA, 22 nt, Human herpesvirus 7
ugaaaaaacaguucaagaaaua

SEQ ID NO: 181920 - RNA, 18 nt, Human herpesvirus 7
ugaaaaaauaaauucuga

SEQ ID NO: 181921 - RNA, 16 nt, Human herpesvirus 7
ucuuuuucaaauggau

SEQ ID NO: 181922 - RNA, 15 nt, Human herpesvirus 7
ucuuuuugaacagaa

SEQ ID NO: 181923 - RNA, 16 nt, Human herpesvirus 7
ugaaaaauaaauacua

SEQ ID NO: 181924 - RNA, 19 nt, Human herpesvirus 7
ugaaaacaauuaagaauca

SEQ ID NO: 181925 - RNA, 18 nt, Human herpesvirus 7
ugaaaaauuuuuuacugu

SEQ ID NO: 181926 - RNA, 16 nt, Human herpesvirus 7
ugaaaacuaacaucuu

SEQ ID NO: 181927 - RNA, 19 nt, Human herpesvirus 7
ugaaaacuuggaaaacaau

SEQ ID NO: 181928 - RNA, 20 nt, Human herpesvirus 7
ugaaaacauuagcauugaaa

SEQ ID NO: 181929 - RNA, 22 nt, Human herpesvirus 7
ugaaaacauugcuguucuugcu

SEQ ID NO: 181930 - RNA, 14 nt, Human herpesvirus 7
ucugguaaugucau

SEQ ID NO: 181931 - RNA, 18 nt, Human herpesvirus 7
ucuggauucaagaaauca

SEQ ID NO: 181932 - RNA, 22 nt, Human herpesvirus 7
ucuggauucaagaaaucagauu

SEQ ID NO: 181933 - RNA, 22 nt, Human herpesvirus 7
ucuuuuaggggaagaaucaaga

SEQ ID NO: 181934 - RNA, 21 nt, Human herpesvirus 7
ucuuuucagugaagcuaaaau

SEQ ID NO: 181935 - RNA, 15 nt, Human herpesvirus 7
ucuuuuacagaagaa

SEQ ID NO: 181936 - RNA, 18 nt, Human herpesvirus 7
ucugucuccaaaucaaaa

SEQ ID NO: 181937 - RNA, 14 nt, Human herpesvirus 7
ucugugacuuagaa

SEQ ID NO: 181938 - RNA, 15 nt, Human herpesvirus 7
ucugugacuuagaaa

SEQ ID NO: 181939 - RNA, 18 nt, Human herpesvirus 7
ucugguugauuugagcag

SEQ ID NO: 181940 - RNA, 17 nt, Human herpesvirus 7
ucugguuucuguugacu

SEQ ID NO: 181941 - RNA, 19 nt, Human herpesvirus 7
ucugguuucuguugacuaa

SEQ ID NO: 181942 - RNA, 19 nt, Human herpesvirus 7
ucuguaaaauuuaaauacu

SEQ ID NO: 181943 - RNA, 17 nt, Human herpesvirus 7
ucugucaccacacucau

SEQ ID NO: 181944 - RNA, 20 nt, Human herpesvirus 7
ugcauguugcuaguauguca

SEQ ID NO: 181945 - RNA, 21 nt, Human herpesvirus 7
ugcauguugcuaguaugucag

SEQ ID NO: 181946 - RNA, 22 nt, Human herpesvirus 7
ugcauguguacuaaagccaaug

SEQ ID NO: 181947 - RNA, 18 nt, Human herpesvirus 7
ugcauuauauccaauaau

SEQ ID NO: 181948 - RNA, 20 nt, Human herpesvirus 7
ugcaucgaauuuuacaaugc

SEQ ID NO: 181949 - RNA, 19 nt, Human herpesvirus 7
ugcaucuccuguaaccauu

SEQ ID NO: 181950 - RNA, 20 nt, Human herpesvirus 7
ugcaucuccuguaaccauuu

SEQ ID NO: 181951 - RNA, 13 nt, Human herpesvirus 7
ugcaugcuaauau

SEQ ID NO: 181952 - RNA, 17 nt, Human herpesvirus 7
ugcaugcuaauauuucc

SEQ ID NO: 181953 - RNA, 14 nt, Human herpesvirus 7
ugcaugaugcaccg

SEQ ID NO: 181954 - RNA, 23 nt, Human herpesvirus 7
ugcaugaugcaccgcacguugau

SEQ ID NO: 181955 - RNA, 20 nt, Human herpesvirus 7
ugcaucaggaaaaucuauca

SEQ ID NO: 181956 - RNA, 21 nt, Human herpesvirus 7
ugcaucaggaaaaucuaucac

SEQ ID NO: 181957 - RNA, 13 nt, Human herpesvirus 7
ugcauccaaagaa

SEQ ID NO: 181958 - RNA, 17 nt, Human herpesvirus 7
ugcaucaaaacauauca

SEQ ID NO: 181959 - RNA, 15 nt, Human herpesvirus 7
ugcauacaguuuauu

SEQ ID NO: 181960 - RNA, 23 nt, Human herpesvirus 7
ugcauauaauaaaggaaagacaa

SEQ ID NO: 181961 - RNA, 19 nt, Human herpesvirus 7
ugccauaauuucagcacug

SEQ ID NO: 181962 - RNA, 19 nt, Human herpesvirus 7
ugccaucuauaaacauucu

SEQ ID NO: 181963 - RNA, 20 nt, Human herpesvirus 7
ugccaucuauaaacauucua

SEQ ID NO: 181964 - RNA, 12 nt, Human herpesvirus 7
ugccauuacuga

SEQ ID NO: 181965 - RNA, 20 nt, Human herpesvirus 7
ugauuucaauaaucaaugca

SEQ ID NO: 181966 - RNA, 22 nt, Human herpesvirus 7
ugcaaacucacuaaugccguca

SEQ ID NO: 181967 - RNA, 21 nt, Human herpesvirus 7
ugcaaauuguaaauucuccaa

SEQ ID NO: 181968 - RNA, 17 nt, Human herpesvirus 7
ugcaacucuucuucaga

SEQ ID NO: 181969 - RNA, 15 nt, Human herpesvirus 7
ugcagccuacuuuua

SEQ ID NO: 181970 - RNA, 16 nt, Human herpesvirus 7
ugcauaaauaauaaca

SEQ ID NO: 181971 - RNA, 21 nt, Human herpesvirus 7
ugcgcuuggcaaacagucuga

SEQ ID NO: 181972 - RNA, 20 nt, Human herpesvirus 7
ugcggcucucuguucgcuug

SEQ ID NO: 181973 - RNA, 21 nt, Human herpesvirus 7
ugcgucucuuugccuguuaaa

SEQ ID NO: 181974 - RNA, 14 nt, Human herpesvirus 7
ugcguguguucaaa

SEQ ID NO: 181975 - RNA, 20 nt, Human herpesvirus 7
ugcguugcuuaaaaacagua

SEQ ID NO: 181976 - RNA, 22 nt, Human herpesvirus 7
ugccgccauguauugucuuaca

SEQ ID NO: 181977 - RNA, 18 nt, Human herpesvirus 7
ugccggccgggugcugcg

SEQ ID NO: 181978 - RNA, 17 nt, Human herpesvirus 7
ugcccccagaacuuguu

SEQ ID NO: 181979 - RNA, 21 nt, Human herpesvirus 7
ugccccuaaacaauuauauaa

SEQ ID NO: 181980 - RNA, 15 nt, Human herpesvirus 7
ugccuuucccagaag

SEQ ID NO: 181981 - RNA, 22 nt, Human herpesvirus 7
ugcgaagguugucuguucucau

SEQ ID NO: 181982 - RNA, 22 nt, Human herpesvirus 7
acuugggaguguuuucuagugu

SEQ ID NO: 181983 - RNA, 16 nt, Human herpesvirus 7
acuuggugaagaucau

SEQ ID NO: 181984 - RNA, 21 nt, Human herpesvirus 7
acuuuaaccgcaaaagccacu

SEQ ID NO: 181985 - RNA, 20 nt, Human herpesvirus 7
acuuuacacggucuuaucua

SEQ ID NO: 181986 - RNA, 14 nt, Human herpesvirus 7
acuuuaucauuacu

SEQ ID NO: 181987 - RNA, 23 nt, Human herpesvirus 7
acuuuacguauaucgaucuaaga

SEQ ID NO: 181988 - RNA, 15 nt, Human herpesvirus 7
agaaaacaucccuuu

SEQ ID NO: 181989 - RNA, 18 nt, Human herpesvirus 7
agaaaacaaaucugauaa

SEQ ID NO: 181990 - RNA, 19 nt, Human herpesvirus 7
agaaaacguuuuuaucuga

SEQ ID NO: 181991 - RNA, 21 nt, Human herpesvirus 7
agaaaacguuuuuaucugaua

SEQ ID NO: 181992 - RNA, 22 nt, Human herpesvirus 7
agaaaacguuuuuaucugauaa

SEQ ID NO: 181993 - RNA, 21 nt, Human herpesvirus 7
agaaaacgaaaguaaguccaa

SEQ ID NO: 181994 - RNA, 18 nt, Human herpesvirus 7
agaaaauuuagcaccaac

SEQ ID NO: 181995 - RNA, 21 nt, Human herpesvirus 7
agaaaaucuuugaaucugcua

SEQ ID NO: 181996 - RNA, 18 nt, Human herpesvirus 7
agaaaaucuaccaauaaa

SEQ ID NO: 181997 - RNA, 21 nt, Human herpesvirus 7
agaaaaucaaaaaauaauucc

SEQ ID NO: 181998 - RNA, 23 nt, Human herpesvirus 7
agaaaaucaaaaaauaauuccuu

SEQ ID NO: 181999 - RNA, 23 nt, Human herpesvirus 7
acuuauuccagauaugacaaauu

SEQ ID NO: 182000 - RNA, 22 nt, Human herpesvirus 7
acuuauuauguuagaugugcuu

SEQ ID NO: 182001 - RNA, 20 nt, Human herpesvirus 7
acuuauuugauuauuuugau

SEQ ID NO: 182002 - RNA, 13 nt, Human herpesvirus 7
acuuaugugucac

SEQ ID NO: 182003 - RNA, 16 nt, Human herpesvirus 7
acuugcgaauacuugu

SEQ ID NO: 182004 - RNA, 14 nt, Human herpesvirus 7
acuugccccuaaac

SEQ ID NO: 182005 - RNA, 14 nt, Human herpesvirus 7
acuucaacauacag

SEQ ID NO: 182006 - RNA, 19 nt, Human herpesvirus 7
acuuggaaacaaauugugg

SEQ ID NO: 182007 - RNA, 16 nt, Human herpesvirus 7
acuugcuagcugugau

SEQ ID NO: 182008 - RNA, 17 nt, Human herpesvirus 7
acuugcuaugcuugaaa

SEQ ID NO: 182009 - RNA, 19 nt, Human herpesvirus 7
acugauguaaaauuaauuc

SEQ ID NO: 182010 - RNA, 19 nt, Human herpesvirus 7
acugcaaccugauaaauac

SEQ ID NO: 182011 - RNA, 18 nt, Human herpesvirus 7
acugggaaaaaaaaauca

SEQ ID NO: 182012 - RNA, 19 nt, Human herpesvirus 7
acucuuucugacauuggaa

SEQ ID NO: 182013 - RNA, 19 nt, Human herpesvirus 7
acugaccagagauguuuua

SEQ ID NO: 182014 - RNA, 13 nt, Human herpesvirus 7
acugguacaaggu

SEQ ID NO: 182015 - RNA, 17 nt, Human herpesvirus 7
acugguacaagguguuc

SEQ ID NO: 182016 - RNA, 19 nt, Human herpesvirus 7
acuguauuuguugaucuuc

SEQ ID NO: 182017 - RNA, 16 nt, Human herpesvirus 7
acuguaucuccaaagu

SEQ ID NO: 182018 - RNA, 18 nt, Human herpesvirus 7
acugucaggcucauuuca

SEQ ID NO: 182019 - RNA, 15 nt, Human herpesvirus 7
acucggucuuuuuau

SEQ ID NO: 182020 - RNA, 19 nt, Human herpesvirus 7
acucgugaaguaaauucag

SEQ ID NO: 182021 - RNA, 15 nt, Human herpesvirus 7
acucuucucgaagaa

SEQ ID NO: 182022 - RNA, 18 nt, Human herpesvirus 7
acucuucuucagauucag

SEQ ID NO: 182023 - RNA, 22 nt, Human herpesvirus 7
acucuucuuuauaagcaguuau

SEQ ID NO: 182024 - RNA, 22 nt, Human herpesvirus 7
acucuuguucauaaaccugcua

SEQ ID NO: 182025 - RNA, 15 nt, Human herpesvirus 7
acucuuguugacuau

SEQ ID NO: 182026 - RNA, 21 nt, Human herpesvirus 7
acucuuuauuuaagcuucaaa

SEQ ID NO: 182027 - RNA, 19 nt, Human herpesvirus 7
acucugcauuccacuaaaa

SEQ ID NO: 182028 - RNA, 13 nt, Human herpesvirus 7
acucugucaucaa

SEQ ID NO: 182029 - RNA, 20 nt, Human herpesvirus 7
acucuggcacgcuaugcgaa

SEQ ID NO: 182030 - RNA, 19 nt, Human herpesvirus 7
acucagauucgacuucuaa

SEQ ID NO: 182031 - RNA, 14 nt, Human herpesvirus 7
acucagaagacaua

SEQ ID NO: 182032 - RNA, 21 nt, Human herpesvirus 7
acucaauaaagauugaucacu

SEQ ID NO: 182033 - RNA, 13 nt, Human herpesvirus 7
acucaugaaggau

SEQ ID NO: 182034 - RNA, 19 nt, Human herpesvirus 7
acucauauuuuucauggua

SEQ ID NO: 182035 - RNA, 20 nt, Human herpesvirus 7
acguagaaaaaaacaaugaa

SEQ ID NO: 182036 - RNA, 23 nt, Human herpesvirus 7
acguaaauuauuugguuccgaaa

SEQ ID NO: 182037 - RNA, 22 nt, Human herpesvirus 7
acguaacaacagcagcugcuaa

SEQ ID NO: 182038 - RNA, 16 nt, Human herpesvirus 7
acguaaguuguuauag

SEQ ID NO: 182039 - RNA, 16 nt, Human herpesvirus 7
acgucaugcuguaugu

SEQ ID NO: 182040 - RNA, 16 nt, Human herpesvirus 7
acgucaaucacaucag

SEQ ID NO: 182041 - RNA, 14 nt, Human herpesvirus 7
acuauaaauggaau

SEQ ID NO: 182042 - RNA, 14 nt, Human herpesvirus 7
acuauauugaauua

SEQ ID NO: 182043 - RNA, 17 nt, Human herpesvirus 7
acuauaugaaaacagcu

SEQ ID NO: 182044 - RNA, 16 nt, Human herpesvirus 7
acuagcaaacagugcu

SEQ ID NO: 182045 - RNA, 17 nt, Human herpesvirus 7
acuagcaaacagugcug

SEQ ID NO: 182046 - RNA, 20 nt, Human herpesvirus 7
acuagagaagccacuucuaa

SEQ ID NO: 182047 - RNA, 16 nt, Human herpesvirus 7
acuaggaaacacaauu

SEQ ID NO: 182048 - RNA, 14 nt, Human herpesvirus 7
acuagcagaucucg

SEQ ID NO: 182049 - RNA, 22 nt, Human herpesvirus 7
acguccauugauuaaaaacccu

SEQ ID NO: 182050 - RNA, 16 nt, Human herpesvirus 7
agaaggccacgcugua

SEQ ID NO: 182051 - RNA, 14 nt, Human herpesvirus 7
agaagagcguuucu

SEQ ID NO: 182052 - RNA, 21 nt, Human herpesvirus 7
agaacuguuaaaaucuguucc

SEQ ID NO: 182053 - RNA, 21 nt, Human herpesvirus 7
agaacuccauucgguuuucaa

SEQ ID NO: 182054 - RNA, 17 nt, Human herpesvirus 7
agaacuugcgaauacuu

SEQ ID NO: 182055 - RNA, 13 nt, Human herpesvirus 7
agaagaaugcaag

SEQ ID NO: 182056 - RNA, 13 nt, Human herpesvirus 7
agaagaacauuua

SEQ ID NO: 182057 - RNA, 20 nt, Human herpesvirus 7
agaauauguuaucauuuauc

SEQ ID NO: 182058 - RNA, 18 nt, Human herpesvirus 7
agaauauuuauguucaaa

SEQ ID NO: 182059 - RNA, 19 nt, Human herpesvirus 7
agaauauuuccagcaucac

SEQ ID NO: 182060 - RNA, 17 nt, Human herpesvirus 7
agaauacuacucagaag

SEQ ID NO: 182061 - RNA, 23 nt, Human herpesvirus 7
agaauacuacucagaagacauau

SEQ ID NO: 182062 - RNA, 22 nt, Human herpesvirus 7
agaauaaaucaaccaacauucu

SEQ ID NO: 182063 - RNA, 19 nt, Human herpesvirus 7
agaauaaguucaucauguu

SEQ ID NO: 182064 - RNA, 23 nt, Human herpesvirus 7
agaaugcaacaucuuaaauguca

SEQ ID NO: 182065 - RNA, 13 nt, Human herpesvirus 7
agaaugcaagccu

SEQ ID NO: 182066 - RNA, 18 nt, Human herpesvirus 7
agaauggcgguuguacug

SEQ ID NO: 182067 - RNA, 18 nt, Human herpesvirus 7
agaauguacacagcugga

SEQ ID NO: 182068 - RNA, 14 nt, Human herpesvirus 7
agaauguucuauca

SEQ ID NO: 182069 - RNA, 14 nt, Human herpesvirus 7
agaacagaaugaua

SEQ ID NO: 182070 - RNA, 15 nt, Human herpesvirus 7
agaacagaaugauaa

SEQ ID NO: 182071 - RNA, 17 nt, Human herpesvirus 7
agaacauuuuucuugcu

SEQ ID NO: 182072 - RNA, 23 nt, Human herpesvirus 7
agaacaucugucaggucacaaaa

SEQ ID NO: 182073 - RNA, 17 nt, Human herpesvirus 7
agaacauugucaaagaa

SEQ ID NO: 182074 - RNA, 22 nt, Human herpesvirus 7
agaaccugaaagaaaauaauuu

SEQ ID NO: 182075 - RNA, 20 nt, Human herpesvirus 7
agaaaucuuuauugguaauu

SEQ ID NO: 182076 - RNA, 23 nt, Human herpesvirus 7
agaaaugaaucugcacuaucucc

SEQ ID NO: 182077 - RNA, 21 nt, Human herpesvirus 7
agaaauguaaauuauguggug

SEQ ID NO: 182078 - RNA, 15 nt, Human herpesvirus 7
agaacaaguagaaaa

SEQ ID NO: 182079 - RNA, 22 nt, Human herpesvirus 7
agaacaaguagaaaaugcuguu

SEQ ID NO: 182080 - RNA, 15 nt, Human herpesvirus 7
agaaaguuguacuca

SEQ ID NO: 182081 - RNA, 16 nt, Human herpesvirus 7
agaaauaugcuuccua

SEQ ID NO: 182082 - RNA, 14 nt, Human herpesvirus 7
agaaagucaucuga

SEQ ID NO: 182083 - RNA, 19 nt, Human herpesvirus 7
agaaagggcaugucugccu

SEQ ID NO: 182084 - RNA, 22 nt, Human herpesvirus 7
agaaagauuaauuaucuacccc

SEQ ID NO: 182085 - RNA, 20 nt, Human herpesvirus 7
agaaagcuguuuccaucuua

SEQ ID NO: 182086 - RNA, 15 nt, Human herpesvirus 7
agaaaggagacuuaa

SEQ ID NO: 182087 - RNA, 18 nt, Human herpesvirus 7
agaaacgucccugugaca

SEQ ID NO: 182088 - RNA, 18 nt, Human herpesvirus 7
agaaacuugaaaaucaau

SEQ ID NO: 182089 - RNA, 22 nt, Human herpesvirus 7
agaaacuugaaaaucaauccaa

SEQ ID NO: 182090 - RNA, 18 nt, Human herpesvirus 7
agaaacaucuaugugcuc

SEQ ID NO: 182091 - RNA, 12 nt, Human herpesvirus 7
agaaacauguau

SEQ ID NO: 182092 - RNA, 13 nt, Human herpesvirus 7
agaaacauguauc

SEQ ID NO: 182093 - RNA, 20 nt, Human herpesvirus 7
agaaacauuccucauggcca

SEQ ID NO: 182094 - RNA, 17 nt, Human herpesvirus 7
agaggaguauguugcau

SEQ ID NO: 182095 - RNA, 22 nt, Human herpesvirus 7
agaggaguauguugcauaucau

SEQ ID NO: 182096 - RNA, 17 nt, Human herpesvirus 7
agagaacaccauaguca

SEQ ID NO: 182097 - RNA, 22 nt, Human herpesvirus 7
agacugagaccgaauauacuuu

SEQ ID NO: 182098 - RNA, 22 nt, Human herpesvirus 7
agacuuaucaccauaugccaau

SEQ ID NO: 182099 - RNA, 18 nt, Human herpesvirus 7
agacuuaagaccaaugau

SEQ ID NO: 182100 - RNA, 14 nt, Human herpesvirus 7
agacgacgaaguuc

SEQ ID NO: 182101 - RNA, 17 nt, Human herpesvirus 7
agacgaugagcaugaaa

SEQ ID NO: 182102 - RNA, 13 nt, Human herpesvirus 7
agacguugcucau

SEQ ID NO: 182103 - RNA, 19 nt, Human herpesvirus 7
agacuaaucacgagaaaaa

SEQ ID NO: 182104 - RNA, 15 nt, Human herpesvirus 7
agaccuaaacccaga

SEQ ID NO: 182105 - RNA, 20 nt, Human herpesvirus 7
agaccuaucaaauuuaucuc

SEQ ID NO: 182106 - RNA, 17 nt, Human herpesvirus 7
agaccuccuaugucaug

SEQ ID NO: 182107 - RNA, 19 nt, Human herpesvirus 7
agacauugaaaaugcauug

SEQ ID NO: 182108 - RNA, 18 nt, Human herpesvirus 7
agacauuucguuauucca

SEQ ID NO: 182109 - RNA, 13 nt, Human herpesvirus 7
agacaaggggcau

SEQ ID NO: 182110 - RNA, 18 nt, Human herpesvirus 7
agacaccgucauuucgca

SEQ ID NO: 182111 - RNA, 16 nt, Human herpesvirus 7
agaauuuucugcuuua

SEQ ID NO: 182112 - RNA, 16 nt, Human herpesvirus 7
agaauuuaaucauauc

SEQ ID NO: 182113 - RNA, 20 nt, Human herpesvirus 7
agacaauuucacacaaugcc

SEQ ID NO: 182114 - RNA, 19 nt, Human herpesvirus 7
agacacaauggaacagcaa

SEQ ID NO: 182115 - RNA, 21 nt, Human herpesvirus 7
accgucguuugugucuuuuaa

SEQ ID NO: 182116 - RNA, 18 nt, Human herpesvirus 7
accgguaaagaaccuauc

SEQ ID NO: 182117 - RNA, 15 nt, Human herpesvirus 7
acccugucacacuua

SEQ ID NO: 182118 - RNA, 15 nt, Human herpesvirus 7
accccaaaaucaaaa

SEQ ID NO: 182119 - RNA, 17 nt, Human herpesvirus 7
accccaaaaucaaaaaa

SEQ ID NO: 182120 - RNA, 19 nt, Human herpesvirus 7
accccaaaaucaaaaaaca

SEQ ID NO: 182121 - RNA, 18 nt, Human herpesvirus 7
acccaugggcacauuugu

SEQ ID NO: 182122 - RNA, 18 nt, Human herpesvirus 7
acccagaagaaacuugaa

SEQ ID NO: 182123 - RNA, 14 nt, Human herpesvirus 7
acccacuaacauuu

SEQ ID NO: 182124 - RNA, 16 nt, Human herpesvirus 7
acggacuuauguccag

SEQ ID NO: 182125 - RNA, 14 nt, Human herpesvirus 7
acgcuuccaucaca

SEQ ID NO: 182126 - RNA, 23 nt, Human herpesvirus 7
acgcccacucuggaaaugucaag

SEQ ID NO: 182127 - RNA, 13 nt, Human herpesvirus 7
acgcugacaguca

SEQ ID NO: 182128 - RNA, 19 nt, Human herpesvirus 7
acgcucccauaaaacaaga

SEQ ID NO: 182129 - RNA, 16 nt, Human herpesvirus 7
acgcucucaaucaaaa

SEQ ID NO: 182130 - RNA, 21 nt, Human herpesvirus 7
acgcucucaaucaaaaucuug

SEQ ID NO: 182131 - RNA, 19 nt, Human herpesvirus 7
acgaaauuuaaugcuuugu

SEQ ID NO: 182132 - RNA, 14 nt, Human herpesvirus 7
acgcaugcuugcuu

SEQ ID NO: 182133 - RNA, 13 nt, Human herpesvirus 7
acgcauaugcuaa

SEQ ID NO: 182134 - RNA, 18 nt, Human herpesvirus 7
acgaaaauauguugcuca

SEQ ID NO: 182135 - RNA, 17 nt, Human herpesvirus 7
accuuucuuaagcuuuu

SEQ ID NO: 182136 - RNA, 15 nt, Human herpesvirus 7
accugagaugauaaa

SEQ ID NO: 182137 - RNA, 20 nt, Human herpesvirus 7
accugauaaauacucaugaa

SEQ ID NO: 182138 - RNA, 15 nt, Human herpesvirus 7
accuuagaaucacaa

SEQ ID NO: 182139 - RNA, 19 nt, Human herpesvirus 7
accuuagaaucacaacaua

SEQ ID NO: 182140 - RNA, 17 nt, Human herpesvirus 7
accuucauggcacauau

SEQ ID NO: 182141 - RNA, 16 nt, Human herpesvirus 7
accuucgugugucucu

SEQ ID NO: 182142 - RNA, 15 nt, Human herpesvirus 7
accuucuuagccaga

SEQ ID NO: 182143 - RNA, 13 nt, Human herpesvirus 7
accguuugcagcc

SEQ ID NO: 182144 - RNA, 20 nt, Human herpesvirus 7
accugaaaaacaugagugaa

SEQ ID NO: 182145 - RNA, 15 nt, Human herpesvirus 7
accugaaucaaaauc

SEQ ID NO: 182146 - RNA, 20 nt, Human herpesvirus 7
accuccuaugucaugaaucu

SEQ ID NO: 182147 - RNA, 22 nt, Human herpesvirus 7
accucgacauucuccaguggca

SEQ ID NO: 182148 - RNA, 23 nt, Human herpesvirus 7
acaucugucaggucacaaaagcu

SEQ ID NO: 182149 - RNA, 17 nt, Human herpesvirus 7
acaucuuuauauguguu

SEQ ID NO: 182150 - RNA, 19 nt, Human herpesvirus 7
acaucuuucguauugccuu

SEQ ID NO: 182151 - RNA, 13 nt, Human herpesvirus 7
acaugaguacugu

SEQ ID NO: 182152 - RNA, 14 nt, Human herpesvirus 7
acaugaguacuguu

SEQ ID NO: 182153 - RNA, 14 nt, Human herpesvirus 7
acaugcaacauaau

SEQ ID NO: 182154 - RNA, 18 nt, Human herpesvirus 7
acaugauuggccagugug

SEQ ID NO: 182155 - RNA, 13 nt, Human herpesvirus 7
acauaaagguaaa

SEQ ID NO: 182156 - RNA, 15 nt, Human herpesvirus 7
acauaaagguaaaaa

SEQ ID NO: 182157 - RNA, 16 nt, Human herpesvirus 7
acaguuuuauucccau

SEQ ID NO: 182158 - RNA, 18 nt, Human herpesvirus 7
acaucuucaauguucgau

SEQ ID NO: 182159 - RNA, 20 nt, Human herpesvirus 7
acaucuugagaaauaugaau

SEQ ID NO: 182160 - RNA, 16 nt, Human herpesvirus 7
acaucuuaaaugucaa

SEQ ID NO: 182161 - RNA, 20 nt, Human herpesvirus 7
acauggccaucgcuuucuca

SEQ ID NO: 182162 - RNA, 22 nt, Human herpesvirus 7
acauggggcauuaauucuuuca

SEQ ID NO: 182163 - RNA, 20 nt, Human herpesvirus 7
acauguaguacaaugcuguc

SEQ ID NO: 182164 - RNA, 18 nt, Human herpesvirus 7
acauguauccacgcgggg

SEQ ID NO: 182165 - RNA, 14 nt, Human herpesvirus 7
acauuaaaacuacc

SEQ ID NO: 182166 - RNA, 15 nt, Human herpesvirus 7
acauuagcauugaaa

SEQ ID NO: 182167 - RNA, 19 nt, Human herpesvirus 7
acauuaaccacaacuguga

SEQ ID NO: 182168 - RNA, 13 nt, Human herpesvirus 7
acauguuccauuc

SEQ ID NO: 182169 - RNA, 19 nt, Human herpesvirus 7
acauguuccauucaauaaa

SEQ ID NO: 182170 - RNA, 14 nt, Human herpesvirus 7
accacguuuuugca

SEQ ID NO: 182171 - RNA, 18 nt, Human herpesvirus 7
accaggaacagauucucc

SEQ ID NO: 182172 - RNA, 18 nt, Human herpesvirus 7
accaaauauguggcacau

SEQ ID NO: 182173 - RNA, 12 nt, Human herpesvirus 7
acauuacgucau

SEQ ID NO: 182174 - RNA, 21 nt, Human herpesvirus 7
acauuuuguaugaaaagccca

SEQ ID NO: 182175 - RNA, 14 nt, Human herpesvirus 7
acauuuuugaagcu

SEQ ID NO: 182176 - RNA, 21 nt, Human herpesvirus 7
accaaagaguauacaaaagac

SEQ ID NO: 182177 - RNA, 22 nt, Human herpesvirus 7
accaaaaugugggauguaucca

SEQ ID NO: 182178 - RNA, 14 nt, Human herpesvirus 7
accaaacaaaauuc

SEQ ID NO: 182179 - RNA, 17 nt, Human herpesvirus 7
accaaaaaccugaaaaa

SEQ ID NO: 182180 - RNA, 22 nt, Human herpesvirus 7
aauuucuauaaucacgaaauaa

SEQ ID NO: 182181 - RNA, 22 nt, Human herpesvirus 7
aauuucuauuagauaaugacaa

SEQ ID NO: 182182 - RNA, 19 nt, Human herpesvirus 7
aauuucucguuauuuucaa

SEQ ID NO: 182183 - RNA, 21 nt, Human herpesvirus 7
aauuuacuugauuuucuuaca

SEQ ID NO: 182184 - RNA, 13 nt, Human herpesvirus 7
aauuuagcaccaa

SEQ ID NO: 182185 - RNA, 23 nt, Human herpesvirus 7
aauuuaaucauaucuugcuuaga

SEQ ID NO: 182186 - RNA, 20 nt, Human herpesvirus 7
aauuuaaugcuuugucuuac

SEQ ID NO: 182187 - RNA, 16 nt, Human herpesvirus 7
aauuuaaguagugucu

SEQ ID NO: 182188 - RNA, 17 nt, Human herpesvirus 7
aauuuauuuucuaaaaa

SEQ ID NO: 182189 - RNA, 16 nt, Human herpesvirus 7
aauuuaucucauagcu

SEQ ID NO: 182190 - RNA, 17 nt, Human herpesvirus 7
aauuuaucucauagcuu

SEQ ID NO: 182191 - RNA, 22 nt, Human herpesvirus 7
aauuuaucucauagcuuaaaaa

SEQ ID NO: 182192 - RNA, 12 nt, Human herpesvirus 7
aauuuaugauuu

SEQ ID NO: 182193 - RNA, 14 nt, Human herpesvirus 7
aauuuaugcuuuaa

SEQ ID NO: 182194 - RNA, 19 nt, Human herpesvirus 7
aauuuaugcuuuaacugga

SEQ ID NO: 182195 - RNA, 13 nt, Human herpesvirus 7
aauuuaggacuuu

SEQ ID NO: 182196 - RNA, 17 nt, Human herpesvirus 7
aauuucaaaaauucucc

SEQ ID NO: 182197 - RNA, 13 nt, Human herpesvirus 7
aauuucacacaau

SEQ ID NO: 182198 - RNA, 19 nt, Human herpesvirus 7
aauuucacagacgcaucau

SEQ ID NO: 182199 - RNA, 17 nt, Human herpesvirus 7
acacguuucucuguaga

SEQ ID NO: 182200 - RNA, 18 nt, Human herpesvirus 7
acacguuucucuguagau

SEQ ID NO: 182201 - RNA, 15 nt, Human herpesvirus 7
acacguuuucuguca

SEQ ID NO: 182202 - RNA, 13 nt, Human herpesvirus 7
acacguacaauau

SEQ ID NO: 182203 - RNA, 13 nt, Human herpesvirus 7
acacuaugagaua

SEQ ID NO: 182204 - RNA, 19 nt, Human herpesvirus 7
acacuauucucuacuuaau

SEQ ID NO: 182205 - RNA, 19 nt, Human herpesvirus 7
acacucaaaacagaacuuu

SEQ ID NO: 182206 - RNA, 19 nt, Human herpesvirus 7
acagaaugccagaaauuaa

SEQ ID NO: 182207 - RNA, 15 nt, Human herpesvirus 7
acagaaauugaugaa

SEQ ID NO: 182208 - RNA, 21 nt, Human herpesvirus 7
acagagaaagauuaauuaucu

SEQ ID NO: 182209 - RNA, 15 nt, Human herpesvirus 7
acagagaacaccaua

SEQ ID NO: 182210 - RNA, 22 nt, Human herpesvirus 7
acagaccuauguguuuacauua

SEQ ID NO: 182211 - RNA, 15 nt, Human herpesvirus 7
acagaggacuugaaa

SEQ ID NO: 182212 - RNA, 21 nt, Human herpesvirus 7
acagcuagauugacuaugaau

SEQ ID NO: 182213 - RNA, 18 nt, Human herpesvirus 7
acaguuucugcauacucu

SEQ ID NO: 182214 - RNA, 13 nt, Human herpesvirus 7
acaguuaaugugu

SEQ ID NO: 182215 - RNA, 19 nt, Human herpesvirus 7
acaguugcuugugaaggag

SEQ ID NO: 182216 - RNA, 21 nt, Human herpesvirus 7
acagucacguaaaaguguuca

SEQ ID NO: 182217 - RNA, 23 nt, Human herpesvirus 7
acaggaauugcugucuauuucaa

SEQ ID NO: 182218 - RNA, 18 nt, Human herpesvirus 7
auauuaguuuaacuuacu

SEQ ID NO: 182219 - RNA, 12 nt, Human herpesvirus 7
auauuaguuuca

SEQ ID NO: 182220 - RNA, 13 nt, Human herpesvirus 7
auauuaguuucaa

SEQ ID NO: 182221 - RNA, 16 nt, Human herpesvirus 7
auauuaguuucaacca

SEQ ID NO: 182222 - RNA, 22 nt, Human herpesvirus 7
auauuccaacucaaugaaugca

SEQ ID NO: 182223 - RNA, 18 nt, Human herpesvirus 7
auauuccauuaagccaga

SEQ ID NO: 182224 - RNA, 23 nt, Human herpesvirus 7
auauuccauuaagccagauuuca

SEQ ID NO: 182225 - RNA, 16 nt, Human herpesvirus 7
auauaguuuguuucaa

SEQ ID NO: 182226 - RNA, 23 nt, Human herpesvirus 7
auauaguuuguuucaauaugcau

SEQ ID NO: 182227 - RNA, 22 nt, Human herpesvirus 7
auauaucuuugauuacucguga

SEQ ID NO: 182228 - RNA, 14 nt, Human herpesvirus 7
auauauuggcaugc

SEQ ID NO: 182229 - RNA, 20 nt, Human herpesvirus 7
auauauuggcaugcuuacag

SEQ ID NO: 182230 - RNA, 17 nt, Human herpesvirus 7
auauauuccaacucaau

SEQ ID NO: 182231 - RNA, 20 nt, Human herpesvirus 7
auauauuccaacucaaugaa

SEQ ID NO: 182232 - RNA, 22 nt, Human herpesvirus 7
auauaugucauagugggaacau

SEQ ID NO: 182233 - RNA, 18 nt, Human herpesvirus 7
auauaagaugauagccau

SEQ ID NO: 182234 - RNA, 17 nt, Human herpesvirus 7
auauacauaauucaaua

SEQ ID NO: 182235 - RNA, 23 nt, Human herpesvirus 7
auagcuuaaaaaauacauugaau

SEQ ID NO: 182236 - RNA, 20 nt, Human herpesvirus 7
auagcuugacaccaacaucu

SEQ ID NO: 182237 - RNA, 19 nt, Human herpesvirus 7
auauuuccaacgcauucaa

SEQ ID NO: 182238 - RNA, 15 nt, Human herpesvirus 7
auauuuccagcauca

SEQ ID NO: 182239 - RNA, 14 nt, Human herpesvirus 7
auauuuaucugcau

SEQ ID NO: 182240 - RNA, 13 nt, Human herpesvirus 7
auauuuaugccuu

SEQ ID NO: 182241 - RNA, 15 nt, Human herpesvirus 7
auauuuauguucaaa

SEQ ID NO: 182242 - RNA, 16 nt, Human herpesvirus 7
auauuugcuugcugaa

SEQ ID NO: 182243 - RNA, 17 nt, Human herpesvirus 7
auauuugguacuguaga

SEQ ID NO: 182244 - RNA, 12 nt, Human herpesvirus 7
auauuuugacaa

SEQ ID NO: 182245 - RNA, 14 nt, Human herpesvirus 7
auauuuugcuagaa

SEQ ID NO: 182246 - RNA, 21 nt, Human herpesvirus 7
auauuuuuaaauuugucuguu

SEQ ID NO: 182247 - RNA, 21 nt, Human herpesvirus 7
aucaaaagcugcagcugaaag

SEQ ID NO: 182248 - RNA, 18 nt, Human herpesvirus 7
aucaaaaucuguagaaaa

SEQ ID NO: 182249 - RNA, 16 nt, Human herpesvirus 7
aucaaaaugagauuuu

SEQ ID NO: 182250 - RNA, 13 nt, Human herpesvirus 7
aucaaaauuccau

SEQ ID NO: 182251 - RNA, 21 nt, Human herpesvirus 7
aucaaaaaauaauuccuucua

SEQ ID NO: 182252 - RNA, 15 nt, Human herpesvirus 7
aucaaaacauaucag

SEQ ID NO: 182253 - RNA, 21 nt, Human herpesvirus 7
aucaaaguuuuaaaguaugcu

SEQ ID NO: 182254 - RNA, 20 nt, Human herpesvirus 7
aucaaauuuaucucauagcu

SEQ ID NO: 182255 - RNA, 14 nt, Human herpesvirus 7
aucaccauaugcca

SEQ ID NO: 182256 - RNA, 19 nt, Human herpesvirus 7
aucaccauaugccaaugaa

SEQ ID NO: 182257 - RNA, 14 nt, Human herpesvirus 7
aucacgucaugcug

SEQ ID NO: 182258 - RNA, 15 nt, Human herpesvirus 7
aucacaucagauaca

SEQ ID NO: 182259 - RNA, 19 nt, Human herpesvirus 7
aucaacauacgugcuuaga

SEQ ID NO: 182260 - RNA, 20 nt, Human herpesvirus 7
aucaaccaacauucuuguca

SEQ ID NO: 182261 - RNA, 16 nt, Human herpesvirus 7
aucaaccagauuucug

SEQ ID NO: 182262 - RNA, 13 nt, Human herpesvirus 7
auacuucuugccc

SEQ ID NO: 182263 - RNA, 23 nt, Human herpesvirus 7
auacuucuugcccccagaacuug

SEQ ID NO: 182264 - RNA, 15 nt, Human herpesvirus 7
auacuugcaaugcaa

SEQ ID NO: 182265 - RNA, 13 nt, Human herpesvirus 7
auagaaaacauua

SEQ ID NO: 182266 - RNA, 14 nt, Human herpesvirus 7
auacuuguugagcu

SEQ ID NO: 182267 - RNA, 13 nt, Human herpesvirus 7
auagaaacauucc

SEQ ID NO: 182268 - RNA, 14 nt, Human herpesvirus 7
auagaaaucuuuau

SEQ ID NO: 182269 - RNA, 16 nt, Human herpesvirus 7
auagauuacgcacaaa

SEQ ID NO: 182270 - RNA, 13 nt, Human herpesvirus 7
auagacacauuua

SEQ ID NO: 182271 - RNA, 17 nt, Human herpesvirus 7
auagacacauuuaucca

SEQ ID NO: 182272 - RNA, 18 nt, Human herpesvirus 7
auagauaaugaaguuuau

SEQ ID NO: 182273 - RNA, 17 nt, Human herpesvirus 7
auacguuaguugcagcu

SEQ ID NO: 182274 - RNA, 23 nt, Human herpesvirus 7
auacguuaguugcagcugugaua

SEQ ID NO: 182275 - RNA, 13 nt, Human herpesvirus 7
auacuagcagauc

SEQ ID NO: 182276 - RNA, 17 nt, Human herpesvirus 7
auacgaaucaguucaac

SEQ ID NO: 182277 - RNA, 13 nt, Human herpesvirus 7
auacguccaaaaa

SEQ ID NO: 182278 - RNA, 14 nt, Human herpesvirus 7
auacucaugaagga

SEQ ID NO: 182279 - RNA, 15 nt, Human herpesvirus 7
auacucuagaacaaa

SEQ ID NO: 182280 - RNA, 12 nt, Human herpesvirus 7
auacucuuguug

SEQ ID NO: 182281 - RNA, 13 nt, Human herpesvirus 7
auacugaaucuga

SEQ ID NO: 182282 - RNA, 14 nt, Human herpesvirus 7
auacugaaucugaa

SEQ ID NO: 182283 - RNA, 17 nt, Human herpesvirus 7
auacuggcaugucucau

SEQ ID NO: 182284 - RNA, 23 nt, Human herpesvirus 7
auacaggccuguuucuugaugua

SEQ ID NO: 182285 - RNA, 18 nt, Human herpesvirus 7
auacauagaacgacucca

SEQ ID NO: 182286 - RNA, 12 nt, Human herpesvirus 7
auacacugugaa

SEQ ID NO: 182287 - RNA, 22 nt, Human herpesvirus 7
auacacccagucgucugcucaa

SEQ ID NO: 182288 - RNA, 14 nt, Human herpesvirus 7
auaaaggaaagaca

SEQ ID NO: 182289 - RNA, 17 nt, Human herpesvirus 7
auaaaacaaacuauguc

SEQ ID NO: 182290 - RNA, 21 nt, Human herpesvirus 7
auaaaaauuuggcgccaaaaa

SEQ ID NO: 182291 - RNA, 20 nt, Human herpesvirus 7
auaaauauugauaaccuaca

SEQ ID NO: 182292 - RNA, 15 nt, Human herpesvirus 7
auaaagugcugucuu

SEQ ID NO: 182293 - RNA, 19 nt, Human herpesvirus 7
auaaauaguuucauugcgu

SEQ ID NO: 182294 - RNA, 20 nt, Human herpesvirus 7
auaaaugcuuaaauuuccau

SEQ ID NO: 182295 - RNA, 18 nt, Human herpesvirus 7
auaaaucaaccaacauuc

SEQ ID NO: 182296 - RNA, 18 nt, Human herpesvirus 7
auaaaucagaauauuucc

SEQ ID NO: 182297 - RNA, 22 nt, Human herpesvirus 7
auaaauucugaaauaaacauuu

SEQ ID NO: 182298 - RNA, 17 nt, Human herpesvirus 7
auaacaaacgauuuggu

SEQ ID NO: 182299 - RNA, 21 nt, Human herpesvirus 7
auaacaaagugcgaaacgugu

SEQ ID NO: 182300 - RNA, 22 nt, Human herpesvirus 7
auaacaauauuuaaaguagcug

SEQ ID NO: 182301 - RNA, 18 nt, Human herpesvirus 7
aucaggaaaaucuaucac

SEQ ID NO: 182302 - RNA, 20 nt, Human herpesvirus 7
aucagauuugguucauuaca

SEQ ID NO: 182303 - RNA, 19 nt, Human herpesvirus 7
aucaguacaacgacauuga

SEQ ID NO: 182304 - RNA, 20 nt, Human herpesvirus 7
aucagacuaaauauggagca

SEQ ID NO: 182305 - RNA, 23 nt, Human herpesvirus 7
aucagagaugaucuuacuuccua

SEQ ID NO: 182306 - RNA, 18 nt, Human herpesvirus 7
aucaugaaaacaguggga

SEQ ID NO: 182307 - RNA, 14 nt, Human herpesvirus 7
aucaugaaccaugu

SEQ ID NO: 182308 - RNA, 20 nt, Human herpesvirus 7
aucauaccauaaauaccaaa

SEQ ID NO: 182309 - RNA, 13 nt, Human herpesvirus 7
aucauacguuuac

SEQ ID NO: 182310 - RNA, 23 nt, Human herpesvirus 7
aucauagcaggaagcacaaauca

SEQ ID NO: 182311 - RNA, 15 nt, Human herpesvirus 7
aucauauuuuaguau

SEQ ID NO: 182312 - RNA, 13 nt, Human herpesvirus 7
aucauuuauuuga

SEQ ID NO: 182313 - RNA, 21 nt, Human herpesvirus 7
auccaaaaucagacaauuuca

SEQ ID NO: 182314 - RNA, 18 nt, Human herpesvirus 7
auccaaaccggccaauga

SEQ ID NO: 182315 - RNA, 19 nt, Human herpesvirus 7
aucauggaaaauggagcau

SEQ ID NO: 182316 - RNA, 16 nt, Human herpesvirus 7
aucccuauugcaucaa

SEQ ID NO: 182317 - RNA, 15 nt, Human herpesvirus 7
aucccugcugauaca

SEQ ID NO: 182318 - RNA, 15 nt, Human herpesvirus 7
auccguuaauggaua

SEQ ID NO: 182319 - RNA, 16 nt, Human herpesvirus 7
auccgccgacaagaaa

SEQ ID NO: 182320 - RNA, 18 nt, Human herpesvirus 7
auccgucaccgacaauau

SEQ ID NO: 182321 - RNA, 21 nt, Human herpesvirus 7
auccgcuugagagccauaguc

SEQ ID NO: 182322 - RNA, 20 nt, Human herpesvirus 7
aucccuagaagaugacucau

SEQ ID NO: 182323 - RNA, 15 nt, Human herpesvirus 7
auccagagucucuaa

SEQ ID NO: 182324 - RNA, 18 nt, Human herpesvirus 7
auccagcaaagacuugca

SEQ ID NO: 182325 - RNA, 19 nt, Human herpesvirus 7
auccaguacgucuugcugu

SEQ ID NO: 182326 - RNA, 19 nt, Human herpesvirus 7
auccaucuguaacagaccu

SEQ ID NO: 182327 - RNA, 22 nt, Human herpesvirus 7
auccaacagaauacuacucaga

SEQ ID NO: 182328 - RNA, 23 nt, Human herpesvirus 7
auccaacagaauacuacucagaa

SEQ ID NO: 182329 - RNA, 19 nt, Human herpesvirus 7
auccaaguuuuaacaaucu

SEQ ID NO: 182330 - RNA, 20 nt, Human herpesvirus 7
auccaaguuuuaacaaucua

SEQ ID NO: 182331 - RNA, 17 nt, Human herpesvirus 7
auccaaguuuuacagaa

SEQ ID NO: 182332 - RNA, 15 nt, Human herpesvirus 7
auccaauaaugcauc

SEQ ID NO: 182333 - RNA, 21 nt, Human herpesvirus 7
auccaauaaugcaucauagag

SEQ ID NO: 182334 - RNA, 12 nt, Human herpesvirus 7
auccacauacuc

SEQ ID NO: 182335 - RNA, 17 nt, Human herpesvirus 7
aucgcguuuucaugcuc

SEQ ID NO: 182336 - RNA, 19 nt, Human herpesvirus 7
aucgcguuuucaugcucau

SEQ ID NO: 182337 - RNA, 22 nt, Human herpesvirus 7
aucgccauuuucuugagccuug

SEQ ID NO: 182338 - RNA, 20 nt, Human herpesvirus 7
aucguguguuacuauuugac

SEQ ID NO: 182339 - RNA, 15 nt, Human herpesvirus 7
aucgucaucuucucu

SEQ ID NO: 182340 - RNA, 15 nt, Human herpesvirus 7
auccuaugacugaga

SEQ ID NO: 182341 - RNA, 17 nt, Human herpesvirus 7
auccuuaaauuuuacaa

SEQ ID NO: 182342 - RNA, 17 nt, Human herpesvirus 7
auccugcuaaggcgaaa

SEQ ID NO: 182343 - RNA, 13 nt, Human herpesvirus 7
auccugcuauuca

SEQ ID NO: 182344 - RNA, 17 nt, Human herpesvirus 7
auccugcuauucauuuc

SEQ ID NO: 182345 - RNA, 18 nt, Human herpesvirus 7
auccugcuauucauuuca

SEQ ID NO: 182346 - RNA, 15 nt, Human herpesvirus 7
aucgaucucugucaa

SEQ ID NO: 182347 - RNA, 23 nt, Human herpesvirus 7
aucgauguuuuaucuaacacugc

SEQ ID NO: 182348 - RNA, 18 nt, Human herpesvirus 7
aucgcaacaacuaaagag

SEQ ID NO: 182349 - RNA, 15 nt, Human herpesvirus 7
aucgacaaacagaaa

SEQ ID NO: 182350 - RNA, 14 nt, Human herpesvirus 7
aucuaauugcagac

SEQ ID NO: 182351 - RNA, 22 nt, Human herpesvirus 7
aucuaauugcagacuaauuaca

SEQ ID NO: 182352 - RNA, 20 nt, Human herpesvirus 7
aucuaagucuacaucaucaa

SEQ ID NO: 182353 - RNA, 14 nt, Human herpesvirus 7
aucuaauuaaucug

SEQ ID NO: 182354 - RNA, 16 nt, Human herpesvirus 7
aucuaaaguauggaaa

SEQ ID NO: 182355 - RNA, 22 nt, Human herpesvirus 7
aucuaccgcuguacaaugcugu

SEQ ID NO: 182356 - RNA, 12 nt, Human herpesvirus 7
aucuaccaucaa

SEQ ID NO: 182357 - RNA, 13 nt, Human herpesvirus 7
aucuagacccuuu

SEQ ID NO: 182358 - RNA, 13 nt, Human herpesvirus 7
aucuacuguaauc

SEQ ID NO: 182359 - RNA, 22 nt, Human herpesvirus 7
aucuaugaugcauccgaaucuu

SEQ ID NO: 182360 - RNA, 20 nt, Human herpesvirus 7
aucuauaguuuguauuucau

SEQ ID NO: 182361 - RNA, 15 nt, Human herpesvirus 7
aucuccuauguugca

SEQ ID NO: 182362 - RNA, 16 nt, Human herpesvirus 7
aucuccuauguugcaa

SEQ ID NO: 182363 - RNA, 18 nt, Human herpesvirus 7
aucuccgugacaaagcau

SEQ ID NO: 182364 - RNA, 14 nt, Human herpesvirus 7
aucucguaauuuaa

SEQ ID NO: 182365 - RNA, 21 nt, Human herpesvirus 7
aucucacuucagaagauuugu

SEQ ID NO: 182366 - RNA, 19 nt, Human herpesvirus 7
aucucaauuaaaacaucuc

SEQ ID NO: 182367 - RNA, 20 nt, Human herpesvirus 7
aucucaauuaaaacaucucu

SEQ ID NO: 182368 - RNA, 13 nt, Human herpesvirus 7
aucugacuugccc

SEQ ID NO: 182369 - RNA, 23 nt, Human herpesvirus 7
aucugauguagauuuagauuuaa

SEQ ID NO: 182370 - RNA, 16 nt, Human herpesvirus 7
aucugcaaaaaaccau

SEQ ID NO: 182371 - RNA, 12 nt, Human herpesvirus 7
aguggaaucuca

SEQ ID NO: 182372 - RNA, 19 nt, Human herpesvirus 7
agugauuuuucauuuaucu

SEQ ID NO: 182373 - RNA, 12 nt, Human herpesvirus 7
agugauacugaa

SEQ ID NO: 182374 - RNA, 16 nt, Human herpesvirus 7
aguauguccaaucaaa

SEQ ID NO: 182375 - RNA, 15 nt, Human herpesvirus 7
aguauucucauacaa

SEQ ID NO: 182376 - RNA, 18 nt, Human herpesvirus 7
aguauucucauacaacuc

SEQ ID NO: 182377 - RNA, 22 nt, Human herpesvirus 7
aguauuggguagguuaagccua

SEQ ID NO: 182378 - RNA, 19 nt, Human herpesvirus 7
aguucuguuuugaguguua

SEQ ID NO: 182379 - RNA, 16 nt, Human herpesvirus 7
aguugaggcuuuuaga

SEQ ID NO: 182380 - RNA, 15 nt, Human herpesvirus 7
aguguaggcaagaag

SEQ ID NO: 182381 - RNA, 19 nt, Human herpesvirus 7
aguguaaucuagaacuguu

SEQ ID NO: 182382 - RNA, 20 nt, Human herpesvirus 7
aguucaaccuuuuucugaaa

SEQ ID NO: 182383 - RNA, 11 nt, Human herpesvirus 7
aguuuucccag

SEQ ID NO: 182384 - RNA, 13 nt, Human herpesvirus 7
aguuuuauuccca

SEQ ID NO: 182385 - RNA, 14 nt, Human herpesvirus 7
aguuuuauucccau

SEQ ID NO: 182386 - RNA, 18 nt, Human herpesvirus 7
aguuuuauucccaugccu

SEQ ID NO: 182387 - RNA, 19 nt, Human herpesvirus 7
aguuuuauucccaugccua

SEQ ID NO: 182388 - RNA, 23 nt, Human herpesvirus 7
aguuuguuucaauaugcaugcaa

SEQ ID NO: 182389 - RNA, 13 nt, Human herpesvirus 7
aguuuuaacaauc

SEQ ID NO: 182390 - RNA, 14 nt, Human herpesvirus 7
aguuuguauuucau

SEQ ID NO: 182391 - RNA, 15 nt, Human herpesvirus 7
aguugcagcugugau

SEQ ID NO: 182392 - RNA, 16 nt, Human herpesvirus 7
aguugcagcugugaua

SEQ ID NO: 182393 - RNA, 14 nt, Human herpesvirus 7
auaaaaaaucuaau

SEQ ID NO: 182394 - RNA, 20 nt, Human herpesvirus 7
aguuuuggguuuaugaugca

SEQ ID NO: 182395 - RNA, 20 nt, Human herpesvirus 7
auaaaaaauuuuuagcucua

SEQ ID NO: 182396 - RNA, 17 nt, Human herpesvirus 7
auaaaaagcccaugaac

SEQ ID NO: 182397 - RNA, 17 nt, Human herpesvirus 7
aguaauucgauuagcug

SEQ ID NO: 182398 - RNA, 19 nt, Human herpesvirus 7
aguaauucgauuagcuguu

SEQ ID NO: 182399 - RNA, 21 nt, Human herpesvirus 7
aguaauguuauuuuucaugcc

SEQ ID NO: 182400 - RNA, 14 nt, Human herpesvirus 7
aguaaauuucucac

SEQ ID NO: 182401 - RNA, 17 nt, Human herpesvirus 7
aguaaauuucucacacc

SEQ ID NO: 182402 - RNA, 14 nt, Human herpesvirus 7
aguaaacaaaacag

SEQ ID NO: 182403 - RNA, 23 nt, Human herpesvirus 7
agguugcuaucuccuauguugca

SEQ ID NO: 182404 - RNA, 15 nt, Human herpesvirus 7
aguaaaagagaaaaa

SEQ ID NO: 182405 - RNA, 15 nt, Human herpesvirus 7
agguuguugcaauuu

SEQ ID NO: 182406 - RNA, 16 nt, Human herpesvirus 7
agguuguugcaauuuu

SEQ ID NO: 182407 - RNA, 18 nt, Human herpesvirus 7
agguaucuuuacuuucau

SEQ ID NO: 182408 - RNA, 22 nt, Human herpesvirus 7
aggcuuuuagaaaucuuucauc

SEQ ID NO: 182409 - RNA, 19 nt, Human herpesvirus 7
agggaagaaacagcugaaa

SEQ ID NO: 182410 - RNA, 13 nt, Human herpesvirus 7
agggacuuuuaua

SEQ ID NO: 182411 - RNA, 15 nt, Human herpesvirus 7
agggcaugucugccu

SEQ ID NO: 182412 - RNA, 18 nt, Human herpesvirus 7
agggcauuuguaugucua

SEQ ID NO: 182413 - RNA, 20 nt, Human herpesvirus 7
agggggacaauuauuuaaac

SEQ ID NO: 182414 - RNA, 21 nt, Human herpesvirus 7
aggguguguccagauaauaua

SEQ ID NO: 182415 - RNA, 22 nt, Human herpesvirus 7
agggugccuuugguuuuuccag

SEQ ID NO: 182416 - RNA, 12 nt, Human herpesvirus 7
agguacuaucua

SEQ ID NO: 182417 - RNA, 15 nt, Human herpesvirus 7
agguaauagcuuuaa

SEQ ID NO: 182418 - RNA, 15 nt, Human herpesvirus 7
aggcaaaucucauaa

SEQ ID NO: 182419 - RNA, 14 nt, Human herpesvirus 7
aggcagacaugccc

SEQ ID NO: 182420 - RNA, 19 nt, Human herpesvirus 7
aggcagaccuaaacccaga

SEQ ID NO: 182421 - RNA, 15 nt, Human herpesvirus 7
aggcaucgcauauag

SEQ ID NO: 182422 - RNA, 15 nt, Human herpesvirus 7
aggcuucauuggcau

SEQ ID NO: 182423 - RNA, 18 nt, Human herpesvirus 7
aggccaaucugcacauuu

SEQ ID NO: 182424 - RNA, 15 nt, Human herpesvirus 7
aggcuaugacuuuga

SEQ ID NO: 182425 - RNA, 22 nt, Human herpesvirus 7
aggcucauuucaauuucugucu

SEQ ID NO: 182426 - RNA, 12 nt, Human herpesvirus 7
agcugaauugua

SEQ ID NO: 182427 - RNA, 18 nt, Human herpesvirus 7
agcugcauguguacuaaa

SEQ ID NO: 182428 - RNA, 23 nt, Human herpesvirus 7
agcugcauguguacuaaagccaa

SEQ ID NO: 182429 - RNA, 17 nt, Human herpesvirus 7
agcugauuauucaugca

SEQ ID NO: 182430 - RNA, 23 nt, Human herpesvirus 7
aggacuaucagcgacagguguug

SEQ ID NO: 182431 - RNA, 21 nt, Human herpesvirus 7
agcuucagaugcuaugguggc

SEQ ID NO: 182432 - RNA, 17 nt, Human herpesvirus 7
agcuguuuccaucuuau

SEQ ID NO: 182433 - RNA, 20 nt, Human herpesvirus 7
agcuuaaaaaauacauugaa

SEQ ID NO: 182434 - RNA, 16 nt, Human herpesvirus 7
agcuucgaaagauuua

SEQ ID NO: 182435 - RNA, 14 nt, Human herpesvirus 7
aggaccaauucuuu

SEQ ID NO: 182436 - RNA, 15 nt, Human herpesvirus 7
agcgauuuaaugucu

SEQ ID NO: 182437 - RNA, 17 nt, Human herpesvirus 7
agcgcauggagcacaau

SEQ ID NO: 182438 - RNA, 20 nt, Human herpesvirus 7
agcgcauggagcacaauuac

SEQ ID NO: 182439 - RNA, 12 nt, Human herpesvirus 7
agcuaucugauu

SEQ ID NO: 182440 - RNA, 21 nt, Human herpesvirus 7
agcuaauugagaaauuuuaca

SEQ ID NO: 182441 - RNA, 17 nt, Human herpesvirus 7
agcucauuucaucaucc

SEQ ID NO: 182442 - RNA, 15 nt, Human herpesvirus 7
agcuccaagcuuaaa

SEQ ID NO: 182443 - RNA, 14 nt, Human herpesvirus 7
agcuccaugucucu

SEQ ID NO: 182444 - RNA, 23 nt, Human herpesvirus 7
agcucuaucgucaucaucccaaa

SEQ ID NO: 182445 - RNA, 17 nt, Human herpesvirus 7
agccuucagacuugauu

SEQ ID NO: 182446 - RNA, 14 nt, Human herpesvirus 7
agccuuucacuuga

SEQ ID NO: 182447 - RNA, 15 nt, Human herpesvirus 7
agcgaauuugugcug

SEQ ID NO: 182448 - RNA, 16 nt, Human herpesvirus 7
agcccugaauuuuaca

SEQ ID NO: 182449 - RNA, 17 nt, Human herpesvirus 7
agcccugaauuuuacac

SEQ ID NO: 182450 - RNA, 11 nt, Human herpesvirus 7
agaguauuuaa

SEQ ID NO: 182451 - RNA, 13 nt, Human herpesvirus 7
agcccaugaacac

SEQ ID NO: 182452 - RNA, 16 nt, Human herpesvirus 7
agcccagucccaagag

SEQ ID NO: 182453 - RNA, 22 nt, Human herpesvirus 7
agaguagaacuaggaaacacaa

SEQ ID NO: 182454 - RNA, 15 nt, Human herpesvirus 7
agagguccaauagaa

SEQ ID NO: 182455 - RNA, 18 nt, Human herpesvirus 7
cacggaguuuuuacucug

SEQ ID NO: 182456 - RNA, 18 nt, Human herpesvirus 7
cacgcauauguacgugug

SEQ ID NO: 182457 - RNA, 22 nt, Human herpesvirus 7
cacgcauauguacgugugcugc

SEQ ID NO: 182458 - RNA, 15 nt, Human herpesvirus 7
cacuaauccaugaca

SEQ ID NO: 182459 - RNA, 20 nt, Human herpesvirus 7
cacuaaugccgucaucccaa

SEQ ID NO: 182460 - RNA, 21 nt, Human herpesvirus 7
cacgugucgcagccauguugc

SEQ ID NO: 182461 - RNA, 13 nt, Human herpesvirus 7
cacgugugacugu

SEQ ID NO: 182462 - RNA, 12 nt, Human herpesvirus 7
cacguagacuga

SEQ ID NO: 182463 - RNA, 14 nt, Human herpesvirus 7
caccuuacuuuuaa

SEQ ID NO: 182464 - RNA, 17 nt, Human herpesvirus 7
cacgacacugaauguca

SEQ ID NO: 182465 - RNA, 14 nt, Human herpesvirus 7
cacgagaaaaauau

SEQ ID NO: 182466 - RNA, 19 nt, Human herpesvirus 7
cacgagacaaaaauaauau

SEQ ID NO: 182467 - RNA, 16 nt, Human herpesvirus 7
cacccuuuguuugaga

SEQ ID NO: 182468 - RNA, 13 nt, Human herpesvirus 7
caccgagaucauc

SEQ ID NO: 182469 - RNA, 17 nt, Human herpesvirus 7
caccgauuacuguauaa

SEQ ID NO: 182470 - RNA, 19 nt, Human herpesvirus 7
caccgcuacacgagacaaa

SEQ ID NO: 182471 - RNA, 19 nt, Human herpesvirus 7
caccguuuugaaaagucau

SEQ ID NO: 182472 - RNA, 22 nt, Human herpesvirus 7
caccguuuugaaaagucauuau

SEQ ID NO: 182473 - RNA, 21 nt, Human herpesvirus 7
cacuaugccacaaaaaacuuu

SEQ ID NO: 182474 - RNA, 17 nt, Human herpesvirus 7
cacuauuuuauugcgaa

SEQ ID NO: 182475 - RNA, 20 nt, Human herpesvirus 7
cacucauuagaaacaauccc

SEQ ID NO: 182476 - RNA, 13 nt, Human herpesvirus 7
cacugaaugucaa

SEQ ID NO: 182477 - RNA, 19 nt, Human herpesvirus 7
cacucuuucuucacgugug

SEQ ID NO: 182478 - RNA, 15 nt, Human herpesvirus 7
cacugcaaauuguaa

SEQ ID NO: 182479 - RNA, 17 nt, Human herpesvirus 7
cacugugucaucacaga

SEQ ID NO: 182480 - RNA, 17 nt, Human herpesvirus 7
cacuuaaagaacuccau

SEQ ID NO: 182481 - RNA, 16 nt, Human herpesvirus 7
cacuugcuagcuguga

SEQ ID NO: 182482 - RNA, 18 nt, Human herpesvirus 7
cacuugcuagcugugaua

SEQ ID NO: 182483 - RNA, 12 nt, Human herpesvirus 7
cacuuauuccag

SEQ ID NO: 182484 - RNA, 13 nt, Human herpesvirus 7
cacuuauuugauu

SEQ ID NO: 182485 - RNA, 21 nt, Human herpesvirus 7
cagagaauuucuuuguuugcu

SEQ ID NO: 182486 - RNA, 22 nt, Human herpesvirus 7
cagagaauuucuuuguuugcua

SEQ ID NO: 182487 - RNA, 15 nt, Human herpesvirus 7
cagagauuaccugca

SEQ ID NO: 182488 - RNA, 16 nt, Human herpesvirus 7
cagagcgcuuugcuua

SEQ ID NO: 182489 - RNA, 22 nt, Human herpesvirus 7
cagaggaccaauucuuuuacaa

SEQ ID NO: 182490 - RNA, 22 nt, Human herpesvirus 7
cagaaaaucucgaacaguccca

SEQ ID NO: 182491 - RNA, 13 nt, Human herpesvirus 7
cagaaaauucuuu

SEQ ID NO: 182492 - RNA, 21 nt, Human herpesvirus 7
cagaaaacaacacaaagccaa

SEQ ID NO: 182493 - RNA, 20 nt, Human herpesvirus 7
cagaaauuguuccugugugc

SEQ ID NO: 182494 - RNA, 22 nt, Human herpesvirus 7
cagaaauuucaaaggaagacau

SEQ ID NO: 182495 - RNA, 21 nt, Human herpesvirus 7
cagaaauugaaaugagccuga

SEQ ID NO: 182496 - RNA, 22 nt, Human herpesvirus 7
cagaaauugaugaagacagcuc

SEQ ID NO: 182497 - RNA, 15 nt, Human herpesvirus 7
cagagaaccacguga

SEQ ID NO: 182498 - RNA, 23 nt, Human herpesvirus 7
cagaaaugaaucugcacuaucuc

SEQ ID NO: 182499 - RNA, 13 nt, Human herpesvirus 7
cagaaacauguau

SEQ ID NO: 182500 - RNA, 23 nt, Human herpesvirus 7
caaggacgaaucuacauuaaaca

SEQ ID NO: 182501 - RNA, 18 nt, Human herpesvirus 7
caagauuaauauauuuuc

SEQ ID NO: 182502 - RNA, 14 nt, Human herpesvirus 7
caagauaagcaaua

SEQ ID NO: 182503 - RNA, 19 nt, Human herpesvirus 7
caagauaagcaauacauuc

SEQ ID NO: 182504 - RNA, 15 nt, Human herpesvirus 7
caagauagugacauu

SEQ ID NO: 182505 - RNA, 17 nt, Human herpesvirus 7
caacacaaagccaauga

SEQ ID NO: 182506 - RNA, 12 nt, Human herpesvirus 7
caaucuuacaaa

SEQ ID NO: 182507 - RNA, 22 nt, Human herpesvirus 7
caaugaacaaguuucaaaaagu

SEQ ID NO: 182508 - RNA, 21 nt, Human herpesvirus 7
caaugcagaaugcguaacuuu

SEQ ID NO: 182509 - RNA, 19 nt, Human herpesvirus 7
caaugcagccuacuuuuaa

SEQ ID NO: 182510 - RNA, 22 nt, Human herpesvirus 7
caaugagacagcaacugugcau

SEQ ID NO: 182511 - RNA, 17 nt, Human herpesvirus 7
caaugauuuuucugcuu

SEQ ID NO: 182512 - RNA, 21 nt, Human herpesvirus 7
caaucccagaaauuucaaagg

SEQ ID NO: 182513 - RNA, 20 nt, Human herpesvirus 7
caauagaaaacaaaucugau

SEQ ID NO: 182514 - RNA, 20 nt, Human herpesvirus 7
caaucuacuguacuuuugau

SEQ ID NO: 182515 - RNA, 15 nt, Human herpesvirus 7
caaucgauaaacuuu

SEQ ID NO: 182516 - RNA, 20 nt, Human herpesvirus 7
caaucgguaacaugucuuca

SEQ ID NO: 182517 - RNA, 18 nt, Human herpesvirus 7
caauacaugaauuaucua

SEQ ID NO: 182518 - RNA, 14 nt, Human herpesvirus 7
caauacauucucaa

SEQ ID NO: 182519 - RNA, 17 nt, Human herpesvirus 7
caauaauggcauuacua

SEQ ID NO: 182520 - RNA, 24 nt, Human herpesvirus 7
caauaaugcaucauagaguagaac

SEQ ID NO: 182521 - RNA, 23 nt, Human herpesvirus 7
caagguguuccuuagcuauguuu

SEQ ID NO: 182522 - RNA, 20 nt, Human herpesvirus 7
cacauaaguugacaauguca

SEQ ID NO: 182523 - RNA, 21 nt, Human herpesvirus 7
cacauaaguugacaaugucaa

SEQ ID NO: 182524 - RNA, 22 nt, Human herpesvirus 7
cacauaaguugacaaugucaau

SEQ ID NO: 182525 - RNA, 17 nt, Human herpesvirus 7
cacauacucuagaacaa

SEQ ID NO: 182526 - RNA, 14 nt, Human herpesvirus 7
caccauaugccaau

SEQ ID NO: 182527 - RNA, 15 nt, Human herpesvirus 7
caccauaugccaaug

SEQ ID NO: 182528 - RNA, 19 nt, Human herpesvirus 7
cacagggacguuucuagca

SEQ ID NO: 182529 - RNA, 21 nt, Human herpesvirus 7
cacagggacguuucuagcaaa

SEQ ID NO: 182530 - RNA, 18 nt, Human herpesvirus 7
cacacacguuuucuguca

SEQ ID NO: 182531 - RNA, 16 nt, Human herpesvirus 7
caauggacguuuauuu

SEQ ID NO: 182532 - RNA, 12 nt, Human herpesvirus 7
caauguaugugc

SEQ ID NO: 182533 - RNA, 12 nt, Human herpesvirus 7
caauuacuuguc

SEQ ID NO: 182534 - RNA, 13 nt, Human herpesvirus 7
cacaauggaacag

SEQ ID NO: 182535 - RNA, 19 nt, Human herpesvirus 7
cacaauuacacaaauugau

SEQ ID NO: 182536 - RNA, 13 nt, Human herpesvirus 7
caauuaaugcauu

SEQ ID NO: 182537 - RNA, 16 nt, Human herpesvirus 7
caauuacaaaauguau

SEQ ID NO: 182538 - RNA, 19 nt, Human herpesvirus 7
caauuacaaaauguauaca

SEQ ID NO: 182539 - RNA, 20 nt, Human herpesvirus 7
aucuggaaucgaauacaguu

SEQ ID NO: 182540 - RNA, 15 nt, Human herpesvirus 7
aucugguaaugucau

SEQ ID NO: 182541 - RNA, 20 nt, Human herpesvirus 7
aucugcuggaaauuugugua

SEQ ID NO: 182542 - RNA, 22 nt, Human herpesvirus 7
aucugucauggacggcauuuaa

SEQ ID NO: 182543 - RNA, 16 nt, Human herpesvirus 7
aucuuaaaaguacaaa

SEQ ID NO: 182544 - RNA, 20 nt, Human herpesvirus 7
augguaccuuagaaucacaa

SEQ ID NO: 182545 - RNA, 18 nt, Human herpesvirus 7
auggguucacacccuguc

SEQ ID NO: 182546 - RNA, 14 nt, Human herpesvirus 7
auguccgcuuacaa

SEQ ID NO: 182547 - RNA, 19 nt, Human herpesvirus 7
auguccgcuuacaagaugc

SEQ ID NO: 182548 - RNA, 11 nt, Human herpesvirus 7
auguaauuccg

SEQ ID NO: 182549 - RNA, 19 nt, Human herpesvirus 7
auguacacagcuggaguua

SEQ ID NO: 182550 - RNA, 14 nt, Human herpesvirus 7
auguccaaucaaaa

SEQ ID NO: 182551 - RNA, 16 nt, Human herpesvirus 7
auguccagauccaucu

SEQ ID NO: 182552 - RNA, 22 nt, Human herpesvirus 7
augucucauaauaucgguuauc

SEQ ID NO: 182553 - RNA, 12 nt, Human herpesvirus 7
auguaaaccaaa

SEQ ID NO: 182554 - RNA, 14 nt, Human herpesvirus 7
auguaaaccaaauu

SEQ ID NO: 182555 - RNA, 16 nt, Human herpesvirus 7
auguaaaauuaauuca

SEQ ID NO: 182556 - RNA, 19 nt, Human herpesvirus 7
augguucuuauaacaaagu

SEQ ID NO: 182557 - RNA, 11 nt, Human herpesvirus 7
auguaacuuuc

SEQ ID NO: 182558 - RNA, 12 nt, Human herpesvirus 7
augguugugcaa

SEQ ID NO: 182559 - RNA, 13 nt, Human herpesvirus 7
augucucuguucc

SEQ ID NO: 182560 - RNA, 15 nt, Human herpesvirus 7
augucucuguuccca

SEQ ID NO: 182561 - RNA, 17 nt, Human herpesvirus 7
augucuucaacuucucu

SEQ ID NO: 182562 - RNA, 21 nt, Human herpesvirus 7
augucuuaauugccgauuccu

SEQ ID NO: 182563 - RNA, 22 nt, Human herpesvirus 7
augugcugaaugugcgaccuau

SEQ ID NO: 182564 - RNA, 22 nt, Human herpesvirus 7
augugcuuauuuauauauggca

SEQ ID NO: 182565 - RNA, 18 nt, Human herpesvirus 7
augugcuuuuuucuggua

SEQ ID NO: 182566 - RNA, 18 nt, Human herpesvirus 7
auguguagauuuggauga

SEQ ID NO: 182567 - RNA, 16 nt, Human herpesvirus 7
auguguacuaaagcca

SEQ ID NO: 182568 - RNA, 18 nt, Human herpesvirus 7
auguggugcuuacgugau

SEQ ID NO: 182569 - RNA, 12 nt, Human herpesvirus 7
auuaauuuccac

SEQ ID NO: 182570 - RNA, 22 nt, Human herpesvirus 7
auuaauucuuucaguucccaua

SEQ ID NO: 182571 - RNA, 14 nt, Human herpesvirus 7
auguguuacaugau

SEQ ID NO: 182572 - RNA, 20 nt, Human herpesvirus 7
auguguuacaugaucuugua

SEQ ID NO: 182573 - RNA, 17 nt, Human herpesvirus 7
auguuaaaggaucaaaa

SEQ ID NO: 182574 - RNA, 19 nt, Human herpesvirus 7
auguguuuacauuacugga

SEQ ID NO: 182575 - RNA, 14 nt, Human herpesvirus 7
auguuauuuggaau

SEQ ID NO: 182576 - RNA, 14 nt, Human herpesvirus 7
auguuaugugcuua

SEQ ID NO: 182577 - RNA, 15 nt, Human herpesvirus 7
auguuaugugcuuau

SEQ ID NO: 182578 - RNA, 13 nt, Human herpesvirus 7
auucucuacuuaa

SEQ ID NO: 182579 - RNA, 15 nt, Human herpesvirus 7
auugcuagucucaau

SEQ ID NO: 182580 - RNA, 14 nt, Human herpesvirus 7
auuggagaugucag

SEQ ID NO: 182581 - RNA, 15 nt, Human herpesvirus 7
auugcugucuauuuc

SEQ ID NO: 182582 - RNA, 16 nt, Human herpesvirus 7
auugcugucuauuuca

SEQ ID NO: 182583 - RNA, 17 nt, Human herpesvirus 7
auugcugucuauuucaa

SEQ ID NO: 182584 - RNA, 22 nt, Human herpesvirus 7
auuggucguugcuuacuuugcg

SEQ ID NO: 182585 - RNA, 19 nt, Human herpesvirus 7
auugguagaaaugugcgaa

SEQ ID NO: 182586 - RNA, 22 nt, Human herpesvirus 7
auugguagaaaugugcgaaggu

SEQ ID NO: 182587 - RNA, 19 nt, Human herpesvirus 7
auuggcaugcuuacaguga

SEQ ID NO: 182588 - RNA, 21 nt, Human herpesvirus 7
auuggauaauaucaguacaac

SEQ ID NO: 182589 - RNA, 15 nt, Human herpesvirus 7
auucguuaagcaccg

SEQ ID NO: 182590 - RNA, 19 nt, Human herpesvirus 7
auucuauuuuaaaaaccau

SEQ ID NO: 182591 - RNA, 17 nt, Human herpesvirus 7
auucuaggcuugcauuc

SEQ ID NO: 182592 - RNA, 19 nt, Human herpesvirus 7
auucuauaaaacgugugaa

SEQ ID NO: 182593 - RNA, 12 nt, Human herpesvirus 7
auucuauagaaa

SEQ ID NO: 182594 - RNA, 16 nt, Human herpesvirus 7
auucuaacaaauacca

SEQ ID NO: 182595 - RNA, 23 nt, Human herpesvirus 7
auucuaacaaauaccaugaaaaa

SEQ ID NO: 182596 - RNA, 21 nt, Human herpesvirus 7
auucuccaaucauaauuuuca

SEQ ID NO: 182597 - RNA, 23 nt, Human herpesvirus 7
auucuccaguggcaguacuacua

SEQ ID NO: 182598 - RNA, 16 nt, Human herpesvirus 7
auucucauacaacucu

SEQ ID NO: 182599 - RNA, 16 nt, Human herpesvirus 7
auucucauagauuuca

SEQ ID NO: 182600 - RNA, 17 nt, Human herpesvirus 7
auucucauagauuucag

SEQ ID NO: 182601 - RNA, 17 nt, Human herpesvirus 7
auucgaucuaagucuac

SEQ ID NO: 182602 - RNA, 16 nt, Human herpesvirus 7
auuccuucuaaauucu

SEQ ID NO: 182603 - RNA, 15 nt, Human herpesvirus 7
auucgaaacacuuac

SEQ ID NO: 182604 - RNA, 16 nt, Human herpesvirus 7
auuccgguguggaaac

SEQ ID NO: 182605 - RNA, 13 nt, Human herpesvirus 7
auuccucaucucc

SEQ ID NO: 182606 - RNA, 20 nt, Human herpesvirus 7
auuccucauggccagugaau

SEQ ID NO: 182607 - RNA, 20 nt, Human herpesvirus 7
auuccguuuuaaauagugaa

SEQ ID NO: 182608 - RNA, 17 nt, Human herpesvirus 7
auuccuauuaagcagcu

SEQ ID NO: 182609 - RNA, 17 nt, Human herpesvirus 7
auuccagauaugacaaa

SEQ ID NO: 182610 - RNA, 18 nt, Human herpesvirus 7
auuccagauaugacaaau

SEQ ID NO: 182611 - RNA, 12 nt, Human herpesvirus 7
auuccaucucac

SEQ ID NO: 182612 - RNA, 20 nt, Human herpesvirus 7
auuccaucugguaaugucau

SEQ ID NO: 182613 - RNA, 15 nt, Human herpesvirus 7
auuauacuagcagau

SEQ ID NO: 182614 - RNA, 14 nt, Human herpesvirus 7
auucauuguaugac

SEQ ID NO: 182615 - RNA, 23 nt, Human herpesvirus 7
auuauaaaagauggaaaguuuau

SEQ ID NO: 182616 - RNA, 15 nt, Human herpesvirus 7
auuauacacugugaa

SEQ ID NO: 182617 - RNA, 14 nt, Human herpesvirus 7
auuaguucuggccg

SEQ ID NO: 182618 - RNA, 14 nt, Human herpesvirus 7
auuagaaacaacac

SEQ ID NO: 182619 - RNA, 20 nt, Human herpesvirus 7
auuagaaagcucacuucaaa

SEQ ID NO: 182620 - RNA, 21 nt, Human herpesvirus 7
auuacuucuuugacaaaaaug

SEQ ID NO: 182621 - RNA, 18 nt, Human herpesvirus 7
auuacucgugaaguaaau

SEQ ID NO: 182622 - RNA, 20 nt, Human herpesvirus 7
auuacucguguugcaaauca

SEQ ID NO: 182623 - RNA, 12 nt, Human herpesvirus 7
auuacauugcag

SEQ ID NO: 182624 - RNA, 13 nt, Human herpesvirus 7
auuacgaacugau

SEQ ID NO: 182625 - RNA, 13 nt, Human herpesvirus 7
auuacgagauauu

SEQ ID NO: 182626 - RNA, 19 nt, Human herpesvirus 7
auuagcgcgugaacaaaua

SEQ ID NO: 182627 - RNA, 14 nt, Human herpesvirus 7
auuagauaaugaca

SEQ ID NO: 182628 - RNA, 11 nt, Human herpesvirus 7
auuagauucca

SEQ ID NO: 182629 - RNA, 13 nt, Human herpesvirus 7
auuuauugcuuaa

SEQ ID NO: 182630 - RNA, 15 nt, Human herpesvirus 7
auuuauuuacagauu

SEQ ID NO: 182631 - RNA, 22 nt, Human herpesvirus 7
auuuauuuucguaucugugacu

SEQ ID NO: 182632 - RNA, 21 nt, Human herpesvirus 7
auuuauuuuuuccaugucaca

SEQ ID NO: 182633 - RNA, 18 nt, Human herpesvirus 7
auuucaaacguaaugcaa

SEQ ID NO: 182634 - RNA, 19 nt, Human herpesvirus 7
auuucaaacguaaugcaaa

SEQ ID NO: 182635 - RNA, 18 nt, Human herpesvirus 7
auuucaauaaucaaugca

SEQ ID NO: 182636 - RNA, 21 nt, Human herpesvirus 7
auuucaauaaucaaugcaucu

SEQ ID NO: 182637 - RNA, 18 nt, Human herpesvirus 7
auuuaucucauagcuuaa

SEQ ID NO: 182638 - RNA, 17 nt, Human herpesvirus 7
auuuauauauggcaaua

SEQ ID NO: 182639 - RNA, 15 nt, Human herpesvirus 7
auuuauccaucaaaa

SEQ ID NO: 182640 - RNA, 13 nt, Human herpesvirus 7
auuucauaucuau

SEQ ID NO: 182641 - RNA, 16 nt, Human herpesvirus 7
auuucagcuccauguc

SEQ ID NO: 182642 - RNA, 18 nt, Human herpesvirus 7
auuucagaauuuccagaa

SEQ ID NO: 182643 - RNA, 14 nt, Human herpesvirus 7
auuucagaugacaa

SEQ ID NO: 182644 - RNA, 15 nt, Human herpesvirus 7
auuucacacaaugcc

SEQ ID NO: 182645 - RNA, 19 nt, Human herpesvirus 7
auuugaaaaaaagauuuaa

SEQ ID NO: 182646 - RNA, 14 nt, Human herpesvirus 7
auuugaacggaaua

SEQ ID NO: 182647 - RNA, 22 nt, Human herpesvirus 7
auuugaauauugcuagucucaa

SEQ ID NO: 182648 - RNA, 18 nt, Human herpesvirus 7
auuugaaugaacaaauaa

SEQ ID NO: 182649 - RNA, 14 nt, Human herpesvirus 7
auuugacaaaacaa

SEQ ID NO: 182650 - RNA, 16 nt, Human herpesvirus 7
auuugauuccaucuca

SEQ ID NO: 182651 - RNA, 18 nt, Human herpesvirus 7
caaaaacgguauguaaau

SEQ ID NO: 182652 - RNA, 22 nt, Human herpesvirus 7
caaaaaccgggcuuuuuuauaa

SEQ ID NO: 182653 - RNA, 13 nt, Human herpesvirus 7
caaaaaccugaaa

SEQ ID NO: 182654 - RNA, 18 nt, Human herpesvirus 7
auuuguaucuaugacaga

SEQ ID NO: 182655 - RNA, 17 nt, Human herpesvirus 7
auuuguguguaugugca

SEQ ID NO: 182656 - RNA, 16 nt, Human herpesvirus 7
auuugcuuuaccccaa

SEQ ID NO: 182657 - RNA, 20 nt, Human herpesvirus 7
auuugcugaacucugucauc

SEQ ID NO: 182658 - RNA, 18 nt, Human herpesvirus 7
auuuggugaagauucuua

SEQ ID NO: 182659 - RNA, 11 nt, Human herpesvirus 7
auuugcauaaa

SEQ ID NO: 182660 - RNA, 23 nt, Human herpesvirus 7
auuuagucggcacacguacaaua

SEQ ID NO: 182661 - RNA, 20 nt, Human herpesvirus 7
auuuacuugauuuucuuaca

SEQ ID NO: 182662 - RNA, 15 nt, Human herpesvirus 7
auuuacugauucuau

SEQ ID NO: 182663 - RNA, 22 nt, Human herpesvirus 7
auuuaaugucugugucuaugag

SEQ ID NO: 182664 - RNA, 14 nt, Human herpesvirus 7
auuuaagaauuuaa

SEQ ID NO: 182665 - RNA, 14 nt, Human herpesvirus 7
auuuaagcuucaaa

SEQ ID NO: 182666 - RNA, 16 nt, Human herpesvirus 7
auuuaacaaagugcau

SEQ ID NO: 182667 - RNA, 17 nt, Human herpesvirus 7
auuuaacaaagugcaua

SEQ ID NO: 182668 - RNA, 18 nt, Human herpesvirus 7
auuuaaaccgaguguaau

SEQ ID NO: 182669 - RNA, 18 nt, Human herpesvirus 7
auuguacauuuuaccaaa

SEQ ID NO: 182670 - RNA, 15 nt, Human herpesvirus 7
auuguacaauuacaa

SEQ ID NO: 182671 - RNA, 22 nt, Human herpesvirus 7
auuguauaugaugacaacaaag

SEQ ID NO: 182672 - RNA, 15 nt, Human herpesvirus 7
auuguggggcauuca

SEQ ID NO: 182673 - RNA, 18 nt, Human herpesvirus 7
auugugguacaacaaaca

SEQ ID NO: 182674 - RNA, 20 nt, Human herpesvirus 7
auugugcaucuccuguaacc

SEQ ID NO: 182675 - RNA, 17 nt, Human herpesvirus 7
auuguccuuucaacgau

SEQ ID NO: 182676 - RNA, 21 nt, Human herpesvirus 7
auuguccuuucaacgaucuca

SEQ ID NO: 182677 - RNA, 17 nt, Human herpesvirus 7
auugucuuacagcacuu

SEQ ID NO: 182678 - RNA, 16 nt, Human herpesvirus 7
auugugaagucuuuau

SEQ ID NO: 182679 - RNA, 19 nt, Human herpesvirus 7
auugugaguuucuacaugu

SEQ ID NO: 182680 - RNA, 22 nt, Human herpesvirus 7
caaacagaagcugacuuuguca

SEQ ID NO: 182681 - RNA, 15 nt, Human herpesvirus 7
caaacauguaaucaa

SEQ ID NO: 182682 - RNA, 16 nt, Human herpesvirus 7
caaacauguuccauuc

SEQ ID NO: 182683 - RNA, 22 nt, Human herpesvirus 7
caaacauguuccauucaauaaa

SEQ ID NO: 182684 - RNA, 20 nt, Human herpesvirus 7
caaaauuuuggauuguguaa

SEQ ID NO: 182685 - RNA, 22 nt, Human herpesvirus 7
caaaauuuuggauuguguaauu

SEQ ID NO: 182686 - RNA, 17 nt, Human herpesvirus 7
caaacaaauaauucaaa

SEQ ID NO: 182687 - RNA, 18 nt, Human herpesvirus 7
caaacaauaaauuuugaa

SEQ ID NO: 182688 - RNA, 20 nt, Human herpesvirus 7
caaacaauuuuuuguucaaa

SEQ ID NO: 182689 - RNA, 17 nt, Human herpesvirus 7
caaaacaaacucugcuu

SEQ ID NO: 182690 - RNA, 23 nt, Human herpesvirus 7
caaaaauuggacaccaguaugaa

SEQ ID NO: 182691 - RNA, 12 nt, Human herpesvirus 7
caaaacaagaag

SEQ ID NO: 182692 - RNA, 22 nt, Human herpesvirus 7
caaaacaagaagcgagauuuau

SEQ ID NO: 182693 - RNA, 13 nt, Human herpesvirus 7
caaaacaaucggu

SEQ ID NO: 182694 - RNA, 21 nt, Human herpesvirus 7
caaaacaaucgguaacauguc

SEQ ID NO: 182695 - RNA, 22 nt, Human herpesvirus 7
caaaacaaucgguaacaugucu

SEQ ID NO: 182696 - RNA, 20 nt, Human herpesvirus 7
caaaaaugauaugacauggc

SEQ ID NO: 182697 - RNA, 22 nt, Human herpesvirus 7
caaaaaggauuuucgauuccau

SEQ ID NO: 182698 - RNA, 23 nt, Human herpesvirus 7
caaaaaguagaaggaaaccaauu

SEQ ID NO: 182699 - RNA, 12 nt, Human herpesvirus 7
caaaaagugcau

SEQ ID NO: 182700 - RNA, 14 nt, Human herpesvirus 7
caaaacagaacuuu

SEQ ID NO: 182701 - RNA, 12 nt, Human herpesvirus 7
caaaacauauca

SEQ ID NO: 182702 - RNA, 13 nt, Human herpesvirus 7
caaaauuucauua

SEQ ID NO: 182703 - RNA, 16 nt, Human herpesvirus 7
caaaauuccaaaaugu

SEQ ID NO: 182704 - RNA, 13 nt, Human herpesvirus 7
caaaauuccauuc

SEQ ID NO: 182705 - RNA, 14 nt, Human herpesvirus 7
caaaauuccauucg

SEQ ID NO: 182706 - RNA, 13 nt, Human herpesvirus 7
caaaauucugcuu

SEQ ID NO: 182707 - RNA, 18 nt, Human herpesvirus 7
caaaauucugcuugucuc

SEQ ID NO: 182708 - RNA, 21 nt, Human herpesvirus 7
caaaauucugcuugucucugu

SEQ ID NO: 182709 - RNA, 16 nt, Human herpesvirus 7
caaaucaaaguuuuaa

SEQ ID NO: 182710 - RNA, 16 nt, Human herpesvirus 7
caaauauguggcacau

SEQ ID NO: 182711 - RNA, 17 nt, Human herpesvirus 7
caaauauguggcacaua

SEQ ID NO: 182712 - RNA, 22 nt, Human herpesvirus 7
caaacgcugacagucauuuaca

SEQ ID NO: 182713 - RNA, 13 nt, Human herpesvirus 7
caaacucacuaau

SEQ ID NO: 182714 - RNA, 11 nt, Human herpesvirus 7
caaacuauggu

SEQ ID NO: 182715 - RNA, 15 nt, Human herpesvirus 7
caaacuaugugcuua

SEQ ID NO: 182716 - RNA, 21 nt, Human herpesvirus 7
caacaacuaaaacuacauuua

SEQ ID NO: 182717 - RNA, 13 nt, Human herpesvirus 7
caacaacuaaaga

SEQ ID NO: 182718 - RNA, 15 nt, Human herpesvirus 7
caacaaacauuccaa

SEQ ID NO: 182719 - RNA, 16 nt, Human herpesvirus 7
caacaaacauuccaac

SEQ ID NO: 182720 - RNA, 11 nt, Human herpesvirus 7
caaauguucca

SEQ ID NO: 182721 - RNA, 17 nt, Human herpesvirus 7
caaauuaaauacuugca

SEQ ID NO: 182722 - RNA, 20 nt, Human herpesvirus 7
caaauuaaauacuugcaaug

SEQ ID NO: 182723 - RNA, 14 nt, Human herpesvirus 7
caaauugaaccuua

SEQ ID NO: 182724 - RNA, 22 nt, Human herpesvirus 7
caaauuccugcuugcacaaaga

SEQ ID NO: 182725 - RNA, 18 nt, Human herpesvirus 7
caaauucaaccacagaca

SEQ ID NO: 182726 - RNA, 15 nt, Human herpesvirus 7
caaauucauccaaaa

SEQ ID NO: 182727 - RNA, 22 nt, Human herpesvirus 7
caaauuaugcguuaaugucucu

SEQ ID NO: 182728 - RNA, 21 nt, Human herpesvirus 7
caaauuuaucucauagcuuaa

SEQ ID NO: 182729 - RNA, 22 nt, Human herpesvirus 7
caaauuucaaacguaaugcaaa

SEQ ID NO: 182730 - RNA, 19 nt, Human herpesvirus 7
caaauuucuccacaguccu

SEQ ID NO: 182731 - RNA, 12 nt, Human herpesvirus 7
caaauugauccu

SEQ ID NO: 182732 - RNA, 20 nt, Human herpesvirus 7
caaauugauccugcuauuca

SEQ ID NO: 182733 - RNA, 20 nt, Human herpesvirus 7
caaauuguggagagauucaa

SEQ ID NO: 182734 - RNA, 19 nt, Human herpesvirus 7
caaauuuaagagacauuga

SEQ ID NO: 182735 - RNA, 20 nt, Human herpesvirus 7
caaauuuaagagacauugaa

SEQ ID NO: 182736 - RNA, 23 nt, Human herpesvirus 7
cauguuucaagaauggcugauga

SEQ ID NO: 182737 - RNA, 18 nt, Human herpesvirus 7
cauguuccauucaauaaa

SEQ ID NO: 182738 - RNA, 19 nt, Human herpesvirus 7
cauguguacuaaagccaau

SEQ ID NO: 182739 - RNA, 21 nt, Human herpesvirus 7
caugauuauauaaguccuuca

SEQ ID NO: 182740 - RNA, 19 nt, Human herpesvirus 7
caugucuuuuaguuuucau

SEQ ID NO: 182741 - RNA, 22 nt, Human herpesvirus 7
caugucuucaacuucucuugga

SEQ ID NO: 182742 - RNA, 18 nt, Human herpesvirus 7
caugacuggacacaauca

SEQ ID NO: 182743 - RNA, 16 nt, Human herpesvirus 7
caugagaacggcgcga

SEQ ID NO: 182744 - RNA, 22 nt, Human herpesvirus 7
caugagaacggcgcgacugugc

SEQ ID NO: 182745 - RNA, 18 nt, Human herpesvirus 7
caugaugaauauaacaaa

SEQ ID NO: 182746 - RNA, 15 nt, Human herpesvirus 7
caugguucguacagu

SEQ ID NO: 182747 - RNA, 16 nt, Human herpesvirus 7
caugauugguaaaaaa

SEQ ID NO: 182748 - RNA, 21 nt, Human herpesvirus 7
caugauugguaaaaaauuacu

SEQ ID NO: 182749 - RNA, 18 nt, Human herpesvirus 7
caugauuucaauaaucaa

SEQ ID NO: 182750 - RNA, 15 nt, Human herpesvirus 7
caugaucuccguuga

SEQ ID NO: 182751 - RNA, 20 nt, Human herpesvirus 7
caugauguuaaagaacaaga

SEQ ID NO: 182752 - RNA, 19 nt, Human herpesvirus 7
cauauuccauuaagccaga

SEQ ID NO: 182753 - RNA, 10 nt, Human herpesvirus 7
cauagcuuaa

SEQ ID NO: 182754 - RNA, 16 nt, Human herpesvirus 7
caucaaaacauaucag

SEQ ID NO: 182755 - RNA, 24 nt, Human herpesvirus 7
caucaaaacauaucagauuuuauc

SEQ ID NO: 182756 - RNA, 18 nt, Human herpesvirus 7
caucaacauacgugcuua

SEQ ID NO: 182757 - RNA, 13 nt, Human herpesvirus 7
caucaauguuuuc

SEQ ID NO: 182758 - RNA, 14 nt, Human herpesvirus 7
caucgguagugucu

SEQ ID NO: 182759 - RNA, 22 nt, Human herpesvirus 7
caucgguuuucugagugcuaaa

SEQ ID NO: 182760 - RNA, 13 nt, Human herpesvirus 7
caucuaugugcuc

SEQ ID NO: 182761 - RNA, 21 nt, Human herpesvirus 7
cagcaucccuauugcaucaac

SEQ ID NO: 182762 - RNA, 14 nt, Human herpesvirus 7
cagcagcugcuaaa

SEQ ID NO: 182763 - RNA, 20 nt, Human herpesvirus 7
cagcaaaucugaaaauugcg

SEQ ID NO: 182764 - RNA, 15 nt, Human herpesvirus 7
cagauugcuuguuac

SEQ ID NO: 182765 - RNA, 23 nt, Human herpesvirus 7
cagauuucauguuuuaugacuca

SEQ ID NO: 182766 - RNA, 21 nt, Human herpesvirus 7
cagauuuuaguuccacgucaa

SEQ ID NO: 182767 - RNA, 15 nt, Human herpesvirus 7
cagauucaguaucac

SEQ ID NO: 182768 - RNA, 15 nt, Human herpesvirus 7
cagauugaaauucca

SEQ ID NO: 182769 - RNA, 16 nt, Human herpesvirus 7
cagauugaaauuccau

SEQ ID NO: 182770 - RNA, 21 nt, Human herpesvirus 7
cagauugaaauuccauacaaa

SEQ ID NO: 182771 - RNA, 19 nt, Human herpesvirus 7
cauaaucauggaaaaugga

SEQ ID NO: 182772 - RNA, 16 nt, Human herpesvirus 7
cauacucuagaacaaa

SEQ ID NO: 182773 - RNA, 21 nt, Human herpesvirus 7
cauacucuagaacaaacugua

SEQ ID NO: 182774 - RNA, 19 nt, Human herpesvirus 7
cauaaugacacgacacuga

SEQ ID NO: 182775 - RNA, 23 nt, Human herpesvirus 7
cauaaugacacgacacugaaugu

SEQ ID NO: 182776 - RNA, 16 nt, Human herpesvirus 7
cauaaguugacaaugu

SEQ ID NO: 182777 - RNA, 18 nt, Human herpesvirus 7
cauaaguugacaauguca

SEQ ID NO: 182778 - RNA, 16 nt, Human herpesvirus 7
cauagcacucauacua

SEQ ID NO: 182779 - RNA, 12 nt, Human herpesvirus 7
cauagauuucag

SEQ ID NO: 182780 - RNA, 17 nt, Human herpesvirus 7
cauagauuaaauagcaa

SEQ ID NO: 182781 - RNA, 18 nt, Human herpesvirus 7
cauagauuaaauagcaaa

SEQ ID NO: 182782 - RNA, 17 nt, Human herpesvirus 7
cauagcaggaagcacaa

SEQ ID NO: 182783 - RNA, 21 nt, Human herpesvirus 7
cauagcaggaagcacaaauca

SEQ ID NO: 182784 - RNA, 17 nt, Human herpesvirus 7
cauagaagaaugcaagc

SEQ ID NO: 182785 - RNA, 15 nt, Human herpesvirus 7
cauacuuuaaaacuu

SEQ ID NO: 182786 - RNA, 15 nt, Human herpesvirus 7
cauaaagcaccaaaa

SEQ ID NO: 182787 - RNA, 19 nt, Human herpesvirus 7
cauaaagguaaaaauuuga

SEQ ID NO: 182788 - RNA, 20 nt, Human herpesvirus 7
cauaaagguaaaaauuugac

SEQ ID NO: 182789 - RNA, 17 nt, Human herpesvirus 7
cauaaauaauaacaauu

SEQ ID NO: 182790 - RNA, 21 nt, Human herpesvirus 7
cauaaaugcuuaaauuuccau

SEQ ID NO: 182791 - RNA, 18 nt, Human herpesvirus 7
cauaacaaaaaagguguu

SEQ ID NO: 182792 - RNA, 22 nt, Human herpesvirus 7
cauaacaaaaaagguguugaua

SEQ ID NO: 182793 - RNA, 14 nt, Human herpesvirus 7
cauaacccacuaac

SEQ ID NO: 182794 - RNA, 19 nt, Human herpesvirus 7
caguguuuuuuucugguaa

SEQ ID NO: 182795 - RNA, 19 nt, Human herpesvirus 7
cauaaaauguacaauuccu

SEQ ID NO: 182796 - RNA, 12 nt, Human herpesvirus 7
cauaaacuauca

SEQ ID NO: 182797 - RNA, 18 nt, Human herpesvirus 7
caguuacuuuuacuccuc

SEQ ID NO: 182798 - RNA, 14 nt, Human herpesvirus 7
caguuagucugcug

SEQ ID NO: 182799 - RNA, 14 nt, Human herpesvirus 7
caguguacuguuga

SEQ ID NO: 182800 - RNA, 19 nt, Human herpesvirus 7
caguguacuguugauacaa

SEQ ID NO: 182801 - RNA, 17 nt, Human herpesvirus 7
cagugggaaaguguaca

SEQ ID NO: 182802 - RNA, 18 nt, Human herpesvirus 7
ccacucuggaaaugucaa

SEQ ID NO: 182803 - RNA, 23 nt, Human herpesvirus 7
ccacugauuuuuaaacuugugaa

SEQ ID NO: 182804 - RNA, 16 nt, Human herpesvirus 7
ccacuaauccaugaca

SEQ ID NO: 182805 - RNA, 19 nt, Human herpesvirus 7
ccagacagcuguauaucua

SEQ ID NO: 182806 - RNA, 17 nt, Human herpesvirus 7
ccagaccgcauaaccca

SEQ ID NO: 182807 - RNA, 15 nt, Human herpesvirus 7
ccagaacauuuauuu

SEQ ID NO: 182808 - RNA, 23 nt, Human herpesvirus 7
ccagaagaauggcgaguuacauu

SEQ ID NO: 182809 - RNA, 22 nt, Human herpesvirus 7
ccagagaaccacgugacuugga

SEQ ID NO: 182810 - RNA, 17 nt, Human herpesvirus 7
ccaccgguccuuccuca

SEQ ID NO: 182811 - RNA, 24 nt, Human herpesvirus 7
ccacgaauaucguuguguggcaac

SEQ ID NO: 182812 - RNA, 20 nt, Human herpesvirus 7
ccacgaugacuuccaaguuu

SEQ ID NO: 182813 - RNA, 17 nt, Human herpesvirus 7
ccaccgauuauauucaa

SEQ ID NO: 182814 - RNA, 15 nt, Human herpesvirus 7
ccaauaaaucuucau

SEQ ID NO: 182815 - RNA, 14 nt, Human herpesvirus 7
ccaagugggugguc

SEQ ID NO: 182816 - RNA, 15 nt, Human herpesvirus 7
ccaccauuucugaaa

SEQ ID NO: 182817 - RNA, 21 nt, Human herpesvirus 7
ccaagacgccggggacauucc

SEQ ID NO: 182818 - RNA, 16 nt, Human herpesvirus 7
ccaacucaaugaaugc

SEQ ID NO: 182819 - RNA, 20 nt, Human herpesvirus 7
ccaaagaaaaaaggaugaaa

SEQ ID NO: 182820 - RNA, 19 nt, Human herpesvirus 7
ccaaacaaaauuccaaaau

SEQ ID NO: 182821 - RNA, 20 nt, Human herpesvirus 7
ccaaaaucagacaauuucac

SEQ ID NO: 182822 - RNA, 19 nt, Human herpesvirus 7
ccaaaaucuauauuugauu

SEQ ID NO: 182823 - RNA, 20 nt, Human herpesvirus 7
ccaaaccuauccacucuccu

SEQ ID NO: 182824 - RNA, 22 nt, Human herpesvirus 7
cauuguucaacuucaacauaca

SEQ ID NO: 182825 - RNA, 22 nt, Human herpesvirus 7
cauuuaaauucaacaucuuuca

SEQ ID NO: 182826 - RNA, 18 nt, Human herpesvirus 7
ccaaaaagaaacuuucua

SEQ ID NO: 182827 - RNA, 22 nt, Human herpesvirus 7
cauuuuguaugaaaagcccaaa

SEQ ID NO: 182828 - RNA, 15 nt, Human herpesvirus 7
cauugucacugcaaa

SEQ ID NO: 182829 - RNA, 21 nt, Human herpesvirus 7
cauuggaaaaaugcugcaaug

SEQ ID NO: 182830 - RNA, 18 nt, Human herpesvirus 7
cauuauuggauaauauca

SEQ ID NO: 182831 - RNA, 23 nt, Human herpesvirus 7
cauuaugagauuugccugccaga

SEQ ID NO: 182832 - RNA, 14 nt, Human herpesvirus 7
cauuauuuguucaa

SEQ ID NO: 182833 - RNA, 19 nt, Human herpesvirus 7
cauucgcaaggaauaugaa

SEQ ID NO: 182834 - RNA, 21 nt, Human herpesvirus 7
cauucuccaguggcaguacua

SEQ ID NO: 182835 - RNA, 15 nt, Human herpesvirus 7
cauuccucauggcca

SEQ ID NO: 182836 - RNA, 22 nt, Human herpesvirus 7
cauuccuuggaaaaaugaugcu

SEQ ID NO: 182837 - RNA, 13 nt, Human herpesvirus 7
cauucgaugucag

SEQ ID NO: 182838 - RNA, 12 nt, Human herpesvirus 7
cauucgaucuaa

SEQ ID NO: 182839 - RNA, 20 nt, Human herpesvirus 7
cauucuucuauggguucaca

SEQ ID NO: 182840 - RNA, 20 nt, Human herpesvirus 7
cauucuuuucaaugcaacuu

SEQ ID NO: 182841 - RNA, 13 nt, Human herpesvirus 7
cauugaaaaagca

SEQ ID NO: 182842 - RNA, 14 nt, Human herpesvirus 7
cauuauauccaaua

SEQ ID NO: 182843 - RNA, 15 nt, Human herpesvirus 7
cauuauauccaauaa

SEQ ID NO: 182844 - RNA, 17 nt, Human herpesvirus 7
cauuagagcauauucca

SEQ ID NO: 182845 - RNA, 22 nt, Human herpesvirus 7
cauuacuacaguggaugcugga

SEQ ID NO: 182846 - RNA, 16 nt, Human herpesvirus 7
cauuacucguguugca

SEQ ID NO: 182847 - RNA, 19 nt, Human herpesvirus 7
cauuacucguguugcaaau

SEQ ID NO: 182848 - RNA, 17 nt, Human herpesvirus 7
cauuacuggauguauaa

SEQ ID NO: 182849 - RNA, 17 nt, Human herpesvirus 7
cauuaauaucaauuuga

SEQ ID NO: 182850 - RNA, 18 nt, Human herpesvirus 7
cauuaauaucaauuugaa

SEQ ID NO: 182851 - RNA, 22 nt, Human herpesvirus 7
ccuguuugacguaauuacccag

SEQ ID NO: 182852 - RNA, 15 nt, Human herpesvirus 7
ccuguuaaaagugaa

SEQ ID NO: 182853 - RNA, 19 nt, Human herpesvirus 7
ccuguacuguugcuaauua

SEQ ID NO: 182854 - RNA, 23 nt, Human herpesvirus 7
ccugguguuuuguauacaacuuu

SEQ ID NO: 182855 - RNA, 18 nt, Human herpesvirus 7
ccuguuuucgcuguugau

SEQ ID NO: 182856 - RNA, 16 nt, Human herpesvirus 7
ccuucauggcacauau

SEQ ID NO: 182857 - RNA, 15 nt, Human herpesvirus 7
ccuucccaacuaaaa

SEQ ID NO: 182858 - RNA, 18 nt, Human herpesvirus 7
ccuuccucguugccacua

SEQ ID NO: 182859 - RNA, 22 nt, Human herpesvirus 7
ccuucuuauaaugauguaaugu

SEQ ID NO: 182860 - RNA, 16 nt, Human herpesvirus 7
ccuucgcugcugugag

SEQ ID NO: 182861 - RNA, 17 nt, Human herpesvirus 7
cgaagaaauucgaaaca

SEQ ID NO: 182862 - RNA, 17 nt, Human herpesvirus 7
cgaacuguuacaacuuu

SEQ ID NO: 182863 - RNA, 22 nt, Human herpesvirus 7
cgaacuguuacaacuuugccaa

SEQ ID NO: 182864 - RNA, 15 nt, Human herpesvirus 7
cgaaagccacuguug

SEQ ID NO: 182865 - RNA, 15 nt, Human herpesvirus 7
cgaaacaauacauga

SEQ ID NO: 182866 - RNA, 19 nt, Human herpesvirus 7
ccuuuuaacaacagccaaa

SEQ ID NO: 182867 - RNA, 22 nt, Human herpesvirus 7
ccuuuuuucuuccuagcauuaa

SEQ ID NO: 182868 - RNA, 14 nt, Human herpesvirus 7
cgaaaaacacuuua

SEQ ID NO: 182869 - RNA, 11 nt, Human herpesvirus 7
ccuucuugccu

SEQ ID NO: 182870 - RNA, 15 nt, Human herpesvirus 7
ccuuguguugucaua

SEQ ID NO: 182871 - RNA, 18 nt, Human herpesvirus 7
ccuuguguugucauacaa

SEQ ID NO: 182872 - RNA, 20 nt, Human herpesvirus 7
ccuuuaugugauauacuuuu

SEQ ID NO: 182873 - RNA, 16 nt, Human herpesvirus 7
ccuggaaagcucauuu

SEQ ID NO: 182874 - RNA, 18 nt, Human herpesvirus 7
ccuggaacuucaccacga

SEQ ID NO: 182875 - RNA, 19 nt, Human herpesvirus 7
ccuggcguuacggguggca

SEQ ID NO: 182876 - RNA, 15 nt, Human herpesvirus 7
ccugccagagaacca

SEQ ID NO: 182877 - RNA, 23 nt, Human herpesvirus 7
ccugcuaaggcgaaaaacacuuu

SEQ ID NO: 182878 - RNA, 18 nt, Human herpesvirus 7
ccugcuauucauuucacg

SEQ ID NO: 182879 - RNA, 22 nt, Human herpesvirus 7
ccugaaucaaaauccuggauuu

SEQ ID NO: 182880 - RNA, 15 nt, Human herpesvirus 7
ccugaauuuuacacc

SEQ ID NO: 182881 - RNA, 16 nt, Human herpesvirus 7
ccucauggccagugaa

SEQ ID NO: 182882 - RNA, 17 nt, Human herpesvirus 7
ccucauggccagugaau

SEQ ID NO: 182883 - RNA, 12 nt, Human herpesvirus 7
ccuccauaugaa

SEQ ID NO: 182884 - RNA, 17 nt, Human herpesvirus 7
ccucaaccggcaaucau

SEQ ID NO: 182885 - RNA, 16 nt, Human herpesvirus 7
ccggacaguuugcaac

SEQ ID NO: 182886 - RNA, 21 nt, Human herpesvirus 7
ccggaccauuuccucuggaaa

SEQ ID NO: 182887 - RNA, 23 nt, Human herpesvirus 7
ccggaaguugaggcuuuuagaaa

SEQ ID NO: 182888 - RNA, 12 nt, Human herpesvirus 7
ccggacuuugau

SEQ ID NO: 182889 - RNA, 23 nt, Human herpesvirus 7
cccuuuccaauauagacauuucg

SEQ ID NO: 182890 - RNA, 24 nt, Human herpesvirus 7
ccgaaaguguaggcaagaaggcca

SEQ ID NO: 182891 - RNA, 13 nt, Human herpesvirus 7
ccgaaaaagaauu

SEQ ID NO: 182892 - RNA, 22 nt, Human herpesvirus 7
ccuauuaagcagcuugaugaau

SEQ ID NO: 182893 - RNA, 14 nt, Human herpesvirus 7
ccuauuacgccaaa

SEQ ID NO: 182894 - RNA, 18 nt, Human herpesvirus 7
ccuauucacauaccugua

SEQ ID NO: 182895 - RNA, 14 nt, Human herpesvirus 7
ccuaugacugagaa

SEQ ID NO: 182896 - RNA, 22 nt, Human herpesvirus 7
ccuaugacugagaaaaacagac

SEQ ID NO: 182897 - RNA, 16 nt, Human herpesvirus 7
ccuaugauacaaucga

SEQ ID NO: 182898 - RNA, 15 nt, Human herpesvirus 7
ccuaucaaaauucca

SEQ ID NO: 182899 - RNA, 20 nt, Human herpesvirus 7
ccuaucaaaauuccauucga

SEQ ID NO: 182900 - RNA, 14 nt, Human herpesvirus 7
ccuaggauaccaaa

SEQ ID NO: 182901 - RNA, 18 nt, Human herpesvirus 7
ccggggacauuccucauc

SEQ ID NO: 182902 - RNA, 12 nt, Human herpesvirus 7
ccgggugcugcg

SEQ ID NO: 182903 - RNA, 14 nt, Human herpesvirus 7
ccgggugcugcgua

SEQ ID NO: 182904 - RNA, 19 nt, Human herpesvirus 7
ccgguauuuuguuuugcau

SEQ ID NO: 182905 - RNA, 15 nt, Human herpesvirus 7
ccgguccuuccucaa

SEQ ID NO: 182906 - RNA, 23 nt, Human herpesvirus 7
ccgucagcaucucagaaguuuca

SEQ ID NO: 182907 - RNA, 13 nt, Human herpesvirus 7
ccauagaagaaug

SEQ ID NO: 182908 - RNA, 18 nt, Human herpesvirus 7
ccauaugccaaugaacaa

SEQ ID NO: 182909 - RNA, 17 nt, Human herpesvirus 7
ccauaauuugaauuaau

SEQ ID NO: 182910 - RNA, 15 nt, Human herpesvirus 7
cccaugaacacugcu

SEQ ID NO: 182911 - RNA, 15 nt, Human herpesvirus 7
cccagucccaagaga

SEQ ID NO: 182912 - RNA, 16 nt, Human herpesvirus 7
gccauaaaugcuuaaa

SEQ ID NO: 182913 - RNA, 12 nt, Human herpesvirus 7
gccauaauuuca

SEQ ID NO: 182914 - RNA, 19 nt, Human herpesvirus 7
gccauaauuucagcacugg

SEQ ID NO: 182915 - RNA, 20 nt, Human herpesvirus 7
gccauaauuucagcacuggg

SEQ ID NO: 182916 - RNA, 18 nt, Human herpesvirus 7
gccauaauuugaauuaau

SEQ ID NO: 182917 - RNA, 22 nt, Human herpesvirus 7
gccaguucuaucucaaaacaaa

SEQ ID NO: 182918 - RNA, 22 nt, Human herpesvirus 7
gccagaucguucauugauuaua

SEQ ID NO: 182919 - RNA, 17 nt, Human herpesvirus 7
gccagagaaccacguga

SEQ ID NO: 182920 - RNA, 17 nt, Human herpesvirus 7
gccagaacucaauuuuu

SEQ ID NO: 182921 - RNA, 20 nt, Human herpesvirus 7
gccacguuuuuuucuucaau

SEQ ID NO: 182922 - RNA, 14 nt, Human herpesvirus 7
gccaccuucuuaua

SEQ ID NO: 182923 - RNA, 22 nt, Human herpesvirus 7
gcauuuuuaaaacaagacagaa

SEQ ID NO: 182924 - RNA, 16 nt, Human herpesvirus 7
gccaaacuaugugcuu

SEQ ID NO: 182925 - RNA, 15 nt, Human herpesvirus 7
gccaaucugcacauu

SEQ ID NO: 182926 - RNA, 19 nt, Human herpesvirus 7
gcauggaucguagcaacag

SEQ ID NO: 182927 - RNA, 20 nt, Human herpesvirus 7
gcauuauauccaauaaugca

SEQ ID NO: 182928 - RNA, 18 nt, Human herpesvirus 7
gcauuauuggauaauauc

SEQ ID NO: 182929 - RNA, 12 nt, Human herpesvirus 7
gcauuagagcau

SEQ ID NO: 182930 - RNA, 17 nt, Human herpesvirus 7
gcauuaggcagcgcuug

SEQ ID NO: 182931 - RNA, 22 nt, Human herpesvirus 7
gcauuaggcagcgcuugauaca

SEQ ID NO: 182932 - RNA, 22 nt, Human herpesvirus 7
gcauucuucuauggguucacac

SEQ ID NO: 182933 - RNA, 15 nt, Human herpesvirus 7
gcauuuguaugucua

SEQ ID NO: 182934 - RNA, 17 nt, Human herpesvirus 7
gcauuuaccauuucgaa

SEQ ID NO: 182935 - RNA, 13 nt, Human herpesvirus 7
gcauuucacuugu

SEQ ID NO: 182936 - RNA, 18 nt, Human herpesvirus 7
gcaucuccuguaaccauu

SEQ ID NO: 182937 - RNA, 22 nt, Human herpesvirus 7
gcaucauuccuauuaagcagcu

SEQ ID NO: 182938 - RNA, 19 nt, Human herpesvirus 7
gcaucuuuucagugaagcu

SEQ ID NO: 182939 - RNA, 18 nt, Human herpesvirus 7
gcaugcuaauauuuccaa

SEQ ID NO: 182940 - RNA, 16 nt, Human herpesvirus 7
gcaugcuuacagugaa

SEQ ID NO: 182941 - RNA, 17 nt, Human herpesvirus 7
gcaugcuuacagugaag

SEQ ID NO: 182942 - RNA, 18 nt, Human herpesvirus 7
gcaguguuuaaaauguua

SEQ ID NO: 182943 - RNA, 12 nt, Human herpesvirus 7
gcaguugaauuc

SEQ ID NO: 182944 - RNA, 19 nt, Human herpesvirus 7
gcaguuauaugaaauuuca

SEQ ID NO: 182945 - RNA, 15 nt, Human herpesvirus 7
gcauaaagcaccaaa

SEQ ID NO: 182946 - RNA, 22 nt, Human herpesvirus 7
gcauaaaaaaucuaauuaaucu

SEQ ID NO: 182947 - RNA, 19 nt, Human herpesvirus 7
gcauagauuaaauagcaaa

SEQ ID NO: 182948 - RNA, 17 nt, Human herpesvirus 7
gcauauuuugcuagaaa

SEQ ID NO: 182949 - RNA, 15 nt, Human herpesvirus 7
gcauaugcuaagaaa

SEQ ID NO: 182950 - RNA, 16 nt, Human herpesvirus 7
gcagucaaagauuuug

SEQ ID NO: 182951 - RNA, 17 nt, Human herpesvirus 7
gcagcugugauauuugg

SEQ ID NO: 182952 - RNA, 19 nt, Human herpesvirus 7
gcagcuucuaaaugugcua

SEQ ID NO: 182953 - RNA, 22 nt, Human herpesvirus 7
gcagcuuuuauuccuucccaac

SEQ ID NO: 182954 - RNA, 18 nt, Human herpesvirus 7
gcagaaugcguaacuuug

SEQ ID NO: 182955 - RNA, 19 nt, Human herpesvirus 7
gcagaaugcguaacuuugg

SEQ ID NO: 182956 - RNA, 13 nt, Human herpesvirus 7
gcagacacuacuu

SEQ ID NO: 182957 - RNA, 21 nt, Human herpesvirus 7
gauuccgaagauacgcuagaa

SEQ ID NO: 182958 - RNA, 13 nt, Human herpesvirus 7
gauuccagcacuu

SEQ ID NO: 182959 - RNA, 13 nt, Human herpesvirus 7
gauuccaucucac

SEQ ID NO: 182960 - RNA, 17 nt, Human herpesvirus 7
gauuagcuguucauauc

SEQ ID NO: 182961 - RNA, 20 nt, Human herpesvirus 7
gauuagguaauagcuuuaaa

SEQ ID NO: 182962 - RNA, 17 nt, Human herpesvirus 7
gauucaagaaaucagau

SEQ ID NO: 182963 - RNA, 16 nt, Human herpesvirus 7
gauuauacaaauccaa

SEQ ID NO: 182964 - RNA, 22 nt, Human herpesvirus 7
gauuucauguuuuaugacucag

SEQ ID NO: 182965 - RNA, 14 nt, Human herpesvirus 7
gauuucagcauuug

SEQ ID NO: 182966 - RNA, 21 nt, Human herpesvirus 7
gauuucugaaaaucuccuuga

SEQ ID NO: 182967 - RNA, 16 nt, Human herpesvirus 7
gauuugaagguugcca

SEQ ID NO: 182968 - RNA, 14 nt, Human herpesvirus 7
gauuugcagccaga

SEQ ID NO: 182969 - RNA, 16 nt, Human herpesvirus 7
gauuuuaaauuuacuu

SEQ ID NO: 182970 - RNA, 18 nt, Human herpesvirus 7
gauuuucuagagcauaua

SEQ ID NO: 182971 - RNA, 14 nt, Human herpesvirus 7
gcaaaacugggaaa

SEQ ID NO: 182972 - RNA, 14 nt, Human herpesvirus 7
gcaaaagccacuga

SEQ ID NO: 182973 - RNA, 15 nt, Human herpesvirus 7
gcaaaagccacugau

SEQ ID NO: 182974 - RNA, 13 nt, Human herpesvirus 7
gcaaaaaaccauu

SEQ ID NO: 182975 - RNA, 13 nt, Human herpesvirus 7
gauuuuucccaaa

SEQ ID NO: 182976 - RNA, 19 nt, Human herpesvirus 7
gauuuuuuaguauucucau

SEQ ID NO: 182977 - RNA, 16 nt, Human herpesvirus 7
gcaaaaaggauuuucg

SEQ ID NO: 182978 - RNA, 20 nt, Human herpesvirus 7
gcagaaauauaugaauaucu

SEQ ID NO: 182979 - RNA, 12 nt, Human herpesvirus 7
gcagaaaauucu

SEQ ID NO: 182980 - RNA, 21 nt, Human herpesvirus 7
gcacuaucuccuaaaugaauu

SEQ ID NO: 182981 - RNA, 22 nt, Human herpesvirus 7
gcaacuagagaagccacuucua

SEQ ID NO: 182982 - RNA, 23 nt, Human herpesvirus 7
gcaacuagagaagccacuucuaa

SEQ ID NO: 182983 - RNA, 16 nt, Human herpesvirus 7
gcaacuggcauuccuu

SEQ ID NO: 182984 - RNA, 17 nt, Human herpesvirus 7
gcacauuauaagaaucu

SEQ ID NO: 182985 - RNA, 21 nt, Human herpesvirus 7
gcaccaaaaaauaaaaacaag

SEQ ID NO: 182986 - RNA, 20 nt, Human herpesvirus 7
gaugccagccuauucacaua

SEQ ID NO: 182987 - RNA, 21 nt, Human herpesvirus 7
gaugccagccuauucacauac

SEQ ID NO: 182988 - RNA, 14 nt, Human herpesvirus 7
gaugcuucaauuca

SEQ ID NO: 182989 - RNA, 14 nt, Human herpesvirus 7
gaugcguguguuca

SEQ ID NO: 182990 - RNA, 17 nt, Human herpesvirus 7
gaugcagaaaaauccaa

SEQ ID NO: 182991 - RNA, 15 nt, Human herpesvirus 7
gaugcauccaaagaa

SEQ ID NO: 182992 - RNA, 18 nt, Human herpesvirus 7
gauuaacauuaaccacaa

SEQ ID NO: 182993 - RNA, 22 nt, Human herpesvirus 7
gauuaaccacgcauaugcuaag

SEQ ID NO: 182994 - RNA, 17 nt, Human herpesvirus 7
gauuagaaucagacuaa

SEQ ID NO: 182995 - RNA, 23 nt, Human herpesvirus 7
gauuacauccugcuaaggcgaaa

SEQ ID NO: 182996 - RNA, 23 nt, Human herpesvirus 7
gauuacauuugcuuuaccccaaa

SEQ ID NO: 182997 - RNA, 22 nt, Human herpesvirus 7
gaucguuguugguguguuacau

SEQ ID NO: 182998 - RNA, 19 nt, Human herpesvirus 7
gaucgucuguugaaacaua

SEQ ID NO: 182999 - RNA, 19 nt, Human herpesvirus 7
gaucucaaaauuauaacuu

SEQ ID NO: 183000 - RNA, 17 nt, Human herpesvirus 7
gaucuaaagacacuuau

SEQ ID NO: 183001 - RNA, 17 nt, Human herpesvirus 7
gauccugcuauucauuu

SEQ ID NO: 183002 - RNA, 12 nt, Human herpesvirus 7
gagggugcguua

SEQ ID NO: 183003 - RNA, 21 nt, Human herpesvirus 7
gaggugcuguuuccaugucuu

SEQ ID NO: 183004 - RNA, 20 nt, Human herpesvirus 7
gauagccauaaaugcuuaaa

SEQ ID NO: 183005 - RNA, 17 nt, Human herpesvirus 7
gaguauacaaaagacau

SEQ ID NO: 183006 - RNA, 17 nt, Human herpesvirus 7
gauagcggucaucucac

SEQ ID NO: 183007 - RNA, 24 nt, Human herpesvirus 7
gauagcuugacaccaacaucuguc

SEQ ID NO: 183008 - RNA, 13 nt, Human herpesvirus 7
gauauaaauacgc

SEQ ID NO: 183009 - RNA, 18 nt, Human herpesvirus 7
gauauaguuuguuucaau

SEQ ID NO: 183010 - RNA, 17 nt, Human herpesvirus 7
gauccaucuguaacaga

SEQ ID NO: 183011 - RNA, 14 nt, Human herpesvirus 7
gauauucuaacaaa

SEQ ID NO: 183012 - RNA, 22 nt, Human herpesvirus 7
cuuggagacgaugagcaugaaa

SEQ ID NO: 183013 - RNA, 17 nt, Human herpesvirus 7
cuuggaaaacaaucaau

SEQ ID NO: 183014 - RNA, 20 nt, Human herpesvirus 7
cuuggauaaccaaacuauau

SEQ ID NO: 183015 - RNA, 23 nt, Human herpesvirus 7
cuugagccagcaagaacagcaau

SEQ ID NO: 183016 - RNA, 15 nt, Human herpesvirus 7
cuugagaaauaugaa

SEQ ID NO: 183017 - RNA, 20 nt, Human herpesvirus 7
cuugauguuuugcaagcaca

SEQ ID NO: 183018 - RNA, 21 nt, Human herpesvirus 7
gaaaucauuuugcuguuuaaa

SEQ ID NO: 183019 - RNA, 16 nt, Human herpesvirus 7
gaaaguaaaaacuuuu

SEQ ID NO: 183020 - RNA, 19 nt, Human herpesvirus 7
gaaagucagaacauuguca

SEQ ID NO: 183021 - RNA, 14 nt, Human herpesvirus 7
gaaaguccaaagug

SEQ ID NO: 183022 - RNA, 18 nt, Human herpesvirus 7
cuuggcugacauacgaau

SEQ ID NO: 183023 - RNA, 22 nt, Human herpesvirus 7
cuugguggauccguaacugcau

SEQ ID NO: 183024 - RNA, 18 nt, Human herpesvirus 7
cuuguaaaguaaaacgua

SEQ ID NO: 183025 - RNA, 17 nt, Human herpesvirus 7
cuugguuuuacaaauua

SEQ ID NO: 183026 - RNA, 21 nt, Human herpesvirus 7
gaacauugucaaagaaugcaa

SEQ ID NO: 183027 - RNA, 20 nt, Human herpesvirus 7
gaacaucuugagaaauauga

SEQ ID NO: 183028 - RNA, 21 nt, Human herpesvirus 7
gaacaugagauaaacuuuuau

SEQ ID NO: 183029 - RNA, 16 nt, Human herpesvirus 7
gaacagucccagauaa

SEQ ID NO: 183030 - RNA, 13 nt, Human herpesvirus 7
gaacagauucucc

SEQ ID NO: 183031 - RNA, 17 nt, Human herpesvirus 7
gaacacugcuucuccca

SEQ ID NO: 183032 - RNA, 22 nt, Human herpesvirus 7
gaacacugcuucucccauucaa

SEQ ID NO: 183033 - RNA, 15 nt, Human herpesvirus 7
gaaaugaaucugcac

SEQ ID NO: 183034 - RNA, 16 nt, Human herpesvirus 7
gaaauaauagaugucu

SEQ ID NO: 183035 - RNA, 12 nt, Human herpesvirus 7
gaacuggcacau

SEQ ID NO: 183036 - RNA, 16 nt, Human herpesvirus 7
gaacuguuacaacuuu

SEQ ID NO: 183037 - RNA, 16 nt, Human herpesvirus 7
gaacuguuacaguuaa

SEQ ID NO: 183038 - RNA, 15 nt, Human herpesvirus 7
gaacuuacauuucaa

SEQ ID NO: 183039 - RNA, 19 nt, Human herpesvirus 7
gaacuuacauuucaaacaa

SEQ ID NO: 183040 - RNA, 18 nt, Human herpesvirus 7
gaacucaauuuuucuccc

SEQ ID NO: 183041 - RNA, 19 nt, Human herpesvirus 7
gaacuagaaaaacacuagc

SEQ ID NO: 183042 - RNA, 15 nt, Human herpesvirus 7
gaacugaaaacaaug

SEQ ID NO: 183043 - RNA, 18 nt, Human herpesvirus 7
gaacucguagcauugcca

SEQ ID NO: 183044 - RNA, 14 nt, Human herpesvirus 7
gaagaaacuugaaa

SEQ ID NO: 183045 - RNA, 23 nt, Human herpesvirus 7
gaacuuuuguaggaaauuuucau

SEQ ID NO: 183046 - RNA, 21 nt, Human herpesvirus 7
gaagaaaagaaaaagcaacaa

SEQ ID NO: 183047 - RNA, 14 nt, Human herpesvirus 7
gaacuuuaugcaaa

SEQ ID NO: 183048 - RNA, 11 nt, Human herpesvirus 7
gaacuugucac

SEQ ID NO: 183049 - RNA, 16 nt, Human herpesvirus 7
gaacuuguuuugacuu

SEQ ID NO: 183050 - RNA, 19 nt, Human herpesvirus 7
gaagagguaaguguaagcu

SEQ ID NO: 183051 - RNA, 17 nt, Human herpesvirus 7
gaagaggagaauucugu

SEQ ID NO: 183052 - RNA, 23 nt, Human herpesvirus 7
gaagagacgauuaugucuaagga

SEQ ID NO: 183053 - RNA, 19 nt, Human herpesvirus 7
gaagaaugggugucagcuu

SEQ ID NO: 183054 - RNA, 19 nt, Human herpesvirus 7
gaagacagcucaaaaguau

SEQ ID NO: 183055 - RNA, 20 nt, Human herpesvirus 7
gaagacauccgauagcauua

SEQ ID NO: 183056 - RNA, 21 nt, Human herpesvirus 7
gaauacaguugaaucaccugu

SEQ ID NO: 183057 - RNA, 23 nt, Human herpesvirus 7
gaauaauuucagcuggaauugua

SEQ ID NO: 183058 - RNA, 15 nt, Human herpesvirus 7
gaauauauacgcuua

SEQ ID NO: 183059 - RNA, 18 nt, Human herpesvirus 7
gaauauaaaaaauuugaa

SEQ ID NO: 183060 - RNA, 20 nt, Human herpesvirus 7
gaaugcaagcaacacuuaaa

SEQ ID NO: 183061 - RNA, 12 nt, Human herpesvirus 7
gaauaaacaaug

SEQ ID NO: 183062 - RNA, 22 nt, Human herpesvirus 7
gaaugggugucagcuucuggga

SEQ ID NO: 183063 - RNA, 15 nt, Human herpesvirus 7
gaauguuuacaugua

SEQ ID NO: 183064 - RNA, 13 nt, Human herpesvirus 7
gaauuaaauccac

SEQ ID NO: 183065 - RNA, 15 nt, Human herpesvirus 7
gaauggcugaugaua

SEQ ID NO: 183066 - RNA, 13 nt, Human herpesvirus 7
gaauguggcuuaa

SEQ ID NO: 183067 - RNA, 18 nt, Human herpesvirus 7
gaauuugauuccaucuca

SEQ ID NO: 183068 - RNA, 20 nt, Human herpesvirus 7
gacacguuucucuguagaua

SEQ ID NO: 183069 - RNA, 19 nt, Human herpesvirus 7
gaauuuaacaaagugcaua

SEQ ID NO: 183070 - RNA, 19 nt, Human herpesvirus 7
gaauuuagauuaauagaua

SEQ ID NO: 183071 - RNA, 19 nt, Human herpesvirus 7
gaauuccgauuuaagugaa

SEQ ID NO: 183072 - RNA, 18 nt, Human herpesvirus 7
gaauuaauaaaacaaacu

SEQ ID NO: 183073 - RNA, 23 nt, Human herpesvirus 7
gaauucgcgcgacgagggcugca

SEQ ID NO: 183074 - RNA, 16 nt, Human herpesvirus 7
gaauuaucgcaauuaa

SEQ ID NO: 183075 - RNA, 15 nt, Human herpesvirus 7
gaauuauacacugug

SEQ ID NO: 183076 - RNA, 17 nt, Human herpesvirus 7
gaauuauacacugugaa

SEQ ID NO: 183077 - RNA, 19 nt, Human herpesvirus 7
gacagagucaaucugugaa

SEQ ID NO: 183078 - RNA, 19 nt, Human herpesvirus 7
gacagcaacugugcaugaa

SEQ ID NO: 183079 - RNA, 22 nt, Human herpesvirus 7
gacagaaugccagaaauuaaau

SEQ ID NO: 183080 - RNA, 22 nt, Human herpesvirus 7
gacagagaaagauuaauuaucu

SEQ ID NO: 183081 - RNA, 20 nt, Human herpesvirus 7
gacagaccuauguguuuaca

SEQ ID NO: 183082 - RNA, 17 nt, Human herpesvirus 7
gacagcaccaauccuuu

SEQ ID NO: 183083 - RNA, 13 nt, Human herpesvirus 7
gacagguguuguu

SEQ ID NO: 183084 - RNA, 16 nt, Human herpesvirus 7
gacagucaccaagggc

SEQ ID NO: 183085 - RNA, 20 nt, Human herpesvirus 7
gacuccuguauuaaguguuu

SEQ ID NO: 183086 - RNA, 18 nt, Human herpesvirus 7
gacuaucgcaacaacuaa

SEQ ID NO: 183087 - RNA, 21 nt, Human herpesvirus 7
gacuuugauccauuugugaug

SEQ ID NO: 183088 - RNA, 17 nt, Human herpesvirus 7
gagaaaauaaacauguu

SEQ ID NO: 183089 - RNA, 13 nt, Human herpesvirus 7
gacuuuacacggu

SEQ ID NO: 183090 - RNA, 16 nt, Human herpesvirus 7
gacuuucgugucacag

SEQ ID NO: 183091 - RNA, 22 nt, Human herpesvirus 7
gacuuucuucuagaaacuaaag

SEQ ID NO: 183092 - RNA, 15 nt, Human herpesvirus 7
gacuuggcucuuaau

SEQ ID NO: 183093 - RNA, 22 nt, Human herpesvirus 7
gagaagacaacgacuacaggaa

SEQ ID NO: 183094 - RNA, 16 nt, Human herpesvirus 7
gagaaauuacaguaca

SEQ ID NO: 183095 - RNA, 19 nt, Human herpesvirus 7
gagaaaucgcuuauuuaac

SEQ ID NO: 183096 - RNA, 22 nt, Human herpesvirus 7
gagcaauugauucacauuguca

SEQ ID NO: 183097 - RNA, 23 nt, Human herpesvirus 7
gagaucauaauuacauugcaguc

SEQ ID NO: 183098 - RNA, 22 nt, Human herpesvirus 7
gagauugguagugugcacacaa

SEQ ID NO: 183099 - RNA, 18 nt, Human herpesvirus 7
gagccugcguuugaaugu

SEQ ID NO: 183100 - RNA, 19 nt, Human herpesvirus 7
gaggagaacucguagcauu

SEQ ID NO: 183101 - RNA, 22 nt, Human herpesvirus 7
gacuaaauauggagcagcuuaa

SEQ ID NO: 183102 - RNA, 14 nt, Human herpesvirus 7
gacgaguaugucca

SEQ ID NO: 183103 - RNA, 16 nt, Human herpesvirus 7
gacgaugagcaugaaa

SEQ ID NO: 183104 - RNA, 23 nt, Human herpesvirus 7
gacgcagcaucccuauugcauca

SEQ ID NO: 183105 - RNA, 16 nt, Human herpesvirus 7
gacgaauuucuuugcg

SEQ ID NO: 183106 - RNA, 21 nt, Human herpesvirus 7
gaccuaaacccagagcuaaaa

SEQ ID NO: 183107 - RNA, 20 nt, Human herpesvirus 7
gaccuauguguuuacauuac

SEQ ID NO: 183108 - RNA, 21 nt, Human herpesvirus 7
gacauggccaucgcuuucuca

SEQ ID NO: 183109 - RNA, 12 nt, Human herpesvirus 7
gacauuccucau

SEQ ID NO: 183110 - RNA, 18 nt, Human herpesvirus 7
gacauugaaaaugcauug

SEQ ID NO: 183111 - RNA, 11 nt, Human herpesvirus 7
gacauuugcaa

SEQ ID NO: 183112 - RNA, 19 nt, Human herpesvirus 7
gaccagcacaaaugucuua

SEQ ID NO: 183113 - RNA, 17 nt, Human herpesvirus 7
gaccacaacaggauuaa

SEQ ID NO: 183114 - RNA, 22 nt, Human herpesvirus 7
cuacauuuaaaaaaucugaaua

SEQ ID NO: 183115 - RNA, 15 nt, Human herpesvirus 7
cuacauaaagguaaa

SEQ ID NO: 183116 - RNA, 21 nt, Human herpesvirus 7
cuacacgagacaaaaauaaua

SEQ ID NO: 183117 - RNA, 16 nt, Human herpesvirus 7
cuaaugcuuugcugca

SEQ ID NO: 183118 - RNA, 23 nt, Human herpesvirus 7
cuaauauuauaucuaaaguggag

SEQ ID NO: 183119 - RNA, 18 nt, Human herpesvirus 7
cuaaucucuuuucucucc

SEQ ID NO: 183120 - RNA, 22 nt, Human herpesvirus 7
cuaauuugcauaaacuaucaaa

SEQ ID NO: 183121 - RNA, 20 nt, Human herpesvirus 7
cuacaauaugacgacuuuga

SEQ ID NO: 183122 - RNA, 22 nt, Human herpesvirus 7
cuacaaugguuuuuuugacaaa

SEQ ID NO: 183123 - RNA, 15 nt, Human herpesvirus 7
cuacacaucuucaau

SEQ ID NO: 183124 - RNA, 14 nt, Human herpesvirus 7
cuacguguuuauac

SEQ ID NO: 183125 - RNA, 19 nt, Human herpesvirus 7
cuaccucuuacauuugauu

SEQ ID NO: 183126 - RNA, 15 nt, Human herpesvirus 7
cuacugaagagccaa

SEQ ID NO: 183127 - RNA, 19 nt, Human herpesvirus 7
cuaggaaacacaauuguau

SEQ ID NO: 183128 - RNA, 21 nt, Human herpesvirus 7
cuaggagauugguagugugca

SEQ ID NO: 183129 - RNA, 17 nt, Human herpesvirus 7
cuaggucuuccacuguu

SEQ ID NO: 183130 - RNA, 18 nt, Human herpesvirus 7
cuaguacgcccacucugg

SEQ ID NO: 183131 - RNA, 21 nt, Human herpesvirus 7
cucaagcacaaucacgugauu

SEQ ID NO: 183132 - RNA, 18 nt, Human herpesvirus 7
cucaauaaaaaugucucu

SEQ ID NO: 183133 - RNA, 17 nt, Human herpesvirus 7
cucaauaaagauugauc

SEQ ID NO: 183134 - RNA, 18 nt, Human herpesvirus 7
cucaauaaagauugauca

SEQ ID NO: 183135 - RNA, 18 nt, Human herpesvirus 7
cucagaauguacacagcu

SEQ ID NO: 183136 - RNA, 17 nt, Human herpesvirus 7
cuauagaucuugacuca

SEQ ID NO: 183137 - RNA, 21 nt, Human herpesvirus 7
cuauaaaggaaaauauauuaa

SEQ ID NO: 183138 - RNA, 14 nt, Human herpesvirus 7
cuauaaauggaauu

SEQ ID NO: 183139 - RNA, 16 nt, Human herpesvirus 7
cuaguucugaaaucaa

SEQ ID NO: 183140 - RNA, 20 nt, Human herpesvirus 7
cuauuucaauuaaugcauug

SEQ ID NO: 183141 - RNA, 14 nt, Human herpesvirus 7
cuauauuugauuga

SEQ ID NO: 183142 - RNA, 14 nt, Human herpesvirus 7
cuaucaaaauucca

SEQ ID NO: 183143 - RNA, 15 nt, Human herpesvirus 7
cuaucaaaauuccau

SEQ ID NO: 183144 - RNA, 17 nt, Human herpesvirus 7
cuaucaaauuuaucuca

SEQ ID NO: 183145 - RNA, 17 nt, Human herpesvirus 7
cuaucaaggucuuucau

SEQ ID NO: 183146 - RNA, 18 nt, Human herpesvirus 7
cuaucaaggucuuucaug

SEQ ID NO: 183147 - RNA, 22 nt, Human herpesvirus 7
cgaagguugucuguucucaugc

SEQ ID NO: 183148 - RNA, 13 nt, Human herpesvirus 7
cgaauuuguucaa

SEQ ID NO: 183149 - RNA, 21 nt, Human herpesvirus 7
cgaauuuguucaauugccacc

SEQ ID NO: 183150 - RNA, 16 nt, Human herpesvirus 7
cgaauuuuacaaugca

SEQ ID NO: 183151 - RNA, 22 nt, Human herpesvirus 7
cgaaugccaucuauaaacauuc

SEQ ID NO: 183152 - RNA, 18 nt, Human herpesvirus 7
cgaagcagggaaaaagca

SEQ ID NO: 183153 - RNA, 22 nt, Human herpesvirus 7
cgaagcagggaaaaagcauaaa

SEQ ID NO: 183154 - RNA, 14 nt, Human herpesvirus 7
cggaagagacuguc

SEQ ID NO: 183155 - RNA, 16 nt, Human herpesvirus 7
cgacacugaaugucaa

SEQ ID NO: 183156 - RNA, 23 nt, Human herpesvirus 7
cggacaguuugcaacaaauucca

SEQ ID NO: 183157 - RNA, 22 nt, Human herpesvirus 7
cggacaaauauacgaaugccau

SEQ ID NO: 183158 - RNA, 23 nt, Human herpesvirus 7
cggaaguugaggcuuuuagaaau

SEQ ID NO: 183159 - RNA, 22 nt, Human herpesvirus 7
cggauacguacgcaacagagcc

SEQ ID NO: 183160 - RNA, 16 nt, Human herpesvirus 7
cggggacauuccucau

SEQ ID NO: 183161 - RNA, 20 nt, Human herpesvirus 7
cggauaugccuucaggcaca

SEQ ID NO: 183162 - RNA, 20 nt, Human herpesvirus 7
cgucgcaccgucauuuaauu

SEQ ID NO: 183163 - RNA, 18 nt, Human herpesvirus 7
cgucuacauuuaaauuca

SEQ ID NO: 183164 - RNA, 20 nt, Human herpesvirus 7
cgucucuuugccuguuaaaa

SEQ ID NO: 183165 - RNA, 20 nt, Human herpesvirus 7
cguaaaaaaucaagucugaa

SEQ ID NO: 183166 - RNA, 15 nt, Human herpesvirus 7
cguaacaacagcagc

SEQ ID NO: 183167 - RNA, 12 nt, Human herpesvirus 7
cguaacugugac

SEQ ID NO: 183168 - RNA, 19 nt, Human herpesvirus 7
cuaaccacugugucaucac

SEQ ID NO: 183169 - RNA, 17 nt, Human herpesvirus 7
cuaacaaaaaaauaccu

SEQ ID NO: 183170 - RNA, 19 nt, Human herpesvirus 7
cuaaaucacuaguccuaaa

SEQ ID NO: 183171 - RNA, 14 nt, Human herpesvirus 7
cuaaauauucugug

SEQ ID NO: 183172 - RNA, 19 nt, Human herpesvirus 7
cuaaauaaaaaaaauugaa

SEQ ID NO: 183173 - RNA, 13 nt, Human herpesvirus 7
cgugugaaaacaa

SEQ ID NO: 183174 - RNA, 20 nt, Human herpesvirus 7
cuaaagacacuuauuugauu

SEQ ID NO: 183175 - RNA, 15 nt, Human herpesvirus 7
cuaaagagcauucau

SEQ ID NO: 183176 - RNA, 21 nt, Human herpesvirus 7
cgucuucuucugaguguguua

SEQ ID NO: 183177 - RNA, 18 nt, Human herpesvirus 7
cgucuuuugauuuugccg

SEQ ID NO: 183178 - RNA, 19 nt, Human herpesvirus 7
cgugucaaaaaaaaaacaa

SEQ ID NO: 183179 - RNA, 19 nt, Human herpesvirus 7
cgugucgcagccauguugc

SEQ ID NO: 183180 - RNA, 20 nt, Human herpesvirus 7
cuggaugauguuauacauaa

SEQ ID NO: 183181 - RNA, 13 nt, Human herpesvirus 7
cuggauguauaaa

SEQ ID NO: 183182 - RNA, 13 nt, Human herpesvirus 7
cuggaucauagag

SEQ ID NO: 183183 - RNA, 22 nt, Human herpesvirus 7
cuguauuuguugaucuucaaua

SEQ ID NO: 183184 - RNA, 17 nt, Human herpesvirus 7
cugucacgcaagucaca

SEQ ID NO: 183185 - RNA, 13 nt, Human herpesvirus 7
cugucaggcucau

SEQ ID NO: 183186 - RNA, 15 nt, Human herpesvirus 7
cugucauaaucugau

SEQ ID NO: 183187 - RNA, 17 nt, Human herpesvirus 7
cugggcguuaacacugu

SEQ ID NO: 183188 - RNA, 19 nt, Human herpesvirus 7
cugcagcugaaagcgcaaa

SEQ ID NO: 183189 - RNA, 14 nt, Human herpesvirus 7
cugccaccauuucu

SEQ ID NO: 183190 - RNA, 22 nt, Human herpesvirus 7
cugccaccauuucugaaaccuu

SEQ ID NO: 183191 - RNA, 13 nt, Human herpesvirus 7
cugcuaaaaccau

SEQ ID NO: 183192 - RNA, 19 nt, Human herpesvirus 7
cugcuaacaaguaugucag

SEQ ID NO: 183193 - RNA, 15 nt, Human herpesvirus 7
cuggacacaaucagc

SEQ ID NO: 183194 - RNA, 17 nt, Human herpesvirus 7
cuggaauauuugcugag

SEQ ID NO: 183195 - RNA, 17 nt, Human herpesvirus 7
cuggaaucgaauacagu

SEQ ID NO: 183196 - RNA, 16 nt, Human herpesvirus 7
cucuuuacaaaauuca

SEQ ID NO: 183197 - RNA, 13 nt, Human herpesvirus 7
cugaaaccaaagc

SEQ ID NO: 183198 - RNA, 18 nt, Human herpesvirus 7
cugaaaaucuccuugaua

SEQ ID NO: 183199 - RNA, 18 nt, Human herpesvirus 7
cugaauaauaugcuuuca

SEQ ID NO: 183200 - RNA, 13 nt, Human herpesvirus 7
cugauaucuuaaa

SEQ ID NO: 183201 - RNA, 23 nt, Human herpesvirus 7
cugauaaaaaaagaaaagagaaa

SEQ ID NO: 183202 - RNA, 18 nt, Human herpesvirus 7
cugagacggacuuauguc

SEQ ID NO: 183203 - RNA, 20 nt, Human herpesvirus 7
cugagacggacuuaugucca

SEQ ID NO: 183204 - RNA, 21 nt, Human herpesvirus 7
cugagagaauaaguucaucau

SEQ ID NO: 183205 - RNA, 17 nt, Human herpesvirus 7
cugagaucuuccaauuc

SEQ ID NO: 183206 - RNA, 23 nt, Human herpesvirus 7
cucauggcuaacgcuaaagagca

SEQ ID NO: 183207 - RNA, 13 nt, Human herpesvirus 7
cucauuagaaaca

SEQ ID NO: 183208 - RNA, 22 nt, Human herpesvirus 7
cucauuagaaacaaucccagaa

SEQ ID NO: 183209 - RNA, 16 nt, Human herpesvirus 7
cucugaauaauaugcu

SEQ ID NO: 183210 - RNA, 14 nt, Human herpesvirus 7
cucucuauuacaca

SEQ ID NO: 183211 - RNA, 15 nt, Human herpesvirus 7
cucucuauuacacag

SEQ ID NO: 183212 - RNA, 19 nt, Human herpesvirus 7
cucugaucauuugcauguu

SEQ ID NO: 183213 - RNA, 20 nt, Human herpesvirus 7
cucugaucuaaaguauggaa

SEQ ID NO: 183214 - RNA, 16 nt, Human herpesvirus 7
cuucaauucaccaauu

SEQ ID NO: 183215 - RNA, 20 nt, Human herpesvirus 7
cuucaauucaccaauuucua

SEQ ID NO: 183216 - RNA, 22 nt, Human herpesvirus 7
cuucaaucguuggcauuguauc

SEQ ID NO: 183217 - RNA, 20 nt, Human herpesvirus 7
cuuauuccagauaugacaaa

SEQ ID NO: 183218 - RNA, 18 nt, Human herpesvirus 7
cuuauuauauaugucaua

SEQ ID NO: 183219 - RNA, 13 nt, Human herpesvirus 7
cuuauccuguugu

SEQ ID NO: 183220 - RNA, 15 nt, Human herpesvirus 7
cuuaugauuggagua

SEQ ID NO: 183221 - RNA, 11 nt, Human herpesvirus 7
cuucauggcac

SEQ ID NO: 183222 - RNA, 17 nt, Human herpesvirus 7
cuucauggcacauauaa

SEQ ID NO: 183223 - RNA, 16 nt, Human herpesvirus 7
cuucagguuguuguca

SEQ ID NO: 183224 - RNA, 19 nt, Human herpesvirus 7
cuucagacguggauaacga

SEQ ID NO: 183225 - RNA, 19 nt, Human herpesvirus 7
cuucagauucaguaucacu

SEQ ID NO: 183226 - RNA, 18 nt, Human herpesvirus 7
cuuccaauucuuuguacu

SEQ ID NO: 183227 - RNA, 15 nt, Human herpesvirus 7
cuucgucuaagucaa

SEQ ID NO: 183228 - RNA, 16 nt, Human herpesvirus 7
cuucuaaaugugcuaa

SEQ ID NO: 183229 - RNA, 17 nt, Human herpesvirus 7
cuucuaaaugugcuaaa

SEQ ID NO: 183230 - RNA, 15 nt, Human herpesvirus 7
cuucuaauugcgcag

SEQ ID NO: 183231 - RNA, 19 nt, Human herpesvirus 7
cuucuaauugcgcaguguu

SEQ ID NO: 183232 - RNA, 15 nt, Human herpesvirus 7
cuucuauuauagaag

SEQ ID NO: 183233 - RNA, 18 nt, Human herpesvirus 7
cuucucccauucaauaau

SEQ ID NO: 183234 - RNA, 20 nt, Human herpesvirus 7
cuucguaaauauaaucaaaa

SEQ ID NO: 183235 - RNA, 22 nt, Human herpesvirus 7
cuucgagaaaauuuagcaccaa

SEQ ID NO: 183236 - RNA, 20 nt, Human herpesvirus 7
cuucuugcauuuccgagaca

SEQ ID NO: 183237 - RNA, 16 nt, Human herpesvirus 7
cuucuugcccccagaa

SEQ ID NO: 183238 - RNA, 17 nt, Human herpesvirus 7
cuucuugccuacacuuu

SEQ ID NO: 183239 - RNA, 18 nt, Human herpesvirus 7
cuucugucaccacacuca

SEQ ID NO: 183240 - RNA, 21 nt, Human herpesvirus 7
cuucuuccacgaguacuccuu

SEQ ID NO: 183241 - RNA, 18 nt, Human herpesvirus 7
cuugaauagguaucuuua

SEQ ID NO: 183242 - RNA, 19 nt, Human herpesvirus 7
cuugaagaacaacaugaaa

SEQ ID NO: 183243 - RNA, 18 nt, Human herpesvirus 7
cuucugaguguguuaaau

SEQ ID NO: 183244 - RNA, 16 nt, Human herpesvirus 7
cuucugaaucugcaaa

SEQ ID NO: 183245 - RNA, 18 nt, Human herpesvirus 7
cuucugcuaacucauaau

SEQ ID NO: 183246 - RNA, 18 nt, Human herpesvirus 7
cuuaagacaccccaaaau

SEQ ID NO: 183247 - RNA, 15 nt, Human herpesvirus 7
cuuaacgacgaugcu

SEQ ID NO: 183248 - RNA, 12 nt, Human herpesvirus 7
cuuaaaugugua

SEQ ID NO: 183249 - RNA, 17 nt, Human herpesvirus 7
cuuaaauuuuacaaaga

SEQ ID NO: 183250 - RNA, 18 nt, Human herpesvirus 7
cuuaaauuuuacaaagac

SEQ ID NO: 183251 - RNA, 19 nt, Human herpesvirus 7
cuuacauuucaaacaacau

SEQ ID NO: 183252 - RNA, 10 nt, Human herpesvirus 7
cuuacaacaa

SEQ ID NO: 183253 - RNA, 13 nt, Human herpesvirus 7
cuuaauaaaguuu

SEQ ID NO: 183254 - RNA, 17 nt, Human herpesvirus 7
cuuagaucgaacuguua

SEQ ID NO: 183255 - RNA, 16 nt, Human herpesvirus 7
cuuagaugcugaaaca

SEQ ID NO: 183256 - RNA, 19 nt, Human herpesvirus 7
cuuagcuuucaugauuuca

SEQ ID NO: 183257 - RNA, 14 nt, Human herpesvirus 7
cuuagcuaauugag

SEQ ID NO: 183258 - RNA, 15 nt, Human herpesvirus 7
cuuacuguuuacaca

SEQ ID NO: 183259 - RNA, 13 nt, Human herpesvirus 7
cuuacuuguguug

SEQ ID NO: 183260 - RNA, 19 nt, Human herpesvirus 7
cuuacuuguguugugaaaa

SEQ ID NO: 183261 - RNA, 22 nt, Human herpesvirus 7
cuuagaagcuugcuagauucua

SEQ ID NO: 183262 - RNA, 17 nt, Human herpesvirus 7
cuuauauuaaaaaccac

SEQ ID NO: 183263 - RNA, 21 nt, Human herpesvirus 7
cuuauauuaaaaaccacagag

SEQ ID NO: 183264 - RNA, 17 nt, Human herpesvirus 7
cuuaucaccauaugcca

SEQ ID NO: 183265 - RNA, 15 nt, Human herpesvirus 7
cuguugauacaacua

SEQ ID NO: 183266 - RNA, 14 nt, Human herpesvirus 7
cuguugguuaugca

SEQ ID NO: 183267 - RNA, 14 nt, Human herpesvirus 7
cuguuuacacauua

SEQ ID NO: 183268 - RNA, 22 nt, Human herpesvirus 7
cuguuuguaaggccaaagguaa

SEQ ID NO: 183269 - RNA, 14 nt, Human herpesvirus 7
cuuaaaaguacaaa

SEQ ID NO: 183270 - RNA, 17 nt, Human herpesvirus 7
cuuaaaauacuaaucaa

SEQ ID NO: 183271 - RNA, 13 nt, Human herpesvirus 7
cuuaaaauucagu

SEQ ID NO: 183272 - RNA, 15 nt, Human herpesvirus 7
cuuaaacaugauuua

SEQ ID NO: 183273 - RNA, 14 nt, Human herpesvirus 7
cuuaaagaacucca

SEQ ID NO: 183274 - RNA, 15 nt, Human herpesvirus 7
cuuaaagaacuccau

SEQ ID NO: 183275 - RNA, 18 nt, Human herpesvirus 7
cuguuuucgcuguugaua

SEQ ID NO: 183276 - RNA, 23 nt, Human herpesvirus 7
cuguuuuaauguauuuuucucca

SEQ ID NO: 183277 - RNA, 18 nt, Human herpesvirus 7
cugucuauuucaauuaau

SEQ ID NO: 183278 - RNA, 18 nt, Human herpesvirus 7
cuguuacaacuuugccaa

SEQ ID NO: 183279 - RNA, 19 nt, Human herpesvirus 7
cuguuacaacuuugccaau

SEQ ID NO: 183280 - RNA, 15 nt, Human herpesvirus 7
cuguucccacuggga

SEQ ID NO: 183281 - RNA, 20 nt, Human herpesvirus 7
cuguuaagaauuccagauuu

SEQ ID NO: 183282 - RNA, 14 nt, Human herpesvirus 7
cugugucaucacag

SEQ ID NO: 183283 - RNA, 13 nt, Human herpesvirus 7
cugugucuaugag

SEQ ID NO: 183284 - RNA, 16 nt, Human herpesvirus 7
cuguguccucaauuag

SEQ ID NO: 183285 - RNA, 17 nt, Human herpesvirus 7
uaaguaaggaagguaca

SEQ ID NO: 183286 - RNA, 21 nt, Human herpesvirus 7
uaaggcuguaaaagaaaaucu

SEQ ID NO: 183287 - RNA, 22 nt, Human herpesvirus 7
uaagcaaaaaaagguacuaucu

SEQ ID NO: 183288 - RNA, 17 nt, Human herpesvirus 7
uaagagcuuuugcaaag

SEQ ID NO: 183289 - RNA, 23 nt, Human herpesvirus 7
uaagagacauugaaaaugcauug

SEQ ID NO: 183290 - RNA, 18 nt, Human herpesvirus 7
uaacgcuaaagagcauuc

SEQ ID NO: 183291 - RNA, 15 nt, Human herpesvirus 7
uaacgauccaguacu

SEQ ID NO: 183292 - RNA, 16 nt, Human herpesvirus 7
uaacuuugcuauuuaa

SEQ ID NO: 183293 - RNA, 11 nt, Human herpesvirus 7
uaacuuuuugc

SEQ ID NO: 183294 - RNA, 19 nt, Human herpesvirus 7
uaacgaaggcaucaagaaa

SEQ ID NO: 183295 - RNA, 21 nt, Human herpesvirus 7
uaacgaaggcaucaagaaaca

SEQ ID NO: 183296 - RNA, 16 nt, Human herpesvirus 7
uaacgaauuuuuccau

SEQ ID NO: 183297 - RNA, 18 nt, Human herpesvirus 7
uaacgaauuuuuccaugu

SEQ ID NO: 183298 - RNA, 21 nt, Human herpesvirus 7
uaagacugaagacaaaaccaa

SEQ ID NO: 183299 - RNA, 19 nt, Human herpesvirus 7
uaagacaccccaaaaucaa

SEQ ID NO: 183300 - RNA, 22 nt, Human herpesvirus 7
uaagaaucauuuguauauucua

SEQ ID NO: 183301 - RNA, 15 nt, Human herpesvirus 7
uaagaauuuaaucau

SEQ ID NO: 183302 - RNA, 16 nt, Human herpesvirus 7
uaagaauuuaaucaua

SEQ ID NO: 183303 - RNA, 20 nt, Human herpesvirus 7
uaagaaacaucuaugugcuc

SEQ ID NO: 183304 - RNA, 14 nt, Human herpesvirus 7
uaagaaucuauuua

SEQ ID NO: 183305 - RNA, 19 nt, Human herpesvirus 7
uaacaucggauuuuaucca

SEQ ID NO: 183306 - RNA, 14 nt, Human herpesvirus 7
uaacaugucuucaa

SEQ ID NO: 183307 - RNA, 15 nt, Human herpesvirus 7
uaacaugucuucaac

SEQ ID NO: 183308 - RNA, 10 nt, Human herpesvirus 7
uaacaugugu

SEQ ID NO: 183309 - RNA, 14 nt, Human herpesvirus 7
uaacauuaaccaca

SEQ ID NO: 183310 - RNA, 15 nt, Human herpesvirus 7
uaacaugaguacugu

SEQ ID NO: 183311 - RNA, 15 nt, Human herpesvirus 7
uaacauugcuucaga

SEQ ID NO: 183312 - RNA, 23 nt, Human herpesvirus 7
uaacauugcuucagaaauaacaa

SEQ ID NO: 183313 - RNA, 16 nt, Human herpesvirus 7
uaacauuuuguaugaa

SEQ ID NO: 183314 - RNA, 17 nt, Human herpesvirus 7
uaacauuuuguaugaaa

SEQ ID NO: 183315 - RNA, 14 nt, Human herpesvirus 7
uaacauacugaugu

SEQ ID NO: 183316 - RNA, 15 nt, Human herpesvirus 7
uaacauacugaugua

SEQ ID NO: 183317 - RNA, 19 nt, Human herpesvirus 7
uaacagcuccaagcuuaaa

SEQ ID NO: 183318 - RNA, 18 nt, Human herpesvirus 7
uaacagcucuaucgucau

SEQ ID NO: 183319 - RNA, 21 nt, Human herpesvirus 7
uaaccgauauaguuuguuuca

SEQ ID NO: 183320 - RNA, 13 nt, Human herpesvirus 7
uaacagaccuccu

SEQ ID NO: 183321 - RNA, 14 nt, Human herpesvirus 7
uaaauagugaauca

SEQ ID NO: 183322 - RNA, 16 nt, Human herpesvirus 7
uaaauagugaaucaua

SEQ ID NO: 183323 - RNA, 14 nt, Human herpesvirus 7
uaacacucaaaaca

SEQ ID NO: 183324 - RNA, 17 nt, Human herpesvirus 7
uaacacucuuguacuuu

SEQ ID NO: 183325 - RNA, 17 nt, Human herpesvirus 7
uaaauacuugcaaugca

SEQ ID NO: 183326 - RNA, 13 nt, Human herpesvirus 7
uaaauaauucaca

SEQ ID NO: 183327 - RNA, 14 nt, Human herpesvirus 7
uaaauaauucacau

SEQ ID NO: 183328 - RNA, 15 nt, Human herpesvirus 7
uaaaguugcauugaa

SEQ ID NO: 183329 - RNA, 16 nt, Human herpesvirus 7
uaaagugcugucuugc

SEQ ID NO: 183330 - RNA, 16 nt, Human herpesvirus 7
uaaaguuuccauaaau

SEQ ID NO: 183331 - RNA, 15 nt, Human herpesvirus 7
uaaauaaaaacaugg

SEQ ID NO: 183332 - RNA, 21 nt, Human herpesvirus 7
uaaauaaaaugguugugcaau

SEQ ID NO: 183333 - RNA, 19 nt, Human herpesvirus 7
uaaauaaaauuuaaaauca

SEQ ID NO: 183334 - RNA, 19 nt, Human herpesvirus 7
uaaaggugguuacauaucc

SEQ ID NO: 183335 - RNA, 13 nt, Human herpesvirus 7
uaaaaacaagcuu

SEQ ID NO: 183336 - RNA, 12 nt, Human herpesvirus 7
uaaaaacaguaa

SEQ ID NO: 183337 - RNA, 20 nt, Human herpesvirus 7
uaaaagauggaaaguuuaua

SEQ ID NO: 183338 - RNA, 16 nt, Human herpesvirus 7
uaaaaagaaugcuaaa

SEQ ID NO: 183339 - RNA, 14 nt, Human herpesvirus 7
uaaaaagacaauuu

SEQ ID NO: 183340 - RNA, 22 nt, Human herpesvirus 7
guuuuugaugugcaacauaacc

SEQ ID NO: 183341 - RNA, 15 nt, Human herpesvirus 7
guuuuuuaauacaaa

SEQ ID NO: 183342 - RNA, 15 nt, Human herpesvirus 7
uaaaaaaucuaauua

SEQ ID NO: 183343 - RNA, 20 nt, Human herpesvirus 7
uaaaaaaucuaauuaaucug

SEQ ID NO: 183344 - RNA, 22 nt, Human herpesvirus 7
guuuuuuggcauuauagguuac

SEQ ID NO: 183345 - RNA, 16 nt, Human herpesvirus 7
uaaaaaaaaaaccaca

SEQ ID NO: 183346 - RNA, 12 nt, Human herpesvirus 7
gugggaaagugu

SEQ ID NO: 183347 - RNA, 16 nt, Human herpesvirus 7
guggaaaucuuuaaua

SEQ ID NO: 183348 - RNA, 16 nt, Human herpesvirus 7
uaaaauguacaauucc

SEQ ID NO: 183349 - RNA, 19 nt, Human herpesvirus 7
uaaaauguacauaacucua

SEQ ID NO: 183350 - RNA, 21 nt, Human herpesvirus 7
uaaaauguacauaacucuauc

SEQ ID NO: 183351 - RNA, 16 nt, Human herpesvirus 7
uaaaaugguugugcaa

SEQ ID NO: 183352 - RNA, 17 nt, Human herpesvirus 7
uaaaaugguugugcaau

SEQ ID NO: 183353 - RNA, 19 nt, Human herpesvirus 7
uaaaaugguugugcaauuu

SEQ ID NO: 183354 - RNA, 15 nt, Human herpesvirus 7
uaaaaugaugaugac

SEQ ID NO: 183355 - RNA, 17 nt, Human herpesvirus 7
uaaaaugaugaugacaa

SEQ ID NO: 183356 - RNA, 20 nt, Human herpesvirus 7
uaaaaugggcguaacuguga

SEQ ID NO: 183357 - RNA, 16 nt, Human herpesvirus 7
uaaacgaagaaucauu

SEQ ID NO: 183358 - RNA, 23 nt, Human herpesvirus 7
uaaaauuaauaauauuaguauua

SEQ ID NO: 183359 - RNA, 13 nt, Human herpesvirus 7
uaaaauuaauuca

SEQ ID NO: 183360 - RNA, 17 nt, Human herpesvirus 7
uaaaauuaauucaauca

SEQ ID NO: 183361 - RNA, 21 nt, Human herpesvirus 7
uaaaauguuuuagaccuauca

SEQ ID NO: 183362 - RNA, 17 nt, Human herpesvirus 7
uaaaauugacagcacca

SEQ ID NO: 183363 - RNA, 15 nt, Human herpesvirus 7
uaaaaguaucauuaa

SEQ ID NO: 183364 - RNA, 13 nt, Human herpesvirus 7
uaaaaguucauaa

SEQ ID NO: 183365 - RNA, 18 nt, Human herpesvirus 7
uaaaaguucauaaugaca

SEQ ID NO: 183366 - RNA, 19 nt, Human herpesvirus 7
uaaaauagaaaaugucaga

SEQ ID NO: 183367 - RNA, 14 nt, Human herpesvirus 7
uaaaaucuacugua

SEQ ID NO: 183368 - RNA, 22 nt, Human herpesvirus 7
uaaaauaucuuuuucaaaugga

SEQ ID NO: 183369 - RNA, 23 nt, Human herpesvirus 7
uaaaauaucuuuuucaaauggau

SEQ ID NO: 183370 - RNA, 19 nt, Human herpesvirus 7
uaaaaucaauuuauccuaa

SEQ ID NO: 183371 - RNA, 14 nt, Human herpesvirus 7
uaaagcuacagcuu

SEQ ID NO: 183372 - RNA, 19 nt, Human herpesvirus 7
uaaagggcugucugaaguc

SEQ ID NO: 183373 - RNA, 23 nt, Human herpesvirus 7
uaaagggcugucugaagucuugu

SEQ ID NO: 183374 - RNA, 21 nt, Human herpesvirus 7
uaaagaugauuggauuuucug

SEQ ID NO: 183375 - RNA, 21 nt, Human herpesvirus 7
uaaagauugcuugcacuguaa

SEQ ID NO: 183376 - RNA, 14 nt, Human herpesvirus 7
uaaacguccauuga

SEQ ID NO: 183377 - RNA, 21 nt, Human herpesvirus 7
uaaagaaaagcaaaccuuaca

SEQ ID NO: 183378 - RNA, 15 nt, Human herpesvirus 7
uaaagaaccuaucaa

SEQ ID NO: 183379 - RNA, 16 nt, Human herpesvirus 7
uaaagaacuccauucg

SEQ ID NO: 183380 - RNA, 14 nt, Human herpesvirus 7
uaauauuaguauua

SEQ ID NO: 183381 - RNA, 15 nt, Human herpesvirus 7
uaauaucaguacaac

SEQ ID NO: 183382 - RNA, 14 nt, Human herpesvirus 7
uaauauauuuuccu

SEQ ID NO: 183383 - RNA, 21 nt, Human herpesvirus 7
uaauccaaaccggccaaugau

SEQ ID NO: 183384 - RNA, 18 nt, Human herpesvirus 7
uaaucaaaaaauucuucu

SEQ ID NO: 183385 - RNA, 16 nt, Human herpesvirus 7
uaaucaauuuuugaca

SEQ ID NO: 183386 - RNA, 20 nt, Human herpesvirus 7
uaaucacaaguuaauuuugc

SEQ ID NO: 183387 - RNA, 15 nt, Human herpesvirus 7
uaauaaaacaaacua

SEQ ID NO: 183388 - RNA, 21 nt, Human herpesvirus 7
uaaguggaaucucauaaucau

SEQ ID NO: 183389 - RNA, 17 nt, Human herpesvirus 7
uaaguugacaaugucaa

SEQ ID NO: 183390 - RNA, 19 nt, Human herpesvirus 7
uaaguuguucucaauagca

SEQ ID NO: 183391 - RNA, 19 nt, Human herpesvirus 7
uaauagaaaaauguacaau

SEQ ID NO: 183392 - RNA, 16 nt, Human herpesvirus 7
uaauacuggcaugucu

SEQ ID NO: 183393 - RNA, 18 nt, Human herpesvirus 7
uaauacuggcaugucuca

SEQ ID NO: 183394 - RNA, 21 nt, Human herpesvirus 7
uaauacaacauauagauuuau

SEQ ID NO: 183395 - RNA, 16 nt, Human herpesvirus 7
uaauaauuauuugacu

SEQ ID NO: 183396 - RNA, 20 nt, Human herpesvirus 7
uaauaacaaacgauuuggug

SEQ ID NO: 183397 - RNA, 17 nt, Human herpesvirus 7
uaaugacacgacacuga

SEQ ID NO: 183398 - RNA, 15 nt, Human herpesvirus 7
uaaugaaaaagccau

SEQ ID NO: 183399 - RNA, 17 nt, Human herpesvirus 7
uaaugaaaaagccauaa

SEQ ID NO: 183400 - RNA, 19 nt, Human herpesvirus 7
uaaugaaguuuaucuugga

SEQ ID NO: 183401 - RNA, 16 nt, Human herpesvirus 7
uaauuaaaguugcauu

SEQ ID NO: 183402 - RNA, 13 nt, Human herpesvirus 7
uaaugucauaaaa

SEQ ID NO: 183403 - RNA, 23 nt, Human herpesvirus 7
uaaugucucuguucccacuggga

SEQ ID NO: 183404 - RNA, 23 nt, Human herpesvirus 7
uaaugguaccuuagaaucacaac

SEQ ID NO: 183405 - RNA, 13 nt, Human herpesvirus 7
uaauggauaacca

SEQ ID NO: 183406 - RNA, 16 nt, Human herpesvirus 7
uacaaagaagaauucc

SEQ ID NO: 183407 - RNA, 12 nt, Human herpesvirus 7
uacaacaaacau

SEQ ID NO: 183408 - RNA, 15 nt, Human herpesvirus 7
uacaacgacauugaa

SEQ ID NO: 183409 - RNA, 13 nt, Human herpesvirus 7
uacaaccacaacc

SEQ ID NO: 183410 - RNA, 15 nt, Human herpesvirus 7
uacaaacauguucca

SEQ ID NO: 183411 - RNA, 20 nt, Human herpesvirus 7
uacaaacauguuccauucaa

SEQ ID NO: 183412 - RNA, 16 nt, Human herpesvirus 7
uaauuacuucuuugac

SEQ ID NO: 183413 - RNA, 13 nt, Human herpesvirus 7
uaauuacauugca

SEQ ID NO: 183414 - RNA, 17 nt, Human herpesvirus 7
uaauuacauugcaguca

SEQ ID NO: 183415 - RNA, 20 nt, Human herpesvirus 7
uacauuucaaacaacauauc

SEQ ID NO: 183416 - RNA, 21 nt, Human herpesvirus 7
uacauuucaaacaacauaucg

SEQ ID NO: 183417 - RNA, 15 nt, Human herpesvirus 7
uacauuuugcaauca

SEQ ID NO: 183418 - RNA, 12 nt, Human herpesvirus 7
uaccaaacaaaa

SEQ ID NO: 183419 - RNA, 13 nt, Human herpesvirus 7
uaccaugaaaaau

SEQ ID NO: 183420 - RNA, 20 nt, Human herpesvirus 7
uaccaugaaaaauaugagug

SEQ ID NO: 183421 - RNA, 19 nt, Human herpesvirus 7
uacaacuucuacuaauaca

SEQ ID NO: 183422 - RNA, 14 nt, Human herpesvirus 7
uacaacuuugccaa

SEQ ID NO: 183423 - RNA, 15 nt, Human herpesvirus 7
uacagaaauugauga

SEQ ID NO: 183424 - RNA, 16 nt, Human herpesvirus 7
uacagacagaaugcca

SEQ ID NO: 183425 - RNA, 14 nt, Human herpesvirus 7
uacacucuguuacu

SEQ ID NO: 183426 - RNA, 14 nt, Human herpesvirus 7
uacgauuuugugac

SEQ ID NO: 183427 - RNA, 12 nt, Human herpesvirus 7
uaccgaaagugu

SEQ ID NO: 183428 - RNA, 18 nt, Human herpesvirus 7
uaccgauggaacugaaaa

SEQ ID NO: 183429 - RNA, 14 nt, Human herpesvirus 7
uaccgcauaaauca

SEQ ID NO: 183430 - RNA, 15 nt, Human herpesvirus 7
uaccggaccauuucc

SEQ ID NO: 183431 - RNA, 14 nt, Human herpesvirus 7
uacgaugacagucu

SEQ ID NO: 183432 - RNA, 18 nt, Human herpesvirus 7
uacgaaugccaucuauaa

SEQ ID NO: 183433 - RNA, 21 nt, Human herpesvirus 7
uacccacauuuuuugcacgau

SEQ ID NO: 183434 - RNA, 12 nt, Human herpesvirus 7
uacccacauuuu

SEQ ID NO: 183435 - RNA, 16 nt, Human herpesvirus 7
uagguuguugcaauuu

SEQ ID NO: 183436 - RNA, 23 nt, Human herpesvirus 7
uagguuaagccuaggauaccaaa

SEQ ID NO: 183437 - RNA, 20 nt, Human herpesvirus 7
uagguuacguguucauuuau

SEQ ID NO: 183438 - RNA, 19 nt, Human herpesvirus 7
uaguuaugacgaagcuaaa

SEQ ID NO: 183439 - RNA, 14 nt, Human herpesvirus 7
uagugugcacacaa

SEQ ID NO: 183440 - RNA, 16 nt, Human herpesvirus 7
uaguuugguuauccaa

SEQ ID NO: 183441 - RNA, 23 nt, Human herpesvirus 7
uaguuugguuauccaaguuuuaa

SEQ ID NO: 183442 - RNA, 15 nt, Human herpesvirus 7
uaguucgcaauggua

SEQ ID NO: 183443 - RNA, 12 nt, Human herpesvirus 7
uaguucuacuug

SEQ ID NO: 183444 - RNA, 17 nt, Human herpesvirus 7
uaguuuaacuuacuguu

SEQ ID NO: 183445 - RNA, 13 nt, Human herpesvirus 7
uauaaacauucua

SEQ ID NO: 183446 - RNA, 14 nt, Human herpesvirus 7
uauaaacauucuaa

SEQ ID NO: 183447 - RNA, 21 nt, Human herpesvirus 7
uauaaacauucuaaauugaga

SEQ ID NO: 183448 - RNA, 23 nt, Human herpesvirus 7
uaguuuuggugucggaucuucau

SEQ ID NO: 183449 - RNA, 15 nt, Human herpesvirus 7
uauaacauugcuuca

SEQ ID NO: 183450 - RNA, 19 nt, Human herpesvirus 7
uauaacaauauuuaaagua

SEQ ID NO: 183451 - RNA, 15 nt, Human herpesvirus 7
uaggguuucuaggcu

SEQ ID NO: 183452 - RNA, 15 nt, Human herpesvirus 7
uagguaauagcuuua

SEQ ID NO: 183453 - RNA, 19 nt, Human herpesvirus 7
uagguaucuuuacuuucau

SEQ ID NO: 183454 - RNA, 19 nt, Human herpesvirus 7
uaggggaagaaucaagacg

SEQ ID NO: 183455 - RNA, 17 nt, Human herpesvirus 7
uagcgcugaaauuucau

SEQ ID NO: 183456 - RNA, 17 nt, Human herpesvirus 7
uaggccaguucuaucuc

SEQ ID NO: 183457 - RNA, 18 nt, Human herpesvirus 7
uaggccaguucuaucuca

SEQ ID NO: 183458 - RNA, 18 nt, Human herpesvirus 7
uagcauuuguuacagcuu

SEQ ID NO: 183459 - RNA, 23 nt, Human herpesvirus 7
uagcauuuguuacagcuuucauu

SEQ ID NO: 183460 - RNA, 21 nt, Human herpesvirus 7
uagcauuagagcauauuccau

SEQ ID NO: 183461 - RNA, 13 nt, Human herpesvirus 7
uacugaaucugaa

SEQ ID NO: 183462 - RNA, 17 nt, Human herpesvirus 7
uacucuuucugacauug

SEQ ID NO: 183463 - RNA, 14 nt, Human herpesvirus 7
uacucguguugcaa

SEQ ID NO: 183464 - RNA, 16 nt, Human herpesvirus 7
uaucaaauuuaucuca

SEQ ID NO: 183465 - RNA, 16 nt, Human herpesvirus 7
uaucaaggucuuucau

SEQ ID NO: 183466 - RNA, 23 nt, Human herpesvirus 7
uaucaaggucuuucaugcauugc

SEQ ID NO: 183467 - RNA, 15 nt, Human herpesvirus 7
uaucaaccauucaaa

SEQ ID NO: 183468 - RNA, 22 nt, Human herpesvirus 7
uaucaagauagugacauucccu

SEQ ID NO: 183469 - RNA, 20 nt, Human herpesvirus 7
uauaauaacaaacgauuugg

SEQ ID NO: 183470 - RNA, 21 nt, Human herpesvirus 7
uauaauaacaaacgauuuggu

SEQ ID NO: 183471 - RNA, 21 nt, Human herpesvirus 7
uauaauacuggcaugucucau

SEQ ID NO: 183472 - RNA, 20 nt, Human herpesvirus 7
uauaaugguuugaauaucuc

SEQ ID NO: 183473 - RNA, 17 nt, Human herpesvirus 7
uauaauucucacagcuu

SEQ ID NO: 183474 - RNA, 13 nt, Human herpesvirus 7
uauacaaaagaca

SEQ ID NO: 183475 - RNA, 14 nt, Human herpesvirus 7
uauacaaaagacau

SEQ ID NO: 183476 - RNA, 16 nt, Human herpesvirus 7
uaucaaaauuccauuc

SEQ ID NO: 183477 - RNA, 15 nt, Human herpesvirus 7
uaucucauagcuuaa

SEQ ID NO: 183478 - RNA, 17 nt, Human herpesvirus 7
uaucuccuauguugcaa

SEQ ID NO: 183479 - RNA, 13 nt, Human herpesvirus 7
uaucuaccaucaa

SEQ ID NO: 183480 - RNA, 13 nt, Human herpesvirus 7
uaucucaaaacaa

SEQ ID NO: 183481 - RNA, 16 nt, Human herpesvirus 7
uaucucaaaacaaacu

SEQ ID NO: 183482 - RNA, 12 nt, Human herpesvirus 7
uaucugcauuga

SEQ ID NO: 183483 - RNA, 15 nt, Human herpesvirus 7
uaucucuacaaacag

SEQ ID NO: 183484 - RNA, 19 nt, Human herpesvirus 7
uaucacuuccuguccaaau

SEQ ID NO: 183485 - RNA, 22 nt, Human herpesvirus 7
uaucagaaaaucucgaacaguc

SEQ ID NO: 183486 - RNA, 15 nt, Human herpesvirus 7
uaucgguuaucuuau

SEQ ID NO: 183487 - RNA, 16 nt, Human herpesvirus 7
uaugauacaaucgaua

SEQ ID NO: 183488 - RNA, 16 nt, Human herpesvirus 7
uaugauguuuccgcau

SEQ ID NO: 183489 - RNA, 20 nt, Human herpesvirus 7
uaugauguuuccgcauaaaa

SEQ ID NO: 183490 - RNA, 13 nt, Human herpesvirus 7
uaugaugcauuuu

SEQ ID NO: 183491 - RNA, 22 nt, Human herpesvirus 7
uaugaugcauuuuuauugcagu

SEQ ID NO: 183492 - RNA, 16 nt, Human herpesvirus 7
uaugaugaaacuucca

SEQ ID NO: 183493 - RNA, 15 nt, Human herpesvirus 7
uaugaugacaacaaa

SEQ ID NO: 183494 - RNA, 17 nt, Human herpesvirus 7
uaugaugacaacaaagc

SEQ ID NO: 183495 - RNA, 23 nt, Human herpesvirus 7
uaugacuuugaaucaacagccau

SEQ ID NO: 183496 - RNA, 19 nt, Human herpesvirus 7
uaugacugacauucuucca

SEQ ID NO: 183497 - RNA, 15 nt, Human herpesvirus 7
uaugagauauuuaau

SEQ ID NO: 183498 - RNA, 15 nt, Human herpesvirus 7
uaugacgacuuugaa

SEQ ID NO: 183499 - RNA, 22 nt, Human herpesvirus 7
uaucuguguguuugaaugacau

SEQ ID NO: 183500 - RNA, 17 nt, Human herpesvirus 7
uaugaacuggcacauua

SEQ ID NO: 183501 - RNA, 15 nt, Human herpesvirus 7
uaugaaaacagcugg

SEQ ID NO: 183502 - RNA, 21 nt, Human herpesvirus 7
uauuaaagcuuucaauucauc

SEQ ID NO: 183503 - RNA, 19 nt, Human herpesvirus 7
uauuaaaucauaccauaaa

SEQ ID NO: 183504 - RNA, 18 nt, Human herpesvirus 7
uaugugcuuauaucuuau

SEQ ID NO: 183505 - RNA, 17 nt, Human herpesvirus 7
uauguucaaauaugcau

SEQ ID NO: 183506 - RNA, 22 nt, Human herpesvirus 7
uauguucaaauaugcauggaga

SEQ ID NO: 183507 - RNA, 17 nt, Human herpesvirus 7
uauuaaaaaccacagag

SEQ ID NO: 183508 - RNA, 16 nt, Human herpesvirus 7
uauguucgccugaaga

SEQ ID NO: 183509 - RNA, 19 nt, Human herpesvirus 7
uaugcaucaaaacauauca

SEQ ID NO: 183510 - RNA, 23 nt, Human herpesvirus 7
uaugcaucaaaacauaucagauu

SEQ ID NO: 183511 - RNA, 22 nt, Human herpesvirus 7
uauguagcaucucuguggcugu

SEQ ID NO: 183512 - RNA, 14 nt, Human herpesvirus 7
uaugcaugcaauuu

SEQ ID NO: 183513 - RNA, 20 nt, Human herpesvirus 7
uaugcauuauauccaauaau

SEQ ID NO: 183514 - RNA, 13 nt, Human herpesvirus 7
uauguccaaaaau

SEQ ID NO: 183515 - RNA, 12 nt, Human herpesvirus 7
uauguccaguga

SEQ ID NO: 183516 - RNA, 19 nt, Human herpesvirus 7
uaugucaucgguagugucu

SEQ ID NO: 183517 - RNA, 15 nt, Human herpesvirus 7
uaugucagauucucc

SEQ ID NO: 183518 - RNA, 10 nt, Human herpesvirus 7
uaugugaaaa

SEQ ID NO: 183519 - RNA, 15 nt, Human herpesvirus 7
uaugugagaaaacau

SEQ ID NO: 183520 - RNA, 20 nt, Human herpesvirus 7
ucaaaaaauaauuccuucua

SEQ ID NO: 183521 - RNA, 19 nt, Human herpesvirus 7
ucaaaaaacacguccaaga

SEQ ID NO: 183522 - RNA, 13 nt, Human herpesvirus 7
ucaaaaauaccgg

SEQ ID NO: 183523 - RNA, 21 nt, Human herpesvirus 7
uauuuucuucgucuaagucaa

SEQ ID NO: 183524 - RNA, 19 nt, Human herpesvirus 7
uauuuugacaaucuuggca

SEQ ID NO: 183525 - RNA, 12 nt, Human herpesvirus 7
uauuuugcuaga

SEQ ID NO: 183526 - RNA, 16 nt, Human herpesvirus 7
ucaaacguaaugcaaa

SEQ ID NO: 183527 - RNA, 14 nt, Human herpesvirus 7
ucaaaagcugcagc

SEQ ID NO: 183528 - RNA, 19 nt, Human herpesvirus 7
ucaaaaguagaggccgaaa

SEQ ID NO: 183529 - RNA, 14 nt, Human herpesvirus 7
uauuuauguucaaa

SEQ ID NO: 183530 - RNA, 23 nt, Human herpesvirus 7
uauuguccuuucaacgaucucaa

SEQ ID NO: 183531 - RNA, 17 nt, Human herpesvirus 7
uauuuaaacagcguuca

SEQ ID NO: 183532 - RNA, 21 nt, Human herpesvirus 7
uauuucggcacccuaauugcc

SEQ ID NO: 183533 - RNA, 22 nt, Human herpesvirus 7
uauuucggcacccuaauugcca

SEQ ID NO: 183534 - RNA, 14 nt, Human herpesvirus 7
uauuucgucuuucc

SEQ ID NO: 183535 - RNA, 20 nt, Human herpesvirus 7
uauuucuaauagacaaauua

SEQ ID NO: 183536 - RNA, 14 nt, Human herpesvirus 7
uauuucuacacaaa

SEQ ID NO: 183537 - RNA, 14 nt, Human herpesvirus 7
uauuucugucaucu

SEQ ID NO: 183538 - RNA, 20 nt, Human herpesvirus 7
uauuuuaaaaaagaauuugg

SEQ ID NO: 183539 - RNA, 14 nt, Human herpesvirus 7
uauuugacugggua

SEQ ID NO: 183540 - RNA, 13 nt, Human herpesvirus 7
uauuugacuuuuu

SEQ ID NO: 183541 - RNA, 16 nt, Human herpesvirus 7
uauuugcugagucucu

SEQ ID NO: 183542 - RNA, 20 nt, Human herpesvirus 7
uauuugcuguuuuugacuca

SEQ ID NO: 183543 - RNA, 15 nt, Human herpesvirus 7
uauuugcuugcugaa

SEQ ID NO: 183544 - RNA, 22 nt, Human herpesvirus 7
uauuuucccagauacagcauau

SEQ ID NO: 183545 - RNA, 17 nt, Human herpesvirus 7
uauuuucguaucuguga

SEQ ID NO: 183546 - RNA, 19 nt, Human herpesvirus 7
uauuuguuaaaaguucaua

SEQ ID NO: 183547 - RNA, 19 nt, Human herpesvirus 7
uauuugguacuguagauag

SEQ ID NO: 183548 - RNA, 14 nt, Human herpesvirus 7
uauuuuacauauua

SEQ ID NO: 183549 - RNA, 13 nt, Human herpesvirus 7
uauuaaucuugaa

SEQ ID NO: 183550 - RNA, 15 nt, Human herpesvirus 7
uauuaguuuaacuua

SEQ ID NO: 183551 - RNA, 14 nt, Human herpesvirus 7
uauuccagauauga

SEQ ID NO: 183552 - RNA, 17 nt, Human herpesvirus 7
uauucaauuguccauuu

SEQ ID NO: 183553 - RNA, 17 nt, Human herpesvirus 7
uauucaaaagcuaaaaa

SEQ ID NO: 183554 - RNA, 18 nt, Human herpesvirus 7
uauugucuuacagcacuu

SEQ ID NO: 183555 - RNA, 20 nt, Human herpesvirus 7
uauugucuuacagcacuuug

SEQ ID NO: 183556 - RNA, 22 nt, Human herpesvirus 7
uauugucuuacagcacuuugag

SEQ ID NO: 183557 - RNA, 17 nt, Human herpesvirus 7
uauuguauaugaugaca

SEQ ID NO: 183558 - RNA, 21 nt, Human herpesvirus 7
uauuguauaugaugacaacaa

SEQ ID NO: 183559 - RNA, 14 nt, Human herpesvirus 7
uauugucauaaaau

SEQ ID NO: 183560 - RNA, 10 nt, Human herpesvirus 7
uauugcauca

SEQ ID NO: 183561 - RNA, 22 nt, Human herpesvirus 7
uauugcaucaacuaguucuuua

SEQ ID NO: 183562 - RNA, 15 nt, Human herpesvirus 7
uauugccuuucccag

SEQ ID NO: 183563 - RNA, 17 nt, Human herpesvirus 7
uauuggagagauagcau

SEQ ID NO: 183564 - RNA, 21 nt, Human herpesvirus 7
uauuggagagauagcauuugu

SEQ ID NO: 183565 - RNA, 15 nt, Human herpesvirus 7
uauuggauaauauca

SEQ ID NO: 183566 - RNA, 22 nt, Human herpesvirus 7
uauucuaacaaauaccaugaaa

SEQ ID NO: 183567 - RNA, 15 nt, Human herpesvirus 7
uauucguaaacauuu

SEQ ID NO: 183568 - RNA, 18 nt, Human herpesvirus 7
uauucuacggcuaaucuc

SEQ ID NO: 183569 - RNA, 15 nt, Human herpesvirus 7
uauugaaggugucua

SEQ ID NO: 183570 - RNA, 14 nt, Human herpesvirus 7
uauugacauaauca

SEQ ID NO: 183571 - RNA, 15 nt, Human herpesvirus 7
uauugacauaaucau

SEQ ID NO: 183572 - RNA, 20 nt, Human herpesvirus 7
uauugacauaaucauggaaa

SEQ ID NO: 183573 - RNA, 11 nt, Human herpesvirus 7
ucaacuuugcg

SEQ ID NO: 183574 - RNA, 17 nt, Human herpesvirus 7
ucaagaaaucagauuaa

SEQ ID NO: 183575 - RNA, 15 nt, Human herpesvirus 7
ucaaccacuaaucca

SEQ ID NO: 183576 - RNA, 17 nt, Human herpesvirus 7
ucaaccacuaauccaug

SEQ ID NO: 183577 - RNA, 21 nt, Human herpesvirus 7
ucaaauuuaucucauagcuua

SEQ ID NO: 183578 - RNA, 23 nt, Human herpesvirus 7
ucaaauuguuuuucuuucuugca

SEQ ID NO: 183579 - RNA, 15 nt, Human herpesvirus 7
ucaaauuuugauucc

SEQ ID NO: 183580 - RNA, 17 nt, Human herpesvirus 7
ucaacacaauuuucaca

SEQ ID NO: 183581 - RNA, 22 nt, Human herpesvirus 7
ucaaauggauuuuaauacaaca

SEQ ID NO: 183582 - RNA, 17 nt, Human herpesvirus 7
ucaaaucaaaguuuuaa

SEQ ID NO: 183583 - RNA, 14 nt, Human herpesvirus 7
ucaaaucaauguga

SEQ ID NO: 183584 - RNA, 14 nt, Human herpesvirus 7
ucaaauccgaguca

SEQ ID NO: 183585 - RNA, 20 nt, Human herpesvirus 7
ucaaauaagggauaucuuaa

SEQ ID NO: 183586 - RNA, 21 nt, Human herpesvirus 7
ucaagauaagcaauacauucu

SEQ ID NO: 183587 - RNA, 22 nt, Human herpesvirus 7
ucaacuugaaugagcugacaga

SEQ ID NO: 183588 - RNA, 24 nt, Human herpesvirus 7
ucaagacacguuucucuguagaua

SEQ ID NO: 183589 - RNA, 20 nt, Human herpesvirus 7
ucaagaauggcugaugauaa

SEQ ID NO: 183590 - RNA, 21 nt, Human herpesvirus 7
ucaagacgcuguaugcaagaa

SEQ ID NO: 183591 - RNA, 22 nt, Human herpesvirus 7
ucaagacgcuguaugcaagaaa

SEQ ID NO: 183592 - RNA, 14 nt, Human herpesvirus 7
ucaaggucuuucau

SEQ ID NO: 183593 - RNA, 23 nt, Human herpesvirus 7
ucaaggucuuucaugcauugcau

SEQ ID NO: 183594 - RNA, 15 nt, Human herpesvirus 7
ucaaggaauucugac

SEQ ID NO: 183595 - RNA, 13 nt, Human herpesvirus 7
ucaaucugcaaaa

SEQ ID NO: 183596 - RNA, 14 nt, Human herpesvirus 7
ucaaucacauacuc

SEQ ID NO: 183597 - RNA, 16 nt, Human herpesvirus 7
ucaaucaccaaagagu

SEQ ID NO: 183598 - RNA, 19 nt, Human herpesvirus 7
ucaauaguuuuacaaagaa

SEQ ID NO: 183599 - RNA, 19 nt, Human herpesvirus 7
ucaauagcauaugcuggau

SEQ ID NO: 183600 - RNA, 13 nt, Human herpesvirus 7
ucaauguucgaua

SEQ ID NO: 183601 - RNA, 17 nt, Human herpesvirus 7
ucaauuaaugcauugga

SEQ ID NO: 183602 - RNA, 20 nt, Human herpesvirus 7
ucaauuuauccuaagcuuuu

SEQ ID NO: 183603 - RNA, 18 nt, Human herpesvirus 7
ucaauucaccaauuucua

SEQ ID NO: 183604 - RNA, 19 nt, Human herpesvirus 7
ggagguuugcuauugacuu

SEQ ID NO: 183605 - RNA, 22 nt, Human herpesvirus 7
ggagcauuauuggauaauauca

SEQ ID NO: 183606 - RNA, 14 nt, Human herpesvirus 7
ggccguuuaugaac

SEQ ID NO: 183607 - RNA, 16 nt, Human herpesvirus 7
ggccaguucuaucuca

SEQ ID NO: 183608 - RNA, 12 nt, Human herpesvirus 7
ggcgaguuacau

SEQ ID NO: 183609 - RNA, 16 nt, Human herpesvirus 7
ggcgaguuacauuuca

SEQ ID NO: 183610 - RNA, 14 nt, Human herpesvirus 7
ggcguaacugugac

SEQ ID NO: 183611 - RNA, 20 nt, Human herpesvirus 7
ggcgaauuuuaucauuucaa

SEQ ID NO: 183612 - RNA, 14 nt, Human herpesvirus 7
ggagcaaugcauga

SEQ ID NO: 183613 - RNA, 20 nt, Human herpesvirus 7
ggagaucaauugaguuuacu

SEQ ID NO: 183614 - RNA, 13 nt, Human herpesvirus 7
ggagacaaucuau

SEQ ID NO: 183615 - RNA, 14 nt, Human herpesvirus 7
ggacuuauguccag

SEQ ID NO: 183616 - RNA, 12 nt, Human herpesvirus 7
ggaaaugagauu

SEQ ID NO: 183617 - RNA, 19 nt, Human herpesvirus 7
ggaaaauucguuuauacga

SEQ ID NO: 183618 - RNA, 23 nt, Human herpesvirus 7
ggaaacaucuuuauauguguucg

SEQ ID NO: 183619 - RNA, 21 nt, Human herpesvirus 7
ggaaacacaauuguauuucag

SEQ ID NO: 183620 - RNA, 14 nt, Human herpesvirus 7
ggaaaauauauuaa

SEQ ID NO: 183621 - RNA, 16 nt, Human herpesvirus 7
ggaaacauugaaaaag

SEQ ID NO: 183622 - RNA, 13 nt, Human herpesvirus 7
ggaaagaugguga

SEQ ID NO: 183623 - RNA, 21 nt, Human herpesvirus 7
ggaaagacaaacuauggugau

SEQ ID NO: 183624 - RNA, 18 nt, Human herpesvirus 7
ggaauuugauuccaucuc

SEQ ID NO: 183625 - RNA, 19 nt, Human herpesvirus 7
ggaauuugauuccaucuca

SEQ ID NO: 183626 - RNA, 14 nt, Human herpesvirus 7
ggaauggacaaaaa

SEQ ID NO: 183627 - RNA, 22 nt, Human herpesvirus 7
ggaaucuauaguuuguauuuca

SEQ ID NO: 183628 - RNA, 20 nt, Human herpesvirus 7
ggacaccaguaugaaaucaa

SEQ ID NO: 183629 - RNA, 15 nt, Human herpesvirus 7
ggacaauaacauuuu

SEQ ID NO: 183630 - RNA, 21 nt, Human herpesvirus 7
ggacaaauauacgaaugccau

SEQ ID NO: 183631 - RNA, 19 nt, Human herpesvirus 7
gcguuaaugucucuguucc

SEQ ID NO: 183632 - RNA, 14 nt, Human herpesvirus 7
gcguucguaacaaa

SEQ ID NO: 183633 - RNA, 19 nt, Human herpesvirus 7
gcuaaagagcauucaugcc

SEQ ID NO: 183634 - RNA, 18 nt, Human herpesvirus 7
gcuaaaaccaucauucuu

SEQ ID NO: 183635 - RNA, 18 nt, Human herpesvirus 7
gcuaagaaagaacauuuu

SEQ ID NO: 183636 - RNA, 15 nt, Human herpesvirus 7
gcguguccauucaac

SEQ ID NO: 183637 - RNA, 21 nt, Human herpesvirus 7
gcgcguuguuuguccucuauc

SEQ ID NO: 183638 - RNA, 13 nt, Human herpesvirus 7
gccauucuuuuca

SEQ ID NO: 183639 - RNA, 18 nt, Human herpesvirus 7
gccauucuuuucaaugca

SEQ ID NO: 183640 - RNA, 14 nt, Human herpesvirus 7
gccauuuucuugag

SEQ ID NO: 183641 - RNA, 15 nt, Human herpesvirus 7
gccaucuaauugcag

SEQ ID NO: 183642 - RNA, 20 nt, Human herpesvirus 7
gcccacucuggaaaugucaa

SEQ ID NO: 183643 - RNA, 13 nt, Human herpesvirus 7
gcccaagugggug

SEQ ID NO: 183644 - RNA, 23 nt, Human herpesvirus 7
gcugacauacgaaucaguucaac

SEQ ID NO: 183645 - RNA, 17 nt, Human herpesvirus 7
gcugaacgcagacacaa

SEQ ID NO: 183646 - RNA, 19 nt, Human herpesvirus 7
gcugcaacaaauuaaauac

SEQ ID NO: 183647 - RNA, 17 nt, Human herpesvirus 7
gcugauucaacacucga

SEQ ID NO: 183648 - RNA, 22 nt, Human herpesvirus 7
gcugauccgccgacaagaaaca

SEQ ID NO: 183649 - RNA, 22 nt, Human herpesvirus 7
gcugagacucacuccuugcaua

SEQ ID NO: 183650 - RNA, 16 nt, Human herpesvirus 7
gcucaagcacaaucac

SEQ ID NO: 183651 - RNA, 17 nt, Human herpesvirus 7
gcucaaugguaagcaaa

SEQ ID NO: 183652 - RNA, 22 nt, Human herpesvirus 7
gcuaauuugcauaaacuaucaa

SEQ ID NO: 183653 - RNA, 20 nt, Human herpesvirus 7
gcuauuauuaaagcuuucaa

SEQ ID NO: 183654 - RNA, 14 nt, Human herpesvirus 7
gcuaaggcgaaaaa

SEQ ID NO: 183655 - RNA, 12 nt, Human herpesvirus 7
gcucaacuuaug

SEQ ID NO: 183656 - RNA, 15 nt, Human herpesvirus 7
gcuugcauugcauau

SEQ ID NO: 183657 - RNA, 18 nt, Human herpesvirus 7
gcuugcauugcauaucau

SEQ ID NO: 183658 - RNA, 21 nt, Human herpesvirus 7
gcuugcacaaagauccucuga

SEQ ID NO: 183659 - RNA, 18 nt, Human herpesvirus 7
gcuuuugaauaaucucaa

SEQ ID NO: 183660 - RNA, 20 nt, Human herpesvirus 7
gcuucuucuaauacaucuag

SEQ ID NO: 183661 - RNA, 13 nt, Human herpesvirus 7
gcuugaaagaaua

SEQ ID NO: 183662 - RNA, 22 nt, Human herpesvirus 7
gcuucggaauuugauuccaucu

SEQ ID NO: 183663 - RNA, 14 nt, Human herpesvirus 7
gcuuccaucacaaa

SEQ ID NO: 183664 - RNA, 21 nt, Human herpesvirus 7
gcuucaguacuugaauaugag

SEQ ID NO: 183665 - RNA, 16 nt, Human herpesvirus 7
gcuggcucaagcacaa

SEQ ID NO: 183666 - RNA, 17 nt, Human herpesvirus 7
gcuggcucaagcacaau

SEQ ID NO: 183667 - RNA, 16 nt, Human herpesvirus 7
gcuggaucuucugcua

SEQ ID NO: 183668 - RNA, 13 nt, Human herpesvirus 7
gcugcagcgagaa

SEQ ID NO: 183669 - RNA, 19 nt, Human herpesvirus 7
gugcuuacgugaugccaua

SEQ ID NO: 183670 - RNA, 20 nt, Human herpesvirus 7
gugcucuuugucuuugcucu

SEQ ID NO: 183671 - RNA, 23 nt, Human herpesvirus 7
gugccuugcgguagcacuagauu

SEQ ID NO: 183672 - RNA, 23 nt, Human herpesvirus 7
gugcaucuccuguaaccauuuau

SEQ ID NO: 183673 - RNA, 11 nt, Human herpesvirus 7
gugcaaugaug

SEQ ID NO: 183674 - RNA, 15 nt, Human herpesvirus 7
gugauuuuucauuua

SEQ ID NO: 183675 - RNA, 16 nt, Human herpesvirus 7
gugcaacauaaccaau

SEQ ID NO: 183676 - RNA, 18 nt, Human herpesvirus 7
gugauugcgaccaaagau

SEQ ID NO: 183677 - RNA, 17 nt, Human herpesvirus 7
gugagugaacauuugaa

SEQ ID NO: 183678 - RNA, 17 nt, Human herpesvirus 7
gugaguuucuacauguu

SEQ ID NO: 183679 - RNA, 22 nt, Human herpesvirus 7
gugaguuucuacauguuuaaca

SEQ ID NO: 183680 - RNA, 11 nt, Human herpesvirus 7
gugaucaaaau

SEQ ID NO: 183681 - RNA, 15 nt, Human herpesvirus 7
gugaucaaaauuaau

SEQ ID NO: 183682 - RNA, 18 nt, Human herpesvirus 7
gugacagagggcauuugu

SEQ ID NO: 183683 - RNA, 14 nt, Human herpesvirus 7
gugacccugucaca

SEQ ID NO: 183684 - RNA, 17 nt, Human herpesvirus 7
gugacuuggacuuacuu

SEQ ID NO: 183685 - RNA, 13 nt, Human herpesvirus 7
gugagaaauggaa

SEQ ID NO: 183686 - RNA, 22 nt, Human herpesvirus 7
gugagaaauuuugaucuuguca

SEQ ID NO: 183687 - RNA, 14 nt, Human herpesvirus 7
gugaaguuugcuga

SEQ ID NO: 183688 - RNA, 19 nt, Human herpesvirus 7
gucuugcuuggccgccaaa

SEQ ID NO: 183689 - RNA, 23 nt, Human herpesvirus 7
gucuuauuacucgaugcuucaau

SEQ ID NO: 183690 - RNA, 21 nt, Human herpesvirus 7
gucuucauccguggaaucuau

SEQ ID NO: 183691 - RNA, 20 nt, Human herpesvirus 7
gucugugguugaauuuguua

SEQ ID NO: 183692 - RNA, 12 nt, Human herpesvirus 7
gucugugacaga

SEQ ID NO: 183693 - RNA, 19 nt, Human herpesvirus 7
gucuguagaugcaugcuaa

SEQ ID NO: 183694 - RNA, 23 nt, Human herpesvirus 7
gucuguagaugcaugcuaauauu

SEQ ID NO: 183695 - RNA, 19 nt, Human herpesvirus 7
gugaaauaagaugcuuaag

SEQ ID NO: 183696 - RNA, 20 nt, Human herpesvirus 7
gugaaaauauuuuacaaaaa

SEQ ID NO: 183697 - RNA, 14 nt, Human herpesvirus 7
gucuuuucuaccaa

SEQ ID NO: 183698 - RNA, 14 nt, Human herpesvirus 7
gucuuuauaaagga

SEQ ID NO: 183699 - RNA, 14 nt, Human herpesvirus 7
gucuuguguucaag

SEQ ID NO: 183700 - RNA, 17 nt, Human herpesvirus 7
gucuuucaugcauugca

SEQ ID NO: 183701 - RNA, 14 nt, Human herpesvirus 7
gucugcccuuuuau

SEQ ID NO: 183702 - RNA, 22 nt, Human herpesvirus 7
gucugcucaaugguaagcaaaa

SEQ ID NO: 183703 - RNA, 19 nt, Human herpesvirus 7
gucucucgcaacuucugau

SEQ ID NO: 183704 - RNA, 22 nt, Human herpesvirus 7
gucucuccaggcuaaaacuguc

SEQ ID NO: 183705 - RNA, 11 nt, Human herpesvirus 7
gucucuuugcc

SEQ ID NO: 183706 - RNA, 12 nt, Human herpesvirus 7
gucucauaauau

SEQ ID NO: 183707 - RNA, 21 nt, Human herpesvirus 7
gucuacaauuucuggcaauaa

SEQ ID NO: 183708 - RNA, 22 nt, Human herpesvirus 7
gucuacaauuucuggcaauaaa

SEQ ID NO: 183709 - RNA, 12 nt, Human herpesvirus 7
gucuacauuuaa

SEQ ID NO: 183710 - RNA, 17 nt, Human herpesvirus 7
guccucuaucucuguaa

SEQ ID NO: 183711 - RNA, 22 nt, Human herpesvirus 7
guccuucaauagcagagaauau

SEQ ID NO: 183712 - RNA, 15 nt, Human herpesvirus 7
gucgcaauguuagaa

SEQ ID NO: 183713 - RNA, 16 nt, Human herpesvirus 7
gucaucccugcugaua

SEQ ID NO: 183714 - RNA, 17 nt, Human herpesvirus 7
gucaucgguagugucug

SEQ ID NO: 183715 - RNA, 22 nt, Human herpesvirus 7
gucauacaaugaauuagcuaaa

SEQ ID NO: 183716 - RNA, 23 nt, Human herpesvirus 7
gucauacaaugaauuagcuaaau

SEQ ID NO: 183717 - RNA, 17 nt, Human herpesvirus 7
gucaugaaucuuugacu

SEQ ID NO: 183718 - RNA, 19 nt, Human herpesvirus 7
gucauggacggcauuuaac

SEQ ID NO: 183719 - RNA, 17 nt, Human herpesvirus 7
guccaaaaguuguuaag

SEQ ID NO: 183720 - RNA, 16 nt, Human herpesvirus 7
guccaaagugaugaaa

SEQ ID NO: 183721 - RNA, 13 nt, Human herpesvirus 7
guccaaucaaaaa

SEQ ID NO: 183722 - RNA, 14 nt, Human herpesvirus 7
guaaaaguguucaa

SEQ ID NO: 183723 - RNA, 20 nt, Human herpesvirus 7
guaaaccuucgugugucucu

SEQ ID NO: 183724 - RNA, 15 nt, Human herpesvirus 7
guaaacucacuucua

SEQ ID NO: 183725 - RNA, 15 nt, Human herpesvirus 7
guaaagaaccuauca

SEQ ID NO: 183726 - RNA, 20 nt, Human herpesvirus 7
guaaagauaauguuacauua

SEQ ID NO: 183727 - RNA, 17 nt, Human herpesvirus 7
guaaagauuuaacugau

SEQ ID NO: 183728 - RNA, 23 nt, Human herpesvirus 7
guaaauaaaaugguugugcaauu

SEQ ID NO: 183729 - RNA, 14 nt, Human herpesvirus 7
ggucacaaaagcuu

SEQ ID NO: 183730 - RNA, 16 nt, Human herpesvirus 7
ggucacaaaagcuuug

SEQ ID NO: 183731 - RNA, 17 nt, Human herpesvirus 7
ggugacgucuagacauu

SEQ ID NO: 183732 - RNA, 18 nt, Human herpesvirus 7
ggucacggauuagcuuuc

SEQ ID NO: 183733 - RNA, 15 nt, Human herpesvirus 7
ggcuaaucucuuuuc

SEQ ID NO: 183734 - RNA, 21 nt, Human herpesvirus 7
ggcuaacugagaaaaaugaca

SEQ ID NO: 183735 - RNA, 22 nt, Human herpesvirus 7
ggggauguucuauucucauaga

SEQ ID NO: 183736 - RNA, 12 nt, Human herpesvirus 7
ggcucauuucaa

SEQ ID NO: 183737 - RNA, 19 nt, Human herpesvirus 7
guaucuaccgcuguacaau

SEQ ID NO: 183738 - RNA, 13 nt, Human herpesvirus 7
guaucuccaaagu

SEQ ID NO: 183739 - RNA, 14 nt, Human herpesvirus 7
guaucugugacuua

SEQ ID NO: 183740 - RNA, 15 nt, Human herpesvirus 7
guaugacaacacaag

SEQ ID NO: 183741 - RNA, 22 nt, Human herpesvirus 7
guauguccaaucaaaaacugaa

SEQ ID NO: 183742 - RNA, 23 nt, Human herpesvirus 7
guauucuuaugccagguuuuuca

SEQ ID NO: 183743 - RNA, 23 nt, Human herpesvirus 7
gucacauaauguuguuuggucua

SEQ ID NO: 183744 - RNA, 19 nt, Human herpesvirus 7
gucacuguccaaaacaauc

SEQ ID NO: 183745 - RNA, 13 nt, Human herpesvirus 7
gucacguucuaaa

SEQ ID NO: 183746 - RNA, 17 nt, Human herpesvirus 7
guagaugcaugcuaaua

SEQ ID NO: 183747 - RNA, 15 nt, Human herpesvirus 7
guagauauuuugaca

SEQ ID NO: 183748 - RNA, 20 nt, Human herpesvirus 7
guagauauuuugacaaucuu

SEQ ID NO: 183749 - RNA, 14 nt, Human herpesvirus 7
guaaauauaaucaa

SEQ ID NO: 183750 - RNA, 21 nt, Human herpesvirus 7
guaacaacuagcaaacagugc

SEQ ID NO: 183751 - RNA, 20 nt, Human herpesvirus 7
guaacggauuuacauuucau

SEQ ID NO: 183752 - RNA, 22 nt, Human herpesvirus 7
guacaaccgccauucuuuucaa

SEQ ID NO: 183753 - RNA, 23 nt, Human herpesvirus 7
guacaaccgccauucuuuucaau

SEQ ID NO: 183754 - RNA, 20 nt, Human herpesvirus 7
guaauuuggcuucuauuaua

SEQ ID NO: 183755 - RNA, 22 nt, Human herpesvirus 7
guaauuuuuggcuaacugagaa

SEQ ID NO: 183756 - RNA, 19 nt, Human herpesvirus 7
guacauaacucuaucuccu

SEQ ID NO: 183757 - RNA, 17 nt, Human herpesvirus 7
aaaaacacguccaagaa

SEQ ID NO: 183758 - RNA, 20 nt, Human herpesvirus 7
aaaaacgcuaaccaucugcu

SEQ ID NO: 183759 - RNA, 21 nt, Human herpesvirus 7
aaaaaccaggaacagauucuc

SEQ ID NO: 183760 - RNA, 22 nt, Human herpesvirus 7
aaaaaccaggaacagauucucc

SEQ ID NO: 183761 - RNA, 15 nt, Human herpesvirus 7
aaaaacgguauguaa

SEQ ID NO: 183762 - RNA, 19 nt, Human herpesvirus 7
aaaaacgguguuguaauaa

SEQ ID NO: 183763 - RNA, 18 nt, Human herpesvirus 7
aaaaagauuuaacaugug

SEQ ID NO: 183764 - RNA, 22 nt, Human herpesvirus 7
aaaaacuuuuuauaauaauacu

SEQ ID NO: 183765 - RNA, 13 nt, Human herpesvirus 7
aaaaagaauguau

SEQ ID NO: 183766 - RNA, 20 nt, Human herpesvirus 7
aaaaagaauuuggauuuugu

SEQ ID NO: 183767 - RNA, 16 nt, Human herpesvirus 7
aaaaaggccuuguaaa

SEQ ID NO: 183768 - RNA, 15 nt, Human herpesvirus 7
aaaaagguacuaucu

SEQ ID NO: 183769 - RNA, 17 nt, Human herpesvirus 7
aaaaacccuuuauucau

SEQ ID NO: 183770 - RNA, 18 nt, Human herpesvirus 7
aaaaacgcuaaccaucug

SEQ ID NO: 183771 - RNA, 20 nt, Human herpesvirus 7
aaaaacaaaaucuacuuuuc

SEQ ID NO: 183772 - RNA, 12 nt, Human herpesvirus 7
aaaaacaaugaa

SEQ ID NO: 183773 - RNA, 13 nt, Human herpesvirus 7
aaaaacaaugaaa

SEQ ID NO: 183774 - RNA, 15 nt, Human herpesvirus 7
aaaaacaugagugaa

SEQ ID NO: 183775 - RNA, 17 nt, Human herpesvirus 7
aaaaacaaagacuauaa

SEQ ID NO: 183776 - RNA, 13 nt, Human herpesvirus 7
aaaaaagaacuua

SEQ ID NO: 183777 - RNA, 16 nt, Human herpesvirus 7
aaaaaaauuaguucua

SEQ ID NO: 183778 - RNA, 13 nt, Human herpesvirus 7
aaaaaaccacaaa

SEQ ID NO: 183779 - RNA, 14 nt, Human herpesvirus 7
aaacauuauauucc

SEQ ID NO: 183780 - RNA, 22 nt, Human herpesvirus 7
aaacauuaucgcguuuucaugc

SEQ ID NO: 183781 - RNA, 14 nt, Human herpesvirus 7
aaacauuccaacag

SEQ ID NO: 183782 - RNA, 16 nt, Human herpesvirus 7
aaacauugaaaaagca

SEQ ID NO: 183783 - RNA, 21 nt, Human herpesvirus 7
aaacauuagcauugaaaucau

SEQ ID NO: 183784 - RNA, 13 nt, Human herpesvirus 7
aaacaugauuuau

SEQ ID NO: 183785 - RNA, 16 nt, Human herpesvirus 7
aaacaugcaacauaau

SEQ ID NO: 183786 - RNA, 19 nt, Human herpesvirus 7
aaacaugcaacauaaucca

SEQ ID NO: 183787 - RNA, 11 nt, Human herpesvirus 7
aaacauuucag

SEQ ID NO: 183788 - RNA, 12 nt, Human herpesvirus 7
aaacauuuacaa

SEQ ID NO: 183789 - RNA, 21 nt, Human herpesvirus 7
aaacauuuacaaaaaaaagcu

SEQ ID NO: 183790 - RNA, 14 nt, Human herpesvirus 7
aaacauuuugacga

SEQ ID NO: 183791 - RNA, 20 nt, Human herpesvirus 7
aaacauuuuugaagcuuaaa

SEQ ID NO: 183792 - RNA, 22 nt, Human herpesvirus 7
aaacaucaauuuuaaugugcuu

SEQ ID NO: 183793 - RNA, 15 nt, Human herpesvirus 7
aaacaucuaugugcu

SEQ ID NO: 183794 - RNA, 16 nt, Human herpesvirus 7
aaacaucuaugugcuc

SEQ ID NO: 183795 - RNA, 22 nt, Human herpesvirus 7
aaacaguuaaugugugugguaa

SEQ ID NO: 183796 - RNA, 15 nt, Human herpesvirus 7
aaacagcgugucaaa

SEQ ID NO: 183797 - RNA, 18 nt, Human herpesvirus 7
aaacagcguucaaucaaa

SEQ ID NO: 183798 - RNA, 18 nt, Human herpesvirus 7
aaacaggcauuuaagaau

SEQ ID NO: 183799 - RNA, 16 nt, Human herpesvirus 7
aaacccagagcuaaaa

SEQ ID NO: 183800 - RNA, 14 nt, Human herpesvirus 7
aaaccaugauguua

SEQ ID NO: 183801 - RNA, 21 nt, Human herpesvirus 7
aaaccaugauguuaaagaaca

SEQ ID NO: 183802 - RNA, 23 nt, Human herpesvirus 7
aaaccaugauguuaaagaacaag

SEQ ID NO: 183803 - RNA, 13 nt, Human herpesvirus 7
aaacacaguauau

SEQ ID NO: 183804 - RNA, 15 nt, Human herpesvirus 7
aaacacaguauauaa

SEQ ID NO: 183805 - RNA, 17 nt, Human herpesvirus 7
aaacaaucuggacauuu

SEQ ID NO: 183806 - RNA, 19 nt, Human herpesvirus 7
aaacaaucuggacauuuca

SEQ ID NO: 183807 - RNA, 20 nt, Human herpesvirus 7
aaacaaucuggacauuucaa

SEQ ID NO: 183808 - RNA, 13 nt, Human herpesvirus 7
aaacaagguuuaa

SEQ ID NO: 183809 - RNA, 13 nt, Human herpesvirus 7
aaacaagcuuaaa

SEQ ID NO: 183810 - RNA, 14 nt, Human herpesvirus 7
aaacacguccaaga

SEQ ID NO: 183811 - RNA, 21 nt, Human herpesvirus 7
aaacacguccaagaaauaugc

SEQ ID NO: 183812 - RNA, 22 nt, Human herpesvirus 7
aaacacguccaagaaauaugcu

SEQ ID NO: 183813 - RNA, 19 nt, Human herpesvirus 7
aaacacuacaccaauaguu

SEQ ID NO: 183814 - RNA, 17 nt, Human herpesvirus 7
aaacagaagcugacuuu

SEQ ID NO: 183815 - RNA, 20 nt, Human herpesvirus 7
aaaauuuuuagcucuaaaca

SEQ ID NO: 183816 - RNA, 21 nt, Human herpesvirus 7
aaaauuuuacgaugacagucu

SEQ ID NO: 183817 - RNA, 17 nt, Human herpesvirus 7
aaaauuuuggauugugu

SEQ ID NO: 183818 - RNA, 13 nt, Human herpesvirus 7
aaaauuuggagaa

SEQ ID NO: 183819 - RNA, 16 nt, Human herpesvirus 7
aaaauuuuuuacuguc

SEQ ID NO: 183820 - RNA, 11 nt, Human herpesvirus 7
aaacaaaauac

SEQ ID NO: 183821 - RNA, 17 nt, Human herpesvirus 7
aaacaaaauguauucaa

SEQ ID NO: 183822 - RNA, 18 nt, Human herpesvirus 7
aaacaaaauguauucaau

SEQ ID NO: 183823 - RNA, 14 nt, Human herpesvirus 7
aaacaaaauuccaa

SEQ ID NO: 183824 - RNA, 19 nt, Human herpesvirus 7
aaacaaacuauguccaaaa

SEQ ID NO: 183825 - RNA, 16 nt, Human herpesvirus 7
aaacaacauacauauu

SEQ ID NO: 183826 - RNA, 24 nt, Human herpesvirus 7
aaacaagaaagucagaacauuguc

SEQ ID NO: 183827 - RNA, 13 nt, Human herpesvirus 7
aaacaagauucua

SEQ ID NO: 183828 - RNA, 23 nt, Human herpesvirus 7
aaaauuucauaucuaugaugcau

SEQ ID NO: 183829 - RNA, 23 nt, Human herpesvirus 7
aaaauuuccuacaaaaguucugu

SEQ ID NO: 183830 - RNA, 14 nt, Human herpesvirus 7
aaaauuuaccuuua

SEQ ID NO: 183831 - RNA, 21 nt, Human herpesvirus 7
aaaauuuagcaccaacugaau

SEQ ID NO: 183832 - RNA, 14 nt, Human herpesvirus 7
aaaauuaguucuaa

SEQ ID NO: 183833 - RNA, 13 nt, Human herpesvirus 7
aaaauuaauucaa

SEQ ID NO: 183834 - RNA, 16 nt, Human herpesvirus 7
aaaauuaauaauauua

SEQ ID NO: 183835 - RNA, 22 nt, Human herpesvirus 7
aaaauucaacgucuuacuugga

SEQ ID NO: 183836 - RNA, 14 nt, Human herpesvirus 7
aaaauucaguauuu

SEQ ID NO: 183837 - RNA, 17 nt, Human herpesvirus 7
aaaauuauuuacccaca

SEQ ID NO: 183838 - RNA, 14 nt, Human herpesvirus 7
aaaaguacagugua

SEQ ID NO: 183839 - RNA, 19 nt, Human herpesvirus 7
aaaauaaaaacaagcuuaa

SEQ ID NO: 183840 - RNA, 17 nt, Human herpesvirus 7
aaaaguuaaaagaucuu

SEQ ID NO: 183841 - RNA, 17 nt, Human herpesvirus 7
aaaaguucauaaugaca

SEQ ID NO: 183842 - RNA, 14 nt, Human herpesvirus 7
aaaauaaacauguu

SEQ ID NO: 183843 - RNA, 12 nt, Human herpesvirus 7
aaaaguugcagc

SEQ ID NO: 183844 - RNA, 14 nt, Human herpesvirus 7
aaaauaacuuuaaa

SEQ ID NO: 183845 - RNA, 15 nt, Human herpesvirus 7
aaaauaaagacauga

SEQ ID NO: 183846 - RNA, 21 nt, Human herpesvirus 7
aaaauaaagccagguauucaa

SEQ ID NO: 183847 - RNA, 14 nt, Human herpesvirus 7
aaaauacauugaau

SEQ ID NO: 183848 - RNA, 13 nt, Human herpesvirus 7
aaaauagcacaca

SEQ ID NO: 183849 - RNA, 15 nt, Human herpesvirus 7
aaaauacuacaguua

SEQ ID NO: 183850 - RNA, 23 nt, Human herpesvirus 7
aaaauuaaauaaccaaaccacag

SEQ ID NO: 183851 - RNA, 19 nt, Human herpesvirus 7
aaaauguuaaaggaucaaa

SEQ ID NO: 183852 - RNA, 12 nt, Human herpesvirus 7
aaaauguuuaaa

SEQ ID NO: 183853 - RNA, 20 nt, Human herpesvirus 7
aaaauguuuaaauuacagua

SEQ ID NO: 183854 - RNA, 18 nt, Human herpesvirus 7
aaaauguuuugauuucac

SEQ ID NO: 183855 - RNA, 17 nt, Human herpesvirus 7
aaaaugucucuugaaga

SEQ ID NO: 183856 - RNA, 13 nt, Human herpesvirus 7
aaaauguauacaa

SEQ ID NO: 183857 - RNA, 18 nt, Human herpesvirus 7
aaaaugucagaguuuaaa

SEQ ID NO: 183858 - RNA, 15 nt, Human herpesvirus 7
aaaagcuauguauaa

SEQ ID NO: 183859 - RNA, 12 nt, Human herpesvirus 7
aaaagcuuugau

SEQ ID NO: 183860 - RNA, 13 nt, Human herpesvirus 7
aaaagcuuugauc

SEQ ID NO: 183861 - RNA, 18 nt, Human herpesvirus 7
aaaagcuuugaucuacau

SEQ ID NO: 183862 - RNA, 19 nt, Human herpesvirus 7
aaaagcuuugaucuacaua

SEQ ID NO: 183863 - RNA, 14 nt, Human herpesvirus 7
aaaaggucaucuga

SEQ ID NO: 183864 - RNA, 14 nt, Human herpesvirus 7
aaaagggagaucaa

SEQ ID NO: 183865 - RNA, 14 nt, Human herpesvirus 7
aaaagucugugaca

SEQ ID NO: 183866 - RNA, 15 nt, Human herpesvirus 7
aaaagucugugacag

SEQ ID NO: 183867 - RNA, 16 nt, Human herpesvirus 7
aaaaguucauaaugac

SEQ ID NO: 183868 - RNA, 16 nt, Human herpesvirus 7
aaaaguuguuaagaau

SEQ ID NO: 183869 - RNA, 15 nt, Human herpesvirus 7
aaaauaaaaguaaaa

SEQ ID NO: 183870 - RNA, 19 nt, Human herpesvirus 7
aaaacgcuaaccaucugcu

SEQ ID NO: 183871 - RNA, 18 nt, Human herpesvirus 7
aaaaccauuugguuuuaa

SEQ ID NO: 183872 - RNA, 15 nt, Human herpesvirus 7
aaaacccuuuauuca

SEQ ID NO: 183873 - RNA, 22 nt, Human herpesvirus 7
aaaacccuuuauucauuugcuu

SEQ ID NO: 183874 - RNA, 21 nt, Human herpesvirus 7
aaaacugucacgcaagucaca

SEQ ID NO: 183875 - RNA, 22 nt, Human herpesvirus 7
aaaacugucacgcaagucacaa

SEQ ID NO: 183876 - RNA, 13 nt, Human herpesvirus 7
aaaacuuaauuuc

SEQ ID NO: 183877 - RNA, 18 nt, Human herpesvirus 7
aaaacuuauguacucuga

SEQ ID NO: 183878 - RNA, 18 nt, Human herpesvirus 7
aaaagccauaaaauguac

SEQ ID NO: 183879 - RNA, 16 nt, Human herpesvirus 7
aaaagcccaaacuguu

SEQ ID NO: 183880 - RNA, 21 nt, Human herpesvirus 7
aaaaauguuuacaaacauguu

SEQ ID NO: 183881 - RNA, 14 nt, Human herpesvirus 7
aaaaauuauaauaa

SEQ ID NO: 183882 - RNA, 12 nt, Human herpesvirus 7
aaaacaaauaac

SEQ ID NO: 183883 - RNA, 17 nt, Human herpesvirus 7
aaaaauguuaugugcuu

SEQ ID NO: 183884 - RNA, 16 nt, Human herpesvirus 7
aaaaauuugacauuug

SEQ ID NO: 183885 - RNA, 18 nt, Human herpesvirus 7
aaaaaucucguuuguaaa

SEQ ID NO: 183886 - RNA, 12 nt, Human herpesvirus 7
aaaaaucuugca

SEQ ID NO: 183887 - RNA, 13 nt, Human herpesvirus 7
aaaaaucuuuaca

SEQ ID NO: 183888 - RNA, 22 nt, Human herpesvirus 7
aaaaaucaguguaacucugcca

SEQ ID NO: 183889 - RNA, 22 nt, Human herpesvirus 7
aacaaggacgaaucuacauuaa

SEQ ID NO: 183890 - RNA, 19 nt, Human herpesvirus 7
aacaagcuuaaauguguaa

SEQ ID NO: 183891 - RNA, 21 nt, Human herpesvirus 7
aacaagcuuaaauguguaaca

SEQ ID NO: 183892 - RNA, 19 nt, Human herpesvirus 7
aacaaguagaaaaugcugu

SEQ ID NO: 183893 - RNA, 17 nt, Human herpesvirus 7
aacaauaaaagauuuaa

SEQ ID NO: 183894 - RNA, 19 nt, Human herpesvirus 7
aacaaguaugucagccgcu

SEQ ID NO: 183895 - RNA, 20 nt, Human herpesvirus 7
aacaaguaugucagccgcuu

SEQ ID NO: 183896 - RNA, 18 nt, Human herpesvirus 7
aacaaucuggacauuuca

SEQ ID NO: 183897 - RNA, 12 nt, Human herpesvirus 7
aacaaucuuaca

SEQ ID NO: 183898 - RNA, 18 nt, Human herpesvirus 7
aacaaucuuacaaaaagu

SEQ ID NO: 183899 - RNA, 15 nt, Human herpesvirus 7
aacaaucgauugcag

SEQ ID NO: 183900 - RNA, 18 nt, Human herpesvirus 7
aacaaugagcaauucaug

SEQ ID NO: 183901 - RNA, 19 nt, Human herpesvirus 7
aacaauuucacagacgcau

SEQ ID NO: 183902 - RNA, 14 nt, Human herpesvirus 7
aacaauuuccuuua

SEQ ID NO: 183903 - RNA, 15 nt, Human herpesvirus 7
aacaauugaguucag

SEQ ID NO: 183904 - RNA, 17 nt, Human herpesvirus 7
aacacaaagccaaugag

SEQ ID NO: 183905 - RNA, 19 nt, Human herpesvirus 7
aacaccagucucugaauua

SEQ ID NO: 183906 - RNA, 14 nt, Human herpesvirus 7
aacacauaaugugu

SEQ ID NO: 183907 - RNA, 18 nt, Human herpesvirus 7
aacacucaaaacagaacu

SEQ ID NO: 183908 - RNA, 20 nt, Human herpesvirus 7
aacacucaaaacagaacuuu

SEQ ID NO: 183909 - RNA, 15 nt, Human herpesvirus 7
aacacguccaagaaa

SEQ ID NO: 183910 - RNA, 15 nt, Human herpesvirus 7
aacaagaaagucaga

SEQ ID NO: 183911 - RNA, 14 nt, Human herpesvirus 7
aacaagaagcgaga

SEQ ID NO: 183912 - RNA, 23 nt, Human herpesvirus 7
aacaacuaaagagaaugucgaau

SEQ ID NO: 183913 - RNA, 14 nt, Human herpesvirus 7
aacaacagccaaau

SEQ ID NO: 183914 - RNA, 17 nt, Human herpesvirus 7
aaauuaaauaaccaaac

SEQ ID NO: 183915 - RNA, 14 nt, Human herpesvirus 7
aaauuaaauacaaa

SEQ ID NO: 183916 - RNA, 13 nt, Human herpesvirus 7
aaauuaaauacuu

SEQ ID NO: 183917 - RNA, 23 nt, Human herpesvirus 7
aaauuaaauacuugcaaugcaaa

SEQ ID NO: 183918 - RNA, 17 nt, Human herpesvirus 7
aaauguuuugauuucac

SEQ ID NO: 183919 - RNA, 22 nt, Human herpesvirus 7
aaauguuuugauuucacccuuu

SEQ ID NO: 183920 - RNA, 15 nt, Human herpesvirus 7
aaauuaaacaaucug

SEQ ID NO: 183921 - RNA, 13 nt, Human herpesvirus 7
aaauuaaucaaac

SEQ ID NO: 183922 - RNA, 22 nt, Human herpesvirus 7
aaauuaaucaaacaauugcccu

SEQ ID NO: 183923 - RNA, 23 nt, Human herpesvirus 7
aaauuaauguuuuuccuaugaua

SEQ ID NO: 183924 - RNA, 12 nt, Human herpesvirus 7
aaauuacaguac

SEQ ID NO: 183925 - RNA, 22 nt, Human herpesvirus 7
aaaucuauuuuauccguuaaug

SEQ ID NO: 183926 - RNA, 16 nt, Human herpesvirus 7
aaaucuacuguaaucu

SEQ ID NO: 183927 - RNA, 16 nt, Human herpesvirus 7
aaaucuaucaccaaga

SEQ ID NO: 183928 - RNA, 22 nt, Human herpesvirus 7
aaaucuaucaccaagaacaaua

SEQ ID NO: 183929 - RNA, 14 nt, Human herpesvirus 7
aaauccaaaaucag

SEQ ID NO: 183930 - RNA, 21 nt, Human herpesvirus 7
aaauccuggauuucagcauuu

SEQ ID NO: 183931 - RNA, 22 nt, Human herpesvirus 7
aaaugucuuugucaugaugaau

SEQ ID NO: 183932 - RNA, 21 nt, Human herpesvirus 7
aaaugucuuuugauaagacug

SEQ ID NO: 183933 - RNA, 21 nt, Human herpesvirus 7
aaaugucagaguuuaaaguaa

SEQ ID NO: 183934 - RNA, 20 nt, Human herpesvirus 7
aaaugugcgccgaagaggga

SEQ ID NO: 183935 - RNA, 14 nt, Human herpesvirus 7
aaauguguaacaau

SEQ ID NO: 183936 - RNA, 21 nt, Human herpesvirus 7
aaauguuaugugcuuauaucu

SEQ ID NO: 183937 - RNA, 14 nt, Human herpesvirus 7
aaauguuccuuaua

SEQ ID NO: 183938 - RNA, 23 nt, Human herpesvirus 7
aaauguuuacaaacauguuccau

SEQ ID NO: 183939 - RNA, 17 nt, Human herpesvirus 7
aaaugggaauguuaacc

SEQ ID NO: 183940 - RNA, 18 nt, Human herpesvirus 7
aaaugggcguaacuguga

SEQ ID NO: 183941 - RNA, 15 nt, Human herpesvirus 7
aaauguaacuuucau

SEQ ID NO: 183942 - RNA, 19 nt, Human herpesvirus 7
aaauguacaauuccugaaa

SEQ ID NO: 183943 - RNA, 15 nt, Human herpesvirus 7
aaaugguuacacuga

SEQ ID NO: 183944 - RNA, 14 nt, Human herpesvirus 7
aaaugguugugcaa

SEQ ID NO: 183945 - RNA, 18 nt, Human herpesvirus 7
aaaugguugugcaauuug

SEQ ID NO: 183946 - RNA, 16 nt, Human herpesvirus 7
aaaccuucgugugucu

SEQ ID NO: 183947 - RNA, 18 nt, Human herpesvirus 7
aaaccuucgugugucucu

SEQ ID NO: 183948 - RNA, 22 nt, Human herpesvirus 7
aaaccuauccacucuccugaaa

SEQ ID NO: 183949 - RNA, 15 nt, Human herpesvirus 7
aaaccuuacaacaaa

SEQ ID NO: 183950 - RNA, 18 nt, Human herpesvirus 7
aaacgaaaggaaucuuaa

SEQ ID NO: 183951 - RNA, 14 nt, Human herpesvirus 7
aaacuaacuuaucu

SEQ ID NO: 183952 - RNA, 22 nt, Human herpesvirus 7
aaacuaccgaagguauuuugau

SEQ ID NO: 183953 - RNA, 13 nt, Human herpesvirus 7
aaacuacauuuaa

SEQ ID NO: 183954 - RNA, 21 nt, Human herpesvirus 7
aaacguuaccguuuaaugaaa

SEQ ID NO: 183955 - RNA, 14 nt, Human herpesvirus 7
aaaguaaagggaaa

SEQ ID NO: 183956 - RNA, 13 nt, Human herpesvirus 7
aaagguaggauug

SEQ ID NO: 183957 - RNA, 18 nt, Human herpesvirus 7
aaacuauguccaaaaauu

SEQ ID NO: 183958 - RNA, 21 nt, Human herpesvirus 7
aaacuauguccaaaaauuuag

SEQ ID NO: 183959 - RNA, 19 nt, Human herpesvirus 7
aaacucguggauuuucuac

SEQ ID NO: 183960 - RNA, 20 nt, Human herpesvirus 7
aaagggcagacacuacuuaa

SEQ ID NO: 183961 - RNA, 19 nt, Human herpesvirus 7
aaacucgaaacuggcaaua

SEQ ID NO: 183962 - RNA, 20 nt, Human herpesvirus 7
aaagugcauaaauaauaaca

SEQ ID NO: 183963 - RNA, 13 nt, Human herpesvirus 7
aaaguggagacaa

SEQ ID NO: 183964 - RNA, 22 nt, Human herpesvirus 7
aaaguucuguuuugaguguuaa

SEQ ID NO: 183965 - RNA, 16 nt, Human herpesvirus 7
aaaguucauaaugaca

SEQ ID NO: 183966 - RNA, 12 nt, Human herpesvirus 7
aaagugugaucu

SEQ ID NO: 183967 - RNA, 14 nt, Human herpesvirus 7
aaaguugggaugac

SEQ ID NO: 183968 - RNA, 21 nt, Human herpesvirus 7
aaaguuuaauucucgcuucaa

SEQ ID NO: 183969 - RNA, 22 nt, Human herpesvirus 7
aaaguuuaauucucgcuucaaa

SEQ ID NO: 183970 - RNA, 23 nt, Human herpesvirus 7
aaaguuuaauucucgcuucaaag

SEQ ID NO: 183971 - RNA, 23 nt, Human herpesvirus 7
aaaguuuauagaacaaguagaaa

SEQ ID NO: 183972 - RNA, 14 nt, Human herpesvirus 7
aaauaaaaacaugg

SEQ ID NO: 183973 - RNA, 15 nt, Human herpesvirus 7
aaaguagccuucauu

SEQ ID NO: 183974 - RNA, 12 nt, Human herpesvirus 7
aaaguagguaaa

SEQ ID NO: 183975 - RNA, 17 nt, Human herpesvirus 7
aaagucagaacauuguc

SEQ ID NO: 183976 - RNA, 14 nt, Human herpesvirus 7
aaauauucgaucca

SEQ ID NO: 183977 - RNA, 21 nt, Human herpesvirus 7
aaauauuuagagucgucuugc

SEQ ID NO: 183978 - RNA, 20 nt, Human herpesvirus 7
aaauauuuaucugcauugau

SEQ ID NO: 183979 - RNA, 17 nt, Human herpesvirus 7
aaauauuuaugccuuug

SEQ ID NO: 183980 - RNA, 14 nt, Human herpesvirus 7
aaaucaacuugcag

SEQ ID NO: 183981 - RNA, 23 nt, Human herpesvirus 7
aaaucaaaaauaccggaccauuu

SEQ ID NO: 183982 - RNA, 15 nt, Human herpesvirus 7
aaaucaaaaaugugc

SEQ ID NO: 183983 - RNA, 13 nt, Human herpesvirus 7
aaaucaccuuccu

SEQ ID NO: 183984 - RNA, 21 nt, Human herpesvirus 7
aaaucacagcauuauuguaua

SEQ ID NO: 183985 - RNA, 19 nt, Human herpesvirus 7
aaaucauaccauaaauacc

SEQ ID NO: 183986 - RNA, 21 nt, Human herpesvirus 7
aaaucauaccauaaauaccaa

SEQ ID NO: 183987 - RNA, 21 nt, Human herpesvirus 7
aaauaauagcggcuaacagug

SEQ ID NO: 183988 - RNA, 23 nt, Human herpesvirus 7
aaauauguucagauugaaauucc

SEQ ID NO: 183989 - RNA, 21 nt, Human herpesvirus 7
aaauaacaaaauuguaaguaa

SEQ ID NO: 183990 - RNA, 13 nt, Human herpesvirus 7
aaauaaauacuau

SEQ ID NO: 183991 - RNA, 12 nt, Human herpesvirus 7
aaauaaauucaa

SEQ ID NO: 183992 - RNA, 20 nt, Human herpesvirus 7
aaauaaaaugguugugcaau

SEQ ID NO: 183993 - RNA, 15 nt, Human herpesvirus 7
aaauaaaggaucucu

SEQ ID NO: 183994 - RNA, 13 nt, Human herpesvirus 7
aaauaaacauguu

SEQ ID NO: 183995 - RNA, 19 nt, Human herpesvirus 7
aagagaaaauaaacauguu

SEQ ID NO: 183996 - RNA, 21 nt, Human herpesvirus 7
aagacucuuugugacucggaa

SEQ ID NO: 183997 - RNA, 15 nt, Human herpesvirus 7
aagacugaagacaaa

SEQ ID NO: 183998 - RNA, 21 nt, Human herpesvirus 7
aagacaucgaagaaauucgaa

SEQ ID NO: 183999 - RNA, 21 nt, Human herpesvirus 7
aagaccuguacuguugcuaau

SEQ ID NO: 184000 - RNA, 22 nt, Human herpesvirus 7
aagacggaacuucuuucuucaa

SEQ ID NO: 184001 - RNA, 14 nt, Human herpesvirus 7
aagacgugagcaau

SEQ ID NO: 184002 - RNA, 23 nt, Human herpesvirus 7
aagaggaguauguugcauaucau

SEQ ID NO: 184003 - RNA, 15 nt, Human herpesvirus 7
aagagcauucaugcc

SEQ ID NO: 184004 - RNA, 19 nt, Human herpesvirus 7
aagagccaaauauggagac

SEQ ID NO: 184005 - RNA, 15 nt, Human herpesvirus 7
aagagggacuuuuau

SEQ ID NO: 184006 - RNA, 20 nt, Human herpesvirus 7
aagagggacuuuuauaauac

SEQ ID NO: 184007 - RNA, 23 nt, Human herpesvirus 7
aagaguugcaacuagagaagcca

SEQ ID NO: 184008 - RNA, 19 nt, Human herpesvirus 7
aagagucuauugacauaau

SEQ ID NO: 184009 - RNA, 23 nt, Human herpesvirus 7
aagauacauuuuugcaauaugcu

SEQ ID NO: 184010 - RNA, 16 nt, Human herpesvirus 7
aagauaagcucaaaaa

SEQ ID NO: 184011 - RNA, 17 nt, Human herpesvirus 7
aagauauacauaauuca

SEQ ID NO: 184012 - RNA, 21 nt, Human herpesvirus 7
aagaaaaguugcuuuucaugc

SEQ ID NO: 184013 - RNA, 14 nt, Human herpesvirus 7
aagaaaaaucauuu

SEQ ID NO: 184014 - RNA, 16 nt, Human herpesvirus 7
aagaaaaaaaguacaa

SEQ ID NO: 184015 - RNA, 12 nt, Human herpesvirus 7
aagaaacuugaa

SEQ ID NO: 184016 - RNA, 14 nt, Human herpesvirus 7
aagaaaguccaaag

SEQ ID NO: 184017 - RNA, 15 nt, Human herpesvirus 7
aagaaaguccaaagu

SEQ ID NO: 184018 - RNA, 20 nt, Human herpesvirus 7
aagaaaguuguacucagaga

SEQ ID NO: 184019 - RNA, 17 nt, Human herpesvirus 7
aagaaauaugcuuccua

SEQ ID NO: 184020 - RNA, 18 nt, Human herpesvirus 7
aagaacauuuuucuugcu

SEQ ID NO: 184021 - RNA, 21 nt, Human herpesvirus 7
aacugauauuaaaucauacca

SEQ ID NO: 184022 - RNA, 14 nt, Human herpesvirus 7
aacugcaaauccaa

SEQ ID NO: 184023 - RNA, 15 nt, Human herpesvirus 7
aacugcaaauccaac

SEQ ID NO: 184024 - RNA, 22 nt, Human herpesvirus 7
aacugcaaauccaacagaauac

SEQ ID NO: 184025 - RNA, 16 nt, Human herpesvirus 7
aacuuugccaaugcca

SEQ ID NO: 184026 - RNA, 17 nt, Human herpesvirus 7
aacuuugccaaugccaa

SEQ ID NO: 184027 - RNA, 18 nt, Human herpesvirus 7
aacuguuuguaaggccaa

SEQ ID NO: 184028 - RNA, 14 nt, Human herpesvirus 7
aacuguugccagaa

SEQ ID NO: 184029 - RNA, 22 nt, Human herpesvirus 7
aacugugcaugaaaucuugaau

SEQ ID NO: 184030 - RNA, 22 nt, Human herpesvirus 7
aacugguaucaugaaccauguu

SEQ ID NO: 184031 - RNA, 15 nt, Human herpesvirus 7
aacgcugacagucau

SEQ ID NO: 184032 - RNA, 21 nt, Human herpesvirus 7
aacgcuaaccaucugcuggaa

SEQ ID NO: 184033 - RNA, 17 nt, Human herpesvirus 7
aacgcuaaagagcauuc

SEQ ID NO: 184034 - RNA, 17 nt, Human herpesvirus 7
aacgauccuaaauacgg

SEQ ID NO: 184035 - RNA, 22 nt, Human herpesvirus 7
aacgauaugguuugaaaaccau

SEQ ID NO: 184036 - RNA, 18 nt, Human herpesvirus 7
aacgacaaacuuugcaac

SEQ ID NO: 184037 - RNA, 19 nt, Human herpesvirus 7
aacgaacacuuucuaauaa

SEQ ID NO: 184038 - RNA, 14 nt, Human herpesvirus 7
aaccguuugcagcc

SEQ ID NO: 184039 - RNA, 14 nt, Human herpesvirus 7
aacgagaaaacuua

SEQ ID NO: 184040 - RNA, 16 nt, Human herpesvirus 7
aacgacuccaacugac

SEQ ID NO: 184041 - RNA, 17 nt, Human herpesvirus 7
aacgaacucuuguucau

SEQ ID NO: 184042 - RNA, 12 nt, Human herpesvirus 7
aacucuuccuuu

SEQ ID NO: 184043 - RNA, 15 nt, Human herpesvirus 7
aacucuaucuccuau

SEQ ID NO: 184044 - RNA, 13 nt, Human herpesvirus 7
aacucugucauca

SEQ ID NO: 184045 - RNA, 13 nt, Human herpesvirus 7
aacucgaaacugg

SEQ ID NO: 184046 - RNA, 24 nt, Human herpesvirus 7
aacauaaaaaauuuuuagcucuaa

SEQ ID NO: 184047 - RNA, 20 nt, Human herpesvirus 7
aacauacgugcuuagacuua

SEQ ID NO: 184048 - RNA, 23 nt, Human herpesvirus 7
aacauacgugcuuagacuuauca

SEQ ID NO: 184049 - RNA, 13 nt, Human herpesvirus 7
aacauacugaugu

SEQ ID NO: 184050 - RNA, 13 nt, Human herpesvirus 7
aacaguucaagaa

SEQ ID NO: 184051 - RNA, 22 nt, Human herpesvirus 7
aacaguucaagaaauaaugaag

SEQ ID NO: 184052 - RNA, 16 nt, Human herpesvirus 7
aacaguuuuauuccca

SEQ ID NO: 184053 - RNA, 18 nt, Human herpesvirus 7
aacagugggaaugcaucu

SEQ ID NO: 184054 - RNA, 13 nt, Human herpesvirus 7
aacaguuucugca

SEQ ID NO: 184055 - RNA, 22 nt, Human herpesvirus 7
aacacucuuuauuuaagcuuca

SEQ ID NO: 184056 - RNA, 15 nt, Human herpesvirus 7
aacauauguugauuc

SEQ ID NO: 184057 - RNA, 15 nt, Human herpesvirus 7
aaccgcaaaagccac

SEQ ID NO: 184058 - RNA, 20 nt, Human herpesvirus 7
aaccggacccggacuuugau

SEQ ID NO: 184059 - RNA, 19 nt, Human herpesvirus 7
aaccgagaauguucuauca

SEQ ID NO: 184060 - RNA, 16 nt, Human herpesvirus 7
aagcaaaagccacaga

SEQ ID NO: 184061 - RNA, 17 nt, Human herpesvirus 7
aagcaaaagccacagau

SEQ ID NO: 184062 - RNA, 15 nt, Human herpesvirus 7
aagauuucuauugaa

SEQ ID NO: 184063 - RNA, 16 nt, Human herpesvirus 7
aagauuucuauugaau

SEQ ID NO: 184064 - RNA, 15 nt, Human herpesvirus 7
aagauuuaacaugug

SEQ ID NO: 184065 - RNA, 16 nt, Human herpesvirus 7
aagauuuaacaugugu

SEQ ID NO: 184066 - RNA, 16 nt, Human herpesvirus 7
aagauuccugaugaua

SEQ ID NO: 184067 - RNA, 20 nt, Human herpesvirus 7
aagauugaagcacacacguu

SEQ ID NO: 184068 - RNA, 19 nt, Human herpesvirus 7
aagauugaucacuuugcau

SEQ ID NO: 184069 - RNA, 22 nt, Human herpesvirus 7
aagauugaucacuuugcaucaa

SEQ ID NO: 184070 - RNA, 23 nt, Human herpesvirus 7
aagauugaucacuuugcaucaaa

SEQ ID NO: 184071 - RNA, 20 nt, Human herpesvirus 7
aagaugucuaaaaguacagu

SEQ ID NO: 184072 - RNA, 18 nt, Human herpesvirus 7
aagaugacucaugagaca

SEQ ID NO: 184073 - RNA, 21 nt, Human herpesvirus 7
aagaucguuguuaaauccaau

SEQ ID NO: 184074 - RNA, 21 nt, Human herpesvirus 7
aagguauuuugauaauuuaca

SEQ ID NO: 184075 - RNA, 12 nt, Human herpesvirus 7
aagguacaucuu

SEQ ID NO: 184076 - RNA, 14 nt, Human herpesvirus 7
aagguacauuuugc

SEQ ID NO: 184077 - RNA, 13 nt, Human herpesvirus 7
aagcaauguaugu

SEQ ID NO: 184078 - RNA, 17 nt, Human herpesvirus 7
aagcaauguaugucaaa

SEQ ID NO: 184079 - RNA, 21 nt, Human herpesvirus 7
aauaaaaauuuggcgccaaaa

SEQ ID NO: 184080 - RNA, 20 nt, Human herpesvirus 7
aaguauguuuacgcugcuuu

SEQ ID NO: 184081 - RNA, 18 nt, Human herpesvirus 7
aaguagugucugcccuuu

SEQ ID NO: 184082 - RNA, 12 nt, Human herpesvirus 7
aauaaacuuacu

SEQ ID NO: 184083 - RNA, 16 nt, Human herpesvirus 7
aauaaacuuacucuuc

SEQ ID NO: 184084 - RNA, 14 nt, Human herpesvirus 7
aauaaagauuacau

SEQ ID NO: 184085 - RNA, 18 nt, Human herpesvirus 7
aauaaaaugguugugcaa

SEQ ID NO: 184086 - RNA, 21 nt, Human herpesvirus 7
aauaaaaugguugugcaauuu

SEQ ID NO: 184087 - RNA, 18 nt, Human herpesvirus 7
aauaaaaugaugaugaca

SEQ ID NO: 184088 - RNA, 13 nt, Human herpesvirus 7
aauaaacaaugug

SEQ ID NO: 184089 - RNA, 13 nt, Human herpesvirus 7
aagucacaauuac

SEQ ID NO: 184090 - RNA, 17 nt, Human herpesvirus 7
aauaaaaguaucauuaa

SEQ ID NO: 184091 - RNA, 21 nt, Human herpesvirus 7
aaggucuuucaugcauugcau

SEQ ID NO: 184092 - RNA, 19 nt, Human herpesvirus 7
aaggugguuacauauccaa

SEQ ID NO: 184093 - RNA, 20 nt, Human herpesvirus 7
aaggugguuacauauccaau

SEQ ID NO: 184094 - RNA, 16 nt, Human herpesvirus 7
aaguaaaagcuaguug

SEQ ID NO: 184095 - RNA, 14 nt, Human herpesvirus 7
aaguaaauaaucca

SEQ ID NO: 184096 - RNA, 15 nt, Human herpesvirus 7
aaguaaauaauccau

SEQ ID NO: 184097 - RNA, 19 nt, Human herpesvirus 7
aagguuuaaaacauuuaca

SEQ ID NO: 184098 - RNA, 14 nt, Human herpesvirus 7
aagguuuagcagaa

SEQ ID NO: 184099 - RNA, 11 nt, Human herpesvirus 7
aaguaaggaag

SEQ ID NO: 184100 - RNA, 20 nt, Human herpesvirus 7
aaguaaguccaagucacgug

SEQ ID NO: 184101 - RNA, 19 nt, Human herpesvirus 7
aaguaaucaaggacaugau

SEQ ID NO: 184102 - RNA, 17 nt, Human herpesvirus 7
aaguaccauugcugauc

SEQ ID NO: 184103 - RNA, 17 nt, Human herpesvirus 7
aaguagaaaaugcuguu

SEQ ID NO: 184104 - RNA, 15 nt, Human herpesvirus 7
aaguagaacuugaaa

SEQ ID NO: 184105 - RNA, 20 nt, Human herpesvirus 7
aaucaucuuaaaaguacaaa

SEQ ID NO: 184106 - RNA, 17 nt, Human herpesvirus 7
aaucaugaaaacagugg

SEQ ID NO: 184107 - RNA, 13 nt, Human herpesvirus 7
aaucauaccauaa

SEQ ID NO: 184108 - RNA, 22 nt, Human herpesvirus 7
aaucauaucuugcuuagaugcu

SEQ ID NO: 184109 - RNA, 22 nt, Human herpesvirus 7
aaucauaauuuucaugaacaca

SEQ ID NO: 184110 - RNA, 23 nt, Human herpesvirus 7
aaucacugcucaaaucaaccaga

SEQ ID NO: 184111 - RNA, 22 nt, Human herpesvirus 7
aaucagcauuuaccauuucgaa

SEQ ID NO: 184112 - RNA, 18 nt, Human herpesvirus 7
aaucauuuugcuguuuaa

SEQ ID NO: 184113 - RNA, 16 nt, Human herpesvirus 7
aaucaccgaugaauuu

SEQ ID NO: 184114 - RNA, 18 nt, Human herpesvirus 7
aaucacgagaaaaauauu

SEQ ID NO: 184115 - RNA, 19 nt, Human herpesvirus 7
aaucacccuuaucugucau

SEQ ID NO: 184116 - RNA, 14 nt, Human herpesvirus 7
aaucacaacauaua

SEQ ID NO: 184117 - RNA, 19 nt, Human herpesvirus 7
aaucacaguugcuugugaa

SEQ ID NO: 184118 - RNA, 22 nt, Human herpesvirus 7
aaucacaguugcuugugaagga

SEQ ID NO: 184119 - RNA, 16 nt, Human herpesvirus 7
aaucacauacucuauu

SEQ ID NO: 184120 - RNA, 21 nt, Human herpesvirus 7
aaucacaucagauacagagag

SEQ ID NO: 184121 - RNA, 13 nt, Human herpesvirus 7
aaucaccaaagag

SEQ ID NO: 184122 - RNA, 21 nt, Human herpesvirus 7
aaucaaauuauaccucagcuu

SEQ ID NO: 184123 - RNA, 23 nt, Human herpesvirus 7
aaucaaaaaauaauuccuucuag

SEQ ID NO: 184124 - RNA, 16 nt, Human herpesvirus 7
aauauugcuagucuca

SEQ ID NO: 184125 - RNA, 17 nt, Human herpesvirus 7
aauauugcuagucucaa

SEQ ID NO: 184126 - RNA, 17 nt, Human herpesvirus 7
aauauuuaaaguagcug

SEQ ID NO: 184127 - RNA, 19 nt, Human herpesvirus 7
aauauuuccaacgcauuca

SEQ ID NO: 184128 - RNA, 22 nt, Human herpesvirus 7
aaucaaaguuuuaaaguaugcu

SEQ ID NO: 184129 - RNA, 22 nt, Human herpesvirus 7
aaucaagccacgaugacuucca

SEQ ID NO: 184130 - RNA, 17 nt, Human herpesvirus 7
aauaacaggaaaccaca

SEQ ID NO: 184131 - RNA, 13 nt, Human herpesvirus 7
aauaaaucuguaa

SEQ ID NO: 184132 - RNA, 13 nt, Human herpesvirus 7
aauaaaucuucau

SEQ ID NO: 184133 - RNA, 19 nt, Human herpesvirus 7
aauaaaucaaccaacauuc

SEQ ID NO: 184134 - RNA, 21 nt, Human herpesvirus 7
aauaaaguuuuguaacuauaa

SEQ ID NO: 184135 - RNA, 19 nt, Human herpesvirus 7
aauaaagagucuauugaca

SEQ ID NO: 184136 - RNA, 20 nt, Human herpesvirus 7
aauaaguccgugugcaaaac

SEQ ID NO: 184137 - RNA, 13 nt, Human herpesvirus 7
aauaaucaaugca

SEQ ID NO: 184138 - RNA, 16 nt, Human herpesvirus 7
aauaaugcaucauaga

SEQ ID NO: 184139 - RNA, 15 nt, Human herpesvirus 7
aauaauuucuauuaa

SEQ ID NO: 184140 - RNA, 17 nt, Human herpesvirus 7
aauaucaguacaacgac

SEQ ID NO: 184141 - RNA, 16 nt, Human herpesvirus 7
aauaucauuuuugucu

SEQ ID NO: 184142 - RNA, 13 nt, Human herpesvirus 7
aauacaacauaua

SEQ ID NO: 184143 - RNA, 19 nt, Human herpesvirus 7
aauacaaccacaaccaaaa

SEQ ID NO: 184144 - RNA, 14 nt, Human herpesvirus 7
aauaucaauuugaa

SEQ ID NO: 184145 - RNA, 22 nt, Human herpesvirus 7
aauaauuuuuuuuugagugugc

SEQ ID NO: 184146 - RNA, 23 nt, Human herpesvirus 7
aauaauggcauuacuacagugga

SEQ ID NO: 184147 - RNA, 22 nt, Human herpesvirus 7
aauaugugaaaauaaacaggaa

SEQ ID NO: 184148 - RNA, 16 nt, Human herpesvirus 7
aauauguggcacauaa

SEQ ID NO: 184149 - RNA, 20 nt, Human herpesvirus 7
aauaucuuuuucaaauggau

SEQ ID NO: 184150 - RNA, 14 nt, Human herpesvirus 7
aauauggagcagcu

SEQ ID NO: 184151 - RNA, 16 nt, Human herpesvirus 7
aauaugcaugcaauuu

SEQ ID NO: 184152 - RNA, 21 nt, Human herpesvirus 7
aauuguuuuucuuucuugcau

SEQ ID NO: 184153 - RNA, 16 nt, Human herpesvirus 7
aauuuaaauacugaga

SEQ ID NO: 184154 - RNA, 18 nt, Human herpesvirus 7
aauuuaacgaauuuuucc

SEQ ID NO: 184155 - RNA, 17 nt, Human herpesvirus 7
aauuuacaaaacaaaga

SEQ ID NO: 184156 - RNA, 19 nt, Human herpesvirus 7
aauuuauauuaaaugauuu

SEQ ID NO: 184157 - RNA, 18 nt, Human herpesvirus 7
aauuuauauuugcuugcu

SEQ ID NO: 184158 - RNA, 21 nt, Human herpesvirus 7
aauuuauauuugcuugcugaa

SEQ ID NO: 184159 - RNA, 19 nt, Human herpesvirus 7
aauuucaaacguaaugcaa

SEQ ID NO: 184160 - RNA, 18 nt, Human herpesvirus 7
aauuuaucucauagcuua

SEQ ID NO: 184161 - RNA, 19 nt, Human herpesvirus 7
aauuuaucucauagcuuaa

SEQ ID NO: 184162 - RNA, 14 nt, Human herpesvirus 7
aauuucacacaaug

SEQ ID NO: 184163 - RNA, 16 nt, Human herpesvirus 7
aauuugcauaaacuau

SEQ ID NO: 184164 - RNA, 20 nt, Human herpesvirus 7
aauuugcauaaacuaucaaa

SEQ ID NO: 184165 - RNA, 16 nt, Human herpesvirus 7
aauuuggcgccaaaaa

SEQ ID NO: 184166 - RNA, 21 nt, Human herpesvirus 7
aauuuggcgccaaaaaaacac

SEQ ID NO: 184167 - RNA, 15 nt, Human herpesvirus 7
aauuuggcucugauc

SEQ ID NO: 184168 - RNA, 20 nt, Human herpesvirus 7
aauuuauccuaagcuuuuca

SEQ ID NO: 184169 - RNA, 20 nt, Human herpesvirus 7
aauuugucuguugugcaauu

SEQ ID NO: 184170 - RNA, 16 nt, Human herpesvirus 7
aauuuccuacaaaagu

SEQ ID NO: 184171 - RNA, 12 nt, Human herpesvirus 7
aauuucauaucu

SEQ ID NO: 184172 - RNA, 13 nt, Human herpesvirus 7
aauuucauaucua

SEQ ID NO: 184173 - RNA, 14 nt, Human herpesvirus 7
aauuucauaucuau

SEQ ID NO: 184174 - RNA, 17 nt, Human herpesvirus 7
aauuugaauauugcuag

SEQ ID NO: 184175 - RNA, 13 nt, Human herpesvirus 7
aauuugagaauuu

SEQ ID NO: 184176 - RNA, 18 nt, Human herpesvirus 7
aauuugauuccaucucac

SEQ ID NO: 184177 - RNA, 19 nt, Human herpesvirus 7
aauuucuaaauaugaugaa

SEQ ID NO: 184178 - RNA, 18 nt, Human herpesvirus 7
aauuucucguuauuuuca

SEQ ID NO: 184179 - RNA, 18 nt, Human herpesvirus 7
aauuccgauuuaagugaa

SEQ ID NO: 184180 - RNA, 19 nt, Human herpesvirus 7
aauucaucaggacaaucaa

SEQ ID NO: 184181 - RNA, 14 nt, Human herpesvirus 7
aauucauccaaaaa

SEQ ID NO: 184182 - RNA, 22 nt, Human herpesvirus 7
aauuccaaaauguaaaccaaau

SEQ ID NO: 184183 - RNA, 12 nt, Human herpesvirus 7
aauuccauacaa

SEQ ID NO: 184184 - RNA, 16 nt, Human herpesvirus 7
aauuccauacaaagaa

SEQ ID NO: 184185 - RNA, 22 nt, Human herpesvirus 7
aauuacagcuaacgauccagua

SEQ ID NO: 184186 - RNA, 21 nt, Human herpesvirus 7
aauucuauuuuaaaaaccaug

SEQ ID NO: 184187 - RNA, 16 nt, Human herpesvirus 7
aauucucacagcuuau

SEQ ID NO: 184188 - RNA, 15 nt, Human herpesvirus 7
aauucagcgucaaua

SEQ ID NO: 184189 - RNA, 10 nt, Human herpesvirus 7
aauucuugau

SEQ ID NO: 184190 - RNA, 16 nt, Human herpesvirus 7
aauucuuuguacuugu

SEQ ID NO: 184191 - RNA, 15 nt, Human herpesvirus 7
aauucuuuuucaaga

SEQ ID NO: 184192 - RNA, 17 nt, Human herpesvirus 7
aauugaaagaccaaauu

SEQ ID NO: 184193 - RNA, 21 nt, Human herpesvirus 7
aauugacagcaccaauccuuu

SEQ ID NO: 184194 - RNA, 19 nt, Human herpesvirus 7
aaugaauuuuaaguggaau

SEQ ID NO: 184195 - RNA, 15 nt, Human herpesvirus 7
aaucuuugacuguau

SEQ ID NO: 184196 - RNA, 13 nt, Human herpesvirus 7
aaugaaaaagcca

SEQ ID NO: 184197 - RNA, 14 nt, Human herpesvirus 7
aaugaaaaagccau

SEQ ID NO: 184198 - RNA, 18 nt, Human herpesvirus 7
aaugaaaaagccauaaaa

SEQ ID NO: 184199 - RNA, 19 nt, Human herpesvirus 7
aaucuugugaaguuugcug

SEQ ID NO: 184200 - RNA, 21 nt, Human herpesvirus 7
aaucuugugaaguuugcugaa

SEQ ID NO: 184201 - RNA, 12 nt, Human herpesvirus 7
aaucuccuugau

SEQ ID NO: 184202 - RNA, 18 nt, Human herpesvirus 7
aauuaaaauguacauaac

SEQ ID NO: 184203 - RNA, 17 nt, Human herpesvirus 7
aauuaaacaaucuggac

SEQ ID NO: 184204 - RNA, 17 nt, Human herpesvirus 7
aauguuuuugcuagaaa

SEQ ID NO: 184205 - RNA, 23 nt, Human herpesvirus 7
aauguuuuuuucauacauagaac

SEQ ID NO: 184206 - RNA, 15 nt, Human herpesvirus 7
aauuaaauacuugca

SEQ ID NO: 184207 - RNA, 13 nt, Human herpesvirus 7
aauuaaaguugca

SEQ ID NO: 184208 - RNA, 14 nt, Human herpesvirus 7
aauuaaaguugcau

SEQ ID NO: 184209 - RNA, 23 nt, Human herpesvirus 7
aauuacacaaauugauccugcua

SEQ ID NO: 184210 - RNA, 16 nt, Human herpesvirus 7
aauucaaucaccaaag

SEQ ID NO: 184211 - RNA, 17 nt, Human herpesvirus 7
aauucaaucaccaaaga

SEQ ID NO: 184212 - RNA, 17 nt, Human herpesvirus 7
aauucaaucugcaaaaa

SEQ ID NO: 184213 - RNA, 12 nt, Human herpesvirus 7
aauuaaugcauu

SEQ ID NO: 184214 - RNA, 13 nt, Human herpesvirus 7
aauuaaugcauug

SEQ ID NO: 184215 - RNA, 16 nt, Human herpesvirus 7
aauuaagguggaaauc

SEQ ID NO: 184216 - RNA, 21 nt, Human herpesvirus 7
aauuaagguggaaaucuuuaa

SEQ ID NO: 184217 - RNA, 20 nt, Human herpesvirus 7
aauguuuccguguuuauguc

SEQ ID NO: 184218 - RNA, 21 nt, Human herpesvirus 7
aauguuuacaaacauguucca

SEQ ID NO: 184219 - RNA, 13 nt, Human herpesvirus 7
aauguuuacaugu

SEQ ID NO: 184220 - RNA, 22 nt, Human herpesvirus 7
aauguugagcuaucugauuuau

SEQ ID NO: 184221 - RNA, 19 nt, Human herpesvirus 7
aaugaaucugcacuaucuc

SEQ ID NO: 184222 - RNA, 14 nt, Human herpesvirus 7
aaugugucuuacaa

SEQ ID NO: 184223 - RNA, 13 nt, Human herpesvirus 7
aauguuaugugcu

SEQ ID NO: 184224 - RNA, 16 nt, Human herpesvirus 7
aauguuccacgaucau

SEQ ID NO: 184225 - RNA, 21 nt, Human herpesvirus 7
aauguuccacgaucauuccgu

SEQ ID NO: 184226 - RNA, 21 nt, Human herpesvirus 7
acaauugaguucaggucucuu

SEQ ID NO: 184227 - RNA, 19 nt, Human herpesvirus 7
acaauuugcauaauccucu

SEQ ID NO: 184228 - RNA, 13 nt, Human herpesvirus 7
acacaaauugauc

SEQ ID NO: 184229 - RNA, 12 nt, Human herpesvirus 7
acacaaauuuag

SEQ ID NO: 184230 - RNA, 20 nt, Human herpesvirus 7
acaauuucacacaaugccuu

SEQ ID NO: 184231 - RNA, 13 nt, Human herpesvirus 7
acaauuucacaga

SEQ ID NO: 184232 - RNA, 15 nt, Human herpesvirus 7
acaauuauagaaaca

SEQ ID NO: 184233 - RNA, 18 nt, Human herpesvirus 7
acaauuauagaaacauuc

SEQ ID NO: 184234 - RNA, 20 nt, Human herpesvirus 7
acaauuauagaaacauuccu

SEQ ID NO: 184235 - RNA, 17 nt, Human herpesvirus 7
acaauuaagaaucauuu

SEQ ID NO: 184236 - RNA, 21 nt, Human herpesvirus 7
acaauuacacaaauugauccu

SEQ ID NO: 184237 - RNA, 21 nt, Human herpesvirus 7
acaaugguguuaacaaucuua

SEQ ID NO: 184238 - RNA, 19 nt, Human herpesvirus 7
acaaugguuuuuuugacaa

SEQ ID NO: 184239 - RNA, 18 nt, Human herpesvirus 7
acaauauuaaacuaggcu

SEQ ID NO: 184240 - RNA, 18 nt, Human herpesvirus 7
acaaucgguaacaugucu

SEQ ID NO: 184241 - RNA, 18 nt, Human herpesvirus 7
acaaucuggacauuucaa

SEQ ID NO: 184242 - RNA, 17 nt, Human herpesvirus 7
acaaucuuacaaaaagu

SEQ ID NO: 184243 - RNA, 13 nt, Human herpesvirus 7
acaaugcugucuc

SEQ ID NO: 184244 - RNA, 20 nt, Human herpesvirus 7
acaauggaacagcaaaaagg

SEQ ID NO: 184245 - RNA, 18 nt, Human herpesvirus 7
acaaugccuuucuuaggu

SEQ ID NO: 184246 - RNA, 22 nt, Human herpesvirus 7
acaaggauuugcguaauggauu

SEQ ID NO: 184247 - RNA, 22 nt, Human herpesvirus 7
acaaggugacagagggcauuug

SEQ ID NO: 184248 - RNA, 13 nt, Human herpesvirus 7
acaagguucucau

SEQ ID NO: 184249 - RNA, 23 nt, Human herpesvirus 7
acaagguucucauuuucgacaga

SEQ ID NO: 184250 - RNA, 19 nt, Human herpesvirus 7
acaagggcaauuguuugau

SEQ ID NO: 184251 - RNA, 18 nt, Human herpesvirus 7
acaagguacauuuugcaa

SEQ ID NO: 184252 - RNA, 14 nt, Human herpesvirus 7
acaaguagugcuaa

SEQ ID NO: 184253 - RNA, 18 nt, Human herpesvirus 7
acaaguagugcuaauauu

SEQ ID NO: 184254 - RNA, 18 nt, Human herpesvirus 7
acaaguagaaaaugcugu

SEQ ID NO: 184255 - RNA, 12 nt, Human herpesvirus 7
acaaguuucaaa

SEQ ID NO: 184256 - RNA, 20 nt, Human herpesvirus 7
acaaguuucaaaaagugcau

SEQ ID NO: 184257 - RNA, 19 nt, Human herpesvirus 7
acaaucgauaaacuuuguc

SEQ ID NO: 184258 - RNA, 20 nt, Human herpesvirus 7
acaaucccagaaauuucaaa

SEQ ID NO: 184259 - RNA, 21 nt, Human herpesvirus 7
acaauaugacgacuuugaaga

SEQ ID NO: 184260 - RNA, 18 nt, Human herpesvirus 7
acaauagugaacaugugc

SEQ ID NO: 184261 - RNA, 16 nt, Human herpesvirus 7
acaauaacauuuugua

SEQ ID NO: 184262 - RNA, 14 nt, Human herpesvirus 7
acaacacucugcau

SEQ ID NO: 184263 - RNA, 16 nt, Human herpesvirus 7
acaaaauguauucaau

SEQ ID NO: 184264 - RNA, 19 nt, Human herpesvirus 7
acaaacaaaaauauuuuga

SEQ ID NO: 184265 - RNA, 18 nt, Human herpesvirus 7
acaaacauguuccauuca

SEQ ID NO: 184266 - RNA, 15 nt, Human herpesvirus 7
acaaacauuccaaca

SEQ ID NO: 184267 - RNA, 12 nt, Human herpesvirus 7
acaaacaaugag

SEQ ID NO: 184268 - RNA, 15 nt, Human herpesvirus 7
acaaacaauaaauuu

SEQ ID NO: 184269 - RNA, 18 nt, Human herpesvirus 7
acaagcuuaaauguguaa

SEQ ID NO: 184270 - RNA, 13 nt, Human herpesvirus 7
acaacgguauaca

SEQ ID NO: 184271 - RNA, 17 nt, Human herpesvirus 7
acaaccuggauguaaug

SEQ ID NO: 184272 - RNA, 14 nt, Human herpesvirus 7
acaacgacauugaa

SEQ ID NO: 184273 - RNA, 14 nt, Human herpesvirus 7
acaacgacuacagg

SEQ ID NO: 184274 - RNA, 15 nt, Human herpesvirus 7
acaaccacaaccaaa

SEQ ID NO: 184275 - RNA, 22 nt, Human herpesvirus 7
acaacauauagauaaugaaguu

SEQ ID NO: 184276 - RNA, 13 nt, Human herpesvirus 7
acaacagccaaau

SEQ ID NO: 184277 - RNA, 14 nt, Human herpesvirus 7
acaacauacauauu

SEQ ID NO: 184278 - RNA, 17 nt, Human herpesvirus 7
acuccauucgguuuuca

SEQ ID NO: 184279 - RNA, 12 nt, Human herpesvirus 7
acugaaccaguu

SEQ ID NO: 184280 - RNA, 23 nt, Human herpesvirus 7
acucuuucugacauuggaacuuu

SEQ ID NO: 184281 - RNA, 23 nt, Human herpesvirus 7
acucuucuuugugagaaauggaa

SEQ ID NO: 184282 - RNA, 15 nt, Human herpesvirus 7
acguagaaaaaaaca

SEQ ID NO: 184283 - RNA, 13 nt, Human herpesvirus 7
acguagugucauc

SEQ ID NO: 184284 - RNA, 17 nt, Human herpesvirus 7
acguccauugauuaaaa

SEQ ID NO: 184285 - RNA, 15 nt, Human herpesvirus 7
acgucuagacauuug

SEQ ID NO: 184286 - RNA, 17 nt, Human herpesvirus 7
acgugauuaagauuccu

SEQ ID NO: 184287 - RNA, 15 nt, Human herpesvirus 7
acgugagcacggcac

SEQ ID NO: 184288 - RNA, 17 nt, Human herpesvirus 7
acgugccgcguuuuaaa

SEQ ID NO: 184289 - RNA, 15 nt, Human herpesvirus 7
acucaucauugaaga

SEQ ID NO: 184290 - RNA, 19 nt, Human herpesvirus 7
acucaucauugaagaaaag

SEQ ID NO: 184291 - RNA, 21 nt, Human herpesvirus 7
acucauauuuuucaugguauu

SEQ ID NO: 184292 - RNA, 13 nt, Human herpesvirus 7
acuuacauuucaa

SEQ ID NO: 184293 - RNA, 20 nt, Human herpesvirus 7
acuuaccgucgggugaauuu

SEQ ID NO: 184294 - RNA, 18 nt, Human herpesvirus 7
acuguuuguaaggccaaa

SEQ ID NO: 184295 - RNA, 15 nt, Human herpesvirus 7
acuucuacuaauaca

SEQ ID NO: 184296 - RNA, 15 nt, Human herpesvirus 7
acuguuuacacauua

SEQ ID NO: 184297 - RNA, 14 nt, Human herpesvirus 7
acuguuacaacuuu

SEQ ID NO: 184298 - RNA, 17 nt, Human herpesvirus 7
acuguuacaacuuugcc

SEQ ID NO: 184299 - RNA, 14 nt, Human herpesvirus 7
acugugucaucaca

SEQ ID NO: 184300 - RNA, 16 nt, Human herpesvirus 7
acuguuaagaauucca

SEQ ID NO: 184301 - RNA, 18 nt, Human herpesvirus 7
acuguuaagaauuccaga

SEQ ID NO: 184302 - RNA, 11 nt, Human herpesvirus 7
acugugcauga

SEQ ID NO: 184303 - RNA, 17 nt, Human herpesvirus 7
acugauauuaaaucaua

SEQ ID NO: 184304 - RNA, 12 nt, Human herpesvirus 7
acugaagagcca

SEQ ID NO: 184305 - RNA, 22 nt, Human herpesvirus 7
acucuugcacaggauuugggaa

SEQ ID NO: 184306 - RNA, 16 nt, Human herpesvirus 7
acugacauucuuccag

SEQ ID NO: 184307 - RNA, 18 nt, Human herpesvirus 7
agaacaauaaauucaacu

SEQ ID NO: 184308 - RNA, 17 nt, Human herpesvirus 7
agaacauguaguacaau

SEQ ID NO: 184309 - RNA, 13 nt, Human herpesvirus 7
agaacaccauagu

SEQ ID NO: 184310 - RNA, 14 nt, Human herpesvirus 7
agaacauuaauauc

SEQ ID NO: 184311 - RNA, 18 nt, Human herpesvirus 7
agaacauuuuucuugcuu

SEQ ID NO: 184312 - RNA, 19 nt, Human herpesvirus 7
agaacggcgcgacugugcc

SEQ ID NO: 184313 - RNA, 21 nt, Human herpesvirus 7
agaauuucuuuguuugcuauu

SEQ ID NO: 184314 - RNA, 17 nt, Human herpesvirus 7
agacaaacuauggugau

SEQ ID NO: 184315 - RNA, 22 nt, Human herpesvirus 7
agacaaauuaaacaaucuggac

SEQ ID NO: 184316 - RNA, 19 nt, Human herpesvirus 7
agacaauuucacacaaugc

SEQ ID NO: 184317 - RNA, 15 nt, Human herpesvirus 7
agacaccgucauuuc

SEQ ID NO: 184318 - RNA, 23 nt, Human herpesvirus 7
agacaauauauugaaggugucua

SEQ ID NO: 184319 - RNA, 22 nt, Human herpesvirus 7
agaacuuuuaaaaaagaacuua

SEQ ID NO: 184320 - RNA, 15 nt, Human herpesvirus 7
agaagaaacuugaaa

SEQ ID NO: 184321 - RNA, 22 nt, Human herpesvirus 7
agaacuugaaaaaaucuugcaa

SEQ ID NO: 184322 - RNA, 15 nt, Human herpesvirus 7
acuugcuagcuguga

SEQ ID NO: 184323 - RNA, 22 nt, Human herpesvirus 7
acuuggaguuguguucuuuaac

SEQ ID NO: 184324 - RNA, 23 nt, Human herpesvirus 7
acuugauguuuugcaagcacaug

SEQ ID NO: 184325 - RNA, 20 nt, Human herpesvirus 7
acuuguuuuuuuucucugau

SEQ ID NO: 184326 - RNA, 22 nt, Human herpesvirus 7
acuuguuuuuuuucucugauca

SEQ ID NO: 184327 - RNA, 16 nt, Human herpesvirus 7
acuuuaaaacuuugau

SEQ ID NO: 184328 - RNA, 15 nt, Human herpesvirus 7
acuuguaccaaucaa

SEQ ID NO: 184329 - RNA, 14 nt, Human herpesvirus 7
acuugucuuaccua

SEQ ID NO: 184330 - RNA, 12 nt, Human herpesvirus 7
acuugugaaaau

SEQ ID NO: 184331 - RNA, 13 nt, Human herpesvirus 7
acuugugaaaaua

SEQ ID NO: 184332 - RNA, 15 nt, Human herpesvirus 7
acuugugaaaauaac

SEQ ID NO: 184333 - RNA, 17 nt, Human herpesvirus 7
acuuucgcaacaaucaa

SEQ ID NO: 184334 - RNA, 14 nt, Human herpesvirus 7
acuuucauagcuua

SEQ ID NO: 184335 - RNA, 15 nt, Human herpesvirus 7
acuuucauagcuuaa

SEQ ID NO: 184336 - RNA, 13 nt, Human herpesvirus 7
acuuuaucauuac

SEQ ID NO: 184337 - RNA, 17 nt, Human herpesvirus 7
agaaacaucuaugugcu

SEQ ID NO: 184338 - RNA, 14 nt, Human herpesvirus 7
agaaacauguaucc

SEQ ID NO: 184339 - RNA, 21 nt, Human herpesvirus 7
agaaaauguuuaaauuacagu

SEQ ID NO: 184340 - RNA, 21 nt, Human herpesvirus 7
agaaaauuuauauuugcuugc

SEQ ID NO: 184341 - RNA, 14 nt, Human herpesvirus 7
agaaacaacacucu

SEQ ID NO: 184342 - RNA, 16 nt, Human herpesvirus 7
agaaacaagguuuaaa

SEQ ID NO: 184343 - RNA, 23 nt, Human herpesvirus 7
agaguagaacuaggaaacacaau

SEQ ID NO: 184344 - RNA, 13 nt, Human herpesvirus 7
agaguacaugugu

SEQ ID NO: 184345 - RNA, 18 nt, Human herpesvirus 7
agaguacaugugucguca

SEQ ID NO: 184346 - RNA, 19 nt, Human herpesvirus 7
agaguauacaaaagacaua

SEQ ID NO: 184347 - RNA, 14 nt, Human herpesvirus 7
agaggccgaaaauc

SEQ ID NO: 184348 - RNA, 17 nt, Human herpesvirus 7
agauaguucgcaauggu

SEQ ID NO: 184349 - RNA, 18 nt, Human herpesvirus 7
agauaguucgcaauggua

SEQ ID NO: 184350 - RNA, 19 nt, Human herpesvirus 7
agauauaagaugauagcca

SEQ ID NO: 184351 - RNA, 12 nt, Human herpesvirus 7
agauauuauuaa

SEQ ID NO: 184352 - RNA, 18 nt, Human herpesvirus 7
agauauacauaauucaau

SEQ ID NO: 184353 - RNA, 21 nt, Human herpesvirus 7
agaucauaauuacauugcagu

SEQ ID NO: 184354 - RNA, 22 nt, Human herpesvirus 7
agaucauaauuacauugcaguc

SEQ ID NO: 184355 - RNA, 14 nt, Human herpesvirus 7
agaugcauccaaag

SEQ ID NO: 184356 - RNA, 21 nt, Human herpesvirus 7
agaugcauccaaagaaaaaag

SEQ ID NO: 184357 - RNA, 15 nt, Human herpesvirus 7
agauauucuaacaaa

SEQ ID NO: 184358 - RNA, 18 nt, Human herpesvirus 7
agauauugaugacguuau

SEQ ID NO: 184359 - RNA, 19 nt, Human herpesvirus 7
agacugagacgagcaucua

SEQ ID NO: 184360 - RNA, 15 nt, Human herpesvirus 7
agacugaagacaaaa

SEQ ID NO: 184361 - RNA, 19 nt, Human herpesvirus 7
agacugaagacaaaaccaa

SEQ ID NO: 184362 - RNA, 23 nt, Human herpesvirus 7
agacacggaguuuuuacucugug

SEQ ID NO: 184363 - RNA, 16 nt, Human herpesvirus 7
agacguagugucauca

SEQ ID NO: 184364 - RNA, 24 nt, Human herpesvirus 7
agacguagugucaucacuuaugau

SEQ ID NO: 184365 - RNA, 21 nt, Human herpesvirus 7
agacgucaacuugaaugagcu

SEQ ID NO: 184366 - RNA, 21 nt, Human herpesvirus 7
agagaaaaucuuugaaucugc

SEQ ID NO: 184367 - RNA, 21 nt, Human herpesvirus 7
agagaaaucgcuuauuuaaca

SEQ ID NO: 184368 - RNA, 14 nt, Human herpesvirus 7
agagaaccacguga

SEQ ID NO: 184369 - RNA, 16 nt, Human herpesvirus 7
agagaauauguuauca

SEQ ID NO: 184370 - RNA, 20 nt, Human herpesvirus 7
agagaacuagaacagcugaa

SEQ ID NO: 184371 - RNA, 21 nt, Human herpesvirus 7
agagaauguacgaacuaagaa

SEQ ID NO: 184372 - RNA, 15 nt, Human herpesvirus 7
agagacuccaaucga

SEQ ID NO: 184373 - RNA, 17 nt, Human herpesvirus 7
agagacuccaaucgagc

SEQ ID NO: 184374 - RNA, 16 nt, Human herpesvirus 7
agcaaugcaugaugca

SEQ ID NO: 184375 - RNA, 17 nt, Human herpesvirus 7
agcaaugcaugaugcac

SEQ ID NO: 184376 - RNA, 14 nt, Human herpesvirus 7
agcaauguauguca

SEQ ID NO: 184377 - RNA, 20 nt, Human herpesvirus 7
agcaauguuuucagcgccaa

SEQ ID NO: 184378 - RNA, 15 nt, Human herpesvirus 7
agcaauacauucuca

SEQ ID NO: 184379 - RNA, 16 nt, Human herpesvirus 7
agcacaaaugucuuau

SEQ ID NO: 184380 - RNA, 15 nt, Human herpesvirus 7
agcacaaucacguga

SEQ ID NO: 184381 - RNA, 16 nt, Human herpesvirus 7
agcacauguacagaca

SEQ ID NO: 184382 - RNA, 18 nt, Human herpesvirus 7
agcaagcaugcguaaaaa

SEQ ID NO: 184383 - RNA, 15 nt, Human herpesvirus 7
agcaacugugcauga

SEQ ID NO: 184384 - RNA, 21 nt, Human herpesvirus 7
agcacugggagcaaugcauga

SEQ ID NO: 184385 - RNA, 22 nt, Human herpesvirus 7
agcacugggagcaaugcaugau

SEQ ID NO: 184386 - RNA, 17 nt, Human herpesvirus 7
agauuugguucauuaca

SEQ ID NO: 184387 - RNA, 22 nt, Human herpesvirus 7
agcaaaaaaagguacuaucuau

SEQ ID NO: 184388 - RNA, 18 nt, Human herpesvirus 7
agauuuuaucgaugagaa

SEQ ID NO: 184389 - RNA, 20 nt, Human herpesvirus 7
agauuuucuagagcauauac

SEQ ID NO: 184390 - RNA, 21 nt, Human herpesvirus 7
agauuuuguagguuguugcaa

SEQ ID NO: 184391 - RNA, 17 nt, Human herpesvirus 7
agauuguuggaaaggga

SEQ ID NO: 184392 - RNA, 14 nt, Human herpesvirus 7
agauuuaacaugug

SEQ ID NO: 184393 - RNA, 16 nt, Human herpesvirus 7
agcaaaagccacagau

SEQ ID NO: 184394 - RNA, 13 nt, Human herpesvirus 7
agcaacaaauguu

SEQ ID NO: 184395 - RNA, 23 nt, Human herpesvirus 7
agcaaaauaugcaaaacaaaaua

SEQ ID NO: 184396 - RNA, 15 nt, Human herpesvirus 7
agcaaacagugcugu

SEQ ID NO: 184397 - RNA, 15 nt, Human herpesvirus 7
agcaaagacuugcaa

SEQ ID NO: 184398 - RNA, 23 nt, Human herpesvirus 7
agaugucuaaaaguacaguguau

SEQ ID NO: 184399 - RNA, 10 nt, Human herpesvirus 7
agauggauug

SEQ ID NO: 184400 - RNA, 13 nt, Human herpesvirus 7
agauuaccugcau

SEQ ID NO: 184401 - RNA, 18 nt, Human herpesvirus 7
agauuaccugcauacuuu

SEQ ID NO: 184402 - RNA, 14 nt, Human herpesvirus 7
agauugaucacuuu

SEQ ID NO: 184403 - RNA, 15 nt, Human herpesvirus 7
agauugaucacuuug

SEQ ID NO: 184404 - RNA, 16 nt, Human herpesvirus 7
agauuauacaaaucca

SEQ ID NO: 184405 - RNA, 17 nt, Human herpesvirus 7
agauucaguaucacuua

SEQ ID NO: 184406 - RNA, 16 nt, Human herpesvirus 7
agauuagcuucgauuc

SEQ ID NO: 184407 - RNA, 18 nt, Human herpesvirus 7
acgggaaaaaggauuuga

SEQ ID NO: 184408 - RNA, 15 nt, Human herpesvirus 7
acgcugaauucauuu

SEQ ID NO: 184409 - RNA, 22 nt, Human herpesvirus 7
acgaugaauuaauucuuuccac

SEQ ID NO: 184410 - RNA, 14 nt, Human herpesvirus 7
acgauccaguacuu

SEQ ID NO: 184411 - RNA, 21 nt, Human herpesvirus 7
acgauaugguuugaaaaccau

SEQ ID NO: 184412 - RNA, 21 nt, Human herpesvirus 7
acgaguacuccuucuaccucu

SEQ ID NO: 184413 - RNA, 14 nt, Human herpesvirus 7
acgaugagcaugaa

SEQ ID NO: 184414 - RNA, 15 nt, Human herpesvirus 7
acgaugagcaugaaa

SEQ ID NO: 184415 - RNA, 15 nt, Human herpesvirus 7
acgaugauauuguca

SEQ ID NO: 184416 - RNA, 13 nt, Human herpesvirus 7
acgauuuugugac

SEQ ID NO: 184417 - RNA, 17 nt, Human herpesvirus 7
acgaaauuuaaugcuuu

SEQ ID NO: 184418 - RNA, 13 nt, Human herpesvirus 7
acgaaaacugcaa

SEQ ID NO: 184419 - RNA, 17 nt, Human herpesvirus 7
accuuuuaacaacagcc

SEQ ID NO: 184420 - RNA, 21 nt, Human herpesvirus 7
accuuuuaacaacagccaaau

SEQ ID NO: 184421 - RNA, 20 nt, Human herpesvirus 7
accuucgugugucucuagaa

SEQ ID NO: 184422 - RNA, 23 nt, Human herpesvirus 7
accuuagaaucacaacauauaga

SEQ ID NO: 184423 - RNA, 13 nt, Human herpesvirus 7
accuuacuuuuaa

SEQ ID NO: 184424 - RNA, 22 nt, Human herpesvirus 7
accuuacuuuuaauucuucuaa

SEQ ID NO: 184425 - RNA, 19 nt, Human herpesvirus 7
accgucuuuugauuuugcc

SEQ ID NO: 184426 - RNA, 20 nt, Human herpesvirus 7
accguuuaaugaaaaagcca

SEQ ID NO: 184427 - RNA, 21 nt, Human herpesvirus 7
accguuuaaugaaaaagccau

SEQ ID NO: 184428 - RNA, 22 nt, Human herpesvirus 7
accguuuaaugaaaaagccaua

SEQ ID NO: 184429 - RNA, 16 nt, Human herpesvirus 7
accuccuaugucauga

SEQ ID NO: 184430 - RNA, 16 nt, Human herpesvirus 7
accucgacauucucca

SEQ ID NO: 184431 - RNA, 14 nt, Human herpesvirus 7
accggaccauuucc

SEQ ID NO: 184432 - RNA, 16 nt, Human herpesvirus 7
accgguccuuccucaa

SEQ ID NO: 184433 - RNA, 16 nt, Human herpesvirus 7
accgauuccagcacuu

SEQ ID NO: 184434 - RNA, 16 nt, Human herpesvirus 7
accgauucuaaauuaa

SEQ ID NO: 184435 - RNA, 17 nt, Human herpesvirus 7
accgauucuaaauuaaa

SEQ ID NO: 184436 - RNA, 17 nt, Human herpesvirus 7
accgcaaaagccacuga

SEQ ID NO: 184437 - RNA, 16 nt, Human herpesvirus 7
accgccaccuucuuau

SEQ ID NO: 184438 - RNA, 17 nt, Human herpesvirus 7
acccacuaacauuuuaa

SEQ ID NO: 184439 - RNA, 19 nt, Human herpesvirus 7
acccagaagaaacuugaaa

SEQ ID NO: 184440 - RNA, 18 nt, Human herpesvirus 7
acacaagccgucaauccu

SEQ ID NO: 184441 - RNA, 15 nt, Human herpesvirus 7
acagcagccuacuuu

SEQ ID NO: 184442 - RNA, 13 nt, Human herpesvirus 7
acagcccaagugg

SEQ ID NO: 184443 - RNA, 16 nt, Human herpesvirus 7
acacaucuucaauguu

SEQ ID NO: 184444 - RNA, 12 nt, Human herpesvirus 7
acagcacuuuga

SEQ ID NO: 184445 - RNA, 13 nt, Human herpesvirus 7
acagcacuuugag

SEQ ID NO: 184446 - RNA, 14 nt, Human herpesvirus 7
acacauuuauccau

SEQ ID NO: 184447 - RNA, 17 nt, Human herpesvirus 7
acauauucuuagaaacu

SEQ ID NO: 184448 - RNA, 15 nt, Human herpesvirus 7
acauauguugauucu

SEQ ID NO: 184449 - RNA, 17 nt, Human herpesvirus 7
acauauguugauucucu

SEQ ID NO: 184450 - RNA, 18 nt, Human herpesvirus 7
acaguuuuuuaauacaaa

SEQ ID NO: 184451 - RNA, 18 nt, Human herpesvirus 7
acauauaggaacaaaucu

SEQ ID NO: 184452 - RNA, 19 nt, Human herpesvirus 7
acaucaauuuuaaugugcu

SEQ ID NO: 184453 - RNA, 20 nt, Human herpesvirus 7
acaucaauuuuaaugugcuu

SEQ ID NO: 184454 - RNA, 15 nt, Human herpesvirus 7
acauccgauagcauu

SEQ ID NO: 184455 - RNA, 18 nt, Human herpesvirus 7
acauccgauagcauuaga

SEQ ID NO: 184456 - RNA, 16 nt, Human herpesvirus 7
acaucagauacagaga

SEQ ID NO: 184457 - RNA, 17 nt, Human herpesvirus 7
acaucagauacagagag

SEQ ID NO: 184458 - RNA, 18 nt, Human herpesvirus 7
acagcugaaacucaucau

SEQ ID NO: 184459 - RNA, 16 nt, Human herpesvirus 7
acagcguucaaucaaa

SEQ ID NO: 184460 - RNA, 19 nt, Human herpesvirus 7
acagcguucaaucaaauua

SEQ ID NO: 184461 - RNA, 23 nt, Human herpesvirus 7
acagcuagauugacuaugaauuu

SEQ ID NO: 184462 - RNA, 16 nt, Human herpesvirus 7
acaguggaugcuggaa

SEQ ID NO: 184463 - RNA, 18 nt, Human herpesvirus 7
acaguugcuugugaagga

SEQ ID NO: 184464 - RNA, 22 nt, Human herpesvirus 7
acaguuaaagacggaauuugua

SEQ ID NO: 184465 - RNA, 21 nt, Human herpesvirus 7
acaguuacuuuuacuccucaa

SEQ ID NO: 184466 - RNA, 23 nt, Human herpesvirus 7
acagugaaguaauuuaugcuuua

SEQ ID NO: 184467 - RNA, 22 nt, Human herpesvirus 7
acagucugaaagccgcugccuu

SEQ ID NO: 184468 - RNA, 13 nt, Human herpesvirus 7
acaugaucuugua

SEQ ID NO: 184469 - RNA, 13 nt, Human herpesvirus 7
acaugagugaaaa

SEQ ID NO: 184470 - RNA, 17 nt, Human herpesvirus 7
acaugcaacauaaucca

SEQ ID NO: 184471 - RNA, 15 nt, Human herpesvirus 7
acaugccagacuuaa

SEQ ID NO: 184472 - RNA, 21 nt, Human herpesvirus 7
acauuuuuaccuccauaugaa

SEQ ID NO: 184473 - RNA, 20 nt, Human herpesvirus 7
acauuuuucuauuaguauga

SEQ ID NO: 184474 - RNA, 18 nt, Human herpesvirus 7
acauuuuugcaauaugcu

SEQ ID NO: 184475 - RNA, 19 nt, Human herpesvirus 7
accaaagaucguuguuaaa

SEQ ID NO: 184476 - RNA, 19 nt, Human herpesvirus 7
accaaauauguggcacaua

SEQ ID NO: 184477 - RNA, 14 nt, Human herpesvirus 7
accaaauacaacca

SEQ ID NO: 184478 - RNA, 17 nt, Human herpesvirus 7
accaaauacaaccacaa

SEQ ID NO: 184479 - RNA, 14 nt, Human herpesvirus 7
acauuguacaauua

SEQ ID NO: 184480 - RNA, 18 nt, Human herpesvirus 7
acauugcuucagaaauaa

SEQ ID NO: 184481 - RNA, 19 nt, Human herpesvirus 7
acauuuaaaaaaaaaacca

SEQ ID NO: 184482 - RNA, 23 nt, Human herpesvirus 7
acauuuaaauucaacaucuuuca

SEQ ID NO: 184483 - RNA, 16 nt, Human herpesvirus 7
acauuuauccaucaaa

SEQ ID NO: 184484 - RNA, 20 nt, Human herpesvirus 7
acauuucagaugacaacuca

SEQ ID NO: 184485 - RNA, 15 nt, Human herpesvirus 7
acauuucauuccaaa

SEQ ID NO: 184486 - RNA, 22 nt, Human herpesvirus 7
acauuuacaaaaaaaagcuuug

SEQ ID NO: 184487 - RNA, 17 nt, Human herpesvirus 7
accacugugucaucaca

SEQ ID NO: 184488 - RNA, 13 nt, Human herpesvirus 7
accacaacaggau

SEQ ID NO: 184489 - RNA, 23 nt, Human herpesvirus 7
accaauuaauauuaauacgucca

SEQ ID NO: 184490 - RNA, 17 nt, Human herpesvirus 7
accaauagaaaacauua

SEQ ID NO: 184491 - RNA, 21 nt, Human herpesvirus 7
accaagagccggaaagcaaug

SEQ ID NO: 184492 - RNA, 13 nt, Human herpesvirus 7
accauuguucaac

SEQ ID NO: 184493 - RNA, 18 nt, Human herpesvirus 7
accauuguucaacuucaa

SEQ ID NO: 184494 - RNA, 18 nt, Human herpesvirus 7
accauuuauuuacagauu

SEQ ID NO: 184495 - RNA, 20 nt, Human herpesvirus 7
accauuuauuuacagauuuu

SEQ ID NO: 184496 - RNA, 16 nt, Human herpesvirus 7
accagauauuaguuuc

SEQ ID NO: 184497 - RNA, 14 nt, Human herpesvirus 7
caauguaugugcau

SEQ ID NO: 184498 - RNA, 16 nt, Human herpesvirus 7
caauuacuugucuuac

SEQ ID NO: 184499 - RNA, 14 nt, Human herpesvirus 7
caauuaaugcauug

SEQ ID NO: 184500 - RNA, 17 nt, Human herpesvirus 7
caauuaaugcauuggaa

SEQ ID NO: 184501 - RNA, 20 nt, Human herpesvirus 7
caauuacaaaauguauacaa

SEQ ID NO: 184502 - RNA, 19 nt, Human herpesvirus 7
caauguugccuucuaaaac

SEQ ID NO: 184503 - RNA, 13 nt, Human herpesvirus 7
caauugauucaca

SEQ ID NO: 184504 - RNA, 23 nt, Human herpesvirus 7
caauugcccuuguguugucauac

SEQ ID NO: 184505 - RNA, 15 nt, Human herpesvirus 7
caauucaucaggaca

SEQ ID NO: 184506 - RNA, 20 nt, Human herpesvirus 7
caauucuauuuuaaaaacca

SEQ ID NO: 184507 - RNA, 15 nt, Human herpesvirus 7
caaggaauucugacu

SEQ ID NO: 184508 - RNA, 16 nt, Human herpesvirus 7
caagcuuaaauaagca

SEQ ID NO: 184509 - RNA, 23 nt, Human herpesvirus 7
caagacgccggggacauuccuca

SEQ ID NO: 184510 - RNA, 22 nt, Human herpesvirus 7
cacaauuuuaacgcugaauuca

SEQ ID NO: 184511 - RNA, 19 nt, Human herpesvirus 7
cacaauuguaaauggcaaa

SEQ ID NO: 184512 - RNA, 17 nt, Human herpesvirus 7
cacaauuguauuucagu

SEQ ID NO: 184513 - RNA, 12 nt, Human herpesvirus 7
cacaauuacaca

SEQ ID NO: 184514 - RNA, 13 nt, Human herpesvirus 7
cacaauuacacaa

SEQ ID NO: 184515 - RNA, 15 nt, Human herpesvirus 7
cacaaucagcauuua

SEQ ID NO: 184516 - RNA, 14 nt, Human herpesvirus 7
cacacaaugccuuu

SEQ ID NO: 184517 - RNA, 21 nt, Human herpesvirus 7
cacacaaaggccaggccucuc

SEQ ID NO: 184518 - RNA, 14 nt, Human herpesvirus 7
cacauuaucuugac

SEQ ID NO: 184519 - RNA, 17 nt, Human herpesvirus 7
cacaaguuaauuuugca

SEQ ID NO: 184520 - RNA, 12 nt, Human herpesvirus 7
cacaaaugucuu

SEQ ID NO: 184521 - RNA, 20 nt, Human herpesvirus 7
cacaaaugucuuauccuguu

SEQ ID NO: 184522 - RNA, 19 nt, Human herpesvirus 7
cacaacauauagauaauga

SEQ ID NO: 184523 - RNA, 21 nt, Human herpesvirus 7
cacaaagccaaugagugcaga

SEQ ID NO: 184524 - RNA, 14 nt, Human herpesvirus 7
caauuucacacaau

SEQ ID NO: 184525 - RNA, 13 nt, Human herpesvirus 7
caauuguaaaaau

SEQ ID NO: 184526 - RNA, 19 nt, Human herpesvirus 7
caauuguaaaaauaaagac

SEQ ID NO: 184527 - RNA, 22 nt, Human herpesvirus 7
caauuucuauuagauaaugaca

SEQ ID NO: 184528 - RNA, 18 nt, Human herpesvirus 7
caauuuggcucugaucua

SEQ ID NO: 184529 - RNA, 23 nt, Human herpesvirus 7
caauuuuaacgauuccaaaccua

SEQ ID NO: 184530 - RNA, 12 nt, Human herpesvirus 7
cacuagcuuucu

SEQ ID NO: 184531 - RNA, 14 nt, Human herpesvirus 7
cacguacaauauua

SEQ ID NO: 184532 - RNA, 16 nt, Human herpesvirus 7
cacuaugccacaaaaa

SEQ ID NO: 184533 - RNA, 22 nt, Human herpesvirus 7
cacgccuacgcagcaauguaua

SEQ ID NO: 184534 - RNA, 14 nt, Human herpesvirus 7
cacggaaaauuucc

SEQ ID NO: 184535 - RNA, 13 nt, Human herpesvirus 7
cacgcuuccauca

SEQ ID NO: 184536 - RNA, 13 nt, Human herpesvirus 7
cacauuuuugcua

SEQ ID NO: 184537 - RNA, 24 nt, Human herpesvirus 7
caccaaaaaauaaaaacaagcuua

SEQ ID NO: 184538 - RNA, 15 nt, Human herpesvirus 7
cacauuuaguacuuu

SEQ ID NO: 184539 - RNA, 17 nt, Human herpesvirus 7
cacauuuauccaucaaa

SEQ ID NO: 184540 - RNA, 15 nt, Human herpesvirus 7
caccaauuucuauua

SEQ ID NO: 184541 - RNA, 14 nt, Human herpesvirus 7
cacccuaauugcca

SEQ ID NO: 184542 - RNA, 14 nt, Human herpesvirus 7
caccgucauuuaau

SEQ ID NO: 184543 - RNA, 20 nt, Human herpesvirus 7
cacccuuuguuugagacaau

SEQ ID NO: 184544 - RNA, 20 nt, Human herpesvirus 7
caccguugggaaagacguga

SEQ ID NO: 184545 - RNA, 21 nt, Human herpesvirus 7
cagcuuuuauuccuucccaac

SEQ ID NO: 184546 - RNA, 18 nt, Human herpesvirus 7
caggaacagauucuccag

SEQ ID NO: 184547 - RNA, 15 nt, Human herpesvirus 7
caggaacugcgguua

SEQ ID NO: 184548 - RNA, 13 nt, Human herpesvirus 7
cagcuuaagacac

SEQ ID NO: 184549 - RNA, 16 nt, Human herpesvirus 7
cagcuuauuauauaug

SEQ ID NO: 184550 - RNA, 12 nt, Human herpesvirus 7
cagcugcuaaaa

SEQ ID NO: 184551 - RNA, 13 nt, Human herpesvirus 7
cagcucuguaaua

SEQ ID NO: 184552 - RNA, 20 nt, Human herpesvirus 7
cagcuaucucuacaaacaga

SEQ ID NO: 184553 - RNA, 16 nt, Human herpesvirus 7
cagcccaauguugccu

SEQ ID NO: 184554 - RNA, 14 nt, Human herpesvirus 7
cagccuacuuuacg

SEQ ID NO: 184555 - RNA, 12 nt, Human herpesvirus 7
cagccuauucac

SEQ ID NO: 184556 - RNA, 12 nt, Human herpesvirus 7
cagccuguacaa

SEQ ID NO: 184557 - RNA, 23 nt, Human herpesvirus 7
cagcauuauuguauaugaugaca

SEQ ID NO: 184558 - RNA, 18 nt, Human herpesvirus 7
cagcaucccuauugcauc

SEQ ID NO: 184559 - RNA, 20 nt, Human herpesvirus 7
cagcaucccuauugcaucaa

SEQ ID NO: 184560 - RNA, 15 nt, Human herpesvirus 7
cagcagcugcuaaaa

SEQ ID NO: 184561 - RNA, 16 nt, Human herpesvirus 7
cagcagccuacuuuac

SEQ ID NO: 184562 - RNA, 23 nt, Human herpesvirus 7
cagauugaaauuccauacaaaga

SEQ ID NO: 184563 - RNA, 16 nt, Human herpesvirus 7
cagauuuaagugcaca

SEQ ID NO: 184564 - RNA, 21 nt, Human herpesvirus 7
cagauuuuauuucagcuccau

SEQ ID NO: 184565 - RNA, 19 nt, Human herpesvirus 7
cagcaaauucacgcucuca

SEQ ID NO: 184566 - RNA, 20 nt, Human herpesvirus 7
cagauacagcauauaucuuu

SEQ ID NO: 184567 - RNA, 16 nt, Human herpesvirus 7
cagauauucuaacaaa

SEQ ID NO: 184568 - RNA, 19 nt, Human herpesvirus 7
cagauauucuaacaaauac

SEQ ID NO: 184569 - RNA, 13 nt, Human herpesvirus 7
cagagucucuaaa

SEQ ID NO: 184570 - RNA, 22 nt, Human herpesvirus 7
cagagaucauaauuacauugca

SEQ ID NO: 184571 - RNA, 19 nt, Human herpesvirus 7
cagagaugaaggaagcuuu

SEQ ID NO: 184572 - RNA, 23 nt, Human herpesvirus 7
cagagaugaaggaagcuuuacag

SEQ ID NO: 184573 - RNA, 13 nt, Human herpesvirus 7
cagagaugaucuu

SEQ ID NO: 184574 - RNA, 23 nt, Human herpesvirus 7
cagagaauauguuaucauuuauc

SEQ ID NO: 184575 - RNA, 22 nt, Human herpesvirus 7
cacuuuuugaaaauuucuauca

SEQ ID NO: 184576 - RNA, 13 nt, Human herpesvirus 7
cagaaaaauccaa

SEQ ID NO: 184577 - RNA, 15 nt, Human herpesvirus 7
cagaaaaauccaaaa

SEQ ID NO: 184578 - RNA, 16 nt, Human herpesvirus 7
cagaaaaauccaaaau

SEQ ID NO: 184579 - RNA, 20 nt, Human herpesvirus 7
cacuuauuccagauaugaca

SEQ ID NO: 184580 - RNA, 21 nt, Human herpesvirus 7
caaacuauauugaauuaugua

SEQ ID NO: 184581 - RNA, 21 nt, Human herpesvirus 7
caaacuuugcaacaaaaucua

SEQ ID NO: 184582 - RNA, 13 nt, Human herpesvirus 7
caaagaaaaaacu

SEQ ID NO: 184583 - RNA, 18 nt, Human herpesvirus 7
caaagaaaaaacuaacuu

SEQ ID NO: 184584 - RNA, 17 nt, Human herpesvirus 7
caaacucgaggcuuaaa

SEQ ID NO: 184585 - RNA, 12 nt, Human herpesvirus 7
caaacauuccaa

SEQ ID NO: 184586 - RNA, 14 nt, Human herpesvirus 7
caaacauguuccau

SEQ ID NO: 184587 - RNA, 17 nt, Human herpesvirus 7
caaacauguuccauuca

SEQ ID NO: 184588 - RNA, 18 nt, Human herpesvirus 7
caaacauguuccauucaa

SEQ ID NO: 184589 - RNA, 19 nt, Human herpesvirus 7
caaacauguuccauucaau

SEQ ID NO: 184590 - RNA, 14 nt, Human herpesvirus 7
caaacagaagcuga

SEQ ID NO: 184591 - RNA, 14 nt, Human herpesvirus 7
caaaggaagacauc

SEQ ID NO: 184592 - RNA, 22 nt, Human herpesvirus 7
caaagaucguuguuaaauccaa

SEQ ID NO: 184593 - RNA, 21 nt, Human herpesvirus 7
caaagcauacuuuaaaacuuu

SEQ ID NO: 184594 - RNA, 15 nt, Human herpesvirus 7
caaagauugaagcac

SEQ ID NO: 184595 - RNA, 16 nt, Human herpesvirus 7
caaagauuuuguucua

SEQ ID NO: 184596 - RNA, 18 nt, Human herpesvirus 7
caaagaguauacaaaaga

SEQ ID NO: 184597 - RNA, 13 nt, Human herpesvirus 7
caaagacuauaaa

SEQ ID NO: 184598 - RNA, 16 nt, Human herpesvirus 7
caaacuguacccaaaa

SEQ ID NO: 184599 - RNA, 21 nt, Human herpesvirus 7
caaacuguauuuguugaucuu

SEQ ID NO: 184600 - RNA, 16 nt, Human herpesvirus 7
caaacuauguccaaaa

SEQ ID NO: 184601 - RNA, 13 nt, Human herpesvirus 7
caaaaaacacguc

SEQ ID NO: 184602 - RNA, 13 nt, Human herpesvirus 7
caaaacaaacucu

SEQ ID NO: 184603 - RNA, 22 nt, Human herpesvirus 7
caaaaaucuuuuauaaauaguu

SEQ ID NO: 184604 - RNA, 23 nt, Human herpesvirus 7
caaaaaugugcgccgaagaggga

SEQ ID NO: 184605 - RNA, 22 nt, Human herpesvirus 7
caaaaauaaguccgugugcaaa

SEQ ID NO: 184606 - RNA, 23 nt, Human herpesvirus 7
caaaaaggauuuucgauuccauu

SEQ ID NO: 184607 - RNA, 15 nt, Human herpesvirus 7
caaacaggcauuuaa

SEQ ID NO: 184608 - RNA, 13 nt, Human herpesvirus 7
caaacagucugaa

SEQ ID NO: 184609 - RNA, 19 nt, Human herpesvirus 7
caaacaguuuuauucccau

SEQ ID NO: 184610 - RNA, 21 nt, Human herpesvirus 7
auuuuuuuaaacuaaguugaa

SEQ ID NO: 184611 - RNA, 22 nt, Human herpesvirus 7
auuuuuuaaagaaaagcuugua

SEQ ID NO: 184612 - RNA, 18 nt, Human herpesvirus 7
auuuuuuaguauucucau

SEQ ID NO: 184613 - RNA, 19 nt, Human herpesvirus 7
auuuuauucaaagcuucua

SEQ ID NO: 184614 - RNA, 15 nt, Human herpesvirus 7
auuuuaucgaugaga

SEQ ID NO: 184615 - RNA, 19 nt, Human herpesvirus 7
auuuucaggaaaaucacag

SEQ ID NO: 184616 - RNA, 15 nt, Human herpesvirus 7
auuuucaaacaugau

SEQ ID NO: 184617 - RNA, 13 nt, Human herpesvirus 7
auuuucauaaaga

SEQ ID NO: 184618 - RNA, 15 nt, Human herpesvirus 7
auuuuaauagucuaa

SEQ ID NO: 184619 - RNA, 17 nt, Human herpesvirus 7
auuuuaauaugugaaaa

SEQ ID NO: 184620 - RNA, 18 nt, Human herpesvirus 7
auuuuaaaagguugacau

SEQ ID NO: 184621 - RNA, 17 nt, Human herpesvirus 7
auuuuaaaaaagacacc

SEQ ID NO: 184622 - RNA, 15 nt, Human herpesvirus 7
auuuuagacgcaccu

SEQ ID NO: 184623 - RNA, 13 nt, Human herpesvirus 7
auuuuacaaugca

SEQ ID NO: 184624 - RNA, 22 nt, Human herpesvirus 7
auuuuacauauuaguuuaacuu

SEQ ID NO: 184625 - RNA, 23 nt, Human herpesvirus 7
auuuuaccaaauauguggcacau

SEQ ID NO: 184626 - RNA, 20 nt, Human herpesvirus 7
caaaugugguaaauuugcuu

SEQ ID NO: 184627 - RNA, 17 nt, Human herpesvirus 7
caaauguacaauuugca

SEQ ID NO: 184628 - RNA, 17 nt, Human herpesvirus 7
caacaauaaaagauuua

SEQ ID NO: 184629 - RNA, 23 nt, Human herpesvirus 7
caacacaaauuuaggacuuuaca

SEQ ID NO: 184630 - RNA, 21 nt, Human herpesvirus 7
caacacaagguacauuuugca

SEQ ID NO: 184631 - RNA, 14 nt, Human herpesvirus 7
caacacaauuuuca

SEQ ID NO: 184632 - RNA, 17 nt, Human herpesvirus 7
caacacaauuuucacau

SEQ ID NO: 184633 - RNA, 23 nt, Human herpesvirus 7
caaauggauuuuaauacaacaua

SEQ ID NO: 184634 - RNA, 15 nt, Human herpesvirus 7
caacacucugcauuc

SEQ ID NO: 184635 - RNA, 15 nt, Human herpesvirus 7
caacagagaacacca

SEQ ID NO: 184636 - RNA, 19 nt, Human herpesvirus 7
caacagagcgcuuugcuua

SEQ ID NO: 184637 - RNA, 17 nt, Human herpesvirus 7
caaaucaccgaugaauu

SEQ ID NO: 184638 - RNA, 18 nt, Human herpesvirus 7
caaauauacgaaugccau

SEQ ID NO: 184639 - RNA, 19 nt, Human herpesvirus 7
caaauacaaccacaaccaa

SEQ ID NO: 184640 - RNA, 21 nt, Human herpesvirus 7
caaauaagggauaucuuaaaa

SEQ ID NO: 184641 - RNA, 19 nt, Human herpesvirus 7
caaaucugauaaauuacac

SEQ ID NO: 184642 - RNA, 15 nt, Human herpesvirus 7
caaauauguggcaca

SEQ ID NO: 184643 - RNA, 20 nt, Human herpesvirus 7
caaaguacacguagacugag

SEQ ID NO: 184644 - RNA, 22 nt, Human herpesvirus 7
caacgcauucaauggcaucuua

SEQ ID NO: 184645 - RNA, 23 nt, Human herpesvirus 7
caacauaucgcgauguuggcacu

SEQ ID NO: 184646 - RNA, 14 nt, Human herpesvirus 7
caaccggcaaucau

SEQ ID NO: 184647 - RNA, 15 nt, Human herpesvirus 7
caacauacagcauga

SEQ ID NO: 184648 - RNA, 14 nt, Human herpesvirus 7
caacuuugcgccga

SEQ ID NO: 184649 - RNA, 14 nt, Human herpesvirus 7
caacuuuucuuaaa

SEQ ID NO: 184650 - RNA, 21 nt, Human herpesvirus 7
caagaaacaagguuuaaaaca

SEQ ID NO: 184651 - RNA, 16 nt, Human herpesvirus 7
caagaaaguccaaagu

SEQ ID NO: 184652 - RNA, 18 nt, Human herpesvirus 7
caagaaaguccaaaguga

SEQ ID NO: 184653 - RNA, 22 nt, Human herpesvirus 7
caagaaaguccaaagugaugaa

SEQ ID NO: 184654 - RNA, 17 nt, Human herpesvirus 7
caagaaaucagauuaaa

SEQ ID NO: 184655 - RNA, 17 nt, Human herpesvirus 7
caagaaggaaaauuuca

SEQ ID NO: 184656 - RNA, 21 nt, Human herpesvirus 7
auggaaaccuggagaagacaa

SEQ ID NO: 184657 - RNA, 20 nt, Human herpesvirus 7
auggaaagcaaaagccacag

SEQ ID NO: 184658 - RNA, 15 nt, Human herpesvirus 7
augcuuuaacuggaa

SEQ ID NO: 184659 - RNA, 23 nt, Human herpesvirus 7
auggaacauguuuguaaacauuu

SEQ ID NO: 184660 - RNA, 19 nt, Human herpesvirus 7
augcuggaucuucugcuaa

SEQ ID NO: 184661 - RNA, 15 nt, Human herpesvirus 7
augcuuccuaaaaaa

SEQ ID NO: 184662 - RNA, 22 nt, Human herpesvirus 7
augcuuccuaaaaaaaaaggaa

SEQ ID NO: 184663 - RNA, 17 nt, Human herpesvirus 7
augcugcucagcuagaa

SEQ ID NO: 184664 - RNA, 17 nt, Human herpesvirus 7
augcuugcuuugcauag

SEQ ID NO: 184665 - RNA, 18 nt, Human herpesvirus 7
augcuuugucuuacgucu

SEQ ID NO: 184666 - RNA, 17 nt, Human herpesvirus 7
augcuuuguugucauca

SEQ ID NO: 184667 - RNA, 22 nt, Human herpesvirus 7
auggagauaguucgcaauggua

SEQ ID NO: 184668 - RNA, 15 nt, Human herpesvirus 7
auggacggcauuuaa

SEQ ID NO: 184669 - RNA, 20 nt, Human herpesvirus 7
auuaucgcguuuucaugcuc

SEQ ID NO: 184670 - RNA, 19 nt, Human herpesvirus 7
auuaugguucuuauaacaa

SEQ ID NO: 184671 - RNA, 18 nt, Human herpesvirus 7
auuaugcguuaaugucuc

SEQ ID NO: 184672 - RNA, 22 nt, Human herpesvirus 7
auuaugauguuuccgcauaaaa

SEQ ID NO: 184673 - RNA, 15 nt, Human herpesvirus 7
auuauuagauuccau

SEQ ID NO: 184674 - RNA, 18 nt, Human herpesvirus 7
auuauuuaaacagcguuc

SEQ ID NO: 184675 - RNA, 15 nt, Human herpesvirus 7
auucaaaagcuaaaa

SEQ ID NO: 184676 - RNA, 13 nt, Human herpesvirus 7
auuauuuguucaa

SEQ ID NO: 184677 - RNA, 18 nt, Human herpesvirus 7
auuccgauuuaagugaac

SEQ ID NO: 184678 - RNA, 23 nt, Human herpesvirus 7
auuccgggagaaagcuguuucca

SEQ ID NO: 184679 - RNA, 22 nt, Human herpesvirus 7
auucccaucgugaauaauuuca

SEQ ID NO: 184680 - RNA, 15 nt, Human herpesvirus 7
auucgaaaugaaaua

SEQ ID NO: 184681 - RNA, 14 nt, Human herpesvirus 7
auuccuucuaguga

SEQ ID NO: 184682 - RNA, 21 nt, Human herpesvirus 7
auuccuucuagugaaacacau

SEQ ID NO: 184683 - RNA, 22 nt, Human herpesvirus 7
auuccuucuagugaaacacauu

SEQ ID NO: 184684 - RNA, 16 nt, Human herpesvirus 7
auuccucaucucccac

SEQ ID NO: 184685 - RNA, 19 nt, Human herpesvirus 7
auuccaucugguaauguca

SEQ ID NO: 184686 - RNA, 17 nt, Human herpesvirus 7
auuccauuaagccagau

SEQ ID NO: 184687 - RNA, 21 nt, Human herpesvirus 7
auuccauuaagccagauuuca

SEQ ID NO: 184688 - RNA, 23 nt, Human herpesvirus 7
auuccauuaagccagauuucaug

SEQ ID NO: 184689 - RNA, 21 nt, Human herpesvirus 7
auuccauuuuuugucacugac

SEQ ID NO: 184690 - RNA, 15 nt, Human herpesvirus 7
auuccaacagcuuca

SEQ ID NO: 184691 - RNA, 15 nt, Human herpesvirus 7
auuccaggguaaaga

SEQ ID NO: 184692 - RNA, 14 nt, Human herpesvirus 7
auuccacuaaaaga

SEQ ID NO: 184693 - RNA, 15 nt, Human herpesvirus 7
auuccagauaugaca

SEQ ID NO: 184694 - RNA, 16 nt, Human herpesvirus 7
auucauuuccucccaa

SEQ ID NO: 184695 - RNA, 12 nt, Human herpesvirus 7
auucaugcagaa

SEQ ID NO: 184696 - RNA, 17 nt, Human herpesvirus 7
auucaguuuacugugga

SEQ ID NO: 184697 - RNA, 18 nt, Human herpesvirus 7
auucaucaggacaaucaa

SEQ ID NO: 184698 - RNA, 22 nt, Human herpesvirus 7
auucaucaggacaaucaaacau

SEQ ID NO: 184699 - RNA, 22 nt, Human herpesvirus 7
auucauccaaaaagaaacuuuc

SEQ ID NO: 184700 - RNA, 20 nt, Human herpesvirus 7
auucacgcucucaaucaaaa

SEQ ID NO: 184701 - RNA, 14 nt, Human herpesvirus 7
auucacgcuuccau

SEQ ID NO: 184702 - RNA, 15 nt, Human herpesvirus 7
auucacgcuuccauc

SEQ ID NO: 184703 - RNA, 20 nt, Human herpesvirus 7
auucacgcuuccaucacaaa

SEQ ID NO: 184704 - RNA, 14 nt, Human herpesvirus 7
auucacauaccugu

SEQ ID NO: 184705 - RNA, 19 nt, Human herpesvirus 7
auucacauugucacugcaa

SEQ ID NO: 184706 - RNA, 15 nt, Human herpesvirus 7
auucaaucuacugua

SEQ ID NO: 184707 - RNA, 17 nt, Human herpesvirus 7
auucaauggcaucuuau

SEQ ID NO: 184708 - RNA, 23 nt, Human herpesvirus 7
auucaauauaguuugguuaucca

SEQ ID NO: 184709 - RNA, 16 nt, Human herpesvirus 7
auucaaucaccaaaga

SEQ ID NO: 184710 - RNA, 18 nt, Human herpesvirus 7
auucaauaaaaagauaua

SEQ ID NO: 184711 - RNA, 17 nt, Human herpesvirus 7
auucaauaauggcauua

SEQ ID NO: 184712 - RNA, 22 nt, Human herpesvirus 7
auucaauaauggcauuacuaca

SEQ ID NO: 184713 - RNA, 16 nt, Human herpesvirus 7
auucaaaguacacgua

SEQ ID NO: 184714 - RNA, 17 nt, Human herpesvirus 7
auucaaauaagggauau

SEQ ID NO: 184715 - RNA, 14 nt, Human herpesvirus 7
auucaaccacagac

SEQ ID NO: 184716 - RNA, 22 nt, Human herpesvirus 7
auucaacacucgauuagguaau

SEQ ID NO: 184717 - RNA, 15 nt, Human herpesvirus 7
auucaacaucuuuca

SEQ ID NO: 184718 - RNA, 20 nt, Human herpesvirus 7
auugugugucuuguguucaa

SEQ ID NO: 184719 - RNA, 21 nt, Human herpesvirus 7
auugugugucuuguguucaag

SEQ ID NO: 184720 - RNA, 23 nt, Human herpesvirus 7
auugugguacaacaaacauucca

SEQ ID NO: 184721 - RNA, 18 nt, Human herpesvirus 7
auugucuuacagcacuuu

SEQ ID NO: 184722 - RNA, 15 nt, Human herpesvirus 7
auuguauuugucucu

SEQ ID NO: 184723 - RNA, 21 nt, Human herpesvirus 7
auugucuacaauuucuggcaa

SEQ ID NO: 184724 - RNA, 16 nt, Human herpesvirus 7
auugaguuuacugcca

SEQ ID NO: 184725 - RNA, 22 nt, Human herpesvirus 7
auuguaaguaaauuuacuugau

SEQ ID NO: 184726 - RNA, 15 nt, Human herpesvirus 7
auucgauuagcuguu

SEQ ID NO: 184727 - RNA, 12 nt, Human herpesvirus 7
auucgaugucag

SEQ ID NO: 184728 - RNA, 23 nt, Human herpesvirus 7
auucuuccagaaaggagacuuaa

SEQ ID NO: 184729 - RNA, 15 nt, Human herpesvirus 7
auucuuaugccaggu

SEQ ID NO: 184730 - RNA, 19 nt, Human herpesvirus 7
auugacauaaucauggaaa

SEQ ID NO: 184731 - RNA, 19 nt, Human herpesvirus 7
auugacuaugaauuugaca

SEQ ID NO: 184732 - RNA, 15 nt, Human herpesvirus 7
auucuuuuucaagau

SEQ ID NO: 184733 - RNA, 15 nt, Human herpesvirus 7
auugaaaaugcauug

SEQ ID NO: 184734 - RNA, 18 nt, Human herpesvirus 7
auugaaaaugcauugcuu

SEQ ID NO: 184735 - RNA, 18 nt, Human herpesvirus 7
auugaaagaccaaauuca

SEQ ID NO: 184736 - RNA, 23 nt, Human herpesvirus 7
auucuuuucaaugcaacuuuaau

SEQ ID NO: 184737 - RNA, 20 nt, Human herpesvirus 7
auucuuaaugcgaaagcucu

SEQ ID NO: 184738 - RNA, 14 nt, Human herpesvirus 7
auugaaaguaaaaa

SEQ ID NO: 184739 - RNA, 17 nt, Human herpesvirus 7
auugaaccuuaacauac

SEQ ID NO: 184740 - RNA, 21 nt, Human herpesvirus 7
auuuauauuugcuugcugaau

SEQ ID NO: 184741 - RNA, 19 nt, Human herpesvirus 7
auuuauauauggcaauaaa

SEQ ID NO: 184742 - RNA, 13 nt, Human herpesvirus 7
auuuaugcuuuaa

SEQ ID NO: 184743 - RNA, 17 nt, Human herpesvirus 7
auuucaauuaaugcauu

SEQ ID NO: 184744 - RNA, 17 nt, Human herpesvirus 7
auuucacacaaugccuu

SEQ ID NO: 184745 - RNA, 20 nt, Human herpesvirus 7
auuuauuuuuuccaugucac

SEQ ID NO: 184746 - RNA, 23 nt, Human herpesvirus 7
auuuauugagcaauugauucaca

SEQ ID NO: 184747 - RNA, 12 nt, Human herpesvirus 7
auuuagauuuaa

SEQ ID NO: 184748 - RNA, 18 nt, Human herpesvirus 7
auuuagcaccaacugaau

SEQ ID NO: 184749 - RNA, 20 nt, Human herpesvirus 7
auuuagcuaauucauuguau

SEQ ID NO: 184750 - RNA, 21 nt, Human herpesvirus 7
auuuacuugauuuucuuacac

SEQ ID NO: 184751 - RNA, 20 nt, Human herpesvirus 7
auuuaccuuuaauugauauu

SEQ ID NO: 184752 - RNA, 18 nt, Human herpesvirus 7
auuugguguacuacauau

SEQ ID NO: 184753 - RNA, 20 nt, Human herpesvirus 7
auuugguguacuacauauua

SEQ ID NO: 184754 - RNA, 22 nt, Human herpesvirus 7
auuuguucaaaauauuuaucug

SEQ ID NO: 184755 - RNA, 15 nt, Human herpesvirus 7
auuuguuccaaacuc

SEQ ID NO: 184756 - RNA, 19 nt, Human herpesvirus 7
auuucuaauagacaaauua

SEQ ID NO: 184757 - RNA, 13 nt, Human herpesvirus 7
auuucuacaauau

SEQ ID NO: 184758 - RNA, 15 nt, Human herpesvirus 7
auuucuauaaucacg

SEQ ID NO: 184759 - RNA, 20 nt, Human herpesvirus 7
auuucuauuagauaaugaca

SEQ ID NO: 184760 - RNA, 23 nt, Human herpesvirus 7
auuucuauuagauaaugacaaac

SEQ ID NO: 184761 - RNA, 15 nt, Human herpesvirus 7
auuucguuauuccau

SEQ ID NO: 184762 - RNA, 18 nt, Human herpesvirus 7
auuuccuuuaugugauau

SEQ ID NO: 184763 - RNA, 13 nt, Human herpesvirus 7
auuuccaacgcau

SEQ ID NO: 184764 - RNA, 19 nt, Human herpesvirus 7
auuucauaucuaugaugca

SEQ ID NO: 184765 - RNA, 19 nt, Human herpesvirus 7
auuucagaauuuccagaag

SEQ ID NO: 184766 - RNA, 22 nt, Human herpesvirus 7
auuucacauauaggaacaaauc

SEQ ID NO: 184767 - RNA, 18 nt, Human herpesvirus 7
auuuccgaccugagauga

SEQ ID NO: 184768 - RNA, 20 nt, Human herpesvirus 7
agguaaaaauuugacauuug

SEQ ID NO: 184769 - RNA, 23 nt, Human herpesvirus 7
agguaaaaauuugacauuugcaa

SEQ ID NO: 184770 - RNA, 20 nt, Human herpesvirus 7
aggucuuucaugcauugcau

SEQ ID NO: 184771 - RNA, 14 nt, Human herpesvirus 7
aggucuuccacugu

SEQ ID NO: 184772 - RNA, 16 nt, Human herpesvirus 7
aggucuuccacuguug

SEQ ID NO: 184773 - RNA, 18 nt, Human herpesvirus 7
aggucuuccacuguugua

SEQ ID NO: 184774 - RNA, 14 nt, Human herpesvirus 7
agggguuugaacuu

SEQ ID NO: 184775 - RNA, 23 nt, Human herpesvirus 7
agguuuuucaaagacgcagucua

SEQ ID NO: 184776 - RNA, 21 nt, Human herpesvirus 7
agguugcuucuucgagucagu

SEQ ID NO: 184777 - RNA, 23 nt, Human herpesvirus 7
agguuuaggaaauugcuuucuaa

SEQ ID NO: 184778 - RNA, 16 nt, Human herpesvirus 7
agguuuaaaacauuua

SEQ ID NO: 184779 - RNA, 20 nt, Human herpesvirus 7
agguucauauacuucuugcc

SEQ ID NO: 184780 - RNA, 21 nt, Human herpesvirus 7
agguucauauacuucuugccc

SEQ ID NO: 184781 - RNA, 22 nt, Human herpesvirus 7
agguuaagccuaggauaccaaa

SEQ ID NO: 184782 - RNA, 20 nt, Human herpesvirus 7
agguuaagugaaugugcuuu

SEQ ID NO: 184783 - RNA, 15 nt, Human herpesvirus 7
aggaugaaagugcau

SEQ ID NO: 184784 - RNA, 19 nt, Human herpesvirus 7
aggaguauguugcauauca

SEQ ID NO: 184785 - RNA, 20 nt, Human herpesvirus 7
aggaguauguugcauaucau

SEQ ID NO: 184786 - RNA, 21 nt, Human herpesvirus 7
aggauaccaaacaaaauucca

SEQ ID NO: 184787 - RNA, 14 nt, Human herpesvirus 7
aggcugcuuuuuca

SEQ ID NO: 184788 - RNA, 16 nt, Human herpesvirus 7
aggcuaugacuuugaa

SEQ ID NO: 184789 - RNA, 14 nt, Human herpesvirus 7
aggcgucaccgcua

SEQ ID NO: 184790 - RNA, 15 nt, Human herpesvirus 7
agcuuggccauaaac

SEQ ID NO: 184791 - RNA, 21 nt, Human herpesvirus 7
agcuucauuuuaaaaaagaca

SEQ ID NO: 184792 - RNA, 17 nt, Human herpesvirus 7
agcuucuaaaugugcua

SEQ ID NO: 184793 - RNA, 14 nt, Human herpesvirus 7
agcuuuacagcagc

SEQ ID NO: 184794 - RNA, 15 nt, Human herpesvirus 7
agcuugguuuuacaa

SEQ ID NO: 184795 - RNA, 17 nt, Human herpesvirus 7
aggaaaaacgguguugu

SEQ ID NO: 184796 - RNA, 17 nt, Human herpesvirus 7
aggaaaaaugcugcuca

SEQ ID NO: 184797 - RNA, 17 nt, Human herpesvirus 7
agcuuucaugauuucaa

SEQ ID NO: 184798 - RNA, 18 nt, Human herpesvirus 7
agcuuuucgaacuuguca

SEQ ID NO: 184799 - RNA, 17 nt, Human herpesvirus 7
agcuuucuuucucauca

SEQ ID NO: 184800 - RNA, 18 nt, Human herpesvirus 7
agcuuugaucuacauaua

SEQ ID NO: 184801 - RNA, 20 nt, Human herpesvirus 7
agcuuuggcagcuagccuau

SEQ ID NO: 184802 - RNA, 17 nt, Human herpesvirus 7
aggaaaugucuuuguca

SEQ ID NO: 184803 - RNA, 17 nt, Human herpesvirus 7
aggaaaaucguguuaag

SEQ ID NO: 184804 - RNA, 15 nt, Human herpesvirus 7
aggaacagauucucc

SEQ ID NO: 184805 - RNA, 16 nt, Human herpesvirus 7
agcuucaguacuugaa

SEQ ID NO: 184806 - RNA, 17 nt, Human herpesvirus 7
agcuuaaauguguaaca

SEQ ID NO: 184807 - RNA, 22 nt, Human herpesvirus 7
agcuuaaauguguaacaauuga

SEQ ID NO: 184808 - RNA, 18 nt, Human herpesvirus 7
agcuuaagacaccccaaa

SEQ ID NO: 184809 - RNA, 20 nt, Human herpesvirus 7
agcuuaagacaccccaaaau

SEQ ID NO: 184810 - RNA, 15 nt, Human herpesvirus 7
agcugcuaaaaccau

SEQ ID NO: 184811 - RNA, 22 nt, Human herpesvirus 7
agcauuaauuugguaucacuuc

SEQ ID NO: 184812 - RNA, 13 nt, Human herpesvirus 7
agcauuauuggau

SEQ ID NO: 184813 - RNA, 20 nt, Human herpesvirus 7
agcauuauuggauaauauca

SEQ ID NO: 184814 - RNA, 19 nt, Human herpesvirus 7
agcugggauagaaauguaa

SEQ ID NO: 184815 - RNA, 23 nt, Human herpesvirus 7
agcaucgauguuuuaucuaacac

SEQ ID NO: 184816 - RNA, 18 nt, Human herpesvirus 7
agcauacuuuaaaacuuu

SEQ ID NO: 184817 - RNA, 20 nt, Human herpesvirus 7
agcagugauuucaucaccac

SEQ ID NO: 184818 - RNA, 15 nt, Human herpesvirus 7
agcagcuugaugaau

SEQ ID NO: 184819 - RNA, 18 nt, Human herpesvirus 7
aguugcugcugucuucau

SEQ ID NO: 184820 - RNA, 15 nt, Human herpesvirus 7
aguugcuugugaagg

SEQ ID NO: 184821 - RNA, 14 nt, Human herpesvirus 7
aguuguggcaaaag

SEQ ID NO: 184822 - RNA, 21 nt, Human herpesvirus 7
aguuguacucagagaucauaa

SEQ ID NO: 184823 - RNA, 19 nt, Human herpesvirus 7
auaaaaguaaaaacacguc

SEQ ID NO: 184824 - RNA, 18 nt, Human herpesvirus 7
aguuucaguacauucuag

SEQ ID NO: 184825 - RNA, 14 nt, Human herpesvirus 7
aguuuccauugcug

SEQ ID NO: 184826 - RNA, 13 nt, Human herpesvirus 7
aguuucuacaugu

SEQ ID NO: 184827 - RNA, 13 nt, Human herpesvirus 7
aguuuaucuugga

SEQ ID NO: 184828 - RNA, 20 nt, Human herpesvirus 7
aguuuagagacuggcagagu

SEQ ID NO: 184829 - RNA, 15 nt, Human herpesvirus 7
aguucuaucucaaaa

SEQ ID NO: 184830 - RNA, 17 nt, Human herpesvirus 7
aguucuccgcacuaaaa

SEQ ID NO: 184831 - RNA, 15 nt, Human herpesvirus 7
aguucgcaaugguau

SEQ ID NO: 184832 - RNA, 15 nt, Human herpesvirus 7
aguugacaaugucaa

SEQ ID NO: 184833 - RNA, 16 nt, Human herpesvirus 7
aguugcacuccuagaa

SEQ ID NO: 184834 - RNA, 22 nt, Human herpesvirus 7
aguugcaacuagagaagccacu

SEQ ID NO: 184835 - RNA, 19 nt, Human herpesvirus 7
aguugcaacucuucuucag

SEQ ID NO: 184836 - RNA, 15 nt, Human herpesvirus 7
aguucauaaugacac

SEQ ID NO: 184837 - RNA, 21 nt, Human herpesvirus 7
aguuccuaaauaauucacauu

SEQ ID NO: 184838 - RNA, 17 nt, Human herpesvirus 7
aguuauuuguuccaguu

SEQ ID NO: 184839 - RNA, 15 nt, Human herpesvirus 7
auaacaggaaaccac

SEQ ID NO: 184840 - RNA, 16 nt, Human herpesvirus 7
auaacaggaaaccaca

SEQ ID NO: 184841 - RNA, 16 nt, Human herpesvirus 7
auaacauugcuucaga

SEQ ID NO: 184842 - RNA, 22 nt, Human herpesvirus 7
auaacauugcuucagaaauaac

SEQ ID NO: 184843 - RNA, 15 nt, Human herpesvirus 7
auaaucaaaaaauuc

SEQ ID NO: 184844 - RNA, 19 nt, Human herpesvirus 7
auaauacuggcaugucuca

SEQ ID NO: 184845 - RNA, 14 nt, Human herpesvirus 7
auaauagcggcuaa

SEQ ID NO: 184846 - RNA, 21 nt, Human herpesvirus 7
auaaccgguaaagaaccuauc

SEQ ID NO: 184847 - RNA, 23 nt, Human herpesvirus 7
auaaccgguaaagaaccuaucaa

SEQ ID NO: 184848 - RNA, 16 nt, Human herpesvirus 7
auaaacaauguguuaa

SEQ ID NO: 184849 - RNA, 14 nt, Human herpesvirus 7
auaaacacuugcua

SEQ ID NO: 184850 - RNA, 20 nt, Human herpesvirus 7
auaaacacuugcuagcugug

SEQ ID NO: 184851 - RNA, 23 nt, Human herpesvirus 7
auaaacacuugcuagcugugaua

SEQ ID NO: 184852 - RNA, 21 nt, Human herpesvirus 7
auaaaauuuggagaaggaaaa

SEQ ID NO: 184853 - RNA, 17 nt, Human herpesvirus 7
auaaaaugguugugcaa

SEQ ID NO: 184854 - RNA, 16 nt, Human herpesvirus 7
auaaauucaaggaauu

SEQ ID NO: 184855 - RNA, 18 nt, Human herpesvirus 7
auaaauucaaggaauucu

SEQ ID NO: 184856 - RNA, 15 nt, Human herpesvirus 7
auaaauuuugaaugu

SEQ ID NO: 184857 - RNA, 21 nt, Human herpesvirus 7
auaaaccugcuaacaaguaug

SEQ ID NO: 184858 - RNA, 16 nt, Human herpesvirus 7
auaaacucuaugucaa

SEQ ID NO: 184859 - RNA, 18 nt, Human herpesvirus 7
auaaacguccauugauua

SEQ ID NO: 184860 - RNA, 15 nt, Human herpesvirus 7
auaaacgguagaaug

SEQ ID NO: 184861 - RNA, 17 nt, Human herpesvirus 7
auaaacgguagaaugug

SEQ ID NO: 184862 - RNA, 17 nt, Human herpesvirus 7
aguuaauguguguggua

SEQ ID NO: 184863 - RNA, 12 nt, Human herpesvirus 7
aguuaauugugu

SEQ ID NO: 184864 - RNA, 20 nt, Human herpesvirus 7
agugugcacacaaaggccag

SEQ ID NO: 184865 - RNA, 15 nt, Human herpesvirus 7
aguguucauuaucac

SEQ ID NO: 184866 - RNA, 22 nt, Human herpesvirus 7
aguguuuuuuucugguaaaaag

SEQ ID NO: 184867 - RNA, 22 nt, Human herpesvirus 7
agugcucuuugucuuugcucuc

SEQ ID NO: 184868 - RNA, 13 nt, Human herpesvirus 7
aguggaaucucau

SEQ ID NO: 184869 - RNA, 21 nt, Human herpesvirus 7
agugcucugucuccaaaucaa

SEQ ID NO: 184870 - RNA, 13 nt, Human herpesvirus 7
agugcuuacgauu

SEQ ID NO: 184871 - RNA, 21 nt, Human herpesvirus 7
aguggcaacgaggaaggugau

SEQ ID NO: 184872 - RNA, 22 nt, Human herpesvirus 7
aguggaugcuggaaaacauuuc

SEQ ID NO: 184873 - RNA, 16 nt, Human herpesvirus 7
agugggaaugcaucug

SEQ ID NO: 184874 - RNA, 17 nt, Human herpesvirus 7
aguagaaaaugcuguuu

SEQ ID NO: 184875 - RNA, 14 nt, Human herpesvirus 7
aguacuacuaauca

SEQ ID NO: 184876 - RNA, 18 nt, Human herpesvirus 7
aguaacgcagacuaauca

SEQ ID NO: 184877 - RNA, 22 nt, Human herpesvirus 7
aguaaauucagcgucaauagua

SEQ ID NO: 184878 - RNA, 18 nt, Human herpesvirus 7
aguaaauugcaacuggca

SEQ ID NO: 184879 - RNA, 20 nt, Human herpesvirus 7
aguaaauugcaacuggcauu

SEQ ID NO: 184880 - RNA, 23 nt, Human herpesvirus 7
aguaaauaaaaugguugugcaau

SEQ ID NO: 184881 - RNA, 15 nt, Human herpesvirus 7
agugauuucaucacc

SEQ ID NO: 184882 - RNA, 20 nt, Human herpesvirus 7
agugauuuuucauuuaucuu

SEQ ID NO: 184883 - RNA, 20 nt, Human herpesvirus 7
agugauugguagaaaugugc

SEQ ID NO: 184884 - RNA, 23 nt, Human herpesvirus 7
agugagguggacgcuaauuugca

SEQ ID NO: 184885 - RNA, 14 nt, Human herpesvirus 7
aguaugaaaucaaa

SEQ ID NO: 184886 - RNA, 16 nt, Human herpesvirus 7
aguauggaaaaauguu

SEQ ID NO: 184887 - RNA, 22 nt, Human herpesvirus 7
aguauacaaaagacauaacaaa

SEQ ID NO: 184888 - RNA, 15 nt, Human herpesvirus 7
augaacaaguuucaa

SEQ ID NO: 184889 - RNA, 18 nt, Human herpesvirus 7
augaaaacugaauuggua

SEQ ID NO: 184890 - RNA, 13 nt, Human herpesvirus 7
augaaacuuccaa

SEQ ID NO: 184891 - RNA, 15 nt, Human herpesvirus 7
augaaacuuccaaua

SEQ ID NO: 184892 - RNA, 18 nt, Human herpesvirus 7
aucuuugaaucugcuaag

SEQ ID NO: 184893 - RNA, 17 nt, Human herpesvirus 7
aucuuuuucaaauggau

SEQ ID NO: 184894 - RNA, 13 nt, Human herpesvirus 7
aucuuguuuauuu

SEQ ID NO: 184895 - RNA, 20 nt, Human herpesvirus 7
aucuuuaauaaaaacaaaga

SEQ ID NO: 184896 - RNA, 23 nt, Human herpesvirus 7
aucuuuaauaaaaacaaagacua

SEQ ID NO: 184897 - RNA, 13 nt, Human herpesvirus 7
aucuuuacuuuca

SEQ ID NO: 184898 - RNA, 18 nt, Human herpesvirus 7
aucuuuacuuucauagcu

SEQ ID NO: 184899 - RNA, 19 nt, Human herpesvirus 7
aucuugaauuccgauuuaa

SEQ ID NO: 184900 - RNA, 16 nt, Human herpesvirus 7
aucguucauugauuau

SEQ ID NO: 184901 - RNA, 20 nt, Human herpesvirus 7
aucuaaagacacuuauuuga

SEQ ID NO: 184902 - RNA, 21 nt, Human herpesvirus 7
aucuaaagacacuuauuugau

SEQ ID NO: 184903 - RNA, 17 nt, Human herpesvirus 7
aucuaauauuauaucua

SEQ ID NO: 184904 - RNA, 20 nt, Human herpesvirus 7
aucuaacaguuucugcauac

SEQ ID NO: 184905 - RNA, 23 nt, Human herpesvirus 7
aucuaagagauuguggcaaugua

SEQ ID NO: 184906 - RNA, 14 nt, Human herpesvirus 7
aucgcgauguuggc

SEQ ID NO: 184907 - RNA, 23 nt, Human herpesvirus 7
augaaggaugcguguguucaaaa

SEQ ID NO: 184908 - RNA, 22 nt, Human herpesvirus 7
augaagcgcugagaucuuccaa

SEQ ID NO: 184909 - RNA, 11 nt, Human herpesvirus 7
augaaucugca

SEQ ID NO: 184910 - RNA, 14 nt, Human herpesvirus 7
augaauuugacagu

SEQ ID NO: 184911 - RNA, 24 nt, Human herpesvirus 7
augacaaaacugcaaauccaacag

SEQ ID NO: 184912 - RNA, 18 nt, Human herpesvirus 7
augacaacaaagcaugaa

SEQ ID NO: 184913 - RNA, 19 nt, Human herpesvirus 7
augaaugcaagcaacacuu

SEQ ID NO: 184914 - RNA, 23 nt, Human herpesvirus 7
augacauuuuuaccuccauauga

SEQ ID NO: 184915 - RNA, 18 nt, Human herpesvirus 7
augaccgcaugugaaaau

SEQ ID NO: 184916 - RNA, 12 nt, Human herpesvirus 7
augacucagacg

SEQ ID NO: 184917 - RNA, 22 nt, Human herpesvirus 7
augacuuucuucuagaaacuaa

SEQ ID NO: 184918 - RNA, 11 nt, Human herpesvirus 7
augacuuugaa

SEQ ID NO: 184919 - RNA, 21 nt, Human herpesvirus 7
augccuguuuuuuaaugcuga

SEQ ID NO: 184920 - RNA, 20 nt, Human herpesvirus 7
augcgauacuaguuuauuaa

SEQ ID NO: 184921 - RNA, 14 nt, Human herpesvirus 7
augcgauaucugac

SEQ ID NO: 184922 - RNA, 20 nt, Human herpesvirus 7
augcuaagaaagaacauuuu

SEQ ID NO: 184923 - RNA, 22 nt, Human herpesvirus 7
augcuagaagacugcaaccuga

SEQ ID NO: 184924 - RNA, 12 nt, Human herpesvirus 7
augcugcaaugu

SEQ ID NO: 184925 - RNA, 20 nt, Human herpesvirus 7
augcucuagaaaaucuacca

SEQ ID NO: 184926 - RNA, 15 nt, Human herpesvirus 7
augcuauuaaaugau

SEQ ID NO: 184927 - RNA, 13 nt, Human herpesvirus 7
augcauugcauuc

SEQ ID NO: 184928 - RNA, 13 nt, Human herpesvirus 7
augcauccaaaga

SEQ ID NO: 184929 - RNA, 16 nt, Human herpesvirus 7
augcauauuugaacau

SEQ ID NO: 184930 - RNA, 18 nt, Human herpesvirus 7
augcaucaaaacauauca

SEQ ID NO: 184931 - RNA, 14 nt, Human herpesvirus 7
augcaugcaauuuu

SEQ ID NO: 184932 - RNA, 14 nt, Human herpesvirus 7
augcaugcuaauau

SEQ ID NO: 184933 - RNA, 16 nt, Human herpesvirus 7
augccagccuauucac

SEQ ID NO: 184934 - RNA, 20 nt, Human herpesvirus 7
augccagguuuuucaaagac

SEQ ID NO: 184935 - RNA, 19 nt, Human herpesvirus 7
augcauuauauccaauaau

SEQ ID NO: 184936 - RNA, 14 nt, Human herpesvirus 7
augccaaugaacaa

SEQ ID NO: 184937 - RNA, 14 nt, Human herpesvirus 7
augccuauucaaac

SEQ ID NO: 184938 - RNA, 17 nt, Human herpesvirus 7
augauggauaacuauga

SEQ ID NO: 184939 - RNA, 21 nt, Human herpesvirus 7
augaugcauccgaaucuuuau

SEQ ID NO: 184940 - RNA, 21 nt, Human herpesvirus 7
augaugacaacaaagcaugaa

SEQ ID NO: 184941 - RNA, 22 nt, Human herpesvirus 7
augaugacaacaaagcaugaaa

SEQ ID NO: 184942 - RNA, 9 nt, Human herpesvirus 7
augaugcau

SEQ ID NO: 184943 - RNA, 22 nt, Human herpesvirus 7
augauuagcgcgugaacaaaua

SEQ ID NO: 184944 - RNA, 23 nt, Human herpesvirus 7
augaucuuacuuccuaaucuaac

SEQ ID NO: 184945 - RNA, 15 nt, Human herpesvirus 7
augaugaaacuucca

SEQ ID NO: 184946 - RNA, 16 nt, Human herpesvirus 7
augaugaaacuuccaa

SEQ ID NO: 184947 - RNA, 19 nt, Human herpesvirus 7
augcaagaaaguccaaagu

SEQ ID NO: 184948 - RNA, 13 nt, Human herpesvirus 7
augauuuugacau

SEQ ID NO: 184949 - RNA, 20 nt, Human herpesvirus 7
augauuugguauacacuauu

SEQ ID NO: 184950 - RNA, 17 nt, Human herpesvirus 7
augcagaaaaauccaaa

SEQ ID NO: 184951 - RNA, 14 nt, Human herpesvirus 7
auccaucuguaaca

SEQ ID NO: 184952 - RNA, 15 nt, Human herpesvirus 7
auccauuugugaugu

SEQ ID NO: 184953 - RNA, 18 nt, Human herpesvirus 7
auccauuugugauguacu

SEQ ID NO: 184954 - RNA, 21 nt, Human herpesvirus 7
aucauuccguuuuuuugcauc

SEQ ID NO: 184955 - RNA, 17 nt, Human herpesvirus 7
aucccugcugauacaag

SEQ ID NO: 184956 - RNA, 19 nt, Human herpesvirus 7
aucccuagaagaugacuca

SEQ ID NO: 184957 - RNA, 14 nt, Human herpesvirus 7
aucccagaaauuuc

SEQ ID NO: 184958 - RNA, 16 nt, Human herpesvirus 7
aucgaacuguuacaac

SEQ ID NO: 184959 - RNA, 13 nt, Human herpesvirus 7
auccgaaucuguu

SEQ ID NO: 184960 - RNA, 20 nt, Human herpesvirus 7
aucgcaguguucauuaucac

SEQ ID NO: 184961 - RNA, 16 nt, Human herpesvirus 7
aucgauugcaguugaa

SEQ ID NO: 184962 - RNA, 16 nt, Human herpesvirus 7
aucgaggaagcuuucg

SEQ ID NO: 184963 - RNA, 23 nt, Human herpesvirus 7
auauuagauuauacaaauccaag

SEQ ID NO: 184964 - RNA, 13 nt, Human herpesvirus 7
aucacaacauaua

SEQ ID NO: 184965 - RNA, 19 nt, Human herpesvirus 7
aucacaaguuaauuuugca

SEQ ID NO: 184966 - RNA, 15 nt, Human herpesvirus 7
auauuccaacucaau

SEQ ID NO: 184967 - RNA, 15 nt, Human herpesvirus 7
aucacauuaucuuga

SEQ ID NO: 184968 - RNA, 20 nt, Human herpesvirus 7
aucaucuuaaaaguacaaau

SEQ ID NO: 184969 - RNA, 15 nt, Human herpesvirus 7
aucauggaaaaugga

SEQ ID NO: 184970 - RNA, 16 nt, Human herpesvirus 7
aucacgcuagccucau

SEQ ID NO: 184971 - RNA, 12 nt, Human herpesvirus 7
aucauauaugca

SEQ ID NO: 184972 - RNA, 13 nt, Human herpesvirus 7
aucaucaacauac

SEQ ID NO: 184973 - RNA, 13 nt, Human herpesvirus 7
auauaaacacuug

SEQ ID NO: 184974 - RNA, 18 nt, Human herpesvirus 7
auaguuugguuauccaag

SEQ ID NO: 184975 - RNA, 21 nt, Human herpesvirus 7
auaguuuguuucaauaugcau

SEQ ID NO: 184976 - RNA, 19 nt, Human herpesvirus 7
auagguaucuuuacuuuca

SEQ ID NO: 184977 - RNA, 20 nt, Human herpesvirus 7
auagguaucuuuacuuucau

SEQ ID NO: 184978 - RNA, 24 nt, Human herpesvirus 7
auaguacaucuuucuaguucccau

SEQ ID NO: 184979 - RNA, 19 nt, Human herpesvirus 7
auagcauuuguuacagcuu

SEQ ID NO: 184980 - RNA, 21 nt, Human herpesvirus 7
auagcuugacaccaacaucug

SEQ ID NO: 184981 - RNA, 19 nt, Human herpesvirus 7
auaaugguuugaauaucuc

SEQ ID NO: 184982 - RNA, 19 nt, Human herpesvirus 7
auaauguuuuuuucauaca

SEQ ID NO: 184983 - RNA, 20 nt, Human herpesvirus 7
auagcagagaauauguuauc

SEQ ID NO: 184984 - RNA, 15 nt, Human herpesvirus 7
auagcaggaagcaca

SEQ ID NO: 184985 - RNA, 20 nt, Human herpesvirus 7
auaaucucaauuaaaacauc

SEQ ID NO: 184986 - RNA, 22 nt, Human herpesvirus 7
auaaucucaauuaaaacaucuc

SEQ ID NO: 184987 - RNA, 17 nt, Human herpesvirus 7
auaauggcauuacuaca

SEQ ID NO: 184988 - RNA, 22 nt, Human herpesvirus 7
auaauggcauuacuacagugga

SEQ ID NO: 184989 - RNA, 15 nt, Human herpesvirus 7
auauccaauaaugca

SEQ ID NO: 184990 - RNA, 20 nt, Human herpesvirus 7
auauuaccucguauacauac

SEQ ID NO: 184991 - RNA, 23 nt, Human herpesvirus 7
auaucguuguguggcaacaucuu

SEQ ID NO: 184992 - RNA, 14 nt, Human herpesvirus 7
auaucuaaagugga

SEQ ID NO: 184993 - RNA, 13 nt, Human herpesvirus 7
auauguggcacau

SEQ ID NO: 184994 - RNA, 16 nt, Human herpesvirus 7
auauguugauucucuc

SEQ ID NO: 184995 - RNA, 12 nt, Human herpesvirus 7
auauguugcuca

SEQ ID NO: 184996 - RNA, 20 nt, Human herpesvirus 7
auauaugucauagugggaac

SEQ ID NO: 184997 - RNA, 13 nt, Human herpesvirus 7
auauauuaaucuu

SEQ ID NO: 184998 - RNA, 16 nt, Human herpesvirus 7
auauagcaauauuuau

SEQ ID NO: 184999 - RNA, 21 nt, Human herpesvirus 7
cgauguuuuaucuaacacugc

SEQ ID NO: 185000 - RNA, 20 nt, Human herpesvirus 7
cgauuagcuguucauaucaa

SEQ ID NO: 185001 - RNA, 20 nt, Human herpesvirus 7
cgauuagguaauagcuuuaa

SEQ ID NO: 185002 - RNA, 16 nt, Human herpesvirus 7
cgauugcaguugaauu

SEQ ID NO: 185003 - RNA, 14 nt, Human herpesvirus 7
cgauuccagcacuu

SEQ ID NO: 185004 - RNA, 20 nt, Human herpesvirus 7
cgauccucagaauguacaca

SEQ ID NO: 185005 - RNA, 12 nt, Human herpesvirus 7
cgaucuaaagac

SEQ ID NO: 185006 - RNA, 21 nt, Human herpesvirus 7
cgaucuaagucuacaucauca

SEQ ID NO: 185007 - RNA, 20 nt, Human herpesvirus 7
cgauauaguuuguuucaaua

SEQ ID NO: 185008 - RNA, 23 nt, Human herpesvirus 7
cgauagcauuagagcauauucca

SEQ ID NO: 185009 - RNA, 14 nt, Human herpesvirus 7
cgauacagaucauu

SEQ ID NO: 185010 - RNA, 19 nt, Human herpesvirus 7
cgauaagaaaguuguacuc

SEQ ID NO: 185011 - RNA, 15 nt, Human herpesvirus 7
cgacacugaauguca

SEQ ID NO: 185012 - RNA, 21 nt, Human herpesvirus 7
cgacuuugaagagcuuuuuaa

SEQ ID NO: 185013 - RNA, 21 nt, Human herpesvirus 7
cgacuucuaaaaauacaacuu

SEQ ID NO: 185014 - RNA, 15 nt, Human herpesvirus 7
cgagcgacagucacc

SEQ ID NO: 185015 - RNA, 14 nt, Human herpesvirus 7
cgaagauacgcuag

SEQ ID NO: 185016 - RNA, 13 nt, Human herpesvirus 7
cgaaggcaucaag

SEQ ID NO: 185017 - RNA, 17 nt, Human herpesvirus 7
cgaagcagggaaaaagc

SEQ ID NO: 185018 - RNA, 20 nt, Human herpesvirus 7
cgaaauucgcaaaauuucau

SEQ ID NO: 185019 - RNA, 14 nt, Human herpesvirus 7
cgaaucuacauuaa

SEQ ID NO: 185020 - RNA, 14 nt, Human herpesvirus 7
cgaaucaguucaac

SEQ ID NO: 185021 - RNA, 22 nt, Human herpesvirus 7
cgaaagaauuuuguaagaaaca

SEQ ID NO: 185022 - RNA, 17 nt, Human herpesvirus 7
cgaaacagcgugucaaa

SEQ ID NO: 185023 - RNA, 14 nt, Human herpesvirus 7
ccuuuuucugaaaa

SEQ ID NO: 185024 - RNA, 13 nt, Human herpesvirus 7
ccuuucacuugaa

SEQ ID NO: 185025 - RNA, 12 nt, Human herpesvirus 7
ccuuucccagaa

SEQ ID NO: 185026 - RNA, 23 nt, Human herpesvirus 7
ccuuuaauggaagaacaacaacu

SEQ ID NO: 185027 - RNA, 11 nt, Human herpesvirus 7
ccuuguuugcu

SEQ ID NO: 185028 - RNA, 21 nt, Human herpesvirus 7
ccuuguuuuagggaauguaau

SEQ ID NO: 185029 - RNA, 20 nt, Human herpesvirus 7
ccuuucaacgaucucaaaau

SEQ ID NO: 185030 - RNA, 16 nt, Human herpesvirus 7
ccugcuugcacaaaga

SEQ ID NO: 185031 - RNA, 18 nt, Human herpesvirus 7
ccuggaacguccucugga

SEQ ID NO: 185032 - RNA, 13 nt, Human herpesvirus 7
ccuggaacuucac

SEQ ID NO: 185033 - RNA, 14 nt, Human herpesvirus 7
ccuggagaagacaa

SEQ ID NO: 185034 - RNA, 20 nt, Human herpesvirus 7
ccuggaguuagcgaggcauu

SEQ ID NO: 185035 - RNA, 21 nt, Human herpesvirus 7
ccuggaguuagcgaggcauuu

SEQ ID NO: 185036 - RNA, 20 nt, Human herpesvirus 7
ccuucauuuacagagaauuu

SEQ ID NO: 185037 - RNA, 14 nt, Human herpesvirus 7
ccuucuaaaacagu

SEQ ID NO: 185038 - RNA, 19 nt, Human herpesvirus 7
ccuucuugccuacacuuuc

SEQ ID NO: 185039 - RNA, 18 nt, Human herpesvirus 7
ccuugccaaaagcuugaa

SEQ ID NO: 185040 - RNA, 19 nt, Human herpesvirus 7
ccugauaaauacucaugaa

SEQ ID NO: 185041 - RNA, 16 nt, Human herpesvirus 7
ccucuauuauuucuac

SEQ ID NO: 185042 - RNA, 15 nt, Human herpesvirus 7
ccuccuugccugcaa

SEQ ID NO: 185043 - RNA, 23 nt, Human herpesvirus 7
ccuccuugccugcaauucuauuu

SEQ ID NO: 185044 - RNA, 16 nt, Human herpesvirus 7
ccguaaaacaaucgau

SEQ ID NO: 185045 - RNA, 17 nt, Human herpesvirus 7
ccgguuaaaaugggaau

SEQ ID NO: 185046 - RNA, 22 nt, Human herpesvirus 7
ccgugacaaagcauacuuuaaa

SEQ ID NO: 185047 - RNA, 17 nt, Human herpesvirus 7
ccuaucaaauuuaucuc

SEQ ID NO: 185048 - RNA, 16 nt, Human herpesvirus 7
ccuaucgagacgccag

SEQ ID NO: 185049 - RNA, 20 nt, Human herpesvirus 7
ccuauaauucucacagcuua

SEQ ID NO: 185050 - RNA, 18 nt, Human herpesvirus 7
ccuauucaaacgcuugaa

SEQ ID NO: 185051 - RNA, 21 nt, Human herpesvirus 7
ccuaugacugagaaaaacaga

SEQ ID NO: 185052 - RNA, 21 nt, Human herpesvirus 7
ccuaugucaugaaucuuugac

SEQ ID NO: 185053 - RNA, 12 nt, Human herpesvirus 7
ccgcagacuuuc

SEQ ID NO: 185054 - RNA, 17 nt, Human herpesvirus 7
ccgcacaggcugcaucu

SEQ ID NO: 185055 - RNA, 14 nt, Human herpesvirus 7
ccgggcacacuuug

SEQ ID NO: 185056 - RNA, 17 nt, Human herpesvirus 7
ccggggacauuccucau

SEQ ID NO: 185057 - RNA, 19 nt, Human herpesvirus 7
ccggguaacgcaucuccac

SEQ ID NO: 185058 - RNA, 20 nt, Human herpesvirus 7
ccgaaauucgcaaaauuuca

SEQ ID NO: 185059 - RNA, 23 nt, Human herpesvirus 7
cauuaucgcguuuucaugcucau

SEQ ID NO: 185060 - RNA, 22 nt, Human herpesvirus 7
cauguagaaacucacaauguuu

SEQ ID NO: 185061 - RNA, 18 nt, Human herpesvirus 7
cauguaguacaaugcugu

SEQ ID NO: 185062 - RNA, 14 nt, Human herpesvirus 7
cauggggcauuaau

SEQ ID NO: 185063 - RNA, 13 nt, Human herpesvirus 7
cauggauuucuua

SEQ ID NO: 185064 - RNA, 22 nt, Human herpesvirus 7
cauggcaauagauuacgcacaa

SEQ ID NO: 185065 - RNA, 17 nt, Human herpesvirus 7
caugcauauuugaacau

SEQ ID NO: 185066 - RNA, 15 nt, Human herpesvirus 7
caugcaauuuucacc

SEQ ID NO: 185067 - RNA, 15 nt, Human herpesvirus 7
cauuuuaauauguga

SEQ ID NO: 185068 - RNA, 17 nt, Human herpesvirus 7
cauuuguaugucuacaa

SEQ ID NO: 185069 - RNA, 20 nt, Human herpesvirus 7
cauuuguaugucuacaaugg

SEQ ID NO: 185070 - RNA, 21 nt, Human herpesvirus 7
cauuugugaaauugacaccgu

SEQ ID NO: 185071 - RNA, 13 nt, Human herpesvirus 7
cauugucaaagaa

SEQ ID NO: 185072 - RNA, 18 nt, Human herpesvirus 7
cauuggaacuuuaugcaa

SEQ ID NO: 185073 - RNA, 23 nt, Human herpesvirus 7
cauuggaacuuuaugcaaacuca

SEQ ID NO: 185074 - RNA, 16 nt, Human herpesvirus 7
cauucuaaaccaaaua

SEQ ID NO: 185075 - RNA, 13 nt, Human herpesvirus 7
cauucucaaaaau

SEQ ID NO: 185076 - RNA, 15 nt, Human herpesvirus 7
cauugaaaaugcauu

SEQ ID NO: 185077 - RNA, 16 nt, Human herpesvirus 7
cauugaaaaugcauug

SEQ ID NO: 185078 - RNA, 13 nt, Human herpesvirus 7
cauugaaacucga

SEQ ID NO: 185079 - RNA, 15 nt, Human herpesvirus 7
cauugaaauucugug

SEQ ID NO: 185080 - RNA, 21 nt, Human herpesvirus 7
cauugauccuccuugccugca

SEQ ID NO: 185081 - RNA, 20 nt, Human herpesvirus 7
cauugauuauaugcaucaaa

SEQ ID NO: 185082 - RNA, 15 nt, Human herpesvirus 7
cauugacauguuucu

SEQ ID NO: 185083 - RNA, 22 nt, Human herpesvirus 7
cauuauuugcugaacucuguca

SEQ ID NO: 185084 - RNA, 13 nt, Human herpesvirus 7
cauucaauggcau

SEQ ID NO: 185085 - RNA, 10 nt, Human herpesvirus 7
cauucauuga

SEQ ID NO: 185086 - RNA, 14 nt, Human herpesvirus 7
cauucauuuccucc

SEQ ID NO: 185087 - RNA, 16 nt, Human herpesvirus 7
cauucaauaauggcau

SEQ ID NO: 185088 - RNA, 23 nt, Human herpesvirus 7
cauucaauaauggcauuacuaca

SEQ ID NO: 185089 - RNA, 21 nt, Human herpesvirus 7
cauuccuuggaaaaaugaugc

SEQ ID NO: 185090 - RNA, 18 nt, Human herpesvirus 7
caucaggacaaucaaaca

SEQ ID NO: 185091 - RNA, 20 nt, Human herpesvirus 7
caucaucuuuuugaacagaa

SEQ ID NO: 185092 - RNA, 16 nt, Human herpesvirus 7
caucauauacaauaau

SEQ ID NO: 185093 - RNA, 19 nt, Human herpesvirus 7
caucaagaaacaagguuua

SEQ ID NO: 185094 - RNA, 21 nt, Human herpesvirus 7
caucaaaauuuuaauugugca

SEQ ID NO: 185095 - RNA, 19 nt, Human herpesvirus 7
caucaauuuuaaugugcuu

SEQ ID NO: 185096 - RNA, 14 nt, Human herpesvirus 7
caucacaaaacucu

SEQ ID NO: 185097 - RNA, 18 nt, Human herpesvirus 7
caggaagcacaaaucaaa

SEQ ID NO: 185098 - RNA, 15 nt, Human herpesvirus 7
caucaaaacauauca

SEQ ID NO: 185099 - RNA, 14 nt, Human herpesvirus 7
cauauuuaauuucu

SEQ ID NO: 185100 - RNA, 13 nt, Human herpesvirus 7
cauauuugaacau

SEQ ID NO: 185101 - RNA, 14 nt, Human herpesvirus 7
cauauguugauucu

SEQ ID NO: 185102 - RNA, 23 nt, Human herpesvirus 7
cauauuagauuauacaaauccaa

SEQ ID NO: 185103 - RNA, 11 nt, Human herpesvirus 7
cauauggacuu

SEQ ID NO: 185104 - RNA, 22 nt, Human herpesvirus 7
caugaauuaucuagacccuuua

SEQ ID NO: 185105 - RNA, 22 nt, Human herpesvirus 7
caugaaaacuuggaaaacaauc

SEQ ID NO: 185106 - RNA, 15 nt, Human herpesvirus 7
caucuuuucagugaa

SEQ ID NO: 185107 - RNA, 21 nt, Human herpesvirus 7
caugaaaaauaaauacuauua

SEQ ID NO: 185108 - RNA, 15 nt, Human herpesvirus 7
caugaaacguuucaa

SEQ ID NO: 185109 - RNA, 18 nt, Human herpesvirus 7
caucuugagaaauaugaa

SEQ ID NO: 185110 - RNA, 20 nt, Human herpesvirus 7
caucuuucguauugccuuuc

SEQ ID NO: 185111 - RNA, 17 nt, Human herpesvirus 7
caucuuaaaaguacaaa

SEQ ID NO: 185112 - RNA, 17 nt, Human herpesvirus 7
caucuuaaaugucaaug

SEQ ID NO: 185113 - RNA, 12 nt, Human herpesvirus 7
caucgcauauag

SEQ ID NO: 185114 - RNA, 14 nt, Human herpesvirus 7
caucccugcugaua

SEQ ID NO: 185115 - RNA, 21 nt, Human herpesvirus 7
caucccugcugauacaagaua

SEQ ID NO: 185116 - RNA, 12 nt, Human herpesvirus 7
caucauuccuau

SEQ ID NO: 185117 - RNA, 21 nt, Human herpesvirus 7
caucauugguaagaugcagac

SEQ ID NO: 185118 - RNA, 14 nt, Human herpesvirus 7
ccagauacagcaua

SEQ ID NO: 185119 - RNA, 20 nt, Human herpesvirus 7
ccacuucuaaauaaacaaga

SEQ ID NO: 185120 - RNA, 23 nt, Human herpesvirus 7
ccagauuucauguuuuaugacuc

SEQ ID NO: 185121 - RNA, 21 nt, Human herpesvirus 7
ccagaucguucauugauuaua

SEQ ID NO: 185122 - RNA, 12 nt, Human herpesvirus 7
ccagccaagacg

SEQ ID NO: 185123 - RNA, 18 nt, Human herpesvirus 7
ccacugugucaucacaga

SEQ ID NO: 185124 - RNA, 14 nt, Human herpesvirus 7
ccacuaacauuuua

SEQ ID NO: 185125 - RNA, 16 nt, Human herpesvirus 7
ccacguuuuuuagcuu

SEQ ID NO: 185126 - RNA, 19 nt, Human herpesvirus 7
ccauggccgccuaacugga

SEQ ID NO: 185127 - RNA, 23 nt, Human herpesvirus 7
ccauguauugucuuacagcacuu

SEQ ID NO: 185128 - RNA, 19 nt, Human herpesvirus 7
ccaugaaaaauaaauacua

SEQ ID NO: 185129 - RNA, 17 nt, Human herpesvirus 7
ccaucuauaaacauucu

SEQ ID NO: 185130 - RNA, 15 nt, Human herpesvirus 7
ccaugcauauuugaa

SEQ ID NO: 185131 - RNA, 12 nt, Human herpesvirus 7
ccauaaauacca

SEQ ID NO: 185132 - RNA, 13 nt, Human herpesvirus 7
ccauaaauaccaa

SEQ ID NO: 185133 - RNA, 15 nt, Human herpesvirus 7
ccauaaaugcuuaaa

SEQ ID NO: 185134 - RNA, 19 nt, Human herpesvirus 7
ccauaaaauguacaauucc

SEQ ID NO: 185135 - RNA, 14 nt, Human herpesvirus 7
ccaucuaauugcag

SEQ ID NO: 185136 - RNA, 14 nt, Human herpesvirus 7
ccagugaaugauuu

SEQ ID NO: 185137 - RNA, 13 nt, Human herpesvirus 7
ccagucccaagag

SEQ ID NO: 185138 - RNA, 10 nt, Human herpesvirus 7
ccaguugaau

SEQ ID NO: 185139 - RNA, 14 nt, Human herpesvirus 7
ccaacagcuucaga

SEQ ID NO: 185140 - RNA, 20 nt, Human herpesvirus 7
ccaacagcuucagaugcuau

SEQ ID NO: 185141 - RNA, 21 nt, Human herpesvirus 7
ccaacagaauacuacucagaa

SEQ ID NO: 185142 - RNA, 18 nt, Human herpesvirus 7
cauuuuguuuugcaauau

SEQ ID NO: 185143 - RNA, 16 nt, Human herpesvirus 7
cauuuuuaaaacaaga

SEQ ID NO: 185144 - RNA, 21 nt, Human herpesvirus 7
ccaaaaaaacacaguauauaa

SEQ ID NO: 185145 - RNA, 13 nt, Human herpesvirus 7
cauuuuucuugcu

SEQ ID NO: 185146 - RNA, 20 nt, Human herpesvirus 7
cauuuuuugucacugacgaa

SEQ ID NO: 185147 - RNA, 15 nt, Human herpesvirus 7
ccaaaaagaaacuuu

SEQ ID NO: 185148 - RNA, 19 nt, Human herpesvirus 7
ccaaaaucagacaauuuca

SEQ ID NO: 185149 - RNA, 22 nt, Human herpesvirus 7
ccaaaaucagacaauuucacac

SEQ ID NO: 185150 - RNA, 18 nt, Human herpesvirus 7
ccaaaaucuauauuugau

SEQ ID NO: 185151 - RNA, 14 nt, Human herpesvirus 7
ccacauacucuaga

SEQ ID NO: 185152 - RNA, 19 nt, Human herpesvirus 7
ccacauacucuagaacaaa

SEQ ID NO: 185153 - RNA, 22 nt, Human herpesvirus 7
ccaacgcauucaauggcaucuu

SEQ ID NO: 185154 - RNA, 15 nt, Human herpesvirus 7
aaaauguaucuuaaa

SEQ ID NO: 185155 - RNA, 15 nt, Human herpesvirus 7
aaaaugucucuugaa

SEQ ID NO: 185156 - RNA, 15 nt, Human herpesvirus 7
aaaauguuaugugcu

SEQ ID NO: 185157 - RNA, 22 nt, Human herpesvirus 7
aaaaugggaauguuaaccaaaa

SEQ ID NO: 185158 - RNA, 18 nt, Human herpesvirus 7
aaaaucuuugaaucugcu

SEQ ID NO: 185159 - RNA, 19 nt, Human herpesvirus 7
aaaaucuaucaccaagaac

SEQ ID NO: 185160 - RNA, 14 nt, Human herpesvirus 7
aaaaucucgaacag

SEQ ID NO: 185161 - RNA, 13 nt, Human herpesvirus 7
aaaaucugaauag

SEQ ID NO: 185162 - RNA, 22 nt, Human herpesvirus 7
aaaaucugaauagacacauuua

SEQ ID NO: 185163 - RNA, 16 nt, Human herpesvirus 7
aaaaugagauuuuucc

SEQ ID NO: 185164 - RNA, 13 nt, Human herpesvirus 7
aaaaugaauucaa

SEQ ID NO: 185165 - RNA, 19 nt, Human herpesvirus 7
aaaaugcccucagaacugu

SEQ ID NO: 185166 - RNA, 21 nt, Human herpesvirus 7
aaaaugauuuuucuuaccgca

SEQ ID NO: 185167 - RNA, 18 nt, Human herpesvirus 7
aaaaugcugcaauguuca

SEQ ID NO: 185168 - RNA, 17 nt, Human herpesvirus 7
aaaauaccggaccauuu

SEQ ID NO: 185169 - RNA, 17 nt, Human herpesvirus 7
ccacauuuuuugcacga

SEQ ID NO: 185170 - RNA, 21 nt, Human herpesvirus 7
aaaaucuacuguaaucugacu

SEQ ID NO: 185171 - RNA, 21 nt, Human herpesvirus 7
aaaauauuuaucugcauugau

SEQ ID NO: 185172 - RNA, 18 nt, Human herpesvirus 7
aaaaucaaaaaacacguc

SEQ ID NO: 185173 - RNA, 14 nt, Human herpesvirus 7
aaaauauauuccaa

SEQ ID NO: 185174 - RNA, 14 nt, Human herpesvirus 7
aaaauacuaaucaa

SEQ ID NO: 185175 - RNA, 22 nt, Human herpesvirus 7
aaaauaucuuuuucaaauggau

SEQ ID NO: 185176 - RNA, 13 nt, Human herpesvirus 7
aaaauauguucag

SEQ ID NO: 185177 - RNA, 13 nt, Human herpesvirus 7
aaaauauguugcu

SEQ ID NO: 185178 - RNA, 17 nt, Human herpesvirus 7
cuucugcuaacucauaa

SEQ ID NO: 185179 - RNA, 22 nt, Human herpesvirus 7
cuucuguaaaagaucuuuuaac

SEQ ID NO: 185180 - RNA, 17 nt, Human herpesvirus 7
cuucucuuggaguuugu

SEQ ID NO: 185181 - RNA, 17 nt, Human herpesvirus 7
cuucucccauucaauaa

SEQ ID NO: 185182 - RNA, 15 nt, Human herpesvirus 7
cuucuuugugagaaa

SEQ ID NO: 185183 - RNA, 18 nt, Human herpesvirus 7
cuucuuucuucaacacaa

SEQ ID NO: 185184 - RNA, 17 nt, Human herpesvirus 7
cuugaaaaucaauccaa

SEQ ID NO: 185185 - RNA, 15 nt, Human herpesvirus 7
cuucuaaaaauacaa

SEQ ID NO: 185186 - RNA, 18 nt, Human herpesvirus 7
cuucuaaaaauacaacuu

SEQ ID NO: 185187 - RNA, 19 nt, Human herpesvirus 7
cuucuaaaaauacaacuuc

SEQ ID NO: 185188 - RNA, 16 nt, Human herpesvirus 7
cuucuaaauaaacaag

SEQ ID NO: 185189 - RNA, 21 nt, Human herpesvirus 7
cuucuaccucuuacauuugau

SEQ ID NO: 185190 - RNA, 15 nt, Human herpesvirus 7
cuugccuacacuuuc

SEQ ID NO: 185191 - RNA, 14 nt, Human herpesvirus 7
cuugcaaagacaga

SEQ ID NO: 185192 - RNA, 21 nt, Human herpesvirus 7
cuugcaaagacagaaauugaa

SEQ ID NO: 185193 - RNA, 22 nt, Human herpesvirus 7
cuugagccuugcuagcaccgaa

SEQ ID NO: 185194 - RNA, 17 nt, Human herpesvirus 7
cuugaaugagcugacag

SEQ ID NO: 185195 - RNA, 13 nt, Human herpesvirus 7
cuuguaauuuggc

SEQ ID NO: 185196 - RNA, 16 nt, Human herpesvirus 7
cuuggcugacauacga

SEQ ID NO: 185197 - RNA, 19 nt, Human herpesvirus 7
cuuggguuugaucgaggaa

SEQ ID NO: 185198 - RNA, 18 nt, Human herpesvirus 7
cuugcuuaaaacuuugaa

SEQ ID NO: 185199 - RNA, 16 nt, Human herpesvirus 7
cuuggaaaacaaucaa

SEQ ID NO: 185200 - RNA, 18 nt, Human herpesvirus 7
cuuaucaccauaugccaa

SEQ ID NO: 185201 - RNA, 12 nt, Human herpesvirus 7
cuuauaucuuau

SEQ ID NO: 185202 - RNA, 17 nt, Human herpesvirus 7
cuuauauuccuuugaaa

SEQ ID NO: 185203 - RNA, 21 nt, Human herpesvirus 7
cuuauaaugauguaauguugc

SEQ ID NO: 185204 - RNA, 22 nt, Human herpesvirus 7
cuuauaaauaaaauguuuuaga

SEQ ID NO: 185205 - RNA, 23 nt, Human herpesvirus 7
cuuaggugcaauuuucauaaaga

SEQ ID NO: 185206 - RNA, 16 nt, Human herpesvirus 7
cuuagaaucacaacau

SEQ ID NO: 185207 - RNA, 15 nt, Human herpesvirus 7
cuuagaucgaacugu

SEQ ID NO: 185208 - RNA, 18 nt, Human herpesvirus 7
cuuagaugcauccaaaga

SEQ ID NO: 185209 - RNA, 19 nt, Human herpesvirus 7
cuuagaugcauccaaagaa

SEQ ID NO: 185210 - RNA, 20 nt, Human herpesvirus 7
cuuagaugcauccaaagaaa

SEQ ID NO: 185211 - RNA, 14 nt, Human herpesvirus 7
cuuagaugcugaaa

SEQ ID NO: 185212 - RNA, 23 nt, Human herpesvirus 7
cuuagaugcugaaacaucaauuu

SEQ ID NO: 185213 - RNA, 18 nt, Human herpesvirus 7
cuuagcuaauugagaaau

SEQ ID NO: 185214 - RNA, 15 nt, Human herpesvirus 7
cuuagcuuucaugau

SEQ ID NO: 185215 - RNA, 20 nt, Human herpesvirus 7
cugucauggacggcauuuaa

SEQ ID NO: 185216 - RNA, 18 nt, Human herpesvirus 7
cugucacgcaagucacaa

SEQ ID NO: 185217 - RNA, 14 nt, Human herpesvirus 7
cugucacuguccaa

SEQ ID NO: 185218 - RNA, 20 nt, Human herpesvirus 7
cuguauuuguugaucuucaa

SEQ ID NO: 185219 - RNA, 23 nt, Human herpesvirus 7
cugucaaaagacgcuugcuauuu

SEQ ID NO: 185220 - RNA, 16 nt, Human herpesvirus 7
cuuacucuuucugaca

SEQ ID NO: 185221 - RNA, 24 nt, Human herpesvirus 7
cuuacgugaguguuguaacaacua

SEQ ID NO: 185222 - RNA, 22 nt, Human herpesvirus 7
cuuacgugaugccauaauuuca

SEQ ID NO: 185223 - RNA, 10 nt, Human herpesvirus 7
cuuacuuugc

SEQ ID NO: 185224 - RNA, 22 nt, Human herpesvirus 7
cugucguguaagaugucuaaaa

SEQ ID NO: 185225 - RNA, 17 nt, Human herpesvirus 7
cugucggcaauacuagu

SEQ ID NO: 185226 - RNA, 13 nt, Human herpesvirus 7
cuucagaugcuau

SEQ ID NO: 185227 - RNA, 21 nt, Human herpesvirus 7
cuucagguuguugucauugaa

SEQ ID NO: 185228 - RNA, 15 nt, Human herpesvirus 7
cuucaggaauaucaa

SEQ ID NO: 185229 - RNA, 17 nt, Human herpesvirus 7
cuucaggaauaucaaga

SEQ ID NO: 185230 - RNA, 14 nt, Human herpesvirus 7
cuuauguacucuga

SEQ ID NO: 185231 - RNA, 23 nt, Human herpesvirus 7
cuuauguccagauccaucuguaa

SEQ ID NO: 185232 - RNA, 22 nt, Human herpesvirus 7
cuuaugccagguuuuucaaaga

SEQ ID NO: 185233 - RNA, 23 nt, Human herpesvirus 7
cuuaugauaaagaaaacgcuguu

SEQ ID NO: 185234 - RNA, 22 nt, Human herpesvirus 7
cuuaucugucauggacggcauu

SEQ ID NO: 185235 - RNA, 17 nt, Human herpesvirus 7
cuuauuuugucugguca

SEQ ID NO: 185236 - RNA, 16 nt, Human herpesvirus 7
cuuauuauauauguca

SEQ ID NO: 185237 - RNA, 19 nt, Human herpesvirus 7
cuuauuugauuauuuugau

SEQ ID NO: 185238 - RNA, 17 nt, Human herpesvirus 7
cuucaaaaauguuuaca

SEQ ID NO: 185239 - RNA, 21 nt, Human herpesvirus 7
cuucaaaaauguuuacaaaca

SEQ ID NO: 185240 - RNA, 17 nt, Human herpesvirus 7
cuucaaagauaccuucu

SEQ ID NO: 185241 - RNA, 17 nt, Human herpesvirus 7
cuucaaucguuggcauu

SEQ ID NO: 185242 - RNA, 14 nt, Human herpesvirus 7
cugcuuaaauguaa

SEQ ID NO: 185243 - RNA, 21 nt, Human herpesvirus 7
cugcuucggaauuugauucca

SEQ ID NO: 185244 - RNA, 18 nt, Human herpesvirus 7
cugcuggaaagcuuguga

SEQ ID NO: 185245 - RNA, 15 nt, Human herpesvirus 7
cugccagagaaccac

SEQ ID NO: 185246 - RNA, 21 nt, Human herpesvirus 7
cugccagagaaccacgugacu

SEQ ID NO: 185247 - RNA, 20 nt, Human herpesvirus 7
cuggaaaagggagaucaauu

SEQ ID NO: 185248 - RNA, 19 nt, Human herpesvirus 7
cugcugugagugaacauuu

SEQ ID NO: 185249 - RNA, 19 nt, Human herpesvirus 7
cugcuucucccauucaaua

SEQ ID NO: 185250 - RNA, 15 nt, Human herpesvirus 7
cugcuugcacaaaga

SEQ ID NO: 185251 - RNA, 23 nt, Human herpesvirus 7
cuggaaaugucaagaacuucaga

SEQ ID NO: 185252 - RNA, 23 nt, Human herpesvirus 7
cuggaaagcuugugaagacuaca

SEQ ID NO: 185253 - RNA, 21 nt, Human herpesvirus 7
cugcauguguacuaaagccaa

SEQ ID NO: 185254 - RNA, 19 nt, Human herpesvirus 7
cugauauuaaaucauacca

SEQ ID NO: 185255 - RNA, 13 nt, Human herpesvirus 7
cugagccaucaaa

SEQ ID NO: 185256 - RNA, 15 nt, Human herpesvirus 7
cugauguagauuuag

SEQ ID NO: 185257 - RNA, 21 nt, Human herpesvirus 7
cuggaauuauacacugugaaa

SEQ ID NO: 185258 - RNA, 11 nt, Human herpesvirus 7
cuggcauuccu

SEQ ID NO: 185259 - RNA, 17 nt, Human herpesvirus 7
cugggaaaaaaaaauca

SEQ ID NO: 185260 - RNA, 23 nt, Human herpesvirus 7
cuggcucaagcacaaucacguga

SEQ ID NO: 185261 - RNA, 16 nt, Human herpesvirus 7
cugguaaaaagacaau

SEQ ID NO: 185262 - RNA, 22 nt, Human herpesvirus 7
cugguaauaauaguggugaaau

SEQ ID NO: 185263 - RNA, 15 nt, Human herpesvirus 7
cuguauaucuauuac

SEQ ID NO: 185264 - RNA, 20 nt, Human herpesvirus 7
cucuuccuuucuuugagcua

SEQ ID NO: 185265 - RNA, 14 nt, Human herpesvirus 7
cuccuaacuauaau

SEQ ID NO: 185266 - RNA, 16 nt, Human herpesvirus 7
cugaaggcugcuuuuu

SEQ ID NO: 185267 - RNA, 20 nt, Human herpesvirus 7
cugaagaacauuaauaucaa

SEQ ID NO: 185268 - RNA, 17 nt, Human herpesvirus 7
cugaaagccgcugccuu

SEQ ID NO: 185269 - RNA, 11 nt, Human herpesvirus 7
cugaaagugac

SEQ ID NO: 185270 - RNA, 23 nt, Human herpesvirus 7
cugaaaaaauaaauucugaaaua

SEQ ID NO: 185271 - RNA, 17 nt, Human herpesvirus 7
cucuugaggaaaugucu

SEQ ID NO: 185272 - RNA, 14 nt, Human herpesvirus 7
cugaauuuuacacc

SEQ ID NO: 185273 - RNA, 16 nt, Human herpesvirus 7
cugaauccgcauuuga

SEQ ID NO: 185274 - RNA, 17 nt, Human herpesvirus 7
cugaauugguaauguua

SEQ ID NO: 185275 - RNA, 11 nt, Human herpesvirus 7
cugaaugucaa

SEQ ID NO: 185276 - RNA, 19 nt, Human herpesvirus 7
cugaaugugcgaccuauua

SEQ ID NO: 185277 - RNA, 15 nt, Human herpesvirus 7
cugaauuaaggugga

SEQ ID NO: 185278 - RNA, 18 nt, Human herpesvirus 7
cugaauuaagguggaaau

SEQ ID NO: 185279 - RNA, 16 nt, Human herpesvirus 7
cugaauuaucgcaauu

SEQ ID NO: 185280 - RNA, 18 nt, Human herpesvirus 7
cugaauuaucgcaauuaa

SEQ ID NO: 185281 - RNA, 16 nt, Human herpesvirus 7
cugagagaaccugaaa

SEQ ID NO: 185282 - RNA, 17 nt, Human herpesvirus 7
cugacauuguacaauua

SEQ ID NO: 185283 - RNA, 21 nt, Human herpesvirus 7
cugagacggacuuauguccag

SEQ ID NO: 185284 - RNA, 19 nt, Human herpesvirus 7
cuaacaauaaaguuuccau

SEQ ID NO: 185285 - RNA, 17 nt, Human herpesvirus 7
cuaacaguuucugcaua

SEQ ID NO: 185286 - RNA, 13 nt, Human herpesvirus 7
cuaaccacugugu

SEQ ID NO: 185287 - RNA, 13 nt, Human herpesvirus 7
cuaacaaauacca

SEQ ID NO: 185288 - RNA, 22 nt, Human herpesvirus 7
cuaaccuuuuaacaacagccaa

SEQ ID NO: 185289 - RNA, 17 nt, Human herpesvirus 7
cguuacuucugucacca

SEQ ID NO: 185290 - RNA, 14 nt, Human herpesvirus 7
cguuaguugcagcu

SEQ ID NO: 185291 - RNA, 16 nt, Human herpesvirus 7
cguuaauguaguugua

SEQ ID NO: 185292 - RNA, 22 nt, Human herpesvirus 7
cguuaauguaguuguagugcug

SEQ ID NO: 185293 - RNA, 22 nt, Human herpesvirus 7
cguuaaaaacgaacacuuucua

SEQ ID NO: 185294 - RNA, 21 nt, Human herpesvirus 7
cguuggucgagaauacacauu

SEQ ID NO: 185295 - RNA, 20 nt, Human herpesvirus 7
cguugaucguuguuggugug

SEQ ID NO: 185296 - RNA, 23 nt, Human herpesvirus 7
cuaaauaauucacauuuaugaaa

SEQ ID NO: 185297 - RNA, 11 nt, Human herpesvirus 7
cuaaauaugac

SEQ ID NO: 185298 - RNA, 21 nt, Human herpesvirus 7
cuaaauaugaugaaacuucca

SEQ ID NO: 185299 - RNA, 15 nt, Human herpesvirus 7
cuaaauauucugugu

SEQ ID NO: 185300 - RNA, 15 nt, Human herpesvirus 7
cuaaaguggagacaa

SEQ ID NO: 185301 - RNA, 13 nt, Human herpesvirus 7
cguacaauauuaa

SEQ ID NO: 185302 - RNA, 20 nt, Human herpesvirus 7
cgguuuguuuaaucuggaau

SEQ ID NO: 185303 - RNA, 16 nt, Human herpesvirus 7
cguaaaaaaucaaguc

SEQ ID NO: 185304 - RNA, 21 nt, Human herpesvirus 7
cguaacaaauucaaccacaga

SEQ ID NO: 185305 - RNA, 23 nt, Human herpesvirus 7
cguaacaacagcagcugcuaaaa

SEQ ID NO: 185306 - RNA, 14 nt, Human herpesvirus 7
cguaaacauuuguu

SEQ ID NO: 185307 - RNA, 17 nt, Human herpesvirus 7
cguaaacauuuguugcu

SEQ ID NO: 185308 - RNA, 19 nt, Human herpesvirus 7
cgugagcacggcacacaac

SEQ ID NO: 185309 - RNA, 18 nt, Human herpesvirus 7
cgugagggggacaauuau

SEQ ID NO: 185310 - RNA, 20 nt, Human herpesvirus 7
cgugucgcagccauguugcg

SEQ ID NO: 185311 - RNA, 15 nt, Human herpesvirus 7
cggauuuacauuuca

SEQ ID NO: 185312 - RNA, 21 nt, Human herpesvirus 7
cgauuuaucaagauagugaca

SEQ ID NO: 185313 - RNA, 13 nt, Human herpesvirus 7
cgauuuaagugaa

SEQ ID NO: 185314 - RNA, 22 nt, Human herpesvirus 7
cgauuuaagugaacuguuacag

SEQ ID NO: 185315 - RNA, 22 nt, Human herpesvirus 7
cgggaaaaaggauuugaagguu

SEQ ID NO: 185316 - RNA, 13 nt, Human herpesvirus 7
cgggcacacuuug

SEQ ID NO: 185317 - RNA, 15 nt, Human herpesvirus 7
cuccaaaucaaaaug

SEQ ID NO: 185318 - RNA, 21 nt, Human herpesvirus 7
cucccgcagagauuaccugca

SEQ ID NO: 185319 - RNA, 16 nt, Human herpesvirus 7
cucaugcgauaucuga

SEQ ID NO: 185320 - RNA, 22 nt, Human herpesvirus 7
cucauguaauuaggaaucagac

SEQ ID NO: 185321 - RNA, 22 nt, Human herpesvirus 7
cucagauuagcuucgauucgga

SEQ ID NO: 185322 - RNA, 15 nt, Human herpesvirus 7
cucagaacuguuuua

SEQ ID NO: 185323 - RNA, 21 nt, Human herpesvirus 7
cucagaagacauauuagauua

SEQ ID NO: 185324 - RNA, 23 nt, Human herpesvirus 7
cucacuucuaaaagcugcaugug

SEQ ID NO: 185325 - RNA, 19 nt, Human herpesvirus 7
cucaaaauuauaacuuuau

SEQ ID NO: 185326 - RNA, 17 nt, Human herpesvirus 7
cuauuucugucaucuua

SEQ ID NO: 185327 - RNA, 16 nt, Human herpesvirus 7
cuauuuucuucgucua

SEQ ID NO: 185328 - RNA, 20 nt, Human herpesvirus 7
cuauuuuaaaaaccaugaaa

SEQ ID NO: 185329 - RNA, 20 nt, Human herpesvirus 7
cucaaaaaugauaugacaug

SEQ ID NO: 185330 - RNA, 13 nt, Human herpesvirus 7
cucaaaacaaacu

SEQ ID NO: 185331 - RNA, 22 nt, Human herpesvirus 7
cuauuggaguugcacuccuaga

SEQ ID NO: 185332 - RNA, 18 nt, Human herpesvirus 7
cuauuuaaucuaugcaaa

SEQ ID NO: 185333 - RNA, 23 nt, Human herpesvirus 7
cuaucaagauaagcaauacauuc

SEQ ID NO: 185334 - RNA, 16 nt, Human herpesvirus 7
cuaucaaauuuaucuc

SEQ ID NO: 185335 - RNA, 19 nt, Human herpesvirus 7
cuaucgucaucaucccaaa

SEQ ID NO: 185336 - RNA, 17 nt, Human herpesvirus 7
cuaugcaaagcaagcau

SEQ ID NO: 185337 - RNA, 15 nt, Human herpesvirus 7
cuaugacuuugaauc

SEQ ID NO: 185338 - RNA, 20 nt, Human herpesvirus 7
cuaucuccuauguugcaaug

SEQ ID NO: 185339 - RNA, 24 nt, Human herpesvirus 7
cuauaguuuguauuucauuguccc

SEQ ID NO: 185340 - RNA, 17 nt, Human herpesvirus 7
cuauaauucucacagcu

SEQ ID NO: 185341 - RNA, 21 nt, Human herpesvirus 7
cuauaauucucacagcuuauu

SEQ ID NO: 185342 - RNA, 14 nt, Human herpesvirus 7
cuauaauagccuuu

SEQ ID NO: 185343 - RNA, 16 nt, Human herpesvirus 7
cuauaaucacgaaaua

SEQ ID NO: 185344 - RNA, 15 nt, Human herpesvirus 7
cuauagaucuugacu

SEQ ID NO: 185345 - RNA, 17 nt, Human herpesvirus 7
cuauaaaaagugcucug

SEQ ID NO: 185346 - RNA, 22 nt, Human herpesvirus 7
cuaguugcaacucuucuucaga

SEQ ID NO: 185347 - RNA, 20 nt, Human herpesvirus 7
cuaguucccauuuucagaaa

SEQ ID NO: 185348 - RNA, 15 nt, Human herpesvirus 7
cuagcggaguuugag

SEQ ID NO: 185349 - RNA, 13 nt, Human herpesvirus 7
cuagcagaucucg

SEQ ID NO: 185350 - RNA, 23 nt, Human herpesvirus 7
cuaggagauugguagugugcaca

SEQ ID NO: 185351 - RNA, 17 nt, Human herpesvirus 7
cuaaugcuuugcugcaa

SEQ ID NO: 185352 - RNA, 21 nt, Human herpesvirus 7
cuaauuuuggcgaaacaauac

SEQ ID NO: 185353 - RNA, 15 nt, Human herpesvirus 7
cuaauugcagacuaa

SEQ ID NO: 185354 - RNA, 21 nt, Human herpesvirus 7
cuaauuugcauaaacuaucaa

SEQ ID NO: 185355 - RNA, 15 nt, Human herpesvirus 7
cuaauuuaugauacu

SEQ ID NO: 185356 - RNA, 17 nt, Human herpesvirus 7
cuacuauacucuugcac

SEQ ID NO: 185357 - RNA, 15 nt, Human herpesvirus 7
cuagauugacuauga

SEQ ID NO: 185358 - RNA, 16 nt, Human herpesvirus 7
cuagauugacuaugaa

SEQ ID NO: 185359 - RNA, 17 nt, Human herpesvirus 7
cuagauugacuaugaau

SEQ ID NO: 185360 - RNA, 15 nt, Human herpesvirus 7
cuagcaaaauaugca

SEQ ID NO: 185361 - RNA, 14 nt, Human herpesvirus 7
cuagcaaacagugc

SEQ ID NO: 185362 - RNA, 12 nt, Human herpesvirus 7
cuagagauuaca

SEQ ID NO: 185363 - RNA, 19 nt, Human herpesvirus 7
cuagagggaguaccgaaag

SEQ ID NO: 185364 - RNA, 16 nt, Human herpesvirus 7
cuagaaaaacacuagc

SEQ ID NO: 185365 - RNA, 16 nt, Human herpesvirus 7
cuagaaaaucuaccaa

SEQ ID NO: 185366 - RNA, 16 nt, Human herpesvirus 7
cuacuguaaucugacu

SEQ ID NO: 185367 - RNA, 18 nt, Human herpesvirus 7
gccuggccagcaguguga

SEQ ID NO: 185368 - RNA, 15 nt, Human herpesvirus 7
gccuaggauaccaaa

SEQ ID NO: 185369 - RNA, 18 nt, Human herpesvirus 7
gccauaaacggaauacau

SEQ ID NO: 185370 - RNA, 20 nt, Human herpesvirus 7
gccauaaaauguacaauucc

SEQ ID NO: 185371 - RNA, 14 nt, Human herpesvirus 7
gccaguucuaucuc

SEQ ID NO: 185372 - RNA, 16 nt, Human herpesvirus 7
gccaguucuaucucaa

SEQ ID NO: 185373 - RNA, 18 nt, Human herpesvirus 7
gccagguuuuucaaagac

SEQ ID NO: 185374 - RNA, 14 nt, Human herpesvirus 7
gccagguauucaaa

SEQ ID NO: 185375 - RNA, 20 nt, Human herpesvirus 7
gcccuuucucgugagacauu

SEQ ID NO: 185376 - RNA, 22 nt, Human herpesvirus 7
gccacagcccaagugggugguc

SEQ ID NO: 185377 - RNA, 14 nt, Human herpesvirus 7
gcauuucacuuguu

SEQ ID NO: 185378 - RNA, 21 nt, Human herpesvirus 7
gcauuuccgagacagagucaa

SEQ ID NO: 185379 - RNA, 21 nt, Human herpesvirus 7
gccaauugaagaagugcacau

SEQ ID NO: 185380 - RNA, 21 nt, Human herpesvirus 7
gccaccuucuuauaaugaugu

SEQ ID NO: 185381 - RNA, 14 nt, Human herpesvirus 7
gcaugcuuacagug

SEQ ID NO: 185382 - RNA, 14 nt, Human herpesvirus 7
gcauggagcacaau

SEQ ID NO: 185383 - RNA, 19 nt, Human herpesvirus 7
gcauguguacuaaagccaa

SEQ ID NO: 185384 - RNA, 13 nt, Human herpesvirus 7
gcauguugcuagu

SEQ ID NO: 185385 - RNA, 16 nt, Human herpesvirus 7
gcauuaauucuuucag

SEQ ID NO: 185386 - RNA, 14 nt, Human herpesvirus 7
gcauugaaaucauu

SEQ ID NO: 185387 - RNA, 13 nt, Human herpesvirus 7
gcauugaaauucu

SEQ ID NO: 185388 - RNA, 13 nt, Human herpesvirus 7
gcauuauuguaua

SEQ ID NO: 185389 - RNA, 14 nt, Human herpesvirus 7
gcauugcauaucau

SEQ ID NO: 185390 - RNA, 16 nt, Human herpesvirus 7
gcauugcauaucauga

SEQ ID NO: 185391 - RNA, 21 nt, Human herpesvirus 7
gcaacuagagaagccacuucu

SEQ ID NO: 185392 - RNA, 23 nt, Human herpesvirus 7
gcaacucuucuucagauucagua

SEQ ID NO: 185393 - RNA, 13 nt, Human herpesvirus 7
gcaucgcauauag

SEQ ID NO: 185394 - RNA, 14 nt, Human herpesvirus 7
gcaucuccuguaac

SEQ ID NO: 185395 - RNA, 16 nt, Human herpesvirus 7
gcaugaucuccguuga

SEQ ID NO: 185396 - RNA, 17 nt, Human herpesvirus 7
gcaugaaaucuugaauu

SEQ ID NO: 185397 - RNA, 17 nt, Human herpesvirus 7
gcaacaucuuaaauguc

SEQ ID NO: 185398 - RNA, 20 nt, Human herpesvirus 7
gcaacauaaccaaugcugau

SEQ ID NO: 185399 - RNA, 13 nt, Human herpesvirus 7
gcaacauaaucca

SEQ ID NO: 185400 - RNA, 18 nt, Human herpesvirus 7
gcaacagagaacaccaua

SEQ ID NO: 185401 - RNA, 17 nt, Human herpesvirus 7
gcaacacuuaaaauugg

SEQ ID NO: 185402 - RNA, 16 nt, Human herpesvirus 7
gcaaauccaacagaau

SEQ ID NO: 185403 - RNA, 13 nt, Human herpesvirus 7
gcaacaaacaaau

SEQ ID NO: 185404 - RNA, 23 nt, Human herpesvirus 7
gcaacaaacaaauaauucaaaaa

SEQ ID NO: 185405 - RNA, 17 nt, Human herpesvirus 7
gcaacaaauuaaauacu

SEQ ID NO: 185406 - RNA, 21 nt, Human herpesvirus 7
gcaacaaauuaaauacuugca

SEQ ID NO: 185407 - RNA, 15 nt, Human herpesvirus 7
gcaaagucucauuca

SEQ ID NO: 185408 - RNA, 16 nt, Human herpesvirus 7
gcaaaguucuccuugu

SEQ ID NO: 185409 - RNA, 18 nt, Human herpesvirus 7
gcguggccuucuugccua

SEQ ID NO: 185410 - RNA, 19 nt, Human herpesvirus 7
gcgugauuuuuuauuccca

SEQ ID NO: 185411 - RNA, 23 nt, Human herpesvirus 7
gcggacaaauauacgaaugccau

SEQ ID NO: 185412 - RNA, 18 nt, Human herpesvirus 7
gcgcuccguuuuuccaga

SEQ ID NO: 185413 - RNA, 20 nt, Human herpesvirus 7
gcgcgucuuacggcucuaac

SEQ ID NO: 185414 - RNA, 16 nt, Human herpesvirus 7
gccuuuaaaauuucau

SEQ ID NO: 185415 - RNA, 19 nt, Human herpesvirus 7
gccuguuaaaagugaaccu

SEQ ID NO: 185416 - RNA, 19 nt, Human herpesvirus 7
gccuucuaaaacaguuaau

SEQ ID NO: 185417 - RNA, 17 nt, Human herpesvirus 7
gcugcggacgcggagaa

SEQ ID NO: 185418 - RNA, 21 nt, Human herpesvirus 7
gcuauucacgcuuccaucaca

SEQ ID NO: 185419 - RNA, 22 nt, Human herpesvirus 7
gcuauucacgcuuccaucacaa

SEQ ID NO: 185420 - RNA, 15 nt, Human herpesvirus 7
gcuauucauuucacg

SEQ ID NO: 185421 - RNA, 18 nt, Human herpesvirus 7
gcuauuuaaucuaugcaa

SEQ ID NO: 185422 - RNA, 17 nt, Human herpesvirus 7
gcucaacuuauguguca

SEQ ID NO: 185423 - RNA, 17 nt, Human herpesvirus 7
gcucauguugacgggaa

SEQ ID NO: 185424 - RNA, 18 nt, Human herpesvirus 7
gcucauguugacgggaaa

SEQ ID NO: 185425 - RNA, 14 nt, Human herpesvirus 7
gcucacuucaaaaa

SEQ ID NO: 185426 - RNA, 17 nt, Human herpesvirus 7
gcuacacgagacaaaaa

SEQ ID NO: 185427 - RNA, 17 nt, Human herpesvirus 7
gcuaacaaguaugucag

SEQ ID NO: 185428 - RNA, 20 nt, Human herpesvirus 7
gcuaaagagcauucaugccu

SEQ ID NO: 185429 - RNA, 17 nt, Human herpesvirus 7
ggcuauuugucggugaa

SEQ ID NO: 185430 - RNA, 18 nt, Human herpesvirus 7
ggcguuacggguggcacu

SEQ ID NO: 185431 - RNA, 20 nt, Human herpesvirus 7
ggccccuggcguuacgggug

SEQ ID NO: 185432 - RNA, 17 nt, Human herpesvirus 7
ggcaccccugccaguaa

SEQ ID NO: 185433 - RNA, 17 nt, Human herpesvirus 7
ggcacccuaauugccau

SEQ ID NO: 185434 - RNA, 17 nt, Human herpesvirus 7
ggcaccaauagaaaaca

SEQ ID NO: 185435 - RNA, 20 nt, Human herpesvirus 7
ggauacggcagcggaaguga

SEQ ID NO: 185436 - RNA, 20 nt, Human herpesvirus 7
ggcacauaaguugacaaugu

SEQ ID NO: 185437 - RNA, 15 nt, Human herpesvirus 7
gcuucaguacuugaa

SEQ ID NO: 185438 - RNA, 17 nt, Human herpesvirus 7
gcuguacugaaaccaaa

SEQ ID NO: 185439 - RNA, 23 nt, Human herpesvirus 7
gcuuauuuauauauggcaauaaa

SEQ ID NO: 185440 - RNA, 16 nt, Human herpesvirus 7
gcuucuauuauagaag

SEQ ID NO: 185441 - RNA, 15 nt, Human herpesvirus 7
gcuucucccauucaa

SEQ ID NO: 185442 - RNA, 11 nt, Human herpesvirus 7
gcuucuucuaa

SEQ ID NO: 185443 - RNA, 20 nt, Human herpesvirus 7
ggacuuuuaaauaaaccuua

SEQ ID NO: 185444 - RNA, 20 nt, Human herpesvirus 7
gcuugcgaucaucauuggua

SEQ ID NO: 185445 - RNA, 21 nt, Human herpesvirus 7
ggauaacuaugaacuggcaca

SEQ ID NO: 185446 - RNA, 22 nt, Human herpesvirus 7
ggauaacuaugaacuggcacau

SEQ ID NO: 185447 - RNA, 19 nt, Human herpesvirus 7
ggaguauguugcauaucau

SEQ ID NO: 185448 - RNA, 17 nt, Human herpesvirus 7
ggaguauuaccauuuau

SEQ ID NO: 185449 - RNA, 17 nt, Human herpesvirus 7
ggaggugcuguuuccau

SEQ ID NO: 185450 - RNA, 10 nt, Human herpesvirus 7
ggaguugcac

SEQ ID NO: 185451 - RNA, 20 nt, Human herpesvirus 7
ggagauugguagugugcaca

SEQ ID NO: 185452 - RNA, 19 nt, Human herpesvirus 7
ggagcugauucugccauua

SEQ ID NO: 185453 - RNA, 23 nt, Human herpesvirus 7
ggagcugauucugccauuacuga

SEQ ID NO: 185454 - RNA, 16 nt, Human herpesvirus 7
ggagagauagcauuug

SEQ ID NO: 185455 - RNA, 19 nt, Human herpesvirus 7
ggagagcccagucccaaga

SEQ ID NO: 185456 - RNA, 21 nt, Human herpesvirus 7
ggagagcccagucccaagaga

SEQ ID NO: 185457 - RNA, 23 nt, Human herpesvirus 7
ggagaagacaacgacuacaggaa

SEQ ID NO: 185458 - RNA, 16 nt, Human herpesvirus 7
ggagaauguucgcaaa

SEQ ID NO: 185459 - RNA, 22 nt, Human herpesvirus 7
ggucacauaggaaucgcagugu

SEQ ID NO: 185460 - RNA, 23 nt, Human herpesvirus 7
ggugcucaaacguucuuggucau

SEQ ID NO: 185461 - RNA, 19 nt, Human herpesvirus 7
gguacaacaaacauuccaa

SEQ ID NO: 185462 - RNA, 22 nt, Human herpesvirus 7
gguaauuagugaaaacuugaua

SEQ ID NO: 185463 - RNA, 17 nt, Human herpesvirus 7
gguaucuuuacuuucau

SEQ ID NO: 185464 - RNA, 14 nt, Human herpesvirus 7
gguaggauugaaag

SEQ ID NO: 185465 - RNA, 17 nt, Human herpesvirus 7
gggaaaaaggauuugaa

SEQ ID NO: 185466 - RNA, 15 nt, Human herpesvirus 7
gggaagaaucaagac

SEQ ID NO: 185467 - RNA, 23 nt, Human herpesvirus 7
guaaaggaaauuaguucuuguga

SEQ ID NO: 185468 - RNA, 21 nt, Human herpesvirus 7
guaaaccuucgugugucucua

SEQ ID NO: 185469 - RNA, 16 nt, Human herpesvirus 7
guaaauauaaucaaaa

SEQ ID NO: 185470 - RNA, 20 nt, Human herpesvirus 7
guaaauauuuuuaaaaucua

SEQ ID NO: 185471 - RNA, 15 nt, Human herpesvirus 7
guaaaugacugucag

SEQ ID NO: 185472 - RNA, 21 nt, Human herpesvirus 7
guaaauaaaaugguugugcaa

SEQ ID NO: 185473 - RNA, 22 nt, Human herpesvirus 7
guaaauaaaaugguugugcaau

SEQ ID NO: 185474 - RNA, 18 nt, Human herpesvirus 7
guaaauucuccaaucaua

SEQ ID NO: 185475 - RNA, 12 nt, Human herpesvirus 7
guaaauuuacuu

SEQ ID NO: 185476 - RNA, 23 nt, Human herpesvirus 7
guaaauuuacuugauuuucuuac

SEQ ID NO: 185477 - RNA, 19 nt, Human herpesvirus 7
guaacuuucaucuguguua

SEQ ID NO: 185478 - RNA, 14 nt, Human herpesvirus 7
guaacuuuuugccg

SEQ ID NO: 185479 - RNA, 15 nt, Human herpesvirus 7
guaacaugucuucaa

SEQ ID NO: 185480 - RNA, 15 nt, Human herpesvirus 7
guaacagaccuccua

SEQ ID NO: 185481 - RNA, 18 nt, Human herpesvirus 7
guaacagauuuuauuuca

SEQ ID NO: 185482 - RNA, 13 nt, Human herpesvirus 7
guaaucauucaag

SEQ ID NO: 185483 - RNA, 16 nt, Human herpesvirus 7
guaauuggaguaauca

SEQ ID NO: 185484 - RNA, 14 nt, Human herpesvirus 7
guaauggauuuaau

SEQ ID NO: 185485 - RNA, 18 nt, Human herpesvirus 7
guaauuagugaaaacuug

SEQ ID NO: 185486 - RNA, 14 nt, Human herpesvirus 7
guaauguuacuaua

SEQ ID NO: 185487 - RNA, 19 nt, Human herpesvirus 7
guaaaaauuugacauuugc

SEQ ID NO: 185488 - RNA, 15 nt, Human herpesvirus 7
guaaacauuuguugc

SEQ ID NO: 185489 - RNA, 20 nt, Human herpesvirus 7
guaaacauuuguugcuuuuu

SEQ ID NO: 185490 - RNA, 15 nt, Human herpesvirus 7
guaaaaaaaauggag

SEQ ID NO: 185491 - RNA, 17 nt, Human herpesvirus 7
gguguguccagauaaua

SEQ ID NO: 185492 - RNA, 12 nt, Human herpesvirus 7
gguguguuacau

SEQ ID NO: 185493 - RNA, 20 nt, Human herpesvirus 7
ggugucuucggccuugcuga

SEQ ID NO: 185494 - RNA, 17 nt, Human herpesvirus 7
gguuaaaaaaaugaaua

SEQ ID NO: 185495 - RNA, 19 nt, Human herpesvirus 7
gguguuguuuccgaucuaa

SEQ ID NO: 185496 - RNA, 14 nt, Human herpesvirus 7
gguuagacaauaaa

SEQ ID NO: 185497 - RNA, 13 nt, Human herpesvirus 7
gguuacauaucca

SEQ ID NO: 185498 - RNA, 20 nt, Human herpesvirus 7
gguucugugugguuacauaa

SEQ ID NO: 185499 - RNA, 16 nt, Human herpesvirus 7
gguugacaucaauaaa

SEQ ID NO: 185500 - RNA, 14 nt, Human herpesvirus 7
gauaccaaacaaaa

SEQ ID NO: 185501 - RNA, 15 nt, Human herpesvirus 7
gauccgauuuaucaa

SEQ ID NO: 185502 - RNA, 20 nt, Human herpesvirus 7
gauccugcuauucauuucac

SEQ ID NO: 185503 - RNA, 15 nt, Human herpesvirus 7
gaucgaacuguuaca

SEQ ID NO: 185504 - RNA, 17 nt, Human herpesvirus 7
gauccgccgacaagaaa

SEQ ID NO: 185505 - RNA, 17 nt, Human herpesvirus 7
gauccuaacaauaaagu

SEQ ID NO: 185506 - RNA, 13 nt, Human herpesvirus 7
gaucucugucaaa

SEQ ID NO: 185507 - RNA, 21 nt, Human herpesvirus 7
gaucuuacuuccuaaucuaac

SEQ ID NO: 185508 - RNA, 14 nt, Human herpesvirus 7
gaucuaagucuaca

SEQ ID NO: 185509 - RNA, 15 nt, Human herpesvirus 7
gaucguguguuacua

SEQ ID NO: 185510 - RNA, 20 nt, Human herpesvirus 7
gaucguuguugguguguuac

SEQ ID NO: 185511 - RNA, 21 nt, Human herpesvirus 7
gaucguuguugguguguuaca

SEQ ID NO: 185512 - RNA, 21 nt, Human herpesvirus 7
gauagaaauguaaauuaugug

SEQ ID NO: 185513 - RNA, 21 nt, Human herpesvirus 7
gauagaaauuaugaaaagcuu

SEQ ID NO: 185514 - RNA, 21 nt, Human herpesvirus 7
gauacgaaaacggucugagac

SEQ ID NO: 185515 - RNA, 23 nt, Human herpesvirus 7
gauacauucgcaaggaauaugaa

SEQ ID NO: 185516 - RNA, 21 nt, Human herpesvirus 7
gauacauuuuugcaauaugcu

SEQ ID NO: 185517 - RNA, 12 nt, Human herpesvirus 7
gauaauuuacaa

SEQ ID NO: 185518 - RNA, 13 nt, Human herpesvirus 7
gauaaugacaaac

SEQ ID NO: 185519 - RNA, 12 nt, Human herpesvirus 7
gauaagauuucc

SEQ ID NO: 185520 - RNA, 24 nt, Human herpesvirus 7
gaugacuuccaaguuuugcgcaaa

SEQ ID NO: 185521 - RNA, 18 nt, Human herpesvirus 7
gaugcagaaaaauccaaa

SEQ ID NO: 185522 - RNA, 14 nt, Human herpesvirus 7
gaugaaacuuccaa

SEQ ID NO: 185523 - RNA, 17 nt, Human herpesvirus 7
gaugaauauaacaaaaa

SEQ ID NO: 185524 - RNA, 20 nt, Human herpesvirus 7
gaugaauuaauucuuuccac

SEQ ID NO: 185525 - RNA, 16 nt, Human herpesvirus 7
gaugcguguguucaaa

SEQ ID NO: 185526 - RNA, 17 nt, Human herpesvirus 7
gaugccagccuauucac

SEQ ID NO: 185527 - RNA, 21 nt, Human herpesvirus 7
gaugcauuuuuauugcaguuu

SEQ ID NO: 185528 - RNA, 21 nt, Human herpesvirus 7
gaugcaugcuaauauuuccaa

SEQ ID NO: 185529 - RNA, 18 nt, Human herpesvirus 7
gaugcgaaagccacuguu

SEQ ID NO: 185530 - RNA, 19 nt, Human herpesvirus 7
gaugcgaaagccacuguug

SEQ ID NO: 185531 - RNA, 18 nt, Human herpesvirus 7
gauuauauaaguccuuca

SEQ ID NO: 185532 - RNA, 16 nt, Human herpesvirus 7
gauucacauugucacu

SEQ ID NO: 185533 - RNA, 21 nt, Human herpesvirus 7
gauucacauugucacugcaaa

SEQ ID NO: 185534 - RNA, 13 nt, Human herpesvirus 7
gauuccauuuaaa

SEQ ID NO: 185535 - RNA, 14 nt, Human herpesvirus 7
gauucggcugagua

SEQ ID NO: 185536 - RNA, 17 nt, Human herpesvirus 7
gauucuuauucuacaca

SEQ ID NO: 185537 - RNA, 14 nt, Human herpesvirus 7
gauugaaaguaaaa

SEQ ID NO: 185538 - RNA, 15 nt, Human herpesvirus 7
gauugacuaugaauu

SEQ ID NO: 185539 - RNA, 23 nt, Human herpesvirus 7
gauugauacauucgcaaggaaua

SEQ ID NO: 185540 - RNA, 16 nt, Human herpesvirus 7
gauugaucguguguua

SEQ ID NO: 185541 - RNA, 18 nt, Human herpesvirus 7
gauuaaaaaucuuuacac

SEQ ID NO: 185542 - RNA, 15 nt, Human herpesvirus 7
gauguaggugcugca

SEQ ID NO: 185543 - RNA, 18 nt, Human herpesvirus 7
gaugucagcaaaucugaa

SEQ ID NO: 185544 - RNA, 17 nt, Human herpesvirus 7
gaugucuuaauugccga

SEQ ID NO: 185545 - RNA, 18 nt, Human herpesvirus 7
gauuagcgcgugaacaaa

SEQ ID NO: 185546 - RNA, 18 nt, Human herpesvirus 7
gauguuuugcaagcacau

SEQ ID NO: 185547 - RNA, 18 nt, Human herpesvirus 7
gauuaauagauacguuag

SEQ ID NO: 185548 - RNA, 13 nt, Human herpesvirus 7
gauugcgaccaaa

SEQ ID NO: 185549 - RNA, 13 nt, Human herpesvirus 7
gauuuaacugaua

SEQ ID NO: 185550 - RNA, 15 nt, Human herpesvirus 7
gauuuaaaaaaggaa

SEQ ID NO: 185551 - RNA, 16 nt, Human herpesvirus 7
gauuuccguuguuaaa

SEQ ID NO: 185552 - RNA, 15 nt, Human herpesvirus 7
gauuugguucauuac

SEQ ID NO: 185553 - RNA, 19 nt, Human herpesvirus 7
gauuuuaaaagguugacau

SEQ ID NO: 185554 - RNA, 19 nt, Human herpesvirus 7
gauuuuauuucagcuccau

SEQ ID NO: 185555 - RNA, 13 nt, Human herpesvirus 7
gauuucuauugaa

SEQ ID NO: 185556 - RNA, 21 nt, Human herpesvirus 7
gauuucuauugaauguggaau

SEQ ID NO: 185557 - RNA, 19 nt, Human herpesvirus 7
gauuucuggcaacaguuca

SEQ ID NO: 185558 - RNA, 15 nt, Human herpesvirus 7
gauuucuucuucuaa

SEQ ID NO: 185559 - RNA, 19 nt, Human herpesvirus 7
gauuugaaaaaaagauuua

SEQ ID NO: 185560 - RNA, 16 nt, Human herpesvirus 7
gcaaaccuuacaacaa

SEQ ID NO: 185561 - RNA, 17 nt, Human herpesvirus 7
gcaaaccuuacaacaaa

SEQ ID NO: 185562 - RNA, 13 nt, Human herpesvirus 7
gcaaagacuugca

SEQ ID NO: 185563 - RNA, 21 nt, Human herpesvirus 7
gcaaagacuugcaaagacaga

SEQ ID NO: 185564 - RNA, 16 nt, Human herpesvirus 7
gcaaaauaugcaaaac

SEQ ID NO: 185565 - RNA, 21 nt, Human herpesvirus 7
gcaaaauaugcaaaacaaaau

SEQ ID NO: 185566 - RNA, 14 nt, Human herpesvirus 7
gcaaaagauuuaaa

SEQ ID NO: 185567 - RNA, 22 nt, Human herpesvirus 7
gauuuuguagguuguugcaauu

SEQ ID NO: 185568 - RNA, 19 nt, Human herpesvirus 7
gauuuugugacccugucac

SEQ ID NO: 185569 - RNA, 19 nt, Human herpesvirus 7
gauuugcagccagaacuca

SEQ ID NO: 185570 - RNA, 13 nt, Human herpesvirus 7
gauuuucuuacac

SEQ ID NO: 185571 - RNA, 16 nt, Human herpesvirus 7
gauuuuucccaaaaua

SEQ ID NO: 185572 - RNA, 16 nt, Human herpesvirus 7
gauuuuuuauucccag

SEQ ID NO: 185573 - RNA, 15 nt, Human herpesvirus 7
gacucacuccuugca

SEQ ID NO: 185574 - RNA, 19 nt, Human herpesvirus 7
gacuaucagcgacaggugu

SEQ ID NO: 185575 - RNA, 17 nt, Human herpesvirus 7
gacuaucgcaacaacua

SEQ ID NO: 185576 - RNA, 23 nt, Human herpesvirus 7
gacugguacaagguguuccuuag

SEQ ID NO: 185577 - RNA, 13 nt, Human herpesvirus 7
gacugcaaccuga

SEQ ID NO: 185578 - RNA, 14 nt, Human herpesvirus 7
gacuuauggugugg

SEQ ID NO: 185579 - RNA, 19 nt, Human herpesvirus 7
gacugugccgccuggccag

SEQ ID NO: 185580 - RNA, 14 nt, Human herpesvirus 7
aaaugauaugacau

SEQ ID NO: 185581 - RNA, 23 nt, Human herpesvirus 7
aaaugaucagagaugaucuuacu

SEQ ID NO: 185582 - RNA, 20 nt, Human herpesvirus 7
aaaugagauuuuucccaaaa

SEQ ID NO: 185583 - RNA, 22 nt, Human herpesvirus 7
aaaugaaguuuguuuaccuuca

SEQ ID NO: 185584 - RNA, 22 nt, Human herpesvirus 7
aaauauucuacggcuaaucucu

SEQ ID NO: 185585 - RNA, 21 nt, Human herpesvirus 7
aaauauuggagagauagcauu

SEQ ID NO: 185586 - RNA, 22 nt, Human herpesvirus 7
aaauauuuagagucgucuugca

SEQ ID NO: 185587 - RNA, 12 nt, Human herpesvirus 7
aaaucaaaaaua

SEQ ID NO: 185588 - RNA, 13 nt, Human herpesvirus 7
aaauauguucaga

SEQ ID NO: 185589 - RNA, 17 nt, Human herpesvirus 7
aaauauguucagauuga

SEQ ID NO: 185590 - RNA, 19 nt, Human herpesvirus 7
aaauaugaugaaacuucca

SEQ ID NO: 185591 - RNA, 12 nt, Human herpesvirus 7
aaauauggacuu

SEQ ID NO: 185592 - RNA, 12 nt, Human herpesvirus 7
aaauauggagac

SEQ ID NO: 185593 - RNA, 18 nt, Human herpesvirus 7
aaauauggagcagcuuaa

SEQ ID NO: 185594 - RNA, 15 nt, Human herpesvirus 7
aaauauguggcacau

SEQ ID NO: 185595 - RNA, 14 nt, Human herpesvirus 7
aaauaucccuagaa

SEQ ID NO: 185596 - RNA, 18 nt, Human herpesvirus 7
aaauagugucuguuguaa

SEQ ID NO: 185597 - RNA, 20 nt, Human herpesvirus 7
aaaugucuuugucaugauga

SEQ ID NO: 185598 - RNA, 21 nt, Human herpesvirus 7
aaaugucuuugucaugaugaa

SEQ ID NO: 185599 - RNA, 13 nt, Human herpesvirus 7
aaauguacaauaa

SEQ ID NO: 185600 - RNA, 14 nt, Human herpesvirus 7
aaauguacaauucc

SEQ ID NO: 185601 - RNA, 18 nt, Human herpesvirus 7
aaauguacauaacucuau

SEQ ID NO: 185602 - RNA, 18 nt, Human herpesvirus 7
aaauguaacuuucaucug

SEQ ID NO: 185603 - RNA, 14 nt, Human herpesvirus 7
aaauguaaaccaaa

SEQ ID NO: 185604 - RNA, 17 nt, Human herpesvirus 7
aaauggguuugggaaac

SEQ ID NO: 185605 - RNA, 20 nt, Human herpesvirus 7
gacuaaauauggagcagcuu

SEQ ID NO: 185606 - RNA, 16 nt, Human herpesvirus 7
gacguuucuagcaaaa

SEQ ID NO: 185607 - RNA, 21 nt, Human herpesvirus 7
aaaugcuuaaauuuccaucua

SEQ ID NO: 185608 - RNA, 20 nt, Human herpesvirus 7
aaaugaugaugacaaaaaau

SEQ ID NO: 185609 - RNA, 13 nt, Human herpesvirus 7
gagacugucauaa

SEQ ID NO: 185610 - RNA, 18 nt, Human herpesvirus 7
gagacugucauaaucuga

SEQ ID NO: 185611 - RNA, 14 nt, Human herpesvirus 7
gagcgcuuugcuua

SEQ ID NO: 185612 - RNA, 15 nt, Human herpesvirus 7
gagaaagauuaauua

SEQ ID NO: 185613 - RNA, 21 nt, Human herpesvirus 7
gagaaaaucuuugaaucugcu

SEQ ID NO: 185614 - RNA, 20 nt, Human herpesvirus 7
gacuuugaaucaacagccau

SEQ ID NO: 185615 - RNA, 19 nt, Human herpesvirus 7
gacuuuuauaauacuggca

SEQ ID NO: 185616 - RNA, 20 nt, Human herpesvirus 7
gagaaaacguuuuuaucuga

SEQ ID NO: 185617 - RNA, 21 nt, Human herpesvirus 7
gagaaaacguuuuuaucugau

SEQ ID NO: 185618 - RNA, 18 nt, Human herpesvirus 7
gaggauuuugacaagcgc

SEQ ID NO: 185619 - RNA, 20 nt, Human herpesvirus 7
gaggcagaccuaaacccaga

SEQ ID NO: 185620 - RNA, 13 nt, Human herpesvirus 7
gaggacagucaac

SEQ ID NO: 185621 - RNA, 20 nt, Human herpesvirus 7
gaggaccaauucuuuuacaa

SEQ ID NO: 185622 - RNA, 23 nt, Human herpesvirus 7
gaggaccaauucuuuuacaaggu

SEQ ID NO: 185623 - RNA, 13 nt, Human herpesvirus 7
gaacaugagauaa

SEQ ID NO: 185624 - RNA, 14 nt, Human herpesvirus 7
gaacauuaauauca

SEQ ID NO: 185625 - RNA, 15 nt, Human herpesvirus 7
gaacauuaauaucaa

SEQ ID NO: 185626 - RNA, 21 nt, Human herpesvirus 7
gaacauuaauaucaauuugaa

SEQ ID NO: 185627 - RNA, 22 nt, Human herpesvirus 7
gaacauuaauaucaauuugaau

SEQ ID NO: 185628 - RNA, 15 nt, Human herpesvirus 7
gaacaucuugagaaa

SEQ ID NO: 185629 - RNA, 16 nt, Human herpesvirus 7
gaacgaagaauuaaua

SEQ ID NO: 185630 - RNA, 19 nt, Human herpesvirus 7
gaacaaguagugcuaauau

SEQ ID NO: 185631 - RNA, 21 nt, Human herpesvirus 7
gaaauucuguggagugagaaa

SEQ ID NO: 185632 - RNA, 19 nt, Human herpesvirus 7
gaaauucgcaaaauuucau

SEQ ID NO: 185633 - RNA, 20 nt, Human herpesvirus 7
gaaauuuuacagccuguaca

SEQ ID NO: 185634 - RNA, 22 nt, Human herpesvirus 7
gaaauuuuacagccuguacaaa

SEQ ID NO: 185635 - RNA, 18 nt, Human herpesvirus 7
gaaauuuugaucuuguca

SEQ ID NO: 185636 - RNA, 13 nt, Human herpesvirus 7
gaacaacaugaaa

SEQ ID NO: 185637 - RNA, 16 nt, Human herpesvirus 7
gaacaaauaaugagua

SEQ ID NO: 185638 - RNA, 19 nt, Human herpesvirus 7
gaacaaauuaugguucuua

SEQ ID NO: 185639 - RNA, 15 nt, Human herpesvirus 7
gaacaacaacuaaaa

SEQ ID NO: 185640 - RNA, 17 nt, Human herpesvirus 7
cuuuauuuaagcuucaa

SEQ ID NO: 185641 - RNA, 14 nt, Human herpesvirus 7
gaaaugucaagaac

SEQ ID NO: 185642 - RNA, 19 nt, Human herpesvirus 7
gaaaugucuuugucaugau

SEQ ID NO: 185643 - RNA, 21 nt, Human herpesvirus 7
gaaaugugcgaagguugucug

SEQ ID NO: 185644 - RNA, 22 nt, Human herpesvirus 7
cuuuauucaacuguguuuuaga

SEQ ID NO: 185645 - RNA, 13 nt, Human herpesvirus 7
cuuuacuuucaua

SEQ ID NO: 185646 - RNA, 23 nt, Human herpesvirus 7
cuuuauaaaggaccaugggaaaa

SEQ ID NO: 185647 - RNA, 13 nt, Human herpesvirus 7
cuuuauaugucaa

SEQ ID NO: 185648 - RNA, 18 nt, Human herpesvirus 7
cuuuaucuuugucacuua

SEQ ID NO: 185649 - RNA, 22 nt, Human herpesvirus 7
cuuuaccgauucuaaauuaaaa

SEQ ID NO: 185650 - RNA, 19 nt, Human herpesvirus 7
cuuuaaauuauuauuagua

SEQ ID NO: 185651 - RNA, 15 nt, Human herpesvirus 7
cuuuaaaacuuugau

SEQ ID NO: 185652 - RNA, 19 nt, Human herpesvirus 7
cuuuaacuggaauuauaca

SEQ ID NO: 185653 - RNA, 23 nt, Human herpesvirus 7
cuuuaacuggaauuauacacugu

SEQ ID NO: 185654 - RNA, 23 nt, Human herpesvirus 7
cuuuaaccgcaaaagccacugau

SEQ ID NO: 185655 - RNA, 18 nt, Human herpesvirus 7
cuuuaauccguaucuaga

SEQ ID NO: 185656 - RNA, 19 nt, Human herpesvirus 7
cuuuaauggaagaacaaca

SEQ ID NO: 185657 - RNA, 22 nt, Human herpesvirus 7
cuuuaagugauacugaaucuga

SEQ ID NO: 185658 - RNA, 19 nt, Human herpesvirus 7
cuuuacacggucuuaucua

SEQ ID NO: 185659 - RNA, 15 nt, Human herpesvirus 7
cuuguguugugaaaa

SEQ ID NO: 185660 - RNA, 20 nt, Human herpesvirus 7
cuugugaaaauaacaggaaa

SEQ ID NO: 185661 - RNA, 19 nt, Human herpesvirus 7
cuugugaaguuugcugaaa

SEQ ID NO: 185662 - RNA, 16 nt, Human herpesvirus 7
gaacggauccgcugaa

SEQ ID NO: 185663 - RNA, 15 nt, Human herpesvirus 7
gaacguccucuggau

SEQ ID NO: 185664 - RNA, 20 nt, Human herpesvirus 7
gaagauuugacaaaacaaga

SEQ ID NO: 185665 - RNA, 15 nt, Human herpesvirus 7
gaaguggcuucucua

SEQ ID NO: 185666 - RNA, 13 nt, Human herpesvirus 7
gaauaaaaucuau

SEQ ID NO: 185667 - RNA, 20 nt, Human herpesvirus 7
gaagcgcugagaucuuccaa

SEQ ID NO: 185668 - RNA, 16 nt, Human herpesvirus 7
gaaguauguuucauca

SEQ ID NO: 185669 - RNA, 21 nt, Human herpesvirus 7
gaauacuacucagaagacaua

SEQ ID NO: 185670 - RNA, 14 nt, Human herpesvirus 7
gaauacaguugaau

SEQ ID NO: 185671 - RNA, 15 nt, Human herpesvirus 7
gaauaaguucaucau

SEQ ID NO: 185672 - RNA, 18 nt, Human herpesvirus 7
gaauaaucucaauuaaaa

SEQ ID NO: 185673 - RNA, 14 nt, Human herpesvirus 7
gaauaaaucaacca

SEQ ID NO: 185674 - RNA, 14 nt, Human herpesvirus 7
gaaucaaauuucaa

SEQ ID NO: 185675 - RNA, 17 nt, Human herpesvirus 7
gaaucaaauuucaaacg

SEQ ID NO: 185676 - RNA, 18 nt, Human herpesvirus 7
gaaucaacagccaucuaa

SEQ ID NO: 185677 - RNA, 19 nt, Human herpesvirus 7
gaauauaaaaaauuugaaa

SEQ ID NO: 185678 - RNA, 19 nt, Human herpesvirus 7
gaauaugaggggcaaaaaa

SEQ ID NO: 185679 - RNA, 20 nt, Human herpesvirus 7
gaauaugaggggcaaaaaac

SEQ ID NO: 185680 - RNA, 19 nt, Human herpesvirus 7
gaauauugcuagucucaau

SEQ ID NO: 185681 - RNA, 16 nt, Human herpesvirus 7
gaauagacacauuuau

SEQ ID NO: 185682 - RNA, 20 nt, Human herpesvirus 7
gaaucaagacgcuguaugca

SEQ ID NO: 185683 - RNA, 17 nt, Human herpesvirus 7
gaaucacauuuuugcua

SEQ ID NO: 185684 - RNA, 15 nt, Human herpesvirus 7
gaaucagaccagcac

SEQ ID NO: 185685 - RNA, 17 nt, Human herpesvirus 7
gaaucagaccagcacaa

SEQ ID NO: 185686 - RNA, 22 nt, Human herpesvirus 7
gaaucauagcaggaagcacaaa

SEQ ID NO: 185687 - RNA, 20 nt, Human herpesvirus 7
gaaucaucuuaaaaguacaa

SEQ ID NO: 185688 - RNA, 18 nt, Human herpesvirus 7
gaaucauuuguauauucu

SEQ ID NO: 185689 - RNA, 19 nt, Human herpesvirus 7
gaaucauuuguauauucua

SEQ ID NO: 185690 - RNA, 18 nt, Human herpesvirus 7
aaacgcuaaccaucugcu

SEQ ID NO: 185691 - RNA, 15 nt, Human herpesvirus 7
aaauaaagagucuau

SEQ ID NO: 185692 - RNA, 18 nt, Human herpesvirus 7
aaaguuuuguaacuauaa

SEQ ID NO: 185693 - RNA, 12 nt, Human herpesvirus 7
aaauaaacagga

SEQ ID NO: 185694 - RNA, 13 nt, Human herpesvirus 7
aaauaaacauuuc

SEQ ID NO: 185695 - RNA, 16 nt, Human herpesvirus 7
aaauaaaauguuuuag

SEQ ID NO: 185696 - RNA, 15 nt, Human herpesvirus 7
gaccguaaaacaauc

SEQ ID NO: 185697 - RNA, 21 nt, Human herpesvirus 7
gaccuauguguuuacauuacu

SEQ ID NO: 185698 - RNA, 21 nt, Human herpesvirus 7
gaccuaucaaauuuaucucau

SEQ ID NO: 185699 - RNA, 17 nt, Human herpesvirus 7
gacccugucacacuuau

SEQ ID NO: 185700 - RNA, 22 nt, Human herpesvirus 7
gacccugucacacuuauuccag

SEQ ID NO: 185701 - RNA, 21 nt, Human herpesvirus 7
gacacggaguuuuuacucugu

SEQ ID NO: 185702 - RNA, 14 nt, Human herpesvirus 7
gacacugaauguca

SEQ ID NO: 185703 - RNA, 15 nt, Human herpesvirus 7
gacacugaaugucaa

SEQ ID NO: 185704 - RNA, 17 nt, Human herpesvirus 7
gacacguuucucuguag

SEQ ID NO: 185705 - RNA, 16 nt, Human herpesvirus 7
gacagcuguauaucua

SEQ ID NO: 185706 - RNA, 18 nt, Human herpesvirus 7
gacagcaacugugcauga

SEQ ID NO: 185707 - RNA, 15 nt, Human herpesvirus 7
gacaauaacauuuug

SEQ ID NO: 185708 - RNA, 12 nt, Human herpesvirus 7
gacaaugucaau

SEQ ID NO: 185709 - RNA, 22 nt, Human herpesvirus 7
gacaauuucacacaaugccuuu

SEQ ID NO: 185710 - RNA, 20 nt, Human herpesvirus 7
gacaauuucguuuucuuugg

SEQ ID NO: 185711 - RNA, 21 nt, Human herpesvirus 7
gacaccaguaugaaaucaaaa

SEQ ID NO: 185712 - RNA, 16 nt, Human herpesvirus 7
gacaccaacaucuguc

SEQ ID NO: 185713 - RNA, 18 nt, Human herpesvirus 7
gacacaaucagcauuuac

SEQ ID NO: 185714 - RNA, 19 nt, Human herpesvirus 7
gacacaaucagcauuuacc

SEQ ID NO: 185715 - RNA, 18 nt, Human herpesvirus 7
gacacaccauuguucaac

SEQ ID NO: 185716 - RNA, 21 nt, Human herpesvirus 7
aaacgucuacauuuaaauuca

SEQ ID NO: 185717 - RNA, 16 nt, Human herpesvirus 7
aaacgucccugugaca

SEQ ID NO: 185718 - RNA, 14 nt, Human herpesvirus 7
aaacguaaugcaaa

SEQ ID NO: 185719 - RNA, 14 nt, Human herpesvirus 7
aaacuauauugaau

SEQ ID NO: 185720 - RNA, 10 nt, Human herpesvirus 7
aaacgugccc

SEQ ID NO: 185721 - RNA, 19 nt, Human herpesvirus 7
aaacucacuucuaaaagcu

SEQ ID NO: 185722 - RNA, 14 nt, Human herpesvirus 7
aaacugcaaaucca

SEQ ID NO: 185723 - RNA, 19 nt, Human herpesvirus 7
aaagcccaugaacacugcu

SEQ ID NO: 185724 - RNA, 14 nt, Human herpesvirus 7
aaagccgcugccuu

SEQ ID NO: 185725 - RNA, 21 nt, Human herpesvirus 7
aaagccgcugccuucgcucug

SEQ ID NO: 185726 - RNA, 18 nt, Human herpesvirus 7
aaagcaucgauguuuuau

SEQ ID NO: 185727 - RNA, 16 nt, Human herpesvirus 7
aaagcauaaagcacca

SEQ ID NO: 185728 - RNA, 16 nt, Human herpesvirus 7
aaagccagguauucaa

SEQ ID NO: 185729 - RNA, 23 nt, Human herpesvirus 7
aaacuguauuuguugaucuucaa

SEQ ID NO: 185730 - RNA, 17 nt, Human herpesvirus 7
aaacuguacccaaaaau

SEQ ID NO: 185731 - RNA, 17 nt, Human herpesvirus 7
aaacuuauguacuauac

SEQ ID NO: 185732 - RNA, 19 nt, Human herpesvirus 7
aaacuugaaaaucaaucca

SEQ ID NO: 185733 - RNA, 16 nt, Human herpesvirus 7
gacaagaggacaguca

SEQ ID NO: 185734 - RNA, 15 nt, Human herpesvirus 7
aaagcugcagcugaa

SEQ ID NO: 185735 - RNA, 20 nt, Human herpesvirus 7
aaagcugcauguguacuaaa

SEQ ID NO: 185736 - RNA, 24 nt, Human herpesvirus 7
aaagcuuuggcagcuagccuauaa

SEQ ID NO: 185737 - RNA, 17 nt, Human herpesvirus 7
aaaggaaaaaugcugcu

SEQ ID NO: 185738 - RNA, 13 nt, Human herpesvirus 7
aaaggaaagacaa

SEQ ID NO: 185739 - RNA, 15 nt, Human herpesvirus 7
aaaggaagacacgga

SEQ ID NO: 185740 - RNA, 20 nt, Human herpesvirus 7
aaagcuaaaaaacguggaaa

SEQ ID NO: 185741 - RNA, 13 nt, Human herpesvirus 7
aaagcuacagcuu

SEQ ID NO: 185742 - RNA, 18 nt, Human herpesvirus 7
aaagcguuucacugggaa

SEQ ID NO: 185743 - RNA, 13 nt, Human herpesvirus 7
aaaggaucaaaag

SEQ ID NO: 185744 - RNA, 21 nt, Human herpesvirus 7
aaaggaucaaaagcugcagcu

SEQ ID NO: 185745 - RNA, 23 nt, Human herpesvirus 7
aaaggcaucgcauauagcgcuuu

SEQ ID NO: 185746 - RNA, 21 nt, Human herpesvirus 7
aaaggugguuacauauccaau

SEQ ID NO: 185747 - RNA, 19 nt, Human herpesvirus 7
aaaguauaacauugcuuca

SEQ ID NO: 185748 - RNA, 21 nt, Human herpesvirus 7
aaaguaucauuaaaaugauua

SEQ ID NO: 185749 - RNA, 20 nt, Human herpesvirus 7
aaaguuaaaagaucuuuuac

SEQ ID NO: 185750 - RNA, 15 nt, Human herpesvirus 7
aaaguuaacauaugu

SEQ ID NO: 185751 - RNA, 11 nt, Human herpesvirus 7
aaaguuuauag

SEQ ID NO: 185752 - RNA, 14 nt, Human herpesvirus 7
aaaguuuccauaaa

SEQ ID NO: 185753 - RNA, 15 nt, Human herpesvirus 7
aaaguuguacucaga

SEQ ID NO: 185754 - RNA, 21 nt, Human herpesvirus 7
aaagucuccgugucacuguca

SEQ ID NO: 185755 - RNA, 12 nt, Human herpesvirus 7
aaaguccaaagu

SEQ ID NO: 185756 - RNA, 16 nt, Human herpesvirus 7
aaagucagaacauugu

SEQ ID NO: 185757 - RNA, 19 nt, Human herpesvirus 7
aaugauuugguauacacua

SEQ ID NO: 185758 - RNA, 19 nt, Human herpesvirus 7
aaugaucagagaugaucuu

SEQ ID NO: 185759 - RNA, 19 nt, Human herpesvirus 7
aaugaugguugcaauacaa

SEQ ID NO: 185760 - RNA, 17 nt, Human herpesvirus 7
aaugauauaaaguuuau

SEQ ID NO: 185761 - RNA, 17 nt, Human herpesvirus 7
aaucuucauuacgccuu

SEQ ID NO: 185762 - RNA, 13 nt, Human herpesvirus 7
aaugaguguuuau

SEQ ID NO: 185763 - RNA, 14 nt, Human herpesvirus 7
aaugauaauuucua

SEQ ID NO: 185764 - RNA, 19 nt, Human herpesvirus 7
aaucauuuugcuguuuaaa

SEQ ID NO: 185765 - RNA, 16 nt, Human herpesvirus 7
aaucuaucaccaagaa

SEQ ID NO: 185766 - RNA, 21 nt, Human herpesvirus 7
aaucuaucaccaagaacaaua

SEQ ID NO: 185767 - RNA, 20 nt, Human herpesvirus 7
aaucuauaguuuguauuuca

SEQ ID NO: 185768 - RNA, 16 nt, Human herpesvirus 7
aaucuggacauuucaa

SEQ ID NO: 185769 - RNA, 18 nt, Human herpesvirus 7
aaucuggacauuucaaga

SEQ ID NO: 185770 - RNA, 22 nt, Human herpesvirus 7
aaucugucugucggcaauacua

SEQ ID NO: 185771 - RNA, 18 nt, Human herpesvirus 7
aaucucauaaucauagua

SEQ ID NO: 185772 - RNA, 17 nt, Human herpesvirus 7
aaucucauaaugucuca

SEQ ID NO: 185773 - RNA, 17 nt, Human herpesvirus 7
aaucugcaaaaaaccau

SEQ ID NO: 185774 - RNA, 19 nt, Human herpesvirus 7
aauggcugaugauaaugaa

SEQ ID NO: 185775 - RNA, 18 nt, Human herpesvirus 7
aauggcgaguuacauuuc

SEQ ID NO: 185776 - RNA, 18 nt, Human herpesvirus 7
aauggcgguuguacugua

SEQ ID NO: 185777 - RNA, 13 nt, Human herpesvirus 7
aauggaucuggua

SEQ ID NO: 185778 - RNA, 20 nt, Human herpesvirus 7
aauggauucaaucuacugua

SEQ ID NO: 185779 - RNA, 20 nt, Human herpesvirus 7
aaugcugcaauguucaucaa

SEQ ID NO: 185780 - RNA, 22 nt, Human herpesvirus 7
aaugcugugauuuuccugaaaa

SEQ ID NO: 185781 - RNA, 23 nt, Human herpesvirus 7
aaugcuccgcgcuguucagcucc

SEQ ID NO: 185782 - RNA, 16 nt, Human herpesvirus 7
aaugcguuuuugucuc

SEQ ID NO: 185783 - RNA, 16 nt, Human herpesvirus 7
aaugucucuguuccca

SEQ ID NO: 185784 - RNA, 18 nt, Human herpesvirus 7
aaugucauaaaacuuuuu

SEQ ID NO: 185785 - RNA, 15 nt, Human herpesvirus 7
aaugucagaguuuaa

SEQ ID NO: 185786 - RNA, 19 nt, Human herpesvirus 7
aaugucaaugaguguuuau

SEQ ID NO: 185787 - RNA, 13 nt, Human herpesvirus 7
aauguauguccac

SEQ ID NO: 185788 - RNA, 19 nt, Human herpesvirus 7
aauguauucaaugcuagug

SEQ ID NO: 185789 - RNA, 14 nt, Human herpesvirus 7
aauguaacuuucau

SEQ ID NO: 185790 - RNA, 19 nt, Human herpesvirus 7
aauguagaaguugaucguc

SEQ ID NO: 185791 - RNA, 13 nt, Human herpesvirus 7
aaugguaagcaaa

SEQ ID NO: 185792 - RNA, 12 nt, Human herpesvirus 7
aauggucacuga

SEQ ID NO: 185793 - RNA, 15 nt, Human herpesvirus 7
aauguacauaacucu

SEQ ID NO: 185794 - RNA, 20 nt, Human herpesvirus 7
aauguacauaacucuaucuc

SEQ ID NO: 185795 - RNA, 18 nt, Human herpesvirus 7
aauguacaauaauuucua

SEQ ID NO: 185796 - RNA, 23 nt, Human herpesvirus 7
aauugguucagcgugacagagaa

SEQ ID NO: 185797 - RNA, 21 nt, Human herpesvirus 7
aauugguaauguuacuauaug

SEQ ID NO: 185798 - RNA, 17 nt, Human herpesvirus 7
aauugaguuuacugcca

SEQ ID NO: 185799 - RNA, 19 nt, Human herpesvirus 7
aauuguuuuuuauuuagcu

SEQ ID NO: 185800 - RNA, 20 nt, Human herpesvirus 7
aauuguuccugugugcaaug

SEQ ID NO: 185801 - RNA, 23 nt, Human herpesvirus 7
aauuguuugaucaaaaucuguag

SEQ ID NO: 185802 - RNA, 17 nt, Human herpesvirus 7
aauugugaagucuuuau

SEQ ID NO: 185803 - RNA, 15 nt, Human herpesvirus 7
aauugauccugcuau

SEQ ID NO: 185804 - RNA, 13 nt, Human herpesvirus 7
aauugcagacuaa

SEQ ID NO: 185805 - RNA, 18 nt, Human herpesvirus 7
aauugcagacuaauuaca

SEQ ID NO: 185806 - RNA, 21 nt, Human herpesvirus 7
aauugccaccgggacagauuu

SEQ ID NO: 185807 - RNA, 16 nt, Human herpesvirus 7
aauugccauuguguua

SEQ ID NO: 185808 - RNA, 22 nt, Human herpesvirus 7
aauugcccuuguguugucauac

SEQ ID NO: 185809 - RNA, 17 nt, Human herpesvirus 7
aauugcugucuauuuca

SEQ ID NO: 185810 - RNA, 18 nt, Human herpesvirus 7
aauugcugucuauuucaa

SEQ ID NO: 185811 - RNA, 21 nt, Human herpesvirus 7
aauucauuugugaaauugaca

SEQ ID NO: 185812 - RNA, 17 nt, Human herpesvirus 7
aauuccugcuugcacaa

SEQ ID NO: 185813 - RNA, 20 nt, Human herpesvirus 7
aauuccugcuugcacaaaga

SEQ ID NO: 185814 - RNA, 23 nt, Human herpesvirus 7
aauuccaggguaaagauaauguu

SEQ ID NO: 185815 - RNA, 21 nt, Human herpesvirus 7
aauucaucaggacaaucaaac

SEQ ID NO: 185816 - RNA, 16 nt, Human herpesvirus 7
aauucguuaagcaccg

SEQ ID NO: 185817 - RNA, 13 nt, Human herpesvirus 7
aauucguuuauac

SEQ ID NO: 185818 - RNA, 23 nt, Human herpesvirus 7
aauucuccaaucauaauuuucau

SEQ ID NO: 185819 - RNA, 17 nt, Human herpesvirus 7
aauucucgcuucaaaga

SEQ ID NO: 185820 - RNA, 23 nt, Human herpesvirus 7
aauucugaaauaaacauuucaaa

SEQ ID NO: 185821 - RNA, 15 nt, Human herpesvirus 7
aauucuuugcaauca

SEQ ID NO: 185822 - RNA, 21 nt, Human herpesvirus 7
aauucuuuguacuuguaccaa

SEQ ID NO: 185823 - RNA, 22 nt, Human herpesvirus 7
aauucuuuuacaaggugacaga

SEQ ID NO: 185824 - RNA, 20 nt, Human herpesvirus 7
aauugaaagaccaaauucau

SEQ ID NO: 185825 - RNA, 15 nt, Human herpesvirus 7
aauucuggcucuuua

SEQ ID NO: 185826 - RNA, 18 nt, Human herpesvirus 7
aauucugcuugucucugu

SEQ ID NO: 185827 - RNA, 15 nt, Human herpesvirus 7
aauuaucgcaauuaa

SEQ ID NO: 185828 - RNA, 13 nt, Human herpesvirus 7
aauuaucuacccc

SEQ ID NO: 185829 - RNA, 13 nt, Human herpesvirus 7
aauuaguucuugu

SEQ ID NO: 185830 - RNA, 15 nt, Human herpesvirus 7
aauuaguucuuguga

SEQ ID NO: 185831 - RNA, 17 nt, Human herpesvirus 7
aauuauacuagcagauc

SEQ ID NO: 185832 - RNA, 19 nt, Human herpesvirus 7
aauuauacuagcagaucuc

SEQ ID NO: 185833 - RNA, 20 nt, Human herpesvirus 7
aauuauauaaacacuugcua

SEQ ID NO: 185834 - RNA, 18 nt, Human herpesvirus 7
aauuauuuuaaauucuaa

SEQ ID NO: 185835 - RNA, 14 nt, Human herpesvirus 7
aauucaaccacaga

SEQ ID NO: 185836 - RNA, 19 nt, Human herpesvirus 7
aauuauuaauauuaguauu

SEQ ID NO: 185837 - RNA, 17 nt, Human herpesvirus 7
aauuauuggauucuaca

SEQ ID NO: 185838 - RNA, 23 nt, Human herpesvirus 7
aauuauguggugcguacacugua

SEQ ID NO: 185839 - RNA, 16 nt, Human herpesvirus 7
aauuauuauuaguauu

SEQ ID NO: 185840 - RNA, 18 nt, Human herpesvirus 7
aauuauucggugucuucu

SEQ ID NO: 185841 - RNA, 23 nt, Human herpesvirus 7
aauuauucggugucuucuugcau

SEQ ID NO: 185842 - RNA, 19 nt, Human herpesvirus 7
aauuaauaauauuaguauu

SEQ ID NO: 185843 - RNA, 14 nt, Human herpesvirus 7
aauuaaugcauugg

SEQ ID NO: 185844 - RNA, 14 nt, Human herpesvirus 7
aauuaagguggaaa

SEQ ID NO: 185845 - RNA, 13 nt, Human herpesvirus 7
aauuacauugcag

SEQ ID NO: 185846 - RNA, 21 nt, Human herpesvirus 7
aauuacauugcagucaaagau

SEQ ID NO: 185847 - RNA, 13 nt, Human herpesvirus 7
aauuacguuauau

SEQ ID NO: 185848 - RNA, 21 nt, Human herpesvirus 7
aauuagagaacgaagaauuaa

SEQ ID NO: 185849 - RNA, 19 nt, Human herpesvirus 7
aauuaacacucaaaacaga

SEQ ID NO: 185850 - RNA, 14 nt, Human herpesvirus 7
aauguuuacaugua

SEQ ID NO: 185851 - RNA, 22 nt, Human herpesvirus 7
aauuaaaacuuggugaagauca

SEQ ID NO: 185852 - RNA, 12 nt, Human herpesvirus 7
aauuaaacaauc

SEQ ID NO: 185853 - RNA, 14 nt, Human herpesvirus 7
aauuaaauaaccaa

SEQ ID NO: 185854 - RNA, 13 nt, Human herpesvirus 7
aauuaaauacuug

SEQ ID NO: 185855 - RNA, 20 nt, Human herpesvirus 7
aauuaaauccacggacaaua

SEQ ID NO: 185856 - RNA, 18 nt, Human herpesvirus 7
aauguugcaaauguucca

SEQ ID NO: 185857 - RNA, 16 nt, Human herpesvirus 7
aauguuuuuuucauac

SEQ ID NO: 185858 - RNA, 22 nt, Human herpesvirus 7
aauguuuuuuucauacauagaa

SEQ ID NO: 185859 - RNA, 22 nt, Human herpesvirus 7
aauguucuaucaagauaagcaa

SEQ ID NO: 185860 - RNA, 20 nt, Human herpesvirus 7
aauguuauuuuucaugccuu

SEQ ID NO: 185861 - RNA, 20 nt, Human herpesvirus 7
aauguuccacgaucauuccg

SEQ ID NO: 185862 - RNA, 15 nt, Human herpesvirus 7
aauguuaaaggauca

SEQ ID NO: 185863 - RNA, 22 nt, Human herpesvirus 7
aaggcaucgcauauagcgcuuu

SEQ ID NO: 185864 - RNA, 14 nt, Human herpesvirus 7
aaggcaacaaugac

SEQ ID NO: 185865 - RNA, 12 nt, Human herpesvirus 7
aagggauuuauu

SEQ ID NO: 185866 - RNA, 14 nt, Human herpesvirus 7
aagggcaugucugc

SEQ ID NO: 185867 - RNA, 9 nt, Human herpesvirus 7
aaguacaag

SEQ ID NO: 185868 - RNA, 21 nt, Human herpesvirus 7
aaguaccguggacuuucuuga

SEQ ID NO: 185869 - RNA, 19 nt, Human herpesvirus 7
aaguagaaggaaaccaauu

SEQ ID NO: 185870 - RNA, 14 nt, Human herpesvirus 7
aaguagugcuaaua

SEQ ID NO: 185871 - RNA, 21 nt, Human herpesvirus 7
aaguacgccgcguuggugugu

SEQ ID NO: 185872 - RNA, 19 nt, Human herpesvirus 7
aaguauggaaaaauguuau

SEQ ID NO: 185873 - RNA, 19 nt, Human herpesvirus 7
aaguauuuuacaacaauaa

SEQ ID NO: 185874 - RNA, 14 nt, Human herpesvirus 7
aagucacaauuaca

SEQ ID NO: 185875 - RNA, 15 nt, Human herpesvirus 7
aagucacaauuacac

SEQ ID NO: 185876 - RNA, 16 nt, Human herpesvirus 7
aagucacaauuacaca

SEQ ID NO: 185877 - RNA, 18 nt, Human herpesvirus 7
aagucacaauuacacaaa

SEQ ID NO: 185878 - RNA, 22 nt, Human herpesvirus 7
aagugggauuaaaaaucuuuac

SEQ ID NO: 185879 - RNA, 14 nt, Human herpesvirus 7
aaguuaauuuugca

SEQ ID NO: 185880 - RNA, 19 nt, Human herpesvirus 7
aagccuaggauaccaaaca

SEQ ID NO: 185881 - RNA, 13 nt, Human herpesvirus 7
aagaauguaugaa

SEQ ID NO: 185882 - RNA, 13 nt, Human herpesvirus 7
aagaauucaucuu

SEQ ID NO: 185883 - RNA, 15 nt, Human herpesvirus 7
aagaauugauugaau

SEQ ID NO: 185884 - RNA, 15 nt, Human herpesvirus 7
aagacaccccaaaau

SEQ ID NO: 185885 - RNA, 13 nt, Human herpesvirus 7
aagaacuccauuc

SEQ ID NO: 185886 - RNA, 14 nt, Human herpesvirus 7
aagaacuccauucg

SEQ ID NO: 185887 - RNA, 20 nt, Human herpesvirus 7
aagaagacauccgauagcau

SEQ ID NO: 185888 - RNA, 14 nt, Human herpesvirus 7
aagaaggaaaauuu

SEQ ID NO: 185889 - RNA, 14 nt, Human herpesvirus 7
aagaaugcaagccu

SEQ ID NO: 185890 - RNA, 13 nt, Human herpesvirus 7
aaggagaauguuc

SEQ ID NO: 185891 - RNA, 18 nt, Human herpesvirus 7
aaggagagcccaguccca

SEQ ID NO: 185892 - RNA, 19 nt, Human herpesvirus 7
aaggagagcccagucccaa

SEQ ID NO: 185893 - RNA, 18 nt, Human herpesvirus 7
aaggaugcguguguucaa

SEQ ID NO: 185894 - RNA, 18 nt, Human herpesvirus 7
aagcguucguaacaaauu

SEQ ID NO: 185895 - RNA, 12 nt, Human herpesvirus 7
aaucaguucaac

SEQ ID NO: 185896 - RNA, 21 nt, Human herpesvirus 7
aaucacgugauuaagauuccu

SEQ ID NO: 185897 - RNA, 21 nt, Human herpesvirus 7
aaucagacaauuucacacaau

SEQ ID NO: 185898 - RNA, 21 nt, Human herpesvirus 7
aaucaucuuaaaaguacaaau

SEQ ID NO: 185899 - RNA, 16 nt, Human herpesvirus 7
aaucauauaugcauua

SEQ ID NO: 185900 - RNA, 23 nt, Human herpesvirus 7
aaucauauaugcauuauauccaa

SEQ ID NO: 185901 - RNA, 22 nt, Human herpesvirus 7
aaucauaauucaaucugcaaaa

SEQ ID NO: 185902 - RNA, 19 nt, Human herpesvirus 7
aaucauaccauaaauacca

SEQ ID NO: 185903 - RNA, 22 nt, Human herpesvirus 7
aaucauaccauaaauaccaaaa

SEQ ID NO: 185904 - RNA, 23 nt, Human herpesvirus 7
aauauguggcacauaaguugaca

SEQ ID NO: 185905 - RNA, 17 nt, Human herpesvirus 7
aauaugcaugcaauuuu

SEQ ID NO: 185906 - RNA, 15 nt, Human herpesvirus 7
aauaugcuagaagac

SEQ ID NO: 185907 - RNA, 14 nt, Human herpesvirus 7
aaucagacuaaaua

SEQ ID NO: 185908 - RNA, 15 nt, Human herpesvirus 7
aaucagacuaaauau

SEQ ID NO: 185909 - RNA, 14 nt, Human herpesvirus 7
aauacguccaaaaa

SEQ ID NO: 185910 - RNA, 19 nt, Human herpesvirus 7
aauaucuuuuucaaaugga

SEQ ID NO: 185911 - RNA, 22 nt, Human herpesvirus 7
aauaucccuagaagaugacuca

SEQ ID NO: 185912 - RNA, 21 nt, Human herpesvirus 7
aauaucaaccauucaaaaacu

SEQ ID NO: 185913 - RNA, 13 nt, Human herpesvirus 7
aauaucaguacaa

SEQ ID NO: 185914 - RNA, 22 nt, Human herpesvirus 7
aauauagaugcagaaaaaucca

SEQ ID NO: 185915 - RNA, 16 nt, Human herpesvirus 7
aauauacgaaugccau

SEQ ID NO: 185916 - RNA, 19 nt, Human herpesvirus 7
aauaaguccgugugcaaaa

SEQ ID NO: 185917 - RNA, 12 nt, Human herpesvirus 7
aauaauaacaau

SEQ ID NO: 185918 - RNA, 18 nt, Human herpesvirus 7
aauaaugaguauaacuca

SEQ ID NO: 185919 - RNA, 21 nt, Human herpesvirus 7
aauaauaugcuuucacuacua

SEQ ID NO: 185920 - RNA, 14 nt, Human herpesvirus 7
aauaauauuaguau

SEQ ID NO: 185921 - RNA, 13 nt, Human herpesvirus 7
aauaaucaauaaa

SEQ ID NO: 185922 - RNA, 16 nt, Human herpesvirus 7
aaguuguuauagccac

SEQ ID NO: 185923 - RNA, 23 nt, Human herpesvirus 7
aaguugaaauuaaguuuuucaug

SEQ ID NO: 185924 - RNA, 11 nt, Human herpesvirus 7
aaguugaacaa

SEQ ID NO: 185925 - RNA, 14 nt, Human herpesvirus 7
aauaauucaaaaac

SEQ ID NO: 185926 - RNA, 15 nt, Human herpesvirus 7
aauaauucaaaaacu

SEQ ID NO: 185927 - RNA, 18 nt, Human herpesvirus 7
aauaauuuaaaauuauua

SEQ ID NO: 185928 - RNA, 22 nt, Human herpesvirus 7
aauacaaauuccugcuugcaca

SEQ ID NO: 185929 - RNA, 16 nt, Human herpesvirus 7
aauacaugaauuaucu

SEQ ID NO: 185930 - RNA, 21 nt, Human herpesvirus 7
aauacauggggcauuaauucu

SEQ ID NO: 185931 - RNA, 13 nt, Human herpesvirus 7
aauaccaaaaacc

SEQ ID NO: 185932 - RNA, 15 nt, Human herpesvirus 7
aauaccaaaaaccug

SEQ ID NO: 185933 - RNA, 14 nt, Human herpesvirus 7
aacuauaaauggaa

SEQ ID NO: 185934 - RNA, 18 nt, Human herpesvirus 7
aacuauaauagccuuuca

SEQ ID NO: 185935 - RNA, 13 nt, Human herpesvirus 7
aacuauauugaau

SEQ ID NO: 185936 - RNA, 17 nt, Human herpesvirus 7
aacuagcaaacagugcu

SEQ ID NO: 185937 - RNA, 19 nt, Human herpesvirus 7
aacuaugaacuggcacauu

SEQ ID NO: 185938 - RNA, 17 nt, Human herpesvirus 7
aacugauauuaaaucau

SEQ ID NO: 185939 - RNA, 12 nt, Human herpesvirus 7
aacuacauuuaa

SEQ ID NO: 185940 - RNA, 21 nt, Human herpesvirus 7
aacuagaaaaacacuagcuuu

SEQ ID NO: 185941 - RNA, 19 nt, Human herpesvirus 7
aacuagaaaauaacuuuaa

SEQ ID NO: 185942 - RNA, 21 nt, Human herpesvirus 7
aacuagaacagcugaaacuca

SEQ ID NO: 185943 - RNA, 18 nt, Human herpesvirus 7
aaccuuuuaacaacagcc

SEQ ID NO: 185944 - RNA, 17 nt, Human herpesvirus 7
aaccuucgcaacaauua

SEQ ID NO: 185945 - RNA, 17 nt, Human herpesvirus 7
aaccugcuaacaaguau

SEQ ID NO: 185946 - RNA, 17 nt, Human herpesvirus 7
aaccuaucaaaauucca

SEQ ID NO: 185947 - RNA, 23 nt, Human herpesvirus 7
aaccgccauucuuuucaaugcaa

SEQ ID NO: 185948 - RNA, 20 nt, Human herpesvirus 7
aaccgguaaagaaccuauca

SEQ ID NO: 185949 - RNA, 21 nt, Human herpesvirus 7
aaccgguaaagaaccuaucaa

SEQ ID NO: 185950 - RNA, 12 nt, Human herpesvirus 7
aacuggcacauu

SEQ ID NO: 185951 - RNA, 14 nt, Human herpesvirus 7
aacugcgguuauag

SEQ ID NO: 185952 - RNA, 22 nt, Human herpesvirus 7
aacuggaauuauacacugugaa

SEQ ID NO: 185953 - RNA, 22 nt, Human herpesvirus 7
aacuguauuuguugaucuucaa

SEQ ID NO: 185954 - RNA, 20 nt, Human herpesvirus 7
aacugucacgcaagucacaa

SEQ ID NO: 185955 - RNA, 21 nt, Human herpesvirus 7
aacuuuucuuaaacaugauuu

SEQ ID NO: 185956 - RNA, 17 nt, Human herpesvirus 7
aacuuuuggaaugauau

SEQ ID NO: 185957 - RNA, 12 nt, Human herpesvirus 7
aacuuuuugccg

SEQ ID NO: 185958 - RNA, 17 nt, Human herpesvirus 7
aagaacauguaguacaa

SEQ ID NO: 185959 - RNA, 16 nt, Human herpesvirus 7
aagaacauuaauauca

SEQ ID NO: 185960 - RNA, 16 nt, Human herpesvirus 7
aagaaagucaucugag

SEQ ID NO: 185961 - RNA, 15 nt, Human herpesvirus 7
aagaaaguuguacuc

SEQ ID NO: 185962 - RNA, 21 nt, Human herpesvirus 7
aagaaauucgaaacacuuacu

SEQ ID NO: 185963 - RNA, 12 nt, Human herpesvirus 7
aagaaauuguga

SEQ ID NO: 185964 - RNA, 12 nt, Human herpesvirus 7
aagaacaacaac

SEQ ID NO: 185965 - RNA, 15 nt, Human herpesvirus 7
aagaacaacaugaaa

SEQ ID NO: 185966 - RNA, 16 nt, Human herpesvirus 7
aagaacaagagcagau

SEQ ID NO: 185967 - RNA, 19 nt, Human herpesvirus 7
aagaaauaugcuuccuaaa

SEQ ID NO: 185968 - RNA, 15 nt, Human herpesvirus 7
aagaaaccagcuuuu

SEQ ID NO: 185969 - RNA, 22 nt, Human herpesvirus 7
aagaaaaguugcuuuucaugcu

SEQ ID NO: 185970 - RNA, 11 nt, Human herpesvirus 7
aagaaaaagca

SEQ ID NO: 185971 - RNA, 21 nt, Human herpesvirus 7
aagaaaaauuaauugcagcuu

SEQ ID NO: 185972 - RNA, 15 nt, Human herpesvirus 7
aaccaggaacagauu

SEQ ID NO: 185973 - RNA, 22 nt, Human herpesvirus 7
aaccauuaaacgaacucuuguu

SEQ ID NO: 185974 - RNA, 20 nt, Human herpesvirus 7
aaccaugauagaaauuauga

SEQ ID NO: 185975 - RNA, 17 nt, Human herpesvirus 7
aaccacagacacaccau

SEQ ID NO: 185976 - RNA, 14 nt, Human herpesvirus 7
aaccacagaggcgu

SEQ ID NO: 185977 - RNA, 21 nt, Human herpesvirus 7
aaccacagaggcgucaccgcu

SEQ ID NO: 185978 - RNA, 14 nt, Human herpesvirus 7
aaccacaacuguga

SEQ ID NO: 185979 - RNA, 18 nt, Human herpesvirus 7
aaccacaacugugacaaa

SEQ ID NO: 185980 - RNA, 11 nt, Human herpesvirus 7
aaccacugugu

SEQ ID NO: 185981 - RNA, 13 nt, Human herpesvirus 7
aaccacuguguca

SEQ ID NO: 185982 - RNA, 14 nt, Human herpesvirus 7
aaccacugugucau

SEQ ID NO: 185983 - RNA, 13 nt, Human herpesvirus 7
aaccacuaaucca

SEQ ID NO: 185984 - RNA, 16 nt, Human herpesvirus 7
aaccgauacagaucau

SEQ ID NO: 185985 - RNA, 17 nt, Human herpesvirus 7
aaccgauauaguuuguu

SEQ ID NO: 185986 - RNA, 20 nt, Human herpesvirus 7
uuuugcauauuuugcuagaa

SEQ ID NO: 185987 - RNA, 14 nt, Human herpesvirus 7
uuuugccgcuguuu

SEQ ID NO: 185988 - RNA, 20 nt, Human herpesvirus 7
aacaucaauuuuaaugugcu

SEQ ID NO: 185989 - RNA, 18 nt, Human herpesvirus 7
uuuugaucaaaagcuuac

SEQ ID NO: 185990 - RNA, 14 nt, Human herpesvirus 7
uuuugaucuuguca

SEQ ID NO: 185991 - RNA, 21 nt, Human herpesvirus 7
uuuugaugugcaacauaacca

SEQ ID NO: 185992 - RNA, 13 nt, Human herpesvirus 7
aacauauucuuag

SEQ ID NO: 185993 - RNA, 20 nt, Human herpesvirus 7
uuuugugccccaaacuguau

SEQ ID NO: 185994 - RNA, 20 nt, Human herpesvirus 7
uuuugcuauucacgcuucca

SEQ ID NO: 185995 - RNA, 19 nt, Human herpesvirus 7
uuuuucacagaaaucccaa

SEQ ID NO: 185996 - RNA, 23 nt, Human herpesvirus 7
uuuuguuuuauagaaguaccgug

SEQ ID NO: 185997 - RNA, 18 nt, Human herpesvirus 7
uuuuuaaaaucuacugua

SEQ ID NO: 185998 - RNA, 20 nt, Human herpesvirus 7
uuuuguuacgucaacuaaaa

SEQ ID NO: 185999 - RNA, 14 nt, Human herpesvirus 7
aacaugggucucuu

SEQ ID NO: 186000 - RNA, 20 nt, Human herpesvirus 7
aacauguguauauuugcugu

SEQ ID NO: 186001 - RNA, 15 nt, Human herpesvirus 7
aacauguuccauuca

SEQ ID NO: 186002 - RNA, 14 nt, Human herpesvirus 7
aacauguugaaaga

SEQ ID NO: 186003 - RNA, 15 nt, Human herpesvirus 7
aacauguaguacaau

SEQ ID NO: 186004 - RNA, 16 nt, Human herpesvirus 7
aacauuacgucauccc

SEQ ID NO: 186005 - RNA, 24 nt, Human herpesvirus 7
aacauuaucgcguuuucaugcuca

SEQ ID NO: 186006 - RNA, 17 nt, Human herpesvirus 7
aacauuucagaugacaa

SEQ ID NO: 186007 - RNA, 15 nt, Human herpesvirus 7
aacauuuuguaugaa

SEQ ID NO: 186008 - RNA, 20 nt, Human herpesvirus 7
aacauuauucgcgacauuau

SEQ ID NO: 186009 - RNA, 21 nt, Human herpesvirus 7
aaccaaagcaucgauguuuua

SEQ ID NO: 186010 - RNA, 20 nt, Human herpesvirus 7
uuuucgcugaagaacauuaa

SEQ ID NO: 186011 - RNA, 15 nt, Human herpesvirus 7
uuuucguaucuguga

SEQ ID NO: 186012 - RNA, 18 nt, Human herpesvirus 7
uuuucuaaaucacuaguc

SEQ ID NO: 186013 - RNA, 21 nt, Human herpesvirus 7
uuuucuaaaucacuaguccua

SEQ ID NO: 186014 - RNA, 21 nt, Human herpesvirus 7
uuuuaccaaauauguggcaca

SEQ ID NO: 186015 - RNA, 15 nt, Human herpesvirus 7
uuuucucgugauuag

SEQ ID NO: 186016 - RNA, 19 nt, Human herpesvirus 7
uuuucucugaucauuugca

SEQ ID NO: 186017 - RNA, 16 nt, Human herpesvirus 7
uuuucuuacacuauga

SEQ ID NO: 186018 - RNA, 22 nt, Human herpesvirus 7
uuuucuuagaugcauccaaaga

SEQ ID NO: 186019 - RNA, 18 nt, Human herpesvirus 7
uuuugaaaauuucuauca

SEQ ID NO: 186020 - RNA, 14 nt, Human herpesvirus 7
uuuucuuuguaaaa

SEQ ID NO: 186021 - RNA, 17 nt, Human herpesvirus 7
aacagagcgcuuugcuu

SEQ ID NO: 186022 - RNA, 15 nt, Human herpesvirus 7
aacagauugucuuau

SEQ ID NO: 186023 - RNA, 18 nt, Human herpesvirus 7
uuuugaacuguugccaga

SEQ ID NO: 186024 - RNA, 16 nt, Human herpesvirus 7
uuuugaauaacgucau

SEQ ID NO: 186025 - RNA, 16 nt, Human herpesvirus 7
uuugugagaaauggaa

SEQ ID NO: 186026 - RNA, 21 nt, Human herpesvirus 7
uuuguugucaucauauacaau

SEQ ID NO: 186027 - RNA, 13 nt, Human herpesvirus 7
uuuguuguuaucu

SEQ ID NO: 186028 - RNA, 19 nt, Human herpesvirus 7
uuuguuuaccuucauggca

SEQ ID NO: 186029 - RNA, 16 nt, Human herpesvirus 7
uuugucuguugugcaa

SEQ ID NO: 186030 - RNA, 12 nt, Human herpesvirus 7
uuuuaaugugcu

SEQ ID NO: 186031 - RNA, 14 nt, Human herpesvirus 7
uuuuaauaugugaa

SEQ ID NO: 186032 - RNA, 22 nt, Human herpesvirus 7
uuuuaacuuuuuuuuucuuuag

SEQ ID NO: 186033 - RNA, 19 nt, Human herpesvirus 7
uuuuaaauaaacgguagaa

SEQ ID NO: 186034 - RNA, 18 nt, Human herpesvirus 7
uuuuaaaugugucuuaca

SEQ ID NO: 186035 - RNA, 23 nt, Human herpesvirus 7
uuuuaacaacagccaaauguggu

SEQ ID NO: 186036 - RNA, 12 nt, Human herpesvirus 7
uuuuaacaaucu

SEQ ID NO: 186037 - RNA, 14 nt, Human herpesvirus 7
uuuuaacaaucuaa

SEQ ID NO: 186038 - RNA, 23 nt, Human herpesvirus 7
uuuuaaaaucuacuguaaucuga

SEQ ID NO: 186039 - RNA, 22 nt, Human herpesvirus 7
uuuuaaaauuggauuuugcaua

SEQ ID NO: 186040 - RNA, 20 nt, Human herpesvirus 7
uuuguuuugcaauaugcuca

SEQ ID NO: 186041 - RNA, 20 nt, Human herpesvirus 7
uuugacaaucuuggcauuga

SEQ ID NO: 186042 - RNA, 22 nt, Human herpesvirus 7
uuugaauauugcuagucucaau

SEQ ID NO: 186043 - RNA, 13 nt, Human herpesvirus 7
uuugaauaaucuc

SEQ ID NO: 186044 - RNA, 19 nt, Human herpesvirus 7
uuugaacuguugccagaaa

SEQ ID NO: 186045 - RNA, 16 nt, Human herpesvirus 7
uuugaacuuguuuuga

SEQ ID NO: 186046 - RNA, 23 nt, Human herpesvirus 7
uuugaaaauauauuccaacucaa

SEQ ID NO: 186047 - RNA, 19 nt, Human herpesvirus 7
uuugaaauaaaggaucucu

SEQ ID NO: 186048 - RNA, 22 nt, Human herpesvirus 7
uuugacuuuuucuguagacauu

SEQ ID NO: 186049 - RNA, 14 nt, Human herpesvirus 7
uuugccugccagag

SEQ ID NO: 186050 - RNA, 17 nt, Human herpesvirus 7
uuugcagccagaacuca

SEQ ID NO: 186051 - RNA, 22 nt, Human herpesvirus 7
uuugcauagauuaaauagcaaa

SEQ ID NO: 186052 - RNA, 20 nt, Human herpesvirus 7
uuugcauauggacuuaucaa

SEQ ID NO: 186053 - RNA, 15 nt, Human herpesvirus 7
uuugcauauuuugcu

SEQ ID NO: 186054 - RNA, 22 nt, Human herpesvirus 7
uuugcaaagucucauucaugca

SEQ ID NO: 186055 - RNA, 17 nt, Human herpesvirus 7
uuugcaacaaauuccau

SEQ ID NO: 186056 - RNA, 15 nt, Human herpesvirus 7
uuugaucuugucaaa

SEQ ID NO: 186057 - RNA, 22 nt, Human herpesvirus 7
uuucuguaaucauauaugcauu

SEQ ID NO: 186058 - RNA, 23 nt, Human herpesvirus 7
uuucuguaaucauauaugcauua

SEQ ID NO: 186059 - RNA, 14 nt, Human herpesvirus 7
uuucuggaauguug

SEQ ID NO: 186060 - RNA, 16 nt, Human herpesvirus 7
uuucuggaucugccuc

SEQ ID NO: 186061 - RNA, 13 nt, Human herpesvirus 7
uuucuggcaauaa

SEQ ID NO: 186062 - RNA, 16 nt, Human herpesvirus 7
uuucuggcaauaaagu

SEQ ID NO: 186063 - RNA, 13 nt, Human herpesvirus 7
uuucugucuuugc

SEQ ID NO: 186064 - RNA, 19 nt, Human herpesvirus 7
uuucuuaccgcauaaauca

SEQ ID NO: 186065 - RNA, 22 nt, Human herpesvirus 7
uuucuuagcuuucaugauuuca

SEQ ID NO: 186066 - RNA, 19 nt, Human herpesvirus 7
uuucuuauuggagauguca

SEQ ID NO: 186067 - RNA, 13 nt, Human herpesvirus 7
uuucuucuuccac

SEQ ID NO: 186068 - RNA, 19 nt, Human herpesvirus 7
uuugaaaauuucuaucaca

SEQ ID NO: 186069 - RNA, 23 nt, Human herpesvirus 7
uuugaaaauuuuuugugauuuua

SEQ ID NO: 186070 - RNA, 19 nt, Human herpesvirus 7
uugucaaagaaugcaacau

SEQ ID NO: 186071 - RNA, 21 nt, Human herpesvirus 7
uucuuuguaaaaaugaauuca

SEQ ID NO: 186072 - RNA, 17 nt, Human herpesvirus 7
uucuuucuugcauacag

SEQ ID NO: 186073 - RNA, 22 nt, Human herpesvirus 7
uucuuguuuggaaaacaacaua

SEQ ID NO: 186074 - RNA, 22 nt, Human herpesvirus 7
uucuuuaauccguaucuagaga

SEQ ID NO: 186075 - RNA, 15 nt, Human herpesvirus 7
uucuuucucaucacu

SEQ ID NO: 186076 - RNA, 13 nt, Human herpesvirus 7
uucuugcauuucc

SEQ ID NO: 186077 - RNA, 12 nt, Human herpesvirus 7
uucuucuuccac

SEQ ID NO: 186078 - RNA, 20 nt, Human herpesvirus 7
uuuaaaauuaauaauauuag

SEQ ID NO: 186079 - RNA, 22 nt, Human herpesvirus 7
uuuaaaauuauuaauauuagua

SEQ ID NO: 186080 - RNA, 21 nt, Human herpesvirus 7
uuuaaacauuacgaacugaua

SEQ ID NO: 186081 - RNA, 17 nt, Human herpesvirus 7
uuuaaacuaaguugaaa

SEQ ID NO: 186082 - RNA, 14 nt, Human herpesvirus 7
uuuaaaacuuugau

SEQ ID NO: 186083 - RNA, 17 nt, Human herpesvirus 7
uuuaaaacaagacagaa

SEQ ID NO: 186084 - RNA, 17 nt, Human herpesvirus 7
uuuaaaggugguuacau

SEQ ID NO: 186085 - RNA, 21 nt, Human herpesvirus 7
uuuaaaggugguuacauaucc

SEQ ID NO: 186086 - RNA, 22 nt, Human herpesvirus 7
uuuaaaguagcugaauuguacg

SEQ ID NO: 186087 - RNA, 22 nt, Human herpesvirus 7
uuuaaccgcaaaagccacugau

SEQ ID NO: 186088 - RNA, 14 nt, Human herpesvirus 7
uuuaacgcugaauu

SEQ ID NO: 186089 - RNA, 12 nt, Human herpesvirus 7
uuuaacuggaau

SEQ ID NO: 186090 - RNA, 19 nt, Human herpesvirus 7
uuuaacuggaauuauacac

SEQ ID NO: 186091 - RNA, 21 nt, Human herpesvirus 7
uuuaacuggaauuauacacug

SEQ ID NO: 186092 - RNA, 22 nt, Human herpesvirus 7
uuuaacuggaauuauacacugu

SEQ ID NO: 186093 - RNA, 19 nt, Human herpesvirus 7
uuuaacuuacuguuuacac

SEQ ID NO: 186094 - RNA, 13 nt, Human herpesvirus 7
uugucggugaaug

SEQ ID NO: 186095 - RNA, 15 nt, Human herpesvirus 7
uugucuggucacaua

SEQ ID NO: 186096 - RNA, 17 nt, Human herpesvirus 7
uugucuguugugcaauu

SEQ ID NO: 186097 - RNA, 16 nt, Human herpesvirus 7
uugucuuacagcacuu

SEQ ID NO: 186098 - RNA, 12 nt, Human herpesvirus 7
uugucuuaccua

SEQ ID NO: 186099 - RNA, 18 nt, Human herpesvirus 7
uuuaaaaaaaaaaccaca

SEQ ID NO: 186100 - RNA, 19 nt, Human herpesvirus 7
uugugacucggaaccgaga

SEQ ID NO: 186101 - RNA, 16 nt, Human herpesvirus 7
uugugaagucuuuaua

SEQ ID NO: 186102 - RNA, 15 nt, Human herpesvirus 7
uugucuuugcucuca

SEQ ID NO: 186103 - RNA, 22 nt, Human herpesvirus 7
uugugaaaauaacaggaaacca

SEQ ID NO: 186104 - RNA, 21 nt, Human herpesvirus 7
uuucaucuucugaaucugcaa

SEQ ID NO: 186105 - RNA, 15 nt, Human herpesvirus 7
uuuccaacgcauuca

SEQ ID NO: 186106 - RNA, 20 nt, Human herpesvirus 7
uuuauccaguacgucuugcu

SEQ ID NO: 186107 - RNA, 22 nt, Human herpesvirus 7
uuuaucaggugcucuaaauauc

SEQ ID NO: 186108 - RNA, 18 nt, Human herpesvirus 7
uuuauauuugcuugcuga

SEQ ID NO: 186109 - RNA, 19 nt, Human herpesvirus 7
uuuauauuugcuugcugaa

SEQ ID NO: 186110 - RNA, 16 nt, Human herpesvirus 7
uuuaucucauagcuua

SEQ ID NO: 186111 - RNA, 14 nt, Human herpesvirus 7
uuuaucugcauuga

SEQ ID NO: 186112 - RNA, 24 nt, Human herpesvirus 7
uuuaugaaaaacaaaauguauuca

SEQ ID NO: 186113 - RNA, 17 nt, Human herpesvirus 7
uuucagugaagcuaaaa

SEQ ID NO: 186114 - RNA, 17 nt, Human herpesvirus 7
uuucaguguacuguuga

SEQ ID NO: 186115 - RNA, 17 nt, Human herpesvirus 7
uuuagagucgucuugca

SEQ ID NO: 186116 - RNA, 13 nt, Human herpesvirus 7
uuuagcuaauuca

SEQ ID NO: 186117 - RNA, 16 nt, Human herpesvirus 7
uuuagugaguucacga

SEQ ID NO: 186118 - RNA, 22 nt, Human herpesvirus 7
uuuauaaaauauggacuuuuaa

SEQ ID NO: 186119 - RNA, 15 nt, Human herpesvirus 7
uuuaaguauuuuaca

SEQ ID NO: 186120 - RNA, 23 nt, Human herpesvirus 7
uuuaagugaacuguuacaguuaa

SEQ ID NO: 186121 - RNA, 19 nt, Human herpesvirus 7
uuuaagaacagaaugauaa

SEQ ID NO: 186122 - RNA, 14 nt, Human herpesvirus 7
uuuaauagucuaaa

SEQ ID NO: 186123 - RNA, 14 nt, Human herpesvirus 7
uuuaauacaacaua

SEQ ID NO: 186124 - RNA, 19 nt, Human herpesvirus 7
uggauaguucguaaaaaga

SEQ ID NO: 186125 - RNA, 22 nt, Human herpesvirus 7
uggauaaccaaacuauauugaa

SEQ ID NO: 186126 - RNA, 14 nt, Human herpesvirus 7
uggauaacuaugaa

SEQ ID NO: 186127 - RNA, 13 nt, Human herpesvirus 7
uggaguuugucuc

SEQ ID NO: 186128 - RNA, 19 nt, Human herpesvirus 7
uggagacgaugagcaugaa

SEQ ID NO: 186129 - RNA, 21 nt, Human herpesvirus 7
uggagauaguucgcaauggua

SEQ ID NO: 186130 - RNA, 15 nt, Human herpesvirus 7
uggccagcaguguga

SEQ ID NO: 186131 - RNA, 13 nt, Human herpesvirus 7
uggauaauaucag

SEQ ID NO: 186132 - RNA, 14 nt, Human herpesvirus 7
uggcauauaugaau

SEQ ID NO: 186133 - RNA, 14 nt, Human herpesvirus 7
uggcauuauagguu

SEQ ID NO: 186134 - RNA, 18 nt, Human herpesvirus 7
uggcguaaauacagcuca

SEQ ID NO: 186135 - RNA, 18 nt, Human herpesvirus 7
uggcucuuaauaauuauu

SEQ ID NO: 186136 - RNA, 21 nt, Human herpesvirus 7
uggcucuuaauaauuauuuga

SEQ ID NO: 186137 - RNA, 14 nt, Human herpesvirus 7
uggcucaagcacaa

SEQ ID NO: 186138 - RNA, 17 nt, Human herpesvirus 7
uggcucaagcacaauca

SEQ ID NO: 186139 - RNA, 16 nt, Human herpesvirus 7
uggcgaaacaauacau

SEQ ID NO: 186140 - RNA, 18 nt, Human herpesvirus 7
uggcgaguuacauuucac

SEQ ID NO: 186141 - RNA, 21 nt, Human herpesvirus 7
uggccuucuugccuacacuuu

SEQ ID NO: 186142 - RNA, 15 nt, Human herpesvirus 7
uggcgcugaaaacau

SEQ ID NO: 186143 - RNA, 17 nt, Human herpesvirus 7
ugggaaaaaaaaaucac

SEQ ID NO: 186144 - RNA, 21 nt, Human herpesvirus 7
ugggaaagacgugagcaauac

SEQ ID NO: 186145 - RNA, 11 nt, Human herpesvirus 7
ugggaauguua

SEQ ID NO: 186146 - RNA, 23 nt, Human herpesvirus 7
uguagauuuuguagguuguugca

SEQ ID NO: 186147 - RNA, 17 nt, Human herpesvirus 7
uguauaaaucagaauau

SEQ ID NO: 186148 - RNA, 15 nt, Human herpesvirus 7
uguauaucuauuaca

SEQ ID NO: 186149 - RNA, 19 nt, Human herpesvirus 7
uguauaugaugacaacaaa

SEQ ID NO: 186150 - RNA, 15 nt, Human herpesvirus 7
uguaugugcaucaca

SEQ ID NO: 186151 - RNA, 24 nt, Human herpesvirus 7
uguaugcuauuaaaugauuucaga

SEQ ID NO: 186152 - RNA, 22 nt, Human herpesvirus 7
uguaugcaagaaaguccaaagu

SEQ ID NO: 186153 - RNA, 21 nt, Human herpesvirus 7
ugucaaaaaaaaaacaaucca

SEQ ID NO: 186154 - RNA, 21 nt, Human herpesvirus 7
uguauuuuucuccaugcauau

SEQ ID NO: 186155 - RNA, 12 nt, Human herpesvirus 7
uguaggugcugc

SEQ ID NO: 186156 - RNA, 13 nt, Human herpesvirus 7
uguaggugcugca

SEQ ID NO: 186157 - RNA, 14 nt, Human herpesvirus 7
uguagguuguugca

SEQ ID NO: 186158 - RNA, 17 nt, Human herpesvirus 7
uguagaugcaugcuaau

SEQ ID NO: 186159 - RNA, 18 nt, Human herpesvirus 7
uguacuuguaccaaucaa

SEQ ID NO: 186160 - RNA, 16 nt, Human herpesvirus 7
uguacuuuugaucaaa

SEQ ID NO: 186161 - RNA, 19 nt, Human herpesvirus 7
uguacuguugauacaacua

SEQ ID NO: 186162 - RNA, 20 nt, Human herpesvirus 7
uguagaguaucuccgugaca

SEQ ID NO: 186163 - RNA, 22 nt, Human herpesvirus 7
uguagaguaucuccgugacaaa

SEQ ID NO: 186164 - RNA, 19 nt, Human herpesvirus 7
uguagacguagugucauca

SEQ ID NO: 186165 - RNA, 16 nt, Human herpesvirus 7
uguaaacaugaaaaau

SEQ ID NO: 186166 - RNA, 12 nt, Human herpesvirus 7
uguaacuuucau

SEQ ID NO: 186167 - RNA, 21 nt, Human herpesvirus 7
uguaaccuuggcuguucaaaa

SEQ ID NO: 186168 - RNA, 21 nt, Human herpesvirus 7
uguaacagaccuccuauguca

SEQ ID NO: 186169 - RNA, 18 nt, Human herpesvirus 7
uguaaccauuuauuuaca

SEQ ID NO: 186170 - RNA, 19 nt, Human herpesvirus 7
uggguacaaguccuuugau

SEQ ID NO: 186171 - RNA, 20 nt, Human herpesvirus 7
uggguacaaguccuuugaua

SEQ ID NO: 186172 - RNA, 20 nt, Human herpesvirus 7
ugggauuaaaaaucuuuaca

SEQ ID NO: 186173 - RNA, 21 nt, Human herpesvirus 7
ugggauuugaaugaacaaaua

SEQ ID NO: 186174 - RNA, 22 nt, Human herpesvirus 7
ugggauuugaaugaacaaauaa

SEQ ID NO: 186175 - RNA, 13 nt, Human herpesvirus 7
ugguucucuggca

SEQ ID NO: 186176 - RNA, 13 nt, Human herpesvirus 7
ugguugugcaauu

SEQ ID NO: 186177 - RNA, 16 nt, Human herpesvirus 7
ugguaaggcagugauu

SEQ ID NO: 186178 - RNA, 22 nt, Human herpesvirus 7
ugguaagaugcagacugcgcuu

SEQ ID NO: 186179 - RNA, 12 nt, Human herpesvirus 7
ugguaagcaaaa

SEQ ID NO: 186180 - RNA, 16 nt, Human herpesvirus 7
uggaaaacaacauaca

SEQ ID NO: 186181 - RNA, 17 nt, Human herpesvirus 7
uggaaaaauaaacaaua

SEQ ID NO: 186182 - RNA, 18 nt, Human herpesvirus 7
uggaaagcaaaagccaca

SEQ ID NO: 186183 - RNA, 17 nt, Human herpesvirus 7
uggaaagcucauuucau

SEQ ID NO: 186184 - RNA, 19 nt, Human herpesvirus 7
uggaaaauggagcauuauu

SEQ ID NO: 186185 - RNA, 13 nt, Human herpesvirus 7
uggaaauuacugg

SEQ ID NO: 186186 - RNA, 20 nt, Human herpesvirus 7
uggaaauuacuggcagaaau

SEQ ID NO: 186187 - RNA, 16 nt, Human herpesvirus 7
uggaaacaaauugugg

SEQ ID NO: 186188 - RNA, 14 nt, Human herpesvirus 7
uggaaaucuuuaau

SEQ ID NO: 186189 - RNA, 16 nt, Human herpesvirus 7
uggaaagggauuuauu

SEQ ID NO: 186190 - RNA, 14 nt, Human herpesvirus 7
ugcuguauguugaa

SEQ ID NO: 186191 - RNA, 15 nt, Human herpesvirus 7
ugcuguuugucaucg

SEQ ID NO: 186192 - RNA, 15 nt, Human herpesvirus 7
ugcuuaaaaacagua

SEQ ID NO: 186193 - RNA, 14 nt, Human herpesvirus 7
ugcuuaaauuucca

SEQ ID NO: 186194 - RNA, 19 nt, Human herpesvirus 7
ugcuuacagugaaguaauu

SEQ ID NO: 186195 - RNA, 15 nt, Human herpesvirus 7
ugcuuagacuuauca

SEQ ID NO: 186196 - RNA, 15 nt, Human herpesvirus 7
ugcuuugcugcaaca

SEQ ID NO: 186197 - RNA, 12 nt, Human herpesvirus 7
uggaagaacaac

SEQ ID NO: 186198 - RNA, 14 nt, Human herpesvirus 7
uggaagaacaacaa

SEQ ID NO: 186199 - RNA, 21 nt, Human herpesvirus 7
uggaaccuacugaagagccaa

SEQ ID NO: 186200 - RNA, 23 nt, Human herpesvirus 7
ugcgcuuggcaaacagucugaaa

SEQ ID NO: 186201 - RNA, 17 nt, Human herpesvirus 7
ugcggauagcggucauc

SEQ ID NO: 186202 - RNA, 16 nt, Human herpesvirus 7
ugcuagauucuauaaa

SEQ ID NO: 186203 - RNA, 18 nt, Human herpesvirus 7
ugcuagcaccgaaaaugg

SEQ ID NO: 186204 - RNA, 12 nt, Human herpesvirus 7
ugcuagaaacca

SEQ ID NO: 186205 - RNA, 19 nt, Human herpesvirus 7
ugcggaagaacaagcaaac

SEQ ID NO: 186206 - RNA, 17 nt, Human herpesvirus 7
ugcuggcucaagcacaa

SEQ ID NO: 186207 - RNA, 18 nt, Human herpesvirus 7
ugcuggcucaagcacaau

SEQ ID NO: 186208 - RNA, 20 nt, Human herpesvirus 7
ugcuggcucaagcacaauca

SEQ ID NO: 186209 - RNA, 19 nt, Human herpesvirus 7
ugcuauuauuaaagcuuuc

SEQ ID NO: 186210 - RNA, 17 nt, Human herpesvirus 7
ugcuauucacgcuucca

SEQ ID NO: 186211 - RNA, 20 nt, Human herpesvirus 7
ugcucauuuuguuuugcaau

SEQ ID NO: 186212 - RNA, 21 nt, Human herpesvirus 7
ugcucaaugguaagcaaaaaa

SEQ ID NO: 186213 - RNA, 16 nt, Human herpesvirus 7
ugcagaaaaaauaaua

SEQ ID NO: 186214 - RNA, 15 nt, Human herpesvirus 7
ugcagacuaauuaca

SEQ ID NO: 186215 - RNA, 15 nt, Human herpesvirus 7
ugcagaaauuuuuaa

SEQ ID NO: 186216 - RNA, 18 nt, Human herpesvirus 7
ugcagaccguaaaacaau

SEQ ID NO: 186217 - RNA, 19 nt, Human herpesvirus 7
ugcagacugcgcuuggcaa

SEQ ID NO: 186218 - RNA, 23 nt, Human herpesvirus 7
ugcagacugcgcuuggcaaacag

SEQ ID NO: 186219 - RNA, 20 nt, Human herpesvirus 7
ugcagcccaauguugccuuc

SEQ ID NO: 186220 - RNA, 20 nt, Human herpesvirus 7
ugcagcuucuaaaugugcua

SEQ ID NO: 186221 - RNA, 22 nt, Human herpesvirus 7
ugcaucaggaaaaucuaucacc

SEQ ID NO: 186222 - RNA, 16 nt, Human herpesvirus 7
ugacguuaucuaauau

SEQ ID NO: 186223 - RNA, 16 nt, Human herpesvirus 7
ugacguucagucguca

SEQ ID NO: 186224 - RNA, 19 nt, Human herpesvirus 7
ugacggaaguacuaaucac

SEQ ID NO: 186225 - RNA, 14 nt, Human herpesvirus 7
ugacuguaucucca

SEQ ID NO: 186226 - RNA, 15 nt, Human herpesvirus 7
ugcagaaaaauccaa

SEQ ID NO: 186227 - RNA, 16 nt, Human herpesvirus 7
ugcagaaaaauccaaa

SEQ ID NO: 186228 - RNA, 18 nt, Human herpesvirus 7
ugcagaaaaauccaaaau

SEQ ID NO: 186229 - RNA, 11 nt, Human herpesvirus 7
ugacuuugaau

SEQ ID NO: 186230 - RNA, 14 nt, Human herpesvirus 7
ugagaaaaaugaca

SEQ ID NO: 186231 - RNA, 13 nt, Human herpesvirus 7
ugccucugccucu

SEQ ID NO: 186232 - RNA, 19 nt, Human herpesvirus 7
ugccucccgggcacacuuu

SEQ ID NO: 186233 - RNA, 22 nt, Human herpesvirus 7
ugccugccagagaaccacguga

SEQ ID NO: 186234 - RNA, 14 nt, Human herpesvirus 7
ugcauuauauccaa

SEQ ID NO: 186235 - RNA, 16 nt, Human herpesvirus 7
ugcauguugcuaguau

SEQ ID NO: 186236 - RNA, 20 nt, Human herpesvirus 7
ugcauguguacuaaagccaa

SEQ ID NO: 186237 - RNA, 22 nt, Human herpesvirus 7
ugcaucgaauuuuacaaugcag

SEQ ID NO: 186238 - RNA, 12 nt, Human herpesvirus 7
ugcauugcauau

SEQ ID NO: 186239 - RNA, 17 nt, Human herpesvirus 7
ugccggccgggugcugc

SEQ ID NO: 186240 - RNA, 14 nt, Human herpesvirus 7
uucuuagcuuucau

SEQ ID NO: 186241 - RNA, 17 nt, Human herpesvirus 7
uucuuagcuuucaugau

SEQ ID NO: 186242 - RNA, 13 nt, Human herpesvirus 7
uucugucaccaca

SEQ ID NO: 186243 - RNA, 18 nt, Human herpesvirus 7
uucugucaccacacucau

SEQ ID NO: 186244 - RNA, 17 nt, Human herpesvirus 7
uucugucagaacuuuua

SEQ ID NO: 186245 - RNA, 16 nt, Human herpesvirus 7
uucuuacacuaugaga

SEQ ID NO: 186246 - RNA, 16 nt, Human herpesvirus 7
uucuuaccgcauaaau

SEQ ID NO: 186247 - RNA, 16 nt, Human herpesvirus 7
uucuguaaucauauau

SEQ ID NO: 186248 - RNA, 16 nt, Human herpesvirus 7
uucuguagacauuucu

SEQ ID NO: 186249 - RNA, 19 nt, Human herpesvirus 7
uucuggcaacaguucaaaa

SEQ ID NO: 186250 - RNA, 20 nt, Human herpesvirus 7
uucuagcaaaauaugcaaaa

SEQ ID NO: 186251 - RNA, 17 nt, Human herpesvirus 7
uucuagaaacuaaagaa

SEQ ID NO: 186252 - RNA, 12 nt, Human herpesvirus 7
uucuauuguaug

SEQ ID NO: 186253 - RNA, 18 nt, Human herpesvirus 7
uucucaaaaaugauauga

SEQ ID NO: 186254 - RNA, 11 nt, Human herpesvirus 7
uucuccagaaa

SEQ ID NO: 186255 - RNA, 15 nt, Human herpesvirus 7
uucucauagauuuca

SEQ ID NO: 186256 - RNA, 20 nt, Human herpesvirus 7
uucucaugcgauaucugacu

SEQ ID NO: 186257 - RNA, 21 nt, Human herpesvirus 7
uucuaucaaggucuuucaugc

SEQ ID NO: 186258 - RNA, 14 nt, Human herpesvirus 7
uucucaauagcaua

SEQ ID NO: 186259 - RNA, 12 nt, Human herpesvirus 7
uucuccaugcau

SEQ ID NO: 186260 - RNA, 12 nt, Human herpesvirus 7
uucucuguagau

SEQ ID NO: 186261 - RNA, 23 nt, Human herpesvirus 7
uucugaaaccuucgcaacaauua

SEQ ID NO: 186262 - RNA, 12 nt, Human herpesvirus 7
uucugaaaguga

SEQ ID NO: 186263 - RNA, 18 nt, Human herpesvirus 7
uucggagacguugcucau

SEQ ID NO: 186264 - RNA, 22 nt, Human herpesvirus 7
uucggaauuugauuccaucuca

SEQ ID NO: 186265 - RNA, 18 nt, Human herpesvirus 7
uucgugugucucuagaaa

SEQ ID NO: 186266 - RNA, 21 nt, Human herpesvirus 7
uucgggguauguauggcaaug

SEQ ID NO: 186267 - RNA, 18 nt, Human herpesvirus 7
uucuaauugcgcaguguu

SEQ ID NO: 186268 - RNA, 20 nt, Human herpesvirus 7
uucuaauuuuggcgaaacaa

SEQ ID NO: 186269 - RNA, 13 nt, Human herpesvirus 7
uucuaauagacaa

SEQ ID NO: 186270 - RNA, 18 nt, Human herpesvirus 7
uucuacauguuuaacaaa

SEQ ID NO: 186271 - RNA, 19 nt, Human herpesvirus 7
uucuacgaggguagacucu

SEQ ID NO: 186272 - RNA, 15 nt, Human herpesvirus 7
uucuaaauaugauga

SEQ ID NO: 186273 - RNA, 17 nt, Human herpesvirus 7
uucuaaauauucugugu

SEQ ID NO: 186274 - RNA, 17 nt, Human herpesvirus 7
uucuaaaaauccuaaau

SEQ ID NO: 186275 - RNA, 21 nt, Human herpesvirus 7
uucuaaguacuucuggcuuaa

SEQ ID NO: 186276 - RNA, 17 nt, Human herpesvirus 7
uuccuuucuuugagcua

SEQ ID NO: 186277 - RNA, 12 nt, Human herpesvirus 7
uuccuuugaaaa

SEQ ID NO: 186278 - RNA, 22 nt, Human herpesvirus 7
uucgcaacaauuacuugucuua

SEQ ID NO: 186279 - RNA, 20 nt, Human herpesvirus 7
uucgcaaggaauaugaagag

SEQ ID NO: 186280 - RNA, 12 nt, Human herpesvirus 7
uuccucauggcc

SEQ ID NO: 186281 - RNA, 18 nt, Human herpesvirus 7
uuccguuuuuuugcauca

SEQ ID NO: 186282 - RNA, 14 nt, Human herpesvirus 7
uuccucccaaaaau

SEQ ID NO: 186283 - RNA, 19 nt, Human herpesvirus 7
uuccaaacucgaggcuuaa

SEQ ID NO: 186284 - RNA, 22 nt, Human herpesvirus 7
uucauuuuaaaaaagacaccuu

SEQ ID NO: 186285 - RNA, 23 nt, Human herpesvirus 7
uucauuugugaaauugacaccgu

SEQ ID NO: 186286 - RNA, 20 nt, Human herpesvirus 7
uuccaaaauguaaaccaaau

SEQ ID NO: 186287 - RNA, 21 nt, Human herpesvirus 7
uuccaaaauguaaaccaaauu

SEQ ID NO: 186288 - RNA, 17 nt, Human herpesvirus 7
uuccacguuuuuuagcu

SEQ ID NO: 186289 - RNA, 20 nt, Human herpesvirus 7
uuccacuguuguagguaauu

SEQ ID NO: 186290 - RNA, 19 nt, Human herpesvirus 7
uuccaauucuuuguacuug

SEQ ID NO: 186291 - RNA, 15 nt, Human herpesvirus 7
uuccaacgcauucaa

SEQ ID NO: 186292 - RNA, 15 nt, Human herpesvirus 7
uuccaauauagacau

SEQ ID NO: 186293 - RNA, 18 nt, Human herpesvirus 7
uuccacacagggaagaaa

SEQ ID NO: 186294 - RNA, 15 nt, Human herpesvirus 7
uuccauauauaagag

SEQ ID NO: 186295 - RNA, 14 nt, Human herpesvirus 7
uuccaucacaaaac

SEQ ID NO: 186296 - RNA, 11 nt, Human herpesvirus 7
uuccaucuuau

SEQ ID NO: 186297 - RNA, 18 nt, Human herpesvirus 7
uuccgcauaaaaaaucua

SEQ ID NO: 186298 - RNA, 21 nt, Human herpesvirus 7
uuccgcauaaaaaaucuaauu

SEQ ID NO: 186299 - RNA, 15 nt, Human herpesvirus 7
uuccuagcauuaauu

SEQ ID NO: 186300 - RNA, 18 nt, Human herpesvirus 7
uucauguaucgaugugcu

SEQ ID NO: 186301 - RNA, 15 nt, Human herpesvirus 7
uucauuaacuuuuau

SEQ ID NO: 186302 - RNA, 16 nt, Human herpesvirus 7
uucauuaggauagcuu

SEQ ID NO: 186303 - RNA, 15 nt, Human herpesvirus 7
uucauuaucaccaca

SEQ ID NO: 186304 - RNA, 14 nt, Human herpesvirus 7
uucaugcauugcau

SEQ ID NO: 186305 - RNA, 17 nt, Human herpesvirus 7
uucaugccuagagggca

SEQ ID NO: 186306 - RNA, 18 nt, Human herpesvirus 7
uucaguguacuguugaua

SEQ ID NO: 186307 - RNA, 17 nt, Human herpesvirus 7
uucaguuaugaugauua

SEQ ID NO: 186308 - RNA, 22 nt, Human herpesvirus 7
uucaguucccauaaauauugau

SEQ ID NO: 186309 - RNA, 16 nt, Human herpesvirus 7
uucaguaucacuuaaa

SEQ ID NO: 186310 - RNA, 18 nt, Human herpesvirus 7
uucaaguuucuucugggu

SEQ ID NO: 186311 - RNA, 18 nt, Human herpesvirus 7
uucaauaauggcauuacu

SEQ ID NO: 186312 - RNA, 15 nt, Human herpesvirus 7
uucaaucuacuguac

SEQ ID NO: 186313 - RNA, 18 nt, Human herpesvirus 7
uucaaucuacuguacuuu

SEQ ID NO: 186314 - RNA, 13 nt, Human herpesvirus 7
uucaaucugcaaa

SEQ ID NO: 186315 - RNA, 14 nt, Human herpesvirus 7
uucaaucugcaaaa

SEQ ID NO: 186316 - RNA, 12 nt, Human herpesvirus 7
uucaauugccac

SEQ ID NO: 186317 - RNA, 13 nt, Human herpesvirus 7
uucaauugccacc

SEQ ID NO: 186318 - RNA, 16 nt, Human herpesvirus 7
uucaauuaaugcauug

SEQ ID NO: 186319 - RNA, 17 nt, Human herpesvirus 7
uucaauaugcaugcaau

SEQ ID NO: 186320 - RNA, 13 nt, Human herpesvirus 7
uucaaucacauac

SEQ ID NO: 186321 - RNA, 14 nt, Human herpesvirus 7
uucaaucaccaaag

SEQ ID NO: 186322 - RNA, 15 nt, Human herpesvirus 7
uucaaucaccaaaga

SEQ ID NO: 186323 - RNA, 15 nt, Human herpesvirus 7
uucacacaaugccuu

SEQ ID NO: 186324 - RNA, 21 nt, Human herpesvirus 7
uucacaugaaaacuuggaaaa

SEQ ID NO: 186325 - RNA, 14 nt, Human herpesvirus 7
uucaggcuaugacu

SEQ ID NO: 186326 - RNA, 21 nt, Human herpesvirus 7
uuaucaaguagaauaccagag

SEQ ID NO: 186327 - RNA, 16 nt, Human herpesvirus 7
uuaucaccauaugcca

SEQ ID NO: 186328 - RNA, 19 nt, Human herpesvirus 7
uuauaugucaaauguuccu

SEQ ID NO: 186329 - RNA, 23 nt, Human herpesvirus 7
uuauaucuuaauaaaguuuaauu

SEQ ID NO: 186330 - RNA, 19 nt, Human herpesvirus 7
uuaugaacaagguucucau

SEQ ID NO: 186331 - RNA, 13 nt, Human herpesvirus 7
uuaucuaccauca

SEQ ID NO: 186332 - RNA, 15 nt, Human herpesvirus 7
uuaucuaacacugca

SEQ ID NO: 186333 - RNA, 11 nt, Human herpesvirus 7
uuaucuaauau

SEQ ID NO: 186334 - RNA, 13 nt, Human herpesvirus 7
uuauucauuugcu

SEQ ID NO: 186335 - RNA, 19 nt, Human herpesvirus 7
uuauuccagauaugacaaa

SEQ ID NO: 186336 - RNA, 22 nt, Human herpesvirus 7
uuauuccgugcuguacugaaac

SEQ ID NO: 186337 - RNA, 14 nt, Human herpesvirus 7
uuauucuacacauc

SEQ ID NO: 186338 - RNA, 19 nt, Human herpesvirus 7
uuauucuacacaucuucaa

SEQ ID NO: 186339 - RNA, 17 nt, Human herpesvirus 7
uucaaggaauucugacu

SEQ ID NO: 186340 - RNA, 13 nt, Human herpesvirus 7
uuauugagcaauu

SEQ ID NO: 186341 - RNA, 13 nt, Human herpesvirus 7
uuauuagauucca

SEQ ID NO: 186342 - RNA, 22 nt, Human herpesvirus 7
uuaccauuucgaauuuguucaa

SEQ ID NO: 186343 - RNA, 21 nt, Human herpesvirus 7
uuaccgauucuaaauuaaaaa

SEQ ID NO: 186344 - RNA, 20 nt, Human herpesvirus 7
uuaccgucuuuugauuuugc

SEQ ID NO: 186345 - RNA, 22 nt, Human herpesvirus 7
uuaccgucuuuugauuuugccg

SEQ ID NO: 186346 - RNA, 11 nt, Human herpesvirus 7
uuacauugcag

SEQ ID NO: 186347 - RNA, 21 nt, Human herpesvirus 7
uuacauuucaaacaacauauc

SEQ ID NO: 186348 - RNA, 16 nt, Human herpesvirus 7
uuacauuucauuccaa

SEQ ID NO: 186349 - RNA, 21 nt, Human herpesvirus 7
uuacauauuaguuuaacuuac

SEQ ID NO: 186350 - RNA, 13 nt, Human herpesvirus 7
uuaaucuggaauc

SEQ ID NO: 186351 - RNA, 20 nt, Human herpesvirus 7
uuaaucuugaaaaagaauuu

SEQ ID NO: 186352 - RNA, 20 nt, Human herpesvirus 7
uuacaguuuuuuaauacaaa

SEQ ID NO: 186353 - RNA, 15 nt, Human herpesvirus 7
uuaaucauaucuugc

SEQ ID NO: 186354 - RNA, 16 nt, Human herpesvirus 7
uuaauauuaguauugu

SEQ ID NO: 186355 - RNA, 19 nt, Human herpesvirus 7
uuagcuuucaugauuucaa

SEQ ID NO: 186356 - RNA, 20 nt, Human herpesvirus 7
uuagcuuuugaauaaucuca

SEQ ID NO: 186357 - RNA, 20 nt, Human herpesvirus 7
uuagcggagguuugcuauug

SEQ ID NO: 186358 - RNA, 18 nt, Human herpesvirus 7
uuagcgaauuugugcugu

SEQ ID NO: 186359 - RNA, 16 nt, Human herpesvirus 7
uuagcaccaacugaau

SEQ ID NO: 186360 - RNA, 18 nt, Human herpesvirus 7
uuagcaccaacugaauua

SEQ ID NO: 186361 - RNA, 21 nt, Human herpesvirus 7
uuagugauagaguacaugugu

SEQ ID NO: 186362 - RNA, 13 nt, Human herpesvirus 7
uuagcuaauucau

SEQ ID NO: 186363 - RNA, 15 nt, Human herpesvirus 7
uuaggggaagaauca

SEQ ID NO: 186364 - RNA, 17 nt, Human herpesvirus 7
uuagagucgucuugcaa

SEQ ID NO: 186365 - RNA, 15 nt, Human herpesvirus 7
uuagauuauacaaau

SEQ ID NO: 186366 - RNA, 19 nt, Human herpesvirus 7
uuagauuauacaaauccaa

SEQ ID NO: 186367 - RNA, 16 nt, Human herpesvirus 7
uuagauuccauuuaaa

SEQ ID NO: 186368 - RNA, 17 nt, Human herpesvirus 7
uuagaugcauccaaaga

SEQ ID NO: 186369 - RNA, 16 nt, Human herpesvirus 7
uuagauaaugacaaac

SEQ ID NO: 186370 - RNA, 22 nt, Human herpesvirus 7
uuaauaaaaacaaagacuauaa

SEQ ID NO: 186371 - RNA, 19 nt, Human herpesvirus 7
uuaauacaaaauaaagcca

SEQ ID NO: 186372 - RNA, 23 nt, Human herpesvirus 7
uuaaaucauaccauaaauaccaa

SEQ ID NO: 186373 - RNA, 21 nt, Human herpesvirus 7
uuaaaugaagagaauuuagau

SEQ ID NO: 186374 - RNA, 21 nt, Human herpesvirus 7
uuaaauuauuauuaguauugu

SEQ ID NO: 186375 - RNA, 15 nt, Human herpesvirus 7
uuaaauguguaacaa

SEQ ID NO: 186376 - RNA, 21 nt, Human herpesvirus 7
uuaagacaccccaaaaucaaa

SEQ ID NO: 186377 - RNA, 13 nt, Human herpesvirus 7
uuaagcagcagac

SEQ ID NO: 186378 - RNA, 22 nt, Human herpesvirus 7
uuaagccuaggauaccaaacaa

SEQ ID NO: 186379 - RNA, 20 nt, Human herpesvirus 7
uuaaacgaacucuuguucau

SEQ ID NO: 186380 - RNA, 14 nt, Human herpesvirus 7
uuaaacauuacgaa

SEQ ID NO: 186381 - RNA, 15 nt, Human herpesvirus 7
uguuugucaucguaa

SEQ ID NO: 186382 - RNA, 17 nt, Human herpesvirus 7
uguuuggcaacaaacaa

SEQ ID NO: 186383 - RNA, 14 nt, Human herpesvirus 7
uuaaacaaucugga

SEQ ID NO: 186384 - RNA, 13 nt, Human herpesvirus 7
uuaaauaauuuau

SEQ ID NO: 186385 - RNA, 14 nt, Human herpesvirus 7
uuaaauagugaauc

SEQ ID NO: 186386 - RNA, 19 nt, Human herpesvirus 7
uuaaaguugcauugaaaag

SEQ ID NO: 186387 - RNA, 16 nt, Human herpesvirus 7
uuaaaggaucaaaagc

SEQ ID NO: 186388 - RNA, 17 nt, Human herpesvirus 7
uuaaagaaaagcaaacc

SEQ ID NO: 186389 - RNA, 20 nt, Human herpesvirus 7
uuaaagauugcuugcacugu

SEQ ID NO: 186390 - RNA, 22 nt, Human herpesvirus 7
ugucacuuaaagaacuccauuc

SEQ ID NO: 186391 - RNA, 23 nt, Human herpesvirus 7
ugucacgcaagucacaauuacac

SEQ ID NO: 186392 - RNA, 19 nt, Human herpesvirus 7
ugucggcaauacuaguauu

SEQ ID NO: 186393 - RNA, 13 nt, Human herpesvirus 7
ugucacacuuauu

SEQ ID NO: 186394 - RNA, 19 nt, Human herpesvirus 7
ugucuagcuuuauauguca

SEQ ID NO: 186395 - RNA, 13 nt, Human herpesvirus 7
ugucucugugcau

SEQ ID NO: 186396 - RNA, 18 nt, Human herpesvirus 7
ugucucacgagaaagggc

SEQ ID NO: 186397 - RNA, 14 nt, Human herpesvirus 7
ugucucauaauauc

SEQ ID NO: 186398 - RNA, 19 nt, Human herpesvirus 7
ugucuucggccuugcugaa

SEQ ID NO: 186399 - RNA, 17 nt, Human herpesvirus 7
ugucuucuugcauuucc

SEQ ID NO: 186400 - RNA, 12 nt, Human herpesvirus 7
ugucuguucuca

SEQ ID NO: 186401 - RNA, 18 nt, Human herpesvirus 7
ugucuguuguaacagauu

SEQ ID NO: 186402 - RNA, 20 nt, Human herpesvirus 7
ugucucuugaagaacaacau

SEQ ID NO: 186403 - RNA, 23 nt, Human herpesvirus 7
ugucucuuuacagaggacuugaa

SEQ ID NO: 186404 - RNA, 15 nt, Human herpesvirus 7
ugucuuacagcacuu

SEQ ID NO: 186405 - RNA, 22 nt, Human herpesvirus 7
uguugucaucauauacaauaau

SEQ ID NO: 186406 - RNA, 18 nt, Human herpesvirus 7
ugucuuggaagagucucu

SEQ ID NO: 186407 - RNA, 16 nt, Human herpesvirus 7
uguuuaagacauuauu

SEQ ID NO: 186408 - RNA, 22 nt, Human herpesvirus 7
uguuuaagacauuauuugcuga

SEQ ID NO: 186409 - RNA, 19 nt, Human herpesvirus 7
uguuguuuucauagguugc

SEQ ID NO: 186410 - RNA, 14 nt, Human herpesvirus 7
uguuuaaaauguua

SEQ ID NO: 186411 - RNA, 19 nt, Human herpesvirus 7
uguuuaaaggugguuacau

SEQ ID NO: 186412 - RNA, 18 nt, Human herpesvirus 7
uguuucaagaauggcuga

SEQ ID NO: 186413 - RNA, 22 nt, Human herpesvirus 7
uguuucaagaauggcugaugau

SEQ ID NO: 186414 - RNA, 17 nt, Human herpesvirus 7
uguuucuggaucugccu

SEQ ID NO: 186415 - RNA, 22 nt, Human herpesvirus 7
uguuucugaauccgcauuugag

SEQ ID NO: 186416 - RNA, 17 nt, Human herpesvirus 7
uguuuccgaucuaaaga

SEQ ID NO: 186417 - RNA, 23 nt, Human herpesvirus 7
uguuuccgcauaaaaaaucuaau

SEQ ID NO: 186418 - RNA, 21 nt, Human herpesvirus 7
ugaaaauauuuuacaaaaaga

SEQ ID NO: 186419 - RNA, 19 nt, Human herpesvirus 7
ugaaaaugaugguugcaau

SEQ ID NO: 186420 - RNA, 17 nt, Human herpesvirus 7
ugaaaauugcguauuau

SEQ ID NO: 186421 - RNA, 16 nt, Human herpesvirus 7
ugaaaauuucuaucac

SEQ ID NO: 186422 - RNA, 14 nt, Human herpesvirus 7
ugaaaauauauucc

SEQ ID NO: 186423 - RNA, 15 nt, Human herpesvirus 7
ugaaaauaaacagga

SEQ ID NO: 186424 - RNA, 16 nt, Human herpesvirus 7
ugaaaauaaacaggaa

SEQ ID NO: 186425 - RNA, 14 nt, Human herpesvirus 7
ugaaaauaacagga

SEQ ID NO: 186426 - RNA, 15 nt, Human herpesvirus 7
ugaaaauaacaggaa

SEQ ID NO: 186427 - RNA, 21 nt, Human herpesvirus 7
ucuuucaucuucugaaucugc

SEQ ID NO: 186428 - RNA, 15 nt, Human herpesvirus 7
ucuuucuaguuccca

SEQ ID NO: 186429 - RNA, 20 nt, Human herpesvirus 7
ucuuucaugcauugcauucg

SEQ ID NO: 186430 - RNA, 20 nt, Human herpesvirus 7
ucuuuacuuucauagcuuaa

SEQ ID NO: 186431 - RNA, 21 nt, Human herpesvirus 7
ucuuuagagucugugugugca

SEQ ID NO: 186432 - RNA, 13 nt, Human herpesvirus 7
ucuuuaacgguaa

SEQ ID NO: 186433 - RNA, 16 nt, Human herpesvirus 7
ucuuuauaaaggacca

SEQ ID NO: 186434 - RNA, 14 nt, Human herpesvirus 7
ucuuuauaagcagu

SEQ ID NO: 186435 - RNA, 18 nt, Human herpesvirus 7
ucuugugaaguuugcuga

SEQ ID NO: 186436 - RNA, 13 nt, Human herpesvirus 7
ucuucuguaaaag

SEQ ID NO: 186437 - RNA, 16 nt, Human herpesvirus 7
ucuucugcuaacucau

SEQ ID NO: 186438 - RNA, 16 nt, Human herpesvirus 7
ucuugaucccguaaag

SEQ ID NO: 186439 - RNA, 23 nt, Human herpesvirus 7
ucuugauuccgaagauacgcuag

SEQ ID NO: 186440 - RNA, 20 nt, Human herpesvirus 7
ucuucuuugugagaaaugga

SEQ ID NO: 186441 - RNA, 17 nt, Human herpesvirus 7
ucuugacucagauucga

SEQ ID NO: 186442 - RNA, 16 nt, Human herpesvirus 7
ucuugagaaauaugaa

SEQ ID NO: 186443 - RNA, 20 nt, Human herpesvirus 7
ucuugaagaacaacaugaaa

SEQ ID NO: 186444 - RNA, 15 nt, Human herpesvirus 7
ucuucuugcauuucc

SEQ ID NO: 186445 - RNA, 20 nt, Human herpesvirus 7
ugaaagcguuucacugggaa

SEQ ID NO: 186446 - RNA, 21 nt, Human herpesvirus 7
ugaaacucaucauugaagaaa

SEQ ID NO: 186447 - RNA, 23 nt, Human herpesvirus 7
ugaaauggguuugggaaacaucu

SEQ ID NO: 186448 - RNA, 12 nt, Human herpesvirus 7
ugaaauuucaaa

SEQ ID NO: 186449 - RNA, 22 nt, Human herpesvirus 7
ugaaauuucuaaauaugaugaa

SEQ ID NO: 186450 - RNA, 15 nt, Human herpesvirus 7
ugaaauuccauacaa

SEQ ID NO: 186451 - RNA, 15 nt, Human herpesvirus 7
ugaaauugacauggu

SEQ ID NO: 186452 - RNA, 13 nt, Human herpesvirus 7
ugaaagguuacaa

SEQ ID NO: 186453 - RNA, 13 nt, Human herpesvirus 7
ugaaaucaaaaau

SEQ ID NO: 186454 - RNA, 18 nt, Human herpesvirus 7
ugaaauaauagaugucug

SEQ ID NO: 186455 - RNA, 12 nt, Human herpesvirus 7
ugaaauaguguc

SEQ ID NO: 186456 - RNA, 15 nt, Human herpesvirus 7
ugaacucugucauca

SEQ ID NO: 186457 - RNA, 13 nt, Human herpesvirus 7
ugaacuggcacau

SEQ ID NO: 186458 - RNA, 14 nt, Human herpesvirus 7
ugaacuuguuuuga

SEQ ID NO: 186459 - RNA, 16 nt, Human herpesvirus 7
ugaacuuguuuugacu

SEQ ID NO: 186460 - RNA, 14 nt, Human herpesvirus 7
ugaagacuacauaa

SEQ ID NO: 186461 - RNA, 18 nt, Human herpesvirus 7
ugaagaacauuaauauca

SEQ ID NO: 186462 - RNA, 22 nt, Human herpesvirus 7
ugaacacuuuuacgugacuguc

SEQ ID NO: 186463 - RNA, 20 nt, Human herpesvirus 7
ugaacaaguagugcuaauau

SEQ ID NO: 186464 - RNA, 21 nt, Human herpesvirus 7
ugaaauguuuuuuuuacgguu

SEQ ID NO: 186465 - RNA, 23 nt, Human herpesvirus 7
ugaacacaacauccagagucucu

SEQ ID NO: 186466 - RNA, 15 nt, Human herpesvirus 7
ugaacgcagacacaa

SEQ ID NO: 186467 - RNA, 18 nt, Human herpesvirus 7
ugaacccauagaagaaug

SEQ ID NO: 186468 - RNA, 18 nt, Human herpesvirus 7
ugaauucguuaagcaccg

SEQ ID NO: 186469 - RNA, 23 nt, Human herpesvirus 7
ugaauuaucgcaauuaauucagu

SEQ ID NO: 186470 - RNA, 22 nt, Human herpesvirus 7
ugacaaauuucaggaaaaacgg

SEQ ID NO: 186471 - RNA, 18 nt, Human herpesvirus 7
ugacaaaacugcaaaucc

SEQ ID NO: 186472 - RNA, 20 nt, Human herpesvirus 7
ugacaaaacugcaaauccaa

SEQ ID NO: 186473 - RNA, 15 nt, Human herpesvirus 7
ugaauuuuaagugga

SEQ ID NO: 186474 - RNA, 18 nt, Human herpesvirus 7
ugaauuuuaaguggaauc

SEQ ID NO: 186475 - RNA, 20 nt, Human herpesvirus 7
ugaaugcaagcaacacuuaa

SEQ ID NO: 186476 - RNA, 19 nt, Human herpesvirus 7
ugaaucgugggacuugaua

SEQ ID NO: 186477 - RNA, 13 nt, Human herpesvirus 7
ugaaucugaagaa

SEQ ID NO: 186478 - RNA, 17 nt, Human herpesvirus 7
ugaaucugcacuaucuc

SEQ ID NO: 186479 - RNA, 13 nt, Human herpesvirus 7
ugaauauugcuag

SEQ ID NO: 186480 - RNA, 18 nt, Human herpesvirus 7
ugaauauugcuagucuca

SEQ ID NO: 186481 - RNA, 22 nt, Human herpesvirus 7
ugaauagguaucuuuacuuuca

SEQ ID NO: 186482 - RNA, 23 nt, Human herpesvirus 7
ugaagcacacacguuuucuguca

SEQ ID NO: 186483 - RNA, 17 nt, Human herpesvirus 7
ugaagauuguuggaaag

SEQ ID NO: 186484 - RNA, 13 nt, Human herpesvirus 7
ugaagagugcacu

SEQ ID NO: 186485 - RNA, 14 nt, Human herpesvirus 7
ugaagaguucuugu

SEQ ID NO: 186486 - RNA, 19 nt, Human herpesvirus 7
ugaagaggagaauucugua

SEQ ID NO: 186487 - RNA, 13 nt, Human herpesvirus 7
ugaaguuugcuga

SEQ ID NO: 186488 - RNA, 16 nt, Human herpesvirus 7
ugaauagacacauuua

SEQ ID NO: 186489 - RNA, 22 nt, Human herpesvirus 7
ugaaggaugcguguguucaaaa

SEQ ID NO: 186490 - RNA, 13 nt, Human herpesvirus 7
ugacaacucaaua

SEQ ID NO: 186491 - RNA, 12 nt, Human herpesvirus 7
ugacaaugucaa

SEQ ID NO: 186492 - RNA, 19 nt, Human herpesvirus 7
ugacaaugucaauaaucaa

SEQ ID NO: 186493 - RNA, 14 nt, Human herpesvirus 7
ugacaaucuuggca

SEQ ID NO: 186494 - RNA, 15 nt, Human herpesvirus 7
ugacagggugugaac

SEQ ID NO: 186495 - RNA, 16 nt, Human herpesvirus 7
ugacauaaucauggaa

SEQ ID NO: 186496 - RNA, 21 nt, Human herpesvirus 7
ugacagaccuauguguuuaca

SEQ ID NO: 186497 - RNA, 14 nt, Human herpesvirus 7
ugacacgacacuga

SEQ ID NO: 186498 - RNA, 21 nt, Human herpesvirus 7
ugacacgacacugaaugucaa

SEQ ID NO: 186499 - RNA, 15 nt, Human herpesvirus 7
ugacaccaacaucug

SEQ ID NO: 186500 - RNA, 19 nt, Human herpesvirus 7
ugacccugucacacuuauu

SEQ ID NO: 186501 - RNA, 18 nt, Human herpesvirus 7
ugacauuaguucuggccg

SEQ ID NO: 186502 - RNA, 17 nt, Human herpesvirus 7
ugacauuggaacuuuau

SEQ ID NO: 186503 - RNA, 17 nt, Human herpesvirus 7
ucgcgauaacacucuug

SEQ ID NO: 186504 - RNA, 16 nt, Human herpesvirus 7
uccucagaauguacac

SEQ ID NO: 186505 - RNA, 16 nt, Human herpesvirus 7
ucgcuaacuuugcuau

SEQ ID NO: 186506 - RNA, 15 nt, Human herpesvirus 7
ucgcguuuucaugcu

SEQ ID NO: 186507 - RNA, 17 nt, Human herpesvirus 7
ucgcugaagaacauuaa

SEQ ID NO: 186508 - RNA, 13 nt, Human herpesvirus 7
ucgcucaacuuau

SEQ ID NO: 186509 - RNA, 14 nt, Human herpesvirus 7
ucgcucaacuuaug

SEQ ID NO: 186510 - RNA, 20 nt, Human herpesvirus 7
ucgcucaacuuaugugucac

SEQ ID NO: 186511 - RNA, 21 nt, Human herpesvirus 7
ucggaauuugauuccaucuca

SEQ ID NO: 186512 - RNA, 21 nt, Human herpesvirus 7
ucgcuuauuuaacacguagaa

SEQ ID NO: 186513 - RNA, 13 nt, Human herpesvirus 7
ucgcuuucucaag

SEQ ID NO: 186514 - RNA, 12 nt, Human herpesvirus 7
uccucacagauu

SEQ ID NO: 186515 - RNA, 15 nt, Human herpesvirus 7
uccuaugacugagaa

SEQ ID NO: 186516 - RNA, 12 nt, Human herpesvirus 7
uccuaugauaca

SEQ ID NO: 186517 - RNA, 15 nt, Human herpesvirus 7
uccuauguuuggcaa

SEQ ID NO: 186518 - RNA, 18 nt, Human herpesvirus 7
uccguugaaagcguuuca

SEQ ID NO: 186519 - RNA, 23 nt, Human herpesvirus 7
uccguuguuaaaaauuaacagcu

SEQ ID NO: 186520 - RNA, 11 nt, Human herpesvirus 7
uccguuucauu

SEQ ID NO: 186521 - RNA, 17 nt, Human herpesvirus 7
uccuaaaaaaaaaggaa

SEQ ID NO: 186522 - RNA, 21 nt, Human herpesvirus 7
uccguuaauggauaaccaaca

SEQ ID NO: 186523 - RNA, 19 nt, Human herpesvirus 7
ucuacauuaaacagcauuu

SEQ ID NO: 186524 - RNA, 18 nt, Human herpesvirus 7
ucuacauagaaaucuuua

SEQ ID NO: 186525 - RNA, 16 nt, Human herpesvirus 7
ucuacaucaucaacau

SEQ ID NO: 186526 - RNA, 16 nt, Human herpesvirus 7
ucuacaauuucuggca

SEQ ID NO: 186527 - RNA, 23 nt, Human herpesvirus 7
ucuagaacuguuaaaaucuguuc

SEQ ID NO: 186528 - RNA, 14 nt, Human herpesvirus 7
ucuacuucuaguag

SEQ ID NO: 186529 - RNA, 17 nt, Human herpesvirus 7
ucuacuguacuuuugau

SEQ ID NO: 186530 - RNA, 15 nt, Human herpesvirus 7
ucuacuguaaucuga

SEQ ID NO: 186531 - RNA, 15 nt, Human herpesvirus 7
ucgucuaagucaauu

SEQ ID NO: 186532 - RNA, 16 nt, Human herpesvirus 7
ucguaacagagaugaa

SEQ ID NO: 186533 - RNA, 13 nt, Human herpesvirus 7
ucguaucugugac

SEQ ID NO: 186534 - RNA, 14 nt, Human herpesvirus 7
ucguaucugugacu

SEQ ID NO: 186535 - RNA, 21 nt, Human herpesvirus 7
ucguauugccuuucccagaag

SEQ ID NO: 186536 - RNA, 21 nt, Human herpesvirus 7
ucugacuugccccuaaacaau

SEQ ID NO: 186537 - RNA, 12 nt, Human herpesvirus 7
ucugacauugga

SEQ ID NO: 186538 - RNA, 16 nt, Human herpesvirus 7
ucugacauuguacaau

SEQ ID NO: 186539 - RNA, 20 nt, Human herpesvirus 7
ucugacuaaagcuacagcuu

SEQ ID NO: 186540 - RNA, 22 nt, Human herpesvirus 7
ucugacuaaagcuacagcuuug

SEQ ID NO: 186541 - RNA, 19 nt, Human herpesvirus 7
ucugaauagacacauuuau

SEQ ID NO: 186542 - RNA, 15 nt, Human herpesvirus 7
ucugaaucugcaaag

SEQ ID NO: 186543 - RNA, 16 nt, Human herpesvirus 7
ucugaaucugcaaaga

SEQ ID NO: 186544 - RNA, 17 nt, Human herpesvirus 7
ucugaaucugcaaagaa

SEQ ID NO: 186545 - RNA, 15 nt, Human herpesvirus 7
ucugaaauaaacauu

SEQ ID NO: 186546 - RNA, 17 nt, Human herpesvirus 7
ucugaaauaaacauuuc

SEQ ID NO: 186547 - RNA, 20 nt, Human herpesvirus 7
ucugaaauaaacauuucaaa

SEQ ID NO: 186548 - RNA, 21 nt, Human herpesvirus 7
ucugaaaccuucgcaacaauu

SEQ ID NO: 186549 - RNA, 17 nt, Human herpesvirus 7
ucucacgagaaagggca

SEQ ID NO: 186550 - RNA, 23 nt, Human herpesvirus 7
ucucuugaggaaaugucuuuguc

SEQ ID NO: 186551 - RNA, 20 nt, Human herpesvirus 7
ucucaauaguuuuacaaaga

SEQ ID NO: 186552 - RNA, 14 nt, Human herpesvirus 7
ucuauucucauaga

SEQ ID NO: 186553 - RNA, 19 nt, Human herpesvirus 7
ucuauucucauagauuuca

SEQ ID NO: 186554 - RNA, 16 nt, Human herpesvirus 7
ucuauuucuauucagu

SEQ ID NO: 186555 - RNA, 17 nt, Human herpesvirus 7
ucuauuagauaaugaca

SEQ ID NO: 186556 - RNA, 18 nt, Human herpesvirus 7
ucuauuaguaugagugcu

SEQ ID NO: 186557 - RNA, 21 nt, Human herpesvirus 7
ucugucauggacggcauuuaa

SEQ ID NO: 186558 - RNA, 20 nt, Human herpesvirus 7
ucugauucuuauucuacaca

SEQ ID NO: 186559 - RNA, 13 nt, Human herpesvirus 7
ucugauugacucg

SEQ ID NO: 186560 - RNA, 18 nt, Human herpesvirus 7
ucugauuuauauagcaau

SEQ ID NO: 186561 - RNA, 14 nt, Human herpesvirus 7
ucugccauuacuga

SEQ ID NO: 186562 - RNA, 22 nt, Human herpesvirus 7
ucuucagauucaguaucacuua

SEQ ID NO: 186563 - RNA, 23 nt, Human herpesvirus 7
ucuuccaauucuuuguacuugua

SEQ ID NO: 186564 - RNA, 22 nt, Human herpesvirus 7
ucuuccuagcauuaauuuggua

SEQ ID NO: 186565 - RNA, 11 nt, Human herpesvirus 7
ucugucugucg

SEQ ID NO: 186566 - RNA, 22 nt, Human herpesvirus 7
ucugugacuuagaaaaacgcua

SEQ ID NO: 186567 - RNA, 20 nt, Human herpesvirus 7
ucuguguguuugaaugacau

SEQ ID NO: 186568 - RNA, 16 nt, Human herpesvirus 7
ucuguuguccagacag

SEQ ID NO: 186569 - RNA, 16 nt, Human herpesvirus 7
ucuguuguaacagauu

SEQ ID NO: 186570 - RNA, 14 nt, Human herpesvirus 7
ucauagguugcuau

SEQ ID NO: 186571 - RNA, 20 nt, Human herpesvirus 7
ucauagauuucagaauuucc

SEQ ID NO: 186572 - RNA, 16 nt, Human herpesvirus 7
ucauaauuuucaugaa

SEQ ID NO: 186573 - RNA, 20 nt, Human herpesvirus 7
ucauagacgaggccaaucug

SEQ ID NO: 186574 - RNA, 22 nt, Human herpesvirus 7
ucauagcuuaaaaaauacauug

SEQ ID NO: 186575 - RNA, 12 nt, Human herpesvirus 7
ucauaucuauga

SEQ ID NO: 186576 - RNA, 16 nt, Human herpesvirus 7
ucauaucuaugaugca

SEQ ID NO: 186577 - RNA, 18 nt, Human herpesvirus 7
ucauaucuaugaugcauc

SEQ ID NO: 186578 - RNA, 22 nt, Human herpesvirus 7
ucaugauuauauaaguccuuca

SEQ ID NO: 186579 - RNA, 20 nt, Human herpesvirus 7
ucaguacaacgacauugaaa

SEQ ID NO: 186580 - RNA, 22 nt, Human herpesvirus 7
ucaguuaucaaguagaauacca

SEQ ID NO: 186581 - RNA, 20 nt, Human herpesvirus 7
ucaguuguuggaaauaccgu

SEQ ID NO: 186582 - RNA, 15 nt, Human herpesvirus 7
ucaguuuacugugga

SEQ ID NO: 186583 - RNA, 18 nt, Human herpesvirus 7
ucaguuucuuuuucauua

SEQ ID NO: 186584 - RNA, 13 nt, Human herpesvirus 7
ucauaaaccugcu

SEQ ID NO: 186585 - RNA, 18 nt, Human herpesvirus 7
ucauaccauaaauaccaa

SEQ ID NO: 186586 - RNA, 22 nt, Human herpesvirus 7
ucauaccauaaauaccaaaaac

SEQ ID NO: 186587 - RNA, 17 nt, Human herpesvirus 7
ucauaaucauaguacau

SEQ ID NO: 186588 - RNA, 20 nt, Human herpesvirus 7
ucauaaucauaguacaucuu

SEQ ID NO: 186589 - RNA, 13 nt, Human herpesvirus 7
ucauacaaugaau

SEQ ID NO: 186590 - RNA, 21 nt, Human herpesvirus 7
ucauacaaugaauuagcuaaa

SEQ ID NO: 186591 - RNA, 15 nt, Human herpesvirus 7
ucauaauuacauugc

SEQ ID NO: 186592 - RNA, 17 nt, Human herpesvirus 7
ucauaauuacauugcag

SEQ ID NO: 186593 - RNA, 19 nt, Human herpesvirus 7
ucauaauuacauugcaguc

SEQ ID NO: 186594 - RNA, 16 nt, Human herpesvirus 7
ucauuuuuuucuuaua

SEQ ID NO: 186595 - RNA, 14 nt, Human herpesvirus 7
ucauuggcauuauu

SEQ ID NO: 186596 - RNA, 18 nt, Human herpesvirus 7
ucauuggcauuauucuuc

SEQ ID NO: 186597 - RNA, 10 nt, Human herpesvirus 7
ucauucugaa

SEQ ID NO: 186598 - RNA, 15 nt, Human herpesvirus 7
ucauugacauguuuc

SEQ ID NO: 186599 - RNA, 22 nt, Human herpesvirus 7
ucauugacauguuucuggaucu

SEQ ID NO: 186600 - RNA, 14 nt, Human herpesvirus 7
ucauugagucuuca

SEQ ID NO: 186601 - RNA, 18 nt, Human herpesvirus 7
uccaaaguagaacuugaa

SEQ ID NO: 186602 - RNA, 20 nt, Human herpesvirus 7
uccaaaguagaacuugaaaa

SEQ ID NO: 186603 - RNA, 17 nt, Human herpesvirus 7
uccaaaccggccaauga

SEQ ID NO: 186604 - RNA, 19 nt, Human herpesvirus 7
uccaaaaguuguuaagaau

SEQ ID NO: 186605 - RNA, 18 nt, Human herpesvirus 7
uccaaaauacaauaguga

SEQ ID NO: 186606 - RNA, 11 nt, Human herpesvirus 7
uccaaaaucag

SEQ ID NO: 186607 - RNA, 19 nt, Human herpesvirus 7
uccaaaauguaaaccaaau

SEQ ID NO: 186608 - RNA, 11 nt, Human herpesvirus 7
ucaugccuugc

SEQ ID NO: 186609 - RNA, 14 nt, Human herpesvirus 7
ucaugccuugccaa

SEQ ID NO: 186610 - RNA, 23 nt, Human herpesvirus 7
ucaugccuugccaaaagcuugaa

SEQ ID NO: 186611 - RNA, 14 nt, Human herpesvirus 7
ucauggcacauaua

SEQ ID NO: 186612 - RNA, 17 nt, Human herpesvirus 7
ucaugcuguauguugaa

SEQ ID NO: 186613 - RNA, 16 nt, Human herpesvirus 7
ucauggaaaauggagc

SEQ ID NO: 186614 - RNA, 16 nt, Human herpesvirus 7
ucauuccaaaauacaa

SEQ ID NO: 186615 - RNA, 19 nt, Human herpesvirus 7
ucauuccuauuaagcagcu

SEQ ID NO: 186616 - RNA, 22 nt, Human herpesvirus 7
ucauuagaaacaaucccagaaa

SEQ ID NO: 186617 - RNA, 11 nt, Human herpesvirus 7
ucauguugacg

SEQ ID NO: 186618 - RNA, 14 nt, Human herpesvirus 7
uccaauaaugcauc

SEQ ID NO: 186619 - RNA, 18 nt, Human herpesvirus 7
uccaaguuuugcgcaaaa

SEQ ID NO: 186620 - RNA, 19 nt, Human herpesvirus 7
uccaauaaccgguaaagaa

SEQ ID NO: 186621 - RNA, 12 nt, Human herpesvirus 7
uccaacagaaua

SEQ ID NO: 186622 - RNA, 15 nt, Human herpesvirus 7
uccagacagcuguau

SEQ ID NO: 186623 - RNA, 14 nt, Human herpesvirus 7
uccagaguaugaau

SEQ ID NO: 186624 - RNA, 15 nt, Human herpesvirus 7
uccagaguccuuuca

SEQ ID NO: 186625 - RNA, 19 nt, Human herpesvirus 7
uccagauccaucuguaaca

SEQ ID NO: 186626 - RNA, 19 nt, Human herpesvirus 7
uccagauuuucuguuucag

SEQ ID NO: 186627 - RNA, 19 nt, Human herpesvirus 7
uccagcaaagacuugcaaa

SEQ ID NO: 186628 - RNA, 15 nt, Human herpesvirus 7
uccauucgguuuuca

SEQ ID NO: 186629 - RNA, 18 nt, Human herpesvirus 7
uccauucuaaaccaaaua

SEQ ID NO: 186630 - RNA, 20 nt, Human herpesvirus 7
uccauucuaaaccaaauaua

SEQ ID NO: 186631 - RNA, 18 nt, Human herpesvirus 7
uccauuaaaaauuuaccu

SEQ ID NO: 186632 - RNA, 11 nt, Human herpesvirus 7
uccaugucaca

SEQ ID NO: 186633 - RNA, 12 nt, Human herpesvirus 7
uccaugucacau

SEQ ID NO: 186634 - RNA, 15 nt, Human herpesvirus 7
ucccaaaaauuaaca

SEQ ID NO: 186635 - RNA, 23 nt, Human herpesvirus 7
uccauuugugauguacugcucau

SEQ ID NO: 186636 - RNA, 14 nt, Human herpesvirus 7
ucccgcagagauua

SEQ ID NO: 186637 - RNA, 15 nt, Human herpesvirus 7
ucccgcagagauuac

SEQ ID NO: 186638 - RNA, 15 nt, Human herpesvirus 7
uccgcauuugagggu

SEQ ID NO: 186639 - RNA, 15 nt, Human herpesvirus 7
ucccuauugcaucaa

SEQ ID NO: 186640 - RNA, 23 nt, Human herpesvirus 7
ucccuagaagaugacucaugaga

SEQ ID NO: 186641 - RNA, 21 nt, Human herpesvirus 7
ucacaucuagaguaucuuuuc

SEQ ID NO: 186642 - RNA, 17 nt, Human herpesvirus 7
ucacgcucucaaucaaa

SEQ ID NO: 186643 - RNA, 13 nt, Human herpesvirus 7
ucagagaucauaa

SEQ ID NO: 186644 - RNA, 13 nt, Human herpesvirus 7
ucagagaugaucu

SEQ ID NO: 186645 - RNA, 12 nt, Human herpesvirus 7
ucagauguggag

SEQ ID NO: 186646 - RNA, 18 nt, Human herpesvirus 7
ucagauucugacauugua

SEQ ID NO: 186647 - RNA, 21 nt, Human herpesvirus 7
ucagauucugacauuguacaa

SEQ ID NO: 186648 - RNA, 21 nt, Human herpesvirus 7
ucagauugaaauuccauacaa

SEQ ID NO: 186649 - RNA, 20 nt, Human herpesvirus 7
ucagauuugguucauuacag

SEQ ID NO: 186650 - RNA, 17 nt, Human herpesvirus 7
ucagcaaaucugaaaau

SEQ ID NO: 186651 - RNA, 13 nt, Human herpesvirus 7
ucagcaucucaga

SEQ ID NO: 186652 - RNA, 23 nt, Human herpesvirus 7
ucagcauuugguaaaaaaaaugg

SEQ ID NO: 186653 - RNA, 15 nt, Human herpesvirus 7
ucaauaaucaaugca

SEQ ID NO: 186654 - RNA, 17 nt, Human herpesvirus 7
ucaauaguuaauugugu

SEQ ID NO: 186655 - RNA, 22 nt, Human herpesvirus 7
ucaauaguuuuacaaagaacau

SEQ ID NO: 186656 - RNA, 15 nt, Human herpesvirus 7
ucaauaugcaugcaa

SEQ ID NO: 186657 - RNA, 18 nt, Human herpesvirus 7
ucaauaugcaugcaauuu

SEQ ID NO: 186658 - RNA, 17 nt, Human herpesvirus 7
ucacaauuacacaaauu

SEQ ID NO: 186659 - RNA, 22 nt, Human herpesvirus 7
ucacagcuagauugacuaugaa

SEQ ID NO: 186660 - RNA, 20 nt, Human herpesvirus 7
ucacagggacguuucuagca

SEQ ID NO: 186661 - RNA, 22 nt, Human herpesvirus 7
ucacagggacguuucuagcaaa

SEQ ID NO: 186662 - RNA, 19 nt, Human herpesvirus 7
ucaauaaaaagauauacau

SEQ ID NO: 186663 - RNA, 22 nt, Human herpesvirus 7
ucaauaauggcauuacuacagu

SEQ ID NO: 186664 - RNA, 16 nt, Human herpesvirus 7
ucaauagcagagaaua

SEQ ID NO: 186665 - RNA, 16 nt, Human herpesvirus 7
ucaauagcauaugcug

SEQ ID NO: 186666 - RNA, 20 nt, Human herpesvirus 7
ucaaccaacauucuugucaa

SEQ ID NO: 186667 - RNA, 22 nt, Human herpesvirus 7
ucaagguuaagugaaugugcuu

SEQ ID NO: 186668 - RNA, 13 nt, Human herpesvirus 7
ucaaggacaugau

SEQ ID NO: 186669 - RNA, 22 nt, Human herpesvirus 7
ucaacaccagucucugaauuau

SEQ ID NO: 186670 - RNA, 18 nt, Human herpesvirus 7
ucaacacauaauguguau

SEQ ID NO: 186671 - RNA, 20 nt, Human herpesvirus 7
ucaacagagcgcuuugcuua

SEQ ID NO: 186672 - RNA, 22 nt, Human herpesvirus 7
ucaacagccaucuaauugcaga

SEQ ID NO: 186673 - RNA, 16 nt, Human herpesvirus 7
ucaacaucuuucauaa

SEQ ID NO: 186674 - RNA, 17 nt, Human herpesvirus 7
ucaaaagacgcuugcua

SEQ ID NO: 186675 - RNA, 18 nt, Human herpesvirus 7
ucaaaagacgcuugcuau

SEQ ID NO: 186676 - RNA, 17 nt, Human herpesvirus 7
ucaaaacauaucagauu

SEQ ID NO: 186677 - RNA, 20 nt, Human herpesvirus 7
ucaaauuauaccucagcuuu

SEQ ID NO: 186678 - RNA, 17 nt, Human herpesvirus 7
ucaacaaauccacucug

SEQ ID NO: 186679 - RNA, 18 nt, Human herpesvirus 7
ucaaaaaaaaaacaaucc

SEQ ID NO: 186680 - RNA, 19 nt, Human herpesvirus 7
ucaaaaaaaaaacaaucca

SEQ ID NO: 186681 - RNA, 23 nt, Human herpesvirus 7
uauuuuguuuugcauauuuugcu

SEQ ID NO: 186682 - RNA, 11 nt, Human herpesvirus 7
uauuuuuggcg

SEQ ID NO: 186683 - RNA, 14 nt, Human herpesvirus 7
uauuuucuuaacaa

SEQ ID NO: 186684 - RNA, 21 nt, Human herpesvirus 7
uauuuugaaaauauauuccaa

SEQ ID NO: 186685 - RNA, 17 nt, Human herpesvirus 7
uauuuguuuguucuguu

SEQ ID NO: 186686 - RNA, 15 nt, Human herpesvirus 7
uauuuuaaguaauca

SEQ ID NO: 186687 - RNA, 13 nt, Human herpesvirus 7
uauuuuacaaaaa

SEQ ID NO: 186688 - RNA, 22 nt, Human herpesvirus 7
uauuugucucugugcauuucac

SEQ ID NO: 186689 - RNA, 17 nt, Human herpesvirus 7
uauuuguuccaguugaa

SEQ ID NO: 186690 - RNA, 16 nt, Human herpesvirus 7
uauuuguugaucuuca

SEQ ID NO: 186691 - RNA, 17 nt, Human herpesvirus 7
uauuuguugaucuucaa

SEQ ID NO: 186692 - RNA, 21 nt, Human herpesvirus 7
uauaaauguaacuuucaucug

SEQ ID NO: 186693 - RNA, 23 nt, Human herpesvirus 7
uauaaacacuugcuagcugugau

SEQ ID NO: 186694 - RNA, 18 nt, Human herpesvirus 7
uauaaacucuaugucaaa

SEQ ID NO: 186695 - RNA, 13 nt, Human herpesvirus 7
uauaaacagucca

SEQ ID NO: 186696 - RNA, 19 nt, Human herpesvirus 7
uauaaguccuucaauagca

SEQ ID NO: 186697 - RNA, 13 nt, Human herpesvirus 7
uauaagcaguuau

SEQ ID NO: 186698 - RNA, 15 nt, Human herpesvirus 7
uauaacaaaaaacgg

SEQ ID NO: 186699 - RNA, 15 nt, Human herpesvirus 7
uauaacucaaaagac

SEQ ID NO: 186700 - RNA, 16 nt, Human herpesvirus 7
uauucuaacaaauacc

SEQ ID NO: 186701 - RNA, 23 nt, Human herpesvirus 7
uauucuacacaucuucaauguuc

SEQ ID NO: 186702 - RNA, 21 nt, Human herpesvirus 7
uauucuaggcuugcauucuuc

SEQ ID NO: 186703 - RNA, 13 nt, Human herpesvirus 7
uauucucauacaa

SEQ ID NO: 186704 - RNA, 14 nt, Human herpesvirus 7
uauugagcaauuga

SEQ ID NO: 186705 - RNA, 21 nt, Human herpesvirus 7
uauugagcaauugauucacau

SEQ ID NO: 186706 - RNA, 24 nt, Human herpesvirus 7
uauuccauuaagccagauuucaug

SEQ ID NO: 186707 - RNA, 20 nt, Human herpesvirus 7
uauaauucucacagcuuauu

SEQ ID NO: 186708 - RNA, 18 nt, Human herpesvirus 7
uauuccuucccaacuaaa

SEQ ID NO: 186709 - RNA, 18 nt, Human herpesvirus 7
uauaauaaaggaaagaca

SEQ ID NO: 186710 - RNA, 20 nt, Human herpesvirus 7
uauaauaaaggaaagacaaa

SEQ ID NO: 186711 - RNA, 13 nt, Human herpesvirus 7
uauaauagccuuu

SEQ ID NO: 186712 - RNA, 15 nt, Human herpesvirus 7
uauaaucaagucuua

SEQ ID NO: 186713 - RNA, 18 nt, Human herpesvirus 7
uauaaucuuaauguuucu

SEQ ID NO: 186714 - RNA, 16 nt, Human herpesvirus 7
gugucuuuuaaugauc

SEQ ID NO: 186715 - RNA, 14 nt, Human herpesvirus 7
gugugaaaacaauu

SEQ ID NO: 186716 - RNA, 19 nt, Human herpesvirus 7
gugguaaauuugcuugcuu

SEQ ID NO: 186717 - RNA, 21 nt, Human herpesvirus 7
gugugcccgggaggcagacau

SEQ ID NO: 186718 - RNA, 15 nt, Human herpesvirus 7
gugggaacauaaaaa

SEQ ID NO: 186719 - RNA, 16 nt, Human herpesvirus 7
guguuacuauuugacu

SEQ ID NO: 186720 - RNA, 18 nt, Human herpesvirus 7
guguucaggcaacauuaa

SEQ ID NO: 186721 - RNA, 19 nt, Human herpesvirus 7
guguucaggcaacauuaau

SEQ ID NO: 186722 - RNA, 13 nt, Human herpesvirus 7
guguuauacuuau

SEQ ID NO: 186723 - RNA, 21 nt, Human herpesvirus 7
guguuaaggagcuucauuuua

SEQ ID NO: 186724 - RNA, 18 nt, Human herpesvirus 7
guguuaauugugguacaa

SEQ ID NO: 186725 - RNA, 22 nt, Human herpesvirus 7
guguguuacuauuugacugggu

SEQ ID NO: 186726 - RNA, 15 nt, Human herpesvirus 7
guguggcaacaucuu

SEQ ID NO: 186727 - RNA, 19 nt, Human herpesvirus 7
guuaguugcagcugugaua

SEQ ID NO: 186728 - RNA, 14 nt, Human herpesvirus 7
guggccuucuugcc

SEQ ID NO: 186729 - RNA, 13 nt, Human herpesvirus 7
gugcuaugaaaau

SEQ ID NO: 186730 - RNA, 21 nt, Human herpesvirus 7
gugcugcguauguccagugac

SEQ ID NO: 186731 - RNA, 13 nt, Human herpesvirus 7
gugcuuacgugau

SEQ ID NO: 186732 - RNA, 16 nt, Human herpesvirus 7
gugcuuagacuuauca

SEQ ID NO: 186733 - RNA, 19 nt, Human herpesvirus 7
gugcuuagacuuaucacca

SEQ ID NO: 186734 - RNA, 13 nt, Human herpesvirus 7
gugacgcuuuaau

SEQ ID NO: 186735 - RNA, 14 nt, Human herpesvirus 7
gugcguacacugua

SEQ ID NO: 186736 - RNA, 13 nt, Human herpesvirus 7
gugaacuguuaca

SEQ ID NO: 186737 - RNA, 23 nt, Human herpesvirus 7
gugaagcuugcuuaaaacuuuga

SEQ ID NO: 186738 - RNA, 16 nt, Human herpesvirus 7
gucgcuuggguuugau

SEQ ID NO: 186739 - RNA, 22 nt, Human herpesvirus 7
gucuauuucaauuaaugcauug

SEQ ID NO: 186740 - RNA, 14 nt, Human herpesvirus 7
gucugauucuuauu

SEQ ID NO: 186741 - RNA, 18 nt, Human herpesvirus 7
gugaaaauaaacaggaac

SEQ ID NO: 186742 - RNA, 21 nt, Human herpesvirus 7
gugaaaaugaugguugcaaua

SEQ ID NO: 186743 - RNA, 19 nt, Human herpesvirus 7
gucucuaaacuucuagccu

SEQ ID NO: 186744 - RNA, 21 nt, Human herpesvirus 7
gucugaaagccgcugccuucg

SEQ ID NO: 186745 - RNA, 18 nt, Human herpesvirus 7
guaccaaucaagccacga

SEQ ID NO: 186746 - RNA, 14 nt, Human herpesvirus 7
guacaucuuucuag

SEQ ID NO: 186747 - RNA, 16 nt, Human herpesvirus 7
guacagucauuugcag

SEQ ID NO: 186748 - RNA, 16 nt, Human herpesvirus 7
guacaacgacauugaa

SEQ ID NO: 186749 - RNA, 18 nt, Human herpesvirus 7
guacaauaauuucuauua

SEQ ID NO: 186750 - RNA, 15 nt, Human herpesvirus 7
guacaauauuaaacu

SEQ ID NO: 186751 - RNA, 10 nt, Human herpesvirus 7
guacaacaaa

SEQ ID NO: 186752 - RNA, 17 nt, Human herpesvirus 7
guacaacaaacauucca

SEQ ID NO: 186753 - RNA, 23 nt, Human herpesvirus 7
gucgaaaugaaaagucugugaca

SEQ ID NO: 186754 - RNA, 23 nt, Human herpesvirus 7
uaaaugaagagaauuuagauuaa

SEQ ID NO: 186755 - RNA, 14 nt, Human herpesvirus 7
uaaaugaaguuugu

SEQ ID NO: 186756 - RNA, 19 nt, Human herpesvirus 7
uaaaugaaguuuguuuacc

SEQ ID NO: 186757 - RNA, 22 nt, Human herpesvirus 7
uaaauguaauuuaaauaauuua

SEQ ID NO: 186758 - RNA, 13 nt, Human herpesvirus 7
uaaauucaacauc

SEQ ID NO: 186759 - RNA, 18 nt, Human herpesvirus 7
uaaauucaacaucuuuca

SEQ ID NO: 186760 - RNA, 22 nt, Human herpesvirus 7
uaaauucaaggaauucugacuc

SEQ ID NO: 186761 - RNA, 14 nt, Human herpesvirus 7
uaaauucugaaaua

SEQ ID NO: 186762 - RNA, 17 nt, Human herpesvirus 7
uaaauuauuagauucca

SEQ ID NO: 186763 - RNA, 18 nt, Human herpesvirus 7
uaaauguguaacaauuga

SEQ ID NO: 186764 - RNA, 15 nt, Human herpesvirus 7
uaaauuacacucugu

SEQ ID NO: 186765 - RNA, 14 nt, Human herpesvirus 7
uaaauuacgagaua

SEQ ID NO: 186766 - RNA, 21 nt, Human herpesvirus 7
uaacaaacaauaaauuuugaa

SEQ ID NO: 186767 - RNA, 21 nt, Human herpesvirus 7
uaacaaaaaacgguuuugcua

SEQ ID NO: 186768 - RNA, 19 nt, Human herpesvirus 7
uaacaaaaaagguguugau

SEQ ID NO: 186769 - RNA, 22 nt, Human herpesvirus 7
uaaauuucuuaaagaugucuua

SEQ ID NO: 186770 - RNA, 11 nt, Human herpesvirus 7
uaaauuuacuu

SEQ ID NO: 186771 - RNA, 13 nt, Human herpesvirus 7
uaaauuuacuuga

SEQ ID NO: 186772 - RNA, 16 nt, Human herpesvirus 7
uaaauugcaacuggca

SEQ ID NO: 186773 - RNA, 20 nt, Human herpesvirus 7
uaaagggauuucuucuucua

SEQ ID NO: 186774 - RNA, 19 nt, Human herpesvirus 7
uaaaggaucaaaagcugca

SEQ ID NO: 186775 - RNA, 13 nt, Human herpesvirus 7
uaaaggaucucuc

SEQ ID NO: 186776 - RNA, 23 nt, Human herpesvirus 7
uaaaggaaaauauauuaaucuug

SEQ ID NO: 186777 - RNA, 10 nt, Human herpesvirus 7
uaaagcacca

SEQ ID NO: 186778 - RNA, 13 nt, Human herpesvirus 7
uaaagcaccaaaa

SEQ ID NO: 186779 - RNA, 17 nt, Human herpesvirus 7
uaaagauuacauuugcu

SEQ ID NO: 186780 - RNA, 18 nt, Human herpesvirus 7
uaaagauuacauuugcuu

SEQ ID NO: 186781 - RNA, 23 nt, Human herpesvirus 7
uaaagauugaucacuuugcauca

SEQ ID NO: 186782 - RNA, 16 nt, Human herpesvirus 7
uaaagcagaaaauucu

SEQ ID NO: 186783 - RNA, 20 nt, Human herpesvirus 7
uaaagaugauuggauuuucu

SEQ ID NO: 186784 - RNA, 23 nt, Human herpesvirus 7
uaaagagucuauugacauaauca

SEQ ID NO: 186785 - RNA, 15 nt, Human herpesvirus 7
uaaagaguguuuuca

SEQ ID NO: 186786 - RNA, 18 nt, Human herpesvirus 7
uaaagagcauucaugccu

SEQ ID NO: 186787 - RNA, 21 nt, Human herpesvirus 7
uaaagagaaaauaaacauguu

SEQ ID NO: 186788 - RNA, 18 nt, Human herpesvirus 7
uaaaaugaccgcauguga

SEQ ID NO: 186789 - RNA, 20 nt, Human herpesvirus 7
uaaaaugaccgcaugugaaa

SEQ ID NO: 186790 - RNA, 19 nt, Human herpesvirus 7
uaaaauauguucagauuga

SEQ ID NO: 186791 - RNA, 13 nt, Human herpesvirus 7
uaaaaucuacugu

SEQ ID NO: 186792 - RNA, 19 nt, Human herpesvirus 7
uaaaaucuacuguaaucug

SEQ ID NO: 186793 - RNA, 21 nt, Human herpesvirus 7
uaaaaucuacuguaaucugac

SEQ ID NO: 186794 - RNA, 17 nt, Human herpesvirus 7
uaaacaaaacaguuugu

SEQ ID NO: 186795 - RNA, 22 nt, Human herpesvirus 7
uaaacaaaacaguuuguuguau

SEQ ID NO: 186796 - RNA, 23 nt, Human herpesvirus 7
uaaaauguuuuagaccuaucaaa

SEQ ID NO: 186797 - RNA, 23 nt, Human herpesvirus 7
uaaaauuaauucaaucaccaaag

SEQ ID NO: 186798 - RNA, 21 nt, Human herpesvirus 7
uaaacaaucuggacauuucaa

SEQ ID NO: 186799 - RNA, 12 nt, Human herpesvirus 7
uaaacagcauuu

SEQ ID NO: 186800 - RNA, 18 nt, Human herpesvirus 7
uaaaauuuaaaaucaauu

SEQ ID NO: 186801 - RNA, 19 nt, Human herpesvirus 7
uaaaauuucauaucuauga

SEQ ID NO: 186802 - RNA, 18 nt, Human herpesvirus 7
uaaacaaacaaugagcaa

SEQ ID NO: 186803 - RNA, 21 nt, Human herpesvirus 7
uaaacaaacaaugagcaauuc

SEQ ID NO: 186804 - RNA, 16 nt, Human herpesvirus 7
uaaaaauuaacagcuc

SEQ ID NO: 186805 - RNA, 23 nt, Human herpesvirus 7
uaaaaagugcucugucuccaaau

SEQ ID NO: 186806 - RNA, 22 nt, Human herpesvirus 7
uaaaacaaacuauguccaaaaa

SEQ ID NO: 186807 - RNA, 19 nt, Human herpesvirus 7
uaaaacaaucgauugcagu

SEQ ID NO: 186808 - RNA, 21 nt, Human herpesvirus 7
uaaaacaugcaacauaaucca

SEQ ID NO: 186809 - RNA, 23 nt, Human herpesvirus 7
uaaaacauuuacaaaaaaaagcu

SEQ ID NO: 186810 - RNA, 13 nt, Human herpesvirus 7
uaaaaaauuugaa

SEQ ID NO: 186811 - RNA, 16 nt, Human herpesvirus 7
uaaaaacaaagacuau

SEQ ID NO: 186812 - RNA, 20 nt, Human herpesvirus 7
uaaaaacuuuucuuucuuaa

SEQ ID NO: 186813 - RNA, 21 nt, Human herpesvirus 7
uaaaaagaaucacauuuuugc

SEQ ID NO: 186814 - RNA, 17 nt, Human herpesvirus 7
uaaaaagauauacauaa

SEQ ID NO: 186815 - RNA, 17 nt, Human herpesvirus 7
uaaaaacccuuuauuca

SEQ ID NO: 186816 - RNA, 19 nt, Human herpesvirus 7
uaaaaacgaacacuuucua

SEQ ID NO: 186817 - RNA, 23 nt, Human herpesvirus 7
uaaaaacgaacacuuucuaauaa

SEQ ID NO: 186818 - RNA, 14 nt, Human herpesvirus 7
uaaaaagcccauga

SEQ ID NO: 186819 - RNA, 18 nt, Human herpesvirus 7
guuuaccuucauggcaca

SEQ ID NO: 186820 - RNA, 21 nt, Human herpesvirus 7
guuuaugaagaugauguuucc

SEQ ID NO: 186821 - RNA, 17 nt, Human herpesvirus 7
guuuauuaacuauauca

SEQ ID NO: 186822 - RNA, 23 nt, Human herpesvirus 7
guuucacugggaaguauguuuca

SEQ ID NO: 186823 - RNA, 10 nt, Human herpesvirus 7
guuguuaaaa

SEQ ID NO: 186824 - RNA, 18 nt, Human herpesvirus 7
guuguugguguguuacau

SEQ ID NO: 186825 - RNA, 14 nt, Human herpesvirus 7
guuguugucauuga

SEQ ID NO: 186826 - RNA, 13 nt, Human herpesvirus 7
guugugcaauuug

SEQ ID NO: 186827 - RNA, 19 nt, Human herpesvirus 7
guuuaaugaaaaagccaua

SEQ ID NO: 186828 - RNA, 20 nt, Human herpesvirus 7
guuuaaugaaaaagccauaa

SEQ ID NO: 186829 - RNA, 16 nt, Human herpesvirus 7
guuaugcacauccaaa

SEQ ID NO: 186830 - RNA, 13 nt, Human herpesvirus 7
guuauccaaguuu

SEQ ID NO: 186831 - RNA, 17 nt, Human herpesvirus 7
guuaucgcccacuauuu

SEQ ID NO: 186832 - RNA, 14 nt, Human herpesvirus 7
guuggcacugugua

SEQ ID NO: 186833 - RNA, 22 nt, Human herpesvirus 7
guugggaaagacgugagcaaua

SEQ ID NO: 186834 - RNA, 15 nt, Human herpesvirus 7
guugcuuacuuugcg

SEQ ID NO: 186835 - RNA, 14 nt, Human herpesvirus 7
guuguacucagaga

SEQ ID NO: 186836 - RNA, 16 nt, Human herpesvirus 7
guuguagugcuguuau

SEQ ID NO: 186837 - RNA, 13 nt, Human herpesvirus 7
guuguaugaugac

SEQ ID NO: 186838 - RNA, 14 nt, Human herpesvirus 7
guugucauacaaug

SEQ ID NO: 186839 - RNA, 15 nt, Human herpesvirus 7
uaaaaaaaaaaccac

SEQ ID NO: 186840 - RNA, 18 nt, Human herpesvirus 7
uaaaaaaaaaaccacaaa

SEQ ID NO: 186841 - RNA, 17 nt, Human herpesvirus 7
uaaaaaaaucaguguaa

SEQ ID NO: 186842 - RNA, 22 nt, Human herpesvirus 7
guuuuuuauuuagcuaauucau

SEQ ID NO: 186843 - RNA, 18 nt, Human herpesvirus 7
guuuuaugacucagacga

SEQ ID NO: 186844 - RNA, 18 nt, Human herpesvirus 7
guuuucaaauuauuucca

SEQ ID NO: 186845 - RNA, 14 nt, Human herpesvirus 7
guuuuauuucacau

SEQ ID NO: 186846 - RNA, 18 nt, Human herpesvirus 7
guuuucucgcguuucuuc

SEQ ID NO: 186847 - RNA, 13 nt, Human herpesvirus 7
guuuugcauauuu

SEQ ID NO: 186848 - RNA, 14 nt, Human herpesvirus 7
guuuuuaaacuuau

SEQ ID NO: 186849 - RNA, 16 nt, Human herpesvirus 7
guuuugaaauugacau

SEQ ID NO: 186850 - RNA, 12 nt, Human herpesvirus 7
guuuuaaagcug

SEQ ID NO: 186851 - RNA, 21 nt, Human herpesvirus 7
guuuuaaagcugauuauucau

SEQ ID NO: 186852 - RNA, 17 nt, Human herpesvirus 7
guuuuaaauagugaauc

SEQ ID NO: 186853 - RNA, 15 nt, Human herpesvirus 7
guuugggaaacaucu

SEQ ID NO: 186854 - RNA, 21 nt, Human herpesvirus 7
guuugcagcccaauguugccu

SEQ ID NO: 186855 - RNA, 15 nt, Human herpesvirus 7
guuuggagcuugguu

SEQ ID NO: 186856 - RNA, 15 nt, Human herpesvirus 7
guuuggcaacucuuc

SEQ ID NO: 186857 - RNA, 17 nt, Human herpesvirus 7
guuucugagugauuuuu

SEQ ID NO: 186858 - RNA, 16 nt, Human herpesvirus 7
guuucucuguagauau

SEQ ID NO: 186859 - RNA, 15 nt, Human herpesvirus 7
guuuccgcauaaaaa

SEQ ID NO: 186860 - RNA, 19 nt, Human herpesvirus 7
guuucuagcaaaauaugca

SEQ ID NO: 186861 - RNA, 19 nt, Human herpesvirus 7
guuucugugggugcaauua

SEQ ID NO: 186862 - RNA, 20 nt, Human herpesvirus 7
guuugaacaaguagugcuaa

SEQ ID NO: 186863 - RNA, 19 nt, Human herpesvirus 7
guuugaagagugcacuucu

SEQ ID NO: 186864 - RNA, 20 nt, Human herpesvirus 7
guuugaguuucuucuuccac

SEQ ID NO: 186865 - RNA, 12 nt, Human herpesvirus 7
guuugaucaaaa

SEQ ID NO: 186866 - RNA, 21 nt, Human herpesvirus 7
guuugaucaaaaucuguagaa

SEQ ID NO: 186867 - RNA, 14 nt, Human herpesvirus 7
uaaugacaaacaaa

SEQ ID NO: 186868 - RNA, 18 nt, Human herpesvirus 7
uaaugacacgacacugaa

SEQ ID NO: 186869 - RNA, 23 nt, Human herpesvirus 7
uaaugauuugcagccagaacuca

SEQ ID NO: 186870 - RNA, 12 nt, Human herpesvirus 7
uaaugccgucau

SEQ ID NO: 186871 - RNA, 12 nt, Human herpesvirus 7
uaaugauuagga

SEQ ID NO: 186872 - RNA, 18 nt, Human herpesvirus 7
uaaugguuugaauaucuc

SEQ ID NO: 186873 - RNA, 21 nt, Human herpesvirus 7
uaauggcauuacuacagugga

SEQ ID NO: 186874 - RNA, 20 nt, Human herpesvirus 7
uaauggaagaacaacaacua

SEQ ID NO: 186875 - RNA, 15 nt, Human herpesvirus 7
uaauuuuccauucau

SEQ ID NO: 186876 - RNA, 19 nt, Human herpesvirus 7
uaauuuuggcgaaacaaua

SEQ ID NO: 186877 - RNA, 22 nt, Human herpesvirus 7
uaauuuggaaauuguuugauca

SEQ ID NO: 186878 - RNA, 20 nt, Human herpesvirus 7
uacaaaaagaauugauugaa

SEQ ID NO: 186879 - RNA, 22 nt, Human herpesvirus 7
uaauuuccacguuuuuuagcuu

SEQ ID NO: 186880 - RNA, 23 nt, Human herpesvirus 7
uaauuuccacguuuuuuagcuuu

SEQ ID NO: 186881 - RNA, 18 nt, Human herpesvirus 7
uaauuugcauaaacuauc

SEQ ID NO: 186882 - RNA, 15 nt, Human herpesvirus 7
uaauguguaucaaua

SEQ ID NO: 186883 - RNA, 22 nt, Human herpesvirus 7
uaauguauuuuucuccaugcau

SEQ ID NO: 186884 - RNA, 15 nt, Human herpesvirus 7
uaaugucugugucua

SEQ ID NO: 186885 - RNA, 14 nt, Human herpesvirus 7
uacaaagaacaugu

SEQ ID NO: 186886 - RNA, 22 nt, Human herpesvirus 7
uacaaagaacauguaguacaau

SEQ ID NO: 186887 - RNA, 20 nt, Human herpesvirus 7
uacaaauugguucagcguga

SEQ ID NO: 186888 - RNA, 22 nt, Human herpesvirus 7
uacaaauuuaagagacauugaa

SEQ ID NO: 186889 - RNA, 21 nt, Human herpesvirus 7
uacaaauuuuaauagucuaaa

SEQ ID NO: 186890 - RNA, 16 nt, Human herpesvirus 7
uacaacaaacauucca

SEQ ID NO: 186891 - RNA, 17 nt, Human herpesvirus 7
uacaacaaacauuccaa

SEQ ID NO: 186892 - RNA, 21 nt, Human herpesvirus 7
uacaacaaagaaaaaacuaac

SEQ ID NO: 186893 - RNA, 22 nt, Human herpesvirus 7
uacaaacaauuuuuuguucaaa

SEQ ID NO: 186894 - RNA, 24 nt, Human herpesvirus 7
uacaaacagaagcugacuuuguca

SEQ ID NO: 186895 - RNA, 18 nt, Human herpesvirus 7
uacaaacauguuccauuc

SEQ ID NO: 186896 - RNA, 14 nt, Human herpesvirus 7
uacaaagaccucga

SEQ ID NO: 186897 - RNA, 23 nt, Human herpesvirus 7
uaaucauggaaaauggagcauua

SEQ ID NO: 186898 - RNA, 22 nt, Human herpesvirus 7
uaaucaaaaaauucuucuacuu

SEQ ID NO: 186899 - RNA, 23 nt, Human herpesvirus 7
uaaucaaaauuuuggauugugua

SEQ ID NO: 186900 - RNA, 14 nt, Human herpesvirus 7
uaauauuaguauug

SEQ ID NO: 186901 - RNA, 19 nt, Human herpesvirus 7
uaauaugcuuucacuacua

SEQ ID NO: 186902 - RNA, 23 nt, Human herpesvirus 7
uaauauagaaauuguuaccuaaa

SEQ ID NO: 186903 - RNA, 13 nt, Human herpesvirus 7
uaauauauuuucc

SEQ ID NO: 186904 - RNA, 19 nt, Human herpesvirus 7
uaauccucugacauuugaa

SEQ ID NO: 186905 - RNA, 21 nt, Human herpesvirus 7
uaauccucugacauuugaaau

SEQ ID NO: 186906 - RNA, 22 nt, Human herpesvirus 7
uaaucuugugaaguuugcugaa

SEQ ID NO: 186907 - RNA, 15 nt, Human herpesvirus 7
uaaucugacuugccc

SEQ ID NO: 186908 - RNA, 19 nt, Human herpesvirus 7
uaaucugauugauacauuc

SEQ ID NO: 186909 - RNA, 23 nt, Human herpesvirus 7
uaauagugggccaagauccuuau

SEQ ID NO: 186910 - RNA, 13 nt, Human herpesvirus 7
uaauaguggugaa

SEQ ID NO: 186911 - RNA, 20 nt, Human herpesvirus 7
uaauacguccaaaaauugga

SEQ ID NO: 186912 - RNA, 17 nt, Human herpesvirus 7
uaauagccuuucacuug

SEQ ID NO: 186913 - RNA, 13 nt, Human herpesvirus 7
uaaccuacauuuu

SEQ ID NO: 186914 - RNA, 12 nt, Human herpesvirus 7
uaaccugaauua

SEQ ID NO: 186915 - RNA, 20 nt, Human herpesvirus 7
uaaccgcaaaagccacugau

SEQ ID NO: 186916 - RNA, 19 nt, Human herpesvirus 7
uaacccacuaacauuuuaa

SEQ ID NO: 186917 - RNA, 18 nt, Human herpesvirus 7
uaaccacgcauaugcuaa

SEQ ID NO: 186918 - RNA, 17 nt, Human herpesvirus 7
uaaccacugugucauca

SEQ ID NO: 186919 - RNA, 19 nt, Human herpesvirus 7
uaaccacugugucaucaca

SEQ ID NO: 186920 - RNA, 17 nt, Human herpesvirus 7
uaaccaaaaugugggau

SEQ ID NO: 186921 - RNA, 16 nt, Human herpesvirus 7
uaaccaaaccacagau

SEQ ID NO: 186922 - RNA, 13 nt, Human herpesvirus 7
uaaccaaacuaua

SEQ ID NO: 186923 - RNA, 21 nt, Human herpesvirus 7
uaacauuuuaauaugugaaaa

SEQ ID NO: 186924 - RNA, 23 nt, Human herpesvirus 7
uaacauuacgucaucccugcuga

SEQ ID NO: 186925 - RNA, 23 nt, Human herpesvirus 7
uaacauguguauauuugcuguuu

SEQ ID NO: 186926 - RNA, 21 nt, Human herpesvirus 7
aacaaguuucaaaaagugcau

SEQ ID NO: 186927 - RNA, 14 nt, Human herpesvirus 7
aacaagguucucau

SEQ ID NO: 186928 - RNA, 24 nt, Human herpesvirus 7
aacaagguucucauuuucgacaga

SEQ ID NO: 186929 - RNA, 14 nt, Human herpesvirus 7
aacaagguuuaaaa

SEQ ID NO: 186930 - RNA, 11 nt, Human herpesvirus 7
aacaaucaaua

SEQ ID NO: 186931 - RNA, 20 nt, Human herpesvirus 7
aacaaucccagaaauuucaa

SEQ ID NO: 186932 - RNA, 23 nt, Human herpesvirus 7
aacaaugaaaguugggaugacaa

SEQ ID NO: 186933 - RNA, 15 nt, Human herpesvirus 7
aacaaugagcaauuc

SEQ ID NO: 186934 - RNA, 23 nt, Human herpesvirus 7
aacaaucgguaacaugucuucaa

SEQ ID NO: 186935 - RNA, 16 nt, Human herpesvirus 7
uacuaaucacaaguua

SEQ ID NO: 186936 - RNA, 22 nt, Human herpesvirus 7
uaccguuuaaugaaaaagccau

SEQ ID NO: 186937 - RNA, 18 nt, Human herpesvirus 7
uaccggaaacauugaaaa

SEQ ID NO: 186938 - RNA, 15 nt, Human herpesvirus 7
uaccgguacauuuau

SEQ ID NO: 186939 - RNA, 18 nt, Human herpesvirus 7
uacacugauuucuacaau

SEQ ID NO: 186940 - RNA, 10 nt, Human herpesvirus 7
uacauuucaa

SEQ ID NO: 186941 - RNA, 13 nt, Human herpesvirus 7
uacagacagaaug

SEQ ID NO: 186942 - RNA, 18 nt, Human herpesvirus 7
uacagacagaaugccaga

SEQ ID NO: 186943 - RNA, 20 nt, Human herpesvirus 7
uacauuugcuuuaccccaaa

SEQ ID NO: 186944 - RNA, 15 nt, Human herpesvirus 7
uacauuuuaccaaau

SEQ ID NO: 186945 - RNA, 14 nt, Human herpesvirus 7
uacauuuuugcaau

SEQ ID NO: 186946 - RNA, 16 nt, Human herpesvirus 7
uaccauaaauaccaaa

SEQ ID NO: 186947 - RNA, 18 nt, Human herpesvirus 7
uaccauaaauaccaaaaa

SEQ ID NO: 186948 - RNA, 21 nt, Human herpesvirus 7
uagacauuucguuauuccauc

SEQ ID NO: 186949 - RNA, 13 nt, Human herpesvirus 7
uagacacauuuau

SEQ ID NO: 186950 - RNA, 17 nt, Human herpesvirus 7
uagacacauuuauccau

SEQ ID NO: 186951 - RNA, 23 nt, Human herpesvirus 7
uagacgaggccaaucugcacauu

SEQ ID NO: 186952 - RNA, 13 nt, Human herpesvirus 7
uagaccuaucaaa

SEQ ID NO: 186953 - RNA, 17 nt, Human herpesvirus 7
uagacguagugucauca

SEQ ID NO: 186954 - RNA, 24 nt, Human herpesvirus 7
uagacguagugucaucacuuauga

SEQ ID NO: 186955 - RNA, 21 nt, Human herpesvirus 7
uagacuuaucaccauaugcca

SEQ ID NO: 186956 - RNA, 22 nt, Human herpesvirus 7
uacuuaaauauuuuacauauua

SEQ ID NO: 186957 - RNA, 18 nt, Human herpesvirus 7
uacucccucuaguggcaa

SEQ ID NO: 186958 - RNA, 22 nt, Human herpesvirus 7
uacuguugauacaacuaaaaau

SEQ ID NO: 186959 - RNA, 12 nt, Human herpesvirus 7
aacaauggugug

SEQ ID NO: 186960 - RNA, 21 nt, Human herpesvirus 7
aacaaugguguuaacaaucuu

SEQ ID NO: 186961 - RNA, 18 nt, Human herpesvirus 7
uacuguuuacacauuaua

SEQ ID NO: 186962 - RNA, 16 nt, Human herpesvirus 7
uacuuauguguuacau

SEQ ID NO: 186963 - RNA, 15 nt, Human herpesvirus 7
uacuuccuaaucuaa

SEQ ID NO: 186964 - RNA, 17 nt, Human herpesvirus 7
uacuuccuaaucuaaca

SEQ ID NO: 186965 - RNA, 14 nt, Human herpesvirus 7
uagaaaacaucccu

SEQ ID NO: 186966 - RNA, 14 nt, Human herpesvirus 7
uagaaaaucuacca

SEQ ID NO: 186967 - RNA, 17 nt, Human herpesvirus 7
uagaaaaaaacaaugaa

SEQ ID NO: 186968 - RNA, 21 nt, Human herpesvirus 7
uagaaaaaaacaaugaaaguu

SEQ ID NO: 186969 - RNA, 17 nt, Human herpesvirus 7
uagaaaaauguacaaua

SEQ ID NO: 186970 - RNA, 19 nt, Human herpesvirus 7
uagaaaacaaaucugauaa

SEQ ID NO: 186971 - RNA, 11 nt, Human herpesvirus 7
uacuugcaaug

SEQ ID NO: 186972 - RNA, 15 nt, Human herpesvirus 7
uacuugcaaugcaaa

SEQ ID NO: 186973 - RNA, 18 nt, Human herpesvirus 7
uagauaaugaaguuuauc

SEQ ID NO: 186974 - RNA, 13 nt, Human herpesvirus 7
uagauaaugacaa

SEQ ID NO: 186975 - RNA, 18 nt, Human herpesvirus 7
uagauaaugacaaacaaa

SEQ ID NO: 186976 - RNA, 13 nt, Human herpesvirus 7
uagauacauuaua

SEQ ID NO: 186977 - RNA, 19 nt, Human herpesvirus 7
uagaugcagaaaaauccaa

SEQ ID NO: 186978 - RNA, 17 nt, Human herpesvirus 7
uagaugcauccaaagaa

SEQ ID NO: 186979 - RNA, 16 nt, Human herpesvirus 7
uagaugcaugcuaaua

SEQ ID NO: 186980 - RNA, 22 nt, Human herpesvirus 7
uagauauguggugcuuacguga

SEQ ID NO: 186981 - RNA, 14 nt, Human herpesvirus 7
uagaucuugacuca

SEQ ID NO: 186982 - RNA, 23 nt, Human herpesvirus 7
uagaucuugacucagauucgacu

SEQ ID NO: 186983 - RNA, 16 nt, Human herpesvirus 7
uagaugucugcauaga

SEQ ID NO: 186984 - RNA, 14 nt, Human herpesvirus 7
uagauuaaauagca

SEQ ID NO: 186985 - RNA, 15 nt, Human herpesvirus 7
uagauuaaauagcaa

SEQ ID NO: 186986 - RNA, 17 nt, Human herpesvirus 7
uagauuaaauagcaaag

SEQ ID NO: 186987 - RNA, 16 nt, Human herpesvirus 7
uagccauaaaugcuua

SEQ ID NO: 186988 - RNA, 21 nt, Human herpesvirus 7
uagccagaucguucauugauu

SEQ ID NO: 186989 - RNA, 21 nt, Human herpesvirus 7
uagcauugaaaucauuuugcu

SEQ ID NO: 186990 - RNA, 19 nt, Human herpesvirus 7
uagcccuccuaacuauaau

SEQ ID NO: 186991 - RNA, 14 nt, Human herpesvirus 7
uagcauuagagcau

SEQ ID NO: 186992 - RNA, 17 nt, Human herpesvirus 7
uagcauuagagcauauu

SEQ ID NO: 186993 - RNA, 20 nt, Human herpesvirus 7
uagcauaugcuggaucuucu

SEQ ID NO: 186994 - RNA, 15 nt, Human herpesvirus 7
uaguaugagugcuau

SEQ ID NO: 186995 - RNA, 14 nt, Human herpesvirus 7
uaguacaucuuucu

SEQ ID NO: 186996 - RNA, 17 nt, Human herpesvirus 7
uaggugcugcagcaguu

SEQ ID NO: 186997 - RNA, 16 nt, Human herpesvirus 7
uagugcguuuugacag

SEQ ID NO: 186998 - RNA, 14 nt, Human herpesvirus 7
uagugauagaguac

SEQ ID NO: 186999 - RNA, 11 nt, Human herpesvirus 7
uagugcuguua

SEQ ID NO: 187000 - RNA, 15 nt, Human herpesvirus 7
uagugugcacacaaa

SEQ ID NO: 187001 - RNA, 18 nt, Human herpesvirus 7
uaguuucuagaagaaagu

SEQ ID NO: 187002 - RNA, 17 nt, Human herpesvirus 7
uaguuuuugcauaugga

SEQ ID NO: 187003 - RNA, 23 nt, Human herpesvirus 7
uaguugugauugcgaccaaagau

SEQ ID NO: 187004 - RNA, 17 nt, Human herpesvirus 7
uaggucuuccacuguug

SEQ ID NO: 187005 - RNA, 18 nt, Human herpesvirus 7
uaggucuuccacuguugu

SEQ ID NO: 187006 - RNA, 19 nt, Human herpesvirus 7
uaggcgaauuggugcucaa

SEQ ID NO: 187007 - RNA, 23 nt, Human herpesvirus 7
uaggagauugguagugugcacac

SEQ ID NO: 187008 - RNA, 16 nt, Human herpesvirus 7
uaggauugaaaguaaa

SEQ ID NO: 187009 - RNA, 11 nt, Human herpesvirus 7
uagcuaaugcu

SEQ ID NO: 187010 - RNA, 17 nt, Human herpesvirus 7
uagcguucgacagcaaa

SEQ ID NO: 187011 - RNA, 15 nt, Human herpesvirus 7
uagccuuucacuuga

SEQ ID NO: 187012 - RNA, 16 nt, Human herpesvirus 7
uagcgaauuugugcug

SEQ ID NO: 187013 - RNA, 18 nt, Human herpesvirus 7
uagcggagguuugcuauu

SEQ ID NO: 187014 - RNA, 16 nt, Human herpesvirus 7
uagcuuggccauaaac

SEQ ID NO: 187015 - RNA, 22 nt, Human herpesvirus 7
uagcuuguuaaagaaaagcaaa

SEQ ID NO: 187016 - RNA, 13 nt, Human herpesvirus 7
uagcuuucaugau

SEQ ID NO: 187017 - RNA, 20 nt, Human herpesvirus 7
uuccaacgcauucaauggca

SEQ ID NO: 187018 - RNA, 19 nt, Human herpesvirus 7
uuggagacgaugagcauga

SEQ ID NO: 187019 - RNA, 20 nt, Human herpesvirus 7
uuuccaucuaccgcgaugaa

SEQ ID NO: 187020 - RNA, 15 nt, Human herpesvirus 7
ucuauuacacaggaa

SEQ ID NO: 187021 - RNA, 22 nt, Human herpesvirus 7
ucuuuauaaaggaccaugggaa

SEQ ID NO: 187022 - RNA, 17 nt, Human herpesvirus 7
ugacaacaaagcaugaa

SEQ ID NO: 187023 - RNA, 17 nt, Human herpesvirus 7
gcaauaugcuagaagac

SEQ ID NO: 187024 - RNA, 16 nt, Human herpesvirus 7
cggugaauguagaagu

SEQ ID NO: 187025 - RNA, 15 nt, Human herpesvirus 7
cuauuuaaaauauua

SEQ ID NO: 187026 - RNA, 18 nt, Human herpesvirus 7
cuucuucagauucaguau

SEQ ID NO: 187027 - RNA, 18 nt, Human herpesvirus 7
cuucuaaauauucugugu

SEQ ID NO: 187028 - RNA, 23 nt, Human herpesvirus 7
gauuauaugcaucaaaacauauc

SEQ ID NO: 187029 - RNA, 18 nt, Human herpesvirus 7
gagauuucugaaaaucuc

SEQ ID NO: 187030 - RNA, 20 nt, Human herpesvirus 7
gacaaucuauauaaaauauc

SEQ ID NO: 187031 - RNA, 18 nt, Human herpesvirus 7
gaaucuauuuaaaauauu

SEQ ID NO: 187032 - RNA, 20 nt, Human herpesvirus 7
gaaugucgaaucuacauccu

SEQ ID NO: 187033 - RNA, 17 nt, Human herpesvirus 7
gaauuaauaaaaguauc

SEQ ID NO: 187034 - RNA, 17 nt, Human herpesvirus 7
gaaauucgcaaaauuuc

SEQ ID NO: 187035 - RNA, 16 nt, Human herpesvirus 7
gaaauuucaaaaauuc

SEQ ID NO: 187036 - RNA, 15 nt, Human herpesvirus 7
gaaagugaaaauauu

SEQ ID NO: 187037 - RNA, 20 nt, Human herpesvirus 7
aacuauaucaucaucuuuuu

SEQ ID NO: 187038 - RNA, 16 nt, Human herpesvirus 7
aacgguuaaucuuuuu

SEQ ID NO: 187039 - RNA, 18 nt, Human herpesvirus 7
aacugauaauuucuuuuu

SEQ ID NO: 187040 - RNA, 22 nt, Human herpesvirus 7
aaucuauauaaaauaucuuuuu

SEQ ID NO: 187041 - RNA, 22 nt, Human herpesvirus 7
aaucugcucguuuuuauuuuuu

SEQ ID NO: 187042 - RNA, 21 nt, Human herpesvirus 7
aaugcuaaaguuaacauaugu

SEQ ID NO: 187043 - RNA, 14 nt, Human herpesvirus 7
aauggcaucuuauu

SEQ ID NO: 187044 - RNA, 20 nt, Human herpesvirus 7
aauguuagaaacaucuguuu

SEQ ID NO: 187045 - RNA, 15 nt, Human herpesvirus 7
aaguguaagcuuuuu

SEQ ID NO: 187046 - RNA, 16 nt, Human herpesvirus 7
aauaucccagaauauc

SEQ ID NO: 187047 - RNA, 23 nt, Human herpesvirus 7
aaucaucuuaaaaguacaaaugu

SEQ ID NO: 187048 - RNA, 22 nt, Human herpesvirus 7
aauccaaguuuuacagaaauug

SEQ ID NO: 187049 - RNA, 22 nt, Human herpesvirus 7
aauugacagcaccaauccuuuu

SEQ ID NO: 187050 - RNA, 21 nt, Human herpesvirus 7
acaaauaauucaaaaacuauc

SEQ ID NO: 187051 - RNA, 21 nt, Human herpesvirus 7
acaaauaccaugaaaaauaug

SEQ ID NO: 187052 - RNA, 13 nt, Human herpesvirus 7
aauuacacaaauu

SEQ ID NO: 187053 - RNA, 15 nt, Human herpesvirus 7
aauuauuaaucuuuu

SEQ ID NO: 187054 - RNA, 17 nt, Human herpesvirus 7
aauucgcuuaccuuuuu

SEQ ID NO: 187055 - RNA, 15 nt, Human herpesvirus 7
aagaauuuaaucaua

SEQ ID NO: 187056 - RNA, 12 nt, Human herpesvirus 7
aagaugucuaaa

SEQ ID NO: 187057 - RNA, 13 nt, Human herpesvirus 7
aagcaacaaaugu

SEQ ID NO: 187058 - RNA, 15 nt, Human herpesvirus 7
aagagacugucauaa

SEQ ID NO: 187059 - RNA, 21 nt, Human herpesvirus 7
aagcugauucaacacucgauu

SEQ ID NO: 187060 - RNA, 22 nt, Human herpesvirus 7
aagcuucuacaaacaauuuuuu

SEQ ID NO: 187061 - RNA, 14 nt, Human herpesvirus 7
acauuuaaaaaauc

SEQ ID NO: 187062 - RNA, 13 nt, Human herpesvirus 7
acauaaaaauuuc

SEQ ID NO: 187063 - RNA, 15 nt, Human herpesvirus 7
aggcugcaucuuuuc

SEQ ID NO: 187064 - RNA, 15 nt, Human herpesvirus 7
caaucccagaaauuu

SEQ ID NO: 187065 - RNA, 20 nt, Human herpesvirus 7
cagaaauuauacuagcagau

SEQ ID NO: 187066 - RNA, 15 nt, Human herpesvirus 7
cacguccaagaaaua

SEQ ID NO: 187067 - RNA, 20 nt, Human herpesvirus 7
ccauuguguuaaaaauauca

SEQ ID NO: 187068 - RNA, 16 nt, Human herpesvirus 7
cauugcuucagaaaua

SEQ ID NO: 187069 - RNA, 22 nt, Human herpesvirus 7
cauuucaagaaggaaaauuuca

SEQ ID NO: 187070 - RNA, 14 nt, Human herpesvirus 7
caucgaagaaauuc

SEQ ID NO: 187071 - RNA, 18 nt, Human herpesvirus 7
cagauucuccagaaauua

SEQ ID NO: 187072 - RNA, 19 nt, Human herpesvirus 7
ccguaaaacaaucgauugc

SEQ ID NO: 187073 - RNA, 18 nt, Human herpesvirus 7
ucaauuaaugcauuggaa

SEQ ID NO: 187074 - RNA, 16 nt, Human herpesvirus 7
uauuuagagucgucuu

SEQ ID NO: 187075 - RNA, 17 nt, Human herpesvirus 7
uaaugcuuugucuuacg

SEQ ID NO: 187076 - RNA, 15 nt, Human herpesvirus 7
uauccaguacgucuu

SEQ ID NO: 187077 - RNA, 16 nt, Human herpesvirus 7
uaucuuuucaaaggaa

SEQ ID NO: 187078 - RNA, 20 nt, Human herpesvirus 7
uagacugagacgagcaucua

SEQ ID NO: 187079 - RNA, 23 nt, Human herpesvirus 7
gacauuucaagaaggaaaauuuc

SEQ ID NO: 187080 - RNA, 22 nt, Human herpesvirus 7
gacuaaucacgagaaaaauauu

SEQ ID NO: 187081 - RNA, 20 nt, Human herpesvirus 7
gaccucgacauucuccagug

SEQ ID NO: 187082 - RNA, 13 nt, Human herpesvirus 7
gccaauaaaaauc

SEQ ID NO: 187083 - RNA, 18 nt, Human herpesvirus 7
gcauuauuggauaauauc

SEQ ID NO: 187084 - RNA, 16 nt, Human herpesvirus 7
gauaucuuaaaauaug

SEQ ID NO: 187085 - RNA, 16 nt, Human herpesvirus 7
cgacauuauaaaagau

SEQ ID NO: 187086 - RNA, 22 nt, Human herpesvirus 7
cauauaugcauuauauccaaua

SEQ ID NO: 187087 - RNA, 15 nt, Human herpesvirus 7
cauagcuagaaauug

SEQ ID NO: 187088 - RNA, 19 nt, Human herpesvirus 7
cauacauagaacgacucca

SEQ ID NO: 187089 - RNA, 16 nt, Human herpesvirus 7
cagucccagauaauua

SEQ ID NO: 187090 - RNA, 13 nt, Human herpesvirus 7
cauaaauaccaaa

SEQ ID NO: 187091 - RNA, 20 nt, Human herpesvirus 7
cggaguuugaguuucuucuu

SEQ ID NO: 187092 - RNA, 16 nt, Human herpesvirus 7
acuauucgaaaauauc

SEQ ID NO: 187093 - RNA, 11 nt, Human herpesvirus 7
aaaacuugaua

SEQ ID NO: 187094 - RNA, 17 nt, Human herpesvirus 7
aaauuccauucgaucua

SEQ ID NO: 187095 - RNA, 23 nt, Human herpesvirus 7
aacaaagugcauaaauaauaaca

SEQ ID NO: 187096 - RNA, 19 nt, Human herpesvirus 7
aguucuuuaauaucauuuu

SEQ ID NO: 187097 - RNA, 17 nt, Human herpesvirus 7
aucuagaguaucuuuuc

SEQ ID NO: 187098 - RNA, 21 nt, Human herpesvirus 7
auuaucaucaggaaucuuuuu

SEQ ID NO: 187099 - RNA, 23 nt, Human herpesvirus 7
cacgaguacuccuucuaccucuu

SEQ ID NO: 187100 - RNA, 15 nt, Homo sapiens
cuguggccaaguucu

SEQ ID NO: 187101 - RNA, 17 nt, Homo sapiens
uuuaaaugaaagugaga

SEQ ID NO: 187102 - RNA, 20 nt, Homo sapiens
cuccugaccucaaguaaucc

SEQ ID NO: 187103 - RNA, 13 nt, Homo sapiens
ggauuacaggcau

SEQ ID NO: 187104 - RNA, 13 nt, Homo sapiens
cacacuguuaaaa

SEQ ID NO: 187105 - RNA, 14 nt, Homo sapiens
aucaguguuuccaa

SEQ ID NO: 187106 - RNA, 15 nt, Homo sapiens
augggagacacugau

SEQ ID NO: 187107 - RNA, 21 nt, Homo sapiens
ugagacuuacuucucugcuau

SEQ ID NO: 187108 - RNA, 14 nt, Homo sapiens
aucaguagccagca

SEQ ID NO: 187109 - RNA, 16 nt, Homo sapiens
aacaaagucacccacu

SEQ ID NO: 187110 - RNA, 17 nt, Homo sapiens
gucaaagccuugguaaa

SEQ ID NO: 187111 - RNA, 16 nt, Homo sapiens
aaacagaaaaccugau

SEQ ID NO: 187112 - RNA, 22 nt, Homo sapiens
uacugcuggcaguggaacuaag

SEQ ID NO: 187113 - RNA, 16 nt, Homo sapiens
uugacauucugaaugc

SEQ ID NO: 187114 - RNA, 20 nt, Homo sapiens
auuagcauuugucaacaaag

SEQ ID NO: 187115 - RNA, 23 nt, Homo sapiens
ugggucagaguuccgacugccau

SEQ ID NO: 187116 - RNA, 13 nt, Homo sapiens
aucugaacuccuu

SEQ ID NO: 187117 - RNA, 16 nt, Homo sapiens
aagguugagggcaaug

SEQ ID NO: 187118 - RNA, 19 nt, Homo sapiens
uccugaguagcuggauuac

SEQ ID NO: 187119 - RNA, 19 nt, Homo sapiens
cauaaugcauguggcacuu

SEQ ID NO: 187120 - RNA, 17 nt, Homo sapiens
guacauguuaaacuuac

SEQ ID NO: 187121 - RNA, 16 nt, Homo sapiens
aauugcuucaagcauu

SEQ ID NO: 187122 - RNA, 20 nt, Homo sapiens
ucucaaacuccugaccucaa

SEQ ID NO: 187123 - RNA, 16 nt, Homo sapiens
cuucuuuuugcuucaa

SEQ ID NO: 187124 - RNA, 16 nt, Homo sapiens
aaagggagaagaggga

SEQ ID NO: 187125 - RNA, 13 nt, Homo sapiens
gaauaguuuccaa

SEQ ID NO: 187126 - RNA, 15 nt, Homo sapiens
aggcuucuggggcuu

SEQ ID NO: 187127 - RNA, 16 nt, Homo sapiens
ugcauucucuagucag

SEQ ID NO: 187128 - RNA, 21 nt, Homo sapiens
ucauggauauguuauacugaa

SEQ ID NO: 187129 - RNA, 14 nt, Homo sapiens
acagcaucagcuca

SEQ ID NO: 187130 - RNA, 21 nt, Homo sapiens
cagagucucgcucuguugccc

SEQ ID NO: 187131 - RNA, 20 nt, Homo sapiens
ucuaagccuucugguuuuau

SEQ ID NO: 187132 - RNA, 14 nt, Homo sapiens
agaugaaacaucau

SEQ ID NO: 187133 - RNA, 13 nt, Homo sapiens
gugccaucagcuc

SEQ ID NO: 187134 - RNA, 18 nt, Homo sapiens
gccacccucccacugcca

SEQ ID NO: 187135 - RNA, 18 nt, Homo sapiens
ccaggcuggagugcaaug

SEQ ID NO: 187136 - RNA, 16 nt, Homo sapiens
aaauauaguucacaau

SEQ ID NO: 187137 - RNA, 13 nt, Homo sapiens
cagcaucagcuca

SEQ ID NO: 187138 - RNA, 20 nt, Homo sapiens
cuguucuaaggcugugccau

SEQ ID NO: 187139 - RNA, 23 nt, Homo sapiens
uucauggauauguuauacugaac

SEQ ID NO: 187140 - RNA, 22 nt, Homo sapiens
uacuuuuuccuggcucaucucu

SEQ ID NO: 187141 - RNA, 20 nt, Homo sapiens
cagagcagagaggcugaaua

SEQ ID NO: 187142 - RNA, 19 nt, Homo sapiens
cuccuggaccaggucucau

SEQ ID NO: 187143 - RNA, 21 nt, Homo sapiens
cauucccguggaacguuuuuc

SEQ ID NO: 187144 - RNA, 17 nt, Homo sapiens
acuuuuuccuggcucau

SEQ ID NO: 187145 - RNA, 20 nt, Homo sapiens
aaagcuggagucugucaaug

SEQ ID NO: 187146 - RNA, 19 nt, Homo sapiens
accaggucucauaaugcau

SEQ ID NO: 187147 - RNA, 19 nt, Homo sapiens
uaaguuacacauuuuucag

SEQ ID NO: 187148 - RNA, 22 nt, Homo sapiens
cugggauuacagggaugagcca

SEQ ID NO: 187149 - RNA, 20 nt, Homo sapiens
auugcagcgauuaauaacag

SEQ ID NO: 187150 - RNA, 10 nt, Homo sapiens
ucauauugau

SEQ ID NO: 187151 - RNA, 16 nt, Homo sapiens
aacguaagacugugua

SEQ ID NO: 187152 - RNA, 19 nt, Homo sapiens
acacagucuuggcucacug

SEQ ID NO: 187153 - RNA, 14 nt, Homo sapiens
ccagccucaucucu

SEQ ID NO: 187154 - RNA, 19 nt, Homo sapiens
cccucuaggaggugaugau

SEQ ID NO: 187155 - RNA, 16 nt, Homo sapiens
gacacagcaucagcuc

SEQ ID NO: 187156 - RNA, 13 nt, Homo sapiens
gcaguggaacuaa

SEQ ID NO: 187157 - RNA, 14 nt, Homo sapiens
uacuucucugcuau

SEQ ID NO: 187158 - RNA, 14 nt, Homo sapiens
uaaccauugucaua

SEQ ID NO: 187159 - RNA, 19 nt, Homo sapiens
cuggcaguggaacuaagaa

SEQ ID NO: 187160 - RNA, 13 nt, Homo sapiens
caguguacagucu

SEQ ID NO: 187161 - RNA, 17 nt, Homo sapiens
agugagcuccuaagcca

SEQ ID NO: 187162 - RNA, 20 nt, Homo sapiens
ugcaguuuuuuucuugucua

SEQ ID NO: 187163 - RNA, 20 nt, Homo sapiens
ugaguagcuggauuacaggc

SEQ ID NO: 187164 - RNA, 22 nt, Homo sapiens
ugagacuuugaggguguauauu

SEQ ID NO: 187165 - RNA, 18 nt, Homo sapiens
ccacccucccacugccaa

SEQ ID NO: 187166 - RNA, 20 nt, Homo sapiens
aaugacacagucuuggcuca

SEQ ID NO: 187167 - RNA, 13 nt, Homo sapiens
gucuauuagcucc

SEQ ID NO: 187168 - RNA, 19 nt, Homo sapiens
cccaggcuggagugcaaug

SEQ ID NO: 187169 - RNA, 13 nt, Homo sapiens
caguaguugcaau

SEQ ID NO: 187170 - RNA, 21 nt, Homo sapiens
uguauuuaaaugaaagugaga

SEQ ID NO: 187171 - RNA, 19 nt, Homo sapiens
uaaagaaaaguuuuguaaa

SEQ ID NO: 187172 - RNA, 19 nt, Homo sapiens
acaaaguaagccauguauc

SEQ ID NO: 187173 - RNA, 21 nt, Homo sapiens
ucaagacgucacccuccauuc

SEQ ID NO: 187174 - RNA, 20 nt, Homo sapiens
cauaaaaguuggcucaggag

SEQ ID NO: 187175 - RNA, 21 nt, Homo sapiens
uacuauuuuuacuaaucuuuc

SEQ ID NO: 187176 - RNA, 21 nt, Homo sapiens
ccauuagcauuugucaacaaa

SEQ ID NO: 187177 - RNA, 18 nt, Homo sapiens
aaagucuacuuuaccuaa

SEQ ID NO: 187178 - RNA, 13 nt, Homo sapiens
aaagaaauuucca

SEQ ID NO: 187179 - RNA, 16 nt, Homo sapiens
gcagaguacaaaguaa

SEQ ID NO: 187180 - RNA, 21 nt, Homo sapiens
auguccuacugagacagcaca

SEQ ID NO: 187181 - RNA, 15 nt, Homo sapiens
aaugugacucaagac

SEQ ID NO: 187182 - RNA, 17 nt, Homo sapiens
cugcuagggaauaucaa

SEQ ID NO: 187183 - RNA, 14 nt, Homo sapiens
aauagugauuucca

SEQ ID NO: 187184 - RNA, 16 nt, Homo sapiens
augacacucuagucaa

SEQ ID NO: 187185 - RNA, 21 nt, Homo sapiens
uuauauguauaucacauuccc

SEQ ID NO: 187186 - RNA, 21 nt, Homo sapiens
ggggacacagcaucagcucaa

SEQ ID NO: 187187 - RNA, 19 nt, Homo sapiens
aauagugauuuccacagug

SEQ ID NO: 187188 - RNA, 19 nt, Homo sapiens
guuuauacccguuucacau

SEQ ID NO: 187189 - RNA, 22 nt, Homo sapiens
gcaaaaccaaauauuccagaga

SEQ ID NO: 187190 - RNA, 15 nt, Homo sapiens
aguguaccagagaag

SEQ ID NO: 187191 - RNA, 14 nt, Homo sapiens
aauucaucagauaa

SEQ ID NO: 187192 - RNA, 13 nt, Homo sapiens
gggagacacugau

SEQ ID NO: 187193 - RNA, 12 nt, Homo sapiens
aggacuguagaa

SEQ ID NO: 187194 - RNA, 14 nt, Homo sapiens
aaacaucauuucaa

SEQ ID NO: 187195 - RNA, 12 nt, Homo sapiens
gcuggagugcaa

SEQ ID NO: 187196 - RNA, 13 nt, Homo sapiens
auauacuuauaga

SEQ ID NO: 187197 - RNA, 18 nt, Homo sapiens
uaaugcauguggcacuua

SEQ ID NO: 187198 - RNA, 14 nt, Homo sapiens
uaaaauagccauaa

SEQ ID NO: 187199 - RNA, 16 nt, Homo sapiens
cuaaauaugagcccag

SEQ ID NO: 187200 - RNA, 15 nt, Homo sapiens
aaccguacacugugu

SEQ ID NO: 187201 - RNA, 17 nt, Homo sapiens
agguugagggcaaugga

SEQ ID NO: 187202 - RNA, 21 nt, Homo sapiens
aaugcugguuuuucaguuuuc

SEQ ID NO: 187203 - RNA, 11 nt, Homo sapiens
ggaacugugua

SEQ ID NO: 187204 - RNA, 21 nt, Homo sapiens
cuaagaagcagauaauggugu

SEQ ID NO: 187205 - RNA, 16 nt, Homo sapiens
caacauuuguuuuagu

SEQ ID NO: 187206 - RNA, 21 nt, Homo sapiens
gauacacaaucugaaacagcu

SEQ ID NO: 187207 - RNA, 20 nt, Homo sapiens
ugcagccacuguuaagccau

SEQ ID NO: 187208 - RNA, 17 nt, Homo sapiens
ucggcucuggccuccaa

SEQ ID NO: 187209 - RNA, 17 nt, Homo sapiens
uucuuccaugucuauua

SEQ ID NO: 187210 - RNA, 22 nt, Homo sapiens
caaucaauucauaucuauuuau

SEQ ID NO: 187211 - RNA, 15 nt, Homo sapiens
auaaagacaggguuu

SEQ ID NO: 187212 - RNA, 23 nt, Homo sapiens
uccuggggaacauagaacucaug

SEQ ID NO: 187213 - RNA, 13 nt, Homo sapiens
uggcucaucucuu

SEQ ID NO: 187214 - RNA, 13 nt, Homo sapiens
gauacgacaacuu

SEQ ID NO: 187215 - RNA, 19 nt, Homo sapiens
uccauuuacccuucuuuuc

SEQ ID NO: 187216 - RNA, 14 nt, Homo sapiens
uucuggggcuucag

SEQ ID NO: 187217 - RNA, 21 nt, Homo sapiens
guccaucccgucgacguagaa

SEQ ID NO: 187218 - RNA, 21 nt, Homo sapiens
cuuuguaaagaaaguggcuug

SEQ ID NO: 187219 - RNA, 16 nt, Homo sapiens
agcuguuuuguugaca

SEQ ID NO: 187220 - RNA, 15 nt, Homo sapiens
gagggaacuguguag

SEQ ID NO: 187221 - RNA, 23 nt, Homo sapiens
acauuuuacuuuuuccuggcuca

SEQ ID NO: 187222 - RNA, 16 nt, Homo sapiens
auccacuaaaaucaaa

SEQ ID NO: 187223 - RNA, 14 nt, Homo sapiens
ugcuguaugucucg

SEQ ID NO: 187224 - RNA, 21 nt, Homo sapiens
guuuuacuguccaaagacaug

SEQ ID NO: 187225 - RNA, 15 nt, Homo sapiens
aauagugauuuccac

SEQ ID NO: 187226 - RNA, 20 nt, Homo sapiens
cuccccuguucauucugcau

SEQ ID NO: 187227 - RNA, 16 nt, Homo sapiens
acacagcaucagcuca

SEQ ID NO: 187228 - RNA, 22 nt, Homo sapiens
gaauaacauggugugcuucuua

SEQ ID NO: 187229 - RNA, 16 nt, Homo sapiens
ucugcauucucuaguc

SEQ ID NO: 187230 - RNA, 14 nt, Homo sapiens
ugagcaaaaccaaa

SEQ ID NO: 187231 - RNA, 21 nt, Homo sapiens
cacaaucugaaacagcuucau

SEQ ID NO: 187232 - RNA, 13 nt, Homo sapiens
accaauauuguac

SEQ ID NO: 187233 - RNA, 22 nt, Homo sapiens
aaucaguguuuccaaucugucc

SEQ ID NO: 187234 - RNA, 11 nt, Homo sapiens
auucaaaguga

SEQ ID NO: 187235 - RNA, 12 nt, Homo sapiens
aauaaagacagg

SEQ ID NO: 187236 - RNA, 15 nt, Homo sapiens
ucuaaaaucugcuag

SEQ ID NO: 187237 - RNA, 21 nt, Homo sapiens
agugcaguuuuuuucuugucu

SEQ ID NO: 187238 - RNA, 19 nt, Homo sapiens
ccucaucuccuaaaaggca

SEQ ID NO: 187239 - RNA, 18 nt, Homo sapiens
aagagaaguuuucuugac

SEQ ID NO: 187240 - RNA, 11 nt, Homo sapiens
ccacucagguc

SEQ ID NO: 187241 - RNA, 15 nt, Homo sapiens
gaauguaaugguggc

SEQ ID NO: 187242 - RNA, 16 nt, Homo sapiens
ucaaacaaaaagucau

SEQ ID NO: 187243 - RNA, 19 nt, Homo sapiens
cauggauauguuauacuga

SEQ ID NO: 187244 - RNA, 22 nt, Homo sapiens
aacuuggaaauagugauuucca

SEQ ID NO: 187245 - RNA, 13 nt, Homo sapiens
agguugagggcaa

SEQ ID NO: 187246 - RNA, 22 nt, Homo sapiens
ugacucaagacuuccagagccu

SEQ ID NO: 187247 - RNA, 19 nt, Homo sapiens
agaaccucgagguuucuca

SEQ ID NO: 187248 - RNA, 17 nt, Homo sapiens
caacaaagucacccacu

SEQ ID NO: 187249 - RNA, 15 nt, Homo sapiens
agagggaaaacagaa

SEQ ID NO: 187250 - RNA, 21 nt, Homo sapiens
agcuagcaacauuuguuuuag

SEQ ID NO: 187251 - RNA, 17 nt, Homo sapiens
aggagugccacuucaug

SEQ ID NO: 187252 - RNA, 15 nt, Homo sapiens
acacaaucugaaaca

SEQ ID NO: 187253 - RNA, 17 nt, Homo sapiens
ggcuaguaaaagccauc

SEQ ID NO: 187254 - RNA, 22 nt, Homo sapiens
cuuaaaagaaagagaaguuuuc

SEQ ID NO: 187255 - RNA, 15 nt, Homo sapiens
ugaaugccacucugu

SEQ ID NO: 187256 - RNA, 17 nt, Homo sapiens
cacauuuuucagauaua

SEQ ID NO: 187257 - RNA, 15 nt, Homo sapiens
augaauaguuuccaa

SEQ ID NO: 187258 - RNA, 19 nt, Homo sapiens
agaucguucucugccucac

SEQ ID NO: 187259 - RNA, 17 nt, Homo sapiens
uuaaaccguacacugug

SEQ ID NO: 187260 - RNA, 24 nt, Homo sapiens
ggacagcuccuggaccaggcccau

SEQ ID NO: 187261 - RNA, 14 nt, Homo sapiens
auuucuguucuucc

SEQ ID NO: 187262 - RNA, 13 nt, Homo sapiens
ucaaaaacauucu

SEQ ID NO: 187263 - RNA, 16 nt, Homo sapiens
uccuuagaaguggaag

SEQ ID NO: 187264 - RNA, 23 nt, Homo sapiens
agaauauuauuggaaaauucucu

SEQ ID NO: 187265 - RNA, 13 nt, Homo sapiens
ggcaggacagcuc

SEQ ID NO: 187266 - RNA, 21 nt, Homo sapiens
cacuucccacuauugcuugca

SEQ ID NO: 187267 - RNA, 20 nt, Homo sapiens
ucugacucuuggcacagcau

SEQ ID NO: 187268 - RNA, 15 nt, Homo sapiens
guaggugguuuugaa

SEQ ID NO: 187269 - RNA, 13 nt, Homo sapiens
agcagauaauggu

SEQ ID NO: 187270 - RNA, 14 nt, Homo sapiens
ugacucuuggcaca

SEQ ID NO: 187271 - RNA, 19 nt, Homo sapiens
ugcuucaaaaacauucuua

SEQ ID NO: 187272 - RNA, 15 nt, Homo sapiens
ucguucucugccuca

SEQ ID NO: 187273 - RNA, 16 nt, Homo sapiens
cauaaaaguuggcuca

SEQ ID NO: 187274 - RNA, 17 nt, Homo sapiens
cuguaugucucguggua

SEQ ID NO: 187275 - RNA, 14 nt, Homo sapiens
uacgacaacuugca

SEQ ID NO: 187276 - RNA, 13 nt, Homo sapiens
uuacuaaucuuuc

SEQ ID NO: 187277 - RNA, 23 nt, Homo sapiens
auacuguuuuacuguccaaagac

SEQ ID NO: 187278 - RNA, 20 nt, Homo sapiens
gaaguuuguuuaaaugacag

SEQ ID NO: 187279 - RNA, 16 nt, Homo sapiens
aaaccaaauauuccag

SEQ ID NO: 187280 - RNA, 23 nt, Homo sapiens
cacagccaaccuagcuagcaaca

SEQ ID NO: 187281 - RNA, 22 nt, Homo sapiens
gccggggaaggaggccguccau

SEQ ID NO: 187282 - RNA, 11 nt, Homo sapiens
agaagaugaau

SEQ ID NO: 187283 - RNA, 15 nt, Homo sapiens
caaucugaaacagcu

SEQ ID NO: 187284 - RNA, 15 nt, Homo sapiens
ccaaagacauguuua

SEQ ID NO: 187285 - RNA, 11 nt, Homo sapiens
uguccaaagac

SEQ ID NO: 187286 - RNA, 21 nt, Homo sapiens
aauguggcuugaauguaggua

SEQ ID NO: 187287 - RNA, 18 nt, Homo sapiens
aaaaguauccugcuucug

SEQ ID NO: 187288 - RNA, 15 nt, Homo sapiens
auugaacuuaugcaa

SEQ ID NO: 187289 - RNA, 13 nt, Homo sapiens
guguaccagagaa

SEQ ID NO: 187290 - RNA, 18 nt, Homo sapiens
ugaaaauaugacacucua

SEQ ID NO: 187291 - RNA, 21 nt, Homo sapiens
gucuuuggugaacauugcaau

SEQ ID NO: 187292 - RNA, 12 nt, Homo sapiens
ccaguuacauaa

SEQ ID NO: 187293 - RNA, 17 nt, Homo sapiens
gcuccauucaaagugag

SEQ ID NO: 187294 - RNA, 15 nt, Homo sapiens
ccuuugccugguaca

SEQ ID NO: 187295 - RNA, 23 nt, Homo sapiens
acugggacuaaguguaccagaga

SEQ ID NO: 187296 - RNA, 23 nt, Homo sapiens
uuaaaaggaaagcagauggugga

SEQ ID NO: 187297 - RNA, 20 nt, Homo sapiens
gcacaaauugggccaaagaa

SEQ ID NO: 187298 - RNA, 19 nt, Homo sapiens
cucgugguaggacuguaga

SEQ ID NO: 187299 - RNA, 17 nt, Homo sapiens
acccuucuuuucugacu

SEQ ID NO: 187300 - RNA, 19 nt, Homo sapiens
cuuuaccuaaauaugagcc

SEQ ID NO: 187301 - RNA, 18 nt, Homo sapiens
uaaaccguacacuguguu

SEQ ID NO: 187302 - RNA, 22 nt, Homo sapiens
uucagucaaagauacacaaucu

SEQ ID NO: 187303 - RNA, 17 nt, Homo sapiens
uuuccaaauuauggcaa

SEQ ID NO: 187304 - RNA, 12 nt, Homo sapiens
uguagaaaguga

SEQ ID NO: 187305 - RNA, 16 nt, Homo sapiens
acugcaacuucugccu

SEQ ID NO: 187306 - RNA, 13 nt, Homo sapiens
aggacuguagaaa

SEQ ID NO: 187307 - RNA, 18 nt, Homo sapiens
uagaaugagacuuacuuc

SEQ ID NO: 187308 - RNA, 19 nt, Homo sapiens
ugcuucuuaaaauagccau

SEQ ID NO: 187309 - RNA, 15 nt, Homo sapiens
uaauaaagacagggu

SEQ ID NO: 187310 - RNA, 17 nt, Homo sapiens
guucugguuacuguucu

SEQ ID NO: 187311 - RNA, 16 nt, Homo sapiens
acguaagacuguguaa

SEQ ID NO: 187312 - RNA, 19 nt, Homo sapiens
ugagucccagagccaauca

SEQ ID NO: 187313 - RNA, 22 nt, Homo sapiens
accagagaagggcuuggacuca

SEQ ID NO: 187314 - RNA, 12 nt, Homo sapiens
caaaacauuugu

SEQ ID NO: 187315 - RNA, 23 nt, Homo sapiens
ugaaaagaaucggcaauguuuca

SEQ ID NO: 187316 - RNA, 18 nt, Homo sapiens
uccugaccucaaguaauc

SEQ ID NO: 187317 - RNA, 23 nt, Homo sapiens
uaguaaaagccaucuauguauau

SEQ ID NO: 187318 - RNA, 14 nt, Homo sapiens
uguacagucuugua

SEQ ID NO: 187319 - RNA, 20 nt, Homo sapiens
guuuaugcauagauaaucuc

SEQ ID NO: 187320 - RNA, 15 nt, Homo sapiens
auacuagaguucaug

SEQ ID NO: 187321 - RNA, 13 nt, Homo sapiens
gguuauauguaua

SEQ ID NO: 187322 - RNA, 18 nt, Homo sapiens
auaugacacucuagucaa

SEQ ID NO: 187323 - RNA, 13 nt, Homo sapiens
cauuuacauugcc

SEQ ID NO: 187324 - RNA, 22 nt, Homo sapiens
agacagcacagccaaccuagcu

SEQ ID NO: 187325 - RNA, 11 nt, Homo sapiens
uaaaagccauc

SEQ ID NO: 187326 - RNA, 15 nt, Homo sapiens
caaugacacagucuu

SEQ ID NO: 187327 - RNA, 20 nt, Homo sapiens
aagauggcacuuauaaccaa

SEQ ID NO: 187328 - RNA, 15 nt, Homo sapiens
cuuuuuauacuauua

SEQ ID NO: 187329 - RNA, 12 nt, Homo sapiens
agugauuuccac

SEQ ID NO: 187330 - RNA, 22 nt, Homo sapiens
gaaaagaaucggcaauguuuca

SEQ ID NO: 187331 - RNA, 19 nt, Homo sapiens
gcuucuuugaaacuuguau

SEQ ID NO: 187332 - RNA, 19 nt, Homo sapiens
ugcaguuuuuuucuugucu

SEQ ID NO: 187333 - RNA, 21 nt, Homo sapiens
ucuaaggcugugccaucagcu

SEQ ID NO: 187334 - RNA, 16 nt, Homo sapiens
ugagacagcacagcca

SEQ ID NO: 187335 - RNA, 16 nt, Homo sapiens
cuaacaguaguugcaa

SEQ ID NO: 187336 - RNA, 22 nt, Homo sapiens
cauuugucaacaaagucaccca

SEQ ID NO: 187337 - RNA, 18 nt, Homo sapiens
acuuuugaaaacaaaaua

SEQ ID NO: 187338 - RNA, 21 nt, Homo sapiens
augacacucuagucaaagccu

SEQ ID NO: 187339 - RNA, 19 nt, Homo sapiens
ccaaagcccaaagugguau

SEQ ID NO: 187340 - RNA, 12 nt, Homo sapiens
guucauucugca

SEQ ID NO: 187341 - RNA, 24 nt, Homo sapiens
cuugguaaaauaaucaguguuucc

SEQ ID NO: 187342 - RNA, 21 nt, Homo sapiens
uugcccaggcuggagugcaau

SEQ ID NO: 187343 - RNA, 19 nt, Homo sapiens
uguuaagccauguguucca

SEQ ID NO: 187344 - RNA, 11 nt, Homo sapiens
aagacugacca

SEQ ID NO: 187345 - RNA, 10 nt, Homo sapiens
gaaaacagaa

SEQ ID NO: 187346 - RNA, 15 nt, Homo sapiens
uuuaauagcgucaua

SEQ ID NO: 187347 - RNA, 15 nt, Homo sapiens
uuugaggguguauau

SEQ ID NO: 187348 - RNA, 11 nt, Homo sapiens
acccucccacu

SEQ ID NO: 187349 - RNA, 16 nt, Homo sapiens
uguuauacugaaccag

SEQ ID NO: 187350 - RNA, 20 nt, Homo sapiens
gacucuaacaguaguugcaa

SEQ ID NO: 187351 - RNA, 16 nt, Homo sapiens
acugaaccaggccaga

SEQ ID NO: 187352 - RNA, 16 nt, Homo sapiens
uaacgagaaauagaaa

SEQ ID NO: 187353 - RNA, 18 nt, Homo sapiens
uucugcauucucuaguca

SEQ ID NO: 187354 - RNA, 18 nt, Homo sapiens
uuaaaccguacacugugu

SEQ ID NO: 187355 - RNA, 14 nt, Homo sapiens
ccuggggcuucuga

SEQ ID NO: 187356 - RNA, 17 nt, Homo sapiens
agaugcauccuuucaua

SEQ ID NO: 187357 - RNA, 21 nt, Homo sapiens
ugaggaauuucuguucuucca

SEQ ID NO: 187358 - RNA, 11 nt, Homo sapiens
ggcucaucucu

SEQ ID NO: 187359 - RNA, 20 nt, Homo sapiens
uacacauuuuucagauauaa

SEQ ID NO: 187360 - RNA, 14 nt, Homo sapiens
ucaacaaagucacc

SEQ ID NO: 187361 - RNA, 18 nt, Homo sapiens
aauuucucuacugucuca

SEQ ID NO: 187362 - RNA, 19 nt, Homo sapiens
ucaaaacaaucuugucaua

SEQ ID NO: 187363 - RNA, 23 nt, Homo sapiens
uuacuguucuaaggcugugccau

SEQ ID NO: 187364 - RNA, 22 nt, Homo sapiens
cccucccacugccaaagaacuu

SEQ ID NO: 187365 - RNA, 17 nt, Homo sapiens
ugcuugcacaaaccaau

SEQ ID NO: 187366 - RNA, 20 nt, Homo sapiens
gucaaagauacacaaucuga

SEQ ID NO: 187367 - RNA, 22 nt, Homo sapiens
gacucuauuaaaaucuucaaua

SEQ ID NO: 187368 - RNA, 16 nt, Homo sapiens
aaucucuccauucccg

SEQ ID NO: 187369 - RNA, 22 nt, Homo sapiens
uagucucuggcaagaugcuuua

SEQ ID NO: 187370 - RNA, 13 nt, Homo sapiens
ccuacugagacag

SEQ ID NO: 187371 - RNA, 22 nt, Homo sapiens
uaccuuuuauuuuaauguuucc

SEQ ID NO: 187372 - RNA, 11 nt, Homo sapiens
uuuaaagacag

SEQ ID NO: 187373 - RNA, 19 nt, Homo sapiens
ccuuggcuaguaaaagcca

SEQ ID NO: 187374 - RNA, 13 nt, Homo sapiens
guccaaggucucc

SEQ ID NO: 187375 - RNA, 22 nt, Homo sapiens
gugggcuaagcacgggccauau

SEQ ID NO: 187376 - RNA, 22 nt, Homo sapiens
agccuaggaaagccaguuacau

SEQ ID NO: 187377 - RNA, 17 nt, Homo sapiens
cugauguagcuuauaca

SEQ ID NO: 187378 - RNA, 18 nt, Homo sapiens
cgugaccugccaggcaca

SEQ ID NO: 187379 - RNA, 13 nt, Homo sapiens
auuugucaacaaa

SEQ ID NO: 187380 - RNA, 20 nt, Homo sapiens
cuggauuacaggcaugugcc

SEQ ID NO: 187381 - RNA, 20 nt, Homo sapiens
uacacaaucugaaacagcuu

SEQ ID NO: 187382 - RNA, 17 nt, Homo sapiens
auuugucaacaaaguca

SEQ ID NO: 187383 - RNA, 21 nt, Homo sapiens
guauaaauauguauuuuguca

SEQ ID NO: 187384 - RNA, 18 nt, Homo sapiens
uugcacaaauugggccaa

SEQ ID NO: 187385 - RNA, 21 nt, Homo sapiens
cccacugccaaagaacuugga

SEQ ID NO: 187386 - RNA, 15 nt, Homo sapiens
gaacugaacauucca

SEQ ID NO: 187387 - RNA, 16 nt, Homo sapiens
cuauuagcuccacaaa

SEQ ID NO: 187388 - RNA, 15 nt, Homo sapiens
gccaguuacauaaaa

SEQ ID NO: 187389 - RNA, 20 nt, Homo sapiens
ugauauguugguagauucua

SEQ ID NO: 187390 - RNA, 23 nt, Homo sapiens
uguaagaucguucucugccucac

SEQ ID NO: 187391 - RNA, 21 nt, Homo sapiens
aauuuuauguuuaguugcaca

SEQ ID NO: 187392 - RNA, 16 nt, Homo sapiens
aguugcaauguuuuag

SEQ ID NO: 187393 - RNA, 13 nt, Homo sapiens
guaagacugugua

SEQ ID NO: 187394 - RNA, 19 nt, Homo sapiens
uauauguauaucacauucc

SEQ ID NO: 187395 - RNA, 14 nt, Homo sapiens
aaaaggcagaguac

SEQ ID NO: 187396 - RNA, 17 nt, Homo sapiens
ucuggccuccaagucca

SEQ ID NO: 187397 - RNA, 12 nt, Homo sapiens
aggccagagcaa

SEQ ID NO: 187398 - RNA, 18 nt, Homo sapiens
ucacagccacuugggaua

SEQ ID NO: 187399 - RNA, 16 nt, Homo sapiens
aaguccacaguggaac

SEQ ID NO: 187400 - RNA, 14 nt, Homo sapiens
uuugaggguguaua

SEQ ID NO: 187401 - RNA, 20 nt, Homo sapiens
uaaacuuacuuaguguuaug

SEQ ID NO: 187402 - RNA, 23 nt, Homo sapiens
uucagauauaaaagacugaccaa

SEQ ID NO: 187403 - RNA, 20 nt, Homo sapiens
ucugccuccccuucacuccc

SEQ ID NO: 187404 - RNA, 22 nt, Homo sapiens
caauauacuuguauagcaguuu

SEQ ID NO: 187405 - RNA, 12 nt, Homo sapiens
uaguugcuguau

SEQ ID NO: 187406 - RNA, 16 nt, Homo sapiens
uuaaaauagccauaaa

SEQ ID NO: 187407 - RNA, 21 nt, Homo sapiens
uaagcacgggccauaugaaua

SEQ ID NO: 187408 - RNA, 16 nt, Homo sapiens
gaguuccgacugccau

SEQ ID NO: 187409 - RNA, 14 nt, Homo sapiens
acauuuuguauauu

SEQ ID NO: 187410 - RNA, 19 nt, Homo sapiens
aguauccugcuucugauau

SEQ ID NO: 187411 - RNA, 15 nt, Homo sapiens
guuuccaaucugucc

SEQ ID NO: 187412 - RNA, 18 nt, Homo sapiens
uucuuucaaagaagccag

SEQ ID NO: 187413 - RNA, 16 nt, Homo sapiens
ucaggcagaucucagc

SEQ ID NO: 187414 - RNA, 13 nt, Homo sapiens
cacugauguauga

SEQ ID NO: 187415 - RNA, 18 nt, Homo sapiens
cgauuaauaacaggcaaa

SEQ ID NO: 187416 - RNA, 12 nt, Homo sapiens
aaguaagccaug

SEQ ID NO: 187417 - RNA, 20 nt, Homo sapiens
aaguaaauauagcucaggua

SEQ ID NO: 187418 - RNA, 15 nt, Homo sapiens
gaaaaguaacuguuu

SEQ ID NO: 187419 - RNA, 12 nt, Homo sapiens
uguaccagagaa

SEQ ID NO: 187420 - RNA, 20 nt, Homo sapiens
agcuguuuaugcauagauaa

SEQ ID NO: 187421 - RNA, 19 nt, Homo sapiens
agaugaaacaucauuucaa

SEQ ID NO: 187422 - RNA, 22 nt, Homo sapiens
cuuaagacgugauuuugcugua

SEQ ID NO: 187423 - RNA, 15 nt, Homo sapiens
cugaccaauauugua

SEQ ID NO: 187424 - RNA, 23 nt, Homo sapiens
uagugauuuccacagugacucca

SEQ ID NO: 187425 - RNA, 21 nt, Homo sapiens
uggauuacaggcaugugccac

SEQ ID NO: 187426 - RNA, 23 nt, Homo sapiens
aaaaccguaugagggaacugugu

SEQ ID NO: 187427 - RNA, 17 nt, Homo sapiens
gaaaagggaacugaaca

SEQ ID NO: 187428 - RNA, 14 nt, Homo sapiens
gccagcaucugccu

SEQ ID NO: 187429 - RNA, 21 nt, Homo sapiens
ugaugcuggggacacagcauc

SEQ ID NO: 187430 - RNA, 16 nt, Homo sapiens
aggcuggagugcaaug

SEQ ID NO: 187431 - RNA, 19 nt, Homo sapiens
ugaccaauauuguacaguu

SEQ ID NO: 187432 - RNA, 23 nt, Homo sapiens
gucaauguccuacugagacagca

SEQ ID NO: 187433 - RNA, 22 nt, Homo sapiens
ucagcaccuacaguguacaguc

SEQ ID NO: 187434 - RNA, 16 nt, Homo sapiens
gcaguggaacuaagaa

SEQ ID NO: 187435 - RNA, 18 nt, Homo sapiens
uccuccccuguucauucu

SEQ ID NO: 187436 - RNA, 23 nt, Homo sapiens
cagucaaagauacacaaucugaa

SEQ ID NO: 187437 - RNA, 21 nt, Homo sapiens
acugcauaugaaaggacacua

SEQ ID NO: 187438 - RNA, 22 nt, Homo sapiens
aauauuccagagacugggacua

SEQ ID NO: 187439 - RNA, 14 nt, Homo sapiens
caguaguugcaaug

SEQ ID NO: 187440 - RNA, 21 nt, Homo sapiens
cuaugauuguccguaggccca

SEQ ID NO: 187441 - RNA, 13 nt, Homo sapiens
ggauuacagggau

SEQ ID NO: 187442 - RNA, 18 nt, Homo sapiens
aaaccugaugcuggggac

SEQ ID NO: 187443 - RNA, 11 nt, Homo sapiens
auaguuuccaa

SEQ ID NO: 187444 - RNA, 21 nt, Homo sapiens
ugugaccauuagcauuuguca

SEQ ID NO: 187445 - RNA, 17 nt, Homo sapiens
accuaacgagaaauaga

SEQ ID NO: 187446 - RNA, 18 nt, Homo sapiens
gaauuuggguaugaacag

SEQ ID NO: 187447 - RNA, 13 nt, Homo sapiens
ugacacagucuug

SEQ ID NO: 187448 - RNA, 18 nt, Homo sapiens
ggguuucaccauguuggc

SEQ ID NO: 187449 - RNA, 14 nt, Homo sapiens
caaaguaagccaug

SEQ ID NO: 187450 - RNA, 22 nt, Homo sapiens
gccuaggaaagccaguuacaua

SEQ ID NO: 187451 - RNA, 15 nt, Homo sapiens
gguccaaggucucca

SEQ ID NO: 187452 - RNA, 18 nt, Homo sapiens
uugugcauaaaaacaaga

SEQ ID NO: 187453 - RNA, 22 nt, Homo sapiens
ucuuuaaccacuuuucaauguc

SEQ ID NO: 187454 - RNA, 13 nt, Homo sapiens
uccacaguggaac

SEQ ID NO: 187455 - RNA, 18 nt, Homo sapiens
gauaaucucuccauuccc

SEQ ID NO: 187456 - RNA, 23 nt, Homo sapiens
cuuccuccccuguucauucugca

SEQ ID NO: 187457 - RNA, 16 nt, Homo sapiens
augcaguuuuccuuaa

SEQ ID NO: 187458 - RNA, 22 nt, Homo sapiens
gcaggauuugggcucuuggaau

SEQ ID NO: 187459 - RNA, 13 nt, Homo sapiens
cagaaaaagaagg

SEQ ID NO: 187460 - RNA, 22 nt, Homo sapiens
ggcuaagcacgggccauaugaa

SEQ ID NO: 187461 - RNA, 16 nt, Homo sapiens
acccuucuccuuagaa

SEQ ID NO: 187462 - RNA, 21 nt, Homo sapiens
auaacauggugugcuucuuaa

SEQ ID NO: 187463 - RNA, 22 nt, Homo sapiens
gcacaaaccaauuaaacccagu

SEQ ID NO: 187464 - RNA, 20 nt, Homo sapiens
ucauauugaugugugucuag

SEQ ID NO: 187465 - RNA, 21 nt, Homo sapiens
ugcccaggcuggagugcaaug

SEQ ID NO: 187466 - RNA, 18 nt, Homo sapiens
accuaaauaugagcccag

SEQ ID NO: 187467 - RNA, 17 nt, Homo sapiens
aaauaaucaguguuucc

SEQ ID NO: 187468 - RNA, 21 nt, Homo sapiens
gacgucacccuccauucugca

SEQ ID NO: 187469 - RNA, 20 nt, Homo sapiens
gcacucagaaaauggcacuu

SEQ ID NO: 187470 - RNA, 14 nt, Homo sapiens
auguaucucaggaa

SEQ ID NO: 187471 - RNA, 21 nt, Homo sapiens
aauguguucggugauuucaga

SEQ ID NO: 187472 - RNA, 20 nt, Homo sapiens
caggcuggagugcaaugaca

SEQ ID NO: 187473 - RNA, 15 nt, Homo sapiens
uguuuauagugcucu

SEQ ID NO: 187474 - RNA, 13 nt, Homo sapiens
aaaaugugacuca

SEQ ID NO: 187475 - RNA, 21 nt, Homo sapiens
uuaaagcagggauaugcugua

SEQ ID NO: 187476 - RNA, 18 nt, Homo sapiens
aauucagggagugggcua

SEQ ID NO: 187477 - RNA, 16 nt, Homo sapiens
gucagucuucuuccau

SEQ ID NO: 187478 - RNA, 12 nt, Homo sapiens
gaaucucucuuc

SEQ ID NO: 187479 - RNA, 16 nt, Homo sapiens
gccagagcaaacagaa

SEQ ID NO: 187480 - RNA, 17 nt, Homo sapiens
acuuacuucucugcuau

SEQ ID NO: 187481 - RNA, 12 nt, Homo sapiens
uaagaugaaaca

SEQ ID NO: 187482 - RNA, 14 nt, Homo sapiens
ugagaaaaugucuu

SEQ ID NO: 187483 - RNA, 22 nt, Homo sapiens
agauucuaauggcuuuauugca

SEQ ID NO: 187484 - RNA, 19 nt, Homo sapiens
agcaccuacaguguacagu

SEQ ID NO: 187485 - RNA, 21 nt, Homo sapiens
ugguuuugcucacaaaagucu

SEQ ID NO: 187486 - RNA, 17 nt, Homo sapiens
ucaaaacaaucuuguca

SEQ ID NO: 187487 - RNA, 14 nt, Homo sapiens
uuggaaaaucaaga

SEQ ID NO: 187488 - RNA, 22 nt, Homo sapiens
gugcuucuuaaaauagccauaa

SEQ ID NO: 187489 - RNA, 22 nt, Homo sapiens
ggcugucagauauaaguaacuu

SEQ ID NO: 187490 - RNA, 20 nt, Homo sapiens
ucuacugucucaguuuacau

SEQ ID NO: 187491 - RNA, 15 nt, Homo sapiens
ugugggcuccauuca

SEQ ID NO: 187492 - RNA, 23 nt, Homo sapiens
gaagggcuuggacucaagcaaga

SEQ ID NO: 187493 - RNA, 17 nt, Homo sapiens
agggagugggcuaagca

SEQ ID NO: 187494 - RNA, 22 nt, Homo sapiens
ucuuuguaaagaaaguggcuug

SEQ ID NO: 187495 - RNA, 13 nt, Homo sapiens
ccuccaaguccac

SEQ ID NO: 187496 - RNA, 13 nt, Homo sapiens
aaaugaaagugag

SEQ ID NO: 187497 - RNA, 17 nt, Homo sapiens
caggcuggagugcaaug

SEQ ID NO: 187498 - RNA, 15 nt, Homo sapiens
ugguuauauguauau

SEQ ID NO: 187499 - RNA, 14 nt, Homo sapiens
guuuucccaaagag

SEQ ID NO: 187500 - RNA, 19 nt, Homo sapiens
gcccaggcuggagugcaau

SEQ ID NO: 187501 - RNA, 20 nt, Homo sapiens
ucauacuugaaaauaugaca

SEQ ID NO: 187502 - RNA, 14 nt, Homo sapiens
gcuccuaagccaug

SEQ ID NO: 187503 - RNA, 11 nt, Homo sapiens
accucaucucc

SEQ ID NO: 187504 - RNA, 19 nt, Homo sapiens
cugauguagcuuauacaaa

SEQ ID NO: 187505 - RNA, 13 nt, Homo sapiens
gaaacagcuucau

SEQ ID NO: 187506 - RNA, 21 nt, Homo sapiens
aaaucuuuuuuguucaaagau

SEQ ID NO: 187507 - RNA, 11 nt, Homo sapiens
ccaaggucucc

SEQ ID NO: 187508 - RNA, 18 nt, Homo sapiens
aaguucuuaguugcugua

SEQ ID NO: 187509 - RNA, 22 nt, Homo sapiens
uggggacacagcaucagcucaa

SEQ ID NO: 187510 - RNA, 12 nt, Homo sapiens
uuaagaaauuca

SEQ ID NO: 187511 - RNA, 14 nt, Homo sapiens
accuacaguguaca

SEQ ID NO: 187512 - RNA, 20 nt, Homo sapiens
gaaaagaaucggcaauguuu

SEQ ID NO: 187513 - RNA, 13 nt, Homo sapiens
ucugaaacagcuu

SEQ ID NO: 187514 - RNA, 23 nt, Homo sapiens
aacaguaguugcaauguuuuaga

SEQ ID NO: 187515 - RNA, 16 nt, Homo sapiens
gacucaucauuuccau

SEQ ID NO: 187516 - RNA, 13 nt, Homo sapiens
cuggcucaucucu

SEQ ID NO: 187517 - RNA, 18 nt, Homo sapiens
uggcuaguaaaagccauc

SEQ ID NO: 187518 - RNA, 18 nt, Homo sapiens
auuaagaaauucacuucc

SEQ ID NO: 187519 - RNA, 11 nt, Homo sapiens
uuuaaccaaga

SEQ ID NO: 187520 - RNA, 20 nt, Homo sapiens
cagcuguuuaugcauagaua

SEQ ID NO: 187521 - RNA, 13 nt, Homo sapiens
gugauauguuggu

SEQ ID NO: 187522 - RNA, 16 nt, Homo sapiens
aaagugauccauacuu

SEQ ID NO: 187523 - RNA, 21 nt, Homo sapiens
uguuuaugaauaguuuccaaa

SEQ ID NO: 187524 - RNA, 20 nt, Homo sapiens
aaccaaauacuuuaauguau

SEQ ID NO: 187525 - RNA, 22 nt, Homo sapiens
guaaaauaaucaguguuuccaa

SEQ ID NO: 187526 - RNA, 18 nt, Homo sapiens
aucugaaacagcuucaug

SEQ ID NO: 187527 - RNA, 21 nt, Homo sapiens
caugucuauuagcuccacaaa

SEQ ID NO: 187528 - RNA, 19 nt, Homo sapiens
cauuuaagcugccuguaca

SEQ ID NO: 187529 - RNA, 18 nt, Homo sapiens
ggaaauagugauuuccac

SEQ ID NO: 187530 - RNA, 20 nt, Homo sapiens
uguguuuuuaauaaagacag

SEQ ID NO: 187531 - RNA, 18 nt, Homo sapiens
uugcaauguggcuugaau

SEQ ID NO: 187532 - RNA, 22 nt, Homo sapiens
agcagaugguggagcugaauau

SEQ ID NO: 187533 - RNA, 16 nt, Homo sapiens
gaaguuuaauugacuu

SEQ ID NO: 187534 - RNA, 23 nt, Homo sapiens
guggacucuaacaguaguugcaa

SEQ ID NO: 187535 - RNA, 16 nt, Homo sapiens
caggcuggagugcaau

SEQ ID NO: 187536 - RNA, 23 nt, Homo sapiens
aaauuuucuuuuuauacuauuaa

SEQ ID NO: 187537 - RNA, 13 nt, Homo sapiens
augaaacaucauu

SEQ ID NO: 187538 - RNA, 23 nt, Homo sapiens
aauuuuauguuuaguugcacaaa

SEQ ID NO: 187539 - RNA, 22 nt, Homo sapiens
gucuuggcucacugcaacuucu

SEQ ID NO: 187540 - RNA, 13 nt, Homo sapiens
gcaaaaccaaaua

SEQ ID NO: 187541 - RNA, 22 nt, Homo sapiens
ucugauaugcaguuuuccuuaa

SEQ ID NO: 187542 - RNA, 20 nt, Homo sapiens
cagagucucgcucuguugcc

SEQ ID NO: 187543 - RNA, 20 nt, Homo sapiens
uuuuuacuaaucuuucugca

SEQ ID NO: 187544 - RNA, 15 nt, Homo sapiens
gcuaguaaaagccau

SEQ ID NO: 187545 - RNA, 18 nt, Homo sapiens
accauuagcauuugucaa

SEQ ID NO: 187546 - RNA, 14 nt, Homo sapiens
aaaaaugugacuca

SEQ ID NO: 187547 - RNA, 16 nt, Homo sapiens
gcaauagaaauccaau

SEQ ID NO: 187548 - RNA, 23 nt, Homo sapiens
auauacuuauagaauucagucaa

SEQ ID NO: 187549 - RNA, 20 nt, Homo sapiens
gccuccaaguccacagugga

SEQ ID NO: 187550 - RNA, 15 nt, Homo sapiens
agcgauuaauaacag

SEQ ID NO: 187551 - RNA, 22 nt, Homo sapiens
aaguaagccauguaucucagga

SEQ ID NO: 187552 - RNA, 12 nt, Homo sapiens
uguaauugcaaa

SEQ ID NO: 187553 - RNA, 15 nt, Homo sapiens
acaguaguugcaaug

SEQ ID NO: 187554 - RNA, 15 nt, Homo sapiens
cuaacaguaguugca

SEQ ID NO: 187555 - RNA, 17 nt, Homo sapiens
ccaggcuggagugcaau

SEQ ID NO: 187556 - RNA, 14 nt, Homo sapiens
ccagagacugggac

SEQ ID NO: 187557 - RNA, 22 nt, Homo sapiens
aagccuugguaaaauaaucagu

SEQ ID NO: 187558 - RNA, 17 nt, Homo sapiens
auucuuacauuuuacuu

SEQ ID NO: 187559 - RNA, 18 nt, Homo sapiens
cauuuguuuuagucugaa

SEQ ID NO: 187560 - RNA, 13 nt, Homo sapiens
gcugggauuacag

SEQ ID NO: 187561 - RNA, 19 nt, Homo sapiens
agccaugggagacacugau

SEQ ID NO: 187562 - RNA, 12 nt, Homo sapiens
augacacagucu

SEQ ID NO: 187563 - RNA, 13 nt, Homo sapiens
aguugcuguaugu

SEQ ID NO: 187564 - RNA, 15 nt, Homo sapiens
cgacaacuugcacgu

SEQ ID NO: 187565 - RNA, 20 nt, Homo sapiens
gcagaugguggagcugaaua

SEQ ID NO: 187566 - RNA, 16 nt, Homo sapiens
uuccuccccuguucau

SEQ ID NO: 187567 - RNA, 14 nt, Homo sapiens
caauagaaauccaa

SEQ ID NO: 187568 - RNA, 15 nt, Homo sapiens
cagcaccuacagugu

SEQ ID NO: 187569 - RNA, 22 nt, Homo sapiens
ccucaaaugagaaaaugucuuu

SEQ ID NO: 187570 - RNA, 17 nt, Homo sapiens
cugguggggcugccagg

SEQ ID NO: 187571 - RNA, 13 nt, Homo sapiens
gcauucucuaguc

SEQ ID NO: 187572 - RNA, 23 nt, Homo sapiens
uucuaaagauggaaaaaccaccc

SEQ ID NO: 187573 - RNA, 19 nt, Homo sapiens
gcuucuuaaaauagccaua

SEQ ID NO: 187574 - RNA, 11 nt, Homo sapiens
uucaagugauu

SEQ ID NO: 187575 - RNA, 18 nt, Homo sapiens
ucacugcaacuucugccu

SEQ ID NO: 187576 - RNA, 19 nt, Homo sapiens
uuauacaauauacuuguau

SEQ ID NO: 187577 - RNA, 12 nt, Homo sapiens
uuacauugccuu

SEQ ID NO: 187578 - RNA, 15 nt, Homo sapiens
uaagaaauucacuuc

SEQ ID NO: 187579 - RNA, 16 nt, Homo sapiens
aaugccacucuguaau

SEQ ID NO: 187580 - RNA, 14 nt, Homo sapiens
agccucaucucuuu

SEQ ID NO: 187581 - RNA, 19 nt, Homo sapiens
ugaacauugcaauagaaau

SEQ ID NO: 187582 - RNA, 14 nt, Homo sapiens
aaccuagcuagcaa

SEQ ID NO: 187583 - RNA, 14 nt, Homo sapiens
aggguaaauucucu

SEQ ID NO: 187584 - RNA, 14 nt, Homo sapiens
guccacaguggaac

SEQ ID NO: 187585 - RNA, 12 nt, Homo sapiens
gagcaaacagaa

SEQ ID NO: 187586 - RNA, 15 nt, Homo sapiens
agccauguaucucag

SEQ ID NO: 187587 - RNA, 13 nt, Homo sapiens
caggcacacugag

SEQ ID NO: 187588 - RNA, 17 nt, Homo sapiens
agucugucaauguccua

SEQ ID NO: 187589 - RNA, 10 nt, Homo sapiens
gaaaagcagg

SEQ ID NO: 187590 - RNA, 22 nt, Homo sapiens
cacuuagguccaaggucuccag

SEQ ID NO: 187591 - RNA, 13 nt, Homo sapiens
agccucaucucuu

SEQ ID NO: 187592 - RNA, 16 nt, Homo sapiens
aggucagucuucuucc

SEQ ID NO: 187593 - RNA, 19 nt, Homo sapiens
caccaacuauagaauguau

SEQ ID NO: 187594 - RNA, 21 nt, Homo sapiens
caaucuguccuguuacaaaag

SEQ ID NO: 187595 - RNA, 23 nt, Homo sapiens
caguugcagcuguuuuguugaca

SEQ ID NO: 187596 - RNA, 18 nt, Homo sapiens
uuguuauucuguaguuuc

SEQ ID NO: 187597 - RNA, 13 nt, Homo sapiens
aguaaaagccauc

SEQ ID NO: 187598 - RNA, 17 nt, Homo sapiens
acauaaaaguuggcuca

SEQ ID NO: 187599 - RNA, 23 nt, Homo sapiens
uuacuuuuuccuggcucaucucu

SEQ ID NO: 187600 - RNA, 16 nt, Homo sapiens
ugaccugccaggcaca

SEQ ID NO: 187601 - RNA, 20 nt, Homo sapiens
gaacguuuuuccuguucuua

SEQ ID NO: 187602 - RNA, 19 nt, Homo sapiens
accgcaggauuugggcucu

SEQ ID NO: 187603 - RNA, 23 nt, Homo sapiens
agaagguugagggcaauggacaa

SEQ ID NO: 187604 - RNA, 16 nt, Homo sapiens
aauaaauucaucagau

SEQ ID NO: 187605 - RNA, 20 nt, Homo sapiens
uacccguuucacaugcuuuu

SEQ ID NO: 187606 - RNA, 14 nt, Homo sapiens
ugaauaugccacuu

SEQ ID NO: 187607 - RNA, 16 nt, Homo sapiens
ugccaggcacacugag

SEQ ID NO: 187608 - RNA, 15 nt, Homo sapiens
auucuccugccucag

SEQ ID NO: 187609 - RNA, 16 nt, Homo sapiens
caauauuguacaguuu

SEQ ID NO: 187610 - RNA, 19 nt, Homo sapiens
gagaucuauauauguauaa

SEQ ID NO: 187611 - RNA, 18 nt, Homo sapiens
ugaaguuuaauugacuua

SEQ ID NO: 187612 - RNA, 18 nt, Homo sapiens
acugccaaagaacuugga

SEQ ID NO: 187613 - RNA, 16 nt, Homo sapiens
uaagccauguguucca

SEQ ID NO: 187614 - RNA, 13 nt, Homo sapiens
gaauuaagcacag

SEQ ID NO: 187615 - RNA, 21 nt, Homo sapiens
ucucccagccagguucugacu

SEQ ID NO: 187616 - RNA, 14 nt, Homo sapiens
uugcucacaaaagu

SEQ ID NO: 187617 - RNA, 18 nt, Homo sapiens
aaccucgagguuucucaa

SEQ ID NO: 187618 - RNA, 23 nt, Homo sapiens
gaaaagaaucggcaauguuucaa

SEQ ID NO: 187619 - RNA, 21 nt, Homo sapiens
ugugcuucuuaaaauagccau

SEQ ID NO: 187620 - RNA, 14 nt, Homo sapiens
caucauuucaaucg

SEQ ID NO: 187621 - RNA, 19 nt, Homo sapiens
aaaauggcacuugggggac

SEQ ID NO: 187622 - RNA, 12 nt, Homo sapiens
uuuaaagacaga

SEQ ID NO: 187623 - RNA, 18 nt, Homo sapiens
cucuaacaguaguugcaa

SEQ ID NO: 187624 - RNA, 13 nt, Homo sapiens
ggguaaauucucu

SEQ ID NO: 187625 - RNA, 21 nt, Homo sapiens
ccaaguucuuaguugcuguau

SEQ ID NO: 187626 - RNA, 21 nt, Homo sapiens
gaauuuuuauauccacuaaaa

SEQ ID NO: 187627 - RNA, 22 nt, Homo sapiens
cccgccacccucccacugccaa

SEQ ID NO: 187628 - RNA, 15 nt, Homo sapiens
gugagaggacucuga

SEQ ID NO: 187629 - RNA, 22 nt, Homo sapiens
gaaaaagaagguugagggcaau

SEQ ID NO: 187630 - RNA, 21 nt, Homo sapiens
aaccguaugagggaacugugu

SEQ ID NO: 187631 - RNA, 13 nt, Homo sapiens
caacuguggcuua

SEQ ID NO: 187632 - RNA, 15 nt, Homo sapiens
ccuuagaaguggaag

SEQ ID NO: 187633 - RNA, 18 nt, Homo sapiens
ccaaagaaacauugccuu

SEQ ID NO: 187634 - RNA, 22 nt, Homo sapiens
uugcacaaauugggccaaagaa

SEQ ID NO: 187635 - RNA, 14 nt, Homo sapiens
aaacaaucuuguca

SEQ ID NO: 187636 - RNA, 17 nt, Homo sapiens
cuuagccaagcaguuuc

SEQ ID NO: 187637 - RNA, 16 nt, Homo sapiens
acaauauacuuguaua

SEQ ID NO: 187638 - RNA, 15 nt, Homo sapiens
uuaugaauaguuucc

SEQ ID NO: 187639 - RNA, 16 nt, Homo sapiens
agucugauuguagcua

SEQ ID NO: 187640 - RNA, 22 nt, Homo sapiens
gguacaguauggggguuguaaa

SEQ ID NO: 187641 - RNA, 17 nt, Homo sapiens
guucuaaggcugugcca

SEQ ID NO: 187642 - RNA, 14 nt, Homo sapiens
uuuucuugucuaua

SEQ ID NO: 187643 - RNA, 22 nt, Homo sapiens
gugccucugggacuggacaauu

SEQ ID NO: 187644 - RNA, 16 nt, Homo sapiens
uauagaaaugcugguu

SEQ ID NO: 187645 - RNA, 23 nt, Homo sapiens
gucucaguuuacauuuuguauau

SEQ ID NO: 187646 - RNA, 16 nt, Homo sapiens
uggccuggggcuucug

SEQ ID NO: 187647 - RNA, 13 nt, Homo sapiens
gcuucuuuacuua

SEQ ID NO: 187648 - RNA, 10 nt, Homo sapiens
ugucuuuauu

SEQ ID NO: 187649 - RNA, 18 nt, Homo sapiens
accaacuauagaauguau

SEQ ID NO: 187650 - RNA, 22 nt, Homo sapiens
cuuuaguuuuugugaaguuuaa

SEQ ID NO: 187651 - RNA, 22 nt, Homo sapiens
gcuggauuacaggcaugugcca

SEQ ID NO: 187652 - RNA, 21 nt, Homo sapiens
uuggacucaagcaagauuuca

SEQ ID NO: 187653 - RNA, 22 nt, Homo sapiens
gcgcaguuggucuuuaaccacu

SEQ ID NO: 187654 - RNA, 22 nt, Homo sapiens
uguagagagagaaaaguaacug

SEQ ID NO: 187655 - RNA, 16 nt, Homo sapiens
uaaucaguguuuccaa

SEQ ID NO: 187656 - RNA, 13 nt, Homo sapiens
aaaguaagccaug

SEQ ID NO: 187657 - RNA, 13 nt, Homo sapiens
ucaaguaauccac

SEQ ID NO: 187658 - RNA, 17 nt, Homo sapiens
ugaaagugagacuuuga

SEQ ID NO: 187659 - RNA, 16 nt, Homo sapiens
cuaaguguaccagaga

SEQ ID NO: 187660 - RNA, 14 nt, Homo sapiens
caauguuuuagaau

SEQ ID NO: 187661 - RNA, 13 nt, Homo sapiens
ucuuaagacguga

SEQ ID NO: 187662 - RNA, 20 nt, Homo sapiens
cccaggcuggagugcaauga

SEQ ID NO: 187663 - RNA, 18 nt, Homo sapiens
cuuagagcuuuaccuaaa

SEQ ID NO: 187664 - RNA, 17 nt, Homo sapiens
gaugcuggggacacagc

SEQ ID NO: 187665 - RNA, 14 nt, Homo sapiens
gaaacaucauuuca

SEQ ID NO: 187666 - RNA, 11 nt, Homo sapiens
aguugcuguau

SEQ ID NO: 187667 - RNA, 14 nt, Homo sapiens
uacuuaguucaagc

SEQ ID NO: 187668 - RNA, 17 nt, Homo sapiens
augguggccuggggcuu

SEQ ID NO: 187669 - RNA, 15 nt, Homo sapiens
uuacuguccaaagac

SEQ ID NO: 187670 - RNA, 15 nt, Homo sapiens
agcugccuguacaca

SEQ ID NO: 187671 - RNA, 22 nt, Homo sapiens
acacaaucugaaacagcuucau

SEQ ID NO: 187672 - RNA, 14 nt, Homo sapiens
ucaucucuuuauuc

SEQ ID NO: 187673 - RNA, 22 nt, Homo sapiens
gcccagacccuucuccuuagaa

SEQ ID NO: 187674 - RNA, 13 nt, Homo sapiens
cagagcaaacaga

SEQ ID NO: 187675 - RNA, 12 nt, Homo sapiens
agcaucagcuca

SEQ ID NO: 187676 - RNA, 21 nt, Homo sapiens
augucuuuauuaaauguagaa

SEQ ID NO: 187677 - RNA, 13 nt, Homo sapiens
aauauaucaguaa

SEQ ID NO: 187678 - RNA, 14 nt, Homo sapiens
ccaaagugguauag

SEQ ID NO: 187679 - RNA, 14 nt, Homo sapiens
acugaacauuccag

SEQ ID NO: 187680 - RNA, 20 nt, Homo sapiens
ugaaagcuggagucugucaa

SEQ ID NO: 187681 - RNA, 13 nt, Homo sapiens
accuacaguguac

SEQ ID NO: 187682 - RNA, 18 nt, Homo sapiens
cuugacuuuugaaaacaa

SEQ ID NO: 187683 - RNA, 21 nt, Homo sapiens
cagagaagggcuuggacucaa

SEQ ID NO: 187684 - RNA, 13 nt, Homo sapiens
ugcucacaaaagu

SEQ ID NO: 187685 - RNA, 15 nt, Homo sapiens
agggagaagagggaa

SEQ ID NO: 187686 - RNA, 15 nt, Homo sapiens
uggggacacagcauc

SEQ ID NO: 187687 - RNA, 12 nt, Homo sapiens
agccucaucucu

SEQ ID NO: 187688 - RNA, 17 nt, Homo sapiens
caaacuccugaccucaa

SEQ ID NO: 187689 - RNA, 15 nt, Homo sapiens
cccagccucaucucu

SEQ ID NO: 187690 - RNA, 20 nt, Homo sapiens
cagccuccugaguagcugga

SEQ ID NO: 187691 - RNA, 22 nt, Homo sapiens
ccauuagcauuugucaacaaag

SEQ ID NO: 187692 - RNA, 23 nt, Homo sapiens
uucagucaaagauacacaaucug

SEQ ID NO: 187693 - RNA, 22 nt, Homo sapiens
caucugccuccccuucacuccc

SEQ ID NO: 187694 - RNA, 23 nt, Homo sapiens
cacuguuaagccauguguuccaa

SEQ ID NO: 187695 - RNA, 16 nt, Homo sapiens
aguagcuggauuacag

SEQ ID NO: 187696 - RNA, 19 nt, Homo sapiens
uuugcuucaaaaacauucu

SEQ ID NO: 187697 - RNA, 19 nt, Homo sapiens
auuaucuaaaaucugcuag

SEQ ID NO: 187698 - RNA, 18 nt, Homo sapiens
augagaaaaugucuuuau

SEQ ID NO: 187699 - RNA, 13 nt, Homo sapiens
gaauaugcacaaa

SEQ ID NO: 187700 - RNA, 18 nt, Homo sapiens
caaucugaaacagcuuca

SEQ ID NO: 187701 - RNA, 22 nt, Homo sapiens
caaagauacacaaucugaaaca

SEQ ID NO: 187702 - RNA, 12 nt, Homo sapiens
cuguccaaagac

SEQ ID NO: 187703 - RNA, 20 nt, Homo sapiens
uguuucaaacaaaaagucau

SEQ ID NO: 187704 - RNA, 23 nt, Homo sapiens
caguuggcuaagaagugacucuu

SEQ ID NO: 187705 - RNA, 16 nt, Homo sapiens
uaaaccguacacugug

SEQ ID NO: 187706 - RNA, 21 nt, Homo sapiens
accgcgcccagccucaucucu

SEQ ID NO: 187707 - RNA, 18 nt, Homo sapiens
uccuggggaacauagaac

SEQ ID NO: 187708 - RNA, 15 nt, Homo sapiens
gcaggacagcuccug

SEQ ID NO: 187709 - RNA, 21 nt, Homo sapiens
acugccaucuuggacuuguca

SEQ ID NO: 187710 - RNA, 23 nt, Homo sapiens
aaugagcaaaaccaaauauucca

SEQ ID NO: 187711 - RNA, 18 nt, Homo sapiens
ucauaaaagucacuuuau

SEQ ID NO: 187712 - RNA, 16 nt, Homo sapiens
gaacugaacauuccag

SEQ ID NO: 187713 - RNA, 22 nt, Homo sapiens
aucccucaaaacaaucuuguca

SEQ ID NO: 187714 - RNA, 20 nt, Homo sapiens
aucugcuagggaauaucaau

SEQ ID NO: 187715 - RNA, 18 nt, Homo sapiens
uacuuauagaauucaguc

SEQ ID NO: 187716 - RNA, 13 nt, Homo sapiens
ucuuccaucaccu

SEQ ID NO: 187717 - RNA, 15 nt, Homo sapiens
cuccuuagaagugga

SEQ ID NO: 187718 - RNA, 20 nt, Homo sapiens
uugaaguauauucaaccaaa

SEQ ID NO: 187719 - RNA, 20 nt, Homo sapiens
gcuuagcuaauauugcaaug

SEQ ID NO: 187720 - RNA, 19 nt, Homo sapiens
aacugaaugccacucugua

SEQ ID NO: 187721 - RNA, 17 nt, Homo sapiens
aaaaaugugacucaaga

SEQ ID NO: 187722 - RNA, 12 nt, Homo sapiens
gaguagcuggau

SEQ ID NO: 187723 - RNA, 23 nt, Homo sapiens
aauguaagaucguucucugccuc

SEQ ID NO: 187724 - RNA, 21 nt, Homo sapiens
aaaauuaagaaauucacuucc

SEQ ID NO: 187725 - RNA, 18 nt, Homo sapiens
uggccaggcuggucucaa

SEQ ID NO: 187726 - RNA, 15 nt, Homo sapiens
gccccagccuaggaa

SEQ ID NO: 187727 - RNA, 20 nt, Homo sapiens
cugucaauguccuacugaga

SEQ ID NO: 187728 - RNA, 16 nt, Homo sapiens
uuuaauguuuccuuua

SEQ ID NO: 187729 - RNA, 22 nt, Homo sapiens
uagucugaacaauauauacuua

SEQ ID NO: 187730 - RNA, 23 nt, Homo sapiens
guucauggauauguuauacugaa

SEQ ID NO: 187731 - RNA, 18 nt, Homo sapiens
ugguuguauuaaagcagg

SEQ ID NO: 187732 - RNA, 14 nt, Homo sapiens
cauaugaauaacau

SEQ ID NO: 187733 - RNA, 12 nt, Homo sapiens
acaaucuuguca

SEQ ID NO: 187734 - RNA, 16 nt, Homo sapiens
auaaaaguuggcucag

SEQ ID NO: 187735 - RNA, 16 nt, Homo sapiens
accaauauuguacagu

SEQ ID NO: 187736 - RNA, 22 nt, Homo sapiens
uccuaagccaugggagacacug

SEQ ID NO: 187737 - RNA, 23 nt, Homo sapiens
gaaaugcugguuuuucaguuuuc

SEQ ID NO: 187738 - RNA, 14 nt, Homo sapiens
ugccaaagaacuug

SEQ ID NO: 187739 - RNA, 22 nt, Homo sapiens
aagaugaaugagcaaaaccaaa

SEQ ID NO: 187740 - RNA, 15 nt, Homo sapiens
augagcaaaaccaaa

SEQ ID NO: 187741 - RNA, 23 nt, Homo sapiens
uaaaaguacauguuaaacuuacu

SEQ ID NO: 187742 - RNA, 14 nt, Homo sapiens
auugggccaaagaa

SEQ ID NO: 187743 - RNA, 13 nt, Homo sapiens
cuuaguugcugua

SEQ ID NO: 187744 - RNA, 20 nt, Homo sapiens
cuaagcacgggccauaugaa

SEQ ID NO: 187745 - RNA, 18 nt, Homo sapiens
aaguacauguuaaacuua

SEQ ID NO: 187746 - RNA, 21 nt, Homo sapiens
uaaaauaaucaguguuuccaa

SEQ ID NO: 187747 - RNA, 17 nt, Homo sapiens
uagcauuugucaacaaa

SEQ ID NO: 187748 - RNA, 13 nt, Homo sapiens
uugucaacaaagu

SEQ ID NO: 187749 - RNA, 17 nt, Homo sapiens
uaagaagugacucuugc

SEQ ID NO: 187750 - RNA, 15 nt, Homo sapiens
uugagggcaauggac

SEQ ID NO: 187751 - RNA, 19 nt, Homo sapiens
guguacagucuuguauuaa

SEQ ID NO: 187752 - RNA, 21 nt, Homo sapiens
aagaauuuuuauauccacuaa

SEQ ID NO: 187753 - RNA, 17 nt, Homo sapiens
gacucuuggcacagcau

SEQ ID NO: 187754 - RNA, 17 nt, Homo sapiens
auuuucuuuuuauacua

SEQ ID NO: 187755 - RNA, 17 nt, Homo sapiens
ucaaacuccugaccuca

SEQ ID NO: 187756 - RNA, 17 nt, Homo sapiens
ucaauguccuacugaga

SEQ ID NO: 187757 - RNA, 23 nt, Homo sapiens
uuccaaucuguccuguuacaaaa

SEQ ID NO: 187758 - RNA, 19 nt, Homo sapiens
guaaauauagcucagguag

SEQ ID NO: 187759 - RNA, 20 nt, Homo sapiens
ucuaaagauggaaaaaccac

SEQ ID NO: 187760 - RNA, 20 nt, Homo sapiens
ggcuggagugcaaugacaca

SEQ ID NO: 187761 - RNA, 22 nt, Homo sapiens
guaacuguuuugguuuugcuca

SEQ ID NO: 187762 - RNA, 12 nt, Homo sapiens
gcaaaaccaaau

SEQ ID NO: 187763 - RNA, 10 nt, Homo sapiens
ucccaaagag

SEQ ID NO: 187764 - RNA, 14 nt, Homo sapiens
uggcucaucucuuu

SEQ ID NO: 187765 - RNA, 16 nt, Homo sapiens
ugagucccagagccaa

SEQ ID NO: 187766 - RNA, 15 nt, Homo sapiens
aguuguuaauaaaag

SEQ ID NO: 187767 - RNA, 18 nt, Homo sapiens
ccuucuuuuuguucuuca

SEQ ID NO: 187768 - RNA, 16 nt, Homo sapiens
cuggcaagaugcuuua

SEQ ID NO: 187769 - RNA, 19 nt, Homo sapiens
caaaaccaaauauuccaga

SEQ ID NO: 187770 - RNA, 17 nt, Homo sapiens
cuucugaaaaaguaucc

SEQ ID NO: 187771 - RNA, 21 nt, Homo sapiens
ccuccaaguccacaguggaac

SEQ ID NO: 187772 - RNA, 11 nt, Homo sapiens
uugcuguagaa

SEQ ID NO: 187773 - RNA, 17 nt, Homo sapiens
caaucuguccuguuaca

SEQ ID NO: 187774 - RNA, 19 nt, Homo sapiens
gaguacaaaguaagccaug

SEQ ID NO: 187775 - RNA, 22 nt, Homo sapiens
acagucuuguauuaaguuguua

SEQ ID NO: 187776 - RNA, 12 nt, Homo sapiens
uuuuauauccac

SEQ ID NO: 187777 - RNA, 17 nt, Homo sapiens
ggcacacugagccagca

SEQ ID NO: 187778 - RNA, 19 nt, Homo sapiens
uugcuugcacaaaccaauu

SEQ ID NO: 187779 - RNA, 16 nt, Homo sapiens
uaugaauaguuuccaa

SEQ ID NO: 187780 - RNA, 18 nt, Homo sapiens
uguagaagauggcacuua

SEQ ID NO: 187781 - RNA, 14 nt, Homo sapiens
ugaaacaucauuuc

SEQ ID NO: 187782 - RNA, 12 nt, Homo sapiens
uucucugccuca

SEQ ID NO: 187783 - RNA, 19 nt, Homo sapiens
gucuuuggugaacauugca

SEQ ID NO: 187784 - RNA, 12 nt, Homo sapiens
caguguuuccaa

SEQ ID NO: 187785 - RNA, 19 nt, Homo sapiens
ggacuaaguguaccagaga

SEQ ID NO: 187786 - RNA, 16 nt, Homo sapiens
ucagggagugggcuaa

SEQ ID NO: 187787 - RNA, 14 nt, Homo sapiens
caguggaacuaaga

SEQ ID NO: 187788 - RNA, 20 nt, Homo sapiens
uuucuugucuauaaagcauu

SEQ ID NO: 187789 - RNA, 22 nt, Homo sapiens
caggcaugugccacccacccaa

SEQ ID NO: 187790 - RNA, 18 nt, Homo sapiens
agggcaauggacaaggaa

SEQ ID NO: 187791 - RNA, 23 nt, Homo sapiens
aagacgucacccuccauucugca

SEQ ID NO: 187792 - RNA, 20 nt, Homo sapiens
auacuagaguucauggauau

SEQ ID NO: 187793 - RNA, 12 nt, Homo sapiens
uuaacugaaugc

SEQ ID NO: 187794 - RNA, 22 nt, Homo sapiens
uggcuucuuuacuuaguucaag

SEQ ID NO: 187795 - RNA, 23 nt, Homo sapiens
agucuuguuguuuucccaaagag

SEQ ID NO: 187796 - RNA, 22 nt, Homo sapiens
gugaccugccaggcacacugag

SEQ ID NO: 187797 - RNA, 15 nt, Homo sapiens
aagccauguguucca

SEQ ID NO: 187798 - RNA, 9 nt, Homo sapiens
aaagugaug

SEQ ID NO: 187799 - RNA, 23 nt, Homo sapiens
ugcuucuuugaaacuuguaugaa

SEQ ID NO: 187800 - RNA, 19 nt, Homo sapiens
uagcggggaggggguuauc

SEQ ID NO: 187801 - RNA, 17 nt, Homo sapiens
cuucuuuuugcuucaaa

SEQ ID NO: 187802 - RNA, 15 nt, Homo sapiens
ugggauuacagggau

SEQ ID NO: 187803 - RNA, 13 nt, Homo sapiens
ucaucauuuccau

SEQ ID NO: 187804 - RNA, 22 nt, Homo sapiens
caauauauacuuauagaauuca

SEQ ID NO: 187805 - RNA, 22 nt, Homo sapiens
acagcauggagucacagccacu

SEQ ID NO: 187806 - RNA, 18 nt, Homo sapiens
cuauaagaugaaacauca

SEQ ID NO: 187807 - RNA, 13 nt, Homo sapiens
uggagucugucaa

SEQ ID NO: 187808 - RNA, 13 nt, Homo sapiens
caaagaaauuucc

SEQ ID NO: 187809 - RNA, 21 nt, Homo sapiens
aauaguuguuauucuguaguu

SEQ ID NO: 187810 - RNA, 20 nt, Homo sapiens
cugaacaauauauacuuaua

SEQ ID NO: 187811 - RNA, 23 nt, Homo sapiens
uuauucuguaguuucacucucau

SEQ ID NO: 187812 - RNA, 20 nt, Homo sapiens
ugcuggcaguggaacuaaga

SEQ ID NO: 187813 - RNA, 16 nt, Homo sapiens
gcagagaggcugaaua

SEQ ID NO: 187814 - RNA, 16 nt, Homo sapiens
uucccauuaaagaagu

SEQ ID NO: 187815 - RNA, 18 nt, Homo sapiens
ucugcauucucuagucag

SEQ ID NO: 187816 - RNA, 16 nt, Homo sapiens
ggggacacagcaucag

SEQ ID NO: 187817 - RNA, 12 nt, Homo sapiens
guaaaagccauc

SEQ ID NO: 187818 - RNA, 16 nt, Homo sapiens
acucaggcagaucuca

SEQ ID NO: 187819 - RNA, 23 nt, Homo sapiens
cuagugcaguuuuuuucuugucu

SEQ ID NO: 187820 - RNA, 22 nt, Homo sapiens
ucaaagaaauuuccacucaggu

SEQ ID NO: 187821 - RNA, 17 nt, Homo sapiens
uaacaggagugccacuu

SEQ ID NO: 187822 - RNA, 22 nt, Homo sapiens
ggagucuuagagcuuuaccuaa

SEQ ID NO: 187823 - RNA, 22 nt, Homo sapiens
uaggaagaauuuuuauauccac

SEQ ID NO: 187824 - RNA, 20 nt, Homo sapiens
uagauaaucucuccauuccc

SEQ ID NO: 187825 - RNA, 20 nt, Homo sapiens
aaucuuucugcagaaacaga

SEQ ID NO: 187826 - RNA, 14 nt, Homo sapiens
uagcuccacaaagc

SEQ ID NO: 187827 - RNA, 18 nt, Homo sapiens
uuuaaaugaaagugagac

SEQ ID NO: 187828 - RNA, 20 nt, Homo sapiens
cuauaagaugaaacaucauu

SEQ ID NO: 187829 - RNA, 15 nt, Homo sapiens
acucaucauuuccau

SEQ ID NO: 187830 - RNA, 21 nt, Homo sapiens
cagaaucucucuucuuuucaa

SEQ ID NO: 187831 - RNA, 16 nt, Homo sapiens
gcccagccucaucucu

SEQ ID NO: 187832 - RNA, 13 nt, Homo sapiens
guucucugccuca

SEQ ID NO: 187833 - RNA, 19 nt, Homo sapiens
cuccacaaagccaaucuca

SEQ ID NO: 187834 - RNA, 17 nt, Homo sapiens
uuuaauguuuccuuuaa

SEQ ID NO: 187835 - RNA, 17 nt, Homo sapiens
gaacuccuuggcuucuu

SEQ ID NO: 187836 - RNA, 23 nt, Homo sapiens
uaaaaaaaaaaaaaaaagugaug

SEQ ID NO: 187837 - RNA, 15 nt, Homo sapiens
acagcaucagcucaa

SEQ ID NO: 187838 - RNA, 21 nt, Homo sapiens
ucugaacaauauauacuuaua

SEQ ID NO: 187839 - RNA, 16 nt, Homo sapiens
uagaaaagggaacuga

SEQ ID NO: 187840 - RNA, 16 nt, Homo sapiens
gccacuguuaagccau

SEQ ID NO: 187841 - RNA, 18 nt, Homo sapiens
ccaaguccacaguggaac

SEQ ID NO: 187842 - RNA, 15 nt, Homo sapiens
guugcuguaugucuc

SEQ ID NO: 187843 - RNA, 22 nt, Homo sapiens
agagagaaaaguaacuguuuug

SEQ ID NO: 187844 - RNA, 19 nt, Homo sapiens
caauauauacuuauagaau

SEQ ID NO: 187845 - RNA, 12 nt, Homo sapiens
cacugccaaaga

SEQ ID NO: 187846 - RNA, 18 nt, Homo sapiens
cuuucccuuaaauaacac

SEQ ID NO: 187847 - RNA, 20 nt, Homo sapiens
gucugucaauguccuacuga

SEQ ID NO: 187848 - RNA, 14 nt, Homo sapiens
aaagaacuuggaaa

SEQ ID NO: 187849 - RNA, 19 nt, Homo sapiens
aagggcuuggacucaagca

SEQ ID NO: 187850 - RNA, 12 nt, Homo sapiens
acacagcaucag

SEQ ID NO: 187851 - RNA, 17 nt, Homo sapiens
cuucuaaguaaauacaa

SEQ ID NO: 187852 - RNA, 17 nt, Homo sapiens
ucaaucccucaaaacaa

SEQ ID NO: 187853 - RNA, 18 nt, Homo sapiens
ccgacugccaucuuggac

SEQ ID NO: 187854 - RNA, 21 nt, Homo sapiens
uaagaagcagauaaugguguu

SEQ ID NO: 187855 - RNA, 15 nt, Homo sapiens
ucuguucuuccauca

SEQ ID NO: 187856 - RNA, 22 nt, Homo sapiens
uggauuugucuuuggugaacau

SEQ ID NO: 187857 - RNA, 14 nt, Homo sapiens
ccacugccaaagaa

SEQ ID NO: 187858 - RNA, 15 nt, Homo sapiens
ccaaauuauggcaaa

SEQ ID NO: 187859 - RNA, 22 nt, Homo sapiens
uuaucauuaaaaggaaagcaga

SEQ ID NO: 187860 - RNA, 9 nt, Homo sapiens
aaagacaga

SEQ ID NO: 187861 - RNA, 14 nt, Homo sapiens
acuaagaagcagau

SEQ ID NO: 187862 - RNA, 21 nt, Homo sapiens
aacuucaacguaagacugugu

SEQ ID NO: 187863 - RNA, 13 nt, Homo sapiens
uguguuucuuuag

SEQ ID NO: 187864 - RNA, 22 nt, Homo sapiens
ugucaauguccuacugagacag

SEQ ID NO: 187865 - RNA, 22 nt, Homo sapiens
gccauaaaggggagggacucau

SEQ ID NO: 187866 - RNA, 19 nt, Homo sapiens
uuggcuaguaaaagccauc

SEQ ID NO: 187867 - RNA, 18 nt, Homo sapiens
gccagagcaaacagaaaa

SEQ ID NO: 187868 - RNA, 24 nt, Homo sapiens
agugagacuuugaggguguauauu

SEQ ID NO: 187869 - RNA, 20 nt, Homo sapiens
ucaaaaaaaaaaaaauguga

SEQ ID NO: 187870 - RNA, 14 nt, Homo sapiens
cuagucaguuggcu

SEQ ID NO: 187871 - RNA, 17 nt, Homo sapiens
aucccgucgacguagaa

SEQ ID NO: 187872 - RNA, 21 nt, Homo sapiens
uaagaucguucucugccucac

SEQ ID NO: 187873 - RNA, 21 nt, Homo sapiens
aaaaagcccuuaaaaauaugu

SEQ ID NO: 187874 - RNA, 23 nt, Homo sapiens
gagacagcacagccaaccuagcu

SEQ ID NO: 187875 - RNA, 14 nt, Homo sapiens
auagaauucaguca

SEQ ID NO: 187876 - RNA, 16 nt, Homo sapiens
uauugaacuuaugcaa

SEQ ID NO: 187877 - RNA, 20 nt, Homo sapiens
caggguuucaccauguuggc

SEQ ID NO: 187878 - RNA, 19 nt, Homo sapiens
agauaaucucuccauuccc

SEQ ID NO: 187879 - RNA, 15 nt, Homo sapiens
ggcuggagugcaaug

SEQ ID NO: 187880 - RNA, 13 nt, Homo sapiens
cagcuguuuaugc

SEQ ID NO: 187881 - RNA, 21 nt, Homo sapiens
ccgccacccucccacugccaa

SEQ ID NO: 187882 - RNA, 21 nt, Homo sapiens
ccuaaaaggcagaguacaaag

SEQ ID NO: 187883 - RNA, 11 nt, Homo sapiens
aguaagccaug

SEQ ID NO: 187884 - RNA, 17 nt, Homo sapiens
cacccucccacugccaa

SEQ ID NO: 187885 - RNA, 19 nt, Homo sapiens
aaauuucucuacugucuca

SEQ ID NO: 187886 - RNA, 16 nt, Homo sapiens
agcuagcaacauuugu

SEQ ID NO: 187887 - RNA, 14 nt, Homo sapiens
ucuaaguaaauaca

SEQ ID NO: 187888 - RNA, 23 nt, Homo sapiens
aaugucuuuauuaaauguagaaa

SEQ ID NO: 187889 - RNA, 21 nt, Homo sapiens
ggcuucagucuuuuccaugaa

SEQ ID NO: 187890 - RNA, 16 nt, Homo sapiens
ugcaaugacacagucu

SEQ ID NO: 187891 - RNA, 13 nt, Homo sapiens
cuaaguaaauaca

SEQ ID NO: 187892 - RNA, 22 nt, Homo sapiens
ggcuaagaagugacucuugcaa

SEQ ID NO: 187893 - RNA, 18 nt, Homo sapiens
auugcaauagaaauccaa

SEQ ID NO: 187894 - RNA, 18 nt, Homo sapiens
gacgugauuuugcuguag

SEQ ID NO: 187895 - RNA, 22 nt, Homo sapiens
aauguuuaugaauaguuuccaa

SEQ ID NO: 187896 - RNA, 18 nt, Homo sapiens
gucugauuguagcuauga

SEQ ID NO: 187897 - RNA, 16 nt, Homo sapiens
cagcauggagucacag

SEQ ID NO: 187898 - RNA, 23 nt, Homo sapiens
uaaaaguuggcucaggagucuua

SEQ ID NO: 187899 - RNA, 21 nt, Homo sapiens
gaguuauuuuuauuuauuuaa

SEQ ID NO: 187900 - RNA, 15 nt, Homo sapiens
gaccauuagcauuug

SEQ ID NO: 187901 - RNA, 13 nt, Homo sapiens
cucuuggguucaa

SEQ ID NO: 187902 - RNA, 13 nt, Homo sapiens
ugggauuacaggg

SEQ ID NO: 187903 - RNA, 15 nt, Homo sapiens
auucucuagucaguu

SEQ ID NO: 187904 - RNA, 14 nt, Homo sapiens
cucaucauuuccau

SEQ ID NO: 187905 - RNA, 19 nt, Homo sapiens
cucuggccuccaaguccac

SEQ ID NO: 187906 - RNA, 19 nt, Homo sapiens
aguuuauacccguuucaca

SEQ ID NO: 187907 - RNA, 15 nt, Homo sapiens
uccugcuucugauau

SEQ ID NO: 187908 - RNA, 23 nt, Homo sapiens
ccacccccaaauuuucuuuuuau

SEQ ID NO: 187909 - RNA, 16 nt, Homo sapiens
gagggaaaacagaaaa

SEQ ID NO: 187910 - RNA, 18 nt, Homo sapiens
ucucgugguaggacugua

SEQ ID NO: 187911 - RNA, 19 nt, Homo sapiens
aggauuugggcucuuggaa

SEQ ID NO: 187912 - RNA, 22 nt, Homo sapiens
cuuguuagugcacagcacaaau

SEQ ID NO: 187913 - RNA, 16 nt, Homo sapiens
caaauauuccagagac

SEQ ID NO: 187914 - RNA, 16 nt, Homo sapiens
agugauucuccugccu

SEQ ID NO: 187915 - RNA, 21 nt, Homo sapiens
gauaggguuucuaaugguuau

SEQ ID NO: 187916 - RNA, 16 nt, Homo sapiens
auuuuaauguuuccuu

SEQ ID NO: 187917 - RNA, 19 nt, Homo sapiens
agauaaccucaagucacau

SEQ ID NO: 187918 - RNA, 13 nt, Homo sapiens
cauuuguuuucac

SEQ ID NO: 187919 - RNA, 16 nt, Homo sapiens
uauaaaagacugacca

SEQ ID NO: 187920 - RNA, 16 nt, Homo sapiens
ugaaugccacucugua

SEQ ID NO: 187921 - RNA, 22 nt, Homo sapiens
uuaaaaaauggacucuugaaau

SEQ ID NO: 187922 - RNA, 19 nt, Homo sapiens
cacuguguuuuuuuguaua

SEQ ID NO: 187923 - RNA, 18 nt, Homo sapiens
gcaguuuuuuucuugucu

SEQ ID NO: 187924 - RNA, 15 nt, Homo sapiens
uuggugaacauugca

SEQ ID NO: 187925 - RNA, 20 nt, Homo sapiens
caaguucuuaguugcuguau

SEQ ID NO: 187926 - RNA, 23 nt, Homo sapiens
ucaaaugagaaaaugucuuuauu

SEQ ID NO: 187927 - RNA, 18 nt, Homo sapiens
ggauacgacaacuugcac

SEQ ID NO: 187928 - RNA, 17 nt, Homo sapiens
ugggagacacugaugua

SEQ ID NO: 187929 - RNA, 21 nt, Homo sapiens
cugaugcuggggacacagcau

SEQ ID NO: 187930 - RNA, 21 nt, Homo sapiens
ucaugggguggacucuaacag

SEQ ID NO: 187931 - RNA, 23 nt, Homo sapiens
ucuuaagacgugauuuugcugua

SEQ ID NO: 187932 - RNA, 13 nt, Homo sapiens
gaacuuaugcaaa

SEQ ID NO: 187933 - RNA, 16 nt, Homo sapiens
cacccuccauucugca

SEQ ID NO: 187934 - RNA, 15 nt, Homo sapiens
aucuaaaaucugcua

SEQ ID NO: 187935 - RNA, 23 nt, Homo sapiens
ccuaagccaugggagacacugau

SEQ ID NO: 187936 - RNA, 23 nt, Homo sapiens
ugucucgugguaggacuguagaa

SEQ ID NO: 187937 - RNA, 21 nt, Homo sapiens
gucucaaacuccugaccucaa

SEQ ID NO: 187938 - RNA, 18 nt, Homo sapiens
cagaaagcuagaaagugu

SEQ ID NO: 187939 - RNA, 22 nt, Homo sapiens
caaagaacuuggaaauagugau

SEQ ID NO: 187940 - RNA, 22 nt, Homo sapiens
ccugaccucaaguaauccaccu

SEQ ID NO: 187941 - RNA, 17 nt, Homo sapiens
uucaacguaagacugug

SEQ ID NO: 187942 - RNA, 18 nt, Homo sapiens
acugaauuuugucuuuau

SEQ ID NO: 187943 - RNA, 19 nt, Homo sapiens
guuguuaauaaaaguacau

SEQ ID NO: 187944 - RNA, 22 nt, Homo sapiens
cagucuucuuccaugucuauua

SEQ ID NO: 187945 - RNA, 19 nt, Homo sapiens
gacuaaguguaccagagaa

SEQ ID NO: 187946 - RNA, 17 nt, Homo sapiens
agccccagccuaggaaa

SEQ ID NO: 187947 - RNA, 12 nt, Homo sapiens
agaaagugaucc

SEQ ID NO: 187948 - RNA, 17 nt, Homo sapiens
ggcucucccagccaggu

SEQ ID NO: 187949 - RNA, 14 nt, Homo sapiens
ugcacguauuuuaa

SEQ ID NO: 187950 - RNA, 13 nt, Homo sapiens
caucauuuccauu

SEQ ID NO: 187951 - RNA, 15 nt, Homo sapiens
ccagagcaaacagaa

SEQ ID NO: 187952 - RNA, 21 nt, Homo sapiens
gaguucauggauauguuauac

SEQ ID NO: 187953 - RNA, 19 nt, Homo sapiens
cgugguaggacuguagaaa

SEQ ID NO: 187954 - RNA, 23 nt, Homo sapiens
caaucaguagccagcaucugccu

SEQ ID NO: 187955 - RNA, 12 nt, Homo sapiens
acuuaguucaag

SEQ ID NO: 187956 - RNA, 14 nt, Homo sapiens
agcuggagucuguc

SEQ ID NO: 187957 - RNA, 13 nt, Homo sapiens
aaaaacauucuua

SEQ ID NO: 187958 - RNA, 17 nt, Homo sapiens
ggcugugccaucagcuc

SEQ ID NO: 187959 - RNA, 13 nt, Homo sapiens
caaaguaagccau

SEQ ID NO: 187960 - RNA, 11 nt, Homo sapiens
agaaguggaag

SEQ ID NO: 187961 - RNA, 15 nt, Homo sapiens
uccuccccuguucau

SEQ ID NO: 187962 - RNA, 15 nt, Homo sapiens
uuuucaaugucuaaa

SEQ ID NO: 187963 - RNA, 13 nt, Homo sapiens
aagcauucuucaa

SEQ ID NO: 187964 - RNA, 15 nt, Homo sapiens
ccugccaggcacacu

SEQ ID NO: 187965 - RNA, 14 nt, Homo sapiens
uaguggugacugug

SEQ ID NO: 187966 - RNA, 19 nt, Homo sapiens
acaaucuugucauacuuga

SEQ ID NO: 187967 - RNA, 22 nt, Homo sapiens
aaccguaugagggaacugugua

SEQ ID NO: 187968 - RNA, 23 nt, Homo sapiens
gccuuccuggaggugacacuuga

SEQ ID NO: 187969 - RNA, 21 nt, Homo sapiens
gcagaguacaaaguaagccau

SEQ ID NO: 187970 - RNA, 18 nt, Homo sapiens
gaugaaacaucauuucaa

SEQ ID NO: 187971 - RNA, 22 nt, Homo sapiens
cuagaguucauggauauguuau

SEQ ID NO: 187972 - RNA, 15 nt, Homo sapiens
cccacccaacuaauu

SEQ ID NO: 187973 - RNA, 22 nt, Homo sapiens
ccauacuagaguucauggauau

SEQ ID NO: 187974 - RNA, 16 nt, Homo sapiens
agucuuguauuaaguu

SEQ ID NO: 187975 - RNA, 14 nt, Homo sapiens
auuguagcuaugau

SEQ ID NO: 187976 - RNA, 22 nt, Homo sapiens
guucauggauauguuauacuga

SEQ ID NO: 187977 - RNA, 20 nt, Homo sapiens
aagaugaaacaucauuucaa

SEQ ID NO: 187978 - RNA, 22 nt, Homo sapiens
guuuaugcauagauaaucucuc

SEQ ID NO: 187979 - RNA, 13 nt, Homo sapiens
auucugcacucag

SEQ ID NO: 187980 - RNA, 19 nt, Homo sapiens
gaccugccaggcacacuga

SEQ ID NO: 187981 - RNA, 23 nt, Homo sapiens
ccaguaguggugacugugggcuc

SEQ ID NO: 187982 - RNA, 21 nt, Homo sapiens
ugccacucuguaauugcaaaa

SEQ ID NO: 187983 - RNA, 15 nt, Homo sapiens
cuagucaguuggcua

SEQ ID NO: 187984 - RNA, 19 nt, Homo sapiens
uuucuuucaaagaagccag

SEQ ID NO: 187985 - RNA, 11 nt, Homo sapiens
gaaaacagaaa

SEQ ID NO: 187986 - RNA, 22 nt, Homo sapiens
auauacuuauagaauucaguca

SEQ ID NO: 187987 - RNA, 20 nt, Homo sapiens
ggcacagcauggagucacag

SEQ ID NO: 187988 - RNA, 15 nt, Homo sapiens
gcaccuacaguguac

SEQ ID NO: 187989 - RNA, 23 nt, Homo sapiens
cuuuuuuuuuuuuuaaagacaga

SEQ ID NO: 187990 - RNA, 15 nt, Homo sapiens
agucugaacaauaua

SEQ ID NO: 187991 - RNA, 19 nt, Homo sapiens
ucaagugauucuccugccu

SEQ ID NO: 187992 - RNA, 19 nt, Homo sapiens
caaucucaaucccucaaaa

SEQ ID NO: 187993 - RNA, 16 nt, Homo sapiens
gaaguuuucuugacuu

SEQ ID NO: 187994 - RNA, 15 nt, Homo sapiens
aaaaguuuuguaaau

SEQ ID NO: 187995 - RNA, 16 nt, Homo sapiens
ccaggcuggagugcaa

SEQ ID NO: 187996 - RNA, 22 nt, Homo sapiens
gaaauagugauuuccacaguga

SEQ ID NO: 187997 - RNA, 16 nt, Homo sapiens
ugaaguuuaauugacu

SEQ ID NO: 187998 - RNA, 20 nt, Homo sapiens
uccuuggcuucuuuacuuag

SEQ ID NO: 187999 - RNA, 20 nt, Homo sapiens
guagaaagugauccauacuu

SEQ ID NO: 188000 - RNA, 14 nt, Homo sapiens
ccacaguggaacca

SEQ ID NO: 188001 - RNA, 19 nt, Homo sapiens
uccuaagccaugggagaca

SEQ ID NO: 188002 - RNA, 13 nt, Homo sapiens
ucuuuuugcuuca

SEQ ID NO: 188003 - RNA, 14 nt, Homo sapiens
gauuuccacaguga

SEQ ID NO: 188004 - RNA, 11 nt, Homo sapiens
caaaaccaaau

SEQ ID NO: 188005 - RNA, 21 nt, Homo sapiens
ucugaggcuucuggggcuuca

SEQ ID NO: 188006 - RNA, 14 nt, Homo sapiens
ucuuuuccaugaac

SEQ ID NO: 188007 - RNA, 16 nt, Homo sapiens
acccucccacugccaa

SEQ ID NO: 188008 - RNA, 13 nt, Homo sapiens
agaagaugaauga

SEQ ID NO: 188009 - RNA, 18 nt, Homo sapiens
uuaagaaauucacuuccc

SEQ ID NO: 188010 - RNA, 19 nt, Homo sapiens
cuagcaacauuuguuuuag

SEQ ID NO: 188011 - RNA, 21 nt, Homo sapiens
auuugucaacaaagucaccca

SEQ ID NO: 188012 - RNA, 16 nt, Homo sapiens
uggcaggacagcuccu

SEQ ID NO: 188013 - RNA, 17 nt, Homo sapiens
cauggagucacagccac

SEQ ID NO: 188014 - RNA, 18 nt, Homo sapiens
cacucuguaauugcaaaa

SEQ ID NO: 188015 - RNA, 10 nt, Homo sapiens
aaacuuguau

SEQ ID NO: 188016 - RNA, 20 nt, Homo sapiens
cugaccaauauuguacaguu

SEQ ID NO: 188017 - RNA, 18 nt, Homo sapiens
ugugaaguuuaauugacu

SEQ ID NO: 188018 - RNA, 13 nt, Homo sapiens
caaaaccaaauau

SEQ ID NO: 188019 - RNA, 12 nt, Homo sapiens
ugaacauuccag

SEQ ID NO: 188020 - RNA, 19 nt, Homo sapiens
accaaauacuuuaauguau

SEQ ID NO: 188021 - RNA, 20 nt, Homo sapiens
gggacuaaguguaccagaga

SEQ ID NO: 188022 - RNA, 18 nt, Homo sapiens
auuagcuccacaaagcca

SEQ ID NO: 188023 - RNA, 14 nt, Homo sapiens
cuuccaucaccucc

SEQ ID NO: 188024 - RNA, 16 nt, Homo sapiens
gcuccauucaaaguga

SEQ ID NO: 188025 - RNA, 16 nt, Homo sapiens
cagccagguucugacu

SEQ ID NO: 188026 - RNA, 12 nt, Homo sapiens
ugaggguguaua

SEQ ID NO: 188027 - RNA, 15 nt, Homo sapiens
aauauagcucaggua

SEQ ID NO: 188028 - RNA, 15 nt, Homo sapiens
cagcauggagucaca

SEQ ID NO: 188029 - RNA, 15 nt, Homo sapiens
caaauauuccagaga

SEQ ID NO: 188030 - RNA, 22 nt, Homo sapiens
auuaaauguagaaagugaucca

SEQ ID NO: 188031 - RNA, 18 nt, Homo sapiens
uggaaauagugauuucca

SEQ ID NO: 188032 - RNA, 19 nt, Homo sapiens
agacgugauuuugcuguag

SEQ ID NO: 188033 - RNA, 16 nt, Homo sapiens
gcuaguaaaagccauc

SEQ ID NO: 188034 - RNA, 23 nt, Homo sapiens
cuuagagcuuuaccuaaauauga

SEQ ID NO: 188035 - RNA, 15 nt, Homo sapiens
aauaaccauugucau

SEQ ID NO: 188036 - RNA, 23 nt, Homo sapiens
aagaauuuuuauauccacuaaaa

SEQ ID NO: 188037 - RNA, 15 nt, Homo sapiens
aaauuucucuacugu

SEQ ID NO: 188038 - RNA, 21 nt, Homo sapiens
ggaauccuggggaacauagaa

SEQ ID NO: 188039 - RNA, 13 nt, Homo sapiens
caaagaagccagc

SEQ ID NO: 188040 - RNA, 21 nt, Homo sapiens
uaguggugacugugggcucca

SEQ ID NO: 188041 - RNA, 15 nt, Homo sapiens
acaaucuugucauac

SEQ ID NO: 188042 - RNA, 18 nt, Homo sapiens
aaguaauccaccugccuc

SEQ ID NO: 188043 - RNA, 22 nt, Homo sapiens
uugucaacaaagucacccacuu

SEQ ID NO: 188044 - RNA, 21 nt, Homo sapiens
caaucugaaacagcuucaugg

SEQ ID NO: 188045 - RNA, 15 nt, Homo sapiens
gauucuccugccuca

SEQ ID NO: 188046 - RNA, 15 nt, Homo sapiens
cagagccucaaauga

SEQ ID NO: 188047 - RNA, 14 nt, Homo sapiens
acuuauuuauauaa

SEQ ID NO: 188048 - RNA, 13 nt, Homo sapiens
gucuuguguuucu

SEQ ID NO: 188049 - RNA, 20 nt, Homo sapiens
uguucugguuacuguucuaa

SEQ ID NO: 188050 - RNA, 20 nt, Homo sapiens
uauacccguuucacaugcuu

SEQ ID NO: 188051 - RNA, 20 nt, Homo sapiens
aaaauaaucaguguuuccaa

SEQ ID NO: 188052 - RNA, 18 nt, Homo sapiens
acacaaucugaaacagcu

SEQ ID NO: 188053 - RNA, 17 nt, Homo sapiens
cuucagucuuuuccaug

SEQ ID NO: 188054 - RNA, 19 nt, Homo sapiens
cuuaugcaaauaaccauug

SEQ ID NO: 188055 - RNA, 22 nt, Homo sapiens
gcagcgauuaauaacaggcaaa

SEQ ID NO: 188056 - RNA, 16 nt, Homo sapiens
acaagaacacugaaaa

SEQ ID NO: 188057 - RNA, 15 nt, Homo sapiens
gaaauggggaacuac

SEQ ID NO: 188058 - RNA, 22 nt, Homo sapiens
acuuauagaauucagucaaaga

SEQ ID NO: 188059 - RNA, 18 nt, Homo sapiens
aacaggaauucugaauua

SEQ ID NO: 188060 - RNA, 15 nt, Homo sapiens
uguccuguuacaaaa

SEQ ID NO: 188061 - RNA, 21 nt, Homo sapiens
uggcaguggaacuaagaaagc

SEQ ID NO: 188062 - RNA, 17 nt, Homo sapiens
cacaaaagucuacuuua

SEQ ID NO: 188063 - RNA, 21 nt, Homo sapiens
agccaaccuagcuagcaacau

SEQ ID NO: 188064 - RNA, 23 nt, Homo sapiens
acccuucuccuuagaaguggaag

SEQ ID NO: 188065 - RNA, 15 nt, Homo sapiens
cacagucuuggcuca

SEQ ID NO: 188066 - RNA, 15 nt, Homo sapiens
acacagcaucagcuc

SEQ ID NO: 188067 - RNA, 22 nt, Homo sapiens
ggagaaauaugguacucauuaa

SEQ ID NO: 188068 - RNA, 13 nt, Homo sapiens
auguguuccaagg

SEQ ID NO: 188069 - RNA, 17 nt, Homo sapiens
guacaaaguaagccaug

SEQ ID NO: 188070 - RNA, 20 nt, Homo sapiens
accaaauacuuuaauguaua

SEQ ID NO: 188071 - RNA, 19 nt, Homo sapiens
gccacccucccacugccaa

SEQ ID NO: 188072 - RNA, 15 nt, Homo sapiens
ccacugccaaagaac

SEQ ID NO: 188073 - RNA, 18 nt, Homo sapiens
acauuuguuuguggucua

SEQ ID NO: 188074 - RNA, 11 nt, Homo sapiens
cacaugcuuuu

SEQ ID NO: 188075 - RNA, 12 nt, Homo sapiens
gaccaggucuca

SEQ ID NO: 188076 - RNA, 19 nt, Homo sapiens
ggaauuucuguucuuccau

SEQ ID NO: 188077 - RNA, 16 nt, Homo sapiens
aacuuacuuaguguua

SEQ ID NO: 188078 - RNA, 15 nt, Homo sapiens
uaacauggugugcuu

SEQ ID NO: 188079 - RNA, 22 nt, Homo sapiens
aacauuuguuuuagucugaaca

SEQ ID NO: 188080 - RNA, 22 nt, Homo sapiens
aaacccaguaguggugacugug

SEQ ID NO: 188081 - RNA, 13 nt, Homo sapiens
uucuucuuuuugc

SEQ ID NO: 188082 - RNA, 14 nt, Homo sapiens
auaucacauuccca

SEQ ID NO: 188083 - RNA, 16 nt, Homo sapiens
cucaaagaaauuucca

SEQ ID NO: 188084 - RNA, 16 nt, Homo sapiens
uacagucuuguauuaa

SEQ ID NO: 188085 - RNA, 19 nt, Homo sapiens
accugccaggcacacugag

SEQ ID NO: 188086 - RNA, 22 nt, Homo sapiens
augaaucaaucaauucauaucu

SEQ ID NO: 188087 - RNA, 16 nt, Homo sapiens
uagcuuauacaaaaca

SEQ ID NO: 188088 - RNA, 21 nt, Homo sapiens
aauguuuuagaaugagacuua

SEQ ID NO: 188089 - RNA, 22 nt, Homo sapiens
ucauucugcauucucuagucag

SEQ ID NO: 188090 - RNA, 18 nt, Homo sapiens
gaucguucucugccucac

SEQ ID NO: 188091 - RNA, 22 nt, Homo sapiens
uguacaguuuuuauugcuuguu

SEQ ID NO: 188092 - RNA, 21 nt, Homo sapiens
ugaccugccaggcacacugag

SEQ ID NO: 188093 - RNA, 22 nt, Homo sapiens
cugagucccuuagccaagcagu

SEQ ID NO: 188094 - RNA, 14 nt, Homo sapiens
ccaaauuauggcaa

SEQ ID NO: 188095 - RNA, 23 nt, Homo sapiens
ccuaggaaagccaguuacauaaa

SEQ ID NO: 188096 - RNA, 20 nt, Homo sapiens
gauuuugaaauuuuuauuaa

SEQ ID NO: 188097 - RNA, 16 nt, Homo sapiens
cuuaaaauagccauaa

SEQ ID NO: 188098 - RNA, 14 nt, Homo sapiens
cagcuccuggacca

SEQ ID NO: 188099 - RNA, 17 nt, Homo sapiens
agaaaguggcuugaaau

SEQ ID NO: 188100 - RNA, 20 nt, Homo sapiens
uuaauaggguaaauucucua

SEQ ID NO: 188101 - RNA, 22 nt, Homo sapiens
ucaaagugagcuccuaagccau

SEQ ID NO: 188102 - RNA, 22 nt, Homo sapiens
ucaagacgucacccuccauucu

SEQ ID NO: 188103 - RNA, 13 nt, Homo sapiens
uuuugcuguagaa

SEQ ID NO: 188104 - RNA, 15 nt, Homo sapiens
aagaauguuuaugaa

SEQ ID NO: 188105 - RNA, 21 nt, Homo sapiens
cagguucugacucuuggcaca

SEQ ID NO: 188106 - RNA, 18 nt, Homo sapiens
cagggagugggcuaagca

SEQ ID NO: 188107 - RNA, 20 nt, Homo sapiens
auuccacaaccugguuugcc

SEQ ID NO: 188108 - RNA, 15 nt, Homo sapiens
aauugggccaaagaa

SEQ ID NO: 188109 - RNA, 22 nt, Homo sapiens
ugauuucagcaccuacagugua

SEQ ID NO: 188110 - RNA, 17 nt, Homo sapiens
ucagucuuuuccaugaa

SEQ ID NO: 188111 - RNA, 17 nt, Homo sapiens
agguuucucaaagaaau

SEQ ID NO: 188112 - RNA, 19 nt, Homo sapiens
cucgagguuucucaaagaa

SEQ ID NO: 188113 - RNA, 17 nt, Homo sapiens
cuccuggaccaggucuc

SEQ ID NO: 188114 - RNA, 16 nt, Homo sapiens
cccuucuuuucugacu

SEQ ID NO: 188115 - RNA, 16 nt, Homo sapiens
cauaacaggagugcca

SEQ ID NO: 188116 - RNA, 20 nt, Homo sapiens
uguuaauaaaaguacauguu

SEQ ID NO: 188117 - RNA, 21 nt, Homo sapiens
uguguuuuuaauaaagacagg

SEQ ID NO: 188118 - RNA, 18 nt, Homo sapiens
acaaauugggccaaagaa

SEQ ID NO: 188119 - RNA, 15 nt, Homo sapiens
uacuuuaauguauaa

SEQ ID NO: 188120 - RNA, 21 nt, Homo sapiens
guauaguuaaccacuaccgaa

SEQ ID NO: 188121 - RNA, 17 nt, Homo sapiens
cuggccuccaaguccac

SEQ ID NO: 188122 - RNA, 12 nt, Homo sapiens
acugagccagca

SEQ ID NO: 188123 - RNA, 14 nt, Homo sapiens
caauagauauuuac

SEQ ID NO: 188124 - RNA, 12 nt, Homo sapiens
auguaucucagg

SEQ ID NO: 188125 - RNA, 12 nt, Homo sapiens
uggcucaucucu

SEQ ID NO: 188126 - RNA, 15 nt, Homo sapiens
aguugggugauaugu

SEQ ID NO: 188127 - RNA, 13 nt, Homo sapiens
ugcaauguuuuag

SEQ ID NO: 188128 - RNA, 14 nt, Homo sapiens
uccccuucacuccc

SEQ ID NO: 188129 - RNA, 18 nt, Homo sapiens
gcaaacagaaaaagaagg

SEQ ID NO: 188130 - RNA, 13 nt, Homo sapiens
cagccucaucucu

SEQ ID NO: 188131 - RNA, 22 nt, Homo sapiens
caaaaccaaauauuccagagac

SEQ ID NO: 188132 - RNA, 19 nt, Homo sapiens
cgugauuuugcuguagaag

SEQ ID NO: 188133 - RNA, 16 nt, Homo sapiens
uaaugguuauauguau

SEQ ID NO: 188134 - RNA, 16 nt, Homo sapiens
ggaaagccaguuacau

SEQ ID NO: 188135 - RNA, 13 nt, Homo sapiens
ccaggggagaccc

SEQ ID NO: 188136 - RNA, 15 nt, Homo sapiens
cuuacuuaguguuau

SEQ ID NO: 188137 - RNA, 14 nt, Homo sapiens
uccaaagacauguu

SEQ ID NO: 188138 - RNA, 13 nt, Homo sapiens
gccauaugaauaa

SEQ ID NO: 188139 - RNA, 14 nt, Homo sapiens
cuuagaaagucuga

SEQ ID NO: 188140 - RNA, 15 nt, Homo sapiens
uggguucaagugauu

SEQ ID NO: 188141 - RNA, 19 nt, Homo sapiens
cucugagucccagagccaa

SEQ ID NO: 188142 - RNA, 14 nt, Homo sapiens
ugaauaguuuccaa

SEQ ID NO: 188143 - RNA, 18 nt, Homo sapiens
aaggacacuagaagauuu

SEQ ID NO: 188144 - RNA, 13 nt, Homo sapiens
cacuuuucaaugu

SEQ ID NO: 188145 - RNA, 13 nt, Homo sapiens
agagcuuuaccua

SEQ ID NO: 188146 - RNA, 23 nt, Homo sapiens
aaucaguguuuccaaucuguccu

SEQ ID NO: 188147 - RNA, 14 nt, Homo sapiens
caguguacagucuu

SEQ ID NO: 188148 - RNA, 16 nt, Homo sapiens
guggauuggauuuguc

SEQ ID NO: 188149 - RNA, 20 nt, Homo sapiens
uggggacacagcaucagcuc

SEQ ID NO: 188150 - RNA, 23 nt, Homo sapiens
agccaccgcgcccagccucaucu

SEQ ID NO: 188151 - RNA, 15 nt, Homo sapiens
gcuagggaauaucaa

SEQ ID NO: 188152 - RNA, 22 nt, Homo sapiens
agaagauggcacuuauaaccaa

SEQ ID NO: 188153 - RNA, 14 nt, Homo sapiens
acguaagacugugu

SEQ ID NO: 188154 - RNA, 13 nt, Homo sapiens
gacucuaacagua

SEQ ID NO: 188155 - RNA, 18 nt, Homo sapiens
cucaaagaaauuuccacu

SEQ ID NO: 188156 - RNA, 18 nt, Homo sapiens
ccagagcguguagugaau

SEQ ID NO: 188157 - RNA, 18 nt, Homo sapiens
aauguccuacugagacag

SEQ ID NO: 188158 - RNA, 19 nt, Homo sapiens
accuguggccaaguucuua

SEQ ID NO: 188159 - RNA, 19 nt, Homo sapiens
cccuguucauucugcauuc

SEQ ID NO: 188160 - RNA, 18 nt, Homo sapiens
uagcauuugucaacaaag

SEQ ID NO: 188161 - RNA, 20 nt, Homo sapiens
aagaaucggcaauguuucaa

SEQ ID NO: 188162 - RNA, 18 nt, Homo sapiens
gaaccaggccagagcaaa

SEQ ID NO: 188163 - RNA, 21 nt, Homo sapiens
uccacucaggucuguuuuccg

SEQ ID NO: 188164 - RNA, 14 nt, Homo sapiens
ugggauuacaggga

SEQ ID NO: 188165 - RNA, 17 nt, Homo sapiens
gaauuucuguucuucca

SEQ ID NO: 188166 - RNA, 17 nt, Homo sapiens
agucuuagagcuuuacc

SEQ ID NO: 188167 - RNA, 13 nt, Homo sapiens
cagagacugggac

SEQ ID NO: 188168 - RNA, 14 nt, Homo sapiens
ucaaaaacauucuu

SEQ ID NO: 188169 - RNA, 20 nt, Homo sapiens
gaguucauggauauguuaua

SEQ ID NO: 188170 - RNA, 23 nt, Homo sapiens
gauauguuauacugaaccaggcc

SEQ ID NO: 188171 - RNA, 16 nt, Homo sapiens
cuugguaaaauaauca

SEQ ID NO: 188172 - RNA, 21 nt, Homo sapiens
aaaugugacucaagacuucca

SEQ ID NO: 188173 - RNA, 16 nt, Homo sapiens
cgugauuuugcuguag

SEQ ID NO: 188174 - RNA, 13 nt, Homo sapiens
uucagaaucucuc

SEQ ID NO: 188175 - RNA, 14 nt, Homo sapiens
uacuguccaaagac

SEQ ID NO: 188176 - RNA, 19 nt, Homo sapiens
uguuuuuaauaaagacagg

SEQ ID NO: 188177 - RNA, 15 nt, Homo sapiens
ccauaugaauaacau

SEQ ID NO: 188178 - RNA, 12 nt, Homo sapiens
ugggccaaagaa

SEQ ID NO: 188179 - RNA, 16 nt, Homo sapiens
acuauugcuugcacaa

SEQ ID NO: 188180 - RNA, 14 nt, Homo sapiens
aaaagacugaccaa

SEQ ID NO: 188181 - RNA, 17 nt, Homo sapiens
uguuucaaacaaaaagu

SEQ ID NO: 188182 - RNA, 22 nt, Homo sapiens
cuguuuugguuuugcucacaaa

SEQ ID NO: 188183 - RNA, 17 nt, Homo sapiens
accuaaauaugagccca

SEQ ID NO: 188184 - RNA, 15 nt, Homo sapiens
uggauuugucuuugg

SEQ ID NO: 188185 - RNA, 20 nt, Homo sapiens
ggacuaaguguaccagagaa

SEQ ID NO: 188186 - RNA, 20 nt, Homo sapiens
augcuggggacacagcauca

SEQ ID NO: 188187 - RNA, 22 nt, Homo sapiens
ccauaggaggccaacccaaaau

SEQ ID NO: 188188 - RNA, 14 nt, Homo sapiens
uguagaaagugauc

SEQ ID NO: 188189 - RNA, 18 nt, Homo sapiens
cagugacuccacucugag

SEQ ID NO: 188190 - RNA, 21 nt, Homo sapiens
gacucaagacuuccagagccu

SEQ ID NO: 188191 - RNA, 12 nt, Homo sapiens
uccccucuagga

SEQ ID NO: 188192 - RNA, 20 nt, Homo sapiens
cuuuuuccuggcucaucucu

SEQ ID NO: 188193 - RNA, 21 nt, Homo sapiens
gaaauucacuuccccucuagg

SEQ ID NO: 188194 - RNA, 24 nt, Homo sapiens
aaucccucaaaacaaucuugucau

SEQ ID NO: 188195 - RNA, 12 nt, Homo sapiens
ucccacugccaa

SEQ ID NO: 188196 - RNA, 14 nt, Homo sapiens
gucugaacaauaua

SEQ ID NO: 188197 - RNA, 18 nt, Homo sapiens
agcucagguagcacuuua

SEQ ID NO: 188198 - RNA, 14 nt, Homo sapiens
uagaaugagacuua

SEQ ID NO: 188199 - RNA, 15 nt, Homo sapiens
gagcuccuaagccau

SEQ ID NO: 188200 - RNA, 18 nt, Homo sapiens
agaagguugagggcaaug

SEQ ID NO: 188201 - RNA, 21 nt, Homo sapiens
gaccaauauuguacaguuuuu

SEQ ID NO: 188202 - RNA, 20 nt, Homo sapiens
agugcaguuuuuuucuuguc

SEQ ID NO: 188203 - RNA, 22 nt, Homo sapiens
uagaaccucgagguuucucaaa

SEQ ID NO: 188204 - RNA, 20 nt, Homo sapiens
uacaguuuuuauugcuuguu

SEQ ID NO: 188205 - RNA, 18 nt, Homo sapiens
cuuagguccaaggucucc

SEQ ID NO: 188206 - RNA, 15 nt, Homo sapiens
cuaguaaaagccauc

SEQ ID NO: 188207 - RNA, 13 nt, Homo sapiens
gauaugcuguauu

SEQ ID NO: 188208 - RNA, 20 nt, Homo sapiens
auaaaggggagggacucauc

SEQ ID NO: 188209 - RNA, 12 nt, Homo sapiens
ugaaacaucauu

SEQ ID NO: 188210 - RNA, 23 nt, Homo sapiens
gcaaaaccaaauauuccagagac

SEQ ID NO: 188211 - RNA, 19 nt, Homo sapiens
gacuuugaggguguauauu

SEQ ID NO: 188212 - RNA, 22 nt, Homo sapiens
cacagcacaaauuaguuguaua

SEQ ID NO: 188213 - RNA, 12 nt, Homo sapiens
gccaagcaguuu

SEQ ID NO: 188214 - RNA, 19 nt, Homo sapiens
cuuccuggaggugacacuu

SEQ ID NO: 188215 - RNA, 21 nt, Homo sapiens
aaagcuagaaaguguaugugu

SEQ ID NO: 188216 - RNA, 20 nt, Homo sapiens
accaauauuguacaguuuuu

SEQ ID NO: 188217 - RNA, 17 nt, Homo sapiens
aauaaccauugucauaa

SEQ ID NO: 188218 - RNA, 18 nt, Homo sapiens
ccucccacugccaaagaa

SEQ ID NO: 188219 - RNA, 22 nt, Homo sapiens
aaugccacucuguaauugcaaa

SEQ ID NO: 188220 - RNA, 22 nt, Homo sapiens
uuaaguuacacauuuuucagau

SEQ ID NO: 188221 - RNA, 18 nt, Homo sapiens
uguugacauucugaaugc

SEQ ID NO: 188222 - RNA, 18 nt, Homo sapiens
auauguauaucacauucc

SEQ ID NO: 188223 - RNA, 13 nt, Homo sapiens
accaggucucaua

SEQ ID NO: 188224 - RNA, 22 nt, Homo sapiens
ucaagugauucuccugccucag

SEQ ID NO: 188225 - RNA, 12 nt, Homo sapiens
guacacuguguu

SEQ ID NO: 188226 - RNA, 18 nt, Homo sapiens
ucuuggguucaagugauu

SEQ ID NO: 188227 - RNA, 15 nt, Homo sapiens
acaaaguaagccaug

SEQ ID NO: 188228 - RNA, 21 nt, Homo sapiens
ccuuggcuaguaaaagccauc

SEQ ID NO: 188229 - RNA, 17 nt, Homo sapiens
ugaauuuugucuuuaug

SEQ ID NO: 188230 - RNA, 13 nt, Homo sapiens
agucuucuuccau

SEQ ID NO: 188231 - RNA, 16 nt, Homo sapiens
uacuauuuuuacuaau

SEQ ID NO: 188232 - RNA, 13 nt, Homo sapiens
uucuuuucugacu

SEQ ID NO: 188233 - RNA, 22 nt, Homo sapiens
cuguagaaaagggaacugaaca

SEQ ID NO: 188234 - RNA, 23 nt, Homo sapiens
caggcgugaccugccaggcacac

SEQ ID NO: 188235 - RNA, 23 nt, Homo sapiens
aaaacuucaacguaagacugugu

SEQ ID NO: 188236 - RNA, 15 nt, Homo sapiens
ugcagccacuguuaa

SEQ ID NO: 188237 - RNA, 17 nt, Homo sapiens
aucguucucugccucac

SEQ ID NO: 188238 - RNA, 16 nt, Homo sapiens
ucacguaaagcuagaa

SEQ ID NO: 188239 - RNA, 15 nt, Homo sapiens
auagaauucagucaa

SEQ ID NO: 188240 - RNA, 17 nt, Homo sapiens
aagaucguucucugccu

SEQ ID NO: 188241 - RNA, 14 nt, Homo sapiens
cuuaaaauagccau

SEQ ID NO: 188242 - RNA, 17 nt, Homo sapiens
cuaaaaguuaauagggu

SEQ ID NO: 188243 - RNA, 18 nt, Homo sapiens
aauguagaaagugaucca

SEQ ID NO: 188244 - RNA, 23 nt, Homo sapiens
gucucauaaugcauguggcacuu

SEQ ID NO: 188245 - RNA, 14 nt, Homo sapiens
aacaucauuucaau

SEQ ID NO: 188246 - RNA, 12 nt, Homo sapiens
uaaaaguuggcu

SEQ ID NO: 188247 - RNA, 20 nt, Homo sapiens
gcccaggcuggagugcaaug

SEQ ID NO: 188248 - RNA, 13 nt, Homo sapiens
agaaagugaucca

SEQ ID NO: 188249 - RNA, 20 nt, Homo sapiens
guuaaaaguuguguuuugaa

SEQ ID NO: 188250 - RNA, 13 nt, Homo sapiens
cuucuccuuagaa

SEQ ID NO: 188251 - RNA, 23 nt, Homo sapiens
ugauagagguucuuuauugcuca

SEQ ID NO: 188252 - RNA, 19 nt, Homo sapiens
aggcugugccaucagcucc

SEQ ID NO: 188253 - RNA, 13 nt, Homo sapiens
gaaaaguuuugua

SEQ ID NO: 188254 - RNA, 16 nt, Homo sapiens
cacagccaaccuagcu

SEQ ID NO: 188255 - RNA, 20 nt, Homo sapiens
cucgugguaggacuguagaa

SEQ ID NO: 188256 - RNA, 16 nt, Homo sapiens
ccuggaccaggucuca

SEQ ID NO: 188257 - RNA, 17 nt, Homo sapiens
uugguuuugcucacaaa

SEQ ID NO: 188258 - RNA, 13 nt, Homo sapiens
acuguccaaagac

SEQ ID NO: 188259 - RNA, 13 nt, Homo sapiens
caaucguaaaauu

SEQ ID NO: 188260 - RNA, 16 nt, Homo sapiens
uagaucugaacuccuu

SEQ ID NO: 188261 - RNA, 19 nt, Homo sapiens
auuuuauguuuaguugcac

SEQ ID NO: 188262 - RNA, 22 nt, Homo sapiens
caccgcgcccagccucaucucu

SEQ ID NO: 188263 - RNA, 14 nt, Homo sapiens
caaugucuaaaaac

SEQ ID NO: 188264 - RNA, 21 nt, Homo sapiens
auaacuuuuuuuuaaguuaca

SEQ ID NO: 188265 - RNA, 14 nt, Homo sapiens
gcuaauauugcaau

SEQ ID NO: 188266 - RNA, 22 nt, Homo sapiens
acauuuguuuuagucugaacaa

SEQ ID NO: 188267 - RNA, 18 nt, Homo sapiens
ugguuuuucaguuuucag

SEQ ID NO: 188268 - RNA, 14 nt, Homo sapiens
uuuauugcuuguug

SEQ ID NO: 188269 - RNA, 18 nt, Homo sapiens
ggaacuaagaaagcccuu

SEQ ID NO: 188270 - RNA, 21 nt, Homo sapiens
cacugccaaagaacuuggaaa

SEQ ID NO: 188271 - RNA, 17 nt, Homo sapiens
uggcacuuauaaccaaa

SEQ ID NO: 188272 - RNA, 15 nt, Homo sapiens
uugcaauguggcuug

SEQ ID NO: 188273 - RNA, 17 nt, Homo sapiens
cuccccuucacucccac

SEQ ID NO: 188274 - RNA, 17 nt, Homo sapiens
ccaaauauuccagagac

SEQ ID NO: 188275 - RNA, 14 nt, Homo sapiens
accguacacugugu

SEQ ID NO: 188276 - RNA, 18 nt, Homo sapiens
uccagagacugggacuaa

SEQ ID NO: 188277 - RNA, 19 nt, Homo sapiens
cuuuaauuuuuuacuauuu

SEQ ID NO: 188278 - RNA, 17 nt, Homo sapiens
cauacuagaguucaugg

SEQ ID NO: 188279 - RNA, 12 nt, Homo sapiens
uuucccaaagag

SEQ ID NO: 188280 - RNA, 20 nt, Homo sapiens
acagugacuccacucugagu

SEQ ID NO: 188281 - RNA, 14 nt, Homo sapiens
ugggagacacugau

SEQ ID NO: 188282 - RNA, 17 nt, Homo sapiens
ucuccuuagaaguggaa

SEQ ID NO: 188283 - RNA, 22 nt, Homo sapiens
uaugauuguccguaggcccaua

SEQ ID NO: 188284 - RNA, 16 nt, Homo sapiens
uccuggggaacauaga

SEQ ID NO: 188285 - RNA, 21 nt, Homo sapiens
ccacugccaaagaacuuggaa

SEQ ID NO: 188286 - RNA, 22 nt, Homo sapiens
uagugaaucacguaaagcuaga

SEQ ID NO: 188287 - RNA, 16 nt, Homo sapiens
acugaauuuugucuuu

SEQ ID NO: 188288 - RNA, 14 nt, Homo sapiens
cacaaucugaaaca

SEQ ID NO: 188289 - RNA, 18 nt, Homo sapiens
gcccaggcuggagugcaa

SEQ ID NO: 188290 - RNA, 16 nt, Homo sapiens
acuuacuuaguguuau

SEQ ID NO: 188291 - RNA, 22 nt, Homo sapiens
ucccuucuuuuuguucuucauc

SEQ ID NO: 188292 - RNA, 14 nt, Homo sapiens
ugugccaucagcuc

SEQ ID NO: 188293 - RNA, 19 nt, Homo sapiens
caaucaguagccagcaucu

SEQ ID NO: 188294 - RNA, 20 nt, Homo sapiens
gccagguucugacucuuggc

SEQ ID NO: 188295 - RNA, 17 nt, Homo sapiens
aagcuggagucugucaa

SEQ ID NO: 188296 - RNA, 15 nt, Homo sapiens
cuagaguucauggau

SEQ ID NO: 188297 - RNA, 14 nt, Homo sapiens
ucucucuucuuuuc

SEQ ID NO: 188298 - RNA, 19 nt, Homo sapiens
cugaguagcuggauuacag

SEQ ID NO: 188299 - RNA, 19 nt, Homo sapiens
ucagaguuccgacugccau

SEQ ID NO: 188300 - RNA, 22 nt, Homo sapiens
uaaccaaagcccaaagugguau

SEQ ID NO: 188301 - RNA, 19 nt, Homo sapiens
uggaaauagugauuuccac

SEQ ID NO: 188302 - RNA, 20 nt, Homo sapiens
ugcccaggcuggagugcaau

SEQ ID NO: 188303 - RNA, 14 nt, Homo sapiens
cuggccuccaaguc

SEQ ID NO: 188304 - RNA, 17 nt, Homo sapiens
augagggaacuguguag

SEQ ID NO: 188305 - RNA, 13 nt, Homo sapiens
uucuccugccuca

SEQ ID NO: 188306 - RNA, 12 nt, Homo sapiens
uauuuuuacuaa

SEQ ID NO: 188307 - RNA, 20 nt, Homo sapiens
guauauucaaccaaauacuu

SEQ ID NO: 188308 - RNA, 18 nt, Homo sapiens
aaagacaggguuucacca

SEQ ID NO: 188309 - RNA, 17 nt, Homo sapiens
uuaugaauaguuuccaa

SEQ ID NO: 188310 - RNA, 16 nt, Homo sapiens
gcauuugucaacaaag

SEQ ID NO: 188311 - RNA, 20 nt, Homo sapiens
agcaacauuuguuuuagucu

SEQ ID NO: 188312 - RNA, 22 nt, Homo sapiens
cugucaauguccuacugagaca

SEQ ID NO: 188313 - RNA, 21 nt, Homo sapiens
aguagcuggauuacaggcaug

SEQ ID NO: 188314 - RNA, 21 nt, Homo sapiens
aggucuccagagggugaaagc

SEQ ID NO: 188315 - RNA, 19 nt, Homo sapiens
guuucaccauguuggccag

SEQ ID NO: 188316 - RNA, 16 nt, Homo sapiens
uuucauaucacacugu

SEQ ID NO: 188317 - RNA, 17 nt, Homo sapiens
aaccguacacuguguuu

SEQ ID NO: 188318 - RNA, 15 nt, Homo sapiens
acaaagccaaucuca

SEQ ID NO: 188319 - RNA, 14 nt, Homo sapiens
gucuuuaaccacuu

SEQ ID NO: 188320 - RNA, 19 nt, Homo sapiens
agucuuagagcuuuaccua

SEQ ID NO: 188321 - RNA, 21 nt, Homo sapiens
ugcuguagaagauggcacuua

SEQ ID NO: 188322 - RNA, 15 nt, Homo sapiens
auucuguaguuucac

SEQ ID NO: 188323 - RNA, 12 nt, Homo sapiens
ggaaaauucucu

SEQ ID NO: 188324 - RNA, 18 nt, Homo sapiens
ugcaaugacacagucuug

SEQ ID NO: 188325 - RNA, 21 nt, Homo sapiens
aaagcccuuaaaaauaugugu

SEQ ID NO: 188326 - RNA, 16 nt, Homo sapiens
aauuuugucuuuauga

SEQ ID NO: 188327 - RNA, 19 nt, Homo sapiens
cugggacuaaguguaccag

SEQ ID NO: 188328 - RNA, 13 nt, Homo sapiens
uccacaaagccaa

SEQ ID NO: 188329 - RNA, 20 nt, Homo sapiens
aaaaucaaacaauucaggga

SEQ ID NO: 188330 - RNA, 20 nt, Homo sapiens
uaagaugaaacaucauuuca

SEQ ID NO: 188331 - RNA, 17 nt, Homo sapiens
auuucucuacugucuca

SEQ ID NO: 188332 - RNA, 15 nt, Homo sapiens
gagugggcuaagcac

SEQ ID NO: 188333 - RNA, 21 nt, Homo sapiens
ugcacaaauugggccaaagaa

SEQ ID NO: 188334 - RNA, 21 nt, Homo sapiens
gaauucagucaaagauacaca

SEQ ID NO: 188335 - RNA, 23 nt, Homo sapiens
aacuuggaaauagugauuuccac

SEQ ID NO: 188336 - RNA, 17 nt, Homo sapiens
caguaguggugacugug

SEQ ID NO: 188337 - RNA, 12 nt, Homo sapiens
gacucaagcaag

SEQ ID NO: 188338 - RNA, 21 nt, Homo sapiens
auuuuacuuuuuccuggcuca

SEQ ID NO: 188339 - RNA, 14 nt, Homo sapiens
acaaucugaaacag

SEQ ID NO: 188340 - RNA, 18 nt, Homo sapiens
cuauuuuuuguaaugugu

SEQ ID NO: 188341 - RNA, 19 nt, Homo sapiens
ccucaaaacaaucuuguca

SEQ ID NO: 188342 - RNA, 15 nt, Homo sapiens
guagaaagugaucca

SEQ ID NO: 188343 - RNA, 19 nt, Homo sapiens
agaaguaaauauagcucag

SEQ ID NO: 188344 - RNA, 20 nt, Homo sapiens
gacgugauuuugcuguagaa

SEQ ID NO: 188345 - RNA, 15 nt, Homo sapiens
agccagguucugacu

SEQ ID NO: 188346 - RNA, 22 nt, Homo sapiens
uguuuccuuuaauuuuuuacua

SEQ ID NO: 188347 - RNA, 16 nt, Homo sapiens
acacaaucugaaacag

SEQ ID NO: 188348 - RNA, 19 nt, Homo sapiens
gaaugagcaaaaccaaaua

SEQ ID NO: 188349 - RNA, 15 nt, Homo sapiens
uccacagugacucca

SEQ ID NO: 188350 - RNA, 22 nt, Homo sapiens
augaggaauuucuguucuucca

SEQ ID NO: 188351 - RNA, 19 nt, Homo sapiens
gcauuugucaacaaaguca

SEQ ID NO: 188352 - RNA, 22 nt, Homo sapiens
gggaaggaggccguccaucccg

SEQ ID NO: 188353 - RNA, 17 nt, Homo sapiens
uuagugcacagcacaaa

SEQ ID NO: 188354 - RNA, 14 nt, Homo sapiens
uauacaauauacuu

SEQ ID NO: 188355 - RNA, 21 nt, Homo sapiens
ggucagaguuccgacugccau

SEQ ID NO: 188356 - RNA, 17 nt, Homo sapiens
agauuucagauuuguga

SEQ ID NO: 188357 - RNA, 13 nt, Homo sapiens
ugauuguagcuau

SEQ ID NO: 188358 - RNA, 13 nt, Homo sapiens
cuuuauugcucau

SEQ ID NO: 188359 - RNA, 17 nt, Homo sapiens
gacgugauuuugcugua

SEQ ID NO: 188360 - RNA, 11 nt, Homo sapiens
auaugcacaaa

SEQ ID NO: 188361 - RNA, 21 nt, Homo sapiens
aguauauucaaccaaauacuu

SEQ ID NO: 188362 - RNA, 23 nt, Homo sapiens
cauggauauguuauacugaacca

SEQ ID NO: 188363 - RNA, 15 nt, Homo sapiens
cucaggcagaucuca

SEQ ID NO: 188364 - RNA, 18 nt, Homo sapiens
cuucuuuacuuaguucaa

SEQ ID NO: 188365 - RNA, 20 nt, Homo sapiens
ccacagugacuccacucuga

SEQ ID NO: 188366 - RNA, 22 nt, Homo sapiens
cgaauauaucaguaauuucaga

SEQ ID NO: 188367 - RNA, 16 nt, Homo sapiens
aaaagggaacugaaca

SEQ ID NO: 188368 - RNA, 17 nt, Homo sapiens
cuuggguucaagugauu

SEQ ID NO: 188369 - RNA, 17 nt, Homo sapiens
uaaaccguacacugugu

SEQ ID NO: 188370 - RNA, 17 nt, Homo sapiens
cucaaagaaauuuccac

SEQ ID NO: 188371 - RNA, 18 nt, Homo sapiens
agcuggagucugucaaug

SEQ ID NO: 188372 - RNA, 17 nt, Homo sapiens
ucuuaaaauagccauaa

SEQ ID NO: 188373 - RNA, 20 nt, Homo sapiens
uuguauuuaaaugaaaguga

SEQ ID NO: 188374 - RNA, 15 nt, Homo sapiens
aauguagaaagugau

SEQ ID NO: 188375 - RNA, 18 nt, Homo sapiens
auacugaaccaggccaga

SEQ ID NO: 188376 - RNA, 16 nt, Homo sapiens
uuacauuuuguauauu

SEQ ID NO: 188377 - RNA, 20 nt, Homo sapiens
uugcccaggcuggagugcaa

SEQ ID NO: 188378 - RNA, 20 nt, Homo sapiens
ucugaaaaaguauccugcuu

SEQ ID NO: 188379 - RNA, 22 nt, Homo sapiens
uaaauuucucuacugucucagu

SEQ ID NO: 188380 - RNA, 19 nt, Homo sapiens
ccaagcaguuucuuucaaa

SEQ ID NO: 188381 - RNA, 23 nt, Homo sapiens
gucucgugguaggacuguagaaa

SEQ ID NO: 188382 - RNA, 18 nt, Homo sapiens
cagaguuccgacugccau

SEQ ID NO: 188383 - RNA, 16 nt, Homo sapiens
uguacagucuuguauu

SEQ ID NO: 188384 - RNA, 22 nt, Homo sapiens
ucaaacaaaaagucauaaaagu

SEQ ID NO: 188385 - RNA, 13 nt, Homo sapiens
uccacagugacuc

SEQ ID NO: 188386 - RNA, 19 nt, Homo sapiens
uguauuuaaaugaaaguga

SEQ ID NO: 188387 - RNA, 18 nt, Homo sapiens
uuuuccuggcucaucucu

SEQ ID NO: 188388 - RNA, 20 nt, Homo sapiens
uuauuaaauguagaaaguga

SEQ ID NO: 188389 - RNA, 14 nt, Homo sapiens
agccaguuacauaa

SEQ ID NO: 188390 - RNA, 17 nt, Homo sapiens
agcuggauuacaggcau

SEQ ID NO: 188391 - RNA, 23 nt, Homo sapiens
uuuauacucaggcagaucucagc

SEQ ID NO: 188392 - RNA, 11 nt, Homo sapiens
ugaacauucca

SEQ ID NO: 188393 - RNA, 20 nt, Homo sapiens
gucugaacaauauauacuua

SEQ ID NO: 188394 - RNA, 19 nt, Homo sapiens
caugggagacacugaugua

SEQ ID NO: 188395 - RNA, 15 nt, Homo sapiens
acaauauacuuguau

SEQ ID NO: 188396 - RNA, 16 nt, Homo sapiens
cuuguauagcaguuuc

SEQ ID NO: 188397 - RNA, 17 nt, Homo sapiens
gcaauggacaaggaagg

SEQ ID NO: 188398 - RNA, 14 nt, Homo sapiens
uguuaacugaaugc

SEQ ID NO: 188399 - RNA, 21 nt, Homo sapiens
aaauuaagaaauucacuuccc

SEQ ID NO: 188400 - RNA, 15 nt, Homo sapiens
ugcauguggcacuua

SEQ ID NO: 188401 - RNA, 12 nt, Homo sapiens
aaaaugugacuc

SEQ ID NO: 188402 - RNA, 19 nt, Homo sapiens
acugggcgcaguuggucuu

SEQ ID NO: 188403 - RNA, 17 nt, Homo sapiens
cuaaguguaccagagaa

SEQ ID NO: 188404 - RNA, 15 nt, Homo sapiens
cuuuauacucaggca

SEQ ID NO: 188405 - RNA, 14 nt, Homo sapiens
uaguaaaagccauc

SEQ ID NO: 188406 - RNA, 13 nt, Homo sapiens
ucccucaaaacaa

SEQ ID NO: 188407 - RNA, 22 nt, Homo sapiens
uguuucaaacaaaaagucauaa

SEQ ID NO: 188408 - RNA, 16 nt, Homo sapiens
uuuacuguccaaagac

SEQ ID NO: 188409 - RNA, 16 nt, Homo sapiens
uaauaaaaguacaugu

SEQ ID NO: 188410 - RNA, 20 nt, Homo sapiens
ucagucuuuuccaugaacuu

SEQ ID NO: 188411 - RNA, 13 nt, Homo sapiens
cacucagaaaaug

SEQ ID NO: 188412 - RNA, 18 nt, Homo sapiens
caucccgucgacguagaa

SEQ ID NO: 188413 - RNA, 13 nt, Homo sapiens
auuuacauugccu

SEQ ID NO: 188414 - RNA, 15 nt, Homo sapiens
aauguauuugcuaua

SEQ ID NO: 188415 - RNA, 19 nt, Homo sapiens
gugcugggauuacagggau

SEQ ID NO: 188416 - RNA, 20 nt, Homo sapiens
aagugagcuccuaagccaug

SEQ ID NO: 188417 - RNA, 13 nt, Homo sapiens
uacuaaucuuucu

SEQ ID NO: 188418 - RNA, 18 nt, Homo sapiens
guuuacauuuuguauauu

SEQ ID NO: 188419 - RNA, 18 nt, Homo sapiens
uguuguuuucccaaagag

SEQ ID NO: 188420 - RNA, 20 nt, Homo sapiens
cucuuggguucaagugauuc

SEQ ID NO: 188421 - RNA, 18 nt, Homo sapiens
gccaaucaguagccagca

SEQ ID NO: 188422 - RNA, 19 nt, Homo sapiens
uuaaauguagaaagugauc

SEQ ID NO: 188423 - RNA, 17 nt, Homo sapiens
caaauugggccaaagaa

SEQ ID NO: 188424 - RNA, 15 nt, Homo sapiens
ggaccaggucucaua

SEQ ID NO: 188425 - RNA, 14 nt, Homo sapiens
ucuaauggcuuuau

SEQ ID NO: 188426 - RNA, 18 nt, Homo sapiens
agcccuuaggaagaauuu

SEQ ID NO: 188427 - RNA, 15 nt, Homo sapiens
ucauggauauguuau

SEQ ID NO: 188428 - RNA, 21 nt, Homo sapiens
cuuguuagugcacagcacaaa

SEQ ID NO: 188429 - RNA, 15 nt, Homo sapiens
aacugaacauuccag

SEQ ID NO: 188430 - RNA, 20 nt, Homo sapiens
accguaugagggaacugugu

SEQ ID NO: 188431 - RNA, 18 nt, Homo sapiens
ggagccccugcucuggug

SEQ ID NO: 188432 - RNA, 13 nt, Homo sapiens
uggaaccagccca

SEQ ID NO: 188433 - RNA, 18 nt, Homo sapiens
gcgcccagccucaucucu

SEQ ID NO: 188434 - RNA, 19 nt, Homo sapiens
auugcuugcacaaaccaau

SEQ ID NO: 188435 - RNA, 18 nt, Homo sapiens
aauaugacacucuaguca

SEQ ID NO: 188436 - RNA, 13 nt, Homo sapiens
uaaauguagaaag

SEQ ID NO: 188437 - RNA, 20 nt, Homo sapiens
gacagcuccuggaccaggcc

SEQ ID NO: 188438 - RNA, 19 nt, Homo sapiens
uuggauacgacaacuugca

SEQ ID NO: 188439 - RNA, 17 nt, Homo sapiens
gucaauguccuacugag

SEQ ID NO: 188440 - RNA, 15 nt, Homo sapiens
cacagcaucagcuca

SEQ ID NO: 188441 - RNA, 19 nt, Homo sapiens
gucugaacaauauauacuu

SEQ ID NO: 188442 - RNA, 20 nt, Homo sapiens
cgccacccucccacugccaa

SEQ ID NO: 188443 - RNA, 20 nt, Homo sapiens
ugacacucuagucaaagccu

SEQ ID NO: 188444 - RNA, 22 nt, Homo sapiens
aguuccgacugccaucuuggac

SEQ ID NO: 188445 - RNA, 14 nt, Homo sapiens
uuaaacuuacuuag

SEQ ID NO: 188446 - RNA, 15 nt, Homo sapiens
cagauuauuauugaa

SEQ ID NO: 188447 - RNA, 21 nt, Homo sapiens
uguaaauuucucuacugucuc

SEQ ID NO: 188448 - RNA, 19 nt, Homo sapiens
cacuuagguccaaggucuc

SEQ ID NO: 188449 - RNA, 18 nt, Homo sapiens
guugagggcaauggacaa

SEQ ID NO: 188450 - RNA, 14 nt, Homo sapiens
gacagaagcguaua

SEQ ID NO: 188451 - RNA, 14 nt, Homo sapiens
aauaaaauuguaca

SEQ ID NO: 188452 - RNA, 16 nt, Homo sapiens
aaaugcugguuuuuca

SEQ ID NO: 188453 - RNA, 21 nt, Homo sapiens
accuaaauaugagcccagaaa

SEQ ID NO: 188454 - RNA, 20 nt, Homo sapiens
gucagaguuccgacugccau

SEQ ID NO: 188455 - RNA, 23 nt, Homo sapiens
uccugaccucaaguaauccaccu

SEQ ID NO: 188456 - RNA, 13 nt, Homo sapiens
uugaaacuuguau

SEQ ID NO: 188457 - RNA, 23 nt, Homo sapiens
uguuaagccauguguuccaaggc

SEQ ID NO: 188458 - RNA, 22 nt, Homo sapiens
uuaaauguagaaagugauccau

SEQ ID NO: 188459 - RNA, 18 nt, Homo sapiens
guuuuacuguccaaagac

SEQ ID NO: 188460 - RNA, 15 nt, Homo sapiens
uuuuccuguucuuaa

SEQ ID NO: 188461 - RNA, 20 nt, Homo sapiens
uaaauuucucuacugucuca

SEQ ID NO: 188462 - RNA, 15 nt, Homo sapiens
gacucaucauuucca

SEQ ID NO: 188463 - RNA, 17 nt, Homo sapiens
uccacagugacuccacu

SEQ ID NO: 188464 - RNA, 14 nt, Homo sapiens
gucauaacuagaac

SEQ ID NO: 188465 - RNA, 21 nt, Homo sapiens
gguaaaauaaucaguguuucc

SEQ ID NO: 188466 - RNA, 15 nt, Homo sapiens
cauucugcacucaga

SEQ ID NO: 188467 - RNA, 12 nt, Homo sapiens
uauuccagagac

SEQ ID NO: 188468 - RNA, 18 nt, Homo sapiens
augcuggggacacagcau

SEQ ID NO: 188469 - RNA, 15 nt, Homo sapiens
aaucaguguuuccaa

SEQ ID NO: 188470 - RNA, 14 nt, Homo sapiens
caauauacuuguau

SEQ ID NO: 188471 - RNA, 23 nt, Homo sapiens
cuuuggugaacauugcaauagaa

SEQ ID NO: 188472 - RNA, 21 nt, Homo sapiens
aucugccuccccuucacuccc

SEQ ID NO: 188473 - RNA, 16 nt, Homo sapiens
auggcaggacagcucc

SEQ ID NO: 188474 - RNA, 10 nt, Homo sapiens
uaaagacaga

SEQ ID NO: 188475 - RNA, 12 nt, Homo sapiens
gucuuggcucac

SEQ ID NO: 188476 - RNA, 15 nt, Homo sapiens
ucuaaaaacauuugu

SEQ ID NO: 188477 - RNA, 16 nt, Homo sapiens
uacaauauacuuguau

SEQ ID NO: 188478 - RNA, 15 nt, Homo sapiens
aaggcagaguacaaa

SEQ ID NO: 188479 - RNA, 17 nt, Homo sapiens
cuaagcacgggccauau

SEQ ID NO: 188480 - RNA, 16 nt, Homo sapiens
uuagagcuuuaccuaa

SEQ ID NO: 188481 - RNA, 19 nt, Homo sapiens
uccuggaggugacacuuga

SEQ ID NO: 188482 - RNA, 15 nt, Homo sapiens
aguucauggauaugu

SEQ ID NO: 188483 - RNA, 15 nt, Homo sapiens
cuggagucugucaau

SEQ ID NO: 188484 - RNA, 18 nt, Homo sapiens
gucacagccacuugggau

SEQ ID NO: 188485 - RNA, 13 nt, Homo sapiens
ggaaccagcccag

SEQ ID NO: 188486 - RNA, 13 nt, Homo sapiens
uaugcacaaacuu

SEQ ID NO: 188487 - RNA, 15 nt, Homo sapiens
gauauaaaagacuga

SEQ ID NO: 188488 - RNA, 14 nt, Homo sapiens
ugcaauguuuuaga

SEQ ID NO: 188489 - RNA, 19 nt, Homo sapiens
caauguuucaaacaaaaag

SEQ ID NO: 188490 - RNA, 19 nt, Homo sapiens
uuacuuuuuccuggcucau

SEQ ID NO: 188491 - RNA, 11 nt, Homo sapiens
gccucaucucu

SEQ ID NO: 188492 - RNA, 15 nt, Homo sapiens
aucuguccuguuaca

SEQ ID NO: 188493 - RNA, 20 nt, Homo sapiens
acucuaacaguaguugcaau

SEQ ID NO: 188494 - RNA, 19 nt, Homo sapiens
cucuugaaaucuguuaaaa

SEQ ID NO: 188495 - RNA, 14 nt, Homo sapiens
ucuuuggugaacau

SEQ ID NO: 188496 - RNA, 23 nt, Homo sapiens
aaucccucaaaacaaucuuguca

SEQ ID NO: 188497 - RNA, 18 nt, Homo sapiens
auguaagaucguucucug

SEQ ID NO: 188498 - RNA, 15 nt, Homo sapiens
agaaauccaauugga

SEQ ID NO: 188499 - RNA, 16 nt, Homo sapiens
uuaauaaagacagggu

SEQ ID NO: 188500 - RNA, 21 nt, Homo sapiens
uuauuaaauguagaaagugau

SEQ ID NO: 188501 - RNA, 13 nt, Homo sapiens
aauagccauaaag

SEQ ID NO: 188502 - RNA, 21 nt, Homo sapiens
ccugaugcuggggacacagca

SEQ ID NO: 188503 - RNA, 23 nt, Homo sapiens
cauucugcacucagaaaauggca

SEQ ID NO: 188504 - RNA, 23 nt, Homo sapiens
aagacgugauuuugcuguagaag

SEQ ID NO: 188505 - RNA, 14 nt, Homo sapiens
aaauucacuucccc

SEQ ID NO: 188506 - RNA, 13 nt, Homo sapiens
gguucaagugauu

SEQ ID NO: 188507 - RNA, 12 nt, Homo sapiens
uucacucccacc

SEQ ID NO: 188508 - RNA, 19 nt, Homo sapiens
cacagcaucagcucaagac

SEQ ID NO: 188509 - RNA, 23 nt, Homo sapiens
cgugaccugccaggcacacugag

SEQ ID NO: 188510 - RNA, 18 nt, Homo sapiens
auuuuucagauauaaaag

SEQ ID NO: 188511 - RNA, 15 nt, Homo sapiens
aguuccgacugccau

SEQ ID NO: 188512 - RNA, 17 nt, Homo sapiens
auguagaaagugaucca

SEQ ID NO: 188513 - RNA, 13 nt, Homo sapiens
gagcaaacagaaa

SEQ ID NO: 188514 - RNA, 19 nt, Homo sapiens
ucgugguaggacuguagaa

SEQ ID NO: 188515 - RNA, 22 nt, Homo sapiens
ugaguagcuggauuacaggcau

SEQ ID NO: 188516 - RNA, 19 nt, Homo sapiens
guagaaaagggaacugaac

SEQ ID NO: 188517 - RNA, 19 nt, Homo sapiens
uagugauuuccacagugac

SEQ ID NO: 188518 - RNA, 15 nt, Homo sapiens
cuggaccaggucuca

SEQ ID NO: 188519 - RNA, 15 nt, Homo sapiens
uucaguuuucaggag

SEQ ID NO: 188520 - RNA, 22 nt, Homo sapiens
guguuuuuaauaaagacagggu

SEQ ID NO: 188521 - RNA, 17 nt, Homo sapiens
auaugacacucuaguca

SEQ ID NO: 188522 - RNA, 15 nt, Homo sapiens
uucugaaaaaguauc

SEQ ID NO: 188523 - RNA, 14 nt, Homo sapiens
acaaaguaagccau

SEQ ID NO: 188524 - RNA, 15 nt, Homo sapiens
aaaacaaucuuguca

SEQ ID NO: 188525 - RNA, 12 nt, Homo sapiens
aaugucuuuauu

SEQ ID NO: 188526 - RNA, 22 nt, Homo sapiens
caaaaacauucuuacauuuuac

SEQ ID NO: 188527 - RNA, 13 nt, Homo sapiens
aaacaucauuuca

SEQ ID NO: 188528 - RNA, 15 nt, Homo sapiens
uuaaaugaaagugag

SEQ ID NO: 188529 - RNA, 21 nt, Homo sapiens
acuguuuugguuuugcucaca

SEQ ID NO: 188530 - RNA, 16 nt, Homo sapiens
aagaauguuuaugaau

SEQ ID NO: 188531 - RNA, 19 nt, Homo sapiens
agggaacugaacauuccag

SEQ ID NO: 188532 - RNA, 22 nt, Homo sapiens
uaagcugccuguacacaacuca

SEQ ID NO: 188533 - RNA, 20 nt, Homo sapiens
aaggcugugccaucagcucc

SEQ ID NO: 188534 - RNA, 21 nt, Homo sapiens
ccauaaaggggagggacucau

SEQ ID NO: 188535 - RNA, 15 nt, Homo sapiens
agaaagugauccaua

SEQ ID NO: 188536 - RNA, 16 nt, Homo sapiens
aagcagguucuuguua

SEQ ID NO: 188537 - RNA, 15 nt, Homo sapiens
uucuuucaaagaagc

SEQ ID NO: 188538 - RNA, 23 nt, Homo sapiens
ucagauauaaaagacugaccaau

SEQ ID NO: 188539 - RNA, 22 nt, Homo sapiens
ucuaaggcugugccaucagcuc

SEQ ID NO: 188540 - RNA, 13 nt, Homo sapiens
aagccuugguaaa

SEQ ID NO: 188541 - RNA, 22 nt, Homo sapiens
agcuggagucugucaauguccu

SEQ ID NO: 188542 - RNA, 14 nt, Homo sapiens
ccuggcucaucucu

SEQ ID NO: 188543 - RNA, 18 nt, Homo sapiens
cuuuuuuuuaaguuacac

SEQ ID NO: 188544 - RNA, 15 nt, Homo sapiens
caggcgugaccugcc

SEQ ID NO: 188545 - RNA, 22 nt, Homo sapiens
cuccuuggcuucuuuacuuagu

SEQ ID NO: 188546 - RNA, 20 nt, Homo sapiens
uggacucaagcaagauuuca

SEQ ID NO: 188547 - RNA, 12 nt, Homo sapiens
acugccaaagaa

SEQ ID NO: 188548 - RNA, 15 nt, Homo sapiens
uggcuucuuuacuua

SEQ ID NO: 188549 - RNA, 15 nt, Homo sapiens
ucaaaaacauucuua

SEQ ID NO: 188550 - RNA, 21 nt, Homo sapiens
aggacacuagaagauuuugaa

SEQ ID NO: 188551 - RNA, 15 nt, Homo sapiens
ugcacaaaccaauua

SEQ ID NO: 188552 - RNA, 13 nt, Homo sapiens
ugaacauugcaau

SEQ ID NO: 188553 - RNA, 15 nt, Homo sapiens
cacaaauuaguugua

SEQ ID NO: 188554 - RNA, 15 nt, Homo sapiens
aagccauguaucuca

SEQ ID NO: 188555 - RNA, 12 nt, Homo sapiens
guagaaagugau

SEQ ID NO: 188556 - RNA, 19 nt, Homo sapiens
cauugcaauagaaauccaa

SEQ ID NO: 188557 - RNA, 16 nt, Homo sapiens
ucauuguaaaaagccc

SEQ ID NO: 188558 - RNA, 19 nt, Homo sapiens
auuggaccagucagcacag

SEQ ID NO: 188559 - RNA, 19 nt, Homo sapiens
cuccugaguagcuggauua

SEQ ID NO: 188560 - RNA, 23 nt, Homo sapiens
aaaugcugguuuuucaguuuuca

SEQ ID NO: 188561 - RNA, 17 nt, Homo sapiens
auccuggggaacauaga

SEQ ID NO: 188562 - RNA, 20 nt, Homo sapiens
agcuuacaagccagcuggag

SEQ ID NO: 188563 - RNA, 21 nt, Homo sapiens
auagagguucuuuauugcuca

SEQ ID NO: 188564 - RNA, 21 nt, Homo sapiens
guagagagagaaaaguaacug

SEQ ID NO: 188565 - RNA, 16 nt, Homo sapiens
augagggaacugugua

SEQ ID NO: 188566 - RNA, 17 nt, Homo sapiens
gaaugagcaaaaccaaa

SEQ ID NO: 188567 - RNA, 22 nt, Homo sapiens
aaacauuuguuuguggucuaua

SEQ ID NO: 188568 - RNA, 18 nt, Homo sapiens
ccugccaggcacacugag

SEQ ID NO: 188569 - RNA, 13 nt, Homo sapiens
cuugcacaaacca

SEQ ID NO: 188570 - RNA, 15 nt, Homo sapiens
gaaugagacuuacuu

SEQ ID NO: 188571 - RNA, 21 nt, Homo sapiens
ucaagugauucuccugccuca

SEQ ID NO: 188572 - RNA, 22 nt, Homo sapiens
agauacacaaucugaaacagcu

SEQ ID NO: 188573 - RNA, 14 nt, Homo sapiens
cauuugucaacaaa

SEQ ID NO: 188574 - RNA, 19 nt, Homo sapiens
augugacucaagacuucca

SEQ ID NO: 188575 - RNA, 14 nt, Homo sapiens
agaauaaauacugu

SEQ ID NO: 188576 - RNA, 22 nt, Homo sapiens
uuaccuuuuauuuuaauguuuc

SEQ ID NO: 188577 - RNA, 17 nt, Homo sapiens
uagcuuauacaaaacau

SEQ ID NO: 188578 - RNA, 21 nt, Homo sapiens
caaguucuuaguugcuguaug

SEQ ID NO: 188579 - RNA, 19 nt, Homo sapiens
aauucugaauuaagcacag

SEQ ID NO: 188580 - RNA, 19 nt, Homo sapiens
uagugcacagcacaaauua

SEQ ID NO: 188581 - RNA, 21 nt, Homo sapiens
accuucaguugucucugaugu

SEQ ID NO: 188582 - RNA, 11 nt, Homo sapiens
auaaagacagg

SEQ ID NO: 188583 - RNA, 10 nt, Homo sapiens
cucacaaaag

SEQ ID NO: 188584 - RNA, 20 nt, Homo sapiens
auacuuauagaauucaguca

SEQ ID NO: 188585 - RNA, 20 nt, Homo sapiens
gucaacaaagucacccacuu

SEQ ID NO: 188586 - RNA, 10 nt, Homo sapiens
aaaagugaug

SEQ ID NO: 188587 - RNA, 21 nt, Homo sapiens
cucugauguagcuuauacaaa

SEQ ID NO: 188588 - RNA, 11 nt, Homo sapiens
uuugcuguaga

SEQ ID NO: 188589 - RNA, 18 nt, Homo sapiens
acgugauuuugcuguaga

SEQ ID NO: 188590 - RNA, 19 nt, Homo sapiens
aguuuacauuuuguauauu

SEQ ID NO: 188591 - RNA, 17 nt, Homo sapiens
ggcaggaccuguggcca

SEQ ID NO: 188592 - RNA, 13 nt, Homo sapiens
cuaaauaugagcc

SEQ ID NO: 188593 - RNA, 12 nt, Homo sapiens
acugugggcucc

SEQ ID NO: 188594 - RNA, 16 nt, Homo sapiens
uuguuuguggucuaua

SEQ ID NO: 188595 - RNA, 20 nt, Homo sapiens
ccaggcuggagugcaaugac

SEQ ID NO: 188596 - RNA, 14 nt, Homo sapiens
ggguucaagugauu

SEQ ID NO: 188597 - RNA, 13 nt, Homo sapiens
guuggcucaggag

SEQ ID NO: 188598 - RNA, 18 nt, Homo sapiens
uuaagccauguguuccaa

SEQ ID NO: 188599 - RNA, 20 nt, Homo sapiens
aaaugagaagucucacugau

SEQ ID NO: 188600 - RNA, 16 nt, Homo sapiens
gauuuugcuguagaag

SEQ ID NO: 188601 - RNA, 12 nt, Homo sapiens
aacuucugccuc

SEQ ID NO: 188602 - RNA, 23 nt, Homo sapiens
cuucucugcuaucuagaucugaa

SEQ ID NO: 188603 - RNA, 18 nt, Homo sapiens
auaggaggccaacccaaa

SEQ ID NO: 188604 - RNA, 17 nt, Homo sapiens
uagugaaucacguaaag

SEQ ID NO: 188605 - RNA, 21 nt, Homo sapiens
guuguuaauaaaaguacaugu

SEQ ID NO: 188606 - RNA, 22 nt, Homo sapiens
guaagaucguucucugccucac

SEQ ID NO: 188607 - RNA, 15 nt, Homo sapiens
guauuaaguuguuaa

SEQ ID NO: 188608 - RNA, 21 nt, Homo sapiens
caggguuucaccauguuggcc

SEQ ID NO: 188609 - RNA, 21 nt, Homo sapiens
guaaauuucucuacugucuca

SEQ ID NO: 188610 - RNA, 14 nt, Homo sapiens
uuugucaacaaagu

SEQ ID NO: 188611 - RNA, 12 nt, Homo sapiens
uuugucuuuaug

SEQ ID NO: 188612 - RNA, 19 nt, Homo sapiens
uuuucuucuuuuugcuuca

SEQ ID NO: 188613 - RNA, 17 nt, Homo sapiens
cuucuuuuuguucuuca

SEQ ID NO: 188614 - RNA, 19 nt, Homo sapiens
agggcuuggacucaagcaa

SEQ ID NO: 188615 - RNA, 17 nt, Homo sapiens
cagguucugacucuugg

SEQ ID NO: 188616 - RNA, 15 nt, Homo sapiens
uagaaagaagaugaa

SEQ ID NO: 188617 - RNA, 16 nt, Homo sapiens
gucuaaaaacauuugu

SEQ ID NO: 188618 - RNA, 13 nt, Homo sapiens
caaucccucaaaa

SEQ ID NO: 188619 - RNA, 22 nt, Homo sapiens
aagaaaaguuuuguaaauuucu

SEQ ID NO: 188620 - RNA, 14 nt, Homo sapiens
acacagcaucagcu

SEQ ID NO: 188621 - RNA, 12 nt, Homo sapiens
gaaccaggccag

SEQ ID NO: 188622 - RNA, 13 nt, Homo sapiens
uaauaaagacagg

SEQ ID NO: 188623 - RNA, 16 nt, Homo sapiens
ucaauguccuacugag

SEQ ID NO: 188624 - RNA, 13 nt, Homo sapiens
ucaaagugagcuc

SEQ ID NO: 188625 - RNA, 14 nt, Homo sapiens
aaugagacuuacuu

SEQ ID NO: 188626 - RNA, 21 nt, Homo sapiens
aaaaguuuuguaaauuucucu

SEQ ID NO: 188627 - RNA, 20 nt, Homo sapiens
cuauaaaaugagaagucuca

SEQ ID NO: 188628 - RNA, 15 nt, Homo sapiens
uaucuaaaaucugcu

SEQ ID NO: 188629 - RNA, 21 nt, Homo sapiens
ucaaguaauccaccugccucg

SEQ ID NO: 188630 - RNA, 14 nt, Homo sapiens
uguguuuuuaauaa

SEQ ID NO: 188631 - RNA, 12 nt, Homo sapiens
uaagacugugua

SEQ ID NO: 188632 - RNA, 21 nt, Homo sapiens
ugagcaaaaccaaauauucca

SEQ ID NO: 188633 - RNA, 16 nt, Homo sapiens
cugcuucugauaugca

SEQ ID NO: 188634 - RNA, 22 nt, Homo sapiens
gaaaauugggaauaugcacaaa

SEQ ID NO: 188635 - RNA, 23 nt, Homo sapiens
gugagacuuugaggguguauauu

SEQ ID NO: 188636 - RNA, 19 nt, Homo sapiens
aagccauguguuccaaggc

SEQ ID NO: 188637 - RNA, 14 nt, Homo sapiens
aagaaacauugccu

SEQ ID NO: 188638 - RNA, 14 nt, Homo sapiens
gcuguagaagaugg

SEQ ID NO: 188639 - RNA, 14 nt, Homo sapiens
gcuucugauaugca

SEQ ID NO: 188640 - RNA, 12 nt, Homo sapiens
auugcuugcaca

SEQ ID NO: 188641 - RNA, 19 nt, Homo sapiens
uacaaaguaagccauguau

SEQ ID NO: 188642 - RNA, 14 nt, Homo sapiens
ucucugcuaucuag

SEQ ID NO: 188643 - RNA, 15 nt, Homo sapiens
uuaaaaauaugugua

SEQ ID NO: 188644 - RNA, 14 nt, Homo sapiens
uagaagauggcacu

SEQ ID NO: 188645 - RNA, 19 nt, Homo sapiens
caaagugcugggauuacag

SEQ ID NO: 188646 - RNA, 14 nt, Homo sapiens
uuaauaaaaguaca

SEQ ID NO: 188647 - RNA, 21 nt, Homo sapiens
uuaaauguagaaagugaucca

SEQ ID NO: 188648 - RNA, 21 nt, Homo sapiens
uggggacacagcaucagcuca

SEQ ID NO: 188649 - RNA, 18 nt, Homo sapiens
ucagaaaauggcacuugg

SEQ ID NO: 188650 - RNA, 16 nt, Homo sapiens
uagaaauccaauugga

SEQ ID NO: 188651 - RNA, 20 nt, Homo sapiens
gccacucuguaauugcaaaa

SEQ ID NO: 188652 - RNA, 21 nt, Homo sapiens
gacagcacagccaaccuagcu

SEQ ID NO: 188653 - RNA, 23 nt, Homo sapiens
aauugggccaaagaaacauugcc

SEQ ID NO: 188654 - RNA, 22 nt, Homo sapiens
guuucauauugaugugugucua

SEQ ID NO: 188655 - RNA, 16 nt, Homo sapiens
ucagcaccuacagugu

SEQ ID NO: 188656 - RNA, 21 nt, Homo sapiens
agacgugauuuugcuguagaa

SEQ ID NO: 188657 - RNA, 14 nt, Homo sapiens
uagaauucagucaa

SEQ ID NO: 188658 - RNA, 17 nt, Homo sapiens
uaugacacucuagucaa

SEQ ID NO: 188659 - RNA, 12 nt, Homo sapiens
ucugcuagggaa

SEQ ID NO: 188660 - RNA, 21 nt, Homo sapiens
aagauuucagauuugugacca

SEQ ID NO: 188661 - RNA, 16 nt, Homo sapiens
augagcaaaaccaaau

SEQ ID NO: 188662 - RNA, 20 nt, Homo sapiens
ugucuuuggugaacauugca

SEQ ID NO: 188663 - RNA, 13 nt, Homo sapiens
aaaagacugacca

SEQ ID NO: 188664 - RNA, 18 nt, Homo sapiens
caaggucuccagagggug

SEQ ID NO: 188665 - RNA, 14 nt, Homo sapiens
cacuguuaagccau

SEQ ID NO: 188666 - RNA, 20 nt, Homo sapiens
gaccugccaggcacacugag

SEQ ID NO: 188667 - RNA, 17 nt, Homo sapiens
ccagagccucaaaugag

SEQ ID NO: 188668 - RNA, 15 nt, Homo sapiens
cccgucgacguagaa

SEQ ID NO: 188669 - RNA, 17 nt, Homo sapiens
uaaauauagcucaggua

SEQ ID NO: 188670 - RNA, 15 nt, Homo sapiens
aaugacacagucuug

SEQ ID NO: 188671 - RNA, 21 nt, Homo sapiens
cugaccaauauuguacaguuu

SEQ ID NO: 188672 - RNA, 22 nt, Homo sapiens
uagagaccaguuuucucuggaa

SEQ ID NO: 188673 - RNA, 23 nt, Homo sapiens
accagagaagggcuuggacucaa

SEQ ID NO: 188674 - RNA, 22 nt, Homo sapiens
aaagccaaucucaaucccucaa

SEQ ID NO: 188675 - RNA, 16 nt, Homo sapiens
ucaacaaagucaccca

SEQ ID NO: 188676 - RNA, 22 nt, Homo sapiens
ucccucaaaacaaucuugucau

SEQ ID NO: 188677 - RNA, 12 nt, Homo sapiens
ggagacacugau

SEQ ID NO: 188678 - RNA, 20 nt, Homo sapiens
guuaaaauaaaauuguacau

SEQ ID NO: 188679 - RNA, 18 nt, Homo sapiens
aauugggaauaugcacaa

SEQ ID NO: 188680 - RNA, 17 nt, Homo sapiens
guuguuuucccaaagag

SEQ ID NO: 188681 - RNA, 13 nt, Homo sapiens
uguaucucaggaa

SEQ ID NO: 188682 - RNA, 21 nt, Homo sapiens
auucucuagucaguuggcuaa

SEQ ID NO: 188683 - RNA, 20 nt, Homo sapiens
auuugcuuagaaagucugau

SEQ ID NO: 188684 - RNA, 23 nt, Homo sapiens
uguauauuuucugugcagccacu

SEQ ID NO: 188685 - RNA, 21 nt, Homo sapiens
acuuuuuccuggcucaucucu

SEQ ID NO: 188686 - RNA, 19 nt, Homo sapiens
aaccaaauauuccagagac

SEQ ID NO: 188687 - RNA, 12 nt, Homo sapiens
uuugcuguagaa

SEQ ID NO: 188688 - RNA, 21 nt, Homo sapiens
accucgagguuucucaaagaa

SEQ ID NO: 188689 - RNA, 23 nt, Homo sapiens
aauaagcaggcgugaccugccag

SEQ ID NO: 188690 - RNA, 18 nt, Homo sapiens
aucacauucccauuugcu

SEQ ID NO: 188691 - RNA, 19 nt, Homo sapiens
cagucuuggcucacugcaa

SEQ ID NO: 188692 - RNA, 12 nt, Homo sapiens
gguauuuagcca

SEQ ID NO: 188693 - RNA, 22 nt, Homo sapiens
ucuaaagauggaaaaaccaccc

SEQ ID NO: 188694 - RNA, 20 nt, Homo sapiens
aguuuccaaauuauggcaaa

SEQ ID NO: 188695 - RNA, 21 nt, Homo sapiens
ucugccuccccuucacuccca

SEQ ID NO: 188696 - RNA, 16 nt, Homo sapiens
cugugccaucagcucc

SEQ ID NO: 188697 - RNA, 16 nt, Homo sapiens
gugccaucagcuccuu

SEQ ID NO: 188698 - RNA, 19 nt, Homo sapiens
ugccaucuuggacuuguca

SEQ ID NO: 188699 - RNA, 14 nt, Homo sapiens
ucuuaguugcugua

SEQ ID NO: 188700 - RNA, 14 nt, Homo sapiens
guuccgacugccau

SEQ ID NO: 188701 - RNA, 18 nt, Homo sapiens
cucccagccagguucuga

SEQ ID NO: 188702 - RNA, 23 nt, Homo sapiens
ccacuguuaagccauguguucca

SEQ ID NO: 188703 - RNA, 22 nt, Homo sapiens
aaaauaugacacucuagucaaa

SEQ ID NO: 188704 - RNA, 21 nt, Homo sapiens
uaaauguagaaagugauccau

SEQ ID NO: 188705 - RNA, 23 nt, Homo sapiens
guugauuucagcaccuacagugu

SEQ ID NO: 188706 - RNA, 21 nt, Homo sapiens
aacaaucuugucauacuugaa

SEQ ID NO: 188707 - RNA, 19 nt, Homo sapiens
caguaguggugacuguggg

SEQ ID NO: 188708 - RNA, 16 nt, Homo sapiens
uacaaaguaagccaug

SEQ ID NO: 188709 - RNA, 13 nt, Homo sapiens
gucacagccacuu

SEQ ID NO: 188710 - RNA, 17 nt, Homo sapiens
caggacagcuccuggac

SEQ ID NO: 188711 - RNA, 15 nt, Homo sapiens
aacauugcaauagaa

SEQ ID NO: 188712 - RNA, 19 nt, Homo sapiens
agugauucuccugccucag

SEQ ID NO: 188713 - RNA, 16 nt, Homo sapiens
aaguuuaauugacuua

SEQ ID NO: 188714 - RNA, 14 nt, Homo sapiens
guuuaguugcacaa

SEQ ID NO: 188715 - RNA, 15 nt, Homo sapiens
caacaaagucaccca

SEQ ID NO: 188716 - RNA, 14 nt, Homo sapiens
uuauggcaaauuca

SEQ ID NO: 188717 - RNA, 18 nt, Homo sapiens
cauauugaugugugucua

SEQ ID NO: 188718 - RNA, 17 nt, Homo sapiens
auucagggagugggcua

SEQ ID NO: 188719 - RNA, 23 nt, Homo sapiens
ggcagaguacaaaguaagccaug

SEQ ID NO: 188720 - RNA, 17 nt, Homo sapiens
gauuugggcucuuggaa

SEQ ID NO: 188721 - RNA, 17 nt, Homo sapiens
cuagaguucauggauau

SEQ ID NO: 188722 - RNA, 19 nt, Homo sapiens
acauuuguuguucuguuaa

SEQ ID NO: 188723 - RNA, 16 nt, Homo sapiens
gauucuccugccucag

SEQ ID NO: 188724 - RNA, 11 nt, Homo sapiens
aguugcacaaa

SEQ ID NO: 188725 - RNA, 16 nt, Homo sapiens
ucaaagccuugguaaa

SEQ ID NO: 188726 - RNA, 24 nt, Homo sapiens
cauguuggccaggcuggucucaaa

SEQ ID NO: 188727 - RNA, 20 nt, Homo sapiens
cuuguuguuuucccaaagag

SEQ ID NO: 188728 - RNA, 22 nt, Homo sapiens
agcaaaaccaaauauuccagag

SEQ ID NO: 188729 - RNA, 15 nt, Homo sapiens
cucuguaauugcaaa

SEQ ID NO: 188730 - RNA, 19 nt, Homo sapiens
gacgugauuuugcuguaga

SEQ ID NO: 188731 - RNA, 15 nt, Homo sapiens
uccuguuacaaaaga

SEQ ID NO: 188732 - RNA, 19 nt, Homo sapiens
ccacuauugcuugcacaaa

SEQ ID NO: 188733 - RNA, 23 nt, Homo sapiens
cuuggaauccuggggaacauaga

SEQ ID NO: 188734 - RNA, 21 nt, Homo sapiens
aagggauggaagaaguaaaua

SEQ ID NO: 188735 - RNA, 17 nt, Homo sapiens
ucaugagugcaacugug

SEQ ID NO: 188736 - RNA, 22 nt, Homo sapiens
ccauuugcuuagaaagucugau

SEQ ID NO: 188737 - RNA, 13 nt, Homo sapiens
agcaaaaccaaau

SEQ ID NO: 188738 - RNA, 18 nt, Homo sapiens
ggacucaagcaagauuuc

SEQ ID NO: 188739 - RNA, 14 nt, Homo sapiens
acagccacuuggga

SEQ ID NO: 188740 - RNA, 17 nt, Homo sapiens
uauugaacuuaugcaaa

SEQ ID NO: 188741 - RNA, 12 nt, Homo sapiens
aaugaaagugag

SEQ ID NO: 188742 - RNA, 16 nt, Homo sapiens
cccuccauucugcacu

SEQ ID NO: 188743 - RNA, 23 nt, Human herpesvirus 8 (Kaposi`s sarcoma-associated h
uuugaaagcaauaaagacaaaug

SEQ ID NO: 188744 - RNA, 19 nt, Human herpesvirus 8 (Kaposi`s sarcoma-associated h
uuugacaagucuucuuguc

SEQ ID NO: 188745 - RNA, 14 nt, Human herpesvirus 8 (Kaposi`s sarcoma-associated h
ugccuuuugcuuaa

SEQ ID NO: 188746 - RNA, 17 nt, Human herpesvirus 8 (Kaposi`s sarcoma-associated h
ugccuguaccagugucg

SEQ ID NO: 188747 - RNA, 18 nt, Human herpesvirus 8 (Kaposi`s sarcoma-associated h
ugccugcuuacaaugugu

SEQ ID NO: 188748 - RNA, 18 nt, Human herpesvirus 8 (Kaposi`s sarcoma-associated h
ugccguggacaccacauu

SEQ ID NO: 188749 - RNA, 13 nt, Human herpesvirus 8 (Kaposi`s sarcoma-associated h
ugccuccaccgga

SEQ ID NO: 188750 - RNA, 18 nt, Human herpesvirus 8 (Kaposi`s sarcoma-associated h
ugcccuaaaugugacaau

SEQ ID NO: 188751 - RNA, 16 nt, Human herpesvirus 8 (Kaposi`s sarcoma-associated h
ugcccagacaccaaag

SEQ ID NO: 188752 - RNA, 20 nt, Human herpesvirus 8 (Kaposi`s sarcoma-associated h
ugcccagacaccaaagacaa

SEQ ID NO: 188753 - RNA, 19 nt, Human herpesvirus 8 (Kaposi`s sarcoma-associated h
ugcccugguugacacaaug

SEQ ID NO: 188754 - RNA, 12 nt, Human herpesvirus 8 (Kaposi`s sarcoma-associated h
ugcgucuacugc

SEQ ID NO: 188755 - RNA, 23 nt, Human herpesvirus 8 (Kaposi`s sarcoma-associated h
ugcgggcgauuacaggaaacugg

SEQ ID NO: 188756 - RNA, 14 nt, Human herpesvirus 8 (Kaposi`s sarcoma-associated h
ugcgcuauuugccg

SEQ ID NO: 188757 - RNA, 15 nt, Human herpesvirus 8 (Kaposi`s sarcoma-associated h
ugcgcgguguggcag

SEQ ID NO: 188758 - RNA, 21 nt, Human herpesvirus 8 (Kaposi`s sarcoma-associated h
ugcgauagggggaugagccag

SEQ ID NO: 188759 - RNA, 23 nt, Human herpesvirus 8 (Kaposi`s sarcoma-associated h
ugcgauagggggaugagccagaa

SEQ ID NO: 188760 - RNA, 19 nt, Human herpesvirus 8 (Kaposi`s sarcoma-associated h
ugcagcuggacuggaguca

SEQ ID NO: 188761 - RNA, 18 nt, Human herpesvirus 8 (Kaposi`s sarcoma-associated h
ugcaacccucguguuugg

SEQ ID NO: 188762 - RNA, 17 nt, Human herpesvirus 8 (Kaposi`s sarcoma-associated h
ugcaacccucuacucuu

SEQ ID NO: 188763 - RNA, 20 nt, Human herpesvirus 8 (Kaposi`s sarcoma-associated h
ugcaaaagagacacuaucuc

SEQ ID NO: 188764 - RNA, 15 nt, Human herpesvirus 8 (Kaposi`s sarcoma-associated h
ugcaaaauaaagucu

SEQ ID NO: 188765 - RNA, 13 nt, Human herpesvirus 8 (Kaposi`s sarcoma-associated h
ugcaaacuauaca

SEQ ID NO: 188766 - RNA, 15 nt, Human herpesvirus 8 (Kaposi`s sarcoma-associated h
ugcaaacuauacaca

SEQ ID NO: 188767 - RNA, 16 nt, Human herpesvirus 8 (Kaposi`s sarcoma-associated h
ugcaaaaugugcuuug

SEQ ID NO: 188768 - RNA, 13 nt, Human herpesvirus 8 (Kaposi`s sarcoma-associated h
ugccaugguacca

SEQ ID NO: 188769 - RNA, 22 nt, Human herpesvirus 8 (Kaposi`s sarcoma-associated h
ugccaugguaccauucgugugg

SEQ ID NO: 188770 - RNA, 20 nt, Human herpesvirus 8 (Kaposi`s sarcoma-associated h
ugccaacgaccugaugcagg

SEQ ID NO: 188771 - RNA, 20 nt, Human herpesvirus 8 (Kaposi`s sarcoma-associated h
ugccaaggagugggaucucc

SEQ ID NO: 188772 - RNA, 11 nt, Human herpesvirus 8 (Kaposi`s sarcoma-associated h
ugcauugcucu

SEQ ID NO: 188773 - RNA, 20 nt, Human herpesvirus 8 (Kaposi`s sarcoma-associated h
ugcauucugguggaucuaga

SEQ ID NO: 188774 - RNA, 12 nt, Human herpesvirus 8 (Kaposi`s sarcoma-associated h
ugcaugugguua

SEQ ID NO: 188775 - RNA, 20 nt, Human herpesvirus 8 (Kaposi`s sarcoma-associated h
ugcaugcucggcaacauuca

SEQ ID NO: 188776 - RNA, 21 nt, Human herpesvirus 8 (Kaposi`s sarcoma-associated h
ugcaugcucggcaacauucaa

SEQ ID NO: 188777 - RNA, 16 nt, Human herpesvirus 8 (Kaposi`s sarcoma-associated h
ugcaugcuggcgaugc

SEQ ID NO: 188778 - RNA, 15 nt, Human herpesvirus 8 (Kaposi`s sarcoma-associated h
ucuguaaaacacugu

SEQ ID NO: 188779 - RNA, 16 nt, Human herpesvirus 8 (Kaposi`s sarcoma-associated h
ucuuuuccaccuacac

SEQ ID NO: 188780 - RNA, 14 nt, Human herpesvirus 8 (Kaposi`s sarcoma-associated h
ucuuuucaaccucg

SEQ ID NO: 188781 - RNA, 18 nt, Human herpesvirus 8 (Kaposi`s sarcoma-associated h
ucuggauacacuacuuau

SEQ ID NO: 188782 - RNA, 21 nt, Human herpesvirus 8 (Kaposi`s sarcoma-associated h
ucugcugcaucacgccauacc

SEQ ID NO: 188783 - RNA, 19 nt, Human herpesvirus 8 (Kaposi`s sarcoma-associated h
ucuggcuggcgcucagggu

SEQ ID NO: 188784 - RNA, 14 nt, Human herpesvirus 8 (Kaposi`s sarcoma-associated h
ugaaaaagaggcaa

SEQ ID NO: 188785 - RNA, 15 nt, Human herpesvirus 8 (Kaposi`s sarcoma-associated h
ugaaaaguguuccca

SEQ ID NO: 188786 - RNA, 12 nt, Human herpesvirus 8 (Kaposi`s sarcoma-associated h
ugaaaauacagg

SEQ ID NO: 188787 - RNA, 16 nt, Human herpesvirus 8 (Kaposi`s sarcoma-associated h
ugaaacuaccagccau

SEQ ID NO: 188788 - RNA, 11 nt, Human herpesvirus 8 (Kaposi`s sarcoma-associated h
ugaaacauucg

SEQ ID NO: 188789 - RNA, 14 nt, Human herpesvirus 8 (Kaposi`s sarcoma-associated h
ugaaguuuacauua

SEQ ID NO: 188790 - RNA, 21 nt, Human herpesvirus 8 (Kaposi`s sarcoma-associated h
ugaauaacuuuauuacaggua

SEQ ID NO: 188791 - RNA, 16 nt, Human herpesvirus 8 (Kaposi`s sarcoma-associated h
ugaauacccuggauca

SEQ ID NO: 188792 - RNA, 21 nt, Human herpesvirus 8 (Kaposi`s sarcoma-associated h
ugaauacccuggaucagggaa

SEQ ID NO: 188793 - RNA, 16 nt, Human herpesvirus 8 (Kaposi`s sarcoma-associated h
ugacauguggagccac

SEQ ID NO: 188794 - RNA, 19 nt, Human herpesvirus 8 (Kaposi`s sarcoma-associated h
ugacagggacgcauaucac

SEQ ID NO: 188795 - RNA, 16 nt, Human herpesvirus 8 (Kaposi`s sarcoma-associated h
ugacauacaugagaga

SEQ ID NO: 188796 - RNA, 14 nt, Human herpesvirus 8 (Kaposi`s sarcoma-associated h
ugaaugugaucacg

SEQ ID NO: 188797 - RNA, 12 nt, Human herpesvirus 8 (Kaposi`s sarcoma-associated h
ugaguguaaaaa

SEQ ID NO: 188798 - RNA, 17 nt, Human herpesvirus 8 (Kaposi`s sarcoma-associated h
ugaggugcucuucccac

SEQ ID NO: 188799 - RNA, 13 nt, Human herpesvirus 8 (Kaposi`s sarcoma-associated h
ugauacagggaca

SEQ ID NO: 188800 - RNA, 20 nt, Human herpesvirus 8 (Kaposi`s sarcoma-associated h
ugacgggguaucgccgccag

SEQ ID NO: 188801 - RNA, 17 nt, Human herpesvirus 8 (Kaposi`s sarcoma-associated h
ugacggguuugugauag

SEQ ID NO: 188802 - RNA, 16 nt, Human herpesvirus 8 (Kaposi`s sarcoma-associated h
ugaggucggauacuua

SEQ ID NO: 188803 - RNA, 22 nt, Human herpesvirus 8 (Kaposi`s sarcoma-associated h
ugagguaauucuagaaagcgga

SEQ ID NO: 188804 - RNA, 14 nt, Human herpesvirus 8 (Kaposi`s sarcoma-associated h
ugaggaccuuguca

SEQ ID NO: 188805 - RNA, 21 nt, Human herpesvirus 8 (Kaposi`s sarcoma-associated h
ugacgcccuggucgacgccgu

SEQ ID NO: 188806 - RNA, 21 nt, Human herpesvirus 8 (Kaposi`s sarcoma-associated h
ugaccuuguuuguuaaugaaa

SEQ ID NO: 188807 - RNA, 22 nt, Human herpesvirus 8 (Kaposi`s sarcoma-associated h
ugacccacauagaccuacaccc

SEQ ID NO: 188808 - RNA, 15 nt, Human herpesvirus 8 (Kaposi`s sarcoma-associated h
ugaccacgcacuaua

SEQ ID NO: 188809 - RNA, 19 nt, Human herpesvirus 8 (Kaposi`s sarcoma-associated h
ucucccguggccugcauug

SEQ ID NO: 188810 - RNA, 14 nt, Human herpesvirus 8 (Kaposi`s sarcoma-associated h
ucucccaaaccaca

SEQ ID NO: 188811 - RNA, 22 nt, Human herpesvirus 8 (Kaposi`s sarcoma-associated h
ucuccgccagggacgccgauag

SEQ ID NO: 188812 - RNA, 21 nt, Human herpesvirus 8 (Kaposi`s sarcoma-associated h
ucuccagaucacccagugugc

SEQ ID NO: 188813 - RNA, 16 nt, Human herpesvirus 8 (Kaposi`s sarcoma-associated h
ucuccagaagagcauu

SEQ ID NO: 188814 - RNA, 17 nt, Human herpesvirus 8 (Kaposi`s sarcoma-associated h
ucuccagaagagcauuu

SEQ ID NO: 188815 - RNA, 19 nt, Human herpesvirus 8 (Kaposi`s sarcoma-associated h
ucucaugcuuuauucccaa

SEQ ID NO: 188816 - RNA, 14 nt, Human herpesvirus 8 (Kaposi`s sarcoma-associated h
ucugcaucauggga

SEQ ID NO: 188817 - RNA, 20 nt, Human herpesvirus 8 (Kaposi`s sarcoma-associated h
ucugauucuuagauaguguu

SEQ ID NO: 188818 - RNA, 19 nt, Human herpesvirus 8 (Kaposi`s sarcoma-associated h
ucugcguuccacaaacaca

SEQ ID NO: 188819 - RNA, 13 nt, Human herpesvirus 8 (Kaposi`s sarcoma-associated h
ucuaauaaacaag

SEQ ID NO: 188820 - RNA, 21 nt, Human herpesvirus 8 (Kaposi`s sarcoma-associated h
ucuaauaaacaagcuaccugc

SEQ ID NO: 188821 - RNA, 16 nt, Human herpesvirus 8 (Kaposi`s sarcoma-associated h
ucuaaucuggcaugua

SEQ ID NO: 188822 - RNA, 22 nt, Human herpesvirus 8 (Kaposi`s sarcoma-associated h
ucuaaucuuagucuuacuguca

SEQ ID NO: 188823 - RNA, 17 nt, Human herpesvirus 8 (Kaposi`s sarcoma-associated h
ucucacccaauacuuaa

SEQ ID NO: 188824 - RNA, 22 nt, Human herpesvirus 8 (Kaposi`s sarcoma-associated h
ucucauagacuuucuaaagguu

SEQ ID NO: 188825 - RNA, 14 nt, Human herpesvirus 8 (Kaposi`s sarcoma-associated h
ucucauaacuagug

SEQ ID NO: 188826 - RNA, 20 nt, Human herpesvirus 8 (Kaposi`s sarcoma-associated h
ucucacgacccaucuaccuc

SEQ ID NO: 188827 - RNA, 21 nt, Human herpesvirus 8 (Kaposi`s sarcoma-associated h
ucucacgacccaucuaccuca

SEQ ID NO: 188828 - RNA, 23 nt, Human herpesvirus 8 (Kaposi`s sarcoma-associated h
ucuaaaaagagguuggucugcac

SEQ ID NO: 188829 - RNA, 22 nt, Human herpesvirus 8 (Kaposi`s sarcoma-associated h
ucgugggagcggguugucuaca

SEQ ID NO: 188830 - RNA, 17 nt, Human herpesvirus 8 (Kaposi`s sarcoma-associated h
ucggaauguaagcugcu

SEQ ID NO: 188831 - RNA, 13 nt, Human herpesvirus 8 (Kaposi`s sarcoma-associated h
ucgggugggacgu

SEQ ID NO: 188832 - RNA, 16 nt, Human herpesvirus 8 (Kaposi`s sarcoma-associated h
ucggugccuucacaua

SEQ ID NO: 188833 - RNA, 14 nt, Human herpesvirus 8 (Kaposi`s sarcoma-associated h
ucguaagaggaccc

SEQ ID NO: 188834 - RNA, 15 nt, Human herpesvirus 8 (Kaposi`s sarcoma-associated h
ucgguucaaccugga

SEQ ID NO: 188835 - RNA, 20 nt, Human herpesvirus 8 (Kaposi`s sarcoma-associated h
ucgguucuguguuugucuga

SEQ ID NO: 188836 - RNA, 15 nt, Human herpesvirus 8 (Kaposi`s sarcoma-associated h
ucgguggguggcuug

SEQ ID NO: 188837 - RNA, 17 nt, Human herpesvirus 8 (Kaposi`s sarcoma-associated h
ucgugcgccuaggccau

SEQ ID NO: 188838 - RNA, 13 nt, Human herpesvirus 8 (Kaposi`s sarcoma-associated h
ucgugcagccuug

SEQ ID NO: 188839 - RNA, 16 nt, Human herpesvirus 8 (Kaposi`s sarcoma-associated h
ucgugcagccuugcau

SEQ ID NO: 188840 - RNA, 17 nt, Human herpesvirus 8 (Kaposi`s sarcoma-associated h
ucgucuacaacagacuu

SEQ ID NO: 188841 - RNA, 18 nt, Human herpesvirus 8 (Kaposi`s sarcoma-associated h
ucgucuacccugccacuc

SEQ ID NO: 188842 - RNA, 15 nt, Human herpesvirus 8 (Kaposi`s sarcoma-associated h
ucgucgagcacuccu

SEQ ID NO: 188843 - RNA, 14 nt, Human herpesvirus 8 (Kaposi`s sarcoma-associated h
ucguccgacaugug

SEQ ID NO: 188844 - RNA, 15 nt, Human herpesvirus 8 (Kaposi`s sarcoma-associated h
ucguccgacaugugc

SEQ ID NO: 188845 - RNA, 15 nt, Human herpesvirus 8 (Kaposi`s sarcoma-associated h
ucgaagccaggguca

SEQ ID NO: 188846 - RNA, 14 nt, Human herpesvirus 8 (Kaposi`s sarcoma-associated h
ucgcucuuuacuua

SEQ ID NO: 188847 - RNA, 17 nt, Human herpesvirus 8 (Kaposi`s sarcoma-associated h
ucgcugccccaaaaggc

SEQ ID NO: 188848 - RNA, 13 nt, Human herpesvirus 8 (Kaposi`s sarcoma-associated h
uccugcugucuau

SEQ ID NO: 188849 - RNA, 12 nt, Human herpesvirus 8 (Kaposi`s sarcoma-associated h
uccugcauuugg

SEQ ID NO: 188850 - RNA, 16 nt, Human herpesvirus 8 (Kaposi`s sarcoma-associated h
uccugcauuuggacac

SEQ ID NO: 188851 - RNA, 21 nt, Human herpesvirus 8 (Kaposi`s sarcoma-associated h
uccucuccgcauuaaagcacu

SEQ ID NO: 188852 - RNA, 23 nt, Human herpesvirus 8 (Kaposi`s sarcoma-associated h
ucgaaaaaaauaaugcagacaga

SEQ ID NO: 188853 - RNA, 20 nt, Human herpesvirus 8 (Kaposi`s sarcoma-associated h
ucccaggcaggaguauauca

SEQ ID NO: 188854 - RNA, 14 nt, Human herpesvirus 8 (Kaposi`s sarcoma-associated h
ucccagugccucag

SEQ ID NO: 188855 - RNA, 13 nt, Human herpesvirus 8 (Kaposi`s sarcoma-associated h
ucccaugaugcag

SEQ ID NO: 188856 - RNA, 15 nt, Human herpesvirus 8 (Kaposi`s sarcoma-associated h
ucccaugaugcagag

SEQ ID NO: 188857 - RNA, 21 nt, Human herpesvirus 8 (Kaposi`s sarcoma-associated h
uccccaacaagacaguuguga

SEQ ID NO: 188858 - RNA, 20 nt, Human herpesvirus 8 (Kaposi`s sarcoma-associated h
ucccauuugauauauggaaa

SEQ ID NO: 188859 - RNA, 20 nt, Human herpesvirus 8 (Kaposi`s sarcoma-associated h
uccacauggcagcugaauca

SEQ ID NO: 188860 - RNA, 14 nt, Human herpesvirus 8 (Kaposi`s sarcoma-associated h
uccacccaccaagc

SEQ ID NO: 188861 - RNA, 12 nt, Human herpesvirus 8 (Kaposi`s sarcoma-associated h
ucccaacaugua

SEQ ID NO: 188862 - RNA, 18 nt, Human herpesvirus 8 (Kaposi`s sarcoma-associated h
ucccgccgguugguggug

SEQ ID NO: 188863 - RNA, 15 nt, Human herpesvirus 8 (Kaposi`s sarcoma-associated h
uccccugcaaugcaa

SEQ ID NO: 188864 - RNA, 15 nt, Human herpesvirus 8 (Kaposi`s sarcoma-associated h
uccccugcacaacau

SEQ ID NO: 188865 - RNA, 13 nt, Human herpesvirus 8 (Kaposi`s sarcoma-associated h
ucccccaaccucu

SEQ ID NO: 188866 - RNA, 19 nt, Human herpesvirus 8 (Kaposi`s sarcoma-associated h
uccucuagucguuguagug

SEQ ID NO: 188867 - RNA, 12 nt, Human herpesvirus 8 (Kaposi`s sarcoma-associated h
uccucuugcgcu

SEQ ID NO: 188868 - RNA, 17 nt, Human herpesvirus 8 (Kaposi`s sarcoma-associated h
uccucuaucagcugcag

SEQ ID NO: 188869 - RNA, 13 nt, Human herpesvirus 8 (Kaposi`s sarcoma-associated h
uccuaaacaagga

SEQ ID NO: 188870 - RNA, 22 nt, Human herpesvirus 8 (Kaposi`s sarcoma-associated h
uccguugucgacuauaaccugg

SEQ ID NO: 188871 - RNA, 19 nt, Human herpesvirus 8 (Kaposi`s sarcoma-associated h
uccguuuggacacuccuca

SEQ ID NO: 188872 - RNA, 20 nt, Human herpesvirus 8 (Kaposi`s sarcoma-associated h
uccguauuucugcauuguag

SEQ ID NO: 188873 - RNA, 22 nt, Human herpesvirus 8 (Kaposi`s sarcoma-associated h
uccguauuucugcauuguagug

SEQ ID NO: 188874 - RNA, 17 nt, Human herpesvirus 8 (Kaposi`s sarcoma-associated h
uccgcaacuucuauguu

SEQ ID NO: 188875 - RNA, 13 nt, Human herpesvirus 8 (Kaposi`s sarcoma-associated h
uccgauugcuuca

SEQ ID NO: 188876 - RNA, 17 nt, Human herpesvirus 8 (Kaposi`s sarcoma-associated h
uccgcauuaaagcacuc

SEQ ID NO: 188877 - RNA, 21 nt, Human herpesvirus 8 (Kaposi`s sarcoma-associated h
uccgccacgcagcucaucaau

SEQ ID NO: 188878 - RNA, 22 nt, Human herpesvirus 8 (Kaposi`s sarcoma-associated h
ucauguaccuggcguccagcua

SEQ ID NO: 188879 - RNA, 13 nt, Human herpesvirus 8 (Kaposi`s sarcoma-associated h
ucaugggaccgug

SEQ ID NO: 188880 - RNA, 16 nt, Human herpesvirus 8 (Kaposi`s sarcoma-associated h
ucauuagugacauaca

SEQ ID NO: 188881 - RNA, 15 nt, Human herpesvirus 8 (Kaposi`s sarcoma-associated h
ucauuaugcaugcaa

SEQ ID NO: 188882 - RNA, 18 nt, Human herpesvirus 8 (Kaposi`s sarcoma-associated h
ucauuaugcaugcaauac

SEQ ID NO: 188883 - RNA, 19 nt, Human herpesvirus 8 (Kaposi`s sarcoma-associated h
ucauucacccgagccacau

SEQ ID NO: 188884 - RNA, 15 nt, Human herpesvirus 8 (Kaposi`s sarcoma-associated h
ucaucuucauucucu

SEQ ID NO: 188885 - RNA, 20 nt, Human herpesvirus 8 (Kaposi`s sarcoma-associated h
ucaugauuacagagucacaa

SEQ ID NO: 188886 - RNA, 16 nt, Human herpesvirus 8 (Kaposi`s sarcoma-associated h
ucacaacagacuaccc

SEQ ID NO: 188887 - RNA, 18 nt, Human herpesvirus 8 (Kaposi`s sarcoma-associated h
ucacaacagacuaccccu

SEQ ID NO: 188888 - RNA, 23 nt, Human herpesvirus 8 (Kaposi`s sarcoma-associated h
ucacaccguauauaaacaaggaa

SEQ ID NO: 188889 - RNA, 22 nt, Human herpesvirus 8 (Kaposi`s sarcoma-associated h
ucaucccgccgguugguggugu

SEQ ID NO: 188890 - RNA, 16 nt, Human herpesvirus 8 (Kaposi`s sarcoma-associated h
ucaucaaugggagaac

SEQ ID NO: 188891 - RNA, 22 nt, Human herpesvirus 8 (Kaposi`s sarcoma-associated h
ugguaacucccucaagcauuga

SEQ ID NO: 188892 - RNA, 20 nt, Human herpesvirus 8 (Kaposi`s sarcoma-associated h
ugguuauuggccaggacaau

SEQ ID NO: 188893 - RNA, 14 nt, Human herpesvirus 8 (Kaposi`s sarcoma-associated h
uggugggagucucu

SEQ ID NO: 188894 - RNA, 17 nt, Human herpesvirus 8 (Kaposi`s sarcoma-associated h
uguagaucuggauacac

SEQ ID NO: 188895 - RNA, 18 nt, Human herpesvirus 8 (Kaposi`s sarcoma-associated h
ugguuccacgaaugucag

SEQ ID NO: 188896 - RNA, 23 nt, Human herpesvirus 8 (Kaposi`s sarcoma-associated h
ugguuccguucuccuucuugaug

SEQ ID NO: 188897 - RNA, 18 nt, Human herpesvirus 8 (Kaposi`s sarcoma-associated h
ugguuacucaaaugggaa

SEQ ID NO: 188898 - RNA, 16 nt, Human herpesvirus 8 (Kaposi`s sarcoma-associated h
uguaggcguagagggu

SEQ ID NO: 188899 - RNA, 19 nt, Human herpesvirus 8 (Kaposi`s sarcoma-associated h
uguauccuagaaugaagug

SEQ ID NO: 188900 - RNA, 21 nt, Human herpesvirus 8 (Kaposi`s sarcoma-associated h
uguauccucgcgaaaaugcac

SEQ ID NO: 188901 - RNA, 17 nt, Human herpesvirus 8 (Kaposi`s sarcoma-associated h
uguccgagcacauaugg

SEQ ID NO: 188902 - RNA, 23 nt, Human herpesvirus 8 (Kaposi`s sarcoma-associated h
uguaugccgcacucggcguacag

SEQ ID NO: 188903 - RNA, 23 nt, Human herpesvirus 8 (Kaposi`s sarcoma-associated h
uguaucagaacaguggugcacua

SEQ ID NO: 188904 - RNA, 14 nt, Human herpesvirus 8 (Kaposi`s sarcoma-associated h
uguauugacaccau

SEQ ID NO: 188905 - RNA, 16 nt, Human herpesvirus 8 (Kaposi`s sarcoma-associated h
ugugagcaucaccaac

SEQ ID NO: 188906 - RNA, 15 nt, Human herpesvirus 8 (Kaposi`s sarcoma-associated h
ugucuagacaauaaa

SEQ ID NO: 188907 - RNA, 18 nt, Human herpesvirus 8 (Kaposi`s sarcoma-associated h
ugucgcgacagacugccu

SEQ ID NO: 188908 - RNA, 16 nt, Human herpesvirus 8 (Kaposi`s sarcoma-associated h
ugucgccccaggauca

SEQ ID NO: 188909 - RNA, 22 nt, Human herpesvirus 8 (Kaposi`s sarcoma-associated h
uguccuccucugaguuugacga

SEQ ID NO: 188910 - RNA, 15 nt, Human herpesvirus 8 (Kaposi`s sarcoma-associated h
uguccugauuuucca

SEQ ID NO: 188911 - RNA, 23 nt, Human herpesvirus 8 (Kaposi`s sarcoma-associated h
uguccuucgcacuucuugaccaa

SEQ ID NO: 188912 - RNA, 16 nt, Human herpesvirus 8 (Kaposi`s sarcoma-associated h
ugucgacuauaaccug

SEQ ID NO: 188913 - RNA, 19 nt, Human herpesvirus 8 (Kaposi`s sarcoma-associated h
uggcacacgcugcaaugua

SEQ ID NO: 188914 - RNA, 23 nt, Human herpesvirus 8 (Kaposi`s sarcoma-associated h
uggcacacgguuacuagcaccac

SEQ ID NO: 188915 - RNA, 22 nt, Human herpesvirus 8 (Kaposi`s sarcoma-associated h
uggcgcguaacggcaggcguga

SEQ ID NO: 188916 - RNA, 12 nt, Human herpesvirus 8 (Kaposi`s sarcoma-associated h
uggcaacugcca

SEQ ID NO: 188917 - RNA, 21 nt, Human herpesvirus 8 (Kaposi`s sarcoma-associated h
uggcaagcaguggagcaagac

SEQ ID NO: 188918 - RNA, 22 nt, Human herpesvirus 8 (Kaposi`s sarcoma-associated h
uggcaagaaauccgagcaccuc

SEQ ID NO: 188919 - RNA, 16 nt, Human herpesvirus 8 (Kaposi`s sarcoma-associated h
uggcuaucuugcugca

SEQ ID NO: 188920 - RNA, 19 nt, Human herpesvirus 8 (Kaposi`s sarcoma-associated h
uggcugccuggacaguauu

SEQ ID NO: 188921 - RNA, 16 nt, Human herpesvirus 8 (Kaposi`s sarcoma-associated h
uggcguuuaccugcac

SEQ ID NO: 188922 - RNA, 22 nt, Human herpesvirus 8 (Kaposi`s sarcoma-associated h
uggcaaaaucuguugaauguga

SEQ ID NO: 188923 - RNA, 21 nt, Human herpesvirus 8 (Kaposi`s sarcoma-associated h
ugggucguggcgccuuuggca

SEQ ID NO: 188924 - RNA, 22 nt, Human herpesvirus 8 (Kaposi`s sarcoma-associated h
ugggucuacuucgcuaacugua

SEQ ID NO: 188925 - RNA, 21 nt, Human herpesvirus 8 (Kaposi`s sarcoma-associated h
uggguacuaugggugaccaca

SEQ ID NO: 188926 - RNA, 12 nt, Human herpesvirus 8 (Kaposi`s sarcoma-associated h
uggggaugacuc

SEQ ID NO: 188927 - RNA, 15 nt, Human herpesvirus 8 (Kaposi`s sarcoma-associated h
uggggcuacacauca

SEQ ID NO: 188928 - RNA, 17 nt, Human herpesvirus 8 (Kaposi`s sarcoma-associated h
ugggguugcauagggcu

SEQ ID NO: 188929 - RNA, 16 nt, Human herpesvirus 8 (Kaposi`s sarcoma-associated h
ugggggauccacucag

SEQ ID NO: 188930 - RNA, 14 nt, Human herpesvirus 8 (Kaposi`s sarcoma-associated h
ugggggucucggga

SEQ ID NO: 188931 - RNA, 19 nt, Human herpesvirus 8 (Kaposi`s sarcoma-associated h
ugggccaugacaacugcca

SEQ ID NO: 188932 - RNA, 14 nt, Human herpesvirus 8 (Kaposi`s sarcoma-associated h
ugggcuagugccaa

SEQ ID NO: 188933 - RNA, 17 nt, Human herpesvirus 8 (Kaposi`s sarcoma-associated h
ugggcuuguacaugugu

SEQ ID NO: 188934 - RNA, 19 nt, Human herpesvirus 8 (Kaposi`s sarcoma-associated h
ugggcuuguacaugugucu

SEQ ID NO: 188935 - RNA, 16 nt, Human herpesvirus 8 (Kaposi`s sarcoma-associated h
ugggcaaaauaccugu

SEQ ID NO: 188936 - RNA, 12 nt, Human herpesvirus 8 (Kaposi`s sarcoma-associated h
uggcuguuacaa

SEQ ID NO: 188937 - RNA, 15 nt, Human herpesvirus 8 (Kaposi`s sarcoma-associated h
uggcuguuacaauaa

SEQ ID NO: 188938 - RNA, 21 nt, Human herpesvirus 8 (Kaposi`s sarcoma-associated h
uggcuguuacaauaaagcuga

SEQ ID NO: 188939 - RNA, 17 nt, Human herpesvirus 8 (Kaposi`s sarcoma-associated h
uguuuauuucaagagcc

SEQ ID NO: 188940 - RNA, 22 nt, Human herpesvirus 8 (Kaposi`s sarcoma-associated h
uguuucccacgugcaccagcuc

SEQ ID NO: 188941 - RNA, 18 nt, Human herpesvirus 8 (Kaposi`s sarcoma-associated h
uuaaaaaccacucacuga

SEQ ID NO: 188942 - RNA, 15 nt, Human herpesvirus 8 (Kaposi`s sarcoma-associated h
uguuuucggacgcua

SEQ ID NO: 188943 - RNA, 20 nt, Human herpesvirus 8 (Kaposi`s sarcoma-associated h
uuaaaaacaaguagcuguug

SEQ ID NO: 188944 - RNA, 16 nt, Human herpesvirus 8 (Kaposi`s sarcoma-associated h
uuaaaaggacauugua

SEQ ID NO: 188945 - RNA, 13 nt, Human herpesvirus 8 (Kaposi`s sarcoma-associated h
uuaaaagguuucc

SEQ ID NO: 188946 - RNA, 17 nt, Human herpesvirus 8 (Kaposi`s sarcoma-associated h
uuaaaaugcguuuuaga

SEQ ID NO: 188947 - RNA, 16 nt, Human herpesvirus 8 (Kaposi`s sarcoma-associated h
uuaaacgacaaaguga

SEQ ID NO: 188948 - RNA, 20 nt, Human herpesvirus 8 (Kaposi`s sarcoma-associated h
ugugcauuuauuagacguug

SEQ ID NO: 188949 - RNA, 20 nt, Human herpesvirus 8 (Kaposi`s sarcoma-associated h
ugugccuaucaaucugagaa

SEQ ID NO: 188950 - RNA, 23 nt, Human herpesvirus 8 (Kaposi`s sarcoma-associated h
ugugcacuagcagaaaacugucu

SEQ ID NO: 188951 - RNA, 23 nt, Human herpesvirus 8 (Kaposi`s sarcoma-associated h
uguuccaagagcgagugugccuc

SEQ ID NO: 188952 - RNA, 23 nt, Human herpesvirus 8 (Kaposi`s sarcoma-associated h
uguucaggugguaauaaagucau

SEQ ID NO: 188953 - RNA, 18 nt, Human herpesvirus 8 (Kaposi`s sarcoma-associated h
uguucgauucauuacugg

SEQ ID NO: 188954 - RNA, 13 nt, Human herpesvirus 8 (Kaposi`s sarcoma-associated h
uuaggggcgguga

SEQ ID NO: 188955 - RNA, 14 nt, Human herpesvirus 8 (Kaposi`s sarcoma-associated h
uuagaaacaaagca

SEQ ID NO: 188956 - RNA, 19 nt, Human herpesvirus 8 (Kaposi`s sarcoma-associated h
uuaguacgugguaagggaa

SEQ ID NO: 188957 - RNA, 22 nt, Human herpesvirus 8 (Kaposi`s sarcoma-associated h
uuagugaaacccccugugccuu

SEQ ID NO: 188958 - RNA, 22 nt, Human herpesvirus 8 (Kaposi`s sarcoma-associated h
uuacuagcaccacuauuucugc

SEQ ID NO: 188959 - RNA, 16 nt, Human herpesvirus 8 (Kaposi`s sarcoma-associated h
uuacuauaaacagccu

SEQ ID NO: 188960 - RNA, 13 nt, Human herpesvirus 8 (Kaposi`s sarcoma-associated h
uuacuguccauua

SEQ ID NO: 188961 - RNA, 22 nt, Human herpesvirus 8 (Kaposi`s sarcoma-associated h
uuacaauaaagccgagccacaa

SEQ ID NO: 188962 - RNA, 22 nt, Human herpesvirus 8 (Kaposi`s sarcoma-associated h
uuacaauaaagcugagccacaa

SEQ ID NO: 188963 - RNA, 15 nt, Human herpesvirus 8 (Kaposi`s sarcoma-associated h
uuacagagucacaaa

SEQ ID NO: 188964 - RNA, 15 nt, Human herpesvirus 8 (Kaposi`s sarcoma-associated h
uuaacgcagauaucg

SEQ ID NO: 188965 - RNA, 21 nt, Human herpesvirus 8 (Kaposi`s sarcoma-associated h
uucuauacaugccccuuaucu

SEQ ID NO: 188966 - RNA, 16 nt, Human herpesvirus 8 (Kaposi`s sarcoma-associated h
uucucaucgcaugcga

SEQ ID NO: 188967 - RNA, 17 nt, Human herpesvirus 8 (Kaposi`s sarcoma-associated h
uucuccguugacaggga

SEQ ID NO: 188968 - RNA, 13 nt, Human herpesvirus 8 (Kaposi`s sarcoma-associated h
uugaacagggcau

SEQ ID NO: 188969 - RNA, 14 nt, Human herpesvirus 8 (Kaposi`s sarcoma-associated h
uugacaccuauaau

SEQ ID NO: 188970 - RNA, 13 nt, Human herpesvirus 8 (Kaposi`s sarcoma-associated h
uugaaugugauca

SEQ ID NO: 188971 - RNA, 18 nt, Human herpesvirus 8 (Kaposi`s sarcoma-associated h
uugacaucucgguacugc

SEQ ID NO: 188972 - RNA, 13 nt, Human herpesvirus 8 (Kaposi`s sarcoma-associated h
uugaccugcaaac

SEQ ID NO: 188973 - RNA, 15 nt, Human herpesvirus 8 (Kaposi`s sarcoma-associated h
uugaccaugacaccc

SEQ ID NO: 188974 - RNA, 15 nt, Human herpesvirus 8 (Kaposi`s sarcoma-associated h
uugagcgcugugcuu

SEQ ID NO: 188975 - RNA, 14 nt, Human herpesvirus 8 (Kaposi`s sarcoma-associated h
uugcaccaagcaca

SEQ ID NO: 188976 - RNA, 15 nt, Human herpesvirus 8 (Kaposi`s sarcoma-associated h
uugcaccaagcacaa

SEQ ID NO: 188977 - RNA, 22 nt, Human herpesvirus 8 (Kaposi`s sarcoma-associated h
uugcacgccaacccucagugug

SEQ ID NO: 188978 - RNA, 14 nt, Human herpesvirus 8 (Kaposi`s sarcoma-associated h
uugcagugugcagu

SEQ ID NO: 188979 - RNA, 15 nt, Human herpesvirus 8 (Kaposi`s sarcoma-associated h
uugccagcugcgcau

SEQ ID NO: 188980 - RNA, 17 nt, Human herpesvirus 8 (Kaposi`s sarcoma-associated h
uugcuggaggccaacuu

SEQ ID NO: 188981 - RNA, 10 nt, Human herpesvirus 8 (Kaposi`s sarcoma-associated h
uuccuguggg

SEQ ID NO: 188982 - RNA, 19 nt, Human herpesvirus 8 (Kaposi`s sarcoma-associated h
uucgccaauuauugcacca

SEQ ID NO: 188983 - RNA, 19 nt, Human herpesvirus 8 (Kaposi`s sarcoma-associated h
uucuacgaggcaauugcca

SEQ ID NO: 188984 - RNA, 12 nt, Human herpesvirus 8 (Kaposi`s sarcoma-associated h
uucgaggccagg

SEQ ID NO: 188985 - RNA, 23 nt, Human herpesvirus 8 (Kaposi`s sarcoma-associated h
uuccggacgugaaggcuagucua

SEQ ID NO: 188986 - RNA, 14 nt, Human herpesvirus 8 (Kaposi`s sarcoma-associated h
uuccguccaccagg

SEQ ID NO: 188987 - RNA, 18 nt, Human herpesvirus 8 (Kaposi`s sarcoma-associated h
uuccccgucuccagucac

SEQ ID NO: 188988 - RNA, 17 nt, Human herpesvirus 8 (Kaposi`s sarcoma-associated h
uucccuacauugcuccg

SEQ ID NO: 188989 - RNA, 20 nt, Human herpesvirus 8 (Kaposi`s sarcoma-associated h
uucccuccugcauuuggaca

SEQ ID NO: 188990 - RNA, 22 nt, Human herpesvirus 8 (Kaposi`s sarcoma-associated h
uucacgguagagaagagaccac

SEQ ID NO: 188991 - RNA, 11 nt, Human herpesvirus 8 (Kaposi`s sarcoma-associated h
uuauaacaaug

SEQ ID NO: 188992 - RNA, 20 nt, Human herpesvirus 8 (Kaposi`s sarcoma-associated h
uucagcuucaggaauacguc

SEQ ID NO: 188993 - RNA, 13 nt, Human herpesvirus 8 (Kaposi`s sarcoma-associated h
uucaucacuucca

SEQ ID NO: 188994 - RNA, 22 nt, Human herpesvirus 8 (Kaposi`s sarcoma-associated h
uucauaccucaacccacacugg

SEQ ID NO: 188995 - RNA, 17 nt, Human herpesvirus 8 (Kaposi`s sarcoma-associated h
uucauuagugacauaca

SEQ ID NO: 188996 - RNA, 15 nt, Human herpesvirus 8 (Kaposi`s sarcoma-associated h
uucauuaugcaugca

SEQ ID NO: 188997 - RNA, 20 nt, Human herpesvirus 8 (Kaposi`s sarcoma-associated h
uucauucucuccacuagacu

SEQ ID NO: 188998 - RNA, 14 nt, Human herpesvirus 8 (Kaposi`s sarcoma-associated h
uugguauaugacua

SEQ ID NO: 188999 - RNA, 14 nt, Human herpesvirus 8 (Kaposi`s sarcoma-associated h
uugggaccuuucaa

SEQ ID NO: 189000 - RNA, 19 nt, Human herpesvirus 8 (Kaposi`s sarcoma-associated h
uugggagugugcacuagca

SEQ ID NO: 189001 - RNA, 23 nt, Human herpesvirus 8 (Kaposi`s sarcoma-associated h
uugggauucacucagcugccaag

SEQ ID NO: 189002 - RNA, 12 nt, Human herpesvirus 8 (Kaposi`s sarcoma-associated h
uuggacacuccu

SEQ ID NO: 189003 - RNA, 10 nt, Human herpesvirus 8 (Kaposi`s sarcoma-associated h
uugugaucuc

SEQ ID NO: 189004 - RNA, 23 nt, Human herpesvirus 8 (Kaposi`s sarcoma-associated h
uugucuuguaaaaauaaauguga

SEQ ID NO: 189005 - RNA, 23 nt, Human herpesvirus 8 (Kaposi`s sarcoma-associated h
uuguaaacugauggguacuaugg

SEQ ID NO: 189006 - RNA, 21 nt, Human herpesvirus 8 (Kaposi`s sarcoma-associated h
uugguuuguacacagauguga

SEQ ID NO: 189007 - RNA, 18 nt, Human herpesvirus 8 (Kaposi`s sarcoma-associated h
uugguguccagacaguua

SEQ ID NO: 189008 - RNA, 22 nt, Human herpesvirus 8 (Kaposi`s sarcoma-associated h
uuggugaagcagacgaugcuuu

SEQ ID NO: 189009 - RNA, 19 nt, Human herpesvirus 8 (Kaposi`s sarcoma-associated h
uuguggcaccugaggugcu

SEQ ID NO: 189010 - RNA, 22 nt, Human herpesvirus 8 (Kaposi`s sarcoma-associated h
uuguggggauaugggcuuguac

SEQ ID NO: 189011 - RNA, 11 nt, Human herpesvirus 8 (Kaposi`s sarcoma-associated h
uuguuacuugc

SEQ ID NO: 189012 - RNA, 18 nt, Human herpesvirus 8 (Kaposi`s sarcoma-associated h
uuuacgcgacggaucucu

SEQ ID NO: 189013 - RNA, 23 nt, Human herpesvirus 8 (Kaposi`s sarcoma-associated h
uuuaccaguauagugguuuacau

SEQ ID NO: 189014 - RNA, 13 nt, Human herpesvirus 8 (Kaposi`s sarcoma-associated h
uuuacuugcagca

SEQ ID NO: 189015 - RNA, 14 nt, Human herpesvirus 8 (Kaposi`s sarcoma-associated h
uuuacugguguaca

SEQ ID NO: 189016 - RNA, 14 nt, Human herpesvirus 8 (Kaposi`s sarcoma-associated h
uuuagauuguauca

SEQ ID NO: 189017 - RNA, 17 nt, Human herpesvirus 8 (Kaposi`s sarcoma-associated h
uuuagcauccuaucgca

SEQ ID NO: 189018 - RNA, 22 nt, Human herpesvirus 8 (Kaposi`s sarcoma-associated h
uuuagugguggucguugaucuu

SEQ ID NO: 189019 - RNA, 13 nt, Human herpesvirus 8 (Kaposi`s sarcoma-associated h
uuuauaacaauga

SEQ ID NO: 189020 - RNA, 14 nt, Human herpesvirus 8 (Kaposi`s sarcoma-associated h
uuuauaacaaugaa

SEQ ID NO: 189021 - RNA, 19 nt, Human herpesvirus 8 (Kaposi`s sarcoma-associated h
uuuaugguuuuguguuaca

SEQ ID NO: 189022 - RNA, 22 nt, Human herpesvirus 8 (Kaposi`s sarcoma-associated h
uuuaugguuuuguguuacacua

SEQ ID NO: 189023 - RNA, 16 nt, Human herpesvirus 8 (Kaposi`s sarcoma-associated h
uuuauguuuauagcua

SEQ ID NO: 189024 - RNA, 20 nt, Human herpesvirus 8 (Kaposi`s sarcoma-associated h
uuuauguuuauagcuacaaa

SEQ ID NO: 189025 - RNA, 15 nt, Human herpesvirus 8 (Kaposi`s sarcoma-associated h
uuuaucuucaaggcc

SEQ ID NO: 189026 - RNA, 24 nt, Human herpesvirus 8 (Kaposi`s sarcoma-associated h
uuuauucaaaagaacauugaugcc

SEQ ID NO: 189027 - RNA, 13 nt, Human herpesvirus 8 (Kaposi`s sarcoma-associated h
uuucagugggaca

SEQ ID NO: 189028 - RNA, 11 nt, Human herpesvirus 8 (Kaposi`s sarcoma-associated h
uuucaaccucg

SEQ ID NO: 189029 - RNA, 22 nt, Human herpesvirus 8 (Kaposi`s sarcoma-associated h
uuucccacgaugggaacuuuca

SEQ ID NO: 189030 - RNA, 11 nt, Human herpesvirus 8 (Kaposi`s sarcoma-associated h
uuucucucaua

SEQ ID NO: 189031 - RNA, 17 nt, Human herpesvirus 8 (Kaposi`s sarcoma-associated h
uuuccuauguguuuauu

SEQ ID NO: 189032 - RNA, 12 nt, Human herpesvirus 8 (Kaposi`s sarcoma-associated h
uuuccuagccag

SEQ ID NO: 189033 - RNA, 16 nt, Human herpesvirus 8 (Kaposi`s sarcoma-associated h
uuuccuaaacaaggaa

SEQ ID NO: 189034 - RNA, 20 nt, Human herpesvirus 8 (Kaposi`s sarcoma-associated h
uuuccuuuguuuuuccacau

SEQ ID NO: 189035 - RNA, 19 nt, Human herpesvirus 8 (Kaposi`s sarcoma-associated h
guaacgagguuacugccag

SEQ ID NO: 189036 - RNA, 21 nt, Human herpesvirus 8 (Kaposi`s sarcoma-associated h
guaaccagcuacgcacugagc

SEQ ID NO: 189037 - RNA, 21 nt, Human herpesvirus 8 (Kaposi`s sarcoma-associated h
guaacacaaaagcaaguggac

SEQ ID NO: 189038 - RNA, 18 nt, Human herpesvirus 8 (Kaposi`s sarcoma-associated h
guaaauuggccacugcag

SEQ ID NO: 189039 - RNA, 22 nt, Human herpesvirus 8 (Kaposi`s sarcoma-associated h
guagaucuggauacacuacuua

SEQ ID NO: 189040 - RNA, 15 nt, Human herpesvirus 8 (Kaposi`s sarcoma-associated h
guagaugaaugucuc

SEQ ID NO: 189041 - RNA, 15 nt, Human herpesvirus 8 (Kaposi`s sarcoma-associated h
guagauugacuggaa

SEQ ID NO: 189042 - RNA, 22 nt, Human herpesvirus 8 (Kaposi`s sarcoma-associated h
guagccauaaaaugggccauga

SEQ ID NO: 189043 - RNA, 14 nt, Human herpesvirus 8 (Kaposi`s sarcoma-associated h
guagaggguugcug

SEQ ID NO: 189044 - RNA, 13 nt, Human herpesvirus 8 (Kaposi`s sarcoma-associated h
guaccccaugcau

SEQ ID NO: 189045 - RNA, 17 nt, Human herpesvirus 8 (Kaposi`s sarcoma-associated h
guaccauucgugugguu

SEQ ID NO: 189046 - RNA, 13 nt, Human herpesvirus 8 (Kaposi`s sarcoma-associated h
guacccaauguua

SEQ ID NO: 189047 - RNA, 17 nt, Human herpesvirus 8 (Kaposi`s sarcoma-associated h
guacauuaaaaggacau

SEQ ID NO: 189048 - RNA, 21 nt, Human herpesvirus 8 (Kaposi`s sarcoma-associated h
guacauuaaaaggacauugua

SEQ ID NO: 189049 - RNA, 12 nt, Human herpesvirus 8 (Kaposi`s sarcoma-associated h
guaccaccaaga

SEQ ID NO: 189050 - RNA, 18 nt, Human herpesvirus 8 (Kaposi`s sarcoma-associated h
gucagagaauacagugcu

SEQ ID NO: 189051 - RNA, 20 nt, Human herpesvirus 8 (Kaposi`s sarcoma-associated h
gucagagaauacagugcuaa

SEQ ID NO: 189052 - RNA, 14 nt, Human herpesvirus 8 (Kaposi`s sarcoma-associated h
gucagauuucucua

SEQ ID NO: 189053 - RNA, 14 nt, Human herpesvirus 8 (Kaposi`s sarcoma-associated h
gucagcaguguuug

SEQ ID NO: 189054 - RNA, 16 nt, Human herpesvirus 8 (Kaposi`s sarcoma-associated h
gucacaucucacgcau

SEQ ID NO: 189055 - RNA, 14 nt, Human herpesvirus 8 (Kaposi`s sarcoma-associated h
gucaccgacaccau

SEQ ID NO: 189056 - RNA, 20 nt, Human herpesvirus 8 (Kaposi`s sarcoma-associated h
gucaccgugggaacugugag

SEQ ID NO: 189057 - RNA, 19 nt, Human herpesvirus 8 (Kaposi`s sarcoma-associated h
gucacagucgccaacuguc

SEQ ID NO: 189058 - RNA, 20 nt, Human herpesvirus 8 (Kaposi`s sarcoma-associated h
gucacaaauuuuaacagcca

SEQ ID NO: 189059 - RNA, 19 nt, Human herpesvirus 8 (Kaposi`s sarcoma-associated h
guaugggaacacaauacua

SEQ ID NO: 189060 - RNA, 21 nt, Human herpesvirus 8 (Kaposi`s sarcoma-associated h
guaucugauuuaauaaacacu

SEQ ID NO: 189061 - RNA, 22 nt, Human herpesvirus 8 (Kaposi`s sarcoma-associated h
guaugccgcguuagcagccaug

SEQ ID NO: 189062 - RNA, 16 nt, Human herpesvirus 8 (Kaposi`s sarcoma-associated h
guaucucucuacgagg

SEQ ID NO: 189063 - RNA, 18 nt, Human herpesvirus 8 (Kaposi`s sarcoma-associated h
guaggcauuuuguauuau

SEQ ID NO: 189064 - RNA, 17 nt, Human herpesvirus 8 (Kaposi`s sarcoma-associated h
guaggcccaugugggcu

SEQ ID NO: 189065 - RNA, 17 nt, Human herpesvirus 8 (Kaposi`s sarcoma-associated h
ggggcagcaucacccca

SEQ ID NO: 189066 - RNA, 21 nt, Human herpesvirus 8 (Kaposi`s sarcoma-associated h
ggggcggcuguggcaccaaau

SEQ ID NO: 189067 - RNA, 21 nt, Human herpesvirus 8 (Kaposi`s sarcoma-associated h
ggcuaacuugccggacagcuu

SEQ ID NO: 189068 - RNA, 16 nt, Human herpesvirus 8 (Kaposi`s sarcoma-associated h
ggcuaaccaccacagu

SEQ ID NO: 189069 - RNA, 12 nt, Human herpesvirus 8 (Kaposi`s sarcoma-associated h
ggcuaguguaug

SEQ ID NO: 189070 - RNA, 17 nt, Human herpesvirus 8 (Kaposi`s sarcoma-associated h
gguagagaagagaccac

SEQ ID NO: 189071 - RNA, 19 nt, Human herpesvirus 8 (Kaposi`s sarcoma-associated h
gggguauggcgucaucuga

SEQ ID NO: 189072 - RNA, 22 nt, Human herpesvirus 8 (Kaposi`s sarcoma-associated h
ggugacaccuuucagacgucca

SEQ ID NO: 189073 - RNA, 16 nt, Human herpesvirus 8 (Kaposi`s sarcoma-associated h
ggucaauacauuguga

SEQ ID NO: 189074 - RNA, 15 nt, Human herpesvirus 8 (Kaposi`s sarcoma-associated h
ggucaccuggcccaa

SEQ ID NO: 189075 - RNA, 15 nt, Human herpesvirus 8 (Kaposi`s sarcoma-associated h
gguauuugcagacau

SEQ ID NO: 189076 - RNA, 13 nt, Human herpesvirus 8 (Kaposi`s sarcoma-associated h
guaaaacggccaa

SEQ ID NO: 189077 - RNA, 14 nt, Human herpesvirus 8 (Kaposi`s sarcoma-associated h
guaaaacggccaaa

SEQ ID NO: 189078 - RNA, 12 nt, Human herpesvirus 8 (Kaposi`s sarcoma-associated h
guccaccauucc

SEQ ID NO: 189079 - RNA, 15 nt, Human herpesvirus 8 (Kaposi`s sarcoma-associated h
gucaucuugcgccau

SEQ ID NO: 189080 - RNA, 13 nt, Human herpesvirus 8 (Kaposi`s sarcoma-associated h
gucaugcacggua

SEQ ID NO: 189081 - RNA, 17 nt, Human herpesvirus 8 (Kaposi`s sarcoma-associated h
gucagguuccacccagu

SEQ ID NO: 189082 - RNA, 15 nt, Human herpesvirus 8 (Kaposi`s sarcoma-associated h
gucgcagagaccucu

SEQ ID NO: 189083 - RNA, 22 nt, Human herpesvirus 8 (Kaposi`s sarcoma-associated h
gucgcagagaccucuugcgcga

SEQ ID NO: 189084 - RNA, 22 nt, Human herpesvirus 8 (Kaposi`s sarcoma-associated h
gucgcaaacuuauaacaucacc

SEQ ID NO: 189085 - RNA, 23 nt, Human herpesvirus 8 (Kaposi`s sarcoma-associated h
guccucuaguuuucgggugauua

SEQ ID NO: 189086 - RNA, 18 nt, Human herpesvirus 8 (Kaposi`s sarcoma-associated h
guccugauuuuccaggga

SEQ ID NO: 189087 - RNA, 21 nt, Human herpesvirus 8 (Kaposi`s sarcoma-associated h
gucuaccugccggacacugaa

SEQ ID NO: 189088 - RNA, 19 nt, Human herpesvirus 8 (Kaposi`s sarcoma-associated h
gucgguucacugcugguau

SEQ ID NO: 189089 - RNA, 19 nt, Human herpesvirus 8 (Kaposi`s sarcoma-associated h
gucucuauaccgugcauga

SEQ ID NO: 189090 - RNA, 14 nt, Human herpesvirus 8 (Kaposi`s sarcoma-associated h
gucuccgccaggga

SEQ ID NO: 189091 - RNA, 16 nt, Human herpesvirus 8 (Kaposi`s sarcoma-associated h
gucuccggugccuguu

SEQ ID NO: 189092 - RNA, 18 nt, Human herpesvirus 8 (Kaposi`s sarcoma-associated h
gucuccagaagagcauuu

SEQ ID NO: 189093 - RNA, 22 nt, Human herpesvirus 8 (Kaposi`s sarcoma-associated h
gucuggguggucgcaccuggua

SEQ ID NO: 189094 - RNA, 20 nt, Human herpesvirus 8 (Kaposi`s sarcoma-associated h
gucuguaaagaaaguagaua

SEQ ID NO: 189095 - RNA, 15 nt, Human herpesvirus 8 (Kaposi`s sarcoma-associated h
gucugagugguuauu

SEQ ID NO: 189096 - RNA, 19 nt, Human herpesvirus 8 (Kaposi`s sarcoma-associated h
gugaaacccggauuugccc

SEQ ID NO: 189097 - RNA, 13 nt, Human herpesvirus 8 (Kaposi`s sarcoma-associated h
gugaaguuuacau

SEQ ID NO: 189098 - RNA, 23 nt, Human herpesvirus 8 (Kaposi`s sarcoma-associated h
gucuuauaacagugcucuuccuc

SEQ ID NO: 189099 - RNA, 14 nt, Human herpesvirus 8 (Kaposi`s sarcoma-associated h
gugagggaguguuu

SEQ ID NO: 189100 - RNA, 22 nt, Human herpesvirus 8 (Kaposi`s sarcoma-associated h
gugauuacucgcacaagcgcug

SEQ ID NO: 189101 - RNA, 16 nt, Human herpesvirus 8 (Kaposi`s sarcoma-associated h
gugcaaccugcugcag

SEQ ID NO: 189102 - RNA, 14 nt, Human herpesvirus 8 (Kaposi`s sarcoma-associated h
gugcaugugguaug

SEQ ID NO: 189103 - RNA, 13 nt, Human herpesvirus 8 (Kaposi`s sarcoma-associated h
gugcauuggcuau

SEQ ID NO: 189104 - RNA, 23 nt, Human herpesvirus 8 (Kaposi`s sarcoma-associated h
gugcccaggccgccgaccaugcu

SEQ ID NO: 189105 - RNA, 23 nt, Human herpesvirus 8 (Kaposi`s sarcoma-associated h
gugccuaucaaucugagaaaagu

SEQ ID NO: 189106 - RNA, 20 nt, Human herpesvirus 8 (Kaposi`s sarcoma-associated h
gugccgcgcaucaaccagcg

SEQ ID NO: 189107 - RNA, 13 nt, Human herpesvirus 8 (Kaposi`s sarcoma-associated h
gugcgggccaaug

SEQ ID NO: 189108 - RNA, 12 nt, Human herpesvirus 8 (Kaposi`s sarcoma-associated h
gugcguaugcuc

SEQ ID NO: 189109 - RNA, 20 nt, Human herpesvirus 8 (Kaposi`s sarcoma-associated h
gcuggcccaaacuagcagag

SEQ ID NO: 189110 - RNA, 17 nt, Human herpesvirus 8 (Kaposi`s sarcoma-associated h
gcuggucgguucacugc

SEQ ID NO: 189111 - RNA, 20 nt, Human herpesvirus 8 (Kaposi`s sarcoma-associated h
gcuguacagugccugcagua

SEQ ID NO: 189112 - RNA, 13 nt, Human herpesvirus 8 (Kaposi`s sarcoma-associated h
gcuguaauggugu

SEQ ID NO: 189113 - RNA, 14 nt, Human herpesvirus 8 (Kaposi`s sarcoma-associated h
gcugguuacucaaa

SEQ ID NO: 189114 - RNA, 16 nt, Human herpesvirus 8 (Kaposi`s sarcoma-associated h
gcugguuacucaaaug

SEQ ID NO: 189115 - RNA, 14 nt, Human herpesvirus 8 (Kaposi`s sarcoma-associated h
gcuucggcauuauu

SEQ ID NO: 189116 - RNA, 17 nt, Human herpesvirus 8 (Kaposi`s sarcoma-associated h
gcuucggaaagcacugg

SEQ ID NO: 189117 - RNA, 20 nt, Human herpesvirus 8 (Kaposi`s sarcoma-associated h
gcuucggaaagcacugggau

SEQ ID NO: 189118 - RNA, 20 nt, Human herpesvirus 8 (Kaposi`s sarcoma-associated h
gcuuuugggaucagaccccu

SEQ ID NO: 189119 - RNA, 14 nt, Human herpesvirus 8 (Kaposi`s sarcoma-associated h
gcuugcugauauau

SEQ ID NO: 189120 - RNA, 20 nt, Human herpesvirus 8 (Kaposi`s sarcoma-associated h
gcuucauuaugcaugcaaua

SEQ ID NO: 189121 - RNA, 16 nt, Human herpesvirus 8 (Kaposi`s sarcoma-associated h
gcuugaggauggugcu

SEQ ID NO: 189122 - RNA, 20 nt, Human herpesvirus 8 (Kaposi`s sarcoma-associated h
gcucagacaccgucgccaaa

SEQ ID NO: 189123 - RNA, 13 nt, Human herpesvirus 8 (Kaposi`s sarcoma-associated h
gcugaugcgaaug

SEQ ID NO: 189124 - RNA, 16 nt, Human herpesvirus 8 (Kaposi`s sarcoma-associated h
gcugaugcucuggcca

SEQ ID NO: 189125 - RNA, 13 nt, Human herpesvirus 8 (Kaposi`s sarcoma-associated h
gcugcaauguacu

SEQ ID NO: 189126 - RNA, 17 nt, Human herpesvirus 8 (Kaposi`s sarcoma-associated h
gcugcaauguacugcca

SEQ ID NO: 189127 - RNA, 14 nt, Human herpesvirus 8 (Kaposi`s sarcoma-associated h
gcugaaaagggaac

SEQ ID NO: 189128 - RNA, 18 nt, Human herpesvirus 8 (Kaposi`s sarcoma-associated h
gcucauaacacagucaca

SEQ ID NO: 189129 - RNA, 21 nt, Human herpesvirus 8 (Kaposi`s sarcoma-associated h
gcccaccgucggcggugcaug

SEQ ID NO: 189130 - RNA, 17 nt, Human herpesvirus 8 (Kaposi`s sarcoma-associated h
gcccacccuguacauga

SEQ ID NO: 189131 - RNA, 13 nt, Human herpesvirus 8 (Kaposi`s sarcoma-associated h
gcccacuggugua

SEQ ID NO: 189132 - RNA, 14 nt, Human herpesvirus 8 (Kaposi`s sarcoma-associated h
gcccagacaccaaa

SEQ ID NO: 189133 - RNA, 17 nt, Human herpesvirus 8 (Kaposi`s sarcoma-associated h
gcccagacaccaaagac

SEQ ID NO: 189134 - RNA, 22 nt, Human herpesvirus 8 (Kaposi`s sarcoma-associated h
gcccagcgacucucaagcagua

SEQ ID NO: 189135 - RNA, 22 nt, Human herpesvirus 8 (Kaposi`s sarcoma-associated h
gccauuauagaugaaacauucg

SEQ ID NO: 189136 - RNA, 21 nt, Human herpesvirus 8 (Kaposi`s sarcoma-associated h
gccauucuaggagacgcgcaa

SEQ ID NO: 189137 - RNA, 20 nt, Human herpesvirus 8 (Kaposi`s sarcoma-associated h
gccauucaucgaguccuuga

SEQ ID NO: 189138 - RNA, 23 nt, Human herpesvirus 8 (Kaposi`s sarcoma-associated h
gcgcugguugaugcgcggcacau

SEQ ID NO: 189139 - RNA, 11 nt, Human herpesvirus 8 (Kaposi`s sarcoma-associated h
gcgcuaugugg

SEQ ID NO: 189140 - RNA, 13 nt, Human herpesvirus 8 (Kaposi`s sarcoma-associated h
gcgcuauuugccg

SEQ ID NO: 189141 - RNA, 18 nt, Human herpesvirus 8 (Kaposi`s sarcoma-associated h
gcgggcgauuacaggaaa

SEQ ID NO: 189142 - RNA, 15 nt, Human herpesvirus 8 (Kaposi`s sarcoma-associated h
gcuaaaugaauauca

SEQ ID NO: 189143 - RNA, 24 nt, Human herpesvirus 8 (Kaposi`s sarcoma-associated h
gcguguuuugccuguaccaguguc

SEQ ID NO: 189144 - RNA, 19 nt, Human herpesvirus 8 (Kaposi`s sarcoma-associated h
gcguuagcagccaugugcu

SEQ ID NO: 189145 - RNA, 22 nt, Human herpesvirus 8 (Kaposi`s sarcoma-associated h
gcggccaguuuauuagggcgau

SEQ ID NO: 189146 - RNA, 13 nt, Human herpesvirus 8 (Kaposi`s sarcoma-associated h
gcggcacauugug

SEQ ID NO: 189147 - RNA, 19 nt, Human herpesvirus 8 (Kaposi`s sarcoma-associated h
ggacaagucccagcaauaa

SEQ ID NO: 189148 - RNA, 13 nt, Human herpesvirus 8 (Kaposi`s sarcoma-associated h
ggacaaccgugga

SEQ ID NO: 189149 - RNA, 14 nt, Human herpesvirus 8 (Kaposi`s sarcoma-associated h
ggacaacgccaugc

SEQ ID NO: 189150 - RNA, 17 nt, Human herpesvirus 8 (Kaposi`s sarcoma-associated h
ggacaggacgcggccau

SEQ ID NO: 189151 - RNA, 12 nt, Human herpesvirus 8 (Kaposi`s sarcoma-associated h
ggacacugaugu

SEQ ID NO: 189152 - RNA, 22 nt, Human herpesvirus 8 (Kaposi`s sarcoma-associated h
ggaauggccuccacccaccaag

SEQ ID NO: 189153 - RNA, 22 nt, Human herpesvirus 8 (Kaposi`s sarcoma-associated h
ggaauggcucacggacuuuauu

SEQ ID NO: 189154 - RNA, 19 nt, Human herpesvirus 8 (Kaposi`s sarcoma-associated h
ggaagugucgggaggcaug

SEQ ID NO: 189155 - RNA, 23 nt, Human herpesvirus 8 (Kaposi`s sarcoma-associated h
ggaaagcagcgcccacuggugua

SEQ ID NO: 189156 - RNA, 14 nt, Human herpesvirus 8 (Kaposi`s sarcoma-associated h
ggagaaacagugga

SEQ ID NO: 189157 - RNA, 22 nt, Human herpesvirus 8 (Kaposi`s sarcoma-associated h
ggagaccuacacugcauucuac

SEQ ID NO: 189158 - RNA, 19 nt, Human herpesvirus 8 (Kaposi`s sarcoma-associated h
ggagacggccaucgcuaua

SEQ ID NO: 189159 - RNA, 17 nt, Human herpesvirus 8 (Kaposi`s sarcoma-associated h
ggagauauugauagcca

SEQ ID NO: 189160 - RNA, 14 nt, Human herpesvirus 8 (Kaposi`s sarcoma-associated h
ggagaucaaggaca

SEQ ID NO: 189161 - RNA, 12 nt, Human herpesvirus 8 (Kaposi`s sarcoma-associated h
ggagagggccac

SEQ ID NO: 189162 - RNA, 16 nt, Human herpesvirus 8 (Kaposi`s sarcoma-associated h
ggagaggaaugguggc

SEQ ID NO: 189163 - RNA, 23 nt, Human herpesvirus 8 (Kaposi`s sarcoma-associated h
ggagcagacgugcccagacacca

SEQ ID NO: 189164 - RNA, 14 nt, Human herpesvirus 8 (Kaposi`s sarcoma-associated h
ggagccaacaaaca

SEQ ID NO: 189165 - RNA, 23 nt, Human herpesvirus 8 (Kaposi`s sarcoma-associated h
ggaccguguguuuggugguguca

SEQ ID NO: 189166 - RNA, 17 nt, Human herpesvirus 8 (Kaposi`s sarcoma-associated h
ggaccagaggacagggu

SEQ ID NO: 189167 - RNA, 13 nt, Human herpesvirus 8 (Kaposi`s sarcoma-associated h
ggacucacugggg

SEQ ID NO: 189168 - RNA, 22 nt, Human herpesvirus 8 (Kaposi`s sarcoma-associated h
ggacucacugggggucucggga

SEQ ID NO: 189169 - RNA, 22 nt, Human herpesvirus 8 (Kaposi`s sarcoma-associated h
ggacgugcgggccaaugccaug

SEQ ID NO: 189170 - RNA, 15 nt, Human herpesvirus 8 (Kaposi`s sarcoma-associated h
ggacuggcagggugg

SEQ ID NO: 189171 - RNA, 14 nt, Human herpesvirus 8 (Kaposi`s sarcoma-associated h
ggacugagauuucc

SEQ ID NO: 189172 - RNA, 13 nt, Human herpesvirus 8 (Kaposi`s sarcoma-associated h
ggacgccauuugc

SEQ ID NO: 189173 - RNA, 17 nt, Human herpesvirus 8 (Kaposi`s sarcoma-associated h
ggcgaauaaaacaggaa

SEQ ID NO: 189174 - RNA, 22 nt, Human herpesvirus 8 (Kaposi`s sarcoma-associated h
ggcgauuuaucauccacgcgga

SEQ ID NO: 189175 - RNA, 22 nt, Human herpesvirus 8 (Kaposi`s sarcoma-associated h
ggcgauaccgcgccacguaugg

SEQ ID NO: 189176 - RNA, 17 nt, Human herpesvirus 8 (Kaposi`s sarcoma-associated h
ggccauggcgauguuug

SEQ ID NO: 189177 - RNA, 13 nt, Human herpesvirus 8 (Kaposi`s sarcoma-associated h
ggcccccaccaaa

SEQ ID NO: 189178 - RNA, 14 nt, Human herpesvirus 8 (Kaposi`s sarcoma-associated h
ggcccccaccaaac

SEQ ID NO: 189179 - RNA, 15 nt, Human herpesvirus 8 (Kaposi`s sarcoma-associated h
ggcccccaccaaacc

SEQ ID NO: 189180 - RNA, 22 nt, Human herpesvirus 8 (Kaposi`s sarcoma-associated h
ggcccagcgucgucgaugggag

SEQ ID NO: 189181 - RNA, 20 nt, Human herpesvirus 8 (Kaposi`s sarcoma-associated h
ggccuccacccaccaagcua

SEQ ID NO: 189182 - RNA, 19 nt, Human herpesvirus 8 (Kaposi`s sarcoma-associated h
ggccuccagcaaagcacau

SEQ ID NO: 189183 - RNA, 14 nt, Human herpesvirus 8 (Kaposi`s sarcoma-associated h
ggccuaucugagga

SEQ ID NO: 189184 - RNA, 24 nt, Human herpesvirus 8 (Kaposi`s sarcoma-associated h
ggccggcugguuacucaaauggga

SEQ ID NO: 189185 - RNA, 23 nt, Human herpesvirus 8 (Kaposi`s sarcoma-associated h
ggcccugggcuuacguucuuauu

SEQ ID NO: 189186 - RNA, 19 nt, Human herpesvirus 8 (Kaposi`s sarcoma-associated h
ggaggcuaggugcccagcg

SEQ ID NO: 189187 - RNA, 18 nt, Human herpesvirus 8 (Kaposi`s sarcoma-associated h
ggagucacaaguaccacu

SEQ ID NO: 189188 - RNA, 18 nt, Human herpesvirus 8 (Kaposi`s sarcoma-associated h
ggagcccgagaucaucuu

SEQ ID NO: 189189 - RNA, 16 nt, Human herpesvirus 8 (Kaposi`s sarcoma-associated h
ggaggaagagcacugu

SEQ ID NO: 189190 - RNA, 20 nt, Human herpesvirus 8 (Kaposi`s sarcoma-associated h
ggcacccaacauccauuaug

SEQ ID NO: 189191 - RNA, 21 nt, Human herpesvirus 8 (Kaposi`s sarcoma-associated h
ggccaguauuaugccagggaa

SEQ ID NO: 189192 - RNA, 18 nt, Human herpesvirus 8 (Kaposi`s sarcoma-associated h
ggcaguggacacagucug

SEQ ID NO: 189193 - RNA, 18 nt, Human herpesvirus 8 (Kaposi`s sarcoma-associated h
ggcagucuaucgucucca

SEQ ID NO: 189194 - RNA, 14 nt, Human herpesvirus 8 (Kaposi`s sarcoma-associated h
ggcaguccaagguc

SEQ ID NO: 189195 - RNA, 21 nt, Human herpesvirus 8 (Kaposi`s sarcoma-associated h
ggcaggcgugagaggcaauac

SEQ ID NO: 189196 - RNA, 13 nt, Human herpesvirus 8 (Kaposi`s sarcoma-associated h
ucaauacauugug

SEQ ID NO: 189197 - RNA, 15 nt, Human herpesvirus 8 (Kaposi`s sarcoma-associated h
ucaauaaagagacca

SEQ ID NO: 189198 - RNA, 18 nt, Human herpesvirus 8 (Kaposi`s sarcoma-associated h
ucaaccucgaugggauau

SEQ ID NO: 189199 - RNA, 18 nt, Human herpesvirus 8 (Kaposi`s sarcoma-associated h
ucaaccaggccaccauuc

SEQ ID NO: 189200 - RNA, 21 nt, Human herpesvirus 8 (Kaposi`s sarcoma-associated h
ucaaccaggccaccauuccuc

SEQ ID NO: 189201 - RNA, 14 nt, Human herpesvirus 8 (Kaposi`s sarcoma-associated h
uauugaagcauguu

SEQ ID NO: 189202 - RNA, 21 nt, Human herpesvirus 8 (Kaposi`s sarcoma-associated h
uauucuagagcccgcugcuau

SEQ ID NO: 189203 - RNA, 13 nt, Human herpesvirus 8 (Kaposi`s sarcoma-associated h
uauugcauggcau

SEQ ID NO: 189204 - RNA, 19 nt, Human herpesvirus 8 (Kaposi`s sarcoma-associated h
uauuguuuuugaacaugug

SEQ ID NO: 189205 - RNA, 14 nt, Human herpesvirus 8 (Kaposi`s sarcoma-associated h
uauucaggcagaag

SEQ ID NO: 189206 - RNA, 22 nt, Human herpesvirus 8 (Kaposi`s sarcoma-associated h
uauuagagaaaggcuacgugag

SEQ ID NO: 189207 - RNA, 21 nt, Human herpesvirus 8 (Kaposi`s sarcoma-associated h
uauuagaggguggacagugcc

SEQ ID NO: 189208 - RNA, 13 nt, Human herpesvirus 8 (Kaposi`s sarcoma-associated h
uauuaugccaggg

SEQ ID NO: 189209 - RNA, 17 nt, Human herpesvirus 8 (Kaposi`s sarcoma-associated h
uauuugggggaugcugu

SEQ ID NO: 189210 - RNA, 18 nt, Human herpesvirus 8 (Kaposi`s sarcoma-associated h
uauuuacuuuuaugguuu

SEQ ID NO: 189211 - RNA, 18 nt, Human herpesvirus 8 (Kaposi`s sarcoma-associated h
uauuuuuuacuacaggua

SEQ ID NO: 189212 - RNA, 19 nt, Human herpesvirus 8 (Kaposi`s sarcoma-associated h
uaugucuuuguguguguua

SEQ ID NO: 189213 - RNA, 20 nt, Human herpesvirus 8 (Kaposi`s sarcoma-associated h
uaugcagcagcgugacacua

SEQ ID NO: 189214 - RNA, 16 nt, Human herpesvirus 8 (Kaposi`s sarcoma-associated h
uauguggcuuuuguca

SEQ ID NO: 189215 - RNA, 16 nt, Human herpesvirus 8 (Kaposi`s sarcoma-associated h
uauguugugcgccuac

SEQ ID NO: 189216 - RNA, 18 nt, Human herpesvirus 8 (Kaposi`s sarcoma-associated h
uauguuuuuaccaguaua

SEQ ID NO: 189217 - RNA, 12 nt, Human herpesvirus 8 (Kaposi`s sarcoma-associated h
uauuaaccauag

SEQ ID NO: 189218 - RNA, 12 nt, Human herpesvirus 8 (Kaposi`s sarcoma-associated h
uauuaaagggac

SEQ ID NO: 189219 - RNA, 19 nt, Human herpesvirus 8 (Kaposi`s sarcoma-associated h
uaugaccggcuuguuuaua

SEQ ID NO: 189220 - RNA, 15 nt, Human herpesvirus 8 (Kaposi`s sarcoma-associated h
uaugacuacugugaa

SEQ ID NO: 189221 - RNA, 15 nt, Human herpesvirus 8 (Kaposi`s sarcoma-associated h
uaugcaccgugcagg

SEQ ID NO: 189222 - RNA, 17 nt, Human herpesvirus 8 (Kaposi`s sarcoma-associated h
uaugcaccuccaaaaca

SEQ ID NO: 189223 - RNA, 22 nt, Human herpesvirus 8 (Kaposi`s sarcoma-associated h
uaugauacuuacguccuaagga

SEQ ID NO: 189224 - RNA, 19 nt, Human herpesvirus 8 (Kaposi`s sarcoma-associated h
uaugaggucggauacuuau

SEQ ID NO: 189225 - RNA, 14 nt, Human herpesvirus 8 (Kaposi`s sarcoma-associated h
uaugaguguaaaaa

SEQ ID NO: 189226 - RNA, 23 nt, Human herpesvirus 8 (Kaposi`s sarcoma-associated h
uaucgaucacgcccgugugcaug

SEQ ID NO: 189227 - RNA, 18 nt, Human herpesvirus 8 (Kaposi`s sarcoma-associated h
uaucaggcuagugcugua

SEQ ID NO: 189228 - RNA, 14 nt, Human herpesvirus 8 (Kaposi`s sarcoma-associated h
uaucaggggaacca

SEQ ID NO: 189229 - RNA, 17 nt, Human herpesvirus 8 (Kaposi`s sarcoma-associated h
uaucagcugcagccagg

SEQ ID NO: 189230 - RNA, 23 nt, Human herpesvirus 8 (Kaposi`s sarcoma-associated h
uaucucgccgguguaugacccug

SEQ ID NO: 189231 - RNA, 18 nt, Human herpesvirus 8 (Kaposi`s sarcoma-associated h
uaucaauaaagagaccaa

SEQ ID NO: 189232 - RNA, 15 nt, Human herpesvirus 8 (Kaposi`s sarcoma-associated h
uaucacggacgccac

SEQ ID NO: 189233 - RNA, 15 nt, Human herpesvirus 8 (Kaposi`s sarcoma-associated h
uagcaugcugaugau

SEQ ID NO: 189234 - RNA, 21 nt, Human herpesvirus 8 (Kaposi`s sarcoma-associated h
uagcauccuaucgcacagaca

SEQ ID NO: 189235 - RNA, 20 nt, Human herpesvirus 8 (Kaposi`s sarcoma-associated h
uaggggcacccuauccauca

SEQ ID NO: 189236 - RNA, 15 nt, Human herpesvirus 8 (Kaposi`s sarcoma-associated h
uagguagauugacug

SEQ ID NO: 189237 - RNA, 16 nt, Human herpesvirus 8 (Kaposi`s sarcoma-associated h
uauaacagcaacaugu

SEQ ID NO: 189238 - RNA, 15 nt, Human herpesvirus 8 (Kaposi`s sarcoma-associated h
uauaacaucaccaag

SEQ ID NO: 189239 - RNA, 23 nt, Human herpesvirus 8 (Kaposi`s sarcoma-associated h
uauaaggacaagucccagcaaua

SEQ ID NO: 189240 - RNA, 13 nt, Human herpesvirus 8 (Kaposi`s sarcoma-associated h
uauaaacauggca

SEQ ID NO: 189241 - RNA, 11 nt, Human herpesvirus 8 (Kaposi`s sarcoma-associated h
uaggugucaag

SEQ ID NO: 189242 - RNA, 18 nt, Human herpesvirus 8 (Kaposi`s sarcoma-associated h
uaguacgugguaagggaa

SEQ ID NO: 189243 - RNA, 22 nt, Human herpesvirus 8 (Kaposi`s sarcoma-associated h
uacccauguuggguccacaagu

SEQ ID NO: 189244 - RNA, 17 nt, Human herpesvirus 8 (Kaposi`s sarcoma-associated h
uacccuggaucagggaa

SEQ ID NO: 189245 - RNA, 16 nt, Human herpesvirus 8 (Kaposi`s sarcoma-associated h
uacgcgacggaucucu

SEQ ID NO: 189246 - RNA, 12 nt, Human herpesvirus 8 (Kaposi`s sarcoma-associated h
uacgcagggugc

SEQ ID NO: 189247 - RNA, 16 nt, Human herpesvirus 8 (Kaposi`s sarcoma-associated h
uacgcgguuguuuacg

SEQ ID NO: 189248 - RNA, 16 nt, Human herpesvirus 8 (Kaposi`s sarcoma-associated h
uacgucccucuuggcu

SEQ ID NO: 189249 - RNA, 22 nt, Human herpesvirus 8 (Kaposi`s sarcoma-associated h
uacgucccucuuggcuguuaca

SEQ ID NO: 189250 - RNA, 23 nt, Human herpesvirus 8 (Kaposi`s sarcoma-associated h
uacgucccucuuggcuguuacaa

SEQ ID NO: 189251 - RNA, 18 nt, Human herpesvirus 8 (Kaposi`s sarcoma-associated h
uacacuaaccacaacaau

SEQ ID NO: 189252 - RNA, 12 nt, Human herpesvirus 8 (Kaposi`s sarcoma-associated h
uacacuacuuau

SEQ ID NO: 189253 - RNA, 15 nt, Human herpesvirus 8 (Kaposi`s sarcoma-associated h
uacacuauguagggu

SEQ ID NO: 189254 - RNA, 14 nt, Human herpesvirus 8 (Kaposi`s sarcoma-associated h
uacaagacaacuaa

SEQ ID NO: 189255 - RNA, 15 nt, Human herpesvirus 8 (Kaposi`s sarcoma-associated h
uacacccacauacac

SEQ ID NO: 189256 - RNA, 15 nt, Human herpesvirus 8 (Kaposi`s sarcoma-associated h
uacauuugacaacac

SEQ ID NO: 189257 - RNA, 13 nt, Human herpesvirus 8 (Kaposi`s sarcoma-associated h
uacaacuauuucc

SEQ ID NO: 189258 - RNA, 23 nt, Human herpesvirus 8 (Kaposi`s sarcoma-associated h
uacaacuauuuccuuuuuucaaa

SEQ ID NO: 189259 - RNA, 14 nt, Human herpesvirus 8 (Kaposi`s sarcoma-associated h
uaauggauggcuau

SEQ ID NO: 189260 - RNA, 21 nt, Human herpesvirus 8 (Kaposi`s sarcoma-associated h
uaaugcggagaggaauggugg

SEQ ID NO: 189261 - RNA, 13 nt, Human herpesvirus 8 (Kaposi`s sarcoma-associated h
uaauacauaacac

SEQ ID NO: 189262 - RNA, 13 nt, Human herpesvirus 8 (Kaposi`s sarcoma-associated h
uaauaaauugcuu

SEQ ID NO: 189263 - RNA, 16 nt, Human herpesvirus 8 (Kaposi`s sarcoma-associated h
uaaacgucuguaaaac

SEQ ID NO: 189264 - RNA, 15 nt, Human herpesvirus 8 (Kaposi`s sarcoma-associated h
uaaagccgagccaca

SEQ ID NO: 189265 - RNA, 22 nt, Human herpesvirus 8 (Kaposi`s sarcoma-associated h
uaaagcgcgaacaagacaccaa

SEQ ID NO: 189266 - RNA, 14 nt, Human herpesvirus 8 (Kaposi`s sarcoma-associated h
uaaaauagcucauu

SEQ ID NO: 189267 - RNA, 17 nt, Human herpesvirus 8 (Kaposi`s sarcoma-associated h
uaaaauacaaaaacaca

SEQ ID NO: 189268 - RNA, 21 nt, Human herpesvirus 8 (Kaposi`s sarcoma-associated h
uaaaauacaaaaacacaauca

SEQ ID NO: 189269 - RNA, 15 nt, Human herpesvirus 8 (Kaposi`s sarcoma-associated h
uaaaccgaaguacug

SEQ ID NO: 189270 - RNA, 19 nt, Human herpesvirus 8 (Kaposi`s sarcoma-associated h
guggaaaauucuccaggca

SEQ ID NO: 189271 - RNA, 17 nt, Human herpesvirus 8 (Kaposi`s sarcoma-associated h
gugggaaauagaccuca

SEQ ID NO: 189272 - RNA, 18 nt, Human herpesvirus 8 (Kaposi`s sarcoma-associated h
guggcugaugcucuggcc

SEQ ID NO: 189273 - RNA, 15 nt, Human herpesvirus 8 (Kaposi`s sarcoma-associated h
guggcugccuggaca

SEQ ID NO: 189274 - RNA, 23 nt, Human herpesvirus 8 (Kaposi`s sarcoma-associated h
gugggcgaguuuauugguaguga

SEQ ID NO: 189275 - RNA, 12 nt, Human herpesvirus 8 (Kaposi`s sarcoma-associated h
gugggacacggu

SEQ ID NO: 189276 - RNA, 22 nt, Human herpesvirus 8 (Kaposi`s sarcoma-associated h
gugguauguauuguacuaaaga

SEQ ID NO: 189277 - RNA, 15 nt, Human herpesvirus 8 (Kaposi`s sarcoma-associated h
gugggugcacugagu

SEQ ID NO: 189278 - RNA, 13 nt, Human herpesvirus 8 (Kaposi`s sarcoma-associated h
guggugacgcugu

SEQ ID NO: 189279 - RNA, 11 nt, Human herpesvirus 8 (Kaposi`s sarcoma-associated h
guggucucuuc

SEQ ID NO: 189280 - RNA, 19 nt, Human herpesvirus 8 (Kaposi`s sarcoma-associated h
gugguuaacuucaccucca

SEQ ID NO: 189281 - RNA, 20 nt, Human herpesvirus 8 (Kaposi`s sarcoma-associated h
gugguuaacuucaccuccag

SEQ ID NO: 189282 - RNA, 23 nt, Human herpesvirus 8 (Kaposi`s sarcoma-associated h
guuuuucuggucgcugccaguca

SEQ ID NO: 189283 - RNA, 18 nt, Human herpesvirus 8 (Kaposi`s sarcoma-associated h
uaaaaaccacucacugag

SEQ ID NO: 189284 - RNA, 15 nt, Human herpesvirus 8 (Kaposi`s sarcoma-associated h
uaaagcugagccaca

SEQ ID NO: 189285 - RNA, 22 nt, Human herpesvirus 8 (Kaposi`s sarcoma-associated h
uaaagucaugggaccgugugug

SEQ ID NO: 189286 - RNA, 18 nt, Human herpesvirus 8 (Kaposi`s sarcoma-associated h
uaaagucauuaaacgaca

SEQ ID NO: 189287 - RNA, 18 nt, Human herpesvirus 8 (Kaposi`s sarcoma-associated h
uaacacuucccaauaaca

SEQ ID NO: 189288 - RNA, 19 nt, Human herpesvirus 8 (Kaposi`s sarcoma-associated h
uaacacuucccaauaacaa

SEQ ID NO: 189289 - RNA, 22 nt, Human herpesvirus 8 (Kaposi`s sarcoma-associated h
uaacagccacgacguggcccac

SEQ ID NO: 189290 - RNA, 15 nt, Human herpesvirus 8 (Kaposi`s sarcoma-associated h
uaacagcaacauguu

SEQ ID NO: 189291 - RNA, 17 nt, Human herpesvirus 8 (Kaposi`s sarcoma-associated h
uaacagcaacauguuua

SEQ ID NO: 189292 - RNA, 14 nt, Human herpesvirus 8 (Kaposi`s sarcoma-associated h
uaaccgcuaaggga

SEQ ID NO: 189293 - RNA, 16 nt, Human herpesvirus 8 (Kaposi`s sarcoma-associated h
uaaccgugcuacuuac

SEQ ID NO: 189294 - RNA, 15 nt, Human herpesvirus 8 (Kaposi`s sarcoma-associated h
uaacccgcuccgcca

SEQ ID NO: 189295 - RNA, 13 nt, Human herpesvirus 8 (Kaposi`s sarcoma-associated h
uaacccacgucac

SEQ ID NO: 189296 - RNA, 22 nt, Human herpesvirus 8 (Kaposi`s sarcoma-associated h
uaaccacaacaauagggauacu

SEQ ID NO: 189297 - RNA, 23 nt, Human herpesvirus 8 (Kaposi`s sarcoma-associated h
uaacagugcucuuccuccuaguc

SEQ ID NO: 189298 - RNA, 24 nt, Human herpesvirus 8 (Kaposi`s sarcoma-associated h
uaacagugcucuuccuccuaguca

SEQ ID NO: 189299 - RNA, 20 nt, Human herpesvirus 8 (Kaposi`s sarcoma-associated h
uaacaugcaacccucuacuc

SEQ ID NO: 189300 - RNA, 19 nt, Human herpesvirus 8 (Kaposi`s sarcoma-associated h
uaagaaaaucgaagccagg

SEQ ID NO: 189301 - RNA, 19 nt, Human herpesvirus 8 (Kaposi`s sarcoma-associated h
uaacggagaaaugaucaug

SEQ ID NO: 189302 - RNA, 15 nt, Human herpesvirus 8 (Kaposi`s sarcoma-associated h
uaagagcacacugug

SEQ ID NO: 189303 - RNA, 17 nt, Human herpesvirus 8 (Kaposi`s sarcoma-associated h
uaagggaagcaaaacac

SEQ ID NO: 189304 - RNA, 20 nt, Human herpesvirus 8 (Kaposi`s sarcoma-associated h
uaaggggauuacuguccauu

SEQ ID NO: 189305 - RNA, 20 nt, Human herpesvirus 8 (Kaposi`s sarcoma-associated h
cuguguccuccucugaguuu

SEQ ID NO: 189306 - RNA, 12 nt, Human herpesvirus 8 (Kaposi`s sarcoma-associated h
cuguuacaauaa

SEQ ID NO: 189307 - RNA, 14 nt, Human herpesvirus 8 (Kaposi`s sarcoma-associated h
cuguuacccugcuc

SEQ ID NO: 189308 - RNA, 22 nt, Human herpesvirus 8 (Kaposi`s sarcoma-associated h
cugucgcuuccauuuuccaagg

SEQ ID NO: 189309 - RNA, 18 nt, Human herpesvirus 8 (Kaposi`s sarcoma-associated h
cuguguacaaaccaaauu

SEQ ID NO: 189310 - RNA, 20 nt, Human herpesvirus 8 (Kaposi`s sarcoma-associated h
cugucuccagaagagcauuu

SEQ ID NO: 189311 - RNA, 16 nt, Human herpesvirus 8 (Kaposi`s sarcoma-associated h
cugucgagacauguca

SEQ ID NO: 189312 - RNA, 17 nt, Human herpesvirus 8 (Kaposi`s sarcoma-associated h
cuguccucgcccaacuu

SEQ ID NO: 189313 - RNA, 16 nt, Human herpesvirus 8 (Kaposi`s sarcoma-associated h
cuguccaugucgcaca

SEQ ID NO: 189314 - RNA, 21 nt, Human herpesvirus 8 (Kaposi`s sarcoma-associated h
cuguuuucccacgaugggaac

SEQ ID NO: 189315 - RNA, 13 nt, Human herpesvirus 8 (Kaposi`s sarcoma-associated h
cuguuugcuuaau

SEQ ID NO: 189316 - RNA, 14 nt, Human herpesvirus 8 (Kaposi`s sarcoma-associated h
cuguuuacugcugu

SEQ ID NO: 189317 - RNA, 18 nt, Human herpesvirus 8 (Kaposi`s sarcoma-associated h
cuguuguggaaagcuccu

SEQ ID NO: 189318 - RNA, 21 nt, Human herpesvirus 8 (Kaposi`s sarcoma-associated h
cuguuuccagugacccuaguc

SEQ ID NO: 189319 - RNA, 22 nt, Human herpesvirus 8 (Kaposi`s sarcoma-associated h
cuguuuccagugacccuaguca

SEQ ID NO: 189320 - RNA, 16 nt, Human herpesvirus 8 (Kaposi`s sarcoma-associated h
cuguugaaugugauca

SEQ ID NO: 189321 - RNA, 13 nt, Human herpesvirus 8 (Kaposi`s sarcoma-associated h
cuguugacuuuca

SEQ ID NO: 189322 - RNA, 14 nt, Human herpesvirus 8 (Kaposi`s sarcoma-associated h
cuguugacuuucaa

SEQ ID NO: 189323 - RNA, 23 nt, Human herpesvirus 8 (Kaposi`s sarcoma-associated h
cuuauaccggccuguuuccaaac

SEQ ID NO: 189324 - RNA, 16 nt, Human herpesvirus 8 (Kaposi`s sarcoma-associated h
cuuauaacacuaauau

SEQ ID NO: 189325 - RNA, 23 nt, Human herpesvirus 8 (Kaposi`s sarcoma-associated h
cuuauaacacuaauauacuuugc

SEQ ID NO: 189326 - RNA, 16 nt, Human herpesvirus 8 (Kaposi`s sarcoma-associated h
cuuauaacagugcucu

SEQ ID NO: 189327 - RNA, 14 nt, Human herpesvirus 8 (Kaposi`s sarcoma-associated h
cuuaggacacugau

SEQ ID NO: 189328 - RNA, 21 nt, Human herpesvirus 8 (Kaposi`s sarcoma-associated h
cuuaacuaaacauuaccaaua

SEQ ID NO: 189329 - RNA, 14 nt, Human herpesvirus 8 (Kaposi`s sarcoma-associated h
cuuaauccuuacuu

SEQ ID NO: 189330 - RNA, 15 nt, Human herpesvirus 8 (Kaposi`s sarcoma-associated h
cuuaaguacauuaaa

SEQ ID NO: 189331 - RNA, 19 nt, Human herpesvirus 8 (Kaposi`s sarcoma-associated h
cuucuggaucccacgcuau

SEQ ID NO: 189332 - RNA, 15 nt, Human herpesvirus 8 (Kaposi`s sarcoma-associated h
cuucugggcgaagaa

SEQ ID NO: 189333 - RNA, 13 nt, Human herpesvirus 8 (Kaposi`s sarcoma-associated h
cuugaacagggca

SEQ ID NO: 189334 - RNA, 17 nt, Human herpesvirus 8 (Kaposi`s sarcoma-associated h
cuucgcaccccauccac

SEQ ID NO: 189335 - RNA, 16 nt, Human herpesvirus 8 (Kaposi`s sarcoma-associated h
cuucggaaagcacugg

SEQ ID NO: 189336 - RNA, 12 nt, Human herpesvirus 8 (Kaposi`s sarcoma-associated h
cuucuauacaug

SEQ ID NO: 189337 - RNA, 13 nt, Human herpesvirus 8 (Kaposi`s sarcoma-associated h
cuucuauacaugc

SEQ ID NO: 189338 - RNA, 15 nt, Human herpesvirus 8 (Kaposi`s sarcoma-associated h
cuucuagcauaugcu

SEQ ID NO: 189339 - RNA, 22 nt, Human herpesvirus 8 (Kaposi`s sarcoma-associated h
cuucguccccuauccacccuaa

SEQ ID NO: 189340 - RNA, 13 nt, Human herpesvirus 8 (Kaposi`s sarcoma-associated h
cuucgugccccag

SEQ ID NO: 189341 - RNA, 16 nt, Human herpesvirus 8 (Kaposi`s sarcoma-associated h
cuuccagucuccagag

SEQ ID NO: 189342 - RNA, 12 nt, Human herpesvirus 8 (Kaposi`s sarcoma-associated h
cuucccaauagc

SEQ ID NO: 189343 - RNA, 21 nt, Human herpesvirus 8 (Kaposi`s sarcoma-associated h
cuucccagauuaaacaaaaag

SEQ ID NO: 189344 - RNA, 18 nt, Human herpesvirus 8 (Kaposi`s sarcoma-associated h
cucucuuaggacacugau

SEQ ID NO: 189345 - RNA, 20 nt, Human herpesvirus 8 (Kaposi`s sarcoma-associated h
cucugacaaccuucagauaa

SEQ ID NO: 189346 - RNA, 18 nt, Human herpesvirus 8 (Kaposi`s sarcoma-associated h
cucuccgcauuaaagcac

SEQ ID NO: 189347 - RNA, 14 nt, Human herpesvirus 8 (Kaposi`s sarcoma-associated h
cucucccaaaccac

SEQ ID NO: 189348 - RNA, 21 nt, Human herpesvirus 8 (Kaposi`s sarcoma-associated h
cucaugauuacagagucacaa

SEQ ID NO: 189349 - RNA, 12 nt, Human herpesvirus 8 (Kaposi`s sarcoma-associated h
cucccauaacaa

SEQ ID NO: 189350 - RNA, 16 nt, Human herpesvirus 8 (Kaposi`s sarcoma-associated h
cucccucaagcauuga

SEQ ID NO: 189351 - RNA, 17 nt, Human herpesvirus 8 (Kaposi`s sarcoma-associated h
cucccuuugucuuaccg

SEQ ID NO: 189352 - RNA, 14 nt, Human herpesvirus 8 (Kaposi`s sarcoma-associated h
cucccguauuccau

SEQ ID NO: 189353 - RNA, 22 nt, Human herpesvirus 8 (Kaposi`s sarcoma-associated h
cucccguucccaugaugcagag

SEQ ID NO: 189354 - RNA, 15 nt, Human herpesvirus 8 (Kaposi`s sarcoma-associated h
cucccucccauaaca

SEQ ID NO: 189355 - RNA, 21 nt, Human herpesvirus 8 (Kaposi`s sarcoma-associated h
cugaggaggauggguggaauu

SEQ ID NO: 189356 - RNA, 14 nt, Human herpesvirus 8 (Kaposi`s sarcoma-associated h
cugaagcaccacau

SEQ ID NO: 189357 - RNA, 19 nt, Human herpesvirus 8 (Kaposi`s sarcoma-associated h
cugaagcaccacauacaga

SEQ ID NO: 189358 - RNA, 18 nt, Human herpesvirus 8 (Kaposi`s sarcoma-associated h
cugaagccucccuaauag

SEQ ID NO: 189359 - RNA, 13 nt, Human herpesvirus 8 (Kaposi`s sarcoma-associated h
cuggacacuaaaa

SEQ ID NO: 189360 - RNA, 13 nt, Human herpesvirus 8 (Kaposi`s sarcoma-associated h
cugcucucgcugc

SEQ ID NO: 189361 - RNA, 22 nt, Human herpesvirus 8 (Kaposi`s sarcoma-associated h
cugcucaucgcgaccgcugcca

SEQ ID NO: 189362 - RNA, 18 nt, Human herpesvirus 8 (Kaposi`s sarcoma-associated h
cugcgucauguaccuggc

SEQ ID NO: 189363 - RNA, 18 nt, Human herpesvirus 8 (Kaposi`s sarcoma-associated h
cugccaauauaguggcca

SEQ ID NO: 189364 - RNA, 20 nt, Human herpesvirus 8 (Kaposi`s sarcoma-associated h
cugcagggcgcugcucuugu

SEQ ID NO: 189365 - RNA, 14 nt, Human herpesvirus 8 (Kaposi`s sarcoma-associated h
cugcaccuugaugu

SEQ ID NO: 189366 - RNA, 14 nt, Human herpesvirus 8 (Kaposi`s sarcoma-associated h
cugcacaacauaug

SEQ ID NO: 189367 - RNA, 17 nt, Human herpesvirus 8 (Kaposi`s sarcoma-associated h
cugcaauguacugccau

SEQ ID NO: 189368 - RNA, 15 nt, Human herpesvirus 8 (Kaposi`s sarcoma-associated h
cuggguagcuaugcc

SEQ ID NO: 189369 - RNA, 19 nt, Human herpesvirus 8 (Kaposi`s sarcoma-associated h
cuggguagcuaugcccacc

SEQ ID NO: 189370 - RNA, 22 nt, Human herpesvirus 8 (Kaposi`s sarcoma-associated h
cugguaccagagaauaaagcca

SEQ ID NO: 189371 - RNA, 15 nt, Human herpesvirus 8 (Kaposi`s sarcoma-associated h
cugucacggucuaca

SEQ ID NO: 189372 - RNA, 23 nt, Human herpesvirus 8 (Kaposi`s sarcoma-associated h
cugucacuagaauuggagcacuu

SEQ ID NO: 189373 - RNA, 16 nt, Human herpesvirus 8 (Kaposi`s sarcoma-associated h
cugucagauuucucua

SEQ ID NO: 189374 - RNA, 23 nt, Human herpesvirus 8 (Kaposi`s sarcoma-associated h
cugucaaccgucuccgccaggga

SEQ ID NO: 189375 - RNA, 19 nt, Human herpesvirus 8 (Kaposi`s sarcoma-associated h
cugggccacaaaacugcca

SEQ ID NO: 189376 - RNA, 20 nt, Human herpesvirus 8 (Kaposi`s sarcoma-associated h
cugggccacaaaacugccaa

SEQ ID NO: 189377 - RNA, 21 nt, Human herpesvirus 8 (Kaposi`s sarcoma-associated h
cugggccacaaaacugccaaa

SEQ ID NO: 189378 - RNA, 15 nt, Human herpesvirus 8 (Kaposi`s sarcoma-associated h
cuggauacacccaca

SEQ ID NO: 189379 - RNA, 21 nt, Human herpesvirus 8 (Kaposi`s sarcoma-associated h
cuggagcccgagaucaucuuu

SEQ ID NO: 189380 - RNA, 17 nt, Human herpesvirus 8 (Kaposi`s sarcoma-associated h
cuggacgauguacuuga

SEQ ID NO: 189381 - RNA, 15 nt, Human herpesvirus 8 (Kaposi`s sarcoma-associated h
cuggacaguauucuc

SEQ ID NO: 189382 - RNA, 14 nt, Human herpesvirus 8 (Kaposi`s sarcoma-associated h
cuggacuggaguca

SEQ ID NO: 189383 - RNA, 15 nt, Human herpesvirus 8 (Kaposi`s sarcoma-associated h
cgugucuagacaaua

SEQ ID NO: 189384 - RNA, 13 nt, Human herpesvirus 8 (Kaposi`s sarcoma-associated h
cguguaacccugc

SEQ ID NO: 189385 - RNA, 15 nt, Human herpesvirus 8 (Kaposi`s sarcoma-associated h
cguggcggaaggugg

SEQ ID NO: 189386 - RNA, 21 nt, Human herpesvirus 8 (Kaposi`s sarcoma-associated h
cuaaagauaccgaccaauaca

SEQ ID NO: 189387 - RNA, 15 nt, Human herpesvirus 8 (Kaposi`s sarcoma-associated h
cuaaccacaacaaua

SEQ ID NO: 189388 - RNA, 21 nt, Human herpesvirus 8 (Kaposi`s sarcoma-associated h
cuaaccgcaaagauaagccaa

SEQ ID NO: 189389 - RNA, 18 nt, Human herpesvirus 8 (Kaposi`s sarcoma-associated h
cgguugcaccaagcacaa

SEQ ID NO: 189390 - RNA, 13 nt, Human herpesvirus 8 (Kaposi`s sarcoma-associated h
cgguugguggugu

SEQ ID NO: 189391 - RNA, 15 nt, Human herpesvirus 8 (Kaposi`s sarcoma-associated h
cgguucccacccaca

SEQ ID NO: 189392 - RNA, 21 nt, Human herpesvirus 8 (Kaposi`s sarcoma-associated h
cggggggugggggauccacuc

SEQ ID NO: 189393 - RNA, 21 nt, Human herpesvirus 8 (Kaposi`s sarcoma-associated h
cgucugccgaagucagugcca

SEQ ID NO: 189394 - RNA, 14 nt, Human herpesvirus 8 (Kaposi`s sarcoma-associated h
cgucugugucacuc

SEQ ID NO: 189395 - RNA, 18 nt, Human herpesvirus 8 (Kaposi`s sarcoma-associated h
cgucuaauaaaacuaauc

SEQ ID NO: 189396 - RNA, 17 nt, Human herpesvirus 8 (Kaposi`s sarcoma-associated h
cgucuacaacagacuuu

SEQ ID NO: 189397 - RNA, 14 nt, Human herpesvirus 8 (Kaposi`s sarcoma-associated h
cgucgcgcugguug

SEQ ID NO: 189398 - RNA, 21 nt, Human herpesvirus 8 (Kaposi`s sarcoma-associated h
cgucccucuuggcuguuacaa

SEQ ID NO: 189399 - RNA, 14 nt, Human herpesvirus 8 (Kaposi`s sarcoma-associated h
cguaagccagugug

SEQ ID NO: 189400 - RNA, 16 nt, Human herpesvirus 8 (Kaposi`s sarcoma-associated h
cguacccaauguuaau

SEQ ID NO: 189401 - RNA, 22 nt, Human herpesvirus 8 (Kaposi`s sarcoma-associated h
cggauguaaucuuguaguccaa

SEQ ID NO: 189402 - RNA, 14 nt, Human herpesvirus 8 (Kaposi`s sarcoma-associated h
cggaugcgggcgau

SEQ ID NO: 189403 - RNA, 19 nt, Human herpesvirus 8 (Kaposi`s sarcoma-associated h
cggaugcgggcgauuacag

SEQ ID NO: 189404 - RNA, 22 nt, Human herpesvirus 8 (Kaposi`s sarcoma-associated h
cggaugcgggcgauuacaggaa

SEQ ID NO: 189405 - RNA, 15 nt, Human herpesvirus 8 (Kaposi`s sarcoma-associated h
cggauuuugauaugu

SEQ ID NO: 189406 - RNA, 15 nt, Human herpesvirus 8 (Kaposi`s sarcoma-associated h
cggauacuuauuaaa

SEQ ID NO: 189407 - RNA, 22 nt, Human herpesvirus 8 (Kaposi`s sarcoma-associated h
cggaggcccgagaaacacugug

SEQ ID NO: 189408 - RNA, 14 nt, Human herpesvirus 8 (Kaposi`s sarcoma-associated h
cggaguagugcaag

SEQ ID NO: 189409 - RNA, 20 nt, Human herpesvirus 8 (Kaposi`s sarcoma-associated h
cggaguagugcaagugcacg

SEQ ID NO: 189410 - RNA, 22 nt, Human herpesvirus 8 (Kaposi`s sarcoma-associated h
cggaagauugguguccagacag

SEQ ID NO: 189411 - RNA, 13 nt, Human herpesvirus 8 (Kaposi`s sarcoma-associated h
cggacuacaucca

SEQ ID NO: 189412 - RNA, 12 nt, Human herpesvirus 8 (Kaposi`s sarcoma-associated h
cgacaugugcuu

SEQ ID NO: 189413 - RNA, 9 nt, Human herpesvirus 8 (Kaposi`s sarcoma-associated h
cgacauuuc

SEQ ID NO: 189414 - RNA, 23 nt, Human herpesvirus 8 (Kaposi`s sarcoma-associated h
cgaccaauacaagacaacuaaua

SEQ ID NO: 189415 - RNA, 22 nt, Human herpesvirus 8 (Kaposi`s sarcoma-associated h
cgaccauuggcggguagaauca

SEQ ID NO: 189416 - RNA, 17 nt, Human herpesvirus 8 (Kaposi`s sarcoma-associated h
cgaaugcguucuccugc

SEQ ID NO: 189417 - RNA, 22 nt, Human herpesvirus 8 (Kaposi`s sarcoma-associated h
cgaaugcucaggucugucacua

SEQ ID NO: 189418 - RNA, 16 nt, Human herpesvirus 8 (Kaposi`s sarcoma-associated h
cuauauggcaacugcc

SEQ ID NO: 189419 - RNA, 15 nt, Human herpesvirus 8 (Kaposi`s sarcoma-associated h
cuauuucugccguuu

SEQ ID NO: 189420 - RNA, 13 nt, Human herpesvirus 8 (Kaposi`s sarcoma-associated h
cuauaaacagccu

SEQ ID NO: 189421 - RNA, 12 nt, Human herpesvirus 8 (Kaposi`s sarcoma-associated h
cuauacaugccc

SEQ ID NO: 189422 - RNA, 14 nt, Human herpesvirus 8 (Kaposi`s sarcoma-associated h
cucagggagcacgu

SEQ ID NO: 189423 - RNA, 16 nt, Human herpesvirus 8 (Kaposi`s sarcoma-associated h
cucagggagcacguga

SEQ ID NO: 189424 - RNA, 20 nt, Human herpesvirus 8 (Kaposi`s sarcoma-associated h
cucagugugcuguccagcgu

SEQ ID NO: 189425 - RNA, 13 nt, Human herpesvirus 8 (Kaposi`s sarcoma-associated h
cucauaacacagu

SEQ ID NO: 189426 - RNA, 14 nt, Human herpesvirus 8 (Kaposi`s sarcoma-associated h
cucauaucuuuaag

SEQ ID NO: 189427 - RNA, 16 nt, Human herpesvirus 8 (Kaposi`s sarcoma-associated h
cucaucggacaggacg

SEQ ID NO: 189428 - RNA, 21 nt, Human herpesvirus 8 (Kaposi`s sarcoma-associated h
cucaucgcgaccgcugccaau

SEQ ID NO: 189429 - RNA, 19 nt, Human herpesvirus 8 (Kaposi`s sarcoma-associated h
cuaggaggaagagcacugu

SEQ ID NO: 189430 - RNA, 23 nt, Human herpesvirus 8 (Kaposi`s sarcoma-associated h
cuaggaggaagagcacuguuaua

SEQ ID NO: 189431 - RNA, 14 nt, Human herpesvirus 8 (Kaposi`s sarcoma-associated h
cuacugcacaaaau

SEQ ID NO: 189432 - RNA, 18 nt, Human herpesvirus 8 (Kaposi`s sarcoma-associated h
cuacugugaaguuuacau

SEQ ID NO: 189433 - RNA, 18 nt, Human herpesvirus 8 (Kaposi`s sarcoma-associated h
cuacugugggugcacuga

SEQ ID NO: 189434 - RNA, 20 nt, Human herpesvirus 8 (Kaposi`s sarcoma-associated h
cuacugugggugcacugagu

SEQ ID NO: 189435 - RNA, 22 nt, Human herpesvirus 8 (Kaposi`s sarcoma-associated h
cuacuucagccgcuugcugaua

SEQ ID NO: 189436 - RNA, 15 nt, Human herpesvirus 8 (Kaposi`s sarcoma-associated h
cuacuuuggacaguu

SEQ ID NO: 189437 - RNA, 16 nt, Human herpesvirus 8 (Kaposi`s sarcoma-associated h
cuacuaagaguucccc

SEQ ID NO: 189438 - RNA, 20 nt, Human herpesvirus 8 (Kaposi`s sarcoma-associated h
cuacaaauguuuuaugcaaa

SEQ ID NO: 189439 - RNA, 16 nt, Human herpesvirus 8 (Kaposi`s sarcoma-associated h
cuaaucgaguaccccu

SEQ ID NO: 189440 - RNA, 16 nt, Human herpesvirus 8 (Kaposi`s sarcoma-associated h
cuacacuuuacugugu

SEQ ID NO: 189441 - RNA, 17 nt, Human herpesvirus 8 (Kaposi`s sarcoma-associated h
cuacaggggcuugacag

SEQ ID NO: 189442 - RNA, 19 nt, Human herpesvirus 8 (Kaposi`s sarcoma-associated h
cuacccugauuagcacugu

SEQ ID NO: 189443 - RNA, 20 nt, Human herpesvirus 8 (Kaposi`s sarcoma-associated h
cuacccugauuagcacugua

SEQ ID NO: 189444 - RNA, 22 nt, Human herpesvirus 8 (Kaposi`s sarcoma-associated h
cuacccugauuagcacuguauu

SEQ ID NO: 189445 - RNA, 14 nt, Human herpesvirus 8 (Kaposi`s sarcoma-associated h
gacccaaaaaggac

SEQ ID NO: 189446 - RNA, 16 nt, Human herpesvirus 8 (Kaposi`s sarcoma-associated h
gacccagaaaauuucu

SEQ ID NO: 189447 - RNA, 14 nt, Human herpesvirus 8 (Kaposi`s sarcoma-associated h
gacauggucugaca

SEQ ID NO: 189448 - RNA, 20 nt, Human herpesvirus 8 (Kaposi`s sarcoma-associated h
gacauggacauuaugaaggg

SEQ ID NO: 189449 - RNA, 22 nt, Human herpesvirus 8 (Kaposi`s sarcoma-associated h
gacaucccccccgcaggccagc

SEQ ID NO: 189450 - RNA, 17 nt, Human herpesvirus 8 (Kaposi`s sarcoma-associated h
gaccugaugcaggccac

SEQ ID NO: 189451 - RNA, 14 nt, Human herpesvirus 8 (Kaposi`s sarcoma-associated h
gaccucugucuucu

SEQ ID NO: 189452 - RNA, 14 nt, Human herpesvirus 8 (Kaposi`s sarcoma-associated h
gaccucuguggcau

SEQ ID NO: 189453 - RNA, 13 nt, Human herpesvirus 8 (Kaposi`s sarcoma-associated h
gaccuacacccuc

SEQ ID NO: 189454 - RNA, 12 nt, Human herpesvirus 8 (Kaposi`s sarcoma-associated h
gaccuacaucuc

SEQ ID NO: 189455 - RNA, 23 nt, Human herpesvirus 8 (Kaposi`s sarcoma-associated h
gacccggcaacacuggacacuaa

SEQ ID NO: 189456 - RNA, 22 nt, Human herpesvirus 8 (Kaposi`s sarcoma-associated h
gacccucacuucuccguugaca

SEQ ID NO: 189457 - RNA, 20 nt, Human herpesvirus 8 (Kaposi`s sarcoma-associated h
gacgccgucgcggaccucaa

SEQ ID NO: 189458 - RNA, 12 nt, Human herpesvirus 8 (Kaposi`s sarcoma-associated h
gacuacauccaa

SEQ ID NO: 189459 - RNA, 22 nt, Human herpesvirus 8 (Kaposi`s sarcoma-associated h
gaggacacgccaucgccgccag

SEQ ID NO: 189460 - RNA, 18 nt, Human herpesvirus 8 (Kaposi`s sarcoma-associated h
gagcuucggaaagcacug

SEQ ID NO: 189461 - RNA, 15 nt, Human herpesvirus 8 (Kaposi`s sarcoma-associated h
gagcgacuggaucau

SEQ ID NO: 189462 - RNA, 16 nt, Human herpesvirus 8 (Kaposi`s sarcoma-associated h
gagcgagugugccucc

SEQ ID NO: 189463 - RNA, 18 nt, Human herpesvirus 8 (Kaposi`s sarcoma-associated h
gagcacccugaaacucca

SEQ ID NO: 189464 - RNA, 18 nt, Human herpesvirus 8 (Kaposi`s sarcoma-associated h
gagcacgaagacauggug

SEQ ID NO: 189465 - RNA, 15 nt, Human herpesvirus 8 (Kaposi`s sarcoma-associated h
gagcgggguuuccag

SEQ ID NO: 189466 - RNA, 15 nt, Human herpesvirus 8 (Kaposi`s sarcoma-associated h
gagcacacuucccag

SEQ ID NO: 189467 - RNA, 17 nt, Human herpesvirus 8 (Kaposi`s sarcoma-associated h
gagaaccaugccagacu

SEQ ID NO: 189468 - RNA, 20 nt, Human herpesvirus 8 (Kaposi`s sarcoma-associated h
gagaacaugcuggaucccag

SEQ ID NO: 189469 - RNA, 21 nt, Human herpesvirus 8 (Kaposi`s sarcoma-associated h
gagaaauuacugcaccucgcc

SEQ ID NO: 189470 - RNA, 20 nt, Human herpesvirus 8 (Kaposi`s sarcoma-associated h
gagaaaucccauuugauaua

SEQ ID NO: 189471 - RNA, 20 nt, Human herpesvirus 8 (Kaposi`s sarcoma-associated h
gagaacugucgagacauguc

SEQ ID NO: 189472 - RNA, 16 nt, Human herpesvirus 8 (Kaposi`s sarcoma-associated h
gacuaugggaaugugc

SEQ ID NO: 189473 - RNA, 19 nt, Human herpesvirus 8 (Kaposi`s sarcoma-associated h
gacucaauuggaugcuaug

SEQ ID NO: 189474 - RNA, 12 nt, Human herpesvirus 8 (Kaposi`s sarcoma-associated h
gacagugccugg

SEQ ID NO: 189475 - RNA, 15 nt, Human herpesvirus 8 (Kaposi`s sarcoma-associated h
gacaguuaccauuca

SEQ ID NO: 189476 - RNA, 12 nt, Human herpesvirus 8 (Kaposi`s sarcoma-associated h
gacaguauucuc

SEQ ID NO: 189477 - RNA, 20 nt, Human herpesvirus 8 (Kaposi`s sarcoma-associated h
gacagcucguaaacaaaggc

SEQ ID NO: 189478 - RNA, 18 nt, Human herpesvirus 8 (Kaposi`s sarcoma-associated h
gacaggcacgcaaugcuc

SEQ ID NO: 189479 - RNA, 15 nt, Human herpesvirus 8 (Kaposi`s sarcoma-associated h
gacagggcuaugauu

SEQ ID NO: 189480 - RNA, 22 nt, Human herpesvirus 8 (Kaposi`s sarcoma-associated h
gaaugguaccauggcaaaaaac

SEQ ID NO: 189481 - RNA, 19 nt, Human herpesvirus 8 (Kaposi`s sarcoma-associated h
gaauggagaggagaccccc

SEQ ID NO: 189482 - RNA, 20 nt, Human herpesvirus 8 (Kaposi`s sarcoma-associated h
gaaugcucaggucugucacu

SEQ ID NO: 189483 - RNA, 16 nt, Human herpesvirus 8 (Kaposi`s sarcoma-associated h
gaauaaagaaugcccu

SEQ ID NO: 189484 - RNA, 16 nt, Human herpesvirus 8 (Kaposi`s sarcoma-associated h
gaauaaagccaaccua

SEQ ID NO: 189485 - RNA, 23 nt, Human herpesvirus 8 (Kaposi`s sarcoma-associated h
gaaguuuacauuaucuuaacuaa

SEQ ID NO: 189486 - RNA, 19 nt, Human herpesvirus 8 (Kaposi`s sarcoma-associated h
gaaugcauauggacuguua

SEQ ID NO: 189487 - RNA, 15 nt, Human herpesvirus 8 (Kaposi`s sarcoma-associated h
gaagacauggugacc

SEQ ID NO: 189488 - RNA, 13 nt, Human herpesvirus 8 (Kaposi`s sarcoma-associated h
gaagacccagaaa

SEQ ID NO: 189489 - RNA, 14 nt, Human herpesvirus 8 (Kaposi`s sarcoma-associated h
gaagagcacuguua

SEQ ID NO: 189490 - RNA, 21 nt, Human herpesvirus 8 (Kaposi`s sarcoma-associated h
gaagagccugaguauacaugu

SEQ ID NO: 189491 - RNA, 12 nt, Human herpesvirus 8 (Kaposi`s sarcoma-associated h
gaacuucuagca

SEQ ID NO: 189492 - RNA, 20 nt, Human herpesvirus 8 (Kaposi`s sarcoma-associated h
gaacuucuagcauaugcugc

SEQ ID NO: 189493 - RNA, 22 nt, Human herpesvirus 8 (Kaposi`s sarcoma-associated h
gaacuucuagcauaugcugcca

SEQ ID NO: 189494 - RNA, 22 nt, Human herpesvirus 8 (Kaposi`s sarcoma-associated h
gaacuugcucuuuucaaccucg

SEQ ID NO: 189495 - RNA, 19 nt, Human herpesvirus 8 (Kaposi`s sarcoma-associated h
gaacugucgagacauguca

SEQ ID NO: 189496 - RNA, 19 nt, Human herpesvirus 8 (Kaposi`s sarcoma-associated h
gaaccacggcgcuguacag

SEQ ID NO: 189497 - RNA, 23 nt, Human herpesvirus 8 (Kaposi`s sarcoma-associated h
gaacggucaauuuugcgccagcc

SEQ ID NO: 189498 - RNA, 19 nt, Human herpesvirus 8 (Kaposi`s sarcoma-associated h
gaaauaugucgcaggccga

SEQ ID NO: 189499 - RNA, 20 nt, Human herpesvirus 8 (Kaposi`s sarcoma-associated h
gaacagaagacccagaaaau

SEQ ID NO: 189500 - RNA, 15 nt, Human herpesvirus 8 (Kaposi`s sarcoma-associated h
gaacagcacauaugu

SEQ ID NO: 189501 - RNA, 21 nt, Human herpesvirus 8 (Kaposi`s sarcoma-associated h
gaacagcacauaugucucccu

SEQ ID NO: 189502 - RNA, 14 nt, Human herpesvirus 8 (Kaposi`s sarcoma-associated h
gaacaucagagaug

SEQ ID NO: 189503 - RNA, 16 nt, Human herpesvirus 8 (Kaposi`s sarcoma-associated h
gaacauuguucaaaac

SEQ ID NO: 189504 - RNA, 14 nt, Human herpesvirus 8 (Kaposi`s sarcoma-associated h
gaacaugcugccac

SEQ ID NO: 189505 - RNA, 21 nt, Human herpesvirus 8 (Kaposi`s sarcoma-associated h
gaacaugcuggaucccagugc

SEQ ID NO: 189506 - RNA, 14 nt, Human herpesvirus 8 (Kaposi`s sarcoma-associated h
gaacauguggcaca

SEQ ID NO: 189507 - RNA, 15 nt, Human herpesvirus 8 (Kaposi`s sarcoma-associated h
gaacauguggcacac

SEQ ID NO: 189508 - RNA, 16 nt, Human herpesvirus 8 (Kaposi`s sarcoma-associated h
gaacauugaugccuug

SEQ ID NO: 189509 - RNA, 21 nt, Human herpesvirus 8 (Kaposi`s sarcoma-associated h
cuuguaaaaauaaaugugaau

SEQ ID NO: 189510 - RNA, 20 nt, Human herpesvirus 8 (Kaposi`s sarcoma-associated h
cuuggugugcugauguugua

SEQ ID NO: 189511 - RNA, 19 nt, Human herpesvirus 8 (Kaposi`s sarcoma-associated h
cuuggcuguuacaauaaag

SEQ ID NO: 189512 - RNA, 12 nt, Human herpesvirus 8 (Kaposi`s sarcoma-associated h
cuugggauuuuu

SEQ ID NO: 189513 - RNA, 19 nt, Human herpesvirus 8 (Kaposi`s sarcoma-associated h
cuuggaguuaaagcuguca

SEQ ID NO: 189514 - RNA, 22 nt, Human herpesvirus 8 (Kaposi`s sarcoma-associated h
cuuggaguuaaagcugucacua

SEQ ID NO: 189515 - RNA, 23 nt, Human herpesvirus 8 (Kaposi`s sarcoma-associated h
cuuggaguuaaagcugucacuaa

SEQ ID NO: 189516 - RNA, 17 nt, Human herpesvirus 8 (Kaposi`s sarcoma-associated h
cuuggcgcccacguaug

SEQ ID NO: 189517 - RNA, 13 nt, Human herpesvirus 8 (Kaposi`s sarcoma-associated h
cuuggaacaaucu

SEQ ID NO: 189518 - RNA, 21 nt, Human herpesvirus 8 (Kaposi`s sarcoma-associated h
gaucccagugccucagcaacu

SEQ ID NO: 189519 - RNA, 21 nt, Human herpesvirus 8 (Kaposi`s sarcoma-associated h
gauccgcaaugucagguucca

SEQ ID NO: 189520 - RNA, 16 nt, Human herpesvirus 8 (Kaposi`s sarcoma-associated h
gauauuacagacucug

SEQ ID NO: 189521 - RNA, 16 nt, Human herpesvirus 8 (Kaposi`s sarcoma-associated h
gauauagcgugucuca

SEQ ID NO: 189522 - RNA, 20 nt, Human herpesvirus 8 (Kaposi`s sarcoma-associated h
gauaggauggcuagauuucg

SEQ ID NO: 189523 - RNA, 19 nt, Human herpesvirus 8 (Kaposi`s sarcoma-associated h
gaggugacccuuugugcuc

SEQ ID NO: 189524 - RNA, 20 nt, Human herpesvirus 8 (Kaposi`s sarcoma-associated h
gauccuguagaugagacaga

SEQ ID NO: 189525 - RNA, 20 nt, Human herpesvirus 8 (Kaposi`s sarcoma-associated h
gaucgaacagaagacccaga

SEQ ID NO: 189526 - RNA, 23 nt, Human herpesvirus 8 (Kaposi`s sarcoma-associated h
gaucggaucuuuuacaauauucu

SEQ ID NO: 189527 - RNA, 18 nt, Human herpesvirus 8 (Kaposi`s sarcoma-associated h
gaugauaggcaacaugac

SEQ ID NO: 189528 - RNA, 17 nt, Human herpesvirus 8 (Kaposi`s sarcoma-associated h
gaucucccaauuacagg

SEQ ID NO: 189529 - RNA, 16 nt, Human herpesvirus 8 (Kaposi`s sarcoma-associated h
gaucucagaggcccau

SEQ ID NO: 189530 - RNA, 17 nt, Human herpesvirus 8 (Kaposi`s sarcoma-associated h
gauuacagagucacaaa

SEQ ID NO: 189531 - RNA, 20 nt, Human herpesvirus 8 (Kaposi`s sarcoma-associated h
gauuacucgcacaagcgcug

SEQ ID NO: 189532 - RNA, 21 nt, Human herpesvirus 8 (Kaposi`s sarcoma-associated h
gauuaaaaaccacucacugag

SEQ ID NO: 189533 - RNA, 12 nt, Human herpesvirus 8 (Kaposi`s sarcoma-associated h
gaugccacuguu

SEQ ID NO: 189534 - RNA, 15 nt, Human herpesvirus 8 (Kaposi`s sarcoma-associated h
gcaccaagcacaaca

SEQ ID NO: 189535 - RNA, 19 nt, Human herpesvirus 8 (Kaposi`s sarcoma-associated h
gcacauaaggaacagauua

SEQ ID NO: 189536 - RNA, 11 nt, Human herpesvirus 8 (Kaposi`s sarcoma-associated h
gcaacugacca

SEQ ID NO: 189537 - RNA, 17 nt, Human herpesvirus 8 (Kaposi`s sarcoma-associated h
gcaacuucuauguuucc

SEQ ID NO: 189538 - RNA, 15 nt, Human herpesvirus 8 (Kaposi`s sarcoma-associated h
gcaacugcgucaugu

SEQ ID NO: 189539 - RNA, 17 nt, Human herpesvirus 8 (Kaposi`s sarcoma-associated h
gcacagacacgagcuag

SEQ ID NO: 189540 - RNA, 22 nt, Human herpesvirus 8 (Kaposi`s sarcoma-associated h
gcacagagucuacgugccagug

SEQ ID NO: 189541 - RNA, 12 nt, Human herpesvirus 8 (Kaposi`s sarcoma-associated h
gcacucagaaca

SEQ ID NO: 189542 - RNA, 17 nt, Human herpesvirus 8 (Kaposi`s sarcoma-associated h
gcacuccuguuagcaca

SEQ ID NO: 189543 - RNA, 21 nt, Human herpesvirus 8 (Kaposi`s sarcoma-associated h
gcacuccuguuagcacauucu

SEQ ID NO: 189544 - RNA, 12 nt, Human herpesvirus 8 (Kaposi`s sarcoma-associated h
gcacuauagugc

SEQ ID NO: 189545 - RNA, 15 nt, Human herpesvirus 8 (Kaposi`s sarcoma-associated h
gcagaacaguaccca

SEQ ID NO: 189546 - RNA, 20 nt, Human herpesvirus 8 (Kaposi`s sarcoma-associated h
gcagaaccgaugguuuccua

SEQ ID NO: 189547 - RNA, 21 nt, Human herpesvirus 8 (Kaposi`s sarcoma-associated h
gcacuguuauaagaccaauca

SEQ ID NO: 189548 - RNA, 13 nt, Human herpesvirus 8 (Kaposi`s sarcoma-associated h
gcaaaaaacacuc

SEQ ID NO: 189549 - RNA, 19 nt, Human herpesvirus 8 (Kaposi`s sarcoma-associated h
gcaaaagagacacuaucuc

SEQ ID NO: 189550 - RNA, 14 nt, Human herpesvirus 8 (Kaposi`s sarcoma-associated h
gcaaaaugugcuuu

SEQ ID NO: 189551 - RNA, 16 nt, Human herpesvirus 8 (Kaposi`s sarcoma-associated h
gcaacccacagcaucc

SEQ ID NO: 189552 - RNA, 20 nt, Human herpesvirus 8 (Kaposi`s sarcoma-associated h
gcaacguucauccuagguga

SEQ ID NO: 189553 - RNA, 20 nt, Human herpesvirus 8 (Kaposi`s sarcoma-associated h
gcaacggcgguguaucaggc

SEQ ID NO: 189554 - RNA, 23 nt, Human herpesvirus 8 (Kaposi`s sarcoma-associated h
gauuuugauaugugugcccaauc

SEQ ID NO: 189555 - RNA, 16 nt, Human herpesvirus 8 (Kaposi`s sarcoma-associated h
gauuauaaugggucua

SEQ ID NO: 189556 - RNA, 16 nt, Human herpesvirus 8 (Kaposi`s sarcoma-associated h
gauuccgucauucacc

SEQ ID NO: 189557 - RNA, 14 nt, Human herpesvirus 8 (Kaposi`s sarcoma-associated h
gcagccucuacccu

SEQ ID NO: 189558 - RNA, 20 nt, Human herpesvirus 8 (Kaposi`s sarcoma-associated h
gcagcuuaccgcuacugugg

SEQ ID NO: 189559 - RNA, 15 nt, Human herpesvirus 8 (Kaposi`s sarcoma-associated h
gcagucacuucccca

SEQ ID NO: 189560 - RNA, 19 nt, Human herpesvirus 8 (Kaposi`s sarcoma-associated h
gcagugcacgcaccaggau

SEQ ID NO: 189561 - RNA, 13 nt, Human herpesvirus 8 (Kaposi`s sarcoma-associated h
gcaggcagccaag

SEQ ID NO: 189562 - RNA, 18 nt, Human herpesvirus 8 (Kaposi`s sarcoma-associated h
gcaggagucagagcagug

SEQ ID NO: 189563 - RNA, 21 nt, Human herpesvirus 8 (Kaposi`s sarcoma-associated h
gcauaaccgagcucugcugcc

SEQ ID NO: 189564 - RNA, 17 nt, Human herpesvirus 8 (Kaposi`s sarcoma-associated h
gcaguguuugcugcugu

SEQ ID NO: 189565 - RNA, 20 nt, Human herpesvirus 8 (Kaposi`s sarcoma-associated h
gcaugcucggcaacauucaa

SEQ ID NO: 189566 - RNA, 18 nt, Human herpesvirus 8 (Kaposi`s sarcoma-associated h
gcaucuuuagagagcuag

SEQ ID NO: 189567 - RNA, 21 nt, Human herpesvirus 8 (Kaposi`s sarcoma-associated h
gcauuuccugcccugguucua

SEQ ID NO: 189568 - RNA, 15 nt, Human herpesvirus 8 (Kaposi`s sarcoma-associated h
gcauuggcuauuuua

SEQ ID NO: 189569 - RNA, 16 nt, Human herpesvirus 8 (Kaposi`s sarcoma-associated h
gcauuauaaacccauc

SEQ ID NO: 189570 - RNA, 17 nt, Human herpesvirus 8 (Kaposi`s sarcoma-associated h
gcauuauuucgaguacg

SEQ ID NO: 189571 - RNA, 21 nt, Human herpesvirus 8 (Kaposi`s sarcoma-associated h
gcaugugguuaagcuuugcag

SEQ ID NO: 189572 - RNA, 14 nt, Human herpesvirus 8 (Kaposi`s sarcoma-associated h
gcauuaaagcacuc

SEQ ID NO: 189573 - RNA, 20 nt, Human herpesvirus 8 (Kaposi`s sarcoma-associated h
gccaauuauugcaccauuua

SEQ ID NO: 189574 - RNA, 22 nt, Human herpesvirus 8 (Kaposi`s sarcoma-associated h
gccacaaacgccccucuuggcu

SEQ ID NO: 189575 - RNA, 13 nt, Human herpesvirus 8 (Kaposi`s sarcoma-associated h
gccacaacccaac

SEQ ID NO: 189576 - RNA, 21 nt, Human herpesvirus 8 (Kaposi`s sarcoma-associated h
gccaaaugcccagaaugaagg

SEQ ID NO: 189577 - RNA, 18 nt, Human herpesvirus 8 (Kaposi`s sarcoma-associated h
gccaaaugcggccaguuu

SEQ ID NO: 189578 - RNA, 17 nt, Human herpesvirus 8 (Kaposi`s sarcoma-associated h
gccaacccucagugugc

SEQ ID NO: 189579 - RNA, 21 nt, Human herpesvirus 8 (Kaposi`s sarcoma-associated h
gccaccgagaaggaagcgcag

SEQ ID NO: 189580 - RNA, 22 nt, Human herpesvirus 8 (Kaposi`s sarcoma-associated h
gccacauacgcucgccacucua

SEQ ID NO: 189581 - RNA, 11 nt, Human herpesvirus 8 (Kaposi`s sarcoma-associated h
gccacauuucc

SEQ ID NO: 189582 - RNA, 16 nt, Human herpesvirus 8 (Kaposi`s sarcoma-associated h
gccacggauggaacau

SEQ ID NO: 189583 - RNA, 22 nt, Human herpesvirus 8 (Kaposi`s sarcoma-associated h
gccaucaaagacgccuuccuca

SEQ ID NO: 189584 - RNA, 17 nt, Human herpesvirus 8 (Kaposi`s sarcoma-associated h
gccaucaacgauacuga

SEQ ID NO: 189585 - RNA, 22 nt, Human herpesvirus 8 (Kaposi`s sarcoma-associated h
gccauagcagucgccaguuuuu

SEQ ID NO: 189586 - RNA, 20 nt, Human herpesvirus 8 (Kaposi`s sarcoma-associated h
gccauccgcgagccauucau

SEQ ID NO: 189587 - RNA, 17 nt, Human herpesvirus 8 (Kaposi`s sarcoma-associated h
gccaggacaaugaaaag

SEQ ID NO: 189588 - RNA, 23 nt, Human herpesvirus 8 (Kaposi`s sarcoma-associated h
cccaguuaaccggcuuguacagu

SEQ ID NO: 189589 - RNA, 13 nt, Human herpesvirus 8 (Kaposi`s sarcoma-associated h
cccagucggccca

SEQ ID NO: 189590 - RNA, 14 nt, Human herpesvirus 8 (Kaposi`s sarcoma-associated h
cccaucuaccucaa

SEQ ID NO: 189591 - RNA, 23 nt, Human herpesvirus 8 (Kaposi`s sarcoma-associated h
ccagggaagaugaaggacacggg

SEQ ID NO: 189592 - RNA, 23 nt, Human herpesvirus 8 (Kaposi`s sarcoma-associated h
ccaggcucuacagguaggccaca

SEQ ID NO: 189593 - RNA, 14 nt, Human herpesvirus 8 (Kaposi`s sarcoma-associated h
ccauagugugcguu

SEQ ID NO: 189594 - RNA, 20 nt, Human herpesvirus 8 (Kaposi`s sarcoma-associated h
cccucgucgacagagccagc

SEQ ID NO: 189595 - RNA, 22 nt, Human herpesvirus 8 (Kaposi`s sarcoma-associated h
cccuccugucuaaaaucaggag

SEQ ID NO: 189596 - RNA, 16 nt, Human herpesvirus 8 (Kaposi`s sarcoma-associated h
cccucuuggcuguuac

SEQ ID NO: 189597 - RNA, 17 nt, Human herpesvirus 8 (Kaposi`s sarcoma-associated h
cccucuuggcuguuaca

SEQ ID NO: 189598 - RNA, 21 nt, Human herpesvirus 8 (Kaposi`s sarcoma-associated h
cccucuuggcuguuacaauaa

SEQ ID NO: 189599 - RNA, 12 nt, Human herpesvirus 8 (Kaposi`s sarcoma-associated h
cccugaaacucc

SEQ ID NO: 189600 - RNA, 16 nt, Human herpesvirus 8 (Kaposi`s sarcoma-associated h
cccugaaaugaucguc

SEQ ID NO: 189601 - RNA, 18 nt, Human herpesvirus 8 (Kaposi`s sarcoma-associated h
cccuguacaugaaccaga

SEQ ID NO: 189602 - RNA, 23 nt, Human herpesvirus 8 (Kaposi`s sarcoma-associated h
ccccucauuuaucgcguuugaua

SEQ ID NO: 189603 - RNA, 14 nt, Human herpesvirus 8 (Kaposi`s sarcoma-associated h
ccccacaggacaag

SEQ ID NO: 189604 - RNA, 12 nt, Human herpesvirus 8 (Kaposi`s sarcoma-associated h
ccccucuuggcu

SEQ ID NO: 189605 - RNA, 17 nt, Human herpesvirus 8 (Kaposi`s sarcoma-associated h
ccccucuuggcuguuac

SEQ ID NO: 189606 - RNA, 16 nt, Human herpesvirus 8 (Kaposi`s sarcoma-associated h
ccccugcaaugcaagg

SEQ ID NO: 189607 - RNA, 20 nt, Human herpesvirus 8 (Kaposi`s sarcoma-associated h
ccguaucggacuuuggauaa

SEQ ID NO: 189608 - RNA, 17 nt, Human herpesvirus 8 (Kaposi`s sarcoma-associated h
ccgguguaugacccuga

SEQ ID NO: 189609 - RNA, 20 nt, Human herpesvirus 8 (Kaposi`s sarcoma-associated h
ccuaggugacugggagauaa

SEQ ID NO: 189610 - RNA, 21 nt, Human herpesvirus 8 (Kaposi`s sarcoma-associated h
ccucaacccacacuggcccaa

SEQ ID NO: 189611 - RNA, 14 nt, Human herpesvirus 8 (Kaposi`s sarcoma-associated h
ccgaaugcguucuc

SEQ ID NO: 189612 - RNA, 17 nt, Human herpesvirus 8 (Kaposi`s sarcoma-associated h
ccgaaguacugcuuaaa

SEQ ID NO: 189613 - RNA, 16 nt, Human herpesvirus 8 (Kaposi`s sarcoma-associated h
ccggacuacauccaaa

SEQ ID NO: 189614 - RNA, 21 nt, Human herpesvirus 8 (Kaposi`s sarcoma-associated h
ccggagagcgucaucugcgaa

SEQ ID NO: 189615 - RNA, 16 nt, Human herpesvirus 8 (Kaposi`s sarcoma-associated h
ccggaguagugcaagu

SEQ ID NO: 189616 - RNA, 21 nt, Human herpesvirus 8 (Kaposi`s sarcoma-associated h
ccgcuacugugggugcacuga

SEQ ID NO: 189617 - RNA, 21 nt, Human herpesvirus 8 (Kaposi`s sarcoma-associated h
ccgcuaagaaaaucgaagcca

SEQ ID NO: 189618 - RNA, 23 nt, Human herpesvirus 8 (Kaposi`s sarcoma-associated h
ccgcuaagaaaaucgaagccagg

SEQ ID NO: 189619 - RNA, 17 nt, Human herpesvirus 8 (Kaposi`s sarcoma-associated h
ccucaagcauugaguuu

SEQ ID NO: 189620 - RNA, 13 nt, Human herpesvirus 8 (Kaposi`s sarcoma-associated h
ccucaaauucuca

SEQ ID NO: 189621 - RNA, 18 nt, Human herpesvirus 8 (Kaposi`s sarcoma-associated h
ccucagcaacugcgucau

SEQ ID NO: 189622 - RNA, 23 nt, Human herpesvirus 8 (Kaposi`s sarcoma-associated h
ccucagugugcuguccagcgugg

SEQ ID NO: 189623 - RNA, 15 nt, Human herpesvirus 8 (Kaposi`s sarcoma-associated h
ccucauaauaaugau

SEQ ID NO: 189624 - RNA, 16 nt, Human herpesvirus 8 (Kaposi`s sarcoma-associated h
ccucuugcgcuaugug

SEQ ID NO: 189625 - RNA, 19 nt, Human herpesvirus 8 (Kaposi`s sarcoma-associated h
ccucuuggcuguuacaaua

SEQ ID NO: 189626 - RNA, 19 nt, Human herpesvirus 8 (Kaposi`s sarcoma-associated h
ccucuccauagaacuggaa

SEQ ID NO: 189627 - RNA, 20 nt, Human herpesvirus 8 (Kaposi`s sarcoma-associated h
ccucuccgcauuaaagcacu

SEQ ID NO: 189628 - RNA, 18 nt, Human herpesvirus 8 (Kaposi`s sarcoma-associated h
ccucuggccugugcccaa

SEQ ID NO: 189629 - RNA, 16 nt, Human herpesvirus 8 (Kaposi`s sarcoma-associated h
ccuccuugagugucua

SEQ ID NO: 189630 - RNA, 18 nt, Human herpesvirus 8 (Kaposi`s sarcoma-associated h
ccucgagcgugcugauuu

SEQ ID NO: 189631 - RNA, 16 nt, Human herpesvirus 8 (Kaposi`s sarcoma-associated h
ccugaccagacaagaa

SEQ ID NO: 189632 - RNA, 16 nt, Human herpesvirus 8 (Kaposi`s sarcoma-associated h
ccugacucauuucauu

SEQ ID NO: 189633 - RNA, 18 nt, Human herpesvirus 8 (Kaposi`s sarcoma-associated h
ccugauacgccacggugg

SEQ ID NO: 189634 - RNA, 20 nt, Human herpesvirus 8 (Kaposi`s sarcoma-associated h
ccugaagucccgaugccacu

SEQ ID NO: 189635 - RNA, 18 nt, Human herpesvirus 8 (Kaposi`s sarcoma-associated h
ccugaaacgucgcccaaa

SEQ ID NO: 189636 - RNA, 17 nt, Human herpesvirus 8 (Kaposi`s sarcoma-associated h
ccugauuagcacuguau

SEQ ID NO: 189637 - RNA, 20 nt, Human herpesvirus 8 (Kaposi`s sarcoma-associated h
ccugcacuccaagccagucg

SEQ ID NO: 189638 - RNA, 18 nt, Human herpesvirus 8 (Kaposi`s sarcoma-associated h
ccugcggucccagggugc

SEQ ID NO: 189639 - RNA, 16 nt, Human herpesvirus 8 (Kaposi`s sarcoma-associated h
ccugcauuuggacaca

SEQ ID NO: 189640 - RNA, 13 nt, Human herpesvirus 8 (Kaposi`s sarcoma-associated h
ccuggcugcaaag

SEQ ID NO: 189641 - RNA, 19 nt, Human herpesvirus 8 (Kaposi`s sarcoma-associated h
ccuggagaagggugggugg

SEQ ID NO: 189642 - RNA, 17 nt, Human herpesvirus 8 (Kaposi`s sarcoma-associated h
ccuggacaguauucuca

SEQ ID NO: 189643 - RNA, 18 nt, Human herpesvirus 8 (Kaposi`s sarcoma-associated h
ccuggacaguauucucac

SEQ ID NO: 189644 - RNA, 16 nt, Human herpesvirus 8 (Kaposi`s sarcoma-associated h
ccugcugucuaucuuu

SEQ ID NO: 189645 - RNA, 22 nt, Human herpesvirus 8 (Kaposi`s sarcoma-associated h
ccugcuuacaaugugucugugg

SEQ ID NO: 189646 - RNA, 19 nt, Human herpesvirus 8 (Kaposi`s sarcoma-associated h
ccuugucacaaauuuuaac

SEQ ID NO: 189647 - RNA, 16 nt, Human herpesvirus 8 (Kaposi`s sarcoma-associated h
ccuugcugucuuugua

SEQ ID NO: 189648 - RNA, 19 nt, Human herpesvirus 8 (Kaposi`s sarcoma-associated h
ccuuggaagauauguugug

SEQ ID NO: 189649 - RNA, 14 nt, Human herpesvirus 8 (Kaposi`s sarcoma-associated h
cgaaagcuucaucg

SEQ ID NO: 189650 - RNA, 23 nt, Human herpesvirus 8 (Kaposi`s sarcoma-associated h
cgaacuaacggguaacugcaugc

SEQ ID NO: 189651 - RNA, 18 nt, Human herpesvirus 8 (Kaposi`s sarcoma-associated h
cgaacagaagacccagaa

SEQ ID NO: 189652 - RNA, 21 nt, Human herpesvirus 8 (Kaposi`s sarcoma-associated h
cgaacagaagacccagaaaau

SEQ ID NO: 189653 - RNA, 14 nt, Human herpesvirus 8 (Kaposi`s sarcoma-associated h
ccuucgucaugcac

SEQ ID NO: 189654 - RNA, 20 nt, Human herpesvirus 8 (Kaposi`s sarcoma-associated h
ccuucuucugguaagcaccu

SEQ ID NO: 189655 - RNA, 16 nt, Human herpesvirus 8 (Kaposi`s sarcoma-associated h
ccuuaagaaaguggau

SEQ ID NO: 189656 - RNA, 21 nt, Human herpesvirus 8 (Kaposi`s sarcoma-associated h
ccuuaauuggauauagacuua

SEQ ID NO: 189657 - RNA, 15 nt, Human herpesvirus 8 (Kaposi`s sarcoma-associated h
ccuuaauuuaaucua

SEQ ID NO: 189658 - RNA, 18 nt, Human herpesvirus 8 (Kaposi`s sarcoma-associated h
ccuuagaccuacaucucc

SEQ ID NO: 189659 - RNA, 15 nt, Human herpesvirus 8 (Kaposi`s sarcoma-associated h
ccuuaugucaguucc

SEQ ID NO: 189660 - RNA, 13 nt, Human herpesvirus 8 (Kaposi`s sarcoma-associated h
ccuguacaugaac

SEQ ID NO: 189661 - RNA, 21 nt, Human herpesvirus 8 (Kaposi`s sarcoma-associated h
ccuguacaugaaccagaauca

SEQ ID NO: 189662 - RNA, 13 nt, Human herpesvirus 8 (Kaposi`s sarcoma-associated h
ccugucagauuua

SEQ ID NO: 189663 - RNA, 16 nt, Human herpesvirus 8 (Kaposi`s sarcoma-associated h
cauuaagagugccacu

SEQ ID NO: 189664 - RNA, 23 nt, Human herpesvirus 8 (Kaposi`s sarcoma-associated h
cauuaccaauacuauuauaacau

SEQ ID NO: 189665 - RNA, 19 nt, Human herpesvirus 8 (Kaposi`s sarcoma-associated h
cauuaacaaacaaggucaa

SEQ ID NO: 189666 - RNA, 22 nt, Human herpesvirus 8 (Kaposi`s sarcoma-associated h
cauuaaaugaacauuguucaaa

SEQ ID NO: 189667 - RNA, 17 nt, Human herpesvirus 8 (Kaposi`s sarcoma-associated h
cauuaucuuaacuaaac

SEQ ID NO: 189668 - RNA, 17 nt, Human herpesvirus 8 (Kaposi`s sarcoma-associated h
cauuagugacauacaug

SEQ ID NO: 189669 - RNA, 16 nt, Human herpesvirus 8 (Kaposi`s sarcoma-associated h
cauuaugcaugcaaua

SEQ ID NO: 189670 - RNA, 15 nt, Human herpesvirus 8 (Kaposi`s sarcoma-associated h
cauuggauuggauca

SEQ ID NO: 189671 - RNA, 21 nt, Human herpesvirus 8 (Kaposi`s sarcoma-associated h
cauuggauuggaucaacuaag

SEQ ID NO: 189672 - RNA, 22 nt, Human herpesvirus 8 (Kaposi`s sarcoma-associated h
cauuuuuuacggacaauacuga

SEQ ID NO: 189673 - RNA, 12 nt, Human herpesvirus 8 (Kaposi`s sarcoma-associated h
cauuuugguguc

SEQ ID NO: 189674 - RNA, 19 nt, Human herpesvirus 8 (Kaposi`s sarcoma-associated h
ccaaacacaucaguguccu

SEQ ID NO: 189675 - RNA, 22 nt, Human herpesvirus 8 (Kaposi`s sarcoma-associated h
ccaaaauucgcagggagacaag

SEQ ID NO: 189676 - RNA, 12 nt, Human herpesvirus 8 (Kaposi`s sarcoma-associated h
ccaagugcauug

SEQ ID NO: 189677 - RNA, 13 nt, Human herpesvirus 8 (Kaposi`s sarcoma-associated h
ccaaguauggaau

SEQ ID NO: 189678 - RNA, 17 nt, Human herpesvirus 8 (Kaposi`s sarcoma-associated h
ccaauaaugcaaugcuu

SEQ ID NO: 189679 - RNA, 17 nt, Human herpesvirus 8 (Kaposi`s sarcoma-associated h
ccacgaaauacauuaac

SEQ ID NO: 189680 - RNA, 18 nt, Human herpesvirus 8 (Kaposi`s sarcoma-associated h
ccaccguaaucgugcagg

SEQ ID NO: 189681 - RNA, 18 nt, Human herpesvirus 8 (Kaposi`s sarcoma-associated h
ccacggggacauggacag

SEQ ID NO: 189682 - RNA, 20 nt, Human herpesvirus 8 (Kaposi`s sarcoma-associated h
ccacguggagccaacaaaca

SEQ ID NO: 189683 - RNA, 16 nt, Human herpesvirus 8 (Kaposi`s sarcoma-associated h
ccagagaauaaagcca

SEQ ID NO: 189684 - RNA, 15 nt, Human herpesvirus 8 (Kaposi`s sarcoma-associated h
ccagacugguccaag

SEQ ID NO: 189685 - RNA, 13 nt, Human herpesvirus 8 (Kaposi`s sarcoma-associated h
ccagcuagcagug

SEQ ID NO: 189686 - RNA, 21 nt, Human herpesvirus 8 (Kaposi`s sarcoma-associated h
ccagcuccuauugcaacugac

SEQ ID NO: 189687 - RNA, 23 nt, Human herpesvirus 8 (Kaposi`s sarcoma-associated h
ccaggccucuagcuguagaguca

SEQ ID NO: 189688 - RNA, 16 nt, Human herpesvirus 8 (Kaposi`s sarcoma-associated h
ccaggaucaacacuuc

SEQ ID NO: 189689 - RNA, 15 nt, Human herpesvirus 8 (Kaposi`s sarcoma-associated h
ccaggaaguucaaug

SEQ ID NO: 189690 - RNA, 16 nt, Human herpesvirus 8 (Kaposi`s sarcoma-associated h
ccaggacaaugaaaag

SEQ ID NO: 189691 - RNA, 18 nt, Human herpesvirus 8 (Kaposi`s sarcoma-associated h
ccaggacccguaccacaa

SEQ ID NO: 189692 - RNA, 18 nt, Human herpesvirus 8 (Kaposi`s sarcoma-associated h
ccagaagcgcaccacaga

SEQ ID NO: 189693 - RNA, 15 nt, Human herpesvirus 8 (Kaposi`s sarcoma-associated h
ccacuugggugcaca

SEQ ID NO: 189694 - RNA, 21 nt, Human herpesvirus 8 (Kaposi`s sarcoma-associated h
ccacuugggugcacagagaua

SEQ ID NO: 189695 - RNA, 17 nt, Human herpesvirus 8 (Kaposi`s sarcoma-associated h
ccacuuuuuguuugaug

SEQ ID NO: 189696 - RNA, 20 nt, Human herpesvirus 8 (Kaposi`s sarcoma-associated h
ccagaccgccaccagguggc

SEQ ID NO: 189697 - RNA, 21 nt, Human herpesvirus 8 (Kaposi`s sarcoma-associated h
ccagaaugaaggacauaccua

SEQ ID NO: 189698 - RNA, 23 nt, Human herpesvirus 8 (Kaposi`s sarcoma-associated h
ccagacaccaaagacaaguacca

SEQ ID NO: 189699 - RNA, 16 nt, Human herpesvirus 8 (Kaposi`s sarcoma-associated h
ccacuauuaugccgaa

SEQ ID NO: 189700 - RNA, 21 nt, Human herpesvirus 8 (Kaposi`s sarcoma-associated h
ccacucuauauggcaacugcc

SEQ ID NO: 189701 - RNA, 16 nt, Human herpesvirus 8 (Kaposi`s sarcoma-associated h
ccacucuugccaacga

SEQ ID NO: 189702 - RNA, 13 nt, Human herpesvirus 8 (Kaposi`s sarcoma-associated h
caguggugcacua

SEQ ID NO: 189703 - RNA, 12 nt, Human herpesvirus 8 (Kaposi`s sarcoma-associated h
cagugugcagua

SEQ ID NO: 189704 - RNA, 16 nt, Human herpesvirus 8 (Kaposi`s sarcoma-associated h
cagugugcaguaguaa

SEQ ID NO: 189705 - RNA, 17 nt, Human herpesvirus 8 (Kaposi`s sarcoma-associated h
caguguccagccacauc

SEQ ID NO: 189706 - RNA, 20 nt, Human herpesvirus 8 (Kaposi`s sarcoma-associated h
cagugucuaugucuguguuu

SEQ ID NO: 189707 - RNA, 23 nt, Human herpesvirus 8 (Kaposi`s sarcoma-associated h
caguuaaccggcuuguacaguga

SEQ ID NO: 189708 - RNA, 19 nt, Human herpesvirus 8 (Kaposi`s sarcoma-associated h
cauaaaaugggccaugaca

SEQ ID NO: 189709 - RNA, 18 nt, Human herpesvirus 8 (Kaposi`s sarcoma-associated h
cauagcagucgccaguuu

SEQ ID NO: 189710 - RNA, 15 nt, Human herpesvirus 8 (Kaposi`s sarcoma-associated h
cauaaggaacagauu

SEQ ID NO: 189711 - RNA, 21 nt, Human herpesvirus 8 (Kaposi`s sarcoma-associated h
cauaaguguuuggaguggagu

SEQ ID NO: 189712 - RNA, 17 nt, Human herpesvirus 8 (Kaposi`s sarcoma-associated h
cauacguuuugaacaau

SEQ ID NO: 189713 - RNA, 18 nt, Human herpesvirus 8 (Kaposi`s sarcoma-associated h
cauacguuuugaacaaug

SEQ ID NO: 189714 - RNA, 20 nt, Human herpesvirus 8 (Kaposi`s sarcoma-associated h
cagcaaacggagaccuacac

SEQ ID NO: 189715 - RNA, 13 nt, Human herpesvirus 8 (Kaposi`s sarcoma-associated h
cagcaaagcacau

SEQ ID NO: 189716 - RNA, 14 nt, Human herpesvirus 8 (Kaposi`s sarcoma-associated h
cagcaccuguuucc

SEQ ID NO: 189717 - RNA, 15 nt, Human herpesvirus 8 (Kaposi`s sarcoma-associated h
cagcaauaaacccac

SEQ ID NO: 189718 - RNA, 16 nt, Human herpesvirus 8 (Kaposi`s sarcoma-associated h
cagcaauaaacccaca

SEQ ID NO: 189719 - RNA, 13 nt, Human herpesvirus 8 (Kaposi`s sarcoma-associated h
cagcaacugcguc

SEQ ID NO: 189720 - RNA, 16 nt, Human herpesvirus 8 (Kaposi`s sarcoma-associated h
cagccaccacgccaca

SEQ ID NO: 189721 - RNA, 17 nt, Human herpesvirus 8 (Kaposi`s sarcoma-associated h
caguggaugaccaacag

SEQ ID NO: 189722 - RNA, 23 nt, Human herpesvirus 8 (Kaposi`s sarcoma-associated h
cagugcucuuccuccuagucaua

SEQ ID NO: 189723 - RNA, 14 nt, Human herpesvirus 8 (Kaposi`s sarcoma-associated h
cagugccucagcaa

SEQ ID NO: 189724 - RNA, 14 nt, Human herpesvirus 8 (Kaposi`s sarcoma-associated h
cagugccugcagua

SEQ ID NO: 189725 - RNA, 18 nt, Human herpesvirus 8 (Kaposi`s sarcoma-associated h
caucucucacacccugac

SEQ ID NO: 189726 - RNA, 13 nt, Human herpesvirus 8 (Kaposi`s sarcoma-associated h
caucucggccauu

SEQ ID NO: 189727 - RNA, 14 nt, Human herpesvirus 8 (Kaposi`s sarcoma-associated h
caucucgguacugc

SEQ ID NO: 189728 - RNA, 20 nt, Human herpesvirus 8 (Kaposi`s sarcoma-associated h
caucguagcucaugauuaca

SEQ ID NO: 189729 - RNA, 15 nt, Human herpesvirus 8 (Kaposi`s sarcoma-associated h
caucgucuucccacg

SEQ ID NO: 189730 - RNA, 22 nt, Human herpesvirus 8 (Kaposi`s sarcoma-associated h
caucuacccugauuagcacugu

SEQ ID NO: 189731 - RNA, 23 nt, Human herpesvirus 8 (Kaposi`s sarcoma-associated h
caucuacccugauuagcacugua

SEQ ID NO: 189732 - RNA, 20 nt, Human herpesvirus 8 (Kaposi`s sarcoma-associated h
caucaacgauacugaucacu

SEQ ID NO: 189733 - RNA, 18 nt, Human herpesvirus 8 (Kaposi`s sarcoma-associated h
caucaaagacgccuuccu

SEQ ID NO: 189734 - RNA, 20 nt, Human herpesvirus 8 (Kaposi`s sarcoma-associated h
cauauucuuucccgucaggg

SEQ ID NO: 189735 - RNA, 21 nt, Human herpesvirus 8 (Kaposi`s sarcoma-associated h
cauagucacaucuguguacaa

SEQ ID NO: 189736 - RNA, 19 nt, Human herpesvirus 8 (Kaposi`s sarcoma-associated h
caugaguuccacacagauu

SEQ ID NO: 189737 - RNA, 20 nt, Human herpesvirus 8 (Kaposi`s sarcoma-associated h
caugauuugauacagggaca

SEQ ID NO: 189738 - RNA, 19 nt, Human herpesvirus 8 (Kaposi`s sarcoma-associated h
caugacuacgcucaccauc

SEQ ID NO: 189739 - RNA, 20 nt, Human herpesvirus 8 (Kaposi`s sarcoma-associated h
caugucuguccggacauuuu

SEQ ID NO: 189740 - RNA, 22 nt, Human herpesvirus 8 (Kaposi`s sarcoma-associated h
caugugaacaauaaacacguuu

SEQ ID NO: 189741 - RNA, 18 nt, Human herpesvirus 8 (Kaposi`s sarcoma-associated h
caugugcguauuuagugg

SEQ ID NO: 189742 - RNA, 13 nt, Human herpesvirus 8 (Kaposi`s sarcoma-associated h
cauguggagccac

SEQ ID NO: 189743 - RNA, 18 nt, Human herpesvirus 8 (Kaposi`s sarcoma-associated h
cauguuggguccacaagu

SEQ ID NO: 189744 - RNA, 13 nt, Human herpesvirus 8 (Kaposi`s sarcoma-associated h
caacaaacaagac

SEQ ID NO: 189745 - RNA, 16 nt, Human herpesvirus 8 (Kaposi`s sarcoma-associated h
caacaaacaagacaca

SEQ ID NO: 189746 - RNA, 22 nt, Human herpesvirus 8 (Kaposi`s sarcoma-associated h
caacaagacaguugugaucucu

SEQ ID NO: 189747 - RNA, 22 nt, Human herpesvirus 8 (Kaposi`s sarcoma-associated h
caaacgccccucuuggcuguua

SEQ ID NO: 189748 - RNA, 15 nt, Human herpesvirus 8 (Kaposi`s sarcoma-associated h
caaaccccauggcag

SEQ ID NO: 189749 - RNA, 21 nt, Human herpesvirus 8 (Kaposi`s sarcoma-associated h
caaauauugaggaucuguuaa

SEQ ID NO: 189750 - RNA, 21 nt, Human herpesvirus 8 (Kaposi`s sarcoma-associated h
caaaugauauuuugauggugu

SEQ ID NO: 189751 - RNA, 12 nt, Human herpesvirus 8 (Kaposi`s sarcoma-associated h
caaaacaguaau

SEQ ID NO: 189752 - RNA, 15 nt, Human herpesvirus 8 (Kaposi`s sarcoma-associated h
caaaaugugcuuugc

SEQ ID NO: 189753 - RNA, 22 nt, Human herpesvirus 8 (Kaposi`s sarcoma-associated h
caaacaugggguuccagugcgc

SEQ ID NO: 189754 - RNA, 21 nt, Human herpesvirus 8 (Kaposi`s sarcoma-associated h
auuguauaaccgugcuacuua

SEQ ID NO: 189755 - RNA, 23 nt, Human herpesvirus 8 (Kaposi`s sarcoma-associated h
auuguauaaccgugcuacuuaca

SEQ ID NO: 189756 - RNA, 15 nt, Human herpesvirus 8 (Kaposi`s sarcoma-associated h
auuggugcguuguga

SEQ ID NO: 189757 - RNA, 20 nt, Human herpesvirus 8 (Kaposi`s sarcoma-associated h
auuuacgguggugugccugg

SEQ ID NO: 189758 - RNA, 13 nt, Human herpesvirus 8 (Kaposi`s sarcoma-associated h
auuuggacacaac

SEQ ID NO: 189759 - RNA, 10 nt, Human herpesvirus 8 (Kaposi`s sarcoma-associated h
caaaaacaca

SEQ ID NO: 189760 - RNA, 22 nt, Human herpesvirus 8 (Kaposi`s sarcoma-associated h
caaaaacagcuggaccggaggc

SEQ ID NO: 189761 - RNA, 14 nt, Human herpesvirus 8 (Kaposi`s sarcoma-associated h
caaaaacacaauca

SEQ ID NO: 189762 - RNA, 15 nt, Human herpesvirus 8 (Kaposi`s sarcoma-associated h
auuugauacagggac

SEQ ID NO: 189763 - RNA, 15 nt, Human herpesvirus 8 (Kaposi`s sarcoma-associated h
auuugaaagcaauaa

SEQ ID NO: 189764 - RNA, 14 nt, Human herpesvirus 8 (Kaposi`s sarcoma-associated h
auuucacugucacu

SEQ ID NO: 189765 - RNA, 23 nt, Human herpesvirus 8 (Kaposi`s sarcoma-associated h
auuuaucuaccuuagaagaccug

SEQ ID NO: 189766 - RNA, 17 nt, Human herpesvirus 8 (Kaposi`s sarcoma-associated h
auuuaucgcguuugaua

SEQ ID NO: 189767 - RNA, 13 nt, Human herpesvirus 8 (Kaposi`s sarcoma-associated h
auuagcacuguau

SEQ ID NO: 189768 - RNA, 22 nt, Human herpesvirus 8 (Kaposi`s sarcoma-associated h
auuagcacuguauucucugacu

SEQ ID NO: 189769 - RNA, 16 nt, Human herpesvirus 8 (Kaposi`s sarcoma-associated h
auuacucgcacaagcg

SEQ ID NO: 189770 - RNA, 14 nt, Human herpesvirus 8 (Kaposi`s sarcoma-associated h
auuagaaacaaagc

SEQ ID NO: 189771 - RNA, 13 nt, Human herpesvirus 8 (Kaposi`s sarcoma-associated h
auuauaacagcga

SEQ ID NO: 189772 - RNA, 15 nt, Human herpesvirus 8 (Kaposi`s sarcoma-associated h
auucccaaacacauc

SEQ ID NO: 189773 - RNA, 13 nt, Human herpesvirus 8 (Kaposi`s sarcoma-associated h
auuccgucauuca

SEQ ID NO: 189774 - RNA, 23 nt, Human herpesvirus 8 (Kaposi`s sarcoma-associated h
auucguaagaggacccagggugc

SEQ ID NO: 189775 - RNA, 13 nt, Human herpesvirus 8 (Kaposi`s sarcoma-associated h
auucucugguacc

SEQ ID NO: 189776 - RNA, 19 nt, Human herpesvirus 8 (Kaposi`s sarcoma-associated h
auucgugugguuugggaga

SEQ ID NO: 189777 - RNA, 22 nt, Human herpesvirus 8 (Kaposi`s sarcoma-associated h
auuggauggggcaugggcacca

SEQ ID NO: 189778 - RNA, 15 nt, Human herpesvirus 8 (Kaposi`s sarcoma-associated h
auuggccaggacaau

SEQ ID NO: 189779 - RNA, 21 nt, Human herpesvirus 8 (Kaposi`s sarcoma-associated h
auuggucuuauaacagugcuc

SEQ ID NO: 189780 - RNA, 11 nt, Human herpesvirus 8 (Kaposi`s sarcoma-associated h
auugcucuguu

SEQ ID NO: 189781 - RNA, 16 nt, Human herpesvirus 8 (Kaposi`s sarcoma-associated h
auuaccaauacuauua

SEQ ID NO: 189782 - RNA, 19 nt, Human herpesvirus 8 (Kaposi`s sarcoma-associated h
augugucuguggcuaucuu

SEQ ID NO: 189783 - RNA, 19 nt, Human herpesvirus 8 (Kaposi`s sarcoma-associated h
auguggaauauaaugugaa

SEQ ID NO: 189784 - RNA, 20 nt, Human herpesvirus 8 (Kaposi`s sarcoma-associated h
auguggcacacgcugcaaug

SEQ ID NO: 189785 - RNA, 20 nt, Human herpesvirus 8 (Kaposi`s sarcoma-associated h
augugauuacucgcacaagc

SEQ ID NO: 189786 - RNA, 14 nt, Human herpesvirus 8 (Kaposi`s sarcoma-associated h
augugaucacggag

SEQ ID NO: 189787 - RNA, 20 nt, Human herpesvirus 8 (Kaposi`s sarcoma-associated h
auguaaauuggccacugcag

SEQ ID NO: 189788 - RNA, 20 nt, Human herpesvirus 8 (Kaposi`s sarcoma-associated h
auguccugauuuuccaggga

SEQ ID NO: 189789 - RNA, 16 nt, Human herpesvirus 8 (Kaposi`s sarcoma-associated h
auguccuucacuuugg

SEQ ID NO: 189790 - RNA, 20 nt, Human herpesvirus 8 (Kaposi`s sarcoma-associated h
aucuguguacaaaccaaauu

SEQ ID NO: 189791 - RNA, 20 nt, Human herpesvirus 8 (Kaposi`s sarcoma-associated h
augguuauuggccaggacaa

SEQ ID NO: 189792 - RNA, 16 nt, Human herpesvirus 8 (Kaposi`s sarcoma-associated h
auggucauagccagau

SEQ ID NO: 189793 - RNA, 18 nt, Human herpesvirus 8 (Kaposi`s sarcoma-associated h
auggucauagccagauua

SEQ ID NO: 189794 - RNA, 20 nt, Human herpesvirus 8 (Kaposi`s sarcoma-associated h
aucuguuacuggcaccuaag

SEQ ID NO: 189795 - RNA, 15 nt, Human herpesvirus 8 (Kaposi`s sarcoma-associated h
aucuggaaaacaagg

SEQ ID NO: 189796 - RNA, 20 nt, Human herpesvirus 8 (Kaposi`s sarcoma-associated h
aucugguccuaagagugugg

SEQ ID NO: 189797 - RNA, 14 nt, Human herpesvirus 8 (Kaposi`s sarcoma-associated h
aucuggauacacua

SEQ ID NO: 189798 - RNA, 19 nt, Human herpesvirus 8 (Kaposi`s sarcoma-associated h
caaugugccgcgcaucaac

SEQ ID NO: 189799 - RNA, 16 nt, Human herpesvirus 8 (Kaposi`s sarcoma-associated h
cacagucacaguucag

SEQ ID NO: 189800 - RNA, 13 nt, Human herpesvirus 8 (Kaposi`s sarcoma-associated h
cacacgcugcaau

SEQ ID NO: 189801 - RNA, 15 nt, Human herpesvirus 8 (Kaposi`s sarcoma-associated h
cacacgcugcaaugu

SEQ ID NO: 189802 - RNA, 22 nt, Human herpesvirus 8 (Kaposi`s sarcoma-associated h
cacacgcugcaauguacugcca

SEQ ID NO: 189803 - RNA, 15 nt, Human herpesvirus 8 (Kaposi`s sarcoma-associated h
cacacggaaggcagu

SEQ ID NO: 189804 - RNA, 17 nt, Human herpesvirus 8 (Kaposi`s sarcoma-associated h
cacacggacaacggcua

SEQ ID NO: 189805 - RNA, 15 nt, Human herpesvirus 8 (Kaposi`s sarcoma-associated h
cacacauuugucuuu

SEQ ID NO: 189806 - RNA, 21 nt, Human herpesvirus 8 (Kaposi`s sarcoma-associated h
caccauuccucuccgcauuaa

SEQ ID NO: 189807 - RNA, 14 nt, Human herpesvirus 8 (Kaposi`s sarcoma-associated h
cacccaacauccau

SEQ ID NO: 189808 - RNA, 18 nt, Human herpesvirus 8 (Kaposi`s sarcoma-associated h
caccaucucggccauuau

SEQ ID NO: 189809 - RNA, 21 nt, Human herpesvirus 8 (Kaposi`s sarcoma-associated h
cacccacacauuugucuuuau

SEQ ID NO: 189810 - RNA, 12 nt, Human herpesvirus 8 (Kaposi`s sarcoma-associated h
cacccagugugc

SEQ ID NO: 189811 - RNA, 16 nt, Human herpesvirus 8 (Kaposi`s sarcoma-associated h
cacaguguauccccca

SEQ ID NO: 189812 - RNA, 22 nt, Human herpesvirus 8 (Kaposi`s sarcoma-associated h
cacaucagcuuggcgaccucaa

SEQ ID NO: 189813 - RNA, 22 nt, Human herpesvirus 8 (Kaposi`s sarcoma-associated h
caagguauuuuuuagcauccua

SEQ ID NO: 189814 - RNA, 22 nt, Human herpesvirus 8 (Kaposi`s sarcoma-associated h
caauaaagauuaacugucuaca

SEQ ID NO: 189815 - RNA, 19 nt, Human herpesvirus 8 (Kaposi`s sarcoma-associated h
caauaaagccgagccacaa

SEQ ID NO: 189816 - RNA, 21 nt, Human herpesvirus 8 (Kaposi`s sarcoma-associated h
caauaaagccgagccacaaag

SEQ ID NO: 189817 - RNA, 18 nt, Human herpesvirus 8 (Kaposi`s sarcoma-associated h
caauaaagcugagccaca

SEQ ID NO: 189818 - RNA, 19 nt, Human herpesvirus 8 (Kaposi`s sarcoma-associated h
caauaaagcugagccacaa

SEQ ID NO: 189819 - RNA, 20 nt, Human herpesvirus 8 (Kaposi`s sarcoma-associated h
caauaaagcugagccacaaa

SEQ ID NO: 189820 - RNA, 22 nt, Human herpesvirus 8 (Kaposi`s sarcoma-associated h
caauaaagcugagccacaaacg

SEQ ID NO: 189821 - RNA, 19 nt, Human herpesvirus 8 (Kaposi`s sarcoma-associated h
caaucucucauagacuuuc

SEQ ID NO: 189822 - RNA, 19 nt, Human herpesvirus 8 (Kaposi`s sarcoma-associated h
caauacccccaaaaugucc

SEQ ID NO: 189823 - RNA, 19 nt, Human herpesvirus 8 (Kaposi`s sarcoma-associated h
caauacuuaagucccugaa

SEQ ID NO: 189824 - RNA, 15 nt, Human herpesvirus 8 (Kaposi`s sarcoma-associated h
caaucuggcauaugc

SEQ ID NO: 189825 - RNA, 16 nt, Human herpesvirus 8 (Kaposi`s sarcoma-associated h
caacaccagaccgcca

SEQ ID NO: 189826 - RNA, 13 nt, Human herpesvirus 8 (Kaposi`s sarcoma-associated h
caaggaguggcug

SEQ ID NO: 189827 - RNA, 17 nt, Human herpesvirus 8 (Kaposi`s sarcoma-associated h
caaggagugggaucucc

SEQ ID NO: 189828 - RNA, 15 nt, Human herpesvirus 8 (Kaposi`s sarcoma-associated h
caaggaucucaaaag

SEQ ID NO: 189829 - RNA, 16 nt, Human herpesvirus 8 (Kaposi`s sarcoma-associated h
caaggccugugcccaa

SEQ ID NO: 189830 - RNA, 19 nt, Human herpesvirus 8 (Kaposi`s sarcoma-associated h
caagcuugagcuuuucaaa

SEQ ID NO: 189831 - RNA, 13 nt, Human herpesvirus 8 (Kaposi`s sarcoma-associated h
caagcuaccugca

SEQ ID NO: 189832 - RNA, 21 nt, Human herpesvirus 8 (Kaposi`s sarcoma-associated h
caagccucccgugauuggucu

SEQ ID NO: 189833 - RNA, 15 nt, Human herpesvirus 8 (Kaposi`s sarcoma-associated h
cagaaacugcucucg

SEQ ID NO: 189834 - RNA, 21 nt, Human herpesvirus 8 (Kaposi`s sarcoma-associated h
cagaggcaacguucauccuag

SEQ ID NO: 189835 - RNA, 16 nt, Human herpesvirus 8 (Kaposi`s sarcoma-associated h
cagauuagaacugaua

SEQ ID NO: 189836 - RNA, 16 nt, Human herpesvirus 8 (Kaposi`s sarcoma-associated h
cagauguucuugccag

SEQ ID NO: 189837 - RNA, 18 nt, Human herpesvirus 8 (Kaposi`s sarcoma-associated h
cagagaugggucuaugau

SEQ ID NO: 189838 - RNA, 15 nt, Human herpesvirus 8 (Kaposi`s sarcoma-associated h
cagagccuaccccaa

SEQ ID NO: 189839 - RNA, 18 nt, Human herpesvirus 8 (Kaposi`s sarcoma-associated h
cagagccuucacggcaca

SEQ ID NO: 189840 - RNA, 19 nt, Human herpesvirus 8 (Kaposi`s sarcoma-associated h
cagagacucaauuggaugc

SEQ ID NO: 189841 - RNA, 13 nt, Human herpesvirus 8 (Kaposi`s sarcoma-associated h
cagagaucacggc

SEQ ID NO: 189842 - RNA, 13 nt, Human herpesvirus 8 (Kaposi`s sarcoma-associated h
cacuucccaauaa

SEQ ID NO: 189843 - RNA, 17 nt, Human herpesvirus 8 (Kaposi`s sarcoma-associated h
cacuucuccguugacag

SEQ ID NO: 189844 - RNA, 13 nt, Human herpesvirus 8 (Kaposi`s sarcoma-associated h
cacugugugguug

SEQ ID NO: 189845 - RNA, 20 nt, Human herpesvirus 8 (Kaposi`s sarcoma-associated h
cacuguuauaagaccaauca

SEQ ID NO: 189846 - RNA, 21 nt, Human herpesvirus 8 (Kaposi`s sarcoma-associated h
cacuguggauuuuauggacau

SEQ ID NO: 189847 - RNA, 16 nt, Human herpesvirus 8 (Kaposi`s sarcoma-associated h
cacuguucuccacgua

SEQ ID NO: 189848 - RNA, 22 nt, Human herpesvirus 8 (Kaposi`s sarcoma-associated h
cacucuauauggcaacugccaa

SEQ ID NO: 189849 - RNA, 17 nt, Human herpesvirus 8 (Kaposi`s sarcoma-associated h
cacuauggggucagggu

SEQ ID NO: 189850 - RNA, 15 nt, Human herpesvirus 8 (Kaposi`s sarcoma-associated h
cacuauuaugccgaa

SEQ ID NO: 189851 - RNA, 15 nt, Human herpesvirus 8 (Kaposi`s sarcoma-associated h
cacuauaaauaucau

SEQ ID NO: 189852 - RNA, 23 nt, Human herpesvirus 8 (Kaposi`s sarcoma-associated h
cacuauaaauaucauugccguua

SEQ ID NO: 189853 - RNA, 21 nt, Human herpesvirus 8 (Kaposi`s sarcoma-associated h
caccgcgguccauuagcuuaa

SEQ ID NO: 189854 - RNA, 22 nt, Human herpesvirus 8 (Kaposi`s sarcoma-associated h
caccgaugccgaaaucaguguc

SEQ ID NO: 189855 - RNA, 13 nt, Human herpesvirus 8 (Kaposi`s sarcoma-associated h
caccgagugcuuu

SEQ ID NO: 189856 - RNA, 20 nt, Human herpesvirus 8 (Kaposi`s sarcoma-associated h
cacccuauuggucacaucuc

SEQ ID NO: 189857 - RNA, 23 nt, Human herpesvirus 8 (Kaposi`s sarcoma-associated h
cacccucccccaccgagugcuuu

SEQ ID NO: 189858 - RNA, 20 nt, Human herpesvirus 8 (Kaposi`s sarcoma-associated h
caccccucccucgcguccaa

SEQ ID NO: 189859 - RNA, 19 nt, Human herpesvirus 8 (Kaposi`s sarcoma-associated h
cacgacacgauguuuucca

SEQ ID NO: 189860 - RNA, 14 nt, Human herpesvirus 8 (Kaposi`s sarcoma-associated h
caccuuaaacacaa

SEQ ID NO: 189861 - RNA, 20 nt, Human herpesvirus 8 (Kaposi`s sarcoma-associated h
caccuuaaacacaacaccag

SEQ ID NO: 189862 - RNA, 16 nt, Human herpesvirus 8 (Kaposi`s sarcoma-associated h
cacguaccugaccuga

SEQ ID NO: 189863 - RNA, 21 nt, Human herpesvirus 8 (Kaposi`s sarcoma-associated h
cacggugucguguaugccaau

SEQ ID NO: 189864 - RNA, 21 nt, Human herpesvirus 8 (Kaposi`s sarcoma-associated h
cacgguuacuagcaccacuau

SEQ ID NO: 189865 - RNA, 22 nt, Human herpesvirus 8 (Kaposi`s sarcoma-associated h
cacgguugcaccaagcacaaca

SEQ ID NO: 189866 - RNA, 20 nt, Human herpesvirus 8 (Kaposi`s sarcoma-associated h
cacgguggcccugccuagug

SEQ ID NO: 189867 - RNA, 13 nt, Human herpesvirus 8 (Kaposi`s sarcoma-associated h
cacggugcacuga

SEQ ID NO: 189868 - RNA, 17 nt, Human herpesvirus 8 (Kaposi`s sarcoma-associated h
cacuaaccacaacaaua

SEQ ID NO: 189869 - RNA, 21 nt, Human herpesvirus 8 (Kaposi`s sarcoma-associated h
cacguugggagugugcacuag

SEQ ID NO: 189870 - RNA, 20 nt, Human herpesvirus 8 (Kaposi`s sarcoma-associated h
cacuagaauuggagcacuuu

SEQ ID NO: 189871 - RNA, 18 nt, Human herpesvirus 8 (Kaposi`s sarcoma-associated h
cacuagacuccaguuuaa

SEQ ID NO: 189872 - RNA, 19 nt, Human herpesvirus 8 (Kaposi`s sarcoma-associated h
cacgcaccgcaagcagcaa

SEQ ID NO: 189873 - RNA, 18 nt, Human herpesvirus 8 (Kaposi`s sarcoma-associated h
cacgcacuuggcccugau

SEQ ID NO: 189874 - RNA, 21 nt, Human herpesvirus 8 (Kaposi`s sarcoma-associated h
cacgcgaaugcagcaguagac

SEQ ID NO: 189875 - RNA, 13 nt, Human herpesvirus 8 (Kaposi`s sarcoma-associated h
cacggaaggcagu

SEQ ID NO: 189876 - RNA, 15 nt, Human herpesvirus 8 (Kaposi`s sarcoma-associated h
cacgcugcaauguac

SEQ ID NO: 189877 - RNA, 14 nt, Human herpesvirus 8 (Kaposi`s sarcoma-associated h
agagggauggguuu

SEQ ID NO: 189878 - RNA, 21 nt, Human herpesvirus 8 (Kaposi`s sarcoma-associated h
agaggauauuaaaguggugau

SEQ ID NO: 189879 - RNA, 22 nt, Human herpesvirus 8 (Kaposi`s sarcoma-associated h
agaggcaauacagaaguggguu

SEQ ID NO: 189880 - RNA, 17 nt, Human herpesvirus 8 (Kaposi`s sarcoma-associated h
agcccagagcuagcaca

SEQ ID NO: 189881 - RNA, 19 nt, Human herpesvirus 8 (Kaposi`s sarcoma-associated h
agagguuggucugcacccu

SEQ ID NO: 189882 - RNA, 18 nt, Human herpesvirus 8 (Kaposi`s sarcoma-associated h
agccccuugguuccacga

SEQ ID NO: 189883 - RNA, 20 nt, Human herpesvirus 8 (Kaposi`s sarcoma-associated h
agcccuuaucagcucacugu

SEQ ID NO: 189884 - RNA, 17 nt, Human herpesvirus 8 (Kaposi`s sarcoma-associated h
agccgaaaggauuccac

SEQ ID NO: 189885 - RNA, 13 nt, Human herpesvirus 8 (Kaposi`s sarcoma-associated h
agcgaccagucuu

SEQ ID NO: 189886 - RNA, 16 nt, Human herpesvirus 8 (Kaposi`s sarcoma-associated h
agcgaccagucuuaua

SEQ ID NO: 189887 - RNA, 22 nt, Human herpesvirus 8 (Kaposi`s sarcoma-associated h
agccuuguuggggguuauauuc

SEQ ID NO: 189888 - RNA, 21 nt, Human herpesvirus 8 (Kaposi`s sarcoma-associated h
agcucaucaaugggagaacca

SEQ ID NO: 189889 - RNA, 13 nt, Human herpesvirus 8 (Kaposi`s sarcoma-associated h
agcuacaaauguu

SEQ ID NO: 189890 - RNA, 21 nt, Human herpesvirus 8 (Kaposi`s sarcoma-associated h
agcgcguguuucacgucuuga

SEQ ID NO: 189891 - RNA, 22 nt, Human herpesvirus 8 (Kaposi`s sarcoma-associated h
agcuaccugcaaacuauacaca

SEQ ID NO: 189892 - RNA, 16 nt, Human herpesvirus 8 (Kaposi`s sarcoma-associated h
aggacauaccuacuaa

SEQ ID NO: 189893 - RNA, 16 nt, Human herpesvirus 8 (Kaposi`s sarcoma-associated h
agcuucggaaagcacu

SEQ ID NO: 189894 - RNA, 18 nt, Human herpesvirus 8 (Kaposi`s sarcoma-associated h
agcuucggaaagcacugg

SEQ ID NO: 189895 - RNA, 14 nt, Human herpesvirus 8 (Kaposi`s sarcoma-associated h
agcuucaucguggu

SEQ ID NO: 189896 - RNA, 19 nt, Human herpesvirus 8 (Kaposi`s sarcoma-associated h
agcuucaucguggugcccu

SEQ ID NO: 189897 - RNA, 19 nt, Human herpesvirus 8 (Kaposi`s sarcoma-associated h
agcuguugugguuuuucuc

SEQ ID NO: 189898 - RNA, 17 nt, Human herpesvirus 8 (Kaposi`s sarcoma-associated h
agcuuaaccacaugcau

SEQ ID NO: 189899 - RNA, 12 nt, Human herpesvirus 8 (Kaposi`s sarcoma-associated h
aggaccugauac

SEQ ID NO: 189900 - RNA, 22 nt, Human herpesvirus 8 (Kaposi`s sarcoma-associated h
aggagcagccugcaggggagca

SEQ ID NO: 189901 - RNA, 15 nt, Human herpesvirus 8 (Kaposi`s sarcoma-associated h
agcugccaaggcaag

SEQ ID NO: 189902 - RNA, 16 nt, Human herpesvirus 8 (Kaposi`s sarcoma-associated h
agcugagccacaaacg

SEQ ID NO: 189903 - RNA, 13 nt, Human herpesvirus 8 (Kaposi`s sarcoma-associated h
agcugauguggug

SEQ ID NO: 189904 - RNA, 17 nt, Human herpesvirus 8 (Kaposi`s sarcoma-associated h
agcuggagugcugacca

SEQ ID NO: 189905 - RNA, 16 nt, Human herpesvirus 8 (Kaposi`s sarcoma-associated h
agcugguaaccagcua

SEQ ID NO: 189906 - RNA, 15 nt, Human herpesvirus 8 (Kaposi`s sarcoma-associated h
agcuguacauaaucc

SEQ ID NO: 189907 - RNA, 22 nt, Human herpesvirus 8 (Kaposi`s sarcoma-associated h
agcugucauugaggaagaucua

SEQ ID NO: 189908 - RNA, 21 nt, Human herpesvirus 8 (Kaposi`s sarcoma-associated h
aggcuagugcuguaauggugu

SEQ ID NO: 189909 - RNA, 15 nt, Human herpesvirus 8 (Kaposi`s sarcoma-associated h
aggccaagugcauug

SEQ ID NO: 189910 - RNA, 18 nt, Human herpesvirus 8 (Kaposi`s sarcoma-associated h
aggcaauugccaacgacc

SEQ ID NO: 189911 - RNA, 21 nt, Human herpesvirus 8 (Kaposi`s sarcoma-associated h
agguaauuaacauccacagga

SEQ ID NO: 189912 - RNA, 16 nt, Human herpesvirus 8 (Kaposi`s sarcoma-associated h
agggugcacauuuuca

SEQ ID NO: 189913 - RNA, 14 nt, Human herpesvirus 8 (Kaposi`s sarcoma-associated h
aggguugcauguua

SEQ ID NO: 189914 - RNA, 18 nt, Human herpesvirus 8 (Kaposi`s sarcoma-associated h
aggggguguccccugcaa

SEQ ID NO: 189915 - RNA, 22 nt, Human herpesvirus 8 (Kaposi`s sarcoma-associated h
aggggcuuaugucauuuuuacu

SEQ ID NO: 189916 - RNA, 16 nt, Human herpesvirus 8 (Kaposi`s sarcoma-associated h
agggucugcagaugau

SEQ ID NO: 189917 - RNA, 14 nt, Human herpesvirus 8 (Kaposi`s sarcoma-associated h
agggccaagcuacu

SEQ ID NO: 189918 - RNA, 15 nt, Human herpesvirus 8 (Kaposi`s sarcoma-associated h
agggcguguccagga

SEQ ID NO: 189919 - RNA, 18 nt, Human herpesvirus 8 (Kaposi`s sarcoma-associated h
agggaguauaucauauca

SEQ ID NO: 189920 - RNA, 18 nt, Human herpesvirus 8 (Kaposi`s sarcoma-associated h
agggaaauggggaacaca

SEQ ID NO: 189921 - RNA, 19 nt, Human herpesvirus 8 (Kaposi`s sarcoma-associated h
agggaaauggggaacacag

SEQ ID NO: 189922 - RNA, 14 nt, Human herpesvirus 8 (Kaposi`s sarcoma-associated h
agggacguuugcag

SEQ ID NO: 189923 - RNA, 17 nt, Human herpesvirus 8 (Kaposi`s sarcoma-associated h
aggucaauacauuguga

SEQ ID NO: 189924 - RNA, 20 nt, Human herpesvirus 8 (Kaposi`s sarcoma-associated h
aggucuccgagcacugcgag

SEQ ID NO: 189925 - RNA, 18 nt, Human herpesvirus 8 (Kaposi`s sarcoma-associated h
agguuguaacacaaaagc

SEQ ID NO: 189926 - RNA, 21 nt, Human herpesvirus 8 (Kaposi`s sarcoma-associated h
agguuguaacacaaaagcaag

SEQ ID NO: 189927 - RNA, 20 nt, Human herpesvirus 8 (Kaposi`s sarcoma-associated h
agguugacagggacgcauau

SEQ ID NO: 189928 - RNA, 20 nt, Human herpesvirus 8 (Kaposi`s sarcoma-associated h
aggugacuuaucuaaaaaga

SEQ ID NO: 189929 - RNA, 19 nt, Human herpesvirus 8 (Kaposi`s sarcoma-associated h
aggugagagaccccgugau

SEQ ID NO: 189930 - RNA, 12 nt, Human herpesvirus 8 (Kaposi`s sarcoma-associated h
aguaauguguau

SEQ ID NO: 189931 - RNA, 22 nt, Human herpesvirus 8 (Kaposi`s sarcoma-associated h
aguauauaagagcacacugugu

SEQ ID NO: 189932 - RNA, 15 nt, Human herpesvirus 8 (Kaposi`s sarcoma-associated h
aguauauuaguguua

SEQ ID NO: 189933 - RNA, 16 nt, Human herpesvirus 8 (Kaposi`s sarcoma-associated h
aguauauuaguguuau

SEQ ID NO: 189934 - RNA, 17 nt, Human herpesvirus 8 (Kaposi`s sarcoma-associated h
aguaguucaacugcauu

SEQ ID NO: 189935 - RNA, 20 nt, Human herpesvirus 8 (Kaposi`s sarcoma-associated h
aguuuuuuucuaaauuggca

SEQ ID NO: 189936 - RNA, 14 nt, Human herpesvirus 8 (Kaposi`s sarcoma-associated h
aguguacacagcca

SEQ ID NO: 189937 - RNA, 15 nt, Human herpesvirus 8 (Kaposi`s sarcoma-associated h
aguguacacagccaa

SEQ ID NO: 189938 - RNA, 17 nt, Human herpesvirus 8 (Kaposi`s sarcoma-associated h
aguguacacagccaaug

SEQ ID NO: 189939 - RNA, 15 nt, Human herpesvirus 8 (Kaposi`s sarcoma-associated h
aguggugaucuuagg

SEQ ID NO: 189940 - RNA, 23 nt, Human herpesvirus 8 (Kaposi`s sarcoma-associated h
agugguuauuuuuuuccuaggcg

SEQ ID NO: 189941 - RNA, 14 nt, Human herpesvirus 8 (Kaposi`s sarcoma-associated h
agugucgccagugc

SEQ ID NO: 189942 - RNA, 11 nt, Human herpesvirus 8 (Kaposi`s sarcoma-associated h
aguauucucac

SEQ ID NO: 189943 - RNA, 12 nt, Human herpesvirus 8 (Kaposi`s sarcoma-associated h
aguauuaugcca

SEQ ID NO: 189944 - RNA, 15 nt, Human herpesvirus 8 (Kaposi`s sarcoma-associated h
aguauuaugccaggg

SEQ ID NO: 189945 - RNA, 16 nt, Human herpesvirus 8 (Kaposi`s sarcoma-associated h
aguaugucgugggaaa

SEQ ID NO: 189946 - RNA, 16 nt, Human herpesvirus 8 (Kaposi`s sarcoma-associated h
agugagcgcgcucugu

SEQ ID NO: 189947 - RNA, 18 nt, Human herpesvirus 8 (Kaposi`s sarcoma-associated h
aguggacuuucuccguga

SEQ ID NO: 189948 - RNA, 21 nt, Human herpesvirus 8 (Kaposi`s sarcoma-associated h
agugccucagcaacugcguca

SEQ ID NO: 189949 - RNA, 18 nt, Human herpesvirus 8 (Kaposi`s sarcoma-associated h
aucugcaaggguauucua

SEQ ID NO: 189950 - RNA, 21 nt, Human herpesvirus 8 (Kaposi`s sarcoma-associated h
aucugaaacuaccagccauca

SEQ ID NO: 189951 - RNA, 17 nt, Human herpesvirus 8 (Kaposi`s sarcoma-associated h
aucuauccaagugcaca

SEQ ID NO: 189952 - RNA, 17 nt, Human herpesvirus 8 (Kaposi`s sarcoma-associated h
aucuacccugauuagca

SEQ ID NO: 189953 - RNA, 21 nt, Human herpesvirus 8 (Kaposi`s sarcoma-associated h
aucuacccugauuagcacugu

SEQ ID NO: 189954 - RNA, 22 nt, Human herpesvirus 8 (Kaposi`s sarcoma-associated h
aucuacccugauuagcacugua

SEQ ID NO: 189955 - RNA, 21 nt, Human herpesvirus 8 (Kaposi`s sarcoma-associated h
aucgacuaauacgugaccaug

SEQ ID NO: 189956 - RNA, 20 nt, Human herpesvirus 8 (Kaposi`s sarcoma-associated h
aucgcaccuuaaacacaaca

SEQ ID NO: 189957 - RNA, 23 nt, Human herpesvirus 8 (Kaposi`s sarcoma-associated h
aucgucuccagaucacccagugu

SEQ ID NO: 189958 - RNA, 14 nt, Human herpesvirus 8 (Kaposi`s sarcoma-associated h
aucguagcucauga

SEQ ID NO: 189959 - RNA, 19 nt, Human herpesvirus 8 (Kaposi`s sarcoma-associated h
aucgucaucucuaaucgag

SEQ ID NO: 189960 - RNA, 21 nt, Human herpesvirus 8 (Kaposi`s sarcoma-associated h
aucgccuuaugaagcuuaaac

SEQ ID NO: 189961 - RNA, 12 nt, Human herpesvirus 8 (Kaposi`s sarcoma-associated h
auccacaggaag

SEQ ID NO: 189962 - RNA, 14 nt, Human herpesvirus 8 (Kaposi`s sarcoma-associated h
auccacccuaauac

SEQ ID NO: 189963 - RNA, 22 nt, Human herpesvirus 8 (Kaposi`s sarcoma-associated h
auccacggugucguguaugcca

SEQ ID NO: 189964 - RNA, 21 nt, Human herpesvirus 8 (Kaposi`s sarcoma-associated h
auccacucagguguuuuccaa

SEQ ID NO: 189965 - RNA, 16 nt, Human herpesvirus 8 (Kaposi`s sarcoma-associated h
auccaaauuaugcagu

SEQ ID NO: 189966 - RNA, 20 nt, Human herpesvirus 8 (Kaposi`s sarcoma-associated h
auccaugucuuuccgugucu

SEQ ID NO: 189967 - RNA, 18 nt, Human herpesvirus 8 (Kaposi`s sarcoma-associated h
aucccccacaggacaagc

SEQ ID NO: 189968 - RNA, 13 nt, Human herpesvirus 8 (Kaposi`s sarcoma-associated h
auccauuauagca

SEQ ID NO: 189969 - RNA, 18 nt, Human herpesvirus 8 (Kaposi`s sarcoma-associated h
auccgcgagccauucauc

SEQ ID NO: 189970 - RNA, 12 nt, Human herpesvirus 8 (Kaposi`s sarcoma-associated h
auccgagcaccu

SEQ ID NO: 189971 - RNA, 19 nt, Human herpesvirus 8 (Kaposi`s sarcoma-associated h
auccgagcaccucagaaag

SEQ ID NO: 189972 - RNA, 23 nt, Human herpesvirus 8 (Kaposi`s sarcoma-associated h
aucauguacgucguaagccagug

SEQ ID NO: 189973 - RNA, 19 nt, Human herpesvirus 8 (Kaposi`s sarcoma-associated h
aucaucgcaggaugcauaa

SEQ ID NO: 189974 - RNA, 13 nt, Human herpesvirus 8 (Kaposi`s sarcoma-associated h
aucacuuccagga

SEQ ID NO: 189975 - RNA, 18 nt, Human herpesvirus 8 (Kaposi`s sarcoma-associated h
aucacugcggguuaauag

SEQ ID NO: 189976 - RNA, 17 nt, Human herpesvirus 8 (Kaposi`s sarcoma-associated h
aucagaacaguggugca

SEQ ID NO: 189977 - RNA, 21 nt, Human herpesvirus 8 (Kaposi`s sarcoma-associated h
aucaggcggggaggagggggu

SEQ ID NO: 189978 - RNA, 16 nt, Human herpesvirus 8 (Kaposi`s sarcoma-associated h
aucaggcuagugcugu

SEQ ID NO: 189979 - RNA, 19 nt, Human herpesvirus 8 (Kaposi`s sarcoma-associated h
aucagcugcagccaggaag

SEQ ID NO: 189980 - RNA, 20 nt, Human herpesvirus 8 (Kaposi`s sarcoma-associated h
aucagcucacuguucuccac

SEQ ID NO: 189981 - RNA, 17 nt, Human herpesvirus 8 (Kaposi`s sarcoma-associated h
auaaagucaugggaccg

SEQ ID NO: 189982 - RNA, 14 nt, Human herpesvirus 8 (Kaposi`s sarcoma-associated h
auaacacagucaca

SEQ ID NO: 189983 - RNA, 17 nt, Human herpesvirus 8 (Kaposi`s sarcoma-associated h
auaacacagucacaguu

SEQ ID NO: 189984 - RNA, 15 nt, Human herpesvirus 8 (Kaposi`s sarcoma-associated h
auacagggacagaug

SEQ ID NO: 189985 - RNA, 19 nt, Human herpesvirus 8 (Kaposi`s sarcoma-associated h
auacagggguaucacuucc

SEQ ID NO: 189986 - RNA, 16 nt, Human herpesvirus 8 (Kaposi`s sarcoma-associated h
auacagaccauuauag

SEQ ID NO: 189987 - RNA, 17 nt, Human herpesvirus 8 (Kaposi`s sarcoma-associated h
auacagacugcaguuau

SEQ ID NO: 189988 - RNA, 20 nt, Human herpesvirus 8 (Kaposi`s sarcoma-associated h
auacugcccaaguauggaau

SEQ ID NO: 189989 - RNA, 19 nt, Human herpesvirus 8 (Kaposi`s sarcoma-associated h
auacguacagaaaaccaua

SEQ ID NO: 189990 - RNA, 16 nt, Human herpesvirus 8 (Kaposi`s sarcoma-associated h
auagacuuaaaauguc

SEQ ID NO: 189991 - RNA, 12 nt, Human herpesvirus 8 (Kaposi`s sarcoma-associated h
auagaagagccu

SEQ ID NO: 189992 - RNA, 14 nt, Human herpesvirus 8 (Kaposi`s sarcoma-associated h
auagaagagccuga

SEQ ID NO: 189993 - RNA, 11 nt, Human herpesvirus 8 (Kaposi`s sarcoma-associated h
aucaacuaagg

SEQ ID NO: 189994 - RNA, 22 nt, Human herpesvirus 8 (Kaposi`s sarcoma-associated h
aucaccaagggcuuuaacuaua

SEQ ID NO: 189995 - RNA, 15 nt, Human herpesvirus 8 (Kaposi`s sarcoma-associated h
aucacccagugugcg

SEQ ID NO: 189996 - RNA, 14 nt, Human herpesvirus 8 (Kaposi`s sarcoma-associated h
aucaccucuacaga

SEQ ID NO: 189997 - RNA, 19 nt, Human herpesvirus 8 (Kaposi`s sarcoma-associated h
auagcuacaaauguuuuau

SEQ ID NO: 189998 - RNA, 17 nt, Human herpesvirus 8 (Kaposi`s sarcoma-associated h
auaggcaacaugacaug

SEQ ID NO: 189999 - RNA, 17 nt, Human herpesvirus 8 (Kaposi`s sarcoma-associated h
auauaaguuaaaccaaa

SEQ ID NO: 190000 - RNA, 18 nt, Human herpesvirus 8 (Kaposi`s sarcoma-associated h
auauuaguguuauaagaa

SEQ ID NO: 190001 - RNA, 19 nt, Human herpesvirus 8 (Kaposi`s sarcoma-associated h
auauucggagaacaugcug

SEQ ID NO: 190002 - RNA, 15 nt, Human herpesvirus 8 (Kaposi`s sarcoma-associated h
acaggacaagcugau

SEQ ID NO: 190003 - RNA, 16 nt, Human herpesvirus 8 (Kaposi`s sarcoma-associated h
acaggagauauugaua

SEQ ID NO: 190004 - RNA, 21 nt, Human herpesvirus 8 (Kaposi`s sarcoma-associated h
acaguugugaucucuggagac

SEQ ID NO: 190005 - RNA, 22 nt, Human herpesvirus 8 (Kaposi`s sarcoma-associated h
acagugcucuuccuccuaguca

SEQ ID NO: 190006 - RNA, 23 nt, Human herpesvirus 8 (Kaposi`s sarcoma-associated h
acagugcucuuccuccuagucau

SEQ ID NO: 190007 - RNA, 16 nt, Human herpesvirus 8 (Kaposi`s sarcoma-associated h
acagagccuaccccaa

SEQ ID NO: 190008 - RNA, 20 nt, Human herpesvirus 8 (Kaposi`s sarcoma-associated h
acagcccgauggcccuucag

SEQ ID NO: 190009 - RNA, 10 nt, Human herpesvirus 8 (Kaposi`s sarcoma-associated h
acacuaugua

SEQ ID NO: 190010 - RNA, 22 nt, Human herpesvirus 8 (Kaposi`s sarcoma-associated h
acagaaaggucaccuggcccaa

SEQ ID NO: 190011 - RNA, 18 nt, Human herpesvirus 8 (Kaposi`s sarcoma-associated h
acacuacuaugucccaaa

SEQ ID NO: 190012 - RNA, 20 nt, Human herpesvirus 8 (Kaposi`s sarcoma-associated h
acacuacuaauguaaccuaa

SEQ ID NO: 190013 - RNA, 22 nt, Human herpesvirus 8 (Kaposi`s sarcoma-associated h
acacuaacaaguuuuguaagaa

SEQ ID NO: 190014 - RNA, 18 nt, Human herpesvirus 8 (Kaposi`s sarcoma-associated h
acacgaaugguaccaugg

SEQ ID NO: 190015 - RNA, 20 nt, Human herpesvirus 8 (Kaposi`s sarcoma-associated h
acauuuucucgugugcccuu

SEQ ID NO: 190016 - RNA, 14 nt, Human herpesvirus 8 (Kaposi`s sarcoma-associated h
acauuugucuuuau

SEQ ID NO: 190017 - RNA, 22 nt, Human herpesvirus 8 (Kaposi`s sarcoma-associated h
acauuugucuuuauugcuuuca

SEQ ID NO: 190018 - RNA, 19 nt, Human herpesvirus 8 (Kaposi`s sarcoma-associated h
accaacaauauuauuuauu

SEQ ID NO: 190019 - RNA, 20 nt, Human herpesvirus 8 (Kaposi`s sarcoma-associated h
accaggacggagccguccac

SEQ ID NO: 190020 - RNA, 20 nt, Human herpesvirus 8 (Kaposi`s sarcoma-associated h
accacgccugacucauuuca

SEQ ID NO: 190021 - RNA, 20 nt, Human herpesvirus 8 (Kaposi`s sarcoma-associated h
accacucuuuaucaugugaa

SEQ ID NO: 190022 - RNA, 20 nt, Human herpesvirus 8 (Kaposi`s sarcoma-associated h
accacuauccaugucuuucc

SEQ ID NO: 190023 - RNA, 13 nt, Human herpesvirus 8 (Kaposi`s sarcoma-associated h
acauuaccaauac

SEQ ID NO: 190024 - RNA, 16 nt, Human herpesvirus 8 (Kaposi`s sarcoma-associated h
acauuaccaauacuau

SEQ ID NO: 190025 - RNA, 14 nt, Human herpesvirus 8 (Kaposi`s sarcoma-associated h
acauuaaacacaua

SEQ ID NO: 190026 - RNA, 17 nt, Human herpesvirus 8 (Kaposi`s sarcoma-associated h
acauuaaacacauacaa

SEQ ID NO: 190027 - RNA, 19 nt, Human herpesvirus 8 (Kaposi`s sarcoma-associated h
acauguggcccccuuuaca

SEQ ID NO: 190028 - RNA, 14 nt, Human herpesvirus 8 (Kaposi`s sarcoma-associated h
acaugugucuauca

SEQ ID NO: 190029 - RNA, 19 nt, Human herpesvirus 8 (Kaposi`s sarcoma-associated h
acauguggagccacuggcg

SEQ ID NO: 190030 - RNA, 12 nt, Human herpesvirus 8 (Kaposi`s sarcoma-associated h
acaugugacuga

SEQ ID NO: 190031 - RNA, 18 nt, Human herpesvirus 8 (Kaposi`s sarcoma-associated h
acaugguacaagcaauga

SEQ ID NO: 190032 - RNA, 19 nt, Human herpesvirus 8 (Kaposi`s sarcoma-associated h
acauggaauacgggagaca

SEQ ID NO: 190033 - RNA, 22 nt, Human herpesvirus 8 (Kaposi`s sarcoma-associated h
acaugagagacugcaggccauc

SEQ ID NO: 190034 - RNA, 22 nt, Human herpesvirus 8 (Kaposi`s sarcoma-associated h
acaugcaacccucuacucuucc

SEQ ID NO: 190035 - RNA, 14 nt, Human herpesvirus 8 (Kaposi`s sarcoma-associated h
acaugccccaaagc

SEQ ID NO: 190036 - RNA, 17 nt, Human herpesvirus 8 (Kaposi`s sarcoma-associated h
acaugccccuuaucucc

SEQ ID NO: 190037 - RNA, 16 nt, Human herpesvirus 8 (Kaposi`s sarcoma-associated h
acaugaaagacugccu

SEQ ID NO: 190038 - RNA, 17 nt, Human herpesvirus 8 (Kaposi`s sarcoma-associated h
acaugaaagacugccug

SEQ ID NO: 190039 - RNA, 13 nt, Human herpesvirus 8 (Kaposi`s sarcoma-associated h
accuccuccuacg

SEQ ID NO: 190040 - RNA, 22 nt, Human herpesvirus 8 (Kaposi`s sarcoma-associated h
accucgggccuugggugcgaug

SEQ ID NO: 190041 - RNA, 22 nt, Human herpesvirus 8 (Kaposi`s sarcoma-associated h
accucuuucaucacuuccagga

SEQ ID NO: 190042 - RNA, 15 nt, Human herpesvirus 8 (Kaposi`s sarcoma-associated h
accguguggcugcaa

SEQ ID NO: 190043 - RNA, 13 nt, Human herpesvirus 8 (Kaposi`s sarcoma-associated h
accguguguggcu

SEQ ID NO: 190044 - RNA, 14 nt, Human herpesvirus 8 (Kaposi`s sarcoma-associated h
accucccuuugucu

SEQ ID NO: 190045 - RNA, 16 nt, Human herpesvirus 8 (Kaposi`s sarcoma-associated h
accuugauguuuccca

SEQ ID NO: 190046 - RNA, 14 nt, Human herpesvirus 8 (Kaposi`s sarcoma-associated h
accugaggugcucu

SEQ ID NO: 190047 - RNA, 23 nt, Human herpesvirus 8 (Kaposi`s sarcoma-associated h
accugcaaacuauacacaaauga

SEQ ID NO: 190048 - RNA, 16 nt, Human herpesvirus 8 (Kaposi`s sarcoma-associated h
acgcaggcgccuauga

SEQ ID NO: 190049 - RNA, 19 nt, Human herpesvirus 8 (Kaposi`s sarcoma-associated h
acgccaacccucagugugc

SEQ ID NO: 190050 - RNA, 16 nt, Human herpesvirus 8 (Kaposi`s sarcoma-associated h
acgcaccgacacugga

SEQ ID NO: 190051 - RNA, 17 nt, Human herpesvirus 8 (Kaposi`s sarcoma-associated h
acgcaccgcaagcagca

SEQ ID NO: 190052 - RNA, 21 nt, Human herpesvirus 8 (Kaposi`s sarcoma-associated h
acgcagacccggcaacacugg

SEQ ID NO: 190053 - RNA, 22 nt, Human herpesvirus 8 (Kaposi`s sarcoma-associated h
acgcagacccggcaacacugga

SEQ ID NO: 190054 - RNA, 20 nt, Human herpesvirus 8 (Kaposi`s sarcoma-associated h
acgccccucuuggcuguuac

SEQ ID NO: 190055 - RNA, 19 nt, Human herpesvirus 8 (Kaposi`s sarcoma-associated h
acgcugcaauguacugcca

SEQ ID NO: 190056 - RNA, 22 nt, Human herpesvirus 8 (Kaposi`s sarcoma-associated h
acgcugcaauguacugccauga

SEQ ID NO: 190057 - RNA, 20 nt, Human herpesvirus 8 (Kaposi`s sarcoma-associated h
acggacgcaccgacacugga

SEQ ID NO: 190058 - RNA, 17 nt, Human herpesvirus 8 (Kaposi`s sarcoma-associated h
acggacgccacugcuuu

SEQ ID NO: 190059 - RNA, 12 nt, Human herpesvirus 8 (Kaposi`s sarcoma-associated h
acggaaggcagu

SEQ ID NO: 190060 - RNA, 23 nt, Human herpesvirus 8 (Kaposi`s sarcoma-associated h
acggaauaaaauacguacagaaa

SEQ ID NO: 190061 - RNA, 19 nt, Human herpesvirus 8 (Kaposi`s sarcoma-associated h
acccaaugucaggggacca

SEQ ID NO: 190062 - RNA, 22 nt, Human herpesvirus 8 (Kaposi`s sarcoma-associated h
acccacagcaucccccaaauaa

SEQ ID NO: 190063 - RNA, 19 nt, Human herpesvirus 8 (Kaposi`s sarcoma-associated h
acccacggugauagauaug

SEQ ID NO: 190064 - RNA, 20 nt, Human herpesvirus 8 (Kaposi`s sarcoma-associated h
accauuuuuuacggacaaua

SEQ ID NO: 190065 - RNA, 18 nt, Human herpesvirus 8 (Kaposi`s sarcoma-associated h
acccaauguuaauguucu

SEQ ID NO: 190066 - RNA, 19 nt, Human herpesvirus 8 (Kaposi`s sarcoma-associated h
acccaauguuaauguucuc

SEQ ID NO: 190067 - RNA, 13 nt, Human herpesvirus 8 (Kaposi`s sarcoma-associated h
accaugccagacu

SEQ ID NO: 190068 - RNA, 15 nt, Human herpesvirus 8 (Kaposi`s sarcoma-associated h
accauguugcgcaau

SEQ ID NO: 190069 - RNA, 23 nt, Human herpesvirus 8 (Kaposi`s sarcoma-associated h
accauguugcgcaauucaggcau

SEQ ID NO: 190070 - RNA, 21 nt, Human herpesvirus 8 (Kaposi`s sarcoma-associated h
accagguggcacccaacaucc

SEQ ID NO: 190071 - RNA, 14 nt, Human herpesvirus 8 (Kaposi`s sarcoma-associated h
accaggcaacacaa

SEQ ID NO: 190072 - RNA, 22 nt, Human herpesvirus 8 (Kaposi`s sarcoma-associated h
accaggcaacacaagggugaaa

SEQ ID NO: 190073 - RNA, 18 nt, Human herpesvirus 8 (Kaposi`s sarcoma-associated h
accaguucagagugugua

SEQ ID NO: 190074 - RNA, 22 nt, Human herpesvirus 8 (Kaposi`s sarcoma-associated h
acccuauuggucacaucucacg

SEQ ID NO: 190075 - RNA, 14 nt, Human herpesvirus 8 (Kaposi`s sarcoma-associated h
acccucagugugcu

SEQ ID NO: 190076 - RNA, 23 nt, Human herpesvirus 8 (Kaposi`s sarcoma-associated h
acccucagugugcuguccagcgu

SEQ ID NO: 190077 - RNA, 16 nt, Human herpesvirus 8 (Kaposi`s sarcoma-associated h
acccuguacaugaacc

SEQ ID NO: 190078 - RNA, 19 nt, Human herpesvirus 8 (Kaposi`s sarcoma-associated h
acccuguacaugaaccaga

SEQ ID NO: 190079 - RNA, 17 nt, Human herpesvirus 8 (Kaposi`s sarcoma-associated h
acccugauuagcacugu

SEQ ID NO: 190080 - RNA, 18 nt, Human herpesvirus 8 (Kaposi`s sarcoma-associated h
acccugauuagcacugua

SEQ ID NO: 190081 - RNA, 16 nt, Human herpesvirus 8 (Kaposi`s sarcoma-associated h
accggaguagugcaag

SEQ ID NO: 190082 - RNA, 17 nt, Human herpesvirus 8 (Kaposi`s sarcoma-associated h
accggaguagugcaagu

SEQ ID NO: 190083 - RNA, 21 nt, Human herpesvirus 8 (Kaposi`s sarcoma-associated h
accgggaucuguuacuggcac

SEQ ID NO: 190084 - RNA, 22 nt, Human herpesvirus 8 (Kaposi`s sarcoma-associated h
agacaacacuacuaugucccaa

SEQ ID NO: 190085 - RNA, 18 nt, Human herpesvirus 8 (Kaposi`s sarcoma-associated h
agacaaacaugugggcuu

SEQ ID NO: 190086 - RNA, 13 nt, Human herpesvirus 8 (Kaposi`s sarcoma-associated h
agacaaacacugu

SEQ ID NO: 190087 - RNA, 16 nt, Human herpesvirus 8 (Kaposi`s sarcoma-associated h
agacaaacacugugga

SEQ ID NO: 190088 - RNA, 15 nt, Human herpesvirus 8 (Kaposi`s sarcoma-associated h
agacacucugccaug

SEQ ID NO: 190089 - RNA, 14 nt, Human herpesvirus 8 (Kaposi`s sarcoma-associated h
agacaguuaaucuu

SEQ ID NO: 190090 - RNA, 18 nt, Human herpesvirus 8 (Kaposi`s sarcoma-associated h
agacaguuaaucuuuauu

SEQ ID NO: 190091 - RNA, 16 nt, Human herpesvirus 8 (Kaposi`s sarcoma-associated h
agacaguugugaucuc

SEQ ID NO: 190092 - RNA, 13 nt, Human herpesvirus 8 (Kaposi`s sarcoma-associated h
agaccguacaucc

SEQ ID NO: 190093 - RNA, 14 nt, Human herpesvirus 8 (Kaposi`s sarcoma-associated h
agaccuacaucucc

SEQ ID NO: 190094 - RNA, 18 nt, Human herpesvirus 8 (Kaposi`s sarcoma-associated h
agaccgagcguauucuca

SEQ ID NO: 190095 - RNA, 13 nt, Human herpesvirus 8 (Kaposi`s sarcoma-associated h
agacccaaaaagg

SEQ ID NO: 190096 - RNA, 14 nt, Human herpesvirus 8 (Kaposi`s sarcoma-associated h
agacguuagcuuca

SEQ ID NO: 190097 - RNA, 18 nt, Human herpesvirus 8 (Kaposi`s sarcoma-associated h
agacucaauuggaugcua

SEQ ID NO: 190098 - RNA, 21 nt, Human herpesvirus 8 (Kaposi`s sarcoma-associated h
agacuccaguuuaaaagacuc

SEQ ID NO: 190099 - RNA, 19 nt, Human herpesvirus 8 (Kaposi`s sarcoma-associated h
agacggucuuuaggggcac

SEQ ID NO: 190100 - RNA, 15 nt, Human herpesvirus 8 (Kaposi`s sarcoma-associated h
agacuggcucugaua

SEQ ID NO: 190101 - RNA, 19 nt, Human herpesvirus 8 (Kaposi`s sarcoma-associated h
agaggacagggugguuaua

SEQ ID NO: 190102 - RNA, 14 nt, Human herpesvirus 8 (Kaposi`s sarcoma-associated h
agaaagacacauga

SEQ ID NO: 190103 - RNA, 14 nt, Human herpesvirus 8 (Kaposi`s sarcoma-associated h
agaaaggugacuua

SEQ ID NO: 190104 - RNA, 20 nt, Human herpesvirus 8 (Kaposi`s sarcoma-associated h
agaaauuacugcaccucgcc

SEQ ID NO: 190105 - RNA, 12 nt, Human herpesvirus 8 (Kaposi`s sarcoma-associated h
agaaaugaucau

SEQ ID NO: 190106 - RNA, 16 nt, Human herpesvirus 8 (Kaposi`s sarcoma-associated h
agaacaguacccacga

SEQ ID NO: 190107 - RNA, 14 nt, Human herpesvirus 8 (Kaposi`s sarcoma-associated h
agaauuggagcacu

SEQ ID NO: 190108 - RNA, 15 nt, Human herpesvirus 8 (Kaposi`s sarcoma-associated h
agaauuggagcacuu

SEQ ID NO: 190109 - RNA, 17 nt, Human herpesvirus 8 (Kaposi`s sarcoma-associated h
agaauagaccagccuga

SEQ ID NO: 190110 - RNA, 21 nt, Human herpesvirus 8 (Kaposi`s sarcoma-associated h
agaagcaauuuauuaagcaaa

SEQ ID NO: 190111 - RNA, 21 nt, Human herpesvirus 8 (Kaposi`s sarcoma-associated h
acuaggaggaagagcacuguu

SEQ ID NO: 190112 - RNA, 23 nt, Human herpesvirus 8 (Kaposi`s sarcoma-associated h
acggucuuuggggcuacacauca

SEQ ID NO: 190113 - RNA, 20 nt, Human herpesvirus 8 (Kaposi`s sarcoma-associated h
acggugucguguaugccaau

SEQ ID NO: 190114 - RNA, 19 nt, Human herpesvirus 8 (Kaposi`s sarcoma-associated h
acgguugcaccaagcacaa

SEQ ID NO: 190115 - RNA, 19 nt, Human herpesvirus 8 (Kaposi`s sarcoma-associated h
acgguagagaagagaccac

SEQ ID NO: 190116 - RNA, 20 nt, Human herpesvirus 8 (Kaposi`s sarcoma-associated h
acgguagagaagagaccacg

SEQ ID NO: 190117 - RNA, 17 nt, Human herpesvirus 8 (Kaposi`s sarcoma-associated h
acucagguguuuuccaa

SEQ ID NO: 190118 - RNA, 13 nt, Human herpesvirus 8 (Kaposi`s sarcoma-associated h
acucacugagugg

SEQ ID NO: 190119 - RNA, 20 nt, Human herpesvirus 8 (Kaposi`s sarcoma-associated h
acucacugggggucucggga

SEQ ID NO: 190120 - RNA, 17 nt, Human herpesvirus 8 (Kaposi`s sarcoma-associated h
acucagcugccaaggca

SEQ ID NO: 190121 - RNA, 19 nt, Human herpesvirus 8 (Kaposi`s sarcoma-associated h
acuuacugcagcacuaggu

SEQ ID NO: 190122 - RNA, 20 nt, Human herpesvirus 8 (Kaposi`s sarcoma-associated h
acuguagacaguuaaucuuu

SEQ ID NO: 190123 - RNA, 19 nt, Human herpesvirus 8 (Kaposi`s sarcoma-associated h
acugaccauguucaggugg

SEQ ID NO: 190124 - RNA, 19 nt, Human herpesvirus 8 (Kaposi`s sarcoma-associated h
acugagcgugccugcuuac

SEQ ID NO: 190125 - RNA, 15 nt, Human herpesvirus 8 (Kaposi`s sarcoma-associated h
acugggauccacugc

SEQ ID NO: 190126 - RNA, 19 nt, Human herpesvirus 8 (Kaposi`s sarcoma-associated h
acugggacuugauaaucuc

SEQ ID NO: 190127 - RNA, 21 nt, Human herpesvirus 8 (Kaposi`s sarcoma-associated h
acugcacaaaauugucuugua

SEQ ID NO: 190128 - RNA, 15 nt, Human herpesvirus 8 (Kaposi`s sarcoma-associated h
acuggcgcguugccg

SEQ ID NO: 190129 - RNA, 16 nt, Human herpesvirus 8 (Kaposi`s sarcoma-associated h
acuggcggguggcuca

SEQ ID NO: 190130 - RNA, 14 nt, Human herpesvirus 8 (Kaposi`s sarcoma-associated h
acuugcucuuuuca

SEQ ID NO: 190131 - RNA, 21 nt, Human herpesvirus 8 (Kaposi`s sarcoma-associated h
acuuaggcuaaccaccacagu

SEQ ID NO: 190132 - RNA, 24 nt, Human herpesvirus 8 (Kaposi`s sarcoma-associated h
acuuaucguggacgucaggaguca

SEQ ID NO: 190133 - RNA, 14 nt, Human herpesvirus 8 (Kaposi`s sarcoma-associated h
agaaaauucacacc

SEQ ID NO: 190134 - RNA, 22 nt, Human herpesvirus 8 (Kaposi`s sarcoma-associated h
acuuuacauuugacaacacgca

SEQ ID NO: 190135 - RNA, 19 nt, Human herpesvirus 8 (Kaposi`s sarcoma-associated h
aaaaaaacgaguguacaca

SEQ ID NO: 190136 - RNA, 15 nt, Human herpesvirus 8 (Kaposi`s sarcoma-associated h
aaaaacguauaugcc

SEQ ID NO: 190137 - RNA, 21 nt, Human herpesvirus 8 (Kaposi`s sarcoma-associated h
aaaaaccccgcgccaccuucc

SEQ ID NO: 190138 - RNA, 19 nt, Human herpesvirus 8 (Kaposi`s sarcoma-associated h
aaaaacacucccucacaau

SEQ ID NO: 190139 - RNA, 18 nt, Human herpesvirus 8 (Kaposi`s sarcoma-associated h
aaaaaccacucacugaga

SEQ ID NO: 190140 - RNA, 17 nt, Human herpesvirus 8 (Kaposi`s sarcoma-associated h
aaaacuaaucaguguua

SEQ ID NO: 190141 - RNA, 13 nt, Human herpesvirus 8 (Kaposi`s sarcoma-associated h
aaaacugccaaag

SEQ ID NO: 190142 - RNA, 17 nt, Human herpesvirus 8 (Kaposi`s sarcoma-associated h
aaaaccgcccacugauu

SEQ ID NO: 190143 - RNA, 18 nt, Human herpesvirus 8 (Kaposi`s sarcoma-associated h
aaaacuaccgucuaccug

SEQ ID NO: 190144 - RNA, 15 nt, Human herpesvirus 8 (Kaposi`s sarcoma-associated h
aaaagggcauguugc

SEQ ID NO: 190145 - RNA, 13 nt, Human herpesvirus 8 (Kaposi`s sarcoma-associated h
aaaauacauuuua

SEQ ID NO: 190146 - RNA, 17 nt, Human herpesvirus 8 (Kaposi`s sarcoma-associated h
aaaauacaaaaacacaa

SEQ ID NO: 190147 - RNA, 21 nt, Human herpesvirus 8 (Kaposi`s sarcoma-associated h
aaaauuucuguuuccagugac

SEQ ID NO: 190148 - RNA, 17 nt, Human herpesvirus 8 (Kaposi`s sarcoma-associated h
aaaauuguguguaccua

SEQ ID NO: 190149 - RNA, 13 nt, Human herpesvirus 8 (Kaposi`s sarcoma-associated h
aaaauugccaccu

SEQ ID NO: 190150 - RNA, 15 nt, Human herpesvirus 8 (Kaposi`s sarcoma-associated h
aaacacucccucaca

SEQ ID NO: 190151 - RNA, 20 nt, Human herpesvirus 8 (Kaposi`s sarcoma-associated h
aaacacucccucacaaugua

SEQ ID NO: 190152 - RNA, 23 nt, Human herpesvirus 8 (Kaposi`s sarcoma-associated h
aaacacgacacgauguuuuccag

SEQ ID NO: 190153 - RNA, 13 nt, Human herpesvirus 8 (Kaposi`s sarcoma-associated h
aaacaaggucaau

SEQ ID NO: 190154 - RNA, 23 nt, Human herpesvirus 8 (Kaposi`s sarcoma-associated h
aaaccggaguagugcaagugcac

SEQ ID NO: 190155 - RNA, 22 nt, Human herpesvirus 8 (Kaposi`s sarcoma-associated h
aaacauacguuuugaacaaugu

SEQ ID NO: 190156 - RNA, 18 nt, Human herpesvirus 8 (Kaposi`s sarcoma-associated h
aaaccaaauucgccucuc

SEQ ID NO: 190157 - RNA, 18 nt, Human herpesvirus 8 (Kaposi`s sarcoma-associated h
aaacauuggcuguguaca

SEQ ID NO: 190158 - RNA, 17 nt, Human herpesvirus 8 (Kaposi`s sarcoma-associated h
aaacauuguuuauuuca

SEQ ID NO: 190159 - RNA, 14 nt, Human herpesvirus 8 (Kaposi`s sarcoma-associated h
auauaagaaccaaa

SEQ ID NO: 190160 - RNA, 18 nt, Human herpesvirus 8 (Kaposi`s sarcoma-associated h
auauaacagcaacauguu

SEQ ID NO: 190161 - RNA, 13 nt, Human herpesvirus 8 (Kaposi`s sarcoma-associated h
auaugugugccca

SEQ ID NO: 190162 - RNA, 16 nt, Human herpesvirus 8 (Kaposi`s sarcoma-associated h
auauguccuucacuuu

SEQ ID NO: 190163 - RNA, 15 nt, Human herpesvirus 8 (Kaposi`s sarcoma-associated h
auaugucugccccag

SEQ ID NO: 190164 - RNA, 24 nt, Human herpesvirus 8 (Kaposi`s sarcoma-associated h
auauccacggugucguguaugcca

SEQ ID NO: 190165 - RNA, 12 nt, Human herpesvirus 8 (Kaposi`s sarcoma-associated h
auaucauaucaa

SEQ ID NO: 190166 - RNA, 20 nt, Human herpesvirus 8 (Kaposi`s sarcoma-associated h
auaugggcuuguacaugugu

SEQ ID NO: 190167 - RNA, 22 nt, Human herpesvirus 8 (Kaposi`s sarcoma-associated h
auauggggauugcgauugcuca

SEQ ID NO: 190168 - RNA, 13 nt, Human herpesvirus 8 (Kaposi`s sarcoma-associated h
auaaugccaauau

SEQ ID NO: 190169 - RNA, 22 nt, Human herpesvirus 8 (Kaposi`s sarcoma-associated h
auaaugccaauauaucagcuaa

SEQ ID NO: 190170 - RNA, 19 nt, Human herpesvirus 8 (Kaposi`s sarcoma-associated h
auaauggucuguauugaca

SEQ ID NO: 190171 - RNA, 22 nt, Human herpesvirus 8 (Kaposi`s sarcoma-associated h
auagccggggaaaaguggacgg

SEQ ID NO: 190172 - RNA, 20 nt, Human herpesvirus 8 (Kaposi`s sarcoma-associated h
auaggauggcuagauuucgc

SEQ ID NO: 190173 - RNA, 19 nt, Human herpesvirus 8 (Kaposi`s sarcoma-associated h
auagggggaugagccagaa

SEQ ID NO: 190174 - RNA, 17 nt, Human herpesvirus 8 (Kaposi`s sarcoma-associated h
auagugacuguagacag

SEQ ID NO: 190175 - RNA, 21 nt, Human herpesvirus 8 (Kaposi`s sarcoma-associated h
auagugucuggcuggcagggu

SEQ ID NO: 190176 - RNA, 11 nt, Human herpesvirus 8 (Kaposi`s sarcoma-associated h
aucacuuccag

SEQ ID NO: 190177 - RNA, 14 nt, Human herpesvirus 8 (Kaposi`s sarcoma-associated h
aucacuuccaggau

SEQ ID NO: 190178 - RNA, 22 nt, Human herpesvirus 8 (Kaposi`s sarcoma-associated h
aucacgguugcaccaagcacaa

SEQ ID NO: 190179 - RNA, 23 nt, Human herpesvirus 8 (Kaposi`s sarcoma-associated h
aucacugcggguuaauaggauuu

SEQ ID NO: 190180 - RNA, 15 nt, Human herpesvirus 8 (Kaposi`s sarcoma-associated h
aucaugccuguggau

SEQ ID NO: 190181 - RNA, 22 nt, Human herpesvirus 8 (Kaposi`s sarcoma-associated h
aucaucugcagacccuuaggga

SEQ ID NO: 190182 - RNA, 20 nt, Human herpesvirus 8 (Kaposi`s sarcoma-associated h
aucaucgcaggaugcauaag

SEQ ID NO: 190183 - RNA, 14 nt, Human herpesvirus 8 (Kaposi`s sarcoma-associated h
aucacccagugugc

SEQ ID NO: 190184 - RNA, 15 nt, Human herpesvirus 8 (Kaposi`s sarcoma-associated h
auauugauagccacu

SEQ ID NO: 190185 - RNA, 18 nt, Human herpesvirus 8 (Kaposi`s sarcoma-associated h
auauugauagccacuaug

SEQ ID NO: 190186 - RNA, 23 nt, Human herpesvirus 8 (Kaposi`s sarcoma-associated h
aucgagggcauacccguggcuca

SEQ ID NO: 190187 - RNA, 14 nt, Human herpesvirus 8 (Kaposi`s sarcoma-associated h
aucgaguaccccuc

SEQ ID NO: 190188 - RNA, 15 nt, Human herpesvirus 8 (Kaposi`s sarcoma-associated h
aucgaguccuugagg

SEQ ID NO: 190189 - RNA, 20 nt, Human herpesvirus 8 (Kaposi`s sarcoma-associated h
aucgcauaauaaaacaaaua

SEQ ID NO: 190190 - RNA, 18 nt, Human herpesvirus 8 (Kaposi`s sarcoma-associated h
aucauuucugaaacagaa

SEQ ID NO: 190191 - RNA, 20 nt, Human herpesvirus 8 (Kaposi`s sarcoma-associated h
aucauuaaagguuagcgcca

SEQ ID NO: 190192 - RNA, 23 nt, Human herpesvirus 8 (Kaposi`s sarcoma-associated h
augcagcagcgugacacuacuaa

SEQ ID NO: 190193 - RNA, 18 nt, Human herpesvirus 8 (Kaposi`s sarcoma-associated h
augcaaaauacauuuuau

SEQ ID NO: 190194 - RNA, 20 nt, Human herpesvirus 8 (Kaposi`s sarcoma-associated h
augauauacucccucccaua

SEQ ID NO: 190195 - RNA, 14 nt, Human herpesvirus 8 (Kaposi`s sarcoma-associated h
augauagacaugga

SEQ ID NO: 190196 - RNA, 22 nt, Human herpesvirus 8 (Kaposi`s sarcoma-associated h
augauaggcaacaugacauggu

SEQ ID NO: 190197 - RNA, 12 nt, Human herpesvirus 8 (Kaposi`s sarcoma-associated h
augauuacagag

SEQ ID NO: 190198 - RNA, 20 nt, Human herpesvirus 8 (Kaposi`s sarcoma-associated h
augccuacaccguauuguua

SEQ ID NO: 190199 - RNA, 20 nt, Human herpesvirus 8 (Kaposi`s sarcoma-associated h
augccccaaagccguuccca

SEQ ID NO: 190200 - RNA, 22 nt, Human herpesvirus 8 (Kaposi`s sarcoma-associated h
augcccccuuuuuucaguggga

SEQ ID NO: 190201 - RNA, 17 nt, Human herpesvirus 8 (Kaposi`s sarcoma-associated h
augccaguagcaugcug

SEQ ID NO: 190202 - RNA, 21 nt, Human herpesvirus 8 (Kaposi`s sarcoma-associated h
augcauaucguugacaugugg

SEQ ID NO: 190203 - RNA, 16 nt, Human herpesvirus 8 (Kaposi`s sarcoma-associated h
augcucaggucuguca

SEQ ID NO: 190204 - RNA, 18 nt, Human herpesvirus 8 (Kaposi`s sarcoma-associated h
augcucaggucugucacu

SEQ ID NO: 190205 - RNA, 19 nt, Human herpesvirus 8 (Kaposi`s sarcoma-associated h
augcucaggucugucacua

SEQ ID NO: 190206 - RNA, 17 nt, Human herpesvirus 8 (Kaposi`s sarcoma-associated h
augcucggcaacauuca

SEQ ID NO: 190207 - RNA, 19 nt, Human herpesvirus 8 (Kaposi`s sarcoma-associated h
augcugaagagcaggcgua

SEQ ID NO: 190208 - RNA, 16 nt, Human herpesvirus 8 (Kaposi`s sarcoma-associated h
augcuagcgugucuga

SEQ ID NO: 190209 - RNA, 18 nt, Human herpesvirus 8 (Kaposi`s sarcoma-associated h
augcguucuccugcauac

SEQ ID NO: 190210 - RNA, 18 nt, Human herpesvirus 8 (Kaposi`s sarcoma-associated h
augcgcggcacauugugu

SEQ ID NO: 190211 - RNA, 13 nt, Human herpesvirus 8 (Kaposi`s sarcoma-associated h
augacuccgggga

SEQ ID NO: 190212 - RNA, 23 nt, Human herpesvirus 8 (Kaposi`s sarcoma-associated h
augacuaggaggaagagcacugu

SEQ ID NO: 190213 - RNA, 22 nt, Human herpesvirus 8 (Kaposi`s sarcoma-associated h
augacuuccccgucuccaguca

SEQ ID NO: 190214 - RNA, 21 nt, Human herpesvirus 8 (Kaposi`s sarcoma-associated h
augagccucccuuagugacau

SEQ ID NO: 190215 - RNA, 22 nt, Human herpesvirus 8 (Kaposi`s sarcoma-associated h
augagccucccuuagugacauc

SEQ ID NO: 190216 - RNA, 17 nt, Human herpesvirus 8 (Kaposi`s sarcoma-associated h
augaauacccuggauca

SEQ ID NO: 190217 - RNA, 15 nt, Human herpesvirus 8 (Kaposi`s sarcoma-associated h
augaacauuguucaa

SEQ ID NO: 190218 - RNA, 24 nt, Human herpesvirus 8 (Kaposi`s sarcoma-associated h
aucuugcugcauaaagucauggga

SEQ ID NO: 190219 - RNA, 20 nt, Human herpesvirus 8 (Kaposi`s sarcoma-associated h
aucgcucaaacucaucucuc

SEQ ID NO: 190220 - RNA, 19 nt, Human herpesvirus 8 (Kaposi`s sarcoma-associated h
aucuuugcgcuauuugccg

SEQ ID NO: 190221 - RNA, 20 nt, Human herpesvirus 8 (Kaposi`s sarcoma-associated h
aucuuguauucucaucgcau

SEQ ID NO: 190222 - RNA, 15 nt, Human herpesvirus 8 (Kaposi`s sarcoma-associated h
augaaagacugccug

SEQ ID NO: 190223 - RNA, 16 nt, Human herpesvirus 8 (Kaposi`s sarcoma-associated h
augaaagacugccuga

SEQ ID NO: 190224 - RNA, 19 nt, Human herpesvirus 8 (Kaposi`s sarcoma-associated h
augaaacauucggugagug

SEQ ID NO: 190225 - RNA, 18 nt, Human herpesvirus 8 (Kaposi`s sarcoma-associated h
augaaaaguguucccaaa

SEQ ID NO: 190226 - RNA, 14 nt, Human herpesvirus 8 (Kaposi`s sarcoma-associated h
aucuuuuccaccua

SEQ ID NO: 190227 - RNA, 16 nt, Human herpesvirus 8 (Kaposi`s sarcoma-associated h
aguauagugguuuaca

SEQ ID NO: 190228 - RNA, 19 nt, Human herpesvirus 8 (Kaposi`s sarcoma-associated h
agugccacaauuucauuaa

SEQ ID NO: 190229 - RNA, 20 nt, Human herpesvirus 8 (Kaposi`s sarcoma-associated h
aguaacgagguuacugccag

SEQ ID NO: 190230 - RNA, 15 nt, Human herpesvirus 8 (Kaposi`s sarcoma-associated h
aguagaucagaguag

SEQ ID NO: 190231 - RNA, 21 nt, Human herpesvirus 8 (Kaposi`s sarcoma-associated h
aguagcuguugacuuucaaac

SEQ ID NO: 190232 - RNA, 14 nt, Human herpesvirus 8 (Kaposi`s sarcoma-associated h
aguacugcuuaaac

SEQ ID NO: 190233 - RNA, 19 nt, Human herpesvirus 8 (Kaposi`s sarcoma-associated h
agugggacagcaacaccca

SEQ ID NO: 190234 - RNA, 22 nt, Human herpesvirus 8 (Kaposi`s sarcoma-associated h
aguggauugccgucacauauca

SEQ ID NO: 190235 - RNA, 21 nt, Human herpesvirus 8 (Kaposi`s sarcoma-associated h
aguggaccgcgagacaucaga

SEQ ID NO: 190236 - RNA, 13 nt, Human herpesvirus 8 (Kaposi`s sarcoma-associated h
aguggaguggugu

SEQ ID NO: 190237 - RNA, 17 nt, Human herpesvirus 8 (Kaposi`s sarcoma-associated h
aguggcccgucuguaua

SEQ ID NO: 190238 - RNA, 23 nt, Human herpesvirus 8 (Kaposi`s sarcoma-associated h
aguguaucccccacaggacaagc

SEQ ID NO: 190239 - RNA, 16 nt, Human herpesvirus 8 (Kaposi`s sarcoma-associated h
agugguugccauccuu

SEQ ID NO: 190240 - RNA, 12 nt, Human herpesvirus 8 (Kaposi`s sarcoma-associated h
agugguuuacau

SEQ ID NO: 190241 - RNA, 20 nt, Human herpesvirus 8 (Kaposi`s sarcoma-associated h
agugguuaacuucaccucca

SEQ ID NO: 190242 - RNA, 17 nt, Human herpesvirus 8 (Kaposi`s sarcoma-associated h
aguggaauuacguugua

SEQ ID NO: 190243 - RNA, 19 nt, Human herpesvirus 8 (Kaposi`s sarcoma-associated h
aguuaaagcugucacuaau

SEQ ID NO: 190244 - RNA, 17 nt, Human herpesvirus 8 (Kaposi`s sarcoma-associated h
aguguuuuuugccaugg

SEQ ID NO: 190245 - RNA, 14 nt, Human herpesvirus 8 (Kaposi`s sarcoma-associated h
aguguuugcugcug

SEQ ID NO: 190246 - RNA, 17 nt, Human herpesvirus 8 (Kaposi`s sarcoma-associated h
aguguugguuacacuaa

SEQ ID NO: 190247 - RNA, 22 nt, Human herpesvirus 8 (Kaposi`s sarcoma-associated h
aguguugguuacacuaaccaca

SEQ ID NO: 190248 - RNA, 15 nt, Human herpesvirus 8 (Kaposi`s sarcoma-associated h
aguguucccaaaaaa

SEQ ID NO: 190249 - RNA, 15 nt, Human herpesvirus 8 (Kaposi`s sarcoma-associated h
aguguguagugcauc

SEQ ID NO: 190250 - RNA, 19 nt, Human herpesvirus 8 (Kaposi`s sarcoma-associated h
agugugcgcgcagcuuucc

SEQ ID NO: 190251 - RNA, 22 nt, Human herpesvirus 8 (Kaposi`s sarcoma-associated h
aguguggacuuuuaccaguuca

SEQ ID NO: 190252 - RNA, 19 nt, Human herpesvirus 8 (Kaposi`s sarcoma-associated h
aguguccagccacaucagc

SEQ ID NO: 190253 - RNA, 13 nt, Human herpesvirus 8 (Kaposi`s sarcoma-associated h
aguuaccauucau

SEQ ID NO: 190254 - RNA, 19 nt, Human herpesvirus 8 (Kaposi`s sarcoma-associated h
auaaaccgaaguacugcuu

SEQ ID NO: 190255 - RNA, 15 nt, Human herpesvirus 8 (Kaposi`s sarcoma-associated h
auaaaauacgcgugu

SEQ ID NO: 190256 - RNA, 13 nt, Human herpesvirus 8 (Kaposi`s sarcoma-associated h
auaaaccagacac

SEQ ID NO: 190257 - RNA, 11 nt, Human herpesvirus 8 (Kaposi`s sarcoma-associated h
auaaacagccu

SEQ ID NO: 190258 - RNA, 15 nt, Human herpesvirus 8 (Kaposi`s sarcoma-associated h
auaaacagccuuggu

SEQ ID NO: 190259 - RNA, 17 nt, Human herpesvirus 8 (Kaposi`s sarcoma-associated h
auaaccgugcuacuuac

SEQ ID NO: 190260 - RNA, 16 nt, Human herpesvirus 8 (Kaposi`s sarcoma-associated h
auaacaugcaacccuc

SEQ ID NO: 190261 - RNA, 12 nt, Human herpesvirus 8 (Kaposi`s sarcoma-associated h
auaacagugcuc

SEQ ID NO: 190262 - RNA, 16 nt, Human herpesvirus 8 (Kaposi`s sarcoma-associated h
auaacagcaacauguu

SEQ ID NO: 190263 - RNA, 17 nt, Human herpesvirus 8 (Kaposi`s sarcoma-associated h
auaacagcaacauguuu

SEQ ID NO: 190264 - RNA, 16 nt, Human herpesvirus 8 (Kaposi`s sarcoma-associated h
auaacacagucacagu

SEQ ID NO: 190265 - RNA, 23 nt, Human herpesvirus 8 (Kaposi`s sarcoma-associated h
auaacaagguuaggaucuugccc

SEQ ID NO: 190266 - RNA, 14 nt, Human herpesvirus 8 (Kaposi`s sarcoma-associated h
aguucagagugugu

SEQ ID NO: 190267 - RNA, 22 nt, Human herpesvirus 8 (Kaposi`s sarcoma-associated h
aguuccccgggaacggacaauu

SEQ ID NO: 190268 - RNA, 13 nt, Human herpesvirus 8 (Kaposi`s sarcoma-associated h
aguugacggguuu

SEQ ID NO: 190269 - RNA, 18 nt, Human herpesvirus 8 (Kaposi`s sarcoma-associated h
aguuuaaaagacucuaga

SEQ ID NO: 190270 - RNA, 15 nt, Human herpesvirus 8 (Kaposi`s sarcoma-associated h
aguuuaucucagaca

SEQ ID NO: 190271 - RNA, 17 nt, Human herpesvirus 8 (Kaposi`s sarcoma-associated h
aguuuccguccaccagg

SEQ ID NO: 190272 - RNA, 19 nt, Human herpesvirus 8 (Kaposi`s sarcoma-associated h
auaaaagaauggugucaau

SEQ ID NO: 190273 - RNA, 22 nt, Human herpesvirus 8 (Kaposi`s sarcoma-associated h
aguuguggucucucuugcuggu

SEQ ID NO: 190274 - RNA, 23 nt, Human herpesvirus 8 (Kaposi`s sarcoma-associated h
aguuggccuccagcaaagcacau

SEQ ID NO: 190275 - RNA, 17 nt, Human herpesvirus 8 (Kaposi`s sarcoma-associated h
aguuggagaaacagugg

SEQ ID NO: 190276 - RNA, 19 nt, Human herpesvirus 8 (Kaposi`s sarcoma-associated h
agcagcugucccggaucca

SEQ ID NO: 190277 - RNA, 18 nt, Human herpesvirus 8 (Kaposi`s sarcoma-associated h
agcagccuaacauguggc

SEQ ID NO: 190278 - RNA, 15 nt, Human herpesvirus 8 (Kaposi`s sarcoma-associated h
agcagcgccagugga

SEQ ID NO: 190279 - RNA, 20 nt, Human herpesvirus 8 (Kaposi`s sarcoma-associated h
agcauccuaucgcacagaca

SEQ ID NO: 190280 - RNA, 23 nt, Human herpesvirus 8 (Kaposi`s sarcoma-associated h
agcuggguauaaaggagggauuu

SEQ ID NO: 190281 - RNA, 18 nt, Human herpesvirus 8 (Kaposi`s sarcoma-associated h
agcugcugguucaggauu

SEQ ID NO: 190282 - RNA, 21 nt, Human herpesvirus 8 (Kaposi`s sarcoma-associated h
agcuggagugcugaccacggc

SEQ ID NO: 190283 - RNA, 14 nt, Human herpesvirus 8 (Kaposi`s sarcoma-associated h
agcuggaccguccu

SEQ ID NO: 190284 - RNA, 19 nt, Human herpesvirus 8 (Kaposi`s sarcoma-associated h
agcuuaccgcuacuguggg

SEQ ID NO: 190285 - RNA, 14 nt, Human herpesvirus 8 (Kaposi`s sarcoma-associated h
agcugucacuaaua

SEQ ID NO: 190286 - RNA, 17 nt, Human herpesvirus 8 (Kaposi`s sarcoma-associated h
agcuggucccgugguca

SEQ ID NO: 190287 - RNA, 15 nt, Human herpesvirus 8 (Kaposi`s sarcoma-associated h
aggaaacugggugua

SEQ ID NO: 190288 - RNA, 17 nt, Human herpesvirus 8 (Kaposi`s sarcoma-associated h
aggaggaagagcacugu

SEQ ID NO: 190289 - RNA, 16 nt, Human herpesvirus 8 (Kaposi`s sarcoma-associated h
aggaagagcacuguua

SEQ ID NO: 190290 - RNA, 18 nt, Human herpesvirus 8 (Kaposi`s sarcoma-associated h
aggaagcauccggacuga

SEQ ID NO: 190291 - RNA, 20 nt, Human herpesvirus 8 (Kaposi`s sarcoma-associated h
aggaagcauccggacugaga

SEQ ID NO: 190292 - RNA, 22 nt, Human herpesvirus 8 (Kaposi`s sarcoma-associated h
aggaagcaucugguccuaagag

SEQ ID NO: 190293 - RNA, 15 nt, Human herpesvirus 8 (Kaposi`s sarcoma-associated h
aggcuaggugcccag

SEQ ID NO: 190294 - RNA, 14 nt, Human herpesvirus 8 (Kaposi`s sarcoma-associated h
aggcuggaauggau

SEQ ID NO: 190295 - RNA, 15 nt, Human herpesvirus 8 (Kaposi`s sarcoma-associated h
aggcuggaccuccuc

SEQ ID NO: 190296 - RNA, 16 nt, Human herpesvirus 8 (Kaposi`s sarcoma-associated h
agggggaugagccaga

SEQ ID NO: 190297 - RNA, 13 nt, Human herpesvirus 8 (Kaposi`s sarcoma-associated h
aggggaguagggu

SEQ ID NO: 190298 - RNA, 15 nt, Human herpesvirus 8 (Kaposi`s sarcoma-associated h
aggagggcagguuaa

SEQ ID NO: 190299 - RNA, 17 nt, Human herpesvirus 8 (Kaposi`s sarcoma-associated h
aggaucuuccucuaagg

SEQ ID NO: 190300 - RNA, 13 nt, Human herpesvirus 8 (Kaposi`s sarcoma-associated h
aggugggugugca

SEQ ID NO: 190301 - RNA, 18 nt, Human herpesvirus 8 (Kaposi`s sarcoma-associated h
aggugguaauaaagucau

SEQ ID NO: 190302 - RNA, 19 nt, Human herpesvirus 8 (Kaposi`s sarcoma-associated h
agguuguaacacaaaagca

SEQ ID NO: 190303 - RNA, 22 nt, Human herpesvirus 8 (Kaposi`s sarcoma-associated h
aggggguguccccugcaaugca

SEQ ID NO: 190304 - RNA, 11 nt, Human herpesvirus 8 (Kaposi`s sarcoma-associated h
aggggugacac

SEQ ID NO: 190305 - RNA, 22 nt, Human herpesvirus 8 (Kaposi`s sarcoma-associated h
agggugaaacccggauuugccc

SEQ ID NO: 190306 - RNA, 15 nt, Human herpesvirus 8 (Kaposi`s sarcoma-associated h
aggguggacagugcc

SEQ ID NO: 190307 - RNA, 16 nt, Human herpesvirus 8 (Kaposi`s sarcoma-associated h
aggucugucacuagaa

SEQ ID NO: 190308 - RNA, 21 nt, Human herpesvirus 8 (Kaposi`s sarcoma-associated h
aggugccgacgucgucgcaaa

SEQ ID NO: 190309 - RNA, 20 nt, Human herpesvirus 8 (Kaposi`s sarcoma-associated h
auuucagcccuuaucagcuc

SEQ ID NO: 190310 - RNA, 23 nt, Human herpesvirus 8 (Kaposi`s sarcoma-associated h
auuucauuaacaaacaaggucaa

SEQ ID NO: 190311 - RNA, 23 nt, Human herpesvirus 8 (Kaposi`s sarcoma-associated h
auuugucgcgccagaaagacaca

SEQ ID NO: 190312 - RNA, 20 nt, Human herpesvirus 8 (Kaposi`s sarcoma-associated h
auuugugaaacaauaaugau

SEQ ID NO: 190313 - RNA, 22 nt, Human herpesvirus 8 (Kaposi`s sarcoma-associated h
auuucugaaacagaaacugcuc

SEQ ID NO: 190314 - RNA, 19 nt, Human herpesvirus 8 (Kaposi`s sarcoma-associated h
auuuacgcgacggaucucu

SEQ ID NO: 190315 - RNA, 14 nt, Human herpesvirus 8 (Kaposi`s sarcoma-associated h
auuuaguacguggu

SEQ ID NO: 190316 - RNA, 22 nt, Human herpesvirus 8 (Kaposi`s sarcoma-associated h
auuuaguacgugguaagggaag

SEQ ID NO: 190317 - RNA, 20 nt, Human herpesvirus 8 (Kaposi`s sarcoma-associated h
auuuauuuuuuacuacaggu

SEQ ID NO: 190318 - RNA, 22 nt, Human herpesvirus 8 (Kaposi`s sarcoma-associated h
auuuauuuuuuacuacagguau

SEQ ID NO: 190319 - RNA, 16 nt, Human herpesvirus 8 (Kaposi`s sarcoma-associated h
auuucacugucacuuu

SEQ ID NO: 190320 - RNA, 17 nt, Human herpesvirus 8 (Kaposi`s sarcoma-associated h
auuucacugucacuuuc

SEQ ID NO: 190321 - RNA, 18 nt, Human herpesvirus 8 (Kaposi`s sarcoma-associated h
auuucacugucacuuuca

SEQ ID NO: 190322 - RNA, 16 nt, Human herpesvirus 8 (Kaposi`s sarcoma-associated h
auugaagcauguugcg

SEQ ID NO: 190323 - RNA, 14 nt, Human herpesvirus 8 (Kaposi`s sarcoma-associated h
auugagcgcugugc

SEQ ID NO: 190324 - RNA, 22 nt, Human herpesvirus 8 (Kaposi`s sarcoma-associated h
auugaguguaaaucgggccacu

SEQ ID NO: 190325 - RNA, 13 nt, Human herpesvirus 8 (Kaposi`s sarcoma-associated h
auugucuagacac

SEQ ID NO: 190326 - RNA, 20 nt, Human herpesvirus 8 (Kaposi`s sarcoma-associated h
auugugacuauuugugaaac

SEQ ID NO: 190327 - RNA, 21 nt, Human herpesvirus 8 (Kaposi`s sarcoma-associated h
auugugacuauuugugaaaca

SEQ ID NO: 190328 - RNA, 17 nt, Human herpesvirus 8 (Kaposi`s sarcoma-associated h
auuguguguaccuagcc

SEQ ID NO: 190329 - RNA, 21 nt, Human herpesvirus 8 (Kaposi`s sarcoma-associated h
auucacucagcugccaaggca

SEQ ID NO: 190330 - RNA, 17 nt, Human herpesvirus 8 (Kaposi`s sarcoma-associated h
auucaucgaguccuuga

SEQ ID NO: 190331 - RNA, 16 nt, Human herpesvirus 8 (Kaposi`s sarcoma-associated h
auucccaaacacauca

SEQ ID NO: 190332 - RNA, 15 nt, Human herpesvirus 8 (Kaposi`s sarcoma-associated h
auuccuccgcacaga

SEQ ID NO: 190333 - RNA, 23 nt, Human herpesvirus 8 (Kaposi`s sarcoma-associated h
auuccucuccgcauuaaagcacu

SEQ ID NO: 190334 - RNA, 18 nt, Human herpesvirus 8 (Kaposi`s sarcoma-associated h
auucccggucccacauga

SEQ ID NO: 190335 - RNA, 20 nt, Human herpesvirus 8 (Kaposi`s sarcoma-associated h
auuaugcaguaucuauccaa

SEQ ID NO: 190336 - RNA, 21 nt, Human herpesvirus 8 (Kaposi`s sarcoma-associated h
auuaugaggccuaucugagga

SEQ ID NO: 190337 - RNA, 11 nt, Human herpesvirus 8 (Kaposi`s sarcoma-associated h
auuaugguucc

SEQ ID NO: 190338 - RNA, 15 nt, Human herpesvirus 8 (Kaposi`s sarcoma-associated h
auuaucuuaacuaaa

SEQ ID NO: 190339 - RNA, 17 nt, Human herpesvirus 8 (Kaposi`s sarcoma-associated h
augcugccccuagaccu

SEQ ID NO: 190340 - RNA, 19 nt, Human herpesvirus 8 (Kaposi`s sarcoma-associated h
auggaagaccuaaccgcaa

SEQ ID NO: 190341 - RNA, 24 nt, Human herpesvirus 8 (Kaposi`s sarcoma-associated h
caacuaauauuaaccauagugugc

SEQ ID NO: 190342 - RNA, 22 nt, Human herpesvirus 8 (Kaposi`s sarcoma-associated h
caacgaccugaugcaggccacc

SEQ ID NO: 190343 - RNA, 16 nt, Human herpesvirus 8 (Kaposi`s sarcoma-associated h
caaaguauauuagugu

SEQ ID NO: 190344 - RNA, 19 nt, Human herpesvirus 8 (Kaposi`s sarcoma-associated h
caacacuacuaugucccaa

SEQ ID NO: 190345 - RNA, 19 nt, Human herpesvirus 8 (Kaposi`s sarcoma-associated h
caacaauagggauacuguu

SEQ ID NO: 190346 - RNA, 20 nt, Human herpesvirus 8 (Kaposi`s sarcoma-associated h
caaaugcccagaaugaagga

SEQ ID NO: 190347 - RNA, 22 nt, Human herpesvirus 8 (Kaposi`s sarcoma-associated h
caaaugcccagaaugaaggaca

SEQ ID NO: 190348 - RNA, 16 nt, Human herpesvirus 8 (Kaposi`s sarcoma-associated h
caaaugcggccaguuu

SEQ ID NO: 190349 - RNA, 17 nt, Human herpesvirus 8 (Kaposi`s sarcoma-associated h
auuuuaacagccacgac

SEQ ID NO: 190350 - RNA, 22 nt, Human herpesvirus 8 (Kaposi`s sarcoma-associated h
auuuuaugaggucggauacuua

SEQ ID NO: 190351 - RNA, 22 nt, Human herpesvirus 8 (Kaposi`s sarcoma-associated h
caaaaaaaacauagugccucau

SEQ ID NO: 190352 - RNA, 19 nt, Human herpesvirus 8 (Kaposi`s sarcoma-associated h
caaagagugucaguaaaau

SEQ ID NO: 190353 - RNA, 17 nt, Human herpesvirus 8 (Kaposi`s sarcoma-associated h
caaagcuuaaccacaug

SEQ ID NO: 190354 - RNA, 22 nt, Human herpesvirus 8 (Kaposi`s sarcoma-associated h
caaaggcggccguggcagucaa

SEQ ID NO: 190355 - RNA, 14 nt, Human herpesvirus 8 (Kaposi`s sarcoma-associated h
caaaccccauggca

SEQ ID NO: 190356 - RNA, 21 nt, Human herpesvirus 8 (Kaposi`s sarcoma-associated h
caaacgccccucuuggcuguu

SEQ ID NO: 190357 - RNA, 10 nt, Human herpesvirus 8 (Kaposi`s sarcoma-associated h
caaaccacac

SEQ ID NO: 190358 - RNA, 20 nt, Human herpesvirus 8 (Kaposi`s sarcoma-associated h
caaacaugggguuccagugc

SEQ ID NO: 190359 - RNA, 14 nt, Human herpesvirus 8 (Kaposi`s sarcoma-associated h
cacuccuguuagca

SEQ ID NO: 190360 - RNA, 13 nt, Human herpesvirus 8 (Kaposi`s sarcoma-associated h
cagagcagugcuc

SEQ ID NO: 190361 - RNA, 21 nt, Human herpesvirus 8 (Kaposi`s sarcoma-associated h
cagagcguagaugaaugucuc

SEQ ID NO: 190362 - RNA, 14 nt, Human herpesvirus 8 (Kaposi`s sarcoma-associated h
cagagcuguuaccc

SEQ ID NO: 190363 - RNA, 19 nt, Human herpesvirus 8 (Kaposi`s sarcoma-associated h
cagagcuguuacccugcuc

SEQ ID NO: 190364 - RNA, 12 nt, Human herpesvirus 8 (Kaposi`s sarcoma-associated h
cagaaaaccaua

SEQ ID NO: 190365 - RNA, 16 nt, Human herpesvirus 8 (Kaposi`s sarcoma-associated h
cagagaauaaagccaa

SEQ ID NO: 190366 - RNA, 16 nt, Human herpesvirus 8 (Kaposi`s sarcoma-associated h
cagagaauacagugcu

SEQ ID NO: 190367 - RNA, 17 nt, Human herpesvirus 8 (Kaposi`s sarcoma-associated h
cagagaauacagugcua

SEQ ID NO: 190368 - RNA, 14 nt, Human herpesvirus 8 (Kaposi`s sarcoma-associated h
cagagucugcucua

SEQ ID NO: 190369 - RNA, 15 nt, Human herpesvirus 8 (Kaposi`s sarcoma-associated h
cagaguuguggaccu

SEQ ID NO: 190370 - RNA, 18 nt, Human herpesvirus 8 (Kaposi`s sarcoma-associated h
cagagggcguguccagga

SEQ ID NO: 190371 - RNA, 14 nt, Human herpesvirus 8 (Kaposi`s sarcoma-associated h
cagagucacaaagg

SEQ ID NO: 190372 - RNA, 23 nt, Human herpesvirus 8 (Kaposi`s sarcoma-associated h
cagauaggccucauaauaaugau

SEQ ID NO: 190373 - RNA, 18 nt, Human herpesvirus 8 (Kaposi`s sarcoma-associated h
cagauauaaacauggcac

SEQ ID NO: 190374 - RNA, 12 nt, Human herpesvirus 8 (Kaposi`s sarcoma-associated h
cagcaaagcaca

SEQ ID NO: 190375 - RNA, 21 nt, Human herpesvirus 8 (Kaposi`s sarcoma-associated h
cagcaaagcacauuuugcacg

SEQ ID NO: 190376 - RNA, 22 nt, Human herpesvirus 8 (Kaposi`s sarcoma-associated h
cagcaagcggcugaaguaguca

SEQ ID NO: 190377 - RNA, 16 nt, Human herpesvirus 8 (Kaposi`s sarcoma-associated h
cagcaacauguuuaca

SEQ ID NO: 190378 - RNA, 21 nt, Human herpesvirus 8 (Kaposi`s sarcoma-associated h
cagauggccggguuuacucug

SEQ ID NO: 190379 - RNA, 14 nt, Human herpesvirus 8 (Kaposi`s sarcoma-associated h
cagaugauaggcaa

SEQ ID NO: 190380 - RNA, 14 nt, Human herpesvirus 8 (Kaposi`s sarcoma-associated h
cagauguucuugcc

SEQ ID NO: 190381 - RNA, 15 nt, Human herpesvirus 8 (Kaposi`s sarcoma-associated h
cagcacauaugucuc

SEQ ID NO: 190382 - RNA, 23 nt, Human herpesvirus 8 (Kaposi`s sarcoma-associated h
cagcauauacagguguccaagac

SEQ ID NO: 190383 - RNA, 17 nt, Human herpesvirus 8 (Kaposi`s sarcoma-associated h
cagccucuguacaugga

SEQ ID NO: 190384 - RNA, 15 nt, Human herpesvirus 8 (Kaposi`s sarcoma-associated h
cagccuaacaugugg

SEQ ID NO: 190385 - RNA, 16 nt, Human herpesvirus 8 (Kaposi`s sarcoma-associated h
cagccaugugcugguu

SEQ ID NO: 190386 - RNA, 21 nt, Human herpesvirus 8 (Kaposi`s sarcoma-associated h
cagcccgauggcccuucaggc

SEQ ID NO: 190387 - RNA, 17 nt, Human herpesvirus 8 (Kaposi`s sarcoma-associated h
cagcccauaguauguaa

SEQ ID NO: 190388 - RNA, 23 nt, Human herpesvirus 8 (Kaposi`s sarcoma-associated h
cagccaccacgccacaacccaac

SEQ ID NO: 190389 - RNA, 20 nt, Human herpesvirus 8 (Kaposi`s sarcoma-associated h
cagcucaucaaugggagaac

SEQ ID NO: 190390 - RNA, 23 nt, Human herpesvirus 8 (Kaposi`s sarcoma-associated h
cagcugaaucagcauauacaggu

SEQ ID NO: 190391 - RNA, 20 nt, Human herpesvirus 8 (Kaposi`s sarcoma-associated h
cagcuggacuggagucaggu

SEQ ID NO: 190392 - RNA, 22 nt, Human herpesvirus 8 (Kaposi`s sarcoma-associated h
caggaagugucgggaggcaugu

SEQ ID NO: 190393 - RNA, 17 nt, Human herpesvirus 8 (Kaposi`s sarcoma-associated h
caccguggaguugccug

SEQ ID NO: 190394 - RNA, 19 nt, Human herpesvirus 8 (Kaposi`s sarcoma-associated h
cacgagcuaggaguggacu

SEQ ID NO: 190395 - RNA, 17 nt, Human herpesvirus 8 (Kaposi`s sarcoma-associated h
cacgaugggaacuuuca

SEQ ID NO: 190396 - RNA, 21 nt, Human herpesvirus 8 (Kaposi`s sarcoma-associated h
caccgucggcggugcauguga

SEQ ID NO: 190397 - RNA, 16 nt, Human herpesvirus 8 (Kaposi`s sarcoma-associated h
cacccuacuuagugaa

SEQ ID NO: 190398 - RNA, 12 nt, Human herpesvirus 8 (Kaposi`s sarcoma-associated h
caccgacacugg

SEQ ID NO: 190399 - RNA, 16 nt, Human herpesvirus 8 (Kaposi`s sarcoma-associated h
cacauuugucuuuauu

SEQ ID NO: 190400 - RNA, 15 nt, Human herpesvirus 8 (Kaposi`s sarcoma-associated h
cacauugugucaacc

SEQ ID NO: 190401 - RNA, 17 nt, Human herpesvirus 8 (Kaposi`s sarcoma-associated h
cacggggacauggacag

SEQ ID NO: 190402 - RNA, 14 nt, Human herpesvirus 8 (Kaposi`s sarcoma-associated h
cacggaguuggcua

SEQ ID NO: 190403 - RNA, 16 nt, Human herpesvirus 8 (Kaposi`s sarcoma-associated h
cacggcgcuguacagu

SEQ ID NO: 190404 - RNA, 20 nt, Human herpesvirus 8 (Kaposi`s sarcoma-associated h
cacuauggggucagggugga

SEQ ID NO: 190405 - RNA, 10 nt, Human herpesvirus 8 (Kaposi`s sarcoma-associated h
cacuauguag

SEQ ID NO: 190406 - RNA, 19 nt, Human herpesvirus 8 (Kaposi`s sarcoma-associated h
cacguagggcuuuacccuc

SEQ ID NO: 190407 - RNA, 17 nt, Human herpesvirus 8 (Kaposi`s sarcoma-associated h
cacuagcagaaaacugu

SEQ ID NO: 190408 - RNA, 13 nt, Human herpesvirus 8 (Kaposi`s sarcoma-associated h
cacgucacaucac

SEQ ID NO: 190409 - RNA, 20 nt, Human herpesvirus 8 (Kaposi`s sarcoma-associated h
cacgguugcaccaagcacaa

SEQ ID NO: 190410 - RNA, 16 nt, Human herpesvirus 8 (Kaposi`s sarcoma-associated h
cacaaaagcaagugga

SEQ ID NO: 190411 - RNA, 18 nt, Human herpesvirus 8 (Kaposi`s sarcoma-associated h
cacaaaugaaaugaguca

SEQ ID NO: 190412 - RNA, 19 nt, Human herpesvirus 8 (Kaposi`s sarcoma-associated h
cacaagggccaagcuacug

SEQ ID NO: 190413 - RNA, 17 nt, Human herpesvirus 8 (Kaposi`s sarcoma-associated h
cacaauauaagaaccaa

SEQ ID NO: 190414 - RNA, 21 nt, Human herpesvirus 8 (Kaposi`s sarcoma-associated h
cacaauauaagaaccaaagga

SEQ ID NO: 190415 - RNA, 18 nt, Human herpesvirus 8 (Kaposi`s sarcoma-associated h
cacauguagccugucacc

SEQ ID NO: 190416 - RNA, 12 nt, Human herpesvirus 8 (Kaposi`s sarcoma-associated h
cacauggcagcu

SEQ ID NO: 190417 - RNA, 18 nt, Human herpesvirus 8 (Kaposi`s sarcoma-associated h
cacauggcagcugaauca

SEQ ID NO: 190418 - RNA, 22 nt, Human herpesvirus 8 (Kaposi`s sarcoma-associated h
cacauggcagcugaaucagcau

SEQ ID NO: 190419 - RNA, 19 nt, Human herpesvirus 8 (Kaposi`s sarcoma-associated h
cacaaucacgguugcacca

SEQ ID NO: 190420 - RNA, 14 nt, Human herpesvirus 8 (Kaposi`s sarcoma-associated h
cacaauuucauuaa

SEQ ID NO: 190421 - RNA, 19 nt, Human herpesvirus 8 (Kaposi`s sarcoma-associated h
caagacuaaaaaggccacc

SEQ ID NO: 190422 - RNA, 20 nt, Human herpesvirus 8 (Kaposi`s sarcoma-associated h
caagaccgagcguauucuca

SEQ ID NO: 190423 - RNA, 21 nt, Human herpesvirus 8 (Kaposi`s sarcoma-associated h
caagaccgagcguauucucag

SEQ ID NO: 190424 - RNA, 13 nt, Human herpesvirus 8 (Kaposi`s sarcoma-associated h
caagcuacuggcc

SEQ ID NO: 190425 - RNA, 23 nt, Human herpesvirus 8 (Kaposi`s sarcoma-associated h
caaggaaugcauauggacuguua

SEQ ID NO: 190426 - RNA, 14 nt, Human herpesvirus 8 (Kaposi`s sarcoma-associated h
caauugacugugga

SEQ ID NO: 190427 - RNA, 23 nt, Human herpesvirus 8 (Kaposi`s sarcoma-associated h
caauugacuguggagaaucggga

SEQ ID NO: 190428 - RNA, 17 nt, Human herpesvirus 8 (Kaposi`s sarcoma-associated h
caaugugucuguggcua

SEQ ID NO: 190429 - RNA, 18 nt, Human herpesvirus 8 (Kaposi`s sarcoma-associated h
caauguuaauguucucua

SEQ ID NO: 190430 - RNA, 17 nt, Human herpesvirus 8 (Kaposi`s sarcoma-associated h
caaugucaggggaccau

SEQ ID NO: 190431 - RNA, 20 nt, Human herpesvirus 8 (Kaposi`s sarcoma-associated h
caaugucaggggaccauauc

SEQ ID NO: 190432 - RNA, 14 nt, Human herpesvirus 8 (Kaposi`s sarcoma-associated h
caaugucagguucc

SEQ ID NO: 190433 - RNA, 22 nt, Human herpesvirus 8 (Kaposi`s sarcoma-associated h
accagccugaaacgucgcccaa

SEQ ID NO: 190434 - RNA, 15 nt, Human herpesvirus 8 (Kaposi`s sarcoma-associated h
accauguucaggugg

SEQ ID NO: 190435 - RNA, 17 nt, Human herpesvirus 8 (Kaposi`s sarcoma-associated h
accaagcacaacauuaa

SEQ ID NO: 190436 - RNA, 19 nt, Human herpesvirus 8 (Kaposi`s sarcoma-associated h
accaauaacgaagguaugu

SEQ ID NO: 190437 - RNA, 16 nt, Human herpesvirus 8 (Kaposi`s sarcoma-associated h
accacaagggccaagc

SEQ ID NO: 190438 - RNA, 16 nt, Human herpesvirus 8 (Kaposi`s sarcoma-associated h
acauuguuuauuucaa

SEQ ID NO: 190439 - RNA, 23 nt, Human herpesvirus 8 (Kaposi`s sarcoma-associated h
acauuggauuggaucaacuaagg

SEQ ID NO: 190440 - RNA, 15 nt, Human herpesvirus 8 (Kaposi`s sarcoma-associated h
accaacaaguaugaa

SEQ ID NO: 190441 - RNA, 13 nt, Human herpesvirus 8 (Kaposi`s sarcoma-associated h
accaacaauauua

SEQ ID NO: 190442 - RNA, 18 nt, Human herpesvirus 8 (Kaposi`s sarcoma-associated h
acauuuuguaaugaauaa

SEQ ID NO: 190443 - RNA, 17 nt, Human herpesvirus 8 (Kaposi`s sarcoma-associated h
acauuugacaacacgca

SEQ ID NO: 190444 - RNA, 13 nt, Human herpesvirus 8 (Kaposi`s sarcoma-associated h
acauggacagggg

SEQ ID NO: 190445 - RNA, 20 nt, Human herpesvirus 8 (Kaposi`s sarcoma-associated h
acauggucugacaacauaga

SEQ ID NO: 190446 - RNA, 17 nt, Human herpesvirus 8 (Kaposi`s sarcoma-associated h
acauggccggacaccac

SEQ ID NO: 190447 - RNA, 19 nt, Human herpesvirus 8 (Kaposi`s sarcoma-associated h
acagugaguggcuguagca

SEQ ID NO: 190448 - RNA, 16 nt, Human herpesvirus 8 (Kaposi`s sarcoma-associated h
acagugccugcaguaa

SEQ ID NO: 190449 - RNA, 18 nt, Human herpesvirus 8 (Kaposi`s sarcoma-associated h
acaguggaauuacguugu

SEQ ID NO: 190450 - RNA, 13 nt, Human herpesvirus 8 (Kaposi`s sarcoma-associated h
acaguauucucac

SEQ ID NO: 190451 - RNA, 19 nt, Human herpesvirus 8 (Kaposi`s sarcoma-associated h
acauccaaauuaugcagua

SEQ ID NO: 190452 - RNA, 12 nt, Human herpesvirus 8 (Kaposi`s sarcoma-associated h
acauccacagga

SEQ ID NO: 190453 - RNA, 16 nt, Human herpesvirus 8 (Kaposi`s sarcoma-associated h
acaguuuggugcaaag

SEQ ID NO: 190454 - RNA, 12 nt, Human herpesvirus 8 (Kaposi`s sarcoma-associated h
acauagugccuc

SEQ ID NO: 190455 - RNA, 22 nt, Human herpesvirus 8 (Kaposi`s sarcoma-associated h
acauaugucucccuucgugccc

SEQ ID NO: 190456 - RNA, 14 nt, Human herpesvirus 8 (Kaposi`s sarcoma-associated h
acauauugguauau

SEQ ID NO: 190457 - RNA, 15 nt, Human herpesvirus 8 (Kaposi`s sarcoma-associated h
acacauuugucuuua

SEQ ID NO: 190458 - RNA, 17 nt, Human herpesvirus 8 (Kaposi`s sarcoma-associated h
acacauuugucuuuauu

SEQ ID NO: 190459 - RNA, 15 nt, Human herpesvirus 8 (Kaposi`s sarcoma-associated h
acacaucaguguccu

SEQ ID NO: 190460 - RNA, 13 nt, Human herpesvirus 8 (Kaposi`s sarcoma-associated h
acacaucauaaag

SEQ ID NO: 190461 - RNA, 14 nt, Human herpesvirus 8 (Kaposi`s sarcoma-associated h
acacaucauaaagu

SEQ ID NO: 190462 - RNA, 15 nt, Human herpesvirus 8 (Kaposi`s sarcoma-associated h
acagccuuggugcua

SEQ ID NO: 190463 - RNA, 17 nt, Human herpesvirus 8 (Kaposi`s sarcoma-associated h
acacagucacaguucag

SEQ ID NO: 190464 - RNA, 14 nt, Human herpesvirus 8 (Kaposi`s sarcoma-associated h
acacauacaaugcu

SEQ ID NO: 190465 - RNA, 19 nt, Human herpesvirus 8 (Kaposi`s sarcoma-associated h
acacacggaaggcagugga

SEQ ID NO: 190466 - RNA, 15 nt, Human herpesvirus 8 (Kaposi`s sarcoma-associated h
acccacguuuaucaa

SEQ ID NO: 190467 - RNA, 21 nt, Human herpesvirus 8 (Kaposi`s sarcoma-associated h
accauuccucuccgcauuaaa

SEQ ID NO: 190468 - RNA, 21 nt, Human herpesvirus 8 (Kaposi`s sarcoma-associated h
acccacagcccauaguaugua

SEQ ID NO: 190469 - RNA, 15 nt, Human herpesvirus 8 (Kaposi`s sarcoma-associated h
acccacccccuucug

SEQ ID NO: 190470 - RNA, 22 nt, Human herpesvirus 8 (Kaposi`s sarcoma-associated h
accgagugcuuuaaugcggaga

SEQ ID NO: 190471 - RNA, 16 nt, Human herpesvirus 8 (Kaposi`s sarcoma-associated h
accgcgagacaucaga

SEQ ID NO: 190472 - RNA, 19 nt, Human herpesvirus 8 (Kaposi`s sarcoma-associated h
accgcaaagauaagccaau

SEQ ID NO: 190473 - RNA, 22 nt, Human herpesvirus 8 (Kaposi`s sarcoma-associated h
accgcauacguucguaugccgu

SEQ ID NO: 190474 - RNA, 16 nt, Human herpesvirus 8 (Kaposi`s sarcoma-associated h
accguaaucgugcagg

SEQ ID NO: 190475 - RNA, 14 nt, Human herpesvirus 8 (Kaposi`s sarcoma-associated h
accgucuaccugcc

SEQ ID NO: 190476 - RNA, 21 nt, Human herpesvirus 8 (Kaposi`s sarcoma-associated h
accgcuugaccugcaaacuuu

SEQ ID NO: 190477 - RNA, 14 nt, Human herpesvirus 8 (Kaposi`s sarcoma-associated h
accgcuacuguggg

SEQ ID NO: 190478 - RNA, 18 nt, Human herpesvirus 8 (Kaposi`s sarcoma-associated h
accggaguagugcaagug

SEQ ID NO: 190479 - RNA, 17 nt, Human herpesvirus 8 (Kaposi`s sarcoma-associated h
accggcaggcagccaag

SEQ ID NO: 190480 - RNA, 18 nt, Human herpesvirus 8 (Kaposi`s sarcoma-associated h
accgggauuuaaaaccgc

SEQ ID NO: 190481 - RNA, 18 nt, Human herpesvirus 8 (Kaposi`s sarcoma-associated h
accggcuuguuuauaaca

SEQ ID NO: 190482 - RNA, 23 nt, Human herpesvirus 8 (Kaposi`s sarcoma-associated h
accucuaucucgccgguguauga

SEQ ID NO: 190483 - RNA, 20 nt, Human herpesvirus 8 (Kaposi`s sarcoma-associated h
accucuccauagaacuggaa

SEQ ID NO: 190484 - RNA, 14 nt, Human herpesvirus 8 (Kaposi`s sarcoma-associated h
accgugcuacuuac

SEQ ID NO: 190485 - RNA, 15 nt, Human herpesvirus 8 (Kaposi`s sarcoma-associated h
accuaaaaaaugugc

SEQ ID NO: 190486 - RNA, 18 nt, Human herpesvirus 8 (Kaposi`s sarcoma-associated h
accuaaaaaaugugcaug

SEQ ID NO: 190487 - RNA, 19 nt, Human herpesvirus 8 (Kaposi`s sarcoma-associated h
accucaggguaacucugaa

SEQ ID NO: 190488 - RNA, 22 nt, Human herpesvirus 8 (Kaposi`s sarcoma-associated h
accucuccggcgguggcggcca

SEQ ID NO: 190489 - RNA, 23 nt, Human herpesvirus 8 (Kaposi`s sarcoma-associated h
accucuuucaucacuuccaggau

SEQ ID NO: 190490 - RNA, 18 nt, Human herpesvirus 8 (Kaposi`s sarcoma-associated h
accuuucagacguccagu

SEQ ID NO: 190491 - RNA, 14 nt, Human herpesvirus 8 (Kaposi`s sarcoma-associated h
acgaaaaucuggca

SEQ ID NO: 190492 - RNA, 13 nt, Human herpesvirus 8 (Kaposi`s sarcoma-associated h
acgaaagcuaugg

SEQ ID NO: 190493 - RNA, 21 nt, Human herpesvirus 8 (Kaposi`s sarcoma-associated h
acgauuaaaaaccacucacug

SEQ ID NO: 190494 - RNA, 20 nt, Human herpesvirus 8 (Kaposi`s sarcoma-associated h
acgaugggaacuuucaucca

SEQ ID NO: 190495 - RNA, 15 nt, Human herpesvirus 8 (Kaposi`s sarcoma-associated h
acgagguuacugcca

SEQ ID NO: 190496 - RNA, 16 nt, Human herpesvirus 8 (Kaposi`s sarcoma-associated h
acgagguuacugccag

SEQ ID NO: 190497 - RNA, 15 nt, Human herpesvirus 8 (Kaposi`s sarcoma-associated h
acgcggugaaacaga

SEQ ID NO: 190498 - RNA, 23 nt, Human herpesvirus 8 (Kaposi`s sarcoma-associated h
acgcgguuguuuacgcagggugc

SEQ ID NO: 190499 - RNA, 18 nt, Human herpesvirus 8 (Kaposi`s sarcoma-associated h
acgcugucccgugcccag

SEQ ID NO: 190500 - RNA, 23 nt, Human herpesvirus 8 (Kaposi`s sarcoma-associated h
acguagccuuucucuaauaaaca

SEQ ID NO: 190501 - RNA, 20 nt, Human herpesvirus 8 (Kaposi`s sarcoma-associated h
acgguuacuagcaccacuau

SEQ ID NO: 190502 - RNA, 12 nt, Human herpesvirus 8 (Kaposi`s sarcoma-associated h
acgggagacacu

SEQ ID NO: 190503 - RNA, 13 nt, Human herpesvirus 8 (Kaposi`s sarcoma-associated h
acggaaggcagug

SEQ ID NO: 190504 - RNA, 22 nt, Human herpesvirus 8 (Kaposi`s sarcoma-associated h
acggaggauccuaggugggugu

SEQ ID NO: 190505 - RNA, 17 nt, Human herpesvirus 8 (Kaposi`s sarcoma-associated h
acggagaccuacacugc

SEQ ID NO: 190506 - RNA, 18 nt, Human herpesvirus 8 (Kaposi`s sarcoma-associated h
acggagaccuacacugca

SEQ ID NO: 190507 - RNA, 15 nt, Human herpesvirus 8 (Kaposi`s sarcoma-associated h
acggaucaugcucuc

SEQ ID NO: 190508 - RNA, 17 nt, Human herpesvirus 8 (Kaposi`s sarcoma-associated h
agauuauaaugggucua

SEQ ID NO: 190509 - RNA, 22 nt, Human herpesvirus 8 (Kaposi`s sarcoma-associated h
agauuauaaugggucuacuucg

SEQ ID NO: 190510 - RNA, 14 nt, Human herpesvirus 8 (Kaposi`s sarcoma-associated h
agauugacuggaac

SEQ ID NO: 190511 - RNA, 19 nt, Human herpesvirus 8 (Kaposi`s sarcoma-associated h
agauugacuggaacgccau

SEQ ID NO: 190512 - RNA, 15 nt, Human herpesvirus 8 (Kaposi`s sarcoma-associated h
agauuaacugucuac

SEQ ID NO: 190513 - RNA, 21 nt, Human herpesvirus 8 (Kaposi`s sarcoma-associated h
agauguuagauagacccggcg

SEQ ID NO: 190514 - RNA, 12 nt, Human herpesvirus 8 (Kaposi`s sarcoma-associated h
agcaaagcacau

SEQ ID NO: 190515 - RNA, 20 nt, Human herpesvirus 8 (Kaposi`s sarcoma-associated h
agcaaagugucucacccaau

SEQ ID NO: 190516 - RNA, 15 nt, Human herpesvirus 8 (Kaposi`s sarcoma-associated h
agauuuacaaauggu

SEQ ID NO: 190517 - RNA, 17 nt, Human herpesvirus 8 (Kaposi`s sarcoma-associated h
agauuuaguacguggua

SEQ ID NO: 190518 - RNA, 15 nt, Human herpesvirus 8 (Kaposi`s sarcoma-associated h
agauugccaccguuu

SEQ ID NO: 190519 - RNA, 20 nt, Human herpesvirus 8 (Kaposi`s sarcoma-associated h
agauuggaggcacauaagga

SEQ ID NO: 190520 - RNA, 17 nt, Human herpesvirus 8 (Kaposi`s sarcoma-associated h
agauugguguccagaca

SEQ ID NO: 190521 - RNA, 13 nt, Human herpesvirus 8 (Kaposi`s sarcoma-associated h
agauuggguuggg

SEQ ID NO: 190522 - RNA, 19 nt, Human herpesvirus 8 (Kaposi`s sarcoma-associated h
agcacuccuguuagcacau

SEQ ID NO: 190523 - RNA, 20 nt, Human herpesvirus 8 (Kaposi`s sarcoma-associated h
agcacgugaaaucucgccug

SEQ ID NO: 190524 - RNA, 18 nt, Human herpesvirus 8 (Kaposi`s sarcoma-associated h
agcaccuuggaacaaucu

SEQ ID NO: 190525 - RNA, 14 nt, Human herpesvirus 8 (Kaposi`s sarcoma-associated h
agcacgaagacaug

SEQ ID NO: 190526 - RNA, 15 nt, Human herpesvirus 8 (Kaposi`s sarcoma-associated h
agcacgaagacaugg

SEQ ID NO: 190527 - RNA, 21 nt, Human herpesvirus 8 (Kaposi`s sarcoma-associated h
agcaacugcgucauguaccug

SEQ ID NO: 190528 - RNA, 21 nt, Human herpesvirus 8 (Kaposi`s sarcoma-associated h
agcaacacccagcuagcagug

SEQ ID NO: 190529 - RNA, 17 nt, Human herpesvirus 8 (Kaposi`s sarcoma-associated h
agcaagacgccagacag

SEQ ID NO: 190530 - RNA, 21 nt, Human herpesvirus 8 (Kaposi`s sarcoma-associated h
agcacagcgcucaauuaucua

SEQ ID NO: 190531 - RNA, 17 nt, Human herpesvirus 8 (Kaposi`s sarcoma-associated h
agcacacacgaugaaga

SEQ ID NO: 190532 - RNA, 15 nt, Human herpesvirus 8 (Kaposi`s sarcoma-associated h
agcaauaaagacaaa

SEQ ID NO: 190533 - RNA, 13 nt, Human herpesvirus 8 (Kaposi`s sarcoma-associated h
agagacacuaucu

SEQ ID NO: 190534 - RNA, 19 nt, Human herpesvirus 8 (Kaposi`s sarcoma-associated h
agagaccguacauccucug

SEQ ID NO: 190535 - RNA, 23 nt, Human herpesvirus 8 (Kaposi`s sarcoma-associated h
agagaauggagaggagaccccca

SEQ ID NO: 190536 - RNA, 22 nt, Human herpesvirus 8 (Kaposi`s sarcoma-associated h
agacuuugugugguaagaagga

SEQ ID NO: 190537 - RNA, 14 nt, Human herpesvirus 8 (Kaposi`s sarcoma-associated h
agacacuaucucgu

SEQ ID NO: 190538 - RNA, 21 nt, Human herpesvirus 8 (Kaposi`s sarcoma-associated h
agacgugcccagacaccaaag

SEQ ID NO: 190539 - RNA, 15 nt, Human herpesvirus 8 (Kaposi`s sarcoma-associated h
agacguugacugcca

SEQ ID NO: 190540 - RNA, 14 nt, Human herpesvirus 8 (Kaposi`s sarcoma-associated h
agacuggcucugau

SEQ ID NO: 190541 - RNA, 16 nt, Human herpesvirus 8 (Kaposi`s sarcoma-associated h
agacuccaguuuaaaa

SEQ ID NO: 190542 - RNA, 16 nt, Human herpesvirus 8 (Kaposi`s sarcoma-associated h
agacuaugggaaugug

SEQ ID NO: 190543 - RNA, 18 nt, Human herpesvirus 8 (Kaposi`s sarcoma-associated h
agacuaugggaaugugcc

SEQ ID NO: 190544 - RNA, 20 nt, Human herpesvirus 8 (Kaposi`s sarcoma-associated h
agacuaugggaaugugccua

SEQ ID NO: 190545 - RNA, 18 nt, Human herpesvirus 8 (Kaposi`s sarcoma-associated h
agacuaucagguagcaaa

SEQ ID NO: 190546 - RNA, 13 nt, Human herpesvirus 8 (Kaposi`s sarcoma-associated h
agagggaucccag

SEQ ID NO: 190547 - RNA, 16 nt, Human herpesvirus 8 (Kaposi`s sarcoma-associated h
agaguagaggguugca

SEQ ID NO: 190548 - RNA, 18 nt, Human herpesvirus 8 (Kaposi`s sarcoma-associated h
agaaacaaagcacuggcu

SEQ ID NO: 190549 - RNA, 17 nt, Human herpesvirus 8 (Kaposi`s sarcoma-associated h
agaaacacugugaggca

SEQ ID NO: 190550 - RNA, 20 nt, Human herpesvirus 8 (Kaposi`s sarcoma-associated h
acuuuauuauagaugcuuua

SEQ ID NO: 190551 - RNA, 19 nt, Human herpesvirus 8 (Kaposi`s sarcoma-associated h
acuuugcccuaaaugugac

SEQ ID NO: 190552 - RNA, 21 nt, Human herpesvirus 8 (Kaposi`s sarcoma-associated h
acuuugcgugucuagacaaua

SEQ ID NO: 190553 - RNA, 18 nt, Human herpesvirus 8 (Kaposi`s sarcoma-associated h
agaacugucgagacaugu

SEQ ID NO: 190554 - RNA, 21 nt, Human herpesvirus 8 (Kaposi`s sarcoma-associated h
agaacugucgagacaugucac

SEQ ID NO: 190555 - RNA, 18 nt, Human herpesvirus 8 (Kaposi`s sarcoma-associated h
agaauuagaaacaaagca

SEQ ID NO: 190556 - RNA, 15 nt, Human herpesvirus 8 (Kaposi`s sarcoma-associated h
agacaauaugcccaa

SEQ ID NO: 190557 - RNA, 21 nt, Human herpesvirus 8 (Kaposi`s sarcoma-associated h
agacaacuaauauuaaccaua

SEQ ID NO: 190558 - RNA, 13 nt, Human herpesvirus 8 (Kaposi`s sarcoma-associated h
agacaccaaagac

SEQ ID NO: 190559 - RNA, 14 nt, Human herpesvirus 8 (Kaposi`s sarcoma-associated h
agacaccaaagaca

SEQ ID NO: 190560 - RNA, 20 nt, Human herpesvirus 8 (Kaposi`s sarcoma-associated h
agaaccgaugguuuccuagc

SEQ ID NO: 190561 - RNA, 19 nt, Human herpesvirus 8 (Kaposi`s sarcoma-associated h
agaaccaugccagacuuug

SEQ ID NO: 190562 - RNA, 19 nt, Human herpesvirus 8 (Kaposi`s sarcoma-associated h
agaaacucccccaaccucu

SEQ ID NO: 190563 - RNA, 14 nt, Human herpesvirus 8 (Kaposi`s sarcoma-associated h
acugagaugucuuu

SEQ ID NO: 190564 - RNA, 13 nt, Human herpesvirus 8 (Kaposi`s sarcoma-associated h
acuguuaacccaa

SEQ ID NO: 190565 - RNA, 18 nt, Human herpesvirus 8 (Kaposi`s sarcoma-associated h
acuguuaacccaauguca

SEQ ID NO: 190566 - RNA, 23 nt, Human herpesvirus 8 (Kaposi`s sarcoma-associated h
acuucuagcauaugcugccaaga

SEQ ID NO: 190567 - RNA, 21 nt, Human herpesvirus 8 (Kaposi`s sarcoma-associated h
acuucugggccacaaaacugc

SEQ ID NO: 190568 - RNA, 22 nt, Human herpesvirus 8 (Kaposi`s sarcoma-associated h
acuucugggccacaaaacugcc

SEQ ID NO: 190569 - RNA, 22 nt, Human herpesvirus 8 (Kaposi`s sarcoma-associated h
acuuaacuguuuacugcuguua

SEQ ID NO: 190570 - RNA, 16 nt, Human herpesvirus 8 (Kaposi`s sarcoma-associated h
acgucuguaaaacacu

SEQ ID NO: 190571 - RNA, 13 nt, Human herpesvirus 8 (Kaposi`s sarcoma-associated h
acgucguaagcca

SEQ ID NO: 190572 - RNA, 21 nt, Human herpesvirus 8 (Kaposi`s sarcoma-associated h
acgucccucuuggcuguuaca

SEQ ID NO: 190573 - RNA, 22 nt, Human herpesvirus 8 (Kaposi`s sarcoma-associated h
acgucccucuuggcuguuacaa

SEQ ID NO: 190574 - RNA, 16 nt, Human herpesvirus 8 (Kaposi`s sarcoma-associated h
acuccuguuagcacau

SEQ ID NO: 190575 - RNA, 17 nt, Human herpesvirus 8 (Kaposi`s sarcoma-associated h
acuccuguuagcacauu

SEQ ID NO: 190576 - RNA, 19 nt, Human herpesvirus 8 (Kaposi`s sarcoma-associated h
acucccucccauaacaaua

SEQ ID NO: 190577 - RNA, 15 nt, Human herpesvirus 8 (Kaposi`s sarcoma-associated h
acucccccaaccucu

SEQ ID NO: 190578 - RNA, 17 nt, Human herpesvirus 8 (Kaposi`s sarcoma-associated h
acaacauagacaugccc

SEQ ID NO: 190579 - RNA, 17 nt, Human herpesvirus 8 (Kaposi`s sarcoma-associated h
acaacauuaaacacaua

SEQ ID NO: 190580 - RNA, 15 nt, Human herpesvirus 8 (Kaposi`s sarcoma-associated h
acaaggaaugcauau

SEQ ID NO: 190581 - RNA, 20 nt, Human herpesvirus 8 (Kaposi`s sarcoma-associated h
acaagcgcugacgaaagcua

SEQ ID NO: 190582 - RNA, 14 nt, Human herpesvirus 8 (Kaposi`s sarcoma-associated h
acaaacaagacaca

SEQ ID NO: 190583 - RNA, 20 nt, Human herpesvirus 8 (Kaposi`s sarcoma-associated h
acaaacaagacacacccgcc

SEQ ID NO: 190584 - RNA, 14 nt, Human herpesvirus 8 (Kaposi`s sarcoma-associated h
acaaaauauacagg

SEQ ID NO: 190585 - RNA, 13 nt, Human herpesvirus 8 (Kaposi`s sarcoma-associated h
acaacagacuuuu

SEQ ID NO: 190586 - RNA, 18 nt, Human herpesvirus 8 (Kaposi`s sarcoma-associated h
acaaacgccccucuuggc

SEQ ID NO: 190587 - RNA, 19 nt, Human herpesvirus 8 (Kaposi`s sarcoma-associated h
acaaacgccccucuuggcu

SEQ ID NO: 190588 - RNA, 21 nt, Human herpesvirus 8 (Kaposi`s sarcoma-associated h
acaauaaagauuaacugucua

SEQ ID NO: 190589 - RNA, 18 nt, Human herpesvirus 8 (Kaposi`s sarcoma-associated h
acaauaaagcugagccac

SEQ ID NO: 190590 - RNA, 23 nt, Human herpesvirus 8 (Kaposi`s sarcoma-associated h
acaauaugcccaacuucaucaca

SEQ ID NO: 190591 - RNA, 16 nt, Human herpesvirus 8 (Kaposi`s sarcoma-associated h
acaagucuucuuguca

SEQ ID NO: 190592 - RNA, 13 nt, Human herpesvirus 8 (Kaposi`s sarcoma-associated h
acaaguaccacca

SEQ ID NO: 190593 - RNA, 13 nt, Human herpesvirus 8 (Kaposi`s sarcoma-associated h
acaaugugucugu

SEQ ID NO: 190594 - RNA, 13 nt, Human herpesvirus 8 (Kaposi`s sarcoma-associated h
acaauuucauuaa

SEQ ID NO: 190595 - RNA, 19 nt, Human herpesvirus 8 (Kaposi`s sarcoma-associated h
acaauuucauuaacaaaca

SEQ ID NO: 190596 - RNA, 23 nt, Human herpesvirus 8 (Kaposi`s sarcoma-associated h
acaauuucauuaacaaacaaggu

SEQ ID NO: 190597 - RNA, 15 nt, Human herpesvirus 8 (Kaposi`s sarcoma-associated h
acacaacaccagacc

SEQ ID NO: 190598 - RNA, 17 nt, Human herpesvirus 8 (Kaposi`s sarcoma-associated h
aauguuuuggucucuuu

SEQ ID NO: 190599 - RNA, 14 nt, Human herpesvirus 8 (Kaposi`s sarcoma-associated h
aaucuggcauguau

SEQ ID NO: 190600 - RNA, 17 nt, Human herpesvirus 8 (Kaposi`s sarcoma-associated h
aaugaaggacauaccua

SEQ ID NO: 190601 - RNA, 19 nt, Human herpesvirus 8 (Kaposi`s sarcoma-associated h
aaugaauaacuuuauuaca

SEQ ID NO: 190602 - RNA, 17 nt, Human herpesvirus 8 (Kaposi`s sarcoma-associated h
aaugaaauuguggcacu

SEQ ID NO: 190603 - RNA, 13 nt, Human herpesvirus 8 (Kaposi`s sarcoma-associated h
aauugacugugga

SEQ ID NO: 190604 - RNA, 14 nt, Human herpesvirus 8 (Kaposi`s sarcoma-associated h
aauuucauuaacaa

SEQ ID NO: 190605 - RNA, 17 nt, Human herpesvirus 8 (Kaposi`s sarcoma-associated h
aauuuccugcugucuau

SEQ ID NO: 190606 - RNA, 13 nt, Human herpesvirus 8 (Kaposi`s sarcoma-associated h
acaaaacugccaa

SEQ ID NO: 190607 - RNA, 20 nt, Human herpesvirus 8 (Kaposi`s sarcoma-associated h
aauauucucuauaacauaau

SEQ ID NO: 190608 - RNA, 12 nt, Human herpesvirus 8 (Kaposi`s sarcoma-associated h
aauacaaaaaca

SEQ ID NO: 190609 - RNA, 19 nt, Human herpesvirus 8 (Kaposi`s sarcoma-associated h
aauaucucauuaaaccuac

SEQ ID NO: 190610 - RNA, 12 nt, Human herpesvirus 8 (Kaposi`s sarcoma-associated h
aauaacuuuauu

SEQ ID NO: 190611 - RNA, 17 nt, Human herpesvirus 8 (Kaposi`s sarcoma-associated h
aauaaagccgagccaca

SEQ ID NO: 190612 - RNA, 19 nt, Human herpesvirus 8 (Kaposi`s sarcoma-associated h
aauaaagccgagccacaaa

SEQ ID NO: 190613 - RNA, 15 nt, Human herpesvirus 8 (Kaposi`s sarcoma-associated h
aauaaagccaaccua

SEQ ID NO: 190614 - RNA, 17 nt, Human herpesvirus 8 (Kaposi`s sarcoma-associated h
aauaaagccaaccuaug

SEQ ID NO: 190615 - RNA, 17 nt, Human herpesvirus 8 (Kaposi`s sarcoma-associated h
aauaaagcugagccaca

SEQ ID NO: 190616 - RNA, 19 nt, Human herpesvirus 8 (Kaposi`s sarcoma-associated h
aauaaagcugagccacaaa

SEQ ID NO: 190617 - RNA, 14 nt, Human herpesvirus 8 (Kaposi`s sarcoma-associated h
aauaaagucauuaa

SEQ ID NO: 190618 - RNA, 15 nt, Human herpesvirus 8 (Kaposi`s sarcoma-associated h
aaucacgguugcacc

SEQ ID NO: 190619 - RNA, 15 nt, Human herpesvirus 8 (Kaposi`s sarcoma-associated h
aaucaguguccagcc

SEQ ID NO: 190620 - RNA, 22 nt, Human herpesvirus 8 (Kaposi`s sarcoma-associated h
aaguaagucguccgacaugugc

SEQ ID NO: 190621 - RNA, 14 nt, Human herpesvirus 8 (Kaposi`s sarcoma-associated h
aauaaagagaccaa

SEQ ID NO: 190622 - RNA, 18 nt, Human herpesvirus 8 (Kaposi`s sarcoma-associated h
aaguaugucgugggaaau

SEQ ID NO: 190623 - RNA, 15 nt, Human herpesvirus 8 (Kaposi`s sarcoma-associated h
aagcacauuuugcac

SEQ ID NO: 190624 - RNA, 17 nt, Human herpesvirus 8 (Kaposi`s sarcoma-associated h
aagcacauuuugcacgc

SEQ ID NO: 190625 - RNA, 15 nt, Human herpesvirus 8 (Kaposi`s sarcoma-associated h
aagcacaacauuaaa

SEQ ID NO: 190626 - RNA, 16 nt, Human herpesvirus 8 (Kaposi`s sarcoma-associated h
aaggucaauacauugu

SEQ ID NO: 190627 - RNA, 14 nt, Human herpesvirus 8 (Kaposi`s sarcoma-associated h
aagcaaaacacaaa

SEQ ID NO: 190628 - RNA, 14 nt, Human herpesvirus 8 (Kaposi`s sarcoma-associated h
aacccucagugugc

SEQ ID NO: 190629 - RNA, 14 nt, Human herpesvirus 8 (Kaposi`s sarcoma-associated h
aacccugccaaaug

SEQ ID NO: 190630 - RNA, 18 nt, Human herpesvirus 8 (Kaposi`s sarcoma-associated h
aaccggcuuguacaguga

SEQ ID NO: 190631 - RNA, 15 nt, Human herpesvirus 8 (Kaposi`s sarcoma-associated h
aacccgcuccgccac

SEQ ID NO: 190632 - RNA, 15 nt, Human herpesvirus 8 (Kaposi`s sarcoma-associated h
aacccggauuugccc

SEQ ID NO: 190633 - RNA, 23 nt, Human herpesvirus 8 (Kaposi`s sarcoma-associated h
aacaggaugcccgcucaugugcg

SEQ ID NO: 190634 - RNA, 19 nt, Human herpesvirus 8 (Kaposi`s sarcoma-associated h
aacaguuuggugcaaagug

SEQ ID NO: 190635 - RNA, 18 nt, Human herpesvirus 8 (Kaposi`s sarcoma-associated h
aacugucgagacauguca

SEQ ID NO: 190636 - RNA, 21 nt, Human herpesvirus 8 (Kaposi`s sarcoma-associated h
aacugucgagacaugucacca

SEQ ID NO: 190637 - RNA, 12 nt, Human herpesvirus 8 (Kaposi`s sarcoma-associated h
aagauaagccaa

SEQ ID NO: 190638 - RNA, 14 nt, Human herpesvirus 8 (Kaposi`s sarcoma-associated h
aagaguagaggguu

SEQ ID NO: 190639 - RNA, 13 nt, Human herpesvirus 8 (Kaposi`s sarcoma-associated h
aagagggccaguu

SEQ ID NO: 190640 - RNA, 19 nt, Human herpesvirus 8 (Kaposi`s sarcoma-associated h
aagaccgagcguauucuca

SEQ ID NO: 190641 - RNA, 20 nt, Human herpesvirus 8 (Kaposi`s sarcoma-associated h
aagaccgagcguauucucag

SEQ ID NO: 190642 - RNA, 15 nt, Human herpesvirus 8 (Kaposi`s sarcoma-associated h
aagagcacacugugu

SEQ ID NO: 190643 - RNA, 16 nt, Human herpesvirus 8 (Kaposi`s sarcoma-associated h
aaauaaagucugagug

SEQ ID NO: 190644 - RNA, 18 nt, Human herpesvirus 8 (Kaposi`s sarcoma-associated h
aaauaugucgcaggccga

SEQ ID NO: 190645 - RNA, 18 nt, Human herpesvirus 8 (Kaposi`s sarcoma-associated h
aaaguauuuaaagcuggg

SEQ ID NO: 190646 - RNA, 16 nt, Human herpesvirus 8 (Kaposi`s sarcoma-associated h
aaagucuggcccucac

SEQ ID NO: 190647 - RNA, 14 nt, Human herpesvirus 8 (Kaposi`s sarcoma-associated h
aaacucacugagug

SEQ ID NO: 190648 - RNA, 17 nt, Human herpesvirus 8 (Kaposi`s sarcoma-associated h
aaaggggacgugucauu

SEQ ID NO: 190649 - RNA, 16 nt, Human herpesvirus 8 (Kaposi`s sarcoma-associated h
aaaggugacuuaucua

SEQ ID NO: 190650 - RNA, 16 nt, Human herpesvirus 8 (Kaposi`s sarcoma-associated h
aaacgccacaggcggc

SEQ ID NO: 190651 - RNA, 15 nt, Human herpesvirus 8 (Kaposi`s sarcoma-associated h
aaacggccaaagcaa

SEQ ID NO: 190652 - RNA, 13 nt, Human herpesvirus 8 (Kaposi`s sarcoma-associated h
aaacguuuuuccc

SEQ ID NO: 190653 - RNA, 15 nt, Human herpesvirus 8 (Kaposi`s sarcoma-associated h
aaaccuuaauuggau

SEQ ID NO: 190654 - RNA, 13 nt, Human herpesvirus 8 (Kaposi`s sarcoma-associated h
aaaugggaacaau

SEQ ID NO: 190655 - RNA, 12 nt, Human herpesvirus 8 (Kaposi`s sarcoma-associated h
aaaugguccggg

SEQ ID NO: 190656 - RNA, 12 nt, Human herpesvirus 8 (Kaposi`s sarcoma-associated h
aaauuacugcac

SEQ ID NO: 190657 - RNA, 17 nt, Human herpesvirus 8 (Kaposi`s sarcoma-associated h
aacaagcuaccugcaaa

SEQ ID NO: 190658 - RNA, 15 nt, Human herpesvirus 8 (Kaposi`s sarcoma-associated h
aacacguacaucuac

SEQ ID NO: 190659 - RNA, 18 nt, Human herpesvirus 8 (Kaposi`s sarcoma-associated h
aacacguaccugaccuga

SEQ ID NO: 190660 - RNA, 18 nt, Human herpesvirus 8 (Kaposi`s sarcoma-associated h
aacacauuaagagugcca

SEQ ID NO: 190661 - RNA, 17 nt, Human herpesvirus 8 (Kaposi`s sarcoma-associated h
aacacccagcuagcagu

SEQ ID NO: 190662 - RNA, 16 nt, Human herpesvirus 8 (Kaposi`s sarcoma-associated h
aacaaucucuuacuuc

SEQ ID NO: 190663 - RNA, 21 nt, Human herpesvirus 8 (Kaposi`s sarcoma-associated h
aacaaguagcuguugacuuuc

SEQ ID NO: 190664 - RNA, 22 nt, Human herpesvirus 8 (Kaposi`s sarcoma-associated h
aacaaguagcuguugacuuuca

SEQ ID NO: 190665 - RNA, 13 nt, Human herpesvirus 8 (Kaposi`s sarcoma-associated h
uaggaauacgcuu

SEQ ID NO: 190666 - RNA, 15 nt, Human herpesvirus 8 (Kaposi`s sarcoma-associated h
uaggcaacaugacau

SEQ ID NO: 190667 - RNA, 24 nt, Human herpesvirus 8 (Kaposi`s sarcoma-associated h
uaggcacccggaacuaucguugcu

SEQ ID NO: 190668 - RNA, 18 nt, Human herpesvirus 8 (Kaposi`s sarcoma-associated h
uaggccaauacugcccaa

SEQ ID NO: 190669 - RNA, 18 nt, Human herpesvirus 8 (Kaposi`s sarcoma-associated h
uaggcgaagagaccgcau

SEQ ID NO: 190670 - RNA, 22 nt, Human herpesvirus 8 (Kaposi`s sarcoma-associated h
uaggcgaagagaccgcaucucu

SEQ ID NO: 190671 - RNA, 12 nt, Human herpesvirus 8 (Kaposi`s sarcoma-associated h
uaggaccuuucu

SEQ ID NO: 190672 - RNA, 16 nt, Human herpesvirus 8 (Kaposi`s sarcoma-associated h
uaggauucgugcagcc

SEQ ID NO: 190673 - RNA, 19 nt, Human herpesvirus 8 (Kaposi`s sarcoma-associated h
uaggaggaagagcacuguu

SEQ ID NO: 190674 - RNA, 19 nt, Human herpesvirus 8 (Kaposi`s sarcoma-associated h
uagguagauugacuggaac

SEQ ID NO: 190675 - RNA, 19 nt, Human herpesvirus 8 (Kaposi`s sarcoma-associated h
uaguugugcuuccugauga

SEQ ID NO: 190676 - RNA, 20 nt, Human herpesvirus 8 (Kaposi`s sarcoma-associated h
uagugcuccgauaugaacga

SEQ ID NO: 190677 - RNA, 17 nt, Human herpesvirus 8 (Kaposi`s sarcoma-associated h
uaggugggugugcauuu

SEQ ID NO: 190678 - RNA, 20 nt, Human herpesvirus 8 (Kaposi`s sarcoma-associated h
uagguuguuauuaucaaaga

SEQ ID NO: 190679 - RNA, 18 nt, Human herpesvirus 8 (Kaposi`s sarcoma-associated h
uagcauccuaucgcacag

SEQ ID NO: 190680 - RNA, 15 nt, Human herpesvirus 8 (Kaposi`s sarcoma-associated h
uagcagauauaaaca

SEQ ID NO: 190681 - RNA, 21 nt, Human herpesvirus 8 (Kaposi`s sarcoma-associated h
uagccauccauuauagcacac

SEQ ID NO: 190682 - RNA, 18 nt, Human herpesvirus 8 (Kaposi`s sarcoma-associated h
uagccggugaaacagaua

SEQ ID NO: 190683 - RNA, 16 nt, Human herpesvirus 8 (Kaposi`s sarcoma-associated h
uagauggcacagaguc

SEQ ID NO: 190684 - RNA, 13 nt, Human herpesvirus 8 (Kaposi`s sarcoma-associated h
uagauugacugga

SEQ ID NO: 190685 - RNA, 14 nt, Human herpesvirus 8 (Kaposi`s sarcoma-associated h
uagauugacuggaa

SEQ ID NO: 190686 - RNA, 18 nt, Human herpesvirus 8 (Kaposi`s sarcoma-associated h
uagauuuaguacguggua

SEQ ID NO: 190687 - RNA, 15 nt, Human herpesvirus 8 (Kaposi`s sarcoma-associated h
uagaugaaacauucg

SEQ ID NO: 190688 - RNA, 20 nt, Human herpesvirus 8 (Kaposi`s sarcoma-associated h
uagaguccaaaacacgcacc

SEQ ID NO: 190689 - RNA, 16 nt, Human herpesvirus 8 (Kaposi`s sarcoma-associated h
uacucccccuccucag

SEQ ID NO: 190690 - RNA, 16 nt, Human herpesvirus 8 (Kaposi`s sarcoma-associated h
uacuuaacgugucuga

SEQ ID NO: 190691 - RNA, 16 nt, Human herpesvirus 8 (Kaposi`s sarcoma-associated h
uagagcccgcugcuau

SEQ ID NO: 190692 - RNA, 15 nt, Human herpesvirus 8 (Kaposi`s sarcoma-associated h
uagagcgacugcugg

SEQ ID NO: 190693 - RNA, 22 nt, Human herpesvirus 8 (Kaposi`s sarcoma-associated h
uagacgcaggcgccuaugacua

SEQ ID NO: 190694 - RNA, 19 nt, Human herpesvirus 8 (Kaposi`s sarcoma-associated h
uagacaguuaaucuuuauu

SEQ ID NO: 190695 - RNA, 15 nt, Human herpesvirus 8 (Kaposi`s sarcoma-associated h
uagaccuacaucucc

SEQ ID NO: 190696 - RNA, 19 nt, Human herpesvirus 8 (Kaposi`s sarcoma-associated h
uaccauguugcgcaauuca

SEQ ID NO: 190697 - RNA, 21 nt, Human herpesvirus 8 (Kaposi`s sarcoma-associated h
uaccauggcaaaaaacacucc

SEQ ID NO: 190698 - RNA, 19 nt, Human herpesvirus 8 (Kaposi`s sarcoma-associated h
uacccaauguuaauguucu

SEQ ID NO: 190699 - RNA, 15 nt, Human herpesvirus 8 (Kaposi`s sarcoma-associated h
uaccgaccaauacaa

SEQ ID NO: 190700 - RNA, 17 nt, Human herpesvirus 8 (Kaposi`s sarcoma-associated h
uacccugauuagcacug

SEQ ID NO: 190701 - RNA, 18 nt, Human herpesvirus 8 (Kaposi`s sarcoma-associated h
uacccugauuagcacugu

SEQ ID NO: 190702 - RNA, 19 nt, Human herpesvirus 8 (Kaposi`s sarcoma-associated h
uacccugauuagcacugua

SEQ ID NO: 190703 - RNA, 22 nt, Human herpesvirus 8 (Kaposi`s sarcoma-associated h
uacccugccguuguucuuugcg

SEQ ID NO: 190704 - RNA, 18 nt, Human herpesvirus 8 (Kaposi`s sarcoma-associated h
uacauuugacaacacgca

SEQ ID NO: 190705 - RNA, 13 nt, Human herpesvirus 8 (Kaposi`s sarcoma-associated h
uaccaccaagaag

SEQ ID NO: 190706 - RNA, 19 nt, Human herpesvirus 8 (Kaposi`s sarcoma-associated h
uaccaauacuauuauaaca

SEQ ID NO: 190707 - RNA, 14 nt, Human herpesvirus 8 (Kaposi`s sarcoma-associated h
uacagaaaaccaua

SEQ ID NO: 190708 - RNA, 16 nt, Human herpesvirus 8 (Kaposi`s sarcoma-associated h
uacacuuuacugugua

SEQ ID NO: 190709 - RNA, 21 nt, Human herpesvirus 8 (Kaposi`s sarcoma-associated h
uacacucauauaucagcaagc

SEQ ID NO: 190710 - RNA, 20 nt, Human herpesvirus 8 (Kaposi`s sarcoma-associated h
uaccguaccggcaucugcaa

SEQ ID NO: 190711 - RNA, 19 nt, Human herpesvirus 8 (Kaposi`s sarcoma-associated h
uaccgcccuccguuuugca

SEQ ID NO: 190712 - RNA, 18 nt, Human herpesvirus 8 (Kaposi`s sarcoma-associated h
uacguuguagaucuggau

SEQ ID NO: 190713 - RNA, 23 nt, Human herpesvirus 8 (Kaposi`s sarcoma-associated h
uacuaagagaacagcacauaugu

SEQ ID NO: 190714 - RNA, 16 nt, Human herpesvirus 8 (Kaposi`s sarcoma-associated h
uacuaauguaaccuaa

SEQ ID NO: 190715 - RNA, 11 nt, Human herpesvirus 8 (Kaposi`s sarcoma-associated h
uacuacaggua

SEQ ID NO: 190716 - RNA, 12 nt, Human herpesvirus 8 (Kaposi`s sarcoma-associated h
uacuacagguau

SEQ ID NO: 190717 - RNA, 17 nt, Human herpesvirus 8 (Kaposi`s sarcoma-associated h
uacuacagguauacuca

SEQ ID NO: 190718 - RNA, 23 nt, Human herpesvirus 8 (Kaposi`s sarcoma-associated h
uacuauaaacagccuuggugcua

SEQ ID NO: 190719 - RNA, 21 nt, Human herpesvirus 8 (Kaposi`s sarcoma-associated h
aacaaggucaauacauuguga

SEQ ID NO: 190720 - RNA, 19 nt, Human herpesvirus 8 (Kaposi`s sarcoma-associated h
uaacauuuuguaaugaaua

SEQ ID NO: 190721 - RNA, 18 nt, Human herpesvirus 8 (Kaposi`s sarcoma-associated h
uaaccauagugugcguuu

SEQ ID NO: 190722 - RNA, 21 nt, Human herpesvirus 8 (Kaposi`s sarcoma-associated h
uaacccgcuccgccacgcagc

SEQ ID NO: 190723 - RNA, 19 nt, Human herpesvirus 8 (Kaposi`s sarcoma-associated h
uaaccgagcucugcugccu

SEQ ID NO: 190724 - RNA, 19 nt, Human herpesvirus 8 (Kaposi`s sarcoma-associated h
uaaccuaaaaaaugugcau

SEQ ID NO: 190725 - RNA, 20 nt, Human herpesvirus 8 (Kaposi`s sarcoma-associated h
uaaccuguccaugucgcaca

SEQ ID NO: 190726 - RNA, 13 nt, Human herpesvirus 8 (Kaposi`s sarcoma-associated h
uaauauacuuugc

SEQ ID NO: 190727 - RNA, 22 nt, Human herpesvirus 8 (Kaposi`s sarcoma-associated h
uaauauacuuugcgugucuaga

SEQ ID NO: 190728 - RNA, 22 nt, Human herpesvirus 8 (Kaposi`s sarcoma-associated h
uacaacagacuuuucccauuuc

SEQ ID NO: 190729 - RNA, 16 nt, Human herpesvirus 8 (Kaposi`s sarcoma-associated h
uacacccucacguguu

SEQ ID NO: 190730 - RNA, 18 nt, Human herpesvirus 8 (Kaposi`s sarcoma-associated h
uacaaacaacauaaacau

SEQ ID NO: 190731 - RNA, 23 nt, Human herpesvirus 8 (Kaposi`s sarcoma-associated h
uaauuuuugguccguagaaugua

SEQ ID NO: 190732 - RNA, 12 nt, Human herpesvirus 8 (Kaposi`s sarcoma-associated h
uacaaaaacaca

SEQ ID NO: 190733 - RNA, 13 nt, Human herpesvirus 8 (Kaposi`s sarcoma-associated h
uacaaaaacacaa

SEQ ID NO: 190734 - RNA, 23 nt, Human herpesvirus 8 (Kaposi`s sarcoma-associated h
guuugaaaaaaaauaaacauacg

SEQ ID NO: 190735 - RNA, 15 nt, Human herpesvirus 8 (Kaposi`s sarcoma-associated h
guuuggcagucacuu

SEQ ID NO: 190736 - RNA, 20 nt, Human herpesvirus 8 (Kaposi`s sarcoma-associated h
guuuggcccacguggugcug

SEQ ID NO: 190737 - RNA, 19 nt, Human herpesvirus 8 (Kaposi`s sarcoma-associated h
guuuggaguggaguggugu

SEQ ID NO: 190738 - RNA, 21 nt, Human herpesvirus 8 (Kaposi`s sarcoma-associated h
guuuuccauccguguccucua

SEQ ID NO: 190739 - RNA, 11 nt, Human herpesvirus 8 (Kaposi`s sarcoma-associated h
guuuugcacua

SEQ ID NO: 190740 - RNA, 14 nt, Human herpesvirus 8 (Kaposi`s sarcoma-associated h
guuuuaucuucaag

SEQ ID NO: 190741 - RNA, 14 nt, Human herpesvirus 8 (Kaposi`s sarcoma-associated h
guuuuuugccaugg

SEQ ID NO: 190742 - RNA, 15 nt, Human herpesvirus 8 (Kaposi`s sarcoma-associated h
guuuuugaacaugug

SEQ ID NO: 190743 - RNA, 18 nt, Human herpesvirus 8 (Kaposi`s sarcoma-associated h
uaaaaaacguauaugccc

SEQ ID NO: 190744 - RNA, 16 nt, Human herpesvirus 8 (Kaposi`s sarcoma-associated h
uaaaaaaugugcaugu

SEQ ID NO: 190745 - RNA, 19 nt, Human herpesvirus 8 (Kaposi`s sarcoma-associated h
guugucccucagccacaaa

SEQ ID NO: 190746 - RNA, 22 nt, Human herpesvirus 8 (Kaposi`s sarcoma-associated h
guuggccuccagcaaagcacau

SEQ ID NO: 190747 - RNA, 16 nt, Human herpesvirus 8 (Kaposi`s sarcoma-associated h
guuagugaccugcugu

SEQ ID NO: 190748 - RNA, 16 nt, Human herpesvirus 8 (Kaposi`s sarcoma-associated h
guuaucuccugcucau

SEQ ID NO: 190749 - RNA, 13 nt, Human herpesvirus 8 (Kaposi`s sarcoma-associated h
guuguucuuugcg

SEQ ID NO: 190750 - RNA, 18 nt, Human herpesvirus 8 (Kaposi`s sarcoma-associated h
guuuccagugacccuagu

SEQ ID NO: 190751 - RNA, 20 nt, Human herpesvirus 8 (Kaposi`s sarcoma-associated h
guuucccacgugcaccagcu

SEQ ID NO: 190752 - RNA, 15 nt, Human herpesvirus 8 (Kaposi`s sarcoma-associated h
guuuauaacaaugaa

SEQ ID NO: 190753 - RNA, 17 nt, Human herpesvirus 8 (Kaposi`s sarcoma-associated h
uaaaaaccacucacuga

SEQ ID NO: 190754 - RNA, 18 nt, Human herpesvirus 8 (Kaposi`s sarcoma-associated h
uaaacaagcuaccugcaa

SEQ ID NO: 190755 - RNA, 16 nt, Human herpesvirus 8 (Kaposi`s sarcoma-associated h
uaaaaccgcccacuga

SEQ ID NO: 190756 - RNA, 17 nt, Human herpesvirus 8 (Kaposi`s sarcoma-associated h
uaaaaccgcccacugau

SEQ ID NO: 190757 - RNA, 20 nt, Human herpesvirus 8 (Kaposi`s sarcoma-associated h
uaaagauaccgaccaauaca

SEQ ID NO: 190758 - RNA, 23 nt, Human herpesvirus 8 (Kaposi`s sarcoma-associated h
uaaagauggguccguauuucugc

SEQ ID NO: 190759 - RNA, 16 nt, Human herpesvirus 8 (Kaposi`s sarcoma-associated h
uaaagccgagccacaa

SEQ ID NO: 190760 - RNA, 18 nt, Human herpesvirus 8 (Kaposi`s sarcoma-associated h
uaaagccgagccacaaag

SEQ ID NO: 190761 - RNA, 15 nt, Human herpesvirus 8 (Kaposi`s sarcoma-associated h
uaaagaguaccacuc

SEQ ID NO: 190762 - RNA, 16 nt, Human herpesvirus 8 (Kaposi`s sarcoma-associated h
uaaagcugagccacaa

SEQ ID NO: 190763 - RNA, 13 nt, Human herpesvirus 8 (Kaposi`s sarcoma-associated h
uaaagcugucacu

SEQ ID NO: 190764 - RNA, 17 nt, Human herpesvirus 8 (Kaposi`s sarcoma-associated h
uaaagcugucacuaaua

SEQ ID NO: 190765 - RNA, 16 nt, Human herpesvirus 8 (Kaposi`s sarcoma-associated h
uaaauuggccacugca

SEQ ID NO: 190766 - RNA, 14 nt, Human herpesvirus 8 (Kaposi`s sarcoma-associated h
uaacauccacagga

SEQ ID NO: 190767 - RNA, 20 nt, Human herpesvirus 8 (Kaposi`s sarcoma-associated h
gucgagcacuccuguuagca

SEQ ID NO: 190768 - RNA, 20 nt, Human herpesvirus 8 (Kaposi`s sarcoma-associated h
gucgcaggccgaauaccucg

SEQ ID NO: 190769 - RNA, 13 nt, Human herpesvirus 8 (Kaposi`s sarcoma-associated h
gucgccaacuguc

SEQ ID NO: 190770 - RNA, 18 nt, Human herpesvirus 8 (Kaposi`s sarcoma-associated h
gucgccagggucaucccg

SEQ ID NO: 190771 - RNA, 12 nt, Human herpesvirus 8 (Kaposi`s sarcoma-associated h
guacacagccaa

SEQ ID NO: 190772 - RNA, 19 nt, Human herpesvirus 8 (Kaposi`s sarcoma-associated h
guacagaaaaccauacugu

SEQ ID NO: 190773 - RNA, 13 nt, Human herpesvirus 8 (Kaposi`s sarcoma-associated h
guacagugccugc

SEQ ID NO: 190774 - RNA, 22 nt, Human herpesvirus 8 (Kaposi`s sarcoma-associated h
guacauuaaaaggacauuguau

SEQ ID NO: 190775 - RNA, 16 nt, Human herpesvirus 8 (Kaposi`s sarcoma-associated h
guaccggcaucugcaa

SEQ ID NO: 190776 - RNA, 20 nt, Human herpesvirus 8 (Kaposi`s sarcoma-associated h
guaccauggcaaaaaacacu

SEQ ID NO: 190777 - RNA, 23 nt, Human herpesvirus 8 (Kaposi`s sarcoma-associated h
gucugagaaauuacugcaccucg

SEQ ID NO: 190778 - RNA, 22 nt, Human herpesvirus 8 (Kaposi`s sarcoma-associated h
gugaaacccggauuugccccau

SEQ ID NO: 190779 - RNA, 17 nt, Human herpesvirus 8 (Kaposi`s sarcoma-associated h
gucuuuuuaaccgcuaa

SEQ ID NO: 190780 - RNA, 19 nt, Human herpesvirus 8 (Kaposi`s sarcoma-associated h
gucugaucccaaaagcaau

SEQ ID NO: 190781 - RNA, 21 nt, Human herpesvirus 8 (Kaposi`s sarcoma-associated h
gucugauucuuagauaguguu

SEQ ID NO: 190782 - RNA, 14 nt, Human herpesvirus 8 (Kaposi`s sarcoma-associated h
gucuggcuggcgcu

SEQ ID NO: 190783 - RNA, 20 nt, Human herpesvirus 8 (Kaposi`s sarcoma-associated h
gucguuguagugguggcaga

SEQ ID NO: 190784 - RNA, 18 nt, Human herpesvirus 8 (Kaposi`s sarcoma-associated h
gucuaauacguaacuguu

SEQ ID NO: 190785 - RNA, 14 nt, Human herpesvirus 8 (Kaposi`s sarcoma-associated h
gucuagacaauaaa

SEQ ID NO: 190786 - RNA, 15 nt, Human herpesvirus 8 (Kaposi`s sarcoma-associated h
gucgcgccagaaaga

SEQ ID NO: 190787 - RNA, 16 nt, Human herpesvirus 8 (Kaposi`s sarcoma-associated h
gucgucugacgccaua

SEQ ID NO: 190788 - RNA, 19 nt, Human herpesvirus 8 (Kaposi`s sarcoma-associated h
gugacaaucuggaugugua

SEQ ID NO: 190789 - RNA, 14 nt, Human herpesvirus 8 (Kaposi`s sarcoma-associated h
gugacaccuuucag

SEQ ID NO: 190790 - RNA, 16 nt, Human herpesvirus 8 (Kaposi`s sarcoma-associated h
gugacacuacuaaugu

SEQ ID NO: 190791 - RNA, 14 nt, Human herpesvirus 8 (Kaposi`s sarcoma-associated h
gugacccacauaga

SEQ ID NO: 190792 - RNA, 18 nt, Human herpesvirus 8 (Kaposi`s sarcoma-associated h
gugacccacauagaccua

SEQ ID NO: 190793 - RNA, 12 nt, Human herpesvirus 8 (Kaposi`s sarcoma-associated h
gugcuacuuaca

SEQ ID NO: 190794 - RNA, 20 nt, Human herpesvirus 8 (Kaposi`s sarcoma-associated h
gugcuauaauggauggcuau

SEQ ID NO: 190795 - RNA, 21 nt, Human herpesvirus 8 (Kaposi`s sarcoma-associated h
gugacgcugucccgugcccag

SEQ ID NO: 190796 - RNA, 19 nt, Human herpesvirus 8 (Kaposi`s sarcoma-associated h
guggcgcggaaacugggca

SEQ ID NO: 190797 - RNA, 20 nt, Human herpesvirus 8 (Kaposi`s sarcoma-associated h
guggcccugaaaugaucguc

SEQ ID NO: 190798 - RNA, 14 nt, Human herpesvirus 8 (Kaposi`s sarcoma-associated h
guggcccugccuag

SEQ ID NO: 190799 - RNA, 13 nt, Human herpesvirus 8 (Kaposi`s sarcoma-associated h
guuagauggcaca

SEQ ID NO: 190800 - RNA, 17 nt, Human herpesvirus 8 (Kaposi`s sarcoma-associated h
guuagauggcacagagu

SEQ ID NO: 190801 - RNA, 20 nt, Human herpesvirus 8 (Kaposi`s sarcoma-associated h
guuaccuuauccgcuagcca

SEQ ID NO: 190802 - RNA, 21 nt, Human herpesvirus 8 (Kaposi`s sarcoma-associated h
guuaccuuauccgcuagccac

SEQ ID NO: 190803 - RNA, 17 nt, Human herpesvirus 8 (Kaposi`s sarcoma-associated h
guuacugccagacccac

SEQ ID NO: 190804 - RNA, 15 nt, Human herpesvirus 8 (Kaposi`s sarcoma-associated h
guguuacacuaugua

SEQ ID NO: 190805 - RNA, 13 nt, Human herpesvirus 8 (Kaposi`s sarcoma-associated h
gugggaacuguga

SEQ ID NO: 190806 - RNA, 15 nt, Human herpesvirus 8 (Kaposi`s sarcoma-associated h
gugugcacuagcaga

SEQ ID NO: 190807 - RNA, 12 nt, Human herpesvirus 8 (Kaposi`s sarcoma-associated h
uauaauggaugg

SEQ ID NO: 190808 - RNA, 21 nt, Human herpesvirus 8 (Kaposi`s sarcoma-associated h
uauaauggucuguauugacac

SEQ ID NO: 190809 - RNA, 15 nt, Human herpesvirus 8 (Kaposi`s sarcoma-associated h
uauaaguuaaaccaa

SEQ ID NO: 190810 - RNA, 13 nt, Human herpesvirus 8 (Kaposi`s sarcoma-associated h
uauugaagcaugu

SEQ ID NO: 190811 - RNA, 17 nt, Human herpesvirus 8 (Kaposi`s sarcoma-associated h
uauugcaacugaccaug

SEQ ID NO: 190812 - RNA, 18 nt, Human herpesvirus 8 (Kaposi`s sarcoma-associated h
uauaaccgugcuacuuac

SEQ ID NO: 190813 - RNA, 19 nt, Human herpesvirus 8 (Kaposi`s sarcoma-associated h
uauaaacagccuuggugcu

SEQ ID NO: 190814 - RNA, 17 nt, Human herpesvirus 8 (Kaposi`s sarcoma-associated h
uauaacagcaacauguu

SEQ ID NO: 190815 - RNA, 21 nt, Human herpesvirus 8 (Kaposi`s sarcoma-associated h
uauaacagcaacauguuuaca

SEQ ID NO: 190816 - RNA, 14 nt, Human herpesvirus 8 (Kaposi`s sarcoma-associated h
uauaacagugcucu

SEQ ID NO: 190817 - RNA, 14 nt, Human herpesvirus 8 (Kaposi`s sarcoma-associated h
uauuuugauggugu

SEQ ID NO: 190818 - RNA, 15 nt, Human herpesvirus 8 (Kaposi`s sarcoma-associated h
uauuuugaugguguu

SEQ ID NO: 190819 - RNA, 18 nt, Human herpesvirus 8 (Kaposi`s sarcoma-associated h
uauuuuuuuucaaacagg

SEQ ID NO: 190820 - RNA, 16 nt, Human herpesvirus 8 (Kaposi`s sarcoma-associated h
ucaaaugggaacaaug

SEQ ID NO: 190821 - RNA, 16 nt, Human herpesvirus 8 (Kaposi`s sarcoma-associated h
ucaauaaagagaccaa

SEQ ID NO: 190822 - RNA, 17 nt, Human herpesvirus 8 (Kaposi`s sarcoma-associated h
ucagcccuagccaugga

SEQ ID NO: 190823 - RNA, 16 nt, Human herpesvirus 8 (Kaposi`s sarcoma-associated h
ucagcagcaagcacag

SEQ ID NO: 190824 - RNA, 15 nt, Human herpesvirus 8 (Kaposi`s sarcoma-associated h
ucagcaacugcguca

SEQ ID NO: 190825 - RNA, 13 nt, Human herpesvirus 8 (Kaposi`s sarcoma-associated h
ucacggccguguu

SEQ ID NO: 190826 - RNA, 14 nt, Human herpesvirus 8 (Kaposi`s sarcoma-associated h
ucacucagcugcca

SEQ ID NO: 190827 - RNA, 20 nt, Human herpesvirus 8 (Kaposi`s sarcoma-associated h
ucacucagcugccaaggcaa

SEQ ID NO: 190828 - RNA, 23 nt, Human herpesvirus 8 (Kaposi`s sarcoma-associated h
ucacuccauucccggucccacau

SEQ ID NO: 190829 - RNA, 23 nt, Human herpesvirus 8 (Kaposi`s sarcoma-associated h
ucccuaagcgggacgcacuugau

SEQ ID NO: 190830 - RNA, 12 nt, Human herpesvirus 8 (Kaposi`s sarcoma-associated h
uccgcaauguca

SEQ ID NO: 190831 - RNA, 19 nt, Human herpesvirus 8 (Kaposi`s sarcoma-associated h
uccgcacagacgacugggc

SEQ ID NO: 190832 - RNA, 21 nt, Human herpesvirus 8 (Kaposi`s sarcoma-associated h
uccggacucgucuacccugcc

SEQ ID NO: 190833 - RNA, 14 nt, Human herpesvirus 8 (Kaposi`s sarcoma-associated h
uccgcgaacacgga

SEQ ID NO: 190834 - RNA, 15 nt, Human herpesvirus 8 (Kaposi`s sarcoma-associated h
uccgcauuaaagcac

SEQ ID NO: 190835 - RNA, 17 nt, Human herpesvirus 8 (Kaposi`s sarcoma-associated h
uccgguggcaacauaca

SEQ ID NO: 190836 - RNA, 14 nt, Human herpesvirus 8 (Kaposi`s sarcoma-associated h
uccccugcaaugca

SEQ ID NO: 190837 - RNA, 17 nt, Human herpesvirus 8 (Kaposi`s sarcoma-associated h
uccccuaaaaguucuau

SEQ ID NO: 190838 - RNA, 17 nt, Human herpesvirus 8 (Kaposi`s sarcoma-associated h
ucccaaaaaaccuuaau

SEQ ID NO: 190839 - RNA, 22 nt, Human herpesvirus 8 (Kaposi`s sarcoma-associated h
uccauugcacucagaacauaaa

SEQ ID NO: 190840 - RNA, 13 nt, Human herpesvirus 8 (Kaposi`s sarcoma-associated h
ucccaaaccacac

SEQ ID NO: 190841 - RNA, 16 nt, Human herpesvirus 8 (Kaposi`s sarcoma-associated h
uccccgucuccaguca

SEQ ID NO: 190842 - RNA, 18 nt, Human herpesvirus 8 (Kaposi`s sarcoma-associated h
uccccggauuccuccgca

SEQ ID NO: 190843 - RNA, 19 nt, Human herpesvirus 8 (Kaposi`s sarcoma-associated h
uccccggcguccucucaug

SEQ ID NO: 190844 - RNA, 19 nt, Human herpesvirus 8 (Kaposi`s sarcoma-associated h
uccccgggaacggacaauu

SEQ ID NO: 190845 - RNA, 16 nt, Human herpesvirus 8 (Kaposi`s sarcoma-associated h
uccauggcaguggaca

SEQ ID NO: 190846 - RNA, 18 nt, Human herpesvirus 8 (Kaposi`s sarcoma-associated h
uccauccguguccucuag

SEQ ID NO: 190847 - RNA, 13 nt, Human herpesvirus 8 (Kaposi`s sarcoma-associated h
uccagcaaagcac

SEQ ID NO: 190848 - RNA, 14 nt, Human herpesvirus 8 (Kaposi`s sarcoma-associated h
uccagcaaagcaca

SEQ ID NO: 190849 - RNA, 18 nt, Human herpesvirus 8 (Kaposi`s sarcoma-associated h
uccagaguuuuaugggcu

SEQ ID NO: 190850 - RNA, 21 nt, Human herpesvirus 8 (Kaposi`s sarcoma-associated h
uccagacucuucgcugaugaa

SEQ ID NO: 190851 - RNA, 17 nt, Human herpesvirus 8 (Kaposi`s sarcoma-associated h
uccagacugguccaagc

SEQ ID NO: 190852 - RNA, 16 nt, Human herpesvirus 8 (Kaposi`s sarcoma-associated h
uccagaagagcauuuu

SEQ ID NO: 190853 - RNA, 13 nt, Human herpesvirus 8 (Kaposi`s sarcoma-associated h
ucauuagugacau

SEQ ID NO: 190854 - RNA, 14 nt, Human herpesvirus 8 (Kaposi`s sarcoma-associated h
ucauuagugacaua

SEQ ID NO: 190855 - RNA, 18 nt, Human herpesvirus 8 (Kaposi`s sarcoma-associated h
ucauuaaaccuacugccu

SEQ ID NO: 190856 - RNA, 13 nt, Human herpesvirus 8 (Kaposi`s sarcoma-associated h
ucauuaaacgaca

SEQ ID NO: 190857 - RNA, 22 nt, Human herpesvirus 8 (Kaposi`s sarcoma-associated h
ucauuauuaugaggccuaucug

SEQ ID NO: 190858 - RNA, 22 nt, Human herpesvirus 8 (Kaposi`s sarcoma-associated h
ucauucagagacucaauuggau

SEQ ID NO: 190859 - RNA, 10 nt, Human herpesvirus 8 (Kaposi`s sarcoma-associated h
ucaugcucau

SEQ ID NO: 190860 - RNA, 20 nt, Human herpesvirus 8 (Kaposi`s sarcoma-associated h
ucauguacgucguaagccag

SEQ ID NO: 190861 - RNA, 22 nt, Human herpesvirus 8 (Kaposi`s sarcoma-associated h
ucauguacgucguaagccagug

SEQ ID NO: 190862 - RNA, 19 nt, Human herpesvirus 8 (Kaposi`s sarcoma-associated h
uccaaaggccgcuuguauu

SEQ ID NO: 190863 - RNA, 18 nt, Human herpesvirus 8 (Kaposi`s sarcoma-associated h
uccaaauaaaccagacac

SEQ ID NO: 190864 - RNA, 18 nt, Human herpesvirus 8 (Kaposi`s sarcoma-associated h
ucauuucauuuguguaua

SEQ ID NO: 190865 - RNA, 23 nt, Human herpesvirus 8 (Kaposi`s sarcoma-associated h
ucaguucgaccaccccugcaccu

SEQ ID NO: 190866 - RNA, 13 nt, Human herpesvirus 8 (Kaposi`s sarcoma-associated h
ucaguacuccuuc

SEQ ID NO: 190867 - RNA, 17 nt, Human herpesvirus 8 (Kaposi`s sarcoma-associated h
ucuguugaaugugauca

SEQ ID NO: 190868 - RNA, 16 nt, Human herpesvirus 8 (Kaposi`s sarcoma-associated h
ucuguggcuaucuugc

SEQ ID NO: 190869 - RNA, 23 nt, Human herpesvirus 8 (Kaposi`s sarcoma-associated h
ucugucgucucuuccaggguuga

SEQ ID NO: 190870 - RNA, 23 nt, Human herpesvirus 8 (Kaposi`s sarcoma-associated h
ucugugccugcguuaacuuccca

SEQ ID NO: 190871 - RNA, 16 nt, Human herpesvirus 8 (Kaposi`s sarcoma-associated h
ucuuccuccuagucau

SEQ ID NO: 190872 - RNA, 17 nt, Human herpesvirus 8 (Kaposi`s sarcoma-associated h
ucugauucugacagaca

SEQ ID NO: 190873 - RNA, 15 nt, Human herpesvirus 8 (Kaposi`s sarcoma-associated h
ucugcacccuuucau

SEQ ID NO: 190874 - RNA, 13 nt, Human herpesvirus 8 (Kaposi`s sarcoma-associated h
ucuguauugacac

SEQ ID NO: 190875 - RNA, 18 nt, Human herpesvirus 8 (Kaposi`s sarcoma-associated h
ucugcugucuaguggaga

SEQ ID NO: 190876 - RNA, 15 nt, Human herpesvirus 8 (Kaposi`s sarcoma-associated h
ucuagacacgcaaag

SEQ ID NO: 190877 - RNA, 20 nt, Human herpesvirus 8 (Kaposi`s sarcoma-associated h
ucucaagcaguaucuuggga

SEQ ID NO: 190878 - RNA, 16 nt, Human herpesvirus 8 (Kaposi`s sarcoma-associated h
ucuauuuaaggcaguc

SEQ ID NO: 190879 - RNA, 15 nt, Human herpesvirus 8 (Kaposi`s sarcoma-associated h
ucugaagcaccacau

SEQ ID NO: 190880 - RNA, 22 nt, Human herpesvirus 8 (Kaposi`s sarcoma-associated h
ucguccgggagaaccaugccag

SEQ ID NO: 190881 - RNA, 15 nt, Human herpesvirus 8 (Kaposi`s sarcoma-associated h
ucgugacggugacau

SEQ ID NO: 190882 - RNA, 13 nt, Human herpesvirus 8 (Kaposi`s sarcoma-associated h
ucgucugugucac

SEQ ID NO: 190883 - RNA, 13 nt, Human herpesvirus 8 (Kaposi`s sarcoma-associated h
ucguguaugccaa

SEQ ID NO: 190884 - RNA, 23 nt, Human herpesvirus 8 (Kaposi`s sarcoma-associated h
ucgugcaaaagagacacuaucuc

SEQ ID NO: 190885 - RNA, 14 nt, Human herpesvirus 8 (Kaposi`s sarcoma-associated h
ucuacgugccagug

SEQ ID NO: 190886 - RNA, 22 nt, Human herpesvirus 8 (Kaposi`s sarcoma-associated h
ucuacagguaggccacauacgc

SEQ ID NO: 190887 - RNA, 15 nt, Human herpesvirus 8 (Kaposi`s sarcoma-associated h
ucuaccucaacugaa

SEQ ID NO: 190888 - RNA, 20 nt, Human herpesvirus 8 (Kaposi`s sarcoma-associated h
ucuaccugccggacacugaa

SEQ ID NO: 190889 - RNA, 20 nt, Human herpesvirus 8 (Kaposi`s sarcoma-associated h
ucuacccugauuagcacugu

SEQ ID NO: 190890 - RNA, 15 nt, Human herpesvirus 8 (Kaposi`s sarcoma-associated h
ucuacccugccacuc

SEQ ID NO: 190891 - RNA, 16 nt, Human herpesvirus 8 (Kaposi`s sarcoma-associated h
uccguuuggacacucc

SEQ ID NO: 190892 - RNA, 14 nt, Human herpesvirus 8 (Kaposi`s sarcoma-associated h
uccgugguacccag

SEQ ID NO: 190893 - RNA, 16 nt, Human herpesvirus 8 (Kaposi`s sarcoma-associated h
uccguccccaauuuca

SEQ ID NO: 190894 - RNA, 23 nt, Human herpesvirus 8 (Kaposi`s sarcoma-associated h
ucgcuggcccaaacuagcagaga

SEQ ID NO: 190895 - RNA, 12 nt, Human herpesvirus 8 (Kaposi`s sarcoma-associated h
ugaccacggcac

SEQ ID NO: 190896 - RNA, 15 nt, Human herpesvirus 8 (Kaposi`s sarcoma-associated h
ugacauaaaauuucu

SEQ ID NO: 190897 - RNA, 16 nt, Human herpesvirus 8 (Kaposi`s sarcoma-associated h
ugacauaggcgacaaa

SEQ ID NO: 190898 - RNA, 22 nt, Human herpesvirus 8 (Kaposi`s sarcoma-associated h
ugaccggcuuguuuauaacaau

SEQ ID NO: 190899 - RNA, 21 nt, Human herpesvirus 8 (Kaposi`s sarcoma-associated h
ugacgauguucaggaggaaga

SEQ ID NO: 190900 - RNA, 13 nt, Human herpesvirus 8 (Kaposi`s sarcoma-associated h
ugacgaaugcauc

SEQ ID NO: 190901 - RNA, 18 nt, Human herpesvirus 8 (Kaposi`s sarcoma-associated h
ugacagacaacacuacua

SEQ ID NO: 190902 - RNA, 13 nt, Human herpesvirus 8 (Kaposi`s sarcoma-associated h
ugacauacaugag

SEQ ID NO: 190903 - RNA, 14 nt, Human herpesvirus 8 (Kaposi`s sarcoma-associated h
ugacauacaugaga

SEQ ID NO: 190904 - RNA, 16 nt, Human herpesvirus 8 (Kaposi`s sarcoma-associated h
ugacaaucuggaugug

SEQ ID NO: 190905 - RNA, 18 nt, Human herpesvirus 8 (Kaposi`s sarcoma-associated h
ugacaaucuggaugugua

SEQ ID NO: 190906 - RNA, 18 nt, Human herpesvirus 8 (Kaposi`s sarcoma-associated h
ugacaagucuucuuguca

SEQ ID NO: 190907 - RNA, 20 nt, Human herpesvirus 8 (Kaposi`s sarcoma-associated h
ugacacccuggauggguuaa

SEQ ID NO: 190908 - RNA, 22 nt, Human herpesvirus 8 (Kaposi`s sarcoma-associated h
ugaauaacuuuauuacagguau

SEQ ID NO: 190909 - RNA, 18 nt, Human herpesvirus 8 (Kaposi`s sarcoma-associated h
ugaaugggggcagugcac

SEQ ID NO: 190910 - RNA, 19 nt, Human herpesvirus 8 (Kaposi`s sarcoma-associated h
ugaaugggggcagugcacg

SEQ ID NO: 190911 - RNA, 13 nt, Human herpesvirus 8 (Kaposi`s sarcoma-associated h
ugaaugugaucac

SEQ ID NO: 190912 - RNA, 14 nt, Human herpesvirus 8 (Kaposi`s sarcoma-associated h
ugaaccccgugugg

SEQ ID NO: 190913 - RNA, 14 nt, Human herpesvirus 8 (Kaposi`s sarcoma-associated h
ugaacauuguucaa

SEQ ID NO: 190914 - RNA, 12 nt, Human herpesvirus 8 (Kaposi`s sarcoma-associated h
ugaaaugaguca

SEQ ID NO: 190915 - RNA, 15 nt, Human herpesvirus 8 (Kaposi`s sarcoma-associated h
ugaaaggugguucua

SEQ ID NO: 190916 - RNA, 14 nt, Human herpesvirus 8 (Kaposi`s sarcoma-associated h
ugaaagacugccug

SEQ ID NO: 190917 - RNA, 13 nt, Human herpesvirus 8 (Kaposi`s sarcoma-associated h
ugaaagcaauaaa

SEQ ID NO: 190918 - RNA, 19 nt, Human herpesvirus 8 (Kaposi`s sarcoma-associated h
ugaaagcaggacguccagg

SEQ ID NO: 190919 - RNA, 17 nt, Human herpesvirus 8 (Kaposi`s sarcoma-associated h
ucuucuuggugugcuga

SEQ ID NO: 190920 - RNA, 23 nt, Human herpesvirus 8 (Kaposi`s sarcoma-associated h
ucuugcgcgaccugcuucacuua

SEQ ID NO: 190921 - RNA, 14 nt, Human herpesvirus 8 (Kaposi`s sarcoma-associated h
ucuuggcuguuaca

SEQ ID NO: 190922 - RNA, 20 nt, Human herpesvirus 8 (Kaposi`s sarcoma-associated h
ucuugcugcauaaagucaug

SEQ ID NO: 190923 - RNA, 17 nt, Human herpesvirus 8 (Kaposi`s sarcoma-associated h
ucuucucauucagagac

SEQ ID NO: 190924 - RNA, 12 nt, Human herpesvirus 8 (Kaposi`s sarcoma-associated h
ucuuccagucuc

SEQ ID NO: 190925 - RNA, 19 nt, Human herpesvirus 8 (Kaposi`s sarcoma-associated h
ugaaacaauaaugauuaaa

SEQ ID NO: 190926 - RNA, 13 nt, Human herpesvirus 8 (Kaposi`s sarcoma-associated h
uguuuacugcugu

SEQ ID NO: 190927 - RNA, 16 nt, Human herpesvirus 8 (Kaposi`s sarcoma-associated h
ugucugaauguggaau

SEQ ID NO: 190928 - RNA, 17 nt, Human herpesvirus 8 (Kaposi`s sarcoma-associated h
ugucuuaaguacauuaa

SEQ ID NO: 190929 - RNA, 18 nt, Human herpesvirus 8 (Kaposi`s sarcoma-associated h
ugucucacccaauacuua

SEQ ID NO: 190930 - RNA, 13 nt, Human herpesvirus 8 (Kaposi`s sarcoma-associated h
ugucguggcuuuu

SEQ ID NO: 190931 - RNA, 14 nt, Human herpesvirus 8 (Kaposi`s sarcoma-associated h
ugucuagacaauaa

SEQ ID NO: 190932 - RNA, 20 nt, Human herpesvirus 8 (Kaposi`s sarcoma-associated h
ugucagauuucucuaucuau

SEQ ID NO: 190933 - RNA, 18 nt, Human herpesvirus 8 (Kaposi`s sarcoma-associated h
uuaaagcugucacuaaua

SEQ ID NO: 190934 - RNA, 16 nt, Human herpesvirus 8 (Kaposi`s sarcoma-associated h
uuaaacgucuguaaaa

SEQ ID NO: 190935 - RNA, 18 nt, Human herpesvirus 8 (Kaposi`s sarcoma-associated h
uuaaacacaacaccagac

SEQ ID NO: 190936 - RNA, 14 nt, Human herpesvirus 8 (Kaposi`s sarcoma-associated h
uuaaacacauacaa

SEQ ID NO: 190937 - RNA, 18 nt, Human herpesvirus 8 (Kaposi`s sarcoma-associated h
uuaaacacauacaaugcu

SEQ ID NO: 190938 - RNA, 14 nt, Human herpesvirus 8 (Kaposi`s sarcoma-associated h
uguuugugaggacc

SEQ ID NO: 190939 - RNA, 12 nt, Human herpesvirus 8 (Kaposi`s sarcoma-associated h
uguuugcugcug

SEQ ID NO: 190940 - RNA, 13 nt, Human herpesvirus 8 (Kaposi`s sarcoma-associated h
uguuugcugcugu

SEQ ID NO: 190941 - RNA, 22 nt, Human herpesvirus 8 (Kaposi`s sarcoma-associated h
uuaagauuauaaugggucuacu

SEQ ID NO: 190942 - RNA, 12 nt, Human herpesvirus 8 (Kaposi`s sarcoma-associated h
uuaauaaccaug

SEQ ID NO: 190943 - RNA, 19 nt, Human herpesvirus 8 (Kaposi`s sarcoma-associated h
uuagauaguguugagguaa

SEQ ID NO: 190944 - RNA, 20 nt, Human herpesvirus 8 (Kaposi`s sarcoma-associated h
uuagcagccaugugcugguu

SEQ ID NO: 190945 - RNA, 16 nt, Human herpesvirus 8 (Kaposi`s sarcoma-associated h
uuagcgccaccgugug

SEQ ID NO: 190946 - RNA, 12 nt, Human herpesvirus 8 (Kaposi`s sarcoma-associated h
uuaaucuuuauu

SEQ ID NO: 190947 - RNA, 21 nt, Human herpesvirus 8 (Kaposi`s sarcoma-associated h
uuacauuaucuuaacuaaaca

SEQ ID NO: 190948 - RNA, 22 nt, Human herpesvirus 8 (Kaposi`s sarcoma-associated h
uuacauggaauacgggagacac

SEQ ID NO: 190949 - RNA, 20 nt, Human herpesvirus 8 (Kaposi`s sarcoma-associated h
uuacauuugacaacacgcac

SEQ ID NO: 190950 - RNA, 13 nt, Human herpesvirus 8 (Kaposi`s sarcoma-associated h
uuaccaauacuau

SEQ ID NO: 190951 - RNA, 22 nt, Human herpesvirus 8 (Kaposi`s sarcoma-associated h
uuaccaguauagugguuuacau

SEQ ID NO: 190952 - RNA, 22 nt, Human herpesvirus 8 (Kaposi`s sarcoma-associated h
uuacgcagggugcggugcugcc

SEQ ID NO: 190953 - RNA, 22 nt, Human herpesvirus 8 (Kaposi`s sarcoma-associated h
uuauguuguuuguauaacaugc

SEQ ID NO: 190954 - RNA, 23 nt, Human herpesvirus 8 (Kaposi`s sarcoma-associated h
uuauguuguuuguauaacaugca

SEQ ID NO: 190955 - RNA, 19 nt, Human herpesvirus 8 (Kaposi`s sarcoma-associated h
uuauguuuauagcuacaaa

SEQ ID NO: 190956 - RNA, 18 nt, Human herpesvirus 8 (Kaposi`s sarcoma-associated h
uuauuaaaagcauugucu

SEQ ID NO: 190957 - RNA, 19 nt, Human herpesvirus 8 (Kaposi`s sarcoma-associated h
uuaugggugugugccagua

SEQ ID NO: 190958 - RNA, 15 nt, Human herpesvirus 8 (Kaposi`s sarcoma-associated h
uuaugcaugcaauac

SEQ ID NO: 190959 - RNA, 20 nt, Human herpesvirus 8 (Kaposi`s sarcoma-associated h
uuauugcauggcaucccaua

SEQ ID NO: 190960 - RNA, 17 nt, Human herpesvirus 8 (Kaposi`s sarcoma-associated h
uuaucagcucacuguuc

SEQ ID NO: 190961 - RNA, 21 nt, Human herpesvirus 8 (Kaposi`s sarcoma-associated h
uuaucaaagaaaggugacuua

SEQ ID NO: 190962 - RNA, 20 nt, Human herpesvirus 8 (Kaposi`s sarcoma-associated h
uucaaugguuuuugugguua

SEQ ID NO: 190963 - RNA, 22 nt, Human herpesvirus 8 (Kaposi`s sarcoma-associated h
uucagugggacagcaacaccca

SEQ ID NO: 190964 - RNA, 20 nt, Human herpesvirus 8 (Kaposi`s sarcoma-associated h
uucauuacugguaccagaga

SEQ ID NO: 190965 - RNA, 17 nt, Human herpesvirus 8 (Kaposi`s sarcoma-associated h
uucaucgaguccuugag

SEQ ID NO: 190966 - RNA, 13 nt, Human herpesvirus 8 (Kaposi`s sarcoma-associated h
uuccuagccagau

SEQ ID NO: 190967 - RNA, 13 nt, Human herpesvirus 8 (Kaposi`s sarcoma-associated h
uuccauuuuccaa

SEQ ID NO: 190968 - RNA, 18 nt, Human herpesvirus 8 (Kaposi`s sarcoma-associated h
uuccauuuuccaaggccu

SEQ ID NO: 190969 - RNA, 19 nt, Human herpesvirus 8 (Kaposi`s sarcoma-associated h
uucccaauagcgcugucau

SEQ ID NO: 190970 - RNA, 23 nt, Human herpesvirus 8 (Kaposi`s sarcoma-associated h
uuccucuaaggcccccaccaaac

SEQ ID NO: 190971 - RNA, 13 nt, Human herpesvirus 8 (Kaposi`s sarcoma-associated h
uuccugugggcua

SEQ ID NO: 190972 - RNA, 18 nt, Human herpesvirus 8 (Kaposi`s sarcoma-associated h
uucuaaucuggcauguau

SEQ ID NO: 190973 - RNA, 18 nt, Human herpesvirus 8 (Kaposi`s sarcoma-associated h
uucguaagaggacccagg

SEQ ID NO: 190974 - RNA, 20 nt, Human herpesvirus 8 (Kaposi`s sarcoma-associated h
uucucuauaacauaauugua

SEQ ID NO: 190975 - RNA, 14 nt, Human herpesvirus 8 (Kaposi`s sarcoma-associated h
uucucacaacggcu

SEQ ID NO: 190976 - RNA, 14 nt, Human herpesvirus 8 (Kaposi`s sarcoma-associated h
uucuacgaggcaau

SEQ ID NO: 190977 - RNA, 22 nt, Human herpesvirus 8 (Kaposi`s sarcoma-associated h
uucuaggagacgcgcaaagggg

SEQ ID NO: 190978 - RNA, 20 nt, Human herpesvirus 8 (Kaposi`s sarcoma-associated h
uucuagagcccgcugcuauu

SEQ ID NO: 190979 - RNA, 20 nt, Human herpesvirus 8 (Kaposi`s sarcoma-associated h
uucuagcauaugcugccaag

SEQ ID NO: 190980 - RNA, 21 nt, Human herpesvirus 8 (Kaposi`s sarcoma-associated h
uucuggcuuggcgcuuagccu

SEQ ID NO: 190981 - RNA, 23 nt, Human herpesvirus 8 (Kaposi`s sarcoma-associated h
uucugggccacaaaacugccaaa

SEQ ID NO: 190982 - RNA, 14 nt, Human herpesvirus 8 (Kaposi`s sarcoma-associated h
uucugggcgaagaa

SEQ ID NO: 190983 - RNA, 15 nt, Human herpesvirus 8 (Kaposi`s sarcoma-associated h
uucuuagauaguguu

SEQ ID NO: 190984 - RNA, 17 nt, Human herpesvirus 8 (Kaposi`s sarcoma-associated h
ugccgccuggacaguga

SEQ ID NO: 190985 - RNA, 17 nt, Human herpesvirus 8 (Kaposi`s sarcoma-associated h
ugcauuggcuauuuuag

SEQ ID NO: 190986 - RNA, 19 nt, Human herpesvirus 8 (Kaposi`s sarcoma-associated h
ugcauguuauacaaacaac

SEQ ID NO: 190987 - RNA, 23 nt, Human herpesvirus 8 (Kaposi`s sarcoma-associated h
ugccugcgcugcgcauggcuuac

SEQ ID NO: 190988 - RNA, 17 nt, Human herpesvirus 8 (Kaposi`s sarcoma-associated h
ugccguggacaccacau

SEQ ID NO: 190989 - RNA, 19 nt, Human herpesvirus 8 (Kaposi`s sarcoma-associated h
ugccugguauuuaguggag

SEQ ID NO: 190990 - RNA, 18 nt, Human herpesvirus 8 (Kaposi`s sarcoma-associated h
ugccugucagauuuacaa

SEQ ID NO: 190991 - RNA, 20 nt, Human herpesvirus 8 (Kaposi`s sarcoma-associated h
ugacuuccccgucuccaguc

SEQ ID NO: 190992 - RNA, 22 nt, Human herpesvirus 8 (Kaposi`s sarcoma-associated h
ugacuuccccgucuccagucac

SEQ ID NO: 190993 - RNA, 12 nt, Human herpesvirus 8 (Kaposi`s sarcoma-associated h
ugacuuaucuaa

SEQ ID NO: 190994 - RNA, 13 nt, Human herpesvirus 8 (Kaposi`s sarcoma-associated h
ugacggugacauu

SEQ ID NO: 190995 - RNA, 22 nt, Human herpesvirus 8 (Kaposi`s sarcoma-associated h
ugacuaggaggaagagcacugu

SEQ ID NO: 190996 - RNA, 23 nt, Human herpesvirus 8 (Kaposi`s sarcoma-associated h
ugacuaggaggaagagcacuguu

SEQ ID NO: 190997 - RNA, 23 nt, Human herpesvirus 8 (Kaposi`s sarcoma-associated h
ugcaggcaguccaaggucgacag

SEQ ID NO: 190998 - RNA, 16 nt, Human herpesvirus 8 (Kaposi`s sarcoma-associated h
ugcagcacuagguuag

SEQ ID NO: 190999 - RNA, 21 nt, Human herpesvirus 8 (Kaposi`s sarcoma-associated h
ugcagcagcgugacacuacua

SEQ ID NO: 191000 - RNA, 15 nt, Human herpesvirus 8 (Kaposi`s sarcoma-associated h
ugcagacagaggcaa

SEQ ID NO: 191001 - RNA, 17 nt, Human herpesvirus 8 (Kaposi`s sarcoma-associated h
ugcagacccuuagggau

SEQ ID NO: 191002 - RNA, 18 nt, Human herpesvirus 8 (Kaposi`s sarcoma-associated h
ugcuauuuuucaucugaa

SEQ ID NO: 191003 - RNA, 17 nt, Human herpesvirus 8 (Kaposi`s sarcoma-associated h
ugcugccacugccacgg

SEQ ID NO: 191004 - RNA, 20 nt, Human herpesvirus 8 (Kaposi`s sarcoma-associated h
ugcgcuaugugggacaacua

SEQ ID NO: 191005 - RNA, 21 nt, Human herpesvirus 8 (Kaposi`s sarcoma-associated h
ugcggcggccgcuaagaaaau

SEQ ID NO: 191006 - RNA, 16 nt, Human herpesvirus 8 (Kaposi`s sarcoma-associated h
ugcuacggaucaugcu

SEQ ID NO: 191007 - RNA, 17 nt, Human herpesvirus 8 (Kaposi`s sarcoma-associated h
uggacgggguugucuuc

SEQ ID NO: 191008 - RNA, 13 nt, Human herpesvirus 8 (Kaposi`s sarcoma-associated h
uggaccuccgccg

SEQ ID NO: 191009 - RNA, 19 nt, Human herpesvirus 8 (Kaposi`s sarcoma-associated h
uggagaauauccacggugu

SEQ ID NO: 191010 - RNA, 13 nt, Human herpesvirus 8 (Kaposi`s sarcoma-associated h
uggagaaacagug

SEQ ID NO: 191011 - RNA, 14 nt, Human herpesvirus 8 (Kaposi`s sarcoma-associated h
uggagaaacagugg

SEQ ID NO: 191012 - RNA, 16 nt, Human herpesvirus 8 (Kaposi`s sarcoma-associated h
uggacuggcagggugg

SEQ ID NO: 191013 - RNA, 21 nt, Human herpesvirus 8 (Kaposi`s sarcoma-associated h
uggacuguuaacccaauguca

SEQ ID NO: 191014 - RNA, 23 nt, Human herpesvirus 8 (Kaposi`s sarcoma-associated h
uggacgcggccuucgucaugcac

SEQ ID NO: 191015 - RNA, 16 nt, Human herpesvirus 8 (Kaposi`s sarcoma-associated h
uggacgucaggaguca

SEQ ID NO: 191016 - RNA, 12 nt, Human herpesvirus 8 (Kaposi`s sarcoma-associated h
ugcuguggguug

SEQ ID NO: 191017 - RNA, 15 nt, Human herpesvirus 8 (Kaposi`s sarcoma-associated h
uggaaagguguccuu

SEQ ID NO: 191018 - RNA, 13 nt, Human herpesvirus 8 (Kaposi`s sarcoma-associated h
uggaaaauucucc

SEQ ID NO: 191019 - RNA, 19 nt, Human herpesvirus 8 (Kaposi`s sarcoma-associated h
ugcuuuugggaucagaccc

SEQ ID NO: 191020 - RNA, 14 nt, Human herpesvirus 8 (Kaposi`s sarcoma-associated h
ugguaauaaaguca

SEQ ID NO: 191021 - RNA, 22 nt, Human herpesvirus 8 (Kaposi`s sarcoma-associated h
uggguuuauaaugccaauauau

SEQ ID NO: 191022 - RNA, 13 nt, Human herpesvirus 8 (Kaposi`s sarcoma-associated h
ugguugugccguc

SEQ ID NO: 191023 - RNA, 21 nt, Human herpesvirus 8 (Kaposi`s sarcoma-associated h
ugguucuaagucgcacguuag

SEQ ID NO: 191024 - RNA, 18 nt, Human herpesvirus 8 (Kaposi`s sarcoma-associated h
ugggauuccgucauucac

SEQ ID NO: 191025 - RNA, 20 nt, Human herpesvirus 8 (Kaposi`s sarcoma-associated h
ugggaucgaacagaagaccc

SEQ ID NO: 191026 - RNA, 16 nt, Human herpesvirus 8 (Kaposi`s sarcoma-associated h
ugggccacaaaacugc

SEQ ID NO: 191027 - RNA, 17 nt, Human herpesvirus 8 (Kaposi`s sarcoma-associated h
ugggccacaaaacugcc

SEQ ID NO: 191028 - RNA, 18 nt, Human herpesvirus 8 (Kaposi`s sarcoma-associated h
ugggccacaaaacugcca

SEQ ID NO: 191029 - RNA, 21 nt, Human herpesvirus 8 (Kaposi`s sarcoma-associated h
ugggccacaaaacugccaaag

SEQ ID NO: 191030 - RNA, 23 nt, Human herpesvirus 8 (Kaposi`s sarcoma-associated h
uggguacuaugggugaccacaua

SEQ ID NO: 191031 - RNA, 14 nt, Human herpesvirus 8 (Kaposi`s sarcoma-associated h
ugggugaccacaua

SEQ ID NO: 191032 - RNA, 20 nt, Human herpesvirus 8 (Kaposi`s sarcoma-associated h
ugggugcaacgacaaaugag

SEQ ID NO: 191033 - RNA, 22 nt, Human herpesvirus 8 (Kaposi`s sarcoma-associated h
uguaaccuaaaaaaugugcaug

SEQ ID NO: 191034 - RNA, 22 nt, Human herpesvirus 8 (Kaposi`s sarcoma-associated h
uguagacuaugggaaugugccu

SEQ ID NO: 191035 - RNA, 19 nt, Human herpesvirus 8 (Kaposi`s sarcoma-associated h
uguagacaguuaaucuuua

SEQ ID NO: 191036 - RNA, 15 nt, Human herpesvirus 8 (Kaposi`s sarcoma-associated h
uguagaucuggauac

SEQ ID NO: 191037 - RNA, 14 nt, Human herpesvirus 8 (Kaposi`s sarcoma-associated h
uguauuguacuaaa

SEQ ID NO: 191038 - RNA, 20 nt, Human herpesvirus 8 (Kaposi`s sarcoma-associated h
uguaucagaacaguggugca

SEQ ID NO: 191039 - RNA, 19 nt, Human herpesvirus 8 (Kaposi`s sarcoma-associated h
uguaucaggcuagugcugu

SEQ ID NO: 191040 - RNA, 20 nt, Human herpesvirus 8 (Kaposi`s sarcoma-associated h
uguaucaggcuagugcugua

SEQ ID NO: 191041 - RNA, 19 nt, Human herpesvirus 8 (Kaposi`s sarcoma-associated h
uguauaaccgugcuacuua

SEQ ID NO: 191042 - RNA, 12 nt, Human herpesvirus 8 (Kaposi`s sarcoma-associated h
ugggaacuguga

SEQ ID NO: 191043 - RNA, 19 nt, Human herpesvirus 8 (Kaposi`s sarcoma-associated h
ugggaaacguguccugcca

SEQ ID NO: 191044 - RNA, 20 nt, Human herpesvirus 8 (Kaposi`s sarcoma-associated h
ugggaaacguguccugccag

SEQ ID NO: 191045 - RNA, 19 nt, Human herpesvirus 8 (Kaposi`s sarcoma-associated h
uggcuucuauaagcaccuu

SEQ ID NO: 191046 - RNA, 18 nt, Human herpesvirus 8 (Kaposi`s sarcoma-associated h
uggcuguuacaauaaagc

SEQ ID NO: 191047 - RNA, 21 nt, Human herpesvirus 8 (Kaposi`s sarcoma-associated h
uggcuguuacaauaaagccga

SEQ ID NO: 191048 - RNA, 14 nt, Human herpesvirus 8 (Kaposi`s sarcoma-associated h
ugggaccuuucaac

SEQ ID NO: 191049 - RNA, 17 nt, Human herpesvirus 8 (Kaposi`s sarcoma-associated h
ugggacuccggacucgu

SEQ ID NO: 191050 - RNA, 20 nt, Human herpesvirus 8 (Kaposi`s sarcoma-associated h
ugggagcggguugucuacau

SEQ ID NO: 191051 - RNA, 23 nt, Human herpesvirus 8 (Kaposi`s sarcoma-associated h
ugggagcggguugucuacaugaa

SEQ ID NO: 191052 - RNA, 17 nt, Human herpesvirus 8 (Kaposi`s sarcoma-associated h
ugggacuugauaaucuc

SEQ ID NO: 191053 - RNA, 23 nt, Human herpesvirus 8 (Kaposi`s sarcoma-associated h
ugggagggaguauaucauaucaa

SEQ ID NO: 191054 - RNA, 13 nt, Human herpesvirus 8 (Kaposi`s sarcoma-associated h
uggcggaaggugg

SEQ ID NO: 191055 - RNA, 21 nt, Human herpesvirus 8 (Kaposi`s sarcoma-associated h
uggcgcaggagucagagcagu

SEQ ID NO: 191056 - RNA, 16 nt, Human herpesvirus 8 (Kaposi`s sarcoma-associated h
uggcgcaagcacuuuu

SEQ ID NO: 191057 - RNA, 16 nt, Human herpesvirus 8 (Kaposi`s sarcoma-associated h
uggcgcccacguaugg

SEQ ID NO: 191058 - RNA, 20 nt, Human herpesvirus 8 (Kaposi`s sarcoma-associated h
uggcgagucccuuaugucag

SEQ ID NO: 191059 - RNA, 13 nt, Human herpesvirus 8 (Kaposi`s sarcoma-associated h
uggcucauaacac

SEQ ID NO: 191060 - RNA, 22 nt, Human herpesvirus 8 (Kaposi`s sarcoma-associated h
uggcggguagaaucaauguggu

SEQ ID NO: 191061 - RNA, 19 nt, Human herpesvirus 8 (Kaposi`s sarcoma-associated h
uggauccgcaaugucaggu

SEQ ID NO: 191062 - RNA, 12 nt, Human herpesvirus 8 (Kaposi`s sarcoma-associated h
uggaucagggaa

SEQ ID NO: 191063 - RNA, 21 nt, Human herpesvirus 8 (Kaposi`s sarcoma-associated h
uggccauaacgagcgaccagu

SEQ ID NO: 191064 - RNA, 23 nt, Human herpesvirus 8 (Kaposi`s sarcoma-associated h
uggcccaauuaauuggagcucuu

SEQ ID NO: 191065 - RNA, 12 nt, Human herpesvirus 8 (Kaposi`s sarcoma-associated h
uggccgcauuug

SEQ ID NO: 191066 - RNA, 13 nt, Human herpesvirus 8 (Kaposi`s sarcoma-associated h
uggccaauaaugc

SEQ ID NO: 191067 - RNA, 18 nt, Human herpesvirus 8 (Kaposi`s sarcoma-associated h
uggccgcgcccaggggca

SEQ ID NO: 191068 - RNA, 15 nt, Human herpesvirus 8 (Kaposi`s sarcoma-associated h
uggccggguuuacuc

SEQ ID NO: 191069 - RNA, 20 nt, Human herpesvirus 8 (Kaposi`s sarcoma-associated h
uggccucgaaggcacgguga

SEQ ID NO: 191070 - RNA, 12 nt, Human herpesvirus 8 (Kaposi`s sarcoma-associated h
uggagcacuuuu

SEQ ID NO: 191071 - RNA, 16 nt, Human herpesvirus 8 (Kaposi`s sarcoma-associated h
uggagcacuuuuggaa

SEQ ID NO: 191072 - RNA, 23 nt, Human herpesvirus 8 (Kaposi`s sarcoma-associated h
uggagcacuuuuggaaaacgugg

SEQ ID NO: 191073 - RNA, 17 nt, Human herpesvirus 8 (Kaposi`s sarcoma-associated h
uggagacguuagcuuca

SEQ ID NO: 191074 - RNA, 20 nt, Human herpesvirus 8 (Kaposi`s sarcoma-associated h
uggagcaagacgccagacag

SEQ ID NO: 191075 - RNA, 21 nt, Human herpesvirus 8 (Kaposi`s sarcoma-associated h
uggagcaagacgccagacagc

SEQ ID NO: 191076 - RNA, 18 nt, Human herpesvirus 8 (Kaposi`s sarcoma-associated h
uggagcccgagaucaucu

SEQ ID NO: 191077 - RNA, 13 nt, Human herpesvirus 8 (Kaposi`s sarcoma-associated h
uggauauagacuu

SEQ ID NO: 191078 - RNA, 18 nt, Human herpesvirus 8 (Kaposi`s sarcoma-associated h
uggaggcuaggugcccag

SEQ ID NO: 191079 - RNA, 16 nt, Human herpesvirus 8 (Kaposi`s sarcoma-associated h
uggaguggaguggugu

SEQ ID NO: 191080 - RNA, 17 nt, Human herpesvirus 8 (Kaposi`s sarcoma-associated h
uggagugguguguuuca

SEQ ID NO: 191081 - RNA, 17 nt, Human herpesvirus 8 (Kaposi`s sarcoma-associated h
uggaguuaaagcuguca

SEQ ID NO: 191082 - RNA, 20 nt, Human herpesvirus 8 (Kaposi`s sarcoma-associated h
uuuaagauuaagauuauaau

SEQ ID NO: 191083 - RNA, 15 nt, Human herpesvirus 8 (Kaposi`s sarcoma-associated h
uuuaaggcagucuau

SEQ ID NO: 191084 - RNA, 22 nt, Human herpesvirus 8 (Kaposi`s sarcoma-associated h
uuuagcauccuaucgcacagac

SEQ ID NO: 191085 - RNA, 14 nt, Human herpesvirus 8 (Kaposi`s sarcoma-associated h
uuuaucauccacgc

SEQ ID NO: 191086 - RNA, 15 nt, Human herpesvirus 8 (Kaposi`s sarcoma-associated h
uuuaucaugugaaca

SEQ ID NO: 191087 - RNA, 15 nt, Human herpesvirus 8 (Kaposi`s sarcoma-associated h
uuuccaaggccugug

SEQ ID NO: 191088 - RNA, 22 nt, Human herpesvirus 8 (Kaposi`s sarcoma-associated h
uuucccacgugcaccagcucag

SEQ ID NO: 191089 - RNA, 16 nt, Human herpesvirus 8 (Kaposi`s sarcoma-associated h
uuucauagccuuguug

SEQ ID NO: 191090 - RNA, 14 nt, Human herpesvirus 8 (Kaposi`s sarcoma-associated h
uugucuuaaguaca

SEQ ID NO: 191091 - RNA, 17 nt, Human herpesvirus 8 (Kaposi`s sarcoma-associated h
uugucuuaaguacauua

SEQ ID NO: 191092 - RNA, 13 nt, Human herpesvirus 8 (Kaposi`s sarcoma-associated h
uugucggauuuug

SEQ ID NO: 191093 - RNA, 18 nt, Human herpesvirus 8 (Kaposi`s sarcoma-associated h
uugucggauuuugauaug

SEQ ID NO: 191094 - RNA, 19 nt, Human herpesvirus 8 (Kaposi`s sarcoma-associated h
uugucggauuuugauaugu

SEQ ID NO: 191095 - RNA, 20 nt, Human herpesvirus 8 (Kaposi`s sarcoma-associated h
uuuaaccgcuaagggauuau

SEQ ID NO: 191096 - RNA, 19 nt, Human herpesvirus 8 (Kaposi`s sarcoma-associated h
uuuaaaaccgcccacugau

SEQ ID NO: 191097 - RNA, 22 nt, Human herpesvirus 8 (Kaposi`s sarcoma-associated h
uugucacaaauuuuaacagcca

SEQ ID NO: 191098 - RNA, 19 nt, Human herpesvirus 8 (Kaposi`s sarcoma-associated h
uugucagguucacuuggga

SEQ ID NO: 191099 - RNA, 19 nt, Human herpesvirus 8 (Kaposi`s sarcoma-associated h
uuugaaaaaaaauaaacau

SEQ ID NO: 191100 - RNA, 15 nt, Human herpesvirus 8 (Kaposi`s sarcoma-associated h
uuucuggguuuacau

SEQ ID NO: 191101 - RNA, 22 nt, Human herpesvirus 8 (Kaposi`s sarcoma-associated h
uuuccgucguggaugagagggu

SEQ ID NO: 191102 - RNA, 20 nt, Human herpesvirus 8 (Kaposi`s sarcoma-associated h
uuuccguuagugaccugcug

SEQ ID NO: 191103 - RNA, 17 nt, Human herpesvirus 8 (Kaposi`s sarcoma-associated h
uuucuguaaucaucgca

SEQ ID NO: 191104 - RNA, 14 nt, Human herpesvirus 8 (Kaposi`s sarcoma-associated h
uuuccucuugcgcu

SEQ ID NO: 191105 - RNA, 16 nt, Human herpesvirus 8 (Kaposi`s sarcoma-associated h
uuugcagugucuaugu

SEQ ID NO: 191106 - RNA, 16 nt, Human herpesvirus 8 (Kaposi`s sarcoma-associated h
uuugcgcuauuugccg

SEQ ID NO: 191107 - RNA, 18 nt, Human herpesvirus 8 (Kaposi`s sarcoma-associated h
uuugauauuacagacucu

SEQ ID NO: 191108 - RNA, 20 nt, Human herpesvirus 8 (Kaposi`s sarcoma-associated h
uuugauauuacagacucugu

SEQ ID NO: 191109 - RNA, 16 nt, Human herpesvirus 8 (Kaposi`s sarcoma-associated h
uuugacaacacgcacc

SEQ ID NO: 191110 - RNA, 12 nt, Human herpesvirus 8 (Kaposi`s sarcoma-associated h
uuuuaagacaaa

SEQ ID NO: 191111 - RNA, 22 nt, Human herpesvirus 8 (Kaposi`s sarcoma-associated h
uuuuaacaguuuggugcaaagu

SEQ ID NO: 191112 - RNA, 18 nt, Human herpesvirus 8 (Kaposi`s sarcoma-associated h
uuugucuucgccuaugaa

SEQ ID NO: 191113 - RNA, 13 nt, Human herpesvirus 8 (Kaposi`s sarcoma-associated h
uuuguuacuauaa

SEQ ID NO: 191114 - RNA, 22 nt, Human herpesvirus 8 (Kaposi`s sarcoma-associated h
uuuguguuacacuauguagggu

SEQ ID NO: 191115 - RNA, 22 nt, Human herpesvirus 8 (Kaposi`s sarcoma-associated h
uuugugauagcuggagugcuga

SEQ ID NO: 191116 - RNA, 18 nt, Human herpesvirus 8 (Kaposi`s sarcoma-associated h
uuugugcucgacggagac

SEQ ID NO: 191117 - RNA, 21 nt, Human herpesvirus 8 (Kaposi`s sarcoma-associated h
uuuugacaagucuucuuguca

SEQ ID NO: 191118 - RNA, 22 nt, Human herpesvirus 8 (Kaposi`s sarcoma-associated h
uuuugacaagucuucuugucac

SEQ ID NO: 191119 - RNA, 18 nt, Human herpesvirus 8 (Kaposi`s sarcoma-associated h
uuuucucgugugcccuuc

SEQ ID NO: 191120 - RNA, 14 nt, Human herpesvirus 8 (Kaposi`s sarcoma-associated h
uuuucggacgcuau

SEQ ID NO: 191121 - RNA, 19 nt, Human herpesvirus 8 (Kaposi`s sarcoma-associated h
aacauuaccaauacuauua

SEQ ID NO: 191122 - RNA, 21 nt, Human herpesvirus 8 (Kaposi`s sarcoma-associated h
aacauggagguguguauccca

SEQ ID NO: 191123 - RNA, 13 nt, Human herpesvirus 8 (Kaposi`s sarcoma-associated h
uuuuuccagugua

SEQ ID NO: 191124 - RNA, 17 nt, Human herpesvirus 8 (Kaposi`s sarcoma-associated h
uuuuuccaucuccauga

SEQ ID NO: 191125 - RNA, 21 nt, Human herpesvirus 8 (Kaposi`s sarcoma-associated h
uuuuucacccaccacggaaua

SEQ ID NO: 191126 - RNA, 16 nt, Human herpesvirus 8 (Kaposi`s sarcoma-associated h
uuuugauaugugugcc

SEQ ID NO: 191127 - RNA, 15 nt, Human herpesvirus 8 (Kaposi`s sarcoma-associated h
uuuugcauugcucug

SEQ ID NO: 191128 - RNA, 16 nt, Human herpesvirus 8 (Kaposi`s sarcoma-associated h
aaccgaugguuuccua

SEQ ID NO: 191129 - RNA, 20 nt, Human herpesvirus 8 (Kaposi`s sarcoma-associated h
aaccgcaaagauaagccaau

SEQ ID NO: 191130 - RNA, 21 nt, Human herpesvirus 8 (Kaposi`s sarcoma-associated h
aaccccgcgcguaucucucua

SEQ ID NO: 191131 - RNA, 12 nt, Human herpesvirus 8 (Kaposi`s sarcoma-associated h
aacccacacugg

SEQ ID NO: 191132 - RNA, 21 nt, Human herpesvirus 8 (Kaposi`s sarcoma-associated h
aaccauuuuuuacggacaaua

SEQ ID NO: 191133 - RNA, 13 nt, Human herpesvirus 8 (Kaposi`s sarcoma-associated h
aaccacucauaaa

SEQ ID NO: 191134 - RNA, 17 nt, Human herpesvirus 8 (Kaposi`s sarcoma-associated h
aaccacggcgcuguaca

SEQ ID NO: 191135 - RNA, 17 nt, Human herpesvirus 8 (Kaposi`s sarcoma-associated h
aaccagcuacgcacuga

SEQ ID NO: 191136 - RNA, 16 nt, Human herpesvirus 8 (Kaposi`s sarcoma-associated h
aagaaaaucgaagcca

SEQ ID NO: 191137 - RNA, 13 nt, Human herpesvirus 8 (Kaposi`s sarcoma-associated h
aagaaaggugacu

SEQ ID NO: 191138 - RNA, 20 nt, Human herpesvirus 8 (Kaposi`s sarcoma-associated h
aagaaauccgagcaccucag

SEQ ID NO: 191139 - RNA, 16 nt, Human herpesvirus 8 (Kaposi`s sarcoma-associated h
aagaaauuuuauguca

SEQ ID NO: 191140 - RNA, 19 nt, Human herpesvirus 8 (Kaposi`s sarcoma-associated h
aacuuuuccauugcacuca

SEQ ID NO: 191141 - RNA, 19 nt, Human herpesvirus 8 (Kaposi`s sarcoma-associated h
aacugucgagacaugucac

SEQ ID NO: 191142 - RNA, 21 nt, Human herpesvirus 8 (Kaposi`s sarcoma-associated h
aacugucuccagaagagcauu

SEQ ID NO: 191143 - RNA, 22 nt, Human herpesvirus 8 (Kaposi`s sarcoma-associated h
aacugggcacggaugacaggga

SEQ ID NO: 191144 - RNA, 23 nt, Human herpesvirus 8 (Kaposi`s sarcoma-associated h
aacugcaugcucggcaacauuca

SEQ ID NO: 191145 - RNA, 11 nt, Human herpesvirus 8 (Kaposi`s sarcoma-associated h
aacugccaaag

SEQ ID NO: 191146 - RNA, 19 nt, Human herpesvirus 8 (Kaposi`s sarcoma-associated h
aaccgucuccgccagggac

SEQ ID NO: 191147 - RNA, 19 nt, Human herpesvirus 8 (Kaposi`s sarcoma-associated h
aaccggcuuguacagugag

SEQ ID NO: 191148 - RNA, 21 nt, Human herpesvirus 8 (Kaposi`s sarcoma-associated h
aaccuaaaaaaugugcaugug

SEQ ID NO: 191149 - RNA, 14 nt, Human herpesvirus 8 (Kaposi`s sarcoma-associated h
aacuaccagccauc

SEQ ID NO: 191150 - RNA, 18 nt, Human herpesvirus 8 (Kaposi`s sarcoma-associated h
aacuaauauuaaccauag

SEQ ID NO: 191151 - RNA, 22 nt, Human herpesvirus 8 (Kaposi`s sarcoma-associated h
aacuaaccacucauaaaaccuc

SEQ ID NO: 191152 - RNA, 12 nt, Human herpesvirus 8 (Kaposi`s sarcoma-associated h
aauacauuguga

SEQ ID NO: 191153 - RNA, 13 nt, Human herpesvirus 8 (Kaposi`s sarcoma-associated h
aauacccuguuuc

SEQ ID NO: 191154 - RNA, 22 nt, Human herpesvirus 8 (Kaposi`s sarcoma-associated h
aauacagggguaucacuuccuc

SEQ ID NO: 191155 - RNA, 23 nt, Human herpesvirus 8 (Kaposi`s sarcoma-associated h
aauacagugcuaaucaggguaga

SEQ ID NO: 191156 - RNA, 23 nt, Human herpesvirus 8 (Kaposi`s sarcoma-associated h
aauacauaacacacacaaagaca

SEQ ID NO: 191157 - RNA, 14 nt, Human herpesvirus 8 (Kaposi`s sarcoma-associated h
aauacaaaaacaca

SEQ ID NO: 191158 - RNA, 17 nt, Human herpesvirus 8 (Kaposi`s sarcoma-associated h
aauacaaaaacacaauc

SEQ ID NO: 191159 - RNA, 19 nt, Human herpesvirus 8 (Kaposi`s sarcoma-associated h
aauacaaaaacacaaucac

SEQ ID NO: 191160 - RNA, 23 nt, Human herpesvirus 8 (Kaposi`s sarcoma-associated h
aaguuggccuccagcaaagcaca

SEQ ID NO: 191161 - RNA, 18 nt, Human herpesvirus 8 (Kaposi`s sarcoma-associated h
aauaacuuuauuacaggu

SEQ ID NO: 191162 - RNA, 18 nt, Human herpesvirus 8 (Kaposi`s sarcoma-associated h
aauauaacagcaacaugu

SEQ ID NO: 191163 - RNA, 23 nt, Human herpesvirus 8 (Kaposi`s sarcoma-associated h
aaucacgguugcaccaagcacaa

SEQ ID NO: 191164 - RNA, 13 nt, Human herpesvirus 8 (Kaposi`s sarcoma-associated h
aauauuaaccaua

SEQ ID NO: 191165 - RNA, 16 nt, Human herpesvirus 8 (Kaposi`s sarcoma-associated h
aauauuaaccauagug

SEQ ID NO: 191166 - RNA, 19 nt, Human herpesvirus 8 (Kaposi`s sarcoma-associated h
aaucaggagggucaaugaa

SEQ ID NO: 191167 - RNA, 15 nt, Human herpesvirus 8 (Kaposi`s sarcoma-associated h
aaucagugguugcca

SEQ ID NO: 191168 - RNA, 23 nt, Human herpesvirus 8 (Kaposi`s sarcoma-associated h
aaucaguguccagccacaucagc

SEQ ID NO: 191169 - RNA, 12 nt, Human herpesvirus 8 (Kaposi`s sarcoma-associated h
aagcuaugguuu

SEQ ID NO: 191170 - RNA, 16 nt, Human herpesvirus 8 (Kaposi`s sarcoma-associated h
aagaagcgcacccagc

SEQ ID NO: 191171 - RNA, 17 nt, Human herpesvirus 8 (Kaposi`s sarcoma-associated h
aagccguucccaugagc

SEQ ID NO: 191172 - RNA, 19 nt, Human herpesvirus 8 (Kaposi`s sarcoma-associated h
aagcgaucacgacggauuu

SEQ ID NO: 191173 - RNA, 21 nt, Human herpesvirus 8 (Kaposi`s sarcoma-associated h
aaguggaguuaaccuacagau

SEQ ID NO: 191174 - RNA, 23 nt, Human herpesvirus 8 (Kaposi`s sarcoma-associated h
aaguguucccaaaaaaccuuaau

SEQ ID NO: 191175 - RNA, 12 nt, Human herpesvirus 8 (Kaposi`s sarcoma-associated h
aaguuaaaccaa

SEQ ID NO: 191176 - RNA, 19 nt, Human herpesvirus 8 (Kaposi`s sarcoma-associated h
aaguauuuaaagcugggua

SEQ ID NO: 191177 - RNA, 14 nt, Human herpesvirus 8 (Kaposi`s sarcoma-associated h
aaguacuuuuccau

SEQ ID NO: 191178 - RNA, 21 nt, Human herpesvirus 8 (Kaposi`s sarcoma-associated h
aaguacauuaaaaggacauug

SEQ ID NO: 191179 - RNA, 19 nt, Human herpesvirus 8 (Kaposi`s sarcoma-associated h
aaggggggggauuuaucua

SEQ ID NO: 191180 - RNA, 19 nt, Human herpesvirus 8 (Kaposi`s sarcoma-associated h
aaggcgggaucaucugcag

SEQ ID NO: 191181 - RNA, 23 nt, Human herpesvirus 8 (Kaposi`s sarcoma-associated h
aauguguagguuguuauuaucaa

SEQ ID NO: 191182 - RNA, 24 nt, Human herpesvirus 8 (Kaposi`s sarcoma-associated h
aauuaccguccgcagaucauggau

SEQ ID NO: 191183 - RNA, 17 nt, Human herpesvirus 8 (Kaposi`s sarcoma-associated h
aauuacaggagaacagc

SEQ ID NO: 191184 - RNA, 18 nt, Human herpesvirus 8 (Kaposi`s sarcoma-associated h
aauuauugcaccauuuau

SEQ ID NO: 191185 - RNA, 22 nt, Human herpesvirus 8 (Kaposi`s sarcoma-associated h
aauuauggaggcuaggugccca

SEQ ID NO: 191186 - RNA, 16 nt, Human herpesvirus 8 (Kaposi`s sarcoma-associated h
aauucaaggaucucaa

SEQ ID NO: 191187 - RNA, 18 nt, Human herpesvirus 8 (Kaposi`s sarcoma-associated h
aauucaaggaucucaaaa

SEQ ID NO: 191188 - RNA, 14 nt, Human herpesvirus 8 (Kaposi`s sarcoma-associated h
aauucgcagggaga

SEQ ID NO: 191189 - RNA, 18 nt, Human herpesvirus 8 (Kaposi`s sarcoma-associated h
aauucgcgugguccugga

SEQ ID NO: 191190 - RNA, 18 nt, Human herpesvirus 8 (Kaposi`s sarcoma-associated h
aauuguaauguguuuuau

SEQ ID NO: 191191 - RNA, 17 nt, Human herpesvirus 8 (Kaposi`s sarcoma-associated h
aauuggauauagacuua

SEQ ID NO: 191192 - RNA, 19 nt, Human herpesvirus 8 (Kaposi`s sarcoma-associated h
aauuggauauagacuuaaa

SEQ ID NO: 191193 - RNA, 14 nt, Human herpesvirus 8 (Kaposi`s sarcoma-associated h
aauggucuccagaa

SEQ ID NO: 191194 - RNA, 13 nt, Human herpesvirus 8 (Kaposi`s sarcoma-associated h
aauguacugccau

SEQ ID NO: 191195 - RNA, 17 nt, Human herpesvirus 8 (Kaposi`s sarcoma-associated h
aauguacugccaugaaa

SEQ ID NO: 191196 - RNA, 19 nt, Human herpesvirus 8 (Kaposi`s sarcoma-associated h
aaugucagguuccacccag

SEQ ID NO: 191197 - RNA, 21 nt, Human herpesvirus 8 (Kaposi`s sarcoma-associated h
aaugcggagaggaaugguggc

SEQ ID NO: 191198 - RNA, 17 nt, Human herpesvirus 8 (Kaposi`s sarcoma-associated h
aaucugaauaugacgag

SEQ ID NO: 191199 - RNA, 18 nt, Human herpesvirus 8 (Kaposi`s sarcoma-associated h
aaucugagaaaaguuaaa

SEQ ID NO: 191200 - RNA, 17 nt, Human herpesvirus 8 (Kaposi`s sarcoma-associated h
aaucucucauagacuuu

SEQ ID NO: 191201 - RNA, 17 nt, Human herpesvirus 8 (Kaposi`s sarcoma-associated h
aaucuggcaugcuggga

SEQ ID NO: 191202 - RNA, 16 nt, Human herpesvirus 8 (Kaposi`s sarcoma-associated h
aaucuguugaauguga

SEQ ID NO: 191203 - RNA, 14 nt, Human herpesvirus 8 (Kaposi`s sarcoma-associated h
aaugcaaugcuucc

SEQ ID NO: 191204 - RNA, 19 nt, Human herpesvirus 8 (Kaposi`s sarcoma-associated h
aaugcauauggacuguuaa

SEQ ID NO: 191205 - RNA, 22 nt, Human herpesvirus 8 (Kaposi`s sarcoma-associated h
aaugcccagaaugaaggacaua

SEQ ID NO: 191206 - RNA, 19 nt, Human herpesvirus 8 (Kaposi`s sarcoma-associated h
aaagggggugguauuuccu

SEQ ID NO: 191207 - RNA, 16 nt, Human herpesvirus 8 (Kaposi`s sarcoma-associated h
aaaggccgcuuguauu

SEQ ID NO: 191208 - RNA, 19 nt, Human herpesvirus 8 (Kaposi`s sarcoma-associated h
aaagcuaugguuuuucaau

SEQ ID NO: 191209 - RNA, 24 nt, Human herpesvirus 8 (Kaposi`s sarcoma-associated h
aaagcuaugguuuuucaauaaagu

SEQ ID NO: 191210 - RNA, 12 nt, Human herpesvirus 8 (Kaposi`s sarcoma-associated h
aaagcugucacu

SEQ ID NO: 191211 - RNA, 17 nt, Human herpesvirus 8 (Kaposi`s sarcoma-associated h
aaagcugagccacaaac

SEQ ID NO: 191212 - RNA, 15 nt, Human herpesvirus 8 (Kaposi`s sarcoma-associated h
gacaagcugaugugg

SEQ ID NO: 191213 - RNA, 19 nt, Human herpesvirus 8 (Kaposi`s sarcoma-associated h
aaagcagcgcccacuggug

SEQ ID NO: 191214 - RNA, 18 nt, Human herpesvirus 8 (Kaposi`s sarcoma-associated h
aaagcggauugaguguaa

SEQ ID NO: 191215 - RNA, 17 nt, Human herpesvirus 8 (Kaposi`s sarcoma-associated h
aaacucccccaaccucu

SEQ ID NO: 191216 - RNA, 15 nt, Human herpesvirus 8 (Kaposi`s sarcoma-associated h
aaacuaccagccauc

SEQ ID NO: 191217 - RNA, 18 nt, Human herpesvirus 8 (Kaposi`s sarcoma-associated h
aaacggccaaagcaaagu

SEQ ID NO: 191218 - RNA, 23 nt, Human herpesvirus 8 (Kaposi`s sarcoma-associated h
aaacguggcugaugcucuggcca

SEQ ID NO: 191219 - RNA, 18 nt, Human herpesvirus 8 (Kaposi`s sarcoma-associated h
gacacacggaaggcagug

SEQ ID NO: 191220 - RNA, 21 nt, Human herpesvirus 8 (Kaposi`s sarcoma-associated h
gacaccaaagacaaguaccac

SEQ ID NO: 191221 - RNA, 15 nt, Human herpesvirus 8 (Kaposi`s sarcoma-associated h
gacaaggaguggcug

SEQ ID NO: 191222 - RNA, 19 nt, Human herpesvirus 8 (Kaposi`s sarcoma-associated h
gacaagucccagcaauaaa

SEQ ID NO: 191223 - RNA, 20 nt, Human herpesvirus 8 (Kaposi`s sarcoma-associated h
gacaagucuucuugucacuc

SEQ ID NO: 191224 - RNA, 17 nt, Human herpesvirus 8 (Kaposi`s sarcoma-associated h
gacagcaacacccagcu

SEQ ID NO: 191225 - RNA, 11 nt, Human herpesvirus 8 (Kaposi`s sarcoma-associated h
gacagagccag

SEQ ID NO: 191226 - RNA, 17 nt, Human herpesvirus 8 (Kaposi`s sarcoma-associated h
gacagcuuucagagucu

SEQ ID NO: 191227 - RNA, 22 nt, Human herpesvirus 8 (Kaposi`s sarcoma-associated h
gacagaacaccguuuuauuuga

SEQ ID NO: 191228 - RNA, 20 nt, Human herpesvirus 8 (Kaposi`s sarcoma-associated h
gacccggcaacacuggacac

SEQ ID NO: 191229 - RNA, 18 nt, Human herpesvirus 8 (Kaposi`s sarcoma-associated h
gaccccgugauccaggag

SEQ ID NO: 191230 - RNA, 13 nt, Human herpesvirus 8 (Kaposi`s sarcoma-associated h
gaccguacauccu

SEQ ID NO: 191231 - RNA, 14 nt, Human herpesvirus 8 (Kaposi`s sarcoma-associated h
aaauaaaacggugu

SEQ ID NO: 191232 - RNA, 14 nt, Human herpesvirus 8 (Kaposi`s sarcoma-associated h
gaccucuccggcgg

SEQ ID NO: 191233 - RNA, 17 nt, Human herpesvirus 8 (Kaposi`s sarcoma-associated h
aaacgccccucuuggcu

SEQ ID NO: 191234 - RNA, 20 nt, Human herpesvirus 8 (Kaposi`s sarcoma-associated h
aaacggagaccuacacugca

SEQ ID NO: 191235 - RNA, 16 nt, Human herpesvirus 8 (Kaposi`s sarcoma-associated h
aaacgaagcaaagugu

SEQ ID NO: 191236 - RNA, 21 nt, Human herpesvirus 8 (Kaposi`s sarcoma-associated h
aaacgaagcaaagugucucac

SEQ ID NO: 191237 - RNA, 20 nt, Human herpesvirus 8 (Kaposi`s sarcoma-associated h
gaauaacuuuauuacaggua

SEQ ID NO: 191238 - RNA, 23 nt, Human herpesvirus 8 (Kaposi`s sarcoma-associated h
gaagcgccagcgucagcagcaag

SEQ ID NO: 191239 - RNA, 16 nt, Human herpesvirus 8 (Kaposi`s sarcoma-associated h
gaagcauccggacuga

SEQ ID NO: 191240 - RNA, 20 nt, Human herpesvirus 8 (Kaposi`s sarcoma-associated h
gaagcaucugguccuaagag

SEQ ID NO: 191241 - RNA, 13 nt, Human herpesvirus 8 (Kaposi`s sarcoma-associated h
gaagcauguugcg

SEQ ID NO: 191242 - RNA, 16 nt, Human herpesvirus 8 (Kaposi`s sarcoma-associated h
gaaguuucagagccuu

SEQ ID NO: 191243 - RNA, 23 nt, Human herpesvirus 8 (Kaposi`s sarcoma-associated h
gaaguucauauucccaccuccac

SEQ ID NO: 191244 - RNA, 19 nt, Human herpesvirus 8 (Kaposi`s sarcoma-associated h
gaaguuggccuccagcaaa

SEQ ID NO: 191245 - RNA, 17 nt, Human herpesvirus 8 (Kaposi`s sarcoma-associated h
gaagucccgaugccacu

SEQ ID NO: 191246 - RNA, 24 nt, Human herpesvirus 8 (Kaposi`s sarcoma-associated h
gaagcaguuucaggacgcacagca

SEQ ID NO: 191247 - RNA, 13 nt, Human herpesvirus 8 (Kaposi`s sarcoma-associated h
cuuguacaugugu

SEQ ID NO: 191248 - RNA, 18 nt, Human herpesvirus 8 (Kaposi`s sarcoma-associated h
cuuuaccacagagaucac

SEQ ID NO: 191249 - RNA, 22 nt, Human herpesvirus 8 (Kaposi`s sarcoma-associated h
cuuuaccacagagaucacggcc

SEQ ID NO: 191250 - RNA, 18 nt, Human herpesvirus 8 (Kaposi`s sarcoma-associated h
cuuguuuauaacaaugaa

SEQ ID NO: 191251 - RNA, 20 nt, Human herpesvirus 8 (Kaposi`s sarcoma-associated h
gaacacacggacaacggcua

SEQ ID NO: 191252 - RNA, 21 nt, Human herpesvirus 8 (Kaposi`s sarcoma-associated h
gaacacauuaagagugccacu

SEQ ID NO: 191253 - RNA, 16 nt, Human herpesvirus 8 (Kaposi`s sarcoma-associated h
gaacacgagauagugu

SEQ ID NO: 191254 - RNA, 16 nt, Human herpesvirus 8 (Kaposi`s sarcoma-associated h
gaacaguacccacgaa

SEQ ID NO: 191255 - RNA, 17 nt, Human herpesvirus 8 (Kaposi`s sarcoma-associated h
gaacaguacccacgaaa

SEQ ID NO: 191256 - RNA, 18 nt, Human herpesvirus 8 (Kaposi`s sarcoma-associated h
gaacaguacccacgaaau

SEQ ID NO: 191257 - RNA, 20 nt, Human herpesvirus 8 (Kaposi`s sarcoma-associated h
gaaccugacagagcacccug

SEQ ID NO: 191258 - RNA, 19 nt, Human herpesvirus 8 (Kaposi`s sarcoma-associated h
gaaccgucgugcuuaccca

SEQ ID NO: 191259 - RNA, 16 nt, Human herpesvirus 8 (Kaposi`s sarcoma-associated h
gaaccaugccagacuu

SEQ ID NO: 191260 - RNA, 12 nt, Human herpesvirus 8 (Kaposi`s sarcoma-associated h
gagcguauucuc

SEQ ID NO: 191261 - RNA, 14 nt, Human herpesvirus 8 (Kaposi`s sarcoma-associated h
gagcguauucucag

SEQ ID NO: 191262 - RNA, 14 nt, Human herpesvirus 8 (Kaposi`s sarcoma-associated h
gaggaugaggaaga

SEQ ID NO: 191263 - RNA, 15 nt, Human herpesvirus 8 (Kaposi`s sarcoma-associated h
gaggcuaggugccca

SEQ ID NO: 191264 - RNA, 22 nt, Human herpesvirus 8 (Kaposi`s sarcoma-associated h
gaggguuuauagaagagccuga

SEQ ID NO: 191265 - RNA, 17 nt, Human herpesvirus 8 (Kaposi`s sarcoma-associated h
gagguaccccaugcauu

SEQ ID NO: 191266 - RNA, 17 nt, Human herpesvirus 8 (Kaposi`s sarcoma-associated h
gaggugcucuucccaca

SEQ ID NO: 191267 - RNA, 20 nt, Human herpesvirus 8 (Kaposi`s sarcoma-associated h
gagacucaauuggaugcuau

SEQ ID NO: 191268 - RNA, 21 nt, Human herpesvirus 8 (Kaposi`s sarcoma-associated h
gagacugcaggccaucgcucu

SEQ ID NO: 191269 - RNA, 14 nt, Human herpesvirus 8 (Kaposi`s sarcoma-associated h
gagcggacgccauu

SEQ ID NO: 191270 - RNA, 16 nt, Human herpesvirus 8 (Kaposi`s sarcoma-associated h
gagccuucacggcaca

SEQ ID NO: 191271 - RNA, 22 nt, Human herpesvirus 8 (Kaposi`s sarcoma-associated h
gagccuucacggcacacuacuc

SEQ ID NO: 191272 - RNA, 18 nt, Human herpesvirus 8 (Kaposi`s sarcoma-associated h
gagccguccaccauuccu

SEQ ID NO: 191273 - RNA, 21 nt, Human herpesvirus 8 (Kaposi`s sarcoma-associated h
gagacuggugcgcacaggcca

SEQ ID NO: 191274 - RNA, 12 nt, Human herpesvirus 8 (Kaposi`s sarcoma-associated h
gagagacugcag

SEQ ID NO: 191275 - RNA, 21 nt, Human herpesvirus 8 (Kaposi`s sarcoma-associated h
aaaugggccaugacaacugcc

SEQ ID NO: 191276 - RNA, 22 nt, Human herpesvirus 8 (Kaposi`s sarcoma-associated h
aaaugggccaugacaacugcca

SEQ ID NO: 191277 - RNA, 15 nt, Human herpesvirus 8 (Kaposi`s sarcoma-associated h
gacuaaaaaggccac

SEQ ID NO: 191278 - RNA, 16 nt, Human herpesvirus 8 (Kaposi`s sarcoma-associated h
aaauagcucauuuucu

SEQ ID NO: 191279 - RNA, 17 nt, Human herpesvirus 8 (Kaposi`s sarcoma-associated h
gacuuacugcagcacua

SEQ ID NO: 191280 - RNA, 20 nt, Human herpesvirus 8 (Kaposi`s sarcoma-associated h
gacugccacggccgccuuug

SEQ ID NO: 191281 - RNA, 14 nt, Human herpesvirus 8 (Kaposi`s sarcoma-associated h
gacuggcucugaua

SEQ ID NO: 191282 - RNA, 17 nt, Human herpesvirus 8 (Kaposi`s sarcoma-associated h
gacuaucagguagcaaa

SEQ ID NO: 191283 - RNA, 22 nt, Human herpesvirus 8 (Kaposi`s sarcoma-associated h
gacuaggaggaagagcacuguu

SEQ ID NO: 191284 - RNA, 13 nt, Human herpesvirus 8 (Kaposi`s sarcoma-associated h
gacuacugugaag

SEQ ID NO: 191285 - RNA, 18 nt, Human herpesvirus 8 (Kaposi`s sarcoma-associated h
gacuccaguuuaaaagac

SEQ ID NO: 191286 - RNA, 13 nt, Human herpesvirus 8 (Kaposi`s sarcoma-associated h
gcaaaauacauuu

SEQ ID NO: 191287 - RNA, 15 nt, Human herpesvirus 8 (Kaposi`s sarcoma-associated h
gcaaaauacauuuua

SEQ ID NO: 191288 - RNA, 13 nt, Human herpesvirus 8 (Kaposi`s sarcoma-associated h
gauuucucuaucu

SEQ ID NO: 191289 - RNA, 14 nt, Human herpesvirus 8 (Kaposi`s sarcoma-associated h
gauuugauacaggg

SEQ ID NO: 191290 - RNA, 21 nt, Human herpesvirus 8 (Kaposi`s sarcoma-associated h
gauuuacgguggugugccugg

SEQ ID NO: 191291 - RNA, 21 nt, Human herpesvirus 8 (Kaposi`s sarcoma-associated h
gauuuaaaaccgcccacugau

SEQ ID NO: 191292 - RNA, 11 nt, Human herpesvirus 8 (Kaposi`s sarcoma-associated h
gauuguaucag

SEQ ID NO: 191293 - RNA, 16 nt, Human herpesvirus 8 (Kaposi`s sarcoma-associated h
gauugcucaagcaaca

SEQ ID NO: 191294 - RNA, 14 nt, Human herpesvirus 8 (Kaposi`s sarcoma-associated h
gauuaacugucuac

SEQ ID NO: 191295 - RNA, 12 nt, Human herpesvirus 8 (Kaposi`s sarcoma-associated h
gauuagcacugu

SEQ ID NO: 191296 - RNA, 13 nt, Human herpesvirus 8 (Kaposi`s sarcoma-associated h
gauuagcacugua

SEQ ID NO: 191297 - RNA, 14 nt, Human herpesvirus 8 (Kaposi`s sarcoma-associated h
gauuagcacuguau

SEQ ID NO: 191298 - RNA, 18 nt, Human herpesvirus 8 (Kaposi`s sarcoma-associated h
gauuagccugcagugugg

SEQ ID NO: 191299 - RNA, 23 nt, Human herpesvirus 8 (Kaposi`s sarcoma-associated h
gauguccugauuuuccagggaca

SEQ ID NO: 191300 - RNA, 17 nt, Human herpesvirus 8 (Kaposi`s sarcoma-associated h
gauuaaaaaccacucac

SEQ ID NO: 191301 - RNA, 18 nt, Human herpesvirus 8 (Kaposi`s sarcoma-associated h
gauugacuggaacgccau

SEQ ID NO: 191302 - RNA, 14 nt, Human herpesvirus 8 (Kaposi`s sarcoma-associated h
gauucgcacagaaa

SEQ ID NO: 191303 - RNA, 20 nt, Human herpesvirus 8 (Kaposi`s sarcoma-associated h
gauucgcacagaaaucccug

SEQ ID NO: 191304 - RNA, 20 nt, Human herpesvirus 8 (Kaposi`s sarcoma-associated h
gauucugacagacaacacua

SEQ ID NO: 191305 - RNA, 23 nt, Human herpesvirus 8 (Kaposi`s sarcoma-associated h
gauucacgguagagaagagacca

SEQ ID NO: 191306 - RNA, 21 nt, Human herpesvirus 8 (Kaposi`s sarcoma-associated h
gauucaguugaucgauuucug

SEQ ID NO: 191307 - RNA, 19 nt, Human herpesvirus 8 (Kaposi`s sarcoma-associated h
gauuaugguuccguucucc

SEQ ID NO: 191308 - RNA, 13 nt, Human herpesvirus 8 (Kaposi`s sarcoma-associated h
gauuauaccggga

SEQ ID NO: 191309 - RNA, 18 nt, Human herpesvirus 8 (Kaposi`s sarcoma-associated h
gaugcgaaugugccagca

SEQ ID NO: 191310 - RNA, 21 nt, Human herpesvirus 8 (Kaposi`s sarcoma-associated h
gaugccgcgcuuggguuggcg

SEQ ID NO: 191311 - RNA, 18 nt, Human herpesvirus 8 (Kaposi`s sarcoma-associated h
gaugcgcggcacauugug

SEQ ID NO: 191312 - RNA, 13 nt, Human herpesvirus 8 (Kaposi`s sarcoma-associated h
gaugcggguuggg

SEQ ID NO: 191313 - RNA, 15 nt, Human herpesvirus 8 (Kaposi`s sarcoma-associated h
gaugguguuggacac

SEQ ID NO: 191314 - RNA, 15 nt, Human herpesvirus 8 (Kaposi`s sarcoma-associated h
gaugaauaugauccu

SEQ ID NO: 191315 - RNA, 13 nt, Human herpesvirus 8 (Kaposi`s sarcoma-associated h
gaugaaugcuucc

SEQ ID NO: 191316 - RNA, 21 nt, Human herpesvirus 8 (Kaposi`s sarcoma-associated h
gauaagccaauugacugugga

SEQ ID NO: 191317 - RNA, 12 nt, Human herpesvirus 8 (Kaposi`s sarcoma-associated h
gagguggcgcgg

SEQ ID NO: 191318 - RNA, 13 nt, Human herpesvirus 8 (Kaposi`s sarcoma-associated h
gauacacuacuua

SEQ ID NO: 191319 - RNA, 22 nt, Human herpesvirus 8 (Kaposi`s sarcoma-associated h
gauacagggacagauguuagau

SEQ ID NO: 191320 - RNA, 21 nt, Human herpesvirus 8 (Kaposi`s sarcoma-associated h
gaucugcgcgucagcaguguu

SEQ ID NO: 191321 - RNA, 15 nt, Human herpesvirus 8 (Kaposi`s sarcoma-associated h
gauccgcaaugucag

SEQ ID NO: 191322 - RNA, 16 nt, Human herpesvirus 8 (Kaposi`s sarcoma-associated h
gaucccuucacagugc

SEQ ID NO: 191323 - RNA, 23 nt, Human herpesvirus 8 (Kaposi`s sarcoma-associated h
gaucccaggcaggaguauaucag

SEQ ID NO: 191324 - RNA, 16 nt, Human herpesvirus 8 (Kaposi`s sarcoma-associated h
gaucccagugccucag

SEQ ID NO: 191325 - RNA, 21 nt, Human herpesvirus 8 (Kaposi`s sarcoma-associated h
gguuccgacaaggaguggcug

SEQ ID NO: 191326 - RNA, 19 nt, Human herpesvirus 8 (Kaposi`s sarcoma-associated h
gguugcauagggcuuugau

SEQ ID NO: 191327 - RNA, 21 nt, Human herpesvirus 8 (Kaposi`s sarcoma-associated h
gguugcauagggcuuugauga

SEQ ID NO: 191328 - RNA, 23 nt, Human herpesvirus 8 (Kaposi`s sarcoma-associated h
gguuaaccuguccaugucgcaca

SEQ ID NO: 191329 - RNA, 12 nt, Human herpesvirus 8 (Kaposi`s sarcoma-associated h
gguuccacccag

SEQ ID NO: 191330 - RNA, 17 nt, Human herpesvirus 8 (Kaposi`s sarcoma-associated h
ggugucguguaugccaa

SEQ ID NO: 191331 - RNA, 13 nt, Human herpesvirus 8 (Kaposi`s sarcoma-associated h
ggugucaaccagg

SEQ ID NO: 191332 - RNA, 12 nt, Human herpesvirus 8 (Kaposi`s sarcoma-associated h
gguggugugccu

SEQ ID NO: 191333 - RNA, 19 nt, Human herpesvirus 8 (Kaposi`s sarcoma-associated h
gguuguuuacgcagggugc

SEQ ID NO: 191334 - RNA, 21 nt, Human herpesvirus 8 (Kaposi`s sarcoma-associated h
gguuucugaucccuaaggguc

SEQ ID NO: 191335 - RNA, 21 nt, Human herpesvirus 8 (Kaposi`s sarcoma-associated h
gguuucugggauagugucugg

SEQ ID NO: 191336 - RNA, 16 nt, Human herpesvirus 8 (Kaposi`s sarcoma-associated h
gguuuccuagccagau

SEQ ID NO: 191337 - RNA, 20 nt, Human herpesvirus 8 (Kaposi`s sarcoma-associated h
guaaaauaaaauacaaaaac

SEQ ID NO: 191338 - RNA, 14 nt, Human herpesvirus 8 (Kaposi`s sarcoma-associated h
guaaaacacuguuu

SEQ ID NO: 191339 - RNA, 14 nt, Human herpesvirus 8 (Kaposi`s sarcoma-associated h
guaaaaauaaaugu

SEQ ID NO: 191340 - RNA, 14 nt, Human herpesvirus 8 (Kaposi`s sarcoma-associated h
guaauuaacaucca

SEQ ID NO: 191341 - RNA, 22 nt, Human herpesvirus 8 (Kaposi`s sarcoma-associated h
guaagucguccgacaugugcuu

SEQ ID NO: 191342 - RNA, 18 nt, Human herpesvirus 8 (Kaposi`s sarcoma-associated h
guaagcaagucgauuuga

SEQ ID NO: 191343 - RNA, 20 nt, Human herpesvirus 8 (Kaposi`s sarcoma-associated h
guaagacaaacaugugggcu

SEQ ID NO: 191344 - RNA, 14 nt, Human herpesvirus 8 (Kaposi`s sarcoma-associated h
guaacgauggcaaa

SEQ ID NO: 191345 - RNA, 16 nt, Human herpesvirus 8 (Kaposi`s sarcoma-associated h
guaaauuggccacugc

SEQ ID NO: 191346 - RNA, 16 nt, Human herpesvirus 8 (Kaposi`s sarcoma-associated h
ggguugucuacaugaa

SEQ ID NO: 191347 - RNA, 14 nt, Human herpesvirus 8 (Kaposi`s sarcoma-associated h
ggguugcugauuac

SEQ ID NO: 191348 - RNA, 17 nt, Human herpesvirus 8 (Kaposi`s sarcoma-associated h
ggcuugggaguggccaa

SEQ ID NO: 191349 - RNA, 15 nt, Human herpesvirus 8 (Kaposi`s sarcoma-associated h
ggcuuguacagugag

SEQ ID NO: 191350 - RNA, 15 nt, Human herpesvirus 8 (Kaposi`s sarcoma-associated h
gggaaggaagggcgg

SEQ ID NO: 191351 - RNA, 23 nt, Human herpesvirus 8 (Kaposi`s sarcoma-associated h
gggaacaauggcgccaccuugcu

SEQ ID NO: 191352 - RNA, 21 nt, Human herpesvirus 8 (Kaposi`s sarcoma-associated h
gguaaugagguuaguaaagua

SEQ ID NO: 191353 - RNA, 13 nt, Human herpesvirus 8 (Kaposi`s sarcoma-associated h
gguaaugccacau

SEQ ID NO: 191354 - RNA, 21 nt, Human herpesvirus 8 (Kaposi`s sarcoma-associated h
gguaagggaagcaaaacacaa

SEQ ID NO: 191355 - RNA, 17 nt, Human herpesvirus 8 (Kaposi`s sarcoma-associated h
gguaccauggcaaaaaa

SEQ ID NO: 191356 - RNA, 12 nt, Human herpesvirus 8 (Kaposi`s sarcoma-associated h
gguaccccaugc

SEQ ID NO: 191357 - RNA, 21 nt, Human herpesvirus 8 (Kaposi`s sarcoma-associated h
gguggcacccaacauccauua

SEQ ID NO: 191358 - RNA, 16 nt, Human herpesvirus 8 (Kaposi`s sarcoma-associated h
gguggcccugaaauga

SEQ ID NO: 191359 - RNA, 13 nt, Human herpesvirus 8 (Kaposi`s sarcoma-associated h
gguggguggcuug

SEQ ID NO: 191360 - RNA, 17 nt, Human herpesvirus 8 (Kaposi`s sarcoma-associated h
ggugaaaaauaacgggg

SEQ ID NO: 191361 - RNA, 17 nt, Human herpesvirus 8 (Kaposi`s sarcoma-associated h
ggucuuauaacagugcu

SEQ ID NO: 191362 - RNA, 15 nt, Human herpesvirus 8 (Kaposi`s sarcoma-associated h
ggucuccggugccug

SEQ ID NO: 191363 - RNA, 18 nt, Human herpesvirus 8 (Kaposi`s sarcoma-associated h
ggucuccggugccuguug

SEQ ID NO: 191364 - RNA, 16 nt, Human herpesvirus 8 (Kaposi`s sarcoma-associated h
ggagaccuacacugca

SEQ ID NO: 191365 - RNA, 17 nt, Human herpesvirus 8 (Kaposi`s sarcoma-associated h
ggagcacuuuuggaaaa

SEQ ID NO: 191366 - RNA, 20 nt, Human herpesvirus 8 (Kaposi`s sarcoma-associated h
ggagcagccugcaggggagc

SEQ ID NO: 191367 - RNA, 14 nt, Human herpesvirus 8 (Kaposi`s sarcoma-associated h
ggagcaagacgcca

SEQ ID NO: 191368 - RNA, 21 nt, Human herpesvirus 8 (Kaposi`s sarcoma-associated h
ggagauugccaccguuuacaa

SEQ ID NO: 191369 - RNA, 21 nt, Human herpesvirus 8 (Kaposi`s sarcoma-associated h
ggagucacaaguaccacuucu

SEQ ID NO: 191370 - RNA, 22 nt, Human herpesvirus 8 (Kaposi`s sarcoma-associated h
ggaguguuuuuugccaugguac

SEQ ID NO: 191371 - RNA, 20 nt, Human herpesvirus 8 (Kaposi`s sarcoma-associated h
ggauaacuucugggccacaa

SEQ ID NO: 191372 - RNA, 13 nt, Human herpesvirus 8 (Kaposi`s sarcoma-associated h
ggauaaccagguu

SEQ ID NO: 191373 - RNA, 17 nt, Human herpesvirus 8 (Kaposi`s sarcoma-associated h
ggauagaguccaaaaca

SEQ ID NO: 191374 - RNA, 14 nt, Human herpesvirus 8 (Kaposi`s sarcoma-associated h
ggauaugggcuugu

SEQ ID NO: 191375 - RNA, 21 nt, Human herpesvirus 8 (Kaposi`s sarcoma-associated h
ggacucgucuacccugccacu

SEQ ID NO: 191376 - RNA, 19 nt, Human herpesvirus 8 (Kaposi`s sarcoma-associated h
ggagaaccaaccucuccau

SEQ ID NO: 191377 - RNA, 21 nt, Human herpesvirus 8 (Kaposi`s sarcoma-associated h
ggacuucuggaucccacgcua

SEQ ID NO: 191378 - RNA, 15 nt, Human herpesvirus 8 (Kaposi`s sarcoma-associated h
gcuugagcuuuucaa

SEQ ID NO: 191379 - RNA, 18 nt, Human herpesvirus 8 (Kaposi`s sarcoma-associated h
gcuucauuaugcaugcaa

SEQ ID NO: 191380 - RNA, 15 nt, Human herpesvirus 8 (Kaposi`s sarcoma-associated h
gcuguaauggugugu

SEQ ID NO: 191381 - RNA, 20 nt, Human herpesvirus 8 (Kaposi`s sarcoma-associated h
gcugguugaugcgcggcaca

SEQ ID NO: 191382 - RNA, 16 nt, Human herpesvirus 8 (Kaposi`s sarcoma-associated h
gcuucagcuucaggaa

SEQ ID NO: 191383 - RNA, 22 nt, Human herpesvirus 8 (Kaposi`s sarcoma-associated h
gcuucauacgcauauacaggua

SEQ ID NO: 191384 - RNA, 14 nt, Human herpesvirus 8 (Kaposi`s sarcoma-associated h
gcugguaucuggaa

SEQ ID NO: 191385 - RNA, 16 nt, Human herpesvirus 8 (Kaposi`s sarcoma-associated h
gcuggucccgugguca

SEQ ID NO: 191386 - RNA, 22 nt, Human herpesvirus 8 (Kaposi`s sarcoma-associated h
gcugguaaccagcuacgcacug

SEQ ID NO: 191387 - RNA, 14 nt, Human herpesvirus 8 (Kaposi`s sarcoma-associated h
ggauccagacuggu

SEQ ID NO: 191388 - RNA, 17 nt, Human herpesvirus 8 (Kaposi`s sarcoma-associated h
ggaucccuucacagugc

SEQ ID NO: 191389 - RNA, 16 nt, Human herpesvirus 8 (Kaposi`s sarcoma-associated h
ggaucugugugugaag

SEQ ID NO: 191390 - RNA, 22 nt, Human herpesvirus 8 (Kaposi`s sarcoma-associated h
ggaucuguuacuggcaccuaag

SEQ ID NO: 191391 - RNA, 14 nt, Human herpesvirus 8 (Kaposi`s sarcoma-associated h
ggaucuagacugcu

SEQ ID NO: 191392 - RNA, 22 nt, Human herpesvirus 8 (Kaposi`s sarcoma-associated h
ggcaaaauaccugucgcuucca

SEQ ID NO: 191393 - RNA, 14 nt, Human herpesvirus 8 (Kaposi`s sarcoma-associated h
ggccggacaccacc

SEQ ID NO: 191394 - RNA, 23 nt, Human herpesvirus 8 (Kaposi`s sarcoma-associated h
ggcccuggauacacccacauaca

SEQ ID NO: 191395 - RNA, 23 nt, Human herpesvirus 8 (Kaposi`s sarcoma-associated h
ggcuacacaucauaaaguacuuu

SEQ ID NO: 191396 - RNA, 17 nt, Human herpesvirus 8 (Kaposi`s sarcoma-associated h
ggcuaguuaucuucaga

SEQ ID NO: 191397 - RNA, 19 nt, Human herpesvirus 8 (Kaposi`s sarcoma-associated h
ggcuagucauggcacucga

SEQ ID NO: 191398 - RNA, 15 nt, Human herpesvirus 8 (Kaposi`s sarcoma-associated h
ggcucauaacacagu

SEQ ID NO: 191399 - RNA, 17 nt, Human herpesvirus 8 (Kaposi`s sarcoma-associated h
ggcuugaggauggugcu

SEQ ID NO: 191400 - RNA, 14 nt, Human herpesvirus 8 (Kaposi`s sarcoma-associated h
ggcgcucagggugc

SEQ ID NO: 191401 - RNA, 18 nt, Human herpesvirus 8 (Kaposi`s sarcoma-associated h
ggcgcgggguuuuuccau

SEQ ID NO: 191402 - RNA, 13 nt, Human herpesvirus 8 (Kaposi`s sarcoma-associated h
ggcgguugggauu

SEQ ID NO: 191403 - RNA, 18 nt, Human herpesvirus 8 (Kaposi`s sarcoma-associated h
ggcgguugggauucacuc

SEQ ID NO: 191404 - RNA, 21 nt, Human herpesvirus 8 (Kaposi`s sarcoma-associated h
gcuaagaaaaucgaagccagg

SEQ ID NO: 191405 - RNA, 13 nt, Human herpesvirus 8 (Kaposi`s sarcoma-associated h
gcguuucuuugua

SEQ ID NO: 191406 - RNA, 17 nt, Human herpesvirus 8 (Kaposi`s sarcoma-associated h
gcuaccugcaaacuaua

SEQ ID NO: 191407 - RNA, 12 nt, Human herpesvirus 8 (Kaposi`s sarcoma-associated h
gcucacuguucu

SEQ ID NO: 191408 - RNA, 20 nt, Human herpesvirus 8 (Kaposi`s sarcoma-associated h
gcucaggucugucacuagaa

SEQ ID NO: 191409 - RNA, 13 nt, Human herpesvirus 8 (Kaposi`s sarcoma-associated h
gcucauaacacag

SEQ ID NO: 191410 - RNA, 23 nt, Human herpesvirus 8 (Kaposi`s sarcoma-associated h
gcucaucgcgaccgcugccaaua

SEQ ID NO: 191411 - RNA, 20 nt, Human herpesvirus 8 (Kaposi`s sarcoma-associated h
gcuacguacccaauguuaau

SEQ ID NO: 191412 - RNA, 16 nt, Human herpesvirus 8 (Kaposi`s sarcoma-associated h
gcugcgcgucuucuau

SEQ ID NO: 191413 - RNA, 22 nt, Human herpesvirus 8 (Kaposi`s sarcoma-associated h
gcugcgcgucuucuauacaugc

SEQ ID NO: 191414 - RNA, 18 nt, Human herpesvirus 8 (Kaposi`s sarcoma-associated h
gcugcgauccagaggaua

SEQ ID NO: 191415 - RNA, 20 nt, Human herpesvirus 8 (Kaposi`s sarcoma-associated h
gcugcuauuuuucaucugaa

SEQ ID NO: 191416 - RNA, 22 nt, Human herpesvirus 8 (Kaposi`s sarcoma-associated h
gcugccuaggaccuuucugcug

SEQ ID NO: 191417 - RNA, 22 nt, Human herpesvirus 8 (Kaposi`s sarcoma-associated h
gcucgccacucuauauggcaac

SEQ ID NO: 191418 - RNA, 17 nt, Human herpesvirus 8 (Kaposi`s sarcoma-associated h
gcucgaaagcuucaucg

SEQ ID NO: 191419 - RNA, 19 nt, Human herpesvirus 8 (Kaposi`s sarcoma-associated h
gcuccuauugcaacugacc

SEQ ID NO: 191420 - RNA, 15 nt, Human herpesvirus 8 (Kaposi`s sarcoma-associated h
gccuucgaggccagg

SEQ ID NO: 191421 - RNA, 14 nt, Human herpesvirus 8 (Kaposi`s sarcoma-associated h
gccugugcccaaau

SEQ ID NO: 191422 - RNA, 21 nt, Human herpesvirus 8 (Kaposi`s sarcoma-associated h
gccuguccucgcccaacuuug

SEQ ID NO: 191423 - RNA, 13 nt, Human herpesvirus 8 (Kaposi`s sarcoma-associated h
gccuuucuguaau

SEQ ID NO: 191424 - RNA, 22 nt, Human herpesvirus 8 (Kaposi`s sarcoma-associated h
gcgcuguacagugccugcagua

SEQ ID NO: 191425 - RNA, 13 nt, Human herpesvirus 8 (Kaposi`s sarcoma-associated h
gcgcggcacauug

SEQ ID NO: 191426 - RNA, 20 nt, Human herpesvirus 8 (Kaposi`s sarcoma-associated h
gcggagaggggguggugcga

SEQ ID NO: 191427 - RNA, 15 nt, Human herpesvirus 8 (Kaposi`s sarcoma-associated h
gcgugcaucggucuc

SEQ ID NO: 191428 - RNA, 13 nt, Human herpesvirus 8 (Kaposi`s sarcoma-associated h
gcgucugugccug

SEQ ID NO: 191429 - RNA, 23 nt, Human herpesvirus 8 (Kaposi`s sarcoma-associated h
gcguaucuuaaagcgccccguga

SEQ ID NO: 191430 - RNA, 21 nt, Human herpesvirus 8 (Kaposi`s sarcoma-associated h
gcgucagcagcaagcacagaa

SEQ ID NO: 191431 - RNA, 23 nt, Human herpesvirus 8 (Kaposi`s sarcoma-associated h
gcgguaguugugcuuccugauga

SEQ ID NO: 191432 - RNA, 14 nt, Human herpesvirus 8 (Kaposi`s sarcoma-associated h
gcggugguugccga

SEQ ID NO: 191433 - RNA, 18 nt, Human herpesvirus 8 (Kaposi`s sarcoma-associated h
gcgguugggauucacuca

SEQ ID NO: 191434 - RNA, 15 nt, Human herpesvirus 8 (Kaposi`s sarcoma-associated h
gcggugucaaccagg

SEQ ID NO: 191435 - RNA, 14 nt, Human herpesvirus 8 (Kaposi`s sarcoma-associated h
gcaacauguuuaca

SEQ ID NO: 191436 - RNA, 21 nt, Human herpesvirus 8 (Kaposi`s sarcoma-associated h
gcaaccauuuuuuacggacaa

SEQ ID NO: 191437 - RNA, 18 nt, Human herpesvirus 8 (Kaposi`s sarcoma-associated h
gcauccuaucgcacagac

SEQ ID NO: 191438 - RNA, 13 nt, Human herpesvirus 8 (Kaposi`s sarcoma-associated h
gcauuagaagaaa

SEQ ID NO: 191439 - RNA, 22 nt, Human herpesvirus 8 (Kaposi`s sarcoma-associated h
gcaugugauuacucgcacaagc

SEQ ID NO: 191440 - RNA, 12 nt, Human herpesvirus 8 (Kaposi`s sarcoma-associated h
gcaugguugcaa

SEQ ID NO: 191441 - RNA, 18 nt, Human herpesvirus 8 (Kaposi`s sarcoma-associated h
gcaugguugcaacagacg

SEQ ID NO: 191442 - RNA, 18 nt, Human herpesvirus 8 (Kaposi`s sarcoma-associated h
gcaugcucggcaacauuc

SEQ ID NO: 191443 - RNA, 19 nt, Human herpesvirus 8 (Kaposi`s sarcoma-associated h
gcaugcucggcaacauuca

SEQ ID NO: 191444 - RNA, 16 nt, Human herpesvirus 8 (Kaposi`s sarcoma-associated h
gccacguaugggcaaa

SEQ ID NO: 191445 - RNA, 23 nt, Human herpesvirus 8 (Kaposi`s sarcoma-associated h
gccacguaugggcaaaauaccug

SEQ ID NO: 191446 - RNA, 21 nt, Human herpesvirus 8 (Kaposi`s sarcoma-associated h
gccacauacgucccucuuggc

SEQ ID NO: 191447 - RNA, 22 nt, Human herpesvirus 8 (Kaposi`s sarcoma-associated h
gccaccaagaucuuccagucuc

SEQ ID NO: 191448 - RNA, 16 nt, Human herpesvirus 8 (Kaposi`s sarcoma-associated h
gccaauugacugugga

SEQ ID NO: 191449 - RNA, 13 nt, Human herpesvirus 8 (Kaposi`s sarcoma-associated h
gcauuggcuauuu

SEQ ID NO: 191450 - RNA, 17 nt, Human herpesvirus 8 (Kaposi`s sarcoma-associated h
gccacaaaacugccaaa

SEQ ID NO: 191451 - RNA, 21 nt, Human herpesvirus 8 (Kaposi`s sarcoma-associated h
gccacaaacgccccucuuggc

SEQ ID NO: 191452 - RNA, 17 nt, Human herpesvirus 8 (Kaposi`s sarcoma-associated h
gccgaacagguugccau

SEQ ID NO: 191453 - RNA, 19 nt, Human herpesvirus 8 (Kaposi`s sarcoma-associated h
gccccucuuggcuguuaca

SEQ ID NO: 191454 - RNA, 20 nt, Human herpesvirus 8 (Kaposi`s sarcoma-associated h
gccccucuuggcuguuacaa

SEQ ID NO: 191455 - RNA, 16 nt, Human herpesvirus 8 (Kaposi`s sarcoma-associated h
gcccagacaccaaaga

SEQ ID NO: 191456 - RNA, 19 nt, Human herpesvirus 8 (Kaposi`s sarcoma-associated h
gcccccccauagccaucca

SEQ ID NO: 191457 - RNA, 14 nt, Human herpesvirus 8 (Kaposi`s sarcoma-associated h
gcccccaccaaacc

SEQ ID NO: 191458 - RNA, 20 nt, Human herpesvirus 8 (Kaposi`s sarcoma-associated h
gccccauggggaucuuugcg

SEQ ID NO: 191459 - RNA, 18 nt, Human herpesvirus 8 (Kaposi`s sarcoma-associated h
gccacugccacggaugga

SEQ ID NO: 191460 - RNA, 18 nt, Human herpesvirus 8 (Kaposi`s sarcoma-associated h
gccagucguacgcggcca

SEQ ID NO: 191461 - RNA, 22 nt, Human herpesvirus 8 (Kaposi`s sarcoma-associated h
gccagugccuggcauaccacgu

SEQ ID NO: 191462 - RNA, 22 nt, Human herpesvirus 8 (Kaposi`s sarcoma-associated h
gccaguggaggaauauguggcu

SEQ ID NO: 191463 - RNA, 16 nt, Human herpesvirus 8 (Kaposi`s sarcoma-associated h
gccauccgcgagccau

SEQ ID NO: 191464 - RNA, 16 nt, Human herpesvirus 8 (Kaposi`s sarcoma-associated h
gccaugaaaggugguu

SEQ ID NO: 191465 - RNA, 22 nt, Human herpesvirus 8 (Kaposi`s sarcoma-associated h
gccuagaacuaaccacucauaa

SEQ ID NO: 191466 - RNA, 15 nt, Human herpesvirus 8 (Kaposi`s sarcoma-associated h
gccuccagcaaagca

SEQ ID NO: 191467 - RNA, 14 nt, Human herpesvirus 8 (Kaposi`s sarcoma-associated h
gccgaaaucagugu

SEQ ID NO: 191468 - RNA, 22 nt, Human herpesvirus 8 (Kaposi`s sarcoma-associated h
gccgucguccgggagaaccaug

SEQ ID NO: 191469 - RNA, 15 nt, Human herpesvirus 8 (Kaposi`s sarcoma-associated h
gccguccaccauucc

SEQ ID NO: 191470 - RNA, 14 nt, Human herpesvirus 8 (Kaposi`s sarcoma-associated h
gccgccaaacuggg

SEQ ID NO: 191471 - RNA, 21 nt, Human herpesvirus 8 (Kaposi`s sarcoma-associated h
cuacugugaaguuuacauuau

SEQ ID NO: 191472 - RNA, 23 nt, Human herpesvirus 8 (Kaposi`s sarcoma-associated h
cuagacugcuaggauucgugcag

SEQ ID NO: 191473 - RNA, 23 nt, Human herpesvirus 8 (Kaposi`s sarcoma-associated h
cuagaaagcggauugaguguaaa

SEQ ID NO: 191474 - RNA, 22 nt, Human herpesvirus 8 (Kaposi`s sarcoma-associated h
cuagaacuugcuccaguguuag

SEQ ID NO: 191475 - RNA, 20 nt, Human herpesvirus 8 (Kaposi`s sarcoma-associated h
cuaggaggaagagcacuguu

SEQ ID NO: 191476 - RNA, 23 nt, Human herpesvirus 8 (Kaposi`s sarcoma-associated h
cuaggaugcacaguauagggaua

SEQ ID NO: 191477 - RNA, 21 nt, Human herpesvirus 8 (Kaposi`s sarcoma-associated h
cuaggaccuuucugcugcauc

SEQ ID NO: 191478 - RNA, 21 nt, Human herpesvirus 8 (Kaposi`s sarcoma-associated h
cuagcggcgagauuggaggca

SEQ ID NO: 191479 - RNA, 22 nt, Human herpesvirus 8 (Kaposi`s sarcoma-associated h
cuagcuguagagucauuuccuu

SEQ ID NO: 191480 - RNA, 15 nt, Human herpesvirus 8 (Kaposi`s sarcoma-associated h
cuagcgugucugaaa

SEQ ID NO: 191481 - RNA, 14 nt, Human herpesvirus 8 (Kaposi`s sarcoma-associated h
cuauaaauaucauu

SEQ ID NO: 191482 - RNA, 13 nt, Human herpesvirus 8 (Kaposi`s sarcoma-associated h
cuauaauggaugg

SEQ ID NO: 191483 - RNA, 15 nt, Human herpesvirus 8 (Kaposi`s sarcoma-associated h
cuauaauggucugua

SEQ ID NO: 191484 - RNA, 16 nt, Human herpesvirus 8 (Kaposi`s sarcoma-associated h
cuaucucugguggugg

SEQ ID NO: 191485 - RNA, 17 nt, Human herpesvirus 8 (Kaposi`s sarcoma-associated h
cuaucugguugacaccc

SEQ ID NO: 191486 - RNA, 13 nt, Human herpesvirus 8 (Kaposi`s sarcoma-associated h
cuaucgcacagac

SEQ ID NO: 191487 - RNA, 15 nt, Human herpesvirus 8 (Kaposi`s sarcoma-associated h
cuauccaagugcaca

SEQ ID NO: 191488 - RNA, 20 nt, Human herpesvirus 8 (Kaposi`s sarcoma-associated h
cuauccaagugcacacucgc

SEQ ID NO: 191489 - RNA, 16 nt, Human herpesvirus 8 (Kaposi`s sarcoma-associated h
cuauccacccuaauac

SEQ ID NO: 191490 - RNA, 20 nt, Human herpesvirus 8 (Kaposi`s sarcoma-associated h
cuauccacccuaauacauaa

SEQ ID NO: 191491 - RNA, 23 nt, Human herpesvirus 8 (Kaposi`s sarcoma-associated h
cuauccacccuaauacauaacac

SEQ ID NO: 191492 - RNA, 18 nt, Human herpesvirus 8 (Kaposi`s sarcoma-associated h
cuauuucuuuuugccaga

SEQ ID NO: 191493 - RNA, 16 nt, Human herpesvirus 8 (Kaposi`s sarcoma-associated h
cuauggcgcaagcacu

SEQ ID NO: 191494 - RNA, 16 nt, Human herpesvirus 8 (Kaposi`s sarcoma-associated h
cucaacccacacuggc

SEQ ID NO: 191495 - RNA, 20 nt, Human herpesvirus 8 (Kaposi`s sarcoma-associated h
cucacugggggucucgggaa

SEQ ID NO: 191496 - RNA, 22 nt, Human herpesvirus 8 (Kaposi`s sarcoma-associated h
cucacggacaacgccaugcagc

SEQ ID NO: 191497 - RNA, 17 nt, Human herpesvirus 8 (Kaposi`s sarcoma-associated h
cucaugcccacccugua

SEQ ID NO: 191498 - RNA, 19 nt, Human herpesvirus 8 (Kaposi`s sarcoma-associated h
cucaucucucacacccuga

SEQ ID NO: 191499 - RNA, 22 nt, Human herpesvirus 8 (Kaposi`s sarcoma-associated h
cucaucuacccugauuagcacu

SEQ ID NO: 191500 - RNA, 11 nt, Human herpesvirus 8 (Kaposi`s sarcoma-associated h
cucccuaauag

SEQ ID NO: 191501 - RNA, 20 nt, Human herpesvirus 8 (Kaposi`s sarcoma-associated h
cgggaugcuagcgugucuga

SEQ ID NO: 191502 - RNA, 22 nt, Human herpesvirus 8 (Kaposi`s sarcoma-associated h
cgggagcuucggaaagcacugg

SEQ ID NO: 191503 - RNA, 23 nt, Human herpesvirus 8 (Kaposi`s sarcoma-associated h
cggcuuaaguuugguugucucug

SEQ ID NO: 191504 - RNA, 18 nt, Human herpesvirus 8 (Kaposi`s sarcoma-associated h
cggcggaccaucccccca

SEQ ID NO: 191505 - RNA, 17 nt, Human herpesvirus 8 (Kaposi`s sarcoma-associated h
cggcguuuccauaugag

SEQ ID NO: 191506 - RNA, 17 nt, Human herpesvirus 8 (Kaposi`s sarcoma-associated h
cggcucacuucccccca

SEQ ID NO: 191507 - RNA, 14 nt, Human herpesvirus 8 (Kaposi`s sarcoma-associated h
cgggugauuaagca

SEQ ID NO: 191508 - RNA, 21 nt, Human herpesvirus 8 (Kaposi`s sarcoma-associated h
cggguagaaucaaugugguuc

SEQ ID NO: 191509 - RNA, 17 nt, Human herpesvirus 8 (Kaposi`s sarcoma-associated h
cgggucgccgacauuga

SEQ ID NO: 191510 - RNA, 19 nt, Human herpesvirus 8 (Kaposi`s sarcoma-associated h
cggggaagucaugcucauc

SEQ ID NO: 191511 - RNA, 14 nt, Human herpesvirus 8 (Kaposi`s sarcoma-associated h
cggagggcuguucu

SEQ ID NO: 191512 - RNA, 20 nt, Human herpesvirus 8 (Kaposi`s sarcoma-associated h
cggcaacacuggacacuaaa

SEQ ID NO: 191513 - RNA, 14 nt, Human herpesvirus 8 (Kaposi`s sarcoma-associated h
cggccaguuuauua

SEQ ID NO: 191514 - RNA, 22 nt, Human herpesvirus 8 (Kaposi`s sarcoma-associated h
cggcgcuauaggaaaauugcca

SEQ ID NO: 191515 - RNA, 18 nt, Human herpesvirus 8 (Kaposi`s sarcoma-associated h
cgugucgcccgucacugg

SEQ ID NO: 191516 - RNA, 15 nt, Human herpesvirus 8 (Kaposi`s sarcoma-associated h
cgugcagccuugcau

SEQ ID NO: 191517 - RNA, 19 nt, Human herpesvirus 8 (Kaposi`s sarcoma-associated h
cgugcccagacaccaaaga

SEQ ID NO: 191518 - RNA, 21 nt, Human herpesvirus 8 (Kaposi`s sarcoma-associated h
cgugcguuugcagugugcagu

SEQ ID NO: 191519 - RNA, 20 nt, Human herpesvirus 8 (Kaposi`s sarcoma-associated h
cgugcuacuuacagcauggc

SEQ ID NO: 191520 - RNA, 15 nt, Human herpesvirus 8 (Kaposi`s sarcoma-associated h
cgugagguuguauga

SEQ ID NO: 191521 - RNA, 17 nt, Human herpesvirus 8 (Kaposi`s sarcoma-associated h
cgugacggugacauugc

SEQ ID NO: 191522 - RNA, 13 nt, Human herpesvirus 8 (Kaposi`s sarcoma-associated h
cgugcaccagcuc

SEQ ID NO: 191523 - RNA, 22 nt, Human herpesvirus 8 (Kaposi`s sarcoma-associated h
cgugaaucgcaccuuaaacaca

SEQ ID NO: 191524 - RNA, 20 nt, Human herpesvirus 8 (Kaposi`s sarcoma-associated h
cgguuguuuacgcagggugc

SEQ ID NO: 191525 - RNA, 13 nt, Human herpesvirus 8 (Kaposi`s sarcoma-associated h
cguacauggagcg

SEQ ID NO: 191526 - RNA, 22 nt, Human herpesvirus 8 (Kaposi`s sarcoma-associated h
cgguaaacauuguuuauuucaa

SEQ ID NO: 191527 - RNA, 16 nt, Human herpesvirus 8 (Kaposi`s sarcoma-associated h
cggugucguguaugcc

SEQ ID NO: 191528 - RNA, 19 nt, Human herpesvirus 8 (Kaposi`s sarcoma-associated h
cgguucccacccacacauu

SEQ ID NO: 191529 - RNA, 22 nt, Human herpesvirus 8 (Kaposi`s sarcoma-associated h
cgguugguggugugugggaaac

SEQ ID NO: 191530 - RNA, 15 nt, Human herpesvirus 8 (Kaposi`s sarcoma-associated h
cguugacugccacgg

SEQ ID NO: 191531 - RNA, 14 nt, Human herpesvirus 8 (Kaposi`s sarcoma-associated h
cguguggcugcaaa

SEQ ID NO: 191532 - RNA, 14 nt, Human herpesvirus 8 (Kaposi`s sarcoma-associated h
cguuagcagccaug

SEQ ID NO: 191533 - RNA, 14 nt, Human herpesvirus 8 (Kaposi`s sarcoma-associated h
cuaaccgcaaagau

SEQ ID NO: 191534 - RNA, 15 nt, Human herpesvirus 8 (Kaposi`s sarcoma-associated h
cuaacccacgucaca

SEQ ID NO: 191535 - RNA, 22 nt, Human herpesvirus 8 (Kaposi`s sarcoma-associated h
cuaaucaggguagaugagcaug

SEQ ID NO: 191536 - RNA, 15 nt, Human herpesvirus 8 (Kaposi`s sarcoma-associated h
cuaaucuggcaugua

SEQ ID NO: 191537 - RNA, 15 nt, Human herpesvirus 8 (Kaposi`s sarcoma-associated h
cuaauauuaaccaua

SEQ ID NO: 191538 - RNA, 19 nt, Human herpesvirus 8 (Kaposi`s sarcoma-associated h
cuaaaugaauaucauuugc

SEQ ID NO: 191539 - RNA, 13 nt, Human herpesvirus 8 (Kaposi`s sarcoma-associated h
cuaaaugugacaa

SEQ ID NO: 191540 - RNA, 22 nt, Human herpesvirus 8 (Kaposi`s sarcoma-associated h
cugagcugguaaccagcuacgc

SEQ ID NO: 191541 - RNA, 23 nt, Human herpesvirus 8 (Kaposi`s sarcoma-associated h
cugagugcggcggccgcuaagaa

SEQ ID NO: 191542 - RNA, 16 nt, Human herpesvirus 8 (Kaposi`s sarcoma-associated h
cugacagacaacacua

SEQ ID NO: 191543 - RNA, 18 nt, Human herpesvirus 8 (Kaposi`s sarcoma-associated h
cugacagagcacccugaa

SEQ ID NO: 191544 - RNA, 22 nt, Human herpesvirus 8 (Kaposi`s sarcoma-associated h
cugacgguggggaaaacgaagu

SEQ ID NO: 191545 - RNA, 15 nt, Human herpesvirus 8 (Kaposi`s sarcoma-associated h
cucuuggcuguuaca

SEQ ID NO: 191546 - RNA, 18 nt, Human herpesvirus 8 (Kaposi`s sarcoma-associated h
cucuuggcuguuacaaua

SEQ ID NO: 191547 - RNA, 22 nt, Human herpesvirus 8 (Kaposi`s sarcoma-associated h
cugaaguagucagacauucgua

SEQ ID NO: 191548 - RNA, 17 nt, Human herpesvirus 8 (Kaposi`s sarcoma-associated h
cuccgcauuaaagcacu

SEQ ID NO: 191549 - RNA, 21 nt, Human herpesvirus 8 (Kaposi`s sarcoma-associated h
cuccgcauuaaagcacucggu

SEQ ID NO: 191550 - RNA, 12 nt, Human herpesvirus 8 (Kaposi`s sarcoma-associated h
cucuucccacac

SEQ ID NO: 191551 - RNA, 14 nt, Human herpesvirus 8 (Kaposi`s sarcoma-associated h
cuccucgucugugu

SEQ ID NO: 191552 - RNA, 18 nt, Human herpesvirus 8 (Kaposi`s sarcoma-associated h
cugggucguggcgccuuu

SEQ ID NO: 191553 - RNA, 21 nt, Human herpesvirus 8 (Kaposi`s sarcoma-associated h
cuggguguaagcuguacauaa

SEQ ID NO: 191554 - RNA, 14 nt, Human herpesvirus 8 (Kaposi`s sarcoma-associated h
cuggguguuaugca

SEQ ID NO: 191555 - RNA, 20 nt, Human herpesvirus 8 (Kaposi`s sarcoma-associated h
cugggauagaguccaaaaca

SEQ ID NO: 191556 - RNA, 15 nt, Human herpesvirus 8 (Kaposi`s sarcoma-associated h
cugggacagucuaaa

SEQ ID NO: 191557 - RNA, 17 nt, Human herpesvirus 8 (Kaposi`s sarcoma-associated h
cugggccacaaaacugc

SEQ ID NO: 191558 - RNA, 20 nt, Human herpesvirus 8 (Kaposi`s sarcoma-associated h
cuggcucagacaccgucgcc

SEQ ID NO: 191559 - RNA, 13 nt, Human herpesvirus 8 (Kaposi`s sarcoma-associated h
cuggcguguaaac

SEQ ID NO: 191560 - RNA, 18 nt, Human herpesvirus 8 (Kaposi`s sarcoma-associated h
cuggcguuuaguguggau

SEQ ID NO: 191561 - RNA, 15 nt, Human herpesvirus 8 (Kaposi`s sarcoma-associated h
cuggccugugcccaa

SEQ ID NO: 191562 - RNA, 16 nt, Human herpesvirus 8 (Kaposi`s sarcoma-associated h
cuggacaguauucuca

SEQ ID NO: 191563 - RNA, 17 nt, Human herpesvirus 8 (Kaposi`s sarcoma-associated h
cuggacaguauucucac

SEQ ID NO: 191564 - RNA, 12 nt, Human herpesvirus 8 (Kaposi`s sarcoma-associated h
cuggcccccggg

SEQ ID NO: 191565 - RNA, 15 nt, Human herpesvirus 8 (Kaposi`s sarcoma-associated h
cugauuagcacugua

SEQ ID NO: 191566 - RNA, 21 nt, Human herpesvirus 8 (Kaposi`s sarcoma-associated h
cugauaugcaugugucugugc

SEQ ID NO: 191567 - RNA, 23 nt, Human herpesvirus 8 (Kaposi`s sarcoma-associated h
cugccaaaugcccagaaugaagg

SEQ ID NO: 191568 - RNA, 18 nt, Human herpesvirus 8 (Kaposi`s sarcoma-associated h
cugcauaaagucauggga

SEQ ID NO: 191569 - RNA, 14 nt, Human herpesvirus 8 (Kaposi`s sarcoma-associated h
cugcuuuugcgcag

SEQ ID NO: 191570 - RNA, 19 nt, Human herpesvirus 8 (Kaposi`s sarcoma-associated h
cugccagguucccaaaaua

SEQ ID NO: 191571 - RNA, 21 nt, Human herpesvirus 8 (Kaposi`s sarcoma-associated h
cugccaugaaaggugguucua

SEQ ID NO: 191572 - RNA, 14 nt, Human herpesvirus 8 (Kaposi`s sarcoma-associated h
cugcuggcuucaac

SEQ ID NO: 191573 - RNA, 17 nt, Human herpesvirus 8 (Kaposi`s sarcoma-associated h
cugcugucuaucuuuac

SEQ ID NO: 191574 - RNA, 19 nt, Human herpesvirus 8 (Kaposi`s sarcoma-associated h
cuucacagugcgauagggg

SEQ ID NO: 191575 - RNA, 17 nt, Human herpesvirus 8 (Kaposi`s sarcoma-associated h
cuuauuaaaagcauugu

SEQ ID NO: 191576 - RNA, 15 nt, Human herpesvirus 8 (Kaposi`s sarcoma-associated h
cuucaucguggugcc

SEQ ID NO: 191577 - RNA, 13 nt, Human herpesvirus 8 (Kaposi`s sarcoma-associated h
cuucauuaugcau

SEQ ID NO: 191578 - RNA, 19 nt, Human herpesvirus 8 (Kaposi`s sarcoma-associated h
cuucauuaugcaugcaaua

SEQ ID NO: 191579 - RNA, 16 nt, Human herpesvirus 8 (Kaposi`s sarcoma-associated h
cuucauuguucuccag

SEQ ID NO: 191580 - RNA, 14 nt, Human herpesvirus 8 (Kaposi`s sarcoma-associated h
cuguccggacauuu

SEQ ID NO: 191581 - RNA, 17 nt, Human herpesvirus 8 (Kaposi`s sarcoma-associated h
cugucgagacaugucac

SEQ ID NO: 191582 - RNA, 23 nt, Human herpesvirus 8 (Kaposi`s sarcoma-associated h
cugucgagacaugucaccaacgu

SEQ ID NO: 191583 - RNA, 17 nt, Human herpesvirus 8 (Kaposi`s sarcoma-associated h
cugucgccccaggauca

SEQ ID NO: 191584 - RNA, 15 nt, Human herpesvirus 8 (Kaposi`s sarcoma-associated h
cuuacugcagcacua

SEQ ID NO: 191585 - RNA, 23 nt, Human herpesvirus 8 (Kaposi`s sarcoma-associated h
cugucuaaaaucaggagggucaa

SEQ ID NO: 191586 - RNA, 15 nt, Human herpesvirus 8 (Kaposi`s sarcoma-associated h
cuguauugacaccau

SEQ ID NO: 191587 - RNA, 15 nt, Human herpesvirus 8 (Kaposi`s sarcoma-associated h
cugucccgugcccag

SEQ ID NO: 191588 - RNA, 16 nt, Human herpesvirus 8 (Kaposi`s sarcoma-associated h
cugucccgugcccagg

SEQ ID NO: 191589 - RNA, 20 nt, Human herpesvirus 8 (Kaposi`s sarcoma-associated h
cuuaggcuaaccaccacagu

SEQ ID NO: 191590 - RNA, 17 nt, Human herpesvirus 8 (Kaposi`s sarcoma-associated h
cuuagcagaguguccag

SEQ ID NO: 191591 - RNA, 14 nt, Human herpesvirus 8 (Kaposi`s sarcoma-associated h
cuuauaacagugcu

SEQ ID NO: 191592 - RNA, 17 nt, Human herpesvirus 8 (Kaposi`s sarcoma-associated h
cuuauaacagugcucuu

SEQ ID NO: 191593 - RNA, 19 nt, Human herpesvirus 8 (Kaposi`s sarcoma-associated h
cuugcuggucgguucacug

SEQ ID NO: 191594 - RNA, 20 nt, Human herpesvirus 8 (Kaposi`s sarcoma-associated h
cuugcuggucgguucacugc

SEQ ID NO: 191595 - RNA, 18 nt, Human herpesvirus 8 (Kaposi`s sarcoma-associated h
cuugcugcauaaagucau

SEQ ID NO: 191596 - RNA, 17 nt, Human herpesvirus 8 (Kaposi`s sarcoma-associated h
cuugguaacucccucaa

SEQ ID NO: 191597 - RNA, 15 nt, Human herpesvirus 8 (Kaposi`s sarcoma-associated h
cuugggugcacagag

SEQ ID NO: 191598 - RNA, 13 nt, Human herpesvirus 8 (Kaposi`s sarcoma-associated h
cuuggcuguuaca

SEQ ID NO: 191599 - RNA, 14 nt, Human herpesvirus 8 (Kaposi`s sarcoma-associated h
cuuggcuguuacaa

SEQ ID NO: 191600 - RNA, 15 nt, Human herpesvirus 8 (Kaposi`s sarcoma-associated h
cuugguugugccguc

SEQ ID NO: 191601 - RNA, 15 nt, Human herpesvirus 8 (Kaposi`s sarcoma-associated h
cuugaggauggugcu

SEQ ID NO: 191602 - RNA, 19 nt, Human herpesvirus 8 (Kaposi`s sarcoma-associated h
cuugccggacagcuuucag

SEQ ID NO: 191603 - RNA, 13 nt, Human herpesvirus 8 (Kaposi`s sarcoma-associated h
cuucgucaugcac

SEQ ID NO: 191604 - RNA, 15 nt, Human herpesvirus 8 (Kaposi`s sarcoma-associated h
cuuccugaugaaauc

SEQ ID NO: 191605 - RNA, 23 nt, Human herpesvirus 8 (Kaposi`s sarcoma-associated h
cuucgccuaugaaaauacagggg

SEQ ID NO: 191606 - RNA, 21 nt, Human herpesvirus 8 (Kaposi`s sarcoma-associated h
cuuccuauggcgcaagcacuu

SEQ ID NO: 191607 - RNA, 15 nt, Human herpesvirus 8 (Kaposi`s sarcoma-associated h
cuucuugaccaaaag

SEQ ID NO: 191608 - RNA, 19 nt, Human herpesvirus 8 (Kaposi`s sarcoma-associated h
cuucugggccacaaaacug

SEQ ID NO: 191609 - RNA, 14 nt, Human herpesvirus 8 (Kaposi`s sarcoma-associated h
cuucugacucugua

SEQ ID NO: 191610 - RNA, 22 nt, Human herpesvirus 8 (Kaposi`s sarcoma-associated h
ccacaucagcuuggcgaccuca

SEQ ID NO: 191611 - RNA, 21 nt, Human herpesvirus 8 (Kaposi`s sarcoma-associated h
ccacauuccccccgugcacaa

SEQ ID NO: 191612 - RNA, 19 nt, Human herpesvirus 8 (Kaposi`s sarcoma-associated h
aaaauaccugucgcuucca

SEQ ID NO: 191613 - RNA, 22 nt, Human herpesvirus 8 (Kaposi`s sarcoma-associated h
ccaccgacaaagcgucuuuaug

SEQ ID NO: 191614 - RNA, 13 nt, Human herpesvirus 8 (Kaposi`s sarcoma-associated h
ccacccaccuacu

SEQ ID NO: 191615 - RNA, 14 nt, Human herpesvirus 8 (Kaposi`s sarcoma-associated h
ccacccaccuacuu

SEQ ID NO: 191616 - RNA, 19 nt, Human herpesvirus 8 (Kaposi`s sarcoma-associated h
ccacacauuugucuuuauu

SEQ ID NO: 191617 - RNA, 16 nt, Human herpesvirus 8 (Kaposi`s sarcoma-associated h
ccaacccucagugugc

SEQ ID NO: 191618 - RNA, 19 nt, Human herpesvirus 8 (Kaposi`s sarcoma-associated h
ccaaccuggcaagcagugg

SEQ ID NO: 191619 - RNA, 15 nt, Human herpesvirus 8 (Kaposi`s sarcoma-associated h
ccacauaauuggaug

SEQ ID NO: 191620 - RNA, 13 nt, Human herpesvirus 8 (Kaposi`s sarcoma-associated h
ccaaaacacgcac

SEQ ID NO: 191621 - RNA, 18 nt, Human herpesvirus 8 (Kaposi`s sarcoma-associated h
cauuuuguaaugaauaac

SEQ ID NO: 191622 - RNA, 18 nt, Human herpesvirus 8 (Kaposi`s sarcoma-associated h
cauuuuuuacggacaaua

SEQ ID NO: 191623 - RNA, 13 nt, Human herpesvirus 8 (Kaposi`s sarcoma-associated h
ccaacaauauuau

SEQ ID NO: 191624 - RNA, 14 nt, Human herpesvirus 8 (Kaposi`s sarcoma-associated h
ccaacaauauuauu

SEQ ID NO: 191625 - RNA, 15 nt, Human herpesvirus 8 (Kaposi`s sarcoma-associated h
ccaguucagagugug

SEQ ID NO: 191626 - RNA, 21 nt, Human herpesvirus 8 (Kaposi`s sarcoma-associated h
ccagugugcgcgcagcuuucc

SEQ ID NO: 191627 - RNA, 20 nt, Human herpesvirus 8 (Kaposi`s sarcoma-associated h
ccagugucgccagugccugg

SEQ ID NO: 191628 - RNA, 16 nt, Human herpesvirus 8 (Kaposi`s sarcoma-associated h
ccagugccuggcauac

SEQ ID NO: 191629 - RNA, 13 nt, Human herpesvirus 8 (Kaposi`s sarcoma-associated h
ccagugccucagc

SEQ ID NO: 191630 - RNA, 18 nt, Human herpesvirus 8 (Kaposi`s sarcoma-associated h
ccaucuaccucaacugaa

SEQ ID NO: 191631 - RNA, 19 nt, Human herpesvirus 8 (Kaposi`s sarcoma-associated h
ccaguuuuuccaucuccau

SEQ ID NO: 191632 - RNA, 17 nt, Human herpesvirus 8 (Kaposi`s sarcoma-associated h
ccaugccagacuuugug

SEQ ID NO: 191633 - RNA, 12 nt, Human herpesvirus 8 (Kaposi`s sarcoma-associated h
cccaacauguaa

SEQ ID NO: 191634 - RNA, 22 nt, Human herpesvirus 8 (Kaposi`s sarcoma-associated h
ccaugggugcuggugugugugg

SEQ ID NO: 191635 - RNA, 21 nt, Human herpesvirus 8 (Kaposi`s sarcoma-associated h
ccauggcccacggggacaugg

SEQ ID NO: 191636 - RNA, 12 nt, Human herpesvirus 8 (Kaposi`s sarcoma-associated h
ccauggcaaaaa

SEQ ID NO: 191637 - RNA, 15 nt, Human herpesvirus 8 (Kaposi`s sarcoma-associated h
ccacuaaaaccggag

SEQ ID NO: 191638 - RNA, 21 nt, Human herpesvirus 8 (Kaposi`s sarcoma-associated h
ccacguugggagugugcacua

SEQ ID NO: 191639 - RNA, 22 nt, Human herpesvirus 8 (Kaposi`s sarcoma-associated h
ccacggugucguguaugccaau

SEQ ID NO: 191640 - RNA, 22 nt, Human herpesvirus 8 (Kaposi`s sarcoma-associated h
ccacgguggcccugccuagugg

SEQ ID NO: 191641 - RNA, 22 nt, Human herpesvirus 8 (Kaposi`s sarcoma-associated h
ccacugggguccgauugcuuca

SEQ ID NO: 191642 - RNA, 14 nt, Human herpesvirus 8 (Kaposi`s sarcoma-associated h
ccaccuccccuaaa

SEQ ID NO: 191643 - RNA, 18 nt, Human herpesvirus 8 (Kaposi`s sarcoma-associated h
ccaccguguggcugcaaa

SEQ ID NO: 191644 - RNA, 20 nt, Human herpesvirus 8 (Kaposi`s sarcoma-associated h
ccaccguguggcugcaaaau

SEQ ID NO: 191645 - RNA, 20 nt, Human herpesvirus 8 (Kaposi`s sarcoma-associated h
ccaguagcaugcugaugauc

SEQ ID NO: 191646 - RNA, 18 nt, Human herpesvirus 8 (Kaposi`s sarcoma-associated h
ccaguaguucaacugcau

SEQ ID NO: 191647 - RNA, 12 nt, Human herpesvirus 8 (Kaposi`s sarcoma-associated h
ccaguauagugg

SEQ ID NO: 191648 - RNA, 18 nt, Human herpesvirus 8 (Kaposi`s sarcoma-associated h
ccagauccuccacagagc

SEQ ID NO: 191649 - RNA, 12 nt, Human herpesvirus 8 (Kaposi`s sarcoma-associated h
ccagcaaagcac

SEQ ID NO: 191650 - RNA, 14 nt, Human herpesvirus 8 (Kaposi`s sarcoma-associated h
ccagcaaagcacau

SEQ ID NO: 191651 - RNA, 16 nt, Human herpesvirus 8 (Kaposi`s sarcoma-associated h
caucuuugggcuagug

SEQ ID NO: 191652 - RNA, 22 nt, Human herpesvirus 8 (Kaposi`s sarcoma-associated h
caucuuugggcuagugccaaau

SEQ ID NO: 191653 - RNA, 14 nt, Human herpesvirus 8 (Kaposi`s sarcoma-associated h
caucuucauucucu

SEQ ID NO: 191654 - RNA, 15 nt, Human herpesvirus 8 (Kaposi`s sarcoma-associated h
caugaaccagaauca

SEQ ID NO: 191655 - RNA, 21 nt, Human herpesvirus 8 (Kaposi`s sarcoma-associated h
caugaaaggugguucuauauc

SEQ ID NO: 191656 - RNA, 15 nt, Human herpesvirus 8 (Kaposi`s sarcoma-associated h
caucuuuuccaccua

SEQ ID NO: 191657 - RNA, 19 nt, Human herpesvirus 8 (Kaposi`s sarcoma-associated h
caugacauggucugacaac

SEQ ID NO: 191658 - RNA, 22 nt, Human herpesvirus 8 (Kaposi`s sarcoma-associated h
caugacauggucugacaacaua

SEQ ID NO: 191659 - RNA, 23 nt, Human herpesvirus 8 (Kaposi`s sarcoma-associated h
caugaaucggugacuuuuuguga

SEQ ID NO: 191660 - RNA, 15 nt, Human herpesvirus 8 (Kaposi`s sarcoma-associated h
cauauugguauauga

SEQ ID NO: 191661 - RNA, 22 nt, Human herpesvirus 8 (Kaposi`s sarcoma-associated h
cauauugguauaugacuacugu

SEQ ID NO: 191662 - RNA, 19 nt, Human herpesvirus 8 (Kaposi`s sarcoma-associated h
caggacaaugaaaaguguu

SEQ ID NO: 191663 - RNA, 16 nt, Human herpesvirus 8 (Kaposi`s sarcoma-associated h
caggagucagagcagu

SEQ ID NO: 191664 - RNA, 22 nt, Human herpesvirus 8 (Kaposi`s sarcoma-associated h
caggaguauaucaggggaacca

SEQ ID NO: 191665 - RNA, 16 nt, Human herpesvirus 8 (Kaposi`s sarcoma-associated h
caucaacgauacugau

SEQ ID NO: 191666 - RNA, 15 nt, Human herpesvirus 8 (Kaposi`s sarcoma-associated h
caucacuuccaggau

SEQ ID NO: 191667 - RNA, 17 nt, Human herpesvirus 8 (Kaposi`s sarcoma-associated h
cauugcacucagaacau

SEQ ID NO: 191668 - RNA, 19 nt, Human herpesvirus 8 (Kaposi`s sarcoma-associated h
cauugcacucagaacauaa

SEQ ID NO: 191669 - RNA, 14 nt, Human herpesvirus 8 (Kaposi`s sarcoma-associated h
cauugaugccuugg

SEQ ID NO: 191670 - RNA, 14 nt, Human herpesvirus 8 (Kaposi`s sarcoma-associated h
cauucucuccacua

SEQ ID NO: 191671 - RNA, 22 nt, Human herpesvirus 8 (Kaposi`s sarcoma-associated h
cauucucuccacuagacuccag

SEQ ID NO: 191672 - RNA, 22 nt, Human herpesvirus 8 (Kaposi`s sarcoma-associated h
cauuguauaaccgugcuacuua

SEQ ID NO: 191673 - RNA, 19 nt, Human herpesvirus 8 (Kaposi`s sarcoma-associated h
cauuggcuguguacacucg

SEQ ID NO: 191674 - RNA, 20 nt, Human herpesvirus 8 (Kaposi`s sarcoma-associated h
caugcaacccucuacucuuc

SEQ ID NO: 191675 - RNA, 16 nt, Human herpesvirus 8 (Kaposi`s sarcoma-associated h
cauggcagcugaauca

SEQ ID NO: 191676 - RNA, 14 nt, Human herpesvirus 8 (Kaposi`s sarcoma-associated h
cauggcaucccaua

SEQ ID NO: 191677 - RNA, 21 nt, Human herpesvirus 8 (Kaposi`s sarcoma-associated h
caugagccucccuuagugaca

SEQ ID NO: 191678 - RNA, 20 nt, Human herpesvirus 8 (Kaposi`s sarcoma-associated h
caugacuacgcucaccaucc

SEQ ID NO: 191679 - RNA, 19 nt, Human herpesvirus 8 (Kaposi`s sarcoma-associated h
cauggugacccacauagac

SEQ ID NO: 191680 - RNA, 14 nt, Human herpesvirus 8 (Kaposi`s sarcoma-associated h
caugggcaccacgg

SEQ ID NO: 191681 - RNA, 16 nt, Human herpesvirus 8 (Kaposi`s sarcoma-associated h
cauggccggacaccac

SEQ ID NO: 191682 - RNA, 19 nt, Human herpesvirus 8 (Kaposi`s sarcoma-associated h
caugggaacgggaggcuag

SEQ ID NO: 191683 - RNA, 23 nt, Human herpesvirus 8 (Kaposi`s sarcoma-associated h
caugguaccauucgugugguuug

SEQ ID NO: 191684 - RNA, 16 nt, Human herpesvirus 8 (Kaposi`s sarcoma-associated h
cccaccccucauuuau

SEQ ID NO: 191685 - RNA, 13 nt, Human herpesvirus 8 (Kaposi`s sarcoma-associated h
cccacguggugcu

SEQ ID NO: 191686 - RNA, 15 nt, Human herpesvirus 8 (Kaposi`s sarcoma-associated h
cccacguggugcugc

SEQ ID NO: 191687 - RNA, 16 nt, Human herpesvirus 8 (Kaposi`s sarcoma-associated h
cccaauagcgcuguca

SEQ ID NO: 191688 - RNA, 17 nt, Human herpesvirus 8 (Kaposi`s sarcoma-associated h
cccaauguuaauguucu

SEQ ID NO: 191689 - RNA, 14 nt, Human herpesvirus 8 (Kaposi`s sarcoma-associated h
cccaaguauggaau

SEQ ID NO: 191690 - RNA, 15 nt, Human herpesvirus 8 (Kaposi`s sarcoma-associated h
cccacaggacaagcu

SEQ ID NO: 191691 - RNA, 15 nt, Human herpesvirus 8 (Kaposi`s sarcoma-associated h
cccaccaaaccuggu

SEQ ID NO: 191692 - RNA, 16 nt, Human herpesvirus 8 (Kaposi`s sarcoma-associated h
ccgagcguauucucag

SEQ ID NO: 191693 - RNA, 17 nt, Human herpesvirus 8 (Kaposi`s sarcoma-associated h
ccgcaaagauaagccaa

SEQ ID NO: 191694 - RNA, 23 nt, Human herpesvirus 8 (Kaposi`s sarcoma-associated h
ccggguuaugggugugugccagu

SEQ ID NO: 191695 - RNA, 16 nt, Human herpesvirus 8 (Kaposi`s sarcoma-associated h
ccggcuuguacaguga

SEQ ID NO: 191696 - RNA, 17 nt, Human herpesvirus 8 (Kaposi`s sarcoma-associated h
ccgcucucccaaaccac

SEQ ID NO: 191697 - RNA, 17 nt, Human herpesvirus 8 (Kaposi`s sarcoma-associated h
ccgccaucaccaacaag

SEQ ID NO: 191698 - RNA, 14 nt, Human herpesvirus 8 (Kaposi`s sarcoma-associated h
ccgcgccacguaug

SEQ ID NO: 191699 - RNA, 22 nt, Human herpesvirus 8 (Kaposi`s sarcoma-associated h
ccgcgcccaggggcagacccaa

SEQ ID NO: 191700 - RNA, 15 nt, Human herpesvirus 8 (Kaposi`s sarcoma-associated h
ccguggacaccacau

SEQ ID NO: 191701 - RNA, 19 nt, Human herpesvirus 8 (Kaposi`s sarcoma-associated h
ccguggcucauaacacagu

SEQ ID NO: 191702 - RNA, 23 nt, Human herpesvirus 8 (Kaposi`s sarcoma-associated h
ccgugcguuugcagugugcagua

SEQ ID NO: 191703 - RNA, 21 nt, Human herpesvirus 8 (Kaposi`s sarcoma-associated h
ccgugcgccuagaugcgcugg

SEQ ID NO: 191704 - RNA, 13 nt, Human herpesvirus 8 (Kaposi`s sarcoma-associated h
ccgucuguauacg

SEQ ID NO: 191705 - RNA, 17 nt, Human herpesvirus 8 (Kaposi`s sarcoma-associated h
ccgucugugaagucucc

SEQ ID NO: 191706 - RNA, 19 nt, Human herpesvirus 8 (Kaposi`s sarcoma-associated h
ccgugaaccgucgugcuua

SEQ ID NO: 191707 - RNA, 19 nt, Human herpesvirus 8 (Kaposi`s sarcoma-associated h
ccgucgucgagcacuccug

SEQ ID NO: 191708 - RNA, 18 nt, Human herpesvirus 8 (Kaposi`s sarcoma-associated h
ccgugaugggccacuuag

SEQ ID NO: 191709 - RNA, 15 nt, Human herpesvirus 8 (Kaposi`s sarcoma-associated h
ccguccaccauuccu

SEQ ID NO: 191710 - RNA, 14 nt, Human herpesvirus 8 (Kaposi`s sarcoma-associated h
ccguccccuucuuc

SEQ ID NO: 191711 - RNA, 19 nt, Human herpesvirus 8 (Kaposi`s sarcoma-associated h
ccgucaggggagugacaag

SEQ ID NO: 191712 - RNA, 12 nt, Human herpesvirus 8 (Kaposi`s sarcoma-associated h
ccggugccuguu

SEQ ID NO: 191713 - RNA, 19 nt, Human herpesvirus 8 (Kaposi`s sarcoma-associated h
ccguaccggcaucugcaag

SEQ ID NO: 191714 - RNA, 21 nt, Human herpesvirus 8 (Kaposi`s sarcoma-associated h
ccuccuuagaccuacaucucc

SEQ ID NO: 191715 - RNA, 23 nt, Human herpesvirus 8 (Kaposi`s sarcoma-associated h
ccucaaacaugggguuccagugc

SEQ ID NO: 191716 - RNA, 19 nt, Human herpesvirus 8 (Kaposi`s sarcoma-associated h
ccucuccgcauuaaagcac

SEQ ID NO: 191717 - RNA, 16 nt, Human herpesvirus 8 (Kaposi`s sarcoma-associated h
ccucugaagcaccaca

SEQ ID NO: 191718 - RNA, 17 nt, Human herpesvirus 8 (Kaposi`s sarcoma-associated h
ccucugaagcaccacau

SEQ ID NO: 191719 - RNA, 23 nt, Human herpesvirus 8 (Kaposi`s sarcoma-associated h
ccucgugcaaaagagacacuauc

SEQ ID NO: 191720 - RNA, 23 nt, Human herpesvirus 8 (Kaposi`s sarcoma-associated h
ccucgcugccaccguuuggccca

SEQ ID NO: 191721 - RNA, 21 nt, Human herpesvirus 8 (Kaposi`s sarcoma-associated h
ccucuaaggcccccaccaaac

SEQ ID NO: 191722 - RNA, 21 nt, Human herpesvirus 8 (Kaposi`s sarcoma-associated h
ccucgggccuugggugcgaug

SEQ ID NO: 191723 - RNA, 10 nt, Human herpesvirus 8 (Kaposi`s sarcoma-associated h
ccugaguaua

SEQ ID NO: 191724 - RNA, 15 nt, Human herpesvirus 8 (Kaposi`s sarcoma-associated h
ccugauuagcacugu

SEQ ID NO: 191725 - RNA, 24 nt, Human herpesvirus 8 (Kaposi`s sarcoma-associated h
ccugacgacggucgccucgaccac

SEQ ID NO: 191726 - RNA, 14 nt, Human herpesvirus 8 (Kaposi`s sarcoma-associated h
ccucuguacaugga

SEQ ID NO: 191727 - RNA, 22 nt, Human herpesvirus 8 (Kaposi`s sarcoma-associated h
ccucugccuaaagagggauccc

SEQ ID NO: 191728 - RNA, 17 nt, Human herpesvirus 8 (Kaposi`s sarcoma-associated h
ccucuguuuucccacga

SEQ ID NO: 191729 - RNA, 22 nt, Human herpesvirus 8 (Kaposi`s sarcoma-associated h
ccucuugcgcgaccugcuucac

SEQ ID NO: 191730 - RNA, 16 nt, Human herpesvirus 8 (Kaposi`s sarcoma-associated h
ccucuuggcuguuaca

SEQ ID NO: 191731 - RNA, 18 nt, Human herpesvirus 8 (Kaposi`s sarcoma-associated h
ccucuuggcuguuacaau

SEQ ID NO: 191732 - RNA, 14 nt, Human herpesvirus 8 (Kaposi`s sarcoma-associated h
ccuugagugucuag

SEQ ID NO: 191733 - RNA, 20 nt, Human herpesvirus 8 (Kaposi`s sarcoma-associated h
ccuggaucagggaaauaugu

SEQ ID NO: 191734 - RNA, 22 nt, Human herpesvirus 8 (Kaposi`s sarcoma-associated h
ccuggauggguuaacaguggau

SEQ ID NO: 191735 - RNA, 23 nt, Human herpesvirus 8 (Kaposi`s sarcoma-associated h
ccuggauggguuaacaguggaug

SEQ ID NO: 191736 - RNA, 20 nt, Human herpesvirus 8 (Kaposi`s sarcoma-associated h
ccuggcaagcaguggagcaa

SEQ ID NO: 191737 - RNA, 15 nt, Human herpesvirus 8 (Kaposi`s sarcoma-associated h
ccugacucauuucau

SEQ ID NO: 191738 - RNA, 18 nt, Human herpesvirus 8 (Kaposi`s sarcoma-associated h
ccuggacgauguacuuga

SEQ ID NO: 191739 - RNA, 21 nt, Human herpesvirus 8 (Kaposi`s sarcoma-associated h
cgaaaguugaagauaucacug

SEQ ID NO: 191740 - RNA, 21 nt, Human herpesvirus 8 (Kaposi`s sarcoma-associated h
cgaaugcguucuccugcauac

SEQ ID NO: 191741 - RNA, 15 nt, Human herpesvirus 8 (Kaposi`s sarcoma-associated h
cgaauaaaacaggaa

SEQ ID NO: 191742 - RNA, 13 nt, Human herpesvirus 8 (Kaposi`s sarcoma-associated h
cgaacuugcucuu

SEQ ID NO: 191743 - RNA, 19 nt, Human herpesvirus 8 (Kaposi`s sarcoma-associated h
cgagccacaucgucaucuc

SEQ ID NO: 191744 - RNA, 23 nt, Human herpesvirus 8 (Kaposi`s sarcoma-associated h
cgagaacugucgagacaugucac

SEQ ID NO: 191745 - RNA, 22 nt, Human herpesvirus 8 (Kaposi`s sarcoma-associated h
cgacaggcgcguaugggaacac

SEQ ID NO: 191746 - RNA, 14 nt, Human herpesvirus 8 (Kaposi`s sarcoma-associated h
cgaccgcugccaau

SEQ ID NO: 191747 - RNA, 16 nt, Human herpesvirus 8 (Kaposi`s sarcoma-associated h
cgaguguacacagcca

SEQ ID NO: 191748 - RNA, 17 nt, Human herpesvirus 8 (Kaposi`s sarcoma-associated h
cgagugugccuccuuag

SEQ ID NO: 191749 - RNA, 19 nt, Human herpesvirus 8 (Kaposi`s sarcoma-associated h
cgaguacgacgcaggcguc

SEQ ID NO: 191750 - RNA, 15 nt, Human herpesvirus 8 (Kaposi`s sarcoma-associated h
cgauaugcaccucca

SEQ ID NO: 191751 - RNA, 16 nt, Human herpesvirus 8 (Kaposi`s sarcoma-associated h
cgauaugcaccuccaa

SEQ ID NO: 191752 - RNA, 19 nt, Human herpesvirus 8 (Kaposi`s sarcoma-associated h
cgauauguccuucacuuug

SEQ ID NO: 191753 - RNA, 17 nt, Human herpesvirus 8 (Kaposi`s sarcoma-associated h
cgaugcucgagaacugu

SEQ ID NO: 191754 - RNA, 12 nt, Human herpesvirus 8 (Kaposi`s sarcoma-associated h
cgauugcucaag

SEQ ID NO: 191755 - RNA, 11 nt, Human herpesvirus 8 (Kaposi`s sarcoma-associated h
uuuuuuacuac

SEQ ID NO: 191756 - RNA, 23 nt, Human herpesvirus 8 (Kaposi`s sarcoma-associated h
uuuuuaaugcgggauauggggau

SEQ ID NO: 191757 - RNA, 16 nt, Human herpesvirus 8 (Kaposi`s sarcoma-associated h
uuuuucaacaacaguc

SEQ ID NO: 191758 - RNA, 16 nt, Human herpesvirus 8 (Kaposi`s sarcoma-associated h
uuguacaugugucuau

SEQ ID NO: 191759 - RNA, 15 nt, Human herpesvirus 8 (Kaposi`s sarcoma-associated h
uuggcgcuuugcucu

SEQ ID NO: 191760 - RNA, 19 nt, Human herpesvirus 8 (Kaposi`s sarcoma-associated h
uuggcgcccacguaugggu

SEQ ID NO: 191761 - RNA, 11 nt, Human herpesvirus 8 (Kaposi`s sarcoma-associated h
uuggcuguuac

SEQ ID NO: 191762 - RNA, 16 nt, Human herpesvirus 8 (Kaposi`s sarcoma-associated h
uuggcuguuacaauaa

SEQ ID NO: 191763 - RNA, 16 nt, Human herpesvirus 8 (Kaposi`s sarcoma-associated h
uuggcguuuaccugca

SEQ ID NO: 191764 - RNA, 17 nt, Human herpesvirus 8 (Kaposi`s sarcoma-associated h
uuguagaucuggauaca

SEQ ID NO: 191765 - RNA, 21 nt, Human herpesvirus 8 (Kaposi`s sarcoma-associated h
uuugggaauaaagcaugagac

SEQ ID NO: 191766 - RNA, 21 nt, Human herpesvirus 8 (Kaposi`s sarcoma-associated h
uuugggaccuuucaacaaucu

SEQ ID NO: 191767 - RNA, 18 nt, Human herpesvirus 8 (Kaposi`s sarcoma-associated h
uuuggggcuacacaucau

SEQ ID NO: 191768 - RNA, 23 nt, Human herpesvirus 8 (Kaposi`s sarcoma-associated h
uuuguauuauuuauugcauggca

SEQ ID NO: 191769 - RNA, 16 nt, Human herpesvirus 8 (Kaposi`s sarcoma-associated h
uuuguauaacaugcaa

SEQ ID NO: 191770 - RNA, 17 nt, Human herpesvirus 8 (Kaposi`s sarcoma-associated h
uugucccucagccacaa

SEQ ID NO: 191771 - RNA, 18 nt, Human herpesvirus 8 (Kaposi`s sarcoma-associated h
uuuggcccacguggugcu

SEQ ID NO: 191772 - RNA, 20 nt, Human herpesvirus 8 (Kaposi`s sarcoma-associated h
uuuggcccacguggugcugc

SEQ ID NO: 191773 - RNA, 15 nt, Human herpesvirus 8 (Kaposi`s sarcoma-associated h
uuuuauggacauuua

SEQ ID NO: 191774 - RNA, 22 nt, Human herpesvirus 8 (Kaposi`s sarcoma-associated h
uuuucugaaacgcgaauggggu

SEQ ID NO: 191775 - RNA, 19 nt, Human herpesvirus 8 (Kaposi`s sarcoma-associated h
uuuucucgugugcccuuca

SEQ ID NO: 191776 - RNA, 19 nt, Human herpesvirus 8 (Kaposi`s sarcoma-associated h
uuuuauuugggggaugcug

SEQ ID NO: 191777 - RNA, 21 nt, Human herpesvirus 8 (Kaposi`s sarcoma-associated h
ugcucgaggcgacaacgccau

SEQ ID NO: 191778 - RNA, 22 nt, Human herpesvirus 8 (Kaposi`s sarcoma-associated h
ugcucaucgcgaccgcugccaa

SEQ ID NO: 191779 - RNA, 22 nt, Human herpesvirus 8 (Kaposi`s sarcoma-associated h
ugcagacauggccggacaccac

SEQ ID NO: 191780 - RNA, 17 nt, Human herpesvirus 8 (Kaposi`s sarcoma-associated h
ugcagcagcgugacacu

SEQ ID NO: 191781 - RNA, 13 nt, Human herpesvirus 8 (Kaposi`s sarcoma-associated h
ugcagccaggaag

SEQ ID NO: 191782 - RNA, 23 nt, Human herpesvirus 8 (Kaposi`s sarcoma-associated h
ugcacgccaacccucagugugcu

SEQ ID NO: 191783 - RNA, 19 nt, Human herpesvirus 8 (Kaposi`s sarcoma-associated h
ugcugguucaggauuucga

SEQ ID NO: 191784 - RNA, 14 nt, Human herpesvirus 8 (Kaposi`s sarcoma-associated h
ugcucuggacaaug

SEQ ID NO: 191785 - RNA, 16 nt, Human herpesvirus 8 (Kaposi`s sarcoma-associated h
ugcucggcaacauuca

SEQ ID NO: 191786 - RNA, 21 nt, Human herpesvirus 8 (Kaposi`s sarcoma-associated h
ugcugauauaugaguguaaaa

SEQ ID NO: 191787 - RNA, 20 nt, Human herpesvirus 8 (Kaposi`s sarcoma-associated h
ugcugcauaaagucauggga

SEQ ID NO: 191788 - RNA, 21 nt, Human herpesvirus 8 (Kaposi`s sarcoma-associated h
ugcuuuauucccaaacacauc

SEQ ID NO: 191789 - RNA, 14 nt, Human herpesvirus 8 (Kaposi`s sarcoma-associated h
uggaaaacaaaaca

SEQ ID NO: 191790 - RNA, 20 nt, Human herpesvirus 8 (Kaposi`s sarcoma-associated h
uggaauauaaugugaaagga

SEQ ID NO: 191791 - RNA, 12 nt, Human herpesvirus 8 (Kaposi`s sarcoma-associated h
uggaguugccug

SEQ ID NO: 191792 - RNA, 15 nt, Human herpesvirus 8 (Kaposi`s sarcoma-associated h
uggauaaaagaauaa

SEQ ID NO: 191793 - RNA, 22 nt, Human herpesvirus 8 (Kaposi`s sarcoma-associated h
uggauaacuucugggccacaaa

SEQ ID NO: 191794 - RNA, 22 nt, Human herpesvirus 8 (Kaposi`s sarcoma-associated h
uggagccaacaaacaagacaca

SEQ ID NO: 191795 - RNA, 20 nt, Human herpesvirus 8 (Kaposi`s sarcoma-associated h
uggagcucuuagagcuuuaa

SEQ ID NO: 191796 - RNA, 15 nt, Human herpesvirus 8 (Kaposi`s sarcoma-associated h
uggagggcacagauu

SEQ ID NO: 191797 - RNA, 23 nt, Human herpesvirus 8 (Kaposi`s sarcoma-associated h
uggagggcacagauuguggcauu

SEQ ID NO: 191798 - RNA, 16 nt, Human herpesvirus 8 (Kaposi`s sarcoma-associated h
uggacuuucuccguga

SEQ ID NO: 191799 - RNA, 12 nt, Human herpesvirus 8 (Kaposi`s sarcoma-associated h
uggaccgugugu

SEQ ID NO: 191800 - RNA, 17 nt, Human herpesvirus 8 (Kaposi`s sarcoma-associated h
uggaccgcccgucgcug

SEQ ID NO: 191801 - RNA, 17 nt, Human herpesvirus 8 (Kaposi`s sarcoma-associated h
uggacgauguacuugaa

SEQ ID NO: 191802 - RNA, 18 nt, Human herpesvirus 8 (Kaposi`s sarcoma-associated h
uguaaaaauaaaugugaa

SEQ ID NO: 191803 - RNA, 17 nt, Human herpesvirus 8 (Kaposi`s sarcoma-associated h
ugguuuuucucucauaa

SEQ ID NO: 191804 - RNA, 16 nt, Human herpesvirus 8 (Kaposi`s sarcoma-associated h
uguaacccugccaaau

SEQ ID NO: 191805 - RNA, 21 nt, Human herpesvirus 8 (Kaposi`s sarcoma-associated h
uguaaccuaaaaaaugugcau

SEQ ID NO: 191806 - RNA, 15 nt, Human herpesvirus 8 (Kaposi`s sarcoma-associated h
uguaaacguguaacc

SEQ ID NO: 191807 - RNA, 19 nt, Human herpesvirus 8 (Kaposi`s sarcoma-associated h
uguaauuuccugcugucua

SEQ ID NO: 191808 - RNA, 17 nt, Human herpesvirus 8 (Kaposi`s sarcoma-associated h
uguaagcuguacauaau

SEQ ID NO: 191809 - RNA, 12 nt, Human herpesvirus 8 (Kaposi`s sarcoma-associated h
uguaauggugug

SEQ ID NO: 191810 - RNA, 22 nt, Human herpesvirus 8 (Kaposi`s sarcoma-associated h
uguaauguguuuuauguuuaua

SEQ ID NO: 191811 - RNA, 22 nt, Human herpesvirus 8 (Kaposi`s sarcoma-associated h
uguacauggagggaauggccuc

SEQ ID NO: 191812 - RNA, 21 nt, Human herpesvirus 8 (Kaposi`s sarcoma-associated h
ugucaguaaaauaaaauacaa

SEQ ID NO: 191813 - RNA, 16 nt, Human herpesvirus 8 (Kaposi`s sarcoma-associated h
ugucagaaguuucaaa

SEQ ID NO: 191814 - RNA, 24 nt, Human herpesvirus 8 (Kaposi`s sarcoma-associated h
ugucacuagaauuggagcacuuuu

SEQ ID NO: 191815 - RNA, 22 nt, Human herpesvirus 8 (Kaposi`s sarcoma-associated h
ugucacuccccgaggauauaau

SEQ ID NO: 191816 - RNA, 21 nt, Human herpesvirus 8 (Kaposi`s sarcoma-associated h
uguacuuugaggauggggacu

SEQ ID NO: 191817 - RNA, 14 nt, Human herpesvirus 8 (Kaposi`s sarcoma-associated h
ugugaaguuuacau

SEQ ID NO: 191818 - RNA, 22 nt, Human herpesvirus 8 (Kaposi`s sarcoma-associated h
ugucuuuuuaaccgcuaaggga

SEQ ID NO: 191819 - RNA, 14 nt, Human herpesvirus 8 (Kaposi`s sarcoma-associated h
ugucuucgugggua

SEQ ID NO: 191820 - RNA, 17 nt, Human herpesvirus 8 (Kaposi`s sarcoma-associated h
ugucuuuguguguguua

SEQ ID NO: 191821 - RNA, 23 nt, Human herpesvirus 8 (Kaposi`s sarcoma-associated h
ugugcgcgcagcuuuccugugau

SEQ ID NO: 191822 - RNA, 23 nt, Human herpesvirus 8 (Kaposi`s sarcoma-associated h
ugucauuuuuacuuuuacaagga

SEQ ID NO: 191823 - RNA, 22 nt, Human herpesvirus 8 (Kaposi`s sarcoma-associated h
ugucucuggcagcgcaccacau

SEQ ID NO: 191824 - RNA, 17 nt, Human herpesvirus 8 (Kaposi`s sarcoma-associated h
ugucugaauguggaaua

SEQ ID NO: 191825 - RNA, 17 nt, Human herpesvirus 8 (Kaposi`s sarcoma-associated h
uggccuuuuuaagacaa

SEQ ID NO: 191826 - RNA, 14 nt, Human herpesvirus 8 (Kaposi`s sarcoma-associated h
uggcgccaugggug

SEQ ID NO: 191827 - RNA, 18 nt, Human herpesvirus 8 (Kaposi`s sarcoma-associated h
uggccgacgcaaacgcca

SEQ ID NO: 191828 - RNA, 15 nt, Human herpesvirus 8 (Kaposi`s sarcoma-associated h
uggcccgucuguaua

SEQ ID NO: 191829 - RNA, 18 nt, Human herpesvirus 8 (Kaposi`s sarcoma-associated h
uggcccgucuguauacgu

SEQ ID NO: 191830 - RNA, 18 nt, Human herpesvirus 8 (Kaposi`s sarcoma-associated h
uggccgaacgccuaguua

SEQ ID NO: 191831 - RNA, 20 nt, Human herpesvirus 8 (Kaposi`s sarcoma-associated h
uggcccccuuuacagaucua

SEQ ID NO: 191832 - RNA, 19 nt, Human herpesvirus 8 (Kaposi`s sarcoma-associated h
uggccugugcccaaaucug

SEQ ID NO: 191833 - RNA, 20 nt, Human herpesvirus 8 (Kaposi`s sarcoma-associated h
uggccuccagcaaagcacau

SEQ ID NO: 191834 - RNA, 18 nt, Human herpesvirus 8 (Kaposi`s sarcoma-associated h
uggcccacguggugcugc

SEQ ID NO: 191835 - RNA, 14 nt, Human herpesvirus 8 (Kaposi`s sarcoma-associated h
uggccaggacaaug

SEQ ID NO: 191836 - RNA, 19 nt, Human herpesvirus 8 (Kaposi`s sarcoma-associated h
uggcauaccacguguguga

SEQ ID NO: 191837 - RNA, 18 nt, Human herpesvirus 8 (Kaposi`s sarcoma-associated h
uggcauucgguaccacau

SEQ ID NO: 191838 - RNA, 17 nt, Human herpesvirus 8 (Kaposi`s sarcoma-associated h
uggcagcccagccucug

SEQ ID NO: 191839 - RNA, 22 nt, Human herpesvirus 8 (Kaposi`s sarcoma-associated h
uggaucugcgcgucagcagugu

SEQ ID NO: 191840 - RNA, 18 nt, Human herpesvirus 8 (Kaposi`s sarcoma-associated h
uggaucaugacuacgcuc

SEQ ID NO: 191841 - RNA, 17 nt, Human herpesvirus 8 (Kaposi`s sarcoma-associated h
uggauccuacacuuuac

SEQ ID NO: 191842 - RNA, 19 nt, Human herpesvirus 8 (Kaposi`s sarcoma-associated h
ugguaccagagaauaaagc

SEQ ID NO: 191843 - RNA, 14 nt, Human herpesvirus 8 (Kaposi`s sarcoma-associated h
ugguauauuggucc

SEQ ID NO: 191844 - RNA, 21 nt, Human herpesvirus 8 (Kaposi`s sarcoma-associated h
ugggauucacucagcugccaa

SEQ ID NO: 191845 - RNA, 15 nt, Human herpesvirus 8 (Kaposi`s sarcoma-associated h
ugggcaaaauaccug

SEQ ID NO: 191846 - RNA, 16 nt, Human herpesvirus 8 (Kaposi`s sarcoma-associated h
ugggaacuuucaucca

SEQ ID NO: 191847 - RNA, 18 nt, Human herpesvirus 8 (Kaposi`s sarcoma-associated h
ugggaacuuucauccauu

SEQ ID NO: 191848 - RNA, 18 nt, Human herpesvirus 8 (Kaposi`s sarcoma-associated h
ugggaaugugccuaucaa

SEQ ID NO: 191849 - RNA, 18 nt, Human herpesvirus 8 (Kaposi`s sarcoma-associated h
ugggacgugcgggccaau

SEQ ID NO: 191850 - RNA, 19 nt, Human herpesvirus 8 (Kaposi`s sarcoma-associated h
ugggacaacuagaguccaa

SEQ ID NO: 191851 - RNA, 20 nt, Human herpesvirus 8 (Kaposi`s sarcoma-associated h
ugggagcugucccaccagag

SEQ ID NO: 191852 - RNA, 19 nt, Human herpesvirus 8 (Kaposi`s sarcoma-associated h
ugggauagaguccaaaaca

SEQ ID NO: 191853 - RNA, 18 nt, Human herpesvirus 8 (Kaposi`s sarcoma-associated h
ugggagugugcacuagca

SEQ ID NO: 191854 - RNA, 20 nt, Human herpesvirus 8 (Kaposi`s sarcoma-associated h
uggucccguggucauugugu

SEQ ID NO: 191855 - RNA, 20 nt, Human herpesvirus 8 (Kaposi`s sarcoma-associated h
ugguccguagaauguaugua

SEQ ID NO: 191856 - RNA, 20 nt, Human herpesvirus 8 (Kaposi`s sarcoma-associated h
ugguuucugggacagucuaa

SEQ ID NO: 191857 - RNA, 14 nt, Human herpesvirus 8 (Kaposi`s sarcoma-associated h
uggucugcacccuu

SEQ ID NO: 191858 - RNA, 14 nt, Human herpesvirus 8 (Kaposi`s sarcoma-associated h
uuaaguacauuaaa

SEQ ID NO: 191859 - RNA, 16 nt, Human herpesvirus 8 (Kaposi`s sarcoma-associated h
uuaaggugagagaccc

SEQ ID NO: 191860 - RNA, 20 nt, Human herpesvirus 8 (Kaposi`s sarcoma-associated h
uuaaucgcauaauaaaacaa

SEQ ID NO: 191861 - RNA, 23 nt, Human herpesvirus 8 (Kaposi`s sarcoma-associated h
uuaaucgcauaauaaaacaaaua

SEQ ID NO: 191862 - RNA, 21 nt, Human herpesvirus 8 (Kaposi`s sarcoma-associated h
uuaaucuuuauugucuagaca

SEQ ID NO: 191863 - RNA, 13 nt, Human herpesvirus 8 (Kaposi`s sarcoma-associated h
uguggcaccaaau

SEQ ID NO: 191864 - RNA, 13 nt, Human herpesvirus 8 (Kaposi`s sarcoma-associated h
uguggcaccugag

SEQ ID NO: 191865 - RNA, 23 nt, Human herpesvirus 8 (Kaposi`s sarcoma-associated h
uguggcccccuuuacagaucuag

SEQ ID NO: 191866 - RNA, 15 nt, Human herpesvirus 8 (Kaposi`s sarcoma-associated h
uguggcuaucuugcu

SEQ ID NO: 191867 - RNA, 19 nt, Human herpesvirus 8 (Kaposi`s sarcoma-associated h
ugugggauuccgucauuca

SEQ ID NO: 191868 - RNA, 17 nt, Human herpesvirus 8 (Kaposi`s sarcoma-associated h
uguguuccugugggcua

SEQ ID NO: 191869 - RNA, 19 nt, Human herpesvirus 8 (Kaposi`s sarcoma-associated h
uguguugaaggacggauca

SEQ ID NO: 191870 - RNA, 13 nt, Human herpesvirus 8 (Kaposi`s sarcoma-associated h
uguguagguuguu

SEQ ID NO: 191871 - RNA, 15 nt, Human herpesvirus 8 (Kaposi`s sarcoma-associated h
uguguagugcaucga

SEQ ID NO: 191872 - RNA, 16 nt, Human herpesvirus 8 (Kaposi`s sarcoma-associated h
uuaagacaaacacugu

SEQ ID NO: 191873 - RNA, 18 nt, Human herpesvirus 8 (Kaposi`s sarcoma-associated h
uuaagagugccacuaaaa

SEQ ID NO: 191874 - RNA, 15 nt, Human herpesvirus 8 (Kaposi`s sarcoma-associated h
uuaacuucaccucca

SEQ ID NO: 191875 - RNA, 13 nt, Human herpesvirus 8 (Kaposi`s sarcoma-associated h
uuaagaagccacu

SEQ ID NO: 191876 - RNA, 13 nt, Human herpesvirus 8 (Kaposi`s sarcoma-associated h
uuaacuguuuacu

SEQ ID NO: 191877 - RNA, 14 nt, Human herpesvirus 8 (Kaposi`s sarcoma-associated h
uuaacuguuuacug

SEQ ID NO: 191878 - RNA, 20 nt, Human herpesvirus 8 (Kaposi`s sarcoma-associated h
uuaacuguuuacugcuguua

SEQ ID NO: 191879 - RNA, 21 nt, Human herpesvirus 8 (Kaposi`s sarcoma-associated h
uuaacgugucugaauguggaa

SEQ ID NO: 191880 - RNA, 21 nt, Human herpesvirus 8 (Kaposi`s sarcoma-associated h
uguuaacccaaugucagggga

SEQ ID NO: 191881 - RNA, 13 nt, Human herpesvirus 8 (Kaposi`s sarcoma-associated h
uguuaaauuuggc

SEQ ID NO: 191882 - RNA, 17 nt, Human herpesvirus 8 (Kaposi`s sarcoma-associated h
uuacgguggugugccug

SEQ ID NO: 191883 - RNA, 18 nt, Human herpesvirus 8 (Kaposi`s sarcoma-associated h
uuagcaguccggggucca

SEQ ID NO: 191884 - RNA, 19 nt, Human herpesvirus 8 (Kaposi`s sarcoma-associated h
uuagcggaaugucuguuuc

SEQ ID NO: 191885 - RNA, 13 nt, Human herpesvirus 8 (Kaposi`s sarcoma-associated h
uuaggaaacacgg

SEQ ID NO: 191886 - RNA, 14 nt, Human herpesvirus 8 (Kaposi`s sarcoma-associated h
uuaggaaacacggc

SEQ ID NO: 191887 - RNA, 19 nt, Human herpesvirus 8 (Kaposi`s sarcoma-associated h
uuaucagcucacuguucuc

SEQ ID NO: 191888 - RNA, 13 nt, Human herpesvirus 8 (Kaposi`s sarcoma-associated h
uuauuuauugcau

SEQ ID NO: 191889 - RNA, 20 nt, Human herpesvirus 8 (Kaposi`s sarcoma-associated h
uuauuaugaggccuaucuga

SEQ ID NO: 191890 - RNA, 19 nt, Human herpesvirus 8 (Kaposi`s sarcoma-associated h
uuauucccaaacacaucag

SEQ ID NO: 191891 - RNA, 14 nt, Human herpesvirus 8 (Kaposi`s sarcoma-associated h
uuaucuuaacuaaa

SEQ ID NO: 191892 - RNA, 20 nt, Human herpesvirus 8 (Kaposi`s sarcoma-associated h
uuaugaggucggauacuuau

SEQ ID NO: 191893 - RNA, 15 nt, Human herpesvirus 8 (Kaposi`s sarcoma-associated h
uuaucuccugcucau

SEQ ID NO: 191894 - RNA, 14 nt, Human herpesvirus 8 (Kaposi`s sarcoma-associated h
uuaugucaguucca

SEQ ID NO: 191895 - RNA, 15 nt, Human herpesvirus 8 (Kaposi`s sarcoma-associated h
uucccacgugcacca

SEQ ID NO: 191896 - RNA, 17 nt, Human herpesvirus 8 (Kaposi`s sarcoma-associated h
uuccagugacccuaguc

SEQ ID NO: 191897 - RNA, 16 nt, Human herpesvirus 8 (Kaposi`s sarcoma-associated h
uuccaucuccaugagc

SEQ ID NO: 191898 - RNA, 11 nt, Human herpesvirus 8 (Kaposi`s sarcoma-associated h
uucgugcagcc

SEQ ID NO: 191899 - RNA, 17 nt, Human herpesvirus 8 (Kaposi`s sarcoma-associated h
uucuaaucuggcaugua

SEQ ID NO: 191900 - RNA, 15 nt, Human herpesvirus 8 (Kaposi`s sarcoma-associated h
uucuaaucuuagucu

SEQ ID NO: 191901 - RNA, 23 nt, Human herpesvirus 8 (Kaposi`s sarcoma-associated h
uucuaccagguaggucaccgggu

SEQ ID NO: 191902 - RNA, 14 nt, Human herpesvirus 8 (Kaposi`s sarcoma-associated h
uucucuauaacaua

SEQ ID NO: 191903 - RNA, 11 nt, Human herpesvirus 8 (Kaposi`s sarcoma-associated h
uucaaccugga

SEQ ID NO: 191904 - RNA, 17 nt, Human herpesvirus 8 (Kaposi`s sarcoma-associated h
uucaaagucguguaaga

SEQ ID NO: 191905 - RNA, 21 nt, Human herpesvirus 8 (Kaposi`s sarcoma-associated h
uugaugccuuggaagauaugu

SEQ ID NO: 191906 - RNA, 20 nt, Human herpesvirus 8 (Kaposi`s sarcoma-associated h
uugaugcgcggcacauugug

SEQ ID NO: 191907 - RNA, 23 nt, Human herpesvirus 8 (Kaposi`s sarcoma-associated h
uugccuaaaaagaugccucgcua

SEQ ID NO: 191908 - RNA, 19 nt, Human herpesvirus 8 (Kaposi`s sarcoma-associated h
uuggcccacguggugcugc

SEQ ID NO: 191909 - RNA, 23 nt, Human herpesvirus 8 (Kaposi`s sarcoma-associated h
uuggcagaaccgaugguuuccua

SEQ ID NO: 191910 - RNA, 16 nt, Human herpesvirus 8 (Kaposi`s sarcoma-associated h
uuggcagcuuggugaa

SEQ ID NO: 191911 - RNA, 12 nt, Human herpesvirus 8 (Kaposi`s sarcoma-associated h
uuggaugcuaug

SEQ ID NO: 191912 - RNA, 13 nt, Human herpesvirus 8 (Kaposi`s sarcoma-associated h
uuggacacuccuc

SEQ ID NO: 191913 - RNA, 21 nt, Human herpesvirus 8 (Kaposi`s sarcoma-associated h
uugcuacggaucaugcucuca

SEQ ID NO: 191914 - RNA, 15 nt, Human herpesvirus 8 (Kaposi`s sarcoma-associated h
uugcgcuauuugccg

SEQ ID NO: 191915 - RNA, 14 nt, Human herpesvirus 8 (Kaposi`s sarcoma-associated h
uugcgauugcucaa

SEQ ID NO: 191916 - RNA, 13 nt, Human herpesvirus 8 (Kaposi`s sarcoma-associated h
uugauaccaaacu

SEQ ID NO: 191917 - RNA, 18 nt, Human herpesvirus 8 (Kaposi`s sarcoma-associated h
uucugcugcaucacgcca

SEQ ID NO: 191918 - RNA, 19 nt, Human herpesvirus 8 (Kaposi`s sarcoma-associated h
uucugggccacaaaacugc

SEQ ID NO: 191919 - RNA, 19 nt, Human herpesvirus 8 (Kaposi`s sarcoma-associated h
uccaggagcgacuggauca

SEQ ID NO: 191920 - RNA, 15 nt, Human herpesvirus 8 (Kaposi`s sarcoma-associated h
uccagcaaagcacau

SEQ ID NO: 191921 - RNA, 15 nt, Human herpesvirus 8 (Kaposi`s sarcoma-associated h
uccagaagagcauuu

SEQ ID NO: 191922 - RNA, 19 nt, Human herpesvirus 8 (Kaposi`s sarcoma-associated h
uccagaguuuuaugggcuc

SEQ ID NO: 191923 - RNA, 14 nt, Human herpesvirus 8 (Kaposi`s sarcoma-associated h
uccaucagucaggg

SEQ ID NO: 191924 - RNA, 22 nt, Human herpesvirus 8 (Kaposi`s sarcoma-associated h
uccauggcuucuauaagcaccu

SEQ ID NO: 191925 - RNA, 23 nt, Human herpesvirus 8 (Kaposi`s sarcoma-associated h
uccaguguuagacagggcuauga

SEQ ID NO: 191926 - RNA, 23 nt, Human herpesvirus 8 (Kaposi`s sarcoma-associated h
uccauaugaggccaagugcauug

SEQ ID NO: 191927 - RNA, 13 nt, Human herpesvirus 8 (Kaposi`s sarcoma-associated h
uccacgcggauag

SEQ ID NO: 191928 - RNA, 14 nt, Human herpesvirus 8 (Kaposi`s sarcoma-associated h
uccacggaguccau

SEQ ID NO: 191929 - RNA, 23 nt, Human herpesvirus 8 (Kaposi`s sarcoma-associated h
uccacggugucguguaugccaau

SEQ ID NO: 191930 - RNA, 13 nt, Human herpesvirus 8 (Kaposi`s sarcoma-associated h
ucauuuuuacuuu

SEQ ID NO: 191931 - RNA, 18 nt, Human herpesvirus 8 (Kaposi`s sarcoma-associated h
uccuuaagaaaguggaua

SEQ ID NO: 191932 - RNA, 18 nt, Human herpesvirus 8 (Kaposi`s sarcoma-associated h
uccuguggaccacccuau

SEQ ID NO: 191933 - RNA, 20 nt, Human herpesvirus 8 (Kaposi`s sarcoma-associated h
uccugugggcuaacuugccg

SEQ ID NO: 191934 - RNA, 15 nt, Human herpesvirus 8 (Kaposi`s sarcoma-associated h
ucgauuucacuguca

SEQ ID NO: 191935 - RNA, 15 nt, Human herpesvirus 8 (Kaposi`s sarcoma-associated h
ucgauauguccuuca

SEQ ID NO: 191936 - RNA, 21 nt, Human herpesvirus 8 (Kaposi`s sarcoma-associated h
ucgaucacgcccgugugcaug

SEQ ID NO: 191937 - RNA, 16 nt, Human herpesvirus 8 (Kaposi`s sarcoma-associated h
ucgaggaagaaauggg

SEQ ID NO: 191938 - RNA, 22 nt, Human herpesvirus 8 (Kaposi`s sarcoma-associated h
uccucauuaaaaacaaguagcu

SEQ ID NO: 191939 - RNA, 12 nt, Human herpesvirus 8 (Kaposi`s sarcoma-associated h
uccgacaugugc

SEQ ID NO: 191940 - RNA, 16 nt, Human herpesvirus 8 (Kaposi`s sarcoma-associated h
uccgacaugugcuuuu

SEQ ID NO: 191941 - RNA, 17 nt, Human herpesvirus 8 (Kaposi`s sarcoma-associated h
uccuauugcaacugacc

SEQ ID NO: 191942 - RNA, 19 nt, Human herpesvirus 8 (Kaposi`s sarcoma-associated h
uccuagaaugaagugcaac

SEQ ID NO: 191943 - RNA, 20 nt, Human herpesvirus 8 (Kaposi`s sarcoma-associated h
uccuaggugggugugcauuu

SEQ ID NO: 191944 - RNA, 12 nt, Human herpesvirus 8 (Kaposi`s sarcoma-associated h
ucccaaaccaca

SEQ ID NO: 191945 - RNA, 14 nt, Human herpesvirus 8 (Kaposi`s sarcoma-associated h
ucccuagaagccac

SEQ ID NO: 191946 - RNA, 21 nt, Human herpesvirus 8 (Kaposi`s sarcoma-associated h
ucccuaagggucugcagauga

SEQ ID NO: 191947 - RNA, 16 nt, Human herpesvirus 8 (Kaposi`s sarcoma-associated h
ucccaaagagugucag

SEQ ID NO: 191948 - RNA, 14 nt, Human herpesvirus 8 (Kaposi`s sarcoma-associated h
ucccucacaaugua

SEQ ID NO: 191949 - RNA, 14 nt, Human herpesvirus 8 (Kaposi`s sarcoma-associated h
ucccucagccacaa

SEQ ID NO: 191950 - RNA, 13 nt, Human herpesvirus 8 (Kaposi`s sarcoma-associated h
ucacccagugugc

SEQ ID NO: 191951 - RNA, 14 nt, Human herpesvirus 8 (Kaposi`s sarcoma-associated h
ucaccggaggaaug

SEQ ID NO: 191952 - RNA, 16 nt, Human herpesvirus 8 (Kaposi`s sarcoma-associated h
ucaccgcgguccauua

SEQ ID NO: 191953 - RNA, 23 nt, Human herpesvirus 8 (Kaposi`s sarcoma-associated h
ucaccgugggaacugugaguaau

SEQ ID NO: 191954 - RNA, 20 nt, Human herpesvirus 8 (Kaposi`s sarcoma-associated h
ucacuagaauuggagcacuu

SEQ ID NO: 191955 - RNA, 13 nt, Human herpesvirus 8 (Kaposi`s sarcoma-associated h
ucacuacagggaa

SEQ ID NO: 191956 - RNA, 21 nt, Human herpesvirus 8 (Kaposi`s sarcoma-associated h
ucacuacagggaaguuucaga

SEQ ID NO: 191957 - RNA, 19 nt, Human herpesvirus 8 (Kaposi`s sarcoma-associated h
ucacugcugguaucuggaa

SEQ ID NO: 191958 - RNA, 21 nt, Human herpesvirus 8 (Kaposi`s sarcoma-associated h
ucacguagccuuucucuaaua

SEQ ID NO: 191959 - RNA, 14 nt, Human herpesvirus 8 (Kaposi`s sarcoma-associated h
ucacgggaugcuag

SEQ ID NO: 191960 - RNA, 21 nt, Human herpesvirus 8 (Kaposi`s sarcoma-associated h
ucacgguagagaagagaccac

SEQ ID NO: 191961 - RNA, 14 nt, Human herpesvirus 8 (Kaposi`s sarcoma-associated h
ucacggacuuuauu

SEQ ID NO: 191962 - RNA, 18 nt, Human herpesvirus 8 (Kaposi`s sarcoma-associated h
ucacagucgccaacuguc

SEQ ID NO: 191963 - RNA, 22 nt, Human herpesvirus 8 (Kaposi`s sarcoma-associated h
ucacaucuguguacaaaccaaa

SEQ ID NO: 191964 - RNA, 14 nt, Human herpesvirus 8 (Kaposi`s sarcoma-associated h
ucacacucuuuacc

SEQ ID NO: 191965 - RNA, 15 nt, Human herpesvirus 8 (Kaposi`s sarcoma-associated h
uaugguauucaggca

SEQ ID NO: 191966 - RNA, 21 nt, Human herpesvirus 8 (Kaposi`s sarcoma-associated h
uaugggagggaguauaucaua

SEQ ID NO: 191967 - RNA, 17 nt, Human herpesvirus 8 (Kaposi`s sarcoma-associated h
uaugcucacgugagaca

SEQ ID NO: 191968 - RNA, 18 nt, Human herpesvirus 8 (Kaposi`s sarcoma-associated h
uaugggcuuguacaugug

SEQ ID NO: 191969 - RNA, 22 nt, Human herpesvirus 8 (Kaposi`s sarcoma-associated h
uauggggauugcgauugcucaa

SEQ ID NO: 191970 - RNA, 16 nt, Human herpesvirus 8 (Kaposi`s sarcoma-associated h
uaugcccaacuucauc

SEQ ID NO: 191971 - RNA, 16 nt, Human herpesvirus 8 (Kaposi`s sarcoma-associated h
uaucgagggcauaccc

SEQ ID NO: 191972 - RNA, 16 nt, Human herpesvirus 8 (Kaposi`s sarcoma-associated h
uaugccgcguuagcag

SEQ ID NO: 191973 - RNA, 17 nt, Human herpesvirus 8 (Kaposi`s sarcoma-associated h
ucagcuuggcgaccuca

SEQ ID NO: 191974 - RNA, 22 nt, Human herpesvirus 8 (Kaposi`s sarcoma-associated h
ucagccucacggacaacgccau

SEQ ID NO: 191975 - RNA, 20 nt, Human herpesvirus 8 (Kaposi`s sarcoma-associated h
ucagcccuuaucagcucacu

SEQ ID NO: 191976 - RNA, 16 nt, Human herpesvirus 8 (Kaposi`s sarcoma-associated h
ucagccgcuugcugau

SEQ ID NO: 191977 - RNA, 20 nt, Human herpesvirus 8 (Kaposi`s sarcoma-associated h
ucaggauuucgaauaucuca

SEQ ID NO: 191978 - RNA, 22 nt, Human herpesvirus 8 (Kaposi`s sarcoma-associated h
ucaggagcuccucgcagaacau

SEQ ID NO: 191979 - RNA, 14 nt, Human herpesvirus 8 (Kaposi`s sarcoma-associated h
ucaggcgccgccaa

SEQ ID NO: 191980 - RNA, 15 nt, Human herpesvirus 8 (Kaposi`s sarcoma-associated h
ucagggagcacguga

SEQ ID NO: 191981 - RNA, 14 nt, Human herpesvirus 8 (Kaposi`s sarcoma-associated h
ucagugguugccau

SEQ ID NO: 191982 - RNA, 17 nt, Human herpesvirus 8 (Kaposi`s sarcoma-associated h
ucauaacacagucacag

SEQ ID NO: 191983 - RNA, 11 nt, Human herpesvirus 8 (Kaposi`s sarcoma-associated h
ucagucagggg

SEQ ID NO: 191984 - RNA, 21 nt, Human herpesvirus 8 (Kaposi`s sarcoma-associated h
ucagguaaugccacauuuccc

SEQ ID NO: 191985 - RNA, 13 nt, Human herpesvirus 8 (Kaposi`s sarcoma-associated h
ucagaacaguggu

SEQ ID NO: 191986 - RNA, 13 nt, Human herpesvirus 8 (Kaposi`s sarcoma-associated h
ucagaacauaaaa

SEQ ID NO: 191987 - RNA, 18 nt, Human herpesvirus 8 (Kaposi`s sarcoma-associated h
ucacuucuccguugacag

SEQ ID NO: 191988 - RNA, 20 nt, Human herpesvirus 8 (Kaposi`s sarcoma-associated h
ucagagcuguuacccugcuc

SEQ ID NO: 191989 - RNA, 20 nt, Human herpesvirus 8 (Kaposi`s sarcoma-associated h
ucagaggcccauauuaccga

SEQ ID NO: 191990 - RNA, 17 nt, Human herpesvirus 8 (Kaposi`s sarcoma-associated h
ucagagaauacagugcu

SEQ ID NO: 191991 - RNA, 19 nt, Human herpesvirus 8 (Kaposi`s sarcoma-associated h
ucagagaauacagugcuaa

SEQ ID NO: 191992 - RNA, 13 nt, Human herpesvirus 8 (Kaposi`s sarcoma-associated h
ucuuuauugauau

SEQ ID NO: 191993 - RNA, 18 nt, Human herpesvirus 8 (Kaposi`s sarcoma-associated h
ucuuugcgcuauuugccg

SEQ ID NO: 191994 - RNA, 19 nt, Human herpesvirus 8 (Kaposi`s sarcoma-associated h
ucuuugcgguccacucuau

SEQ ID NO: 191995 - RNA, 13 nt, Human herpesvirus 8 (Kaposi`s sarcoma-associated h
ugaaaugagucag

SEQ ID NO: 191996 - RNA, 19 nt, Human herpesvirus 8 (Kaposi`s sarcoma-associated h
ucuuuggggcuacacauca

SEQ ID NO: 191997 - RNA, 20 nt, Human herpesvirus 8 (Kaposi`s sarcoma-associated h
ucuuuggggcuacacaucau

SEQ ID NO: 191998 - RNA, 11 nt, Human herpesvirus 8 (Kaposi`s sarcoma-associated h
ugaacaugugg

SEQ ID NO: 191999 - RNA, 15 nt, Human herpesvirus 8 (Kaposi`s sarcoma-associated h
ugaacauguggcaca

SEQ ID NO: 192000 - RNA, 19 nt, Human herpesvirus 8 (Kaposi`s sarcoma-associated h
ugaagucccgaugccacug

SEQ ID NO: 192001 - RNA, 22 nt, Human herpesvirus 8 (Kaposi`s sarcoma-associated h
ugaagcaccacauacagacugc

SEQ ID NO: 192002 - RNA, 18 nt, Human herpesvirus 8 (Kaposi`s sarcoma-associated h
ugaaggagcgccucgcag

SEQ ID NO: 192003 - RNA, 19 nt, Human herpesvirus 8 (Kaposi`s sarcoma-associated h
ugaaggcgaauaaaacagg

SEQ ID NO: 192004 - RNA, 14 nt, Human herpesvirus 8 (Kaposi`s sarcoma-associated h
ugacaacauagaca

SEQ ID NO: 192005 - RNA, 13 nt, Human herpesvirus 8 (Kaposi`s sarcoma-associated h
ugacaacugccac

SEQ ID NO: 192006 - RNA, 18 nt, Human herpesvirus 8 (Kaposi`s sarcoma-associated h
ugacaagcuauaggacag

SEQ ID NO: 192007 - RNA, 13 nt, Human herpesvirus 8 (Kaposi`s sarcoma-associated h
ugacucauuucau

SEQ ID NO: 192008 - RNA, 17 nt, Human herpesvirus 8 (Kaposi`s sarcoma-associated h
ugacuggaacgccaugg

SEQ ID NO: 192009 - RNA, 23 nt, Human herpesvirus 8 (Kaposi`s sarcoma-associated h
ugacuuuuugugagauagccaca

SEQ ID NO: 192010 - RNA, 22 nt, Human herpesvirus 8 (Kaposi`s sarcoma-associated h
ugagagcuggagggcacagauu

SEQ ID NO: 192011 - RNA, 22 nt, Human herpesvirus 8 (Kaposi`s sarcoma-associated h
ugagauuucccuacauugcucc

SEQ ID NO: 192012 - RNA, 14 nt, Human herpesvirus 8 (Kaposi`s sarcoma-associated h
ugagauagccacau

SEQ ID NO: 192013 - RNA, 16 nt, Human herpesvirus 8 (Kaposi`s sarcoma-associated h
ugauaggcaacaugac

SEQ ID NO: 192014 - RNA, 21 nt, Human herpesvirus 8 (Kaposi`s sarcoma-associated h
ugagccucccuuagugacauc

SEQ ID NO: 192015 - RNA, 14 nt, Human herpesvirus 8 (Kaposi`s sarcoma-associated h
ugauauuuugaugg

SEQ ID NO: 192016 - RNA, 22 nt, Human herpesvirus 8 (Kaposi`s sarcoma-associated h
ugaucccaaaagcaauguuuag

SEQ ID NO: 192017 - RNA, 19 nt, Human herpesvirus 8 (Kaposi`s sarcoma-associated h
ugcaagcuguuggcgcuuu

SEQ ID NO: 192018 - RNA, 13 nt, Human herpesvirus 8 (Kaposi`s sarcoma-associated h
ugcaccaagcaca

SEQ ID NO: 192019 - RNA, 17 nt, Human herpesvirus 8 (Kaposi`s sarcoma-associated h
ugcaccaagcacaacau

SEQ ID NO: 192020 - RNA, 19 nt, Human herpesvirus 8 (Kaposi`s sarcoma-associated h
ugcacaaaauugucuugua

SEQ ID NO: 192021 - RNA, 21 nt, Human herpesvirus 8 (Kaposi`s sarcoma-associated h
ugauguaaauuuaggaaacac

SEQ ID NO: 192022 - RNA, 16 nt, Human herpesvirus 8 (Kaposi`s sarcoma-associated h
ucuguuuccagugacc

SEQ ID NO: 192023 - RNA, 13 nt, Human herpesvirus 8 (Kaposi`s sarcoma-associated h
ucuguuacuggca

SEQ ID NO: 192024 - RNA, 13 nt, Human herpesvirus 8 (Kaposi`s sarcoma-associated h
ucuguugccaggc

SEQ ID NO: 192025 - RNA, 17 nt, Human herpesvirus 8 (Kaposi`s sarcoma-associated h
ucuuacuucgcauaugc

SEQ ID NO: 192026 - RNA, 12 nt, Human herpesvirus 8 (Kaposi`s sarcoma-associated h
ucuuacuaagag

SEQ ID NO: 192027 - RNA, 21 nt, Human herpesvirus 8 (Kaposi`s sarcoma-associated h
ucuuacuaagagaacagcaca

SEQ ID NO: 192028 - RNA, 17 nt, Human herpesvirus 8 (Kaposi`s sarcoma-associated h
ucuuagucuuacuguca

SEQ ID NO: 192029 - RNA, 13 nt, Human herpesvirus 8 (Kaposi`s sarcoma-associated h
ucugaauaugacg

SEQ ID NO: 192030 - RNA, 21 nt, Human herpesvirus 8 (Kaposi`s sarcoma-associated h
ucugacgccggcgacaaugaa

SEQ ID NO: 192031 - RNA, 15 nt, Human herpesvirus 8 (Kaposi`s sarcoma-associated h
ucuguguuugucuga

SEQ ID NO: 192032 - RNA, 14 nt, Human herpesvirus 8 (Kaposi`s sarcoma-associated h
ucugugucacuccc

SEQ ID NO: 192033 - RNA, 16 nt, Human herpesvirus 8 (Kaposi`s sarcoma-associated h
ucuucuguugccaggc

SEQ ID NO: 192034 - RNA, 12 nt, Human herpesvirus 8 (Kaposi`s sarcoma-associated h
ucuucuugucac

SEQ ID NO: 192035 - RNA, 13 nt, Human herpesvirus 8 (Kaposi`s sarcoma-associated h
ucuuggcuguuac

SEQ ID NO: 192036 - RNA, 15 nt, Human herpesvirus 8 (Kaposi`s sarcoma-associated h
ucuuccuccuaguca

SEQ ID NO: 192037 - RNA, 14 nt, Human herpesvirus 8 (Kaposi`s sarcoma-associated h
ucuucgcugaugaa

SEQ ID NO: 192038 - RNA, 20 nt, Human herpesvirus 8 (Kaposi`s sarcoma-associated h
ucuucauucucuccacuaga

SEQ ID NO: 192039 - RNA, 21 nt, Human herpesvirus 8 (Kaposi`s sarcoma-associated h
ucuacccugauuagcacugua

SEQ ID NO: 192040 - RNA, 14 nt, Human herpesvirus 8 (Kaposi`s sarcoma-associated h
ucuacgaggcaauu

SEQ ID NO: 192041 - RNA, 24 nt, Human herpesvirus 8 (Kaposi`s sarcoma-associated h
ucuacagguaggccacauacgcuc

SEQ ID NO: 192042 - RNA, 23 nt, Human herpesvirus 8 (Kaposi`s sarcoma-associated h
ucuacgcggcuaggcacccggaa

SEQ ID NO: 192043 - RNA, 19 nt, Human herpesvirus 8 (Kaposi`s sarcoma-associated h
ucgcaugaauacccuggau

SEQ ID NO: 192044 - RNA, 20 nt, Human herpesvirus 8 (Kaposi`s sarcoma-associated h
ucgcaugaauacccuggauc

SEQ ID NO: 192045 - RNA, 20 nt, Human herpesvirus 8 (Kaposi`s sarcoma-associated h
ucgccagggucaucccgccg

SEQ ID NO: 192046 - RNA, 17 nt, Human herpesvirus 8 (Kaposi`s sarcoma-associated h
ucgccucccaacaugua

SEQ ID NO: 192047 - RNA, 16 nt, Human herpesvirus 8 (Kaposi`s sarcoma-associated h
ucgcgaccgcugccaa

SEQ ID NO: 192048 - RNA, 15 nt, Human herpesvirus 8 (Kaposi`s sarcoma-associated h
ucucuauaacauaau

SEQ ID NO: 192049 - RNA, 15 nt, Human herpesvirus 8 (Kaposi`s sarcoma-associated h
ucucgguacugcgca

SEQ ID NO: 192050 - RNA, 23 nt, Human herpesvirus 8 (Kaposi`s sarcoma-associated h
ucucgugacggugacauugcagu

SEQ ID NO: 192051 - RNA, 13 nt, Human herpesvirus 8 (Kaposi`s sarcoma-associated h
ucucugguggugg

SEQ ID NO: 192052 - RNA, 15 nt, Human herpesvirus 8 (Kaposi`s sarcoma-associated h
ucucuggugguggcu

SEQ ID NO: 192053 - RNA, 19 nt, Human herpesvirus 8 (Kaposi`s sarcoma-associated h
ucuagcauaugcugccaag

SEQ ID NO: 192054 - RNA, 18 nt, Human herpesvirus 8 (Kaposi`s sarcoma-associated h
ucuagucguuguaguggu

SEQ ID NO: 192055 - RNA, 19 nt, Human herpesvirus 8 (Kaposi`s sarcoma-associated h
ucuaugccgaugugucagc

SEQ ID NO: 192056 - RNA, 17 nt, Human herpesvirus 8 (Kaposi`s sarcoma-associated h
ucuaucucgccggugua

SEQ ID NO: 192057 - RNA, 16 nt, Human herpesvirus 8 (Kaposi`s sarcoma-associated h
ucuaucucugguggug

SEQ ID NO: 192058 - RNA, 16 nt, Human herpesvirus 8 (Kaposi`s sarcoma-associated h
cuaaaaaaugugcaug

SEQ ID NO: 192059 - RNA, 21 nt, Human herpesvirus 8 (Kaposi`s sarcoma-associated h
cguuugagucuuucuagcaga

SEQ ID NO: 192060 - RNA, 19 nt, Human herpesvirus 8 (Kaposi`s sarcoma-associated h
cuaaaaucaggagggucaa

SEQ ID NO: 192061 - RNA, 21 nt, Human herpesvirus 8 (Kaposi`s sarcoma-associated h
cuaaaaucaggagggucaaug

SEQ ID NO: 192062 - RNA, 23 nt, Human herpesvirus 8 (Kaposi`s sarcoma-associated h
cuaaaaucaggagggucaaugaa

SEQ ID NO: 192063 - RNA, 20 nt, Human herpesvirus 8 (Kaposi`s sarcoma-associated h
cuaaaaccggaguagugcaa

SEQ ID NO: 192064 - RNA, 17 nt, Human herpesvirus 8 (Kaposi`s sarcoma-associated h
cuagaaugaagugcaac

SEQ ID NO: 192065 - RNA, 18 nt, Human herpesvirus 8 (Kaposi`s sarcoma-associated h
cuagaauuggagcacuuu

SEQ ID NO: 192066 - RNA, 12 nt, Human herpesvirus 8 (Kaposi`s sarcoma-associated h
cuagacacgcaa

SEQ ID NO: 192067 - RNA, 18 nt, Human herpesvirus 8 (Kaposi`s sarcoma-associated h
cuaaggcccccaccaaac

SEQ ID NO: 192068 - RNA, 23 nt, Human herpesvirus 8 (Kaposi`s sarcoma-associated h
cuaagggucugcagaugaucccg

SEQ ID NO: 192069 - RNA, 16 nt, Human herpesvirus 8 (Kaposi`s sarcoma-associated h
cuaagucgcacguuag

SEQ ID NO: 192070 - RNA, 13 nt, Human herpesvirus 8 (Kaposi`s sarcoma-associated h
cuaauaaaacuaa

SEQ ID NO: 192071 - RNA, 19 nt, Human herpesvirus 8 (Kaposi`s sarcoma-associated h
cuaauacauaacacacaca

SEQ ID NO: 192072 - RNA, 19 nt, Human herpesvirus 8 (Kaposi`s sarcoma-associated h
cuaucagguagcaaaugaa

SEQ ID NO: 192073 - RNA, 13 nt, Human herpesvirus 8 (Kaposi`s sarcoma-associated h
cuauccacccuaa

SEQ ID NO: 192074 - RNA, 24 nt, Human herpesvirus 8 (Kaposi`s sarcoma-associated h
cuauccacccuaauacauaacaca

SEQ ID NO: 192075 - RNA, 20 nt, Human herpesvirus 8 (Kaposi`s sarcoma-associated h
cuaucuaucucugguggugg

SEQ ID NO: 192076 - RNA, 18 nt, Human herpesvirus 8 (Kaposi`s sarcoma-associated h
cuaucucuggugguggcu

SEQ ID NO: 192077 - RNA, 18 nt, Human herpesvirus 8 (Kaposi`s sarcoma-associated h
cuaugggggggcuguaga

SEQ ID NO: 192078 - RNA, 18 nt, Human herpesvirus 8 (Kaposi`s sarcoma-associated h
cuaugguauucaggcaga

SEQ ID NO: 192079 - RNA, 17 nt, Human herpesvirus 8 (Kaposi`s sarcoma-associated h
cuauggucauagccaga

SEQ ID NO: 192080 - RNA, 13 nt, Human herpesvirus 8 (Kaposi`s sarcoma-associated h
cuauuauaacauu

SEQ ID NO: 192081 - RNA, 19 nt, Human herpesvirus 8 (Kaposi`s sarcoma-associated h
cuaugggaaugugccuauc

SEQ ID NO: 192082 - RNA, 23 nt, Human herpesvirus 8 (Kaposi`s sarcoma-associated h
cucauuucauuuguguauaguuu

SEQ ID NO: 192083 - RNA, 15 nt, Human herpesvirus 8 (Kaposi`s sarcoma-associated h
cuccagcaaagcaca

SEQ ID NO: 192084 - RNA, 16 nt, Human herpesvirus 8 (Kaposi`s sarcoma-associated h
cuccagcaaagcacau

SEQ ID NO: 192085 - RNA, 23 nt, Human herpesvirus 8 (Kaposi`s sarcoma-associated h
cuccucagacgacaaaacgcaca

SEQ ID NO: 192086 - RNA, 21 nt, Human herpesvirus 8 (Kaposi`s sarcoma-associated h
cuccuggguagcuaugcccac

SEQ ID NO: 192087 - RNA, 18 nt, Human herpesvirus 8 (Kaposi`s sarcoma-associated h
cuccucuucggagaucaa

SEQ ID NO: 192088 - RNA, 13 nt, Human herpesvirus 8 (Kaposi`s sarcoma-associated h
cucccaacaugua

SEQ ID NO: 192089 - RNA, 16 nt, Human herpesvirus 8 (Kaposi`s sarcoma-associated h
cuccagaagagcauuu

SEQ ID NO: 192090 - RNA, 15 nt, Human herpesvirus 8 (Kaposi`s sarcoma-associated h
cuccguugacaggga

SEQ ID NO: 192091 - RNA, 21 nt, Human herpesvirus 8 (Kaposi`s sarcoma-associated h
cuccguuuggacacuccucaa

SEQ ID NO: 192092 - RNA, 21 nt, Human herpesvirus 8 (Kaposi`s sarcoma-associated h
cucgagccucccggaaacgga

SEQ ID NO: 192093 - RNA, 17 nt, Human herpesvirus 8 (Kaposi`s sarcoma-associated h
cucgacggagacacgau

SEQ ID NO: 192094 - RNA, 18 nt, Human herpesvirus 8 (Kaposi`s sarcoma-associated h
cuccuguuagcacauucu

SEQ ID NO: 192095 - RNA, 19 nt, Human herpesvirus 8 (Kaposi`s sarcoma-associated h
cuccuguuagcacauucuc

SEQ ID NO: 192096 - RNA, 12 nt, Human herpesvirus 8 (Kaposi`s sarcoma-associated h
cucuauaacaua

SEQ ID NO: 192097 - RNA, 20 nt, Human herpesvirus 8 (Kaposi`s sarcoma-associated h
cucuaaggcccccaccaaac

SEQ ID NO: 192098 - RNA, 13 nt, Human herpesvirus 8 (Kaposi`s sarcoma-associated h
cucuaauccugaa

SEQ ID NO: 192099 - RNA, 15 nt, Human herpesvirus 8 (Kaposi`s sarcoma-associated h
cucugucgcucuuca

SEQ ID NO: 192100 - RNA, 18 nt, Human herpesvirus 8 (Kaposi`s sarcoma-associated h
cucuggccugugcccaaa

SEQ ID NO: 192101 - RNA, 10 nt, Human herpesvirus 8 (Kaposi`s sarcoma-associated h
cucucauaac

SEQ ID NO: 192102 - RNA, 16 nt, Human herpesvirus 8 (Kaposi`s sarcoma-associated h
cucguucaaugcaugu

SEQ ID NO: 192103 - RNA, 13 nt, Human herpesvirus 8 (Kaposi`s sarcoma-associated h
cucgugugcccuu

SEQ ID NO: 192104 - RNA, 17 nt, Human herpesvirus 8 (Kaposi`s sarcoma-associated h
cucgugacggugacauu

SEQ ID NO: 192105 - RNA, 23 nt, Human herpesvirus 8 (Kaposi`s sarcoma-associated h
cucgugcaaaagagacacuaucu

SEQ ID NO: 192106 - RNA, 14 nt, Human herpesvirus 8 (Kaposi`s sarcoma-associated h
cucggcaacauuca

SEQ ID NO: 192107 - RNA, 22 nt, Human herpesvirus 8 (Kaposi`s sarcoma-associated h
cucgcuuuccguuagugaccug

SEQ ID NO: 192108 - RNA, 18 nt, Human herpesvirus 8 (Kaposi`s sarcoma-associated h
cucuucccacacccggcu

SEQ ID NO: 192109 - RNA, 13 nt, Human herpesvirus 8 (Kaposi`s sarcoma-associated h
cucuuggcuguua

SEQ ID NO: 192110 - RNA, 16 nt, Human herpesvirus 8 (Kaposi`s sarcoma-associated h
cucuuggcuguuacaa

SEQ ID NO: 192111 - RNA, 14 nt, Human herpesvirus 8 (Kaposi`s sarcoma-associated h
cugauuagcacugu

SEQ ID NO: 192112 - RNA, 15 nt, Human herpesvirus 8 (Kaposi`s sarcoma-associated h
cugauuuuccaggga

SEQ ID NO: 192113 - RNA, 13 nt, Human herpesvirus 8 (Kaposi`s sarcoma-associated h
cugaugaacuggc

SEQ ID NO: 192114 - RNA, 21 nt, Human herpesvirus 8 (Kaposi`s sarcoma-associated h
cugacgccggcgacaaugaau

SEQ ID NO: 192115 - RNA, 14 nt, Human herpesvirus 8 (Kaposi`s sarcoma-associated h
cugaccacggcaca

SEQ ID NO: 192116 - RNA, 23 nt, Human herpesvirus 8 (Kaposi`s sarcoma-associated h
cugaccauguucaggugguaaua

SEQ ID NO: 192117 - RNA, 16 nt, Human herpesvirus 8 (Kaposi`s sarcoma-associated h
cugacggccaccgaga

SEQ ID NO: 192118 - RNA, 19 nt, Human herpesvirus 8 (Kaposi`s sarcoma-associated h
cuguacaugaaccagaauc

SEQ ID NO: 192119 - RNA, 17 nt, Human herpesvirus 8 (Kaposi`s sarcoma-associated h
cuguaaugguguguuua

SEQ ID NO: 192120 - RNA, 18 nt, Human herpesvirus 8 (Kaposi`s sarcoma-associated h
cugggacuugauaaucuc

SEQ ID NO: 192121 - RNA, 20 nt, Human herpesvirus 8 (Kaposi`s sarcoma-associated h
cugggaucccuucacagugc

SEQ ID NO: 192122 - RNA, 16 nt, Human herpesvirus 8 (Kaposi`s sarcoma-associated h
cuggugcgaauggcca

SEQ ID NO: 192123 - RNA, 15 nt, Human herpesvirus 8 (Kaposi`s sarcoma-associated h
cugguucuaaucuua

SEQ ID NO: 192124 - RNA, 15 nt, Human herpesvirus 8 (Kaposi`s sarcoma-associated h
cuggaagacgagcaa

SEQ ID NO: 192125 - RNA, 17 nt, Human herpesvirus 8 (Kaposi`s sarcoma-associated h
cuggaagacgagcaauu

SEQ ID NO: 192126 - RNA, 12 nt, Human herpesvirus 8 (Kaposi`s sarcoma-associated h
cuggcagggugg

SEQ ID NO: 192127 - RNA, 24 nt, Human herpesvirus 8 (Kaposi`s sarcoma-associated h
cuggcgcgacaaauaauagaucuc

SEQ ID NO: 192128 - RNA, 20 nt, Human herpesvirus 8 (Kaposi`s sarcoma-associated h
cuggcugcaaagcuuaacca

SEQ ID NO: 192129 - RNA, 24 nt, Human herpesvirus 8 (Kaposi`s sarcoma-associated h
cuggcugcaaagcuuaaccacaug

SEQ ID NO: 192130 - RNA, 14 nt, Human herpesvirus 8 (Kaposi`s sarcoma-associated h
cuggcguccagcua

SEQ ID NO: 192131 - RNA, 12 nt, Human herpesvirus 8 (Kaposi`s sarcoma-associated h
cugcuucacuua

SEQ ID NO: 192132 - RNA, 19 nt, Human herpesvirus 8 (Kaposi`s sarcoma-associated h
cugcucuugucaguauagu

SEQ ID NO: 192133 - RNA, 21 nt, Human herpesvirus 8 (Kaposi`s sarcoma-associated h
cugccuaaagagggaucccag

SEQ ID NO: 192134 - RNA, 23 nt, Human herpesvirus 8 (Kaposi`s sarcoma-associated h
cugccuagaacuaaccacucaua

SEQ ID NO: 192135 - RNA, 21 nt, Human herpesvirus 8 (Kaposi`s sarcoma-associated h
cugcaaacuauacacaaauga

SEQ ID NO: 192136 - RNA, 19 nt, Human herpesvirus 8 (Kaposi`s sarcoma-associated h
cugccaugaaaggugguuc

SEQ ID NO: 192137 - RNA, 12 nt, Human herpesvirus 8 (Kaposi`s sarcoma-associated h
cugcaaugcaag

SEQ ID NO: 192138 - RNA, 14 nt, Human herpesvirus 8 (Kaposi`s sarcoma-associated h
cgcacaagcgcuga

SEQ ID NO: 192139 - RNA, 13 nt, Human herpesvirus 8 (Kaposi`s sarcoma-associated h
cgauuucacuguc

SEQ ID NO: 192140 - RNA, 21 nt, Human herpesvirus 8 (Kaposi`s sarcoma-associated h
cgcaacggcgguguaucaggc

SEQ ID NO: 192141 - RNA, 18 nt, Human herpesvirus 8 (Kaposi`s sarcoma-associated h
cgcaggagucagagcagu

SEQ ID NO: 192142 - RNA, 22 nt, Human herpesvirus 8 (Kaposi`s sarcoma-associated h
cgcagcuuaccgcuacuguggg

SEQ ID NO: 192143 - RNA, 19 nt, Human herpesvirus 8 (Kaposi`s sarcoma-associated h
cgcagcuuuccugugauuu

SEQ ID NO: 192144 - RNA, 14 nt, Human herpesvirus 8 (Kaposi`s sarcoma-associated h
cgcauggcuuacaa

SEQ ID NO: 192145 - RNA, 20 nt, Human herpesvirus 8 (Kaposi`s sarcoma-associated h
cgcauccgugguacccaguc

SEQ ID NO: 192146 - RNA, 20 nt, Human herpesvirus 8 (Kaposi`s sarcoma-associated h
cgcauuaaaaaagaagaaaa

SEQ ID NO: 192147 - RNA, 14 nt, Human herpesvirus 8 (Kaposi`s sarcoma-associated h
cgcauuaaagcacu

SEQ ID NO: 192148 - RNA, 17 nt, Human herpesvirus 8 (Kaposi`s sarcoma-associated h
cgccaggaaguucaaug

SEQ ID NO: 192149 - RNA, 21 nt, Human herpesvirus 8 (Kaposi`s sarcoma-associated h
cgccaccacuauccaugucuu

SEQ ID NO: 192150 - RNA, 15 nt, Human herpesvirus 8 (Kaposi`s sarcoma-associated h
cgccacguggagcca

SEQ ID NO: 192151 - RNA, 19 nt, Human herpesvirus 8 (Kaposi`s sarcoma-associated h
cgccccucuuggcuguuac

SEQ ID NO: 192152 - RNA, 18 nt, Human herpesvirus 8 (Kaposi`s sarcoma-associated h
cgcgaaaugguagagggg

SEQ ID NO: 192153 - RNA, 23 nt, Human herpesvirus 8 (Kaposi`s sarcoma-associated h
cgccucgagggcggccaguauua

SEQ ID NO: 192154 - RNA, 23 nt, Human herpesvirus 8 (Kaposi`s sarcoma-associated h
cgccucugaagcaccacauacag

SEQ ID NO: 192155 - RNA, 12 nt, Human herpesvirus 8 (Kaposi`s sarcoma-associated h
cgauuacaggaa

SEQ ID NO: 192156 - RNA, 21 nt, Human herpesvirus 8 (Kaposi`s sarcoma-associated h
cgauuaaaaaccacucacuga

SEQ ID NO: 192157 - RNA, 20 nt, Human herpesvirus 8 (Kaposi`s sarcoma-associated h
cgauguacuugaacagggca

SEQ ID NO: 192158 - RNA, 18 nt, Human herpesvirus 8 (Kaposi`s sarcoma-associated h
cgagguucucugugaggu

SEQ ID NO: 192159 - RNA, 15 nt, Human herpesvirus 8 (Kaposi`s sarcoma-associated h
cgagcguauucucag

SEQ ID NO: 192160 - RNA, 23 nt, Human herpesvirus 8 (Kaposi`s sarcoma-associated h
cgagccauucaucgaguccuuga

SEQ ID NO: 192161 - RNA, 15 nt, Human herpesvirus 8 (Kaposi`s sarcoma-associated h
ccuaauaaacuggcc

SEQ ID NO: 192162 - RNA, 15 nt, Human herpesvirus 8 (Kaposi`s sarcoma-associated h
ccguuguucuuugcg

SEQ ID NO: 192163 - RNA, 20 nt, Human herpesvirus 8 (Kaposi`s sarcoma-associated h
ccguugucgacuauaaccug

SEQ ID NO: 192164 - RNA, 12 nt, Human herpesvirus 8 (Kaposi`s sarcoma-associated h
cgagcaccucag

SEQ ID NO: 192165 - RNA, 23 nt, Human herpesvirus 8 (Kaposi`s sarcoma-associated h
cgagacggacgcaccgacacugg

SEQ ID NO: 192166 - RNA, 12 nt, Human herpesvirus 8 (Kaposi`s sarcoma-associated h
cgacuggaucau

SEQ ID NO: 192167 - RNA, 20 nt, Human herpesvirus 8 (Kaposi`s sarcoma-associated h
ccuacugccugucagauuua

SEQ ID NO: 192168 - RNA, 13 nt, Human herpesvirus 8 (Kaposi`s sarcoma-associated h
cggcacauugugu

SEQ ID NO: 192169 - RNA, 14 nt, Human herpesvirus 8 (Kaposi`s sarcoma-associated h
cgcuugccuuuugc

SEQ ID NO: 192170 - RNA, 13 nt, Human herpesvirus 8 (Kaposi`s sarcoma-associated h
cgcuugcugauau

SEQ ID NO: 192171 - RNA, 18 nt, Human herpesvirus 8 (Kaposi`s sarcoma-associated h
cggccaguauuaugccag

SEQ ID NO: 192172 - RNA, 18 nt, Human herpesvirus 8 (Kaposi`s sarcoma-associated h
cggcgucaccgacaccau

SEQ ID NO: 192173 - RNA, 14 nt, Human herpesvirus 8 (Kaposi`s sarcoma-associated h
cggcggugcaugug

SEQ ID NO: 192174 - RNA, 21 nt, Human herpesvirus 8 (Kaposi`s sarcoma-associated h
cgggaaacaggugucuaucuu

SEQ ID NO: 192175 - RNA, 11 nt, Human herpesvirus 8 (Kaposi`s sarcoma-associated h
cggcuccgucc

SEQ ID NO: 192176 - RNA, 14 nt, Human herpesvirus 8 (Kaposi`s sarcoma-associated h
cgcggugaaacaga

SEQ ID NO: 192177 - RNA, 16 nt, Human herpesvirus 8 (Kaposi`s sarcoma-associated h
cgcgaccgcugccaau

SEQ ID NO: 192178 - RNA, 21 nt, Human herpesvirus 8 (Kaposi`s sarcoma-associated h
cgcgcucugucgcucuucagu

SEQ ID NO: 192179 - RNA, 23 nt, Human herpesvirus 8 (Kaposi`s sarcoma-associated h
cgcucgcgcgguuucugaucccu

SEQ ID NO: 192180 - RNA, 23 nt, Human herpesvirus 8 (Kaposi`s sarcoma-associated h
cgcucaucuacuuuggacaguuu

SEQ ID NO: 192181 - RNA, 18 nt, Human herpesvirus 8 (Kaposi`s sarcoma-associated h
cgcucaauuaucuacagc

SEQ ID NO: 192182 - RNA, 22 nt, Human herpesvirus 8 (Kaposi`s sarcoma-associated h
cgcuacugugggugcacugagu

SEQ ID NO: 192183 - RNA, 21 nt, Human herpesvirus 8 (Kaposi`s sarcoma-associated h
cgugugggauuccgucauuca

SEQ ID NO: 192184 - RNA, 17 nt, Human herpesvirus 8 (Kaposi`s sarcoma-associated h
cguguguggcuguggga

SEQ ID NO: 192185 - RNA, 17 nt, Human herpesvirus 8 (Kaposi`s sarcoma-associated h
cgugaguuacauggaau

SEQ ID NO: 192186 - RNA, 23 nt, Human herpesvirus 8 (Kaposi`s sarcoma-associated h
cgugcaggucgcagagaccucuu

SEQ ID NO: 192187 - RNA, 19 nt, Human herpesvirus 8 (Kaposi`s sarcoma-associated h
cguugggagugugcacuag

SEQ ID NO: 192188 - RNA, 22 nt, Human herpesvirus 8 (Kaposi`s sarcoma-associated h
cguucuccuucuugauguuuaa

SEQ ID NO: 192189 - RNA, 22 nt, Human herpesvirus 8 (Kaposi`s sarcoma-associated h
cguugucccucagccacaaaua

SEQ ID NO: 192190 - RNA, 15 nt, Human herpesvirus 8 (Kaposi`s sarcoma-associated h
cguuagcagccaugu

SEQ ID NO: 192191 - RNA, 18 nt, Human herpesvirus 8 (Kaposi`s sarcoma-associated h
cguguuucacgucuugac

SEQ ID NO: 192192 - RNA, 19 nt, Human herpesvirus 8 (Kaposi`s sarcoma-associated h
cguucuaaucuggcaugua

SEQ ID NO: 192193 - RNA, 12 nt, Human herpesvirus 8 (Kaposi`s sarcoma-associated h
cguucccaugag

SEQ ID NO: 192194 - RNA, 14 nt, Human herpesvirus 8 (Kaposi`s sarcoma-associated h
cggugagugucuuc

SEQ ID NO: 192195 - RNA, 18 nt, Human herpesvirus 8 (Kaposi`s sarcoma-associated h
cggugauagauaugucug

SEQ ID NO: 192196 - RNA, 21 nt, Human herpesvirus 8 (Kaposi`s sarcoma-associated h
cggucuaugccgaugugucag

SEQ ID NO: 192197 - RNA, 18 nt, Human herpesvirus 8 (Kaposi`s sarcoma-associated h
cggucccguugucccuca

SEQ ID NO: 192198 - RNA, 14 nt, Human herpesvirus 8 (Kaposi`s sarcoma-associated h
cggugccuucacau

SEQ ID NO: 192199 - RNA, 15 nt, Human herpesvirus 8 (Kaposi`s sarcoma-associated h
cggugccuucacaua

SEQ ID NO: 192200 - RNA, 23 nt, Human herpesvirus 8 (Kaposi`s sarcoma-associated h
cgggauuuaaaaccgcccacuga

SEQ ID NO: 192201 - RNA, 19 nt, Human herpesvirus 8 (Kaposi`s sarcoma-associated h
cgggcaaccauuuuuuacg

SEQ ID NO: 192202 - RNA, 22 nt, Human herpesvirus 8 (Kaposi`s sarcoma-associated h
cgucauucacccgagccacauc

SEQ ID NO: 192203 - RNA, 14 nt, Human herpesvirus 8 (Kaposi`s sarcoma-associated h
cgucaucugauauu

SEQ ID NO: 192204 - RNA, 12 nt, Human herpesvirus 8 (Kaposi`s sarcoma-associated h
cgucagcagugu

SEQ ID NO: 192205 - RNA, 15 nt, Human herpesvirus 8 (Kaposi`s sarcoma-associated h
cgucaccgacaccau

SEQ ID NO: 192206 - RNA, 16 nt, Human herpesvirus 8 (Kaposi`s sarcoma-associated h
cgucaccgacaccauc

SEQ ID NO: 192207 - RNA, 17 nt, Human herpesvirus 8 (Kaposi`s sarcoma-associated h
gacguggccagcgugua

SEQ ID NO: 192208 - RNA, 20 nt, Human herpesvirus 8 (Kaposi`s sarcoma-associated h
gacgucuucgccgaggacac

SEQ ID NO: 192209 - RNA, 13 nt, Human herpesvirus 8 (Kaposi`s sarcoma-associated h
gacgugacgcccu

SEQ ID NO: 192210 - RNA, 21 nt, Human herpesvirus 8 (Kaposi`s sarcoma-associated h
gacgugacgcccuggguguua

SEQ ID NO: 192211 - RNA, 13 nt, Human herpesvirus 8 (Kaposi`s sarcoma-associated h
gacggugacauug

SEQ ID NO: 192212 - RNA, 17 nt, Human herpesvirus 8 (Kaposi`s sarcoma-associated h
gacggacggcaccaagg

SEQ ID NO: 192213 - RNA, 16 nt, Human herpesvirus 8 (Kaposi`s sarcoma-associated h
gacaauaugcccaacu

SEQ ID NO: 192214 - RNA, 14 nt, Human herpesvirus 8 (Kaposi`s sarcoma-associated h
gagacuggugcgca

SEQ ID NO: 192215 - RNA, 19 nt, Human herpesvirus 8 (Kaposi`s sarcoma-associated h
gagacuuacugcagcacua

SEQ ID NO: 192216 - RNA, 14 nt, Human herpesvirus 8 (Kaposi`s sarcoma-associated h
gagacuagcugccu

SEQ ID NO: 192217 - RNA, 17 nt, Human herpesvirus 8 (Kaposi`s sarcoma-associated h
gagacgcgcaaaggggg

SEQ ID NO: 192218 - RNA, 17 nt, Human herpesvirus 8 (Kaposi`s sarcoma-associated h
gagacggggaagucaug

SEQ ID NO: 192219 - RNA, 22 nt, Human herpesvirus 8 (Kaposi`s sarcoma-associated h
gagaccuacacugcauucuacg

SEQ ID NO: 192220 - RNA, 15 nt, Human herpesvirus 8 (Kaposi`s sarcoma-associated h
gagaauggcgugcca

SEQ ID NO: 192221 - RNA, 16 nt, Human herpesvirus 8 (Kaposi`s sarcoma-associated h
gacuguuaacccaaug

SEQ ID NO: 192222 - RNA, 22 nt, Human herpesvirus 8 (Kaposi`s sarcoma-associated h
gacuuccccgucuccagucacc

SEQ ID NO: 192223 - RNA, 20 nt, Human herpesvirus 8 (Kaposi`s sarcoma-associated h
gacuggugcgcacaggccaa

SEQ ID NO: 192224 - RNA, 16 nt, Human herpesvirus 8 (Kaposi`s sarcoma-associated h
gacuuaucuaaaaaga

SEQ ID NO: 192225 - RNA, 18 nt, Human herpesvirus 8 (Kaposi`s sarcoma-associated h
gacuuaucuaaaaagagg

SEQ ID NO: 192226 - RNA, 15 nt, Human herpesvirus 8 (Kaposi`s sarcoma-associated h
gacugggccaccaag

SEQ ID NO: 192227 - RNA, 20 nt, Human herpesvirus 8 (Kaposi`s sarcoma-associated h
gagcagugcucccgugcguu

SEQ ID NO: 192228 - RNA, 16 nt, Human herpesvirus 8 (Kaposi`s sarcoma-associated h
gagcagcgccagugga

SEQ ID NO: 192229 - RNA, 19 nt, Human herpesvirus 8 (Kaposi`s sarcoma-associated h
gagccacaucgucaucucu

SEQ ID NO: 192230 - RNA, 23 nt, Human herpesvirus 8 (Kaposi`s sarcoma-associated h
gagccauucaucgaguccuugag

SEQ ID NO: 192231 - RNA, 23 nt, Human herpesvirus 8 (Kaposi`s sarcoma-associated h
gagcccggaggagguugacagaa

SEQ ID NO: 192232 - RNA, 20 nt, Human herpesvirus 8 (Kaposi`s sarcoma-associated h
gaggcccgagaaacacugug

SEQ ID NO: 192233 - RNA, 14 nt, Human herpesvirus 8 (Kaposi`s sarcoma-associated h
gaggccuaucugag

SEQ ID NO: 192234 - RNA, 22 nt, Human herpesvirus 8 (Kaposi`s sarcoma-associated h
gaggauccuaggugggugugca

SEQ ID NO: 192235 - RNA, 23 nt, Human herpesvirus 8 (Kaposi`s sarcoma-associated h
gagugucucccguauuccaugua

SEQ ID NO: 192236 - RNA, 15 nt, Human herpesvirus 8 (Kaposi`s sarcoma-associated h
gaguuccacacagau

SEQ ID NO: 192237 - RNA, 18 nt, Human herpesvirus 8 (Kaposi`s sarcoma-associated h
gaguuaaagcugucacua

SEQ ID NO: 192238 - RNA, 22 nt, Human herpesvirus 8 (Kaposi`s sarcoma-associated h
gaguuacauggaauacgggaga

SEQ ID NO: 192239 - RNA, 16 nt, Human herpesvirus 8 (Kaposi`s sarcoma-associated h
gaguguacacagccaa

SEQ ID NO: 192240 - RNA, 19 nt, Human herpesvirus 8 (Kaposi`s sarcoma-associated h
gauaaaaaacguauaugcc

SEQ ID NO: 192241 - RNA, 12 nt, Human herpesvirus 8 (Kaposi`s sarcoma-associated h
gagucacaaagg

SEQ ID NO: 192242 - RNA, 13 nt, Human herpesvirus 8 (Kaposi`s sarcoma-associated h
gagucacaaaggg

SEQ ID NO: 192243 - RNA, 17 nt, Human herpesvirus 8 (Kaposi`s sarcoma-associated h
gagucacaaguaccacu

SEQ ID NO: 192244 - RNA, 20 nt, Human herpesvirus 8 (Kaposi`s sarcoma-associated h
gagucagagaauacagugcu

SEQ ID NO: 192245 - RNA, 15 nt, Human herpesvirus 8 (Kaposi`s sarcoma-associated h
gagucuacgugccag

SEQ ID NO: 192246 - RNA, 15 nt, Human herpesvirus 8 (Kaposi`s sarcoma-associated h
gcacacugugugguu

SEQ ID NO: 192247 - RNA, 22 nt, Human herpesvirus 8 (Kaposi`s sarcoma-associated h
gcacaacucuacugcacaaaau

SEQ ID NO: 192248 - RNA, 17 nt, Human herpesvirus 8 (Kaposi`s sarcoma-associated h
gcacaacauuaaacaca

SEQ ID NO: 192249 - RNA, 18 nt, Human herpesvirus 8 (Kaposi`s sarcoma-associated h
gcacaacauuaaacacau

SEQ ID NO: 192250 - RNA, 18 nt, Human herpesvirus 8 (Kaposi`s sarcoma-associated h
gcaauuuauuaagcaaac

SEQ ID NO: 192251 - RNA, 23 nt, Human herpesvirus 8 (Kaposi`s sarcoma-associated h
gcaauugccaacgaccugaugca

SEQ ID NO: 192252 - RNA, 14 nt, Human herpesvirus 8 (Kaposi`s sarcoma-associated h
gcaauguacugcca

SEQ ID NO: 192253 - RNA, 20 nt, Human herpesvirus 8 (Kaposi`s sarcoma-associated h
gcaaugucagguuccaccca

SEQ ID NO: 192254 - RNA, 15 nt, Human herpesvirus 8 (Kaposi`s sarcoma-associated h
gcaauaaacccacag

SEQ ID NO: 192255 - RNA, 21 nt, Human herpesvirus 8 (Kaposi`s sarcoma-associated h
gcaagguuguaacacaaaagc

SEQ ID NO: 192256 - RNA, 19 nt, Human herpesvirus 8 (Kaposi`s sarcoma-associated h
gauuuaaaaccgcccacug

SEQ ID NO: 192257 - RNA, 19 nt, Human herpesvirus 8 (Kaposi`s sarcoma-associated h
gcaaacuuuuccauugcac

SEQ ID NO: 192258 - RNA, 20 nt, Human herpesvirus 8 (Kaposi`s sarcoma-associated h
gauuuagacaauaugcccaa

SEQ ID NO: 192259 - RNA, 23 nt, Human herpesvirus 8 (Kaposi`s sarcoma-associated h
gcaaagugucucacccaauacuu

SEQ ID NO: 192260 - RNA, 15 nt, Human herpesvirus 8 (Kaposi`s sarcoma-associated h
gcaaagauaagccaa

SEQ ID NO: 192261 - RNA, 16 nt, Human herpesvirus 8 (Kaposi`s sarcoma-associated h
gcaaagauaagccaau

SEQ ID NO: 192262 - RNA, 13 nt, Human herpesvirus 8 (Kaposi`s sarcoma-associated h
gcaagcacagaaa

SEQ ID NO: 192263 - RNA, 14 nt, Human herpesvirus 8 (Kaposi`s sarcoma-associated h
gcaagcacagaaac

SEQ ID NO: 192264 - RNA, 12 nt, Human herpesvirus 8 (Kaposi`s sarcoma-associated h
gcaacacuggac

SEQ ID NO: 192265 - RNA, 15 nt, Human herpesvirus 8 (Kaposi`s sarcoma-associated h
gaugagcaugacuuc

SEQ ID NO: 192266 - RNA, 10 nt, Human herpesvirus 8 (Kaposi`s sarcoma-associated h
gaucuuugcg

SEQ ID NO: 192267 - RNA, 13 nt, Human herpesvirus 8 (Kaposi`s sarcoma-associated h
gaugaaacauucg

SEQ ID NO: 192268 - RNA, 20 nt, Human herpesvirus 8 (Kaposi`s sarcoma-associated h
gaucuggauacacuacuuau

SEQ ID NO: 192269 - RNA, 15 nt, Human herpesvirus 8 (Kaposi`s sarcoma-associated h
gaucuguuacuggca

SEQ ID NO: 192270 - RNA, 13 nt, Human herpesvirus 8 (Kaposi`s sarcoma-associated h
gaucuuaggccag

SEQ ID NO: 192271 - RNA, 14 nt, Human herpesvirus 8 (Kaposi`s sarcoma-associated h
gauguucuugccag

SEQ ID NO: 192272 - RNA, 19 nt, Human herpesvirus 8 (Kaposi`s sarcoma-associated h
gauucgaucccgcaaccca

SEQ ID NO: 192273 - RNA, 21 nt, Human herpesvirus 8 (Kaposi`s sarcoma-associated h
gauagauaggagaaaucccau

SEQ ID NO: 192274 - RNA, 15 nt, Human herpesvirus 8 (Kaposi`s sarcoma-associated h
gaucacggccguguu

SEQ ID NO: 192275 - RNA, 15 nt, Human herpesvirus 8 (Kaposi`s sarcoma-associated h
gaucacccagugugc

SEQ ID NO: 192276 - RNA, 22 nt, Human herpesvirus 8 (Kaposi`s sarcoma-associated h
gauccagaggauauuaaagugg

SEQ ID NO: 192277 - RNA, 23 nt, Human herpesvirus 8 (Kaposi`s sarcoma-associated h
gaucaugacuacgcucaccaucc

SEQ ID NO: 192278 - RNA, 15 nt, Human herpesvirus 8 (Kaposi`s sarcoma-associated h
gaucaucuuuuccac

SEQ ID NO: 192279 - RNA, 16 nt, Human herpesvirus 8 (Kaposi`s sarcoma-associated h
gauaacggugucuaac

SEQ ID NO: 192280 - RNA, 19 nt, Human herpesvirus 8 (Kaposi`s sarcoma-associated h
cuuugcccuaaaugugaca

SEQ ID NO: 192281 - RNA, 20 nt, Human herpesvirus 8 (Kaposi`s sarcoma-associated h
cuuugcgugucuagacaaua

SEQ ID NO: 192282 - RNA, 17 nt, Human herpesvirus 8 (Kaposi`s sarcoma-associated h
cuuucauuagugacaua

SEQ ID NO: 192283 - RNA, 22 nt, Human herpesvirus 8 (Kaposi`s sarcoma-associated h
cuuucauuagugacauacauga

SEQ ID NO: 192284 - RNA, 23 nt, Human herpesvirus 8 (Kaposi`s sarcoma-associated h
cuuucccgucaggggagugacaa

SEQ ID NO: 192285 - RNA, 15 nt, Human herpesvirus 8 (Kaposi`s sarcoma-associated h
cuuucuagcagagcg

SEQ ID NO: 192286 - RNA, 18 nt, Human herpesvirus 8 (Kaposi`s sarcoma-associated h
cuuuguuaccuggcugca

SEQ ID NO: 192287 - RNA, 14 nt, Human herpesvirus 8 (Kaposi`s sarcoma-associated h
cuuuucaaccucga

SEQ ID NO: 192288 - RNA, 13 nt, Human herpesvirus 8 (Kaposi`s sarcoma-associated h
cuuuuaccaguuc

SEQ ID NO: 192289 - RNA, 15 nt, Human herpesvirus 8 (Kaposi`s sarcoma-associated h
cuuuuaccaguucag

SEQ ID NO: 192290 - RNA, 21 nt, Human herpesvirus 8 (Kaposi`s sarcoma-associated h
cuuuuccguagugaguucuaa

SEQ ID NO: 192291 - RNA, 23 nt, Human herpesvirus 8 (Kaposi`s sarcoma-associated h
cuuuuuaagacaaacacugugga

SEQ ID NO: 192292 - RNA, 21 nt, Human herpesvirus 8 (Kaposi`s sarcoma-associated h
cuuuuugugagauagccacau

SEQ ID NO: 192293 - RNA, 20 nt, Human herpesvirus 8 (Kaposi`s sarcoma-associated h
cuuuuuuguuauuguuacuu

SEQ ID NO: 192294 - RNA, 13 nt, Human herpesvirus 8 (Kaposi`s sarcoma-associated h
gaaaacugucucc

SEQ ID NO: 192295 - RNA, 16 nt, Human herpesvirus 8 (Kaposi`s sarcoma-associated h
cuuuaccuugucaucu

SEQ ID NO: 192296 - RNA, 22 nt, Human herpesvirus 8 (Kaposi`s sarcoma-associated h
cuuuagagagcuagaggcuucc

SEQ ID NO: 192297 - RNA, 22 nt, Human herpesvirus 8 (Kaposi`s sarcoma-associated h
cuuuauugucuagacacgcaaa

SEQ ID NO: 192298 - RNA, 20 nt, Human herpesvirus 8 (Kaposi`s sarcoma-associated h
cuuuauuacagguaugaccg

SEQ ID NO: 192299 - RNA, 12 nt, Human herpesvirus 8 (Kaposi`s sarcoma-associated h
cuuucagaauuc

SEQ ID NO: 192300 - RNA, 18 nt, Human herpesvirus 8 (Kaposi`s sarcoma-associated h
cuuucagacguccaguuc

SEQ ID NO: 192301 - RNA, 14 nt, Human herpesvirus 8 (Kaposi`s sarcoma-associated h
cuuguuuauaacaa

SEQ ID NO: 192302 - RNA, 22 nt, Human herpesvirus 8 (Kaposi`s sarcoma-associated h
cuuguuuauuagagaaaggcua

SEQ ID NO: 192303 - RNA, 21 nt, Human herpesvirus 8 (Kaposi`s sarcoma-associated h
cuuguacagugaguggcugua

SEQ ID NO: 192304 - RNA, 14 nt, Human herpesvirus 8 (Kaposi`s sarcoma-associated h
cuuguacauguguc

SEQ ID NO: 192305 - RNA, 18 nt, Human herpesvirus 8 (Kaposi`s sarcoma-associated h
cuugcagcagccuaacau

SEQ ID NO: 192306 - RNA, 15 nt, Human herpesvirus 8 (Kaposi`s sarcoma-associated h
cuugcugcauaaagu

SEQ ID NO: 192307 - RNA, 20 nt, Human herpesvirus 8 (Kaposi`s sarcoma-associated h
cuguggauuuuauggacauu

SEQ ID NO: 192308 - RNA, 13 nt, Human herpesvirus 8 (Kaposi`s sarcoma-associated h
gaaacgugccugc

SEQ ID NO: 192309 - RNA, 17 nt, Human herpesvirus 8 (Kaposi`s sarcoma-associated h
gaaacucccccaaccuc

SEQ ID NO: 192310 - RNA, 16 nt, Human herpesvirus 8 (Kaposi`s sarcoma-associated h
gaaacuaccagccauc

SEQ ID NO: 192311 - RNA, 22 nt, Human herpesvirus 8 (Kaposi`s sarcoma-associated h
gaaacuccaggcucuacaggua

SEQ ID NO: 192312 - RNA, 15 nt, Human herpesvirus 8 (Kaposi`s sarcoma-associated h
gaaaccaggcucuau

SEQ ID NO: 192313 - RNA, 22 nt, Human herpesvirus 8 (Kaposi`s sarcoma-associated h
gaaaccccgcccccuggugcuc

SEQ ID NO: 192314 - RNA, 21 nt, Human herpesvirus 8 (Kaposi`s sarcoma-associated h
gaaaagugggcgugguauauu

SEQ ID NO: 192315 - RNA, 14 nt, Human herpesvirus 8 (Kaposi`s sarcoma-associated h
gaaaaggaucuucu

SEQ ID NO: 192316 - RNA, 16 nt, Human herpesvirus 8 (Kaposi`s sarcoma-associated h
gaaaagggaacgguca

SEQ ID NO: 192317 - RNA, 18 nt, Human herpesvirus 8 (Kaposi`s sarcoma-associated h
gaacaauggcgccaccuu

SEQ ID NO: 192318 - RNA, 14 nt, Human herpesvirus 8 (Kaposi`s sarcoma-associated h
gaacacguaccuga

SEQ ID NO: 192319 - RNA, 21 nt, Human herpesvirus 8 (Kaposi`s sarcoma-associated h
gaaccgaugguuuccuagcca

SEQ ID NO: 192320 - RNA, 14 nt, Human herpesvirus 8 (Kaposi`s sarcoma-associated h
gaaagacugccuga

SEQ ID NO: 192321 - RNA, 14 nt, Human herpesvirus 8 (Kaposi`s sarcoma-associated h
gaaauuguggcacu

SEQ ID NO: 192322 - RNA, 20 nt, Human herpesvirus 8 (Kaposi`s sarcoma-associated h
gaaagcuucaucguggugcc

SEQ ID NO: 192323 - RNA, 15 nt, Human herpesvirus 8 (Kaposi`s sarcoma-associated h
gaaaugguagagggg

SEQ ID NO: 192324 - RNA, 22 nt, Human herpesvirus 8 (Kaposi`s sarcoma-associated h
gacaaaugagggugaguggaac

SEQ ID NO: 192325 - RNA, 15 nt, Human herpesvirus 8 (Kaposi`s sarcoma-associated h
gacaaagcgucuuua

SEQ ID NO: 192326 - RNA, 22 nt, Human herpesvirus 8 (Kaposi`s sarcoma-associated h
gaaugaagugcaaccugcugca

SEQ ID NO: 192327 - RNA, 17 nt, Human herpesvirus 8 (Kaposi`s sarcoma-associated h
gacaagucuucuuguca

SEQ ID NO: 192328 - RNA, 15 nt, Human herpesvirus 8 (Kaposi`s sarcoma-associated h
gacaacuagagucca

SEQ ID NO: 192329 - RNA, 15 nt, Human herpesvirus 8 (Kaposi`s sarcoma-associated h
gaagucagugccaca

SEQ ID NO: 192330 - RNA, 22 nt, Human herpesvirus 8 (Kaposi`s sarcoma-associated h
gaaucgcaccuuaaacacaaca

SEQ ID NO: 192331 - RNA, 17 nt, Human herpesvirus 8 (Kaposi`s sarcoma-associated h
gaaggcgaauaaaacag

SEQ ID NO: 192332 - RNA, 18 nt, Human herpesvirus 8 (Kaposi`s sarcoma-associated h
gaagcuaugugguuucug

SEQ ID NO: 192333 - RNA, 16 nt, Human herpesvirus 8 (Kaposi`s sarcoma-associated h
gaagccucccuaauag

SEQ ID NO: 192334 - RNA, 19 nt, Human herpesvirus 8 (Kaposi`s sarcoma-associated h
gaagcaccacauacagacu

SEQ ID NO: 192335 - RNA, 20 nt, Human herpesvirus 8 (Kaposi`s sarcoma-associated h
gaagccagggucaggacaau

SEQ ID NO: 192336 - RNA, 23 nt, Human herpesvirus 8 (Kaposi`s sarcoma-associated h
gaagccagggucaggacaauauu

SEQ ID NO: 192337 - RNA, 22 nt, Human herpesvirus 8 (Kaposi`s sarcoma-associated h
gaagcaauacccccaaaauguc

SEQ ID NO: 192338 - RNA, 12 nt, Human herpesvirus 8 (Kaposi`s sarcoma-associated h
gaacggacaauu

SEQ ID NO: 192339 - RNA, 18 nt, Human herpesvirus 8 (Kaposi`s sarcoma-associated h
uacagggguaucacuucc

SEQ ID NO: 192340 - RNA, 19 nt, Human herpesvirus 8 (Kaposi`s sarcoma-associated h
uacagggguaucacuuccu

SEQ ID NO: 192341 - RNA, 20 nt, Human herpesvirus 8 (Kaposi`s sarcoma-associated h
uacaauaaagccgagccaca

SEQ ID NO: 192342 - RNA, 15 nt, Human herpesvirus 8 (Kaposi`s sarcoma-associated h
uaagcugcauacaua

SEQ ID NO: 192343 - RNA, 16 nt, Human herpesvirus 8 (Kaposi`s sarcoma-associated h
uaagcugcauacauau

SEQ ID NO: 192344 - RNA, 16 nt, Human herpesvirus 8 (Kaposi`s sarcoma-associated h
uaagcgccaagccauu

SEQ ID NO: 192345 - RNA, 13 nt, Human herpesvirus 8 (Kaposi`s sarcoma-associated h
uaacuguggcuac

SEQ ID NO: 192346 - RNA, 17 nt, Human herpesvirus 8 (Kaposi`s sarcoma-associated h
uaacuguuuacugcugu

SEQ ID NO: 192347 - RNA, 23 nt, Human herpesvirus 8 (Kaposi`s sarcoma-associated h
uaacugccgguuuacuugcagca

SEQ ID NO: 192348 - RNA, 21 nt, Human herpesvirus 8 (Kaposi`s sarcoma-associated h
uaacuucccaggcaguuuauu

SEQ ID NO: 192349 - RNA, 20 nt, Human herpesvirus 8 (Kaposi`s sarcoma-associated h
uaauugagcgcugugcuuuu

SEQ ID NO: 192350 - RNA, 22 nt, Human herpesvirus 8 (Kaposi`s sarcoma-associated h
uaaggcccccaccaaaccuggu

SEQ ID NO: 192351 - RNA, 14 nt, Human herpesvirus 8 (Kaposi`s sarcoma-associated h
uacuagcaccacua

SEQ ID NO: 192352 - RNA, 17 nt, Human herpesvirus 8 (Kaposi`s sarcoma-associated h
uacuaauguaaccuaaa

SEQ ID NO: 192353 - RNA, 15 nt, Human herpesvirus 8 (Kaposi`s sarcoma-associated h
uacuacagguauacu

SEQ ID NO: 192354 - RNA, 19 nt, Human herpesvirus 8 (Kaposi`s sarcoma-associated h
uacuacagguauacucaag

SEQ ID NO: 192355 - RNA, 16 nt, Human herpesvirus 8 (Kaposi`s sarcoma-associated h
uacuaagagaacagca

SEQ ID NO: 192356 - RNA, 16 nt, Human herpesvirus 8 (Kaposi`s sarcoma-associated h
uacuuaacuguuuacu

SEQ ID NO: 192357 - RNA, 16 nt, Human herpesvirus 8 (Kaposi`s sarcoma-associated h
uacugugaaguuuaca

SEQ ID NO: 192358 - RNA, 20 nt, Human herpesvirus 8 (Kaposi`s sarcoma-associated h
uacuucagccgcuugcugau

SEQ ID NO: 192359 - RNA, 15 nt, Human herpesvirus 8 (Kaposi`s sarcoma-associated h
uacuggacguggcca

SEQ ID NO: 192360 - RNA, 14 nt, Human herpesvirus 8 (Kaposi`s sarcoma-associated h
uacugcuuguucag

SEQ ID NO: 192361 - RNA, 18 nt, Human herpesvirus 8 (Kaposi`s sarcoma-associated h
uaccuuauccgcuagcca

SEQ ID NO: 192362 - RNA, 18 nt, Human herpesvirus 8 (Kaposi`s sarcoma-associated h
uaccucaacugaacacac

SEQ ID NO: 192363 - RNA, 16 nt, Human herpesvirus 8 (Kaposi`s sarcoma-associated h
uaccugaccugaccag

SEQ ID NO: 192364 - RNA, 14 nt, Human herpesvirus 8 (Kaposi`s sarcoma-associated h
uaccgggucugugc

SEQ ID NO: 192365 - RNA, 21 nt, Human herpesvirus 8 (Kaposi`s sarcoma-associated h
uacaugugacugaacauggag

SEQ ID NO: 192366 - RNA, 16 nt, Human herpesvirus 8 (Kaposi`s sarcoma-associated h
uacauuaaaaggacau

SEQ ID NO: 192367 - RNA, 19 nt, Human herpesvirus 8 (Kaposi`s sarcoma-associated h
uacauuaaaaggacauugu

SEQ ID NO: 192368 - RNA, 16 nt, Human herpesvirus 8 (Kaposi`s sarcoma-associated h
uacauccucugccuaa

SEQ ID NO: 192369 - RNA, 20 nt, Human herpesvirus 8 (Kaposi`s sarcoma-associated h
uacauauugguauaugacua

SEQ ID NO: 192370 - RNA, 16 nt, Human herpesvirus 8 (Kaposi`s sarcoma-associated h
uagaacuaaccacuca

SEQ ID NO: 192371 - RNA, 19 nt, Human herpesvirus 8 (Kaposi`s sarcoma-associated h
uagaacuaaccacucauaa

SEQ ID NO: 192372 - RNA, 20 nt, Human herpesvirus 8 (Kaposi`s sarcoma-associated h
uagaagaaaaggaugcacaa

SEQ ID NO: 192373 - RNA, 12 nt, Human herpesvirus 8 (Kaposi`s sarcoma-associated h
uagaaacaaagc

SEQ ID NO: 192374 - RNA, 16 nt, Human herpesvirus 8 (Kaposi`s sarcoma-associated h
uagaaacaaagcacug

SEQ ID NO: 192375 - RNA, 20 nt, Human herpesvirus 8 (Kaposi`s sarcoma-associated h
uagacaugccccaaagccgu

SEQ ID NO: 192376 - RNA, 15 nt, Human herpesvirus 8 (Kaposi`s sarcoma-associated h
uagacuuaaaauguc

SEQ ID NO: 192377 - RNA, 16 nt, Human herpesvirus 8 (Kaposi`s sarcoma-associated h
uagacuuucuaaaggu

SEQ ID NO: 192378 - RNA, 19 nt, Human herpesvirus 8 (Kaposi`s sarcoma-associated h
uagaaucaaugugguucua

SEQ ID NO: 192379 - RNA, 17 nt, Human herpesvirus 8 (Kaposi`s sarcoma-associated h
uagcuacaaauguuuua

SEQ ID NO: 192380 - RNA, 23 nt, Human herpesvirus 8 (Kaposi`s sarcoma-associated h
uagcgugcggucagagugguggg

SEQ ID NO: 192381 - RNA, 20 nt, Human herpesvirus 8 (Kaposi`s sarcoma-associated h
uagcagauauaaacauggca

SEQ ID NO: 192382 - RNA, 15 nt, Human herpesvirus 8 (Kaposi`s sarcoma-associated h
uagcagaaaacuguc

SEQ ID NO: 192383 - RNA, 16 nt, Human herpesvirus 8 (Kaposi`s sarcoma-associated h
uagauuuuggacuaga

SEQ ID NO: 192384 - RNA, 19 nt, Human herpesvirus 8 (Kaposi`s sarcoma-associated h
uagaucuggauacacuacu

SEQ ID NO: 192385 - RNA, 22 nt, Human herpesvirus 8 (Kaposi`s sarcoma-associated h
uagaucuggauacacuacuuau

SEQ ID NO: 192386 - RNA, 15 nt, Human herpesvirus 8 (Kaposi`s sarcoma-associated h
uagaugaaugucuca

SEQ ID NO: 192387 - RNA, 18 nt, Human herpesvirus 8 (Kaposi`s sarcoma-associated h
uaggaggaagagcacugu

SEQ ID NO: 192388 - RNA, 16 nt, Human herpesvirus 8 (Kaposi`s sarcoma-associated h
uaggaccuuucugcug

SEQ ID NO: 192389 - RNA, 21 nt, Human herpesvirus 8 (Kaposi`s sarcoma-associated h
uaggauucgugcagccuugca

SEQ ID NO: 192390 - RNA, 19 nt, Human herpesvirus 8 (Kaposi`s sarcoma-associated h
uagucuuacugucagauuu

SEQ ID NO: 192391 - RNA, 14 nt, Human herpesvirus 8 (Kaposi`s sarcoma-associated h
uagucguuguagug

SEQ ID NO: 192392 - RNA, 16 nt, Human herpesvirus 8 (Kaposi`s sarcoma-associated h
uagucguuguaguggu

SEQ ID NO: 192393 - RNA, 18 nt, Human herpesvirus 8 (Kaposi`s sarcoma-associated h
uauacagguaaaacggcc

SEQ ID NO: 192394 - RNA, 20 nt, Human herpesvirus 8 (Kaposi`s sarcoma-associated h
uauacaugccccuuaucucc

SEQ ID NO: 192395 - RNA, 23 nt, Human herpesvirus 8 (Kaposi`s sarcoma-associated h
uauacacaaaugaaaugagucag

SEQ ID NO: 192396 - RNA, 19 nt, Human herpesvirus 8 (Kaposi`s sarcoma-associated h
uauaccggccuguuuccaa

SEQ ID NO: 192397 - RNA, 15 nt, Human herpesvirus 8 (Kaposi`s sarcoma-associated h
uaguguaugccgcgu

SEQ ID NO: 192398 - RNA, 17 nt, Human herpesvirus 8 (Kaposi`s sarcoma-associated h
uagugccucauaucuuu

SEQ ID NO: 192399 - RNA, 18 nt, Human herpesvirus 8 (Kaposi`s sarcoma-associated h
uagugacauacaugagag

SEQ ID NO: 192400 - RNA, 19 nt, Human herpesvirus 8 (Kaposi`s sarcoma-associated h
uagugcaagugcacggauc

SEQ ID NO: 192401 - RNA, 21 nt, Human herpesvirus 8 (Kaposi`s sarcoma-associated h
uagugaaacccccugugccuu

SEQ ID NO: 192402 - RNA, 20 nt, Human herpesvirus 8 (Kaposi`s sarcoma-associated h
uagucaucgccgccgccaaa

SEQ ID NO: 192403 - RNA, 18 nt, Human herpesvirus 8 (Kaposi`s sarcoma-associated h
uaucaugugaacaauaaa

SEQ ID NO: 192404 - RNA, 14 nt, Human herpesvirus 8 (Kaposi`s sarcoma-associated h
uaucauaucaauaa

SEQ ID NO: 192405 - RNA, 20 nt, Human herpesvirus 8 (Kaposi`s sarcoma-associated h
uauaugcaccguuuccacac

SEQ ID NO: 192406 - RNA, 17 nt, Human herpesvirus 8 (Kaposi`s sarcoma-associated h
uauacuuugcgugucua

SEQ ID NO: 192407 - RNA, 17 nt, Human herpesvirus 8 (Kaposi`s sarcoma-associated h
uauagaugaaacauucg

SEQ ID NO: 192408 - RNA, 21 nt, Human herpesvirus 8 (Kaposi`s sarcoma-associated h
uauauaagagcacacugugug

SEQ ID NO: 192409 - RNA, 14 nt, Human herpesvirus 8 (Kaposi`s sarcoma-associated h
uauagugguuuaca

SEQ ID NO: 192410 - RNA, 15 nt, Human herpesvirus 8 (Kaposi`s sarcoma-associated h
uauagugguuuacau

SEQ ID NO: 192411 - RNA, 22 nt, Human herpesvirus 8 (Kaposi`s sarcoma-associated h
guguucaucgcugccccaaaag

SEQ ID NO: 192412 - RNA, 18 nt, Human herpesvirus 8 (Kaposi`s sarcoma-associated h
guguuagacagggcuaug

SEQ ID NO: 192413 - RNA, 16 nt, Human herpesvirus 8 (Kaposi`s sarcoma-associated h
guguacaaaaaaaaca

SEQ ID NO: 192414 - RNA, 13 nt, Human herpesvirus 8 (Kaposi`s sarcoma-associated h
guguacaaaccaa

SEQ ID NO: 192415 - RNA, 16 nt, Human herpesvirus 8 (Kaposi`s sarcoma-associated h
guguacaauacgccuu

SEQ ID NO: 192416 - RNA, 16 nt, Human herpesvirus 8 (Kaposi`s sarcoma-associated h
guguccccugcaaugc

SEQ ID NO: 192417 - RNA, 18 nt, Human herpesvirus 8 (Kaposi`s sarcoma-associated h
guguccagccacaucagc

SEQ ID NO: 192418 - RNA, 12 nt, Human herpesvirus 8 (Kaposi`s sarcoma-associated h
guguccaggaaa

SEQ ID NO: 192419 - RNA, 15 nt, Human herpesvirus 8 (Kaposi`s sarcoma-associated h
gugucagcccuagcc

SEQ ID NO: 192420 - RNA, 22 nt, Human herpesvirus 8 (Kaposi`s sarcoma-associated h
gugucaguaaaauaaaauacaa

SEQ ID NO: 192421 - RNA, 20 nt, Human herpesvirus 8 (Kaposi`s sarcoma-associated h
guggacuuuuaccaguucag

SEQ ID NO: 192422 - RNA, 23 nt, Human herpesvirus 8 (Kaposi`s sarcoma-associated h
guggaccguguguuugguggugu

SEQ ID NO: 192423 - RNA, 21 nt, Human herpesvirus 8 (Kaposi`s sarcoma-associated h
guggauugccgucacauauca

SEQ ID NO: 192424 - RNA, 21 nt, Human herpesvirus 8 (Kaposi`s sarcoma-associated h
guggauuuuauggacauuuac

SEQ ID NO: 192425 - RNA, 23 nt, Human herpesvirus 8 (Kaposi`s sarcoma-associated h
guggauuuuauggacauuuacca

SEQ ID NO: 192426 - RNA, 21 nt, Human herpesvirus 8 (Kaposi`s sarcoma-associated h
guggagucacaaguaccacuu

SEQ ID NO: 192427 - RNA, 13 nt, Human herpesvirus 8 (Kaposi`s sarcoma-associated h
guccggacauuuu

SEQ ID NO: 192428 - RNA, 16 nt, Human herpesvirus 8 (Kaposi`s sarcoma-associated h
guccggccaccgugga

SEQ ID NO: 192429 - RNA, 17 nt, Human herpesvirus 8 (Kaposi`s sarcoma-associated h
guggaauauaaugugaa

SEQ ID NO: 192430 - RNA, 14 nt, Human herpesvirus 8 (Kaposi`s sarcoma-associated h
guccccugcaaugc

SEQ ID NO: 192431 - RNA, 18 nt, Human herpesvirus 8 (Kaposi`s sarcoma-associated h
gucccucagccacaaaua

SEQ ID NO: 192432 - RNA, 20 nt, Human herpesvirus 8 (Kaposi`s sarcoma-associated h
gucccucuuggcuguuacaa

SEQ ID NO: 192433 - RNA, 19 nt, Human herpesvirus 8 (Kaposi`s sarcoma-associated h
gucccugaagccucccuaa

SEQ ID NO: 192434 - RNA, 20 nt, Human herpesvirus 8 (Kaposi`s sarcoma-associated h
gucccuuaugucaguuccac

SEQ ID NO: 192435 - RNA, 23 nt, Human herpesvirus 8 (Kaposi`s sarcoma-associated h
gucaaaugguaaaggggggcaua

SEQ ID NO: 192436 - RNA, 18 nt, Human herpesvirus 8 (Kaposi`s sarcoma-associated h
guccccggggacccucac

SEQ ID NO: 192437 - RNA, 17 nt, Human herpesvirus 8 (Kaposi`s sarcoma-associated h
gucccacaugauuugau

SEQ ID NO: 192438 - RNA, 20 nt, Human herpesvirus 8 (Kaposi`s sarcoma-associated h
guccaggccucuagcuguag

SEQ ID NO: 192439 - RNA, 18 nt, Human herpesvirus 8 (Kaposi`s sarcoma-associated h
guuaucuuugcagugucu

SEQ ID NO: 192440 - RNA, 14 nt, Human herpesvirus 8 (Kaposi`s sarcoma-associated h
guuacuauaaacag

SEQ ID NO: 192441 - RNA, 21 nt, Human herpesvirus 8 (Kaposi`s sarcoma-associated h
guuaccguaccggcaucugca

SEQ ID NO: 192442 - RNA, 13 nt, Human herpesvirus 8 (Kaposi`s sarcoma-associated h
guguuugucugau

SEQ ID NO: 192443 - RNA, 15 nt, Human herpesvirus 8 (Kaposi`s sarcoma-associated h
guucuaaccacaagu

SEQ ID NO: 192444 - RNA, 14 nt, Human herpesvirus 8 (Kaposi`s sarcoma-associated h
guuccugugggcua

SEQ ID NO: 192445 - RNA, 21 nt, Human herpesvirus 8 (Kaposi`s sarcoma-associated h
guuccuccuaaacguguucau

SEQ ID NO: 192446 - RNA, 22 nt, Human herpesvirus 8 (Kaposi`s sarcoma-associated h
guucaggauuucgaauaucuca

SEQ ID NO: 192447 - RNA, 23 nt, Human herpesvirus 8 (Kaposi`s sarcoma-associated h
guucaggugguaauaaagucauu

SEQ ID NO: 192448 - RNA, 15 nt, Human herpesvirus 8 (Kaposi`s sarcoma-associated h
guucaucagccucac

SEQ ID NO: 192449 - RNA, 15 nt, Human herpesvirus 8 (Kaposi`s sarcoma-associated h
guucacugcugguau

SEQ ID NO: 192450 - RNA, 15 nt, Human herpesvirus 8 (Kaposi`s sarcoma-associated h
guucaacugcauugg

SEQ ID NO: 192451 - RNA, 21 nt, Human herpesvirus 8 (Kaposi`s sarcoma-associated h
guuccaagagcgagugugccu

SEQ ID NO: 192452 - RNA, 17 nt, Human herpesvirus 8 (Kaposi`s sarcoma-associated h
uaacacacacaaagaca

SEQ ID NO: 192453 - RNA, 17 nt, Human herpesvirus 8 (Kaposi`s sarcoma-associated h
uaacacagucacaguuc

SEQ ID NO: 192454 - RNA, 19 nt, Human herpesvirus 8 (Kaposi`s sarcoma-associated h
uaacaauacgguguaggca

SEQ ID NO: 192455 - RNA, 21 nt, Human herpesvirus 8 (Kaposi`s sarcoma-associated h
uaacaauacgguguaggcauu

SEQ ID NO: 192456 - RNA, 16 nt, Human herpesvirus 8 (Kaposi`s sarcoma-associated h
uaacucacguagccuu

SEQ ID NO: 192457 - RNA, 20 nt, Human herpesvirus 8 (Kaposi`s sarcoma-associated h
uaacgugucugaauguggaa

SEQ ID NO: 192458 - RNA, 19 nt, Human herpesvirus 8 (Kaposi`s sarcoma-associated h
uaaaugugacaaucuggau

SEQ ID NO: 192459 - RNA, 20 nt, Human herpesvirus 8 (Kaposi`s sarcoma-associated h
uaaauuaagggggaagggca

SEQ ID NO: 192460 - RNA, 14 nt, Human herpesvirus 8 (Kaposi`s sarcoma-associated h
uaaaacggccaaag

SEQ ID NO: 192461 - RNA, 19 nt, Human herpesvirus 8 (Kaposi`s sarcoma-associated h
uaaaacggccaaagcaaag

SEQ ID NO: 192462 - RNA, 17 nt, Human herpesvirus 8 (Kaposi`s sarcoma-associated h
uaaaacuucauuguucu

SEQ ID NO: 192463 - RNA, 17 nt, Human herpesvirus 8 (Kaposi`s sarcoma-associated h
uaaacacauacaaugcu

SEQ ID NO: 192464 - RNA, 22 nt, Human herpesvirus 8 (Kaposi`s sarcoma-associated h
uaaacauacguuuugaacaaug

SEQ ID NO: 192465 - RNA, 16 nt, Human herpesvirus 8 (Kaposi`s sarcoma-associated h
uaaacauggcacucuu

SEQ ID NO: 192466 - RNA, 18 nt, Human herpesvirus 8 (Kaposi`s sarcoma-associated h
uaaaugaauaucauuugc

SEQ ID NO: 192467 - RNA, 16 nt, Human herpesvirus 8 (Kaposi`s sarcoma-associated h
guugcaccaagcacaa

SEQ ID NO: 192468 - RNA, 22 nt, Human herpesvirus 8 (Kaposi`s sarcoma-associated h
guugaugcgcggcacauugugu

SEQ ID NO: 192469 - RNA, 19 nt, Human herpesvirus 8 (Kaposi`s sarcoma-associated h
guugcgcaauucaggcauc

SEQ ID NO: 192470 - RNA, 17 nt, Human herpesvirus 8 (Kaposi`s sarcoma-associated h
guugugaagcauuuuaa

SEQ ID NO: 192471 - RNA, 15 nt, Human herpesvirus 8 (Kaposi`s sarcoma-associated h
guuguggcaccugag

SEQ ID NO: 192472 - RNA, 19 nt, Human herpesvirus 8 (Kaposi`s sarcoma-associated h
guuguuuguauaacaugca

SEQ ID NO: 192473 - RNA, 21 nt, Human herpesvirus 8 (Kaposi`s sarcoma-associated h
guuuacuugcagcagccuaac

SEQ ID NO: 192474 - RNA, 18 nt, Human herpesvirus 8 (Kaposi`s sarcoma-associated h
guuuauuucaagagccua

SEQ ID NO: 192475 - RNA, 16 nt, Human herpesvirus 8 (Kaposi`s sarcoma-associated h
guuuauuuuuagcaau

SEQ ID NO: 192476 - RNA, 20 nt, Human herpesvirus 8 (Kaposi`s sarcoma-associated h
guuucugaucccuaaggguc

SEQ ID NO: 192477 - RNA, 21 nt, Human herpesvirus 8 (Kaposi`s sarcoma-associated h
guuugggagagcggacgccau

SEQ ID NO: 192478 - RNA, 16 nt, Human herpesvirus 8 (Kaposi`s sarcoma-associated h
guuugggcaaaacaca

SEQ ID NO: 192479 - RNA, 14 nt, Human herpesvirus 8 (Kaposi`s sarcoma-associated h
guuuggaguggagu

SEQ ID NO: 192480 - RNA, 18 nt, Human herpesvirus 8 (Kaposi`s sarcoma-associated h
guuugagucuuucuagca

SEQ ID NO: 192481 - RNA, 19 nt, Human herpesvirus 8 (Kaposi`s sarcoma-associated h
guuugcgcggccuuuucug

SEQ ID NO: 192482 - RNA, 20 nt, Human herpesvirus 8 (Kaposi`s sarcoma-associated h
guuuccagugacccuaguca

SEQ ID NO: 192483 - RNA, 22 nt, Human herpesvirus 8 (Kaposi`s sarcoma-associated h
guuuccagugacccuagucacu

SEQ ID NO: 192484 - RNA, 20 nt, Human herpesvirus 8 (Kaposi`s sarcoma-associated h
guuuauuuuuuuucaaacag

SEQ ID NO: 192485 - RNA, 16 nt, Human herpesvirus 8 (Kaposi`s sarcoma-associated h
guuuuguaaacugaug

SEQ ID NO: 192486 - RNA, 18 nt, Human herpesvirus 8 (Kaposi`s sarcoma-associated h
guuuugaacaauguucau

SEQ ID NO: 192487 - RNA, 12 nt, Human herpesvirus 8 (Kaposi`s sarcoma-associated h
guuuugcacuau

SEQ ID NO: 192488 - RNA, 15 nt, Human herpesvirus 8 (Kaposi`s sarcoma-associated h
guuuuauuaugcgau

SEQ ID NO: 192489 - RNA, 11 nt, Human herpesvirus 8 (Kaposi`s sarcoma-associated h
gcgacccggcg

SEQ ID NO: 192490 - RNA, 14 nt, Human herpesvirus 8 (Kaposi`s sarcoma-associated h
gcgaacuaacgggu

SEQ ID NO: 192491 - RNA, 20 nt, Human herpesvirus 8 (Kaposi`s sarcoma-associated h
gccuuguuggggguuauauu

SEQ ID NO: 192492 - RNA, 22 nt, Human herpesvirus 8 (Kaposi`s sarcoma-associated h
gccuuucucuaauaaacaagcu

SEQ ID NO: 192493 - RNA, 15 nt, Human herpesvirus 8 (Kaposi`s sarcoma-associated h
gccuugggugcgaug

SEQ ID NO: 192494 - RNA, 13 nt, Human herpesvirus 8 (Kaposi`s sarcoma-associated h
gccuuggugcuag

SEQ ID NO: 192495 - RNA, 14 nt, Human herpesvirus 8 (Kaposi`s sarcoma-associated h
gccuuuugcuuaaa

SEQ ID NO: 192496 - RNA, 22 nt, Human herpesvirus 8 (Kaposi`s sarcoma-associated h
gccuuuuuaagacaaacacugu

SEQ ID NO: 192497 - RNA, 17 nt, Human herpesvirus 8 (Kaposi`s sarcoma-associated h
gccuucgucaugcacgg

SEQ ID NO: 192498 - RNA, 15 nt, Human herpesvirus 8 (Kaposi`s sarcoma-associated h
gccuguggauuuuca

SEQ ID NO: 192499 - RNA, 17 nt, Human herpesvirus 8 (Kaposi`s sarcoma-associated h
gccugcggucccagggu

SEQ ID NO: 192500 - RNA, 18 nt, Human herpesvirus 8 (Kaposi`s sarcoma-associated h
gccuggacaguauucuca

SEQ ID NO: 192501 - RNA, 17 nt, Human herpesvirus 8 (Kaposi`s sarcoma-associated h
gccuggcguuuagugug

SEQ ID NO: 192502 - RNA, 13 nt, Human herpesvirus 8 (Kaposi`s sarcoma-associated h
gccgcugcacauu

SEQ ID NO: 192503 - RNA, 18 nt, Human herpesvirus 8 (Kaposi`s sarcoma-associated h
gccuacagacgguccaaa

SEQ ID NO: 192504 - RNA, 17 nt, Human herpesvirus 8 (Kaposi`s sarcoma-associated h
gccgucgcggaccucaa

SEQ ID NO: 192505 - RNA, 15 nt, Human herpesvirus 8 (Kaposi`s sarcoma-associated h
gccucugaagcacca

SEQ ID NO: 192506 - RNA, 15 nt, Human herpesvirus 8 (Kaposi`s sarcoma-associated h
gccuccuuagaccua

SEQ ID NO: 192507 - RNA, 22 nt, Human herpesvirus 8 (Kaposi`s sarcoma-associated h
gccuagugggguggcgcgccac

SEQ ID NO: 192508 - RNA, 22 nt, Human herpesvirus 8 (Kaposi`s sarcoma-associated h
gccuaucugaggaggaugggug

SEQ ID NO: 192509 - RNA, 18 nt, Human herpesvirus 8 (Kaposi`s sarcoma-associated h
gccuaugcugggacagaa

SEQ ID NO: 192510 - RNA, 19 nt, Human herpesvirus 8 (Kaposi`s sarcoma-associated h
gcagagaccucuugcgcga

SEQ ID NO: 192511 - RNA, 22 nt, Human herpesvirus 8 (Kaposi`s sarcoma-associated h
gcagacccggcaacacuggaca

SEQ ID NO: 192512 - RNA, 15 nt, Human herpesvirus 8 (Kaposi`s sarcoma-associated h
gcagaguguccagua

SEQ ID NO: 192513 - RNA, 23 nt, Human herpesvirus 8 (Kaposi`s sarcoma-associated h
gcagauauaaacauggcacucuu

SEQ ID NO: 192514 - RNA, 18 nt, Human herpesvirus 8 (Kaposi`s sarcoma-associated h
gcacggaucggcuugcac

SEQ ID NO: 192515 - RNA, 17 nt, Human herpesvirus 8 (Kaposi`s sarcoma-associated h
gcacgcggugucaacca

SEQ ID NO: 192516 - RNA, 14 nt, Human herpesvirus 8 (Kaposi`s sarcoma-associated h
gcagcaauauuaaa

SEQ ID NO: 192517 - RNA, 21 nt, Human herpesvirus 8 (Kaposi`s sarcoma-associated h
gcagcagcgugacacuacuaa

SEQ ID NO: 192518 - RNA, 23 nt, Human herpesvirus 8 (Kaposi`s sarcoma-associated h
gcccgggggccaggacucacugg

SEQ ID NO: 192519 - RNA, 22 nt, Human herpesvirus 8 (Kaposi`s sarcoma-associated h
gcccuucauaccgggucugugc

SEQ ID NO: 192520 - RNA, 18 nt, Human herpesvirus 8 (Kaposi`s sarcoma-associated h
gccgaagucagugccaca

SEQ ID NO: 192521 - RNA, 15 nt, Human herpesvirus 8 (Kaposi`s sarcoma-associated h
gccgaaaucaguguc

SEQ ID NO: 192522 - RNA, 23 nt, Human herpesvirus 8 (Kaposi`s sarcoma-associated h
gccgacgcaaacgccacaggcgg

SEQ ID NO: 192523 - RNA, 19 nt, Human herpesvirus 8 (Kaposi`s sarcoma-associated h
gccgagccacaaaguacau

SEQ ID NO: 192524 - RNA, 19 nt, Human herpesvirus 8 (Kaposi`s sarcoma-associated h
gcccuggauacacccacau

SEQ ID NO: 192525 - RNA, 17 nt, Human herpesvirus 8 (Kaposi`s sarcoma-associated h
gcccucaaauucucaca

SEQ ID NO: 192526 - RNA, 14 nt, Human herpesvirus 8 (Kaposi`s sarcoma-associated h
gcccgucacuggau

SEQ ID NO: 192527 - RNA, 20 nt, Human herpesvirus 8 (Kaposi`s sarcoma-associated h
gccgauagggcggccacuuu

SEQ ID NO: 192528 - RNA, 15 nt, Human herpesvirus 8 (Kaposi`s sarcoma-associated h
gccgcgcaucaacca

SEQ ID NO: 192529 - RNA, 13 nt, Human herpesvirus 8 (Kaposi`s sarcoma-associated h
gccggacacugaa

SEQ ID NO: 192530 - RNA, 24 nt, Human herpesvirus 8 (Kaposi`s sarcoma-associated h
gcuguugugguuuuucucucauaa

SEQ ID NO: 192531 - RNA, 15 nt, Human herpesvirus 8 (Kaposi`s sarcoma-associated h
gcugucuaguggaga

SEQ ID NO: 192532 - RNA, 13 nt, Human herpesvirus 8 (Kaposi`s sarcoma-associated h
gcuguggcaccaa

SEQ ID NO: 192533 - RNA, 13 nt, Human herpesvirus 8 (Kaposi`s sarcoma-associated h
gcuggaagagaau

SEQ ID NO: 192534 - RNA, 20 nt, Human herpesvirus 8 (Kaposi`s sarcoma-associated h
gcugccaauauaguggccaa

SEQ ID NO: 192535 - RNA, 14 nt, Human herpesvirus 8 (Kaposi`s sarcoma-associated h
gcugccacugccac

SEQ ID NO: 192536 - RNA, 18 nt, Human herpesvirus 8 (Kaposi`s sarcoma-associated h
gcugcgcauggcuuacaa

SEQ ID NO: 192537 - RNA, 15 nt, Human herpesvirus 8 (Kaposi`s sarcoma-associated h
gcucggcaacauuca

SEQ ID NO: 192538 - RNA, 17 nt, Human herpesvirus 8 (Kaposi`s sarcoma-associated h
gcucgcaugaauacccu

SEQ ID NO: 192539 - RNA, 19 nt, Human herpesvirus 8 (Kaposi`s sarcoma-associated h
gcucgcaugaauacccugg

SEQ ID NO: 192540 - RNA, 17 nt, Human herpesvirus 8 (Kaposi`s sarcoma-associated h
gcucugucgcucuucag

SEQ ID NO: 192541 - RNA, 16 nt, Human herpesvirus 8 (Kaposi`s sarcoma-associated h
gcucucccaaaccaca

SEQ ID NO: 192542 - RNA, 19 nt, Human herpesvirus 8 (Kaposi`s sarcoma-associated h
gcuccaguguuagacaggg

SEQ ID NO: 192543 - RNA, 22 nt, Human herpesvirus 8 (Kaposi`s sarcoma-associated h
gcucaucgcgaccgcugccaau

SEQ ID NO: 192544 - RNA, 20 nt, Human herpesvirus 8 (Kaposi`s sarcoma-associated h
gcuccuauugcaacugacca

SEQ ID NO: 192545 - RNA, 12 nt, Human herpesvirus 8 (Kaposi`s sarcoma-associated h
gcuccgcacuug

SEQ ID NO: 192546 - RNA, 14 nt, Human herpesvirus 8 (Kaposi`s sarcoma-associated h
gcuagaggcuuccg

SEQ ID NO: 192547 - RNA, 11 nt, Human herpesvirus 8 (Kaposi`s sarcoma-associated h
gcuacuggccu

SEQ ID NO: 192548 - RNA, 14 nt, Human herpesvirus 8 (Kaposi`s sarcoma-associated h
gcguacaugugacu

SEQ ID NO: 192549 - RNA, 16 nt, Human herpesvirus 8 (Kaposi`s sarcoma-associated h
gcgcggcacauugugu

SEQ ID NO: 192550 - RNA, 12 nt, Human herpesvirus 8 (Kaposi`s sarcoma-associated h
gcgcgaccuccc

SEQ ID NO: 192551 - RNA, 21 nt, Human herpesvirus 8 (Kaposi`s sarcoma-associated h
gcgauuaaaugaggggucuga

SEQ ID NO: 192552 - RNA, 20 nt, Human herpesvirus 8 (Kaposi`s sarcoma-associated h
gcgaucacgacggauuuuug

SEQ ID NO: 192553 - RNA, 13 nt, Human herpesvirus 8 (Kaposi`s sarcoma-associated h
gcgauugcucaag

SEQ ID NO: 192554 - RNA, 13 nt, Human herpesvirus 8 (Kaposi`s sarcoma-associated h
gcgagacaucaga

SEQ ID NO: 192555 - RNA, 14 nt, Human herpesvirus 8 (Kaposi`s sarcoma-associated h
gcgcagauuugugc

SEQ ID NO: 192556 - RNA, 21 nt, Human herpesvirus 8 (Kaposi`s sarcoma-associated h
gcgccagccgcgcgaccuccc

SEQ ID NO: 192557 - RNA, 13 nt, Human herpesvirus 8 (Kaposi`s sarcoma-associated h
gcgccacguaugg

SEQ ID NO: 192558 - RNA, 14 nt, Human herpesvirus 8 (Kaposi`s sarcoma-associated h
gcgcccacguaugg

SEQ ID NO: 192559 - RNA, 19 nt, Human herpesvirus 8 (Kaposi`s sarcoma-associated h
gcgcccacugguguaucag

SEQ ID NO: 192560 - RNA, 23 nt, Human herpesvirus 8 (Kaposi`s sarcoma-associated h
ggaacaaucuggggguuggcgaa

SEQ ID NO: 192561 - RNA, 16 nt, Human herpesvirus 8 (Kaposi`s sarcoma-associated h
ggaacaugcugccacu

SEQ ID NO: 192562 - RNA, 15 nt, Human herpesvirus 8 (Kaposi`s sarcoma-associated h
gcuuguacagugagu

SEQ ID NO: 192563 - RNA, 20 nt, Human herpesvirus 8 (Kaposi`s sarcoma-associated h
ggaagauugguguccagaca

SEQ ID NO: 192564 - RNA, 17 nt, Human herpesvirus 8 (Kaposi`s sarcoma-associated h
ggcauauacuuggcaag

SEQ ID NO: 192565 - RNA, 17 nt, Human herpesvirus 8 (Kaposi`s sarcoma-associated h
ggcacagauuguggcau

SEQ ID NO: 192566 - RNA, 13 nt, Human herpesvirus 8 (Kaposi`s sarcoma-associated h
ggcaacacuggac

SEQ ID NO: 192567 - RNA, 20 nt, Human herpesvirus 8 (Kaposi`s sarcoma-associated h
ggcacaacucuacugcacaa

SEQ ID NO: 192568 - RNA, 21 nt, Human herpesvirus 8 (Kaposi`s sarcoma-associated h
ggcaagaaauccgagcaccuc

SEQ ID NO: 192569 - RNA, 21 nt, Human herpesvirus 8 (Kaposi`s sarcoma-associated h
ggauccuacacuuuacugugu

SEQ ID NO: 192570 - RNA, 23 nt, Human herpesvirus 8 (Kaposi`s sarcoma-associated h
ggaucagggaaauaugucgcagg

SEQ ID NO: 192571 - RNA, 11 nt, Human herpesvirus 8 (Kaposi`s sarcoma-associated h
ggcuguuacaa

SEQ ID NO: 192572 - RNA, 22 nt, Human herpesvirus 8 (Kaposi`s sarcoma-associated h
ggcggggcggcuguggcaccaa

SEQ ID NO: 192573 - RNA, 16 nt, Human herpesvirus 8 (Kaposi`s sarcoma-associated h
ggccacugcagggcgc

SEQ ID NO: 192574 - RNA, 15 nt, Human herpesvirus 8 (Kaposi`s sarcoma-associated h
ggcgcggaaacuggg

SEQ ID NO: 192575 - RNA, 18 nt, Human herpesvirus 8 (Kaposi`s sarcoma-associated h
ggcgcgaaaguccgucaa

SEQ ID NO: 192576 - RNA, 12 nt, Human herpesvirus 8 (Kaposi`s sarcoma-associated h
ggcgcccacgua

SEQ ID NO: 192577 - RNA, 22 nt, Human herpesvirus 8 (Kaposi`s sarcoma-associated h
gggcaaccauuuuuuacggaca

SEQ ID NO: 192578 - RNA, 17 nt, Human herpesvirus 8 (Kaposi`s sarcoma-associated h
gggauuaauaaccauga

SEQ ID NO: 192579 - RNA, 22 nt, Human herpesvirus 8 (Kaposi`s sarcoma-associated h
gggaguuuuucuacgaggcaau

SEQ ID NO: 192580 - RNA, 12 nt, Human herpesvirus 8 (Kaposi`s sarcoma-associated h
gggaugagccag

SEQ ID NO: 192581 - RNA, 14 nt, Human herpesvirus 8 (Kaposi`s sarcoma-associated h
gggagaaccaugcc

SEQ ID NO: 192582 - RNA, 11 nt, Human herpesvirus 8 (Kaposi`s sarcoma-associated h
gggaacggaca

SEQ ID NO: 192583 - RNA, 15 nt, Human herpesvirus 8 (Kaposi`s sarcoma-associated h
gggaagucaugcuca

SEQ ID NO: 192584 - RNA, 16 nt, Human herpesvirus 8 (Kaposi`s sarcoma-associated h
gggaagucaugcucau

SEQ ID NO: 192585 - RNA, 15 nt, Human herpesvirus 8 (Kaposi`s sarcoma-associated h
ggcuucggcauuauu

SEQ ID NO: 192586 - RNA, 18 nt, Human herpesvirus 8 (Kaposi`s sarcoma-associated h
ggcuucuauaagcaccuu

SEQ ID NO: 192587 - RNA, 19 nt, Human herpesvirus 8 (Kaposi`s sarcoma-associated h
ggugggacgugcgggccaa

SEQ ID NO: 192588 - RNA, 19 nt, Human herpesvirus 8 (Kaposi`s sarcoma-associated h
ggucucuucucuaccguga

SEQ ID NO: 192589 - RNA, 22 nt, Human herpesvirus 8 (Kaposi`s sarcoma-associated h
ggucaggacaauauucagcaag

SEQ ID NO: 192590 - RNA, 18 nt, Human herpesvirus 8 (Kaposi`s sarcoma-associated h
gguccccggaagaguaga

SEQ ID NO: 192591 - RNA, 17 nt, Human herpesvirus 8 (Kaposi`s sarcoma-associated h
gguguccccugcaaugc

SEQ ID NO: 192592 - RNA, 18 nt, Human herpesvirus 8 (Kaposi`s sarcoma-associated h
gguguaugacccugagcu

SEQ ID NO: 192593 - RNA, 17 nt, Human herpesvirus 8 (Kaposi`s sarcoma-associated h
gguguccagacaguuac

SEQ ID NO: 192594 - RNA, 14 nt, Human herpesvirus 8 (Kaposi`s sarcoma-associated h
ggugugugccagua

SEQ ID NO: 192595 - RNA, 21 nt, Human herpesvirus 8 (Kaposi`s sarcoma-associated h
ggugggcuacguacccaaugu

SEQ ID NO: 192596 - RNA, 15 nt, Human herpesvirus 8 (Kaposi`s sarcoma-associated h
gguaauaaagucauu

SEQ ID NO: 192597 - RNA, 23 nt, Human herpesvirus 8 (Kaposi`s sarcoma-associated h
gguaacugcaugcucggcaacau

SEQ ID NO: 192598 - RNA, 15 nt, Human herpesvirus 8 (Kaposi`s sarcoma-associated h
gggugcgaugaugaa

SEQ ID NO: 192599 - RNA, 21 nt, Human herpesvirus 8 (Kaposi`s sarcoma-associated h
ggguuaugggugugugccagu

SEQ ID NO: 192600 - RNA, 23 nt, Human herpesvirus 8 (Kaposi`s sarcoma-associated h
ggggacggcgucaccgacaccau

SEQ ID NO: 192601 - RNA, 13 nt, Human herpesvirus 8 (Kaposi`s sarcoma-associated h
ggggacgugucau

SEQ ID NO: 192602 - RNA, 14 nt, Human herpesvirus 8 (Kaposi`s sarcoma-associated h
ggggacgugucauu

SEQ ID NO: 192603 - RNA, 14 nt, Human herpesvirus 8 (Kaposi`s sarcoma-associated h
gggccaaugccaug

SEQ ID NO: 192604 - RNA, 20 nt, Human herpesvirus 8 (Kaposi`s sarcoma-associated h
gggcgccgaaugcguucucc

SEQ ID NO: 192605 - RNA, 20 nt, Human herpesvirus 8 (Kaposi`s sarcoma-associated h
gggcgauaccgcgccacgua

SEQ ID NO: 192606 - RNA, 20 nt, Human herpesvirus 8 (Kaposi`s sarcoma-associated h
gggcgaagaagcgcacccag

SEQ ID NO: 192607 - RNA, 17 nt, Human herpesvirus 8 (Kaposi`s sarcoma-associated h
gguugaugcgcggcaca

SEQ ID NO: 192608 - RNA, 16 nt, Human herpesvirus 8 (Kaposi`s sarcoma-associated h
gguugccgcugcacau

SEQ ID NO: 192609 - RNA, 17 nt, Human herpesvirus 8 (Kaposi`s sarcoma-associated h
gguucuaaucuuagucu

SEQ ID NO: 192610 - RNA, 15 nt, Human herpesvirus 8 (Kaposi`s sarcoma-associated h
gguugggauucacuc

SEQ ID NO: 192611 - RNA, 17 nt, Human herpesvirus 8 (Kaposi`s sarcoma-associated h
gguuuccuagccagaua

SEQ ID NO: 192612 - RNA, 16 nt, Human herpesvirus 8 (Kaposi`s sarcoma-associated h
gguuugauagcagaua

SEQ ID NO: 192613 - RNA, 15 nt, Human herpesvirus 8 (Kaposi`s sarcoma-associated h
guaacuucaccgugg

SEQ ID NO: 192614 - RNA, 20 nt, Human herpesvirus 8 (Kaposi`s sarcoma-associated h
guaacuguucgcuacugcuu

SEQ ID NO: 192615 - RNA, 21 nt, Human herpesvirus 8 (Kaposi`s sarcoma-associated h
guaaugccacauuucccccau

SEQ ID NO: 192616 - RNA, 14 nt, Human herpesvirus 8 (Kaposi`s sarcoma-associated h
guacucguucacac

SEQ ID NO: 192617 - RNA, 12 nt, Human herpesvirus 8 (Kaposi`s sarcoma-associated h
guacugccauga

SEQ ID NO: 192618 - RNA, 19 nt, Human herpesvirus 8 (Kaposi`s sarcoma-associated h
guacugccaugaaaggugg

SEQ ID NO: 192619 - RNA, 22 nt, Human herpesvirus 8 (Kaposi`s sarcoma-associated h
guaguccaaauaaaccagacac

SEQ ID NO: 192620 - RNA, 12 nt, Human herpesvirus 8 (Kaposi`s sarcoma-associated h
guaguugugcuu

SEQ ID NO: 192621 - RNA, 13 nt, Human herpesvirus 8 (Kaposi`s sarcoma-associated h
guauuuaaagcug

SEQ ID NO: 192622 - RNA, 20 nt, Human herpesvirus 8 (Kaposi`s sarcoma-associated h
ccaguagguagucauggaau

SEQ ID NO: 192623 - RNA, 21 nt, Human herpesvirus 8 (Kaposi`s sarcoma-associated h
ccagguggcacccaacaucca

SEQ ID NO: 192624 - RNA, 17 nt, Human herpesvirus 8 (Kaposi`s sarcoma-associated h
ccagccucuguacaugg

SEQ ID NO: 192625 - RNA, 13 nt, Human herpesvirus 8 (Kaposi`s sarcoma-associated h
ccagggucauccc

SEQ ID NO: 192626 - RNA, 16 nt, Human herpesvirus 8 (Kaposi`s sarcoma-associated h
ccagguaacaaagccg

SEQ ID NO: 192627 - RNA, 15 nt, Human herpesvirus 8 (Kaposi`s sarcoma-associated h
ccaugacaacugcca

SEQ ID NO: 192628 - RNA, 22 nt, Human herpesvirus 8 (Kaposi`s sarcoma-associated h
ccacaugauuugauacagggac

SEQ ID NO: 192629 - RNA, 18 nt, Human herpesvirus 8 (Kaposi`s sarcoma-associated h
ccacaucggugccuucac

SEQ ID NO: 192630 - RNA, 17 nt, Human herpesvirus 8 (Kaposi`s sarcoma-associated h
ccacauacagacugcag

SEQ ID NO: 192631 - RNA, 17 nt, Human herpesvirus 8 (Kaposi`s sarcoma-associated h
ccagaugaauaugaucc

SEQ ID NO: 192632 - RNA, 16 nt, Human herpesvirus 8 (Kaposi`s sarcoma-associated h
ccagcaauaaacccac

SEQ ID NO: 192633 - RNA, 18 nt, Human herpesvirus 8 (Kaposi`s sarcoma-associated h
ccagcaaccccucuggau

SEQ ID NO: 192634 - RNA, 17 nt, Human herpesvirus 8 (Kaposi`s sarcoma-associated h
ccagauaccccugcacc

SEQ ID NO: 192635 - RNA, 19 nt, Human herpesvirus 8 (Kaposi`s sarcoma-associated h
ccacagcccauaguaugua

SEQ ID NO: 192636 - RNA, 14 nt, Human herpesvirus 8 (Kaposi`s sarcoma-associated h
ccacaagggccaag

SEQ ID NO: 192637 - RNA, 23 nt, Human herpesvirus 8 (Kaposi`s sarcoma-associated h
ccacaagggccaagcuacuggcc

SEQ ID NO: 192638 - RNA, 11 nt, Human herpesvirus 8 (Kaposi`s sarcoma-associated h
ccaaugccaug

SEQ ID NO: 192639 - RNA, 19 nt, Human herpesvirus 8 (Kaposi`s sarcoma-associated h
ccacaaacacaaucuggca

SEQ ID NO: 192640 - RNA, 15 nt, Human herpesvirus 8 (Kaposi`s sarcoma-associated h
ccaauugacugugga

SEQ ID NO: 192641 - RNA, 13 nt, Human herpesvirus 8 (Kaposi`s sarcoma-associated h
ccaauacuauuau

SEQ ID NO: 192642 - RNA, 17 nt, Human herpesvirus 8 (Kaposi`s sarcoma-associated h
ccaacgaccugaugcag

SEQ ID NO: 192643 - RNA, 21 nt, Human herpesvirus 8 (Kaposi`s sarcoma-associated h
ccaacaagacaguugugaucu

SEQ ID NO: 192644 - RNA, 15 nt, Human herpesvirus 8 (Kaposi`s sarcoma-associated h
ccaaauuaugcagua

SEQ ID NO: 192645 - RNA, 21 nt, Human herpesvirus 8 (Kaposi`s sarcoma-associated h
cauuuauuagacguuggugug

SEQ ID NO: 192646 - RNA, 22 nt, Human herpesvirus 8 (Kaposi`s sarcoma-associated h
cauuugucuuuauugcuuucaa

SEQ ID NO: 192647 - RNA, 24 nt, Human herpesvirus 8 (Kaposi`s sarcoma-associated h
cauuuggacacaacaugcaacaag

SEQ ID NO: 192648 - RNA, 20 nt, Human herpesvirus 8 (Kaposi`s sarcoma-associated h
cauuugcgugcaaaaugugc

SEQ ID NO: 192649 - RNA, 14 nt, Human herpesvirus 8 (Kaposi`s sarcoma-associated h
ccaaagagugucag

SEQ ID NO: 192650 - RNA, 15 nt, Human herpesvirus 8 (Kaposi`s sarcoma-associated h
caugggcaccacgga

SEQ ID NO: 192651 - RNA, 18 nt, Human herpesvirus 8 (Kaposi`s sarcoma-associated h
caugguacaagcaaugau

SEQ ID NO: 192652 - RNA, 18 nt, Human herpesvirus 8 (Kaposi`s sarcoma-associated h
caugggguuccagugcgc

SEQ ID NO: 192653 - RNA, 14 nt, Human herpesvirus 8 (Kaposi`s sarcoma-associated h
cauggccuuuuuaa

SEQ ID NO: 192654 - RNA, 15 nt, Human herpesvirus 8 (Kaposi`s sarcoma-associated h
cauggagguguguau

SEQ ID NO: 192655 - RNA, 16 nt, Human herpesvirus 8 (Kaposi`s sarcoma-associated h
cauggcaaaaaacacu

SEQ ID NO: 192656 - RNA, 16 nt, Human herpesvirus 8 (Kaposi`s sarcoma-associated h
caugcucggcaacauu

SEQ ID NO: 192657 - RNA, 22 nt, Human herpesvirus 8 (Kaposi`s sarcoma-associated h
caugcuagggcgauaccgcgcc

SEQ ID NO: 192658 - RNA, 23 nt, Human herpesvirus 8 (Kaposi`s sarcoma-associated h
caugcugaugcgaaugugccagc

SEQ ID NO: 192659 - RNA, 22 nt, Human herpesvirus 8 (Kaposi`s sarcoma-associated h
caugcccacccuguacaugaac

SEQ ID NO: 192660 - RNA, 21 nt, Human herpesvirus 8 (Kaposi`s sarcoma-associated h
caugccaucuuugggcuagug

SEQ ID NO: 192661 - RNA, 22 nt, Human herpesvirus 8 (Kaposi`s sarcoma-associated h
cccaacaagacaguugugaucu

SEQ ID NO: 192662 - RNA, 16 nt, Human herpesvirus 8 (Kaposi`s sarcoma-associated h
cccaaacuagcagaga

SEQ ID NO: 192663 - RNA, 12 nt, Human herpesvirus 8 (Kaposi`s sarcoma-associated h
cccaaaccacac

SEQ ID NO: 192664 - RNA, 20 nt, Human herpesvirus 8 (Kaposi`s sarcoma-associated h
cccaacauguaaauuggcca

SEQ ID NO: 192665 - RNA, 19 nt, Human herpesvirus 8 (Kaposi`s sarcoma-associated h
ccauuuuuguggcugccug

SEQ ID NO: 192666 - RNA, 13 nt, Human herpesvirus 8 (Kaposi`s sarcoma-associated h
cccacacuggccc

SEQ ID NO: 192667 - RNA, 19 nt, Human herpesvirus 8 (Kaposi`s sarcoma-associated h
cccacccccuucugauucu

SEQ ID NO: 192668 - RNA, 17 nt, Human herpesvirus 8 (Kaposi`s sarcoma-associated h
ccauggcaaaaaacacu

SEQ ID NO: 192669 - RNA, 17 nt, Human herpesvirus 8 (Kaposi`s sarcoma-associated h
ccauggggaucuuugcg

SEQ ID NO: 192670 - RNA, 21 nt, Human herpesvirus 8 (Kaposi`s sarcoma-associated h
ccauucaugccuuucuguaau

SEQ ID NO: 192671 - RNA, 23 nt, Human herpesvirus 8 (Kaposi`s sarcoma-associated h
ccccguucuaaucuggcauguau

SEQ ID NO: 192672 - RNA, 19 nt, Human herpesvirus 8 (Kaposi`s sarcoma-associated h
cccccucgucgacagagcc

SEQ ID NO: 192673 - RNA, 21 nt, Human herpesvirus 8 (Kaposi`s sarcoma-associated h
cccagaaugaaggacauaccu

SEQ ID NO: 192674 - RNA, 19 nt, Human herpesvirus 8 (Kaposi`s sarcoma-associated h
cccagaagcgcaccacaga

SEQ ID NO: 192675 - RNA, 15 nt, Human herpesvirus 8 (Kaposi`s sarcoma-associated h
cccaccuacuuccag

SEQ ID NO: 192676 - RNA, 23 nt, Human herpesvirus 8 (Kaposi`s sarcoma-associated h
cccacgaugggaacuuucaucca

SEQ ID NO: 192677 - RNA, 16 nt, Human herpesvirus 8 (Kaposi`s sarcoma-associated h
cccacgcuaugugagg

SEQ ID NO: 192678 - RNA, 14 nt, Human herpesvirus 8 (Kaposi`s sarcoma-associated h
cccacggugcacug

SEQ ID NO: 192679 - RNA, 20 nt, Human herpesvirus 8 (Kaposi`s sarcoma-associated h
cccagcuccuauugcaacug

SEQ ID NO: 192680 - RNA, 20 nt, Human herpesvirus 8 (Kaposi`s sarcoma-associated h
ccgccucugaagcaccacau

SEQ ID NO: 192681 - RNA, 14 nt, Human herpesvirus 8 (Kaposi`s sarcoma-associated h
ccgcgaguccugua

SEQ ID NO: 192682 - RNA, 16 nt, Human herpesvirus 8 (Kaposi`s sarcoma-associated h
ccgcgagacaucagaa

SEQ ID NO: 192683 - RNA, 16 nt, Human herpesvirus 8 (Kaposi`s sarcoma-associated h
ccgcgcaucaaccagc

SEQ ID NO: 192684 - RNA, 15 nt, Human herpesvirus 8 (Kaposi`s sarcoma-associated h
ccgccaucaccaaca

SEQ ID NO: 192685 - RNA, 16 nt, Human herpesvirus 8 (Kaposi`s sarcoma-associated h
ccguguguggcugugg

SEQ ID NO: 192686 - RNA, 18 nt, Human herpesvirus 8 (Kaposi`s sarcoma-associated h
ccguggacaccacauuuc

SEQ ID NO: 192687 - RNA, 17 nt, Human herpesvirus 8 (Kaposi`s sarcoma-associated h
ccgugaaucgcaccuua

SEQ ID NO: 192688 - RNA, 13 nt, Human herpesvirus 8 (Kaposi`s sarcoma-associated h
ccgugagguugua

SEQ ID NO: 192689 - RNA, 19 nt, Human herpesvirus 8 (Kaposi`s sarcoma-associated h
ccgggaucuguuacuggca

SEQ ID NO: 192690 - RNA, 15 nt, Human herpesvirus 8 (Kaposi`s sarcoma-associated h
ccggcuuguuuauaa

SEQ ID NO: 192691 - RNA, 13 nt, Human herpesvirus 8 (Kaposi`s sarcoma-associated h
ccgggaacggaca

SEQ ID NO: 192692 - RNA, 16 nt, Human herpesvirus 8 (Kaposi`s sarcoma-associated h
ccgcaaagauaagcca

SEQ ID NO: 192693 - RNA, 21 nt, Human herpesvirus 8 (Kaposi`s sarcoma-associated h
ccgcaaucaugccuguggauu

SEQ ID NO: 192694 - RNA, 22 nt, Human herpesvirus 8 (Kaposi`s sarcoma-associated h
ccgcaaucaugccuguggauuu

SEQ ID NO: 192695 - RNA, 21 nt, Human herpesvirus 8 (Kaposi`s sarcoma-associated h
cccuaagggucugcagaugau

SEQ ID NO: 192696 - RNA, 14 nt, Human herpesvirus 8 (Kaposi`s sarcoma-associated h
cccgucuccaguca

SEQ ID NO: 192697 - RNA, 22 nt, Human herpesvirus 8 (Kaposi`s sarcoma-associated h
cccguaccacaagggccaagcu

SEQ ID NO: 192698 - RNA, 13 nt, Human herpesvirus 8 (Kaposi`s sarcoma-associated h
cccggauuugccc

SEQ ID NO: 192699 - RNA, 19 nt, Human herpesvirus 8 (Kaposi`s sarcoma-associated h
ccgagccacaaaguacaua

SEQ ID NO: 192700 - RNA, 18 nt, Human herpesvirus 8 (Kaposi`s sarcoma-associated h
caggaguauaucagggga

SEQ ID NO: 192701 - RNA, 17 nt, Human herpesvirus 8 (Kaposi`s sarcoma-associated h
caggagucagagcagug

SEQ ID NO: 192702 - RNA, 18 nt, Human herpesvirus 8 (Kaposi`s sarcoma-associated h
caggagucagagcagugc

SEQ ID NO: 192703 - RNA, 23 nt, Human herpesvirus 8 (Kaposi`s sarcoma-associated h
caggaugcauaagcugcauacau

SEQ ID NO: 192704 - RNA, 15 nt, Human herpesvirus 8 (Kaposi`s sarcoma-associated h
caggaucaacacuuc

SEQ ID NO: 192705 - RNA, 18 nt, Human herpesvirus 8 (Kaposi`s sarcoma-associated h
caggcaguuuauuuuuaa

SEQ ID NO: 192706 - RNA, 18 nt, Human herpesvirus 8 (Kaposi`s sarcoma-associated h
caggccaccauuccucuc

SEQ ID NO: 192707 - RNA, 21 nt, Human herpesvirus 8 (Kaposi`s sarcoma-associated h
caggccaagauccaacccagc

SEQ ID NO: 192708 - RNA, 15 nt, Human herpesvirus 8 (Kaposi`s sarcoma-associated h
cagggacaucaccuc

SEQ ID NO: 192709 - RNA, 18 nt, Human herpesvirus 8 (Kaposi`s sarcoma-associated h
cagcuaaaugaauaucau

SEQ ID NO: 192710 - RNA, 20 nt, Human herpesvirus 8 (Kaposi`s sarcoma-associated h
cagcgucgccuuagcagagu

SEQ ID NO: 192711 - RNA, 14 nt, Human herpesvirus 8 (Kaposi`s sarcoma-associated h
cagcguauacaccc

SEQ ID NO: 192712 - RNA, 14 nt, Human herpesvirus 8 (Kaposi`s sarcoma-associated h
cagcuacgcacuga

SEQ ID NO: 192713 - RNA, 14 nt, Human herpesvirus 8 (Kaposi`s sarcoma-associated h
cagccuuggugcua

SEQ ID NO: 192714 - RNA, 19 nt, Human herpesvirus 8 (Kaposi`s sarcoma-associated h
cagcgcucaauuaucuaca

SEQ ID NO: 192715 - RNA, 22 nt, Human herpesvirus 8 (Kaposi`s sarcoma-associated h
cagcuccuauugcaacugacca

SEQ ID NO: 192716 - RNA, 17 nt, Human herpesvirus 8 (Kaposi`s sarcoma-associated h
cagcuggacuggaguca

SEQ ID NO: 192717 - RNA, 14 nt, Human herpesvirus 8 (Kaposi`s sarcoma-associated h
cagccuaacaugug

SEQ ID NO: 192718 - RNA, 20 nt, Human herpesvirus 8 (Kaposi`s sarcoma-associated h
cagaugaauaugauccugua

SEQ ID NO: 192719 - RNA, 15 nt, Human herpesvirus 8 (Kaposi`s sarcoma-associated h
cagagucuacgugcc

SEQ ID NO: 192720 - RNA, 18 nt, Human herpesvirus 8 (Kaposi`s sarcoma-associated h
cagagucuacgugccagu

SEQ ID NO: 192721 - RNA, 15 nt, Human herpesvirus 8 (Kaposi`s sarcoma-associated h
cagagucugaacccc

SEQ ID NO: 192722 - RNA, 20 nt, Human herpesvirus 8 (Kaposi`s sarcoma-associated h
cagaguuuuaugggcucauc

SEQ ID NO: 192723 - RNA, 14 nt, Human herpesvirus 8 (Kaposi`s sarcoma-associated h
cagaguguccagua

SEQ ID NO: 192724 - RNA, 15 nt, Human herpesvirus 8 (Kaposi`s sarcoma-associated h
cagacugguccaagc

SEQ ID NO: 192725 - RNA, 19 nt, Human herpesvirus 8 (Kaposi`s sarcoma-associated h
cagacgguccaaagcuuac

SEQ ID NO: 192726 - RNA, 15 nt, Human herpesvirus 8 (Kaposi`s sarcoma-associated h
cagacguccaguucc

SEQ ID NO: 192727 - RNA, 13 nt, Human herpesvirus 8 (Kaposi`s sarcoma-associated h
cagacgugcccag

SEQ ID NO: 192728 - RNA, 20 nt, Human herpesvirus 8 (Kaposi`s sarcoma-associated h
cagacauggccggacaccac

SEQ ID NO: 192729 - RNA, 17 nt, Human herpesvirus 8 (Kaposi`s sarcoma-associated h
cagacaguuaccauuca

SEQ ID NO: 192730 - RNA, 12 nt, Human herpesvirus 8 (Kaposi`s sarcoma-associated h
cagacaccaaag

SEQ ID NO: 192731 - RNA, 19 nt, Human herpesvirus 8 (Kaposi`s sarcoma-associated h
cagaagaccgcguccucca

SEQ ID NO: 192732 - RNA, 16 nt, Human herpesvirus 8 (Kaposi`s sarcoma-associated h
cagaacguaagguuac

SEQ ID NO: 192733 - RNA, 22 nt, Human herpesvirus 8 (Kaposi`s sarcoma-associated h
caccaacguuuuugagaucuau

SEQ ID NO: 192734 - RNA, 14 nt, Human herpesvirus 8 (Kaposi`s sarcoma-associated h
cacauuuugcacgc

SEQ ID NO: 192735 - RNA, 21 nt, Human herpesvirus 8 (Kaposi`s sarcoma-associated h
caccacggaauaaaauacgua

SEQ ID NO: 192736 - RNA, 22 nt, Human herpesvirus 8 (Kaposi`s sarcoma-associated h
cagaaccgaugguuuccuagcc

SEQ ID NO: 192737 - RNA, 20 nt, Human herpesvirus 8 (Kaposi`s sarcoma-associated h
caccaccggcuaguguaugc

SEQ ID NO: 192738 - RNA, 16 nt, Human herpesvirus 8 (Kaposi`s sarcoma-associated h
cagucgccaguuuuuc

SEQ ID NO: 192739 - RNA, 18 nt, Human herpesvirus 8 (Kaposi`s sarcoma-associated h
cagugaguggcuguagca

SEQ ID NO: 192740 - RNA, 18 nt, Human herpesvirus 8 (Kaposi`s sarcoma-associated h
caguuaucaacccuacuc

SEQ ID NO: 192741 - RNA, 22 nt, Human herpesvirus 8 (Kaposi`s sarcoma-associated h
cagucgaggcgaacuucuagca

SEQ ID NO: 192742 - RNA, 15 nt, Human herpesvirus 8 (Kaposi`s sarcoma-associated h
cagucuccagaguuu

SEQ ID NO: 192743 - RNA, 15 nt, Human herpesvirus 8 (Kaposi`s sarcoma-associated h
caguuuggugcaaag

SEQ ID NO: 192744 - RNA, 23 nt, Human herpesvirus 8 (Kaposi`s sarcoma-associated h
caguuuaaaagacucuagauaaa

SEQ ID NO: 192745 - RNA, 20 nt, Human herpesvirus 8 (Kaposi`s sarcoma-associated h
caguuggagaaacaguggaa

SEQ ID NO: 192746 - RNA, 20 nt, Human herpesvirus 8 (Kaposi`s sarcoma-associated h
cauaaaaccuccaaacacag

SEQ ID NO: 192747 - RNA, 15 nt, Human herpesvirus 8 (Kaposi`s sarcoma-associated h
cauacacuagacugg

SEQ ID NO: 192748 - RNA, 12 nt, Human herpesvirus 8 (Kaposi`s sarcoma-associated h
caguauucucac

SEQ ID NO: 192749 - RNA, 17 nt, Human herpesvirus 8 (Kaposi`s sarcoma-associated h
cagucaacgucucuaua

SEQ ID NO: 192750 - RNA, 16 nt, Human herpesvirus 8 (Kaposi`s sarcoma-associated h
cagucacuaugucuuu

SEQ ID NO: 192751 - RNA, 15 nt, Human herpesvirus 8 (Kaposi`s sarcoma-associated h
caguagaucagagua

SEQ ID NO: 192752 - RNA, 22 nt, Human herpesvirus 8 (Kaposi`s sarcoma-associated h
caguagcccgccgcaaggagca

SEQ ID NO: 192753 - RNA, 13 nt, Human herpesvirus 8 (Kaposi`s sarcoma-associated h
caguaaagaguac

SEQ ID NO: 192754 - RNA, 19 nt, Human herpesvirus 8 (Kaposi`s sarcoma-associated h
caggugucugcgggacaau

SEQ ID NO: 192755 - RNA, 14 nt, Human herpesvirus 8 (Kaposi`s sarcoma-associated h
cagguguccaagac

SEQ ID NO: 192756 - RNA, 15 nt, Human herpesvirus 8 (Kaposi`s sarcoma-associated h
caggguagaugagca

SEQ ID NO: 192757 - RNA, 17 nt, Human herpesvirus 8 (Kaposi`s sarcoma-associated h
cagguaauuaacaucca

SEQ ID NO: 192758 - RNA, 16 nt, Human herpesvirus 8 (Kaposi`s sarcoma-associated h
cagguaaaacggccaa

SEQ ID NO: 192759 - RNA, 17 nt, Human herpesvirus 8 (Kaposi`s sarcoma-associated h
cagguaaaacggccaaa

SEQ ID NO: 192760 - RNA, 22 nt, Human herpesvirus 8 (Kaposi`s sarcoma-associated h
caugaaagacugccugaggcuu

SEQ ID NO: 192761 - RNA, 20 nt, Human herpesvirus 8 (Kaposi`s sarcoma-associated h
caucugguccuaagagugug

SEQ ID NO: 192762 - RNA, 19 nt, Human herpesvirus 8 (Kaposi`s sarcoma-associated h
caucgcgaccgcugccaau

SEQ ID NO: 192763 - RNA, 22 nt, Human herpesvirus 8 (Kaposi`s sarcoma-associated h
caucgcgaccgcugccaauaua

SEQ ID NO: 192764 - RNA, 18 nt, Human herpesvirus 8 (Kaposi`s sarcoma-associated h
caucgcaggaugcauaag

SEQ ID NO: 192765 - RNA, 12 nt, Human herpesvirus 8 (Kaposi`s sarcoma-associated h
caucccauaacg

SEQ ID NO: 192766 - RNA, 18 nt, Human herpesvirus 8 (Kaposi`s sarcoma-associated h
cauccccggauuccuccg

SEQ ID NO: 192767 - RNA, 19 nt, Human herpesvirus 8 (Kaposi`s sarcoma-associated h
cauccccggcguccucuca

SEQ ID NO: 192768 - RNA, 23 nt, Human herpesvirus 8 (Kaposi`s sarcoma-associated h
cauccccggcguccucucaugug

SEQ ID NO: 192769 - RNA, 13 nt, Human herpesvirus 8 (Kaposi`s sarcoma-associated h
cauaccuacuaag

SEQ ID NO: 192770 - RNA, 18 nt, Human herpesvirus 8 (Kaposi`s sarcoma-associated h
cauacgucccucuuggcu

SEQ ID NO: 192771 - RNA, 22 nt, Human herpesvirus 8 (Kaposi`s sarcoma-associated h
cauacgucccucuuggcuguua

SEQ ID NO: 192772 - RNA, 22 nt, Human herpesvirus 8 (Kaposi`s sarcoma-associated h
cauauacaagccggcaccaugg

SEQ ID NO: 192773 - RNA, 15 nt, Human herpesvirus 8 (Kaposi`s sarcoma-associated h
cauaucaaggucuuu

SEQ ID NO: 192774 - RNA, 18 nt, Human herpesvirus 8 (Kaposi`s sarcoma-associated h
cauaucguugacaugugg

SEQ ID NO: 192775 - RNA, 15 nt, Human herpesvirus 8 (Kaposi`s sarcoma-associated h
caucagcggcaccac

SEQ ID NO: 192776 - RNA, 16 nt, Human herpesvirus 8 (Kaposi`s sarcoma-associated h
caucauaaaguacuuu

SEQ ID NO: 192777 - RNA, 23 nt, Human herpesvirus 8 (Kaposi`s sarcoma-associated h
cauccacaggaagcgaaaagccu

SEQ ID NO: 192778 - RNA, 18 nt, Human herpesvirus 8 (Kaposi`s sarcoma-associated h
auuuucucacgaaucugg

SEQ ID NO: 192779 - RNA, 23 nt, Human herpesvirus 8 (Kaposi`s sarcoma-associated h
auuuuuaacaguuuggugcaaag

SEQ ID NO: 192780 - RNA, 13 nt, Human herpesvirus 8 (Kaposi`s sarcoma-associated h
auuuuucacccac

SEQ ID NO: 192781 - RNA, 21 nt, Human herpesvirus 8 (Kaposi`s sarcoma-associated h
auuuuuuacggacaauacuga

SEQ ID NO: 192782 - RNA, 16 nt, Human herpesvirus 8 (Kaposi`s sarcoma-associated h
auuuuuuuccuaggcg

SEQ ID NO: 192783 - RNA, 21 nt, Human herpesvirus 8 (Kaposi`s sarcoma-associated h
auuucucugugcgucuacggc

SEQ ID NO: 192784 - RNA, 22 nt, Human herpesvirus 8 (Kaposi`s sarcoma-associated h
auuucgcccgccuguguggaag

SEQ ID NO: 192785 - RNA, 21 nt, Human herpesvirus 8 (Kaposi`s sarcoma-associated h
auugaguuugccgagcccguu

SEQ ID NO: 192786 - RNA, 16 nt, Human herpesvirus 8 (Kaposi`s sarcoma-associated h
auugcaacugaccaug

SEQ ID NO: 192787 - RNA, 19 nt, Human herpesvirus 8 (Kaposi`s sarcoma-associated h
caaaaucuguugaauguga

SEQ ID NO: 192788 - RNA, 21 nt, Human herpesvirus 8 (Kaposi`s sarcoma-associated h
caaaaucuguugaaugugauc

SEQ ID NO: 192789 - RNA, 23 nt, Human herpesvirus 8 (Kaposi`s sarcoma-associated h
caaacugggacuugauaaucucc

SEQ ID NO: 192790 - RNA, 18 nt, Human herpesvirus 8 (Kaposi`s sarcoma-associated h
caaagacgccuuccucag

SEQ ID NO: 192791 - RNA, 17 nt, Human herpesvirus 8 (Kaposi`s sarcoma-associated h
caaagagugucaguaaa

SEQ ID NO: 192792 - RNA, 14 nt, Human herpesvirus 8 (Kaposi`s sarcoma-associated h
caaagauaagccaa

SEQ ID NO: 192793 - RNA, 18 nt, Human herpesvirus 8 (Kaposi`s sarcoma-associated h
caaacuuuuccauugcac

SEQ ID NO: 192794 - RNA, 19 nt, Human herpesvirus 8 (Kaposi`s sarcoma-associated h
caaacuuuuccauugcacu

SEQ ID NO: 192795 - RNA, 19 nt, Human herpesvirus 8 (Kaposi`s sarcoma-associated h
caaagcacauuuugcacgc

SEQ ID NO: 192796 - RNA, 18 nt, Human herpesvirus 8 (Kaposi`s sarcoma-associated h
caaaguggaguuaaccua

SEQ ID NO: 192797 - RNA, 21 nt, Human herpesvirus 8 (Kaposi`s sarcoma-associated h
caaauaaaccgaaguacugcu

SEQ ID NO: 192798 - RNA, 17 nt, Human herpesvirus 8 (Kaposi`s sarcoma-associated h
caacacuggacacuaaa

SEQ ID NO: 192799 - RNA, 15 nt, Human herpesvirus 8 (Kaposi`s sarcoma-associated h
caaauaauagaucuc

SEQ ID NO: 192800 - RNA, 16 nt, Human herpesvirus 8 (Kaposi`s sarcoma-associated h
caacauuaaacacaua

SEQ ID NO: 192801 - RNA, 19 nt, Human herpesvirus 8 (Kaposi`s sarcoma-associated h
caacauagacaugccccaa

SEQ ID NO: 192802 - RNA, 21 nt, Human herpesvirus 8 (Kaposi`s sarcoma-associated h
caauauuauuuauuuuuuacu

SEQ ID NO: 192803 - RNA, 15 nt, Human herpesvirus 8 (Kaposi`s sarcoma-associated h
caauagggauacugu

SEQ ID NO: 192804 - RNA, 14 nt, Human herpesvirus 8 (Kaposi`s sarcoma-associated h
caauuggaugcuau

SEQ ID NO: 192805 - RNA, 18 nt, Human herpesvirus 8 (Kaposi`s sarcoma-associated h
caauuauugcaccauuua

SEQ ID NO: 192806 - RNA, 20 nt, Human herpesvirus 8 (Kaposi`s sarcoma-associated h
cacaggaagcgaaaagccug

SEQ ID NO: 192807 - RNA, 11 nt, Human herpesvirus 8 (Kaposi`s sarcoma-associated h
cacaucucacg

SEQ ID NO: 192808 - RNA, 17 nt, Human herpesvirus 8 (Kaposi`s sarcoma-associated h
cacaugauuugauacag

SEQ ID NO: 192809 - RNA, 12 nt, Human herpesvirus 8 (Kaposi`s sarcoma-associated h
cacagagucuac

SEQ ID NO: 192810 - RNA, 20 nt, Human herpesvirus 8 (Kaposi`s sarcoma-associated h
cacagagucuacgugccagu

SEQ ID NO: 192811 - RNA, 16 nt, Human herpesvirus 8 (Kaposi`s sarcoma-associated h
cacagacacaaauuac

SEQ ID NO: 192812 - RNA, 16 nt, Human herpesvirus 8 (Kaposi`s sarcoma-associated h
cacagagauaugugac

SEQ ID NO: 192813 - RNA, 19 nt, Human herpesvirus 8 (Kaposi`s sarcoma-associated h
cacaacaugcaacaagcaa

SEQ ID NO: 192814 - RNA, 14 nt, Human herpesvirus 8 (Kaposi`s sarcoma-associated h
cacaaaacugccaa

SEQ ID NO: 192815 - RNA, 14 nt, Human herpesvirus 8 (Kaposi`s sarcoma-associated h
caagucuucuuguc

SEQ ID NO: 192816 - RNA, 18 nt, Human herpesvirus 8 (Kaposi`s sarcoma-associated h
caagucuucuugucacuc

SEQ ID NO: 192817 - RNA, 22 nt, Human herpesvirus 8 (Kaposi`s sarcoma-associated h
caagguuguaacacaaaagcaa

SEQ ID NO: 192818 - RNA, 23 nt, Human herpesvirus 8 (Kaposi`s sarcoma-associated h
caaguaagucguccgacaugugc

SEQ ID NO: 192819 - RNA, 14 nt, Human herpesvirus 8 (Kaposi`s sarcoma-associated h
caagacaguuguga

SEQ ID NO: 192820 - RNA, 16 nt, Human herpesvirus 8 (Kaposi`s sarcoma-associated h
caagacaguugugauc

SEQ ID NO: 192821 - RNA, 19 nt, Human herpesvirus 8 (Kaposi`s sarcoma-associated h
caagaccgagcguauucuc

SEQ ID NO: 192822 - RNA, 16 nt, Human herpesvirus 8 (Kaposi`s sarcoma-associated h
caagacacacccgcca

SEQ ID NO: 192823 - RNA, 14 nt, Human herpesvirus 8 (Kaposi`s sarcoma-associated h
caagacaccaauaa

SEQ ID NO: 192824 - RNA, 18 nt, Human herpesvirus 8 (Kaposi`s sarcoma-associated h
caaccggucgcaguggac

SEQ ID NO: 192825 - RNA, 22 nt, Human herpesvirus 8 (Kaposi`s sarcoma-associated h
auucagcaagguuguaacacaa

SEQ ID NO: 192826 - RNA, 14 nt, Human herpesvirus 8 (Kaposi`s sarcoma-associated h
auucaugauuucau

SEQ ID NO: 192827 - RNA, 18 nt, Human herpesvirus 8 (Kaposi`s sarcoma-associated h
auucaaaggcgggaucau

SEQ ID NO: 192828 - RNA, 20 nt, Human herpesvirus 8 (Kaposi`s sarcoma-associated h
auugaaggagcgccucgcag

SEQ ID NO: 192829 - RNA, 16 nt, Human herpesvirus 8 (Kaposi`s sarcoma-associated h
auugacaccauucuuu

SEQ ID NO: 192830 - RNA, 15 nt, Human herpesvirus 8 (Kaposi`s sarcoma-associated h
auuaaacacauacaa

SEQ ID NO: 192831 - RNA, 19 nt, Human herpesvirus 8 (Kaposi`s sarcoma-associated h
auuaaacacauacaaugcu

SEQ ID NO: 192832 - RNA, 16 nt, Human herpesvirus 8 (Kaposi`s sarcoma-associated h
auuauaggugucaagu

SEQ ID NO: 192833 - RNA, 19 nt, Human herpesvirus 8 (Kaposi`s sarcoma-associated h
auuauagaugaaacauucg

SEQ ID NO: 192834 - RNA, 22 nt, Human herpesvirus 8 (Kaposi`s sarcoma-associated h
auuaugcaugcaauacccuguu

SEQ ID NO: 192835 - RNA, 15 nt, Human herpesvirus 8 (Kaposi`s sarcoma-associated h
augggucuaugauca

SEQ ID NO: 192836 - RNA, 15 nt, Human herpesvirus 8 (Kaposi`s sarcoma-associated h
augggugaccacaua

SEQ ID NO: 192837 - RNA, 12 nt, Human herpesvirus 8 (Kaposi`s sarcoma-associated h
auggguggaauu

SEQ ID NO: 192838 - RNA, 17 nt, Human herpesvirus 8 (Kaposi`s sarcoma-associated h
augggugugugccagua

SEQ ID NO: 192839 - RNA, 16 nt, Human herpesvirus 8 (Kaposi`s sarcoma-associated h
auggguuaacagugga

SEQ ID NO: 192840 - RNA, 12 nt, Human herpesvirus 8 (Kaposi`s sarcoma-associated h
auguacugccau

SEQ ID NO: 192841 - RNA, 15 nt, Human herpesvirus 8 (Kaposi`s sarcoma-associated h
auguacugccaugaa

SEQ ID NO: 192842 - RNA, 21 nt, Human herpesvirus 8 (Kaposi`s sarcoma-associated h
auguaggucuccgagcacugc

SEQ ID NO: 192843 - RNA, 22 nt, Human herpesvirus 8 (Kaposi`s sarcoma-associated h
auguaucugauuuaauaaacac

SEQ ID NO: 192844 - RNA, 20 nt, Human herpesvirus 8 (Kaposi`s sarcoma-associated h
augucaggggaccauaucaa

SEQ ID NO: 192845 - RNA, 11 nt, Human herpesvirus 8 (Kaposi`s sarcoma-associated h
auguucaggag

SEQ ID NO: 192846 - RNA, 13 nt, Human herpesvirus 8 (Kaposi`s sarcoma-associated h
auguucagguggu

SEQ ID NO: 192847 - RNA, 21 nt, Human herpesvirus 8 (Kaposi`s sarcoma-associated h
auguuguuuguauaacaugca

SEQ ID NO: 192848 - RNA, 12 nt, Human herpesvirus 8 (Kaposi`s sarcoma-associated h
auguucuugcca

SEQ ID NO: 192849 - RNA, 18 nt, Human herpesvirus 8 (Kaposi`s sarcoma-associated h
auguuucccacgugcacc

SEQ ID NO: 192850 - RNA, 17 nt, Human herpesvirus 8 (Kaposi`s sarcoma-associated h
auggaucccucugacaa

SEQ ID NO: 192851 - RNA, 21 nt, Human herpesvirus 8 (Kaposi`s sarcoma-associated h
auggacauuuaccaugguuau

SEQ ID NO: 192852 - RNA, 16 nt, Human herpesvirus 8 (Kaposi`s sarcoma-associated h
auggaccucugucuuc

SEQ ID NO: 192853 - RNA, 15 nt, Human herpesvirus 8 (Kaposi`s sarcoma-associated h
augggaacuuucauc

SEQ ID NO: 192854 - RNA, 20 nt, Human herpesvirus 8 (Kaposi`s sarcoma-associated h
auggcuucuauaagcaccuu

SEQ ID NO: 192855 - RNA, 17 nt, Human herpesvirus 8 (Kaposi`s sarcoma-associated h
auggccggcacgcggug

SEQ ID NO: 192856 - RNA, 19 nt, Human herpesvirus 8 (Kaposi`s sarcoma-associated h
auggcccuggauacaccca

SEQ ID NO: 192857 - RNA, 15 nt, Human herpesvirus 8 (Kaposi`s sarcoma-associated h
auggcaaaaaacacu

SEQ ID NO: 192858 - RNA, 20 nt, Human herpesvirus 8 (Kaposi`s sarcoma-associated h
augccaguagcaugcugaug

SEQ ID NO: 192859 - RNA, 15 nt, Human herpesvirus 8 (Kaposi`s sarcoma-associated h
augcccaacuucauc

SEQ ID NO: 192860 - RNA, 19 nt, Human herpesvirus 8 (Kaposi`s sarcoma-associated h
augcccaacuucaucacau

SEQ ID NO: 192861 - RNA, 18 nt, Human herpesvirus 8 (Kaposi`s sarcoma-associated h
augccgaacagguugcca

SEQ ID NO: 192862 - RNA, 15 nt, Human herpesvirus 8 (Kaposi`s sarcoma-associated h
augcucaggucuguc

SEQ ID NO: 192863 - RNA, 15 nt, Human herpesvirus 8 (Kaposi`s sarcoma-associated h
augcgugaacccuca

SEQ ID NO: 192864 - RNA, 19 nt, Human herpesvirus 8 (Kaposi`s sarcoma-associated h
augcgggcgauuacaggaa

SEQ ID NO: 192865 - RNA, 12 nt, Human herpesvirus 8 (Kaposi`s sarcoma-associated h
augcucuggcca

SEQ ID NO: 192866 - RNA, 13 nt, Human herpesvirus 8 (Kaposi`s sarcoma-associated h
augcaugcaauac

SEQ ID NO: 192867 - RNA, 16 nt, Human herpesvirus 8 (Kaposi`s sarcoma-associated h
augcauaucguugaca

SEQ ID NO: 192868 - RNA, 12 nt, Human herpesvirus 8 (Kaposi`s sarcoma-associated h
augcaguaucua

SEQ ID NO: 192869 - RNA, 18 nt, Human herpesvirus 8 (Kaposi`s sarcoma-associated h
augauuacagagucacaa

SEQ ID NO: 192870 - RNA, 13 nt, Human herpesvirus 8 (Kaposi`s sarcoma-associated h
augcaacaagcaa

SEQ ID NO: 192871 - RNA, 22 nt, Human herpesvirus 8 (Kaposi`s sarcoma-associated h
augagcaugacuuccccgucuc

SEQ ID NO: 192872 - RNA, 16 nt, Human herpesvirus 8 (Kaposi`s sarcoma-associated h
augaggggucugaucc

SEQ ID NO: 192873 - RNA, 17 nt, Human herpesvirus 8 (Kaposi`s sarcoma-associated h
augaggucggauacuua

SEQ ID NO: 192874 - RNA, 14 nt, Human herpesvirus 8 (Kaposi`s sarcoma-associated h
augaggccuaucug

SEQ ID NO: 192875 - RNA, 16 nt, Human herpesvirus 8 (Kaposi`s sarcoma-associated h
augaucguccacggac

SEQ ID NO: 192876 - RNA, 16 nt, Human herpesvirus 8 (Kaposi`s sarcoma-associated h
augauaggcaacauga

SEQ ID NO: 192877 - RNA, 14 nt, Human herpesvirus 8 (Kaposi`s sarcoma-associated h
augagucaggcgug

SEQ ID NO: 192878 - RNA, 20 nt, Human herpesvirus 8 (Kaposi`s sarcoma-associated h
augagucaggcguggucucu

SEQ ID NO: 192879 - RNA, 16 nt, Human herpesvirus 8 (Kaposi`s sarcoma-associated h
augacgauguucagga

SEQ ID NO: 192880 - RNA, 22 nt, Human herpesvirus 8 (Kaposi`s sarcoma-associated h
augacuacugugaaguuuacau

SEQ ID NO: 192881 - RNA, 14 nt, Human herpesvirus 8 (Kaposi`s sarcoma-associated h
augacaacugccac

SEQ ID NO: 192882 - RNA, 19 nt, Human herpesvirus 8 (Kaposi`s sarcoma-associated h
augacaccccucccucgcg

SEQ ID NO: 192883 - RNA, 23 nt, Human herpesvirus 8 (Kaposi`s sarcoma-associated h
augaauaacuuuauuacagguau

SEQ ID NO: 192884 - RNA, 15 nt, Human herpesvirus 8 (Kaposi`s sarcoma-associated h
aucuuguauucucau

SEQ ID NO: 192885 - RNA, 12 nt, Human herpesvirus 8 (Kaposi`s sarcoma-associated h
augaaacauucg

SEQ ID NO: 192886 - RNA, 18 nt, Human herpesvirus 8 (Kaposi`s sarcoma-associated h
augaagugcaaccugcug

SEQ ID NO: 192887 - RNA, 18 nt, Human herpesvirus 8 (Kaposi`s sarcoma-associated h
augaauacccuggaucag

SEQ ID NO: 192888 - RNA, 22 nt, Human herpesvirus 8 (Kaposi`s sarcoma-associated h
accgcuacugugggugcacuga

SEQ ID NO: 192889 - RNA, 13 nt, Human herpesvirus 8 (Kaposi`s sarcoma-associated h
accuacacugcau

SEQ ID NO: 192890 - RNA, 21 nt, Human herpesvirus 8 (Kaposi`s sarcoma-associated h
accgcccuccguuuugcacua

SEQ ID NO: 192891 - RNA, 23 nt, Human herpesvirus 8 (Kaposi`s sarcoma-associated h
accgaccaauacaagacaacuaa

SEQ ID NO: 192892 - RNA, 17 nt, Human herpesvirus 8 (Kaposi`s sarcoma-associated h
accgagcguauucucag

SEQ ID NO: 192893 - RNA, 12 nt, Human herpesvirus 8 (Kaposi`s sarcoma-associated h
accgagugcuuu

SEQ ID NO: 192894 - RNA, 13 nt, Human herpesvirus 8 (Kaposi`s sarcoma-associated h
accgagugcuuua

SEQ ID NO: 192895 - RNA, 14 nt, Human herpesvirus 8 (Kaposi`s sarcoma-associated h
accgaaccaggcaa

SEQ ID NO: 192896 - RNA, 22 nt, Human herpesvirus 8 (Kaposi`s sarcoma-associated h
accgacaccaucucggccauua

SEQ ID NO: 192897 - RNA, 14 nt, Human herpesvirus 8 (Kaposi`s sarcoma-associated h
acccggauuugccc

SEQ ID NO: 192898 - RNA, 17 nt, Human herpesvirus 8 (Kaposi`s sarcoma-associated h
accccuagccggugaaa

SEQ ID NO: 192899 - RNA, 23 nt, Human herpesvirus 8 (Kaposi`s sarcoma-associated h
accccucuggaucuacagauauc

SEQ ID NO: 192900 - RNA, 19 nt, Human herpesvirus 8 (Kaposi`s sarcoma-associated h
accccucuuacuaagagaa

SEQ ID NO: 192901 - RNA, 15 nt, Human herpesvirus 8 (Kaposi`s sarcoma-associated h
accccaugcauucug

SEQ ID NO: 192902 - RNA, 18 nt, Human herpesvirus 8 (Kaposi`s sarcoma-associated h
accccgcgcguaucucuc

SEQ ID NO: 192903 - RNA, 14 nt, Human herpesvirus 8 (Kaposi`s sarcoma-associated h
accacauacagacu

SEQ ID NO: 192904 - RNA, 15 nt, Human herpesvirus 8 (Kaposi`s sarcoma-associated h
accacauacagacug

SEQ ID NO: 192905 - RNA, 21 nt, Human herpesvirus 8 (Kaposi`s sarcoma-associated h
acauuuccacccaccuacuuc

SEQ ID NO: 192906 - RNA, 13 nt, Human herpesvirus 8 (Kaposi`s sarcoma-associated h
acauugugucaac

SEQ ID NO: 192907 - RNA, 18 nt, Human herpesvirus 8 (Kaposi`s sarcoma-associated h
acauugugucaaccaggg

SEQ ID NO: 192908 - RNA, 16 nt, Human herpesvirus 8 (Kaposi`s sarcoma-associated h
accaagccucccguga

SEQ ID NO: 192909 - RNA, 14 nt, Human herpesvirus 8 (Kaposi`s sarcoma-associated h
accaagaucuucca

SEQ ID NO: 192910 - RNA, 14 nt, Human herpesvirus 8 (Kaposi`s sarcoma-associated h
accaagcacaacau

SEQ ID NO: 192911 - RNA, 15 nt, Human herpesvirus 8 (Kaposi`s sarcoma-associated h
acgauggcaaaggaa

SEQ ID NO: 192912 - RNA, 13 nt, Human herpesvirus 8 (Kaposi`s sarcoma-associated h
acgauguacuuga

SEQ ID NO: 192913 - RNA, 14 nt, Human herpesvirus 8 (Kaposi`s sarcoma-associated h
acgauguuuuccag

SEQ ID NO: 192914 - RNA, 15 nt, Human herpesvirus 8 (Kaposi`s sarcoma-associated h
acgauuaaaaaccac

SEQ ID NO: 192915 - RNA, 16 nt, Human herpesvirus 8 (Kaposi`s sarcoma-associated h
acgauuaaaaaccacu

SEQ ID NO: 192916 - RNA, 13 nt, Human herpesvirus 8 (Kaposi`s sarcoma-associated h
acgcggugucaac

SEQ ID NO: 192917 - RNA, 17 nt, Human herpesvirus 8 (Kaposi`s sarcoma-associated h
acgcggugucaaccagg

SEQ ID NO: 192918 - RNA, 14 nt, Human herpesvirus 8 (Kaposi`s sarcoma-associated h
acggcacacuacuc

SEQ ID NO: 192919 - RNA, 15 nt, Human herpesvirus 8 (Kaposi`s sarcoma-associated h
acggcacaggaccca

SEQ ID NO: 192920 - RNA, 20 nt, Human herpesvirus 8 (Kaposi`s sarcoma-associated h
acgcgcgagacuuggcagaa

SEQ ID NO: 192921 - RNA, 14 nt, Human herpesvirus 8 (Kaposi`s sarcoma-associated h
acgacgcaggcguc

SEQ ID NO: 192922 - RNA, 20 nt, Human herpesvirus 8 (Kaposi`s sarcoma-associated h
acgagcgaccagucuuauac

SEQ ID NO: 192923 - RNA, 21 nt, Human herpesvirus 8 (Kaposi`s sarcoma-associated h
acgaaugcucaggucugucac

SEQ ID NO: 192924 - RNA, 14 nt, Human herpesvirus 8 (Kaposi`s sarcoma-associated h
accuggcugcaaag

SEQ ID NO: 192925 - RNA, 22 nt, Human herpesvirus 8 (Kaposi`s sarcoma-associated h
accugucgcuuccauuuuccaa

SEQ ID NO: 192926 - RNA, 13 nt, Human herpesvirus 8 (Kaposi`s sarcoma-associated h
accuuaauuggau

SEQ ID NO: 192927 - RNA, 18 nt, Human herpesvirus 8 (Kaposi`s sarcoma-associated h
accuuaaacacaacacca

SEQ ID NO: 192928 - RNA, 23 nt, Human herpesvirus 8 (Kaposi`s sarcoma-associated h
accuguucuaccagguaggucac

SEQ ID NO: 192929 - RNA, 20 nt, Human herpesvirus 8 (Kaposi`s sarcoma-associated h
acgugcuuuuggugggcuac

SEQ ID NO: 192930 - RNA, 18 nt, Human herpesvirus 8 (Kaposi`s sarcoma-associated h
acguggagccaacaaaca

SEQ ID NO: 192931 - RNA, 19 nt, Human herpesvirus 8 (Kaposi`s sarcoma-associated h
acgugcccagacaccaaag

SEQ ID NO: 192932 - RNA, 15 nt, Human herpesvirus 8 (Kaposi`s sarcoma-associated h
acguucaccgugccu

SEQ ID NO: 192933 - RNA, 14 nt, Human herpesvirus 8 (Kaposi`s sarcoma-associated h
acgucgcucuuuac

SEQ ID NO: 192934 - RNA, 20 nt, Human herpesvirus 8 (Kaposi`s sarcoma-associated h
acgucccucuuggcuguuac

SEQ ID NO: 192935 - RNA, 16 nt, Human herpesvirus 8 (Kaposi`s sarcoma-associated h
acgggaaauccucuau

SEQ ID NO: 192936 - RNA, 12 nt, Human herpesvirus 8 (Kaposi`s sarcoma-associated h
acggcuccgucc

SEQ ID NO: 192937 - RNA, 18 nt, Human herpesvirus 8 (Kaposi`s sarcoma-associated h
acggcuagcguacucucg

SEQ ID NO: 192938 - RNA, 16 nt, Human herpesvirus 8 (Kaposi`s sarcoma-associated h
acuaauauuaaccaua

SEQ ID NO: 192939 - RNA, 10 nt, Human herpesvirus 8 (Kaposi`s sarcoma-associated h
acuacaggua

SEQ ID NO: 192940 - RNA, 13 nt, Human herpesvirus 8 (Kaposi`s sarcoma-associated h
acuacagguauac

SEQ ID NO: 192941 - RNA, 21 nt, Human herpesvirus 8 (Kaposi`s sarcoma-associated h
acuaaagauaccgaccaauac

SEQ ID NO: 192942 - RNA, 16 nt, Human herpesvirus 8 (Kaposi`s sarcoma-associated h
acuaaaagucuggccc

SEQ ID NO: 192943 - RNA, 21 nt, Human herpesvirus 8 (Kaposi`s sarcoma-associated h
acuaaacauuaccaauacuau

SEQ ID NO: 192944 - RNA, 16 nt, Human herpesvirus 8 (Kaposi`s sarcoma-associated h
acuauggggucagggu

SEQ ID NO: 192945 - RNA, 17 nt, Human herpesvirus 8 (Kaposi`s sarcoma-associated h
acuaugggugaccacau

SEQ ID NO: 192946 - RNA, 17 nt, Human herpesvirus 8 (Kaposi`s sarcoma-associated h
acuauccaugucuuucc

SEQ ID NO: 192947 - RNA, 16 nt, Human herpesvirus 8 (Kaposi`s sarcoma-associated h
acucccucacaaugua

SEQ ID NO: 192948 - RNA, 14 nt, Human herpesvirus 8 (Kaposi`s sarcoma-associated h
acuccaagccaguc

SEQ ID NO: 192949 - RNA, 21 nt, Human herpesvirus 8 (Kaposi`s sarcoma-associated h
acuccauucccggucccacau

SEQ ID NO: 192950 - RNA, 17 nt, Human herpesvirus 8 (Kaposi`s sarcoma-associated h
acucgcacaagcgcuga

SEQ ID NO: 192951 - RNA, 19 nt, Human herpesvirus 8 (Kaposi`s sarcoma-associated h
acuccucuucggagaucaa

SEQ ID NO: 192952 - RNA, 23 nt, Human herpesvirus 8 (Kaposi`s sarcoma-associated h
acuccucuucggagaucaaggac

SEQ ID NO: 192953 - RNA, 22 nt, Human herpesvirus 8 (Kaposi`s sarcoma-associated h
acugccgcucggagauugccac

SEQ ID NO: 192954 - RNA, 17 nt, Human herpesvirus 8 (Kaposi`s sarcoma-associated h
acugcagggcgcugcuc

SEQ ID NO: 192955 - RNA, 23 nt, Human herpesvirus 8 (Kaposi`s sarcoma-associated h
acugcagggcgcugcucuuguca

SEQ ID NO: 192956 - RNA, 13 nt, Human herpesvirus 8 (Kaposi`s sarcoma-associated h
acuugaacagggc

SEQ ID NO: 192957 - RNA, 22 nt, Human herpesvirus 8 (Kaposi`s sarcoma-associated h
acuucccagauuaaacaaaaag

SEQ ID NO: 192958 - RNA, 17 nt, Human herpesvirus 8 (Kaposi`s sarcoma-associated h
acuucccaggcaguuua

SEQ ID NO: 192959 - RNA, 19 nt, Human herpesvirus 8 (Kaposi`s sarcoma-associated h
acuuccccgucuccaguca

SEQ ID NO: 192960 - RNA, 18 nt, Human herpesvirus 8 (Kaposi`s sarcoma-associated h
acuucgggggaucuugua

SEQ ID NO: 192961 - RNA, 16 nt, Human herpesvirus 8 (Kaposi`s sarcoma-associated h
acugugggugcacuga

SEQ ID NO: 192962 - RNA, 14 nt, Human herpesvirus 8 (Kaposi`s sarcoma-associated h
acuuaaaaugucuc

SEQ ID NO: 192963 - RNA, 23 nt, Human herpesvirus 8 (Kaposi`s sarcoma-associated h
acuguucuccacguagacgggga

SEQ ID NO: 192964 - RNA, 19 nt, Human herpesvirus 8 (Kaposi`s sarcoma-associated h
acuguuaacccaaugucag

SEQ ID NO: 192965 - RNA, 22 nt, Human herpesvirus 8 (Kaposi`s sarcoma-associated h
acuguuaacccaaugucagggg

SEQ ID NO: 192966 - RNA, 18 nt, Human herpesvirus 8 (Kaposi`s sarcoma-associated h
aaugagggugaguggaac

SEQ ID NO: 192967 - RNA, 17 nt, Human herpesvirus 8 (Kaposi`s sarcoma-associated h
aaugaacgcacaucagc

SEQ ID NO: 192968 - RNA, 18 nt, Human herpesvirus 8 (Kaposi`s sarcoma-associated h
aaugaauguguagguugu

SEQ ID NO: 192969 - RNA, 13 nt, Human herpesvirus 8 (Kaposi`s sarcoma-associated h
acaaaaacacaau

SEQ ID NO: 192970 - RNA, 17 nt, Human herpesvirus 8 (Kaposi`s sarcoma-associated h
acaaacgccccucuugg

SEQ ID NO: 192971 - RNA, 23 nt, Human herpesvirus 8 (Kaposi`s sarcoma-associated h
acaaacgccccucuuggcuguua

SEQ ID NO: 192972 - RNA, 21 nt, Human herpesvirus 8 (Kaposi`s sarcoma-associated h
acaacacgcaccgcaagcagc

SEQ ID NO: 192973 - RNA, 23 nt, Human herpesvirus 8 (Kaposi`s sarcoma-associated h
acaaauuaccguccgcagaucau

SEQ ID NO: 192974 - RNA, 20 nt, Human herpesvirus 8 (Kaposi`s sarcoma-associated h
acaaaugagggugaguggaa

SEQ ID NO: 192975 - RNA, 21 nt, Human herpesvirus 8 (Kaposi`s sarcoma-associated h
acaaaugagggugaguggaac

SEQ ID NO: 192976 - RNA, 16 nt, Human herpesvirus 8 (Kaposi`s sarcoma-associated h
acaaauaauagaucuc

SEQ ID NO: 192977 - RNA, 22 nt, Human herpesvirus 8 (Kaposi`s sarcoma-associated h
acaauacgguguaggcauuuug

SEQ ID NO: 192978 - RNA, 17 nt, Human herpesvirus 8 (Kaposi`s sarcoma-associated h
acaauagggauacuguu

SEQ ID NO: 192979 - RNA, 18 nt, Human herpesvirus 8 (Kaposi`s sarcoma-associated h
acaauaaagccgagccac

SEQ ID NO: 192980 - RNA, 20 nt, Human herpesvirus 8 (Kaposi`s sarcoma-associated h
acaauaaagccgagccacaa

SEQ ID NO: 192981 - RNA, 21 nt, Human herpesvirus 8 (Kaposi`s sarcoma-associated h
acaauaaagccgagccacaaa

SEQ ID NO: 192982 - RNA, 17 nt, Human herpesvirus 8 (Kaposi`s sarcoma-associated h
acaauaaagcugagcca

SEQ ID NO: 192983 - RNA, 20 nt, Human herpesvirus 8 (Kaposi`s sarcoma-associated h
acaauaaagcugagccacaa

SEQ ID NO: 192984 - RNA, 21 nt, Human herpesvirus 8 (Kaposi`s sarcoma-associated h
acaauaaagcugagccacaaa

SEQ ID NO: 192985 - RNA, 21 nt, Human herpesvirus 8 (Kaposi`s sarcoma-associated h
acaagggccaagcuacuggcc

SEQ ID NO: 192986 - RNA, 13 nt, Human herpesvirus 8 (Kaposi`s sarcoma-associated h
acaaggucaauac

SEQ ID NO: 192987 - RNA, 18 nt, Human herpesvirus 8 (Kaposi`s sarcoma-associated h
acaagucccagcaauaaa

SEQ ID NO: 192988 - RNA, 15 nt, Human herpesvirus 8 (Kaposi`s sarcoma-associated h
acaagucuaaggcca

SEQ ID NO: 192989 - RNA, 20 nt, Human herpesvirus 8 (Kaposi`s sarcoma-associated h
acaauaaagauuaacugucu

SEQ ID NO: 192990 - RNA, 23 nt, Human herpesvirus 8 (Kaposi`s sarcoma-associated h
acaaugaguuauuucagcccuua

SEQ ID NO: 192991 - RNA, 17 nt, Human herpesvirus 8 (Kaposi`s sarcoma-associated h
acaaugugucuguggcu

SEQ ID NO: 192992 - RNA, 19 nt, Human herpesvirus 8 (Kaposi`s sarcoma-associated h
acaacuaauauuaaccaua

SEQ ID NO: 192993 - RNA, 21 nt, Human herpesvirus 8 (Kaposi`s sarcoma-associated h
acaacgccaucgugcgccuag

SEQ ID NO: 192994 - RNA, 17 nt, Human herpesvirus 8 (Kaposi`s sarcoma-associated h
acaagaguaugcaggcu

SEQ ID NO: 192995 - RNA, 14 nt, Human herpesvirus 8 (Kaposi`s sarcoma-associated h
acaagacaccaaua

SEQ ID NO: 192996 - RNA, 15 nt, Human herpesvirus 8 (Kaposi`s sarcoma-associated h
acaagacaccaauaa

SEQ ID NO: 192997 - RNA, 18 nt, Human herpesvirus 8 (Kaposi`s sarcoma-associated h
acaaggcgcggacaggca

SEQ ID NO: 192998 - RNA, 21 nt, Human herpesvirus 8 (Kaposi`s sarcoma-associated h
acaagcaaugauagacaugga

SEQ ID NO: 192999 - RNA, 13 nt, Human herpesvirus 8 (Kaposi`s sarcoma-associated h
acacaaaagcaag

SEQ ID NO: 193000 - RNA, 16 nt, Human herpesvirus 8 (Kaposi`s sarcoma-associated h
acaauucugagaaaga

SEQ ID NO: 193001 - RNA, 21 nt, Human herpesvirus 8 (Kaposi`s sarcoma-associated h
acacagaaacucccccaaccu

SEQ ID NO: 193002 - RNA, 13 nt, Human herpesvirus 8 (Kaposi`s sarcoma-associated h
acacauacaaugc

SEQ ID NO: 193003 - RNA, 22 nt, Human herpesvirus 8 (Kaposi`s sarcoma-associated h
acacauuaagagugccacuaaa

SEQ ID NO: 193004 - RNA, 14 nt, Human herpesvirus 8 (Kaposi`s sarcoma-associated h
acaccacgauuaaa

SEQ ID NO: 193005 - RNA, 15 nt, Human herpesvirus 8 (Kaposi`s sarcoma-associated h
acacucuuuaccaca

SEQ ID NO: 193006 - RNA, 11 nt, Human herpesvirus 8 (Kaposi`s sarcoma-associated h
acacuguggau

SEQ ID NO: 193007 - RNA, 22 nt, Human herpesvirus 8 (Kaposi`s sarcoma-associated h
acacuguggauuuuauggacau

SEQ ID NO: 193008 - RNA, 18 nt, Human herpesvirus 8 (Kaposi`s sarcoma-associated h
acacuuaacuguggcuac

SEQ ID NO: 193009 - RNA, 18 nt, Human herpesvirus 8 (Kaposi`s sarcoma-associated h
acacucccucacaaugua

SEQ ID NO: 193010 - RNA, 14 nt, Human herpesvirus 8 (Kaposi`s sarcoma-associated h
acacuccucaaaca

SEQ ID NO: 193011 - RNA, 12 nt, Human herpesvirus 8 (Kaposi`s sarcoma-associated h
acaguaugguuu

SEQ ID NO: 193012 - RNA, 12 nt, Human herpesvirus 8 (Kaposi`s sarcoma-associated h
acaguauucuca

SEQ ID NO: 193013 - RNA, 23 nt, Human herpesvirus 8 (Kaposi`s sarcoma-associated h
acauacgucccucuuggcuguua

SEQ ID NO: 193014 - RNA, 14 nt, Human herpesvirus 8 (Kaposi`s sarcoma-associated h
acauagacaugccc

SEQ ID NO: 193015 - RNA, 18 nt, Human herpesvirus 8 (Kaposi`s sarcoma-associated h
acagguaauuaacaucca

SEQ ID NO: 193016 - RNA, 15 nt, Human herpesvirus 8 (Kaposi`s sarcoma-associated h
acagguauacucaag

SEQ ID NO: 193017 - RNA, 18 nt, Human herpesvirus 8 (Kaposi`s sarcoma-associated h
acagggguaucacuuccu

SEQ ID NO: 193018 - RNA, 13 nt, Human herpesvirus 8 (Kaposi`s sarcoma-associated h
acagggcaugagg

SEQ ID NO: 193019 - RNA, 16 nt, Human herpesvirus 8 (Kaposi`s sarcoma-associated h
acaggggaguagggua

SEQ ID NO: 193020 - RNA, 18 nt, Human herpesvirus 8 (Kaposi`s sarcoma-associated h
acagaugucucccguggc

SEQ ID NO: 193021 - RNA, 20 nt, Human herpesvirus 8 (Kaposi`s sarcoma-associated h
acaucuacgcguaccugaca

SEQ ID NO: 193022 - RNA, 20 nt, Human herpesvirus 8 (Kaposi`s sarcoma-associated h
acaucgcucaaacucaucuc

SEQ ID NO: 193023 - RNA, 19 nt, Human herpesvirus 8 (Kaposi`s sarcoma-associated h
acauucaagagggccaguu

SEQ ID NO: 193024 - RNA, 16 nt, Human herpesvirus 8 (Kaposi`s sarcoma-associated h
acauuaucuuaacuaa

SEQ ID NO: 193025 - RNA, 21 nt, Human herpesvirus 8 (Kaposi`s sarcoma-associated h
acaucuccggacuacauccaa

SEQ ID NO: 193026 - RNA, 18 nt, Human herpesvirus 8 (Kaposi`s sarcoma-associated h
acauauguuaaacacguc

SEQ ID NO: 193027 - RNA, 21 nt, Human herpesvirus 8 (Kaposi`s sarcoma-associated h
acauccccggauuccuccgca

SEQ ID NO: 193028 - RNA, 20 nt, Human herpesvirus 8 (Kaposi`s sarcoma-associated h
agaugauaggcaacaugaca

SEQ ID NO: 193029 - RNA, 14 nt, Human herpesvirus 8 (Kaposi`s sarcoma-associated h
agaugaaugucuca

SEQ ID NO: 193030 - RNA, 22 nt, Human herpesvirus 8 (Kaposi`s sarcoma-associated h
agaugaagaagaaaaugacgau

SEQ ID NO: 193031 - RNA, 14 nt, Human herpesvirus 8 (Kaposi`s sarcoma-associated h
agauggccggguuu

SEQ ID NO: 193032 - RNA, 13 nt, Human herpesvirus 8 (Kaposi`s sarcoma-associated h
agauuauaauggg

SEQ ID NO: 193033 - RNA, 13 nt, Human herpesvirus 8 (Kaposi`s sarcoma-associated h
agauguucuugcc

SEQ ID NO: 193034 - RNA, 14 nt, Human herpesvirus 8 (Kaposi`s sarcoma-associated h
agauguucuugcca

SEQ ID NO: 193035 - RNA, 18 nt, Human herpesvirus 8 (Kaposi`s sarcoma-associated h
agauugguguccagacag

SEQ ID NO: 193036 - RNA, 13 nt, Human herpesvirus 8 (Kaposi`s sarcoma-associated h
agcaaagugucuc

SEQ ID NO: 193037 - RNA, 16 nt, Human herpesvirus 8 (Kaposi`s sarcoma-associated h
agcaaccccucuggau

SEQ ID NO: 193038 - RNA, 15 nt, Human herpesvirus 8 (Kaposi`s sarcoma-associated h
agauuucucuaucua

SEQ ID NO: 193039 - RNA, 12 nt, Human herpesvirus 8 (Kaposi`s sarcoma-associated h
agcaagcacaga

SEQ ID NO: 193040 - RNA, 16 nt, Human herpesvirus 8 (Kaposi`s sarcoma-associated h
agcacacacgaugaag

SEQ ID NO: 193041 - RNA, 18 nt, Human herpesvirus 8 (Kaposi`s sarcoma-associated h
agcacgaagacaugguga

SEQ ID NO: 193042 - RNA, 14 nt, Human herpesvirus 8 (Kaposi`s sarcoma-associated h
agagugucaguaaa

SEQ ID NO: 193043 - RNA, 20 nt, Human herpesvirus 8 (Kaposi`s sarcoma-associated h
agauaauugagcgcugugcu

SEQ ID NO: 193044 - RNA, 22 nt, Human herpesvirus 8 (Kaposi`s sarcoma-associated h
agauaauugagcgcugugcuuu

SEQ ID NO: 193045 - RNA, 12 nt, Human herpesvirus 8 (Kaposi`s sarcoma-associated h
agauagccacau

SEQ ID NO: 193046 - RNA, 16 nt, Human herpesvirus 8 (Kaposi`s sarcoma-associated h
agaucacccagugugc

SEQ ID NO: 193047 - RNA, 18 nt, Human herpesvirus 8 (Kaposi`s sarcoma-associated h
agauauuuuucaacaaca

SEQ ID NO: 193048 - RNA, 14 nt, Human herpesvirus 8 (Kaposi`s sarcoma-associated h
agauaugucugccc

SEQ ID NO: 193049 - RNA, 19 nt, Human herpesvirus 8 (Kaposi`s sarcoma-associated h
agauauugauagccacuau

SEQ ID NO: 193050 - RNA, 16 nt, Human herpesvirus 8 (Kaposi`s sarcoma-associated h
agauauagcgugucuc

SEQ ID NO: 193051 - RNA, 17 nt, Human herpesvirus 8 (Kaposi`s sarcoma-associated h
agauauagcgugucuca

SEQ ID NO: 193052 - RNA, 16 nt, Human herpesvirus 8 (Kaposi`s sarcoma-associated h
agauauaaacauggca

SEQ ID NO: 193053 - RNA, 20 nt, Human herpesvirus 8 (Kaposi`s sarcoma-associated h
agauauaaacauggcacucu

SEQ ID NO: 193054 - RNA, 22 nt, Human herpesvirus 8 (Kaposi`s sarcoma-associated h
acuuugcgugucuagacaauaa

SEQ ID NO: 193055 - RNA, 13 nt, Human herpesvirus 8 (Kaposi`s sarcoma-associated h
acuuucuccguga

SEQ ID NO: 193056 - RNA, 21 nt, Human herpesvirus 8 (Kaposi`s sarcoma-associated h
acuuuuccauugcacucagaa

SEQ ID NO: 193057 - RNA, 19 nt, Human herpesvirus 8 (Kaposi`s sarcoma-associated h
acuuuuuguucuugugaug

SEQ ID NO: 193058 - RNA, 21 nt, Human herpesvirus 8 (Kaposi`s sarcoma-associated h
agagaauaaagccaaccuaug

SEQ ID NO: 193059 - RNA, 15 nt, Human herpesvirus 8 (Kaposi`s sarcoma-associated h
agagaauuagaaaca

SEQ ID NO: 193060 - RNA, 19 nt, Human herpesvirus 8 (Kaposi`s sarcoma-associated h
agagagguaccccaugcau

SEQ ID NO: 193061 - RNA, 23 nt, Human herpesvirus 8 (Kaposi`s sarcoma-associated h
agagccuucacggcacacuacuc

SEQ ID NO: 193062 - RNA, 13 nt, Human herpesvirus 8 (Kaposi`s sarcoma-associated h
agagucauuuccu

SEQ ID NO: 193063 - RNA, 15 nt, Human herpesvirus 8 (Kaposi`s sarcoma-associated h
agaguccaaccuggc

SEQ ID NO: 193064 - RNA, 13 nt, Human herpesvirus 8 (Kaposi`s sarcoma-associated h
agagucugcucua

SEQ ID NO: 193065 - RNA, 14 nt, Human herpesvirus 8 (Kaposi`s sarcoma-associated h
agccucaacgggca

SEQ ID NO: 193066 - RNA, 23 nt, Human herpesvirus 8 (Kaposi`s sarcoma-associated h
agccgggugaggccaauggauuc

SEQ ID NO: 193067 - RNA, 17 nt, Human herpesvirus 8 (Kaposi`s sarcoma-associated h
agccucuguacauggag

SEQ ID NO: 193068 - RNA, 14 nt, Human herpesvirus 8 (Kaposi`s sarcoma-associated h
agccucccuaauag

SEQ ID NO: 193069 - RNA, 19 nt, Human herpesvirus 8 (Kaposi`s sarcoma-associated h
agccuggacgauguacuug

SEQ ID NO: 193070 - RNA, 15 nt, Human herpesvirus 8 (Kaposi`s sarcoma-associated h
agccaucaacgauac

SEQ ID NO: 193071 - RNA, 22 nt, Human herpesvirus 8 (Kaposi`s sarcoma-associated h
agccacauacgucccucuuggc

SEQ ID NO: 193072 - RNA, 22 nt, Human herpesvirus 8 (Kaposi`s sarcoma-associated h
agccacggccaguuauaugcac

SEQ ID NO: 193073 - RNA, 22 nt, Human herpesvirus 8 (Kaposi`s sarcoma-associated h
agccacaaacgccccucuuggc

SEQ ID NO: 193074 - RNA, 23 nt, Human herpesvirus 8 (Kaposi`s sarcoma-associated h
agccacaaacgccccucuuggcu

SEQ ID NO: 193075 - RNA, 15 nt, Human herpesvirus 8 (Kaposi`s sarcoma-associated h
agccaagaaccauaa

SEQ ID NO: 193076 - RNA, 17 nt, Human herpesvirus 8 (Kaposi`s sarcoma-associated h
agcagaguguccaguag

SEQ ID NO: 193077 - RNA, 16 nt, Human herpesvirus 8 (Kaposi`s sarcoma-associated h
agcaggacguccaggc

SEQ ID NO: 193078 - RNA, 11 nt, Human herpesvirus 8 (Kaposi`s sarcoma-associated h
agcagccaugu

SEQ ID NO: 193079 - RNA, 22 nt, Human herpesvirus 8 (Kaposi`s sarcoma-associated h
agcagcgccaguggaucucgga

SEQ ID NO: 193080 - RNA, 22 nt, Human herpesvirus 8 (Kaposi`s sarcoma-associated h
agcauggccuuuuuaagacaaa

SEQ ID NO: 193081 - RNA, 18 nt, Human herpesvirus 8 (Kaposi`s sarcoma-associated h
agcauccuaucgcacaga

SEQ ID NO: 193082 - RNA, 18 nt, Human herpesvirus 8 (Kaposi`s sarcoma-associated h
agcaguguuugcugcugu

SEQ ID NO: 193083 - RNA, 13 nt, Human herpesvirus 8 (Kaposi`s sarcoma-associated h
agcaguccggggu

SEQ ID NO: 193084 - RNA, 18 nt, Human herpesvirus 8 (Kaposi`s sarcoma-associated h
aggaaacuggguguaagc

SEQ ID NO: 193085 - RNA, 16 nt, Human herpesvirus 8 (Kaposi`s sarcoma-associated h
agcgugacacuacuaa

SEQ ID NO: 193086 - RNA, 12 nt, Human herpesvirus 8 (Kaposi`s sarcoma-associated h
agcguauucuca

SEQ ID NO: 193087 - RNA, 16 nt, Human herpesvirus 8 (Kaposi`s sarcoma-associated h
agcggcgaaucugaau

SEQ ID NO: 193088 - RNA, 16 nt, Human herpesvirus 8 (Kaposi`s sarcoma-associated h
aggaguguugguuaca

SEQ ID NO: 193089 - RNA, 20 nt, Human herpesvirus 8 (Kaposi`s sarcoma-associated h
aggaguguugguuacacuaa

SEQ ID NO: 193090 - RNA, 15 nt, Human herpesvirus 8 (Kaposi`s sarcoma-associated h
aggagugggaucucc

SEQ ID NO: 193091 - RNA, 19 nt, Human herpesvirus 8 (Kaposi`s sarcoma-associated h
aggagguugacagaacacc

SEQ ID NO: 193092 - RNA, 16 nt, Human herpesvirus 8 (Kaposi`s sarcoma-associated h
aggaagcaucuggucc

SEQ ID NO: 193093 - RNA, 12 nt, Human herpesvirus 8 (Kaposi`s sarcoma-associated h
aggaagaugaag

SEQ ID NO: 193094 - RNA, 14 nt, Human herpesvirus 8 (Kaposi`s sarcoma-associated h
aggaagagcacugu

SEQ ID NO: 193095 - RNA, 21 nt, Human herpesvirus 8 (Kaposi`s sarcoma-associated h
aggaauuuuacugguguacaa

SEQ ID NO: 193096 - RNA, 20 nt, Human herpesvirus 8 (Kaposi`s sarcoma-associated h
aggaaugcauauggacuguu

SEQ ID NO: 193097 - RNA, 18 nt, Human herpesvirus 8 (Kaposi`s sarcoma-associated h
aggccucauaauaaugau

SEQ ID NO: 193098 - RNA, 13 nt, Human herpesvirus 8 (Kaposi`s sarcoma-associated h
aggcccugggcuu

SEQ ID NO: 193099 - RNA, 16 nt, Human herpesvirus 8 (Kaposi`s sarcoma-associated h
aggcccaugugggcuu

SEQ ID NO: 193100 - RNA, 19 nt, Human herpesvirus 8 (Kaposi`s sarcoma-associated h
aggaugaggaagaugaaga

SEQ ID NO: 193101 - RNA, 19 nt, Human herpesvirus 8 (Kaposi`s sarcoma-associated h
aggaucuguuaacccaugg

SEQ ID NO: 193102 - RNA, 13 nt, Human herpesvirus 8 (Kaposi`s sarcoma-associated h
aggaugugucugc

SEQ ID NO: 193103 - RNA, 21 nt, Human herpesvirus 8 (Kaposi`s sarcoma-associated h
aggaugugucugcguuccaca

SEQ ID NO: 193104 - RNA, 15 nt, Human herpesvirus 8 (Kaposi`s sarcoma-associated h
auaugacuacuguga

SEQ ID NO: 193105 - RNA, 15 nt, Human herpesvirus 8 (Kaposi`s sarcoma-associated h
auaugcugccaagau

SEQ ID NO: 193106 - RNA, 22 nt, Human herpesvirus 8 (Kaposi`s sarcoma-associated h
auaugggcuuguacaugugucu

SEQ ID NO: 193107 - RNA, 16 nt, Human herpesvirus 8 (Kaposi`s sarcoma-associated h
auaugcccaacuucau

SEQ ID NO: 193108 - RNA, 17 nt, Human herpesvirus 8 (Kaposi`s sarcoma-associated h
auauguccuucacuuug

SEQ ID NO: 193109 - RNA, 17 nt, Human herpesvirus 8 (Kaposi`s sarcoma-associated h
auaucguugacaugugg

SEQ ID NO: 193110 - RNA, 12 nt, Human herpesvirus 8 (Kaposi`s sarcoma-associated h
auacccuguuuc

SEQ ID NO: 193111 - RNA, 17 nt, Human herpesvirus 8 (Kaposi`s sarcoma-associated h
auagggauacuguuuau

SEQ ID NO: 193112 - RNA, 13 nt, Human herpesvirus 8 (Kaposi`s sarcoma-associated h
auagggcuuugau

SEQ ID NO: 193113 - RNA, 20 nt, Human herpesvirus 8 (Kaposi`s sarcoma-associated h
auaccgcgccacguaugggc

SEQ ID NO: 193114 - RNA, 15 nt, Human herpesvirus 8 (Kaposi`s sarcoma-associated h
auaguguugagguaa

SEQ ID NO: 193115 - RNA, 17 nt, Human herpesvirus 8 (Kaposi`s sarcoma-associated h
auaaccaugaguuccac

SEQ ID NO: 193116 - RNA, 21 nt, Human herpesvirus 8 (Kaposi`s sarcoma-associated h
auaaccgagcucugcugccug

SEQ ID NO: 193117 - RNA, 19 nt, Human herpesvirus 8 (Kaposi`s sarcoma-associated h
auaacggugucuaacugcc

SEQ ID NO: 193118 - RNA, 14 nt, Human herpesvirus 8 (Kaposi`s sarcoma-associated h
auaacgaguggggu

SEQ ID NO: 193119 - RNA, 11 nt, Human herpesvirus 8 (Kaposi`s sarcoma-associated h
auaagcaccuu

SEQ ID NO: 193120 - RNA, 20 nt, Human herpesvirus 8 (Kaposi`s sarcoma-associated h
auaagccaauugacugugga

SEQ ID NO: 193121 - RNA, 12 nt, Human herpesvirus 8 (Kaposi`s sarcoma-associated h
auaacuuuauua

SEQ ID NO: 193122 - RNA, 19 nt, Human herpesvirus 8 (Kaposi`s sarcoma-associated h
auaagaaauuuuaugucac

SEQ ID NO: 193123 - RNA, 22 nt, Human herpesvirus 8 (Kaposi`s sarcoma-associated h
auacauguguuuuucuugguuu

SEQ ID NO: 193124 - RNA, 12 nt, Human herpesvirus 8 (Kaposi`s sarcoma-associated h
auaaugaaugug

SEQ ID NO: 193125 - RNA, 13 nt, Human herpesvirus 8 (Kaposi`s sarcoma-associated h
auaaugaaugugu

SEQ ID NO: 193126 - RNA, 15 nt, Human herpesvirus 8 (Kaposi`s sarcoma-associated h
auaauggauggcuau

SEQ ID NO: 193127 - RNA, 13 nt, Human herpesvirus 8 (Kaposi`s sarcoma-associated h
auacaaaaacaca

SEQ ID NO: 193128 - RNA, 14 nt, Human herpesvirus 8 (Kaposi`s sarcoma-associated h
auacaaaaacacaa

SEQ ID NO: 193129 - RNA, 17 nt, Human herpesvirus 8 (Kaposi`s sarcoma-associated h
auacaaaaacacaauca

SEQ ID NO: 193130 - RNA, 20 nt, Human herpesvirus 8 (Kaposi`s sarcoma-associated h
aguguggacuuuuaccaguu

SEQ ID NO: 193131 - RNA, 19 nt, Human herpesvirus 8 (Kaposi`s sarcoma-associated h
aguguuuuuugccauggua

SEQ ID NO: 193132 - RNA, 16 nt, Human herpesvirus 8 (Kaposi`s sarcoma-associated h
aguuaaagcugucacu

SEQ ID NO: 193133 - RNA, 19 nt, Human herpesvirus 8 (Kaposi`s sarcoma-associated h
aguuaaucuuuauugucua

SEQ ID NO: 193134 - RNA, 15 nt, Human herpesvirus 8 (Kaposi`s sarcoma-associated h
agugacauacaugag

SEQ ID NO: 193135 - RNA, 16 nt, Human herpesvirus 8 (Kaposi`s sarcoma-associated h
agugucgccagugccu

SEQ ID NO: 193136 - RNA, 13 nt, Human herpesvirus 8 (Kaposi`s sarcoma-associated h
agucuucuuguca

SEQ ID NO: 193137 - RNA, 18 nt, Human herpesvirus 8 (Kaposi`s sarcoma-associated h
agucuuuuuuuccccaac

SEQ ID NO: 193138 - RNA, 12 nt, Human herpesvirus 8 (Kaposi`s sarcoma-associated h
auaaacauggca

SEQ ID NO: 193139 - RNA, 22 nt, Human herpesvirus 8 (Kaposi`s sarcoma-associated h
auaacauuuuguaaugaauaac

SEQ ID NO: 193140 - RNA, 20 nt, Human herpesvirus 8 (Kaposi`s sarcoma-associated h
auaacagcaacauguuuaca

SEQ ID NO: 193141 - RNA, 18 nt, Human herpesvirus 8 (Kaposi`s sarcoma-associated h
aguuggagaaacagugga

SEQ ID NO: 193142 - RNA, 20 nt, Human herpesvirus 8 (Kaposi`s sarcoma-associated h
aguuugagaagcaucuuuag

SEQ ID NO: 193143 - RNA, 19 nt, Human herpesvirus 8 (Kaposi`s sarcoma-associated h
auaaaacgguguucuguca

SEQ ID NO: 193144 - RNA, 21 nt, Human herpesvirus 8 (Kaposi`s sarcoma-associated h
agucguccgacaugugcuuuu

SEQ ID NO: 193145 - RNA, 12 nt, Human herpesvirus 8 (Kaposi`s sarcoma-associated h
agucgccaguuu

SEQ ID NO: 193146 - RNA, 19 nt, Human herpesvirus 8 (Kaposi`s sarcoma-associated h
agucgccgguagcugccug

SEQ ID NO: 193147 - RNA, 19 nt, Human herpesvirus 8 (Kaposi`s sarcoma-associated h
aguccaaauaaaccagaca

SEQ ID NO: 193148 - RNA, 21 nt, Human herpesvirus 8 (Kaposi`s sarcoma-associated h
agucccagcaauaaacccaca

SEQ ID NO: 193149 - RNA, 15 nt, Human herpesvirus 8 (Kaposi`s sarcoma-associated h
agucacaucugugua

SEQ ID NO: 193150 - RNA, 19 nt, Human herpesvirus 8 (Kaposi`s sarcoma-associated h
agucacaucuguguacaaa

SEQ ID NO: 193151 - RNA, 18 nt, Human herpesvirus 8 (Kaposi`s sarcoma-associated h
agucaggggguggacgac

SEQ ID NO: 193152 - RNA, 14 nt, Human herpesvirus 8 (Kaposi`s sarcoma-associated h
agucagugccacaa

SEQ ID NO: 193153 - RNA, 23 nt, Human herpesvirus 8 (Kaposi`s sarcoma-associated h
aguagacgcaggcgccuaugacu

SEQ ID NO: 193154 - RNA, 17 nt, Human herpesvirus 8 (Kaposi`s sarcoma-associated h
aggugucugcgggacaa

SEQ ID NO: 193155 - RNA, 22 nt, Human herpesvirus 8 (Kaposi`s sarcoma-associated h
aggcgcaaacuucggaauuucc

SEQ ID NO: 193156 - RNA, 15 nt, Human herpesvirus 8 (Kaposi`s sarcoma-associated h
aggcgaacuucuagc

SEQ ID NO: 193157 - RNA, 17 nt, Human herpesvirus 8 (Kaposi`s sarcoma-associated h
agguuaggaucuugccc

SEQ ID NO: 193158 - RNA, 13 nt, Human herpesvirus 8 (Kaposi`s sarcoma-associated h
aguacauaagugu

SEQ ID NO: 193159 - RNA, 20 nt, Human herpesvirus 8 (Kaposi`s sarcoma-associated h
aaaaaguuuccguccaccag

SEQ ID NO: 193160 - RNA, 21 nt, Human herpesvirus 8 (Kaposi`s sarcoma-associated h
aaaaauaaagaagcaauuuau

SEQ ID NO: 193161 - RNA, 14 nt, Human herpesvirus 8 (Kaposi`s sarcoma-associated h
aaaaauaaauguga

SEQ ID NO: 193162 - RNA, 19 nt, Human herpesvirus 8 (Kaposi`s sarcoma-associated h
aaaacauuggcuguguaca

SEQ ID NO: 193163 - RNA, 14 nt, Human herpesvirus 8 (Kaposi`s sarcoma-associated h
aaaacguuuuuccc

SEQ ID NO: 193164 - RNA, 20 nt, Human herpesvirus 8 (Kaposi`s sarcoma-associated h
aaaacuaccgucuaccugcc

SEQ ID NO: 193165 - RNA, 13 nt, Human herpesvirus 8 (Kaposi`s sarcoma-associated h
aaaacgaagucuc

SEQ ID NO: 193166 - RNA, 18 nt, Human herpesvirus 8 (Kaposi`s sarcoma-associated h
aaaaccauacuguuugcu

SEQ ID NO: 193167 - RNA, 18 nt, Human herpesvirus 8 (Kaposi`s sarcoma-associated h
aaaaccuuaauuggauau

SEQ ID NO: 193168 - RNA, 14 nt, Human herpesvirus 8 (Kaposi`s sarcoma-associated h
aaaaaggaccuuac

SEQ ID NO: 193169 - RNA, 17 nt, Human herpesvirus 8 (Kaposi`s sarcoma-associated h
aaaaauaaugcagacag

SEQ ID NO: 193170 - RNA, 11 nt, Human herpesvirus 8 (Kaposi`s sarcoma-associated h
aacggacaauu

SEQ ID NO: 193171 - RNA, 15 nt, Human herpesvirus 8 (Kaposi`s sarcoma-associated h
aacgguguucuguca

SEQ ID NO: 193172 - RNA, 22 nt, Human herpesvirus 8 (Kaposi`s sarcoma-associated h
aacguuuuucccagaagcgcac

SEQ ID NO: 193173 - RNA, 14 nt, Human herpesvirus 8 (Kaposi`s sarcoma-associated h
aacuaaccacucau

SEQ ID NO: 193174 - RNA, 18 nt, Human herpesvirus 8 (Kaposi`s sarcoma-associated h
aacuauagcgcucugccc

SEQ ID NO: 193175 - RNA, 17 nt, Human herpesvirus 8 (Kaposi`s sarcoma-associated h
aacuagcagagaccucu

SEQ ID NO: 193176 - RNA, 17 nt, Human herpesvirus 8 (Kaposi`s sarcoma-associated h
aacuaauauuaaccaua

SEQ ID NO: 193177 - RNA, 15 nt, Human herpesvirus 8 (Kaposi`s sarcoma-associated h
aacuaccagccauca

SEQ ID NO: 193178 - RNA, 15 nt, Human herpesvirus 8 (Kaposi`s sarcoma-associated h
aacccacacuggccc

SEQ ID NO: 193179 - RNA, 12 nt, Human herpesvirus 8 (Kaposi`s sarcoma-associated h
aacccacagcau

SEQ ID NO: 193180 - RNA, 15 nt, Human herpesvirus 8 (Kaposi`s sarcoma-associated h
aacccacagcccaua

SEQ ID NO: 193181 - RNA, 22 nt, Human herpesvirus 8 (Kaposi`s sarcoma-associated h
aacccacagcccauaguaugua

SEQ ID NO: 193182 - RNA, 12 nt, Human herpesvirus 8 (Kaposi`s sarcoma-associated h
aaccauacuguu

SEQ ID NO: 193183 - RNA, 17 nt, Human herpesvirus 8 (Kaposi`s sarcoma-associated h
aaccacucauaaaaccu

SEQ ID NO: 193184 - RNA, 23 nt, Human herpesvirus 8 (Kaposi`s sarcoma-associated h
aaccacggcgcuguacagugccu

SEQ ID NO: 193185 - RNA, 15 nt, Human herpesvirus 8 (Kaposi`s sarcoma-associated h
aaccaggccaccauu

SEQ ID NO: 193186 - RNA, 17 nt, Human herpesvirus 8 (Kaposi`s sarcoma-associated h
aaccuccaaacacaggc

SEQ ID NO: 193187 - RNA, 18 nt, Human herpesvirus 8 (Kaposi`s sarcoma-associated h
aaccuguccaugucgcac

SEQ ID NO: 193188 - RNA, 16 nt, Human herpesvirus 8 (Kaposi`s sarcoma-associated h
aaccaccacaguguau

SEQ ID NO: 193189 - RNA, 15 nt, Human herpesvirus 8 (Kaposi`s sarcoma-associated h
aacauuguuuauuuc

SEQ ID NO: 193190 - RNA, 19 nt, Human herpesvirus 8 (Kaposi`s sarcoma-associated h
aacauuuuguaaugaauaa

SEQ ID NO: 193191 - RNA, 21 nt, Human herpesvirus 8 (Kaposi`s sarcoma-associated h
aacauucaagagggccaguuu

SEQ ID NO: 193192 - RNA, 17 nt, Human herpesvirus 8 (Kaposi`s sarcoma-associated h
aacauuaaacacauaca

SEQ ID NO: 193193 - RNA, 20 nt, Human herpesvirus 8 (Kaposi`s sarcoma-associated h
aacauucggugagugucuuc

SEQ ID NO: 193194 - RNA, 9 nt, Human herpesvirus 8 (Kaposi`s sarcoma-associated h
aacaugugg

SEQ ID NO: 193195 - RNA, 19 nt, Human herpesvirus 8 (Kaposi`s sarcoma-associated h
aacaugcccuuuucugaaa

SEQ ID NO: 193196 - RNA, 16 nt, Human herpesvirus 8 (Kaposi`s sarcoma-associated h
aacagacggucuuuag

SEQ ID NO: 193197 - RNA, 16 nt, Human herpesvirus 8 (Kaposi`s sarcoma-associated h
aacacuggacacuaaa

SEQ ID NO: 193198 - RNA, 15 nt, Human herpesvirus 8 (Kaposi`s sarcoma-associated h
aacacuucccaauaa

SEQ ID NO: 193199 - RNA, 18 nt, Human herpesvirus 8 (Kaposi`s sarcoma-associated h
aacacuucccaauaacaa

SEQ ID NO: 193200 - RNA, 20 nt, Human herpesvirus 8 (Kaposi`s sarcoma-associated h
aaauuucuguuuccagugac

SEQ ID NO: 193201 - RNA, 14 nt, Human herpesvirus 8 (Kaposi`s sarcoma-associated h
aaauuggccacugc

SEQ ID NO: 193202 - RNA, 15 nt, Human herpesvirus 8 (Kaposi`s sarcoma-associated h
aaauuuuaacagcca

SEQ ID NO: 193203 - RNA, 15 nt, Human herpesvirus 8 (Kaposi`s sarcoma-associated h
aaagcggauugagug

SEQ ID NO: 193204 - RNA, 20 nt, Human herpesvirus 8 (Kaposi`s sarcoma-associated h
aaagcuggguauaaaggagg

SEQ ID NO: 193205 - RNA, 13 nt, Human herpesvirus 8 (Kaposi`s sarcoma-associated h
aaagcugucacua

SEQ ID NO: 193206 - RNA, 16 nt, Human herpesvirus 8 (Kaposi`s sarcoma-associated h
aaagcugucacuaaua

SEQ ID NO: 193207 - RNA, 17 nt, Human herpesvirus 8 (Kaposi`s sarcoma-associated h
aaagccgagccacaaag

SEQ ID NO: 193208 - RNA, 12 nt, Human herpesvirus 8 (Kaposi`s sarcoma-associated h
aaaggaccuuac

SEQ ID NO: 193209 - RNA, 22 nt, Human herpesvirus 8 (Kaposi`s sarcoma-associated h
aaaggauggaaaacagucugua

SEQ ID NO: 193210 - RNA, 15 nt, Human herpesvirus 8 (Kaposi`s sarcoma-associated h
aaauacaaaaacaca

SEQ ID NO: 193211 - RNA, 16 nt, Human herpesvirus 8 (Kaposi`s sarcoma-associated h
aaauacaaaaacacaa

SEQ ID NO: 193212 - RNA, 20 nt, Human herpesvirus 8 (Kaposi`s sarcoma-associated h
aaagggaaacaauggggggu

SEQ ID NO: 193213 - RNA, 20 nt, Human herpesvirus 8 (Kaposi`s sarcoma-associated h
aaauacguacagaaaaccau

SEQ ID NO: 193214 - RNA, 21 nt, Human herpesvirus 8 (Kaposi`s sarcoma-associated h
aaauacguacagaaaaccaua

SEQ ID NO: 193215 - RNA, 12 nt, Human herpesvirus 8 (Kaposi`s sarcoma-associated h
aaaugaucaugu

SEQ ID NO: 193216 - RNA, 17 nt, Human herpesvirus 8 (Kaposi`s sarcoma-associated h
aaaucuguugaauguga

SEQ ID NO: 193217 - RNA, 19 nt, Human herpesvirus 8 (Kaposi`s sarcoma-associated h
aaauauacaggcauugggc

SEQ ID NO: 193218 - RNA, 18 nt, Human herpesvirus 8 (Kaposi`s sarcoma-associated h
aaauugccaccucuguca

SEQ ID NO: 193219 - RNA, 14 nt, Human herpesvirus 8 (Kaposi`s sarcoma-associated h
aaagagggauccca

SEQ ID NO: 193220 - RNA, 15 nt, Human herpesvirus 8 (Kaposi`s sarcoma-associated h
aaagauggguccgua

SEQ ID NO: 193221 - RNA, 20 nt, Human herpesvirus 8 (Kaposi`s sarcoma-associated h
aaagaugguaucacaauaaa

SEQ ID NO: 193222 - RNA, 13 nt, Human herpesvirus 8 (Kaposi`s sarcoma-associated h
aaagagugucagu

SEQ ID NO: 193223 - RNA, 14 nt, Human herpesvirus 8 (Kaposi`s sarcoma-associated h
aaagacacaugaga

SEQ ID NO: 193224 - RNA, 16 nt, Human herpesvirus 8 (Kaposi`s sarcoma-associated h
aaagaauggugucaau

SEQ ID NO: 193225 - RNA, 17 nt, Human herpesvirus 8 (Kaposi`s sarcoma-associated h
aaacuggccgcauuugg

SEQ ID NO: 193226 - RNA, 22 nt, Human herpesvirus 8 (Kaposi`s sarcoma-associated h
aaacuuuuccauugcacucaga

SEQ ID NO: 193227 - RNA, 23 nt, Human herpesvirus 8 (Kaposi`s sarcoma-associated h
aaaaugggccaugacaacugcca

SEQ ID NO: 193228 - RNA, 21 nt, Human herpesvirus 8 (Kaposi`s sarcoma-associated h
aaaaucuguugaaugugauca

SEQ ID NO: 193229 - RNA, 15 nt, Human herpesvirus 8 (Kaposi`s sarcoma-associated h
aaaaucgaagccagg

SEQ ID NO: 193230 - RNA, 17 nt, Human herpesvirus 8 (Kaposi`s sarcoma-associated h
aaaagagacacuaucuc

SEQ ID NO: 193231 - RNA, 13 nt, Human herpesvirus 8 (Kaposi`s sarcoma-associated h
aaaagcauugucu

SEQ ID NO: 193232 - RNA, 15 nt, Human herpesvirus 8 (Kaposi`s sarcoma-associated h
aaaaggacauuguau

SEQ ID NO: 193233 - RNA, 20 nt, Human herpesvirus 8 (Kaposi`s sarcoma-associated h
aaaauagggagcguacugcc

SEQ ID NO: 193234 - RNA, 15 nt, Human herpesvirus 8 (Kaposi`s sarcoma-associated h
aaugccacauuuccc

SEQ ID NO: 193235 - RNA, 23 nt, Human herpesvirus 8 (Kaposi`s sarcoma-associated h
aaugagucaggcguggucucuuc

SEQ ID NO: 193236 - RNA, 14 nt, Human herpesvirus 8 (Kaposi`s sarcoma-associated h
aaugcggccaguuu

SEQ ID NO: 193237 - RNA, 20 nt, Human herpesvirus 8 (Kaposi`s sarcoma-associated h
aaugguagaggggguggaaa

SEQ ID NO: 193238 - RNA, 19 nt, Human herpesvirus 8 (Kaposi`s sarcoma-associated h
aaugguggacggcuccguc

SEQ ID NO: 193239 - RNA, 14 nt, Human herpesvirus 8 (Kaposi`s sarcoma-associated h
aauggcguccgcuc

SEQ ID NO: 193240 - RNA, 18 nt, Human herpesvirus 8 (Kaposi`s sarcoma-associated h
aauggauguugggugcca

SEQ ID NO: 193241 - RNA, 19 nt, Human herpesvirus 8 (Kaposi`s sarcoma-associated h
aaugcuuccaauugaagga

SEQ ID NO: 193242 - RNA, 19 nt, Human herpesvirus 8 (Kaposi`s sarcoma-associated h
aaugcucaggucugucacu

SEQ ID NO: 193243 - RNA, 20 nt, Human herpesvirus 8 (Kaposi`s sarcoma-associated h
aaugcucaggucugucacua

SEQ ID NO: 193244 - RNA, 23 nt, Human herpesvirus 8 (Kaposi`s sarcoma-associated h
aaugcucaggucugucacuagaa

SEQ ID NO: 193245 - RNA, 14 nt, Human herpesvirus 8 (Kaposi`s sarcoma-associated h
aaucgcaccuuaaa

SEQ ID NO: 193246 - RNA, 13 nt, Human herpesvirus 8 (Kaposi`s sarcoma-associated h
aauccuuacuugg

SEQ ID NO: 193247 - RNA, 14 nt, Human herpesvirus 8 (Kaposi`s sarcoma-associated h
aauccuuacuuggu

SEQ ID NO: 193248 - RNA, 22 nt, Human herpesvirus 8 (Kaposi`s sarcoma-associated h
aaucuaaauauucucuauaaca

SEQ ID NO: 193249 - RNA, 19 nt, Human herpesvirus 8 (Kaposi`s sarcoma-associated h
aauagcgcugucauucucc

SEQ ID NO: 193250 - RNA, 14 nt, Human herpesvirus 8 (Kaposi`s sarcoma-associated h
acaaaaacacaauc

SEQ ID NO: 193251 - RNA, 21 nt, Human herpesvirus 8 (Kaposi`s sarcoma-associated h
aauuuuccuuuguuuuuccac

SEQ ID NO: 193252 - RNA, 18 nt, Human herpesvirus 8 (Kaposi`s sarcoma-associated h
aauuggauauagacuuaa

SEQ ID NO: 193253 - RNA, 14 nt, Human herpesvirus 8 (Kaposi`s sarcoma-associated h
aauguacugccaug

SEQ ID NO: 193254 - RNA, 15 nt, Human herpesvirus 8 (Kaposi`s sarcoma-associated h
aauguacugccauga

SEQ ID NO: 193255 - RNA, 17 nt, Human herpesvirus 8 (Kaposi`s sarcoma-associated h
aauuacgcguuaucucc

SEQ ID NO: 193256 - RNA, 22 nt, Human herpesvirus 8 (Kaposi`s sarcoma-associated h
aaugugccgcgcaucaaccagc

SEQ ID NO: 193257 - RNA, 14 nt, Human herpesvirus 8 (Kaposi`s sarcoma-associated h
aaugugccuaucaa

SEQ ID NO: 193258 - RNA, 16 nt, Human herpesvirus 8 (Kaposi`s sarcoma-associated h
aagucucuuggacaag

SEQ ID NO: 193259 - RNA, 16 nt, Human herpesvirus 8 (Kaposi`s sarcoma-associated h
aaguggaguuaaccua

SEQ ID NO: 193260 - RNA, 16 nt, Human herpesvirus 8 (Kaposi`s sarcoma-associated h
aauacaagacaacuaa

SEQ ID NO: 193261 - RNA, 19 nt, Human herpesvirus 8 (Kaposi`s sarcoma-associated h
aauacgguguaggcauuuu

SEQ ID NO: 193262 - RNA, 23 nt, Human herpesvirus 8 (Kaposi`s sarcoma-associated h
aaggaagcgcagcuuaccgcuac

SEQ ID NO: 193263 - RNA, 20 nt, Human herpesvirus 8 (Kaposi`s sarcoma-associated h
aaggauggaaaacagucugu

SEQ ID NO: 193264 - RNA, 19 nt, Human herpesvirus 8 (Kaposi`s sarcoma-associated h
aaggaggagggcagguuaa

SEQ ID NO: 193265 - RNA, 18 nt, Human herpesvirus 8 (Kaposi`s sarcoma-associated h
aagucaugggaccgugug

SEQ ID NO: 193266 - RNA, 12 nt, Human herpesvirus 8 (Kaposi`s sarcoma-associated h
aagucauuaaac

SEQ ID NO: 193267 - RNA, 13 nt, Human herpesvirus 8 (Kaposi`s sarcoma-associated h
aagucuucuuguc

SEQ ID NO: 193268 - RNA, 17 nt, Human herpesvirus 8 (Kaposi`s sarcoma-associated h
aagucuucuugucacuc

SEQ ID NO: 193269 - RNA, 17 nt, Human herpesvirus 8 (Kaposi`s sarcoma-associated h
aagucccgaugccacug

SEQ ID NO: 193270 - RNA, 21 nt, Human herpesvirus 8 (Kaposi`s sarcoma-associated h
aagcgcaccacagaaacgccu

SEQ ID NO: 193271 - RNA, 19 nt, Human herpesvirus 8 (Kaposi`s sarcoma-associated h
aagcgcugacgaaagcuau

SEQ ID NO: 193272 - RNA, 15 nt, Human herpesvirus 8 (Kaposi`s sarcoma-associated h
aagcgccaagccauu

SEQ ID NO: 193273 - RNA, 21 nt, Human herpesvirus 8 (Kaposi`s sarcoma-associated h
aagcauguugcgcacaucagc

SEQ ID NO: 193274 - RNA, 15 nt, Human herpesvirus 8 (Kaposi`s sarcoma-associated h
aagcauugucuuaag

SEQ ID NO: 193275 - RNA, 15 nt, Human herpesvirus 8 (Kaposi`s sarcoma-associated h
aagcugucacuaaua

SEQ ID NO: 193276 - RNA, 17 nt, Human herpesvirus 8 (Kaposi`s sarcoma-associated h
aagcuugagcuuuucaa

SEQ ID NO: 193277 - RNA, 15 nt, Human herpesvirus 8 (Kaposi`s sarcoma-associated h
aagcaguuucaggac

SEQ ID NO: 193278 - RNA, 15 nt, Human herpesvirus 8 (Kaposi`s sarcoma-associated h
aagaagcgcacccag

SEQ ID NO: 193279 - RNA, 21 nt, Human herpesvirus 8 (Kaposi`s sarcoma-associated h
aacuugcucuuuucaaccucg

SEQ ID NO: 193280 - RNA, 18 nt, Human herpesvirus 8 (Kaposi`s sarcoma-associated h
accuacacccucacgugu

SEQ ID NO: 193281 - RNA, 17 nt, Human herpesvirus 8 (Kaposi`s sarcoma-associated h
accuacacugcauucua

SEQ ID NO: 193282 - RNA, 16 nt, Human herpesvirus 8 (Kaposi`s sarcoma-associated h
acccuaauacauaaca

SEQ ID NO: 193283 - RNA, 23 nt, Human herpesvirus 8 (Kaposi`s sarcoma-associated h
acccucccccaccgagugcuuua

SEQ ID NO: 193284 - RNA, 21 nt, Human herpesvirus 8 (Kaposi`s sarcoma-associated h
acccucacuauauaaaacaga

SEQ ID NO: 193285 - RNA, 13 nt, Human herpesvirus 8 (Kaposi`s sarcoma-associated h
acccucacuucuc

SEQ ID NO: 193286 - RNA, 22 nt, Human herpesvirus 8 (Kaposi`s sarcoma-associated h
acccuggggacugucauccugu

SEQ ID NO: 193287 - RNA, 19 nt, Human herpesvirus 8 (Kaposi`s sarcoma-associated h
acccugauuagcacuguau

SEQ ID NO: 193288 - RNA, 22 nt, Human herpesvirus 8 (Kaposi`s sarcoma-associated h
acccugagcugguaaccagcua

SEQ ID NO: 193289 - RNA, 19 nt, Human herpesvirus 8 (Kaposi`s sarcoma-associated h
acccuuucauuagugacau

SEQ ID NO: 193290 - RNA, 22 nt, Human herpesvirus 8 (Kaposi`s sarcoma-associated h
acccuuucauuagugacauaca

SEQ ID NO: 193291 - RNA, 18 nt, Human herpesvirus 8 (Kaposi`s sarcoma-associated h
accugaccugaccagaca

SEQ ID NO: 193292 - RNA, 13 nt, Human herpesvirus 8 (Kaposi`s sarcoma-associated h
accugcaaacuuu

SEQ ID NO: 193293 - RNA, 15 nt, Human herpesvirus 8 (Kaposi`s sarcoma-associated h
accuuaaacacaaca

SEQ ID NO: 193294 - RNA, 22 nt, Human herpesvirus 8 (Kaposi`s sarcoma-associated h
acgaaugcucaggucugucacu

SEQ ID NO: 193295 - RNA, 21 nt, Human herpesvirus 8 (Kaposi`s sarcoma-associated h
accuuaacacuucccaauaac

SEQ ID NO: 193296 - RNA, 24 nt, Human herpesvirus 8 (Kaposi`s sarcoma-associated h
accuggugaggaagcaucuggucc

SEQ ID NO: 193297 - RNA, 16 nt, Human herpesvirus 8 (Kaposi`s sarcoma-associated h
acgaccgggaucuguu

SEQ ID NO: 193298 - RNA, 23 nt, Human herpesvirus 8 (Kaposi`s sarcoma-associated h
acgaccgggaucuguuacuggca

SEQ ID NO: 193299 - RNA, 19 nt, Human herpesvirus 8 (Kaposi`s sarcoma-associated h
acgacauuucgccaauuau

SEQ ID NO: 193300 - RNA, 18 nt, Human herpesvirus 8 (Kaposi`s sarcoma-associated h
acgacugggccaccaaga

SEQ ID NO: 193301 - RNA, 23 nt, Human herpesvirus 8 (Kaposi`s sarcoma-associated h
acgcagacccggcaacacuggac

SEQ ID NO: 193302 - RNA, 15 nt, Human herpesvirus 8 (Kaposi`s sarcoma-associated h
acgcaggcgccuaug

SEQ ID NO: 193303 - RNA, 22 nt, Human herpesvirus 8 (Kaposi`s sarcoma-associated h
acauucguaagaggacccaggg

SEQ ID NO: 193304 - RNA, 22 nt, Human herpesvirus 8 (Kaposi`s sarcoma-associated h
accacagagaucacggccgugu

SEQ ID NO: 193305 - RNA, 23 nt, Human herpesvirus 8 (Kaposi`s sarcoma-associated h
accacccuauuggucacaucuca

SEQ ID NO: 193306 - RNA, 17 nt, Human herpesvirus 8 (Kaposi`s sarcoma-associated h
accacgccacaacccaa

SEQ ID NO: 193307 - RNA, 20 nt, Human herpesvirus 8 (Kaposi`s sarcoma-associated h
accacggcgcuguacagugc

SEQ ID NO: 193308 - RNA, 17 nt, Human herpesvirus 8 (Kaposi`s sarcoma-associated h
accacuauccaugucuu

SEQ ID NO: 193309 - RNA, 16 nt, Human herpesvirus 8 (Kaposi`s sarcoma-associated h
accccgauaugcaccu

SEQ ID NO: 193310 - RNA, 18 nt, Human herpesvirus 8 (Kaposi`s sarcoma-associated h
acccguggcucauaacac

SEQ ID NO: 193311 - RNA, 13 nt, Human herpesvirus 8 (Kaposi`s sarcoma-associated h
acccguaccacaa

SEQ ID NO: 193312 - RNA, 23 nt, Human herpesvirus 8 (Kaposi`s sarcoma-associated h
accccuagccggugaaacagaua

SEQ ID NO: 193313 - RNA, 14 nt, Human herpesvirus 8 (Kaposi`s sarcoma-associated h
acccaucuaccuca

SEQ ID NO: 193314 - RNA, 17 nt, Human herpesvirus 8 (Kaposi`s sarcoma-associated h
accauggcaaaaaacac

SEQ ID NO: 193315 - RNA, 15 nt, Human herpesvirus 8 (Kaposi`s sarcoma-associated h
acagauucuacuuaa

SEQ ID NO: 193316 - RNA, 13 nt, Human herpesvirus 8 (Kaposi`s sarcoma-associated h
acaggaagcgaaa

SEQ ID NO: 193317 - RNA, 15 nt, Human herpesvirus 8 (Kaposi`s sarcoma-associated h
acagauuguggcauu

SEQ ID NO: 193318 - RNA, 20 nt, Human herpesvirus 8 (Kaposi`s sarcoma-associated h
acagagucuacgugccagug

SEQ ID NO: 193319 - RNA, 16 nt, Human herpesvirus 8 (Kaposi`s sarcoma-associated h
acaggcgcguauggga

SEQ ID NO: 193320 - RNA, 22 nt, Human herpesvirus 8 (Kaposi`s sarcoma-associated h
acagguaauuaacauccacagg

SEQ ID NO: 193321 - RNA, 17 nt, Human herpesvirus 8 (Kaposi`s sarcoma-associated h
acagggacgcauaucac

SEQ ID NO: 193322 - RNA, 20 nt, Human herpesvirus 8 (Kaposi`s sarcoma-associated h
acaggacaagcugauguggu

SEQ ID NO: 193323 - RNA, 23 nt, Human herpesvirus 8 (Kaposi`s sarcoma-associated h
acauaacacacacaaagacauag

SEQ ID NO: 193324 - RNA, 15 nt, Human herpesvirus 8 (Kaposi`s sarcoma-associated h
acauaaggaacagau

SEQ ID NO: 193325 - RNA, 13 nt, Human herpesvirus 8 (Kaposi`s sarcoma-associated h
acauaccuacuaa

SEQ ID NO: 193326 - RNA, 17 nt, Human herpesvirus 8 (Kaposi`s sarcoma-associated h
acauacgucccucuugg

SEQ ID NO: 193327 - RNA, 18 nt, Human herpesvirus 8 (Kaposi`s sarcoma-associated h
acauacgucccucuuggc

SEQ ID NO: 193328 - RNA, 14 nt, Human herpesvirus 8 (Kaposi`s sarcoma-associated h
acauccgcugccac

SEQ ID NO: 193329 - RNA, 14 nt, Human herpesvirus 8 (Kaposi`s sarcoma-associated h
acaucgucaucucu

SEQ ID NO: 193330 - RNA, 16 nt, Human herpesvirus 8 (Kaposi`s sarcoma-associated h
acaucgucaucucuaa

SEQ ID NO: 193331 - RNA, 18 nt, Human herpesvirus 8 (Kaposi`s sarcoma-associated h
acauuaaaaggacauugu

SEQ ID NO: 193332 - RNA, 19 nt, Human herpesvirus 8 (Kaposi`s sarcoma-associated h
acauuaaaaggacauugua

SEQ ID NO: 193333 - RNA, 20 nt, Human herpesvirus 8 (Kaposi`s sarcoma-associated h
acacuggaagacgagcaauu

SEQ ID NO: 193334 - RNA, 22 nt, Human herpesvirus 8 (Kaposi`s sarcoma-associated h
acacuggaagacgagcaauugu

SEQ ID NO: 193335 - RNA, 15 nt, Human herpesvirus 8 (Kaposi`s sarcoma-associated h
acacuggacacuaaa

SEQ ID NO: 193336 - RNA, 22 nt, Human herpesvirus 8 (Kaposi`s sarcoma-associated h
acacuggcccaauuaauuggag

SEQ ID NO: 193337 - RNA, 20 nt, Human herpesvirus 8 (Kaposi`s sarcoma-associated h
acacuacucccccuccucag

SEQ ID NO: 193338 - RNA, 23 nt, Human herpesvirus 8 (Kaposi`s sarcoma-associated h
acagaaaggucaccuggcccaaa

SEQ ID NO: 193339 - RNA, 11 nt, Human herpesvirus 8 (Kaposi`s sarcoma-associated h
acacuucccaa

SEQ ID NO: 193340 - RNA, 19 nt, Human herpesvirus 8 (Kaposi`s sarcoma-associated h
acacuuuuuguucuuguga

SEQ ID NO: 193341 - RNA, 22 nt, Human herpesvirus 8 (Kaposi`s sarcoma-associated h
acacggaguuggcuacgugcuu

SEQ ID NO: 193342 - RNA, 15 nt, Human herpesvirus 8 (Kaposi`s sarcoma-associated h
acaccaucucggcca

SEQ ID NO: 193343 - RNA, 18 nt, Human herpesvirus 8 (Kaposi`s sarcoma-associated h
acaagacaguugugaucu

SEQ ID NO: 193344 - RNA, 16 nt, Human herpesvirus 8 (Kaposi`s sarcoma-associated h
acaagacaccaauaac

SEQ ID NO: 193345 - RNA, 21 nt, Human herpesvirus 8 (Kaposi`s sarcoma-associated h
acaagacaccaauaacgaagg

SEQ ID NO: 193346 - RNA, 14 nt, Human herpesvirus 8 (Kaposi`s sarcoma-associated h
acaaaugguccggg

SEQ ID NO: 193347 - RNA, 23 nt, Human herpesvirus 8 (Kaposi`s sarcoma-associated h
acaacuuguccggagcugccuag

SEQ ID NO: 193348 - RNA, 17 nt, Human herpesvirus 8 (Kaposi`s sarcoma-associated h
acaacugccacaaguaa

SEQ ID NO: 193349 - RNA, 22 nt, Human herpesvirus 8 (Kaposi`s sarcoma-associated h
acguguccacggaguccauggc

SEQ ID NO: 193350 - RNA, 15 nt, Human herpesvirus 8 (Kaposi`s sarcoma-associated h
acguguccugccagg

SEQ ID NO: 193351 - RNA, 18 nt, Human herpesvirus 8 (Kaposi`s sarcoma-associated h
acuaaacauuaccaauac

SEQ ID NO: 193352 - RNA, 21 nt, Human herpesvirus 8 (Kaposi`s sarcoma-associated h
acgcauauacagguaaaacgg

SEQ ID NO: 193353 - RNA, 16 nt, Human herpesvirus 8 (Kaposi`s sarcoma-associated h
acgccaacccucagug

SEQ ID NO: 193354 - RNA, 22 nt, Human herpesvirus 8 (Kaposi`s sarcoma-associated h
acgccccucuuggcuguuacaa

SEQ ID NO: 193355 - RNA, 12 nt, Human herpesvirus 8 (Kaposi`s sarcoma-associated h
acgccccuggug

SEQ ID NO: 193356 - RNA, 17 nt, Human herpesvirus 8 (Kaposi`s sarcoma-associated h
acguggugcugccuagg

SEQ ID NO: 193357 - RNA, 19 nt, Human herpesvirus 8 (Kaposi`s sarcoma-associated h
acgccgucgcggaccucaa

SEQ ID NO: 193358 - RNA, 15 nt, Human herpesvirus 8 (Kaposi`s sarcoma-associated h
acgccugcaccucua

SEQ ID NO: 193359 - RNA, 18 nt, Human herpesvirus 8 (Kaposi`s sarcoma-associated h
acuaauguaaccuaaaaa

SEQ ID NO: 193360 - RNA, 22 nt, Human herpesvirus 8 (Kaposi`s sarcoma-associated h
acuaauauacuuugcgugucua

SEQ ID NO: 193361 - RNA, 17 nt, Human herpesvirus 8 (Kaposi`s sarcoma-associated h
acuaauauuaaccauag

SEQ ID NO: 193362 - RNA, 22 nt, Human herpesvirus 8 (Kaposi`s sarcoma-associated h
acuaauauuaaccauagugugc

SEQ ID NO: 193363 - RNA, 20 nt, Human herpesvirus 8 (Kaposi`s sarcoma-associated h
acuaccggagugccggcugg

SEQ ID NO: 193364 - RNA, 15 nt, Human herpesvirus 8 (Kaposi`s sarcoma-associated h
acuaccgacugugcc

SEQ ID NO: 193365 - RNA, 21 nt, Human herpesvirus 8 (Kaposi`s sarcoma-associated h
acuacauccaaauuaugcagu

SEQ ID NO: 193366 - RNA, 17 nt, Human herpesvirus 8 (Kaposi`s sarcoma-associated h
acuacagguauacucaa

SEQ ID NO: 193367 - RNA, 18 nt, Human herpesvirus 8 (Kaposi`s sarcoma-associated h
acuacucccccuccucag

SEQ ID NO: 193368 - RNA, 18 nt, Human herpesvirus 8 (Kaposi`s sarcoma-associated h
acuacuaauguaaccuaa

SEQ ID NO: 193369 - RNA, 12 nt, Human herpesvirus 8 (Kaposi`s sarcoma-associated h
acuacugugaag

SEQ ID NO: 193370 - RNA, 18 nt, Human herpesvirus 8 (Kaposi`s sarcoma-associated h
acuacugugaaguuuaca

SEQ ID NO: 193371 - RNA, 19 nt, Human herpesvirus 8 (Kaposi`s sarcoma-associated h
acuagcagaaaacugucuc

SEQ ID NO: 193372 - RNA, 20 nt, Human herpesvirus 8 (Kaposi`s sarcoma-associated h
acuaggaggaagagcacugu

SEQ ID NO: 193373 - RNA, 14 nt, Human herpesvirus 8 (Kaposi`s sarcoma-associated h
acuauaaacagccu

SEQ ID NO: 193374 - RNA, 23 nt, Human herpesvirus 8 (Kaposi`s sarcoma-associated h
acucauaaaaccuccaaacacag

SEQ ID NO: 193375 - RNA, 19 nt, Human herpesvirus 8 (Kaposi`s sarcoma-associated h
acucguugcacacagacac

SEQ ID NO: 193376 - RNA, 19 nt, Human herpesvirus 8 (Kaposi`s sarcoma-associated h
acucgucuacccugccacu

SEQ ID NO: 193377 - RNA, 15 nt, Human herpesvirus 8 (Kaposi`s sarcoma-associated h
acuauuugugaaaca

SEQ ID NO: 193378 - RNA, 22 nt, Human herpesvirus 8 (Kaposi`s sarcoma-associated h
acuauuugugaaacaauaauga

SEQ ID NO: 193379 - RNA, 18 nt, Human herpesvirus 8 (Kaposi`s sarcoma-associated h
acuggcaccuaaguggau

SEQ ID NO: 193380 - RNA, 15 nt, Human herpesvirus 8 (Kaposi`s sarcoma-associated h
acugcuguuaccuua

SEQ ID NO: 193381 - RNA, 14 nt, Human herpesvirus 8 (Kaposi`s sarcoma-associated h
acugcauugguucc

SEQ ID NO: 193382 - RNA, 16 nt, Human herpesvirus 8 (Kaposi`s sarcoma-associated h
acugccacaaguaagu

SEQ ID NO: 193383 - RNA, 16 nt, Human herpesvirus 8 (Kaposi`s sarcoma-associated h
acugcaugcucggcaa

SEQ ID NO: 193384 - RNA, 16 nt, Human herpesvirus 8 (Kaposi`s sarcoma-associated h
agaaauuuuaugucac

SEQ ID NO: 193385 - RNA, 22 nt, Human herpesvirus 8 (Kaposi`s sarcoma-associated h
agaagagaccacgccugacuca

SEQ ID NO: 193386 - RNA, 12 nt, Human herpesvirus 8 (Kaposi`s sarcoma-associated h
agaagacccaga

SEQ ID NO: 193387 - RNA, 18 nt, Human herpesvirus 8 (Kaposi`s sarcoma-associated h
agaagaccgcguccucca

SEQ ID NO: 193388 - RNA, 18 nt, Human herpesvirus 8 (Kaposi`s sarcoma-associated h
agaaaggugacuuaucua

SEQ ID NO: 193389 - RNA, 17 nt, Human herpesvirus 8 (Kaposi`s sarcoma-associated h
agaaauccgagcaccuc

SEQ ID NO: 193390 - RNA, 16 nt, Human herpesvirus 8 (Kaposi`s sarcoma-associated h
agaagcgcaccacaga

SEQ ID NO: 193391 - RNA, 14 nt, Human herpesvirus 8 (Kaposi`s sarcoma-associated h
agaauacagugcua

SEQ ID NO: 193392 - RNA, 18 nt, Human herpesvirus 8 (Kaposi`s sarcoma-associated h
acuucccaggcaguuuau

SEQ ID NO: 193393 - RNA, 20 nt, Human herpesvirus 8 (Kaposi`s sarcoma-associated h
acuucagccgcuugcugaua

SEQ ID NO: 193394 - RNA, 16 nt, Human herpesvirus 8 (Kaposi`s sarcoma-associated h
acuucauuguucucca

SEQ ID NO: 193395 - RNA, 20 nt, Human herpesvirus 8 (Kaposi`s sarcoma-associated h
acuucauuguucuccaggug

SEQ ID NO: 193396 - RNA, 18 nt, Human herpesvirus 8 (Kaposi`s sarcoma-associated h
acuuauaacaucaccaag

SEQ ID NO: 193397 - RNA, 17 nt, Human herpesvirus 8 (Kaposi`s sarcoma-associated h
acugucgagacauguca

SEQ ID NO: 193398 - RNA, 16 nt, Human herpesvirus 8 (Kaposi`s sarcoma-associated h
acuuuuucguggaccg

SEQ ID NO: 193399 - RNA, 23 nt, Human herpesvirus 8 (Kaposi`s sarcoma-associated h
agaaaaggaugcacaacuauguu

SEQ ID NO: 193400 - RNA, 16 nt, Human herpesvirus 8 (Kaposi`s sarcoma-associated h
agaaaaccauacuguu

SEQ ID NO: 193401 - RNA, 22 nt, Human herpesvirus 8 (Kaposi`s sarcoma-associated h
agaaaaccauacuguuugcuua

SEQ ID NO: 193402 - RNA, 20 nt, Human herpesvirus 8 (Kaposi`s sarcoma-associated h
agaccauuauaggugucaag

SEQ ID NO: 193403 - RNA, 20 nt, Human herpesvirus 8 (Kaposi`s sarcoma-associated h
agacauagugacuguagaca

SEQ ID NO: 193404 - RNA, 21 nt, Human herpesvirus 8 (Kaposi`s sarcoma-associated h
agacauggugacccacauaga

SEQ ID NO: 193405 - RNA, 14 nt, Human herpesvirus 8 (Kaposi`s sarcoma-associated h
agaauggugucaau

SEQ ID NO: 193406 - RNA, 16 nt, Human herpesvirus 8 (Kaposi`s sarcoma-associated h
agaaugcgugcuucug

SEQ ID NO: 193407 - RNA, 14 nt, Human herpesvirus 8 (Kaposi`s sarcoma-associated h
agaccguacauccu

SEQ ID NO: 193408 - RNA, 15 nt, Human herpesvirus 8 (Kaposi`s sarcoma-associated h
agacgccuuccucag

SEQ ID NO: 193409 - RNA, 19 nt, Human herpesvirus 8 (Kaposi`s sarcoma-associated h
agacgcaggcgccuaugac

SEQ ID NO: 193410 - RNA, 17 nt, Human herpesvirus 8 (Kaposi`s sarcoma-associated h
agacggggagcugugug

SEQ ID NO: 193411 - RNA, 22 nt, Human herpesvirus 8 (Kaposi`s sarcoma-associated h
agagcacacugugugguuggug

SEQ ID NO: 193412 - RNA, 11 nt, Human herpesvirus 8 (Kaposi`s sarcoma-associated h
agagcacuguu

SEQ ID NO: 193413 - RNA, 22 nt, Human herpesvirus 8 (Kaposi`s sarcoma-associated h
agagcauuuuucccuccugcau

SEQ ID NO: 193414 - RNA, 19 nt, Human herpesvirus 8 (Kaposi`s sarcoma-associated h
agagcgacgcgggucucag

SEQ ID NO: 193415 - RNA, 14 nt, Human herpesvirus 8 (Kaposi`s sarcoma-associated h
agaguccaaccugg

SEQ ID NO: 193416 - RNA, 13 nt, Human herpesvirus 8 (Kaposi`s sarcoma-associated h
caaaaugugcuuu

SEQ ID NO: 193417 - RNA, 20 nt, Human herpesvirus 8 (Kaposi`s sarcoma-associated h
caaaagaacauugaugccuu

SEQ ID NO: 193418 - RNA, 23 nt, Human herpesvirus 8 (Kaposi`s sarcoma-associated h
caaacaaggucaauacauuguga

SEQ ID NO: 193419 - RNA, 19 nt, Human herpesvirus 8 (Kaposi`s sarcoma-associated h
caaauguuuuaugcaaaau

SEQ ID NO: 193420 - RNA, 20 nt, Human herpesvirus 8 (Kaposi`s sarcoma-associated h
caacccucuacucuuccggg

SEQ ID NO: 193421 - RNA, 14 nt, Human herpesvirus 8 (Kaposi`s sarcoma-associated h
caacaugacauggu

SEQ ID NO: 193422 - RNA, 14 nt, Human herpesvirus 8 (Kaposi`s sarcoma-associated h
caacauuaaacaca

SEQ ID NO: 193423 - RNA, 20 nt, Human herpesvirus 8 (Kaposi`s sarcoma-associated h
caacauuaaacacauacaau

SEQ ID NO: 193424 - RNA, 19 nt, Human herpesvirus 8 (Kaposi`s sarcoma-associated h
caacuugcgucuucaccuu

SEQ ID NO: 193425 - RNA, 18 nt, Human herpesvirus 8 (Kaposi`s sarcoma-associated h
caauaaagccgagccaca

SEQ ID NO: 193426 - RNA, 20 nt, Human herpesvirus 8 (Kaposi`s sarcoma-associated h
caauaaagccgagccacaaa

SEQ ID NO: 193427 - RNA, 17 nt, Human herpesvirus 8 (Kaposi`s sarcoma-associated h
caauaaagcguagauuu

SEQ ID NO: 193428 - RNA, 16 nt, Human herpesvirus 8 (Kaposi`s sarcoma-associated h
caauacaagacaacua

SEQ ID NO: 193429 - RNA, 15 nt, Human herpesvirus 8 (Kaposi`s sarcoma-associated h
caauacgccuucagg

SEQ ID NO: 193430 - RNA, 14 nt, Human herpesvirus 8 (Kaposi`s sarcoma-associated h
caauacugcccaag

SEQ ID NO: 193431 - RNA, 16 nt, Human herpesvirus 8 (Kaposi`s sarcoma-associated h
caauagggauacuguu

SEQ ID NO: 193432 - RNA, 21 nt, Human herpesvirus 8 (Kaposi`s sarcoma-associated h
caauagggauacuguuuauaa

SEQ ID NO: 193433 - RNA, 21 nt, Human herpesvirus 8 (Kaposi`s sarcoma-associated h
caauccuuaagaaaguggaua

SEQ ID NO: 193434 - RNA, 16 nt, Human herpesvirus 8 (Kaposi`s sarcoma-associated h
caaucacgguugcacc

SEQ ID NO: 193435 - RNA, 15 nt, Human herpesvirus 8 (Kaposi`s sarcoma-associated h
caauauaguggccaa

SEQ ID NO: 193436 - RNA, 15 nt, Human herpesvirus 8 (Kaposi`s sarcoma-associated h
caagucuucuuguca

SEQ ID NO: 193437 - RNA, 12 nt, Human herpesvirus 8 (Kaposi`s sarcoma-associated h
caauaaaagaga

SEQ ID NO: 193438 - RNA, 22 nt, Human herpesvirus 8 (Kaposi`s sarcoma-associated h
caagcaaugauagacauggaca

SEQ ID NO: 193439 - RNA, 16 nt, Human herpesvirus 8 (Kaposi`s sarcoma-associated h
caagcacaacauuaaa

SEQ ID NO: 193440 - RNA, 21 nt, Human herpesvirus 8 (Kaposi`s sarcoma-associated h
caagcacaacauuaaacacau

SEQ ID NO: 193441 - RNA, 16 nt, Human herpesvirus 8 (Kaposi`s sarcoma-associated h
caagagcgagugugcc

SEQ ID NO: 193442 - RNA, 19 nt, Human herpesvirus 8 (Kaposi`s sarcoma-associated h
caaggucaauacauuguga

SEQ ID NO: 193443 - RNA, 24 nt, Human herpesvirus 8 (Kaposi`s sarcoma-associated h
cacuaaaaccggaguagugcaagu

SEQ ID NO: 193444 - RNA, 21 nt, Human herpesvirus 8 (Kaposi`s sarcoma-associated h
cacucuauauggcaacugcca

SEQ ID NO: 193445 - RNA, 19 nt, Human herpesvirus 8 (Kaposi`s sarcoma-associated h
cacgucgcucuuuacuuau

SEQ ID NO: 193446 - RNA, 23 nt, Human herpesvirus 8 (Kaposi`s sarcoma-associated h
cacgaaugcucaggucugucacu

SEQ ID NO: 193447 - RNA, 13 nt, Human herpesvirus 8 (Kaposi`s sarcoma-associated h
caccuacuuccag

SEQ ID NO: 193448 - RNA, 13 nt, Human herpesvirus 8 (Kaposi`s sarcoma-associated h
caccucagaaagu

SEQ ID NO: 193449 - RNA, 14 nt, Human herpesvirus 8 (Kaposi`s sarcoma-associated h
caccuguguacaau

SEQ ID NO: 193450 - RNA, 19 nt, Human herpesvirus 8 (Kaposi`s sarcoma-associated h
cagaacaguacccacgaaa

SEQ ID NO: 193451 - RNA, 23 nt, Human herpesvirus 8 (Kaposi`s sarcoma-associated h
cagaaccgaugguuuccuagcca

SEQ ID NO: 193452 - RNA, 13 nt, Human herpesvirus 8 (Kaposi`s sarcoma-associated h
cagaagacccaga

SEQ ID NO: 193453 - RNA, 15 nt, Human herpesvirus 8 (Kaposi`s sarcoma-associated h
cagaagacccagaaa

SEQ ID NO: 193454 - RNA, 23 nt, Human herpesvirus 8 (Kaposi`s sarcoma-associated h
cagaagggggcggcguuuccaua

SEQ ID NO: 193455 - RNA, 16 nt, Human herpesvirus 8 (Kaposi`s sarcoma-associated h
cagaagcgcaccacag

SEQ ID NO: 193456 - RNA, 18 nt, Human herpesvirus 8 (Kaposi`s sarcoma-associated h
cacugcugguaucuggaa

SEQ ID NO: 193457 - RNA, 15 nt, Human herpesvirus 8 (Kaposi`s sarcoma-associated h
cagaaagacacauga

SEQ ID NO: 193458 - RNA, 20 nt, Human herpesvirus 8 (Kaposi`s sarcoma-associated h
cagaaacucccccaaccucu

SEQ ID NO: 193459 - RNA, 21 nt, Human herpesvirus 8 (Kaposi`s sarcoma-associated h
cagaaacucccccaaccucug

SEQ ID NO: 193460 - RNA, 13 nt, Human herpesvirus 8 (Kaposi`s sarcoma-associated h
cacugucacuuuc

SEQ ID NO: 193461 - RNA, 20 nt, Human herpesvirus 8 (Kaposi`s sarcoma-associated h
cacagcccauaguauguaaa

SEQ ID NO: 193462 - RNA, 17 nt, Human herpesvirus 8 (Kaposi`s sarcoma-associated h
cacagagccuaccccaa

SEQ ID NO: 193463 - RNA, 19 nt, Human herpesvirus 8 (Kaposi`s sarcoma-associated h
cacagaugugacuauguau

SEQ ID NO: 193464 - RNA, 22 nt, Human herpesvirus 8 (Kaposi`s sarcoma-associated h
cacaguauagggauacaggaga

SEQ ID NO: 193465 - RNA, 17 nt, Human herpesvirus 8 (Kaposi`s sarcoma-associated h
cacaucgcucaaacuca

SEQ ID NO: 193466 - RNA, 15 nt, Human herpesvirus 8 (Kaposi`s sarcoma-associated h
cacaucgucaucucu

SEQ ID NO: 193467 - RNA, 15 nt, Human herpesvirus 8 (Kaposi`s sarcoma-associated h
caccaggauccagac

SEQ ID NO: 193468 - RNA, 16 nt, Human herpesvirus 8 (Kaposi`s sarcoma-associated h
cacaucuguguacaaa

SEQ ID NO: 193469 - RNA, 14 nt, Human herpesvirus 8 (Kaposi`s sarcoma-associated h
cacccaauacuuaa

SEQ ID NO: 193470 - RNA, 14 nt, Human herpesvirus 8 (Kaposi`s sarcoma-associated h
caccauggccacuu

SEQ ID NO: 193471 - RNA, 20 nt, Human herpesvirus 8 (Kaposi`s sarcoma-associated h
caccccagauguucuugcca

SEQ ID NO: 193472 - RNA, 15 nt, Human herpesvirus 8 (Kaposi`s sarcoma-associated h
caccccguucuaauc

SEQ ID NO: 193473 - RNA, 13 nt, Human herpesvirus 8 (Kaposi`s sarcoma-associated h
caauguacugcca

SEQ ID NO: 193474 - RNA, 16 nt, Human herpesvirus 8 (Kaposi`s sarcoma-associated h
caauguacugccauga

SEQ ID NO: 193475 - RNA, 12 nt, Human herpesvirus 8 (Kaposi`s sarcoma-associated h
cacacucgcugu

SEQ ID NO: 193476 - RNA, 23 nt, Human herpesvirus 8 (Kaposi`s sarcoma-associated h
cacacgguuacuagcaccacuau

SEQ ID NO: 193477 - RNA, 14 nt, Human herpesvirus 8 (Kaposi`s sarcoma-associated h
cacagacacgagcu

SEQ ID NO: 193478 - RNA, 20 nt, Human herpesvirus 8 (Kaposi`s sarcoma-associated h
caaucucucauagacuuucu

SEQ ID NO: 193479 - RNA, 18 nt, Human herpesvirus 8 (Kaposi`s sarcoma-associated h
caaugaaacgacauugga

SEQ ID NO: 193480 - RNA, 11 nt, Human herpesvirus 8 (Kaposi`s sarcoma-associated h
caaugccaugg

SEQ ID NO: 193481 - RNA, 14 nt, Human herpesvirus 8 (Kaposi`s sarcoma-associated h
caaugcuucccaau

SEQ ID NO: 193482 - RNA, 13 nt, Human herpesvirus 8 (Kaposi`s sarcoma-associated h
aucuucucauuca

SEQ ID NO: 193483 - RNA, 19 nt, Human herpesvirus 8 (Kaposi`s sarcoma-associated h
aucuguuaacccauggguc

SEQ ID NO: 193484 - RNA, 14 nt, Human herpesvirus 8 (Kaposi`s sarcoma-associated h
aucuguuacuggca

SEQ ID NO: 193485 - RNA, 18 nt, Human herpesvirus 8 (Kaposi`s sarcoma-associated h
aucuuauuggugcguugu

SEQ ID NO: 193486 - RNA, 18 nt, Human herpesvirus 8 (Kaposi`s sarcoma-associated h
auggccuuuuuaagacaa

SEQ ID NO: 193487 - RNA, 20 nt, Human herpesvirus 8 (Kaposi`s sarcoma-associated h
auggccuccacccaccaagc

SEQ ID NO: 193488 - RNA, 22 nt, Human herpesvirus 8 (Kaposi`s sarcoma-associated h
auggccuccacccaccaagcua

SEQ ID NO: 193489 - RNA, 21 nt, Human herpesvirus 8 (Kaposi`s sarcoma-associated h
auggcggggcggcuguggcac

SEQ ID NO: 193490 - RNA, 18 nt, Human herpesvirus 8 (Kaposi`s sarcoma-associated h
augggcuuguacaugugu

SEQ ID NO: 193491 - RNA, 22 nt, Human herpesvirus 8 (Kaposi`s sarcoma-associated h
augggcauauacuuggcaagaa

SEQ ID NO: 193492 - RNA, 20 nt, Human herpesvirus 8 (Kaposi`s sarcoma-associated h
augggaccguguguggcugu

SEQ ID NO: 193493 - RNA, 18 nt, Human herpesvirus 8 (Kaposi`s sarcoma-associated h
augggaacuuucauccau

SEQ ID NO: 193494 - RNA, 22 nt, Human herpesvirus 8 (Kaposi`s sarcoma-associated h
auggcuuucgauucccgcgggc

SEQ ID NO: 193495 - RNA, 19 nt, Human herpesvirus 8 (Kaposi`s sarcoma-associated h
auggucauagccagauuag

SEQ ID NO: 193496 - RNA, 16 nt, Human herpesvirus 8 (Kaposi`s sarcoma-associated h
augggugugugccagu

SEQ ID NO: 193497 - RNA, 15 nt, Human herpesvirus 8 (Kaposi`s sarcoma-associated h
augggguuccagugc

SEQ ID NO: 193498 - RNA, 22 nt, Human herpesvirus 8 (Kaposi`s sarcoma-associated h
augguuauuggccaggacaaug

SEQ ID NO: 193499 - RNA, 20 nt, Human herpesvirus 8 (Kaposi`s sarcoma-associated h
augguuuuguguuacacuau

SEQ ID NO: 193500 - RNA, 20 nt, Human herpesvirus 8 (Kaposi`s sarcoma-associated h
augguguaugcguggucucc

SEQ ID NO: 193501 - RNA, 21 nt, Human herpesvirus 8 (Kaposi`s sarcoma-associated h
auguaagcugcugguucagga

SEQ ID NO: 193502 - RNA, 19 nt, Human herpesvirus 8 (Kaposi`s sarcoma-associated h
auguaaucuuguaguccaa

SEQ ID NO: 193503 - RNA, 23 nt, Human herpesvirus 8 (Kaposi`s sarcoma-associated h
auguaaucuuguaguccaaauaa

SEQ ID NO: 193504 - RNA, 21 nt, Human herpesvirus 8 (Kaposi`s sarcoma-associated h
augugccgcgcaucaaccagc

SEQ ID NO: 193505 - RNA, 21 nt, Human herpesvirus 8 (Kaposi`s sarcoma-associated h
auguggcccccuuuacagauc

SEQ ID NO: 193506 - RNA, 18 nt, Human herpesvirus 8 (Kaposi`s sarcoma-associated h
augucagguuccacccag

SEQ ID NO: 193507 - RNA, 21 nt, Human herpesvirus 8 (Kaposi`s sarcoma-associated h
auguccugauuuuccagggac

SEQ ID NO: 193508 - RNA, 15 nt, Human herpesvirus 8 (Kaposi`s sarcoma-associated h
augucauuuuuacuu

SEQ ID NO: 193509 - RNA, 20 nt, Human herpesvirus 8 (Kaposi`s sarcoma-associated h
augucauuuuuacuuuuaca

SEQ ID NO: 193510 - RNA, 21 nt, Human herpesvirus 8 (Kaposi`s sarcoma-associated h
augugguggucccacugcugc

SEQ ID NO: 193511 - RNA, 19 nt, Human herpesvirus 8 (Kaposi`s sarcoma-associated h
augugggcuucauuaugca

SEQ ID NO: 193512 - RNA, 19 nt, Human herpesvirus 8 (Kaposi`s sarcoma-associated h
augugggacaacuagaguc

SEQ ID NO: 193513 - RNA, 22 nt, Human herpesvirus 8 (Kaposi`s sarcoma-associated h
auguguguaacuuuuucgugga

SEQ ID NO: 193514 - RNA, 16 nt, Human herpesvirus 8 (Kaposi`s sarcoma-associated h
auuaauaaccaugagu

SEQ ID NO: 193515 - RNA, 17 nt, Human herpesvirus 8 (Kaposi`s sarcoma-associated h
auuaauuggagcucuua

SEQ ID NO: 193516 - RNA, 15 nt, Human herpesvirus 8 (Kaposi`s sarcoma-associated h
auuaaauuaaggggg

SEQ ID NO: 193517 - RNA, 14 nt, Human herpesvirus 8 (Kaposi`s sarcoma-associated h
auuaaacacauaca

SEQ ID NO: 193518 - RNA, 16 nt, Human herpesvirus 8 (Kaposi`s sarcoma-associated h
auuaaagcacucggug

SEQ ID NO: 193519 - RNA, 14 nt, Human herpesvirus 8 (Kaposi`s sarcoma-associated h
auguuuuggucucu

SEQ ID NO: 193520 - RNA, 16 nt, Human herpesvirus 8 (Kaposi`s sarcoma-associated h
auguuuuaugcaaaau

SEQ ID NO: 193521 - RNA, 15 nt, Human herpesvirus 8 (Kaposi`s sarcoma-associated h
auguuuccuguuaua

SEQ ID NO: 193522 - RNA, 22 nt, Human herpesvirus 8 (Kaposi`s sarcoma-associated h
caaaacacgcaccgcuugaccu

SEQ ID NO: 193523 - RNA, 13 nt, Human herpesvirus 8 (Kaposi`s sarcoma-associated h
auuuuucaucuga

SEQ ID NO: 193524 - RNA, 16 nt, Human herpesvirus 8 (Kaposi`s sarcoma-associated h
auuuuuccaguguaag

SEQ ID NO: 193525 - RNA, 15 nt, Human herpesvirus 8 (Kaposi`s sarcoma-associated h
caaaagcaaguggac

SEQ ID NO: 193526 - RNA, 13 nt, Human herpesvirus 8 (Kaposi`s sarcoma-associated h
caaaacugccaaa

SEQ ID NO: 193527 - RNA, 14 nt, Human herpesvirus 8 (Kaposi`s sarcoma-associated h
caaaacugccaaag

SEQ ID NO: 193528 - RNA, 18 nt, Human herpesvirus 8 (Kaposi`s sarcoma-associated h
auuuggacacaacaugca

SEQ ID NO: 193529 - RNA, 20 nt, Human herpesvirus 8 (Kaposi`s sarcoma-associated h
auuuaaggcagucuaucguc

SEQ ID NO: 193530 - RNA, 19 nt, Human herpesvirus 8 (Kaposi`s sarcoma-associated h
auuuaaugagacuagcugc

SEQ ID NO: 193531 - RNA, 20 nt, Human herpesvirus 8 (Kaposi`s sarcoma-associated h
auuuacaaaugguccggguu

SEQ ID NO: 193532 - RNA, 17 nt, Human herpesvirus 8 (Kaposi`s sarcoma-associated h
auuucuguuuccaguga

SEQ ID NO: 193533 - RNA, 14 nt, Human herpesvirus 8 (Kaposi`s sarcoma-associated h
auuguuaugggagg

SEQ ID NO: 193534 - RNA, 15 nt, Human herpesvirus 8 (Kaposi`s sarcoma-associated h
auugguguccagaca

SEQ ID NO: 193535 - RNA, 16 nt, Human herpesvirus 8 (Kaposi`s sarcoma-associated h
auugguguccagacag

SEQ ID NO: 193536 - RNA, 12 nt, Human herpesvirus 8 (Kaposi`s sarcoma-associated h
auuguuacuugc

SEQ ID NO: 193537 - RNA, 21 nt, Human herpesvirus 8 (Kaposi`s sarcoma-associated h
auuggucacaucucacgcaua

SEQ ID NO: 193538 - RNA, 21 nt, Human herpesvirus 8 (Kaposi`s sarcoma-associated h
auuggcgggugugucuuguuu

SEQ ID NO: 193539 - RNA, 19 nt, Human herpesvirus 8 (Kaposi`s sarcoma-associated h
auuuaaaaccgcccacuga

SEQ ID NO: 193540 - RNA, 19 nt, Human herpesvirus 8 (Kaposi`s sarcoma-associated h
auuguuuuugaacaugugg

SEQ ID NO: 193541 - RNA, 19 nt, Human herpesvirus 8 (Kaposi`s sarcoma-associated h
auugcuucauacgcauaua

SEQ ID NO: 193542 - RNA, 18 nt, Human herpesvirus 8 (Kaposi`s sarcoma-associated h
auugccaacgaccugaug

SEQ ID NO: 193543 - RNA, 21 nt, Human herpesvirus 8 (Kaposi`s sarcoma-associated h
auucugacagacaacacuacu

SEQ ID NO: 193544 - RNA, 12 nt, Human herpesvirus 8 (Kaposi`s sarcoma-associated h
auucuacuuaaa

SEQ ID NO: 193545 - RNA, 22 nt, Human herpesvirus 8 (Kaposi`s sarcoma-associated h
auugcaccauuuauuguggaua

SEQ ID NO: 193546 - RNA, 16 nt, Human herpesvirus 8 (Kaposi`s sarcoma-associated h
auucucuccacuagac

SEQ ID NO: 193547 - RNA, 15 nt, Human herpesvirus 8 (Kaposi`s sarcoma-associated h
auuauacacacgggu

SEQ ID NO: 193548 - RNA, 12 nt, Human herpesvirus 8 (Kaposi`s sarcoma-associated h
auuagugacaua

SEQ ID NO: 193549 - RNA, 17 nt, Human herpesvirus 8 (Kaposi`s sarcoma-associated h
auuagccugcagugugg

SEQ ID NO: 193550 - RNA, 22 nt, Human herpesvirus 8 (Kaposi`s sarcoma-associated h
auuaucaaagaaaggugacuua

SEQ ID NO: 193551 - RNA, 22 nt, Human herpesvirus 8 (Kaposi`s sarcoma-associated h
auucggggagcgggguuuccag

SEQ ID NO: 193552 - RNA, 20 nt, Human herpesvirus 8 (Kaposi`s sarcoma-associated h
auuacucgcacaagcgcuga

SEQ ID NO: 193553 - RNA, 15 nt, Human herpesvirus 8 (Kaposi`s sarcoma-associated h
auuaccaauacuauu

SEQ ID NO: 193554 - RNA, 14 nt, Human herpesvirus 8 (Kaposi`s sarcoma-associated h
auuacagacucugu

SEQ ID NO: 193555 - RNA, 22 nt, Human herpesvirus 8 (Kaposi`s sarcoma-associated h
agcgugucgcccgucacuggau

SEQ ID NO: 193556 - RNA, 18 nt, Human herpesvirus 8 (Kaposi`s sarcoma-associated h
agcgucuuuaugauuucc

SEQ ID NO: 193557 - RNA, 22 nt, Human herpesvirus 8 (Kaposi`s sarcoma-associated h
agcgugccugcuuacaaugugu

SEQ ID NO: 193558 - RNA, 21 nt, Human herpesvirus 8 (Kaposi`s sarcoma-associated h
agcgugcggucagaguggugg

SEQ ID NO: 193559 - RNA, 13 nt, Human herpesvirus 8 (Kaposi`s sarcoma-associated h
agcguauucucag

SEQ ID NO: 193560 - RNA, 16 nt, Human herpesvirus 8 (Kaposi`s sarcoma-associated h
agcuacgcacugagcg

SEQ ID NO: 193561 - RNA, 14 nt, Human herpesvirus 8 (Kaposi`s sarcoma-associated h
agcuagcagugcua

SEQ ID NO: 193562 - RNA, 18 nt, Human herpesvirus 8 (Kaposi`s sarcoma-associated h
agcucaucaaugggagaa

SEQ ID NO: 193563 - RNA, 14 nt, Human herpesvirus 8 (Kaposi`s sarcoma-associated h
agcgcugugcuuuu

SEQ ID NO: 193564 - RNA, 14 nt, Human herpesvirus 8 (Kaposi`s sarcoma-associated h
agcggacgccauuu

SEQ ID NO: 193565 - RNA, 22 nt, Human herpesvirus 8 (Kaposi`s sarcoma-associated h
agcgcgcucugucgcucuucag

SEQ ID NO: 193566 - RNA, 15 nt, Human herpesvirus 8 (Kaposi`s sarcoma-associated h
agcgcgaaaccacug

SEQ ID NO: 193567 - RNA, 14 nt, Human herpesvirus 8 (Kaposi`s sarcoma-associated h
agcgggguuuccag

SEQ ID NO: 193568 - RNA, 23 nt, Human herpesvirus 8 (Kaposi`s sarcoma-associated h
agcggguuggacuggcagggugg

SEQ ID NO: 193569 - RNA, 15 nt, Human herpesvirus 8 (Kaposi`s sarcoma-associated h
agccuucacggcaca

SEQ ID NO: 193570 - RNA, 15 nt, Human herpesvirus 8 (Kaposi`s sarcoma-associated h
agccgcuugcugaua

SEQ ID NO: 193571 - RNA, 18 nt, Human herpesvirus 8 (Kaposi`s sarcoma-associated h
agccggggaaaaguggac

SEQ ID NO: 193572 - RNA, 15 nt, Human herpesvirus 8 (Kaposi`s sarcoma-associated h
agccuaacauguggc

SEQ ID NO: 193573 - RNA, 14 nt, Human herpesvirus 8 (Kaposi`s sarcoma-associated h
agccgagccacaaa

SEQ ID NO: 193574 - RNA, 14 nt, Human herpesvirus 8 (Kaposi`s sarcoma-associated h
agccucuguacaug

SEQ ID NO: 193575 - RNA, 21 nt, Human herpesvirus 8 (Kaposi`s sarcoma-associated h
agccuaugcugggacagaaua

SEQ ID NO: 193576 - RNA, 16 nt, Human herpesvirus 8 (Kaposi`s sarcoma-associated h
agaugaagcugucauu

SEQ ID NO: 193577 - RNA, 12 nt, Human herpesvirus 8 (Kaposi`s sarcoma-associated h
agccacaucagc

SEQ ID NO: 193578 - RNA, 21 nt, Human herpesvirus 8 (Kaposi`s sarcoma-associated h
agccaccacgccacaacccaa

SEQ ID NO: 193579 - RNA, 23 nt, Human herpesvirus 8 (Kaposi`s sarcoma-associated h
agccacauacgucccucuuggcu

SEQ ID NO: 193580 - RNA, 17 nt, Human herpesvirus 8 (Kaposi`s sarcoma-associated h
agccaauugacugugga

SEQ ID NO: 193581 - RNA, 12 nt, Human herpesvirus 8 (Kaposi`s sarcoma-associated h
agccaacaaaca

SEQ ID NO: 193582 - RNA, 12 nt, Human herpesvirus 8 (Kaposi`s sarcoma-associated h
agccaagaacca

SEQ ID NO: 193583 - RNA, 16 nt, Human herpesvirus 8 (Kaposi`s sarcoma-associated h
agaucggccucugacg

SEQ ID NO: 193584 - RNA, 18 nt, Human herpesvirus 8 (Kaposi`s sarcoma-associated h
agauaacccgagaccgca

SEQ ID NO: 193585 - RNA, 16 nt, Human herpesvirus 8 (Kaposi`s sarcoma-associated h
agggauacuguuuaua

SEQ ID NO: 193586 - RNA, 22 nt, Human herpesvirus 8 (Kaposi`s sarcoma-associated h
agggcaugaggcuggaccuccu

SEQ ID NO: 193587 - RNA, 15 nt, Human herpesvirus 8 (Kaposi`s sarcoma-associated h
agggaauggccucca

SEQ ID NO: 193588 - RNA, 12 nt, Human herpesvirus 8 (Kaposi`s sarcoma-associated h
aggccuaucuga

SEQ ID NO: 193589 - RNA, 18 nt, Human herpesvirus 8 (Kaposi`s sarcoma-associated h
aggcgaauaaaacaggaa

SEQ ID NO: 193590 - RNA, 17 nt, Human herpesvirus 8 (Kaposi`s sarcoma-associated h
aggcauuuuguauuauu

SEQ ID NO: 193591 - RNA, 18 nt, Human herpesvirus 8 (Kaposi`s sarcoma-associated h
aggcccgagaaacacugu

SEQ ID NO: 193592 - RNA, 22 nt, Human herpesvirus 8 (Kaposi`s sarcoma-associated h
aggcccccaccaaaccugguga

SEQ ID NO: 193593 - RNA, 17 nt, Human herpesvirus 8 (Kaposi`s sarcoma-associated h
aggaccucgucuagcac

SEQ ID NO: 193594 - RNA, 14 nt, Human herpesvirus 8 (Kaposi`s sarcoma-associated h
aggacauuguauaa

SEQ ID NO: 193595 - RNA, 16 nt, Human herpesvirus 8 (Kaposi`s sarcoma-associated h
aggagcgacuggauca

SEQ ID NO: 193596 - RNA, 14 nt, Human herpesvirus 8 (Kaposi`s sarcoma-associated h
aggauuccaccauu

SEQ ID NO: 193597 - RNA, 15 nt, Human herpesvirus 8 (Kaposi`s sarcoma-associated h
aggauuuaaugagac

SEQ ID NO: 193598 - RNA, 18 nt, Human herpesvirus 8 (Kaposi`s sarcoma-associated h
aggauuucgaauaucuca

SEQ ID NO: 193599 - RNA, 14 nt, Human herpesvirus 8 (Kaposi`s sarcoma-associated h
aggcaacaugacau

SEQ ID NO: 193600 - RNA, 15 nt, Human herpesvirus 8 (Kaposi`s sarcoma-associated h
aggcacauaaggaac

SEQ ID NO: 193601 - RNA, 18 nt, Human herpesvirus 8 (Kaposi`s sarcoma-associated h
agcucugcugccuguuau

SEQ ID NO: 193602 - RNA, 14 nt, Human herpesvirus 8 (Kaposi`s sarcoma-associated h
agcugagccacaaa

SEQ ID NO: 193603 - RNA, 14 nt, Human herpesvirus 8 (Kaposi`s sarcoma-associated h
agcugccaaggcaa

SEQ ID NO: 193604 - RNA, 21 nt, Human herpesvirus 8 (Kaposi`s sarcoma-associated h
aggaaugcauauggacuguua

SEQ ID NO: 193605 - RNA, 17 nt, Human herpesvirus 8 (Kaposi`s sarcoma-associated h
aggaauuuuacuggugu

SEQ ID NO: 193606 - RNA, 21 nt, Human herpesvirus 8 (Kaposi`s sarcoma-associated h
aggacaagcugaugugguggu

SEQ ID NO: 193607 - RNA, 19 nt, Human herpesvirus 8 (Kaposi`s sarcoma-associated h
agucacuuccccauuuugg

SEQ ID NO: 193608 - RNA, 16 nt, Human herpesvirus 8 (Kaposi`s sarcoma-associated h
agucaccggaggaaug

SEQ ID NO: 193609 - RNA, 15 nt, Human herpesvirus 8 (Kaposi`s sarcoma-associated h
agucuacgugccagu

SEQ ID NO: 193610 - RNA, 16 nt, Human herpesvirus 8 (Kaposi`s sarcoma-associated h
agucuacgugccagug

SEQ ID NO: 193611 - RNA, 16 nt, Human herpesvirus 8 (Kaposi`s sarcoma-associated h
agucgucugacgccau

SEQ ID NO: 193612 - RNA, 20 nt, Human herpesvirus 8 (Kaposi`s sarcoma-associated h
aguccaaauaaaccagacac

SEQ ID NO: 193613 - RNA, 15 nt, Human herpesvirus 8 (Kaposi`s sarcoma-associated h
agucauuaaacgaca

SEQ ID NO: 193614 - RNA, 18 nt, Human herpesvirus 8 (Kaposi`s sarcoma-associated h
aguccauggcaguggaca

SEQ ID NO: 193615 - RNA, 21 nt, Human herpesvirus 8 (Kaposi`s sarcoma-associated h
aguaagucguccgacaugugc

SEQ ID NO: 193616 - RNA, 22 nt, Human herpesvirus 8 (Kaposi`s sarcoma-associated h
aguaagucguccgacaugugcu

SEQ ID NO: 193617 - RNA, 15 nt, Human herpesvirus 8 (Kaposi`s sarcoma-associated h
aggucaccuggccca

SEQ ID NO: 193618 - RNA, 15 nt, Human herpesvirus 8 (Kaposi`s sarcoma-associated h
agguauguuuuuacc

SEQ ID NO: 193619 - RNA, 17 nt, Human herpesvirus 8 (Kaposi`s sarcoma-associated h
agguagauugacuggaa

SEQ ID NO: 193620 - RNA, 22 nt, Human herpesvirus 8 (Kaposi`s sarcoma-associated h
agggcuaugauugcuucuccac

SEQ ID NO: 193621 - RNA, 15 nt, Human herpesvirus 8 (Kaposi`s sarcoma-associated h
auaaaacgguguucu

SEQ ID NO: 193622 - RNA, 20 nt, Human herpesvirus 8 (Kaposi`s sarcoma-associated h
auaaagacaaaugugugggu

SEQ ID NO: 193623 - RNA, 12 nt, Human herpesvirus 8 (Kaposi`s sarcoma-associated h
agugaccugcug

SEQ ID NO: 193624 - RNA, 15 nt, Human herpesvirus 8 (Kaposi`s sarcoma-associated h
auaaagucugagugg

SEQ ID NO: 193625 - RNA, 17 nt, Human herpesvirus 8 (Kaposi`s sarcoma-associated h
auaaagccgagccacaa

SEQ ID NO: 193626 - RNA, 18 nt, Human herpesvirus 8 (Kaposi`s sarcoma-associated h
auaaagccgagccacaaa

SEQ ID NO: 193627 - RNA, 17 nt, Human herpesvirus 8 (Kaposi`s sarcoma-associated h
auaaagcugagccacaa

SEQ ID NO: 193628 - RNA, 18 nt, Human herpesvirus 8 (Kaposi`s sarcoma-associated h
auaaagcugagccacaaa

SEQ ID NO: 193629 - RNA, 17 nt, Human herpesvirus 8 (Kaposi`s sarcoma-associated h
auaaaguacuuuuccau

SEQ ID NO: 193630 - RNA, 18 nt, Human herpesvirus 8 (Kaposi`s sarcoma-associated h
auaacuuuauuacaggua

SEQ ID NO: 193631 - RNA, 17 nt, Human herpesvirus 8 (Kaposi`s sarcoma-associated h
auaacgagcgaccaguc

SEQ ID NO: 193632 - RNA, 18 nt, Human herpesvirus 8 (Kaposi`s sarcoma-associated h
auaagaaauuuuauguca

SEQ ID NO: 193633 - RNA, 17 nt, Human herpesvirus 8 (Kaposi`s sarcoma-associated h
auaagaaccaaaggaca

SEQ ID NO: 193634 - RNA, 18 nt, Human herpesvirus 8 (Kaposi`s sarcoma-associated h
auaagaaccaaaggacau

SEQ ID NO: 193635 - RNA, 22 nt, Human herpesvirus 8 (Kaposi`s sarcoma-associated h
auaagaaccaaaggacauggua

SEQ ID NO: 193636 - RNA, 17 nt, Human herpesvirus 8 (Kaposi`s sarcoma-associated h
auaagcugcauacauau

SEQ ID NO: 193637 - RNA, 22 nt, Human herpesvirus 8 (Kaposi`s sarcoma-associated h
auacaaaaacacaaucacgguu

SEQ ID NO: 193638 - RNA, 19 nt, Human herpesvirus 8 (Kaposi`s sarcoma-associated h
auaauugagcgcugugcuu

SEQ ID NO: 193639 - RNA, 16 nt, Human herpesvirus 8 (Kaposi`s sarcoma-associated h
auagaugaaacauucg

SEQ ID NO: 193640 - RNA, 23 nt, Human herpesvirus 8 (Kaposi`s sarcoma-associated h
auacgucccucuuggcuguuaca

SEQ ID NO: 193641 - RNA, 18 nt, Human herpesvirus 8 (Kaposi`s sarcoma-associated h
auacucccucccauaaca

SEQ ID NO: 193642 - RNA, 16 nt, Human herpesvirus 8 (Kaposi`s sarcoma-associated h
auacauaacacacaca

SEQ ID NO: 193643 - RNA, 12 nt, Human herpesvirus 8 (Kaposi`s sarcoma-associated h
auacacuacuua

SEQ ID NO: 193644 - RNA, 13 nt, Human herpesvirus 8 (Kaposi`s sarcoma-associated h
auacacuacuuau

SEQ ID NO: 193645 - RNA, 22 nt, Human herpesvirus 8 (Kaposi`s sarcoma-associated h
auacaagccggcaccauggcca

SEQ ID NO: 193646 - RNA, 21 nt, Human herpesvirus 8 (Kaposi`s sarcoma-associated h
auacacaaaugaaaugaguca

SEQ ID NO: 193647 - RNA, 17 nt, Human herpesvirus 8 (Kaposi`s sarcoma-associated h
auacccuggaucaggga

SEQ ID NO: 193648 - RNA, 13 nt, Human herpesvirus 8 (Kaposi`s sarcoma-associated h
auacccuguuuca

SEQ ID NO: 193649 - RNA, 21 nt, Human herpesvirus 8 (Kaposi`s sarcoma-associated h
auacgcuugccuuuugcuuaa

SEQ ID NO: 193650 - RNA, 17 nt, Human herpesvirus 8 (Kaposi`s sarcoma-associated h
auacaugagagacugca

SEQ ID NO: 193651 - RNA, 23 nt, Human herpesvirus 8 (Kaposi`s sarcoma-associated h
auacauagucacaucuguguaca

SEQ ID NO: 193652 - RNA, 12 nt, Human herpesvirus 8 (Kaposi`s sarcoma-associated h
aucuguccucau

SEQ ID NO: 193653 - RNA, 19 nt, Human herpesvirus 8 (Kaposi`s sarcoma-associated h
aucuggauacacuacuuau

SEQ ID NO: 193654 - RNA, 17 nt, Human herpesvirus 8 (Kaposi`s sarcoma-associated h
aucuggggguuggcgaa

SEQ ID NO: 193655 - RNA, 20 nt, Human herpesvirus 8 (Kaposi`s sarcoma-associated h
aucuauccaagugcacacuc

SEQ ID NO: 193656 - RNA, 15 nt, Human herpesvirus 8 (Kaposi`s sarcoma-associated h
aucucauuaaaccua

SEQ ID NO: 193657 - RNA, 23 nt, Human herpesvirus 8 (Kaposi`s sarcoma-associated h
auccggcagcaauauuaaaggga

SEQ ID NO: 193658 - RNA, 18 nt, Human herpesvirus 8 (Kaposi`s sarcoma-associated h
auccgcgggcuacguggu

SEQ ID NO: 193659 - RNA, 11 nt, Human herpesvirus 8 (Kaposi`s sarcoma-associated h
auccacucagg

SEQ ID NO: 193660 - RNA, 22 nt, Human herpesvirus 8 (Kaposi`s sarcoma-associated h
auccaccacuuggcgucugccg

SEQ ID NO: 193661 - RNA, 19 nt, Human herpesvirus 8 (Kaposi`s sarcoma-associated h
auccacccuaauacauaac

SEQ ID NO: 193662 - RNA, 14 nt, Human herpesvirus 8 (Kaposi`s sarcoma-associated h
auccuaggugacug

SEQ ID NO: 193663 - RNA, 18 nt, Human herpesvirus 8 (Kaposi`s sarcoma-associated h
aucuacuuuggacaguuu

SEQ ID NO: 193664 - RNA, 20 nt, Human herpesvirus 8 (Kaposi`s sarcoma-associated h
auccuagaaugaagugcaac

SEQ ID NO: 193665 - RNA, 19 nt, Human herpesvirus 8 (Kaposi`s sarcoma-associated h
auccuacacuuuacugugu

SEQ ID NO: 193666 - RNA, 22 nt, Human herpesvirus 8 (Kaposi`s sarcoma-associated h
auaugcccaacuucaucacauc

SEQ ID NO: 193667 - RNA, 13 nt, Human herpesvirus 8 (Kaposi`s sarcoma-associated h
auaugcaccucca

SEQ ID NO: 193668 - RNA, 16 nt, Human herpesvirus 8 (Kaposi`s sarcoma-associated h
aucaggagggucaaug

SEQ ID NO: 193669 - RNA, 14 nt, Human herpesvirus 8 (Kaposi`s sarcoma-associated h
aucaggcuagugcu

SEQ ID NO: 193670 - RNA, 17 nt, Human herpesvirus 8 (Kaposi`s sarcoma-associated h
aucaggcuagugcugua

SEQ ID NO: 193671 - RNA, 17 nt, Human herpesvirus 8 (Kaposi`s sarcoma-associated h
aucagcugcagccagga

SEQ ID NO: 193672 - RNA, 19 nt, Human herpesvirus 8 (Kaposi`s sarcoma-associated h
aucagaacaguggugcacu

SEQ ID NO: 193673 - RNA, 11 nt, Human herpesvirus 8 (Kaposi`s sarcoma-associated h
aucaacacuuc

SEQ ID NO: 193674 - RNA, 22 nt, Human herpesvirus 8 (Kaposi`s sarcoma-associated h
aucaacuaaggggcuuauguca

SEQ ID NO: 193675 - RNA, 17 nt, Human herpesvirus 8 (Kaposi`s sarcoma-associated h
uuagaaugcgugcuucu

SEQ ID NO: 193676 - RNA, 21 nt, Human herpesvirus 8 (Kaposi`s sarcoma-associated h
uucaaaggcgggaucaucugc

SEQ ID NO: 193677 - RNA, 17 nt, Human herpesvirus 8 (Kaposi`s sarcoma-associated h
uuauuugaaagcaauaa

SEQ ID NO: 193678 - RNA, 12 nt, Human herpesvirus 8 (Kaposi`s sarcoma-associated h
uuacacuaugua

SEQ ID NO: 193679 - RNA, 12 nt, Human herpesvirus 8 (Kaposi`s sarcoma-associated h
uuacacuaacca

SEQ ID NO: 193680 - RNA, 15 nt, Human herpesvirus 8 (Kaposi`s sarcoma-associated h
uuacuagcaccacua

SEQ ID NO: 193681 - RNA, 14 nt, Human herpesvirus 8 (Kaposi`s sarcoma-associated h
uuacugguaccaga

SEQ ID NO: 193682 - RNA, 13 nt, Human herpesvirus 8 (Kaposi`s sarcoma-associated h
uuaagaauaaaga

SEQ ID NO: 193683 - RNA, 14 nt, Human herpesvirus 8 (Kaposi`s sarcoma-associated h
uuaacuucaccucc

SEQ ID NO: 193684 - RNA, 16 nt, Human herpesvirus 8 (Kaposi`s sarcoma-associated h
uuaacuuucagaauuc

SEQ ID NO: 193685 - RNA, 16 nt, Human herpesvirus 8 (Kaposi`s sarcoma-associated h
uguuacuauaaacagc

SEQ ID NO: 193686 - RNA, 11 nt, Human herpesvirus 8 (Kaposi`s sarcoma-associated h
uguuacuggca

SEQ ID NO: 193687 - RNA, 14 nt, Human herpesvirus 8 (Kaposi`s sarcoma-associated h
uguuacaauaaagc

SEQ ID NO: 193688 - RNA, 22 nt, Human herpesvirus 8 (Kaposi`s sarcoma-associated h
uguuacccugcucuggacaaug

SEQ ID NO: 193689 - RNA, 17 nt, Human herpesvirus 8 (Kaposi`s sarcoma-associated h
uguuauaagaccaauca

SEQ ID NO: 193690 - RNA, 17 nt, Human herpesvirus 8 (Kaposi`s sarcoma-associated h
uguuaaacgcaccaagg

SEQ ID NO: 193691 - RNA, 12 nt, Human herpesvirus 8 (Kaposi`s sarcoma-associated h
ugugugccagua

SEQ ID NO: 193692 - RNA, 11 nt, Human herpesvirus 8 (Kaposi`s sarcoma-associated h
uguucuugcca

SEQ ID NO: 193693 - RNA, 15 nt, Human herpesvirus 8 (Kaposi`s sarcoma-associated h
uguugagcugcauau

SEQ ID NO: 193694 - RNA, 19 nt, Human herpesvirus 8 (Kaposi`s sarcoma-associated h
uuaacccaaugucagggga

SEQ ID NO: 193695 - RNA, 18 nt, Human herpesvirus 8 (Kaposi`s sarcoma-associated h
uuaacugucuacagucac

SEQ ID NO: 193696 - RNA, 17 nt, Human herpesvirus 8 (Kaposi`s sarcoma-associated h
uuaaaaccgcccacuga

SEQ ID NO: 193697 - RNA, 16 nt, Human herpesvirus 8 (Kaposi`s sarcoma-associated h
uuaacaaacaagguca

SEQ ID NO: 193698 - RNA, 14 nt, Human herpesvirus 8 (Kaposi`s sarcoma-associated h
uguugcgcacauca

SEQ ID NO: 193699 - RNA, 18 nt, Human herpesvirus 8 (Kaposi`s sarcoma-associated h
uguuggcuccacguggcg

SEQ ID NO: 193700 - RNA, 15 nt, Human herpesvirus 8 (Kaposi`s sarcoma-associated h
uguugguuacacuaa

SEQ ID NO: 193701 - RNA, 18 nt, Human herpesvirus 8 (Kaposi`s sarcoma-associated h
uuaaaaacaaguagcugu

SEQ ID NO: 193702 - RNA, 12 nt, Human herpesvirus 8 (Kaposi`s sarcoma-associated h
uuaaaaaccacu

SEQ ID NO: 193703 - RNA, 19 nt, Human herpesvirus 8 (Kaposi`s sarcoma-associated h
uuaaaaaccacucacugag

SEQ ID NO: 193704 - RNA, 15 nt, Human herpesvirus 8 (Kaposi`s sarcoma-associated h
uguuuuuugccaugg

SEQ ID NO: 193705 - RNA, 20 nt, Human herpesvirus 8 (Kaposi`s sarcoma-associated h
uguuuuucuggucgcugcca

SEQ ID NO: 193706 - RNA, 15 nt, Human herpesvirus 8 (Kaposi`s sarcoma-associated h
ugugucugugcccug

SEQ ID NO: 193707 - RNA, 16 nt, Human herpesvirus 8 (Kaposi`s sarcoma-associated h
ugugucugugcccugc

SEQ ID NO: 193708 - RNA, 21 nt, Human herpesvirus 8 (Kaposi`s sarcoma-associated h
uguguagguuguuauuaucaa

SEQ ID NO: 193709 - RNA, 16 nt, Human herpesvirus 8 (Kaposi`s sarcoma-associated h
uguggauuuuauggac

SEQ ID NO: 193710 - RNA, 19 nt, Human herpesvirus 8 (Kaposi`s sarcoma-associated h
uguggauuuuauggacauu

SEQ ID NO: 193711 - RNA, 13 nt, Human herpesvirus 8 (Kaposi`s sarcoma-associated h
uguggcugcaaaa

SEQ ID NO: 193712 - RNA, 21 nt, Human herpesvirus 8 (Kaposi`s sarcoma-associated h
ugugaggaucggaucuuuuac

SEQ ID NO: 193713 - RNA, 15 nt, Human herpesvirus 8 (Kaposi`s sarcoma-associated h
uguacaugugucuau

SEQ ID NO: 193714 - RNA, 19 nt, Human herpesvirus 8 (Kaposi`s sarcoma-associated h
uguacagugaguggcugua

SEQ ID NO: 193715 - RNA, 15 nt, Human herpesvirus 8 (Kaposi`s sarcoma-associated h
uguacaaaccaaauu

SEQ ID NO: 193716 - RNA, 19 nt, Human herpesvirus 8 (Kaposi`s sarcoma-associated h
uguacaugaaccagaauca

SEQ ID NO: 193717 - RNA, 13 nt, Human herpesvirus 8 (Kaposi`s sarcoma-associated h
uguaaucuuguag

SEQ ID NO: 193718 - RNA, 13 nt, Human herpesvirus 8 (Kaposi`s sarcoma-associated h
ugugaaguuuaca

SEQ ID NO: 193719 - RNA, 13 nt, Human herpesvirus 8 (Kaposi`s sarcoma-associated h
ugugaacaauaaa

SEQ ID NO: 193720 - RNA, 22 nt, Human herpesvirus 8 (Kaposi`s sarcoma-associated h
ugucuuguaaaaauaaauguga

SEQ ID NO: 193721 - RNA, 22 nt, Human herpesvirus 8 (Kaposi`s sarcoma-associated h
ugucgcgaaaaggucaauuuca

SEQ ID NO: 193722 - RNA, 18 nt, Human herpesvirus 8 (Kaposi`s sarcoma-associated h
ugucgcccgucacuggau

SEQ ID NO: 193723 - RNA, 14 nt, Human herpesvirus 8 (Kaposi`s sarcoma-associated h
ugucauugccaccc

SEQ ID NO: 193724 - RNA, 17 nt, Human herpesvirus 8 (Kaposi`s sarcoma-associated h
uguccccucggagacaa

SEQ ID NO: 193725 - RNA, 14 nt, Human herpesvirus 8 (Kaposi`s sarcoma-associated h
ugucccucagccac

SEQ ID NO: 193726 - RNA, 20 nt, Human herpesvirus 8 (Kaposi`s sarcoma-associated h
ugucccucagccacaaauaa

SEQ ID NO: 193727 - RNA, 20 nt, Human herpesvirus 8 (Kaposi`s sarcoma-associated h
uggggauugcgauugcucaa

SEQ ID NO: 193728 - RNA, 15 nt, Human herpesvirus 8 (Kaposi`s sarcoma-associated h
uggggaccagaggac

SEQ ID NO: 193729 - RNA, 22 nt, Human herpesvirus 8 (Kaposi`s sarcoma-associated h
uggggaccagaggacagggugg

SEQ ID NO: 193730 - RNA, 20 nt, Human herpesvirus 8 (Kaposi`s sarcoma-associated h
uggggcaugggcaccacgga

SEQ ID NO: 193731 - RNA, 21 nt, Human herpesvirus 8 (Kaposi`s sarcoma-associated h
ugggcgucaccgcgguccauu

SEQ ID NO: 193732 - RNA, 21 nt, Human herpesvirus 8 (Kaposi`s sarcoma-associated h
ugggcgugguauauuggucca

SEQ ID NO: 193733 - RNA, 20 nt, Human herpesvirus 8 (Kaposi`s sarcoma-associated h
uggauugccgucacauauca

SEQ ID NO: 193734 - RNA, 22 nt, Human herpesvirus 8 (Kaposi`s sarcoma-associated h
uggcacacgcugcaauguacug

SEQ ID NO: 193735 - RNA, 16 nt, Human herpesvirus 8 (Kaposi`s sarcoma-associated h
uggcacccaacaucca

SEQ ID NO: 193736 - RNA, 21 nt, Human herpesvirus 8 (Kaposi`s sarcoma-associated h
uggcacccaacauccauuaug

SEQ ID NO: 193737 - RNA, 20 nt, Human herpesvirus 8 (Kaposi`s sarcoma-associated h
uggcaccugaggugcucuuc

SEQ ID NO: 193738 - RNA, 19 nt, Human herpesvirus 8 (Kaposi`s sarcoma-associated h
uggacaccacauuuccacc

SEQ ID NO: 193739 - RNA, 16 nt, Human herpesvirus 8 (Kaposi`s sarcoma-associated h
uggauccuacacuuua

SEQ ID NO: 193740 - RNA, 23 nt, Human herpesvirus 8 (Kaposi`s sarcoma-associated h
uggauccuacacuuuacugugua

SEQ ID NO: 193741 - RNA, 19 nt, Human herpesvirus 8 (Kaposi`s sarcoma-associated h
ugguguacaaaaaaaacau

SEQ ID NO: 193742 - RNA, 21 nt, Human herpesvirus 8 (Kaposi`s sarcoma-associated h
ugguguuguguuuaaggugcg

SEQ ID NO: 193743 - RNA, 14 nt, Human herpesvirus 8 (Kaposi`s sarcoma-associated h
ugguguccagacag

SEQ ID NO: 193744 - RNA, 20 nt, Human herpesvirus 8 (Kaposi`s sarcoma-associated h
ugguuaagcuuugcagccag

SEQ ID NO: 193745 - RNA, 22 nt, Human herpesvirus 8 (Kaposi`s sarcoma-associated h
ugguuaagcuuugcagccaggu

SEQ ID NO: 193746 - RNA, 17 nt, Human herpesvirus 8 (Kaposi`s sarcoma-associated h
ugguccuggaugguucc

SEQ ID NO: 193747 - RNA, 14 nt, Human herpesvirus 8 (Kaposi`s sarcoma-associated h
ugccgaugugucag

SEQ ID NO: 193748 - RNA, 16 nt, Human herpesvirus 8 (Kaposi`s sarcoma-associated h
ugccccuuaucuccac

SEQ ID NO: 193749 - RNA, 18 nt, Human herpesvirus 8 (Kaposi`s sarcoma-associated h
ugccgaaaucagugucca

SEQ ID NO: 193750 - RNA, 16 nt, Human herpesvirus 8 (Kaposi`s sarcoma-associated h
ugccuuuugcuuaaac

SEQ ID NO: 193751 - RNA, 19 nt, Human herpesvirus 8 (Kaposi`s sarcoma-associated h
ugcgaacuugcucuuuuca

SEQ ID NO: 193752 - RNA, 14 nt, Human herpesvirus 8 (Kaposi`s sarcoma-associated h
ugcccgcaauauaa

SEQ ID NO: 193753 - RNA, 22 nt, Human herpesvirus 8 (Kaposi`s sarcoma-associated h
ugcccccuuaauccuuacuugg

SEQ ID NO: 193754 - RNA, 19 nt, Human herpesvirus 8 (Kaposi`s sarcoma-associated h
ugcccaaaucuguccucau

SEQ ID NO: 193755 - RNA, 16 nt, Human herpesvirus 8 (Kaposi`s sarcoma-associated h
ugcccaaguauggaau

SEQ ID NO: 193756 - RNA, 14 nt, Human herpesvirus 8 (Kaposi`s sarcoma-associated h
ugcccaaucucuca

SEQ ID NO: 193757 - RNA, 20 nt, Human herpesvirus 8 (Kaposi`s sarcoma-associated h
ugcccacccuguacaugaac

SEQ ID NO: 193758 - RNA, 16 nt, Human herpesvirus 8 (Kaposi`s sarcoma-associated h
ugcccagcgacucuca

SEQ ID NO: 193759 - RNA, 13 nt, Human herpesvirus 8 (Kaposi`s sarcoma-associated h
ugcacaacauaug

SEQ ID NO: 193760 - RNA, 15 nt, Human herpesvirus 8 (Kaposi`s sarcoma-associated h
ugcaccucuaucucg

SEQ ID NO: 193761 - RNA, 20 nt, Human herpesvirus 8 (Kaposi`s sarcoma-associated h
ugcacaguauagggauacag

SEQ ID NO: 193762 - RNA, 14 nt, Human herpesvirus 8 (Kaposi`s sarcoma-associated h
ugcaccaagcacaa

SEQ ID NO: 193763 - RNA, 17 nt, Human herpesvirus 8 (Kaposi`s sarcoma-associated h
ugcacucagaacauaaa

SEQ ID NO: 193764 - RNA, 20 nt, Human herpesvirus 8 (Kaposi`s sarcoma-associated h
ugcacuccaagccagucgua

SEQ ID NO: 193765 - RNA, 11 nt, Human herpesvirus 8 (Kaposi`s sarcoma-associated h
ugcacuagcag

SEQ ID NO: 193766 - RNA, 18 nt, Human herpesvirus 8 (Kaposi`s sarcoma-associated h
ugcacuagcagaaaacug

SEQ ID NO: 193767 - RNA, 20 nt, Human herpesvirus 8 (Kaposi`s sarcoma-associated h
ugcaccuugauguuucccac

SEQ ID NO: 193768 - RNA, 20 nt, Human herpesvirus 8 (Kaposi`s sarcoma-associated h
ugcacgcaccaggauccaga

SEQ ID NO: 193769 - RNA, 15 nt, Human herpesvirus 8 (Kaposi`s sarcoma-associated h
ugcaguuggagaaac

SEQ ID NO: 193770 - RNA, 20 nt, Human herpesvirus 8 (Kaposi`s sarcoma-associated h
ugcaguuggagaaacagugg

SEQ ID NO: 193771 - RNA, 13 nt, Human herpesvirus 8 (Kaposi`s sarcoma-associated h
ugcagugugcagu

SEQ ID NO: 193772 - RNA, 23 nt, Human herpesvirus 8 (Kaposi`s sarcoma-associated h
ugcauauggacuguuaacccaau

SEQ ID NO: 193773 - RNA, 14 nt, Human herpesvirus 8 (Kaposi`s sarcoma-associated h
ugcucugcgugcug

SEQ ID NO: 193774 - RNA, 17 nt, Human herpesvirus 8 (Kaposi`s sarcoma-associated h
ugcgugcuucuguuuga

SEQ ID NO: 193775 - RNA, 15 nt, Human herpesvirus 8 (Kaposi`s sarcoma-associated h
ugcgugcaaaaugug

SEQ ID NO: 193776 - RNA, 16 nt, Human herpesvirus 8 (Kaposi`s sarcoma-associated h
ugcgugucuagacaau

SEQ ID NO: 193777 - RNA, 23 nt, Human herpesvirus 8 (Kaposi`s sarcoma-associated h
ugcgcagaacaguacccacgaaa

SEQ ID NO: 193778 - RNA, 20 nt, Human herpesvirus 8 (Kaposi`s sarcoma-associated h
uggacaaccguggagucaca

SEQ ID NO: 193779 - RNA, 14 nt, Human herpesvirus 8 (Kaposi`s sarcoma-associated h
uggacacaacaugc

SEQ ID NO: 193780 - RNA, 11 nt, Human herpesvirus 8 (Kaposi`s sarcoma-associated h
uggacacuccu

SEQ ID NO: 193781 - RNA, 21 nt, Human herpesvirus 8 (Kaposi`s sarcoma-associated h
ugcugaugcgaaugugccagc

SEQ ID NO: 193782 - RNA, 17 nt, Human herpesvirus 8 (Kaposi`s sarcoma-associated h
ugcucuuuucaaccucg

SEQ ID NO: 193783 - RNA, 22 nt, Human herpesvirus 8 (Kaposi`s sarcoma-associated h
ugcugauauaugaguguaaaaa

SEQ ID NO: 193784 - RNA, 14 nt, Human herpesvirus 8 (Kaposi`s sarcoma-associated h
ugcuucuguuugaa

SEQ ID NO: 193785 - RNA, 16 nt, Human herpesvirus 8 (Kaposi`s sarcoma-associated h
ugaggccaagugcauu

SEQ ID NO: 193786 - RNA, 15 nt, Human herpesvirus 8 (Kaposi`s sarcoma-associated h
ugaggaagcaucugg

SEQ ID NO: 193787 - RNA, 15 nt, Human herpesvirus 8 (Kaposi`s sarcoma-associated h
ugaggaagaucuaag

SEQ ID NO: 193788 - RNA, 15 nt, Human herpesvirus 8 (Kaposi`s sarcoma-associated h
ugaguaauguguauu

SEQ ID NO: 193789 - RNA, 16 nt, Human herpesvirus 8 (Kaposi`s sarcoma-associated h
ugagggugaguggaac

SEQ ID NO: 193790 - RNA, 23 nt, Human herpesvirus 8 (Kaposi`s sarcoma-associated h
ugagggaguguuuuuugccaugg

SEQ ID NO: 193791 - RNA, 17 nt, Human herpesvirus 8 (Kaposi`s sarcoma-associated h
ugaggccuaucugagga

SEQ ID NO: 193792 - RNA, 11 nt, Human herpesvirus 8 (Kaposi`s sarcoma-associated h
ugauaaucucc

SEQ ID NO: 193793 - RNA, 16 nt, Human herpesvirus 8 (Kaposi`s sarcoma-associated h
ugagaaauuacugcac

SEQ ID NO: 193794 - RNA, 22 nt, Human herpesvirus 8 (Kaposi`s sarcoma-associated h
ugagagaccccgugauccagga

SEQ ID NO: 193795 - RNA, 16 nt, Human herpesvirus 8 (Kaposi`s sarcoma-associated h
ugagagucagagaaua

SEQ ID NO: 193796 - RNA, 16 nt, Human herpesvirus 8 (Kaposi`s sarcoma-associated h
ugagaggcaauacaga

SEQ ID NO: 193797 - RNA, 20 nt, Human herpesvirus 8 (Kaposi`s sarcoma-associated h
ugagauuucccuacauugcu

SEQ ID NO: 193798 - RNA, 13 nt, Human herpesvirus 8 (Kaposi`s sarcoma-associated h
ugagauagccaca

SEQ ID NO: 193799 - RNA, 12 nt, Human herpesvirus 8 (Kaposi`s sarcoma-associated h
ugagccacaaac

SEQ ID NO: 193800 - RNA, 18 nt, Human herpesvirus 8 (Kaposi`s sarcoma-associated h
ugcaaagcuuaaccacau

SEQ ID NO: 193801 - RNA, 21 nt, Human herpesvirus 8 (Kaposi`s sarcoma-associated h
ugcaaccaacaauauuauuua

SEQ ID NO: 193802 - RNA, 14 nt, Human herpesvirus 8 (Kaposi`s sarcoma-associated h
ugcaaaaugugcuu

SEQ ID NO: 193803 - RNA, 15 nt, Human herpesvirus 8 (Kaposi`s sarcoma-associated h
ugcaaaaugugcuuu

SEQ ID NO: 193804 - RNA, 13 nt, Human herpesvirus 8 (Kaposi`s sarcoma-associated h
ugcaaaagagaca

SEQ ID NO: 193805 - RNA, 14 nt, Human herpesvirus 8 (Kaposi`s sarcoma-associated h
ugauuagcacugua

SEQ ID NO: 193806 - RNA, 22 nt, Human herpesvirus 8 (Kaposi`s sarcoma-associated h
ugauauugcggugguugccgaa

SEQ ID NO: 193807 - RNA, 16 nt, Human herpesvirus 8 (Kaposi`s sarcoma-associated h
ugauaugauauacucc

SEQ ID NO: 193808 - RNA, 17 nt, Human herpesvirus 8 (Kaposi`s sarcoma-associated h
ugauaugauauacuccc

SEQ ID NO: 193809 - RNA, 19 nt, Human herpesvirus 8 (Kaposi`s sarcoma-associated h
ugauauacucccucccaua

SEQ ID NO: 193810 - RNA, 17 nt, Human herpesvirus 8 (Kaposi`s sarcoma-associated h
ugauaggcaacaugaca

SEQ ID NO: 193811 - RNA, 23 nt, Human herpesvirus 8 (Kaposi`s sarcoma-associated h
ugauagcagauauaaacauggca

SEQ ID NO: 193812 - RNA, 18 nt, Human herpesvirus 8 (Kaposi`s sarcoma-associated h
ugauuacagagucacaaa

SEQ ID NO: 193813 - RNA, 22 nt, Human herpesvirus 8 (Kaposi`s sarcoma-associated h
aaggacggaugacggcuccguc

SEQ ID NO: 193814 - RNA, 20 nt, Human herpesvirus 8 (Kaposi`s sarcoma-associated h
aaggaaugcauauggacugu

SEQ ID NO: 193815 - RNA, 12 nt, Human herpesvirus 8 (Kaposi`s sarcoma-associated h
aaggacauggua

SEQ ID NO: 193816 - RNA, 18 nt, Human herpesvirus 8 (Kaposi`s sarcoma-associated h
aaggucaauacauuguga

SEQ ID NO: 193817 - RNA, 19 nt, Human herpesvirus 8 (Kaposi`s sarcoma-associated h
aagucuggcccucacuaca

SEQ ID NO: 193818 - RNA, 18 nt, Human herpesvirus 8 (Kaposi`s sarcoma-associated h
aagucguccgacaugugc

SEQ ID NO: 193819 - RNA, 21 nt, Human herpesvirus 8 (Kaposi`s sarcoma-associated h
aagucguguaagaacauugga

SEQ ID NO: 193820 - RNA, 14 nt, Human herpesvirus 8 (Kaposi`s sarcoma-associated h
aagucuucuuguca

SEQ ID NO: 193821 - RNA, 15 nt, Human herpesvirus 8 (Kaposi`s sarcoma-associated h
aagguuguaacacaa

SEQ ID NO: 193822 - RNA, 16 nt, Human herpesvirus 8 (Kaposi`s sarcoma-associated h
aagcaguggagcaaga

SEQ ID NO: 193823 - RNA, 20 nt, Human herpesvirus 8 (Kaposi`s sarcoma-associated h
aagcagcgcccacuggugua

SEQ ID NO: 193824 - RNA, 13 nt, Human herpesvirus 8 (Kaposi`s sarcoma-associated h
aagcauugucuua

SEQ ID NO: 193825 - RNA, 17 nt, Human herpesvirus 8 (Kaposi`s sarcoma-associated h
aagcaugagacuugaca

SEQ ID NO: 193826 - RNA, 18 nt, Human herpesvirus 8 (Kaposi`s sarcoma-associated h
aagcauccggacugagau

SEQ ID NO: 193827 - RNA, 14 nt, Human herpesvirus 8 (Kaposi`s sarcoma-associated h
aagcugagccacaa

SEQ ID NO: 193828 - RNA, 18 nt, Human herpesvirus 8 (Kaposi`s sarcoma-associated h
aagcucgccgauggcuuu

SEQ ID NO: 193829 - RNA, 18 nt, Human herpesvirus 8 (Kaposi`s sarcoma-associated h
aagcuuaaccacaugcau

SEQ ID NO: 193830 - RNA, 14 nt, Human herpesvirus 8 (Kaposi`s sarcoma-associated h
aagccgagccacaa

SEQ ID NO: 193831 - RNA, 16 nt, Human herpesvirus 8 (Kaposi`s sarcoma-associated h
aauagggauacuguuu

SEQ ID NO: 193832 - RNA, 21 nt, Human herpesvirus 8 (Kaposi`s sarcoma-associated h
aauacugcccaaguauggaau

SEQ ID NO: 193833 - RNA, 13 nt, Human herpesvirus 8 (Kaposi`s sarcoma-associated h
aauagaccucacc

SEQ ID NO: 193834 - RNA, 21 nt, Human herpesvirus 8 (Kaposi`s sarcoma-associated h
aagugcaaccugcugcagcug

SEQ ID NO: 193835 - RNA, 18 nt, Human herpesvirus 8 (Kaposi`s sarcoma-associated h
aauaaagccgagccacaa

SEQ ID NO: 193836 - RNA, 18 nt, Human herpesvirus 8 (Kaposi`s sarcoma-associated h
aauaaagcugagccacaa

SEQ ID NO: 193837 - RNA, 12 nt, Human herpesvirus 8 (Kaposi`s sarcoma-associated h
aauaaacauacg

SEQ ID NO: 193838 - RNA, 19 nt, Human herpesvirus 8 (Kaposi`s sarcoma-associated h
aaucuuuauugucuagaca

SEQ ID NO: 193839 - RNA, 23 nt, Human herpesvirus 8 (Kaposi`s sarcoma-associated h
aaucguuuauucaaaagaacauu

SEQ ID NO: 193840 - RNA, 15 nt, Human herpesvirus 8 (Kaposi`s sarcoma-associated h
aaucuaaauauucuc

SEQ ID NO: 193841 - RNA, 18 nt, Human herpesvirus 8 (Kaposi`s sarcoma-associated h
aauccccggcagcaccug

SEQ ID NO: 193842 - RNA, 19 nt, Human herpesvirus 8 (Kaposi`s sarcoma-associated h
aacucaguugagagucaga

SEQ ID NO: 193843 - RNA, 17 nt, Human herpesvirus 8 (Kaposi`s sarcoma-associated h
aacuaaacauuaccaau

SEQ ID NO: 193844 - RNA, 14 nt, Human herpesvirus 8 (Kaposi`s sarcoma-associated h
aacguguccugcca

SEQ ID NO: 193845 - RNA, 18 nt, Human herpesvirus 8 (Kaposi`s sarcoma-associated h
uuuuucuggucgcugcca

SEQ ID NO: 193846 - RNA, 23 nt, Human herpesvirus 8 (Kaposi`s sarcoma-associated h
uuuuucuggucgcugccagucac

SEQ ID NO: 193847 - RNA, 13 nt, Human herpesvirus 8 (Kaposi`s sarcoma-associated h
aacauagacaugc

SEQ ID NO: 193848 - RNA, 12 nt, Human herpesvirus 8 (Kaposi`s sarcoma-associated h
uuuuuguggcug

SEQ ID NO: 193849 - RNA, 22 nt, Human herpesvirus 8 (Kaposi`s sarcoma-associated h
uuuuuguuauuguuacuugcaa

SEQ ID NO: 193850 - RNA, 14 nt, Human herpesvirus 8 (Kaposi`s sarcoma-associated h
aacauccacaggaa

SEQ ID NO: 193851 - RNA, 20 nt, Human herpesvirus 8 (Kaposi`s sarcoma-associated h
aacaugacauggucugacaa

SEQ ID NO: 193852 - RNA, 13 nt, Human herpesvirus 8 (Kaposi`s sarcoma-associated h
aacgcacacgaau

SEQ ID NO: 193853 - RNA, 21 nt, Human herpesvirus 8 (Kaposi`s sarcoma-associated h
aacgccaucgugcgccuaggc

SEQ ID NO: 193854 - RNA, 16 nt, Human herpesvirus 8 (Kaposi`s sarcoma-associated h
aacgccccucuuggcu

SEQ ID NO: 193855 - RNA, 22 nt, Human herpesvirus 8 (Kaposi`s sarcoma-associated h
aacgccccucuuggcuguuaca

SEQ ID NO: 193856 - RNA, 23 nt, Human herpesvirus 8 (Kaposi`s sarcoma-associated h
aacgccccucuuggcuguuacaa

SEQ ID NO: 193857 - RNA, 23 nt, Human herpesvirus 8 (Kaposi`s sarcoma-associated h
aacaugcuggaucccagugccuc

SEQ ID NO: 193858 - RNA, 20 nt, Human herpesvirus 8 (Kaposi`s sarcoma-associated h
aacgauauggccacccuacu

SEQ ID NO: 193859 - RNA, 18 nt, Human herpesvirus 8 (Kaposi`s sarcoma-associated h
aagauaccgaccaauaca

SEQ ID NO: 193860 - RNA, 19 nt, Human herpesvirus 8 (Kaposi`s sarcoma-associated h
aagauaccgaccaauacaa

SEQ ID NO: 193861 - RNA, 15 nt, Human herpesvirus 8 (Kaposi`s sarcoma-associated h
aagauaacccgagac

SEQ ID NO: 193862 - RNA, 16 nt, Human herpesvirus 8 (Kaposi`s sarcoma-associated h
aagagcacacugugug

SEQ ID NO: 193863 - RNA, 12 nt, Human herpesvirus 8 (Kaposi`s sarcoma-associated h
aagcaccacaua

SEQ ID NO: 193864 - RNA, 19 nt, Human herpesvirus 8 (Kaposi`s sarcoma-associated h
aagcacaacauuaaacaca

SEQ ID NO: 193865 - RNA, 22 nt, Human herpesvirus 8 (Kaposi`s sarcoma-associated h
aagcaacaugcccuuuucugaa

SEQ ID NO: 193866 - RNA, 19 nt, Human herpesvirus 8 (Kaposi`s sarcoma-associated h
aagauugguguccagacag

SEQ ID NO: 193867 - RNA, 11 nt, Human herpesvirus 8 (Kaposi`s sarcoma-associated h
aagaugaagga

SEQ ID NO: 193868 - RNA, 16 nt, Human herpesvirus 8 (Kaposi`s sarcoma-associated h
aagauuaagauuauaa

SEQ ID NO: 193869 - RNA, 22 nt, Human herpesvirus 8 (Kaposi`s sarcoma-associated h
aagacauggugacccacauaga

SEQ ID NO: 193870 - RNA, 17 nt, Human herpesvirus 8 (Kaposi`s sarcoma-associated h
aagaccgcguccuccac

SEQ ID NO: 193871 - RNA, 16 nt, Human herpesvirus 8 (Kaposi`s sarcoma-associated h
aagacuaaaaaggcca

SEQ ID NO: 193872 - RNA, 23 nt, Human herpesvirus 8 (Kaposi`s sarcoma-associated h
aagagagaauuagaaacaaagca

SEQ ID NO: 193873 - RNA, 15 nt, Human herpesvirus 8 (Kaposi`s sarcoma-associated h
aagagaccgcaucuc

SEQ ID NO: 193874 - RNA, 16 nt, Human herpesvirus 8 (Kaposi`s sarcoma-associated h
aagacaguugugaucu

SEQ ID NO: 193875 - RNA, 19 nt, Human herpesvirus 8 (Kaposi`s sarcoma-associated h
aagacaguugugaucucug

SEQ ID NO: 193876 - RNA, 21 nt, Human herpesvirus 8 (Kaposi`s sarcoma-associated h
aagacauagugacuguagaca

SEQ ID NO: 193877 - RNA, 16 nt, Human herpesvirus 8 (Kaposi`s sarcoma-associated h
aacuuuauuacaggua

SEQ ID NO: 193878 - RNA, 18 nt, Human herpesvirus 8 (Kaposi`s sarcoma-associated h
aacuugcgucuucaccuu

SEQ ID NO: 193879 - RNA, 23 nt, Human herpesvirus 8 (Kaposi`s sarcoma-associated h
aacuucuagcauaugcugccaag

SEQ ID NO: 193880 - RNA, 22 nt, Human herpesvirus 8 (Kaposi`s sarcoma-associated h
aacuucuauguuuccuguuaua

SEQ ID NO: 193881 - RNA, 21 nt, Human herpesvirus 8 (Kaposi`s sarcoma-associated h
uucacuauggggucagggugg

SEQ ID NO: 193882 - RNA, 21 nt, Human herpesvirus 8 (Kaposi`s sarcoma-associated h
uucacucagcugccaaggcaa

SEQ ID NO: 193883 - RNA, 11 nt, Human herpesvirus 8 (Kaposi`s sarcoma-associated h
uucacugcugg

SEQ ID NO: 193884 - RNA, 13 nt, Human herpesvirus 8 (Kaposi`s sarcoma-associated h
uucacugcuggua

SEQ ID NO: 193885 - RNA, 15 nt, Human herpesvirus 8 (Kaposi`s sarcoma-associated h
uucagaaaagggcau

SEQ ID NO: 193886 - RNA, 18 nt, Human herpesvirus 8 (Kaposi`s sarcoma-associated h
uucaagagccuaugcugg

SEQ ID NO: 193887 - RNA, 22 nt, Human herpesvirus 8 (Kaposi`s sarcoma-associated h
uucaagagccuaugcugggaca

SEQ ID NO: 193888 - RNA, 15 nt, Human herpesvirus 8 (Kaposi`s sarcoma-associated h
uucagacguccaguu

SEQ ID NO: 193889 - RNA, 15 nt, Human herpesvirus 8 (Kaposi`s sarcoma-associated h
uugaacaauguucau

SEQ ID NO: 193890 - RNA, 19 nt, Human herpesvirus 8 (Kaposi`s sarcoma-associated h
uugaucgcgcggaccuguu

SEQ ID NO: 193891 - RNA, 13 nt, Human herpesvirus 8 (Kaposi`s sarcoma-associated h
uugauguuuccca

SEQ ID NO: 193892 - RNA, 14 nt, Human herpesvirus 8 (Kaposi`s sarcoma-associated h
aacacaaaagcaag

SEQ ID NO: 193893 - RNA, 12 nt, Human herpesvirus 8 (Kaposi`s sarcoma-associated h
aacacaaucacg

SEQ ID NO: 193894 - RNA, 13 nt, Human herpesvirus 8 (Kaposi`s sarcoma-associated h
uugauugugacua

SEQ ID NO: 193895 - RNA, 11 nt, Human herpesvirus 8 (Kaposi`s sarcoma-associated h
uugagcugcau

SEQ ID NO: 193896 - RNA, 12 nt, Human herpesvirus 8 (Kaposi`s sarcoma-associated h
uugaguguaaau

SEQ ID NO: 193897 - RNA, 22 nt, Human herpesvirus 8 (Kaposi`s sarcoma-associated h
aacacgacacgauguuuuccag

SEQ ID NO: 193898 - RNA, 14 nt, Human herpesvirus 8 (Kaposi`s sarcoma-associated h
uugcacacagacac

SEQ ID NO: 193899 - RNA, 23 nt, Human herpesvirus 8 (Kaposi`s sarcoma-associated h
uugcacgccaacccucagugugc

SEQ ID NO: 193900 - RNA, 15 nt, Human herpesvirus 8 (Kaposi`s sarcoma-associated h
uugcaguuggagaaa

SEQ ID NO: 193901 - RNA, 18 nt, Human herpesvirus 8 (Kaposi`s sarcoma-associated h
uugccaaaccccauggca

SEQ ID NO: 193902 - RNA, 19 nt, Human herpesvirus 8 (Kaposi`s sarcoma-associated h
uugccauggagaauaucca

SEQ ID NO: 193903 - RNA, 14 nt, Human herpesvirus 8 (Kaposi`s sarcoma-associated h
uuggacaacuuguc

SEQ ID NO: 193904 - RNA, 17 nt, Human herpesvirus 8 (Kaposi`s sarcoma-associated h
uuggauauagacuuaaa

SEQ ID NO: 193905 - RNA, 20 nt, Human herpesvirus 8 (Kaposi`s sarcoma-associated h
uuggacuagagcgacugcug

SEQ ID NO: 193906 - RNA, 18 nt, Human herpesvirus 8 (Kaposi`s sarcoma-associated h
uugccuaaaaagaugccu

SEQ ID NO: 193907 - RNA, 21 nt, Human herpesvirus 8 (Kaposi`s sarcoma-associated h
uugcgugcaaaaugugcuuug

SEQ ID NO: 193908 - RNA, 21 nt, Human herpesvirus 8 (Kaposi`s sarcoma-associated h
uugcucaagcaacaugcccuu

SEQ ID NO: 193909 - RNA, 21 nt, Human herpesvirus 8 (Kaposi`s sarcoma-associated h
uugcuuaaacgucuguaaaac

SEQ ID NO: 193910 - RNA, 16 nt, Human herpesvirus 8 (Kaposi`s sarcoma-associated h
uuugcuuggcgcugua

SEQ ID NO: 193911 - RNA, 17 nt, Human herpesvirus 8 (Kaposi`s sarcoma-associated h
uuugcuuggcgcuguau

SEQ ID NO: 193912 - RNA, 23 nt, Human herpesvirus 8 (Kaposi`s sarcoma-associated h
uuucugaauguuuguaauuuccu

SEQ ID NO: 193913 - RNA, 12 nt, Human herpesvirus 8 (Kaposi`s sarcoma-associated h
uuuggucucuuu

SEQ ID NO: 193914 - RNA, 15 nt, Human herpesvirus 8 (Kaposi`s sarcoma-associated h
uuuccugugauuucu

SEQ ID NO: 193915 - RNA, 17 nt, Human herpesvirus 8 (Kaposi`s sarcoma-associated h
uuuccugugauuucucu

SEQ ID NO: 193916 - RNA, 18 nt, Human herpesvirus 8 (Kaposi`s sarcoma-associated h
uuuuauuugaaagcaaua

SEQ ID NO: 193917 - RNA, 20 nt, Human herpesvirus 8 (Kaposi`s sarcoma-associated h
uuuuauuugggggaugcugu

SEQ ID NO: 193918 - RNA, 21 nt, Human herpesvirus 8 (Kaposi`s sarcoma-associated h
uuuuaugcaaaauacauuuua

SEQ ID NO: 193919 - RNA, 15 nt, Human herpesvirus 8 (Kaposi`s sarcoma-associated h
aacagguugccaugg

SEQ ID NO: 193920 - RNA, 23 nt, Human herpesvirus 8 (Kaposi`s sarcoma-associated h
aacaguggaauuacguuguagau

SEQ ID NO: 193921 - RNA, 18 nt, Human herpesvirus 8 (Kaposi`s sarcoma-associated h
aacauaauuguaaugugu

SEQ ID NO: 193922 - RNA, 22 nt, Human herpesvirus 8 (Kaposi`s sarcoma-associated h
aacauaauuguaauguguuuua

SEQ ID NO: 193923 - RNA, 21 nt, Human herpesvirus 8 (Kaposi`s sarcoma-associated h
uuuuccauaauggauguuggg

SEQ ID NO: 193924 - RNA, 21 nt, Human herpesvirus 8 (Kaposi`s sarcoma-associated h
uuuuccacaucggugccuuca

SEQ ID NO: 193925 - RNA, 22 nt, Human herpesvirus 8 (Kaposi`s sarcoma-associated h
uugggauucacucagcugccaa

SEQ ID NO: 193926 - RNA, 15 nt, Human herpesvirus 8 (Kaposi`s sarcoma-associated h
uugggaauggccgaa

SEQ ID NO: 193927 - RNA, 20 nt, Human herpesvirus 8 (Kaposi`s sarcoma-associated h
uugguauaugacuacuguga

SEQ ID NO: 193928 - RNA, 19 nt, Human herpesvirus 8 (Kaposi`s sarcoma-associated h
uuggucugcacccuuucau

SEQ ID NO: 193929 - RNA, 19 nt, Human herpesvirus 8 (Kaposi`s sarcoma-associated h
uuggucuuauaacagugcu

SEQ ID NO: 193930 - RNA, 16 nt, Human herpesvirus 8 (Kaposi`s sarcoma-associated h
uugguaacucccucaa

SEQ ID NO: 193931 - RNA, 13 nt, Human herpesvirus 8 (Kaposi`s sarcoma-associated h
uuguaugauacuu

SEQ ID NO: 193932 - RNA, 17 nt, Human herpesvirus 8 (Kaposi`s sarcoma-associated h
uuguaugggcauauacu

SEQ ID NO: 193933 - RNA, 14 nt, Human herpesvirus 8 (Kaposi`s sarcoma-associated h
uuguggcaccugag

SEQ ID NO: 193934 - RNA, 10 nt, Human herpesvirus 8 (Kaposi`s sarcoma-associated h
uuguggcauu

SEQ ID NO: 193935 - RNA, 21 nt, Human herpesvirus 8 (Kaposi`s sarcoma-associated h
uuguggucucucuugcugguc

SEQ ID NO: 193936 - RNA, 13 nt, Human herpesvirus 8 (Kaposi`s sarcoma-associated h
uuguuagauggca

SEQ ID NO: 193937 - RNA, 12 nt, Human herpesvirus 8 (Kaposi`s sarcoma-associated h
uuguugaccaug

SEQ ID NO: 193938 - RNA, 16 nt, Human herpesvirus 8 (Kaposi`s sarcoma-associated h
uuuauuacagguauga

SEQ ID NO: 193939 - RNA, 21 nt, Human herpesvirus 8 (Kaposi`s sarcoma-associated h
uuuauguuguuuguauaacau

SEQ ID NO: 193940 - RNA, 16 nt, Human herpesvirus 8 (Kaposi`s sarcoma-associated h
uuuacuuuuacaagga

SEQ ID NO: 193941 - RNA, 14 nt, Human herpesvirus 8 (Kaposi`s sarcoma-associated h
uuuauggacauuua

SEQ ID NO: 193942 - RNA, 20 nt, Human herpesvirus 8 (Kaposi`s sarcoma-associated h
uuuaugcaaaauacauuuua

SEQ ID NO: 193943 - RNA, 11 nt, Human herpesvirus 8 (Kaposi`s sarcoma-associated h
uacauuaucuu

SEQ ID NO: 193944 - RNA, 19 nt, Human herpesvirus 8 (Kaposi`s sarcoma-associated h
uaccucaacccacacuggc

SEQ ID NO: 193945 - RNA, 20 nt, Human herpesvirus 8 (Kaposi`s sarcoma-associated h
uaccucaacccacacuggcc

SEQ ID NO: 193946 - RNA, 19 nt, Human herpesvirus 8 (Kaposi`s sarcoma-associated h
uacaugccccuuaucucca

SEQ ID NO: 193947 - RNA, 20 nt, Human herpesvirus 8 (Kaposi`s sarcoma-associated h
uacaugccccuuaucuccac

SEQ ID NO: 193948 - RNA, 20 nt, Human herpesvirus 8 (Kaposi`s sarcoma-associated h
uacauggagggaauggccuc

SEQ ID NO: 193949 - RNA, 17 nt, Human herpesvirus 8 (Kaposi`s sarcoma-associated h
uacauggaauacgggag

SEQ ID NO: 193950 - RNA, 12 nt, Human herpesvirus 8 (Kaposi`s sarcoma-associated h
uacgugccagug

SEQ ID NO: 193951 - RNA, 20 nt, Human herpesvirus 8 (Kaposi`s sarcoma-associated h
uacgugaguuacauggaaua

SEQ ID NO: 193952 - RNA, 14 nt, Human herpesvirus 8 (Kaposi`s sarcoma-associated h
uacucaaaugggaa

SEQ ID NO: 193953 - RNA, 15 nt, Human herpesvirus 8 (Kaposi`s sarcoma-associated h
aacaacgcacugguu

SEQ ID NO: 193954 - RNA, 19 nt, Human herpesvirus 8 (Kaposi`s sarcoma-associated h
uaauuaucacggacgccac

SEQ ID NO: 193955 - RNA, 18 nt, Human herpesvirus 8 (Kaposi`s sarcoma-associated h
uaauuggauauagacuua

SEQ ID NO: 193956 - RNA, 18 nt, Human herpesvirus 8 (Kaposi`s sarcoma-associated h
uaagucguccgacaugug

SEQ ID NO: 193957 - RNA, 15 nt, Human herpesvirus 8 (Kaposi`s sarcoma-associated h
uaauaaagucauuaa

SEQ ID NO: 193958 - RNA, 20 nt, Human herpesvirus 8 (Kaposi`s sarcoma-associated h
uacaauaaagcugagccaca

SEQ ID NO: 193959 - RNA, 19 nt, Human herpesvirus 8 (Kaposi`s sarcoma-associated h
uacaagcaaugauagacau

SEQ ID NO: 193960 - RNA, 20 nt, Human herpesvirus 8 (Kaposi`s sarcoma-associated h
uacauagucacaucugugua

SEQ ID NO: 193961 - RNA, 19 nt, Human herpesvirus 8 (Kaposi`s sarcoma-associated h
uacagguauacucaaggca

SEQ ID NO: 193962 - RNA, 16 nt, Human herpesvirus 8 (Kaposi`s sarcoma-associated h
uacauaacacacacaa

SEQ ID NO: 193963 - RNA, 19 nt, Human herpesvirus 8 (Kaposi`s sarcoma-associated h
uacauaacacacacaaaga

SEQ ID NO: 193964 - RNA, 13 nt, Human herpesvirus 8 (Kaposi`s sarcoma-associated h
uaaaacggccaaa

SEQ ID NO: 193965 - RNA, 16 nt, Human herpesvirus 8 (Kaposi`s sarcoma-associated h
uaaaacgaagcaaagu

SEQ ID NO: 193966 - RNA, 18 nt, Human herpesvirus 8 (Kaposi`s sarcoma-associated h
uaaaacgaagcaaagugu

SEQ ID NO: 193967 - RNA, 20 nt, Human herpesvirus 8 (Kaposi`s sarcoma-associated h
uaaaacgaagcaaagugucu

SEQ ID NO: 193968 - RNA, 14 nt, Human herpesvirus 8 (Kaposi`s sarcoma-associated h
guugcacacagaca

SEQ ID NO: 193969 - RNA, 15 nt, Human herpesvirus 8 (Kaposi`s sarcoma-associated h
uaaaaggacauugua

SEQ ID NO: 193970 - RNA, 14 nt, Human herpesvirus 8 (Kaposi`s sarcoma-associated h
uaaaagucuggccc

SEQ ID NO: 193971 - RNA, 23 nt, Human herpesvirus 8 (Kaposi`s sarcoma-associated h
uaaaagucuggcccucacuacag

SEQ ID NO: 193972 - RNA, 22 nt, Human herpesvirus 8 (Kaposi`s sarcoma-associated h
guugaucuucuugacgcuccau

SEQ ID NO: 193973 - RNA, 14 nt, Human herpesvirus 8 (Kaposi`s sarcoma-associated h
guugacacaaugug

SEQ ID NO: 193974 - RNA, 14 nt, Human herpesvirus 8 (Kaposi`s sarcoma-associated h
guugaaugugauca

SEQ ID NO: 193975 - RNA, 20 nt, Human herpesvirus 8 (Kaposi`s sarcoma-associated h
guugaaugugaucacggagc

SEQ ID NO: 193976 - RNA, 19 nt, Human herpesvirus 8 (Kaposi`s sarcoma-associated h
guucuaaucuggcauguau

SEQ ID NO: 193977 - RNA, 19 nt, Human herpesvirus 8 (Kaposi`s sarcoma-associated h
guucuuauugaagcauguu

SEQ ID NO: 193978 - RNA, 22 nt, Human herpesvirus 8 (Kaposi`s sarcoma-associated h
uaaaaguucuauuuaaggcagu

SEQ ID NO: 193979 - RNA, 15 nt, Human herpesvirus 8 (Kaposi`s sarcoma-associated h
uaaaauaaaauacaa

SEQ ID NO: 193980 - RNA, 20 nt, Human herpesvirus 8 (Kaposi`s sarcoma-associated h
uaaaauacaaaaacacaauc

SEQ ID NO: 193981 - RNA, 21 nt, Human herpesvirus 8 (Kaposi`s sarcoma-associated h
uaaacccacagcccauaguau

SEQ ID NO: 193982 - RNA, 20 nt, Human herpesvirus 8 (Kaposi`s sarcoma-associated h
uaaacgucuguaaaacacug

SEQ ID NO: 193983 - RNA, 22 nt, Human herpesvirus 8 (Kaposi`s sarcoma-associated h
uaaacguguaacccugccaaau

SEQ ID NO: 193984 - RNA, 22 nt, Human herpesvirus 8 (Kaposi`s sarcoma-associated h
uaaaggggacgugucauugcca

SEQ ID NO: 193985 - RNA, 18 nt, Human herpesvirus 8 (Kaposi`s sarcoma-associated h
uaagcuuugcagccaggu

SEQ ID NO: 193986 - RNA, 17 nt, Human herpesvirus 8 (Kaposi`s sarcoma-associated h
uaaggcccccaccaaac

SEQ ID NO: 193987 - RNA, 19 nt, Human herpesvirus 8 (Kaposi`s sarcoma-associated h
uaagccaauugacugugga

SEQ ID NO: 193988 - RNA, 14 nt, Human herpesvirus 8 (Kaposi`s sarcoma-associated h
uaagacaaacacug

SEQ ID NO: 193989 - RNA, 15 nt, Human herpesvirus 8 (Kaposi`s sarcoma-associated h
uaagacaaacacugu

SEQ ID NO: 193990 - RNA, 16 nt, Human herpesvirus 8 (Kaposi`s sarcoma-associated h
uaagacaaacacugug

SEQ ID NO: 193991 - RNA, 14 nt, Human herpesvirus 8 (Kaposi`s sarcoma-associated h
uaacugcaugcucg

SEQ ID NO: 193992 - RNA, 14 nt, Human herpesvirus 8 (Kaposi`s sarcoma-associated h
uaacuucaccucca

SEQ ID NO: 193993 - RNA, 18 nt, Human herpesvirus 8 (Kaposi`s sarcoma-associated h
uaacuuuauuacagguau

SEQ ID NO: 193994 - RNA, 18 nt, Human herpesvirus 8 (Kaposi`s sarcoma-associated h
uaacggcuucggcauuau

SEQ ID NO: 193995 - RNA, 19 nt, Human herpesvirus 8 (Kaposi`s sarcoma-associated h
uaacggcuucggcauuauu

SEQ ID NO: 193996 - RNA, 18 nt, Human herpesvirus 8 (Kaposi`s sarcoma-associated h
uaacaguuuggugcaaag

SEQ ID NO: 193997 - RNA, 19 nt, Human herpesvirus 8 (Kaposi`s sarcoma-associated h
uaacgccugcaccucuauc

SEQ ID NO: 193998 - RNA, 14 nt, Human herpesvirus 8 (Kaposi`s sarcoma-associated h
uaacagcaacaugu

SEQ ID NO: 193999 - RNA, 12 nt, Human herpesvirus 8 (Kaposi`s sarcoma-associated h
uaaauauucucu

SEQ ID NO: 194000 - RNA, 17 nt, Human herpesvirus 8 (Kaposi`s sarcoma-associated h
guauggcgucaucugau

SEQ ID NO: 194001 - RNA, 19 nt, Human herpesvirus 8 (Kaposi`s sarcoma-associated h
guaugacccugagcuggua

SEQ ID NO: 194002 - RNA, 13 nt, Human herpesvirus 8 (Kaposi`s sarcoma-associated h
guaugacugcccu

SEQ ID NO: 194003 - RNA, 16 nt, Human herpesvirus 8 (Kaposi`s sarcoma-associated h
guauuucugcauugua

SEQ ID NO: 194004 - RNA, 19 nt, Human herpesvirus 8 (Kaposi`s sarcoma-associated h
guauuucugcauuguagug

SEQ ID NO: 194005 - RNA, 13 nt, Human herpesvirus 8 (Kaposi`s sarcoma-associated h
guauuguacuaaa

SEQ ID NO: 194006 - RNA, 18 nt, Human herpesvirus 8 (Kaposi`s sarcoma-associated h
guauuuaaagcuggguau

SEQ ID NO: 194007 - RNA, 13 nt, Human herpesvirus 8 (Kaposi`s sarcoma-associated h
guauucucugacu

SEQ ID NO: 194008 - RNA, 22 nt, Human herpesvirus 8 (Kaposi`s sarcoma-associated h
guauucuagagcccgcugcuau

SEQ ID NO: 194009 - RNA, 14 nt, Human herpesvirus 8 (Kaposi`s sarcoma-associated h
gucaauacauugug

SEQ ID NO: 194010 - RNA, 15 nt, Human herpesvirus 8 (Kaposi`s sarcoma-associated h
gucaauacauuguga

SEQ ID NO: 194011 - RNA, 22 nt, Human herpesvirus 8 (Kaposi`s sarcoma-associated h
gucacaaagggggcaaccucuu

SEQ ID NO: 194012 - RNA, 19 nt, Human herpesvirus 8 (Kaposi`s sarcoma-associated h
gucagcagcaagcacagaa

SEQ ID NO: 194013 - RNA, 21 nt, Human herpesvirus 8 (Kaposi`s sarcoma-associated h
gucagagaauacagugcuaau

SEQ ID NO: 194014 - RNA, 22 nt, Human herpesvirus 8 (Kaposi`s sarcoma-associated h
gucacuagaauuggagcacuuu

SEQ ID NO: 194015 - RNA, 16 nt, Human herpesvirus 8 (Kaposi`s sarcoma-associated h
gucacgucgcucuuua

SEQ ID NO: 194016 - RNA, 14 nt, Human herpesvirus 8 (Kaposi`s sarcoma-associated h
guccacgacuacgu

SEQ ID NO: 194017 - RNA, 16 nt, Human herpesvirus 8 (Kaposi`s sarcoma-associated h
guccacaagucuaagg

SEQ ID NO: 194018 - RNA, 21 nt, Human herpesvirus 8 (Kaposi`s sarcoma-associated h
gucauggaauuguauagacca

SEQ ID NO: 194019 - RNA, 23 nt, Human herpesvirus 8 (Kaposi`s sarcoma-associated h
gucaucccgccgguugguggugu

SEQ ID NO: 194020 - RNA, 18 nt, Human herpesvirus 8 (Kaposi`s sarcoma-associated h
gucaucgccgccgccaaa

SEQ ID NO: 194021 - RNA, 12 nt, Human herpesvirus 8 (Kaposi`s sarcoma-associated h
gggguuccagug

SEQ ID NO: 194022 - RNA, 19 nt, Human herpesvirus 8 (Kaposi`s sarcoma-associated h
ggggguggguucagcgggu

SEQ ID NO: 194023 - RNA, 20 nt, Human herpesvirus 8 (Kaposi`s sarcoma-associated h
guacgguagggcuccugggu

SEQ ID NO: 194024 - RNA, 18 nt, Human herpesvirus 8 (Kaposi`s sarcoma-associated h
gggugaccccuagccggu

SEQ ID NO: 194025 - RNA, 21 nt, Human herpesvirus 8 (Kaposi`s sarcoma-associated h
gggugaaacccggauuugccc

SEQ ID NO: 194026 - RNA, 17 nt, Human herpesvirus 8 (Kaposi`s sarcoma-associated h
guagaaucaaugugguu

SEQ ID NO: 194027 - RNA, 22 nt, Human herpesvirus 8 (Kaposi`s sarcoma-associated h
guagacgcaggcgccuaugacu

SEQ ID NO: 194028 - RNA, 14 nt, Human herpesvirus 8 (Kaposi`s sarcoma-associated h
guagcaugcugaug

SEQ ID NO: 194029 - RNA, 15 nt, Human herpesvirus 8 (Kaposi`s sarcoma-associated h
guauacucaaggcaa

SEQ ID NO: 194030 - RNA, 18 nt, Human herpesvirus 8 (Kaposi`s sarcoma-associated h
guauaacaugcaacccuc

SEQ ID NO: 194031 - RNA, 18 nt, Human herpesvirus 8 (Kaposi`s sarcoma-associated h
guauaaccgugcuacuua

SEQ ID NO: 194032 - RNA, 21 nt, Human herpesvirus 8 (Kaposi`s sarcoma-associated h
guaguccaaauaaaccagaca

SEQ ID NO: 194033 - RNA, 14 nt, Human herpesvirus 8 (Kaposi`s sarcoma-associated h
guagcugccuggua

SEQ ID NO: 194034 - RNA, 21 nt, Human herpesvirus 8 (Kaposi`s sarcoma-associated h
guaggucuccgagcacugcga

SEQ ID NO: 194035 - RNA, 15 nt, Human herpesvirus 8 (Kaposi`s sarcoma-associated h
guaggcguagagggu

SEQ ID NO: 194036 - RNA, 21 nt, Human herpesvirus 8 (Kaposi`s sarcoma-associated h
guagggcuccuggguagcuau

SEQ ID NO: 194037 - RNA, 21 nt, Human herpesvirus 8 (Kaposi`s sarcoma-associated h
guccgcucucccaaaccacac

SEQ ID NO: 194038 - RNA, 19 nt, Human herpesvirus 8 (Kaposi`s sarcoma-associated h
gucccucuuggcuguuaca

SEQ ID NO: 194039 - RNA, 22 nt, Human herpesvirus 8 (Kaposi`s sarcoma-associated h
gucccucagccacaaauaauga

SEQ ID NO: 194040 - RNA, 16 nt, Human herpesvirus 8 (Kaposi`s sarcoma-associated h
guccgccaucaccaac

SEQ ID NO: 194041 - RNA, 16 nt, Human herpesvirus 8 (Kaposi`s sarcoma-associated h
guccccugcaaugcaa

SEQ ID NO: 194042 - RNA, 17 nt, Human herpesvirus 8 (Kaposi`s sarcoma-associated h
guccccaauuucaguac

SEQ ID NO: 194043 - RNA, 15 nt, Human herpesvirus 8 (Kaposi`s sarcoma-associated h
guccagccacaucag

SEQ ID NO: 194044 - RNA, 16 nt, Human herpesvirus 8 (Kaposi`s sarcoma-associated h
gucuuauaacagugcu

SEQ ID NO: 194045 - RNA, 17 nt, Human herpesvirus 8 (Kaposi`s sarcoma-associated h
gucuguaaaacacuguu

SEQ ID NO: 194046 - RNA, 15 nt, Human herpesvirus 8 (Kaposi`s sarcoma-associated h
gucuguaaagaaagu

SEQ ID NO: 194047 - RNA, 23 nt, Human herpesvirus 8 (Kaposi`s sarcoma-associated h
gucugugcguacuuaacuguuua

SEQ ID NO: 194048 - RNA, 14 nt, Human herpesvirus 8 (Kaposi`s sarcoma-associated h
gugagacaucuccg

SEQ ID NO: 194049 - RNA, 24 nt, Human herpesvirus 8 (Kaposi`s sarcoma-associated h
gucuuguaaaaauaaaugugaaug

SEQ ID NO: 194050 - RNA, 19 nt, Human herpesvirus 8 (Kaposi`s sarcoma-associated h
gucuuuaacgccugcaccu

SEQ ID NO: 194051 - RNA, 21 nt, Human herpesvirus 8 (Kaposi`s sarcoma-associated h
gucuucgccuaugaaaauaca

SEQ ID NO: 194052 - RNA, 19 nt, Human herpesvirus 8 (Kaposi`s sarcoma-associated h
gugcccugguugacacaau

SEQ ID NO: 194053 - RNA, 22 nt, Human herpesvirus 8 (Kaposi`s sarcoma-associated h
gugcccugguugacacaaugug

SEQ ID NO: 194054 - RNA, 13 nt, Human herpesvirus 8 (Kaposi`s sarcoma-associated h
guggacaccacau

SEQ ID NO: 194055 - RNA, 21 nt, Human herpesvirus 8 (Kaposi`s sarcoma-associated h
gugccugguggagcacgaaga

SEQ ID NO: 194056 - RNA, 23 nt, Human herpesvirus 8 (Kaposi`s sarcoma-associated h
gugccuccuuagaccuacaucuc

SEQ ID NO: 194057 - RNA, 18 nt, Human herpesvirus 8 (Kaposi`s sarcoma-associated h
gugcacuaccuaucugcu

SEQ ID NO: 194058 - RNA, 22 nt, Human herpesvirus 8 (Kaposi`s sarcoma-associated h
gugaucucuggagacggccauc

SEQ ID NO: 194059 - RNA, 20 nt, Human herpesvirus 8 (Kaposi`s sarcoma-associated h
guuccacggcguguuuugcc

SEQ ID NO: 194060 - RNA, 12 nt, Human herpesvirus 8 (Kaposi`s sarcoma-associated h
guucauaccuca

SEQ ID NO: 194061 - RNA, 19 nt, Human herpesvirus 8 (Kaposi`s sarcoma-associated h
guucauauucccaccucca

SEQ ID NO: 194062 - RNA, 22 nt, Human herpesvirus 8 (Kaposi`s sarcoma-associated h
guuaagcuuugcagccagguaa

SEQ ID NO: 194063 - RNA, 14 nt, Human herpesvirus 8 (Kaposi`s sarcoma-associated h
guuaagaagccacu

SEQ ID NO: 194064 - RNA, 12 nt, Human herpesvirus 8 (Kaposi`s sarcoma-associated h
guucaaccugga

SEQ ID NO: 194065 - RNA, 20 nt, Human herpesvirus 8 (Kaposi`s sarcoma-associated h
guucacugcugguaucugga

SEQ ID NO: 194066 - RNA, 17 nt, Human herpesvirus 8 (Kaposi`s sarcoma-associated h
guuaugggugugugcca

SEQ ID NO: 194067 - RNA, 20 nt, Human herpesvirus 8 (Kaposi`s sarcoma-associated h
guuaugggugugugccagua

SEQ ID NO: 194068 - RNA, 23 nt, Human herpesvirus 8 (Kaposi`s sarcoma-associated h
gugguagagaccgacgccaucaa

SEQ ID NO: 194069 - RNA, 18 nt, Human herpesvirus 8 (Kaposi`s sarcoma-associated h
gugguaagggaagcaaaa

SEQ ID NO: 194070 - RNA, 17 nt, Human herpesvirus 8 (Kaposi`s sarcoma-associated h
guggugcccugcccuca

SEQ ID NO: 194071 - RNA, 20 nt, Human herpesvirus 8 (Kaposi`s sarcoma-associated h
guggucuccggugccuguug

SEQ ID NO: 194072 - RNA, 18 nt, Human herpesvirus 8 (Kaposi`s sarcoma-associated h
guggaucuagacugcuag

SEQ ID NO: 194073 - RNA, 15 nt, Human herpesvirus 8 (Kaposi`s sarcoma-associated h
guggaugagaggguu

SEQ ID NO: 194074 - RNA, 20 nt, Human herpesvirus 8 (Kaposi`s sarcoma-associated h
guggauccgcaaugucaggu

SEQ ID NO: 194075 - RNA, 22 nt, Human herpesvirus 8 (Kaposi`s sarcoma-associated h
guguuuuucuggucgcugccag

SEQ ID NO: 194076 - RNA, 13 nt, Human herpesvirus 8 (Kaposi`s sarcoma-associated h
guguuugcugcug

SEQ ID NO: 194077 - RNA, 21 nt, Human herpesvirus 8 (Kaposi`s sarcoma-associated h
guguaagcaagucgauuugaa

SEQ ID NO: 194078 - RNA, 19 nt, Human herpesvirus 8 (Kaposi`s sarcoma-associated h
guguaucccccacaggaca

SEQ ID NO: 194079 - RNA, 19 nt, Human herpesvirus 8 (Kaposi`s sarcoma-associated h
uauuaaaguggugaucuua

SEQ ID NO: 194080 - RNA, 22 nt, Human herpesvirus 8 (Kaposi`s sarcoma-associated h
uaugucauuuuuacuuuuacaa

SEQ ID NO: 194081 - RNA, 16 nt, Human herpesvirus 8 (Kaposi`s sarcoma-associated h
uauguccuucacuuug

SEQ ID NO: 194082 - RNA, 19 nt, Human herpesvirus 8 (Kaposi`s sarcoma-associated h
uaugucccaaagacuguuu

SEQ ID NO: 194083 - RNA, 17 nt, Human herpesvirus 8 (Kaposi`s sarcoma-associated h
uauuguuuuugaacaug

SEQ ID NO: 194084 - RNA, 21 nt, Human herpesvirus 8 (Kaposi`s sarcoma-associated h
uauugucuagacacgcaaagu

SEQ ID NO: 194085 - RNA, 15 nt, Human herpesvirus 8 (Kaposi`s sarcoma-associated h
uauuaucaaagaaag

SEQ ID NO: 194086 - RNA, 23 nt, Human herpesvirus 8 (Kaposi`s sarcoma-associated h
uauuaucaaagaaaggugacuua

SEQ ID NO: 194087 - RNA, 21 nt, Human herpesvirus 8 (Kaposi`s sarcoma-associated h
ucaagaccgagcguauucuca

SEQ ID NO: 194088 - RNA, 22 nt, Human herpesvirus 8 (Kaposi`s sarcoma-associated h
ucaagaccgagcguauucucag

SEQ ID NO: 194089 - RNA, 23 nt, Human herpesvirus 8 (Kaposi`s sarcoma-associated h
ucaacuaaggggcuuaugucauu

SEQ ID NO: 194090 - RNA, 14 nt, Human herpesvirus 8 (Kaposi`s sarcoma-associated h
ucaacgucucuaua

SEQ ID NO: 194091 - RNA, 16 nt, Human herpesvirus 8 (Kaposi`s sarcoma-associated h
ucaaauaaaacggugu

SEQ ID NO: 194092 - RNA, 19 nt, Human herpesvirus 8 (Kaposi`s sarcoma-associated h
ucaaagacgccuuccucag

SEQ ID NO: 194093 - RNA, 14 nt, Human herpesvirus 8 (Kaposi`s sarcoma-associated h
uauuuaucagucca

SEQ ID NO: 194094 - RNA, 22 nt, Human herpesvirus 8 (Kaposi`s sarcoma-associated h
uauuuauuuuuuacuacaggua

SEQ ID NO: 194095 - RNA, 21 nt, Human herpesvirus 8 (Kaposi`s sarcoma-associated h
uauuuaaggcagucuaucguc

SEQ ID NO: 194096 - RNA, 11 nt, Human herpesvirus 8 (Kaposi`s sarcoma-associated h
uauuucaagag

SEQ ID NO: 194097 - RNA, 18 nt, Human herpesvirus 8 (Kaposi`s sarcoma-associated h
ucaaagaaaggugacuua

SEQ ID NO: 194098 - RNA, 15 nt, Human herpesvirus 8 (Kaposi`s sarcoma-associated h
ucaauuggaugcuau

SEQ ID NO: 194099 - RNA, 13 nt, Human herpesvirus 8 (Kaposi`s sarcoma-associated h
ucaccgacaccau

SEQ ID NO: 194100 - RNA, 21 nt, Human herpesvirus 8 (Kaposi`s sarcoma-associated h
ucaccccagauguucuugcca

SEQ ID NO: 194101 - RNA, 16 nt, Human herpesvirus 8 (Kaposi`s sarcoma-associated h
ucaccccagcuccuau

SEQ ID NO: 194102 - RNA, 14 nt, Human herpesvirus 8 (Kaposi`s sarcoma-associated h
ucacccagugugcg

SEQ ID NO: 194103 - RNA, 19 nt, Human herpesvirus 8 (Kaposi`s sarcoma-associated h
ucaggauuucgaauaucuc

SEQ ID NO: 194104 - RNA, 19 nt, Human herpesvirus 8 (Kaposi`s sarcoma-associated h
ucagguucacuugggagcu

SEQ ID NO: 194105 - RNA, 18 nt, Human herpesvirus 8 (Kaposi`s sarcoma-associated h
ucaggucugucacuagaa

SEQ ID NO: 194106 - RNA, 13 nt, Human herpesvirus 8 (Kaposi`s sarcoma-associated h
ucacugcugguau

SEQ ID NO: 194107 - RNA, 19 nt, Human herpesvirus 8 (Kaposi`s sarcoma-associated h
ucacugggggucucgggaa

SEQ ID NO: 194108 - RNA, 17 nt, Human herpesvirus 8 (Kaposi`s sarcoma-associated h
uagaacuaaccacucau

SEQ ID NO: 194109 - RNA, 16 nt, Human herpesvirus 8 (Kaposi`s sarcoma-associated h
uacugggaucccuuca

SEQ ID NO: 194110 - RNA, 13 nt, Human herpesvirus 8 (Kaposi`s sarcoma-associated h
uacugccagaccc

SEQ ID NO: 194111 - RNA, 19 nt, Human herpesvirus 8 (Kaposi`s sarcoma-associated h
uacugcccaaguauggaau

SEQ ID NO: 194112 - RNA, 17 nt, Human herpesvirus 8 (Kaposi`s sarcoma-associated h
uacugugggugcacuga

SEQ ID NO: 194113 - RNA, 21 nt, Human herpesvirus 8 (Kaposi`s sarcoma-associated h
uagaaacaaagcacuggcugc

SEQ ID NO: 194114 - RNA, 23 nt, Human herpesvirus 8 (Kaposi`s sarcoma-associated h
uagaaaccccgcccccuggugcu

SEQ ID NO: 194115 - RNA, 16 nt, Human herpesvirus 8 (Kaposi`s sarcoma-associated h
uauacucccucccaua

SEQ ID NO: 194116 - RNA, 16 nt, Human herpesvirus 8 (Kaposi`s sarcoma-associated h
uauacagguaaaacgg

SEQ ID NO: 194117 - RNA, 22 nt, Human herpesvirus 8 (Kaposi`s sarcoma-associated h
uauacagguaaaacggccaaag

SEQ ID NO: 194118 - RNA, 17 nt, Human herpesvirus 8 (Kaposi`s sarcoma-associated h
uauacagguguccaaga

SEQ ID NO: 194119 - RNA, 15 nt, Human herpesvirus 8 (Kaposi`s sarcoma-associated h
uagaaugaagugcaa

SEQ ID NO: 194120 - RNA, 23 nt, Human herpesvirus 8 (Kaposi`s sarcoma-associated h
uauauuggcauuauaaacccauc

SEQ ID NO: 194121 - RNA, 16 nt, Human herpesvirus 8 (Kaposi`s sarcoma-associated h
uauaugacuacuguga

SEQ ID NO: 194122 - RNA, 23 nt, Human herpesvirus 8 (Kaposi`s sarcoma-associated h
uaugcagcagcgugacacuacua

SEQ ID NO: 194123 - RNA, 23 nt, Human herpesvirus 8 (Kaposi`s sarcoma-associated h
uauggacauuuaccaugguuauu

SEQ ID NO: 194124 - RNA, 15 nt, Human herpesvirus 8 (Kaposi`s sarcoma-associated h
uauggcgcaagcacu

SEQ ID NO: 194125 - RNA, 12 nt, Human herpesvirus 8 (Kaposi`s sarcoma-associated h
uaugcaccucca

SEQ ID NO: 194126 - RNA, 15 nt, Human herpesvirus 8 (Kaposi`s sarcoma-associated h
uaugaggucggauac

SEQ ID NO: 194127 - RNA, 20 nt, Human herpesvirus 8 (Kaposi`s sarcoma-associated h
uaugaggucggauacuuauu

SEQ ID NO: 194128 - RNA, 15 nt, Human herpesvirus 8 (Kaposi`s sarcoma-associated h
uaugaggccuaucug

SEQ ID NO: 194129 - RNA, 14 nt, Human herpesvirus 8 (Kaposi`s sarcoma-associated h
uaugacuacuguga

SEQ ID NO: 194130 - RNA, 23 nt, Human herpesvirus 8 (Kaposi`s sarcoma-associated h
uaugacuacugugaaguuuacau

SEQ ID NO: 194131 - RNA, 15 nt, Human herpesvirus 8 (Kaposi`s sarcoma-associated h
uaucgucuccagauc

SEQ ID NO: 194132 - RNA, 19 nt, Human herpesvirus 8 (Kaposi`s sarcoma-associated h
uaucuaucucugguggugg

SEQ ID NO: 194133 - RNA, 18 nt, Human herpesvirus 8 (Kaposi`s sarcoma-associated h
uaucucuggugguggcua

SEQ ID NO: 194134 - RNA, 17 nt, Human herpesvirus 8 (Kaposi`s sarcoma-associated h
uaucaugugaacaauaa

SEQ ID NO: 194135 - RNA, 19 nt, Human herpesvirus 8 (Kaposi`s sarcoma-associated h
uauccgcaacuucuauguu

SEQ ID NO: 194136 - RNA, 15 nt, Human herpesvirus 8 (Kaposi`s sarcoma-associated h
uaucaacccuacucg

SEQ ID NO: 194137 - RNA, 21 nt, Human herpesvirus 8 (Kaposi`s sarcoma-associated h
uaucagaacaguggugcacua

SEQ ID NO: 194138 - RNA, 16 nt, Human herpesvirus 8 (Kaposi`s sarcoma-associated h
uccagccacaucagcu

SEQ ID NO: 194139 - RNA, 23 nt, Human herpesvirus 8 (Kaposi`s sarcoma-associated h
ucaucuacccugauuagcacugu

SEQ ID NO: 194140 - RNA, 13 nt, Human herpesvirus 8 (Kaposi`s sarcoma-associated h
ucaucguagcuca

SEQ ID NO: 194141 - RNA, 19 nt, Human herpesvirus 8 (Kaposi`s sarcoma-associated h
ucauccuguuggucugcuu

SEQ ID NO: 194142 - RNA, 20 nt, Human herpesvirus 8 (Kaposi`s sarcoma-associated h
ucaucgcgaccgcugccaau

SEQ ID NO: 194143 - RNA, 15 nt, Human herpesvirus 8 (Kaposi`s sarcoma-associated h
ucccauucaugccuu

SEQ ID NO: 194144 - RNA, 15 nt, Human herpesvirus 8 (Kaposi`s sarcoma-associated h
ucccuucacagugcg

SEQ ID NO: 194145 - RNA, 17 nt, Human herpesvirus 8 (Kaposi`s sarcoma-associated h
ucccucuuggcuguuac

SEQ ID NO: 194146 - RNA, 19 nt, Human herpesvirus 8 (Kaposi`s sarcoma-associated h
ucccucuuggcuguuacaa

SEQ ID NO: 194147 - RNA, 15 nt, Human herpesvirus 8 (Kaposi`s sarcoma-associated h
ucccuccugcauuug

SEQ ID NO: 194148 - RNA, 18 nt, Human herpesvirus 8 (Kaposi`s sarcoma-associated h
ucccccaccgagugcuuu

SEQ ID NO: 194149 - RNA, 17 nt, Human herpesvirus 8 (Kaposi`s sarcoma-associated h
uccagggacaucaccuc

SEQ ID NO: 194150 - RNA, 18 nt, Human herpesvirus 8 (Kaposi`s sarcoma-associated h
uccaggagcgacuggauc

SEQ ID NO: 194151 - RNA, 23 nt, Human herpesvirus 8 (Kaposi`s sarcoma-associated h
uccaggcucuacagguaggccac

SEQ ID NO: 194152 - RNA, 21 nt, Human herpesvirus 8 (Kaposi`s sarcoma-associated h
uccagggaaacaugcccuccu

SEQ ID NO: 194153 - RNA, 16 nt, Human herpesvirus 8 (Kaposi`s sarcoma-associated h
uccucgucuacaacag

SEQ ID NO: 194154 - RNA, 23 nt, Human herpesvirus 8 (Kaposi`s sarcoma-associated h
uccucugccuaaagagggauccc

SEQ ID NO: 194155 - RNA, 12 nt, Human herpesvirus 8 (Kaposi`s sarcoma-associated h
uccgagcaccuc

SEQ ID NO: 194156 - RNA, 14 nt, Human herpesvirus 8 (Kaposi`s sarcoma-associated h
uccgagcaccucag

SEQ ID NO: 194157 - RNA, 16 nt, Human herpesvirus 8 (Kaposi`s sarcoma-associated h
uccgagcaccucagaa

SEQ ID NO: 194158 - RNA, 13 nt, Human herpesvirus 8 (Kaposi`s sarcoma-associated h
ucccuuugucuua

SEQ ID NO: 194159 - RNA, 23 nt, Human herpesvirus 8 (Kaposi`s sarcoma-associated h
uccgaggaucugugugugaagca

SEQ ID NO: 194160 - RNA, 14 nt, Human herpesvirus 8 (Kaposi`s sarcoma-associated h
ucgcccgccugugu

SEQ ID NO: 194161 - RNA, 21 nt, Human herpesvirus 8 (Kaposi`s sarcoma-associated h
ucgcccgucacuggauguaag

SEQ ID NO: 194162 - RNA, 15 nt, Human herpesvirus 8 (Kaposi`s sarcoma-associated h
ucgccaccacuaucc

SEQ ID NO: 194163 - RNA, 20 nt, Human herpesvirus 8 (Kaposi`s sarcoma-associated h
ucgcaagcuugagcuuuuca

SEQ ID NO: 194164 - RNA, 16 nt, Human herpesvirus 8 (Kaposi`s sarcoma-associated h
ucgguacugcgcauuu

SEQ ID NO: 194165 - RNA, 15 nt, Human herpesvirus 8 (Kaposi`s sarcoma-associated h
ucgggggaucuugua

SEQ ID NO: 194166 - RNA, 16 nt, Human herpesvirus 8 (Kaposi`s sarcoma-associated h
ucggcggugcauguga

SEQ ID NO: 194167 - RNA, 17 nt, Human herpesvirus 8 (Kaposi`s sarcoma-associated h
ucggcggugcaugugac

SEQ ID NO: 194168 - RNA, 14 nt, Human herpesvirus 8 (Kaposi`s sarcoma-associated h
ucggcaacauucaa

SEQ ID NO: 194169 - RNA, 15 nt, Human herpesvirus 8 (Kaposi`s sarcoma-associated h
ucggaucuuuuacaa

SEQ ID NO: 194170 - RNA, 15 nt, Human herpesvirus 8 (Kaposi`s sarcoma-associated h
ucgcgaaaaugcacu

SEQ ID NO: 194171 - RNA, 18 nt, Human herpesvirus 8 (Kaposi`s sarcoma-associated h
ucgccucccaacauguaa

SEQ ID NO: 194172 - RNA, 19 nt, Human herpesvirus 8 (Kaposi`s sarcoma-associated h
ucuaaggcccccaccaaac

SEQ ID NO: 194173 - RNA, 17 nt, Human herpesvirus 8 (Kaposi`s sarcoma-associated h
ucuaaauauucucuaua

SEQ ID NO: 194174 - RNA, 22 nt, Human herpesvirus 8 (Kaposi`s sarcoma-associated h
ucguugcuacggaucaugcucu

SEQ ID NO: 194175 - RNA, 16 nt, Human herpesvirus 8 (Kaposi`s sarcoma-associated h
ucuauauccaccacuu

SEQ ID NO: 194176 - RNA, 18 nt, Human herpesvirus 8 (Kaposi`s sarcoma-associated h
ucuauauggcaacugcca

SEQ ID NO: 194177 - RNA, 13 nt, Human herpesvirus 8 (Kaposi`s sarcoma-associated h
ucuauacaugccc

SEQ ID NO: 194178 - RNA, 19 nt, Human herpesvirus 8 (Kaposi`s sarcoma-associated h
ucuauaacauaauuguaau

SEQ ID NO: 194179 - RNA, 14 nt, Human herpesvirus 8 (Kaposi`s sarcoma-associated h
ucuauaagcaccuu

SEQ ID NO: 194180 - RNA, 19 nt, Human herpesvirus 8 (Kaposi`s sarcoma-associated h
ucuaucaucgguagccaua

SEQ ID NO: 194181 - RNA, 11 nt, Human herpesvirus 8 (Kaposi`s sarcoma-associated h
ucuaucuggaa

SEQ ID NO: 194182 - RNA, 18 nt, Human herpesvirus 8 (Kaposi`s sarcoma-associated h
ucuagagcccgcugcuau

SEQ ID NO: 194183 - RNA, 20 nt, Human herpesvirus 8 (Kaposi`s sarcoma-associated h
ucuagcagagcgccgaagaa

SEQ ID NO: 194184 - RNA, 18 nt, Human herpesvirus 8 (Kaposi`s sarcoma-associated h
ucuagcauaugcugccaa

SEQ ID NO: 194185 - RNA, 18 nt, Human herpesvirus 8 (Kaposi`s sarcoma-associated h
ucuccauagaacuggaau

SEQ ID NO: 194186 - RNA, 18 nt, Human herpesvirus 8 (Kaposi`s sarcoma-associated h
ucuccgcauuaaagcacu

SEQ ID NO: 194187 - RNA, 22 nt, Human herpesvirus 8 (Kaposi`s sarcoma-associated h
ucuuacuaagagaacagcacau

SEQ ID NO: 194188 - RNA, 17 nt, Human herpesvirus 8 (Kaposi`s sarcoma-associated h
ucuuaggacacugaugu

SEQ ID NO: 194189 - RNA, 20 nt, Human herpesvirus 8 (Kaposi`s sarcoma-associated h
ucuuauaacacuaauauacu

SEQ ID NO: 194190 - RNA, 16 nt, Human herpesvirus 8 (Kaposi`s sarcoma-associated h
ucuggcccucacuaca

SEQ ID NO: 194191 - RNA, 16 nt, Human herpesvirus 8 (Kaposi`s sarcoma-associated h
ucuggccugugcccaa

SEQ ID NO: 194192 - RNA, 21 nt, Human herpesvirus 8 (Kaposi`s sarcoma-associated h
ucugggccacaaaacugccaa

SEQ ID NO: 194193 - RNA, 16 nt, Human herpesvirus 8 (Kaposi`s sarcoma-associated h
ucuguaaaacacuguu

SEQ ID NO: 194194 - RNA, 14 nt, Human herpesvirus 8 (Kaposi`s sarcoma-associated h
ucuggucgcugcca

SEQ ID NO: 194195 - RNA, 20 nt, Human herpesvirus 8 (Kaposi`s sarcoma-associated h
cugcuauuuuucaucugaaa

SEQ ID NO: 194196 - RNA, 16 nt, Human herpesvirus 8 (Kaposi`s sarcoma-associated h
cugcguguucccggcg

SEQ ID NO: 194197 - RNA, 20 nt, Human herpesvirus 8 (Kaposi`s sarcoma-associated h
cugcguguucccggcgcgaa

SEQ ID NO: 194198 - RNA, 15 nt, Human herpesvirus 8 (Kaposi`s sarcoma-associated h
cugcgucuacugcug

SEQ ID NO: 194199 - RNA, 22 nt, Human herpesvirus 8 (Kaposi`s sarcoma-associated h
cugcgcagaacaguacccacga

SEQ ID NO: 194200 - RNA, 18 nt, Human herpesvirus 8 (Kaposi`s sarcoma-associated h
cugcgcgucagcaguguu

SEQ ID NO: 194201 - RNA, 23 nt, Human herpesvirus 8 (Kaposi`s sarcoma-associated h
cuggagcagcgccaguggaucuc

SEQ ID NO: 194202 - RNA, 19 nt, Human herpesvirus 8 (Kaposi`s sarcoma-associated h
cugccgaagucagugccac

SEQ ID NO: 194203 - RNA, 15 nt, Human herpesvirus 8 (Kaposi`s sarcoma-associated h
cugccggacacugaa

SEQ ID NO: 194204 - RNA, 17 nt, Human herpesvirus 8 (Kaposi`s sarcoma-associated h
cugcacuccaagccagu

SEQ ID NO: 194205 - RNA, 17 nt, Human herpesvirus 8 (Kaposi`s sarcoma-associated h
cugcaaacuauacacaa

SEQ ID NO: 194206 - RNA, 17 nt, Human herpesvirus 8 (Kaposi`s sarcoma-associated h
cugauuuuuuuacgcua

SEQ ID NO: 194207 - RNA, 12 nt, Human herpesvirus 8 (Kaposi`s sarcoma-associated h
cugauucuuaga

SEQ ID NO: 194208 - RNA, 14 nt, Human herpesvirus 8 (Kaposi`s sarcoma-associated h
cucuguuuucccac

SEQ ID NO: 194209 - RNA, 13 nt, Human herpesvirus 8 (Kaposi`s sarcoma-associated h
cucugugcccauc

SEQ ID NO: 194210 - RNA, 16 nt, Human herpesvirus 8 (Kaposi`s sarcoma-associated h
cucuguggcauaagac

SEQ ID NO: 194211 - RNA, 17 nt, Human herpesvirus 8 (Kaposi`s sarcoma-associated h
cucuggcagcgcaccac

SEQ ID NO: 194212 - RNA, 16 nt, Human herpesvirus 8 (Kaposi`s sarcoma-associated h
cuggauguguaucuua

SEQ ID NO: 194213 - RNA, 22 nt, Human herpesvirus 8 (Kaposi`s sarcoma-associated h
cugguguuguguuuaaggugcg

SEQ ID NO: 194214 - RNA, 18 nt, Human herpesvirus 8 (Kaposi`s sarcoma-associated h
cugguggaacaugcugcc

SEQ ID NO: 194215 - RNA, 22 nt, Human herpesvirus 8 (Kaposi`s sarcoma-associated h
cugguguaucagaacaguggug

SEQ ID NO: 194216 - RNA, 15 nt, Human herpesvirus 8 (Kaposi`s sarcoma-associated h
cugugaaguuuacau

SEQ ID NO: 194217 - RNA, 15 nt, Human herpesvirus 8 (Kaposi`s sarcoma-associated h
cugucuuuguaggca

SEQ ID NO: 194218 - RNA, 21 nt, Human herpesvirus 8 (Kaposi`s sarcoma-associated h
cugucuucuuaguuacgcaga

SEQ ID NO: 194219 - RNA, 19 nt, Human herpesvirus 8 (Kaposi`s sarcoma-associated h
cuguacauaauccccggca

SEQ ID NO: 194220 - RNA, 14 nt, Human herpesvirus 8 (Kaposi`s sarcoma-associated h
cuguagagucauuu

SEQ ID NO: 194221 - RNA, 21 nt, Human herpesvirus 8 (Kaposi`s sarcoma-associated h
cugucuccagaagagcauuuu

SEQ ID NO: 194222 - RNA, 12 nt, Human herpesvirus 8 (Kaposi`s sarcoma-associated h
cuuaaacacaac

SEQ ID NO: 194223 - RNA, 15 nt, Human herpesvirus 8 (Kaposi`s sarcoma-associated h
cuuaaaauagcucau

SEQ ID NO: 194224 - RNA, 13 nt, Human herpesvirus 8 (Kaposi`s sarcoma-associated h
cuguuuccaguga

SEQ ID NO: 194225 - RNA, 15 nt, Human herpesvirus 8 (Kaposi`s sarcoma-associated h
cuguuuccagugacc

SEQ ID NO: 194226 - RNA, 15 nt, Human herpesvirus 8 (Kaposi`s sarcoma-associated h
cuguuucgugcaggu

SEQ ID NO: 194227 - RNA, 21 nt, Human herpesvirus 8 (Kaposi`s sarcoma-associated h
cugugguguuuuaucuucaag

SEQ ID NO: 194228 - RNA, 19 nt, Human herpesvirus 8 (Kaposi`s sarcoma-associated h
cuguguuuuguaaacugau

SEQ ID NO: 194229 - RNA, 17 nt, Human herpesvirus 8 (Kaposi`s sarcoma-associated h
cuguugaaugugaucac

SEQ ID NO: 194230 - RNA, 19 nt, Human herpesvirus 8 (Kaposi`s sarcoma-associated h
cuguucgcaaaugaacgca

SEQ ID NO: 194231 - RNA, 19 nt, Human herpesvirus 8 (Kaposi`s sarcoma-associated h
cucagcugccaaggcaagg

SEQ ID NO: 194232 - RNA, 16 nt, Human herpesvirus 8 (Kaposi`s sarcoma-associated h
cucaacgggcaaccau

SEQ ID NO: 194233 - RNA, 19 nt, Human herpesvirus 8 (Kaposi`s sarcoma-associated h
cuccagacucuucgcugau

SEQ ID NO: 194234 - RNA, 20 nt, Human herpesvirus 8 (Kaposi`s sarcoma-associated h
cuccauagguagauugacug

SEQ ID NO: 194235 - RNA, 22 nt, Human herpesvirus 8 (Kaposi`s sarcoma-associated h
cuccauucccggucccacauga

SEQ ID NO: 194236 - RNA, 12 nt, Human herpesvirus 8 (Kaposi`s sarcoma-associated h
cucauaacacag

SEQ ID NO: 194237 - RNA, 20 nt, Human herpesvirus 8 (Kaposi`s sarcoma-associated h
cuccaccucuuucaucacuu

SEQ ID NO: 194238 - RNA, 15 nt, Human herpesvirus 8 (Kaposi`s sarcoma-associated h
cucaggucugucacu

SEQ ID NO: 194239 - RNA, 18 nt, Human herpesvirus 8 (Kaposi`s sarcoma-associated h
cucaggucugucacuaga

SEQ ID NO: 194240 - RNA, 23 nt, Human herpesvirus 8 (Kaposi`s sarcoma-associated h
cucauaaaaccuccaaacacagg

SEQ ID NO: 194241 - RNA, 21 nt, Human herpesvirus 8 (Kaposi`s sarcoma-associated h
cuaccugcaaacuauacacaa

SEQ ID NO: 194242 - RNA, 18 nt, Human herpesvirus 8 (Kaposi`s sarcoma-associated h
cuaccugccggacacuga

SEQ ID NO: 194243 - RNA, 18 nt, Human herpesvirus 8 (Kaposi`s sarcoma-associated h
cuacuaauguaaccuaaa

SEQ ID NO: 194244 - RNA, 17 nt, Human herpesvirus 8 (Kaposi`s sarcoma-associated h
cuauggggucagggugg

SEQ ID NO: 194245 - RNA, 17 nt, Human herpesvirus 8 (Kaposi`s sarcoma-associated h
cuauugcaacugaccau

SEQ ID NO: 194246 - RNA, 13 nt, Human herpesvirus 8 (Kaposi`s sarcoma-associated h
cucgccacucuau

SEQ ID NO: 194247 - RNA, 17 nt, Human herpesvirus 8 (Kaposi`s sarcoma-associated h
cucgcgaaaaugcacuc

SEQ ID NO: 194248 - RNA, 20 nt, Human herpesvirus 8 (Kaposi`s sarcoma-associated h
cucgggccuugggugcgaug

SEQ ID NO: 194249 - RNA, 17 nt, Human herpesvirus 8 (Kaposi`s sarcoma-associated h
cucgaugggauauuucc

SEQ ID NO: 194250 - RNA, 20 nt, Human herpesvirus 8 (Kaposi`s sarcoma-associated h
cucgagggcggccaguauua

SEQ ID NO: 194251 - RNA, 15 nt, Human herpesvirus 8 (Kaposi`s sarcoma-associated h
cucccccaaccucug

SEQ ID NO: 194252 - RNA, 14 nt, Human herpesvirus 8 (Kaposi`s sarcoma-associated h
cucccauaacaaua

SEQ ID NO: 194253 - RNA, 16 nt, Human herpesvirus 8 (Kaposi`s sarcoma-associated h
cucccaccauguugaa

SEQ ID NO: 194254 - RNA, 16 nt, Human herpesvirus 8 (Kaposi`s sarcoma-associated h
cucucccaaaccacac

SEQ ID NO: 194255 - RNA, 14 nt, Human herpesvirus 8 (Kaposi`s sarcoma-associated h
cucucuugcugguc

SEQ ID NO: 194256 - RNA, 21 nt, Human herpesvirus 8 (Kaposi`s sarcoma-associated h
cucucuugcuggucgguucac

SEQ ID NO: 194257 - RNA, 18 nt, Human herpesvirus 8 (Kaposi`s sarcoma-associated h
cucugaagcaccacauac

SEQ ID NO: 194258 - RNA, 18 nt, Human herpesvirus 8 (Kaposi`s sarcoma-associated h
cucugacggccaccgaga

SEQ ID NO: 194259 - RNA, 19 nt, Human herpesvirus 8 (Kaposi`s sarcoma-associated h
cucguugcacacagacaca

SEQ ID NO: 194260 - RNA, 22 nt, Human herpesvirus 8 (Kaposi`s sarcoma-associated h
cucgugacggugacauugcagu

SEQ ID NO: 194261 - RNA, 20 nt, Human herpesvirus 8 (Kaposi`s sarcoma-associated h
cucgucuacccugccacucu

SEQ ID NO: 194262 - RNA, 20 nt, Human herpesvirus 8 (Kaposi`s sarcoma-associated h
cucuauaacauaauuguaau

SEQ ID NO: 194263 - RNA, 17 nt, Human herpesvirus 8 (Kaposi`s sarcoma-associated h
cucuaauaaacaagcua

SEQ ID NO: 194264 - RNA, 12 nt, Human herpesvirus 8 (Kaposi`s sarcoma-associated h
cguggaguugcc

SEQ ID NO: 194265 - RNA, 21 nt, Human herpesvirus 8 (Kaposi`s sarcoma-associated h
cguggacaccacauuuccacc

SEQ ID NO: 194266 - RNA, 11 nt, Human herpesvirus 8 (Kaposi`s sarcoma-associated h
cgucuuuauga

SEQ ID NO: 194267 - RNA, 13 nt, Human herpesvirus 8 (Kaposi`s sarcoma-associated h
cgugucauugcca

SEQ ID NO: 194268 - RNA, 23 nt, Human herpesvirus 8 (Kaposi`s sarcoma-associated h
cguguaugccaauaucuugaaga

SEQ ID NO: 194269 - RNA, 18 nt, Human herpesvirus 8 (Kaposi`s sarcoma-associated h
cguguaacccugccaaau

SEQ ID NO: 194270 - RNA, 17 nt, Human herpesvirus 8 (Kaposi`s sarcoma-associated h
cguuuugaacaauguuc

SEQ ID NO: 194271 - RNA, 14 nt, Human herpesvirus 8 (Kaposi`s sarcoma-associated h
cuaaacauuaccaa

SEQ ID NO: 194272 - RNA, 16 nt, Human herpesvirus 8 (Kaposi`s sarcoma-associated h
cuaauacauaacacac

SEQ ID NO: 194273 - RNA, 21 nt, Human herpesvirus 8 (Kaposi`s sarcoma-associated h
cuaauacauaacacacacaaa

SEQ ID NO: 194274 - RNA, 16 nt, Human herpesvirus 8 (Kaposi`s sarcoma-associated h
cuaauaaacaagcuac

SEQ ID NO: 194275 - RNA, 13 nt, Human herpesvirus 8 (Kaposi`s sarcoma-associated h
cuaauaaacuggc

SEQ ID NO: 194276 - RNA, 19 nt, Human herpesvirus 8 (Kaposi`s sarcoma-associated h
cuaagcgggacgcacuuga

SEQ ID NO: 194277 - RNA, 11 nt, Human herpesvirus 8 (Kaposi`s sarcoma-associated h
cuaagccucaa

SEQ ID NO: 194278 - RNA, 15 nt, Human herpesvirus 8 (Kaposi`s sarcoma-associated h
cuaagagaacagcac

SEQ ID NO: 194279 - RNA, 17 nt, Human herpesvirus 8 (Kaposi`s sarcoma-associated h
cuacagauucuacuuaa

SEQ ID NO: 194280 - RNA, 16 nt, Human herpesvirus 8 (Kaposi`s sarcoma-associated h
cuacaccguauuguua

SEQ ID NO: 194281 - RNA, 19 nt, Human herpesvirus 8 (Kaposi`s sarcoma-associated h
cgucguggaugagaggguu

SEQ ID NO: 194282 - RNA, 12 nt, Human herpesvirus 8 (Kaposi`s sarcoma-associated h
cgucuacugcug

SEQ ID NO: 194283 - RNA, 19 nt, Human herpesvirus 8 (Kaposi`s sarcoma-associated h
cgucggcggugcaugugac

SEQ ID NO: 194284 - RNA, 13 nt, Human herpesvirus 8 (Kaposi`s sarcoma-associated h
cgucaugcacggu

SEQ ID NO: 194285 - RNA, 19 nt, Human herpesvirus 8 (Kaposi`s sarcoma-associated h
cgucccucuuggcuguuac

SEQ ID NO: 194286 - RNA, 20 nt, Human herpesvirus 8 (Kaposi`s sarcoma-associated h
cgucagcagcaagcacagaa

SEQ ID NO: 194287 - RNA, 16 nt, Human herpesvirus 8 (Kaposi`s sarcoma-associated h
cgucacuggauguaag

SEQ ID NO: 194288 - RNA, 18 nt, Human herpesvirus 8 (Kaposi`s sarcoma-associated h
cguaugggaacacaauac

SEQ ID NO: 194289 - RNA, 16 nt, Human herpesvirus 8 (Kaposi`s sarcoma-associated h
cguaggccaauacugc

SEQ ID NO: 194290 - RNA, 20 nt, Human herpesvirus 8 (Kaposi`s sarcoma-associated h
cguaggccaauacugcccaa

SEQ ID NO: 194291 - RNA, 16 nt, Human herpesvirus 8 (Kaposi`s sarcoma-associated h
cguaccggcaucugca

SEQ ID NO: 194292 - RNA, 16 nt, Human herpesvirus 8 (Kaposi`s sarcoma-associated h
cggucgcaguggaccg

SEQ ID NO: 194293 - RNA, 21 nt, Human herpesvirus 8 (Kaposi`s sarcoma-associated h
cggucuacaggggcuugacag

SEQ ID NO: 194294 - RNA, 23 nt, Human herpesvirus 8 (Kaposi`s sarcoma-associated h
cggucuuuggggcuacacaucau

SEQ ID NO: 194295 - RNA, 17 nt, Human herpesvirus 8 (Kaposi`s sarcoma-associated h
cggugaacguccccgcg

SEQ ID NO: 194296 - RNA, 19 nt, Human herpesvirus 8 (Kaposi`s sarcoma-associated h
cggagacuaucagguagca

SEQ ID NO: 194297 - RNA, 22 nt, Human herpesvirus 8 (Kaposi`s sarcoma-associated h
cggaauguaagcugcugguuca

SEQ ID NO: 194298 - RNA, 13 nt, Human herpesvirus 8 (Kaposi`s sarcoma-associated h
aaacacuguggau

SEQ ID NO: 194299 - RNA, 22 nt, Human herpesvirus 8 (Kaposi`s sarcoma-associated h
aaacacgacacgauguuuucca

SEQ ID NO: 194300 - RNA, 14 nt, Human herpesvirus 8 (Kaposi`s sarcoma-associated h
cgcgacggaucucu

SEQ ID NO: 194301 - RNA, 14 nt, Human herpesvirus 8 (Kaposi`s sarcoma-associated h
aaacauuaccaaua

SEQ ID NO: 194302 - RNA, 19 nt, Human herpesvirus 8 (Kaposi`s sarcoma-associated h
aaacaugggguuccagugc

SEQ ID NO: 194303 - RNA, 19 nt, Human herpesvirus 8 (Kaposi`s sarcoma-associated h
aaaccaaaauucgcaggga

SEQ ID NO: 194304 - RNA, 17 nt, Human herpesvirus 8 (Kaposi`s sarcoma-associated h
aaacaugugggcuucau

SEQ ID NO: 194305 - RNA, 20 nt, Human herpesvirus 8 (Kaposi`s sarcoma-associated h
cgcgcagcuuuccugugauu

SEQ ID NO: 194306 - RNA, 23 nt, Human herpesvirus 8 (Kaposi`s sarcoma-associated h
cgcuggcccaaacuagcagagac

SEQ ID NO: 194307 - RNA, 16 nt, Human herpesvirus 8 (Kaposi`s sarcoma-associated h
cgcucgccacucuaua

SEQ ID NO: 194308 - RNA, 20 nt, Human herpesvirus 8 (Kaposi`s sarcoma-associated h
cgcugcuauuuuucaucuga

SEQ ID NO: 194309 - RNA, 21 nt, Human herpesvirus 8 (Kaposi`s sarcoma-associated h
cgcugcuauuuuucaucugaa

SEQ ID NO: 194310 - RNA, 17 nt, Human herpesvirus 8 (Kaposi`s sarcoma-associated h
cgcuacugcuuguucag

SEQ ID NO: 194311 - RNA, 12 nt, Human herpesvirus 8 (Kaposi`s sarcoma-associated h
cgcuauuugccg

SEQ ID NO: 194312 - RNA, 20 nt, Human herpesvirus 8 (Kaposi`s sarcoma-associated h
cgcguaugggaacacaauac

SEQ ID NO: 194313 - RNA, 15 nt, Human herpesvirus 8 (Kaposi`s sarcoma-associated h
cgcggaaacugggca

SEQ ID NO: 194314 - RNA, 15 nt, Human herpesvirus 8 (Kaposi`s sarcoma-associated h
cgcggcacauugugu

SEQ ID NO: 194315 - RNA, 22 nt, Human herpesvirus 8 (Kaposi`s sarcoma-associated h
cgcagaacaguacccacgaaau

SEQ ID NO: 194316 - RNA, 19 nt, Human herpesvirus 8 (Kaposi`s sarcoma-associated h
cgcaggagucagagcagug

SEQ ID NO: 194317 - RNA, 17 nt, Human herpesvirus 8 (Kaposi`s sarcoma-associated h
ccuuaaacacaacacca

SEQ ID NO: 194318 - RNA, 17 nt, Human herpesvirus 8 (Kaposi`s sarcoma-associated h
ccuguuagcacauucuc

SEQ ID NO: 194319 - RNA, 16 nt, Human herpesvirus 8 (Kaposi`s sarcoma-associated h
ccuguguggaagaugu

SEQ ID NO: 194320 - RNA, 22 nt, Human herpesvirus 8 (Kaposi`s sarcoma-associated h
cgccauuugcgugcaaaaugug

SEQ ID NO: 194321 - RNA, 18 nt, Human herpesvirus 8 (Kaposi`s sarcoma-associated h
cgccauuuuuguggcugc

SEQ ID NO: 194322 - RNA, 22 nt, Human herpesvirus 8 (Kaposi`s sarcoma-associated h
cgcauuuacgcgacggaucucu

SEQ ID NO: 194323 - RNA, 19 nt, Human herpesvirus 8 (Kaposi`s sarcoma-associated h
cgcccuccguuuugcacua

SEQ ID NO: 194324 - RNA, 21 nt, Human herpesvirus 8 (Kaposi`s sarcoma-associated h
cgccccucuuggcuguuacaa

SEQ ID NO: 194325 - RNA, 20 nt, Human herpesvirus 8 (Kaposi`s sarcoma-associated h
aaacacaaucacgguugcac

SEQ ID NO: 194326 - RNA, 21 nt, Human herpesvirus 8 (Kaposi`s sarcoma-associated h
aaacaaggucaauacauugug

SEQ ID NO: 194327 - RNA, 12 nt, Human herpesvirus 8 (Kaposi`s sarcoma-associated h
ccugugcccaaa

SEQ ID NO: 194328 - RNA, 17 nt, Human herpesvirus 8 (Kaposi`s sarcoma-associated h
ccugugcccaaaucugu

SEQ ID NO: 194329 - RNA, 12 nt, Human herpesvirus 8 (Kaposi`s sarcoma-associated h
ccugugcccaac

SEQ ID NO: 194330 - RNA, 20 nt, Human herpesvirus 8 (Kaposi`s sarcoma-associated h
aaaauuguguguaccuagcc

SEQ ID NO: 194331 - RNA, 15 nt, Human herpesvirus 8 (Kaposi`s sarcoma-associated h
ccucccuuugucuua

SEQ ID NO: 194332 - RNA, 16 nt, Human herpesvirus 8 (Kaposi`s sarcoma-associated h
ccuccguuuugcacua

SEQ ID NO: 194333 - RNA, 17 nt, Human herpesvirus 8 (Kaposi`s sarcoma-associated h
ccuccguuuugcacuau

SEQ ID NO: 194334 - RNA, 16 nt, Human herpesvirus 8 (Kaposi`s sarcoma-associated h
ccuaguuaacuuuaac

SEQ ID NO: 194335 - RNA, 13 nt, Human herpesvirus 8 (Kaposi`s sarcoma-associated h
ccuagucacucca

SEQ ID NO: 194336 - RNA, 14 nt, Human herpesvirus 8 (Kaposi`s sarcoma-associated h
ccuagucacuccau

SEQ ID NO: 194337 - RNA, 14 nt, Human herpesvirus 8 (Kaposi`s sarcoma-associated h
ccuagcgggcacaa

SEQ ID NO: 194338 - RNA, 19 nt, Human herpesvirus 8 (Kaposi`s sarcoma-associated h
ccuaggugggugugcauuu

SEQ ID NO: 194339 - RNA, 18 nt, Human herpesvirus 8 (Kaposi`s sarcoma-associated h
ccugccucuguuuuccca

SEQ ID NO: 194340 - RNA, 20 nt, Human herpesvirus 8 (Kaposi`s sarcoma-associated h
ccugcccucaaauucucaca

SEQ ID NO: 194341 - RNA, 22 nt, Human herpesvirus 8 (Kaposi`s sarcoma-associated h
ccuccgcgagcgcgaaaccacu

SEQ ID NO: 194342 - RNA, 14 nt, Human herpesvirus 8 (Kaposi`s sarcoma-associated h
ccugcaaugcaagg

SEQ ID NO: 194343 - RNA, 15 nt, Human herpesvirus 8 (Kaposi`s sarcoma-associated h
ccugcagugugggga

SEQ ID NO: 194344 - RNA, 17 nt, Human herpesvirus 8 (Kaposi`s sarcoma-associated h
ccugcacuccaagccag

SEQ ID NO: 194345 - RNA, 22 nt, Human herpesvirus 8 (Kaposi`s sarcoma-associated h
ccuaggcgguugggauucacuc

SEQ ID NO: 194346 - RNA, 20 nt, Human herpesvirus 8 (Kaposi`s sarcoma-associated h
ccuacgcguuaagaagccac

SEQ ID NO: 194347 - RNA, 18 nt, Human herpesvirus 8 (Kaposi`s sarcoma-associated h
ccuacucguugcacacag

SEQ ID NO: 194348 - RNA, 15 nt, Human herpesvirus 8 (Kaposi`s sarcoma-associated h
ccuacauugcuccgc

SEQ ID NO: 194349 - RNA, 18 nt, Human herpesvirus 8 (Kaposi`s sarcoma-associated h
ccuacgaaaaucuggcau

SEQ ID NO: 194350 - RNA, 13 nt, Human herpesvirus 8 (Kaposi`s sarcoma-associated h
ccuacacugcauu

SEQ ID NO: 194351 - RNA, 21 nt, Human herpesvirus 8 (Kaposi`s sarcoma-associated h
ccguuuuauuugaaagcaaua

SEQ ID NO: 194352 - RNA, 16 nt, Human herpesvirus 8 (Kaposi`s sarcoma-associated h
ccggcagcaauauuaa

SEQ ID NO: 194353 - RNA, 14 nt, Human herpesvirus 8 (Kaposi`s sarcoma-associated h
ccggcgacaaugaa

SEQ ID NO: 194354 - RNA, 21 nt, Human herpesvirus 8 (Kaposi`s sarcoma-associated h
ccguucuaaucuggcauguau

SEQ ID NO: 194355 - RNA, 14 nt, Human herpesvirus 8 (Kaposi`s sarcoma-associated h
cccugaaacuccag

SEQ ID NO: 194356 - RNA, 16 nt, Human herpesvirus 8 (Kaposi`s sarcoma-associated h
cccugacagaguugug

SEQ ID NO: 194357 - RNA, 20 nt, Human herpesvirus 8 (Kaposi`s sarcoma-associated h
cccucagccacaaauaauga

SEQ ID NO: 194358 - RNA, 14 nt, Human herpesvirus 8 (Kaposi`s sarcoma-associated h
cccuccguuuugca

SEQ ID NO: 194359 - RNA, 22 nt, Human herpesvirus 8 (Kaposi`s sarcoma-associated h
cccugcccucaaauucucacaa

SEQ ID NO: 194360 - RNA, 16 nt, Human herpesvirus 8 (Kaposi`s sarcoma-associated h
cccugauuagcacugu

SEQ ID NO: 194361 - RNA, 18 nt, Human herpesvirus 8 (Kaposi`s sarcoma-associated h
cccugauuagcacuguau

SEQ ID NO: 194362 - RNA, 13 nt, Human herpesvirus 8 (Kaposi`s sarcoma-associated h
cccugccacucua

SEQ ID NO: 194363 - RNA, 22 nt, Human herpesvirus 8 (Kaposi`s sarcoma-associated h
ccggaguucagagcguagauga

SEQ ID NO: 194364 - RNA, 12 nt, Human herpesvirus 8 (Kaposi`s sarcoma-associated h
ccggauuugccc

SEQ ID NO: 194365 - RNA, 24 nt, Human herpesvirus 8 (Kaposi`s sarcoma-associated h
cccuucaggccuccuugagugucu

SEQ ID NO: 194366 - RNA, 13 nt, Human herpesvirus 8 (Kaposi`s sarcoma-associated h
cccuucagucaaa

SEQ ID NO: 194367 - RNA, 22 nt, Human herpesvirus 8 (Kaposi`s sarcoma-associated h
ccgcugcuauuuuucaucugaa

SEQ ID NO: 194368 - RNA, 20 nt, Human herpesvirus 8 (Kaposi`s sarcoma-associated h
ccgcuugaccugcaaacuuu

SEQ ID NO: 194369 - RNA, 15 nt, Human herpesvirus 8 (Kaposi`s sarcoma-associated h
cccuaauaaacuggc

SEQ ID NO: 194370 - RNA, 14 nt, Human herpesvirus 8 (Kaposi`s sarcoma-associated h
cccuagaagccacc

SEQ ID NO: 194371 - RNA, 17 nt, Human herpesvirus 8 (Kaposi`s sarcoma-associated h
cccguggcucauaacac

SEQ ID NO: 194372 - RNA, 17 nt, Human herpesvirus 8 (Kaposi`s sarcoma-associated h
cccggguuaugggugug

SEQ ID NO: 194373 - RNA, 18 nt, Human herpesvirus 8 (Kaposi`s sarcoma-associated h
cccggauuccuccgcaca

SEQ ID NO: 194374 - RNA, 20 nt, Human herpesvirus 8 (Kaposi`s sarcoma-associated h
cccggcaacacuggacacua

SEQ ID NO: 194375 - RNA, 17 nt, Human herpesvirus 8 (Kaposi`s sarcoma-associated h
cccgccuguguggaaga

SEQ ID NO: 194376 - RNA, 13 nt, Human herpesvirus 8 (Kaposi`s sarcoma-associated h
cccgcguauagca

SEQ ID NO: 194377 - RNA, 12 nt, Human herpesvirus 8 (Kaposi`s sarcoma-associated h
cccggaaacgga

SEQ ID NO: 194378 - RNA, 17 nt, Human herpesvirus 8 (Kaposi`s sarcoma-associated h
ccccucauuuaaucgca

SEQ ID NO: 194379 - RNA, 19 nt, Human herpesvirus 8 (Kaposi`s sarcoma-associated h
ccccucuggaucuacagau

SEQ ID NO: 194380 - RNA, 18 nt, Human herpesvirus 8 (Kaposi`s sarcoma-associated h
ccccucuuggcuguuaca

SEQ ID NO: 194381 - RNA, 19 nt, Human herpesvirus 8 (Kaposi`s sarcoma-associated h
ccccucuuggcuguuacaa

SEQ ID NO: 194382 - RNA, 11 nt, Human herpesvirus 8 (Kaposi`s sarcoma-associated h
ccccugcaaug

SEQ ID NO: 194383 - RNA, 15 nt, Human herpesvirus 8 (Kaposi`s sarcoma-associated h
ccccuguuugaaaaa

SEQ ID NO: 194384 - RNA, 19 nt, Human herpesvirus 8 (Kaposi`s sarcoma-associated h
cccgagagagguaccccau

SEQ ID NO: 194385 - RNA, 22 nt, Human herpesvirus 8 (Kaposi`s sarcoma-associated h
ccccaaagccguucccaugagc

SEQ ID NO: 194386 - RNA, 17 nt, Human herpesvirus 8 (Kaposi`s sarcoma-associated h
cccccaucgucuuccca

SEQ ID NO: 194387 - RNA, 14 nt, Human herpesvirus 8 (Kaposi`s sarcoma-associated h
cccagcuagcagug

SEQ ID NO: 194388 - RNA, 16 nt, Human herpesvirus 8 (Kaposi`s sarcoma-associated h
cccagcuccuauugca

SEQ ID NO: 194389 - RNA, 21 nt, Human herpesvirus 8 (Kaposi`s sarcoma-associated h
cccagcuccuauugcaacuga

SEQ ID NO: 194390 - RNA, 17 nt, Human herpesvirus 8 (Kaposi`s sarcoma-associated h
cccagauguucuugcca

SEQ ID NO: 194391 - RNA, 19 nt, Human herpesvirus 8 (Kaposi`s sarcoma-associated h
cccaaagccguucccauga

SEQ ID NO: 194392 - RNA, 16 nt, Human herpesvirus 8 (Kaposi`s sarcoma-associated h
cccagugccucagcaa

SEQ ID NO: 194393 - RNA, 14 nt, Human herpesvirus 8 (Kaposi`s sarcoma-associated h
cccauagccaucca

SEQ ID NO: 194394 - RNA, 19 nt, Human herpesvirus 8 (Kaposi`s sarcoma-associated h
cccaggcaggaguauauca

SEQ ID NO: 194395 - RNA, 13 nt, Human herpesvirus 8 (Kaposi`s sarcoma-associated h
cccaggaucuucc

SEQ ID NO: 194396 - RNA, 14 nt, Human herpesvirus 8 (Kaposi`s sarcoma-associated h
cccagggugcgaag

SEQ ID NO: 194397 - RNA, 14 nt, Human herpesvirus 8 (Kaposi`s sarcoma-associated h
ccagaagagcauuu

SEQ ID NO: 194398 - RNA, 22 nt, Human herpesvirus 8 (Kaposi`s sarcoma-associated h
ccagacuuugugugguaagaag

SEQ ID NO: 194399 - RNA, 12 nt, Human herpesvirus 8 (Kaposi`s sarcoma-associated h
ccacacagauuc

SEQ ID NO: 194400 - RNA, 15 nt, Human herpesvirus 8 (Kaposi`s sarcoma-associated h
ccacaaaacugccaa

SEQ ID NO: 194401 - RNA, 16 nt, Human herpesvirus 8 (Kaposi`s sarcoma-associated h
ccacaaaacugccaaa

SEQ ID NO: 194402 - RNA, 22 nt, Human herpesvirus 8 (Kaposi`s sarcoma-associated h
ccaauuucaguacuccuuccca

SEQ ID NO: 194403 - RNA, 15 nt, Human herpesvirus 8 (Kaposi`s sarcoma-associated h
ccacaaaguacauaa

SEQ ID NO: 194404 - RNA, 19 nt, Human herpesvirus 8 (Kaposi`s sarcoma-associated h
ccacaaaguacauaagugu

SEQ ID NO: 194405 - RNA, 13 nt, Human herpesvirus 8 (Kaposi`s sarcoma-associated h
ccacaaauaauga

SEQ ID NO: 194406 - RNA, 14 nt, Human herpesvirus 8 (Kaposi`s sarcoma-associated h
ccacaaauaaugaa

SEQ ID NO: 194407 - RNA, 15 nt, Human herpesvirus 8 (Kaposi`s sarcoma-associated h
ccagcuacgcacuga

SEQ ID NO: 194408 - RNA, 13 nt, Human herpesvirus 8 (Kaposi`s sarcoma-associated h
ccagcuaguugug

SEQ ID NO: 194409 - RNA, 13 nt, Human herpesvirus 8 (Kaposi`s sarcoma-associated h
ccagacaccaaag

SEQ ID NO: 194410 - RNA, 17 nt, Human herpesvirus 8 (Kaposi`s sarcoma-associated h
ccaggaugcggguuggg

SEQ ID NO: 194411 - RNA, 18 nt, Human herpesvirus 8 (Kaposi`s sarcoma-associated h
ccauacuguuugcuuaau

SEQ ID NO: 194412 - RNA, 20 nt, Human herpesvirus 8 (Kaposi`s sarcoma-associated h
ccaucaacgauacugaucac

SEQ ID NO: 194413 - RNA, 21 nt, Human herpesvirus 8 (Kaposi`s sarcoma-associated h
ccauaugaggccaagugcauu

SEQ ID NO: 194414 - RNA, 15 nt, Human herpesvirus 8 (Kaposi`s sarcoma-associated h
ccauagugugcguuu

SEQ ID NO: 194415 - RNA, 23 nt, Human herpesvirus 8 (Kaposi`s sarcoma-associated h
ccauaguauguaaagaugggucc

SEQ ID NO: 194416 - RNA, 18 nt, Human herpesvirus 8 (Kaposi`s sarcoma-associated h
cccaacaagacaguugug

SEQ ID NO: 194417 - RNA, 21 nt, Human herpesvirus 8 (Kaposi`s sarcoma-associated h
cccacugauuuuuuuacgcua

SEQ ID NO: 194418 - RNA, 13 nt, Human herpesvirus 8 (Kaposi`s sarcoma-associated h
ccauuaacuuucc

SEQ ID NO: 194419 - RNA, 14 nt, Human herpesvirus 8 (Kaposi`s sarcoma-associated h
ccauuauagcacac

SEQ ID NO: 194420 - RNA, 16 nt, Human herpesvirus 8 (Kaposi`s sarcoma-associated h
ccauccgcgagccauu

SEQ ID NO: 194421 - RNA, 19 nt, Human herpesvirus 8 (Kaposi`s sarcoma-associated h
caugcuagggcgauaccgc

SEQ ID NO: 194422 - RNA, 19 nt, Human herpesvirus 8 (Kaposi`s sarcoma-associated h
caugcucggcaacauucaa

SEQ ID NO: 194423 - RNA, 21 nt, Human herpesvirus 8 (Kaposi`s sarcoma-associated h
caucuguguacaaaccaaauu

SEQ ID NO: 194424 - RNA, 18 nt, Human herpesvirus 8 (Kaposi`s sarcoma-associated h
caugccuuucuguaauca

SEQ ID NO: 194425 - RNA, 17 nt, Human herpesvirus 8 (Kaposi`s sarcoma-associated h
caugcgucgccguagug

SEQ ID NO: 194426 - RNA, 16 nt, Human herpesvirus 8 (Kaposi`s sarcoma-associated h
caugugcugguucaag

SEQ ID NO: 194427 - RNA, 19 nt, Human herpesvirus 8 (Kaposi`s sarcoma-associated h
cauggauccuacacuuuac

SEQ ID NO: 194428 - RNA, 12 nt, Human herpesvirus 8 (Kaposi`s sarcoma-associated h
cauuaaacacau

SEQ ID NO: 194429 - RNA, 15 nt, Human herpesvirus 8 (Kaposi`s sarcoma-associated h
cauuaaacacauaca

SEQ ID NO: 194430 - RNA, 17 nt, Human herpesvirus 8 (Kaposi`s sarcoma-associated h
cauuaaaaggacauugu

SEQ ID NO: 194431 - RNA, 21 nt, Human herpesvirus 8 (Kaposi`s sarcoma-associated h
cauuaaaaggacauuguauaa

SEQ ID NO: 194432 - RNA, 19 nt, Human herpesvirus 8 (Kaposi`s sarcoma-associated h
caucuccggacuacaucca

SEQ ID NO: 194433 - RNA, 16 nt, Human herpesvirus 8 (Kaposi`s sarcoma-associated h
cauaugaggccaagug

SEQ ID NO: 194434 - RNA, 21 nt, Human herpesvirus 8 (Kaposi`s sarcoma-associated h
cauaugaggccaagugcauug

SEQ ID NO: 194435 - RNA, 13 nt, Human herpesvirus 8 (Kaposi`s sarcoma-associated h
cauauggacuguu

SEQ ID NO: 194436 - RNA, 14 nt, Human herpesvirus 8 (Kaposi`s sarcoma-associated h
cauauggacuguua

SEQ ID NO: 194437 - RNA, 17 nt, Human herpesvirus 8 (Kaposi`s sarcoma-associated h
caucgcugccccaaaag

SEQ ID NO: 194438 - RNA, 18 nt, Human herpesvirus 8 (Kaposi`s sarcoma-associated h
cauauacagguaaaacgg

SEQ ID NO: 194439 - RNA, 18 nt, Human herpesvirus 8 (Kaposi`s sarcoma-associated h
cauauacagguguccaag

SEQ ID NO: 194440 - RNA, 13 nt, Human herpesvirus 8 (Kaposi`s sarcoma-associated h
cauagacaugccc

SEQ ID NO: 194441 - RNA, 20 nt, Human herpesvirus 8 (Kaposi`s sarcoma-associated h
ccaauaaugcaaugcuuccc

SEQ ID NO: 194442 - RNA, 19 nt, Human herpesvirus 8 (Kaposi`s sarcoma-associated h
ccaauacuauuauaacauu

SEQ ID NO: 194443 - RNA, 18 nt, Human herpesvirus 8 (Kaposi`s sarcoma-associated h
ccaauguuaauguucucu

SEQ ID NO: 194444 - RNA, 14 nt, Human herpesvirus 8 (Kaposi`s sarcoma-associated h
ccaagcuacuggcc

SEQ ID NO: 194445 - RNA, 15 nt, Human herpesvirus 8 (Kaposi`s sarcoma-associated h
ccaagcuacuggccu

SEQ ID NO: 194446 - RNA, 18 nt, Human herpesvirus 8 (Kaposi`s sarcoma-associated h
ccaaggagugggaucucc

SEQ ID NO: 194447 - RNA, 15 nt, Human herpesvirus 8 (Kaposi`s sarcoma-associated h
ccaagccucccguga

SEQ ID NO: 194448 - RNA, 18 nt, Human herpesvirus 8 (Kaposi`s sarcoma-associated h
ccaaaggacaugguacaa

SEQ ID NO: 194449 - RNA, 22 nt, Human herpesvirus 8 (Kaposi`s sarcoma-associated h
ccaaaggacaugguacaagcaa

SEQ ID NO: 194450 - RNA, 18 nt, Human herpesvirus 8 (Kaposi`s sarcoma-associated h
cauuuaucgacccaacuc

SEQ ID NO: 194451 - RNA, 18 nt, Human herpesvirus 8 (Kaposi`s sarcoma-associated h
ccaaacaggcgcagauuu

SEQ ID NO: 194452 - RNA, 12 nt, Human herpesvirus 8 (Kaposi`s sarcoma-associated h
ccaaaccaguaa

SEQ ID NO: 194453 - RNA, 19 nt, Human herpesvirus 8 (Kaposi`s sarcoma-associated h
cauuauaaacccaucccuc

SEQ ID NO: 194454 - RNA, 18 nt, Human herpesvirus 8 (Kaposi`s sarcoma-associated h
cauuagugacauacauga

SEQ ID NO: 194455 - RNA, 12 nt, Human herpesvirus 8 (Kaposi`s sarcoma-associated h
cauuaccaauac

SEQ ID NO: 194456 - RNA, 15 nt, Human herpesvirus 8 (Kaposi`s sarcoma-associated h
caggcgccuaugacu

SEQ ID NO: 194457 - RNA, 21 nt, Human herpesvirus 8 (Kaposi`s sarcoma-associated h
caggcccucuucuguugccag

SEQ ID NO: 194458 - RNA, 18 nt, Human herpesvirus 8 (Kaposi`s sarcoma-associated h
cagacuuuucccauuucu

SEQ ID NO: 194459 - RNA, 18 nt, Human herpesvirus 8 (Kaposi`s sarcoma-associated h
cagacgacaaaacgcaca

SEQ ID NO: 194460 - RNA, 19 nt, Human herpesvirus 8 (Kaposi`s sarcoma-associated h
cagacccggcaacacugga

SEQ ID NO: 194461 - RNA, 20 nt, Human herpesvirus 8 (Kaposi`s sarcoma-associated h
cagacccggcaacacuggac

SEQ ID NO: 194462 - RNA, 23 nt, Human herpesvirus 8 (Kaposi`s sarcoma-associated h
cagacgugcccagacaccaaaga

SEQ ID NO: 194463 - RNA, 15 nt, Human herpesvirus 8 (Kaposi`s sarcoma-associated h
cagacggucuuuagg

SEQ ID NO: 194464 - RNA, 16 nt, Human herpesvirus 8 (Kaposi`s sarcoma-associated h
cagacccaaaaaggac

SEQ ID NO: 194465 - RNA, 14 nt, Human herpesvirus 8 (Kaposi`s sarcoma-associated h
cagacaccaaagac

SEQ ID NO: 194466 - RNA, 15 nt, Human herpesvirus 8 (Kaposi`s sarcoma-associated h
caggcuagugcugua

SEQ ID NO: 194467 - RNA, 13 nt, Human herpesvirus 8 (Kaposi`s sarcoma-associated h
cagggaaguuuca

SEQ ID NO: 194468 - RNA, 12 nt, Human herpesvirus 8 (Kaposi`s sarcoma-associated h
cagggcuaugau

SEQ ID NO: 194469 - RNA, 22 nt, Human herpesvirus 8 (Kaposi`s sarcoma-associated h
caggggcagacccaaaaaggac

SEQ ID NO: 194470 - RNA, 18 nt, Human herpesvirus 8 (Kaposi`s sarcoma-associated h
caggggaguaggguagga

SEQ ID NO: 194471 - RNA, 17 nt, Human herpesvirus 8 (Kaposi`s sarcoma-associated h
caggucugucacuagaa

SEQ ID NO: 194472 - RNA, 17 nt, Human herpesvirus 8 (Kaposi`s sarcoma-associated h
caguauagugguuuaca

SEQ ID NO: 194473 - RNA, 18 nt, Human herpesvirus 8 (Kaposi`s sarcoma-associated h
caguauagugguuuacau

SEQ ID NO: 194474 - RNA, 17 nt, Human herpesvirus 8 (Kaposi`s sarcoma-associated h
caguagcaugcugauga

SEQ ID NO: 194475 - RNA, 15 nt, Human herpesvirus 8 (Kaposi`s sarcoma-associated h
cagguguccaagacu

SEQ ID NO: 194476 - RNA, 21 nt, Human herpesvirus 8 (Kaposi`s sarcoma-associated h
cagguggcacccaacauccau

SEQ ID NO: 194477 - RNA, 21 nt, Human herpesvirus 8 (Kaposi`s sarcoma-associated h
cauaaaaccuccaaacacagg

SEQ ID NO: 194478 - RNA, 16 nt, Human herpesvirus 8 (Kaposi`s sarcoma-associated h
cauaaaguacuuuucc

SEQ ID NO: 194479 - RNA, 18 nt, Human herpesvirus 8 (Kaposi`s sarcoma-associated h
cauaaagucaugggaccg

SEQ ID NO: 194480 - RNA, 20 nt, Human herpesvirus 8 (Kaposi`s sarcoma-associated h
cauaaccgagcucugcugcc

SEQ ID NO: 194481 - RNA, 13 nt, Human herpesvirus 8 (Kaposi`s sarcoma-associated h
cauaacacaguca

SEQ ID NO: 194482 - RNA, 16 nt, Human herpesvirus 8 (Kaposi`s sarcoma-associated h
cauaagcugcauacau

SEQ ID NO: 194483 - RNA, 23 nt, Human herpesvirus 8 (Kaposi`s sarcoma-associated h
cauaauaaugaugggcaauuaag

SEQ ID NO: 194484 - RNA, 16 nt, Human herpesvirus 8 (Kaposi`s sarcoma-associated h
cauaauaaaacaaaua

SEQ ID NO: 194485 - RNA, 22 nt, Human herpesvirus 8 (Kaposi`s sarcoma-associated h
cauaauaaaacaaauacauagu

SEQ ID NO: 194486 - RNA, 20 nt, Human herpesvirus 8 (Kaposi`s sarcoma-associated h
cauaccucaacccacacugg

SEQ ID NO: 194487 - RNA, 16 nt, Human herpesvirus 8 (Kaposi`s sarcoma-associated h
cauacugggaucccuu

SEQ ID NO: 194488 - RNA, 18 nt, Human herpesvirus 8 (Kaposi`s sarcoma-associated h
cauacugggaucccuuca

SEQ ID NO: 194489 - RNA, 23 nt, Human herpesvirus 8 (Kaposi`s sarcoma-associated h
cauacugggaucccuucacagug

SEQ ID NO: 194490 - RNA, 21 nt, Human herpesvirus 8 (Kaposi`s sarcoma-associated h
cauacgucccucuuggcuguu

SEQ ID NO: 194491 - RNA, 20 nt, Human herpesvirus 8 (Kaposi`s sarcoma-associated h
cagugugcgcgcagcuuucc

SEQ ID NO: 194492 - RNA, 18 nt, Human herpesvirus 8 (Kaposi`s sarcoma-associated h
cagugugcuguccagcgu

SEQ ID NO: 194493 - RNA, 23 nt, Human herpesvirus 8 (Kaposi`s sarcoma-associated h
caguugaucgauuucuguauaca

SEQ ID NO: 194494 - RNA, 19 nt, Human herpesvirus 8 (Kaposi`s sarcoma-associated h
caguuggagaaacagugga

SEQ ID NO: 194495 - RNA, 22 nt, Human herpesvirus 8 (Kaposi`s sarcoma-associated h
caguugggcggggcuguuuuuc

SEQ ID NO: 194496 - RNA, 12 nt, Human herpesvirus 8 (Kaposi`s sarcoma-associated h
caguugugaucu

SEQ ID NO: 194497 - RNA, 15 nt, Human herpesvirus 8 (Kaposi`s sarcoma-associated h
caguggacacagucu

SEQ ID NO: 194498 - RNA, 14 nt, Human herpesvirus 8 (Kaposi`s sarcoma-associated h
cagugacccuaguc

SEQ ID NO: 194499 - RNA, 16 nt, Human herpesvirus 8 (Kaposi`s sarcoma-associated h
cagucuguaaagaaag

SEQ ID NO: 194500 - RNA, 17 nt, Human herpesvirus 8 (Kaposi`s sarcoma-associated h
cagugagcgcgcucugu

SEQ ID NO: 194501 - RNA, 21 nt, Human herpesvirus 8 (Kaposi`s sarcoma-associated h
cagucgcuccuuauaacgcgu

SEQ ID NO: 194502 - RNA, 12 nt, Human herpesvirus 8 (Kaposi`s sarcoma-associated h
gcccaacuucau

SEQ ID NO: 194503 - RNA, 22 nt, Human herpesvirus 8 (Kaposi`s sarcoma-associated h
gcccaacuucaucacauccccg

SEQ ID NO: 194504 - RNA, 11 nt, Human herpesvirus 8 (Kaposi`s sarcoma-associated h
gccaugguacc

SEQ ID NO: 194505 - RNA, 15 nt, Human herpesvirus 8 (Kaposi`s sarcoma-associated h
gccaugguaccauuc

SEQ ID NO: 194506 - RNA, 15 nt, Human herpesvirus 8 (Kaposi`s sarcoma-associated h
gccaggaaguucaau

SEQ ID NO: 194507 - RNA, 16 nt, Human herpesvirus 8 (Kaposi`s sarcoma-associated h
gccaggaaguucaaug

SEQ ID NO: 194508 - RNA, 23 nt, Human herpesvirus 8 (Kaposi`s sarcoma-associated h
gccaggaacacgcgaaugcagca

SEQ ID NO: 194509 - RNA, 18 nt, Human herpesvirus 8 (Kaposi`s sarcoma-associated h
gccagccgcgcgaccucc

SEQ ID NO: 194510 - RNA, 19 nt, Human herpesvirus 8 (Kaposi`s sarcoma-associated h
gcccacccuguacaugaac

SEQ ID NO: 194511 - RNA, 22 nt, Human herpesvirus 8 (Kaposi`s sarcoma-associated h
gcccaaucucucauagacuuuc

SEQ ID NO: 194512 - RNA, 15 nt, Human herpesvirus 8 (Kaposi`s sarcoma-associated h
gcccagacaccaaag

SEQ ID NO: 194513 - RNA, 16 nt, Human herpesvirus 8 (Kaposi`s sarcoma-associated h
gcccacggugcacuga

SEQ ID NO: 194514 - RNA, 15 nt, Human herpesvirus 8 (Kaposi`s sarcoma-associated h
gcccacguauggguu

SEQ ID NO: 194515 - RNA, 18 nt, Human herpesvirus 8 (Kaposi`s sarcoma-associated h
gcccacugguguaucaga

SEQ ID NO: 194516 - RNA, 15 nt, Human herpesvirus 8 (Kaposi`s sarcoma-associated h
gcccgucacuggaug

SEQ ID NO: 194517 - RNA, 13 nt, Human herpesvirus 8 (Kaposi`s sarcoma-associated h
gcccggcggacca

SEQ ID NO: 194518 - RNA, 13 nt, Human herpesvirus 8 (Kaposi`s sarcoma-associated h
gccaagugcauug

SEQ ID NO: 194519 - RNA, 20 nt, Human herpesvirus 8 (Kaposi`s sarcoma-associated h
gccacugcuuugcggcuuaa

SEQ ID NO: 194520 - RNA, 13 nt, Human herpesvirus 8 (Kaposi`s sarcoma-associated h
gccagacagccga

SEQ ID NO: 194521 - RNA, 15 nt, Human herpesvirus 8 (Kaposi`s sarcoma-associated h
gccagauggccgggu

SEQ ID NO: 194522 - RNA, 14 nt, Human herpesvirus 8 (Kaposi`s sarcoma-associated h
gccaauacugccca

SEQ ID NO: 194523 - RNA, 20 nt, Human herpesvirus 8 (Kaposi`s sarcoma-associated h
gccaagccauuauacacacg

SEQ ID NO: 194524 - RNA, 22 nt, Human herpesvirus 8 (Kaposi`s sarcoma-associated h
gccaagccauuauacacacggg

SEQ ID NO: 194525 - RNA, 15 nt, Human herpesvirus 8 (Kaposi`s sarcoma-associated h
gccaagcuacuggcc

SEQ ID NO: 194526 - RNA, 19 nt, Human herpesvirus 8 (Kaposi`s sarcoma-associated h
gccaaaugcggccaguuua

SEQ ID NO: 194527 - RNA, 17 nt, Human herpesvirus 8 (Kaposi`s sarcoma-associated h
gcauaauaaaacaaaua

SEQ ID NO: 194528 - RNA, 19 nt, Human herpesvirus 8 (Kaposi`s sarcoma-associated h
gcauauacagguguccaag

SEQ ID NO: 194529 - RNA, 22 nt, Human herpesvirus 8 (Kaposi`s sarcoma-associated h
gcaucaccccagauguucuugc

SEQ ID NO: 194530 - RNA, 23 nt, Human herpesvirus 8 (Kaposi`s sarcoma-associated h
gcaucaccccagauguucuugcc

SEQ ID NO: 194531 - RNA, 19 nt, Human herpesvirus 8 (Kaposi`s sarcoma-associated h
gcauuuuucccuccugcau

SEQ ID NO: 194532 - RNA, 12 nt, Human herpesvirus 8 (Kaposi`s sarcoma-associated h
gcgaaaccacug

SEQ ID NO: 194533 - RNA, 19 nt, Human herpesvirus 8 (Kaposi`s sarcoma-associated h
gccuuuucuggguuuacau

SEQ ID NO: 194534 - RNA, 23 nt, Human herpesvirus 8 (Kaposi`s sarcoma-associated h
gcgaacaagacaccaauaacgaa

SEQ ID NO: 194535 - RNA, 22 nt, Human herpesvirus 8 (Kaposi`s sarcoma-associated h
gcgaccucaaccggucgcagug

SEQ ID NO: 194536 - RNA, 13 nt, Human herpesvirus 8 (Kaposi`s sarcoma-associated h
gcgaccagucuua

SEQ ID NO: 194537 - RNA, 17 nt, Human herpesvirus 8 (Kaposi`s sarcoma-associated h
gcgaauaaaacaggaag

SEQ ID NO: 194538 - RNA, 23 nt, Human herpesvirus 8 (Kaposi`s sarcoma-associated h
gcgaaugugccagcagccagcgu

SEQ ID NO: 194539 - RNA, 23 nt, Human herpesvirus 8 (Kaposi`s sarcoma-associated h
gcgcagcuuaccgcuacuguggg

SEQ ID NO: 194540 - RNA, 20 nt, Human herpesvirus 8 (Kaposi`s sarcoma-associated h
gccucuagcuguagagucau

SEQ ID NO: 194541 - RNA, 18 nt, Human herpesvirus 8 (Kaposi`s sarcoma-associated h
gccucugaagcaccacau

SEQ ID NO: 194542 - RNA, 14 nt, Human herpesvirus 8 (Kaposi`s sarcoma-associated h
gccucuguacaugg

SEQ ID NO: 194543 - RNA, 20 nt, Human herpesvirus 8 (Kaposi`s sarcoma-associated h
gccugaaacgucgcccaaau

SEQ ID NO: 194544 - RNA, 13 nt, Human herpesvirus 8 (Kaposi`s sarcoma-associated h
gccggcacgcggu

SEQ ID NO: 194545 - RNA, 14 nt, Human herpesvirus 8 (Kaposi`s sarcoma-associated h
gccgcuugcugaua

SEQ ID NO: 194546 - RNA, 15 nt, Human herpesvirus 8 (Kaposi`s sarcoma-associated h
gccggacaccaccgu

SEQ ID NO: 194547 - RNA, 18 nt, Human herpesvirus 8 (Kaposi`s sarcoma-associated h
gcagcuuggugaagcaga

SEQ ID NO: 194548 - RNA, 21 nt, Human herpesvirus 8 (Kaposi`s sarcoma-associated h
gcagcuuaccgcuacuguggg

SEQ ID NO: 194549 - RNA, 16 nt, Human herpesvirus 8 (Kaposi`s sarcoma-associated h
gcagcuggacuggagu

SEQ ID NO: 194550 - RNA, 22 nt, Human herpesvirus 8 (Kaposi`s sarcoma-associated h
gcagcaucaccccagauguucu

SEQ ID NO: 194551 - RNA, 23 nt, Human herpesvirus 8 (Kaposi`s sarcoma-associated h
gcagccuugcauacccuguagau

SEQ ID NO: 194552 - RNA, 13 nt, Human herpesvirus 8 (Kaposi`s sarcoma-associated h
gcagugugcagua

SEQ ID NO: 194553 - RNA, 14 nt, Human herpesvirus 8 (Kaposi`s sarcoma-associated h
gcagucgccaguuu

SEQ ID NO: 194554 - RNA, 17 nt, Human herpesvirus 8 (Kaposi`s sarcoma-associated h
gcaggcuuauaccggcc

SEQ ID NO: 194555 - RNA, 19 nt, Human herpesvirus 8 (Kaposi`s sarcoma-associated h
gcaggcgccuaugacuagg

SEQ ID NO: 194556 - RNA, 12 nt, Human herpesvirus 8 (Kaposi`s sarcoma-associated h
gcacuucuugac

SEQ ID NO: 194557 - RNA, 15 nt, Human herpesvirus 8 (Kaposi`s sarcoma-associated h
gcacuccaagccagu

SEQ ID NO: 194558 - RNA, 20 nt, Human herpesvirus 8 (Kaposi`s sarcoma-associated h
gcacuauaaauaucauugcc

SEQ ID NO: 194559 - RNA, 13 nt, Human herpesvirus 8 (Kaposi`s sarcoma-associated h
gcagaaaacuguc

SEQ ID NO: 194560 - RNA, 18 nt, Human herpesvirus 8 (Kaposi`s sarcoma-associated h
gcagaaaacugucuccag

SEQ ID NO: 194561 - RNA, 18 nt, Human herpesvirus 8 (Kaposi`s sarcoma-associated h
gcagaacaguacccacga

SEQ ID NO: 194562 - RNA, 20 nt, Human herpesvirus 8 (Kaposi`s sarcoma-associated h
gcagacccggcaacacugga

SEQ ID NO: 194563 - RNA, 23 nt, Human herpesvirus 8 (Kaposi`s sarcoma-associated h
gcagagugucucccguauuccau

SEQ ID NO: 194564 - RNA, 18 nt, Human herpesvirus 8 (Kaposi`s sarcoma-associated h
gcagauauaaacauggca

SEQ ID NO: 194565 - RNA, 15 nt, Human herpesvirus 8 (Kaposi`s sarcoma-associated h
gcagcaagcacagaa

SEQ ID NO: 194566 - RNA, 14 nt, Human herpesvirus 8 (Kaposi`s sarcoma-associated h
gcagcagcugcuug

SEQ ID NO: 194567 - RNA, 23 nt, Human herpesvirus 8 (Kaposi`s sarcoma-associated h
gcaaggggguguccccugcaaug

SEQ ID NO: 194568 - RNA, 11 nt, Human herpesvirus 8 (Kaposi`s sarcoma-associated h
gcaagugcacg

SEQ ID NO: 194569 - RNA, 21 nt, Human herpesvirus 8 (Kaposi`s sarcoma-associated h
gauccacucagguguuuucca

SEQ ID NO: 194570 - RNA, 13 nt, Human herpesvirus 8 (Kaposi`s sarcoma-associated h
gaucagaccccuc

SEQ ID NO: 194571 - RNA, 13 nt, Human herpesvirus 8 (Kaposi`s sarcoma-associated h
gcaccaagcacaa

SEQ ID NO: 194572 - RNA, 23 nt, Human herpesvirus 8 (Kaposi`s sarcoma-associated h
gcaccacgcccgggggccaggac

SEQ ID NO: 194573 - RNA, 23 nt, Human herpesvirus 8 (Kaposi`s sarcoma-associated h
gcaccagcucagcgaugccgaca

SEQ ID NO: 194574 - RNA, 16 nt, Human herpesvirus 8 (Kaposi`s sarcoma-associated h
gcaccauggccacuua

SEQ ID NO: 194575 - RNA, 13 nt, Human herpesvirus 8 (Kaposi`s sarcoma-associated h
gcacccaacaucc

SEQ ID NO: 194576 - RNA, 18 nt, Human herpesvirus 8 (Kaposi`s sarcoma-associated h
gcaccuugauguuuccca

SEQ ID NO: 194577 - RNA, 17 nt, Human herpesvirus 8 (Kaposi`s sarcoma-associated h
gcaccuguuuccugcaa

SEQ ID NO: 194578 - RNA, 18 nt, Human herpesvirus 8 (Kaposi`s sarcoma-associated h
gcaccuguuuccugcaac

SEQ ID NO: 194579 - RNA, 20 nt, Human herpesvirus 8 (Kaposi`s sarcoma-associated h
gcacccuauccaucagucag

SEQ ID NO: 194580 - RNA, 17 nt, Human herpesvirus 8 (Kaposi`s sarcoma-associated h
gcaaugucagguuccac

SEQ ID NO: 194581 - RNA, 15 nt, Human herpesvirus 8 (Kaposi`s sarcoma-associated h
gcacacgcugcaaug

SEQ ID NO: 194582 - RNA, 14 nt, Human herpesvirus 8 (Kaposi`s sarcoma-associated h
gcacacgaaugcuc

SEQ ID NO: 194583 - RNA, 15 nt, Human herpesvirus 8 (Kaposi`s sarcoma-associated h
gcacauaugucuccc

SEQ ID NO: 194584 - RNA, 22 nt, Human herpesvirus 8 (Kaposi`s sarcoma-associated h
gcacaagcgcugacgaaagcua

SEQ ID NO: 194585 - RNA, 19 nt, Human herpesvirus 8 (Kaposi`s sarcoma-associated h
ggaagcauccggacugaga

SEQ ID NO: 194586 - RNA, 22 nt, Human herpesvirus 8 (Kaposi`s sarcoma-associated h
ggaagauugguguccagacagu

SEQ ID NO: 194587 - RNA, 17 nt, Human herpesvirus 8 (Kaposi`s sarcoma-associated h
ggaaguuucagagccuu

SEQ ID NO: 194588 - RNA, 17 nt, Human herpesvirus 8 (Kaposi`s sarcoma-associated h
ggaaugcauauggacug

SEQ ID NO: 194589 - RNA, 17 nt, Human herpesvirus 8 (Kaposi`s sarcoma-associated h
ggaauggccuccaccca

SEQ ID NO: 194590 - RNA, 14 nt, Human herpesvirus 8 (Kaposi`s sarcoma-associated h
ggaaagcacuggga

SEQ ID NO: 194591 - RNA, 22 nt, Human herpesvirus 8 (Kaposi`s sarcoma-associated h
ggaaccacggcgcuguacagug

SEQ ID NO: 194592 - RNA, 14 nt, Human herpesvirus 8 (Kaposi`s sarcoma-associated h
gcuuugcagccagg

SEQ ID NO: 194593 - RNA, 21 nt, Human herpesvirus 8 (Kaposi`s sarcoma-associated h
gcuuguacagugaguggcugu

SEQ ID NO: 194594 - RNA, 18 nt, Human herpesvirus 8 (Kaposi`s sarcoma-associated h
gcuuaccgcuacuguggg

SEQ ID NO: 194595 - RNA, 13 nt, Human herpesvirus 8 (Kaposi`s sarcoma-associated h
gcuuacguucuua

SEQ ID NO: 194596 - RNA, 19 nt, Human herpesvirus 8 (Kaposi`s sarcoma-associated h
gcuuaagcgccaagccauu

SEQ ID NO: 194597 - RNA, 15 nt, Human herpesvirus 8 (Kaposi`s sarcoma-associated h
gcuuaaccacaugca

SEQ ID NO: 194598 - RNA, 17 nt, Human herpesvirus 8 (Kaposi`s sarcoma-associated h
gcucucccaaaccacac

SEQ ID NO: 194599 - RNA, 14 nt, Human herpesvirus 8 (Kaposi`s sarcoma-associated h
gcucuggaggccaa

SEQ ID NO: 194600 - RNA, 21 nt, Human herpesvirus 8 (Kaposi`s sarcoma-associated h
gcucuuagagcuuuaaaggag

SEQ ID NO: 194601 - RNA, 19 nt, Human herpesvirus 8 (Kaposi`s sarcoma-associated h
gcuguccucgcaagcuuga

SEQ ID NO: 194602 - RNA, 12 nt, Human herpesvirus 8 (Kaposi`s sarcoma-associated h
gcugccaagauc

SEQ ID NO: 194603 - RNA, 13 nt, Human herpesvirus 8 (Kaposi`s sarcoma-associated h
gcugagccacaaa

SEQ ID NO: 194604 - RNA, 15 nt, Human herpesvirus 8 (Kaposi`s sarcoma-associated h
gcuagcguacucucg

SEQ ID NO: 194605 - RNA, 20 nt, Human herpesvirus 8 (Kaposi`s sarcoma-associated h
gcuaguuaucuucagagcug

SEQ ID NO: 194606 - RNA, 19 nt, Human herpesvirus 8 (Kaposi`s sarcoma-associated h
gcuacugugggugcacuga

SEQ ID NO: 194607 - RNA, 16 nt, Human herpesvirus 8 (Kaposi`s sarcoma-associated h
gcucuaaauagaacag

SEQ ID NO: 194608 - RNA, 18 nt, Human herpesvirus 8 (Kaposi`s sarcoma-associated h
gcgccacucccaccaugu

SEQ ID NO: 194609 - RNA, 17 nt, Human herpesvirus 8 (Kaposi`s sarcoma-associated h
gcgccuagaugcgcugg

SEQ ID NO: 194610 - RNA, 14 nt, Human herpesvirus 8 (Kaposi`s sarcoma-associated h
ggcaguugacgggu

SEQ ID NO: 194611 - RNA, 14 nt, Human herpesvirus 8 (Kaposi`s sarcoma-associated h
ggcauaccacgugu

SEQ ID NO: 194612 - RNA, 17 nt, Human herpesvirus 8 (Kaposi`s sarcoma-associated h
ggcauacccguggcuca

SEQ ID NO: 194613 - RNA, 18 nt, Human herpesvirus 8 (Kaposi`s sarcoma-associated h
ggccacaaaacugccaaa

SEQ ID NO: 194614 - RNA, 23 nt, Human herpesvirus 8 (Kaposi`s sarcoma-associated h
ggccacuuugcccuaaaugugac

SEQ ID NO: 194615 - RNA, 21 nt, Human herpesvirus 8 (Kaposi`s sarcoma-associated h
ggccauccgcgagccauucau

SEQ ID NO: 194616 - RNA, 14 nt, Human herpesvirus 8 (Kaposi`s sarcoma-associated h
ggaugggugcaacg

SEQ ID NO: 194617 - RNA, 16 nt, Human herpesvirus 8 (Kaposi`s sarcoma-associated h
ggauggaucccucuga

SEQ ID NO: 194618 - RNA, 17 nt, Human herpesvirus 8 (Kaposi`s sarcoma-associated h
ggaugucuacgugcccu

SEQ ID NO: 194619 - RNA, 22 nt, Human herpesvirus 8 (Kaposi`s sarcoma-associated h
ggauuuaaaaccgcccacugau

SEQ ID NO: 194620 - RNA, 19 nt, Human herpesvirus 8 (Kaposi`s sarcoma-associated h
ggauucacucagcugccaa

SEQ ID NO: 194621 - RNA, 19 nt, Human herpesvirus 8 (Kaposi`s sarcoma-associated h
ggaugcacaguauagggau

SEQ ID NO: 194622 - RNA, 20 nt, Human herpesvirus 8 (Kaposi`s sarcoma-associated h
ggacucacugggggucucgg

SEQ ID NO: 194623 - RNA, 12 nt, Human herpesvirus 8 (Kaposi`s sarcoma-associated h
ggacgcauauca

SEQ ID NO: 194624 - RNA, 14 nt, Human herpesvirus 8 (Kaposi`s sarcoma-associated h
ggacacaacaugca

SEQ ID NO: 194625 - RNA, 22 nt, Human herpesvirus 8 (Kaposi`s sarcoma-associated h
ggaccuuacgauggaagaccua

SEQ ID NO: 194626 - RNA, 17 nt, Human herpesvirus 8 (Kaposi`s sarcoma-associated h
ggaccgcgagacaucag

SEQ ID NO: 194627 - RNA, 17 nt, Human herpesvirus 8 (Kaposi`s sarcoma-associated h
ggaccgggauagcccgu

SEQ ID NO: 194628 - RNA, 17 nt, Human herpesvirus 8 (Kaposi`s sarcoma-associated h
ggacauggacaggggug

SEQ ID NO: 194629 - RNA, 14 nt, Human herpesvirus 8 (Kaposi`s sarcoma-associated h
ggcuguuacaauaa

SEQ ID NO: 194630 - RNA, 16 nt, Human herpesvirus 8 (Kaposi`s sarcoma-associated h
gggagaaccaugccag

SEQ ID NO: 194631 - RNA, 18 nt, Human herpesvirus 8 (Kaposi`s sarcoma-associated h
gggagagcggacgccauu

SEQ ID NO: 194632 - RNA, 23 nt, Human herpesvirus 8 (Kaposi`s sarcoma-associated h
gggaggcuugguggccauucgca

SEQ ID NO: 194633 - RNA, 19 nt, Human herpesvirus 8 (Kaposi`s sarcoma-associated h
gggagcugucccaccagag

SEQ ID NO: 194634 - RNA, 23 nt, Human herpesvirus 8 (Kaposi`s sarcoma-associated h
ggcugcaaagcuuaaccacaugc

SEQ ID NO: 194635 - RNA, 23 nt, Human herpesvirus 8 (Kaposi`s sarcoma-associated h
ggcugcgcgucuucuauacaugc

SEQ ID NO: 194636 - RNA, 16 nt, Human herpesvirus 8 (Kaposi`s sarcoma-associated h
ggccuugggugcgaug

SEQ ID NO: 194637 - RNA, 22 nt, Human herpesvirus 8 (Kaposi`s sarcoma-associated h
ggccuuuuuuugcguuucccau

SEQ ID NO: 194638 - RNA, 23 nt, Human herpesvirus 8 (Kaposi`s sarcoma-associated h
ggccuccagcaaagcacauuuug

SEQ ID NO: 194639 - RNA, 15 nt, Human herpesvirus 8 (Kaposi`s sarcoma-associated h
ggcgagcucaugccc

SEQ ID NO: 194640 - RNA, 19 nt, Human herpesvirus 8 (Kaposi`s sarcoma-associated h
ggcgagauuggaggcacau

SEQ ID NO: 194641 - RNA, 14 nt, Human herpesvirus 8 (Kaposi`s sarcoma-associated h
ggcgauuacaggaa

SEQ ID NO: 194642 - RNA, 20 nt, Human herpesvirus 8 (Kaposi`s sarcoma-associated h
ggcgauuacaggaaacuggg

SEQ ID NO: 194643 - RNA, 15 nt, Human herpesvirus 8 (Kaposi`s sarcoma-associated h
gggcgauuacaggaa

SEQ ID NO: 194644 - RNA, 20 nt, Human herpesvirus 8 (Kaposi`s sarcoma-associated h
gggcgagaauggcgugccag

SEQ ID NO: 194645 - RNA, 19 nt, Human herpesvirus 8 (Kaposi`s sarcoma-associated h
gggcacggaugacagggaa

SEQ ID NO: 194646 - RNA, 19 nt, Human herpesvirus 8 (Kaposi`s sarcoma-associated h
gggauggaggaagagggau

SEQ ID NO: 194647 - RNA, 20 nt, Human herpesvirus 8 (Kaposi`s sarcoma-associated h
gggauggguuuauaaugcca

SEQ ID NO: 194648 - RNA, 22 nt, Human herpesvirus 8 (Kaposi`s sarcoma-associated h
gggaucgaacagaagacccaga

SEQ ID NO: 194649 - RNA, 12 nt, Human herpesvirus 8 (Kaposi`s sarcoma-associated h
gggauacuguuu

SEQ ID NO: 194650 - RNA, 18 nt, Human herpesvirus 8 (Kaposi`s sarcoma-associated h
gggcuugggaguggccaa

SEQ ID NO: 194651 - RNA, 14 nt, Human herpesvirus 8 (Kaposi`s sarcoma-associated h
gggcuuguacaugu

SEQ ID NO: 194652 - RNA, 22 nt, Human herpesvirus 8 (Kaposi`s sarcoma-associated h
gggcuucauuaugcaugcaaua

SEQ ID NO: 194653 - RNA, 16 nt, Human herpesvirus 8 (Kaposi`s sarcoma-associated h
ggggaagucaugcuca

SEQ ID NO: 194654 - RNA, 13 nt, Human herpesvirus 8 (Kaposi`s sarcoma-associated h
ggggauaugggcu

SEQ ID NO: 194655 - RNA, 20 nt, Human herpesvirus 8 (Kaposi`s sarcoma-associated h
gaccaauacaagacaacuaa

SEQ ID NO: 194656 - RNA, 13 nt, Human herpesvirus 8 (Kaposi`s sarcoma-associated h
gaccaacaggcug

SEQ ID NO: 194657 - RNA, 16 nt, Human herpesvirus 8 (Kaposi`s sarcoma-associated h
gacauuuugucagguu

SEQ ID NO: 194658 - RNA, 23 nt, Human herpesvirus 8 (Kaposi`s sarcoma-associated h
gacauucguaagaggacccaggg

SEQ ID NO: 194659 - RNA, 22 nt, Human herpesvirus 8 (Kaposi`s sarcoma-associated h
gaccacgccugacucauuucau

SEQ ID NO: 194660 - RNA, 19 nt, Human herpesvirus 8 (Kaposi`s sarcoma-associated h
aaauacaaaaacacaauca

SEQ ID NO: 194661 - RNA, 16 nt, Human herpesvirus 8 (Kaposi`s sarcoma-associated h
aaauaaugcagacaga

SEQ ID NO: 194662 - RNA, 17 nt, Human herpesvirus 8 (Kaposi`s sarcoma-associated h
gacaugaaagacugccu

SEQ ID NO: 194663 - RNA, 13 nt, Human herpesvirus 8 (Kaposi`s sarcoma-associated h
gacaguauucuca

SEQ ID NO: 194664 - RNA, 14 nt, Human herpesvirus 8 (Kaposi`s sarcoma-associated h
gacaguauucucac

SEQ ID NO: 194665 - RNA, 23 nt, Human herpesvirus 8 (Kaposi`s sarcoma-associated h
gacaguuaccauucaugauuuca

SEQ ID NO: 194666 - RNA, 17 nt, Human herpesvirus 8 (Kaposi`s sarcoma-associated h
gacaguugugaucucug

SEQ ID NO: 194667 - RNA, 11 nt, Human herpesvirus 8 (Kaposi`s sarcoma-associated h
gacauacauga

SEQ ID NO: 194668 - RNA, 22 nt, Human herpesvirus 8 (Kaposi`s sarcoma-associated h
gacagggacgcauaucacggga

SEQ ID NO: 194669 - RNA, 17 nt, Human herpesvirus 8 (Kaposi`s sarcoma-associated h
gacaacggcgacgacaa

SEQ ID NO: 194670 - RNA, 21 nt, Human herpesvirus 8 (Kaposi`s sarcoma-associated h
gacaacacuacuaugucccaa

SEQ ID NO: 194671 - RNA, 12 nt, Human herpesvirus 8 (Kaposi`s sarcoma-associated h
gacaaacacugu

SEQ ID NO: 194672 - RNA, 15 nt, Human herpesvirus 8 (Kaposi`s sarcoma-associated h
gacaaacacugugga

SEQ ID NO: 194673 - RNA, 13 nt, Human herpesvirus 8 (Kaposi`s sarcoma-associated h
aaaucgaagccag

SEQ ID NO: 194674 - RNA, 16 nt, Human herpesvirus 8 (Kaposi`s sarcoma-associated h
aaauccgagcaccuca

SEQ ID NO: 194675 - RNA, 23 nt, Human herpesvirus 8 (Kaposi`s sarcoma-associated h
aaauuguguguaccuagcccugu

SEQ ID NO: 194676 - RNA, 21 nt, Human herpesvirus 8 (Kaposi`s sarcoma-associated h
gacgcggccuucgucaugcac

SEQ ID NO: 194677 - RNA, 17 nt, Human herpesvirus 8 (Kaposi`s sarcoma-associated h
gacgcauaucacgggau

SEQ ID NO: 194678 - RNA, 14 nt, Human herpesvirus 8 (Kaposi`s sarcoma-associated h
gacgauguacuuga

SEQ ID NO: 194679 - RNA, 17 nt, Human herpesvirus 8 (Kaposi`s sarcoma-associated h
gacgcacagcaugccgu

SEQ ID NO: 194680 - RNA, 19 nt, Human herpesvirus 8 (Kaposi`s sarcoma-associated h
gacgacugggccaccaaga

SEQ ID NO: 194681 - RNA, 21 nt, Human herpesvirus 8 (Kaposi`s sarcoma-associated h
gacgacugggccaccaagauc

SEQ ID NO: 194682 - RNA, 12 nt, Human herpesvirus 8 (Kaposi`s sarcoma-associated h
gacgaaagcuau

SEQ ID NO: 194683 - RNA, 22 nt, Human herpesvirus 8 (Kaposi`s sarcoma-associated h
gacgugcccagacaccaaagac

SEQ ID NO: 194684 - RNA, 11 nt, Human herpesvirus 8 (Kaposi`s sarcoma-associated h
gagaaccaugc

SEQ ID NO: 194685 - RNA, 15 nt, Human herpesvirus 8 (Kaposi`s sarcoma-associated h
gacgugcgggccaau

SEQ ID NO: 194686 - RNA, 21 nt, Human herpesvirus 8 (Kaposi`s sarcoma-associated h
gagaacugucgagacauguca

SEQ ID NO: 194687 - RNA, 19 nt, Human herpesvirus 8 (Kaposi`s sarcoma-associated h
gagaauuagaaacaaagca

SEQ ID NO: 194688 - RNA, 23 nt, Human herpesvirus 8 (Kaposi`s sarcoma-associated h
gacggcgucaccgacaccaucuc

SEQ ID NO: 194689 - RNA, 20 nt, Human herpesvirus 8 (Kaposi`s sarcoma-associated h
aacaaacaagacacacccgc

SEQ ID NO: 194690 - RNA, 17 nt, Human herpesvirus 8 (Kaposi`s sarcoma-associated h
aacaaacaaggucaaua

SEQ ID NO: 194691 - RNA, 13 nt, Human herpesvirus 8 (Kaposi`s sarcoma-associated h
aacaaagcacugg

SEQ ID NO: 194692 - RNA, 23 nt, Human herpesvirus 8 (Kaposi`s sarcoma-associated h
gagauaacggugucuaacugccg

SEQ ID NO: 194693 - RNA, 14 nt, Human herpesvirus 8 (Kaposi`s sarcoma-associated h
gagcaugacuuccc

SEQ ID NO: 194694 - RNA, 13 nt, Human herpesvirus 8 (Kaposi`s sarcoma-associated h
gagccaacaaaca

SEQ ID NO: 194695 - RNA, 13 nt, Human herpesvirus 8 (Kaposi`s sarcoma-associated h
gagcacacugugu

SEQ ID NO: 194696 - RNA, 14 nt, Human herpesvirus 8 (Kaposi`s sarcoma-associated h
gagcacacuuccca

SEQ ID NO: 194697 - RNA, 13 nt, Human herpesvirus 8 (Kaposi`s sarcoma-associated h
gagcagugcuccc

SEQ ID NO: 194698 - RNA, 14 nt, Human herpesvirus 8 (Kaposi`s sarcoma-associated h
gagcagugcucccg

SEQ ID NO: 194699 - RNA, 21 nt, Human herpesvirus 8 (Kaposi`s sarcoma-associated h
gaguuuuucuacgaggcaauu

SEQ ID NO: 194700 - RNA, 20 nt, Human herpesvirus 8 (Kaposi`s sarcoma-associated h
gagugucucccguauuccau

SEQ ID NO: 194701 - RNA, 14 nt, Human herpesvirus 8 (Kaposi`s sarcoma-associated h
gaguguaaaaaacu

SEQ ID NO: 194702 - RNA, 22 nt, Human herpesvirus 8 (Kaposi`s sarcoma-associated h
gauagcccguuucgcuggccca

SEQ ID NO: 194703 - RNA, 18 nt, Human herpesvirus 8 (Kaposi`s sarcoma-associated h
gauaggcaacaugacaug

SEQ ID NO: 194704 - RNA, 13 nt, Human herpesvirus 8 (Kaposi`s sarcoma-associated h
gauauaaacaugg

SEQ ID NO: 194705 - RNA, 19 nt, Human herpesvirus 8 (Kaposi`s sarcoma-associated h
gauaugcaugugucugugc

SEQ ID NO: 194706 - RNA, 23 nt, Human herpesvirus 8 (Kaposi`s sarcoma-associated h
gauaugcaugugucugugcccug

SEQ ID NO: 194707 - RNA, 14 nt, Human herpesvirus 8 (Kaposi`s sarcoma-associated h
gauaugugugccca

SEQ ID NO: 194708 - RNA, 15 nt, Human herpesvirus 8 (Kaposi`s sarcoma-associated h
gauaugugugcccaa

SEQ ID NO: 194709 - RNA, 20 nt, Human herpesvirus 8 (Kaposi`s sarcoma-associated h
gagcuucggaaagcacuggg

SEQ ID NO: 194710 - RNA, 15 nt, Human herpesvirus 8 (Kaposi`s sarcoma-associated h
gaggaagagcacugu

SEQ ID NO: 194711 - RNA, 16 nt, Human herpesvirus 8 (Kaposi`s sarcoma-associated h
gaggaagagcacuguu

SEQ ID NO: 194712 - RNA, 13 nt, Human herpesvirus 8 (Kaposi`s sarcoma-associated h
gaggaauaugugg

SEQ ID NO: 194713 - RNA, 16 nt, Human herpesvirus 8 (Kaposi`s sarcoma-associated h
gagucuacgugccagu

SEQ ID NO: 194714 - RNA, 15 nt, Human herpesvirus 8 (Kaposi`s sarcoma-associated h
gaguauaucagggga

SEQ ID NO: 194715 - RNA, 12 nt, Human herpesvirus 8 (Kaposi`s sarcoma-associated h
gaguaggguagg

SEQ ID NO: 194716 - RNA, 15 nt, Human herpesvirus 8 (Kaposi`s sarcoma-associated h
gaauuauaaaaccgg

SEQ ID NO: 194717 - RNA, 22 nt, Human herpesvirus 8 (Kaposi`s sarcoma-associated h
gaauuacguuguagaucuggau

SEQ ID NO: 194718 - RNA, 14 nt, Human herpesvirus 8 (Kaposi`s sarcoma-associated h
gaauuagaaacaaa

SEQ ID NO: 194719 - RNA, 13 nt, Human herpesvirus 8 (Kaposi`s sarcoma-associated h
gaauggugucaau

SEQ ID NO: 194720 - RNA, 22 nt, Human herpesvirus 8 (Kaposi`s sarcoma-associated h
gaaugugccuaucaaucugaga

SEQ ID NO: 194721 - RNA, 20 nt, Human herpesvirus 8 (Kaposi`s sarcoma-associated h
aaaccaguaaagaguaccac

SEQ ID NO: 194722 - RNA, 20 nt, Human herpesvirus 8 (Kaposi`s sarcoma-associated h
aaaccauacuguuugcuuaa

SEQ ID NO: 194723 - RNA, 20 nt, Human herpesvirus 8 (Kaposi`s sarcoma-associated h
gaauucaaaggcgggaucau

SEQ ID NO: 194724 - RNA, 16 nt, Human herpesvirus 8 (Kaposi`s sarcoma-associated h
aaacccggauuugccc

SEQ ID NO: 194725 - RNA, 19 nt, Human herpesvirus 8 (Kaposi`s sarcoma-associated h
gaauucgcgugguccugga

SEQ ID NO: 194726 - RNA, 18 nt, Human herpesvirus 8 (Kaposi`s sarcoma-associated h
gaagaaaaggaugcacaa

SEQ ID NO: 194727 - RNA, 22 nt, Human herpesvirus 8 (Kaposi`s sarcoma-associated h
gaagaagaaaaugacgauguuc

SEQ ID NO: 194728 - RNA, 15 nt, Human herpesvirus 8 (Kaposi`s sarcoma-associated h
gaaggccgcguccau

SEQ ID NO: 194729 - RNA, 23 nt, Human herpesvirus 8 (Kaposi`s sarcoma-associated h
gaaggaauuguuauccggcagca

SEQ ID NO: 194730 - RNA, 17 nt, Human herpesvirus 8 (Kaposi`s sarcoma-associated h
gaagagagaaugcuucc

SEQ ID NO: 194731 - RNA, 20 nt, Human herpesvirus 8 (Kaposi`s sarcoma-associated h
gaagauauuuuucaacaaca

SEQ ID NO: 194732 - RNA, 17 nt, Human herpesvirus 8 (Kaposi`s sarcoma-associated h
gaaaguccgucaaccag

SEQ ID NO: 194733 - RNA, 18 nt, Human herpesvirus 8 (Kaposi`s sarcoma-associated h
gaacugugaguaaugugu

SEQ ID NO: 194734 - RNA, 17 nt, Human herpesvirus 8 (Kaposi`s sarcoma-associated h
gaacuugcuccaguguu

SEQ ID NO: 194735 - RNA, 13 nt, Human herpesvirus 8 (Kaposi`s sarcoma-associated h
gaacuuucaucca

SEQ ID NO: 194736 - RNA, 17 nt, Human herpesvirus 8 (Kaposi`s sarcoma-associated h
gaaaaacguuuuuccca

SEQ ID NO: 194737 - RNA, 13 nt, Human herpesvirus 8 (Kaposi`s sarcoma-associated h
gaaacugggugua

SEQ ID NO: 194738 - RNA, 21 nt, Human herpesvirus 8 (Kaposi`s sarcoma-associated h
gaaacugcucucgcugcucag

SEQ ID NO: 194739 - RNA, 18 nt, Human herpesvirus 8 (Kaposi`s sarcoma-associated h
gaaacucccccaaccucu

SEQ ID NO: 194740 - RNA, 13 nt, Human herpesvirus 8 (Kaposi`s sarcoma-associated h
gaaagaugaagcu

SEQ ID NO: 194741 - RNA, 19 nt, Human herpesvirus 8 (Kaposi`s sarcoma-associated h
gaaagaugaagcugucauu

SEQ ID NO: 194742 - RNA, 23 nt, Human herpesvirus 8 (Kaposi`s sarcoma-associated h
gaaagcuccucgagcgugcugau

SEQ ID NO: 194743 - RNA, 16 nt, Human herpesvirus 8 (Kaposi`s sarcoma-associated h
gaaaaucgaagccagg

SEQ ID NO: 194744 - RNA, 18 nt, Human herpesvirus 8 (Kaposi`s sarcoma-associated h
gaaacaaagcacuggcug

SEQ ID NO: 194745 - RNA, 18 nt, Human herpesvirus 8 (Kaposi`s sarcoma-associated h
gaaaauucuccaggcagu

SEQ ID NO: 194746 - RNA, 21 nt, Human herpesvirus 8 (Kaposi`s sarcoma-associated h
cuuuugcuuggcgcuguauga

SEQ ID NO: 194747 - RNA, 14 nt, Human herpesvirus 8 (Kaposi`s sarcoma-associated h
cuuuuuaagacaaa

SEQ ID NO: 194748 - RNA, 20 nt, Human herpesvirus 8 (Kaposi`s sarcoma-associated h
cuuuuuaagacaaacacugu

SEQ ID NO: 194749 - RNA, 16 nt, Human herpesvirus 8 (Kaposi`s sarcoma-associated h
cuuugcuggaggccaa

SEQ ID NO: 194750 - RNA, 21 nt, Human herpesvirus 8 (Kaposi`s sarcoma-associated h
cuuugggcuagugccaaauau

SEQ ID NO: 194751 - RNA, 14 nt, Human herpesvirus 8 (Kaposi`s sarcoma-associated h
cuuuguauaaaaua

SEQ ID NO: 194752 - RNA, 19 nt, Human herpesvirus 8 (Kaposi`s sarcoma-associated h
cuuucagacguccaguucc

SEQ ID NO: 194753 - RNA, 20 nt, Human herpesvirus 8 (Kaposi`s sarcoma-associated h
cuuacgccccuggugggaca

SEQ ID NO: 194754 - RNA, 17 nt, Human herpesvirus 8 (Kaposi`s sarcoma-associated h
cuuaccgcuacuguggg

SEQ ID NO: 194755 - RNA, 16 nt, Human herpesvirus 8 (Kaposi`s sarcoma-associated h
cuuaaggggauuacug

SEQ ID NO: 194756 - RNA, 18 nt, Human herpesvirus 8 (Kaposi`s sarcoma-associated h
cuuaagcgccaagccauu

SEQ ID NO: 194757 - RNA, 14 nt, Human herpesvirus 8 (Kaposi`s sarcoma-associated h
cuuaacgugucuga

SEQ ID NO: 194758 - RNA, 16 nt, Human herpesvirus 8 (Kaposi`s sarcoma-associated h
cuuaacuaaacauuac

SEQ ID NO: 194759 - RNA, 20 nt, Human herpesvirus 8 (Kaposi`s sarcoma-associated h
cuuaacacuucccaauaaca

SEQ ID NO: 194760 - RNA, 21 nt, Human herpesvirus 8 (Kaposi`s sarcoma-associated h
cuuaacacuucccaauaacaa

SEQ ID NO: 194761 - RNA, 23 nt, Human herpesvirus 8 (Kaposi`s sarcoma-associated h
ugggaccuuucaacaaucucuua

SEQ ID NO: 194762 - RNA, 20 nt, Human herpesvirus 8 (Kaposi`s sarcoma-associated h
uggacgaccgggaucuguua

SEQ ID NO: 194763 - RNA, 15 nt, Human herpesvirus 8 (Kaposi`s sarcoma-associated h
gugaguccuggcccc

SEQ ID NO: 194764 - RNA, 16 nt, Human herpesvirus 8 (Kaposi`s sarcoma-associated h
gugacgugacgcccug

SEQ ID NO: 194765 - RNA, 16 nt, Human herpesvirus 8 (Kaposi`s sarcoma-associated h
gugcguugugaagcau

SEQ ID NO: 194766 - RNA, 14 nt, Human herpesvirus 8 (Kaposi`s sarcoma-associated h
guguaccuagcccu

SEQ ID NO: 194767 - RNA, 15 nt, Human herpesvirus 8 (Kaposi`s sarcoma-associated h
guggugcccugcccu

SEQ ID NO: 194768 - RNA, 13 nt, Human herpesvirus 8 (Kaposi`s sarcoma-associated h
guguaagaacauu

SEQ ID NO: 194769 - RNA, 19 nt, Human herpesvirus 8 (Kaposi`s sarcoma-associated h
gucaaccaggccaccauuc

SEQ ID NO: 194770 - RNA, 13 nt, Human herpesvirus 8 (Kaposi`s sarcoma-associated h
cgaauaaaacagg

SEQ ID NO: 194771 - RNA, 15 nt, Human herpesvirus 8 (Kaposi`s sarcoma-associated h
gcagacgaccccccg

SEQ ID NO: 194772 - RNA, 17 nt, Human herpesvirus 8 (Kaposi`s sarcoma-associated h
gaugcagggccuggccu

SEQ ID NO: 194773 - RNA, 21 nt, Human herpesvirus 8 (Kaposi`s sarcoma-associated h
gccaccguaacuucaccgugg

SEQ ID NO: 194774 - RNA, 13 nt, Human herpesvirus 8 (Kaposi`s sarcoma-associated h
gccauucgcacca

SEQ ID NO: 194775 - RNA, 21 nt, Human herpesvirus 8 (Kaposi`s sarcoma-associated h
gccuagugggguggcgcgcca

SEQ ID NO: 194776 - RNA, 22 nt, Human herpesvirus 8 (Kaposi`s sarcoma-associated h
cggaggcuggaauggaucugcg

SEQ ID NO: 194777 - RNA, 20 nt, Human herpesvirus 8 (Kaposi`s sarcoma-associated h
cagccucacggacaacgcca

SEQ ID NO: 194778 - RNA, 22 nt, Human herpesvirus 8 (Kaposi`s sarcoma-associated h
augucauuuuuacuuuuacaag

SEQ ID NO: 194779 - RNA, 20 nt, Human herpesvirus 8 (Kaposi`s sarcoma-associated h
augugugggugggaaccgga

SEQ ID NO: 194780 - RNA, 18 nt, Human herpesvirus 8 (Kaposi`s sarcoma-associated h
auggucuguauugacacc

SEQ ID NO: 194781 - RNA, 21 nt, Human herpesvirus 8 (Kaposi`s sarcoma-associated h
aaacaaugggggguuugaaaa

SEQ ID NO: 194782 - RNA, 19 nt, Human herpesvirus 8 (Kaposi`s sarcoma-associated h
uuggguugggaggugaccc

SEQ ID NO: 194783 - RNA, 19 nt, Human herpesvirus 8 (Kaposi`s sarcoma-associated h
uugugcucgacggagacac

SEQ ID NO: 194784 - RNA, 20 nt, Human herpesvirus 8 (Kaposi`s sarcoma-associated h
uguccucauuagucgggacu

SEQ ID NO: 194785 - RNA, 17 nt, Human herpesvirus 8 (Kaposi`s sarcoma-associated h
ugccaauaacccgcccu

SEQ ID NO: 194786 - RNA, 18 nt, Human herpesvirus 8 (Kaposi`s sarcoma-associated h
ugaggaucggaucuuuua

SEQ ID NO: 194787 - RNA, 18 nt, Human herpesvirus 8 (Kaposi`s sarcoma-associated h
ggggcuuaugucauuuuu

SEQ ID NO: 194788 - RNA, 12 nt, Human herpesvirus 8 (Kaposi`s sarcoma-associated h
cucacacccuga

SEQ ID NO: 194789 - RNA, 17 nt, Human herpesvirus 8 (Kaposi`s sarcoma-associated h
cuagcggucaaccccgu

SEQ ID NO: 194790 - RNA, 19 nt, Human herpesvirus 8 (Kaposi`s sarcoma-associated h
cgguggcaacauacauuuu

SEQ ID NO: 194791 - RNA, 20 nt, Human herpesvirus 8 (Kaposi`s sarcoma-associated h
gcgagcucaugcccacccug

SEQ ID NO: 194792 - RNA, 20 nt, Human herpesvirus 8 (Kaposi`s sarcoma-associated h
cccucacuauauaaaacaga

SEQ ID NO: 194793 - RNA, 23 nt, Human herpesvirus 8 (Kaposi`s sarcoma-associated h
cccucguguuugggcaaaacaca

SEQ ID NO: 194794 - RNA, 14 nt, Human herpesvirus 8 (Kaposi`s sarcoma-associated h
ccauagcagucgcc

SEQ ID NO: 194795 - RNA, 14 nt, Human herpesvirus 8 (Kaposi`s sarcoma-associated h
ccagcaaccccucu

SEQ ID NO: 194796 - RNA, 13 nt, Human herpesvirus 8 (Kaposi`s sarcoma-associated h
ccacagcaucccc

SEQ ID NO: 194797 - RNA, 19 nt, Human herpesvirus 8 (Kaposi`s sarcoma-associated h
ccaacuucaucacaucccc

SEQ ID NO: 194798 - RNA, 19 nt, Human herpesvirus 8 (Kaposi`s sarcoma-associated h
ccaagaucuuccagucucc

SEQ ID NO: 194799 - RNA, 23 nt, Human herpesvirus 8 (Kaposi`s sarcoma-associated h
cacacguagggcuuuacccucug

SEQ ID NO: 194800 - RNA, 21 nt, Human herpesvirus 8 (Kaposi`s sarcoma-associated h
caauacuauuauaacauuuug

SEQ ID NO: 194801 - RNA, 17 nt, Human herpesvirus 8 (Kaposi`s sarcoma-associated h
aguauagugguuuacau

SEQ ID NO: 194802 - RNA, 16 nt, Human herpesvirus 8 (Kaposi`s sarcoma-associated h
aggcguguugggacau

SEQ ID NO: 194803 - RNA, 20 nt, Human herpesvirus 8 (Kaposi`s sarcoma-associated h
agggugcccugguugacaca

SEQ ID NO: 194804 - RNA, 18 nt, Human herpesvirus 8 (Kaposi`s sarcoma-associated h
aggugucugcgggacaau

SEQ ID NO: 194805 - RNA, 19 nt, Human herpesvirus 8 (Kaposi`s sarcoma-associated h
acaucccccccgcaggcca

SEQ ID NO: 194806 - RNA, 13 nt, Human herpesvirus 8 (Kaposi`s sarcoma-associated h
agauauuuuaaaa

SEQ ID NO: 194807 - RNA, 19 nt, Human herpesvirus 8 (Kaposi`s sarcoma-associated h
agacggucuuuaggggcac

SEQ ID NO: 194808 - RNA, 18 nt, Human herpesvirus 8 (Kaposi`s sarcoma-associated h
agcaugagacuugacacc

SEQ ID NO: 194809 - RNA, 20 nt, Human herpesvirus 8 (Kaposi`s sarcoma-associated h
aggaucggaucuuuuacaau

SEQ ID NO: 194810 - RNA, 18 nt, Human herpesvirus 8 (Kaposi`s sarcoma-associated h
acggcgguguaucaggcg

SEQ ID NO: 194811 - RNA, 16 nt, Human herpesvirus 8 (Kaposi`s sarcoma-associated h
agacgacaaaacgcac

SEQ ID NO: 194812 - RNA, 17 nt, Human herpesvirus 8 (Kaposi`s sarcoma-associated h
aacgauggcaaaggaac

SEQ ID NO: 194813 - RNA, 18 nt, Homo sapiens
ucugcucaucauucucug

SEQ ID NO: 194814 - RNA, 20 nt, Homo sapiens
aauaauaagaggugcuacug

SEQ ID NO: 194815 - RNA, 14 nt, Homo sapiens
accauaauguuaca

SEQ ID NO: 194816 - RNA, 18 nt, Homo sapiens
cauucugcaagcacaucu

SEQ ID NO: 194817 - RNA, 20 nt, Homo sapiens
aagcagucgugccugugucc

SEQ ID NO: 194818 - RNA, 19 nt, Homo sapiens
ccuggggagucugggcaca

SEQ ID NO: 194819 - RNA, 16 nt, Homo sapiens
agggacgccugggggu

SEQ ID NO: 194820 - RNA, 21 nt, Homo sapiens
uuuucacugcuggcugccuua

SEQ ID NO: 194821 - RNA, 18 nt, Homo sapiens
augcuauaacuauguuga

SEQ ID NO: 194822 - RNA, 17 nt, Homo sapiens
cauuuccaugcauaaau

SEQ ID NO: 194823 - RNA, 18 nt, Homo sapiens
uguaucaaaugugacauu

SEQ ID NO: 194824 - RNA, 11 nt, Homo sapiens
cauuugugccc

SEQ ID NO: 194825 - RNA, 14 nt, Homo sapiens
gauucacaguguga

SEQ ID NO: 194826 - RNA, 19 nt, Homo sapiens
ugauauguucaacuggaga

SEQ ID NO: 194827 - RNA, 20 nt, Homo sapiens
aucuguuaccagaggacaaa

SEQ ID NO: 194828 - RNA, 13 nt, Homo sapiens
cguuuaaucacau

SEQ ID NO: 194829 - RNA, 16 nt, Homo sapiens
gcaccaccaagccaag

SEQ ID NO: 194830 - RNA, 22 nt, Homo sapiens
aaaagaugcauuaucuaugaua

SEQ ID NO: 194831 - RNA, 17 nt, Homo sapiens
ucauaaucuuugcuuua

SEQ ID NO: 194832 - RNA, 16 nt, Homo sapiens
aacaaauguauuucaa

SEQ ID NO: 194833 - RNA, 23 nt, Homo sapiens
ccuuagauguucuaagucuuucc

SEQ ID NO: 194834 - RNA, 20 nt, Homo sapiens
uugcauaguaccaaucauuu

SEQ ID NO: 194835 - RNA, 12 nt, Homo sapiens
cuugcugugagc

SEQ ID NO: 194836 - RNA, 23 nt, Homo sapiens
uccuuuguuuuuuuuuccugucc

SEQ ID NO: 194837 - RNA, 24 nt, Homo sapiens
guccacgagcuguuuacuagggau

SEQ ID NO: 194838 - RNA, 17 nt, Homo sapiens
aucgcaguguucaaggc

SEQ ID NO: 194839 - RNA, 18 nt, Homo sapiens
uaauaaguuucacugacu

SEQ ID NO: 194840 - RNA, 18 nt, Homo sapiens
ucucacaguguugcccag

SEQ ID NO: 194841 - RNA, 18 nt, Homo sapiens
acguggggcagcacagag

SEQ ID NO: 194842 - RNA, 21 nt, Homo sapiens
cuaugugggugggaccacaga

SEQ ID NO: 194843 - RNA, 21 nt, Homo sapiens
cgggccuggagaacuagagaa

SEQ ID NO: 194844 - RNA, 22 nt, Homo sapiens
aagacuucaguauguugucaaa

SEQ ID NO: 194845 - RNA, 21 nt, Homo sapiens
ccuccucuacaauuugccauu

SEQ ID NO: 194846 - RNA, 14 nt, Homo sapiens
aagaaaaucauauu

SEQ ID NO: 194847 - RNA, 23 nt, Homo sapiens
uggauuuggguuggaagugaggg

SEQ ID NO: 194848 - RNA, 15 nt, Homo sapiens
augaacucuuaauca

SEQ ID NO: 194849 - RNA, 23 nt, Homo sapiens
caaagcaaggaaacuauguaaca

SEQ ID NO: 194850 - RNA, 17 nt, Homo sapiens
ugucuaaaaugccucag

SEQ ID NO: 194851 - RNA, 23 nt, Homo sapiens
cuuguaaaugugguaaagaguua

SEQ ID NO: 194852 - RNA, 19 nt, Homo sapiens
aucagugaauaaaccauca

SEQ ID NO: 194853 - RNA, 15 nt, Homo sapiens
augcguuuaaucaca

SEQ ID NO: 194854 - RNA, 13 nt, Homo sapiens
auucaggacacag

SEQ ID NO: 194855 - RNA, 19 nt, Homo sapiens
uucauaauuucuucacuca

SEQ ID NO: 194856 - RNA, 23 nt, Homo sapiens
gcauuuaaccgucaauaggcaaa

SEQ ID NO: 194857 - RNA, 17 nt, Homo sapiens
uaacugccuuguguaca

SEQ ID NO: 194858 - RNA, 13 nt, Homo sapiens
ggaguaugcaaaa

SEQ ID NO: 194859 - RNA, 19 nt, Homo sapiens
auacugcucaucauuccuu

SEQ ID NO: 194860 - RNA, 16 nt, Homo sapiens
uaaagcaggugcccag

SEQ ID NO: 194861 - RNA, 11 nt, Homo sapiens
agaauggagcu

SEQ ID NO: 194862 - RNA, 12 nt, Homo sapiens
aguguugcuugg

SEQ ID NO: 194863 - RNA, 13 nt, Homo sapiens
gggcagcacagag

SEQ ID NO: 194864 - RNA, 18 nt, Homo sapiens
aagcucaucucagcuccu

SEQ ID NO: 194865 - RNA, 22 nt, Homo sapiens
aaaaucacacagccaagccagu

SEQ ID NO: 194866 - RNA, 21 nt, Homo sapiens
caguuugauuguuguuuauaa

SEQ ID NO: 194867 - RNA, 17 nt, Homo sapiens
uccccauuugcuuacuu

SEQ ID NO: 194868 - RNA, 21 nt, Homo sapiens
gcuccaucgcugucaucucag

SEQ ID NO: 194869 - RNA, 19 nt, Homo sapiens
gguuaauaaguuucacuga

SEQ ID NO: 194870 - RNA, 19 nt, Homo sapiens
cagaccauucaggacacag

SEQ ID NO: 194871 - RNA, 15 nt, Homo sapiens
cucugcauucuagua

SEQ ID NO: 194872 - RNA, 19 nt, Homo sapiens
gaaaacacugugcacaucu

SEQ ID NO: 194873 - RNA, 12 nt, Homo sapiens
ggagcacugggu

SEQ ID NO: 194874 - RNA, 14 nt, Homo sapiens
aauuucuacuuuga

SEQ ID NO: 194875 - RNA, 23 nt, Homo sapiens
cuucacagaugugugauucacag

SEQ ID NO: 194876 - RNA, 21 nt, Homo sapiens
aggugaggauugauuaccuag

SEQ ID NO: 194877 - RNA, 13 nt, Homo sapiens
cauucuagguagg

SEQ ID NO: 194878 - RNA, 19 nt, Homo sapiens
ggcucuucuaaucagagcg

SEQ ID NO: 194879 - RNA, 20 nt, Homo sapiens
uguuaucagucauaacuaaa

SEQ ID NO: 194880 - RNA, 17 nt, Homo sapiens
agccucugaauaugaac

SEQ ID NO: 194881 - RNA, 18 nt, Homo sapiens
ucagcuggaucuccauuc

SEQ ID NO: 194882 - RNA, 21 nt, Homo sapiens
caagggcuuuguuuugcacac

SEQ ID NO: 194883 - RNA, 20 nt, Homo sapiens
agacugggucucgcuuuguu

SEQ ID NO: 194884 - RNA, 23 nt, Homo sapiens
aaugcccagugaccagucacuga

SEQ ID NO: 194885 - RNA, 12 nt, Homo sapiens
cauuaucuauga

SEQ ID NO: 194886 - RNA, 15 nt, Homo sapiens
ucacagagugcauug

SEQ ID NO: 194887 - RNA, 17 nt, Homo sapiens
acuuguuuuugcacaug

SEQ ID NO: 194888 - RNA, 17 nt, Homo sapiens
agaacaguaacugccau

SEQ ID NO: 194889 - RNA, 15 nt, Homo sapiens
gcucaucauucucug

SEQ ID NO: 194890 - RNA, 20 nt, Homo sapiens
ggagagcuggggaagcuucu

SEQ ID NO: 194891 - RNA, 18 nt, Homo sapiens
uccucuccacugccuucg

SEQ ID NO: 194892 - RNA, 22 nt, Homo sapiens
cucacuaggcccccacuugccu

SEQ ID NO: 194893 - RNA, 14 nt, Homo sapiens
augugauugcagcu

SEQ ID NO: 194894 - RNA, 22 nt, Homo sapiens
ugaagucaugcguuuaaucaca

SEQ ID NO: 194895 - RNA, 17 nt, Homo sapiens
cuuugagacugggucuc

SEQ ID NO: 194896 - RNA, 21 nt, Homo sapiens
gauucuaugaggcaaccacag

SEQ ID NO: 194897 - RNA, 17 nt, Homo sapiens
cucacuguugaauuuuc

SEQ ID NO: 194898 - RNA, 14 nt, Homo sapiens
uuugaaaucuauga

SEQ ID NO: 194899 - RNA, 18 nt, Homo sapiens
ucccuuacccuccuccag

SEQ ID NO: 194900 - RNA, 20 nt, Homo sapiens
gucccggggcuccacugaac

SEQ ID NO: 194901 - RNA, 22 nt, Homo sapiens
cuaaucagcauucucacuccua

SEQ ID NO: 194902 - RNA, 18 nt, Homo sapiens
agggaaaauuauuugcau

SEQ ID NO: 194903 - RNA, 15 nt, Homo sapiens
aaggauggaugcaga

SEQ ID NO: 194904 - RNA, 14 nt, Homo sapiens
cuaaaaccaucaua

SEQ ID NO: 194905 - RNA, 18 nt, Homo sapiens
cauaauuucuucacucaa

SEQ ID NO: 194906 - RNA, 12 nt, Homo sapiens
uccccacugcuc

SEQ ID NO: 194907 - RNA, 19 nt, Homo sapiens
agaguguuaucagucauaa

SEQ ID NO: 194908 - RNA, 16 nt, Homo sapiens
aauauagcuguacaaa

SEQ ID NO: 194909 - RNA, 16 nt, Homo sapiens
auuagaugaacucaac

SEQ ID NO: 194910 - RNA, 23 nt, Homo sapiens
acuuagaaauugcauuuccugac

SEQ ID NO: 194911 - RNA, 21 nt, Homo sapiens
gagcagugaaugauucagugu

SEQ ID NO: 194912 - RNA, 16 nt, Homo sapiens
cuaugauaugcuaaua

SEQ ID NO: 194913 - RNA, 22 nt, Homo sapiens
caggcagcauuuagcacauacu

SEQ ID NO: 194914 - RNA, 19 nt, Homo sapiens
gcuucccuaaucuaugguc

SEQ ID NO: 194915 - RNA, 21 nt, Homo sapiens
gcaggaacuugcacaaaauca

SEQ ID NO: 194916 - RNA, 17 nt, Homo sapiens
guaggggcccacuucac

SEQ ID NO: 194917 - RNA, 11 nt, Homo sapiens
gagauccuccu

SEQ ID NO: 194918 - RNA, 18 nt, Homo sapiens
agacaggguuuggcugug

SEQ ID NO: 194919 - RNA, 16 nt, Homo sapiens
caauccagcuauguua

SEQ ID NO: 194920 - RNA, 14 nt, Homo sapiens
ugacauccaagcuu

SEQ ID NO: 194921 - RNA, 23 nt, Homo sapiens
aguuugaguuacuaucaugucaa

SEQ ID NO: 194922 - RNA, 15 nt, Homo sapiens
cugagugcaccacuu

SEQ ID NO: 194923 - RNA, 23 nt, Homo sapiens
cauaguacagguaaggugaggga

SEQ ID NO: 194924 - RNA, 19 nt, Homo sapiens
agcacugagcaaagcauug

SEQ ID NO: 194925 - RNA, 14 nt, Homo sapiens
uggccugcacuggu

SEQ ID NO: 194926 - RNA, 21 nt, Homo sapiens
ucuucauaauuucuucacuca

SEQ ID NO: 194927 - RNA, 17 nt, Homo sapiens
ucuaugaaauaucaugc

SEQ ID NO: 194928 - RNA, 20 nt, Homo sapiens
auaaaauuaugccauagcaa

SEQ ID NO: 194929 - RNA, 19 nt, Homo sapiens
gaucccaggggaguguuca

SEQ ID NO: 194930 - RNA, 16 nt, Homo sapiens
cuugucucacuugugc

SEQ ID NO: 194931 - RNA, 15 nt, Homo sapiens
gugugaagaucacgu

SEQ ID NO: 194932 - RNA, 21 nt, Homo sapiens
ugugcaguguugacaguucau

SEQ ID NO: 194933 - RNA, 18 nt, Homo sapiens
cucuccccacugcucauu

SEQ ID NO: 194934 - RNA, 22 nt, Homo sapiens
auguggccuaaaaaugcaacuu

SEQ ID NO: 194935 - RNA, 21 nt, Homo sapiens
agggaacccucuaagggaccu

SEQ ID NO: 194936 - RNA, 23 nt, Homo sapiens
cauagaggugagggaagccugaa

SEQ ID NO: 194937 - RNA, 17 nt, Homo sapiens
ucagacuccugugcaac

SEQ ID NO: 194938 - RNA, 16 nt, Homo sapiens
ucccauagccaggaaa

SEQ ID NO: 194939 - RNA, 14 nt, Homo sapiens
caggcagcauuuag

SEQ ID NO: 194940 - RNA, 14 nt, Homo sapiens
agaugaucaucucc

SEQ ID NO: 194941 - RNA, 21 nt, Homo sapiens
uugcagcuuauauucauccau

SEQ ID NO: 194942 - RNA, 13 nt, Homo sapiens
cugucucauauga

SEQ ID NO: 194943 - RNA, 18 nt, Homo sapiens
ugaagccuauguaugcca

SEQ ID NO: 194944 - RNA, 23 nt, Homo sapiens
cuuuucacugcuggcugccuuag

SEQ ID NO: 194945 - RNA, 14 nt, Homo sapiens
acagcugcagagac

SEQ ID NO: 194946 - RNA, 13 nt, Homo sapiens
cuugcugccugaa

SEQ ID NO: 194947 - RNA, 20 nt, Homo sapiens
ugugaccaaugucuugaugc

SEQ ID NO: 194948 - RNA, 18 nt, Homo sapiens
cugacagaaggacucagg

SEQ ID NO: 194949 - RNA, 22 nt, Homo sapiens
accucaguuuuaucauuuucaa

SEQ ID NO: 194950 - RNA, 17 nt, Homo sapiens
caaaucuggaagccaaa

SEQ ID NO: 194951 - RNA, 14 nt, Homo sapiens
aguaaguggugaga

SEQ ID NO: 194952 - RNA, 18 nt, Homo sapiens
acagagcagaacuuucac

SEQ ID NO: 194953 - RNA, 23 nt, Homo sapiens
aagucacugcacagugcaucuca

SEQ ID NO: 194954 - RNA, 20 nt, Homo sapiens
uuuauagucgaacaauucau

SEQ ID NO: 194955 - RNA, 23 nt, Homo sapiens
cacagagugcauugugaggguua

SEQ ID NO: 194956 - RNA, 12 nt, Homo sapiens
aagugugugauc

SEQ ID NO: 194957 - RNA, 18 nt, Homo sapiens
acuauggcucuacuuuca

SEQ ID NO: 194958 - RNA, 18 nt, Homo sapiens
aaccacaggcagcauuua

SEQ ID NO: 194959 - RNA, 20 nt, Homo sapiens
uucccuauuuugccaguggg

SEQ ID NO: 194960 - RNA, 13 nt, Homo sapiens
uaaggugagggaa

SEQ ID NO: 194961 - RNA, 21 nt, Homo sapiens
uguuuggguauauucauuuca

SEQ ID NO: 194962 - RNA, 16 nt, Homo sapiens
ccagagcuacugacua

SEQ ID NO: 194963 - RNA, 18 nt, Homo sapiens
caaguguagguaucauuu

SEQ ID NO: 194964 - RNA, 20 nt, Homo sapiens
aacaaaaauuaaaauccuca

SEQ ID NO: 194965 - RNA, 19 nt, Homo sapiens
cugggccaagucaaagaca

SEQ ID NO: 194966 - RNA, 18 nt, Homo sapiens
cauuauuucucucugacc

SEQ ID NO: 194967 - RNA, 13 nt, Homo sapiens
gcagaccacugau

SEQ ID NO: 194968 - RNA, 17 nt, Homo sapiens
caauuuuaaaucugaga

SEQ ID NO: 194969 - RNA, 16 nt, Homo sapiens
gaagcuuccuuggcuu

SEQ ID NO: 194970 - RNA, 17 nt, Homo sapiens
ucauuuucugcauuuaa

SEQ ID NO: 194971 - RNA, 18 nt, Homo sapiens
acaauagugauugauaga

SEQ ID NO: 194972 - RNA, 14 nt, Homo sapiens
cuucuaaucaaagc

SEQ ID NO: 194973 - RNA, 16 nt, Homo sapiens
guaggcuuaguuugug

SEQ ID NO: 194974 - RNA, 21 nt, Homo sapiens
gguauauucauuucaaaggga

SEQ ID NO: 194975 - RNA, 18 nt, Homo sapiens
caugaucaucacaaucau

SEQ ID NO: 194976 - RNA, 18 nt, Homo sapiens
uccuccagaauggagcug

SEQ ID NO: 194977 - RNA, 23 nt, Homo sapiens
cugcggguggggcuuggggcuca

SEQ ID NO: 194978 - RNA, 16 nt, Homo sapiens
ucgcuuuguugcccag

SEQ ID NO: 194979 - RNA, 21 nt, Homo sapiens
cuguguauuuaacugccuugu

SEQ ID NO: 194980 - RNA, 18 nt, Homo sapiens
cauauccaacaugugcuc

SEQ ID NO: 194981 - RNA, 21 nt, Homo sapiens
ugcuauaacuauguugauaaa

SEQ ID NO: 194982 - RNA, 19 nt, Homo sapiens
caggcagaucccacuugca

SEQ ID NO: 194983 - RNA, 15 nt, Homo sapiens
caauaguuguugauu

SEQ ID NO: 194984 - RNA, 13 nt, Homo sapiens
ugccugacauuug

SEQ ID NO: 194985 - RNA, 17 nt, Homo sapiens
caaagcuuucauguaaa

SEQ ID NO: 194986 - RNA, 17 nt, Homo sapiens
ugggaacuccuaaauca

SEQ ID NO: 194987 - RNA, 21 nt, Homo sapiens
uaccuugguucccccacugau

SEQ ID NO: 194988 - RNA, 16 nt, Homo sapiens
aagggacauauucauu

SEQ ID NO: 194989 - RNA, 24 nt, Homo sapiens
uuauaaaagaugcauuaucuauga

SEQ ID NO: 194990 - RNA, 16 nt, Homo sapiens
uuucaggccacauggc

SEQ ID NO: 194991 - RNA, 21 nt, Homo sapiens
gccaaggagggcagaucacuu

SEQ ID NO: 194992 - RNA, 21 nt, Homo sapiens
ucccagcugaaauacugaggg

SEQ ID NO: 194993 - RNA, 18 nt, Homo sapiens
acccaugggaagggucca

SEQ ID NO: 194994 - RNA, 12 nt, Homo sapiens
gccguggcugcg

SEQ ID NO: 194995 - RNA, 19 nt, Homo sapiens
cgagucucuucuccacugg

SEQ ID NO: 194996 - RNA, 12 nt, Homo sapiens
aauugcauuucc

SEQ ID NO: 194997 - RNA, 22 nt, Homo sapiens
gcugccucuugaaugcagggac

SEQ ID NO: 194998 - RNA, 17 nt, Homo sapiens
ugugauucacaguguga

SEQ ID NO: 194999 - RNA, 20 nt, Homo sapiens
agaugcugacuguacuccuc

SEQ ID NO: 195000 - RNA, 17 nt, Homo sapiens
gucuacguuaccaggca

SEQ ID NO: 195001 - RNA, 16 nt, Homo sapiens
ccucuacaauuugcca

SEQ ID NO: 195002 - RNA, 23 nt, Homo sapiens
ccacauccuccacguucugcuca

SEQ ID NO: 195003 - RNA, 12 nt, Homo sapiens
ucccccacugau

SEQ ID NO: 195004 - RNA, 23 nt, Homo sapiens
uuucaaugaugggcgagcgugca

SEQ ID NO: 195005 - RNA, 12 nt, Homo sapiens
cuucucauuucu

SEQ ID NO: 195006 - RNA, 23 nt, Homo sapiens
caggaaccucagggcugugugua

SEQ ID NO: 195007 - RNA, 21 nt, Homo sapiens
ccacaauagcagacaguguuu

SEQ ID NO: 195008 - RNA, 14 nt, Homo sapiens
uaaucuuugcuuua

SEQ ID NO: 195009 - RNA, 17 nt, Homo sapiens
ucugaagucacugcaca

SEQ ID NO: 195010 - RNA, 14 nt, Homo sapiens
cuacaauuugccau

SEQ ID NO: 195011 - RNA, 18 nt, Homo sapiens
cuauugcuggcaaagaca

SEQ ID NO: 195012 - RNA, 12 nt, Homo sapiens
caauaugcauuu

SEQ ID NO: 195013 - RNA, 20 nt, Homo sapiens
cagggaaaucaggguuacaa

SEQ ID NO: 195014 - RNA, 21 nt, Homo sapiens
gacacuauuuaucugugcaaa

SEQ ID NO: 195015 - RNA, 15 nt, Homo sapiens
acagaaaacgguuaa

SEQ ID NO: 195016 - RNA, 16 nt, Homo sapiens
ugcaacaguagcauag

SEQ ID NO: 195017 - RNA, 13 nt, Homo sapiens
gaagguugcaccu

SEQ ID NO: 195018 - RNA, 23 nt, Homo sapiens
ucccuuuuuauaucccauuuuua

SEQ ID NO: 195019 - RNA, 21 nt, Homo sapiens
acagccucccacccccaucuc

SEQ ID NO: 195020 - RNA, 16 nt, Homo sapiens
aguguuccccuuccac

SEQ ID NO: 195021 - RNA, 17 nt, Homo sapiens
uuuggaauauuguccau

SEQ ID NO: 195022 - RNA, 17 nt, Homo sapiens
ugagaccacuguuauca

SEQ ID NO: 195023 - RNA, 14 nt, Homo sapiens
ccuuuguacuuugu

SEQ ID NO: 195024 - RNA, 12 nt, Homo sapiens
gagccuggacaa

SEQ ID NO: 195025 - RNA, 17 nt, Homo sapiens
agugauugauagagugu

SEQ ID NO: 195026 - RNA, 11 nt, Homo sapiens
aaauccuugau

SEQ ID NO: 195027 - RNA, 14 nt, Homo sapiens
gcugggcagcuguu

SEQ ID NO: 195028 - RNA, 15 nt, Homo sapiens
gaaaacacugugcac

SEQ ID NO: 195029 - RNA, 16 nt, Homo sapiens
aauccuguccucagcu

SEQ ID NO: 195030 - RNA, 10 nt, Homo sapiens
ggacuauuau

SEQ ID NO: 195031 - RNA, 19 nt, Homo sapiens
cauucuuuuaaaagacaag

SEQ ID NO: 195032 - RNA, 20 nt, Homo sapiens
uaaaacccacaaaaguacaa

SEQ ID NO: 195033 - RNA, 19 nt, Homo sapiens
ugaaaugcuggcauuugca

SEQ ID NO: 195034 - RNA, 20 nt, Homo sapiens
guggguacucaauguguacu

SEQ ID NO: 195035 - RNA, 18 nt, Homo sapiens
auguacaugaagaagcua

SEQ ID NO: 195036 - RNA, 16 nt, Homo sapiens
agugauuggcucugug

SEQ ID NO: 195037 - RNA, 13 nt, Homo sapiens
auuuuugaauaca

SEQ ID NO: 195038 - RNA, 22 nt, Homo sapiens
aacacuuuacaauguucauccc

SEQ ID NO: 195039 - RNA, 20 nt, Homo sapiens
agagcgcaagcugggagcac

SEQ ID NO: 195040 - RNA, 20 nt, Homo sapiens
ggaucaucuauugcuggcaa

SEQ ID NO: 195041 - RNA, 11 nt, Homo sapiens
aaugcaacuuc

SEQ ID NO: 195042 - RNA, 20 nt, Homo sapiens
uaaggguuaguuuacaauca

SEQ ID NO: 195043 - RNA, 15 nt, Homo sapiens
guccgaucuuugacu

SEQ ID NO: 195044 - RNA, 23 nt, Homo sapiens
aaccuguaaagcaggugcccagg

SEQ ID NO: 195045 - RNA, 16 nt, Homo sapiens
uuaaguugauggugau

SEQ ID NO: 195046 - RNA, 17 nt, Homo sapiens
uacaauuuacaaagugu

SEQ ID NO: 195047 - RNA, 18 nt, Homo sapiens
cuuuuucuagucuucaua

SEQ ID NO: 195048 - RNA, 24 nt, Homo sapiens
cucauucagggauagcacugagca

SEQ ID NO: 195049 - RNA, 10 nt, Homo sapiens
acugcaauaa

SEQ ID NO: 195050 - RNA, 12 nt, Homo sapiens
acagaagguccu

SEQ ID NO: 195051 - RNA, 16 nt, Homo sapiens
uaauucuagcuuugag

SEQ ID NO: 195052 - RNA, 23 nt, Homo sapiens
uuagauguucuaagucuuuccau

SEQ ID NO: 195053 - RNA, 19 nt, Homo sapiens
uguuucuuuuguauguaaa

SEQ ID NO: 195054 - RNA, 13 nt, Homo sapiens
aguuacucauuca

SEQ ID NO: 195055 - RNA, 14 nt, Homo sapiens
aacuaaauaaagcu

SEQ ID NO: 195056 - RNA, 13 nt, Homo sapiens
gagggaagccuga

SEQ ID NO: 195057 - RNA, 17 nt, Homo sapiens
cauagaguucagacuuu

SEQ ID NO: 195058 - RNA, 18 nt, Homo sapiens
gcccuuccucuccacugc

SEQ ID NO: 195059 - RNA, 15 nt, Homo sapiens
acacaugagaucuag

SEQ ID NO: 195060 - RNA, 22 nt, Homo sapiens
uauagucgaacaauucauauau

SEQ ID NO: 195061 - RNA, 22 nt, Homo sapiens
cacguaguagggucaggccacg

SEQ ID NO: 195062 - RNA, 23 nt, Homo sapiens
auuuuccuccaucgcaguguuca

SEQ ID NO: 195063 - RNA, 20 nt, Homo sapiens
uccacuuagaaauugcauuu

SEQ ID NO: 195064 - RNA, 21 nt, Homo sapiens
uuuggcucuucuaaucagagc

SEQ ID NO: 195065 - RNA, 13 nt, Homo sapiens
agcugagcaggga

SEQ ID NO: 195066 - RNA, 21 nt, Homo sapiens
gcaggaagcaacgaagggaaa

SEQ ID NO: 195067 - RNA, 20 nt, Homo sapiens
cuaauaaaaaacaccuucua

SEQ ID NO: 195068 - RNA, 15 nt, Homo sapiens
uuuaacaacuaugau

SEQ ID NO: 195069 - RNA, 20 nt, Homo sapiens
uaccugaaauaaaauucauu

SEQ ID NO: 195070 - RNA, 15 nt, Homo sapiens
uaaaacauuaagaaa

SEQ ID NO: 195071 - RNA, 22 nt, Homo sapiens
aaugugaaaaugguccaggaga

SEQ ID NO: 195072 - RNA, 14 nt, Homo sapiens
uaacaaacucugag

SEQ ID NO: 195073 - RNA, 20 nt, Homo sapiens
gcuauggggagaaaagacau

SEQ ID NO: 195074 - RNA, 14 nt, Homo sapiens
agggagcuggaaaa

SEQ ID NO: 195075 - RNA, 12 nt, Homo sapiens
ugaaucacagua

SEQ ID NO: 195076 - RNA, 20 nt, Homo sapiens
uuguaucaaaugugacauua

SEQ ID NO: 195077 - RNA, 20 nt, Homo sapiens
gcauuccagccccucugguc

SEQ ID NO: 195078 - RNA, 21 nt, Homo sapiens
ccaggccaccuccccagcauu

SEQ ID NO: 195079 - RNA, 22 nt, Homo sapiens
ugagaaagagcacuuaagagaa

SEQ ID NO: 195080 - RNA, 17 nt, Homo sapiens
cgauuuuguaucugcag

SEQ ID NO: 195081 - RNA, 13 nt, Homo sapiens
cagcuaaagcaau

SEQ ID NO: 195082 - RNA, 19 nt, Homo sapiens
uaucauuuucugcauuuaa

SEQ ID NO: 195083 - RNA, 18 nt, Homo sapiens
cacaaaauaaccaauccu

SEQ ID NO: 195084 - RNA, 15 nt, Homo sapiens
cuccccuucacaugc

SEQ ID NO: 195085 - RNA, 20 nt, Homo sapiens
uuuugcuggucacugccaug

SEQ ID NO: 195086 - RNA, 21 nt, Homo sapiens
cuccauguagaagccacuauu

SEQ ID NO: 195087 - RNA, 13 nt, Homo sapiens
gaacuagacuccc

SEQ ID NO: 195088 - RNA, 20 nt, Homo sapiens
auauauuuuugugcacauuu

SEQ ID NO: 195089 - RNA, 20 nt, Homo sapiens
ucuggccuugaaaccaccuu

SEQ ID NO: 195090 - RNA, 16 nt, Homo sapiens
agggucccucugugua

SEQ ID NO: 195091 - RNA, 20 nt, Homo sapiens
ugacucuccagaaagcucau

SEQ ID NO: 195092 - RNA, 23 nt, Homo sapiens
aguuccucauuuuugaauacagg

SEQ ID NO: 195093 - RNA, 22 nt, Homo sapiens
cuucauccucugagugugacca

SEQ ID NO: 195094 - RNA, 21 nt, Homo sapiens
gugaagaucacguuccuuccc

SEQ ID NO: 195095 - RNA, 13 nt, Homo sapiens
cugaucugaugca

SEQ ID NO: 195096 - RNA, 16 nt, Homo sapiens
uucccacaggacauuu

SEQ ID NO: 195097 - RNA, 15 nt, Homo sapiens
cuugaaugcagggac

SEQ ID NO: 195098 - RNA, 23 nt, Homo sapiens
gauugccucugaagccuauguau

SEQ ID NO: 195099 - RNA, 14 nt, Homo sapiens
cucagcuucuuaau

SEQ ID NO: 195100 - RNA, 13 nt, Homo sapiens
guagaacuuggau

SEQ ID NO: 195101 - RNA, 22 nt, Homo sapiens
uagaagccacuauuacugggac

SEQ ID NO: 195102 - RNA, 18 nt, Homo sapiens
auaaaguaguccugugaa

SEQ ID NO: 195103 - RNA, 22 nt, Homo sapiens
accccugcuccccugagcugaa

SEQ ID NO: 195104 - RNA, 17 nt, Homo sapiens
cugaaauaaaauucauu

SEQ ID NO: 195105 - RNA, 21 nt, Homo sapiens
aaguggugagaacuacucagg

SEQ ID NO: 195106 - RNA, 12 nt, Homo sapiens
aggcccucgcug

SEQ ID NO: 195107 - RNA, 20 nt, Homo sapiens
cagacgcacgugggucuuca

SEQ ID NO: 195108 - RNA, 14 nt, Homo sapiens
gcucacaccuguaa

SEQ ID NO: 195109 - RNA, 19 nt, Homo sapiens
gccaagggaaccugugucc

SEQ ID NO: 195110 - RNA, 16 nt, Homo sapiens
ccugucuaaaaauuca

SEQ ID NO: 195111 - RNA, 21 nt, Homo sapiens
gcagaaucuguuaccagagga

SEQ ID NO: 195112 - RNA, 20 nt, Homo sapiens
ugucccggggcuccacugaa

SEQ ID NO: 195113 - RNA, 22 nt, Homo sapiens
acuaaaauuguaucaaauguga

SEQ ID NO: 195114 - RNA, 20 nt, Homo sapiens
ggcauuugcaccuaccucac

SEQ ID NO: 195115 - RNA, 18 nt, Homo sapiens
acuguugacauccaagcu

SEQ ID NO: 195116 - RNA, 14 nt, Homo sapiens
gaauaugaacggug

SEQ ID NO: 195117 - RNA, 13 nt, Homo sapiens
aaauuaaagcuga

SEQ ID NO: 195118 - RNA, 23 nt, Homo sapiens
aucuguauauacaauaacauaau

SEQ ID NO: 195119 - RNA, 19 nt, Homo sapiens
cuuuagucugcaaaaugag

SEQ ID NO: 195120 - RNA, 13 nt, Homo sapiens
cugagcugugcag

SEQ ID NO: 195121 - RNA, 14 nt, Homo sapiens
uagugauggagcuu

SEQ ID NO: 195122 - RNA, 14 nt, Homo sapiens
guugcccagugugu

SEQ ID NO: 195123 - RNA, 16 nt, Homo sapiens
guacaacguguccuca

SEQ ID NO: 195124 - RNA, 19 nt, Homo sapiens
aaugcauauccaacaugug

SEQ ID NO: 195125 - RNA, 13 nt, Homo sapiens
gagacugggucuc

SEQ ID NO: 195126 - RNA, 17 nt, Homo sapiens
acaaaguguguauuaaa

SEQ ID NO: 195127 - RNA, 13 nt, Homo sapiens
ccaccugucucag

SEQ ID NO: 195128 - RNA, 18 nt, Homo sapiens
uccaucgcugucaucuca

SEQ ID NO: 195129 - RNA, 15 nt, Homo sapiens
ugacauuauaugcac

SEQ ID NO: 195130 - RNA, 17 nt, Homo sapiens
aguuugcuuuguaugca

SEQ ID NO: 195131 - RNA, 13 nt, Homo sapiens
uaggucaagaaga

SEQ ID NO: 195132 - RNA, 23 nt, Homo sapiens
cacagugugaaucuuggugucua

SEQ ID NO: 195133 - RNA, 20 nt, Homo sapiens
ugacacucccuugggcuccc

SEQ ID NO: 195134 - RNA, 18 nt, Homo sapiens
augauccuaaugaaugca

SEQ ID NO: 195135 - RNA, 12 nt, Homo sapiens
cauuuagcacau

SEQ ID NO: 195136 - RNA, 13 nt, Homo sapiens
auuuuugugcaca

SEQ ID NO: 195137 - RNA, 17 nt, Homo sapiens
gccaagccagucaagga

SEQ ID NO: 195138 - RNA, 21 nt, Homo sapiens
cugguugguguugcagaaggu

SEQ ID NO: 195139 - RNA, 14 nt, Homo sapiens
gacugcugagucaa

SEQ ID NO: 195140 - RNA, 19 nt, Homo sapiens
accauucaggacacaggga

SEQ ID NO: 195141 - RNA, 13 nt, Homo sapiens
cuucuagaaccag

SEQ ID NO: 195142 - RNA, 19 nt, Homo sapiens
uaaaauauagcuguacaaa

SEQ ID NO: 195143 - RNA, 15 nt, Homo sapiens
ucagaguugugcaca

SEQ ID NO: 195144 - RNA, 21 nt, Homo sapiens
uuggaacuuuuauuacugggg

SEQ ID NO: 195145 - RNA, 22 nt, Homo sapiens
uaucugugaaaugcuggcauuu

SEQ ID NO: 195146 - RNA, 18 nt, Homo sapiens
ugcauaagugcaugacau

SEQ ID NO: 195147 - RNA, 17 nt, Homo sapiens
cuccagaccauucagga

SEQ ID NO: 195148 - RNA, 13 nt, Homo sapiens
agacuucccugaa

SEQ ID NO: 195149 - RNA, 14 nt, Homo sapiens
cccauaucugugaa

SEQ ID NO: 195150 - RNA, 22 nt, Homo sapiens
gaacccuuggagccaauggaga

SEQ ID NO: 195151 - RNA, 18 nt, Homo sapiens
guggcuucccgcucagcc

SEQ ID NO: 195152 - RNA, 21 nt, Homo sapiens
aucuccaguuuauagaccaga

SEQ ID NO: 195153 - RNA, 14 nt, Homo sapiens
accagaggacaaag

SEQ ID NO: 195154 - RNA, 20 nt, Homo sapiens
aagacuucaguauguuguca

SEQ ID NO: 195155 - RNA, 15 nt, Homo sapiens
aaugugauugcagcu

SEQ ID NO: 195156 - RNA, 13 nt, Homo sapiens
gacccugggacca

SEQ ID NO: 195157 - RNA, 20 nt, Homo sapiens
cuauaacuauguugauaaaa

SEQ ID NO: 195158 - RNA, 18 nt, Homo sapiens
acaggacccugggaccac

SEQ ID NO: 195159 - RNA, 14 nt, Homo sapiens
uguaaucauauaau

SEQ ID NO: 195160 - RNA, 18 nt, Homo sapiens
cuugccccuguuaccuaa

SEQ ID NO: 195161 - RNA, 18 nt, Homo sapiens
cagggcauuuugguccaa

SEQ ID NO: 195162 - RNA, 15 nt, Homo sapiens
uacuacacauucaau

SEQ ID NO: 195163 - RNA, 23 nt, Homo sapiens
ugaaggguucaccaggucaggga

SEQ ID NO: 195164 - RNA, 14 nt, Homo sapiens
acaauguucauccc

SEQ ID NO: 195165 - RNA, 16 nt, Homo sapiens
cuauaacuauguugau

SEQ ID NO: 195166 - RNA, 22 nt, Homo sapiens
cuucuuaauauaacugccuuaa

SEQ ID NO: 195167 - RNA, 23 nt, Homo sapiens
caaacagccccucuggacacagc

SEQ ID NO: 195168 - RNA, 18 nt, Homo sapiens
ucacugcuggcugccuua

SEQ ID NO: 195169 - RNA, 19 nt, Homo sapiens
aaugucuugaugcaugcac

SEQ ID NO: 195170 - RNA, 13 nt, Homo sapiens
cauaacaauuccu

SEQ ID NO: 195171 - RNA, 14 nt, Homo sapiens
auuuuuuugcaagu

SEQ ID NO: 195172 - RNA, 17 nt, Homo sapiens
cagacucacauccugac

SEQ ID NO: 195173 - RNA, 18 nt, Homo sapiens
gacggugcccaagccaga

SEQ ID NO: 195174 - RNA, 21 nt, Homo sapiens
cuucaguauguugucaaagag

SEQ ID NO: 195175 - RNA, 19 nt, Homo sapiens
gaucacuucaggucaggag

SEQ ID NO: 195176 - RNA, 14 nt, Homo sapiens
caaacuaccuucca

SEQ ID NO: 195177 - RNA, 23 nt, Homo sapiens
ugaagaacugcaggcccuggccu

SEQ ID NO: 195178 - RNA, 14 nt, Homo sapiens
cuugacggcauugc

SEQ ID NO: 195179 - RNA, 18 nt, Homo sapiens
cuuauauucauccaugcc

SEQ ID NO: 195180 - RNA, 17 nt, Homo sapiens
uuauuacauggggucua

SEQ ID NO: 195181 - RNA, 17 nt, Homo sapiens
ccauagaggugagggaa

SEQ ID NO: 195182 - RNA, 17 nt, Homo sapiens
aagccuuuggcucuucu

SEQ ID NO: 195183 - RNA, 15 nt, Homo sapiens
gaaucuguuaccaga

SEQ ID NO: 195184 - RNA, 19 nt, Homo sapiens
aauguuugucucaucccau

SEQ ID NO: 195185 - RNA, 20 nt, Homo sapiens
gccauaaaacauuaagaaaa

SEQ ID NO: 195186 - RNA, 13 nt, Homo sapiens
auguaaauacugu

SEQ ID NO: 195187 - RNA, 17 nt, Homo sapiens
cucugggccaagucaaa

SEQ ID NO: 195188 - RNA, 14 nt, Homo sapiens
cucucaccuccuaa

SEQ ID NO: 195189 - RNA, 16 nt, Homo sapiens
gcccagcuaaagcaau

SEQ ID NO: 195190 - RNA, 22 nt, Homo sapiens
cccauuugcuuacuuugcauuu

SEQ ID NO: 195191 - RNA, 23 nt, Homo sapiens
uccaucgcaguguucaaggccau

SEQ ID NO: 195192 - RNA, 12 nt, Homo sapiens
uaagaaaaucau

SEQ ID NO: 195193 - RNA, 15 nt, Homo sapiens
caugugcucagggaa

SEQ ID NO: 195194 - RNA, 22 nt, Homo sapiens
aucgcugucaucucagcuggau

SEQ ID NO: 195195 - RNA, 15 nt, Homo sapiens
aaaucuugacuacag

SEQ ID NO: 195196 - RNA, 22 nt, Homo sapiens
cauggcuuaguuuucauacaca

SEQ ID NO: 195197 - RNA, 22 nt, Homo sapiens
ccuaugugggugggaccacaga

SEQ ID NO: 195198 - RNA, 20 nt, Homo sapiens
ucagcaaaaagcaaaaucau

SEQ ID NO: 195199 - RNA, 16 nt, Homo sapiens
augugugauucacagu

SEQ ID NO: 195200 - RNA, 19 nt, Homo sapiens
auugugcacauacuugaga

SEQ ID NO: 195201 - RNA, 18 nt, Homo sapiens
aaaauuauuugcauaaca

SEQ ID NO: 195202 - RNA, 17 nt, Homo sapiens
gagucagcagaacuggg

SEQ ID NO: 195203 - RNA, 15 nt, Homo sapiens
aagcccuuuacuuga

SEQ ID NO: 195204 - RNA, 22 nt, Homo sapiens
cauguacacggccucaagggau

SEQ ID NO: 195205 - RNA, 15 nt, Homo sapiens
auaaaauuaugccau

SEQ ID NO: 195206 - RNA, 18 nt, Homo sapiens
cgacuuucugccuggagu

SEQ ID NO: 195207 - RNA, 15 nt, Homo sapiens
auuguuaaaauaacu

SEQ ID NO: 195208 - RNA, 18 nt, Homo sapiens
ugugucccccucugucca

SEQ ID NO: 195209 - RNA, 12 nt, Homo sapiens
ucaucuugccac

SEQ ID NO: 195210 - RNA, 21 nt, Homo sapiens
gccuccucucucaaacugggg

SEQ ID NO: 195211 - RNA, 18 nt, Homo sapiens
ucucacuugugcaguguu

SEQ ID NO: 195212 - RNA, 15 nt, Homo sapiens
agaauggaaggugga

SEQ ID NO: 195213 - RNA, 19 nt, Homo sapiens
cucccugaaguaagcaaag

SEQ ID NO: 195214 - RNA, 19 nt, Homo sapiens
uuugaauacaggcauagag

SEQ ID NO: 195215 - RNA, 16 nt, Homo sapiens
aacucaacuuugacaa

SEQ ID NO: 195216 - RNA, 18 nt, Homo sapiens
gauugcuuaaaauagcaa

SEQ ID NO: 195217 - RNA, 20 nt, Homo sapiens
uuaagaauguucuuauguug

SEQ ID NO: 195218 - RNA, 14 nt, Homo sapiens
ucucagccucugaa

SEQ ID NO: 195219 - RNA, 20 nt, Homo sapiens
acuaggcccccacuugccuc

SEQ ID NO: 195220 - RNA, 14 nt, Homo sapiens
gccugccucuucca

SEQ ID NO: 195221 - RNA, 17 nt, Homo sapiens
aguugcugaugaacucu

SEQ ID NO: 195222 - RNA, 15 nt, Homo sapiens
gaccugacaccuuuc

SEQ ID NO: 195223 - RNA, 18 nt, Homo sapiens
gcccauaucugugaaaug

SEQ ID NO: 195224 - RNA, 16 nt, Homo sapiens
uauagcaagaucccau

SEQ ID NO: 195225 - RNA, 19 nt, Homo sapiens
ucugugggcuccauguaga

SEQ ID NO: 195226 - RNA, 16 nt, Homo sapiens
aaagaaaugcccaucu

SEQ ID NO: 195227 - RNA, 21 nt, Homo sapiens
guaucaaaugugacauuauau

SEQ ID NO: 195228 - RNA, 17 nt, Homo sapiens
gaagccuauguaugcca

SEQ ID NO: 195229 - RNA, 19 nt, Homo sapiens
aacuuggauguaccugccc

SEQ ID NO: 195230 - RNA, 13 nt, Homo sapiens
agagaacuggagg

SEQ ID NO: 195231 - RNA, 15 nt, Homo sapiens
cagggacuugaaguu

SEQ ID NO: 195232 - RNA, 14 nt, Homo sapiens
cacuauuacuggga

SEQ ID NO: 195233 - RNA, 15 nt, Homo sapiens
cuaucgcaccacugu

SEQ ID NO: 195234 - RNA, 16 nt, Homo sapiens
ggagacugucucaaga

SEQ ID NO: 195235 - RNA, 22 nt, Homo sapiens
uuuggaaaucacacgucuggcu

SEQ ID NO: 195236 - RNA, 16 nt, Homo sapiens
ugcaaaaggacucuca

SEQ ID NO: 195237 - RNA, 22 nt, Homo sapiens
gauacugcucaucauuccuuga

SEQ ID NO: 195238 - RNA, 23 nt, Homo sapiens
agccaacuuuugcauguuuugua

SEQ ID NO: 195239 - RNA, 13 nt, Homo sapiens
acaucuuuuacau

SEQ ID NO: 195240 - RNA, 14 nt, Homo sapiens
uugcaaccucgcug

SEQ ID NO: 195241 - RNA, 16 nt, Homo sapiens
uccaggagaaggccaa

SEQ ID NO: 195242 - RNA, 20 nt, Homo sapiens
uacaggcauagaguucagac

SEQ ID NO: 195243 - RNA, 18 nt, Homo sapiens
auaacuaguguugcuugg

SEQ ID NO: 195244 - RNA, 17 nt, Homo sapiens
accuaguagucauuuca

SEQ ID NO: 195245 - RNA, 21 nt, Homo sapiens
acugccaucaagaugagagaa

SEQ ID NO: 195246 - RNA, 13 nt, Homo sapiens
gccaggcagaucc

SEQ ID NO: 195247 - RNA, 15 nt, Homo sapiens
ugcuaucgcaccacu

SEQ ID NO: 195248 - RNA, 19 nt, Homo sapiens
caaccacaggcagcauuua

SEQ ID NO: 195249 - RNA, 12 nt, Homo sapiens
ugugcucaggga

SEQ ID NO: 195250 - RNA, 22 nt, Homo sapiens
ccacugccuucgcuucuugccu

SEQ ID NO: 195251 - RNA, 20 nt, Homo sapiens
gagccaccacguccagcugg

SEQ ID NO: 195252 - RNA, 23 nt, Homo sapiens
cuggucucaaacuccugggcuca

SEQ ID NO: 195253 - RNA, 19 nt, Homo sapiens
ugcccuguaccugugcacg

SEQ ID NO: 195254 - RNA, 16 nt, Homo sapiens
ucccaucccagcugaa

SEQ ID NO: 195255 - RNA, 15 nt, Homo sapiens
gguccaucucagaga

SEQ ID NO: 195256 - RNA, 21 nt, Homo sapiens
gcuuagacuaaggccauuauu

SEQ ID NO: 195257 - RNA, 16 nt, Homo sapiens
aucaacgaguacuuca

SEQ ID NO: 195258 - RNA, 20 nt, Homo sapiens
aaugcagggacaaaugccac

SEQ ID NO: 195259 - RNA, 17 nt, Homo sapiens
uugagccuuaaaaccca

SEQ ID NO: 195260 - RNA, 22 nt, Homo sapiens
cuuggcuuacugcagccuuugc

SEQ ID NO: 195261 - RNA, 14 nt, Homo sapiens
cuuccacugagggc

SEQ ID NO: 195262 - RNA, 20 nt, Homo sapiens
uauauauuuuugugcacauu

SEQ ID NO: 195263 - RNA, 20 nt, Homo sapiens
gaaccaaaucuggaagccaa

SEQ ID NO: 195264 - RNA, 15 nt, Homo sapiens
aauaucaugcuccau

SEQ ID NO: 195265 - RNA, 19 nt, Homo sapiens
ucauaauuucuucacucaa

SEQ ID NO: 195266 - RNA, 17 nt, Homo sapiens
uucccagcuacaccuuu

SEQ ID NO: 195267 - RNA, 12 nt, Homo sapiens
ucucauaugauu

SEQ ID NO: 195268 - RNA, 23 nt, Homo sapiens
aucacacgucuggcuucacagau

SEQ ID NO: 195269 - RNA, 20 nt, Homo sapiens
agacuuugacucuccagaaa

SEQ ID NO: 195270 - RNA, 19 nt, Homo sapiens
gguggccgcugaguggcag

SEQ ID NO: 195271 - RNA, 14 nt, Homo sapiens
auacgguaugauau

SEQ ID NO: 195272 - RNA, 15 nt, Homo sapiens
guagcuagccugaga

SEQ ID NO: 195273 - RNA, 13 nt, Homo sapiens
gucucgcuuuguu

SEQ ID NO: 195274 - RNA, 15 nt, Homo sapiens
gaagucaugcguuua

SEQ ID NO: 195275 - RNA, 16 nt, Homo sapiens
cugcaagcacaucugc

SEQ ID NO: 195276 - RNA, 16 nt, Homo sapiens
ugcuggucacugccau

SEQ ID NO: 195277 - RNA, 16 nt, Homo sapiens
acaguagauuuuccaa

SEQ ID NO: 195278 - RNA, 12 nt, Homo sapiens
agcacuggguug

SEQ ID NO: 195279 - RNA, 14 nt, Homo sapiens
ggagagagacucca

SEQ ID NO: 195280 - RNA, 19 nt, Homo sapiens
agcugucccucacuguuga

SEQ ID NO: 195281 - RNA, 21 nt, Homo sapiens
uuguuuuaugcucagggucaa

SEQ ID NO: 195282 - RNA, 12 nt, Homo sapiens
ugguaugugaca

SEQ ID NO: 195283 - RNA, 22 nt, Homo sapiens
acuucaaggguuuguugaacaa

SEQ ID NO: 195284 - RNA, 15 nt, Homo sapiens
cacaggcagcauuua

SEQ ID NO: 195285 - RNA, 19 nt, Homo sapiens
gugacauuuccaugcauaa

SEQ ID NO: 195286 - RNA, 17 nt, Homo sapiens
uuagagugucuuuccac

SEQ ID NO: 195287 - RNA, 23 nt, Homo sapiens
ugaauacacgagguaugaggucu

SEQ ID NO: 195288 - RNA, 14 nt, Homo sapiens
gaggucuaaucuag

SEQ ID NO: 195289 - RNA, 15 nt, Homo sapiens
uaaaucaaugcuaua

SEQ ID NO: 195290 - RNA, 14 nt, Homo sapiens
cacuucucucagga

SEQ ID NO: 195291 - RNA, 20 nt, Homo sapiens
cagaccacugauaaaaccau

SEQ ID NO: 195292 - RNA, 17 nt, Homo sapiens
gucccuugcugugagca

SEQ ID NO: 195293 - RNA, 16 nt, Homo sapiens
gaauguagcagauccc

SEQ ID NO: 195294 - RNA, 16 nt, Homo sapiens
auuuacaaagugugua

SEQ ID NO: 195295 - RNA, 19 nt, Homo sapiens
augcccuguaccugugcac

SEQ ID NO: 195296 - RNA, 21 nt, Homo sapiens
cuguaaucccagcacuuuggg

SEQ ID NO: 195297 - RNA, 23 nt, Homo sapiens
ucgccuccucuacaauuugccau

SEQ ID NO: 195298 - RNA, 14 nt, Homo sapiens
gcuucuugccucug

SEQ ID NO: 195299 - RNA, 18 nt, Homo sapiens
ucaagaugagagaacugg

SEQ ID NO: 195300 - RNA, 11 nt, Homo sapiens
ggaaaucacac

SEQ ID NO: 195301 - RNA, 12 nt, Homo sapiens
ugucaaugucuu

SEQ ID NO: 195302 - RNA, 21 nt, Homo sapiens
guugucugaagucacugcaca

SEQ ID NO: 195303 - RNA, 19 nt, Homo sapiens
cucauucagggauagcacu

SEQ ID NO: 195304 - RNA, 14 nt, Homo sapiens
ccuggagauccucc

SEQ ID NO: 195305 - RNA, 21 nt, Homo sapiens
cugccuucaccuccucuuuca

SEQ ID NO: 195306 - RNA, 13 nt, Homo sapiens
cucuauuaucuca

SEQ ID NO: 195307 - RNA, 15 nt, Homo sapiens
aaagagcacuuaaga

SEQ ID NO: 195308 - RNA, 16 nt, Homo sapiens
aaauauuuugucuaaa

SEQ ID NO: 195309 - RNA, 18 nt, Homo sapiens
caucuuuuacauucugca

SEQ ID NO: 195310 - RNA, 18 nt, Homo sapiens
cucugacucagggcuccu

SEQ ID NO: 195311 - RNA, 21 nt, Homo sapiens
aggucuaggaacauacuucag

SEQ ID NO: 195312 - RNA, 19 nt, Homo sapiens
ucuauuucuccuccauggg

SEQ ID NO: 195313 - RNA, 16 nt, Homo sapiens
cagcuguuagagucca

SEQ ID NO: 195314 - RNA, 23 nt, Homo sapiens
caaugcuauaacuauguugauaa

SEQ ID NO: 195315 - RNA, 16 nt, Homo sapiens
agccgaggccuacccc

SEQ ID NO: 195316 - RNA, 23 nt, Homo sapiens
cuuugucccggggcuccacugaa

SEQ ID NO: 195317 - RNA, 23 nt, Homo sapiens
aagacaggacccugggaccacag

SEQ ID NO: 195318 - RNA, 15 nt, Homo sapiens
uugccucugugcugu

SEQ ID NO: 195319 - RNA, 22 nt, Homo sapiens
gucuucauaauuucuucacuca

SEQ ID NO: 195320 - RNA, 21 nt, Homo sapiens
guaaagaaauauauaugauau

SEQ ID NO: 195321 - RNA, 15 nt, Homo sapiens
aggcgauccaccugu

SEQ ID NO: 195322 - RNA, 23 nt, Homo sapiens
uauaaagauacagaacucuuuca

SEQ ID NO: 195323 - RNA, 19 nt, Homo sapiens
ugcccagugaccagucacu

SEQ ID NO: 195324 - RNA, 15 nt, Homo sapiens
aggccucuguggcac

SEQ ID NO: 195325 - RNA, 19 nt, Homo sapiens
caugagaucuaggugagga

SEQ ID NO: 195326 - RNA, 13 nt, Homo sapiens
aauagccacugca

SEQ ID NO: 195327 - RNA, 20 nt, Homo sapiens
ucaauuccaccugcaaucaa

SEQ ID NO: 195328 - RNA, 21 nt, Homo sapiens
gucaacaucuuuuacauucug

SEQ ID NO: 195329 - RNA, 16 nt, Homo sapiens
uccugccccaugcugc

SEQ ID NO: 195330 - RNA, 20 nt, Homo sapiens
cagagcgcaagcugggagca

SEQ ID NO: 195331 - RNA, 23 nt, Homo sapiens
gaaacaacaauuucuacuuugaa

SEQ ID NO: 195332 - RNA, 13 nt, Homo sapiens
guuacuugggagg

SEQ ID NO: 195333 - RNA, 16 nt, Homo sapiens
uauauucauccaugcc

SEQ ID NO: 195334 - RNA, 15 nt, Homo sapiens
uucuguguugccaag

SEQ ID NO: 195335 - RNA, 20 nt, Homo sapiens
gacuuguuuuaugcucaggg

SEQ ID NO: 195336 - RNA, 15 nt, Homo sapiens
cagucaaggauggau

SEQ ID NO: 195337 - RNA, 22 nt, Homo sapiens
ugaaccaagaccauugaauucu

SEQ ID NO: 195338 - RNA, 13 nt, Homo sapiens
cuuuuaaguugcu

SEQ ID NO: 195339 - RNA, 11 nt, Homo sapiens
caguguugccc

SEQ ID NO: 195340 - RNA, 13 nt, Homo sapiens
aaaauagcaacac

SEQ ID NO: 195341 - RNA, 14 nt, Homo sapiens
gcagaggccagagg

SEQ ID NO: 195342 - RNA, 12 nt, Homo sapiens
gcaccuaccuca

SEQ ID NO: 195343 - RNA, 19 nt, Homo sapiens
cauucagggauagcacuga

SEQ ID NO: 195344 - RNA, 18 nt, Homo sapiens
uccuucaugaucaucaca

SEQ ID NO: 195345 - RNA, 22 nt, Homo sapiens
ugccugcggaguugugcacgua

SEQ ID NO: 195346 - RNA, 22 nt, Homo sapiens
cccuaugugggugggaccacag

SEQ ID NO: 195347 - RNA, 15 nt, Homo sapiens
cuaaaaaugcaacuu

SEQ ID NO: 195348 - RNA, 22 nt, Homo sapiens
uauguucaacuggagacacuau

SEQ ID NO: 195349 - RNA, 21 nt, Homo sapiens
uguauucucugagcugugcag

SEQ ID NO: 195350 - RNA, 20 nt, Homo sapiens
caagccuagcccuucucuca

SEQ ID NO: 195351 - RNA, 15 nt, Homo sapiens
aucucaaacuacugg

SEQ ID NO: 195352 - RNA, 14 nt, Homo sapiens
aaguuggcuucuaa

SEQ ID NO: 195353 - RNA, 14 nt, Homo sapiens
cagggaaugaaggu

SEQ ID NO: 195354 - RNA, 19 nt, Homo sapiens
gccucaagaugaaggcaaa

SEQ ID NO: 195355 - RNA, 20 nt, Homo sapiens
caaagcaggggaguaugcaa

SEQ ID NO: 195356 - RNA, 22 nt, Homo sapiens
aguguuaucagucauaacuaaa

SEQ ID NO: 195357 - RNA, 13 nt, Homo sapiens
ucaccacuucccu

SEQ ID NO: 195358 - RNA, 18 nt, Homo sapiens
gccaauggagacugucuc

SEQ ID NO: 195359 - RNA, 22 nt, Homo sapiens
gucaacccaauaguuguugauu

SEQ ID NO: 195360 - RNA, 13 nt, Homo sapiens
ccagaggacaaag

SEQ ID NO: 195361 - RNA, 18 nt, Homo sapiens
aaucuucuugauccacuu

SEQ ID NO: 195362 - RNA, 18 nt, Homo sapiens
gcaagaagucaaaguaaa

SEQ ID NO: 195363 - RNA, 23 nt, Homo sapiens
cagagugagacccagcccucauc

SEQ ID NO: 195364 - RNA, 16 nt, Homo sapiens
augaacucuuaaucaa

SEQ ID NO: 195365 - RNA, 17 nt, Homo sapiens
acagaaaaaaucgucuc

SEQ ID NO: 195366 - RNA, 21 nt, Homo sapiens
uauauauuuuugugcacauuu

SEQ ID NO: 195367 - RNA, 11 nt, Homo sapiens
ugggcuucuag

SEQ ID NO: 195368 - RNA, 14 nt, Homo sapiens
ucuuucccaauuca

SEQ ID NO: 195369 - RNA, 17 nt, Homo sapiens
cucauaugauugugcac

SEQ ID NO: 195370 - RNA, 17 nt, Homo sapiens
ucuacaauuugccauug

SEQ ID NO: 195371 - RNA, 13 nt, Homo sapiens
cauuaucuaugau

SEQ ID NO: 195372 - RNA, 21 nt, Homo sapiens
uuaaaucaacgaguacuucaa

SEQ ID NO: 195373 - RNA, 14 nt, Homo sapiens
acugcaagcacugc

SEQ ID NO: 195374 - RNA, 19 nt, Homo sapiens
guuauuuaugccucuguau

SEQ ID NO: 195375 - RNA, 22 nt, Homo sapiens
aguaaguuugauuucauuaaua

SEQ ID NO: 195376 - RNA, 20 nt, Homo sapiens
acaggacccugggaccacag

SEQ ID NO: 195377 - RNA, 19 nt, Homo sapiens
cugggacugugcucagaga

SEQ ID NO: 195378 - RNA, 17 nt, Homo sapiens
aacuaagaaauaugcac

SEQ ID NO: 195379 - RNA, 14 nt, Homo sapiens
uccucaccacuucc

SEQ ID NO: 195380 - RNA, 19 nt, Homo sapiens
gcauaagaaaacuaagaaa

SEQ ID NO: 195381 - RNA, 20 nt, Homo sapiens
caacuuuuuaccuaguacaa

SEQ ID NO: 195382 - RNA, 17 nt, Homo sapiens
acgacugucuccauggc

SEQ ID NO: 195383 - RNA, 21 nt, Homo sapiens
agccuauguaugccauggagg

SEQ ID NO: 195384 - RNA, 14 nt, Homo sapiens
aaaauuaugccaua

SEQ ID NO: 195385 - RNA, 18 nt, Homo sapiens
gcccaucaauuauagaaa

SEQ ID NO: 195386 - RNA, 18 nt, Homo sapiens
cuauggcucuacuuucag

SEQ ID NO: 195387 - RNA, 18 nt, Homo sapiens
accacaggcagcauuuag

SEQ ID NO: 195388 - RNA, 17 nt, Homo sapiens
gcuggagucgggacuaa

SEQ ID NO: 195389 - RNA, 23 nt, Homo sapiens
agcucugaaaccaguguuaggga

SEQ ID NO: 195390 - RNA, 13 nt, Homo sapiens
ccgaaaucagaag

SEQ ID NO: 195391 - RNA, 14 nt, Homo sapiens
guccuugaugcuca

SEQ ID NO: 195392 - RNA, 13 nt, Homo sapiens
ugggcagcuguua

SEQ ID NO: 195393 - RNA, 23 nt, Homo sapiens
gccuucuccagacaaaccagaag

SEQ ID NO: 195394 - RNA, 13 nt, Homo sapiens
acuuccauuugcu

SEQ ID NO: 195395 - RNA, 16 nt, Homo sapiens
cuguaccugugcacgu

SEQ ID NO: 195396 - RNA, 16 nt, Homo sapiens
ucuucauaauuucuuc

SEQ ID NO: 195397 - RNA, 12 nt, Homo sapiens
ugacagaucucu

SEQ ID NO: 195398 - RNA, 21 nt, Homo sapiens
agcuggguuggaaaacaguau

SEQ ID NO: 195399 - RNA, 13 nt, Homo sapiens
aaaacacugugca

SEQ ID NO: 195400 - RNA, 20 nt, Homo sapiens
augggaaggguccaucucag

SEQ ID NO: 195401 - RNA, 12 nt, Homo sapiens
ggccucaaggga

SEQ ID NO: 195402 - RNA, 11 nt, Homo sapiens
ugucaucucag

SEQ ID NO: 195403 - RNA, 20 nt, Homo sapiens
cuaugaaauaucaugcucca

SEQ ID NO: 195404 - RNA, 15 nt, Homo sapiens
ccgagucucuucucc

SEQ ID NO: 195405 - RNA, 17 nt, Homo sapiens
uacugucucuuucauga

SEQ ID NO: 195406 - RNA, 17 nt, Homo sapiens
accucaaccuaugguau

SEQ ID NO: 195407 - RNA, 18 nt, Homo sapiens
ggugggaccacagacuca

SEQ ID NO: 195408 - RNA, 14 nt, Homo sapiens
aucaaguccuacaa

SEQ ID NO: 195409 - RNA, 23 nt, Homo sapiens
uggaaccaacacuaacauauaau

SEQ ID NO: 195410 - RNA, 13 nt, Homo sapiens
cagccacauucua

SEQ ID NO: 195411 - RNA, 19 nt, Homo sapiens
gauacugcgacuuucugcc

SEQ ID NO: 195412 - RNA, 18 nt, Homo sapiens
aaaacauuaagaaaauca

SEQ ID NO: 195413 - RNA, 18 nt, Homo sapiens
uagcauacgguaugauau

SEQ ID NO: 195414 - RNA, 22 nt, Homo sapiens
cugggauuacaauugugagcca

SEQ ID NO: 195415 - RNA, 17 nt, Homo sapiens
agucagaguugugcaca

SEQ ID NO: 195416 - RNA, 19 nt, Homo sapiens
ucucugagcagugaaugau

SEQ ID NO: 195417 - RNA, 17 nt, Homo sapiens
caugagaucuaggugag

SEQ ID NO: 195418 - RNA, 17 nt, Homo sapiens
uuuugaaauuaaccucu

SEQ ID NO: 195419 - RNA, 10 nt, Homo sapiens
cccagugugu

SEQ ID NO: 195420 - RNA, 20 nt, Homo sapiens
gcagguggggagacugggcu

SEQ ID NO: 195421 - RNA, 15 nt, Homo sapiens
gaauaguaaguggug

SEQ ID NO: 195422 - RNA, 20 nt, Homo sapiens
ugauuaguaaagaaaugaca

SEQ ID NO: 195423 - RNA, 22 nt, Homo sapiens
auccccuaagcagaccacugau

SEQ ID NO: 195424 - RNA, 18 nt, Homo sapiens
uguggggugggcacauug

SEQ ID NO: 195425 - RNA, 17 nt, Homo sapiens
uucagggauagcacuga

SEQ ID NO: 195426 - RNA, 15 nt, Homo sapiens
acuauguaacaugua

SEQ ID NO: 195427 - RNA, 16 nt, Homo sapiens
cuugcugcugagugca

SEQ ID NO: 195428 - RNA, 17 nt, Homo sapiens
uucuagguaggggccca

SEQ ID NO: 195429 - RNA, 16 nt, Homo sapiens
cauuuggcaaugccau

SEQ ID NO: 195430 - RNA, 16 nt, Homo sapiens
aucuccccuucacaug

SEQ ID NO: 195431 - RNA, 19 nt, Homo sapiens
ugcaagcacaucugcauuu

SEQ ID NO: 195432 - RNA, 15 nt, Homo sapiens
augagagaacuggag

SEQ ID NO: 195433 - RNA, 20 nt, Homo sapiens
uaaagaaauauauaugauau

SEQ ID NO: 195434 - RNA, 23 nt, Homo sapiens
caucucucccuccccugccauuu

SEQ ID NO: 195435 - RNA, 24 nt, Homo sapiens
uccagacaaaccagaagcaacaga

SEQ ID NO: 195436 - RNA, 10 nt, Homo sapiens
acaugaauau

SEQ ID NO: 195437 - RNA, 15 nt, Homo sapiens
auauacaauaacaua

SEQ ID NO: 195438 - RNA, 17 nt, Homo sapiens
cagucuuccauuugcaa

SEQ ID NO: 195439 - RNA, 15 nt, Homo sapiens
cugggcaauauagca

SEQ ID NO: 195440 - RNA, 20 nt, Homo sapiens
caacuugggaacuagacucc

SEQ ID NO: 195441 - RNA, 22 nt, Homo sapiens
uuaucaccgugggcucccugac

SEQ ID NO: 195442 - RNA, 16 nt, Homo sapiens
gcauaaguuucuggga

SEQ ID NO: 195443 - RNA, 20 nt, Homo sapiens
gcagaaucuguuaccagagg

SEQ ID NO: 195444 - RNA, 13 nt, Homo sapiens
augcugacuguac

SEQ ID NO: 195445 - RNA, 21 nt, Homo sapiens
ggcuuuuacugaagccuuucu

SEQ ID NO: 195446 - RNA, 12 nt, Homo sapiens
agaaaagacaug

SEQ ID NO: 195447 - RNA, 19 nt, Homo sapiens
uuauuacauggggucuaga

SEQ ID NO: 195448 - RNA, 16 nt, Homo sapiens
cucuaagggaccucaa

SEQ ID NO: 195449 - RNA, 17 nt, Homo sapiens
aaagggagcacuggguu

SEQ ID NO: 195450 - RNA, 12 nt, Homo sapiens
auccacauggga

SEQ ID NO: 195451 - RNA, 22 nt, Homo sapiens
auugcugccccaucagugcucc

SEQ ID NO: 195452 - RNA, 13 nt, Homo sapiens
acaucaagcacag

SEQ ID NO: 195453 - RNA, 20 nt, Homo sapiens
ucucaggaccaaagcuuuca

SEQ ID NO: 195454 - RNA, 19 nt, Homo sapiens
cccuaugugggugggacca

SEQ ID NO: 195455 - RNA, 18 nt, Homo sapiens
aaaauagagccugaggga

SEQ ID NO: 195456 - RNA, 13 nt, Homo sapiens
uugcccagugugu

SEQ ID NO: 195457 - RNA, 14 nt, Homo sapiens
gauccacuucucuc

SEQ ID NO: 195458 - RNA, 14 nt, Homo sapiens
agaacuugaccccc

SEQ ID NO: 195459 - RNA, 17 nt, Homo sapiens
gacuucugccuggagac

SEQ ID NO: 195460 - RNA, 18 nt, Homo sapiens
cagucaaggaguggcuua

SEQ ID NO: 195461 - RNA, 17 nt, Homo sapiens
auaugaaugucaguagu

SEQ ID NO: 195462 - RNA, 22 nt, Homo sapiens
aaauuguaucaaaugugacauu

SEQ ID NO: 195463 - RNA, 15 nt, Homo sapiens
guaugacugcacaug

SEQ ID NO: 195464 - RNA, 20 nt, Homo sapiens
aaaaauguauaugcacuuau

SEQ ID NO: 195465 - RNA, 17 nt, Homo sapiens
cuaauuagagcagauga

SEQ ID NO: 195466 - RNA, 19 nt, Homo sapiens
ugcaagcaagaaacacugg

SEQ ID NO: 195467 - RNA, 15 nt, Homo sapiens
gaauagaugcugacu

SEQ ID NO: 195468 - RNA, 16 nt, Homo sapiens
uccucuccacugccuu

SEQ ID NO: 195469 - RNA, 19 nt, Homo sapiens
uccaaacuaccuuccaguu

SEQ ID NO: 195470 - RNA, 20 nt, Homo sapiens
acagagagggggccaccucc

SEQ ID NO: 195471 - RNA, 17 nt, Homo sapiens
aagcuuccuuggcuuuu

SEQ ID NO: 195472 - RNA, 18 nt, Homo sapiens
ugucuacguuaccaggca

SEQ ID NO: 195473 - RNA, 10 nt, Homo sapiens
acaugggagc

SEQ ID NO: 195474 - RNA, 21 nt, Homo sapiens
gacaugcgggcugggcagcug

SEQ ID NO: 195475 - RNA, 17 nt, Homo sapiens
uugucgcucaugugugc

SEQ ID NO: 195476 - RNA, 20 nt, Homo sapiens
gcacuuugggaggccaagga

SEQ ID NO: 195477 - RNA, 17 nt, Homo sapiens
aaguagcacccuggauu

SEQ ID NO: 195478 - RNA, 17 nt, Homo sapiens
cuguauuagucacagag

SEQ ID NO: 195479 - RNA, 23 nt, Homo sapiens
cuccacaauagcagacaguguuu

SEQ ID NO: 195480 - RNA, 18 nt, Homo sapiens
ccuaugugggugggacca

SEQ ID NO: 195481 - RNA, 21 nt, Homo sapiens
cuucauccucugagugugacc

SEQ ID NO: 195482 - RNA, 21 nt, Homo sapiens
caaggauggaugcagauccag

SEQ ID NO: 195483 - RNA, 22 nt, Homo sapiens
agauguaagaaauguucuugca

SEQ ID NO: 195484 - RNA, 14 nt, Homo sapiens
aagaguggaaccaa

SEQ ID NO: 195485 - RNA, 13 nt, Homo sapiens
cugaugcaagcaa

SEQ ID NO: 195486 - RNA, 17 nt, Homo sapiens
agacucccaagcuggac

SEQ ID NO: 195487 - RNA, 19 nt, Homo sapiens
uuucagguuccaaucagaa

SEQ ID NO: 195488 - RNA, 19 nt, Homo sapiens
cagagauaauucuagcuuu

SEQ ID NO: 195489 - RNA, 17 nt, Homo sapiens
ggaugguggagggccac

SEQ ID NO: 195490 - RNA, 19 nt, Homo sapiens
ccgcaaaagacaagucuuu

SEQ ID NO: 195491 - RNA, 15 nt, Homo sapiens
agggaauaauccaga

SEQ ID NO: 195492 - RNA, 16 nt, Homo sapiens
uauauaacaacaaacu

SEQ ID NO: 195493 - RNA, 22 nt, Homo sapiens
caucaagaugagagaacuggag

SEQ ID NO: 195494 - RNA, 19 nt, Homo sapiens
cuagagaaggacccggagg

SEQ ID NO: 195495 - RNA, 12 nt, Homo sapiens
uacaauugugag

SEQ ID NO: 195496 - RNA, 17 nt, Homo sapiens
caucuuaguauuugcau

SEQ ID NO: 195497 - RNA, 19 nt, Homo sapiens
ugcccaggaaccucagggc

SEQ ID NO: 195498 - RNA, 21 nt, Homo sapiens
auacugcucaucauuccuuga

SEQ ID NO: 195499 - RNA, 20 nt, Homo sapiens
aaguugcugaugaacucuua

SEQ ID NO: 195500 - RNA, 17 nt, Homo sapiens
guacaaauauaagaaua

SEQ ID NO: 195501 - RNA, 18 nt, Homo sapiens
acaaggcuggcagugaca

SEQ ID NO: 195502 - RNA, 22 nt, Homo sapiens
aucaaaugugacauuauaugca

SEQ ID NO: 195503 - RNA, 19 nt, Homo sapiens
uuguuguuuauaaagggag

SEQ ID NO: 195504 - RNA, 14 nt, Homo sapiens
agggccacauggga

SEQ ID NO: 195505 - RNA, 22 nt, Homo sapiens
aucucauuggacccuuccaugg

SEQ ID NO: 195506 - RNA, 14 nt, Homo sapiens
gauuagacagucaa

SEQ ID NO: 195507 - RNA, 20 nt, Homo sapiens
cccagccaaacccugucuga

SEQ ID NO: 195508 - RNA, 23 nt, Homo sapiens
auuuaucugugcaaauccuugau

SEQ ID NO: 195509 - RNA, 15 nt, Homo sapiens
aucuccauucucuca

SEQ ID NO: 195510 - RNA, 14 nt, Homo sapiens
gaguccacuuuguu

SEQ ID NO: 195511 - RNA, 14 nt, Homo sapiens
cauugaucugggau

SEQ ID NO: 195512 - RNA, 22 nt, Homo sapiens
cuaccuugguucccccacugau

SEQ ID NO: 195513 - RNA, 16 nt, Homo sapiens
auuaccuccugagaaa

SEQ ID NO: 195514 - RNA, 12 nt, Homo sapiens
acugucucaaga

SEQ ID NO: 195515 - RNA, 22 nt, Homo sapiens
gcauuaucuaugauaugcuaau

SEQ ID NO: 195516 - RNA, 18 nt, Homo sapiens
gcauagaguucagacuuu

SEQ ID NO: 195517 - RNA, 20 nt, Homo sapiens
agaugcauuaucuaugauau

SEQ ID NO: 195518 - RNA, 15 nt, Homo sapiens
gcaccacuguguauu

SEQ ID NO: 195519 - RNA, 21 nt, Homo sapiens
ccacauccuccacguucugcu

SEQ ID NO: 195520 - RNA, 12 nt, Homo sapiens
accuugugagag

SEQ ID NO: 195521 - RNA, 18 nt, Homo sapiens
ccucugggccaagucaaa

SEQ ID NO: 195522 - RNA, 16 nt, Homo sapiens
ugcaccaagcaggaaa

SEQ ID NO: 195523 - RNA, 18 nt, Homo sapiens
acagccccucuggacaca

SEQ ID NO: 195524 - RNA, 23 nt, Homo sapiens
uacaagacaggacccugggacca

SEQ ID NO: 195525 - RNA, 15 nt, Homo sapiens
cuccuguucgccucc

SEQ ID NO: 195526 - RNA, 23 nt, Homo sapiens
cuucgauacaccgggccuggaga

SEQ ID NO: 195527 - RNA, 12 nt, Homo sapiens
auucaguguuaa

SEQ ID NO: 195528 - RNA, 14 nt, Homo sapiens
gaccagaaccagag

SEQ ID NO: 195529 - RNA, 19 nt, Homo sapiens
cacuauuuaucugugcaaa

SEQ ID NO: 195530 - RNA, 15 nt, Homo sapiens
ugcuggcauuugcac

SEQ ID NO: 195531 - RNA, 18 nt, Homo sapiens
ugcagccuccccaggugu

SEQ ID NO: 195532 - RNA, 15 nt, Homo sapiens
cuggucucaaacucc

SEQ ID NO: 195533 - RNA, 18 nt, Homo sapiens
ucaggaguucgagaccag

SEQ ID NO: 195534 - RNA, 12 nt, Homo sapiens
ggcgugaucuug

SEQ ID NO: 195535 - RNA, 17 nt, Homo sapiens
cucgcuuuguugcccag

SEQ ID NO: 195536 - RNA, 18 nt, Homo sapiens
uuaaaaucugucacguag

SEQ ID NO: 195537 - RNA, 12 nt, Homo sapiens
aauccaugaacc

SEQ ID NO: 195538 - RNA, 21 nt, Homo sapiens
uuguagagauggggucucaca

SEQ ID NO: 195539 - RNA, 14 nt, Homo sapiens
cacccaaugcauau

SEQ ID NO: 195540 - RNA, 21 nt, Homo sapiens
ucacaaucaucaucauucuca

SEQ ID NO: 195541 - RNA, 15 nt, Homo sapiens
ccuuucuuacauuag

SEQ ID NO: 195542 - RNA, 13 nt, Homo sapiens
uugauuaccuagu

SEQ ID NO: 195543 - RNA, 13 nt, Homo sapiens
uauaaaugugauu

SEQ ID NO: 195544 - RNA, 22 nt, Homo sapiens
aucucaaacuacuggcaauuug

SEQ ID NO: 195545 - RNA, 13 nt, Homo sapiens
ucgcuucuugccu

SEQ ID NO: 195546 - RNA, 17 nt, Homo sapiens
ggguccaucucagagaa

SEQ ID NO: 195547 - RNA, 18 nt, Homo sapiens
aguucauauguaccaugu

SEQ ID NO: 195548 - RNA, 13 nt, Homo sapiens
ccaacuuuugcau

SEQ ID NO: 195549 - RNA, 17 nt, Homo sapiens
cauccuccacaauagca

SEQ ID NO: 195550 - RNA, 12 nt, Homo sapiens
uaaauacuguuu

SEQ ID NO: 195551 - RNA, 22 nt, Homo sapiens
ugcaaaaggacucucaggacca

SEQ ID NO: 195552 - RNA, 21 nt, Homo sapiens
ucuuuguaagaguggaaccaa

SEQ ID NO: 195553 - RNA, 19 nt, Homo sapiens
acacccagucuguucccca

SEQ ID NO: 195554 - RNA, 23 nt, Homo sapiens
ugccauggaggcacacagcugca

SEQ ID NO: 195555 - RNA, 22 nt, Homo sapiens
uauuacaguuuaucuauggcac

SEQ ID NO: 195556 - RNA, 17 nt, Homo sapiens
cggcucucaccaguggc

SEQ ID NO: 195557 - RNA, 14 nt, Homo sapiens
agugcaucucagcc

SEQ ID NO: 195558 - RNA, 14 nt, Homo sapiens
agccuuugccuccc

SEQ ID NO: 195559 - RNA, 16 nt, Homo sapiens
gacuuagaaaaauccu

SEQ ID NO: 195560 - RNA, 14 nt, Homo sapiens
acuugcugccugaa

SEQ ID NO: 195561 - RNA, 22 nt, Homo sapiens
uuguagagauggggucucacag

SEQ ID NO: 195562 - RNA, 23 nt, Homo sapiens
aaggcucgauuuuguaucugcag

SEQ ID NO: 195563 - RNA, 23 nt, Homo sapiens
cauuugcuuacuuugcauuugug

SEQ ID NO: 195564 - RNA, 16 nt, Homo sapiens
cuaguagucauuucau

SEQ ID NO: 195565 - RNA, 22 nt, Homo sapiens
cuuuauuacaguuuaucuaugg

SEQ ID NO: 195566 - RNA, 21 nt, Homo sapiens
gcuuucauguaaacugugcac

SEQ ID NO: 195567 - RNA, 20 nt, Homo sapiens
aagccuagcccuucucucau

SEQ ID NO: 195568 - RNA, 20 nt, Homo sapiens
acccaggacuuccauuugcu

SEQ ID NO: 195569 - RNA, 14 nt, Homo sapiens
cuguuauagagggu

SEQ ID NO: 195570 - RNA, 20 nt, Homo sapiens
aauucuagcuuugagcuuaa

SEQ ID NO: 195571 - RNA, 12 nt, Homo sapiens
gaagaagcuaaa

SEQ ID NO: 195572 - RNA, 15 nt, Homo sapiens
gcugucuuucacuga

SEQ ID NO: 195573 - RNA, 11 nt, Homo sapiens
gagcugugcag

SEQ ID NO: 195574 - RNA, 16 nt, Homo sapiens
gcaaagacuuuccucu

SEQ ID NO: 195575 - RNA, 17 nt, Homo sapiens
uagucgaacaauucaua

SEQ ID NO: 195576 - RNA, 18 nt, Homo sapiens
uccuucaagccuagcccu

SEQ ID NO: 195577 - RNA, 15 nt, Homo sapiens
acaucugugucuugu

SEQ ID NO: 195578 - RNA, 12 nt, Homo sapiens
uugaacuuggaa

SEQ ID NO: 195579 - RNA, 20 nt, Homo sapiens
ccaugcugcccgcuucucac

SEQ ID NO: 195580 - RNA, 13 nt, Homo sapiens
gcaccuaccucac

SEQ ID NO: 195581 - RNA, 14 nt, Homo sapiens
uguggguaccugua

SEQ ID NO: 195582 - RNA, 21 nt, Homo sapiens
gcaguuugcuuuguaugcacu

SEQ ID NO: 195583 - RNA, 21 nt, Homo sapiens
gaauaaaccaucaucuugcca

SEQ ID NO: 195584 - RNA, 14 nt, Homo sapiens
ucugguuugcagag

SEQ ID NO: 195585 - RNA, 20 nt, Homo sapiens
ggucucgcuuuguugcccag

SEQ ID NO: 195586 - RNA, 17 nt, Homo sapiens
ggccuggcaagugggug

SEQ ID NO: 195587 - RNA, 15 nt, Homo sapiens
cagagcccaagggaa

SEQ ID NO: 195588 - RNA, 14 nt, Homo sapiens
agccucugaauaug

SEQ ID NO: 195589 - RNA, 15 nt, Homo sapiens
acuuguuuuaugcuc

SEQ ID NO: 195590 - RNA, 16 nt, Homo sapiens
gcagaaccuccuggaa

SEQ ID NO: 195591 - RNA, 11 nt, Homo sapiens
cccuuucacaa

SEQ ID NO: 195592 - RNA, 22 nt, Homo sapiens
agugauaucccccagccucaag

SEQ ID NO: 195593 - RNA, 13 nt, Homo sapiens
ucaaauagcauaa

SEQ ID NO: 195594 - RNA, 17 nt, Homo sapiens
ugcaccaccaagccaag

SEQ ID NO: 195595 - RNA, 14 nt, Homo sapiens
cauauccaacaugu

SEQ ID NO: 195596 - RNA, 17 nt, Homo sapiens
uguccaggcacugagau

SEQ ID NO: 195597 - RNA, 16 nt, Homo sapiens
ucuuuugaacccagga

SEQ ID NO: 195598 - RNA, 22 nt, Homo sapiens
acuuagaaauugcauuuccuga

SEQ ID NO: 195599 - RNA, 20 nt, Homo sapiens
ucuauggcacccaugcaccu

SEQ ID NO: 195600 - RNA, 14 nt, Homo sapiens
agcugggagcacag

SEQ ID NO: 195601 - RNA, 19 nt, Homo sapiens
auuccuauauaguuuauug

SEQ ID NO: 195602 - RNA, 19 nt, Homo sapiens
augggcagagcccaaggga

SEQ ID NO: 195603 - RNA, 22 nt, Homo sapiens
cauuuaguuugauuauucagug

SEQ ID NO: 195604 - RNA, 20 nt, Homo sapiens
uguacaacuuuuuaccuagu

SEQ ID NO: 195605 - RNA, 16 nt, Homo sapiens
auuguuaaaauaacua

SEQ ID NO: 195606 - RNA, 22 nt, Homo sapiens
aagcuuucauguaaacugugca

SEQ ID NO: 195607 - RNA, 20 nt, Homo sapiens
accuucuguggcucacagaa

SEQ ID NO: 195608 - RNA, 15 nt, Homo sapiens
ucucugagcagugaa

SEQ ID NO: 195609 - RNA, 15 nt, Homo sapiens
gaaucucugugccuu

SEQ ID NO: 195610 - RNA, 21 nt, Homo sapiens
cauaauguuacauuauuauca

SEQ ID NO: 195611 - RNA, 22 nt, Homo sapiens
auuuaguuugauuauucagugu

SEQ ID NO: 195612 - RNA, 18 nt, Homo sapiens
cauaauguuacauuauua

SEQ ID NO: 195613 - RNA, 22 nt, Homo sapiens
agcuggaagggucaacaucuuu

SEQ ID NO: 195614 - RNA, 17 nt, Homo sapiens
cgagaggugggccaguc

SEQ ID NO: 195615 - RNA, 21 nt, Homo sapiens
ucagcuggaucuccauucucu

SEQ ID NO: 195616 - RNA, 16 nt, Homo sapiens
aguauuugcauauucu

SEQ ID NO: 195617 - RNA, 21 nt, Homo sapiens
ggguuaguuuacaaucagcca

SEQ ID NO: 195618 - RNA, 22 nt, Homo sapiens
uagagauggggucucacagugu

SEQ ID NO: 195619 - RNA, 13 nt, Homo sapiens
caucauaguacag

SEQ ID NO: 195620 - RNA, 19 nt, Homo sapiens
cagcucgggcccucuguga

SEQ ID NO: 195621 - RNA, 23 nt, Homo sapiens
uugacaaacucucccuucacucc

SEQ ID NO: 195622 - RNA, 18 nt, Homo sapiens
gcgucaugcuuguguuau

SEQ ID NO: 195623 - RNA, 22 nt, Homo sapiens
ugcucagggaauaauccagaaa

SEQ ID NO: 195624 - RNA, 12 nt, Homo sapiens
caacuuugacaa

SEQ ID NO: 195625 - RNA, 17 nt, Homo sapiens
aggaucuuuugaaccca

SEQ ID NO: 195626 - RNA, 17 nt, Homo sapiens
ugacuauggcuaccaaa

SEQ ID NO: 195627 - RNA, 19 nt, Homo sapiens
accaugagaccacuguuau

SEQ ID NO: 195628 - RNA, 23 nt, Homo sapiens
gcaggagagaaugcccagugacc

SEQ ID NO: 195629 - RNA, 16 nt, Homo sapiens
ccuccacgccauuucc

SEQ ID NO: 195630 - RNA, 21 nt, Homo sapiens
cuuucaggccacauggcuaaa

SEQ ID NO: 195631 - RNA, 22 nt, Homo sapiens
caggcccuggccuccccugcca

SEQ ID NO: 195632 - RNA, 14 nt, Homo sapiens
acaguguugcccag

SEQ ID NO: 195633 - RNA, 19 nt, Homo sapiens
aacaggauuagacagucaa

SEQ ID NO: 195634 - RNA, 14 nt, Homo sapiens
cuaucgcaccacug

SEQ ID NO: 195635 - RNA, 11 nt, Homo sapiens
cggcugaccau

SEQ ID NO: 195636 - RNA, 19 nt, Homo sapiens
uuuugcuggucacugccau

SEQ ID NO: 195637 - RNA, 13 nt, Homo sapiens
guuuuuacuguga

SEQ ID NO: 195638 - RNA, 15 nt, Homo sapiens
uagaaggagacagag

SEQ ID NO: 195639 - RNA, 15 nt, Homo sapiens
ggccugcacuggugu

SEQ ID NO: 195640 - RNA, 17 nt, Homo sapiens
uguugacauccaagcuu

SEQ ID NO: 195641 - RNA, 13 nt, Homo sapiens
gggucaacaucuu

SEQ ID NO: 195642 - RNA, 21 nt, Homo sapiens
cgaacaauucauauauuugaa

SEQ ID NO: 195643 - RNA, 14 nt, Homo sapiens
aaagaaguggggac

SEQ ID NO: 195644 - RNA, 15 nt, Homo sapiens
guaaggugagggaau

SEQ ID NO: 195645 - RNA, 21 nt, Homo sapiens
caggagggguuaaagcugccg

SEQ ID NO: 195646 - RNA, 15 nt, Homo sapiens
caggcuggccagucc

SEQ ID NO: 195647 - RNA, 21 nt, Homo sapiens
uaccugcccccaauccaugaa

SEQ ID NO: 195648 - RNA, 13 nt, Homo sapiens
cuuagcauguccc

SEQ ID NO: 195649 - RNA, 23 nt, Homo sapiens
uggcuucacagaugugugauuca

SEQ ID NO: 195650 - RNA, 19 nt, Homo sapiens
gagacaugagcauggcuga

SEQ ID NO: 195651 - RNA, 13 nt, Homo sapiens
uucuccuccaugg

SEQ ID NO: 195652 - RNA, 22 nt, Homo sapiens
cagucuuccauuugcaagggaa

SEQ ID NO: 195653 - RNA, 21 nt, Homo sapiens
gaagccucacugcaagcacug

SEQ ID NO: 195654 - RNA, 17 nt, Homo sapiens
ccuucgcuucuugccuc

SEQ ID NO: 195655 - RNA, 13 nt, Homo sapiens
gcaaggugacauu

SEQ ID NO: 195656 - RNA, 16 nt, Homo sapiens
uuacuaucaugucaaa

SEQ ID NO: 195657 - RNA, 12 nt, Homo sapiens
ggggcagcacag

SEQ ID NO: 195658 - RNA, 13 nt, Homo sapiens
agcaaagggcuca

SEQ ID NO: 195659 - RNA, 14 nt, Homo sapiens
accucaaaggugau

SEQ ID NO: 195660 - RNA, 19 nt, Homo sapiens
cuaagaaauaugcacaaua

SEQ ID NO: 195661 - RNA, 13 nt, Homo sapiens
aaagcucaucuca

SEQ ID NO: 195662 - RNA, 16 nt, Homo sapiens
uuggcuucuaaucaaa

SEQ ID NO: 195663 - RNA, 14 nt, Homo sapiens
ccugggaccacaga

SEQ ID NO: 195664 - RNA, 16 nt, Homo sapiens
uggggaagcuucuuaa

SEQ ID NO: 195665 - RNA, 21 nt, Homo sapiens
ugggcagcuguuagaguccaa

SEQ ID NO: 195666 - RNA, 17 nt, Homo sapiens
cucuuguauaugaugau

SEQ ID NO: 195667 - RNA, 15 nt, Homo sapiens
acuugcacaaaauca

SEQ ID NO: 195668 - RNA, 16 nt, Homo sapiens
ccuccagaauggagcu

SEQ ID NO: 195669 - RNA, 20 nt, Homo sapiens
uacgcuccaucgcugucauc

SEQ ID NO: 195670 - RNA, 14 nt, Homo sapiens
caauaauuucaggu

SEQ ID NO: 195671 - RNA, 13 nt, Homo sapiens
aauaagcugccuu

SEQ ID NO: 195672 - RNA, 22 nt, Homo sapiens
ugaccaggcauccuccacaaua

SEQ ID NO: 195673 - RNA, 20 nt, Homo sapiens
accgucaauaggcaaagggg

SEQ ID NO: 195674 - RNA, 18 nt, Homo sapiens
cucugugggcuccaugua

SEQ ID NO: 195675 - RNA, 21 nt, Homo sapiens
auauaaaugugauugcagcuu

SEQ ID NO: 195676 - RNA, 21 nt, Homo sapiens
agggaagcugucccucacugu

SEQ ID NO: 195677 - RNA, 14 nt, Homo sapiens
ucauuucaaaggga

SEQ ID NO: 195678 - RNA, 19 nt, Homo sapiens
uauuuuauucccuuucaca

SEQ ID NO: 195679 - RNA, 18 nt, Homo sapiens
gacuguucuuuuacaaga

SEQ ID NO: 195680 - RNA, 14 nt, Homo sapiens
accaggucagggag

SEQ ID NO: 195681 - RNA, 21 nt, Homo sapiens
guaccuucaaacuagggccaa

SEQ ID NO: 195682 - RNA, 22 nt, Homo sapiens
gugggagcuuuugguaugugac

SEQ ID NO: 195683 - RNA, 18 nt, Homo sapiens
uaccuaguacaaggcaac

SEQ ID NO: 195684 - RNA, 18 nt, Homo sapiens
auuuuauucccuuucaca

SEQ ID NO: 195685 - RNA, 22 nt, Homo sapiens
aaaugcuguauuagucacagag

SEQ ID NO: 195686 - RNA, 23 nt, Homo sapiens
ucuucccuguaugauuccuugau

SEQ ID NO: 195687 - RNA, 21 nt, Homo sapiens
gaaaugcccaucuaugucccu

SEQ ID NO: 195688 - RNA, 13 nt, Homo sapiens
accagaggacaaa

SEQ ID NO: 195689 - RNA, 21 nt, Homo sapiens
uucuguucugucucauaugau

SEQ ID NO: 195690 - RNA, 15 nt, Homo sapiens
uuauucccuuucaca

SEQ ID NO: 195691 - RNA, 23 nt, Homo sapiens
caccugguuccggaauccugucc

SEQ ID NO: 195692 - RNA, 19 nt, Homo sapiens
aaguccuacaagcuaaaau

SEQ ID NO: 195693 - RNA, 23 nt, Homo sapiens
aaggauggagccagcucugcauu

SEQ ID NO: 195694 - RNA, 17 nt, Homo sapiens
cagaaucaaaugcaauu

SEQ ID NO: 195695 - RNA, 16 nt, Homo sapiens
caugaagauucuuucc

SEQ ID NO: 195696 - RNA, 15 nt, Homo sapiens
gaaugccacugccuu

SEQ ID NO: 195697 - RNA, 12 nt, Homo sapiens
aggcaagcacuu

SEQ ID NO: 195698 - RNA, 13 nt, Homo sapiens
uaagauucaucca

SEQ ID NO: 195699 - RNA, 21 nt, Homo sapiens
aagcugucccucacuguugaa

SEQ ID NO: 195700 - RNA, 18 nt, Homo sapiens
aacaccaacauguuggga

SEQ ID NO: 195701 - RNA, 14 nt, Homo sapiens
gcccaagaauagau

SEQ ID NO: 195702 - RNA, 19 nt, Homo sapiens
agaugcauuaucuaugaua

SEQ ID NO: 195703 - RNA, 18 nt, Homo sapiens
uuugaaauuaaccucuca

SEQ ID NO: 195704 - RNA, 16 nt, Homo sapiens
ggaaagaaaugcccau

SEQ ID NO: 195705 - RNA, 16 nt, Homo sapiens
aucauucucauucuca

SEQ ID NO: 195706 - RNA, 22 nt, Homo sapiens
aagacauggggaggaaggacaa

SEQ ID NO: 195707 - RNA, 18 nt, Homo sapiens
gaauuugaguuggaucau

SEQ ID NO: 195708 - RNA, 18 nt, Homo sapiens
agcgaggaggcuccagag

SEQ ID NO: 195709 - RNA, 23 nt, Homo sapiens
cuuaaguuguggagagugcaaca

SEQ ID NO: 195710 - RNA, 21 nt, Homo sapiens
cgugggucuucagggggccag

SEQ ID NO: 195711 - RNA, 15 nt, Homo sapiens
aauuaguaacaugug

SEQ ID NO: 195712 - RNA, 15 nt, Homo sapiens
guuagugauggagcu

SEQ ID NO: 195713 - RNA, 13 nt, Homo sapiens
augcagcaucuaa

SEQ ID NO: 195714 - RNA, 16 nt, Homo sapiens
cucagcuggaucucca

SEQ ID NO: 195715 - RNA, 20 nt, Homo sapiens
caugacauauuuuugcuuua

SEQ ID NO: 195716 - RNA, 19 nt, Homo sapiens
aaccacaggcagcauuuag

SEQ ID NO: 195717 - RNA, 21 nt, Homo sapiens
ucuguggaucagagaugcacc

SEQ ID NO: 195718 - RNA, 21 nt, Homo sapiens
uauuuauagucgaacaauuca

SEQ ID NO: 195719 - RNA, 13 nt, Homo sapiens
gaauaauccagaa

SEQ ID NO: 195720 - RNA, 17 nt, Homo sapiens
ugccagugggaacuccu

SEQ ID NO: 195721 - RNA, 15 nt, Homo sapiens
gauccacuucucuca

SEQ ID NO: 195722 - RNA, 23 nt, Homo sapiens
auauaugauauauaaaugugauu

SEQ ID NO: 195723 - RNA, 17 nt, Homo sapiens
guccugccucagccucc

SEQ ID NO: 195724 - RNA, 15 nt, Homo sapiens
gagcagaacuuucac

SEQ ID NO: 195725 - RNA, 11 nt, Homo sapiens
augagcauuua

SEQ ID NO: 195726 - RNA, 19 nt, Homo sapiens
uugcacaaaaucacacagc

SEQ ID NO: 195727 - RNA, 14 nt, Homo sapiens
uauaaugguugacu

SEQ ID NO: 195728 - RNA, 17 nt, Homo sapiens
uauuuaugccucuguau

SEQ ID NO: 195729 - RNA, 15 nt, Homo sapiens
ugauauugcagcuua

SEQ ID NO: 195730 - RNA, 17 nt, Homo sapiens
ccuccuaaaguagacuu

SEQ ID NO: 195731 - RNA, 15 nt, Homo sapiens
guuuuguauucucug

SEQ ID NO: 195732 - RNA, 16 nt, Homo sapiens
cucgagcaguccugcc

SEQ ID NO: 195733 - RNA, 21 nt, Homo sapiens
gaaaaugcuguauuagucaca

SEQ ID NO: 195734 - RNA, 22 nt, Homo sapiens
gagagcucgcuuugagugacug

SEQ ID NO: 195735 - RNA, 20 nt, Homo sapiens
ccaacguggggcagcacaga

SEQ ID NO: 195736 - RNA, 14 nt, Homo sapiens
ugaaugcagggaca

SEQ ID NO: 195737 - RNA, 20 nt, Homo sapiens
cugggagcacaggcacugca

SEQ ID NO: 195738 - RNA, 19 nt, Homo sapiens
cuccucuacaauuugccau

SEQ ID NO: 195739 - RNA, 20 nt, Homo sapiens
agagauggggucucacagug

SEQ ID NO: 195740 - RNA, 19 nt, Homo sapiens
acuguuggcaaggugacau

SEQ ID NO: 195741 - RNA, 13 nt, Homo sapiens
agucacagagaua

SEQ ID NO: 195742 - RNA, 22 nt, Homo sapiens
caaugcuauaacuauguugaua

SEQ ID NO: 195743 - RNA, 20 nt, Homo sapiens
gagagaaucccuagucuuca

SEQ ID NO: 195744 - RNA, 12 nt, Homo sapiens
ggaccucaaagg

SEQ ID NO: 195745 - RNA, 20 nt, Homo sapiens
gacacuauuuaucugugcaa

SEQ ID NO: 195746 - RNA, 14 nt, Homo sapiens
agucacugcacagu

SEQ ID NO: 195747 - RNA, 15 nt, Homo sapiens
aguguugcucucuag

SEQ ID NO: 195748 - RNA, 17 nt, Homo sapiens
cccuguaccugugcacg

SEQ ID NO: 195749 - RNA, 13 nt, Homo sapiens
uuauauucaucca

SEQ ID NO: 195750 - RNA, 22 nt, Homo sapiens
aaaucacacagccaagccaguc

SEQ ID NO: 195751 - RNA, 22 nt, Homo sapiens
auuaccuugugcuaauccucuu

SEQ ID NO: 195752 - RNA, 22 nt, Homo sapiens
aagcucaucucagcuccugaaa

SEQ ID NO: 195753 - RNA, 17 nt, Homo sapiens
acacagccaagccaguc

SEQ ID NO: 195754 - RNA, 17 nt, Homo sapiens
auaauguuacauuauua

SEQ ID NO: 195755 - RNA, 21 nt, Homo sapiens
ugcuaaucagggaggucauuu

SEQ ID NO: 195756 - RNA, 19 nt, Homo sapiens
gaccccagaggauugcugc

SEQ ID NO: 195757 - RNA, 21 nt, Homo sapiens
uaccaguauaauugaguuuuc

SEQ ID NO: 195758 - RNA, 16 nt, Homo sapiens
gaguuaguuugaguua

SEQ ID NO: 195759 - RNA, 15 nt, Homo sapiens
ucuaggaacauacuu

SEQ ID NO: 195760 - RNA, 17 nt, Homo sapiens
uauuuccuucuccuccu

SEQ ID NO: 195761 - RNA, 14 nt, Homo sapiens
cucacagagugcau

SEQ ID NO: 195762 - RNA, 14 nt, Homo sapiens
ucuggacacagccc

SEQ ID NO: 195763 - RNA, 18 nt, Homo sapiens
acacagccaagccaguca

SEQ ID NO: 195764 - RNA, 21 nt, Homo sapiens
agauggggucucacaguguug

SEQ ID NO: 195765 - RNA, 20 nt, Homo sapiens
ugguuaauaaguuucacuga

SEQ ID NO: 195766 - RNA, 23 nt, Homo sapiens
agaagccucacugcaagcacugc

SEQ ID NO: 195767 - RNA, 13 nt, Homo sapiens
cugccccaugcug

SEQ ID NO: 195768 - RNA, 23 nt, Homo sapiens
aacacuuuacaauguucauccca

SEQ ID NO: 195769 - RNA, 17 nt, Homo sapiens
agucuuauuuccucaac

SEQ ID NO: 195770 - RNA, 20 nt, Homo sapiens
uguuucaauugcaucuccca

SEQ ID NO: 195771 - RNA, 19 nt, Homo sapiens
aucccccagccucaagucu

SEQ ID NO: 195772 - RNA, 21 nt, Homo sapiens
ggcagauacugucucuuucau

SEQ ID NO: 195773 - RNA, 13 nt, Homo sapiens
uucuaaucaaagc

SEQ ID NO: 195774 - RNA, 18 nt, Homo sapiens
uauugacaauaauuucag

SEQ ID NO: 195775 - RNA, 20 nt, Homo sapiens
agcacugagcaaagcauuga

SEQ ID NO: 195776 - RNA, 21 nt, Homo sapiens
agcucagagaggcuagaugau

SEQ ID NO: 195777 - RNA, 18 nt, Homo sapiens
caggggaguaugcaaaag

SEQ ID NO: 195778 - RNA, 22 nt, Homo sapiens
uccuaacaggauuagacaguca

SEQ ID NO: 195779 - RNA, 20 nt, Homo sapiens
cuggagaacuagagaaggac

SEQ ID NO: 195780 - RNA, 19 nt, Homo sapiens
auaaugguugacuggguuu

SEQ ID NO: 195781 - RNA, 19 nt, Homo sapiens
cuuuucuggaauguaauca

SEQ ID NO: 195782 - RNA, 17 nt, Homo sapiens
uuucuggcagccaguac

SEQ ID NO: 195783 - RNA, 18 nt, Homo sapiens
ucaaccugggcaaagccu

SEQ ID NO: 195784 - RNA, 20 nt, Homo sapiens
gccugcggaguugugcacgu

SEQ ID NO: 195785 - RNA, 12 nt, Homo sapiens
ucucgcuuuguu

SEQ ID NO: 195786 - RNA, 17 nt, Homo sapiens
gcuaucgcaccacugug

SEQ ID NO: 195787 - RNA, 16 nt, Homo sapiens
cacugcugccucuuga

SEQ ID NO: 195788 - RNA, 21 nt, Homo sapiens
uagacccugcauuuauagcau

SEQ ID NO: 195789 - RNA, 13 nt, Homo sapiens
uaaacugugcacc

SEQ ID NO: 195790 - RNA, 16 nt, Homo sapiens
ucuuuuacauucugca

SEQ ID NO: 195791 - RNA, 14 nt, Homo sapiens
auaucgaucucuua

SEQ ID NO: 195792 - RNA, 16 nt, Homo sapiens
acccugggaccacaga

SEQ ID NO: 195793 - RNA, 18 nt, Homo sapiens
acuccaggcugucuuuca

SEQ ID NO: 195794 - RNA, 19 nt, Homo sapiens
uggaaaacaguauuuucca

SEQ ID NO: 195795 - RNA, 18 nt, Homo sapiens
aaucaaguuggcuucuaa

SEQ ID NO: 195796 - RNA, 14 nt, Homo sapiens
guuccccacugaca

SEQ ID NO: 195797 - RNA, 13 nt, Homo sapiens
gaggcacacagcu

SEQ ID NO: 195798 - RNA, 20 nt, Homo sapiens
aagaccugacaccuuucaua

SEQ ID NO: 195799 - RNA, 19 nt, Homo sapiens
aacuaagaaauaugcacaa

SEQ ID NO: 195800 - RNA, 22 nt, Homo sapiens
agcccagggcuccugcacuuac

SEQ ID NO: 195801 - RNA, 20 nt, Homo sapiens
uacaaucagccacauucuag

SEQ ID NO: 195802 - RNA, 13 nt, Homo sapiens
guaccugugcacg

SEQ ID NO: 195803 - RNA, 17 nt, Homo sapiens
caacuugggaacuagac

SEQ ID NO: 195804 - RNA, 20 nt, Homo sapiens
aaucuucuugauccacuucu

SEQ ID NO: 195805 - RNA, 16 nt, Homo sapiens
auuaccuaguagucau

SEQ ID NO: 195806 - RNA, 14 nt, Homo sapiens
cagggucauagcau

SEQ ID NO: 195807 - RNA, 13 nt, Homo sapiens
uuaaaaucuguca

SEQ ID NO: 195808 - RNA, 15 nt, Homo sapiens
gcucgagcaguccug

SEQ ID NO: 195809 - RNA, 15 nt, Homo sapiens
ucucacuauaccagu

SEQ ID NO: 195810 - RNA, 17 nt, Homo sapiens
cuuuugacaaaggcaag

SEQ ID NO: 195811 - RNA, 17 nt, Homo sapiens
aacagcccucaggucag

SEQ ID NO: 195812 - RNA, 12 nt, Homo sapiens
ugcccagugugu

SEQ ID NO: 195813 - RNA, 20 nt, Homo sapiens
aaagccugccucuuccagga

SEQ ID NO: 195814 - RNA, 22 nt, Homo sapiens
gcuacugacuauggcuaccaaa

SEQ ID NO: 195815 - RNA, 22 nt, Homo sapiens
agggaagcugucccucacuguu

SEQ ID NO: 195816 - RNA, 19 nt, Homo sapiens
caaacagccccucuggaca

SEQ ID NO: 195817 - RNA, 13 nt, Homo sapiens
gagauauuuacau

SEQ ID NO: 195818 - RNA, 21 nt, Homo sapiens
cuugacuuuagucugcaaaau

SEQ ID NO: 195819 - RNA, 18 nt, Homo sapiens
uguuccccuuccacugag

SEQ ID NO: 195820 - RNA, 14 nt, Homo sapiens
uaagauucauccau

SEQ ID NO: 195821 - RNA, 15 nt, Homo sapiens
caugaggaccaggug

SEQ ID NO: 195822 - RNA, 18 nt, Homo sapiens
uggaucuccauucucuca

SEQ ID NO: 195823 - RNA, 13 nt, Homo sapiens
gcucaucauucuc

SEQ ID NO: 195824 - RNA, 16 nt, Homo sapiens
aucuaugauaugcuaa

SEQ ID NO: 195825 - RNA, 13 nt, Homo sapiens
gagccauaugaau

SEQ ID NO: 195826 - RNA, 16 nt, Homo sapiens
aaguuucacugacuua

SEQ ID NO: 195827 - RNA, 22 nt, Homo sapiens
cugauucugucaaugucuugaa

SEQ ID NO: 195828 - RNA, 13 nt, Homo sapiens
accauucaggaca

SEQ ID NO: 195829 - RNA, 18 nt, Homo sapiens
ucuuaauauaacugccuu

SEQ ID NO: 195830 - RNA, 15 nt, Homo sapiens
caauguucaucccau

SEQ ID NO: 195831 - RNA, 17 nt, Homo sapiens
agauaauucuagcuuug

SEQ ID NO: 195832 - RNA, 18 nt, Homo sapiens
cugaguggcaggggacag

SEQ ID NO: 195833 - RNA, 22 nt, Homo sapiens
uauuuugccagugggaacuccu

SEQ ID NO: 195834 - RNA, 15 nt, Homo sapiens
cuugaaaagacauca

SEQ ID NO: 195835 - RNA, 21 nt, Homo sapiens
acccuaugugggugggaccac

SEQ ID NO: 195836 - RNA, 20 nt, Homo sapiens
cacuugccccuguuaccuaa

SEQ ID NO: 195837 - RNA, 23 nt, Homo sapiens
cauauauuugaaguggagccaua

SEQ ID NO: 195838 - RNA, 23 nt, Homo sapiens
uucuaaaugaauguuuacacucu

SEQ ID NO: 195839 - RNA, 20 nt, Homo sapiens
acccggcugcagaggccaga

SEQ ID NO: 195840 - RNA, 15 nt, Homo sapiens
gggcugcccuggugc

SEQ ID NO: 195841 - RNA, 12 nt, Homo sapiens
agugauggagcu

SEQ ID NO: 195842 - RNA, 14 nt, Homo sapiens
aguacuggcauggu

SEQ ID NO: 195843 - RNA, 17 nt, Homo sapiens
aggcucguugacuggcu

SEQ ID NO: 195844 - RNA, 14 nt, Homo sapiens
auggugaugaaaug

SEQ ID NO: 195845 - RNA, 14 nt, Homo sapiens
caauguuagccaca

SEQ ID NO: 195846 - RNA, 16 nt, Homo sapiens
cuggugacccagucag

SEQ ID NO: 195847 - RNA, 16 nt, Homo sapiens
aguucauauguaccau

SEQ ID NO: 195848 - RNA, 16 nt, Homo sapiens
uaaaaucccuccuuca

SEQ ID NO: 195849 - RNA, 22 nt, Homo sapiens
cugagcagugaaugauucagug

SEQ ID NO: 195850 - RNA, 17 nt, Homo sapiens
aaguaaguuugauuuca

SEQ ID NO: 195851 - RNA, 14 nt, Homo sapiens
cauuauaugcacua

SEQ ID NO: 195852 - RNA, 18 nt, Homo sapiens
uauauauuuuugugcaca

SEQ ID NO: 195853 - RNA, 11 nt, Homo sapiens
augugaugaau

SEQ ID NO: 195854 - RNA, 12 nt, Homo sapiens
ccucucugcucu

SEQ ID NO: 195855 - RNA, 15 nt, Homo sapiens
ugcauauucuuaugu

SEQ ID NO: 195856 - RNA, 15 nt, Homo sapiens
ucguuugaaucacag

SEQ ID NO: 195857 - RNA, 23 nt, Homo sapiens
gcauacgguaugauauugcagcu

SEQ ID NO: 195858 - RNA, 15 nt, Homo sapiens
caccccuaaagagau

SEQ ID NO: 195859 - RNA, 21 nt, Homo sapiens
cccugacugggaguugaucgc

SEQ ID NO: 195860 - RNA, 16 nt, Homo sapiens
uccaacaugugcucag

SEQ ID NO: 195861 - RNA, 15 nt, Homo sapiens
cuucacucaaucucu

SEQ ID NO: 195862 - RNA, 22 nt, Homo sapiens
ucuagguaggggcccacuucac

SEQ ID NO: 195863 - RNA, 22 nt, Homo sapiens
gaguguuccccuuccacugagg

SEQ ID NO: 195864 - RNA, 17 nt, Homo sapiens
acaguaacugccaucaa

SEQ ID NO: 195865 - RNA, 21 nt, Homo sapiens
guagcagauccccagccucug

SEQ ID NO: 195866 - RNA, 22 nt, Homo sapiens
gagggauaguggggucagggcu

SEQ ID NO: 195867 - RNA, 17 nt, Homo sapiens
cuugcaguuaaggguua

SEQ ID NO: 195868 - RNA, 20 nt, Homo sapiens
ugcauaaaauguuaaguuga

SEQ ID NO: 195869 - RNA, 20 nt, Homo sapiens
uagcaaaauacaugacauuu

SEQ ID NO: 195870 - RNA, 18 nt, Homo sapiens
aaggauggagccagcucu

SEQ ID NO: 195871 - RNA, 23 nt, Homo sapiens
aguggcucacaccuguaauccca

SEQ ID NO: 195872 - RNA, 20 nt, Homo sapiens
gccugcggaccagaugaaug

SEQ ID NO: 195873 - RNA, 23 nt, Homo sapiens
uauaacuacuccggagacagggu

SEQ ID NO: 195874 - RNA, 18 nt, Homo sapiens
ccaggcaacuugggaacu

SEQ ID NO: 195875 - RNA, 17 nt, Homo sapiens
aagguuuuuacugugag

SEQ ID NO: 195876 - RNA, 18 nt, Homo sapiens
ccuggucccuuggagaca

SEQ ID NO: 195877 - RNA, 20 nt, Homo sapiens
guuggaagugagggucagag

SEQ ID NO: 195878 - RNA, 16 nt, Homo sapiens
aucuucuucaccauuu

SEQ ID NO: 195879 - RNA, 16 nt, Homo sapiens
uuguuccccacugaca

SEQ ID NO: 195880 - RNA, 15 nt, Homo sapiens
acauuagccuaugug

SEQ ID NO: 195881 - RNA, 22 nt, Homo sapiens
ggaugaaggccucccugucuaa

SEQ ID NO: 195882 - RNA, 21 nt, Homo sapiens
ucacuaggcccccacuugccu

SEQ ID NO: 195883 - RNA, 22 nt, Homo sapiens
cagguucaugccaccauggcca

SEQ ID NO: 195884 - RNA, 19 nt, Homo sapiens
uaguaaagugauaauuucu

SEQ ID NO: 195885 - RNA, 20 nt, Homo sapiens
gccacuccagaccccuggcu

SEQ ID NO: 195886 - RNA, 17 nt, Homo sapiens
agcacugagcaaagcau

SEQ ID NO: 195887 - RNA, 16 nt, Homo sapiens
ccaagucaaagacauu

SEQ ID NO: 195888 - RNA, 18 nt, Homo sapiens
gugcaccacuucaaguga

SEQ ID NO: 195889 - RNA, 21 nt, Homo sapiens
caucagacuccugugcaacuu

SEQ ID NO: 195890 - RNA, 21 nt, Homo sapiens
ugagcauuguggcugucagca

SEQ ID NO: 195891 - RNA, 22 nt, Homo sapiens
uacagcuaaucagcauucucac

SEQ ID NO: 195892 - RNA, 13 nt, Homo sapiens
cugggccaaguca

SEQ ID NO: 195893 - RNA, 17 nt, Homo sapiens
ugcauuaucuaugauau

SEQ ID NO: 195894 - RNA, 23 nt, Homo sapiens
ggagacacuauuuaucugugcaa

SEQ ID NO: 195895 - RNA, 17 nt, Homo sapiens
uguauuagucacagaga

SEQ ID NO: 195896 - RNA, 16 nt, Homo sapiens
gagaacaaugugcuau

SEQ ID NO: 195897 - RNA, 14 nt, Homo sapiens
aucgcaguguucaa

SEQ ID NO: 195898 - RNA, 13 nt, Homo sapiens
ggaaaacaguauu

SEQ ID NO: 195899 - RNA, 15 nt, Homo sapiens
auuuccggccaacag

SEQ ID NO: 195900 - RNA, 17 nt, Homo sapiens
cuaaaaggaaaucucac

SEQ ID NO: 195901 - RNA, 23 nt, Homo sapiens
ggacucagguugucugaagucac

SEQ ID NO: 195902 - RNA, 14 nt, Homo sapiens
ucuaagggaccuca

SEQ ID NO: 195903 - RNA, 14 nt, Homo sapiens
ucagaaauguacaa

SEQ ID NO: 195904 - RNA, 15 nt, Homo sapiens
uuuggccuccuccag

SEQ ID NO: 195905 - RNA, 13 nt, Homo sapiens
cccgcaaugugcc

SEQ ID NO: 195906 - RNA, 15 nt, Homo sapiens
uauauuuuugugcac

SEQ ID NO: 195907 - RNA, 17 nt, Homo sapiens
uuguauuaucaacagca

SEQ ID NO: 195908 - RNA, 17 nt, Homo sapiens
auuuccuuuuccuucaa

SEQ ID NO: 195909 - RNA, 13 nt, Homo sapiens
cuaugaaauauca

SEQ ID NO: 195910 - RNA, 21 nt, Homo sapiens
gaagauggauugguguaaaag

SEQ ID NO: 195911 - RNA, 19 nt, Homo sapiens
uccacccuuggacuuucuu

SEQ ID NO: 195912 - RNA, 20 nt, Homo sapiens
aaaaggacucucaggaccaa

SEQ ID NO: 195913 - RNA, 23 nt, Homo sapiens
cacuccgagaggugggccagucu

SEQ ID NO: 195914 - RNA, 22 nt, Homo sapiens
uuaaaacccacaaaaguacaau

SEQ ID NO: 195915 - RNA, 23 nt, Homo sapiens
cccagcccagggcuccugcacuu

SEQ ID NO: 195916 - RNA, 21 nt, Homo sapiens
agcuucuuaauauaacugccu

SEQ ID NO: 195917 - RNA, 17 nt, Homo sapiens
cuggguuucucuguaua

SEQ ID NO: 195918 - RNA, 16 nt, Homo sapiens
agaccauaauguuaca

SEQ ID NO: 195919 - RNA, 15 nt, Homo sapiens
cuuuggaaaucacac

SEQ ID NO: 195920 - RNA, 16 nt, Homo sapiens
cuuuuggagguauuca

SEQ ID NO: 195921 - RNA, 23 nt, Homo sapiens
cauaauuucuucacucaaucucu

SEQ ID NO: 195922 - RNA, 15 nt, Homo sapiens
gaaugcagggacaaa

SEQ ID NO: 195923 - RNA, 21 nt, Homo sapiens
uggcuucacagaugugugauu

SEQ ID NO: 195924 - RNA, 20 nt, Homo sapiens
uaaaauguugaaaagucaaa

SEQ ID NO: 195925 - RNA, 17 nt, Homo sapiens
uuucugcaaacaccaac

SEQ ID NO: 195926 - RNA, 19 nt, Homo sapiens
uccacguucugcucaucau

SEQ ID NO: 195927 - RNA, 19 nt, Homo sapiens
cucacaccuguaaucccag

SEQ ID NO: 195928 - RNA, 21 nt, Homo sapiens
aaaugcccaucuaugucccuu

SEQ ID NO: 195929 - RNA, 16 nt, Homo sapiens
uaauaaguuucacuga

SEQ ID NO: 195930 - RNA, 17 nt, Homo sapiens
agggauagcacugagca

SEQ ID NO: 195931 - RNA, 23 nt, Homo sapiens
aaguagacuucauuuuuccuaac

SEQ ID NO: 195932 - RNA, 22 nt, Homo sapiens
aaucaaguuggcuucuaaucaa

SEQ ID NO: 195933 - RNA, 22 nt, Homo sapiens
gucucuuguaauccgaaucucu

SEQ ID NO: 195934 - RNA, 20 nt, Homo sapiens
gucuucagggggccaggugc

SEQ ID NO: 195935 - RNA, 22 nt, Homo sapiens
ugaaucacaguauacgcuccau

SEQ ID NO: 195936 - RNA, 15 nt, Homo sapiens
uccagagaguggcuc

SEQ ID NO: 195937 - RNA, 14 nt, Homo sapiens
auucucacuccuac

SEQ ID NO: 195938 - RNA, 23 nt, Homo sapiens
guaauucuaaaugaauguuuaca

SEQ ID NO: 195939 - RNA, 15 nt, Homo sapiens
uccccuuccacugag

SEQ ID NO: 195940 - RNA, 18 nt, Homo sapiens
ucccagcuacaccuuucu

SEQ ID NO: 195941 - RNA, 16 nt, Homo sapiens
uggggugggcacauug

SEQ ID NO: 195942 - RNA, 22 nt, Homo sapiens
aaauuguauuaucaacagcauu

SEQ ID NO: 195943 - RNA, 18 nt, Homo sapiens
uuuugcacacuuugccau

SEQ ID NO: 195944 - RNA, 13 nt, Homo sapiens
gccucaaggacuu

SEQ ID NO: 195945 - RNA, 22 nt, Homo sapiens
uaaugaaauaauguacaucugg

SEQ ID NO: 195946 - RNA, 18 nt, Homo sapiens
ucaauauccuuugccuca

SEQ ID NO: 195947 - RNA, 11 nt, Homo sapiens
acuagggccaa

SEQ ID NO: 195948 - RNA, 22 nt, Homo sapiens
accugaaauaaaauucauuagu

SEQ ID NO: 195949 - RNA, 18 nt, Homo sapiens
aaagccugccucuuccag

SEQ ID NO: 195950 - RNA, 16 nt, Homo sapiens
cauuaauauuugcuga

SEQ ID NO: 195951 - RNA, 16 nt, Homo sapiens
cacauucaauaagcau

SEQ ID NO: 195952 - RNA, 21 nt, Homo sapiens
cagagauaauucuagcuuuga

SEQ ID NO: 195953 - RNA, 14 nt, Homo sapiens
caaacuucaagggu

SEQ ID NO: 195954 - RNA, 20 nt, Homo sapiens
aauccuguccucagcuucuu

SEQ ID NO: 195955 - RNA, 22 nt, Homo sapiens
acaggcccuuccucuccacugc

SEQ ID NO: 195956 - RNA, 18 nt, Homo sapiens
cagacuccugugcaacuu

SEQ ID NO: 195957 - RNA, 18 nt, Homo sapiens
cagccaaacccugucuga

SEQ ID NO: 195958 - RNA, 22 nt, Homo sapiens
cuggguuuuguauucucugagc

SEQ ID NO: 195959 - RNA, 16 nt, Homo sapiens
ugaggaugcagaguca

SEQ ID NO: 195960 - RNA, 21 nt, Homo sapiens
gguaucauuuucugcauuuaa

SEQ ID NO: 195961 - RNA, 14 nt, Homo sapiens
acagccuggcacag

SEQ ID NO: 195962 - RNA, 19 nt, Homo sapiens
cugagguuugccagcauuu

SEQ ID NO: 195963 - RNA, 21 nt, Homo sapiens
caucaagaugagagaacugga

SEQ ID NO: 195964 - RNA, 15 nt, Homo sapiens
uucuguacucaaaug

SEQ ID NO: 195965 - RNA, 18 nt, Homo sapiens
guaagcaaagacuuuccu

SEQ ID NO: 195966 - RNA, 22 nt, Homo sapiens
agugauugauagaguguuauca

SEQ ID NO: 195967 - RNA, 17 nt, Homo sapiens
ucuuucccaauucacau

SEQ ID NO: 195968 - RNA, 18 nt, Homo sapiens
gaggccaggcagauccca

SEQ ID NO: 195969 - RNA, 14 nt, Homo sapiens
aucaucauucucau

SEQ ID NO: 195970 - RNA, 17 nt, Homo sapiens
ucauguaaacugugcac

SEQ ID NO: 195971 - RNA, 16 nt, Homo sapiens
caaaaucacacagcca

SEQ ID NO: 195972 - RNA, 12 nt, Homo sapiens
caagugaagguu

SEQ ID NO: 195973 - RNA, 20 nt, Homo sapiens
ggcagacacagggacuugaa

SEQ ID NO: 195974 - RNA, 13 nt, Homo sapiens
ucucauccaucau

SEQ ID NO: 195975 - RNA, 20 nt, Homo sapiens
acagagauaauucuagcuuu

SEQ ID NO: 195976 - RNA, 15 nt, Homo sapiens
cauauauuuguauga

SEQ ID NO: 195977 - RNA, 15 nt, Homo sapiens
cuggugacccaguca

SEQ ID NO: 195978 - RNA, 15 nt, Homo sapiens
gccuuaaccaugagg

SEQ ID NO: 195979 - RNA, 16 nt, Homo sapiens
aaauguacauuaauua

SEQ ID NO: 195980 - RNA, 20 nt, Homo sapiens
cugcggcacccuugcgcuuu

SEQ ID NO: 195981 - RNA, 18 nt, Homo sapiens
cgcagauguccuugaugc

SEQ ID NO: 195982 - RNA, 13 nt, Homo sapiens
uaauguuacauua

SEQ ID NO: 195983 - RNA, 14 nt, Homo sapiens
agaccacugauaaa

SEQ ID NO: 195984 - RNA, 20 nt, Homo sapiens
agucaugcguuuaaucacau

SEQ ID NO: 195985 - RNA, 17 nt, Homo sapiens
aaaagacaagacuucag

SEQ ID NO: 195986 - RNA, 14 nt, Homo sapiens
ugacaccuuucaua

SEQ ID NO: 195987 - RNA, 17 nt, Homo sapiens
acccuugaaaagacauc

SEQ ID NO: 195988 - RNA, 15 nt, Homo sapiens
auauuuucaccauuu

SEQ ID NO: 195989 - RNA, 19 nt, Homo sapiens
aguuugauuguuguuuaua

SEQ ID NO: 195990 - RNA, 13 nt, Homo sapiens
aucaucuccaguu

SEQ ID NO: 195991 - RNA, 16 nt, Homo sapiens
cauuugaaaucuauga

SEQ ID NO: 195992 - RNA, 21 nt, Homo sapiens
cauaugauugugcacauacuu

SEQ ID NO: 195993 - RNA, 11 nt, Homo sapiens
ugagcauuuag

SEQ ID NO: 195994 - RNA, 14 nt, Homo sapiens
ucugagcugugcag

SEQ ID NO: 195995 - RNA, 17 nt, Homo sapiens
aucccauucugcgucau

SEQ ID NO: 195996 - RNA, 17 nt, Homo sapiens
ggcccacuucaccguac

SEQ ID NO: 195997 - RNA, 20 nt, Homo sapiens
gaauguauugaacuuggaaa

SEQ ID NO: 195998 - RNA, 17 nt, Homo sapiens
cuguuggcaaggugaca

SEQ ID NO: 195999 - RNA, 17 nt, Homo sapiens
cuagguaggggcccacu

SEQ ID NO: 196000 - RNA, 18 nt, Homo sapiens
acugccauggaggcacac

SEQ ID NO: 196001 - RNA, 16 nt, Homo sapiens
ccagcuacaccuuucu

SEQ ID NO: 196002 - RNA, 18 nt, Homo sapiens
ucucgcuuuguugcccag

SEQ ID NO: 196003 - RNA, 22 nt, Homo sapiens
agcuuucauguaaacugugcac

SEQ ID NO: 196004 - RNA, 21 nt, Homo sapiens
uuuaucuauggcacccaugca

SEQ ID NO: 196005 - RNA, 18 nt, Homo sapiens
acuucaguauguugucaa

SEQ ID NO: 196006 - RNA, 12 nt, Homo sapiens
auaaucuuugcu

SEQ ID NO: 196007 - RNA, 17 nt, Homo sapiens
aaggugagcaaagggcu

SEQ ID NO: 196008 - RNA, 23 nt, Homo sapiens
cuucagcucacacaugagaucua

SEQ ID NO: 196009 - RNA, 21 nt, Homo sapiens
aaucuguuaccagaggacaaa

SEQ ID NO: 196010 - RNA, 22 nt, Homo sapiens
ucaaaggugauugugccaggcu

SEQ ID NO: 196011 - RNA, 16 nt, Homo sapiens
ccaggcuggucucaaa

SEQ ID NO: 196012 - RNA, 20 nt, Homo sapiens
cuugagccaguaauuggucc

SEQ ID NO: 196013 - RNA, 14 nt, Homo sapiens
ccccaauccaugaa

SEQ ID NO: 196014 - RNA, 14 nt, Homo sapiens
gccugcggaccaga

SEQ ID NO: 196015 - RNA, 19 nt, Homo sapiens
cuaauacagacuaugucac

SEQ ID NO: 196016 - RNA, 22 nt, Homo sapiens
cuacacauucaauaagcaucaa

SEQ ID NO: 196017 - RNA, 22 nt, Homo sapiens
caaagcuuucauguaaacugug

SEQ ID NO: 196018 - RNA, 15 nt, Homo sapiens
cuaaagcaauaugca

SEQ ID NO: 196019 - RNA, 12 nt, Homo sapiens
guauuagucaca

SEQ ID NO: 196020 - RNA, 20 nt, Homo sapiens
uucucauuucuguagccuga

SEQ ID NO: 196021 - RNA, 23 nt, Homo sapiens
ggcagugacagaacuaagaugau

SEQ ID NO: 196022 - RNA, 17 nt, Homo sapiens
augucguuugaaucaca

SEQ ID NO: 196023 - RNA, 18 nt, Homo sapiens
uuaguauuugcauauucu

SEQ ID NO: 196024 - RNA, 16 nt, Homo sapiens
guaaucccagcacuuu

SEQ ID NO: 196025 - RNA, 21 nt, Homo sapiens
uacuucagcucacacaugaga

SEQ ID NO: 196026 - RNA, 19 nt, Homo sapiens
aggugcuaucgcaccacug

SEQ ID NO: 196027 - RNA, 19 nt, Homo sapiens
aggcauaagaaaacuaaga

SEQ ID NO: 196028 - RNA, 17 nt, Homo sapiens
acugcucaucauuccuu

SEQ ID NO: 196029 - RNA, 23 nt, Homo sapiens
cuucagggggccaggugcacaga

SEQ ID NO: 196030 - RNA, 15 nt, Homo sapiens
accugggcaaagccu

SEQ ID NO: 196031 - RNA, 15 nt, Homo sapiens
uaugauugugcacau

SEQ ID NO: 196032 - RNA, 15 nt, Homo sapiens
auagcaagaucccau

SEQ ID NO: 196033 - RNA, 15 nt, Homo sapiens
aagauucauccauuu

SEQ ID NO: 196034 - RNA, 13 nt, Homo sapiens
acaauuuaccagc

SEQ ID NO: 196035 - RNA, 19 nt, Homo sapiens
agauguccuugaugcucau

SEQ ID NO: 196036 - RNA, 21 nt, Homo sapiens
ugcauauccaacaugugcuca

SEQ ID NO: 196037 - RNA, 14 nt, Homo sapiens
aauuagaugaacuc

SEQ ID NO: 196038 - RNA, 23 nt, Homo sapiens
aaccucagugauuggcucugugg

SEQ ID NO: 196039 - RNA, 17 nt, Homo sapiens
cagaaucuguuaccaga

SEQ ID NO: 196040 - RNA, 14 nt, Homo sapiens
cucugaaaccagug

SEQ ID NO: 196041 - RNA, 14 nt, Homo sapiens
acauacuucagcuc

SEQ ID NO: 196042 - RNA, 11 nt, Homo sapiens
ggaagggucaa

SEQ ID NO: 196043 - RNA, 13 nt, Homo sapiens
aagcacaucugca

SEQ ID NO: 196044 - RNA, 19 nt, Homo sapiens
uucuuaauauaacugccuu

SEQ ID NO: 196045 - RNA, 19 nt, Homo sapiens
cuuuaaagccugccucuuc

SEQ ID NO: 196046 - RNA, 22 nt, Homo sapiens
agcaguuugcuuuguaugcacu

SEQ ID NO: 196047 - RNA, 19 nt, Homo sapiens
caguccugccucagccucc

SEQ ID NO: 196048 - RNA, 17 nt, Homo sapiens
gaguugucaagucucug

SEQ ID NO: 196049 - RNA, 22 nt, Homo sapiens
gucaaaguaaaacuugcugccu

SEQ ID NO: 196050 - RNA, 19 nt, Homo sapiens
cagauacugucucuuucau

SEQ ID NO: 196051 - RNA, 12 nt, Homo sapiens
auuuauauaugu

SEQ ID NO: 196052 - RNA, 20 nt, Homo sapiens
cagcugaccuuugucaucuu

SEQ ID NO: 196053 - RNA, 15 nt, Homo sapiens
ccuuuguacuuugug

SEQ ID NO: 196054 - RNA, 14 nt, Homo sapiens
aagcaaaaucauuu

SEQ ID NO: 196055 - RNA, 18 nt, Homo sapiens
uuuauauuuuuauagaca

SEQ ID NO: 196056 - RNA, 15 nt, Homo sapiens
auguauaugcaauau

SEQ ID NO: 196057 - RNA, 13 nt, Homo sapiens
auaucaugcucca

SEQ ID NO: 196058 - RNA, 18 nt, Homo sapiens
ccucuccccacugcucau

SEQ ID NO: 196059 - RNA, 13 nt, Homo sapiens
caaauguauuuca

SEQ ID NO: 196060 - RNA, 21 nt, Homo sapiens
gaaguaagcaaagacuuuccu

SEQ ID NO: 196061 - RNA, 19 nt, Homo sapiens
gccacacggcucucaccag

SEQ ID NO: 196062 - RNA, 14 nt, Homo sapiens
ccccuggcuuuuca

SEQ ID NO: 196063 - RNA, 20 nt, Homo sapiens
uagucaagugcguccacgag

SEQ ID NO: 196064 - RNA, 21 nt, Homo sapiens
gcaaaacucuacuuaauccaa

SEQ ID NO: 196065 - RNA, 17 nt, Homo sapiens
caaaaauugucccuuaa

SEQ ID NO: 196066 - RNA, 19 nt, Homo sapiens
ucacgaaguuuguucauca

SEQ ID NO: 196067 - RNA, 19 nt, Homo sapiens
uauguaccauguacaugaa

SEQ ID NO: 196068 - RNA, 18 nt, Homo sapiens
ugggccaagucaaagaca

SEQ ID NO: 196069 - RNA, 22 nt, Homo sapiens
uugcaaccucgcuggacucuca

SEQ ID NO: 196070 - RNA, 18 nt, Homo sapiens
auguugggaaacuuggcu

SEQ ID NO: 196071 - RNA, 19 nt, Homo sapiens
aauaugcacaauagcaguu

SEQ ID NO: 196072 - RNA, 14 nt, Homo sapiens
aucuuaaaugccag

SEQ ID NO: 196073 - RNA, 13 nt, Homo sapiens
aacaugugcucag

SEQ ID NO: 196074 - RNA, 17 nt, Homo sapiens
ucacaugucaguaccuu

SEQ ID NO: 196075 - RNA, 18 nt, Homo sapiens
uuaaacuuaccugggcau

SEQ ID NO: 196076 - RNA, 14 nt, Homo sapiens
cagacuucccugaa

SEQ ID NO: 196077 - RNA, 13 nt, Homo sapiens
accaaugucuuga

SEQ ID NO: 196078 - RNA, 20 nt, Homo sapiens
gucagcaggaagcaacgaag

SEQ ID NO: 196079 - RNA, 13 nt, Homo sapiens
uguugaacaauag

SEQ ID NO: 196080 - RNA, 22 nt, Homo sapiens
aagacucuacccauauuacaga

SEQ ID NO: 196081 - RNA, 15 nt, Homo sapiens
aucaggacccagagg

SEQ ID NO: 196082 - RNA, 18 nt, Homo sapiens
guacaaggcaacauauag

SEQ ID NO: 196083 - RNA, 18 nt, Homo sapiens
caggcccuuccucuccac

SEQ ID NO: 196084 - RNA, 13 nt, Homo sapiens
auuagaugaacuc

SEQ ID NO: 196085 - RNA, 20 nt, Homo sapiens
cugaagaacaguaacugcca

SEQ ID NO: 196086 - RNA, 21 nt, Homo sapiens
aauguuauuuuuuaauuauua

SEQ ID NO: 196087 - RNA, 12 nt, Homo sapiens
aguguugcccag

SEQ ID NO: 196088 - RNA, 22 nt, Homo sapiens
uaauauauguauaugcaauaua

SEQ ID NO: 196089 - RNA, 13 nt, Homo sapiens
gaugcaagcaaga

SEQ ID NO: 196090 - RNA, 21 nt, Homo sapiens
auuuccugacagaaggacuca

SEQ ID NO: 196091 - RNA, 19 nt, Homo sapiens
ugaaaaugguccaggagaa

SEQ ID NO: 196092 - RNA, 21 nt, Homo sapiens
cuguauucccaguuacuuggg

SEQ ID NO: 196093 - RNA, 15 nt, Homo sapiens
uugacucuccagaaa

SEQ ID NO: 196094 - RNA, 22 nt, Homo sapiens
cuacagagcuucccugacucau

SEQ ID NO: 196095 - RNA, 16 nt, Homo sapiens
cauccaucaucaugug

SEQ ID NO: 196096 - RNA, 17 nt, Homo sapiens
uuuacaauguucauccc

SEQ ID NO: 196097 - RNA, 19 nt, Homo sapiens
guccuccacgccauuuccu

SEQ ID NO: 196098 - RNA, 23 nt, Homo sapiens
acuacacauucaauaagcaucaa

SEQ ID NO: 196099 - RNA, 18 nt, Homo sapiens
agacaugagcauggcuga

SEQ ID NO: 196100 - RNA, 21 nt, Homo sapiens
cuugaaaagacaucaagcaca

SEQ ID NO: 196101 - RNA, 14 nt, Homo sapiens
aacccuugcuugca

SEQ ID NO: 196102 - RNA, 13 nt, Homo sapiens
uacaauugugagc

SEQ ID NO: 196103 - RNA, 18 nt, Homo sapiens
ggcaauauagcaagaucc

SEQ ID NO: 196104 - RNA, 16 nt, Homo sapiens
uuugaaucacaguaua

SEQ ID NO: 196105 - RNA, 23 nt, Homo sapiens
ugcugcugagugcaccacuucaa

SEQ ID NO: 196106 - RNA, 23 nt, Homo sapiens
aguuuauagaccagaaccagagc

SEQ ID NO: 196107 - RNA, 14 nt, Homo sapiens
gccucuguggcacu

SEQ ID NO: 196108 - RNA, 15 nt, Homo sapiens
aacaguaacugccau

SEQ ID NO: 196109 - RNA, 17 nt, Homo sapiens
ccuagcccuucucucau

SEQ ID NO: 196110 - RNA, 14 nt, Homo sapiens
cuucuccacuggau

SEQ ID NO: 196111 - RNA, 20 nt, Homo sapiens
uuguguuuuguuuuguauca

SEQ ID NO: 196112 - RNA, 18 nt, Homo sapiens
aagcauugagcaaagggg

SEQ ID NO: 196113 - RNA, 16 nt, Homo sapiens
cauaugauugugcaca

SEQ ID NO: 196114 - RNA, 20 nt, Homo sapiens
augcaucaaguuauugacaa

SEQ ID NO: 196115 - RNA, 19 nt, Homo sapiens
uuacaguuuaucuauggca

SEQ ID NO: 196116 - RNA, 18 nt, Homo sapiens
uaaaauuaugccauagca

SEQ ID NO: 196117 - RNA, 18 nt, Homo sapiens
uccagggucccucugugu

SEQ ID NO: 196118 - RNA, 17 nt, Homo sapiens
cccuaaaucuugacuac

SEQ ID NO: 196119 - RNA, 18 nt, Homo sapiens
aucugcauuuucacccca

SEQ ID NO: 196120 - RNA, 23 nt, Homo sapiens
uucugacuugacuuuagucugca

SEQ ID NO: 196121 - RNA, 14 nt, Homo sapiens
cuguauuagucaca

SEQ ID NO: 196122 - RNA, 15 nt, Homo sapiens
agaaugugacaggca

SEQ ID NO: 196123 - RNA, 17 nt, Homo sapiens
ucagcuucuuaauauaa

SEQ ID NO: 196124 - RNA, 16 nt, Homo sapiens
uucacagaugugugau

SEQ ID NO: 196125 - RNA, 14 nt, Homo sapiens
ggaccucaguuuua

SEQ ID NO: 196126 - RNA, 15 nt, Homo sapiens
aagcagaccacugau

SEQ ID NO: 196127 - RNA, 11 nt, Homo sapiens
ccacagacuca

SEQ ID NO: 196128 - RNA, 23 nt, Homo sapiens
guuuuuuuuuuccacuuagaaau

SEQ ID NO: 196129 - RNA, 14 nt, Homo sapiens
uguaccugugcacg

SEQ ID NO: 196130 - RNA, 19 nt, Homo sapiens
cauuguucagaugcuucuu

SEQ ID NO: 196131 - RNA, 16 nt, Homo sapiens
cgaauagccacugcau

SEQ ID NO: 196132 - RNA, 15 nt, Homo sapiens
uauagacaaauaaua

SEQ ID NO: 196133 - RNA, 13 nt, Homo sapiens
uugaaaucuauga

SEQ ID NO: 196134 - RNA, 14 nt, Homo sapiens
caggaacuugcaca

SEQ ID NO: 196135 - RNA, 14 nt, Homo sapiens
aaaguagacuucau

SEQ ID NO: 196136 - RNA, 18 nt, Homo sapiens
aaggcccauaucugugaa

SEQ ID NO: 196137 - RNA, 20 nt, Homo sapiens
gcagcuuagacuaaggccau

SEQ ID NO: 196138 - RNA, 14 nt, Homo sapiens
uauuugcauaacaa

SEQ ID NO: 196139 - RNA, 14 nt, Homo sapiens
ggagaacuagagaa

SEQ ID NO: 196140 - RNA, 13 nt, Homo sapiens
cuauguugauaaa

SEQ ID NO: 196141 - RNA, 20 nt, Homo sapiens
cacaauagcaguugaaacaa

SEQ ID NO: 196142 - RNA, 14 nt, Homo sapiens
uaucugaggucaca

SEQ ID NO: 196143 - RNA, 20 nt, Homo sapiens
ccuuauuagagugucuuucc

SEQ ID NO: 196144 - RNA, 14 nt, Homo sapiens
cccugggaccacag

SEQ ID NO: 196145 - RNA, 13 nt, Homo sapiens
acuguacuccucc

SEQ ID NO: 196146 - RNA, 14 nt, Homo sapiens
agcagggaugaagg

SEQ ID NO: 196147 - RNA, 22 nt, Homo sapiens
cacugggcuucuagaaccaggc

SEQ ID NO: 196148 - RNA, 15 nt, Homo sapiens
ucgaacaauucauau

SEQ ID NO: 196149 - RNA, 14 nt, Homo sapiens
gaaagaagugggga

SEQ ID NO: 196150 - RNA, 13 nt, Homo sapiens
gucccuuggagac

SEQ ID NO: 196151 - RNA, 18 nt, Homo sapiens
gguaauuaguaacaugug

SEQ ID NO: 196152 - RNA, 14 nt, Homo sapiens
acaguaacugccau

SEQ ID NO: 196153 - RNA, 22 nt, Homo sapiens
caggacacagggaaaucagggu

SEQ ID NO: 196154 - RNA, 13 nt, Homo sapiens
caaaugcaauuuu

SEQ ID NO: 196155 - RNA, 15 nt, Homo sapiens
cuccccacugcucau

SEQ ID NO: 196156 - RNA, 13 nt, Homo sapiens
aaaauacaugaca

SEQ ID NO: 196157 - RNA, 18 nt, Homo sapiens
ugauccuaaugaaugcau

SEQ ID NO: 196158 - RNA, 14 nt, Homo sapiens
cucccuuacccucc

SEQ ID NO: 196159 - RNA, 21 nt, Homo sapiens
gguauaaugguugacuggguu

SEQ ID NO: 196160 - RNA, 16 nt, Homo sapiens
gaacaguaacugccau

SEQ ID NO: 196161 - RNA, 15 nt, Homo sapiens
uugggcccuuugagu

SEQ ID NO: 196162 - RNA, 15 nt, Homo sapiens
ggcuaaaaccaucau

SEQ ID NO: 196163 - RNA, 17 nt, Homo sapiens
caugcccuguaccugug

SEQ ID NO: 196164 - RNA, 13 nt, Homo sapiens
aauguauugaacu

SEQ ID NO: 196165 - RNA, 16 nt, Homo sapiens
aguugcugaugaacuc

SEQ ID NO: 196166 - RNA, 19 nt, Homo sapiens
aauuaaaauccucaaucca

SEQ ID NO: 196167 - RNA, 13 nt, Homo sapiens
gaagugugugauc

SEQ ID NO: 196168 - RNA, 21 nt, Homo sapiens
auugugccuacgaauagccac

SEQ ID NO: 196169 - RNA, 16 nt, Homo sapiens
caaagacaaaggugag

SEQ ID NO: 196170 - RNA, 17 nt, Homo sapiens
cuaaucagcauucucac

SEQ ID NO: 196171 - RNA, 20 nt, Homo sapiens
auggcaaaggaagguggaug

SEQ ID NO: 196172 - RNA, 14 nt, Homo sapiens
gcccauaucuguga

SEQ ID NO: 196173 - RNA, 17 nt, Homo sapiens
uggccuugaaaccaccu

SEQ ID NO: 196174 - RNA, 20 nt, Homo sapiens
aaaauauagcuguacaaaua

SEQ ID NO: 196175 - RNA, 13 nt, Homo sapiens
uuuaucugugcaa

SEQ ID NO: 196176 - RNA, 18 nt, Homo sapiens
agaacccuuggagccaau

SEQ ID NO: 196177 - RNA, 22 nt, Homo sapiens
aucucucccuccccugccauuu

SEQ ID NO: 196178 - RNA, 23 nt, Homo sapiens
cuauauaguuuauugacaauaau

SEQ ID NO: 196179 - RNA, 15 nt, Homo sapiens
acguggggcagcaca

SEQ ID NO: 196180 - RNA, 19 nt, Homo sapiens
acuauggcucuacuuucag

SEQ ID NO: 196181 - RNA, 22 nt, Homo sapiens
agaucacuucaggucaggaguu

SEQ ID NO: 196182 - RNA, 19 nt, Homo sapiens
aguguuuggguauauucau

SEQ ID NO: 196183 - RNA, 21 nt, Homo sapiens
ucagugcucccucacauguca

SEQ ID NO: 196184 - RNA, 14 nt, Homo sapiens
cgagucucuucucc

SEQ ID NO: 196185 - RNA, 17 nt, Homo sapiens
gaccccccuauugcugc

SEQ ID NO: 196186 - RNA, 14 nt, Homo sapiens
guguuaaaugugau

SEQ ID NO: 196187 - RNA, 17 nt, Homo sapiens
aguaagcaaagacuuuc

SEQ ID NO: 196188 - RNA, 18 nt, Homo sapiens
cuuagaaauugcauuucc

SEQ ID NO: 196189 - RNA, 22 nt, Homo sapiens
ugguauaaacguccuacuguau

SEQ ID NO: 196190 - RNA, 21 nt, Homo sapiens
cuuucauccacuagugcaaau

SEQ ID NO: 196191 - RNA, 11 nt, Homo sapiens
cuucuugccuc

SEQ ID NO: 196192 - RNA, 15 nt, Homo sapiens
cacugcaagcacugc

SEQ ID NO: 196193 - RNA, 17 nt, Homo sapiens
agaaagcucaucucagc

SEQ ID NO: 196194 - RNA, 12 nt, Homo sapiens
caaccucaguga

SEQ ID NO: 196195 - RNA, 15 nt, Homo sapiens
acaaucuguauauaa

SEQ ID NO: 196196 - RNA, 17 nt, Homo sapiens
agcauuuagacccugca

SEQ ID NO: 196197 - RNA, 21 nt, Homo sapiens
gccugagguuugccagcauuu

SEQ ID NO: 196198 - RNA, 12 nt, Homo sapiens
uuaaauaguaaa

SEQ ID NO: 196199 - RNA, 11 nt, Homo sapiens
uuccuugagaa

SEQ ID NO: 196200 - RNA, 16 nt, Homo sapiens
cucugggccaagucaa

SEQ ID NO: 196201 - RNA, 13 nt, Homo sapiens
uaggaaguaggaa

SEQ ID NO: 196202 - RNA, 22 nt, Homo sapiens
uguucuaagucuuuccauugga

SEQ ID NO: 196203 - RNA, 23 nt, Homo sapiens
ugagaggagagagacuccagcug

SEQ ID NO: 196204 - RNA, 16 nt, Homo sapiens
cauuugcaccuaccuc

SEQ ID NO: 196205 - RNA, 20 nt, Homo sapiens
uauacuucucuauuaucuca

SEQ ID NO: 196206 - RNA, 14 nt, Homo sapiens
uucacucaaucucu

SEQ ID NO: 196207 - RNA, 18 nt, Homo sapiens
aaaauacaugacauuuau

SEQ ID NO: 196208 - RNA, 13 nt, Homo sapiens
uugggaagacaug

SEQ ID NO: 196209 - RNA, 15 nt, Homo sapiens
ugaaaugcuggcauu

SEQ ID NO: 196210 - RNA, 20 nt, Homo sapiens
uggguuuugggucuuugaac

SEQ ID NO: 196211 - RNA, 19 nt, Homo sapiens
uaauccucuuuuucuaguc

SEQ ID NO: 196212 - RNA, 15 nt, Homo sapiens
uguaccugugcacgu

SEQ ID NO: 196213 - RNA, 20 nt, Homo sapiens
cccuggggagucugggcaca

SEQ ID NO: 196214 - RNA, 23 nt, Homo sapiens
cccauaucugugaaaugcuggca

SEQ ID NO: 196215 - RNA, 16 nt, Homo sapiens
aaugcuggcauuugca

SEQ ID NO: 196216 - RNA, 17 nt, Homo sapiens
cagccuggccaacaugg

SEQ ID NO: 196217 - RNA, 20 nt, Homo sapiens
acggagccacuccucugacu

SEQ ID NO: 196218 - RNA, 15 nt, Homo sapiens
caaaaucacacagcc

SEQ ID NO: 196219 - RNA, 21 nt, Homo sapiens
caucuuucuucuauuuuauuc

SEQ ID NO: 196220 - RNA, 14 nt, Homo sapiens
aggaccaagcaucu

SEQ ID NO: 196221 - RNA, 23 nt, Homo sapiens
uuuaaauacagucuuccauuugc

SEQ ID NO: 196222 - RNA, 15 nt, Homo sapiens
aacaaauguauuuca

SEQ ID NO: 196223 - RNA, 22 nt, Homo sapiens
cugggcccucucugcucugcgu

SEQ ID NO: 196224 - RNA, 15 nt, Homo sapiens
auccccucucuuccu

SEQ ID NO: 196225 - RNA, 23 nt, Homo sapiens
caggaguuggaagugugugaucu

SEQ ID NO: 196226 - RNA, 14 nt, Homo sapiens
aaauuguauuauca

SEQ ID NO: 196227 - RNA, 17 nt, Homo sapiens
aguacuggcaugguacg

SEQ ID NO: 196228 - RNA, 17 nt, Homo sapiens
gugaaccuuaguaccua

SEQ ID NO: 196229 - RNA, 23 nt, Homo sapiens
ugcugagugcaccacuucaagug

SEQ ID NO: 196230 - RNA, 17 nt, Homo sapiens
ucuuuuaagcccaucaa

SEQ ID NO: 196231 - RNA, 19 nt, Homo sapiens
gucucaagagggcacuggu

SEQ ID NO: 196232 - RNA, 22 nt, Homo sapiens
aacaugguaaacgcugucccua

SEQ ID NO: 196233 - RNA, 13 nt, Homo sapiens
cucaccuccuaaa

SEQ ID NO: 196234 - RNA, 19 nt, Homo sapiens
auauauauuuuugugcaca

SEQ ID NO: 196235 - RNA, 21 nt, Homo sapiens
gagcacuggguugacuuucag

SEQ ID NO: 196236 - RNA, 18 nt, Homo sapiens
uaguuacucauucaggga

SEQ ID NO: 196237 - RNA, 19 nt, Homo sapiens
gucuauuugagacuuagaa

SEQ ID NO: 196238 - RNA, 19 nt, Homo sapiens
ugcuccuugggcccuuuga

SEQ ID NO: 196239 - RNA, 24 nt, Homo sapiens
acagacuaugucacccaaugcaua

SEQ ID NO: 196240 - RNA, 17 nt, Homo sapiens
auaguggggucagggcu

SEQ ID NO: 196241 - RNA, 13 nt, Homo sapiens
augagaacaugaa

SEQ ID NO: 196242 - RNA, 17 nt, Homo sapiens
caggaggugcuaucgca

SEQ ID NO: 196243 - RNA, 22 nt, Homo sapiens
caugauuucauuucaacuguuu

SEQ ID NO: 196244 - RNA, 15 nt, Homo sapiens
cuguuaccagaggac

SEQ ID NO: 196245 - RNA, 13 nt, Homo sapiens
cucacaccuguaa

SEQ ID NO: 196246 - RNA, 23 nt, Homo sapiens
acccagucagaguugugcacaug

SEQ ID NO: 196247 - RNA, 16 nt, Homo sapiens
uucagugcuucgcaga

SEQ ID NO: 196248 - RNA, 20 nt, Homo sapiens
gccuggcagccgugccuuca

SEQ ID NO: 196249 - RNA, 17 nt, Homo sapiens
augugaaaguuacaaau

SEQ ID NO: 196250 - RNA, 13 nt, Homo sapiens
acuucaaggguuu

SEQ ID NO: 196251 - RNA, 18 nt, Homo sapiens
ugaaaugcuggcauuugc

SEQ ID NO: 196252 - RNA, 22 nt, Homo sapiens
ugggaaggguccaucucagaga

SEQ ID NO: 196253 - RNA, 21 nt, Homo sapiens
caauuuccggccaacaguuaa

SEQ ID NO: 196254 - RNA, 15 nt, Homo sapiens
ccagugaccagucac

SEQ ID NO: 196255 - RNA, 14 nt, Homo sapiens
uaauuuaaugcaug

SEQ ID NO: 196256 - RNA, 17 nt, Homo sapiens
agcccucaggucagggu

SEQ ID NO: 196257 - RNA, 21 nt, Homo sapiens
uguaugauccuaaugaaugca

SEQ ID NO: 196258 - RNA, 16 nt, Homo sapiens
ucacaguguugcccag

SEQ ID NO: 196259 - RNA, 14 nt, Homo sapiens
ucaugaucaucaca

SEQ ID NO: 196260 - RNA, 21 nt, Homo sapiens
gagaauuuacgagcagggaug

SEQ ID NO: 196261 - RNA, 23 nt, Homo sapiens
ggucaggaaggaugagcauuuag

SEQ ID NO: 196262 - RNA, 18 nt, Homo sapiens
cuguucugucucauauga

SEQ ID NO: 196263 - RNA, 19 nt, Homo sapiens
gccuggcaagugggugaaa

SEQ ID NO: 196264 - RNA, 21 nt, Homo sapiens
uggugagaacuacucagggaa

SEQ ID NO: 196265 - RNA, 16 nt, Homo sapiens
acaacuaugauuugga

SEQ ID NO: 196266 - RNA, 14 nt, Homo sapiens
aagaagauggauug

SEQ ID NO: 196267 - RNA, 20 nt, Homo sapiens
guauuaaaaaaaacaaaaag

SEQ ID NO: 196268 - RNA, 15 nt, Homo sapiens
uacuuugugcuugua

SEQ ID NO: 196269 - RNA, 14 nt, Homo sapiens
gguuuaggucaaga

SEQ ID NO: 196270 - RNA, 22 nt, Homo sapiens
cuugccccuguuaccuaauuag

SEQ ID NO: 196271 - RNA, 11 nt, Homo sapiens
uccacuuagaa

SEQ ID NO: 196272 - RNA, 20 nt, Homo sapiens
aaaugccacacggcucucac

SEQ ID NO: 196273 - RNA, 15 nt, Homo sapiens
agaccacuguuauca

SEQ ID NO: 196274 - RNA, 24 nt, Homo sapiens
uauauguuuugugggaacagaugu

SEQ ID NO: 196275 - RNA, 18 nt, Homo sapiens
agaaccagagcucagaga

SEQ ID NO: 196276 - RNA, 19 nt, Homo sapiens
aaucauuuuauaugucaaa

SEQ ID NO: 196277 - RNA, 14 nt, Homo sapiens
ugcuggcugccuua

SEQ ID NO: 196278 - RNA, 16 nt, Homo sapiens
augcagcaucuaagua

SEQ ID NO: 196279 - RNA, 20 nt, Homo sapiens
accccugcuccccugagcug

SEQ ID NO: 196280 - RNA, 14 nt, Homo sapiens
uuuaucugugcaaa

SEQ ID NO: 196281 - RNA, 19 nt, Homo sapiens
aaguauugcaucuguauaa

SEQ ID NO: 196282 - RNA, 21 nt, Homo sapiens
guacuaauacagacuauguca

SEQ ID NO: 196283 - RNA, 20 nt, Homo sapiens
cagucagaguugugcacaug

SEQ ID NO: 196284 - RNA, 22 nt, Homo sapiens
acagagggcaggaacuugcaca

SEQ ID NO: 196285 - RNA, 21 nt, Homo sapiens
gaguuugggaacugcaauaac

SEQ ID NO: 196286 - RNA, 15 nt, Homo sapiens
caggaacuugcacaa

SEQ ID NO: 196287 - RNA, 16 nt, Homo sapiens
ugaaauaucaugcucc

SEQ ID NO: 196288 - RNA, 16 nt, Homo sapiens
ugcuucgcagaugucc

SEQ ID NO: 196289 - RNA, 17 nt, Homo sapiens
gauauguucaacuggag

SEQ ID NO: 196290 - RNA, 17 nt, Homo sapiens
ggauggaugcagaucca

SEQ ID NO: 196291 - RNA, 18 nt, Homo sapiens
cagggucccucuguguau

SEQ ID NO: 196292 - RNA, 17 nt, Homo sapiens
uguguauuuaacugccu

SEQ ID NO: 196293 - RNA, 13 nt, Homo sapiens
ggagaacuagaga

SEQ ID NO: 196294 - RNA, 15 nt, Homo sapiens
aaguucugacuugac

SEQ ID NO: 196295 - RNA, 13 nt, Homo sapiens
acuucaagugacc

SEQ ID NO: 196296 - RNA, 17 nt, Homo sapiens
auaaauguacauuaauu

SEQ ID NO: 196297 - RNA, 16 nt, Homo sapiens
cuauggcacccaugca

SEQ ID NO: 196298 - RNA, 16 nt, Homo sapiens
aacuauguaacaugua

SEQ ID NO: 196299 - RNA, 15 nt, Homo sapiens
aacugggguggauuu

SEQ ID NO: 196300 - RNA, 15 nt, Homo sapiens
accaacccucagagc

SEQ ID NO: 196301 - RNA, 18 nt, Homo sapiens
aaggguucaccaggucag

SEQ ID NO: 196302 - RNA, 12 nt, Homo sapiens
auagaaagccaa

SEQ ID NO: 196303 - RNA, 17 nt, Homo sapiens
aucauucucugucucau

SEQ ID NO: 196304 - RNA, 15 nt, Homo sapiens
ugauucacaguguga

SEQ ID NO: 196305 - RNA, 16 nt, Homo sapiens
ugggcaauauagcaag

SEQ ID NO: 196306 - RNA, 13 nt, Homo sapiens
cggugagcauugu

SEQ ID NO: 196307 - RNA, 16 nt, Homo sapiens
ugggugggaccacaga

SEQ ID NO: 196308 - RNA, 23 nt, Homo sapiens
ccaucccagcugaaauacugagg

SEQ ID NO: 196309 - RNA, 14 nt, Homo sapiens
ucucugagcaguga

SEQ ID NO: 196310 - RNA, 23 nt, Homo sapiens
accuuacauuugaaaucuaugaa

SEQ ID NO: 196311 - RNA, 12 nt, Homo sapiens
agcaaagacuuu

SEQ ID NO: 196312 - RNA, 15 nt, Homo sapiens
uugacaauaauuuca

SEQ ID NO: 196313 - RNA, 16 nt, Homo sapiens
aacuuuuauuacuggg

SEQ ID NO: 196314 - RNA, 21 nt, Homo sapiens
aagccucagagaauugcugau

SEQ ID NO: 196315 - RNA, 20 nt, Homo sapiens
cuccauuguucagaugcuuc

SEQ ID NO: 196316 - RNA, 20 nt, Homo sapiens
cuaagcucaaggcgugagga

SEQ ID NO: 196317 - RNA, 20 nt, Homo sapiens
acauccugaccuugcacaaa

SEQ ID NO: 196318 - RNA, 14 nt, Homo sapiens
guuuagugaucuga

SEQ ID NO: 196319 - RNA, 19 nt, Homo sapiens
acaccguccuccacgccau

SEQ ID NO: 196320 - RNA, 17 nt, Homo sapiens
gagcaguccugccucag

SEQ ID NO: 196321 - RNA, 19 nt, Homo sapiens
gcaaaaagcaaaaucauuu

SEQ ID NO: 196322 - RNA, 20 nt, Homo sapiens
agauaacaaucuguauauaa

SEQ ID NO: 196323 - RNA, 19 nt, Homo sapiens
uggaucuccauucucucag

SEQ ID NO: 196324 - RNA, 12 nt, Homo sapiens
uuucaauugcau

SEQ ID NO: 196325 - RNA, 12 nt, Homo sapiens
ugucucauauga

SEQ ID NO: 196326 - RNA, 22 nt, Homo sapiens
aggugcccaggaaccucagggc

SEQ ID NO: 196327 - RNA, 22 nt, Homo sapiens
uuuggguucacagaagcacagc

SEQ ID NO: 196328 - RNA, 22 nt, Homo sapiens
accauucugacucgguuucucc

SEQ ID NO: 196329 - RNA, 15 nt, Homo sapiens
caacucuuugagaaa

SEQ ID NO: 196330 - RNA, 17 nt, Homo sapiens
uacugggacugugcuca

SEQ ID NO: 196331 - RNA, 18 nt, Homo sapiens
caggggaguguucagggc

SEQ ID NO: 196332 - RNA, 17 nt, Homo sapiens
gugggaccacagacuca

SEQ ID NO: 196333 - RNA, 21 nt, Homo sapiens
cucugagguuuccgaaaucag

SEQ ID NO: 196334 - RNA, 18 nt, Homo sapiens
uaaguaaguuugauuuca

SEQ ID NO: 196335 - RNA, 13 nt, Homo sapiens
ucuucuccacugg

SEQ ID NO: 196336 - RNA, 13 nt, Homo sapiens
cuugaucuguaua

SEQ ID NO: 196337 - RNA, 22 nt, Homo sapiens
caaacucuuaguuacucauuca

SEQ ID NO: 196338 - RNA, 16 nt, Homo sapiens
agcaaaaagcaaaauc

SEQ ID NO: 196339 - RNA, 14 nt, Homo sapiens
augauugugcacau

SEQ ID NO: 196340 - RNA, 17 nt, Homo sapiens
ugcagccuuugccuccc

SEQ ID NO: 196341 - RNA, 15 nt, Homo sapiens
ucggcugaccaugcu

SEQ ID NO: 196342 - RNA, 23 nt, Homo sapiens
augccauagcaagauugcuuaaa

SEQ ID NO: 196343 - RNA, 14 nt, Homo sapiens
aaaucguccaggga

SEQ ID NO: 196344 - RNA, 13 nt, Homo sapiens
ucugaugcaagca

SEQ ID NO: 196345 - RNA, 13 nt, Homo sapiens
cccgacagccugg

SEQ ID NO: 196346 - RNA, 22 nt, Homo sapiens
ccuaaaucaaguuggcuucuaa

SEQ ID NO: 196347 - RNA, 19 nt, Homo sapiens
auauccuuugccucaagga

SEQ ID NO: 196348 - RNA, 21 nt, Homo sapiens
cagcauuuagacccugcauuu

SEQ ID NO: 196349 - RNA, 22 nt, Homo sapiens
ucccuguacaguagauuuucca

SEQ ID NO: 196350 - RNA, 19 nt, Homo sapiens
uccacuucuuguuccccac

SEQ ID NO: 196351 - RNA, 17 nt, Homo sapiens
auggccucauguggcug

SEQ ID NO: 196352 - RNA, 15 nt, Homo sapiens
uacguuaccaggcag

SEQ ID NO: 196353 - RNA, 22 nt, Homo sapiens
uuggguucacagaagcacagca

SEQ ID NO: 196354 - RNA, 17 nt, Homo sapiens
uuauaaaagaugcauua

SEQ ID NO: 196355 - RNA, 18 nt, Homo sapiens
uuacaauuuacaaagugu

SEQ ID NO: 196356 - RNA, 15 nt, Homo sapiens
uaagagaacaaugug

SEQ ID NO: 196357 - RNA, 13 nt, Homo sapiens
ugauauugcagcu

SEQ ID NO: 196358 - RNA, 22 nt, Homo sapiens
gaaucuguuaccagaggacaaa

SEQ ID NO: 196359 - RNA, 15 nt, Homo sapiens
cuuuugaacccagga

SEQ ID NO: 196360 - RNA, 17 nt, Homo sapiens
gauacugcgacuuucug

SEQ ID NO: 196361 - RNA, 23 nt, Homo sapiens
uuauuuaccugaaauaaaauuca

SEQ ID NO: 196362 - RNA, 21 nt, Homo sapiens
augugcucagggaauaaucca

SEQ ID NO: 196363 - RNA, 22 nt, Homo sapiens
uuuuucuuugagacugggucuc

SEQ ID NO: 196364 - RNA, 14 nt, Homo sapiens
ucuguuaccagagg

SEQ ID NO: 196365 - RNA, 20 nt, Homo sapiens
gacuggguuuugugauugcc

SEQ ID NO: 196366 - RNA, 18 nt, Homo sapiens
gucaugcguuuaaucaca

SEQ ID NO: 196367 - RNA, 13 nt, Homo sapiens
gccacggcagccu

SEQ ID NO: 196368 - RNA, 21 nt, Homo sapiens
agguugucugaagucacugca

SEQ ID NO: 196369 - RNA, 22 nt, Homo sapiens
cauaccaaugaaaaaauguaua

SEQ ID NO: 196370 - RNA, 14 nt, Homo sapiens
uaucagucauaacu

SEQ ID NO: 196371 - RNA, 12 nt, Homo sapiens
uuggaaaucaca

SEQ ID NO: 196372 - RNA, 17 nt, Homo sapiens
ugcccaggcuggucuca

SEQ ID NO: 196373 - RNA, 12 nt, Homo sapiens
uccuauguguaa

SEQ ID NO: 196374 - RNA, 22 nt, Homo sapiens
ccuggaguguaugacugcacau

SEQ ID NO: 196375 - RNA, 16 nt, Homo sapiens
augaaauguaaauacu

SEQ ID NO: 196376 - RNA, 14 nt, Homo sapiens
uaacuauguugaua

SEQ ID NO: 196377 - RNA, 14 nt, Homo sapiens
auaugauugugcac

SEQ ID NO: 196378 - RNA, 15 nt, Homo sapiens
ugccucuguauuuaa

SEQ ID NO: 196379 - RNA, 20 nt, Homo sapiens
uagguaggggcccacuucac

SEQ ID NO: 196380 - RNA, 16 nt, Homo sapiens
caaggcuggcagugac

SEQ ID NO: 196381 - RNA, 21 nt, Homo sapiens
gcccuucccacaggacauuuc

SEQ ID NO: 196382 - RNA, 20 nt, Homo sapiens
gacuucauuuuuccuaacag

SEQ ID NO: 196383 - RNA, 18 nt, Homo sapiens
agcacagcacccauggga

SEQ ID NO: 196384 - RNA, 19 nt, Homo sapiens
cgcccccuccgcccugcca

SEQ ID NO: 196385 - RNA, 18 nt, Homo sapiens
ucauaugauugugcacau

SEQ ID NO: 196386 - RNA, 23 nt, Homo sapiens
agcuggaagggucaacaucuuuu

SEQ ID NO: 196387 - RNA, 15 nt, Homo sapiens
agguggccacuccag

SEQ ID NO: 196388 - RNA, 21 nt, Homo sapiens
caggagagaaugcccagugac

SEQ ID NO: 196389 - RNA, 19 nt, Homo sapiens
agacugucucaagagggca

SEQ ID NO: 196390 - RNA, 12 nt, Homo sapiens
aaauccuugaua

SEQ ID NO: 196391 - RNA, 19 nt, Homo sapiens
uggcuagugguggguacuc

SEQ ID NO: 196392 - RNA, 14 nt, Homo sapiens
uauuuaugccucug

SEQ ID NO: 196393 - RNA, 23 nt, Homo sapiens
caaacuaccuuccaguuccucau

SEQ ID NO: 196394 - RNA, 20 nt, Homo sapiens
uguacaguagauuuuccaaa

SEQ ID NO: 196395 - RNA, 14 nt, Homo sapiens
ugaauacaggcaua

SEQ ID NO: 196396 - RNA, 16 nt, Homo sapiens
uugccacuacccccuc

SEQ ID NO: 196397 - RNA, 13 nt, Homo sapiens
guaggacauacca

SEQ ID NO: 196398 - RNA, 16 nt, Homo sapiens
aaaaaucguccaggga

SEQ ID NO: 196399 - RNA, 23 nt, Homo sapiens
gcucccccucccccacugccaua

SEQ ID NO: 196400 - RNA, 16 nt, Homo sapiens
uuccauuugcaaggga

SEQ ID NO: 196401 - RNA, 16 nt, Homo sapiens
acccucuaagggaccu

SEQ ID NO: 196402 - RNA, 22 nt, Homo sapiens
aagcugggagcacaggcacugc

SEQ ID NO: 196403 - RNA, 17 nt, Homo sapiens
cuguguguacuaauaca

SEQ ID NO: 196404 - RNA, 11 nt, Homo sapiens
uacaauuguga

SEQ ID NO: 196405 - RNA, 20 nt, Homo sapiens
auucuaaaugaauguuuaca

SEQ ID NO: 196406 - RNA, 15 nt, Homo sapiens
cuccacgccauuucc

SEQ ID NO: 196407 - RNA, 20 nt, Homo sapiens
ggucucacaguguugcccag

SEQ ID NO: 196408 - RNA, 16 nt, Homo sapiens
aucagaacuguuggca

SEQ ID NO: 196409 - RNA, 16 nt, Homo sapiens
ugugagccaccacguc

SEQ ID NO: 196410 - RNA, 12 nt, Homo sapiens
agugauguaauc

SEQ ID NO: 196411 - RNA, 12 nt, Homo sapiens
cacuucucucag

SEQ ID NO: 196412 - RNA, 22 nt, Homo sapiens
cccagagugcugggauuacaau

SEQ ID NO: 196413 - RNA, 18 nt, Homo sapiens
uuucaaauuggagcuuca

SEQ ID NO: 196414 - RNA, 20 nt, Homo sapiens
augucuuuccuuuugcucuu

SEQ ID NO: 196415 - RNA, 19 nt, Homo sapiens
aacccaggaguucaggguc

SEQ ID NO: 196416 - RNA, 23 nt, Homo sapiens
uuagacagucaaggaguggcuua

SEQ ID NO: 196417 - RNA, 23 nt, Homo sapiens
aucucauuggacccuuccauggu

SEQ ID NO: 196418 - RNA, 20 nt, Homo sapiens
uuaaguugauggugaugaaa

SEQ ID NO: 196419 - RNA, 23 nt, Homo sapiens
acuuuuaaguugcugaugaacuc

SEQ ID NO: 196420 - RNA, 21 nt, Homo sapiens
cagucauaacuaaauaaagcu

SEQ ID NO: 196421 - RNA, 14 nt, Homo sapiens
cugucucagccucc

SEQ ID NO: 196422 - RNA, 18 nt, Homo sapiens
agcacaggcacugcagga

SEQ ID NO: 196423 - RNA, 19 nt, Homo sapiens
cucauaugauugugcacau

SEQ ID NO: 196424 - RNA, 13 nt, Homo sapiens
agcuuaagaauuu

SEQ ID NO: 196425 - RNA, 13 nt, Homo sapiens
cagaguugugcac

SEQ ID NO: 196426 - RNA, 14 nt, Homo sapiens
augcauaaaugcga

SEQ ID NO: 196427 - RNA, 20 nt, Homo sapiens
aaacaugguggguccauggg

SEQ ID NO: 196428 - RNA, 23 nt, Homo sapiens
ccaugggaaggguccaucucaga

SEQ ID NO: 196429 - RNA, 13 nt, Homo sapiens
auuaauauuugcu

SEQ ID NO: 196430 - RNA, 15 nt, Homo sapiens
uccggaauccugucc

SEQ ID NO: 196431 - RNA, 20 nt, Homo sapiens
ccucuuuuucuagucuucau

SEQ ID NO: 196432 - RNA, 22 nt, Homo sapiens
auagagggucuaagauucaucc

SEQ ID NO: 196433 - RNA, 17 nt, Homo sapiens
accgugggcucccugac

SEQ ID NO: 196434 - RNA, 18 nt, Homo sapiens
ccucuguccaggcacuga

SEQ ID NO: 196435 - RNA, 22 nt, Homo sapiens
aucucugcuuuggaaaucacac

SEQ ID NO: 196436 - RNA, 15 nt, Homo sapiens
ucuaagaaagaaauu

SEQ ID NO: 196437 - RNA, 17 nt, Homo sapiens
auaaacguccuacugua

SEQ ID NO: 196438 - RNA, 13 nt, Homo sapiens
gucuucccuguau

SEQ ID NO: 196439 - RNA, 22 nt, Homo sapiens
agucuucauaauuucuucacuc

SEQ ID NO: 196440 - RNA, 14 nt, Homo sapiens
augcucagggucaa

SEQ ID NO: 196441 - RNA, 19 nt, Homo sapiens
cuggcagccgugccuucag

SEQ ID NO: 196442 - RNA, 13 nt, Homo sapiens
uaagaugaucauc

SEQ ID NO: 196443 - RNA, 15 nt, Homo sapiens
cagauccccagccuc

SEQ ID NO: 196444 - RNA, 20 nt, Homo sapiens
ucuccagaaagcucaucuca

SEQ ID NO: 196445 - RNA, 15 nt, Homo sapiens
augugaaaguuacaa

SEQ ID NO: 196446 - RNA, 16 nt, Homo sapiens
ggggccaggugcacag

SEQ ID NO: 196447 - RNA, 23 nt, Homo sapiens
uaaugaugucguuugaaucacag

SEQ ID NO: 196448 - RNA, 18 nt, Homo sapiens
aggauccccucucuuccu

SEQ ID NO: 196449 - RNA, 13 nt, Homo sapiens
aguagucauuuca

SEQ ID NO: 196450 - RNA, 16 nt, Homo sapiens
acccugugcagaaccu

SEQ ID NO: 196451 - RNA, 21 nt, Homo sapiens
aaacagccccucuggacacag

SEQ ID NO: 196452 - RNA, 22 nt, Homo sapiens
agaaucuguuaccagaggacaa

SEQ ID NO: 196453 - RNA, 15 nt, Homo sapiens
cagggauagcacuga

SEQ ID NO: 196454 - RNA, 16 nt, Homo sapiens
acaggcccuuccucuc

SEQ ID NO: 196455 - RNA, 19 nt, Homo sapiens
gaggacuguugacauccaa

SEQ ID NO: 196456 - RNA, 14 nt, Homo sapiens
agccaacuuuugca

SEQ ID NO: 196457 - RNA, 23 nt, Homo sapiens
cuaccgagucucuucuccacugg

SEQ ID NO: 196458 - RNA, 22 nt, Homo sapiens
ucccuuucugugugaagaucac

SEQ ID NO: 196459 - RNA, 16 nt, Homo sapiens
agacugggcugaggga

SEQ ID NO: 196460 - RNA, 18 nt, Homo sapiens
auaaugguugacuggguu

SEQ ID NO: 196461 - RNA, 16 nt, Homo sapiens
ucugaucugaugcaag

SEQ ID NO: 196462 - RNA, 18 nt, Homo sapiens
cuugaggaaaacaagcau

SEQ ID NO: 196463 - RNA, 20 nt, Homo sapiens
uuacuacaugugggagcuuu

SEQ ID NO: 196464 - RNA, 15 nt, Homo sapiens
guaucaggacccaga

SEQ ID NO: 196465 - RNA, 17 nt, Homo sapiens
gagucucuucuccacug

SEQ ID NO: 196466 - RNA, 17 nt, Homo sapiens
uuccuacccuuccucac

SEQ ID NO: 196467 - RNA, 19 nt, Homo sapiens
uccugacagaaggacucag

SEQ ID NO: 196468 - RNA, 15 nt, Homo sapiens
ugugcagaaccuccu

SEQ ID NO: 196469 - RNA, 17 nt, Homo sapiens
gaauguuuacacucuuu

SEQ ID NO: 196470 - RNA, 18 nt, Homo sapiens
guuuauaaaagaugcauu

SEQ ID NO: 196471 - RNA, 18 nt, Homo sapiens
ggagaaacccuugaaaag

SEQ ID NO: 196472 - RNA, 20 nt, Homo sapiens
uguuaccugaaaacacugug

SEQ ID NO: 196473 - RNA, 16 nt, Homo sapiens
uggcagccgugccuuc

SEQ ID NO: 196474 - RNA, 21 nt, Homo sapiens
cacauccucugucuauuugag

SEQ ID NO: 196475 - RNA, 13 nt, Homo sapiens
cagcuuauauuca

SEQ ID NO: 196476 - RNA, 18 nt, Homo sapiens
uagagauuaccuccugag

SEQ ID NO: 196477 - RNA, 19 nt, Homo sapiens
gcaaaauacaugacauuua

SEQ ID NO: 196478 - RNA, 17 nt, Homo sapiens
ugcuggagucgggacua

SEQ ID NO: 196479 - RNA, 15 nt, Homo sapiens
uugcuggcaaagaca

SEQ ID NO: 196480 - RNA, 18 nt, Homo sapiens
caacaguuuuuuaugcua

SEQ ID NO: 196481 - RNA, 23 nt, Homo sapiens
ugccucuugaaugcagggacaaa

SEQ ID NO: 196482 - RNA, 22 nt, Homo sapiens
uugacuggguuucucuguauag

SEQ ID NO: 196483 - RNA, 13 nt, Homo sapiens
aauuagaugaacu

SEQ ID NO: 196484 - RNA, 18 nt, Homo sapiens
gacaaaugccacacggcu

SEQ ID NO: 196485 - RNA, 16 nt, Homo sapiens
ccuuugaaaugaauau

SEQ ID NO: 196486 - RNA, 14 nt, Homo sapiens
acccugggaccaca

SEQ ID NO: 196487 - RNA, 13 nt, Homo sapiens
ccauaauguuaca

SEQ ID NO: 196488 - RNA, 19 nt, Homo sapiens
cacugagcaaagcauugag

SEQ ID NO: 196489 - RNA, 18 nt, Homo sapiens
uucagguacuaaauaccu

SEQ ID NO: 196490 - RNA, 23 nt, Homo sapiens
aaaggcucgauuuuguaucugca

SEQ ID NO: 196491 - RNA, 22 nt, Homo sapiens
cccagucagaguugugcacaug

SEQ ID NO: 196492 - RNA, 19 nt, Homo sapiens
gggagacugggcugaggga

SEQ ID NO: 196493 - RNA, 23 nt, Homo sapiens
ucuuggggggguggccgcugagu

SEQ ID NO: 196494 - RNA, 18 nt, Homo sapiens
aucagacuccugugcaac

SEQ ID NO: 196495 - RNA, 18 nt, Homo sapiens
uaauccagaaaaacugug

SEQ ID NO: 196496 - RNA, 11 nt, Homo sapiens
uugacuuuguc

SEQ ID NO: 196497 - RNA, 12 nt, Homo sapiens
ucggugugcacc

SEQ ID NO: 196498 - RNA, 21 nt, Homo sapiens
uuauacuucucuauuaucuca

SEQ ID NO: 196499 - RNA, 15 nt, Homo sapiens
caaacucucccuuca

SEQ ID NO: 196500 - RNA, 18 nt, Homo sapiens
cucuaguuuccagaggcu

SEQ ID NO: 196501 - RNA, 17 nt, Homo sapiens
acagagugcauugugag

SEQ ID NO: 196502 - RNA, 16 nt, Homo sapiens
augaaagggcaaagac

SEQ ID NO: 196503 - RNA, 16 nt, Homo sapiens
uauauguauaugcaau

SEQ ID NO: 196504 - RNA, 16 nt, Homo sapiens
auucauuucaaaggga

SEQ ID NO: 196505 - RNA, 14 nt, Homo sapiens
uacagaacucuuuc

SEQ ID NO: 196506 - RNA, 17 nt, Homo sapiens
ugagaacuacucaggga

SEQ ID NO: 196507 - RNA, 23 nt, Homo sapiens
gagugucuuuccacggagccacu

SEQ ID NO: 196508 - RNA, 18 nt, Homo sapiens
auauucauuucaaaggga

SEQ ID NO: 196509 - RNA, 22 nt, Homo sapiens
cuacccuuccucaccacuuccc

SEQ ID NO: 196510 - RNA, 13 nt, Homo sapiens
cuucugcuucuca

SEQ ID NO: 196511 - RNA, 17 nt, Homo sapiens
acaccuguaaucccagc

SEQ ID NO: 196512 - RNA, 22 nt, Homo sapiens
uauguagcaaaauacaugacau

SEQ ID NO: 196513 - RNA, 12 nt, Homo sapiens
cuugcugccaaa

SEQ ID NO: 196514 - RNA, 22 nt, Homo sapiens
aggcccuuccucuccacugccu

SEQ ID NO: 196515 - RNA, 23 nt, Homo sapiens
acagagcugguugggaagacaug

SEQ ID NO: 196516 - RNA, 14 nt, Homo sapiens
gccucuuucaucca

SEQ ID NO: 196517 - RNA, 13 nt, Homo sapiens
uacagaugggcaa

SEQ ID NO: 196518 - RNA, 15 nt, Homo sapiens
caagcacagaaggag

SEQ ID NO: 196519 - RNA, 14 nt, Homo sapiens
aaaugagaacauga

SEQ ID NO: 196520 - RNA, 15 nt, Homo sapiens
cacguucugcucauc

SEQ ID NO: 196521 - RNA, 21 nt, Homo sapiens
cucucagucucugagcaguga

SEQ ID NO: 196522 - RNA, 20 nt, Homo sapiens
cuuuugcuggucacugccau

SEQ ID NO: 196523 - RNA, 22 nt, Homo sapiens
uaaagggagauaacaaucugua

SEQ ID NO: 196524 - RNA, 19 nt, Homo sapiens
auuucuucacucaaucucu

SEQ ID NO: 196525 - RNA, 20 nt, Homo sapiens
acagaccuaggauuucauga

SEQ ID NO: 196526 - RNA, 23 nt, Homo sapiens
acccuugcgcuuuugcuggucac

SEQ ID NO: 196527 - RNA, 23 nt, Homo sapiens
gcaaucaaguccuacaagcuaaa

SEQ ID NO: 196528 - RNA, 13 nt, Homo sapiens
caucauuccuuga

SEQ ID NO: 196529 - RNA, 17 nt, Homo sapiens
gagguuugccagcauuu

SEQ ID NO: 196530 - RNA, 21 nt, Homo sapiens
cacuugccccuguuaccuaau

SEQ ID NO: 196531 - RNA, 17 nt, Homo sapiens
gaccugaggcugugguc

SEQ ID NO: 196532 - RNA, 22 nt, Homo sapiens
aagugauaucccccagccucaa

SEQ ID NO: 196533 - RNA, 14 nt, Homo sapiens
ucuuauuuccucaa

SEQ ID NO: 196534 - RNA, 22 nt, Homo sapiens
uuaccugaaauaaaauucauua

SEQ ID NO: 196535 - RNA, 15 nt, Homo sapiens
ugggucuucccugua

SEQ ID NO: 196536 - RNA, 19 nt, Homo sapiens
gggucucgcuuuguugccc

SEQ ID NO: 196537 - RNA, 13 nt, Homo sapiens
ugggaccacagag

SEQ ID NO: 196538 - RNA, 15 nt, Homo sapiens
cagaccauucaggac

SEQ ID NO: 196539 - RNA, 17 nt, Homo sapiens
aaaacuugcugccugaa

SEQ ID NO: 196540 - RNA, 19 nt, Homo sapiens
acuucaagaucugaauuug

SEQ ID NO: 196541 - RNA, 22 nt, Homo sapiens
augaccccuccccuaaugccug

SEQ ID NO: 196542 - RNA, 18 nt, Homo sapiens
agccucacugcaagcacu

SEQ ID NO: 196543 - RNA, 17 nt, Homo sapiens
cuucacucaaucucuga

SEQ ID NO: 196544 - RNA, 22 nt, Homo sapiens
ucaaguuggcuucuaaucaaag

SEQ ID NO: 196545 - RNA, 18 nt, Homo sapiens
aaagcaggggaguaugca

SEQ ID NO: 196546 - RNA, 18 nt, Homo sapiens
uaaaggcucgauuuugua

SEQ ID NO: 196547 - RNA, 12 nt, Homo sapiens
ugauauugcagc

SEQ ID NO: 196548 - RNA, 13 nt, Homo sapiens
caggcuggucuca

SEQ ID NO: 196549 - RNA, 12 nt, Homo sapiens
aaaucuaugaaa

SEQ ID NO: 196550 - RNA, 18 nt, Homo sapiens
ugugugaucugugggcac

SEQ ID NO: 196551 - RNA, 20 nt, Homo sapiens
aagaacaguaacugccauca

SEQ ID NO: 196552 - RNA, 13 nt, Homo sapiens
acuccuaaaucaa

SEQ ID NO: 196553 - RNA, 22 nt, Homo sapiens
uuucuacuuugaagucauacca

SEQ ID NO: 196554 - RNA, 14 nt, Homo sapiens
caugaucaucacaa

SEQ ID NO: 196555 - RNA, 15 nt, Homo sapiens
ugaguuuagugaucu

SEQ ID NO: 196556 - RNA, 21 nt, Homo sapiens
agccacugcauaccaaccugg

SEQ ID NO: 196557 - RNA, 13 nt, Homo sapiens
cugguuagguaga

SEQ ID NO: 196558 - RNA, 15 nt, Homo sapiens
uuuuuccuaacagga

SEQ ID NO: 196559 - RNA, 16 nt, Homo sapiens
uccucugugaccaaug

SEQ ID NO: 196560 - RNA, 15 nt, Homo sapiens
ucuucuaaauggcaa

SEQ ID NO: 196561 - RNA, 18 nt, Homo sapiens
cuuuacuguuagucauuu

SEQ ID NO: 196562 - RNA, 19 nt, Homo sapiens
uccuaaaguagacuucauu

SEQ ID NO: 196563 - RNA, 15 nt, Homo sapiens
gccaggugcacagac

SEQ ID NO: 196564 - RNA, 13 nt, Homo sapiens
gagucgggacuaa

SEQ ID NO: 196565 - RNA, 23 nt, Homo sapiens
acugcugccucuugaaugcaggg

SEQ ID NO: 196566 - RNA, 15 nt, Homo sapiens
ucagagccaccccua

SEQ ID NO: 196567 - RNA, 11 nt, Homo sapiens
gcaccuggcau

SEQ ID NO: 196568 - RNA, 15 nt, Homo sapiens
uguggguaccuguau

SEQ ID NO: 196569 - RNA, 17 nt, Homo sapiens
acagagcagaacuuuca

SEQ ID NO: 196570 - RNA, 14 nt, Homo sapiens
aaucaaaugcaauu

SEQ ID NO: 196571 - RNA, 13 nt, Homo sapiens
cacaaaaucacac

SEQ ID NO: 196572 - RNA, 22 nt, Homo sapiens
caaacagccccucuggacacag

SEQ ID NO: 196573 - RNA, 13 nt, Homo sapiens
agucaaagacauu

SEQ ID NO: 196574 - RNA, 16 nt, Homo sapiens
gggaccacagacucac

SEQ ID NO: 196575 - RNA, 18 nt, Homo sapiens
augugggugggaccacag

SEQ ID NO: 196576 - RNA, 17 nt, Homo sapiens
cuucuaaucaaagcuuu

SEQ ID NO: 196577 - RNA, 15 nt, Homo sapiens
acuaagaaauaugca

SEQ ID NO: 196578 - RNA, 18 nt, Homo sapiens
cuugaucuguauauacaa

SEQ ID NO: 196579 - RNA, 17 nt, Homo sapiens
guuugauuauucagugu

SEQ ID NO: 196580 - RNA, 23 nt, Homo sapiens
cagagaugcaccaccaagccaag

SEQ ID NO: 196581 - RNA, 22 nt, Homo sapiens
uaacauaauuuguacauaugua

SEQ ID NO: 196582 - RNA, 20 nt, Homo sapiens
ccucauuaccuugugcuaau

SEQ ID NO: 196583 - RNA, 14 nt, Homo sapiens
ccacaaaaguacaa

SEQ ID NO: 196584 - RNA, 19 nt, Homo sapiens
acuuuaaucccacuugccc

SEQ ID NO: 196585 - RNA, 23 nt, Homo sapiens
accuaaaaggaaaucucacccca

SEQ ID NO: 196586 - RNA, 18 nt, Homo sapiens
gccauuguuucuccuggg

SEQ ID NO: 196587 - RNA, 15 nt, Homo sapiens
uaugccucuguauuu

SEQ ID NO: 196588 - RNA, 15 nt, Homo sapiens
aaaacacugugcaca

SEQ ID NO: 196589 - RNA, 23 nt, Homo sapiens
cugaauagcagaagguugcaccu

SEQ ID NO: 196590 - RNA, 13 nt, Homo sapiens
cagaaggacucag

SEQ ID NO: 196591 - RNA, 11 nt, Homo sapiens
cuuuguugccc

SEQ ID NO: 196592 - RNA, 14 nt, Homo sapiens
cucacaguguugcc

SEQ ID NO: 196593 - RNA, 15 nt, Homo sapiens
ucccucaucuguccc

SEQ ID NO: 196594 - RNA, 15 nt, Homo sapiens
gcccaguguguuucu

SEQ ID NO: 196595 - RNA, 13 nt, Homo sapiens
uuaucuauggcac

SEQ ID NO: 196596 - RNA, 22 nt, Homo sapiens
gaucucugcuuuggaaaucaca

SEQ ID NO: 196597 - RNA, 18 nt, Homo sapiens
aauguuugucucauccca

SEQ ID NO: 196598 - RNA, 20 nt, Homo sapiens
gcugaaaacugcaacuugua

SEQ ID NO: 196599 - RNA, 20 nt, Homo sapiens
ccucaguuuuaucauuuuca

SEQ ID NO: 196600 - RNA, 20 nt, Homo sapiens
ggggucccauagaggugagg

SEQ ID NO: 196601 - RNA, 23 nt, Homo sapiens
acuugcugcugagugcaccacuu

SEQ ID NO: 196602 - RNA, 24 nt, Homo sapiens
ucuucaccauuuggcaaugccauc

SEQ ID NO: 196603 - RNA, 16 nt, Homo sapiens
auuucuccuccauggg

SEQ ID NO: 196604 - RNA, 18 nt, Homo sapiens
caagcacugcaugggcaa

SEQ ID NO: 196605 - RNA, 14 nt, Homo sapiens
uggaugcagaucca

SEQ ID NO: 196606 - RNA, 13 nt, Homo sapiens
uacuugagacugu

SEQ ID NO: 196607 - RNA, 21 nt, Homo sapiens
agcuucuuaaaugagaaggaa

SEQ ID NO: 196608 - RNA, 21 nt, Homo sapiens
agacuuagaaaaauccuacaa

SEQ ID NO: 196609 - RNA, 16 nt, Homo sapiens
cuucauuuuuccuaac

SEQ ID NO: 196610 - RNA, 16 nt, Homo sapiens
aaaacaagcauucaca

SEQ ID NO: 196611 - RNA, 17 nt, Homo sapiens
cauagcaagauugcuua

SEQ ID NO: 196612 - RNA, 16 nt, Homo sapiens
ucuggucgcuccugcc

SEQ ID NO: 196613 - RNA, 15 nt, Homo sapiens
cauaugauugugcac

SEQ ID NO: 196614 - RNA, 13 nt, Homo sapiens
cuccugggcucag

SEQ ID NO: 196615 - RNA, 14 nt, Homo sapiens
cagaauaauaagag

SEQ ID NO: 196616 - RNA, 19 nt, Homo sapiens
agguuucuggcagccagua

SEQ ID NO: 196617 - RNA, 10 nt, Homo sapiens
cucuguccag

SEQ ID NO: 196618 - RNA, 23 nt, Homo sapiens
gaaaugcccaucuaugucccuug

SEQ ID NO: 196619 - RNA, 19 nt, Homo sapiens
cuuuucaauguuagccaca

SEQ ID NO: 196620 - RNA, 16 nt, Homo sapiens
uacaauguucauccca

SEQ ID NO: 196621 - RNA, 17 nt, Homo sapiens
uuggaaaauaaaucaau

SEQ ID NO: 196622 - RNA, 13 nt, Homo sapiens
agagcugguuggg

SEQ ID NO: 196623 - RNA, 13 nt, Homo sapiens
cucugaucccucu

SEQ ID NO: 196624 - RNA, 18 nt, Homo sapiens
gggccaggugcacagacg

SEQ ID NO: 196625 - RNA, 16 nt, Homo sapiens
cuucuucaccauuugg

SEQ ID NO: 196626 - RNA, 15 nt, Homo sapiens
guaucaaaugugaca

SEQ ID NO: 196627 - RNA, 12 nt, Homo sapiens
gggagucugggc

SEQ ID NO: 196628 - RNA, 13 nt, Homo sapiens
cuugggcucccug

SEQ ID NO: 196629 - RNA, 17 nt, Homo sapiens
ugaauaugauuaguaaa

SEQ ID NO: 196630 - RNA, 22 nt, Homo sapiens
agaguggaaccaacacuaacau

SEQ ID NO: 196631 - RNA, 22 nt, Homo sapiens
cuaacaaguagcacccuggauu

SEQ ID NO: 196632 - RNA, 15 nt, Homo sapiens
ugcugagcauguacu

SEQ ID NO: 196633 - RNA, 23 nt, Homo sapiens
uccagcuggaagggucaacaucu

SEQ ID NO: 196634 - RNA, 20 nt, Homo sapiens
uuacaaucagccacauucua

SEQ ID NO: 196635 - RNA, 18 nt, Homo sapiens
ucaucauucucugucuca

SEQ ID NO: 196636 - RNA, 18 nt, Homo sapiens
acuuucagguacuaaaua

SEQ ID NO: 196637 - RNA, 14 nt, Homo sapiens
caugucagcaaaaa

SEQ ID NO: 196638 - RNA, 22 nt, Homo sapiens
cugagcaaagcauugagcaaag

SEQ ID NO: 196639 - RNA, 22 nt, Homo sapiens
acaagacaggacccugggacca

SEQ ID NO: 196640 - RNA, 13 nt, Homo sapiens
aagcacagcaccc

SEQ ID NO: 196641 - RNA, 16 nt, Homo sapiens
ccaggaaccucagggc

SEQ ID NO: 196642 - RNA, 18 nt, Homo sapiens
uaaaauuagaugaacuca

SEQ ID NO: 196643 - RNA, 20 nt, Homo sapiens
aauuuccggccaacaguuaa

SEQ ID NO: 196644 - RNA, 19 nt, Homo sapiens
accccuccccuaaugccug

SEQ ID NO: 196645 - RNA, 18 nt, Homo sapiens
ugacauccaagcuuccuu

SEQ ID NO: 196646 - RNA, 23 nt, Homo sapiens
uaucucaaacuacuggcaauuug

SEQ ID NO: 196647 - RNA, 19 nt, Homo sapiens
uuaccuaguagucauuuca

SEQ ID NO: 196648 - RNA, 20 nt, Homo sapiens
caggacccugggaccacaga

SEQ ID NO: 196649 - RNA, 23 nt, Homo sapiens
agguugucugaagucacugcaca

SEQ ID NO: 196650 - RNA, 12 nt, Homo sapiens
gagagggggcca

SEQ ID NO: 196651 - RNA, 19 nt, Homo sapiens
agcacagcuugaccugagg

SEQ ID NO: 196652 - RNA, 16 nt, Homo sapiens
agcacagcuugaccug

SEQ ID NO: 196653 - RNA, 14 nt, Homo sapiens
cauccaagcuuccu

SEQ ID NO: 196654 - RNA, 14 nt, Homo sapiens
ugggagcacaggca

SEQ ID NO: 196655 - RNA, 18 nt, Homo sapiens
aaagaaauuguauuauca

SEQ ID NO: 196656 - RNA, 23 nt, Homo sapiens
ucaacuggagacacuauuuaucu

SEQ ID NO: 196657 - RNA, 16 nt, Homo sapiens
uagaguucagacuuuu

SEQ ID NO: 196658 - RNA, 21 nt, Homo sapiens
acccagucagaguugugcaca

SEQ ID NO: 196659 - RNA, 20 nt, Homo sapiens
cuuucaagcagucgugccug

SEQ ID NO: 196660 - RNA, 15 nt, Homo sapiens
gaaccaggcaacuug

SEQ ID NO: 196661 - RNA, 17 nt, Homo sapiens
ucccuuuuuauauccca

SEQ ID NO: 196662 - RNA, 20 nt, Homo sapiens
auguugcccaguguguuucu

SEQ ID NO: 196663 - RNA, 16 nt, Homo sapiens
agcaauaugcauuuaa

SEQ ID NO: 196664 - RNA, 21 nt, Homo sapiens
ugauggagauauuuacaugaa

SEQ ID NO: 196665 - RNA, 14 nt, Homo sapiens
uccuacaagcuaaa

SEQ ID NO: 196666 - RNA, 23 nt, Homo sapiens
uucgauacaccgggccuggagaa

SEQ ID NO: 196667 - RNA, 16 nt, Homo sapiens
aacuaguguugcuugg

SEQ ID NO: 196668 - RNA, 17 nt, Homo sapiens
gugcuaucgcaccacug

SEQ ID NO: 196669 - RNA, 20 nt, Homo sapiens
ggaaaauaaaucaaugcuau

SEQ ID NO: 196670 - RNA, 12 nt, Homo sapiens
ucucugcucugc

SEQ ID NO: 196671 - RNA, 19 nt, Homo sapiens
aaugaugucguuugaauca

SEQ ID NO: 196672 - RNA, 12 nt, Homo sapiens
auucgugcagca

SEQ ID NO: 196673 - RNA, 13 nt, Homo sapiens
aauguucauccca

SEQ ID NO: 196674 - RNA, 17 nt, Homo sapiens
auaagaggugcuacuga

SEQ ID NO: 196675 - RNA, 14 nt, Homo sapiens
gccuaugugcaugc

SEQ ID NO: 196676 - RNA, 13 nt, Homo sapiens
ggagcacuggguu

SEQ ID NO: 196677 - RNA, 13 nt, Homo sapiens
accaggucaggga

SEQ ID NO: 196678 - RNA, 15 nt, Homo sapiens
cagagagggggccac

SEQ ID NO: 196679 - RNA, 12 nt, Homo sapiens
uuuuauauguca

SEQ ID NO: 196680 - RNA, 16 nt, Homo sapiens
aauguuacauuauuau

SEQ ID NO: 196681 - RNA, 20 nt, Homo sapiens
gaaucaggaauauuuuccaa

SEQ ID NO: 196682 - RNA, 16 nt, Homo sapiens
uuugguaugugacaug

SEQ ID NO: 196683 - RNA, 15 nt, Homo sapiens
uauucuucauaacaa

SEQ ID NO: 196684 - RNA, 20 nt, Homo sapiens
gguauaaugguugacugggu

SEQ ID NO: 196685 - RNA, 20 nt, Homo sapiens
gcccaggcuggaguggagug

SEQ ID NO: 196686 - RNA, 15 nt, Homo sapiens
ggaaaacaagcauuc

SEQ ID NO: 196687 - RNA, 16 nt, Homo sapiens
cacagaugugugauuc

SEQ ID NO: 196688 - RNA, 19 nt, Homo sapiens
gaacaauauugacuuuguc

SEQ ID NO: 196689 - RNA, 21 nt, Homo sapiens
caugacucggggguggggaaa

SEQ ID NO: 196690 - RNA, 22 nt, Homo sapiens
ugcauaaaugcgauccacagaa

SEQ ID NO: 196691 - RNA, 12 nt, Homo sapiens
guagcuagccug

SEQ ID NO: 196692 - RNA, 23 nt, Homo sapiens
augcauauccaacaugugcucag

SEQ ID NO: 196693 - RNA, 18 nt, Homo sapiens
agaccugacaccuuucau

SEQ ID NO: 196694 - RNA, 23 nt, Homo sapiens
caagaauagaugcugacuguacu

SEQ ID NO: 196695 - RNA, 21 nt, Homo sapiens
auaaaauguugaaaagucaaa

SEQ ID NO: 196696 - RNA, 19 nt, Homo sapiens
aaucauauaauaaauguac

SEQ ID NO: 196697 - RNA, 15 nt, Homo sapiens
aauguuacauuauua

SEQ ID NO: 196698 - RNA, 19 nt, Homo sapiens
cauuaccgcguuguaaaau

SEQ ID NO: 196699 - RNA, 20 nt, Homo sapiens
cguccagggagcauuuuccu

SEQ ID NO: 196700 - RNA, 14 nt, Homo sapiens
cucaucauuccuug

SEQ ID NO: 196701 - RNA, 12 nt, Homo sapiens
uuccacugcugc

SEQ ID NO: 196702 - RNA, 20 nt, Homo sapiens
acaaaauaaccaauccugga

SEQ ID NO: 196703 - RNA, 21 nt, Homo sapiens
cauggccagguggccacucca

SEQ ID NO: 196704 - RNA, 15 nt, Homo sapiens
cuuuuauuacugggg

SEQ ID NO: 196705 - RNA, 13 nt, Homo sapiens
ucuucaagcagau

SEQ ID NO: 196706 - RNA, 20 nt, Homo sapiens
aauacagucuuccauuugca

SEQ ID NO: 196707 - RNA, 17 nt, Homo sapiens
ccucaguuuuaucauuu

SEQ ID NO: 196708 - RNA, 23 nt, Homo sapiens
caaagcaggggaguaugcaaaag

SEQ ID NO: 196709 - RNA, 21 nt, Homo sapiens
cacuucuuguuccccacugac

SEQ ID NO: 196710 - RNA, 13 nt, Homo sapiens
acaaauugcuuga

SEQ ID NO: 196711 - RNA, 12 nt, Homo sapiens
uagcacauacua

SEQ ID NO: 196712 - RNA, 21 nt, Homo sapiens
ugaacuuggaaagaaaugccc

SEQ ID NO: 196713 - RNA, 16 nt, Homo sapiens
ucauaugauugugcac

SEQ ID NO: 196714 - RNA, 21 nt, Homo sapiens
cagcuggaagggucaacaucu

SEQ ID NO: 196715 - RNA, 16 nt, Homo sapiens
cuuucaaccucaguga

SEQ ID NO: 196716 - RNA, 15 nt, Homo sapiens
ccucccuggucccuu

SEQ ID NO: 196717 - RNA, 18 nt, Homo sapiens
uaugccauagcaagauug

SEQ ID NO: 196718 - RNA, 18 nt, Homo sapiens
ugggagacugcugaguca

SEQ ID NO: 196719 - RNA, 20 nt, Homo sapiens
cguccagcuggaagggucaa

SEQ ID NO: 196720 - RNA, 14 nt, Homo sapiens
agggagcacugggu

SEQ ID NO: 196721 - RNA, 17 nt, Homo sapiens
accacagguucaugcca

SEQ ID NO: 196722 - RNA, 15 nt, Homo sapiens
agaggagaaggaggg

SEQ ID NO: 196723 - RNA, 17 nt, Homo sapiens
ccaagugccggacuagc

SEQ ID NO: 196724 - RNA, 22 nt, Homo sapiens
ucacuaggcccccacuugccuc

SEQ ID NO: 196725 - RNA, 15 nt, Homo sapiens
gauugauuaccaagu

SEQ ID NO: 196726 - RNA, 16 nt, Homo sapiens
gugagcaaagggcuca

SEQ ID NO: 196727 - RNA, 19 nt, Homo sapiens
cauauaauguuguuauuua

SEQ ID NO: 196728 - RNA, 13 nt, Homo sapiens
acucaaucucuga

SEQ ID NO: 196729 - RNA, 16 nt, Homo sapiens
uauaacuauguugaua

SEQ ID NO: 196730 - RNA, 22 nt, Homo sapiens
uuauguaugugaaaguuacaaa

SEQ ID NO: 196731 - RNA, 17 nt, Homo sapiens
ugaugucguuugaauca

SEQ ID NO: 196732 - RNA, 20 nt, Homo sapiens
uauauacccguacaacgugu

SEQ ID NO: 196733 - RNA, 14 nt, Homo sapiens
ucaaauagcauaag

SEQ ID NO: 196734 - RNA, 15 nt, Homo sapiens
cuugaaaucaagggc

SEQ ID NO: 196735 - RNA, 20 nt, Homo sapiens
cuaugucacccaaugcauau

SEQ ID NO: 196736 - RNA, 12 nt, Homo sapiens
uaguaacaugug

SEQ ID NO: 196737 - RNA, 16 nt, Homo sapiens
ugaaaacacugugcac

SEQ ID NO: 196738 - RNA, 15 nt, Homo sapiens
ccucuggacacagcc

SEQ ID NO: 196739 - RNA, 15 nt, Homo sapiens
acggcucucaccagu

SEQ ID NO: 196740 - RNA, 12 nt, Homo sapiens
cuggagauccuc

SEQ ID NO: 196741 - RNA, 15 nt, Homo sapiens
uuagaaauugcauuu

SEQ ID NO: 196742 - RNA, 13 nt, Homo sapiens
agagaguggcucc

SEQ ID NO: 196743 - RNA, 19 nt, Homo sapiens
cuuuacuguuagucauuug

SEQ ID NO: 196744 - RNA, 17 nt, Homo sapiens
acagacuaugucaccca

SEQ ID NO: 196745 - RNA, 19 nt, Homo sapiens
auguacaucuggccuugaa

SEQ ID NO: 196746 - RNA, 22 nt, Homo sapiens
gcacaucugcauuuucacccca

SEQ ID NO: 196747 - RNA, 17 nt, Homo sapiens
uguagaagccacuauua

SEQ ID NO: 196748 - RNA, 15 nt, Homo sapiens
ggacuuccauuugcu

SEQ ID NO: 196749 - RNA, 20 nt, Homo sapiens
cuucuugccucugugcugug

SEQ ID NO: 196750 - RNA, 11 nt, Homo sapiens
aaaauaugcau

SEQ ID NO: 196751 - RNA, 13 nt, Homo sapiens
ggccagguggcca

SEQ ID NO: 196752 - RNA, 21 nt, Homo sapiens
agcagcgccccucccaagagg

SEQ ID NO: 196753 - RNA, 21 nt, Homo sapiens
ccauuuggcaaugccaucauc

SEQ ID NO: 196754 - RNA, 19 nt, Homo sapiens
augaugucguuugaaucac

SEQ ID NO: 196755 - RNA, 13 nt, Homo sapiens
agacaugaauaug

SEQ ID NO: 196756 - RNA, 16 nt, Homo sapiens
ucaagaagaagaugga

SEQ ID NO: 196757 - RNA, 21 nt, Homo sapiens
cugggucucgcuuuguugccc

SEQ ID NO: 196758 - RNA, 12 nt, Homo sapiens
ccaggugcacag

SEQ ID NO: 196759 - RNA, 20 nt, Homo sapiens
ccagcacuuugggaggccaa

SEQ ID NO: 196760 - RNA, 21 nt, Homo sapiens
gggaccacagacucacauccu

SEQ ID NO: 196761 - RNA, 18 nt, Homo sapiens
gggagguauucgugcagc

SEQ ID NO: 196762 - RNA, 21 nt, Homo sapiens
gagacaaaaucuuaaaugcca

SEQ ID NO: 196763 - RNA, 16 nt, Homo sapiens
gaaucaaaugcaauuu

SEQ ID NO: 196764 - RNA, 20 nt, Homo sapiens
agaccccucucccagcuauu

SEQ ID NO: 196765 - RNA, 18 nt, Homo sapiens
gaacaaaaaaaucugcag

SEQ ID NO: 196766 - RNA, 15 nt, Homo sapiens
caaaaaaaucugcag

SEQ ID NO: 196767 - RNA, 17 nt, Homo sapiens
gcuauaacuauguugau

SEQ ID NO: 196768 - RNA, 21 nt, Homo sapiens
ucucagcuggaucuccauucu

SEQ ID NO: 196769 - RNA, 16 nt, Homo sapiens
ugauucugucaauguc

SEQ ID NO: 196770 - RNA, 14 nt, Homo sapiens
auaaguuucacuga

SEQ ID NO: 196771 - RNA, 13 nt, Homo sapiens
cccuccaauccca

SEQ ID NO: 196772 - RNA, 18 nt, Homo sapiens
accccccuauugcugcug

SEQ ID NO: 196773 - RNA, 19 nt, Homo sapiens
gguucaccaggucagggag

SEQ ID NO: 196774 - RNA, 13 nt, Homo sapiens
uggagaagcuccc

SEQ ID NO: 196775 - RNA, 12 nt, Homo sapiens
aaaguguguauu

SEQ ID NO: 196776 - RNA, 15 nt, Homo sapiens
ugccaggccuggcaa

SEQ ID NO: 196777 - RNA, 17 nt, Homo sapiens
caacaugugcucaggga

SEQ ID NO: 196778 - RNA, 12 nt, Homo sapiens
gaaagugauauc

SEQ ID NO: 196779 - RNA, 17 nt, Homo sapiens
cacauacuacacauuca

SEQ ID NO: 196780 - RNA, 15 nt, Homo sapiens
uuagugauggagcuu

SEQ ID NO: 196781 - RNA, 14 nt, Homo sapiens
uuaucagucauaac

SEQ ID NO: 196782 - RNA, 14 nt, Homo sapiens
uuuacauucugcaa

SEQ ID NO: 196783 - RNA, 18 nt, Homo sapiens
gauacuguaacacuuuac

SEQ ID NO: 196784 - RNA, 15 nt, Homo sapiens
cgcuuuguugcccag

SEQ ID NO: 196785 - RNA, 19 nt, Homo sapiens
ggaacuuuuauuacugggg

SEQ ID NO: 196786 - RNA, 21 nt, Homo sapiens
aguguugaugcuuucgucucc

SEQ ID NO: 196787 - RNA, 19 nt, Homo sapiens
aacuggaggaguuccuuga

SEQ ID NO: 196788 - RNA, 20 nt, Homo sapiens
ugaucagcgccgcaccagcc

SEQ ID NO: 196789 - RNA, 14 nt, Homo sapiens
cauucugacaucuu

SEQ ID NO: 196790 - RNA, 15 nt, Homo sapiens
uaaguuugauuucau

SEQ ID NO: 196791 - RNA, 18 nt, Homo sapiens
agaaucuguuaccagagg

SEQ ID NO: 196792 - RNA, 19 nt, Homo sapiens
agggcuccugcacuuacuu

SEQ ID NO: 196793 - RNA, 12 nt, Homo sapiens
uaugccauagca

SEQ ID NO: 196794 - RNA, 20 nt, Homo sapiens
aguguuccccuuccacugag

SEQ ID NO: 196795 - RNA, 15 nt, Homo sapiens
aacuugcugcugagu

SEQ ID NO: 196796 - RNA, 15 nt, Homo sapiens
gcuucccugacucau

SEQ ID NO: 196797 - RNA, 12 nt, Homo sapiens
cguuuaaucaca

SEQ ID NO: 196798 - RNA, 19 nt, Homo sapiens
uugccauuaaacuuaccug

SEQ ID NO: 196799 - RNA, 14 nt, Homo sapiens
gcaagaaacacugg

SEQ ID NO: 196800 - RNA, 22 nt, Homo sapiens
gcccacuucaccguacuaacca

SEQ ID NO: 196801 - RNA, 17 nt, Homo sapiens
caucaucuccugccuuc

SEQ ID NO: 196802 - RNA, 13 nt, Homo sapiens
accagagcucaga

SEQ ID NO: 196803 - RNA, 12 nt, Homo sapiens
ccauauuuucac

SEQ ID NO: 196804 - RNA, 17 nt, Homo sapiens
cauguaaacugugcacc

SEQ ID NO: 196805 - RNA, 21 nt, Homo sapiens
gaugcugccugcccagugcac

SEQ ID NO: 196806 - RNA, 16 nt, Homo sapiens
cugggccgcugccacg

SEQ ID NO: 196807 - RNA, 19 nt, Homo sapiens
cccuauugguaaagaaugg

SEQ ID NO: 196808 - RNA, 19 nt, Homo sapiens
agugaauaaaccaucaucu

SEQ ID NO: 196809 - RNA, 22 nt, Homo sapiens
ugacagcugaccuuugucaucu

SEQ ID NO: 196810 - RNA, 19 nt, Homo sapiens
cgagccaaguuaagaaugu

SEQ ID NO: 196811 - RNA, 17 nt, Homo sapiens
cauucagggauagcacu

SEQ ID NO: 196812 - RNA, 20 nt, Homo sapiens
ccaugucagcaaaaagcaaa

SEQ ID NO: 196813 - RNA, 14 nt, Homo sapiens
augaacggugagca

SEQ ID NO: 196814 - RNA, 17 nt, Homo sapiens
cuuugucccggggcucc

SEQ ID NO: 196815 - RNA, 16 nt, Homo sapiens
aaccaucaucuugcca

SEQ ID NO: 196816 - RNA, 15 nt, Homo sapiens
gccccuguuaccuaa

SEQ ID NO: 196817 - RNA, 15 nt, Homo sapiens
acaauguucauccca

SEQ ID NO: 196818 - RNA, 21 nt, Homo sapiens
caagccuagcccuucucucau

SEQ ID NO: 196819 - RNA, 12 nt, Homo sapiens
auguugaugaaa

SEQ ID NO: 196820 - RNA, 17 nt, Homo sapiens
cucagcuggaucuccau

SEQ ID NO: 196821 - RNA, 17 nt, Homo sapiens
gccugagguuugccagc

SEQ ID NO: 196822 - RNA, 20 nt, Homo sapiens
gacuuuuuuuaaauaguaaa

SEQ ID NO: 196823 - RNA, 18 nt, Homo sapiens
uccggaauccuguccuca

SEQ ID NO: 196824 - RNA, 14 nt, Homo sapiens
agaguugugcacau

SEQ ID NO: 196825 - RNA, 17 nt, Homo sapiens
ucugacucagggcuccu

SEQ ID NO: 196826 - RNA, 17 nt, Homo sapiens
aaucagaacuguuggca

SEQ ID NO: 196827 - RNA, 20 nt, Homo sapiens
gaacuugcugcugagugcac

SEQ ID NO: 196828 - RNA, 23 nt, Homo sapiens
aaggccucccugucuaaaauccc

SEQ ID NO: 196829 - RNA, 23 nt, Homo sapiens
ggcacgaggccaggcagauccca

SEQ ID NO: 196830 - RNA, 13 nt, Homo sapiens
uuucaccauuuga

SEQ ID NO: 196831 - RNA, 20 nt, Homo sapiens
acuaagaugaucaucuccag

SEQ ID NO: 196832 - RNA, 14 nt, Homo sapiens
ucacccaaugcaua

SEQ ID NO: 196833 - RNA, 14 nt, Homo sapiens
uaaaaaugcaacuu

SEQ ID NO: 196834 - RNA, 23 nt, Homo sapiens
cuaaugccugcggaguugugcac

SEQ ID NO: 196835 - RNA, 21 nt, Homo sapiens
ucacacagccaagccagucaa

SEQ ID NO: 196836 - RNA, 12 nt, Homo sapiens
acaagaagccac

SEQ ID NO: 196837 - RNA, 12 nt, Homo sapiens
ggcagcauuuag

SEQ ID NO: 196838 - RNA, 16 nt, Homo sapiens
uggcacccaugcaccu

SEQ ID NO: 196839 - RNA, 20 nt, Homo sapiens
agaauauuuuaaguauugca

SEQ ID NO: 196840 - RNA, 22 nt, Homo sapiens
gccccaugcugcccgcuucuca

SEQ ID NO: 196841 - RNA, 22 nt, Homo sapiens
ucaaacgugaaaaugcuguauu

SEQ ID NO: 196842 - RNA, 15 nt, Homo sapiens
aggaccuuuccacca

SEQ ID NO: 196843 - RNA, 18 nt, Homo sapiens
aaaucuaugaaauaucau

SEQ ID NO: 196844 - RNA, 14 nt, Homo sapiens
aaaacacugugcac

SEQ ID NO: 196845 - RNA, 19 nt, Homo sapiens
gacgaggggugucuugggc

SEQ ID NO: 196846 - RNA, 13 nt, Homo sapiens
uccucuccacugc

SEQ ID NO: 196847 - RNA, 16 nt, Homo sapiens
ccacuccucugacuca

SEQ ID NO: 196848 - RNA, 16 nt, Homo sapiens
uccucuuucaaccuca

SEQ ID NO: 196849 - RNA, 17 nt, Homo sapiens
cuaacuucaaggcccau

SEQ ID NO: 196850 - RNA, 16 nt, Homo sapiens
uauuguuucaauugca

SEQ ID NO: 196851 - RNA, 23 nt, Homo sapiens
uuauaaagggagauaacaaucug

SEQ ID NO: 196852 - RNA, 17 nt, Homo sapiens
gcuucuagaaccaggca

SEQ ID NO: 196853 - RNA, 12 nt, Homo sapiens
cccccuugaggg

SEQ ID NO: 196854 - RNA, 20 nt, Homo sapiens
cuggcuucacagauguguga

SEQ ID NO: 196855 - RNA, 17 nt, Homo sapiens
cuuuguaugcacuuugu

SEQ ID NO: 196856 - RNA, 23 nt, Homo sapiens
uuuuacaauaaaacuuugcugcc

SEQ ID NO: 196857 - RNA, 12 nt, Homo sapiens
ucgaguguuuca

SEQ ID NO: 196858 - RNA, 14 nt, Homo sapiens
ccuuacaguaggag

SEQ ID NO: 196859 - RNA, 13 nt, Homo sapiens
caggcauugccaa

SEQ ID NO: 196860 - RNA, 14 nt, Homo sapiens
guuaguuccuucau

SEQ ID NO: 196861 - RNA, 15 nt, Homo sapiens
cuaagcagaccacug

SEQ ID NO: 196862 - RNA, 18 nt, Homo sapiens
uggaguccgaugauucuc

SEQ ID NO: 196863 - RNA, 15 nt, Homo sapiens
aggcuggccagucca

SEQ ID NO: 196864 - RNA, 14 nt, Homo sapiens
augagagaacugga

SEQ ID NO: 196865 - RNA, 20 nt, Homo sapiens
uacagaaucaaaugcaauuu

SEQ ID NO: 196866 - RNA, 14 nt, Homo sapiens
gucuucaagcagau

SEQ ID NO: 196867 - RNA, 22 nt, Homo sapiens
cauuuccuuuuccuucaagccu

SEQ ID NO: 196868 - RNA, 17 nt, Homo sapiens
cgucuaagucaugagcu

SEQ ID NO: 196869 - RNA, 16 nt, Homo sapiens
cacccuggaggauuuc

SEQ ID NO: 196870 - RNA, 16 nt, Homo sapiens
gucgaacaauucauau

SEQ ID NO: 196871 - RNA, 17 nt, Homo sapiens
cagccaaaaaggacuuu

SEQ ID NO: 196872 - RNA, 18 nt, Homo sapiens
ucugggccaagucaaaga

SEQ ID NO: 196873 - RNA, 18 nt, Homo sapiens
aaagaaagccucagagaa

SEQ ID NO: 196874 - RNA, 13 nt, Homo sapiens
uauauucauuuca

SEQ ID NO: 196875 - RNA, 18 nt, Homo sapiens
aagggcucacgcauucag

SEQ ID NO: 196876 - RNA, 21 nt, Homo sapiens
caagggaauucggugugcacc

SEQ ID NO: 196877 - RNA, 20 nt, Homo sapiens
caacccaauaguuguugauu

SEQ ID NO: 196878 - RNA, 14 nt, Homo sapiens
ugacauuauaugca

SEQ ID NO: 196879 - RNA, 23 nt, Homo sapiens
ugaagucaugcguuuaaucacau

SEQ ID NO: 196880 - RNA, 14 nt, Homo sapiens
gguuucucuguaua

SEQ ID NO: 196881 - RNA, 20 nt, Homo sapiens
ccgggaagagggugauugcu

SEQ ID NO: 196882 - RNA, 17 nt, Homo sapiens
aaggugaaccaugucag

SEQ ID NO: 196883 - RNA, 16 nt, Homo sapiens
aggaugggaaggaggg

SEQ ID NO: 196884 - RNA, 14 nt, Homo sapiens
aacguggggcagca

SEQ ID NO: 196885 - RNA, 13 nt, Homo sapiens
cacugcaagcacu

SEQ ID NO: 196886 - RNA, 19 nt, Homo sapiens
aagccuagcccuucucuca

SEQ ID NO: 196887 - RNA, 15 nt, Homo sapiens
cauagaggugaggga

SEQ ID NO: 196888 - RNA, 23 nt, Homo sapiens
agucaaggauggaugcagaucca

SEQ ID NO: 196889 - RNA, 17 nt, Homo sapiens
auauacaauaacauaau

SEQ ID NO: 196890 - RNA, 17 nt, Homo sapiens
auuuugcauaguaccaa

SEQ ID NO: 196891 - RNA, 23 nt, Homo sapiens
cauuugaaaucuaugaaauauca

SEQ ID NO: 196892 - RNA, 22 nt, Homo sapiens
uaaagcugccggcacagaacuu

SEQ ID NO: 196893 - RNA, 13 nt, Homo sapiens
ugcaacuuguaaa

SEQ ID NO: 196894 - RNA, 21 nt, Homo sapiens
aacuggaggaguuccuugauc

SEQ ID NO: 196895 - RNA, 17 nt, Homo sapiens
gagcaugggacuguucu

SEQ ID NO: 196896 - RNA, 16 nt, Homo sapiens
acagaacuaagaugau

SEQ ID NO: 196897 - RNA, 14 nt, Homo sapiens
uccagaccauucag

SEQ ID NO: 196898 - RNA, 16 nt, Homo sapiens
ucugaugcaagcaaga

SEQ ID NO: 196899 - RNA, 15 nt, Homo sapiens
ccuucuccagacaaa

SEQ ID NO: 196900 - RNA, 14 nt, Homo sapiens
uuauaauauacuau

SEQ ID NO: 196901 - RNA, 15 nt, Homo sapiens
uuguucagaugcuuc

SEQ ID NO: 196902 - RNA, 15 nt, Homo sapiens
uaaaaaugcaacuuc

SEQ ID NO: 196903 - RNA, 22 nt, Homo sapiens
gaccagaaccagagcucagaga

SEQ ID NO: 196904 - RNA, 15 nt, Homo sapiens
uacucauucagggau

SEQ ID NO: 196905 - RNA, 22 nt, Homo sapiens
agcugggagcacaggcacugca

SEQ ID NO: 196906 - RNA, 23 nt, Homo sapiens
accacaggcagcauuuagcacau

SEQ ID NO: 196907 - RNA, 13 nt, Homo sapiens
guuccccacugac

SEQ ID NO: 196908 - RNA, 22 nt, Homo sapiens
acuacacauucaauaagcauca

SEQ ID NO: 196909 - RNA, 20 nt, Homo sapiens
gggaguaggacauaccagcu

SEQ ID NO: 196910 - RNA, 15 nt, Homo sapiens
uuguucuaguuuuca

SEQ ID NO: 196911 - RNA, 15 nt, Homo sapiens
aucauguguguccac

SEQ ID NO: 196912 - RNA, 17 nt, Homo sapiens
cugcacagugcaucuca

SEQ ID NO: 196913 - RNA, 15 nt, Homo sapiens
ggcugaccaugcuca

SEQ ID NO: 196914 - RNA, 10 nt, Homo sapiens
ucucauuucu

SEQ ID NO: 196915 - RNA, 23 nt, Homo sapiens
gagaaagagcacuuaagagaaua

SEQ ID NO: 196916 - RNA, 14 nt, Homo sapiens
gaaugcagggacaa

SEQ ID NO: 196917 - RNA, 19 nt, Homo sapiens
caguguguuucugaucuga

SEQ ID NO: 196918 - RNA, 17 nt, Homo sapiens
cugcuuuggaaaucaca

SEQ ID NO: 196919 - RNA, 22 nt, Homo sapiens
caaggcccauaucugugaaaug

SEQ ID NO: 196920 - RNA, 22 nt, Homo sapiens
gaaacaacaauuucuacuuuga

SEQ ID NO: 196921 - RNA, 21 nt, Homo sapiens
ugagcuuaagaauuuugagca

SEQ ID NO: 196922 - RNA, 20 nt, Homo sapiens
accugaaaacacugugcaca

SEQ ID NO: 196923 - RNA, 21 nt, Homo sapiens
gguuucuggcagccaguaccu

SEQ ID NO: 196924 - RNA, 22 nt, Homo sapiens
acagaacuaagaugaucaucuc

SEQ ID NO: 196925 - RNA, 15 nt, Homo sapiens
acugacuuucucagc

SEQ ID NO: 196926 - RNA, 21 nt, Homo sapiens
agcaugcugugauugugccua

SEQ ID NO: 196927 - RNA, 13 nt, Homo sapiens
auuucacauuaau

SEQ ID NO: 196928 - RNA, 22 nt, Homo sapiens
uacucauucagggauagcacug

SEQ ID NO: 196929 - RNA, 22 nt, Homo sapiens
guagagggaguugucaagucuc

SEQ ID NO: 196930 - RNA, 13 nt, Homo sapiens
uccucugacucag

SEQ ID NO: 196931 - RNA, 22 nt, Homo sapiens
cuaaagaagguuucagaaagaa

SEQ ID NO: 196932 - RNA, 22 nt, Homo sapiens
cugcuugaggaaaacaagcauu

SEQ ID NO: 196933 - RNA, 17 nt, Homo sapiens
gcaguguucaaggccau

SEQ ID NO: 196934 - RNA, 14 nt, Homo sapiens
aaaacugucccuuu

SEQ ID NO: 196935 - RNA, 19 nt, Homo sapiens
ucucuaguuuccagaggcu

SEQ ID NO: 196936 - RNA, 13 nt, Homo sapiens
uugcugugagcaa

SEQ ID NO: 196937 - RNA, 16 nt, Homo sapiens
cauccacuagugcaaa

SEQ ID NO: 196938 - RNA, 15 nt, Homo sapiens
uucccccgcaaugug

SEQ ID NO: 196939 - RNA, 15 nt, Homo sapiens
uccaacaugugcuca

SEQ ID NO: 196940 - RNA, 12 nt, Homo sapiens
cuauuaucucaa

SEQ ID NO: 196941 - RNA, 13 nt, Homo sapiens
cccauggccacuu

SEQ ID NO: 196942 - RNA, 17 nt, Homo sapiens
ccaccccuaaagagaua

SEQ ID NO: 196943 - RNA, 14 nt, Homo sapiens
cagucuuccauuug

SEQ ID NO: 196944 - RNA, 22 nt, Homo sapiens
gcuucacugguugaguguugcu

SEQ ID NO: 196945 - RNA, 16 nt, Homo sapiens
cugggccaagucaaag

SEQ ID NO: 196946 - RNA, 18 nt, Homo sapiens
aaaaugccucaguguauu

SEQ ID NO: 196947 - RNA, 18 nt, Homo sapiens
caauauagcaagauccca

SEQ ID NO: 196948 - RNA, 16 nt, Homo sapiens
ccucuuuuucuagucu

SEQ ID NO: 196949 - RNA, 22 nt, Homo sapiens
auguucacuuuugacaaaggca

SEQ ID NO: 196950 - RNA, 16 nt, Homo sapiens
caaggguuuguugaac

SEQ ID NO: 196951 - RNA, 21 nt, Homo sapiens
caggguuacaaaucuucuuga

SEQ ID NO: 196952 - RNA, 17 nt, Homo sapiens
uaagaugaucaucucca

SEQ ID NO: 196953 - RNA, 19 nt, Homo sapiens
auauaaaguaguccuguga

SEQ ID NO: 196954 - RNA, 13 nt, Homo sapiens
agcccucaucccg

SEQ ID NO: 196955 - RNA, 14 nt, Homo sapiens
auccacuucucuca

SEQ ID NO: 196956 - RNA, 19 nt, Homo sapiens
auuugcugagcauguacug

SEQ ID NO: 196957 - RNA, 23 nt, Homo sapiens
aaggauacuguaacacuuuacaa

SEQ ID NO: 196958 - RNA, 22 nt, Homo sapiens
augccucauuaccuugugcuaa

SEQ ID NO: 196959 - RNA, 18 nt, Homo sapiens
ucccggggcuccacugaa

SEQ ID NO: 196960 - RNA, 23 nt, Homo sapiens
guuucuggcagccaguaccuccu

SEQ ID NO: 196961 - RNA, 15 nt, Homo sapiens
uauuaagccacuuaa

SEQ ID NO: 196962 - RNA, 20 nt, Homo sapiens
uguguacuuuuggguucaca

SEQ ID NO: 196963 - RNA, 19 nt, Homo sapiens
gccgugccuucagcucuac

SEQ ID NO: 196964 - RNA, 14 nt, Homo sapiens
ugagucugugccac

SEQ ID NO: 196965 - RNA, 17 nt, Homo sapiens
agcauugagcaaagggg

SEQ ID NO: 196966 - RNA, 17 nt, Homo sapiens
aguggcucacaccugua

SEQ ID NO: 196967 - RNA, 15 nt, Homo sapiens
aagaagccacagacc

SEQ ID NO: 196968 - RNA, 14 nt, Homo sapiens
aacuugacccccuu

SEQ ID NO: 196969 - RNA, 19 nt, Homo sapiens
ugaagaagagaaugugaca

SEQ ID NO: 196970 - RNA, 15 nt, Homo sapiens
uguaaacugugcacc

SEQ ID NO: 196971 - RNA, 16 nt, Homo sapiens
gaagagaaugugacag

SEQ ID NO: 196972 - RNA, 15 nt, Homo sapiens
cucuuuuucuagucu

SEQ ID NO: 196973 - RNA, 15 nt, Homo sapiens
cugaagaacaguaac

SEQ ID NO: 196974 - RNA, 21 nt, Homo sapiens
ccugaaguaagcaaagacuuu

SEQ ID NO: 196975 - RNA, 17 nt, Homo sapiens
gaaaacaguauuuucca

SEQ ID NO: 196976 - RNA, 10 nt, Homo sapiens
uuuucacugc

SEQ ID NO: 196977 - RNA, 13 nt, Homo sapiens
cagucaaccuggg

SEQ ID NO: 196978 - RNA, 17 nt, Homo sapiens
aaacaaauguauuucaa

SEQ ID NO: 196979 - RNA, 18 nt, Homo sapiens
guuggccugcacuggugu

SEQ ID NO: 196980 - RNA, 16 nt, Homo sapiens
ucuuagucgagccaag

SEQ ID NO: 196981 - RNA, 18 nt, Homo sapiens
aagccuagcccuucucuc

SEQ ID NO: 196982 - RNA, 14 nt, Homo sapiens
ucagaguugugcac

SEQ ID NO: 196983 - RNA, 13 nt, Homo sapiens
aaacaaacaugac

SEQ ID NO: 196984 - RNA, 16 nt, Homo sapiens
uuacuaacuaaacucu

SEQ ID NO: 196985 - RNA, 18 nt, Homo sapiens
aguguaugacugcacaug

SEQ ID NO: 196986 - RNA, 22 nt, Homo sapiens
agguauucguaaggaugggaag

SEQ ID NO: 196987 - RNA, 14 nt, Homo sapiens
aagcagucgugccu

SEQ ID NO: 196988 - RNA, 18 nt, Homo sapiens
gaaccaggcaacuuggga

SEQ ID NO: 196989 - RNA, 17 nt, Homo sapiens
guagaagccacuauuac

SEQ ID NO: 196990 - RNA, 14 nt, Homo sapiens
cuccugugcaacuu

SEQ ID NO: 196991 - RNA, 17 nt, Homo sapiens
uucaauugcaucuccca

SEQ ID NO: 196992 - RNA, 20 nt, Homo sapiens
cuccgagaggugggccaguc

SEQ ID NO: 196993 - RNA, 18 nt, Homo sapiens
agggacuugaaguuguua

SEQ ID NO: 196994 - RNA, 15 nt, Homo sapiens
ucuucagggggccag

SEQ ID NO: 196995 - RNA, 16 nt, Homo sapiens
ucagggauagcacuga

SEQ ID NO: 196996 - RNA, 14 nt, Homo sapiens
cugucuuucacuga

SEQ ID NO: 196997 - RNA, 16 nt, Homo sapiens
aggcccccacuugccu

SEQ ID NO: 196998 - RNA, 14 nt, Homo sapiens
uguuccccacugac

SEQ ID NO: 196999 - RNA, 23 nt, Homo sapiens
acacccuauauuuugcauaguac

SEQ ID NO: 197000 - RNA, 13 nt, Homo sapiens
gagaacuacucag

SEQ ID NO: 197001 - RNA, 21 nt, Homo sapiens
ggaggcuccagagggcacucu

SEQ ID NO: 197002 - RNA, 13 nt, Homo sapiens
caaggaagucaaa

SEQ ID NO: 197003 - RNA, 14 nt, Homo sapiens
uaauguacaucugg

SEQ ID NO: 197004 - RNA, 15 nt, Homo sapiens
uaaaauuaugccaua

SEQ ID NO: 197005 - RNA, 13 nt, Homo sapiens
agaaucaaaugca

SEQ ID NO: 197006 - RNA, 14 nt, Homo sapiens
guucccccugugca

SEQ ID NO: 197007 - RNA, 18 nt, Homo sapiens
aagggaugucucacaucc

SEQ ID NO: 197008 - RNA, 23 nt, Homo sapiens
ucucccuguuggucgguggguug

SEQ ID NO: 197009 - RNA, 23 nt, Homo sapiens
augcuggcauuugcaccuaccuc

SEQ ID NO: 197010 - RNA, 22 nt, Homo sapiens
uggagguauucaauauccuuug

SEQ ID NO: 197011 - RNA, 21 nt, Homo sapiens
ugauauauaaaugugauugca

SEQ ID NO: 197012 - RNA, 14 nt, Homo sapiens
cuuaguauuugcau

SEQ ID NO: 197013 - RNA, 22 nt, Homo sapiens
ugugacauuauaugcacuagca

SEQ ID NO: 197014 - RNA, 21 nt, Homo sapiens
uaccugggcauucuuguuuca

SEQ ID NO: 197015 - RNA, 18 nt, Homo sapiens
uuggcaggcuggccaguc

SEQ ID NO: 197016 - RNA, 12 nt, Homo sapiens
agcucaucucag

SEQ ID NO: 197017 - RNA, 21 nt, Homo sapiens
uugccucugaagccuauguau

SEQ ID NO: 197018 - RNA, 23 nt, Homo sapiens
cacugcuugaggaaaacaagcau

SEQ ID NO: 197019 - RNA, 16 nt, Homo sapiens
cacagguucaugccac

SEQ ID NO: 197020 - RNA, 21 nt, Homo sapiens
ugcauuugugcccacucucca

SEQ ID NO: 197021 - RNA, 18 nt, Homo sapiens
caauuauagaaagccaaa

SEQ ID NO: 197022 - RNA, 15 nt, Homo sapiens
agccaaguuaagaau

SEQ ID NO: 197023 - RNA, 16 nt, Homo sapiens
cgcaccacuguguauu

SEQ ID NO: 197024 - RNA, 15 nt, Homo sapiens
uugaaugcagggaca

SEQ ID NO: 197025 - RNA, 16 nt, Homo sapiens
gucagaguugugcaca

SEQ ID NO: 197026 - RNA, 17 nt, Homo sapiens
cagucagaguugugcac

SEQ ID NO: 197027 - RNA, 14 nt, Homo sapiens
ugcaccaccaagcc

SEQ ID NO: 197028 - RNA, 15 nt, Homo sapiens
uccauuugcuuuguc

SEQ ID NO: 197029 - RNA, 12 nt, Homo sapiens
cuugcacaaaca

SEQ ID NO: 197030 - RNA, 23 nt, Homo sapiens
auuucagguuuuguaaagaugcc

SEQ ID NO: 197031 - RNA, 15 nt, Homo sapiens
acuagggaucccuca

SEQ ID NO: 197032 - RNA, 14 nt, Homo sapiens
acugcuugaggaaa

SEQ ID NO: 197033 - RNA, 16 nt, Homo sapiens
cauaauguuacauuau

SEQ ID NO: 197034 - RNA, 24 nt, Homo sapiens
uaagaguggaaccaacacuaacau

SEQ ID NO: 197035 - RNA, 18 nt, Homo sapiens
uggugacccagucagagu

SEQ ID NO: 197036 - RNA, 22 nt, Homo sapiens
cuccaggcugucuuucacugaa

SEQ ID NO: 197037 - RNA, 21 nt, Homo sapiens
ccugaagaacaguaacugcca

SEQ ID NO: 197038 - RNA, 14 nt, Homo sapiens
gccuuuuguguuuu

SEQ ID NO: 197039 - RNA, 17 nt, Homo sapiens
uuguuacuucugaggua

SEQ ID NO: 197040 - RNA, 14 nt, Homo sapiens
cuggcccagccaaa

SEQ ID NO: 197041 - RNA, 15 nt, Homo sapiens
aaauacuucuugaag

SEQ ID NO: 197042 - RNA, 18 nt, Homo sapiens
cuguauucccaguuacuu

SEQ ID NO: 197043 - RNA, 13 nt, Homo sapiens
gccaaaagccuuu

SEQ ID NO: 197044 - RNA, 18 nt, Homo sapiens
uuaaugaagaaaguggaa

SEQ ID NO: 197045 - RNA, 23 nt, Homo sapiens
uggguucacagaagcacagcacc

SEQ ID NO: 197046 - RNA, 15 nt, Homo sapiens
uuugcauguuuugua

SEQ ID NO: 197047 - RNA, 19 nt, Homo sapiens
cucuuccuacccuuccuca

SEQ ID NO: 197048 - RNA, 13 nt, Homo sapiens
acucauucaggga

SEQ ID NO: 197049 - RNA, 18 nt, Homo sapiens
cauaugauugugcacaua

SEQ ID NO: 197050 - RNA, 20 nt, Homo sapiens
acuucagcucacacaugaga

SEQ ID NO: 197051 - RNA, 22 nt, Homo sapiens
aggcuggcagugacagaacuaa

SEQ ID NO: 197052 - RNA, 22 nt, Homo sapiens
ucaagccuagcccuucucucau

SEQ ID NO: 197053 - RNA, 15 nt, Homo sapiens
uuugaaaucuaugaa

SEQ ID NO: 197054 - RNA, 18 nt, Homo sapiens
accugaaaacacugugca

SEQ ID NO: 197055 - RNA, 21 nt, Homo sapiens
gguuuuauaaggcugauguca

SEQ ID NO: 197056 - RNA, 21 nt, Homo sapiens
cuucucacccuaugugggugg

SEQ ID NO: 197057 - RNA, 23 nt, Homo sapiens
aucauauaauaaauguacauuaa

SEQ ID NO: 197058 - RNA, 22 nt, Homo sapiens
auauguugaugaaaaauagcaa

SEQ ID NO: 197059 - RNA, 16 nt, Homo sapiens
ucagaguugugcacau

SEQ ID NO: 197060 - RNA, 15 nt, Homo sapiens
agguccagcucugga

SEQ ID NO: 197061 - RNA, 22 nt, Homo sapiens
ugccucauuaccuugugcuaau

SEQ ID NO: 197062 - RNA, 17 nt, Homo sapiens
uugacaaccaugagacc

SEQ ID NO: 197063 - RNA, 14 nt, Homo sapiens
auuucuucacucaa

SEQ ID NO: 197064 - RNA, 17 nt, Homo sapiens
gcauuuucaagcaguua

SEQ ID NO: 197065 - RNA, 16 nt, Homo sapiens
cuuguuuuaugcucag

SEQ ID NO: 197066 - RNA, 12 nt, Homo sapiens
ccucugacucag

SEQ ID NO: 197067 - RNA, 19 nt, Homo sapiens
acuucaguauguugucaaa

SEQ ID NO: 197068 - RNA, 21 nt, Homo sapiens
acacugggcuucuagaaccag

SEQ ID NO: 197069 - RNA, 15 nt, Homo sapiens
guauaguacuggcau

SEQ ID NO: 197070 - RNA, 19 nt, Homo sapiens
ugggucuucagggggccag

SEQ ID NO: 197071 - RNA, 19 nt, Homo sapiens
cccuggccuccccugccac

SEQ ID NO: 197072 - RNA, 15 nt, Homo sapiens
ucugucaaugucuug

SEQ ID NO: 197073 - RNA, 14 nt, Homo sapiens
uuugucucauccca

SEQ ID NO: 197074 - RNA, 23 nt, Homo sapiens
gcacagagagggggccaccuccc

SEQ ID NO: 197075 - RNA, 20 nt, Homo sapiens
cagauguccuugaugcucau

SEQ ID NO: 197076 - RNA, 19 nt, Homo sapiens
ccacuuagaaauugcauuu

SEQ ID NO: 197077 - RNA, 20 nt, Homo sapiens
aaugugacauuauaugcacu

SEQ ID NO: 197078 - RNA, 21 nt, Homo sapiens
agcaguugaaacaagaagcca

SEQ ID NO: 197079 - RNA, 20 nt, Homo sapiens
uaaagaccugacaccuuuca

SEQ ID NO: 197080 - RNA, 18 nt, Homo sapiens
aguuacucauucagggau

SEQ ID NO: 197081 - RNA, 17 nt, Homo sapiens
acugagcaaagcauuga

SEQ ID NO: 197082 - RNA, 22 nt, Homo sapiens
acgccauuuccuuuuccuucaa

SEQ ID NO: 197083 - RNA, 15 nt, Homo sapiens
uuuucuagucuucau

SEQ ID NO: 197084 - RNA, 16 nt, Homo sapiens
gagggcagucgauaga

SEQ ID NO: 197085 - RNA, 13 nt, Homo sapiens
uagcauacgguau

SEQ ID NO: 197086 - RNA, 18 nt, Homo sapiens
cacgucuggcuucacaga

SEQ ID NO: 197087 - RNA, 21 nt, Homo sapiens
ccucugggccaagucaaagac

SEQ ID NO: 197088 - RNA, 19 nt, Homo sapiens
auauuuuaaaaucugucac

SEQ ID NO: 197089 - RNA, 21 nt, Homo sapiens
gcaaauccuugauacugcuca

SEQ ID NO: 197090 - RNA, 20 nt, Homo sapiens
ccauagcaagauugcuuaaa

SEQ ID NO: 197091 - RNA, 18 nt, Homo sapiens
gcaaaauacaugacauuu

SEQ ID NO: 197092 - RNA, 21 nt, Homo sapiens
gagacugucucaagagggcac

SEQ ID NO: 197093 - RNA, 12 nt, Homo sapiens
cauguacaugaa

SEQ ID NO: 197094 - RNA, 15 nt, Homo sapiens
acccuuccucaccac

SEQ ID NO: 197095 - RNA, 14 nt, Homo sapiens
uuaccuaguacaag

SEQ ID NO: 197096 - RNA, 12 nt, Homo sapiens
augugugauuca

SEQ ID NO: 197097 - RNA, 16 nt, Homo sapiens
ggcccauaucugugaa

SEQ ID NO: 197098 - RNA, 17 nt, Homo sapiens
ucccacccccaucucuc

SEQ ID NO: 197099 - RNA, 17 nt, Homo sapiens
gacuauggcuaccaaaa

SEQ ID NO: 197100 - RNA, 22 nt, Homo sapiens
ggacuauuauaauuuaaugcau

SEQ ID NO: 197101 - RNA, 15 nt, Homo sapiens
agccuccucucucaa

SEQ ID NO: 197102 - RNA, 17 nt, Homo sapiens
aaacuauguaacaugua

SEQ ID NO: 197103 - RNA, 17 nt, Homo sapiens
gaauggagcuggcccuc

SEQ ID NO: 197104 - RNA, 11 nt, Homo sapiens
cugaauaugaa

SEQ ID NO: 197105 - RNA, 12 nt, Homo sapiens
gacucacauccu

SEQ ID NO: 197106 - RNA, 21 nt, Homo sapiens
uuccuugauggagauauuuac

SEQ ID NO: 197107 - RNA, 23 nt, Homo sapiens
cuugaaaagacaucaagcacaga

SEQ ID NO: 197108 - RNA, 13 nt, Homo sapiens
agagugucuuucc

SEQ ID NO: 197109 - RNA, 20 nt, Homo sapiens
uugggauugagucugugcca

SEQ ID NO: 197110 - RNA, 17 nt, Homo sapiens
gaccuggugcugccucu

SEQ ID NO: 197111 - RNA, 13 nt, Homo sapiens
aggaguuccuuga

SEQ ID NO: 197112 - RNA, 21 nt, Homo sapiens
aucucaaacuacuggcaauuu

SEQ ID NO: 197113 - RNA, 23 nt, Homo sapiens
agaauguucuuauguugcccagu

SEQ ID NO: 197114 - RNA, 15 nt, Homo sapiens
acacuaacauauaau

SEQ ID NO: 197115 - RNA, 16 nt, Homo sapiens
gaagugugugaucugu

SEQ ID NO: 197116 - RNA, 13 nt, Homo sapiens
aaggccucugugg

SEQ ID NO: 197117 - RNA, 19 nt, Homo sapiens
agucacugacccugugcag

SEQ ID NO: 197118 - RNA, 21 nt, Homo sapiens
aauguacaacuuuuuaccuag

SEQ ID NO: 197119 - RNA, 14 nt, Homo sapiens
aaaauauagcugua

SEQ ID NO: 197120 - RNA, 19 nt, Homo sapiens
acugcacagugcaucucag

SEQ ID NO: 197121 - RNA, 19 nt, Homo sapiens
gauugauagaguguuauca

SEQ ID NO: 197122 - RNA, 12 nt, Homo sapiens
gaugagcauuua

SEQ ID NO: 197123 - RNA, 13 nt, Homo sapiens
accauguacauga

SEQ ID NO: 197124 - RNA, 23 nt, Homo sapiens
aggcccuuccucuccacugccuu

SEQ ID NO: 197125 - RNA, 14 nt, Homo sapiens
uugaugcaugcacu

SEQ ID NO: 197126 - RNA, 19 nt, Homo sapiens
gaauuuucucuaacuucaa

SEQ ID NO: 197127 - RNA, 21 nt, Homo sapiens
caaacuggggccucccugguc

SEQ ID NO: 197128 - RNA, 17 nt, Homo sapiens
cagaaaaacugugggua

SEQ ID NO: 197129 - RNA, 13 nt, Homo sapiens
agggucauagcau

SEQ ID NO: 197130 - RNA, 14 nt, Homo sapiens
ugggagugagggau

SEQ ID NO: 197131 - RNA, 18 nt, Homo sapiens
ugcaauaggugugcguca

SEQ ID NO: 197132 - RNA, 16 nt, Homo sapiens
auggcucuacuuucag

SEQ ID NO: 197133 - RNA, 22 nt, Homo sapiens
gccaguaccuccugccccaugc

SEQ ID NO: 197134 - RNA, 19 nt, Homo sapiens
gugcccugcaucccucucc

SEQ ID NO: 197135 - RNA, 17 nt, Homo sapiens
aagauacagaacucuuu

SEQ ID NO: 197136 - RNA, 17 nt, Homo sapiens
cugaaguaagcaaagac

SEQ ID NO: 197137 - RNA, 23 nt, Homo sapiens
ggaagcgagcuuugcugggagag

SEQ ID NO: 197138 - RNA, 16 nt, Homo sapiens
ccauaucugugaaaug

SEQ ID NO: 197139 - RNA, 20 nt, Homo sapiens
cuauggcacccaugcaccuu

SEQ ID NO: 197140 - RNA, 19 nt, Homo sapiens
gggucagagaggagucaga

SEQ ID NO: 197141 - RNA, 15 nt, Homo sapiens
cagcuggaucuccau

SEQ ID NO: 197142 - RNA, 16 nt, Homo sapiens
ucucaaacuacuggca

SEQ ID NO: 197143 - RNA, 14 nt, Homo sapiens
ugccagggccaguc

SEQ ID NO: 197144 - RNA, 15 nt, Homo sapiens
cauuugcaccuaccu

SEQ ID NO: 197145 - RNA, 11 nt, Homo sapiens
acuugcacaaa

SEQ ID NO: 197146 - RNA, 14 nt, Homo sapiens
ugacuugacuuuag

SEQ ID NO: 197147 - RNA, 15 nt, Homo sapiens
cuucacaugcaucaa

SEQ ID NO: 197148 - RNA, 15 nt, Homo sapiens
acaccuguaauccca

SEQ ID NO: 197149 - RNA, 16 nt, Homo sapiens
accgagucucuucucc

SEQ ID NO: 197150 - RNA, 14 nt, Homo sapiens
cccuguaugauucc

SEQ ID NO: 197151 - RNA, 21 nt, Homo sapiens
cugcauaccaaccugggcaau

SEQ ID NO: 197152 - RNA, 19 nt, Homo sapiens
cgacuuguuuuugcacaug

SEQ ID NO: 197153 - RNA, 19 nt, Homo sapiens
uccugccugcggaccagau

SEQ ID NO: 197154 - RNA, 18 nt, Homo sapiens
acuguucccccugugcag

SEQ ID NO: 197155 - RNA, 19 nt, Homo sapiens
caucaucuccugccuuccu

SEQ ID NO: 197156 - RNA, 18 nt, Homo sapiens
uguacaaauauaagaaua

SEQ ID NO: 197157 - RNA, 16 nt, Homo sapiens
cucucaccuccuaaag

SEQ ID NO: 197158 - RNA, 15 nt, Homo sapiens
caaaaggacucucag

SEQ ID NO: 197159 - RNA, 14 nt, Homo sapiens
ccacaggacauuuc

SEQ ID NO: 197160 - RNA, 18 nt, Homo sapiens
gcauaugaggaugcagag

SEQ ID NO: 197161 - RNA, 20 nt, Homo sapiens
acuugcacaaaaucacacag

SEQ ID NO: 197162 - RNA, 16 nt, Homo sapiens
agggccacaugggagg

SEQ ID NO: 197163 - RNA, 14 nt, Homo sapiens
ugggcagagcccaa

SEQ ID NO: 197164 - RNA, 12 nt, Homo sapiens
ucaaugcuauaa

SEQ ID NO: 197165 - RNA, 19 nt, Homo sapiens
uggccuaaaaaugcaacuu

SEQ ID NO: 197166 - RNA, 20 nt, Homo sapiens
aagaugcauuaucuaugaua

SEQ ID NO: 197167 - RNA, 15 nt, Homo sapiens
ugguggagggccaca

SEQ ID NO: 197168 - RNA, 14 nt, Homo sapiens
agcuacugacuaug

SEQ ID NO: 197169 - RNA, 19 nt, Homo sapiens
uuugcauaagugcaugaca

SEQ ID NO: 197170 - RNA, 18 nt, Homo sapiens
aguuugauuauucagugu

SEQ ID NO: 197171 - RNA, 23 nt, Homo sapiens
guuaggaaaauuucacauuaaua

SEQ ID NO: 197172 - RNA, 19 nt, Homo sapiens
ucucaggaccaaagcuuuc

SEQ ID NO: 197173 - RNA, 19 nt, Homo sapiens
gauggagauauuuacauga

SEQ ID NO: 197174 - RNA, 17 nt, Homo sapiens
ugauccacuucucucag

SEQ ID NO: 197175 - RNA, 12 nt, Homo sapiens
cagaauggagcu

SEQ ID NO: 197176 - RNA, 19 nt, Homo sapiens
gcaccacuguguauuuaac

SEQ ID NO: 197177 - RNA, 19 nt, Homo sapiens
gcugagugcaccacuucaa

SEQ ID NO: 197178 - RNA, 19 nt, Homo sapiens
gaacuggaggaguuccuug

SEQ ID NO: 197179 - RNA, 16 nt, Homo sapiens
aucaucaucauucuca

SEQ ID NO: 197180 - RNA, 18 nt, Homo sapiens
auccacuucucucaggau

SEQ ID NO: 197181 - RNA, 18 nt, Homo sapiens
ucagugaauaaaccauca

SEQ ID NO: 197182 - RNA, 15 nt, Homo sapiens
agacuccugugcaac

SEQ ID NO: 197183 - RNA, 17 nt, Homo sapiens
auuuuuauagacaaaua

SEQ ID NO: 197184 - RNA, 20 nt, Homo sapiens
cauauccaacaugugcucag

SEQ ID NO: 197185 - RNA, 18 nt, Homo sapiens
agcuuagacuaaggccau

SEQ ID NO: 197186 - RNA, 15 nt, Homo sapiens
gugaauaaaccauca

SEQ ID NO: 197187 - RNA, 17 nt, Homo sapiens
auauccaacaugugcuc

SEQ ID NO: 197188 - RNA, 16 nt, Homo sapiens
cagaccauucaggaca

SEQ ID NO: 197189 - RNA, 12 nt, Homo sapiens
cuggaagccaaa

SEQ ID NO: 197190 - RNA, 20 nt, Homo sapiens
uuaaucacaccguccuccac

SEQ ID NO: 197191 - RNA, 14 nt, Homo sapiens
aggguuacaaaucu

SEQ ID NO: 197192 - RNA, 15 nt, Homo sapiens
aaauuguauuaucaa

SEQ ID NO: 197193 - RNA, 16 nt, Homo sapiens
uugcuggcaaagacag

SEQ ID NO: 197194 - RNA, 17 nt, Homo sapiens
guccauuguccaauccu

SEQ ID NO: 197195 - RNA, 13 nt, Homo sapiens
cagguaaggugag

SEQ ID NO: 197196 - RNA, 13 nt, Homo sapiens
caugaauaugauu

SEQ ID NO: 197197 - RNA, 14 nt, Homo sapiens
gacuguacuccucc

SEQ ID NO: 197198 - RNA, 20 nt, Homo sapiens
ccagaccauucaggacacag

SEQ ID NO: 197199 - RNA, 15 nt, Homo sapiens
uccuuucacaaccuu

SEQ ID NO: 197200 - RNA, 13 nt, Homo sapiens
auggccagccaac

SEQ ID NO: 197201 - RNA, 20 nt, Homo sapiens
gaagaacaguaacugccauc

SEQ ID NO: 197202 - RNA, 16 nt, Homo sapiens
gucugggcacagucag

SEQ ID NO: 197203 - RNA, 15 nt, Homo sapiens
gucuaaaaugccuca

SEQ ID NO: 197204 - RNA, 14 nt, Homo sapiens
ugucugacaaccuc

SEQ ID NO: 197205 - RNA, 17 nt, Homo sapiens
guuucugguggucuguu

SEQ ID NO: 197206 - RNA, 16 nt, Homo sapiens
augcauaaaugcgauc

SEQ ID NO: 197207 - RNA, 22 nt, Homo sapiens
cacaggcagcauuuagcacaua

SEQ ID NO: 197208 - RNA, 18 nt, Homo sapiens
cuaaauccuuuacuguua

SEQ ID NO: 197209 - RNA, 22 nt, Homo sapiens
uuugucccggggcuccacugaa

SEQ ID NO: 197210 - RNA, 19 nt, Homo sapiens
uggguuggaaaacaguauu

SEQ ID NO: 197211 - RNA, 13 nt, Homo sapiens
auauucauuugga

SEQ ID NO: 197212 - RNA, 14 nt, Homo sapiens
ugguccgaucuuug

SEQ ID NO: 197213 - RNA, 23 nt, Homo sapiens
ucagggauagcacugagcaaagc

SEQ ID NO: 197214 - RNA, 21 nt, Homo sapiens
ugcugggagaggggguagcua

SEQ ID NO: 197215 - RNA, 14 nt, Homo sapiens
auuacaauugugag

SEQ ID NO: 197216 - RNA, 16 nt, Homo sapiens
cuuccuacccuuccuc

SEQ ID NO: 197217 - RNA, 22 nt, Homo sapiens
uucccugaauguauugaacuug

SEQ ID NO: 197218 - RNA, 21 nt, Homo sapiens
cuuaguuacucauucagggau

SEQ ID NO: 197219 - RNA, 16 nt, Homo sapiens
auuucucucugacccu

SEQ ID NO: 197220 - RNA, 20 nt, Homo sapiens
uccaacaugugcucagggaa

SEQ ID NO: 197221 - RNA, 14 nt, Homo sapiens
gcuuuguugcccag

SEQ ID NO: 197222 - RNA, 18 nt, Homo sapiens
uaagaugaucaucuccag

SEQ ID NO: 197223 - RNA, 10 nt, Homo sapiens
cgaguacuuc

SEQ ID NO: 197224 - RNA, 18 nt, Homo sapiens
ccuaaaaggaaaucucac

SEQ ID NO: 197225 - RNA, 13 nt, Homo sapiens
uaguuuucauaca

SEQ ID NO: 197226 - RNA, 15 nt, Homo sapiens
ggcaaagccuaguga

SEQ ID NO: 197227 - RNA, 14 nt, Homo sapiens
aucauuccuugaga

SEQ ID NO: 197228 - RNA, 14 nt, Homo sapiens
acaugaagaagcua

SEQ ID NO: 197229 - RNA, 22 nt, Homo sapiens
cgcugagcgaggagaugcuccu

SEQ ID NO: 197230 - RNA, 18 nt, Homo sapiens
auguuagccacaguguau

SEQ ID NO: 197231 - RNA, 17 nt, Homo sapiens
ucuaaguaaugaugucg

SEQ ID NO: 197232 - RNA, 19 nt, Homo sapiens
agacaguguuuucugggau

SEQ ID NO: 197233 - RNA, 20 nt, Homo sapiens
ugaugcaagcaagaaacacu

SEQ ID NO: 197234 - RNA, 17 nt, Homo sapiens
aaagccugccucuucca

SEQ ID NO: 197235 - RNA, 19 nt, Homo sapiens
gcuucacagaugugugauu

SEQ ID NO: 197236 - RNA, 16 nt, Homo sapiens
cuagauuuaugaauac

SEQ ID NO: 197237 - RNA, 21 nt, Homo sapiens
aggcgccccuucccccuccaa

SEQ ID NO: 197238 - RNA, 14 nt, Homo sapiens
auacuacacauuca

SEQ ID NO: 197239 - RNA, 12 nt, Homo sapiens
ucauucagggau

SEQ ID NO: 197240 - RNA, 19 nt, Homo sapiens
uaccuaguagucauuucau

SEQ ID NO: 197241 - RNA, 11 nt, Homo sapiens
aaccucagggc

SEQ ID NO: 197242 - RNA, 13 nt, Homo sapiens
ugggaccacagac

SEQ ID NO: 197243 - RNA, 18 nt, Homo sapiens
aauauuugcugacagcug

SEQ ID NO: 197244 - RNA, 17 nt, Homo sapiens
guuaggaaaauuucaca

SEQ ID NO: 197245 - RNA, 23 nt, Homo sapiens
acagcucgggcccucugugagau

SEQ ID NO: 197246 - RNA, 23 nt, Homo sapiens
cuuguuccccacugacagccucc

SEQ ID NO: 197247 - RNA, 13 nt, Homo sapiens
cugucuccauggc

SEQ ID NO: 197248 - RNA, 21 nt, Homo sapiens
cacagagauaauucuagcuuu

SEQ ID NO: 197249 - RNA, 16 nt, Homo sapiens
uacuucaagaucugaa

SEQ ID NO: 197250 - RNA, 22 nt, Homo sapiens
ucuuaaguuguggagagugcaa

SEQ ID NO: 197251 - RNA, 20 nt, Homo sapiens
acauucugcaagcacaucug

SEQ ID NO: 197252 - RNA, 23 nt, Homo sapiens
uaaaaauugugaucagaccauaa

SEQ ID NO: 197253 - RNA, 16 nt, Homo sapiens
ccauguacaugaagaa

SEQ ID NO: 197254 - RNA, 18 nt, Homo sapiens
gucuaggaacauacuuca

SEQ ID NO: 197255 - RNA, 12 nt, Homo sapiens
uguaugcacuuu

SEQ ID NO: 197256 - RNA, 17 nt, Homo sapiens
cucacugcaagcacugc

SEQ ID NO: 197257 - RNA, 16 nt, Homo sapiens
cauaagaaaacuaaga

SEQ ID NO: 197258 - RNA, 17 nt, Homo sapiens
cucccugaaguaagcaa

SEQ ID NO: 197259 - RNA, 18 nt, Homo sapiens
cucagucucugagcagug

SEQ ID NO: 197260 - RNA, 14 nt, Homo sapiens
uuucuuacauuagc

SEQ ID NO: 197261 - RNA, 20 nt, Homo sapiens
cuccaguuuauagaccagaa

SEQ ID NO: 197262 - RNA, 20 nt, Homo sapiens
uccccuggggagucugggca

SEQ ID NO: 197263 - RNA, 21 nt, Homo sapiens
guguuaucagucauaacuaaa

SEQ ID NO: 197264 - RNA, 17 nt, Homo sapiens
uggccuccccugccacc

SEQ ID NO: 197265 - RNA, 15 nt, Homo sapiens
ucuuacauuagcagu

SEQ ID NO: 197266 - RNA, 16 nt, Homo sapiens
aaauuuuuguuuauaa

SEQ ID NO: 197267 - RNA, 15 nt, Homo sapiens
aguguagguaucauu

SEQ ID NO: 197268 - RNA, 19 nt, Homo sapiens
ugagggagccuggccccau

SEQ ID NO: 197269 - RNA, 18 nt, Homo sapiens
uaccuaguagucauuuca

SEQ ID NO: 197270 - RNA, 14 nt, Homo sapiens
auuuuugugcacau

SEQ ID NO: 197271 - RNA, 18 nt, Homo sapiens
ucccucacuguugaauuu

SEQ ID NO: 197272 - RNA, 14 nt, Homo sapiens
caguagauuuucca

SEQ ID NO: 197273 - RNA, 22 nt, Homo sapiens
ccuuacauuugaaaucuaugaa

SEQ ID NO: 197274 - RNA, 17 nt, Homo sapiens
gccuaaaaaugcaacuu

SEQ ID NO: 197275 - RNA, 17 nt, Homo sapiens
cucugaaaccaguguua

SEQ ID NO: 197276 - RNA, 19 nt, Homo sapiens
augugacauuauaugcacu

SEQ ID NO: 197277 - RNA, 19 nt, Homo sapiens
cuccuggaagcgagcuuug

SEQ ID NO: 197278 - RNA, 13 nt, Homo sapiens
ggggcagcacaga

SEQ ID NO: 197279 - RNA, 12 nt, Homo sapiens
uauuuauagucg

SEQ ID NO: 197280 - RNA, 15 nt, Homo sapiens
aaaugagaacaugaa

SEQ ID NO: 197281 - RNA, 16 nt, Homo sapiens
gaugccuucuccagac

SEQ ID NO: 197282 - RNA, 20 nt, Homo sapiens
gaaucucuuuuugcuuucga

SEQ ID NO: 197283 - RNA, 13 nt, Homo sapiens
cucaggucagggu

SEQ ID NO: 197284 - RNA, 13 nt, Homo sapiens
ucaaagacauucu

SEQ ID NO: 197285 - RNA, 16 nt, Homo sapiens
agcauuuagcacauac

SEQ ID NO: 197286 - RNA, 16 nt, Homo sapiens
cagacuccugugcaac

SEQ ID NO: 197287 - RNA, 23 nt, Homo sapiens
uucagggggccaggugcacagac

SEQ ID NO: 197288 - RNA, 15 nt, Homo sapiens
cuagauuuaugaaua

SEQ ID NO: 197289 - RNA, 20 nt, Homo sapiens
acugcucauuuggaucccag

SEQ ID NO: 197290 - RNA, 18 nt, Homo sapiens
aauuguaucaaaugugac

SEQ ID NO: 197291 - RNA, 13 nt, Homo sapiens
aagcucaucucag

SEQ ID NO: 197292 - RNA, 15 nt, Homo sapiens
caaaggauacuguaa

SEQ ID NO: 197293 - RNA, 12 nt, Homo sapiens
acgagcagggau

SEQ ID NO: 197294 - RNA, 13 nt, Homo sapiens
ugucagcaaaaag

SEQ ID NO: 197295 - RNA, 16 nt, Homo sapiens
gagaguggcuccuccc

SEQ ID NO: 197296 - RNA, 22 nt, Homo sapiens
augaucaucacaaucaucauca

SEQ ID NO: 197297 - RNA, 16 nt, Homo sapiens
acauucgaguguuuca

SEQ ID NO: 197298 - RNA, 17 nt, Homo sapiens
accucgcuggacucuca

SEQ ID NO: 197299 - RNA, 18 nt, Homo sapiens
agucguggggugugcugg

SEQ ID NO: 197300 - RNA, 16 nt, Homo sapiens
uaggcagacacaggga

SEQ ID NO: 197301 - RNA, 23 nt, Homo sapiens
ucaggccacauggcuaaagaagg

SEQ ID NO: 197302 - RNA, 11 nt, Homo sapiens
auugugcacau

SEQ ID NO: 197303 - RNA, 18 nt, Homo sapiens
ccaacaugugcucaggga

SEQ ID NO: 197304 - RNA, 23 nt, Homo sapiens
auaguacagguaaggugagggaa

SEQ ID NO: 197305 - RNA, 16 nt, Homo sapiens
cuguauuaagccacuu

SEQ ID NO: 197306 - RNA, 15 nt, Homo sapiens
cagagcuucccugac

SEQ ID NO: 197307 - RNA, 12 nt, Homo sapiens
caguguguuucu

SEQ ID NO: 197308 - RNA, 15 nt, Homo sapiens
uaaguaaugaugucg

SEQ ID NO: 197309 - RNA, 22 nt, Homo sapiens
ucaaugcuauaacuauguugau

SEQ ID NO: 197310 - RNA, 21 nt, Homo sapiens
uucaugaguuuuucccagcua

SEQ ID NO: 197311 - RNA, 18 nt, Homo sapiens
augagaucuaggugagga

SEQ ID NO: 197312 - RNA, 18 nt, Homo sapiens
ucccuuugaaaugaauau

SEQ ID NO: 197313 - RNA, 13 nt, Homo sapiens
caaccuaugguau

SEQ ID NO: 197314 - RNA, 16 nt, Homo sapiens
aauaauguacaucugg

SEQ ID NO: 197315 - RNA, 15 nt, Homo sapiens
agguuuuaaagaccu

SEQ ID NO: 197316 - RNA, 15 nt, Homo sapiens
ucaguguuaaaugug

SEQ ID NO: 197317 - RNA, 19 nt, Homo sapiens
aguggcaggggacaggagu

SEQ ID NO: 197318 - RNA, 15 nt, Homo sapiens
ccagagggcacucug

SEQ ID NO: 197319 - RNA, 23 nt, Homo sapiens
aacaauuuuaggaggaccagagc

SEQ ID NO: 197320 - RNA, 20 nt, Homo sapiens
aauaauccagaaaaacugug

SEQ ID NO: 197321 - RNA, 13 nt, Homo sapiens
gcagaacuuucac

SEQ ID NO: 197322 - RNA, 21 nt, Homo sapiens
cacacgucuggcuucacagau

SEQ ID NO: 197323 - RNA, 19 nt, Homo sapiens
ggcagaucccacuugcagc

SEQ ID NO: 197324 - RNA, 16 nt, Homo sapiens
agggcaggaacuugca

SEQ ID NO: 197325 - RNA, 22 nt, Homo sapiens
cugugcagguggggagacuggg

SEQ ID NO: 197326 - RNA, 16 nt, Homo sapiens
aucgcugucaucucag

SEQ ID NO: 197327 - RNA, 13 nt, Homo sapiens
gaguuuucagugg

SEQ ID NO: 197328 - RNA, 16 nt, Homo sapiens
cuagggccaagcccag

SEQ ID NO: 197329 - RNA, 18 nt, Homo sapiens
uggaggaaagugauaucc

SEQ ID NO: 197330 - RNA, 14 nt, Homo sapiens
guucagggucauag

SEQ ID NO: 197331 - RNA, 12 nt, Homo sapiens
agugcaccacuu

SEQ ID NO: 197332 - RNA, 21 nt, Homo sapiens
ccuaccucacagagugcauug

SEQ ID NO: 197333 - RNA, 22 nt, Homo sapiens
gcgauccaccugucucagccuc

SEQ ID NO: 197334 - RNA, 18 nt, Homo sapiens
ucacagaagcacagcacc

SEQ ID NO: 197335 - RNA, 23 nt, Homo sapiens
cauuaguuguuagugauggagcu

SEQ ID NO: 197336 - RNA, 16 nt, Homo sapiens
gugaucugaacagaaa

SEQ ID NO: 197337 - RNA, 17 nt, Homo sapiens
guuugaaucacaguaua

SEQ ID NO: 197338 - RNA, 22 nt, Homo sapiens
uuaccugggcauucuuguuuca

SEQ ID NO: 197339 - RNA, 21 nt, Homo sapiens
uggacuauggcucuacuuuca

SEQ ID NO: 197340 - RNA, 21 nt, Homo sapiens
auggagauauuuacaugaauu

SEQ ID NO: 197341 - RNA, 12 nt, Homo sapiens
ucaacuuugaca

SEQ ID NO: 197342 - RNA, 12 nt, Homo sapiens
ugggaccacaga

SEQ ID NO: 197343 - RNA, 18 nt, Homo sapiens
acuucucuauuaucucaa

SEQ ID NO: 197344 - RNA, 20 nt, Homo sapiens
agucaugagcugagcaggga

SEQ ID NO: 197345 - RNA, 15 nt, Homo sapiens
agagaggacuguuga

SEQ ID NO: 197346 - RNA, 14 nt, Homo sapiens
uugauggugaugaa

SEQ ID NO: 197347 - RNA, 19 nt, Homo sapiens
cuaaaauuagaugaacuca

SEQ ID NO: 197348 - RNA, 22 nt, Homo sapiens
uacugcucaucauuccuugaga

SEQ ID NO: 197349 - RNA, 21 nt, Homo sapiens
agucaaccugccugacauuug

SEQ ID NO: 197350 - RNA, 16 nt, Homo sapiens
agauuguuaaaauaac

SEQ ID NO: 197351 - RNA, 16 nt, Homo sapiens
agcuuugcugggagag

SEQ ID NO: 197352 - RNA, 16 nt, Homo sapiens
acccuaaaucuugacu

SEQ ID NO: 197353 - RNA, 20 nt, Homo sapiens
auuguaucaaaugugacauu

SEQ ID NO: 197354 - RNA, 14 nt, Homo sapiens
gaccugacaccuuu

SEQ ID NO: 197355 - RNA, 14 nt, Homo sapiens
gaaaauuauuugca

SEQ ID NO: 197356 - RNA, 15 nt, Homo sapiens
ccccauuccugggaa

SEQ ID NO: 197357 - RNA, 16 nt, Homo sapiens
aauauaacugccuuaa

SEQ ID NO: 197358 - RNA, 15 nt, Homo sapiens
aguuuauacuucucu

SEQ ID NO: 197359 - RNA, 14 nt, Homo sapiens
caagggaugucuca

SEQ ID NO: 197360 - RNA, 21 nt, Homo sapiens
aucccaugauguagugccucu

SEQ ID NO: 197361 - RNA, 18 nt, Homo sapiens
ugaggaugcagagucagc

SEQ ID NO: 197362 - RNA, 18 nt, Homo sapiens
cugccagggccagucuug

SEQ ID NO: 197363 - RNA, 13 nt, Homo sapiens
auaucgaucucuu

SEQ ID NO: 197364 - RNA, 22 nt, Homo sapiens
ucacaaucaucaucauucucau

SEQ ID NO: 197365 - RNA, 13 nt, Homo sapiens
cagauaaugugaa

SEQ ID NO: 197366 - RNA, 19 nt, Homo sapiens
gcugccucuaccugacacu

SEQ ID NO: 197367 - RNA, 23 nt, Homo sapiens
aguguuuggguauauucauuuca

SEQ ID NO: 197368 - RNA, 17 nt, Homo sapiens
cuguaaucccagcacuu

SEQ ID NO: 197369 - RNA, 13 nt, Homo sapiens
guaaacugugcac

SEQ ID NO: 197370 - RNA, 23 nt, Homo sapiens
acauucugcaagcacaucugcau

SEQ ID NO: 197371 - RNA, 14 nt, Homo sapiens
guaucaaaugugac

SEQ ID NO: 197372 - RNA, 17 nt, Homo sapiens
uccuaaaguagacuuca

SEQ ID NO: 197373 - RNA, 17 nt, Homo sapiens
acuuuuaaguugcugau

SEQ ID NO: 197374 - RNA, 17 nt, Homo sapiens
cucuuaaucaaauagca

SEQ ID NO: 197375 - RNA, 17 nt, Homo sapiens
gauacugucucuuucau

SEQ ID NO: 197376 - RNA, 20 nt, Homo sapiens
ucauucagggauagcacuga

SEQ ID NO: 197377 - RNA, 14 nt, Homo sapiens
uaccugacacuccc

SEQ ID NO: 197378 - RNA, 20 nt, Homo sapiens
ucaggaaggaugagcauuua

SEQ ID NO: 197379 - RNA, 23 nt, Homo sapiens
aucucuuguauaugaugaucugg

SEQ ID NO: 197380 - RNA, 18 nt, Homo sapiens
cauaagugcaugacauau

SEQ ID NO: 197381 - RNA, 19 nt, Homo sapiens
ugaaauaauguacaucugg

SEQ ID NO: 197382 - RNA, 17 nt, Homo sapiens
gauucuuucccaauuca

SEQ ID NO: 197383 - RNA, 15 nt, Homo sapiens
gaacaauauugacuu

SEQ ID NO: 197384 - RNA, 12 nt, Homo sapiens
aguaugcaaaag

SEQ ID NO: 197385 - RNA, 18 nt, Homo sapiens
acagagcuucccugacuc

SEQ ID NO: 197386 - RNA, 13 nt, Homo sapiens
acugucuccaugg

SEQ ID NO: 197387 - RNA, 20 nt, Homo sapiens
aaccaaaucuggaagccaaa

SEQ ID NO: 197388 - RNA, 13 nt, Homo sapiens
cagaugugugauu

SEQ ID NO: 197389 - RNA, 18 nt, Homo sapiens
ccuaaugaaugcauaaaa

SEQ ID NO: 197390 - RNA, 12 nt, Homo sapiens
guucaaagccag

SEQ ID NO: 197391 - RNA, 13 nt, Homo sapiens
uucagaaagaagu

SEQ ID NO: 197392 - RNA, 16 nt, Homo sapiens
ucaucaugugugucca

SEQ ID NO: 197393 - RNA, 16 nt, Homo sapiens
guucugucucauauga

SEQ ID NO: 197394 - RNA, 23 nt, Homo sapiens
cuaacacccagucuguuccccau

SEQ ID NO: 197395 - RNA, 20 nt, Homo sapiens
aaucacacagccaagccagu

SEQ ID NO: 197396 - RNA, 20 nt, Homo sapiens
cucuucuaaucagagcgcaa

SEQ ID NO: 197397 - RNA, 17 nt, Homo sapiens
gaagagaaugugacagg

SEQ ID NO: 197398 - RNA, 13 nt, Homo sapiens
cuuuuacauucug

SEQ ID NO: 197399 - RNA, 20 nt, Homo sapiens
aauaccucaaccuaugguau

SEQ ID NO: 197400 - RNA, 20 nt, Homo sapiens
ccgagucucuucuccacugg

SEQ ID NO: 197401 - RNA, 15 nt, Homo sapiens
ccuuugaaaugaaua

SEQ ID NO: 197402 - RNA, 20 nt, Homo sapiens
aauggagggaauaauaccua

SEQ ID NO: 197403 - RNA, 16 nt, Homo sapiens
cuguauaguacuggca

SEQ ID NO: 197404 - RNA, 16 nt, Homo sapiens
auugaguuuucagugg

SEQ ID NO: 197405 - RNA, 23 nt, Homo sapiens
caagcaguuaguuccuucaugau

SEQ ID NO: 197406 - RNA, 12 nt, Homo sapiens
uucuguggcuca

SEQ ID NO: 197407 - RNA, 17 nt, Homo sapiens
aagaacaguaacugcca

SEQ ID NO: 197408 - RNA, 23 nt, Homo sapiens
guauguuugggagacugcugagu

SEQ ID NO: 197409 - RNA, 14 nt, Homo sapiens
acaugaaaacagaa

SEQ ID NO: 197410 - RNA, 20 nt, Homo sapiens
cacauccucugucuauuuga

SEQ ID NO: 197411 - RNA, 19 nt, Homo sapiens
auuucuccuccaugggaga

SEQ ID NO: 197412 - RNA, 17 nt, Homo sapiens
cucccagauaaugugaa

SEQ ID NO: 197413 - RNA, 22 nt, Homo sapiens
aggcgauccaccugucucagcc

SEQ ID NO: 197414 - RNA, 19 nt, Homo sapiens
cauuuccugacagaaggac

SEQ ID NO: 197415 - RNA, 21 nt, Homo sapiens
cucauuggacccuuccauggu

SEQ ID NO: 197416 - RNA, 14 nt, Homo sapiens
aaggaugggaagga

SEQ ID NO: 197417 - RNA, 15 nt, Homo sapiens
agaccauaauguuac

SEQ ID NO: 197418 - RNA, 20 nt, Homo sapiens
cucugcauuaucugagguca

SEQ ID NO: 197419 - RNA, 13 nt, Homo sapiens
auuucuguguugc

SEQ ID NO: 197420 - RNA, 12 nt, Homo sapiens
gaauuugagugc

SEQ ID NO: 197421 - RNA, 15 nt, Homo sapiens
ugccuucaccuccuc

SEQ ID NO: 197422 - RNA, 19 nt, Homo sapiens
cccacacccucccuuaccc

SEQ ID NO: 197423 - RNA, 13 nt, Homo sapiens
gcagauccagagg

SEQ ID NO: 197424 - RNA, 15 nt, Homo sapiens
uguaaagcaggugcc

SEQ ID NO: 197425 - RNA, 17 nt, Homo sapiens
guguaauuuuguucuag

SEQ ID NO: 197426 - RNA, 14 nt, Homo sapiens
uucuccagacaaac

SEQ ID NO: 197427 - RNA, 22 nt, Homo sapiens
ucuugguugaggaaacaaacau

SEQ ID NO: 197428 - RNA, 20 nt, Homo sapiens
uuaguuuacaaucagccaca

SEQ ID NO: 197429 - RNA, 21 nt, Homo sapiens
gcacccuggauugaucggagc

SEQ ID NO: 197430 - RNA, 20 nt, Homo sapiens
ccuaggauuucaugauuuca

SEQ ID NO: 197431 - RNA, 16 nt, Homo sapiens
agccagcucugcauua

SEQ ID NO: 197432 - RNA, 16 nt, Homo sapiens
gaccacagacucacau

SEQ ID NO: 197433 - RNA, 16 nt, Homo sapiens
agguccuggugguauu

SEQ ID NO: 197434 - RNA, 13 nt, Homo sapiens
aguucagacuuuu

SEQ ID NO: 197435 - RNA, 17 nt, Homo sapiens
gagauggaggaaaguga

SEQ ID NO: 197436 - RNA, 17 nt, Homo sapiens
ccugcaaaaggacucuc

SEQ ID NO: 197437 - RNA, 20 nt, Homo sapiens
gugaaaugcuggcauuugca

SEQ ID NO: 197438 - RNA, 12 nt, Homo sapiens
cuccccauuugc

SEQ ID NO: 197439 - RNA, 12 nt, Homo sapiens
gaacuugcacaa

SEQ ID NO: 197440 - RNA, 16 nt, Homo sapiens
auaugaacggugagca

SEQ ID NO: 197441 - RNA, 18 nt, Homo sapiens
uuggcuuguuuggagcau

SEQ ID NO: 197442 - RNA, 18 nt, Homo sapiens
aaucaggaauauuuucca

SEQ ID NO: 197443 - RNA, 17 nt, Homo sapiens
cuuguaaaugugguaaa

SEQ ID NO: 197444 - RNA, 14 nt, Homo sapiens
gggcagucauuauc

SEQ ID NO: 197445 - RNA, 14 nt, Homo sapiens
uaaaucaaugcuau

SEQ ID NO: 197446 - RNA, 15 nt, Homo sapiens
acaucugcauuuuca

SEQ ID NO: 197447 - RNA, 20 nt, Homo sapiens
uguauagguuuuaaagaccu

SEQ ID NO: 197448 - RNA, 17 nt, Homo sapiens
gacuucauuuuuccuaa

SEQ ID NO: 197449 - RNA, 19 nt, Homo sapiens
caaggcccauaucugugaa

SEQ ID NO: 197450 - RNA, 21 nt, Homo sapiens
uaugccauggaggcacuaaca

SEQ ID NO: 197451 - RNA, 11 nt, Homo sapiens
gugaaggaaua

SEQ ID NO: 197452 - RNA, 19 nt, Homo sapiens
cagucagaguugugcacau

SEQ ID NO: 197453 - RNA, 16 nt, Homo sapiens
uuuaaucccacuugcc

SEQ ID NO: 197454 - RNA, 14 nt, Homo sapiens
agagcuucccugac

SEQ ID NO: 197455 - RNA, 18 nt, Homo sapiens
aaucacacagccaagcca

SEQ ID NO: 197456 - RNA, 20 nt, Homo sapiens
aaggagggcagaucacuuca

SEQ ID NO: 197457 - RNA, 20 nt, Homo sapiens
uauuacaguuuaucuauggc

SEQ ID NO: 197458 - RNA, 14 nt, Homo sapiens
ccucgcugccagcu

SEQ ID NO: 197459 - RNA, 19 nt, Homo sapiens
gucaaccugccugacauuu

SEQ ID NO: 197460 - RNA, 21 nt, Homo sapiens
caaacagccccucuggacaca

SEQ ID NO: 197461 - RNA, 20 nt, Homo sapiens
cuuucauccacuagugcaaa

SEQ ID NO: 197462 - RNA, 14 nt, Homo sapiens
ccuguucacucuac

SEQ ID NO: 197463 - RNA, 23 nt, Homo sapiens
ugcuaauauauguauaugcaaua

SEQ ID NO: 197464 - RNA, 17 nt, Homo sapiens
uuacuaucaugucaaac

SEQ ID NO: 197465 - RNA, 16 nt, Homo sapiens
ugcauugugaggguua

SEQ ID NO: 197466 - RNA, 17 nt, Homo sapiens
uguguggggugggcaca

SEQ ID NO: 197467 - RNA, 19 nt, Homo sapiens
agccccucuggacacagcc

SEQ ID NO: 197468 - RNA, 19 nt, Homo sapiens
ccaugcugcccgcuucuca

SEQ ID NO: 197469 - RNA, 11 nt, Homo sapiens
acuucccugaa

SEQ ID NO: 197470 - RNA, 20 nt, Homo sapiens
cucauaugauugugcacaua

SEQ ID NO: 197471 - RNA, 21 nt, Homo sapiens
uuuucuaagaaagaaauugua

SEQ ID NO: 197472 - RNA, 22 nt, Homo sapiens
uaaaaaaaacaaaaagaacaaa

SEQ ID NO: 197473 - RNA, 24 nt, Homo sapiens
gagacaggguuuggcugugucuaa

SEQ ID NO: 197474 - RNA, 16 nt, Homo sapiens
auguugcccagugugu

SEQ ID NO: 197475 - RNA, 17 nt, Homo sapiens
gcugaaauaaaaauaca

SEQ ID NO: 197476 - RNA, 15 nt, Homo sapiens
uucacuuuugacaaa

SEQ ID NO: 197477 - RNA, 23 nt, Homo sapiens
uguucccuauuuugccaguggga

SEQ ID NO: 197478 - RNA, 19 nt, Homo sapiens
ccuugguucccccacugau

SEQ ID NO: 197479 - RNA, 19 nt, Homo sapiens
cugaaggagccccauuccu

SEQ ID NO: 197480 - RNA, 20 nt, Homo sapiens
cuggaguggaguggcgugau

SEQ ID NO: 197481 - RNA, 14 nt, Homo sapiens
uccgcccugccacu

SEQ ID NO: 197482 - RNA, 22 nt, Homo sapiens
aaugucuuuccuuuugcucuua

SEQ ID NO: 197483 - RNA, 17 nt, Homo sapiens
gagccgggucugccucu

SEQ ID NO: 197484 - RNA, 18 nt, Homo sapiens
agcaggggaguaugcaaa

SEQ ID NO: 197485 - RNA, 12 nt, Homo sapiens
aguuaaggguua

SEQ ID NO: 197486 - RNA, 18 nt, Homo sapiens
cagucagaguugugcaca

SEQ ID NO: 197487 - RNA, 22 nt, Homo sapiens
ggcaaccacaggcagcauuuag

SEQ ID NO: 197488 - RNA, 15 nt, Homo sapiens
agggaaccugugucc

SEQ ID NO: 197489 - RNA, 19 nt, Homo sapiens
cuccagaaagcucaucuca

SEQ ID NO: 197490 - RNA, 16 nt, Homo sapiens
ggcaggaacuugcaca

SEQ ID NO: 197491 - RNA, 17 nt, Homo sapiens
auccaacaugugcucag

SEQ ID NO: 197492 - RNA, 15 nt, Homo sapiens
uuugauuauucagug

SEQ ID NO: 197493 - RNA, 22 nt, Homo sapiens
cauuucuauuucuccuccaugg

SEQ ID NO: 197494 - RNA, 13 nt, Homo sapiens
ucagucucugagc

SEQ ID NO: 197495 - RNA, 14 nt, Homo sapiens
caguaccuccugcc

SEQ ID NO: 197496 - RNA, 15 nt, Homo sapiens
gccaggcagauccca

SEQ ID NO: 197497 - RNA, 22 nt, Homo sapiens
uaaucagggaggucauuuuggu

SEQ ID NO: 197498 - RNA, 13 nt, Homo sapiens
ugggaacuccuaa

SEQ ID NO: 197499 - RNA, 17 nt, Homo sapiens
cuagaugauugauuacc

SEQ ID NO: 197500 - RNA, 20 nt, Homo sapiens
acugcauaccaaccugggca

SEQ ID NO: 197501 - RNA, 14 nt, Homo sapiens
cucaaccuauggua

SEQ ID NO: 197502 - RNA, 23 nt, Homo sapiens
cagaccauucaggacacagggaa

SEQ ID NO: 197503 - RNA, 14 nt, Homo sapiens
aaucccuccuucau

SEQ ID NO: 197504 - RNA, 21 nt, Homo sapiens
ucucugcuuuggaaaucacac

SEQ ID NO: 197505 - RNA, 16 nt, Homo sapiens
ugccacacggcucuca

SEQ ID NO: 197506 - RNA, 16 nt, Homo sapiens
aaaggagggucaggaa

SEQ ID NO: 197507 - RNA, 20 nt, Homo sapiens
uggcuguagaaggagacaga

SEQ ID NO: 197508 - RNA, 21 nt, Homo sapiens
cacuugugcaguguugacagu

SEQ ID NO: 197509 - RNA, 19 nt, Homo sapiens
auucucugucucauccauc

SEQ ID NO: 197510 - RNA, 21 nt, Homo sapiens
ucacagagauaauucuagcuu

SEQ ID NO: 197511 - RNA, 16 nt, Homo sapiens
aggacuuccauuugcu

SEQ ID NO: 197512 - RNA, 14 nt, Homo sapiens
cugccuuguguaca

SEQ ID NO: 197513 - RNA, 19 nt, Homo sapiens
uaaguugauggugaugaaa

SEQ ID NO: 197514 - RNA, 14 nt, Homo sapiens
caggaguucagggu

SEQ ID NO: 197515 - RNA, 12 nt, Homo sapiens
uuuaaaucugag

SEQ ID NO: 197516 - RNA, 21 nt, Homo sapiens
cacagcugcagagacagagag

SEQ ID NO: 197517 - RNA, 23 nt, Homo sapiens
acaugaauugcauuuuacuuuaa

SEQ ID NO: 197518 - RNA, 21 nt, Homo sapiens
ucaagccuagcccuucucuca

SEQ ID NO: 197519 - RNA, 18 nt, Homo sapiens
ugaugaaauguaaauacu

SEQ ID NO: 197520 - RNA, 14 nt, Homo sapiens
auuuaucugugcaa

SEQ ID NO: 197521 - RNA, 17 nt, Homo sapiens
uccuccacaauagcaga

SEQ ID NO: 197522 - RNA, 16 nt, Homo sapiens
cagugaccagucacug

SEQ ID NO: 197523 - RNA, 23 nt, Homo sapiens
aguguuccccuuccacugagggc

SEQ ID NO: 197524 - RNA, 18 nt, Homo sapiens
ccuaagcagaccacugau

SEQ ID NO: 197525 - RNA, 12 nt, Homo sapiens
ugggugggacca

SEQ ID NO: 197526 - RNA, 20 nt, Homo sapiens
auguugaugaaaaauagcaa

SEQ ID NO: 197527 - RNA, 17 nt, Homo sapiens
uagaugcugacuguacu

SEQ ID NO: 197528 - RNA, 16 nt, Homo sapiens
augcuucugacuucau

SEQ ID NO: 197529 - RNA, 22 nt, Homo sapiens
augcuucugacuucauagauuu

SEQ ID NO: 197530 - RNA, 20 nt, Homo sapiens
ugcaaaaguucugacuugac

SEQ ID NO: 197531 - RNA, 17 nt, Homo sapiens
gcgaaaaaaucagugaa

SEQ ID NO: 197532 - RNA, 15 nt, Homo sapiens
aggcagcagugugag

SEQ ID NO: 197533 - RNA, 19 nt, Homo sapiens
ucaaguccuacaagcuaaa

SEQ ID NO: 197534 - RNA, 17 nt, Homo sapiens
augaucuggauccacca

SEQ ID NO: 197535 - RNA, 16 nt, Homo sapiens
cccacaaaaguacaau

SEQ ID NO: 197536 - RNA, 16 nt, Homo sapiens
agaccuaggauuucau

SEQ ID NO: 197537 - RNA, 11 nt, Homo sapiens
ccccacugaca

SEQ ID NO: 197538 - RNA, 22 nt, Homo sapiens
auauccaacaugugcucaggga

SEQ ID NO: 197539 - RNA, 18 nt, Homo sapiens
gagucucuucuccacugg

SEQ ID NO: 197540 - RNA, 23 nt, Homo sapiens
auguaacauguaggaaguaggaa

SEQ ID NO: 197541 - RNA, 19 nt, Homo sapiens
auuuaucugugcaaauccu

SEQ ID NO: 197542 - RNA, 19 nt, Homo sapiens
uggcuaaaaccaucauagu

SEQ ID NO: 197543 - RNA, 16 nt, Homo sapiens
ugcuggcaaagacaga

SEQ ID NO: 197544 - RNA, 15 nt, Homo sapiens
cacugagcaaagcau

SEQ ID NO: 197545 - RNA, 22 nt, Homo sapiens
aaggguucaccaggucagggag

SEQ ID NO: 197546 - RNA, 14 nt, Homo sapiens
auguauaugcacuu

SEQ ID NO: 197547 - RNA, 20 nt, Homo sapiens
aagcaggaaaugaaaauguc

SEQ ID NO: 197548 - RNA, 12 nt, Homo sapiens
aaacaacucuuu

SEQ ID NO: 197549 - RNA, 22 nt, Homo sapiens
gaagcucccugaaguaagcaaa

SEQ ID NO: 197550 - RNA, 23 nt, Homo sapiens
augaauguuuacacucuuuguaa

SEQ ID NO: 197551 - RNA, 16 nt, Homo sapiens
ugauagaguguuauca

SEQ ID NO: 197552 - RNA, 15 nt, Homo sapiens
cuggagucgggacua

SEQ ID NO: 197553 - RNA, 13 nt, Homo sapiens
gguggagggccac

SEQ ID NO: 197554 - RNA, 21 nt, Homo sapiens
guuaccugaaaacacugugca

SEQ ID NO: 197555 - RNA, 13 nt, Homo sapiens
caggcucuucucc

SEQ ID NO: 197556 - RNA, 23 nt, Homo sapiens
cuagguucuaaaaauugugauca

SEQ ID NO: 197557 - RNA, 21 nt, Homo sapiens
gggaaggguccaucucagaga

SEQ ID NO: 197558 - RNA, 17 nt, Homo sapiens
ccaauccuggacaugaa

SEQ ID NO: 197559 - RNA, 21 nt, Homo sapiens
guaggaccaagcaucuugggg

SEQ ID NO: 197560 - RNA, 18 nt, Homo sapiens
ucaaaguaaaacuugcug

SEQ ID NO: 197561 - RNA, 20 nt, Homo sapiens
caguguguuucugaucugau

SEQ ID NO: 197562 - RNA, 15 nt, Homo sapiens
uacauuaauuaccuu

SEQ ID NO: 197563 - RNA, 13 nt, Homo sapiens
aaaugugaugaau

SEQ ID NO: 197564 - RNA, 20 nt, Homo sapiens
gauaaguaaguuugauuuca

SEQ ID NO: 197565 - RNA, 13 nt, Homo sapiens
uacaugacauuua

SEQ ID NO: 197566 - RNA, 15 nt, Homo sapiens
ccacaaaaguacaau

SEQ ID NO: 197567 - RNA, 19 nt, Homo sapiens
agacaaaaucuuaaaugcc

SEQ ID NO: 197568 - RNA, 19 nt, Homo sapiens
aucugaacagaaauaccaa

SEQ ID NO: 197569 - RNA, 20 nt, Homo sapiens
aagggaauucggugugcacc

SEQ ID NO: 197570 - RNA, 15 nt, Homo sapiens
aucagccacauucua

SEQ ID NO: 197571 - RNA, 23 nt, Homo sapiens
aggucccuugucccaaguuccac

SEQ ID NO: 197572 - RNA, 16 nt, Homo sapiens
aucagaccauaauguu

SEQ ID NO: 197573 - RNA, 18 nt, Homo sapiens
cuugacccccuugagggu

SEQ ID NO: 197574 - RNA, 17 nt, Homo sapiens
cccaugggaagggucca

SEQ ID NO: 197575 - RNA, 15 nt, Homo sapiens
acugcaagcacugca

SEQ ID NO: 197576 - RNA, 22 nt, Homo sapiens
uucaucagacuccugugcaacu

SEQ ID NO: 197577 - RNA, 14 nt, Homo sapiens
cacugcauaccaac

SEQ ID NO: 197578 - RNA, 21 nt, Homo sapiens
acugcaagcacugcaugggca

SEQ ID NO: 197579 - RNA, 13 nt, Homo sapiens
ugucuuucacuga

SEQ ID NO: 197580 - RNA, 16 nt, Homo sapiens
gccccaggcauugcca

SEQ ID NO: 197581 - RNA, 17 nt, Homo sapiens
agaagguuuacucugug

SEQ ID NO: 197582 - RNA, 21 nt, Homo sapiens
gauccgucuuuggccuccucc

SEQ ID NO: 197583 - RNA, 21 nt, Homo sapiens
aaauucauuaguuguuaguga

SEQ ID NO: 197584 - RNA, 22 nt, Homo sapiens
guagaaaauuuguuauuuugca

SEQ ID NO: 197585 - RNA, 14 nt, Homo sapiens
aacucugcauucua

SEQ ID NO: 197586 - RNA, 18 nt, Homo sapiens
aggcagaucccacuugca

SEQ ID NO: 197587 - RNA, 18 nt, Homo sapiens
ggcauggccagguggcca

SEQ ID NO: 197588 - RNA, 11 nt, Homo sapiens
ccuaguacaag

SEQ ID NO: 197589 - RNA, 9 nt, Homo sapiens
ggcacauug

SEQ ID NO: 197590 - RNA, 15 nt, Homo sapiens
gaugucucacauccu

SEQ ID NO: 197591 - RNA, 19 nt, Homo sapiens
augucguuugaaucacagu

SEQ ID NO: 197592 - RNA, 23 nt, Homo sapiens
uuugccauauuuucaccauuuga

SEQ ID NO: 197593 - RNA, 20 nt, Homo sapiens
cagaacuuaaggauggagcc

SEQ ID NO: 197594 - RNA, 13 nt, Homo sapiens
uugcaaggcauuu

SEQ ID NO: 197595 - RNA, 20 nt, Homo sapiens
gcauuugugcccacucucca

SEQ ID NO: 197596 - RNA, 16 nt, Homo sapiens
gggucuuugaacccuu

SEQ ID NO: 197597 - RNA, 14 nt, Homo sapiens
ucagcuggaucucc

SEQ ID NO: 197598 - RNA, 14 nt, Homo sapiens
uacaguuuaucuau

SEQ ID NO: 197599 - RNA, 22 nt, Homo sapiens
ucauaugauugugcacauacuu

SEQ ID NO: 197600 - RNA, 21 nt, Homo sapiens
ccugaucagagccgugguccu

SEQ ID NO: 197601 - RNA, 15 nt, Homo sapiens
ucgggacuaacccag

SEQ ID NO: 197602 - RNA, 13 nt, Homo sapiens
cuucuuguucccc

SEQ ID NO: 197603 - RNA, 20 nt, Homo sapiens
acuccgagagcaugcuuaau

SEQ ID NO: 197604 - RNA, 21 nt, Homo sapiens
aggccugggccgcugccacgu

SEQ ID NO: 197605 - RNA, 17 nt, Homo sapiens
ccacuugccccuguuac

SEQ ID NO: 197606 - RNA, 17 nt, Homo sapiens
cacagaagguccuggug

SEQ ID NO: 197607 - RNA, 22 nt, Homo sapiens
ccuucaugaucaucacaaucau

SEQ ID NO: 197608 - RNA, 22 nt, Homo sapiens
caguauuuuccaaacuaccuuc

SEQ ID NO: 197609 - RNA, 17 nt, Homo sapiens
gacaguguuuucuggga

SEQ ID NO: 197610 - RNA, 18 nt, Homo sapiens
accauucaggacacaggg

SEQ ID NO: 197611 - RNA, 20 nt, Homo sapiens
uccugugaaugccacugccu

SEQ ID NO: 197612 - RNA, 18 nt, Homo sapiens
agcauaaguuucugggac

SEQ ID NO: 197613 - RNA, 22 nt, Homo sapiens
uaaccgucaauaggcaaagggg

SEQ ID NO: 197614 - RNA, 17 nt, Homo sapiens
auuauaugcacuagcaa

SEQ ID NO: 197615 - RNA, 20 nt, Homo sapiens
cacauccugaccuugcacaa

SEQ ID NO: 197616 - RNA, 13 nt, Homo sapiens
cauuuauagcaua

SEQ ID NO: 197617 - RNA, 14 nt, Homo sapiens
ccugacaccuuuca

SEQ ID NO: 197618 - RNA, 20 nt, Homo sapiens
caguuugcuuuguaugcacu

SEQ ID NO: 197619 - RNA, 14 nt, Homo sapiens
aaauuaugccauag

SEQ ID NO: 197620 - RNA, 18 nt, Homo sapiens
aaucucaccccaucccac

SEQ ID NO: 197621 - RNA, 21 nt, Homo sapiens
agucauuugcugagcauguac

SEQ ID NO: 197622 - RNA, 11 nt, Homo sapiens
cuuccauuugc

SEQ ID NO: 197623 - RNA, 16 nt, Homo sapiens
ggugaaagauggaacu

SEQ ID NO: 197624 - RNA, 15 nt, Homo sapiens
gaagggacauauuca

SEQ ID NO: 197625 - RNA, 16 nt, Homo sapiens
ccagcacuuugggagg

SEQ ID NO: 197626 - RNA, 20 nt, Homo sapiens
gggucucgcuuuguugccca

SEQ ID NO: 197627 - RNA, 13 nt, Homo sapiens
guucaccagguca

SEQ ID NO: 197628 - RNA, 22 nt, Homo sapiens
augagaauuugagugcucugau

SEQ ID NO: 197629 - RNA, 21 nt, Homo sapiens
gcuuuaauuuuuuuaaccaaa

SEQ ID NO: 197630 - RNA, 14 nt, Homo sapiens
cagcucacacauga

SEQ ID NO: 197631 - RNA, 16 nt, Homo sapiens
uuccccuuccacugag

SEQ ID NO: 197632 - RNA, 20 nt, Homo sapiens
ugaauaugaacggugagcau

SEQ ID NO: 197633 - RNA, 20 nt, Homo sapiens
gugagaacuacucagggaau

SEQ ID NO: 197634 - RNA, 19 nt, Homo sapiens
uaugucacccaaugcauau

SEQ ID NO: 197635 - RNA, 16 nt, Homo sapiens
uggaggcacacagcug

SEQ ID NO: 197636 - RNA, 16 nt, Homo sapiens
cuguuagucauuugcu

SEQ ID NO: 197637 - RNA, 18 nt, Homo sapiens
uuuagacccugcauuuau

SEQ ID NO: 197638 - RNA, 19 nt, Homo sapiens
uuauuagagugucuuucca

SEQ ID NO: 197639 - RNA, 21 nt, Homo sapiens
gucucauaugauugugcacau

SEQ ID NO: 197640 - RNA, 17 nt, Homo sapiens
aaauagagccugaggga

SEQ ID NO: 197641 - RNA, 14 nt, Homo sapiens
auguguaaggugaa

SEQ ID NO: 197642 - RNA, 15 nt, Homo sapiens
agcagucgugccugu

SEQ ID NO: 197643 - RNA, 18 nt, Homo sapiens
ugagaaagagcacuuaag

SEQ ID NO: 197644 - RNA, 17 nt, Homo sapiens
gugcaugcagcaucuaa

SEQ ID NO: 197645 - RNA, 16 nt, Homo sapiens
agccuggccaacaugg

SEQ ID NO: 197646 - RNA, 16 nt, Homo sapiens
auauuuugcauaguac

SEQ ID NO: 197647 - RNA, 17 nt, Homo sapiens
uuucuuuuguauguaaa

SEQ ID NO: 197648 - RNA, 22 nt, Homo sapiens
gguuccagggucccucugugua

SEQ ID NO: 197649 - RNA, 18 nt, Homo sapiens
acacuaacauauaauguu

SEQ ID NO: 197650 - RNA, 23 nt, Homo sapiens
uaguacuugggagaccuguaauc

SEQ ID NO: 197651 - RNA, 11 nt, Homo sapiens
uacaucuggcc

SEQ ID NO: 197652 - RNA, 14 nt, Homo sapiens
ugaaucacaguaua

SEQ ID NO: 197653 - RNA, 17 nt, Homo sapiens
aguuuauugacaauaau

SEQ ID NO: 197654 - RNA, 13 nt, Homo sapiens
cacccaugcaccu

SEQ ID NO: 197655 - RNA, 20 nt, Homo sapiens
ccaccaacagcccucagguc

SEQ ID NO: 197656 - RNA, 19 nt, Homo sapiens
cauccugaccuugcacaaa

SEQ ID NO: 197657 - RNA, 18 nt, Homo sapiens
uaauacagacuaugucac

SEQ ID NO: 197658 - RNA, 16 nt, Homo sapiens
ugaaaugcuggcauuu

SEQ ID NO: 197659 - RNA, 14 nt, Homo sapiens
agcccuuuacuuga

SEQ ID NO: 197660 - RNA, 12 nt, Homo sapiens
gggugggaccac

SEQ ID NO: 197661 - RNA, 22 nt, Homo sapiens
uuaagagaauauuuuaaguauu

SEQ ID NO: 197662 - RNA, 23 nt, Homo sapiens
auguuaggaaaauuucacauuaa

SEQ ID NO: 197663 - RNA, 17 nt, Homo sapiens
cagagcagaacuuucac

SEQ ID NO: 197664 - RNA, 18 nt, Homo sapiens
ucacauuaauauuugcug

SEQ ID NO: 197665 - RNA, 15 nt, Homo sapiens
ugacaauaauuucag

SEQ ID NO: 197666 - RNA, 18 nt, Homo sapiens
aacggugagcauuguggc

SEQ ID NO: 197667 - RNA, 21 nt, Homo sapiens
accugugcacguuggaacuuu

SEQ ID NO: 197668 - RNA, 23 nt, Homo sapiens
uccacggagccacuccucugacu

SEQ ID NO: 197669 - RNA, 16 nt, Homo sapiens
ggcagcauuuagcaca

SEQ ID NO: 197670 - RNA, 16 nt, Homo sapiens
cagggcuccugcacuu

SEQ ID NO: 197671 - RNA, 11 nt, Homo sapiens
cuuuacuugac

SEQ ID NO: 197672 - RNA, 16 nt, Homo sapiens
ucaaauuggagcuuca

SEQ ID NO: 197673 - RNA, 16 nt, Homo sapiens
aagucauaccaaugaa

SEQ ID NO: 197674 - RNA, 12 nt, Homo sapiens
uugugauugccu

SEQ ID NO: 197675 - RNA, 23 nt, Homo sapiens
uacaacuuuuuaccuaguacaag

SEQ ID NO: 197676 - RNA, 12 nt, Homo sapiens
cacagugugaau

SEQ ID NO: 197677 - RNA, 20 nt, Homo sapiens
gcacuguucccccugugcag

SEQ ID NO: 197678 - RNA, 16 nt, Homo sapiens
cagaaagcucaucuca

SEQ ID NO: 197679 - RNA, 16 nt, Homo sapiens
ugacccagucagaguu

SEQ ID NO: 197680 - RNA, 14 nt, Homo sapiens
cuuauauucaucca

SEQ ID NO: 197681 - RNA, 17 nt, Homo sapiens
uucacagaugugugauu

SEQ ID NO: 197682 - RNA, 20 nt, Homo sapiens
aagcuaaaauuagaugaacu

SEQ ID NO: 197683 - RNA, 19 nt, Homo sapiens
acaaacucucccuucacuc

SEQ ID NO: 197684 - RNA, 20 nt, Homo sapiens
aggugguauguuugggagac

SEQ ID NO: 197685 - RNA, 18 nt, Homo sapiens
auugugaucagaccauaa

SEQ ID NO: 197686 - RNA, 22 nt, Homo sapiens
acaaaugccacacggcucucac

SEQ ID NO: 197687 - RNA, 15 nt, Homo sapiens
ggagacuagauuuau

SEQ ID NO: 197688 - RNA, 16 nt, Homo sapiens
cucaagaugaaggcaa

SEQ ID NO: 197689 - RNA, 19 nt, Homo sapiens
aucccccgcugguggcaga

SEQ ID NO: 197690 - RNA, 16 nt, Homo sapiens
aauaaauguacauuaa

SEQ ID NO: 197691 - RNA, 22 nt, Homo sapiens
agaugggcaaauuaaggcauaa

SEQ ID NO: 197692 - RNA, 23 nt, Homo sapiens
gggauaaguaaguuugauuucau

SEQ ID NO: 197693 - RNA, 23 nt, Homo sapiens
cauauucuuauguaugugaaagu

SEQ ID NO: 197694 - RNA, 19 nt, Homo sapiens
agggggccaggugcacaga

SEQ ID NO: 197695 - RNA, 17 nt, Homo sapiens
augggaaccccuucauc

SEQ ID NO: 197696 - RNA, 20 nt, Homo sapiens
caaagccuuuggcucuucua

SEQ ID NO: 197697 - RNA, 20 nt, Homo sapiens
gcuccaucgcugucaucuca

SEQ ID NO: 197698 - RNA, 15 nt, Homo sapiens
ggaggaccagagcua

SEQ ID NO: 197699 - RNA, 12 nt, Homo sapiens
cgcuucuugccu

SEQ ID NO: 197700 - RNA, 15 nt, Homo sapiens
auuuucugcauuuaa

SEQ ID NO: 197701 - RNA, 15 nt, Homo sapiens
ccuccgcccugccac

SEQ ID NO: 197702 - RNA, 14 nt, Homo sapiens
uaccaaucauuuua

SEQ ID NO: 197703 - RNA, 15 nt, Homo sapiens
aucuuuuaagcccau

SEQ ID NO: 197704 - RNA, 20 nt, Homo sapiens
caaccucgcuggacucucag

SEQ ID NO: 197705 - RNA, 17 nt, Homo sapiens
aggacuguugacaucca

SEQ ID NO: 197706 - RNA, 18 nt, Homo sapiens
uuuugcuggucacugcca

SEQ ID NO: 197707 - RNA, 15 nt, Homo sapiens
cagggcuguguguac

SEQ ID NO: 197708 - RNA, 19 nt, Homo sapiens
ccuaacaggauuagacagu

SEQ ID NO: 197709 - RNA, 21 nt, Homo sapiens
aggagggucaggaaggaugag

SEQ ID NO: 197710 - RNA, 21 nt, Homo sapiens
agaauauuuuaaguauugcau

SEQ ID NO: 197711 - RNA, 17 nt, Homo sapiens
uuaaauacagucuucca

SEQ ID NO: 197712 - RNA, 19 nt, Homo sapiens
ccgucaauaggcaaagggg

SEQ ID NO: 197713 - RNA, 15 nt, Homo sapiens
uggcaaggugacauu

SEQ ID NO: 197714 - RNA, 20 nt, Homo sapiens
ucaccauuuggcaaugccau

SEQ ID NO: 197715 - RNA, 13 nt, Homo sapiens
ggagacugcugag

SEQ ID NO: 197716 - RNA, 17 nt, Homo sapiens
aucugugcaaauccuug

SEQ ID NO: 197717 - RNA, 22 nt, Homo sapiens
gccauuuuggguuuugggucuu

SEQ ID NO: 197718 - RNA, 13 nt, Homo sapiens
cagccucaagucu

SEQ ID NO: 197719 - RNA, 15 nt, Homo sapiens
cagagaggagucaga

SEQ ID NO: 197720 - RNA, 22 nt, Homo sapiens
agaccacgcccguccugccugu

SEQ ID NO: 197721 - RNA, 23 nt, Homo sapiens
cagcuggguuggaaaacaguauu

SEQ ID NO: 197722 - RNA, 22 nt, Homo sapiens
accuuacauuugaaaucuauga

SEQ ID NO: 197723 - RNA, 22 nt, Homo sapiens
ucacucaaucucugauucuguc

SEQ ID NO: 197724 - RNA, 19 nt, Homo sapiens
ucagacuccugugcaacuu

SEQ ID NO: 197725 - RNA, 12 nt, Homo sapiens
auugacuuuguc

SEQ ID NO: 197726 - RNA, 16 nt, Homo sapiens
cagagaggacuguuga

SEQ ID NO: 197727 - RNA, 20 nt, Homo sapiens
caguaccuccugccccaugc

SEQ ID NO: 197728 - RNA, 13 nt, Homo sapiens
ucuagaacuugac

SEQ ID NO: 197729 - RNA, 19 nt, Homo sapiens
augcugugauugugccuac

SEQ ID NO: 197730 - RNA, 21 nt, Homo sapiens
ccuuuggggugaacuaccuug

SEQ ID NO: 197731 - RNA, 15 nt, Homo sapiens
caggccacauggcua

SEQ ID NO: 197732 - RNA, 16 nt, Homo sapiens
gauccccucucuuccu

SEQ ID NO: 197733 - RNA, 13 nt, Homo sapiens
ggaacugcaauaa

SEQ ID NO: 197734 - RNA, 16 nt, Homo sapiens
cuccacugccuucgau

SEQ ID NO: 197735 - RNA, 21 nt, Homo sapiens
ucuuuucuggaauguaaucaa

SEQ ID NO: 197736 - RNA, 12 nt, Homo sapiens
acuauuacuggg

SEQ ID NO: 197737 - RNA, 21 nt, Homo sapiens
agacugggucucgcuuuguug

SEQ ID NO: 197738 - RNA, 14 nt, Homo sapiens
ugcuuaaaauagca

SEQ ID NO: 197739 - RNA, 21 nt, Homo sapiens
accgagucucuucuccacugg

SEQ ID NO: 197740 - RNA, 21 nt, Homo sapiens
cuucaugaucaucacaaucau

SEQ ID NO: 197741 - RNA, 13 nt, Homo sapiens
gaaaucuaugaaa

SEQ ID NO: 197742 - RNA, 16 nt, Homo sapiens
cuguaugauuccuuga

SEQ ID NO: 197743 - RNA, 19 nt, Homo sapiens
ugugucccccucuguccag

SEQ ID NO: 197744 - RNA, 21 nt, Homo sapiens
gagccuuaaaacccacaaaag

SEQ ID NO: 197745 - RNA, 23 nt, Homo sapiens
gaugaccccuccccuaaugccug

SEQ ID NO: 197746 - RNA, 21 nt, Homo sapiens
aggacuuccauuugcuuuguc

SEQ ID NO: 197747 - RNA, 11 nt, Homo sapiens
aaaugcaacuu

SEQ ID NO: 197748 - RNA, 16 nt, Homo sapiens
auauagcaagauccca

SEQ ID NO: 197749 - RNA, 18 nt, Homo sapiens
ugccuucuccagacaaac

SEQ ID NO: 197750 - RNA, 12 nt, Homo sapiens
agacuuugacuc

SEQ ID NO: 197751 - RNA, 20 nt, Homo sapiens
gaaauacugaggggucucca

SEQ ID NO: 197752 - RNA, 18 nt, Homo sapiens
ucacucaaucucugauuc

SEQ ID NO: 197753 - RNA, 13 nt, Homo sapiens
cacuggguugacu

SEQ ID NO: 197754 - RNA, 22 nt, Homo sapiens
acauuugaaaucuaugaaauau

SEQ ID NO: 197755 - RNA, 17 nt, Homo sapiens
ucuuccauuugcaaggg

SEQ ID NO: 197756 - RNA, 21 nt, Homo sapiens
auuugcaagggaaaagucucu

SEQ ID NO: 197757 - RNA, 13 nt, Homo sapiens
augcagggacaaa

SEQ ID NO: 197758 - RNA, 14 nt, Homo sapiens
gaaugauucagugu

SEQ ID NO: 197759 - RNA, 16 nt, Homo sapiens
gaaaacacugugcaca

SEQ ID NO: 197760 - RNA, 21 nt, Homo sapiens
acaaccaugagaccacuguua

SEQ ID NO: 197761 - RNA, 21 nt, Homo sapiens
auuuuaaugaagaaaguggaa

SEQ ID NO: 197762 - RNA, 18 nt, Homo sapiens
uguuucuuuuguauguaa

SEQ ID NO: 197763 - RNA, 18 nt, Homo sapiens
uguggcuggaagauccug

SEQ ID NO: 197764 - RNA, 14 nt, Homo sapiens
augcagggacaaau

SEQ ID NO: 197765 - RNA, 13 nt, Homo sapiens
uuuuccacuuaga

SEQ ID NO: 197766 - RNA, 16 nt, Homo sapiens
ugcccagugaccaguc

SEQ ID NO: 197767 - RNA, 14 nt, Homo sapiens
aagucaaccugccu

SEQ ID NO: 197768 - RNA, 14 nt, Homo sapiens
uggaaaauaaauca

SEQ ID NO: 197769 - RNA, 23 nt, Homo sapiens
ccuacaaggcuggcagugacaga

SEQ ID NO: 197770 - RNA, 22 nt, Homo sapiens
uggggagaaaagacaugaauau

SEQ ID NO: 197771 - RNA, 18 nt, Homo sapiens
ucacauucgaguguuuca

SEQ ID NO: 197772 - RNA, 12 nt, Homo sapiens
ccaggaccaguc

SEQ ID NO: 197773 - RNA, 20 nt, Homo sapiens
gcuccauguagaagccacua

SEQ ID NO: 197774 - RNA, 18 nt, Homo sapiens
cuuccauuugcaagggaa

SEQ ID NO: 197775 - RNA, 15 nt, Homo sapiens
uccccacugcucauu

SEQ ID NO: 197776 - RNA, 17 nt, Homo sapiens
cccggggcuccacugaa

SEQ ID NO: 197777 - RNA, 16 nt, Homo sapiens
augagaccacuguuau

SEQ ID NO: 197778 - RNA, 16 nt, Homo sapiens
ucugucucauaugauu

SEQ ID NO: 197779 - RNA, 15 nt, Homo sapiens
ugggaacugcaauaa

SEQ ID NO: 197780 - RNA, 13 nt, Homo sapiens
uaccuugugcuaa

SEQ ID NO: 197781 - RNA, 22 nt, Homo sapiens
gguucacagaagcacagcaccc

SEQ ID NO: 197782 - RNA, 21 nt, Homo sapiens
agaacuaagaugaucaucucc

SEQ ID NO: 197783 - RNA, 22 nt, Homo sapiens
ccuugauggagauauuuacaug

SEQ ID NO: 197784 - RNA, 15 nt, Homo sapiens
aagcaguuaguuccu

SEQ ID NO: 197785 - RNA, 20 nt, Homo sapiens
uucaggacacagggaaauca

SEQ ID NO: 197786 - RNA, 21 nt, Homo sapiens
cugucucauaugauugugcac

SEQ ID NO: 197787 - RNA, 19 nt, Homo sapiens
uccucugugaccaaugucu

SEQ ID NO: 197788 - RNA, 12 nt, Homo sapiens
cuaaaguagacu

SEQ ID NO: 197789 - RNA, 15 nt, Homo sapiens
ccacuguguauuuaa

SEQ ID NO: 197790 - RNA, 18 nt, Homo sapiens
guggaaccaacacuaaca

SEQ ID NO: 197791 - RNA, 22 nt, Homo sapiens
cagagugagacccagcccucau

SEQ ID NO: 197792 - RNA, 13 nt, Homo sapiens
agaaggagggaga

SEQ ID NO: 197793 - RNA, 19 nt, Homo sapiens
ucaacaucuuuuacauucu

SEQ ID NO: 197794 - RNA, 17 nt, Homo sapiens
acgugggcggcagagag

SEQ ID NO: 197795 - RNA, 20 nt, Homo sapiens
uaacuucaaggcccauaucu

SEQ ID NO: 197796 - RNA, 15 nt, Homo sapiens
ccagagaguggcucc

SEQ ID NO: 197797 - RNA, 13 nt, Homo sapiens
gaaacaacucuuu

SEQ ID NO: 197798 - RNA, 19 nt, Homo sapiens
aaugcagggacaaaugcca

SEQ ID NO: 197799 - RNA, 12 nt, Homo sapiens
cucaaucucuga

SEQ ID NO: 197800 - RNA, 21 nt, Homo sapiens
uggaacuuuuauuacuggggu

SEQ ID NO: 197801 - RNA, 20 nt, Homo sapiens
aaucacacgucuggcuucac

SEQ ID NO: 197802 - RNA, 14 nt, Homo sapiens
ucaguguauuugua

SEQ ID NO: 197803 - RNA, 14 nt, Homo sapiens
cugaccuugcacaa

SEQ ID NO: 197804 - RNA, 12 nt, Homo sapiens
uggaagggucaa

SEQ ID NO: 197805 - RNA, 18 nt, Homo sapiens
cucuuguauaugaugauc

SEQ ID NO: 197806 - RNA, 16 nt, Homo sapiens
aaacguccuacuguau

SEQ ID NO: 197807 - RNA, 16 nt, Homo sapiens
aucagucauaacuaaa

SEQ ID NO: 197808 - RNA, 20 nt, Homo sapiens
auaugaugaucuggauccac

SEQ ID NO: 197809 - RNA, 17 nt, Homo sapiens
aggagguuuaggucaag

SEQ ID NO: 197810 - RNA, 16 nt, Homo sapiens
gcuuaguuuguguguu

SEQ ID NO: 197811 - RNA, 18 nt, Homo sapiens
cccaggucccuuguccca

SEQ ID NO: 197812 - RNA, 16 nt, Homo sapiens
cauuaccuugugcuaa

SEQ ID NO: 197813 - RNA, 16 nt, Homo sapiens
ugucugacaaccucuu

SEQ ID NO: 197814 - RNA, 19 nt, Homo sapiens
ccuggucccuuggagacaa

SEQ ID NO: 197815 - RNA, 21 nt, Homo sapiens
cccaguguguuucugaucuga

SEQ ID NO: 197816 - RNA, 15 nt, Homo sapiens
gauacagaacucuuu

SEQ ID NO: 197817 - RNA, 17 nt, Homo sapiens
auccugaccuugcacaa

SEQ ID NO: 197818 - RNA, 18 nt, Homo sapiens
ccugacagaaggacucag

SEQ ID NO: 197819 - RNA, 20 nt, Homo sapiens
cccuccuccagaccauucag

SEQ ID NO: 197820 - RNA, 18 nt, Homo sapiens
ucacagaugugugauuca

SEQ ID NO: 197821 - RNA, 14 nt, Homo sapiens
cuuccucaccacuu

SEQ ID NO: 197822 - RNA, 18 nt, Homo sapiens
uagaguguuaucagucau

SEQ ID NO: 197823 - RNA, 21 nt, Homo sapiens
augucguuugaaucacaguau

SEQ ID NO: 197824 - RNA, 15 nt, Homo sapiens
caccaggucagggag

SEQ ID NO: 197825 - RNA, 12 nt, Homo sapiens
cauucucugucu

SEQ ID NO: 197826 - RNA, 17 nt, Homo sapiens
aaggcuagaucaugaag

SEQ ID NO: 197827 - RNA, 18 nt, Homo sapiens
agcaaagggagcacuggg

SEQ ID NO: 197828 - RNA, 13 nt, Homo sapiens
cugccagggccag

SEQ ID NO: 197829 - RNA, 13 nt, Homo sapiens
uaagggaccucaa

SEQ ID NO: 197830 - RNA, 17 nt, Homo sapiens
ugucuaaaaucccuccu

SEQ ID NO: 197831 - RNA, 16 nt, Homo sapiens
ggaacccucuaaggga

SEQ ID NO: 197832 - RNA, 16 nt, Homo sapiens
gccacuauuacuggga

SEQ ID NO: 197833 - RNA, 21 nt, Homo sapiens
aguagacuucauuuuuccuaa

SEQ ID NO: 197834 - RNA, 13 nt, Homo sapiens
uuuagauuguuaa

SEQ ID NO: 197835 - RNA, 14 nt, Homo sapiens
uaacaacuaugauu

SEQ ID NO: 197836 - RNA, 16 nt, Homo sapiens
ggaguaggacauacca

SEQ ID NO: 197837 - RNA, 13 nt, Homo sapiens
ugauucacagugu

SEQ ID NO: 197838 - RNA, 20 nt, Homo sapiens
aagagggugauugcuggggc

SEQ ID NO: 197839 - RNA, 14 nt, Homo sapiens
caggcuggccaguc

SEQ ID NO: 197840 - RNA, 17 nt, Homo sapiens
ugacacuuuucaugugu

SEQ ID NO: 197841 - RNA, 21 nt, Homo sapiens
uugaguuugucgcucaugugu

SEQ ID NO: 197842 - RNA, 13 nt, Homo sapiens
auucucauucuca

SEQ ID NO: 197843 - RNA, 14 nt, Homo sapiens
accaccaagccaag

SEQ ID NO: 197844 - RNA, 22 nt, Homo sapiens
ugacccagucagaguugugcac

SEQ ID NO: 197845 - RNA, 20 nt, Homo sapiens
gugcccccagacgcacgugg

SEQ ID NO: 197846 - RNA, 13 nt, Homo sapiens
cacagcacccaug

SEQ ID NO: 197847 - RNA, 17 nt, Homo sapiens
aguguaugacugcacau

SEQ ID NO: 197848 - RNA, 20 nt, Homo sapiens
agcaggggaguaugcaaaag

SEQ ID NO: 197849 - RNA, 22 nt, Homo sapiens
aagggccagcuggaggugaaga

SEQ ID NO: 197850 - RNA, 21 nt, Homo sapiens
cuaugaaauaucaugcuccau

SEQ ID NO: 197851 - RNA, 20 nt, Homo sapiens
uuugcaagggaaaagucucu

SEQ ID NO: 197852 - RNA, 17 nt, Homo sapiens
ucuuguuccccacugac

SEQ ID NO: 197853 - RNA, 13 nt, Homo sapiens
caaaugugacauu

SEQ ID NO: 197854 - RNA, 15 nt, Homo sapiens
cccucuaagggaccu

SEQ ID NO: 197855 - RNA, 16 nt, Homo sapiens
ccuccugggcccucuc

SEQ ID NO: 197856 - RNA, 14 nt, Homo sapiens
acuuccauuugcuu

SEQ ID NO: 197857 - RNA, 22 nt, Homo sapiens
aauuuuuuuaaccaaaggugaa

SEQ ID NO: 197858 - RNA, 21 nt, Homo sapiens
acucaaucucugauucuguca

SEQ ID NO: 197859 - RNA, 22 nt, Homo sapiens
ccugaaguaagcaaagacuuuc

SEQ ID NO: 197860 - RNA, 17 nt, Homo sapiens
guucacucuacuuagca

SEQ ID NO: 197861 - RNA, 13 nt, Homo sapiens
cauuugcaccuac

SEQ ID NO: 197862 - RNA, 19 nt, Homo sapiens
gcauuugugcccacucucc

SEQ ID NO: 197863 - RNA, 12 nt, Homo sapiens
uucacaguguga

SEQ ID NO: 197864 - RNA, 22 nt, Homo sapiens
uucucagaaucuacccaaagga

SEQ ID NO: 197865 - RNA, 14 nt, Homo sapiens
aauaauguacaucu

SEQ ID NO: 197866 - RNA, 17 nt, Homo sapiens
agauaauuauaauauac

SEQ ID NO: 197867 - RNA, 23 nt, Homo sapiens
agaagcuaaauccuuuacuguua

SEQ ID NO: 197868 - RNA, 12 nt, Homo sapiens
ucaauccagcua

SEQ ID NO: 197869 - RNA, 21 nt, Homo sapiens
ugcaucuguauaaguaagaaa

SEQ ID NO: 197870 - RNA, 20 nt, Homo sapiens
aacuggaggaguuccuugau

SEQ ID NO: 197871 - RNA, 13 nt, Homo sapiens
uucagcucuacag

SEQ ID NO: 197872 - RNA, 13 nt, Homo sapiens
auaguacuggcau

SEQ ID NO: 197873 - RNA, 21 nt, Homo sapiens
gagcauuguggcugucagcag

SEQ ID NO: 197874 - RNA, 16 nt, Homo sapiens
auauugcuucuucucc

SEQ ID NO: 197875 - RNA, 18 nt, Homo sapiens
uguaucauuaugaaguca

SEQ ID NO: 197876 - RNA, 23 nt, Homo sapiens
aauauuguccauuguccaauccu

SEQ ID NO: 197877 - RNA, 14 nt, Homo sapiens
ugcauuaucuauga

SEQ ID NO: 197878 - RNA, 15 nt, Homo sapiens
ucuacuaacaaucag

SEQ ID NO: 197879 - RNA, 15 nt, Homo sapiens
aucgcugucaucuca

SEQ ID NO: 197880 - RNA, 21 nt, Homo sapiens
aggguucaccaggucagggag

SEQ ID NO: 197881 - RNA, 15 nt, Homo sapiens
uacuaucaugucaaa

SEQ ID NO: 197882 - RNA, 19 nt, Homo sapiens
cagaaucuguuaccagagg

SEQ ID NO: 197883 - RNA, 13 nt, Homo sapiens
auuuuuguuuaua

SEQ ID NO: 197884 - RNA, 19 nt, Homo sapiens
agcugguugggaagacaug

SEQ ID NO: 197885 - RNA, 14 nt, Homo sapiens
caacgaguacuuca

SEQ ID NO: 197886 - RNA, 14 nt, Homo sapiens
gauucaguguuaaa

SEQ ID NO: 197887 - RNA, 20 nt, Homo sapiens
ggagcuuuugguaugugaca

SEQ ID NO: 197888 - RNA, 15 nt, Homo sapiens
uaauauaacugccuu

SEQ ID NO: 197889 - RNA, 14 nt, Homo sapiens
uauuuuugugcaca

SEQ ID NO: 197890 - RNA, 19 nt, Homo sapiens
ccaaucccaccaacccuca

SEQ ID NO: 197891 - RNA, 17 nt, Homo sapiens
gauaguggggucagggc

SEQ ID NO: 197892 - RNA, 14 nt, Homo sapiens
acacuaacauauaa

SEQ ID NO: 197893 - RNA, 13 nt, Homo sapiens
uaaguuucacuga

SEQ ID NO: 197894 - RNA, 12 nt, Homo sapiens
augaugaucugg

SEQ ID NO: 197895 - RNA, 16 nt, Homo sapiens
cuaugaggcaaccaca

SEQ ID NO: 197896 - RNA, 17 nt, Homo sapiens
aaacagccccucuggac

SEQ ID NO: 197897 - RNA, 17 nt, Homo sapiens
cuaagcagaccacugau

SEQ ID NO: 197898 - RNA, 20 nt, Homo sapiens
aaaugcuguauuagucacag

SEQ ID NO: 197899 - RNA, 16 nt, Homo sapiens
cugaaguaagcaaaga

SEQ ID NO: 197900 - RNA, 22 nt, Homo sapiens
gcaguugaaacaagaagccaca

SEQ ID NO: 197901 - RNA, 20 nt, Homo sapiens
cucacagagugcauugugag

SEQ ID NO: 197902 - RNA, 21 nt, Homo sapiens
ucagacuccugugcaacuuuc

SEQ ID NO: 197903 - RNA, 15 nt, Homo sapiens
aggugcuacugacuu

SEQ ID NO: 197904 - RNA, 17 nt, Homo sapiens
uaucaccgugggcuccc

SEQ ID NO: 197905 - RNA, 22 nt, Homo sapiens
acacagcugcagagacagagag

SEQ ID NO: 197906 - RNA, 21 nt, Homo sapiens
aagaacaauauugacuuuguc

SEQ ID NO: 197907 - RNA, 20 nt, Homo sapiens
ugaccuugcacaaacagccc

SEQ ID NO: 197908 - RNA, 17 nt, Homo sapiens
cacauacuugagacugu

SEQ ID NO: 197909 - RNA, 22 nt, Homo sapiens
aggaauauauggcagaguugua

SEQ ID NO: 197910 - RNA, 23 nt, Homo sapiens
gagacacuauuuaucugugcaaa

SEQ ID NO: 197911 - RNA, 19 nt, Homo sapiens
accugaaaacacugugcac

SEQ ID NO: 197912 - RNA, 20 nt, Homo sapiens
gaauuuucucuaacuucaag

SEQ ID NO: 197913 - RNA, 17 nt, Homo sapiens
acaucuuuuacauucug

SEQ ID NO: 197914 - RNA, 10 nt, Homo sapiens
uaugcaaaag

SEQ ID NO: 197915 - RNA, 12 nt, Homo sapiens
ugaaaagucaaa

SEQ ID NO: 197916 - RNA, 20 nt, Homo sapiens
caaagcauugagcaaagggg

SEQ ID NO: 197917 - RNA, 14 nt, Homo sapiens
ugugggugggacca

SEQ ID NO: 197918 - RNA, 16 nt, Homo sapiens
auggaggcacacagcu

SEQ ID NO: 197919 - RNA, 20 nt, Homo sapiens
uacauucugcaagcacaucu

SEQ ID NO: 197920 - RNA, 20 nt, Homo sapiens
aucuugcuucugcuucucau

SEQ ID NO: 197921 - RNA, 15 nt, Homo sapiens
caggaaccucagggc

SEQ ID NO: 197922 - RNA, 20 nt, Homo sapiens
gagugcaccacuucaaguga

SEQ ID NO: 197923 - RNA, 21 nt, Homo sapiens
uacugggguuuuucuaagaaa

SEQ ID NO: 197924 - RNA, 18 nt, Homo sapiens
accccuccccuaaugccu

SEQ ID NO: 197925 - RNA, 20 nt, Homo sapiens
cagauacugucucuuucaug

SEQ ID NO: 197926 - RNA, 23 nt, Homo sapiens
auagugauugauagaguguuauc

SEQ ID NO: 197927 - RNA, 18 nt, Homo sapiens
aaggcuggcagugacaga

SEQ ID NO: 197928 - RNA, 12 nt, Homo sapiens
caggcacugaga

SEQ ID NO: 197929 - RNA, 18 nt, Homo sapiens
gcuucucugacuucugcc

SEQ ID NO: 197930 - RNA, 20 nt, Homo sapiens
caggacuuccauuugcuuug

SEQ ID NO: 197931 - RNA, 16 nt, Homo sapiens
uucauaaguauuucaa

SEQ ID NO: 197932 - RNA, 16 nt, Homo sapiens
cuugcuugcaauaggu

SEQ ID NO: 197933 - RNA, 17 nt, Homo sapiens
ccagaaagcucaucuca

SEQ ID NO: 197934 - RNA, 16 nt, Homo sapiens
cauggagcaugggacu

SEQ ID NO: 197935 - RNA, 14 nt, Homo sapiens
cagaaaaacugugg

SEQ ID NO: 197936 - RNA, 23 nt, Homo sapiens
gccuguggcgccgucuccagggg

SEQ ID NO: 197937 - RNA, 17 nt, Homo sapiens
uuuggguuuugggucuu

SEQ ID NO: 197938 - RNA, 22 nt, Homo sapiens
auauuuguaugauccuaaugaa

SEQ ID NO: 197939 - RNA, 16 nt, Homo sapiens
gugacauuuccaugca

SEQ ID NO: 197940 - RNA, 22 nt, Homo sapiens
uaaaacuuuaaucccacuugcc

SEQ ID NO: 197941 - RNA, 15 nt, Homo sapiens
auaacuauguugaua

SEQ ID NO: 197942 - RNA, 20 nt, Homo sapiens
aaugcauauccaacaugugc

SEQ ID NO: 197943 - RNA, 14 nt, Homo sapiens
uggcugccuuagaa

SEQ ID NO: 197944 - RNA, 11 nt, Homo sapiens
auaguacuggc

SEQ ID NO: 197945 - RNA, 13 nt, Homo sapiens
cuaagaugaucau

SEQ ID NO: 197946 - RNA, 15 nt, Homo sapiens
guaaauguuuagguu

SEQ ID NO: 197947 - RNA, 19 nt, Homo sapiens
uaccucacagagugcauug

SEQ ID NO: 197948 - RNA, 14 nt, Homo sapiens
cucugugaccaaug

SEQ ID NO: 197949 - RNA, 16 nt, Homo sapiens
cugcccccaauccaug

SEQ ID NO: 197950 - RNA, 17 nt, Homo sapiens
gaccuguaaucauauaa

SEQ ID NO: 197951 - RNA, 17 nt, Homo sapiens
aguguuaucagucauaa

SEQ ID NO: 197952 - RNA, 14 nt, Homo sapiens
uagaggugagggaa

SEQ ID NO: 197953 - RNA, 18 nt, Homo sapiens
ugacccucuccccacugc

SEQ ID NO: 197954 - RNA, 22 nt, Homo sapiens
uggggacagagcagaacuuuca

SEQ ID NO: 197955 - RNA, 13 nt, Homo sapiens
uuuugugauugcc

SEQ ID NO: 197956 - RNA, 19 nt, Homo sapiens
uauugcagcuuauauucau

SEQ ID NO: 197957 - RNA, 11 nt, Homo sapiens
uggcaaagaca

SEQ ID NO: 197958 - RNA, 18 nt, Homo sapiens
caggaguuggaagugugu

SEQ ID NO: 197959 - RNA, 14 nt, Homo sapiens
uaaauguacauuaa

SEQ ID NO: 197960 - RNA, 14 nt, Homo sapiens
gaaggcaaacccau

SEQ ID NO: 197961 - RNA, 13 nt, Homo sapiens
ccuccacgccauu

SEQ ID NO: 197962 - RNA, 11 nt, Homo sapiens
gccaagccagu

SEQ ID NO: 197963 - RNA, 15 nt, Homo sapiens
uuauaaaagaugcau

SEQ ID NO: 197964 - RNA, 22 nt, Homo sapiens
auccucugagugugaccaggca

SEQ ID NO: 197965 - RNA, 22 nt, Homo sapiens
ugaauaaaccaucaucuugcca

SEQ ID NO: 197966 - RNA, 19 nt, Homo sapiens
aucaggaauauuuuccaaa

SEQ ID NO: 197967 - RNA, 21 nt, Homo sapiens
aacguggggcagcacagagag

SEQ ID NO: 197968 - RNA, 15 nt, Homo sapiens
uuacaaaguguguau

SEQ ID NO: 197969 - RNA, 21 nt, Homo sapiens
auaugcacaauagcaguugaa

SEQ ID NO: 197970 - RNA, 13 nt, Homo sapiens
gcuccacugaaca

SEQ ID NO: 197971 - RNA, 14 nt, Homo sapiens
auugagcaaagggg

SEQ ID NO: 197972 - RNA, 16 nt, Homo sapiens
uuuguaucauuaugaa

SEQ ID NO: 197973 - RNA, 20 nt, Homo sapiens
cuugaguuuagugaucugaa

SEQ ID NO: 197974 - RNA, 20 nt, Homo sapiens
cauuagccuaugugcaugca

SEQ ID NO: 197975 - RNA, 15 nt, Homo sapiens
gcagugacagaacua

SEQ ID NO: 197976 - RNA, 12 nt, Homo sapiens
uuccccacugac

SEQ ID NO: 197977 - RNA, 18 nt, Homo sapiens
acagaagccucacugcaa

SEQ ID NO: 197978 - RNA, 20 nt, Homo sapiens
auccuacaaggcuggcagug

SEQ ID NO: 197979 - RNA, 15 nt, Homo sapiens
gaaaacugcaacuug

SEQ ID NO: 197980 - RNA, 16 nt, Homo sapiens
cuuguuccccacugac

SEQ ID NO: 197981 - RNA, 15 nt, Homo sapiens
uuacgagcagggaug

SEQ ID NO: 197982 - RNA, 22 nt, Homo sapiens
gccugaucagcgccgcaccagc

SEQ ID NO: 197983 - RNA, 18 nt, Homo sapiens
auuacauggggucuagaa

SEQ ID NO: 197984 - RNA, 19 nt, Homo sapiens
auuugcauaacaauuccuc

SEQ ID NO: 197985 - RNA, 21 nt, Homo sapiens
uauaguuuauugacaauaauu

SEQ ID NO: 197986 - RNA, 14 nt, Homo sapiens
cccuguuaccuaau

SEQ ID NO: 197987 - RNA, 16 nt, Homo sapiens
caugcauaaaugcgau

SEQ ID NO: 197988 - RNA, 14 nt, Homo sapiens
ccaacaugugcuca

SEQ ID NO: 197989 - RNA, 21 nt, Homo sapiens
cuggagucgggacuaacccag

SEQ ID NO: 197990 - RNA, 17 nt, Homo sapiens
ugcucuuaaguugugga

SEQ ID NO: 197991 - RNA, 23 nt, Homo sapiens
cuucaagccuagcccuucucuca

SEQ ID NO: 197992 - RNA, 14 nt, Homo sapiens
cuaguguugcuugg

SEQ ID NO: 197993 - RNA, 15 nt, Homo sapiens
aucccccagccucaa

SEQ ID NO: 197994 - RNA, 18 nt, Homo sapiens
uauauaaaugugauugca

SEQ ID NO: 197995 - RNA, 19 nt, Homo sapiens
gaggcuggguucauuugug

SEQ ID NO: 197996 - RNA, 20 nt, Homo sapiens
uugcccaggcuggucucaaa

SEQ ID NO: 197997 - RNA, 23 nt, Homo sapiens
ucccugaaguaagcaaagacuuu

SEQ ID NO: 197998 - RNA, 21 nt, Homo sapiens
agugauaucccccagccucaa

SEQ ID NO: 197999 - RNA, 23 nt, Homo sapiens
aguguugcccaggcuggucucaa

SEQ ID NO: 198000 - RNA, 19 nt, Homo sapiens
cagggaaaauuauuugcau

SEQ ID NO: 198001 - RNA, 22 nt, Homo sapiens
gugaucagaccauaauguuaca

SEQ ID NO: 198002 - RNA, 23 nt, Homo sapiens
uccacuucuuguuccccacugac

SEQ ID NO: 198003 - RNA, 19 nt, Homo sapiens
ccugcggaguugugcacgu

SEQ ID NO: 198004 - RNA, 19 nt, Homo sapiens
cagucaaggaguggcuuac

SEQ ID NO: 198005 - RNA, 23 nt, Homo sapiens
ccccagacgcacgugggucuuca

SEQ ID NO: 198006 - RNA, 23 nt, Homo sapiens
ggugcuacacccuuuuccagcug

SEQ ID NO: 198007 - RNA, 21 nt, Homo sapiens
ugcaaauccuugauacugcuc

SEQ ID NO: 198008 - RNA, 15 nt, Homo sapiens
aaaaauccuacaagg

SEQ ID NO: 198009 - RNA, 17 nt, Homo sapiens
aggaugggaaggaggga

SEQ ID NO: 198010 - RNA, 13 nt, Homo sapiens
uuacaauugugag

SEQ ID NO: 198011 - RNA, 14 nt, Homo sapiens
ugaguuuucagugg

SEQ ID NO: 198012 - RNA, 15 nt, Homo sapiens
uuuggagguauucaa

SEQ ID NO: 198013 - RNA, 14 nt, Homo sapiens
ccuugaugcucaua

SEQ ID NO: 198014 - RNA, 13 nt, Homo sapiens
ccaggucagggag

SEQ ID NO: 198015 - RNA, 17 nt, Homo sapiens
auccaugaaccaagacc

SEQ ID NO: 198016 - RNA, 22 nt, Homo sapiens
gccguggggccgccgccucuuu

SEQ ID NO: 198017 - RNA, 16 nt, Homo sapiens
cacaggcacugcagga

SEQ ID NO: 198018 - RNA, 14 nt, Homo sapiens
cauuugcuuugucc

SEQ ID NO: 198019 - RNA, 15 nt, Homo sapiens
aauucggugugcacc

SEQ ID NO: 198020 - RNA, 15 nt, Homo sapiens
cacuucucucaggau

SEQ ID NO: 198021 - RNA, 22 nt, Homo sapiens
gagacacuauuuaucugugcaa

SEQ ID NO: 198022 - RNA, 19 nt, Homo sapiens
gaccacagagggcaggaac

SEQ ID NO: 198023 - RNA, 14 nt, Homo sapiens
uccuccagaccauu

SEQ ID NO: 198024 - RNA, 19 nt, Homo sapiens
gacuuccauuugcuuuguc

SEQ ID NO: 198025 - RNA, 15 nt, Homo sapiens
gguuccggaauccug

SEQ ID NO: 198026 - RNA, 13 nt, Homo sapiens
acagagugcauug

SEQ ID NO: 198027 - RNA, 20 nt, Homo sapiens
cuucauaauuucuucacuca

SEQ ID NO: 198028 - RNA, 19 nt, Homo sapiens
gggcuucuagaaccaggca

SEQ ID NO: 198029 - RNA, 19 nt, Homo sapiens
acagccccucuggacacag

SEQ ID NO: 198030 - RNA, 12 nt, Homo sapiens
cacacuuugcca

SEQ ID NO: 198031 - RNA, 20 nt, Homo sapiens
ucagggagaguuugggaacu

SEQ ID NO: 198032 - RNA, 23 nt, Homo sapiens
ugaauaugauuaguaaagaaaug

SEQ ID NO: 198033 - RNA, 14 nt, Homo sapiens
gcgcucagggccau

SEQ ID NO: 198034 - RNA, 20 nt, Homo sapiens
ugaaaaugcuguauuaguca

SEQ ID NO: 198035 - RNA, 23 nt, Homo sapiens
cuguggugugucccccucugucc

SEQ ID NO: 198036 - RNA, 19 nt, Homo sapiens
aaucaggaauauuuuccaa

SEQ ID NO: 198037 - RNA, 24 nt, Homo sapiens
uggagguauucaauauccuuugcc

SEQ ID NO: 198038 - RNA, 20 nt, Homo sapiens
uguugcucucuaguuuccag

SEQ ID NO: 198039 - RNA, 20 nt, Homo sapiens
gacccggaggggccuggcag

SEQ ID NO: 198040 - RNA, 15 nt, Homo sapiens
caauauugacuuugu

SEQ ID NO: 198041 - RNA, 20 nt, Homo sapiens
caggcgauccaccugucuca

SEQ ID NO: 198042 - RNA, 20 nt, Homo sapiens
aauccaugaaccaagaccau

SEQ ID NO: 198043 - RNA, 16 nt, Homo sapiens
uggggagaaaagacau

SEQ ID NO: 198044 - RNA, 17 nt, Homo sapiens
caugaucaucacaauca

SEQ ID NO: 198045 - RNA, 11 nt, Homo sapiens
cuuaaucacac

SEQ ID NO: 198046 - RNA, 13 nt, Homo sapiens
cgugggcucccug

SEQ ID NO: 198047 - RNA, 20 nt, Homo sapiens
ugcccaggcuggaguggagu

SEQ ID NO: 198048 - RNA, 12 nt, Homo sapiens
aagcacuugugg

SEQ ID NO: 198049 - RNA, 16 nt, Homo sapiens
augccucuguauuuaa

SEQ ID NO: 198050 - RNA, 14 nt, Homo sapiens
ccuucuguggcuca

SEQ ID NO: 198051 - RNA, 19 nt, Homo sapiens
ccuuguaauucuaaaugaa

SEQ ID NO: 198052 - RNA, 13 nt, Homo sapiens
ccugggaccacag

SEQ ID NO: 198053 - RNA, 19 nt, Homo sapiens
ucguuugaaucacaguaua

SEQ ID NO: 198054 - RNA, 14 nt, Homo sapiens
ugcacuuacuugcu

SEQ ID NO: 198055 - RNA, 17 nt, Homo sapiens
cucucacuauaccagua

SEQ ID NO: 198056 - RNA, 14 nt, Homo sapiens
aaugcccagugacc

SEQ ID NO: 198057 - RNA, 17 nt, Homo sapiens
caaucagccacauucua

SEQ ID NO: 198058 - RNA, 20 nt, Homo sapiens
agcagugaaugauucagugu

SEQ ID NO: 198059 - RNA, 13 nt, Homo sapiens
auucuaguacuug

SEQ ID NO: 198060 - RNA, 17 nt, Homo sapiens
aguccuacaagcuaaaa

SEQ ID NO: 198061 - RNA, 13 nt, Homo sapiens
accauaauguuac

SEQ ID NO: 198062 - RNA, 17 nt, Homo sapiens
gaggugagggaagccug

SEQ ID NO: 198063 - RNA, 22 nt, Homo sapiens
agccucacugcaagcacugcau

SEQ ID NO: 198064 - RNA, 14 nt, Homo sapiens
acugaagccuuucu

SEQ ID NO: 198065 - RNA, 18 nt, Homo sapiens
uacccuuccucaccacuu

SEQ ID NO: 198066 - RNA, 21 nt, Homo sapiens
ucuacccaaaggauacuguaa

SEQ ID NO: 198067 - RNA, 18 nt, Homo sapiens
accugaaauaaaauucau

SEQ ID NO: 198068 - RNA, 21 nt, Homo sapiens
uaccugaaaacacugugcaca

SEQ ID NO: 198069 - RNA, 18 nt, Homo sapiens
aaacuccugggcucaggc

SEQ ID NO: 198070 - RNA, 13 nt, Homo sapiens
uggcccagccaaa

SEQ ID NO: 198071 - RNA, 20 nt, Homo sapiens
gcuacaccuuucuccuuugu

SEQ ID NO: 198072 - RNA, 18 nt, Homo sapiens
ccuuccucaccacuuccc

SEQ ID NO: 198073 - RNA, 14 nt, Homo sapiens
aggaaggaugagca

SEQ ID NO: 198074 - RNA, 18 nt, Homo sapiens
ugauaucccccagccuca

SEQ ID NO: 198075 - RNA, 15 nt, Homo sapiens
ucgcugucaucucag

SEQ ID NO: 198076 - RNA, 19 nt, Homo sapiens
ucaccauuuggcaaugcca

SEQ ID NO: 198077 - RNA, 14 nt, Homo sapiens
aagucaaagacauu

SEQ ID NO: 198078 - RNA, 12 nt, Homo sapiens
aaugugauugca

SEQ ID NO: 198079 - RNA, 22 nt, Homo sapiens
aacugcaggcccuggccucccc

SEQ ID NO: 198080 - RNA, 12 nt, Homo sapiens
ugaaaaaugccu

SEQ ID NO: 198081 - RNA, 22 nt, Homo sapiens
gucaaggauggaugcagaucca

SEQ ID NO: 198082 - RNA, 16 nt, Homo sapiens
cacaggcagcauuuag

SEQ ID NO: 198083 - RNA, 16 nt, Homo sapiens
cucacacaugagaucu

SEQ ID NO: 198084 - RNA, 16 nt, Homo sapiens
gaauaugauuaguaaa

SEQ ID NO: 198085 - RNA, 21 nt, Homo sapiens
acauggcuaaagaagguuuca

SEQ ID NO: 198086 - RNA, 12 nt, Homo sapiens
agaaauguacaa

SEQ ID NO: 198087 - RNA, 19 nt, Homo sapiens
uacagaaucaaaugcaauu

SEQ ID NO: 198088 - RNA, 17 nt, Homo sapiens
agacaggacccugggac

SEQ ID NO: 198089 - RNA, 19 nt, Homo sapiens
uauauuugaaguggagcca

SEQ ID NO: 198090 - RNA, 11 nt, Homo sapiens
aguaacaugug

SEQ ID NO: 198091 - RNA, 16 nt, Homo sapiens
acaauauugacuuugu

SEQ ID NO: 198092 - RNA, 17 nt, Homo sapiens
cuagugguggguacuca

SEQ ID NO: 198093 - RNA, 19 nt, Homo sapiens
cuugaaagaaaauaugcau

SEQ ID NO: 198094 - RNA, 17 nt, Homo sapiens
gucucgcuuuguugccc

SEQ ID NO: 198095 - RNA, 21 nt, Homo sapiens
ucugaugcaagcaagaaacac

SEQ ID NO: 198096 - RNA, 15 nt, Homo sapiens
aagugugugaucugu

SEQ ID NO: 198097 - RNA, 15 nt, Homo sapiens
cuaaagaagguuuca

SEQ ID NO: 198098 - RNA, 12 nt, Homo sapiens
acaaaaucacac

SEQ ID NO: 198099 - RNA, 14 nt, Homo sapiens
ggaauaauccagaa

SEQ ID NO: 198100 - RNA, 23 nt, Homo sapiens
uuuucaauguuagccacagugua

SEQ ID NO: 198101 - RNA, 21 nt, Homo sapiens
uauccaacaugugcucaggga

SEQ ID NO: 198102 - RNA, 23 nt, Homo sapiens
ugaucggagccuccucucucaaa

SEQ ID NO: 198103 - RNA, 14 nt, Homo sapiens
uauaucgaucucuu

SEQ ID NO: 198104 - RNA, 23 nt, Homo sapiens
ccaucagugcucccucacauguc

SEQ ID NO: 198105 - RNA, 17 nt, Homo sapiens
cagaggcuuaaucacac

SEQ ID NO: 198106 - RNA, 20 nt, Homo sapiens
cccuuucugugugaagauca

SEQ ID NO: 198107 - RNA, 22 nt, Homo sapiens
cauagaggugagggaagccuga

SEQ ID NO: 198108 - RNA, 21 nt, Homo sapiens
caaaaucauuuuauaugucaa

SEQ ID NO: 198109 - RNA, 15 nt, Homo sapiens
caggaauauuuucca

SEQ ID NO: 198110 - RNA, 15 nt, Homo sapiens
cauugugaggguuaa

SEQ ID NO: 198111 - RNA, 18 nt, Homo sapiens
agcaagaucccaucucuu

SEQ ID NO: 198112 - RNA, 15 nt, Homo sapiens
cuccugaagccacag

SEQ ID NO: 198113 - RNA, 17 nt, Homo sapiens
agguuuaggucaagaag

SEQ ID NO: 198114 - RNA, 17 nt, Homo sapiens
caucauucucugucuca

SEQ ID NO: 198115 - RNA, 16 nt, Homo sapiens
aagcugggagcacagg

SEQ ID NO: 198116 - RNA, 12 nt, Homo sapiens
gaaaucaagggc

SEQ ID NO: 198117 - RNA, 16 nt, Homo sapiens
gaacuuucaccuucau

SEQ ID NO: 198118 - RNA, 21 nt, Homo sapiens
agaggagagagacuccagcug

SEQ ID NO: 198119 - RNA, 14 nt, Homo sapiens
cuauguuauauuga

SEQ ID NO: 198120 - RNA, 18 nt, Homo sapiens
cagaucccacuugcagcc

SEQ ID NO: 198121 - RNA, 14 nt, Homo sapiens
uuacuaucauguca

SEQ ID NO: 198122 - RNA, 19 nt, Homo sapiens
gccuccucuacaauuugcc

SEQ ID NO: 198123 - RNA, 13 nt, Homo sapiens
ugaagccacagca

SEQ ID NO: 198124 - RNA, 16 nt, Homo sapiens
augcguuuaaucacau

SEQ ID NO: 198125 - RNA, 13 nt, Homo sapiens
caggugcacagac

SEQ ID NO: 198126 - RNA, 16 nt, Homo sapiens
ucuugaguuuagugau

SEQ ID NO: 198127 - RNA, 15 nt, Homo sapiens
uaagcaaagacuuuc

SEQ ID NO: 198128 - RNA, 18 nt, Homo sapiens
aggagggcagaucacuuc

SEQ ID NO: 198129 - RNA, 14 nt, Homo sapiens
uauaguacuggcau

SEQ ID NO: 198130 - RNA, 14 nt, Homo sapiens
cuauguaacaugua

SEQ ID NO: 198131 - RNA, 20 nt, Homo sapiens
cagccaagccagucaaggau

SEQ ID NO: 198132 - RNA, 22 nt, Homo sapiens
augauccuaaugaaugcauaaa

SEQ ID NO: 198133 - RNA, 14 nt, Homo sapiens
agagagggggccac

SEQ ID NO: 198134 - RNA, 14 nt, Homo sapiens
gcacccuugcgcuu

SEQ ID NO: 198135 - RNA, 19 nt, Homo sapiens
auccagguaauccaagaua

SEQ ID NO: 198136 - RNA, 16 nt, Homo sapiens
cuggaagcauggagca

SEQ ID NO: 198137 - RNA, 14 nt, Homo sapiens
cacugggcuucuag

SEQ ID NO: 198138 - RNA, 14 nt, Homo sapiens
ucagccacauucua

SEQ ID NO: 198139 - RNA, 13 nt, Homo sapiens
uaccugggcauuc

SEQ ID NO: 198140 - RNA, 20 nt, Homo sapiens
gcauacgguaugauauugca

SEQ ID NO: 198141 - RNA, 22 nt, Homo sapiens
uaugguuaauaaguuucacuga

SEQ ID NO: 198142 - RNA, 21 nt, Homo sapiens
uauaaaugugauugcagcuuu

SEQ ID NO: 198143 - RNA, 18 nt, Homo sapiens
ccacuagugcaaaucaua

SEQ ID NO: 198144 - RNA, 15 nt, Homo sapiens
aaucagccacauucu

SEQ ID NO: 198145 - RNA, 18 nt, Homo sapiens
ucagggcugagaggagaa

SEQ ID NO: 198146 - RNA, 20 nt, Homo sapiens
ucaaaggugauugugccagg

SEQ ID NO: 198147 - RNA, 22 nt, Homo sapiens
aaaugguccaggagaaggccaa

SEQ ID NO: 198148 - RNA, 22 nt, Homo sapiens
ugcuccgucuaagucaugagcu

SEQ ID NO: 198149 - RNA, 18 nt, Homo sapiens
cucacuugugcaguguug

SEQ ID NO: 198150 - RNA, 17 nt, Homo sapiens
ugaacggugagcauugu

SEQ ID NO: 198151 - RNA, 16 nt, Homo sapiens
ucaaguuggcuucuaa

SEQ ID NO: 198152 - RNA, 20 nt, Homo sapiens
agcucugaaaccaguguuag

SEQ ID NO: 198153 - RNA, 21 nt, Homo sapiens
gaccucaaaggugauugugcc

SEQ ID NO: 198154 - RNA, 16 nt, Homo sapiens
ucauccacuagugcaa

SEQ ID NO: 198155 - RNA, 14 nt, Homo sapiens
cugagauaccagcg

SEQ ID NO: 198156 - RNA, 23 nt, Homo sapiens
cagacuaugucacccaaugcaua

SEQ ID NO: 198157 - RNA, 20 nt, Homo sapiens
uuugggaacugcaauaaccu

SEQ ID NO: 198158 - RNA, 20 nt, Homo sapiens
gcuucuugccucugugcugu

SEQ ID NO: 198159 - RNA, 17 nt, Homo sapiens
ggaagagggugauugcu

SEQ ID NO: 198160 - RNA, 18 nt, Homo sapiens
aucagcgccgcaccagcc

SEQ ID NO: 198161 - RNA, 20 nt, Homo sapiens
acuguuagucauuugcugag

SEQ ID NO: 198162 - RNA, 18 nt, Homo sapiens
acagccuggcacagggca

SEQ ID NO: 198163 - RNA, 23 nt, Homo sapiens
ucaugccaccauggccagccaac

SEQ ID NO: 198164 - RNA, 19 nt, Homo sapiens
gggauggcuaaaaccauca

SEQ ID NO: 198165 - RNA, 17 nt, Homo sapiens
ggaagugugugaucugu

SEQ ID NO: 198166 - RNA, 11 nt, Homo sapiens
caacagcauuu

SEQ ID NO: 198167 - RNA, 14 nt, Homo sapiens
uucuggaauguaau

SEQ ID NO: 198168 - RNA, 23 nt, Homo sapiens
gguggcagaaucuguuaccagag

SEQ ID NO: 198169 - RNA, 17 nt, Homo sapiens
gaaccagagcucagaga

SEQ ID NO: 198170 - RNA, 16 nt, Homo sapiens
aacaugugcucaggga

SEQ ID NO: 198171 - RNA, 12 nt, Homo sapiens
uuuucacuugua

SEQ ID NO: 198172 - RNA, 18 nt, Homo sapiens
aauccuuuacuguuaguc

SEQ ID NO: 198173 - RNA, 19 nt, Homo sapiens
uuacaaucagccacauucu

SEQ ID NO: 198174 - RNA, 20 nt, Homo sapiens
cuuggagacaaaaucuuaaa

SEQ ID NO: 198175 - RNA, 20 nt, Homo sapiens
gcuaaaauuagaugaacuca

SEQ ID NO: 198176 - RNA, 20 nt, Homo sapiens
agcucgggcccucugugaga

SEQ ID NO: 198177 - RNA, 20 nt, Homo sapiens
ugguugaguguugcucucua

SEQ ID NO: 198178 - RNA, 19 nt, Homo sapiens
ggcccgacagccuggcaca

SEQ ID NO: 198179 - RNA, 20 nt, Homo sapiens
cuccgucuaagucaugagcu

SEQ ID NO: 198180 - RNA, 17 nt, Homo sapiens
ugaaaacacugugcaca

SEQ ID NO: 198181 - RNA, 15 nt, Homo sapiens
agacuaugucaccca

SEQ ID NO: 198182 - RNA, 15 nt, Homo sapiens
cagacuccugugcaa

SEQ ID NO: 198183 - RNA, 14 nt, Homo sapiens
uugguaugugacau

SEQ ID NO: 198184 - RNA, 16 nt, Homo sapiens
uccuuggcuuuuacug

SEQ ID NO: 198185 - RNA, 16 nt, Homo sapiens
cuaagagaacaaugug

SEQ ID NO: 198186 - RNA, 21 nt, Homo sapiens
agaccacgcccguccugccug

SEQ ID NO: 198187 - RNA, 14 nt, Homo sapiens
agucuucaagcaga

SEQ ID NO: 198188 - RNA, 18 nt, Homo sapiens
ugugcucagagaccccuc

SEQ ID NO: 198189 - RNA, 15 nt, Homo sapiens
auugugagccaccac

SEQ ID NO: 198190 - RNA, 15 nt, Homo sapiens
acaggcagcauuuag

SEQ ID NO: 198191 - RNA, 13 nt, Homo sapiens
cacagugcaucuc

SEQ ID NO: 198192 - RNA, 13 nt, Homo sapiens
gacuccugugcaa

SEQ ID NO: 198193 - RNA, 16 nt, Homo sapiens
gcauugagcaaagggg

SEQ ID NO: 198194 - RNA, 13 nt, Homo sapiens
gucuaagucauga

SEQ ID NO: 198195 - RNA, 22 nt, Homo sapiens
uccccuggggagucugggcaca

SEQ ID NO: 198196 - RNA, 20 nt, Homo sapiens
ugugaaaguuacaaauugcu

SEQ ID NO: 198197 - RNA, 21 nt, Homo sapiens
uuagaaaaauccuacaaggcu

SEQ ID NO: 198198 - RNA, 17 nt, Homo sapiens
augaaauaucaugcucc

SEQ ID NO: 198199 - RNA, 17 nt, Homo sapiens
cccugucuaaaaauuca

SEQ ID NO: 198200 - RNA, 17 nt, Homo sapiens
gacuccugugcaacuuu

SEQ ID NO: 198201 - RNA, 14 nt, Homo sapiens
uucagccaggagau

SEQ ID NO: 198202 - RNA, 23 nt, Homo sapiens
cugggucucgcuuuguugcccag

SEQ ID NO: 198203 - RNA, 13 nt, Homo sapiens
agaggggguagcu

SEQ ID NO: 198204 - RNA, 17 nt, Homo sapiens
uuccuugaucuguauau

SEQ ID NO: 198205 - RNA, 17 nt, Homo sapiens
ucuguggcacucagaua

SEQ ID NO: 198206 - RNA, 15 nt, Homo sapiens
ugcaagcacaucugc

SEQ ID NO: 198207 - RNA, 20 nt, Homo sapiens
auguggcuggaagauccugc

SEQ ID NO: 198208 - RNA, 18 nt, Homo sapiens
acuuuuuaccuaguacaa

SEQ ID NO: 198209 - RNA, 14 nt, Homo sapiens
gugaaaugcuggca

SEQ ID NO: 198210 - RNA, 18 nt, Homo sapiens
agguugucugaagucacu

SEQ ID NO: 198211 - RNA, 22 nt, Homo sapiens
acucuccagaaagcucaucuca

SEQ ID NO: 198212 - RNA, 13 nt, Homo sapiens
acauuuccaugca

SEQ ID NO: 198213 - RNA, 23 nt, Homo sapiens
gacccagucagaguugugcacau

SEQ ID NO: 198214 - RNA, 18 nt, Homo sapiens
cucauuaccuugugcuaa

SEQ ID NO: 198215 - RNA, 18 nt, Homo sapiens
guuaauaaguuucacuga

SEQ ID NO: 198216 - RNA, 14 nt, Homo sapiens
cagaacucuuucaa

SEQ ID NO: 198217 - RNA, 18 nt, Homo sapiens
gcccgacagccuggcaca

SEQ ID NO: 198218 - RNA, 18 nt, Homo sapiens
auuauuauucuucauaac

SEQ ID NO: 198219 - RNA, 19 nt, Homo sapiens
caugagaccacuguuauca

SEQ ID NO: 198220 - RNA, 17 nt, Homo sapiens
agggaauaauccagaaa

SEQ ID NO: 198221 - RNA, 23 nt, Homo sapiens
uuggagaaacccuugaaaagaca

SEQ ID NO: 198222 - RNA, 22 nt, Homo sapiens
ccuaaucuauggucgggagaca

SEQ ID NO: 198223 - RNA, 19 nt, Homo sapiens
cuuggacuauuauaauuua

SEQ ID NO: 198224 - RNA, 19 nt, Homo sapiens
ccauagcaagauugcuuaa

SEQ ID NO: 198225 - RNA, 20 nt, Homo sapiens
uucauauguaccauguacau

SEQ ID NO: 198226 - RNA, 15 nt, Homo sapiens
accaucauaguacag

SEQ ID NO: 198227 - RNA, 17 nt, Homo sapiens
cacaugucaguaccuuc

SEQ ID NO: 198228 - RNA, 23 nt, Homo sapiens
cugcaggagagaaugcccaguga

SEQ ID NO: 198229 - RNA, 15 nt, Homo sapiens
gaugcagauccagag

SEQ ID NO: 198230 - RNA, 20 nt, Homo sapiens
gcuuuugcuggucacugcca

SEQ ID NO: 198231 - RNA, 22 nt, Homo sapiens
guuuccugccugcggaccagau

SEQ ID NO: 198232 - RNA, 13 nt, Homo sapiens
auccuuuacuguu

SEQ ID NO: 198233 - RNA, 15 nt, Homo sapiens
uaauacagggcauuu

SEQ ID NO: 198234 - RNA, 15 nt, Homo sapiens
ccucgcuggacucuc

SEQ ID NO: 198235 - RNA, 15 nt, Homo sapiens
ugaagcuuccuuggc

SEQ ID NO: 198236 - RNA, 20 nt, Homo sapiens
aaguaaaacuugcugccuga

SEQ ID NO: 198237 - RNA, 13 nt, Homo sapiens
cugggaccacaga

SEQ ID NO: 198238 - RNA, 14 nt, Homo sapiens
ucccuguaaccucu

SEQ ID NO: 198239 - RNA, 17 nt, Homo sapiens
ugauauauaaaugugau

SEQ ID NO: 198240 - RNA, 19 nt, Homo sapiens
ugggccaagucaaagacau

SEQ ID NO: 198241 - RNA, 14 nt, Homo sapiens
aguuucacugacuu

SEQ ID NO: 198242 - RNA, 19 nt, Homo sapiens
auauugcagcuuauauuca

SEQ ID NO: 198243 - RNA, 13 nt, Homo sapiens
ucaauaggcaaag

SEQ ID NO: 198244 - RNA, 18 nt, Homo sapiens
gauuggcaggaguuggaa

SEQ ID NO: 198245 - RNA, 13 nt, Homo sapiens
cacugcauaccaa

SEQ ID NO: 198246 - RNA, 15 nt, Homo sapiens
auguugaugaaaaau

SEQ ID NO: 198247 - RNA, 16 nt, Homo sapiens
gagggcagaucacuuc

SEQ ID NO: 198248 - RNA, 19 nt, Homo sapiens
cugcugagugcaccacuuc

SEQ ID NO: 198249 - RNA, 22 nt, Homo sapiens
aaccaugagaccacuguuauca

SEQ ID NO: 198250 - RNA, 20 nt, Homo sapiens
cuagaugauugauuaccaag

SEQ ID NO: 198251 - RNA, 12 nt, Homo sapiens
ugugagcaagaa

SEQ ID NO: 198252 - RNA, 11 nt, Homo sapiens
aaggacucuca

SEQ ID NO: 198253 - RNA, 15 nt, Homo sapiens
ugcagcuuauauuca

SEQ ID NO: 198254 - RNA, 16 nt, Homo sapiens
cugacuguacuccucc

SEQ ID NO: 198255 - RNA, 16 nt, Homo sapiens
cuuguuuuugcacaug

SEQ ID NO: 198256 - RNA, 17 nt, Homo sapiens
auuaccgcguuguaaaa

SEQ ID NO: 198257 - RNA, 12 nt, Homo sapiens
guacaucuggcc

SEQ ID NO: 198258 - RNA, 21 nt, Homo sapiens
caggaguucagggucauagca

SEQ ID NO: 198259 - RNA, 12 nt, Homo sapiens
aauuuguacaua

SEQ ID NO: 198260 - RNA, 19 nt, Homo sapiens
cacugcauaccaaccuggg

SEQ ID NO: 198261 - RNA, 13 nt, Homo sapiens
acuucucucagga

SEQ ID NO: 198262 - RNA, 19 nt, Homo sapiens
aaugccacacggcucucac

SEQ ID NO: 198263 - RNA, 18 nt, Homo sapiens
caucagacuccugugcaa

SEQ ID NO: 198264 - RNA, 20 nt, Homo sapiens
gaucggagccuccucucuca

SEQ ID NO: 198265 - RNA, 21 nt, Homo sapiens
acugccuucgcuucuugccuc

SEQ ID NO: 198266 - RNA, 21 nt, Homo sapiens
ggagacagagcugguugggaa

SEQ ID NO: 198267 - RNA, 17 nt, Homo sapiens
gugacauuuccaugcau

SEQ ID NO: 198268 - RNA, 16 nt, Homo sapiens
acauccaagcuuccuu

SEQ ID NO: 198269 - RNA, 14 nt, Homo sapiens
auuaccuugugcua

SEQ ID NO: 198270 - RNA, 20 nt, Homo sapiens
uucaucagacuccugugcaa

SEQ ID NO: 198271 - RNA, 18 nt, Homo sapiens
gcaagaucccaucucuuu

SEQ ID NO: 198272 - RNA, 14 nt, Homo sapiens
gucuuugaacccuu

SEQ ID NO: 198273 - RNA, 16 nt, Homo sapiens
ccauggugugaucguc

SEQ ID NO: 198274 - RNA, 14 nt, Homo sapiens
uagggaucccucau

SEQ ID NO: 198275 - RNA, 21 nt, Homo sapiens
cauggcagaaggcaaacccau

SEQ ID NO: 198276 - RNA, 21 nt, Homo sapiens
cucauucagggauagcacuga

SEQ ID NO: 198277 - RNA, 14 nt, Homo sapiens
cguuugaaucacag

SEQ ID NO: 198278 - RNA, 14 nt, Homo sapiens
gaaagaaaugccca

SEQ ID NO: 198279 - RNA, 22 nt, Homo sapiens
ucuguuggcaggcuggccaguc

SEQ ID NO: 198280 - RNA, 15 nt, Homo sapiens
uguucccuauuuugc

SEQ ID NO: 198281 - RNA, 16 nt, Homo sapiens
auaaaauuaugccaua

SEQ ID NO: 198282 - RNA, 14 nt, Homo sapiens
uguuaucagucaua

SEQ ID NO: 198283 - RNA, 20 nt, Homo sapiens
aaucccuagucuucaagcag

SEQ ID NO: 198284 - RNA, 22 nt, Homo sapiens
cuugaaagaaaauaugcaucua

SEQ ID NO: 198285 - RNA, 21 nt, Homo sapiens
cacccuuccccuccuucuccc

SEQ ID NO: 198286 - RNA, 13 nt, Homo sapiens
gauuauucagugu

SEQ ID NO: 198287 - RNA, 21 nt, Homo sapiens
ugugaccaaugucuugaugca

SEQ ID NO: 198288 - RNA, 22 nt, Homo sapiens
uuaaaagacaagacuucaguau

SEQ ID NO: 198289 - RNA, 16 nt, Homo sapiens
acuguaacacuuuaca

SEQ ID NO: 198290 - RNA, 19 nt, Homo sapiens
ugacuauggcuaccaaaaa

SEQ ID NO: 198291 - RNA, 19 nt, Homo sapiens
augaauugcauuuuacuuu

SEQ ID NO: 198292 - RNA, 21 nt, Homo sapiens
ccuggcuggcauggaggguga

SEQ ID NO: 198293 - RNA, 14 nt, Homo sapiens
caaaggauacugua

SEQ ID NO: 198294 - RNA, 15 nt, Homo sapiens
aggauuagacaguca

SEQ ID NO: 198295 - RNA, 15 nt, Homo sapiens
gaaaaauguguaauu

SEQ ID NO: 198296 - RNA, 10 nt, Homo sapiens
guuaccuaau

SEQ ID NO: 198297 - RNA, 16 nt, Homo sapiens
auuuggcaaugccauc

SEQ ID NO: 198298 - RNA, 19 nt, Homo sapiens
aauccaauggguuuuuccc

SEQ ID NO: 198299 - RNA, 12 nt, Homo sapiens
cagugcucccuc

SEQ ID NO: 198300 - RNA, 19 nt, Homo sapiens
aagcauucacaacuuguuu

SEQ ID NO: 198301 - RNA, 18 nt, Homo sapiens
aacaucuuuuacauucug

SEQ ID NO: 198302 - RNA, 15 nt, Homo sapiens
aguuuauugacaaua

SEQ ID NO: 198303 - RNA, 23 nt, Homo sapiens
cagagguuucuggcagccaguac

SEQ ID NO: 198304 - RNA, 18 nt, Homo sapiens
cucaacguugcuccccau

SEQ ID NO: 198305 - RNA, 18 nt, Homo sapiens
caugagaccacuguuauc

SEQ ID NO: 198306 - RNA, 22 nt, Homo sapiens
acugccauggaggcacacagcu

SEQ ID NO: 198307 - RNA, 22 nt, Homo sapiens
gcacuggguugacuuucaggua

SEQ ID NO: 198308 - RNA, 23 nt, Homo sapiens
caccuuucauaaucuuugcuuua

SEQ ID NO: 198309 - RNA, 19 nt, Homo sapiens
ucacauucgaguguuucag

SEQ ID NO: 198310 - RNA, 14 nt, Homo sapiens
uaagaaaacuaaga

SEQ ID NO: 198311 - RNA, 20 nt, Homo sapiens
cagagcuugaacacagucuc

SEQ ID NO: 198312 - RNA, 12 nt, Homo sapiens
ccuggcuggcau

SEQ ID NO: 198313 - RNA, 14 nt, Homo sapiens
ugaaguaagcaaag

SEQ ID NO: 198314 - RNA, 17 nt, Homo sapiens
uauggcucuacuuucag

SEQ ID NO: 198315 - RNA, 15 nt, Homo sapiens
auaagugcaugacau

SEQ ID NO: 198316 - RNA, 14 nt, Homo sapiens
cuguaaccucuuca

SEQ ID NO: 198317 - RNA, 20 nt, Homo sapiens
cacugcacagugcaucucag

SEQ ID NO: 198318 - RNA, 18 nt, Homo sapiens
auaugcuaauauauguau

SEQ ID NO: 198319 - RNA, 17 nt, Homo sapiens
uucuucacucaaucucu

SEQ ID NO: 198320 - RNA, 22 nt, Homo sapiens
uccucauuuuugaauacaggca

SEQ ID NO: 198321 - RNA, 15 nt, Homo sapiens
aagacaucaagcaca

SEQ ID NO: 198322 - RNA, 15 nt, Homo sapiens
uaccuaguagucauu

SEQ ID NO: 198323 - RNA, 21 nt, Homo sapiens
caugggaaggguccaucucag

SEQ ID NO: 198324 - RNA, 15 nt, Homo sapiens
caaaugccacacggc

SEQ ID NO: 198325 - RNA, 17 nt, Homo sapiens
acaugagaucuagguga

SEQ ID NO: 198326 - RNA, 22 nt, Homo sapiens
aucugugcaaauccuugauacu

SEQ ID NO: 198327 - RNA, 13 nt, Homo sapiens
ggcuugcugccaa

SEQ ID NO: 198328 - RNA, 15 nt, Homo sapiens
aucauuaugaaguca

SEQ ID NO: 198329 - RNA, 18 nt, Homo sapiens
ccagaggcuuaaucacac

SEQ ID NO: 198330 - RNA, 16 nt, Homo sapiens
ccugcccagugcacac

SEQ ID NO: 198331 - RNA, 14 nt, Homo sapiens
agcuugcaacaaaa

SEQ ID NO: 198332 - RNA, 15 nt, Homo sapiens
cucucuaguuuccag

SEQ ID NO: 198333 - RNA, 20 nt, Homo sapiens
cuagguucuaaaaauuguga

SEQ ID NO: 198334 - RNA, 22 nt, Homo sapiens
gcacccaggacuuccauuugcu

SEQ ID NO: 198335 - RNA, 15 nt, Homo sapiens
cccucacuguugaau

SEQ ID NO: 198336 - RNA, 20 nt, Homo sapiens
cauuauaugcacuagcaaua

SEQ ID NO: 198337 - RNA, 15 nt, Homo sapiens
aucugccacguguau

SEQ ID NO: 198338 - RNA, 11 nt, Homo sapiens
ggauagcacug

SEQ ID NO: 198339 - RNA, 18 nt, Homo sapiens
ugaagaacaguaacugcc

SEQ ID NO: 198340 - RNA, 13 nt, Homo sapiens
uguaaaugugcau

SEQ ID NO: 198341 - RNA, 13 nt, Homo sapiens
auuugagugcucu

SEQ ID NO: 198342 - RNA, 20 nt, Homo sapiens
gcaaaggggggaagggacau

SEQ ID NO: 198343 - RNA, 17 nt, Homo sapiens
ggcagagaggacuguug

SEQ ID NO: 198344 - RNA, 12 nt, Homo sapiens
gccagguggcca

SEQ ID NO: 198345 - RNA, 18 nt, Homo sapiens
uguuucugaucugaugca

SEQ ID NO: 198346 - RNA, 22 nt, Homo sapiens
gcccuucucucauuauuucucu

SEQ ID NO: 198347 - RNA, 20 nt, Homo sapiens
caguguuaaaugugaugaau

SEQ ID NO: 198348 - RNA, 19 nt, Homo sapiens
ugguucccccacugaucac

SEQ ID NO: 198349 - RNA, 14 nt, Homo sapiens
aacuacucagggaa

SEQ ID NO: 198350 - RNA, 14 nt, Homo sapiens
ugguaaaauacuuc

SEQ ID NO: 198351 - RNA, 18 nt, Homo sapiens
ucaaaugugacauuauau

SEQ ID NO: 198352 - RNA, 17 nt, Homo sapiens
cacauccugaccuugca

SEQ ID NO: 198353 - RNA, 23 nt, Homo sapiens
cccuaugugggugggaccacaga

SEQ ID NO: 198354 - RNA, 13 nt, Homo sapiens
acugggcuucuag

SEQ ID NO: 198355 - RNA, 16 nt, Homo sapiens
auuaucaacagcauuu

SEQ ID NO: 198356 - RNA, 12 nt, Homo sapiens
ugaucugaugca

SEQ ID NO: 198357 - RNA, 15 nt, Homo sapiens
augggaaggguccau

SEQ ID NO: 198358 - RNA, 15 nt, Homo sapiens
cugcccagugcacac

SEQ ID NO: 198359 - RNA, 17 nt, Homo sapiens
auggcccugcaaaagga

SEQ ID NO: 198360 - RNA, 15 nt, Homo sapiens
aacuacuggcaauuu

SEQ ID NO: 198361 - RNA, 20 nt, Homo sapiens
cucacaccuguaaucccagc

SEQ ID NO: 198362 - RNA, 16 nt, Homo sapiens
cacaucuaaccucauc

SEQ ID NO: 198363 - RNA, 13 nt, Homo sapiens
aguugaaacaaga

SEQ ID NO: 198364 - RNA, 18 nt, Homo sapiens
gaaacacugggcuucuag

SEQ ID NO: 198365 - RNA, 20 nt, Homo sapiens
aucucauuggacccuuccau

SEQ ID NO: 198366 - RNA, 21 nt, Homo sapiens
acaauaaacgguacuugucau

SEQ ID NO: 198367 - RNA, 16 nt, Homo sapiens
cccuuggagccaaugg

SEQ ID NO: 198368 - RNA, 16 nt, Homo sapiens
ucaagcagucgugccu

SEQ ID NO: 198369 - RNA, 11 nt, Homo sapiens
auucuaugagg

SEQ ID NO: 198370 - RNA, 23 nt, Homo sapiens
agccuauguaugccauggaggca

SEQ ID NO: 198371 - RNA, 17 nt, Homo sapiens
agggcauggccaggugg

SEQ ID NO: 198372 - RNA, 18 nt, Homo sapiens
aaagacaccuacugagug

SEQ ID NO: 198373 - RNA, 17 nt, Homo sapiens
uaagucaaccugccuga

SEQ ID NO: 198374 - RNA, 15 nt, Homo sapiens
ucugaagucacugca

SEQ ID NO: 198375 - RNA, 20 nt, Homo sapiens
uuauagaccagaaccagagc

SEQ ID NO: 198376 - RNA, 18 nt, Homo sapiens
agauacugucucuuucau

SEQ ID NO: 198377 - RNA, 20 nt, Homo sapiens
uugggggauggcuaaaacca

SEQ ID NO: 198378 - RNA, 20 nt, Homo sapiens
ugcauauccaacaugugcuc

SEQ ID NO: 198379 - RNA, 22 nt, Homo sapiens
ccacguccagcuggaaggguca

SEQ ID NO: 198380 - RNA, 13 nt, Homo sapiens
guauaugcaauau

SEQ ID NO: 198381 - RNA, 19 nt, Homo sapiens
ggcugcccacacaccccaa

SEQ ID NO: 198382 - RNA, 19 nt, Homo sapiens
acaucuuuuacauucugca

SEQ ID NO: 198383 - RNA, 20 nt, Homo sapiens
uucauauauuuguaugaucc

SEQ ID NO: 198384 - RNA, 21 nt, Homo sapiens
ccuuguguacaguuauuuaug

SEQ ID NO: 198385 - RNA, 20 nt, Homo sapiens
gcaaugugcccccagacgca

SEQ ID NO: 198386 - RNA, 14 nt, Homo sapiens
ucuucaccauuugg

SEQ ID NO: 198387 - RNA, 20 nt, Homo sapiens
aaauauaaaacugcguuaaa

SEQ ID NO: 198388 - RNA, 20 nt, Homo sapiens
ccagaggauugcugccccau

SEQ ID NO: 198389 - RNA, 16 nt, Homo sapiens
gcugccucuaccugac

SEQ ID NO: 198390 - RNA, 15 nt, Homo sapiens
cugggagcacaggca

SEQ ID NO: 198391 - RNA, 18 nt, Homo sapiens
aagccuauguaugccaug

SEQ ID NO: 198392 - RNA, 22 nt, Homo sapiens
cauacgguaugauauugcagcu

SEQ ID NO: 198393 - RNA, 11 nt, Homo sapiens
cccagcacugc

SEQ ID NO: 198394 - RNA, 14 nt, Homo sapiens
cuugaacacagucu

SEQ ID NO: 198395 - RNA, 17 nt, Homo sapiens
uaaaccaucaucuugcc

SEQ ID NO: 198396 - RNA, 16 nt, Homo sapiens
auguuugucucauccc

SEQ ID NO: 198397 - RNA, 23 nt, Homo sapiens
caggaacuugcacaaaaucacac

SEQ ID NO: 198398 - RNA, 11 nt, Homo sapiens
uucuccacugg

SEQ ID NO: 198399 - RNA, 21 nt, Homo sapiens
acagacgucccuccacguuca

SEQ ID NO: 198400 - RNA, 21 nt, Homo sapiens
gcuucuuaauauaacugccuu

SEQ ID NO: 198401 - RNA, 17 nt, Homo sapiens
ccacaggcagcauuuag

SEQ ID NO: 198402 - RNA, 20 nt, Homo sapiens
ugguccuuagccccaucugc

SEQ ID NO: 198403 - RNA, 22 nt, Homo sapiens
aggaggugcuaucgcaccacug

SEQ ID NO: 198404 - RNA, 23 nt, Homo sapiens
uuacaguaggagcccagcucuga

SEQ ID NO: 198405 - RNA, 18 nt, Homo sapiens
cuucuccauccacauggg

SEQ ID NO: 198406 - RNA, 17 nt, Homo sapiens
cggagccuccucucuca

SEQ ID NO: 198407 - RNA, 14 nt, Homo sapiens
cauaaaauguuaag

SEQ ID NO: 198408 - RNA, 18 nt, Homo sapiens
ucaaucucugauucuguc

SEQ ID NO: 198409 - RNA, 10 nt, Homo sapiens
uuccacugag

SEQ ID NO: 198410 - RNA, 19 nt, Homo sapiens
guaugauccuaaugaaugc

SEQ ID NO: 198411 - RNA, 18 nt, Homo sapiens
ucagcauucucacuccua

SEQ ID NO: 198412 - RNA, 18 nt, Homo sapiens
gcugacuguacuccuccc

SEQ ID NO: 198413 - RNA, 13 nt, Homo sapiens
gugauugugccag

SEQ ID NO: 198414 - RNA, 17 nt, Homo sapiens
ugagaaagagcacuuaa

SEQ ID NO: 198415 - RNA, 15 nt, Homo sapiens
cauuuucugcauuua

SEQ ID NO: 198416 - RNA, 17 nt, Homo sapiens
agagaaugcccagugac

SEQ ID NO: 198417 - RNA, 23 nt, Homo sapiens
aucacaccguccuccacgccauu

SEQ ID NO: 198418 - RNA, 18 nt, Homo sapiens
ucuucacucaaucucuga

SEQ ID NO: 198419 - RNA, 13 nt, Homo sapiens
agccauaugaaug

SEQ ID NO: 198420 - RNA, 18 nt, Homo sapiens
aauaccaaaauuauuuca

SEQ ID NO: 198421 - RNA, 11 nt, Homo sapiens
caggugcacag

SEQ ID NO: 198422 - RNA, 18 nt, Homo sapiens
aucuuaguauuugcauau

SEQ ID NO: 198423 - RNA, 14 nt, Homo sapiens
ugcuuguuauuaga

SEQ ID NO: 198424 - RNA, 16 nt, Homo sapiens
gcucgcuuugagugac

SEQ ID NO: 198425 - RNA, 23 nt, Homo sapiens
aaaugucuuuccuuuugcucuua

SEQ ID NO: 198426 - RNA, 20 nt, Homo sapiens
accauguacaugaagaagcu

SEQ ID NO: 198427 - RNA, 18 nt, Homo sapiens
aggccugggccgcugcca

SEQ ID NO: 198428 - RNA, 20 nt, Homo sapiens
agucacagagauaauucuag

SEQ ID NO: 198429 - RNA, 19 nt, Homo sapiens
agauacugucucuuucaug

SEQ ID NO: 198430 - RNA, 15 nt, Homo sapiens
cuaugauaugcuaau

SEQ ID NO: 198431 - RNA, 19 nt, Homo sapiens
aaaccaagccguggcuucc

SEQ ID NO: 198432 - RNA, 19 nt, Homo sapiens
aaagacuuuccucuuaguc

SEQ ID NO: 198433 - RNA, 21 nt, Homo sapiens
uuaaacccuauugguaaagaa

SEQ ID NO: 198434 - RNA, 17 nt, Homo sapiens
gugguccuuugggguga

SEQ ID NO: 198435 - RNA, 18 nt, Homo sapiens
augcgggcugggcagcug

SEQ ID NO: 198436 - RNA, 12 nt, Homo sapiens
cucuaacuucaa

SEQ ID NO: 198437 - RNA, 23 nt, Homo sapiens
auaagcaaagggagcacuggguu

SEQ ID NO: 198438 - RNA, 17 nt, Homo sapiens
aguugauggugaugaaa

SEQ ID NO: 198439 - RNA, 18 nt, Homo sapiens
acccucuccccacugcuc

SEQ ID NO: 198440 - RNA, 14 nt, Homo sapiens
uaauauaacugccu

SEQ ID NO: 198441 - RNA, 17 nt, Homo sapiens
agcacagcacccauggg

SEQ ID NO: 198442 - RNA, 19 nt, Homo sapiens
uucugcauuuaaccgucaa

SEQ ID NO: 198443 - RNA, 15 nt, Homo sapiens
aggcaaccacaggca

SEQ ID NO: 198444 - RNA, 19 nt, Homo sapiens
aacccucuaagggaccuca

SEQ ID NO: 198445 - RNA, 16 nt, Homo sapiens
auaugauugugcacau

SEQ ID NO: 198446 - RNA, 22 nt, Homo sapiens
guaauuuuguucuaguuuucag

SEQ ID NO: 198447 - RNA, 15 nt, Homo sapiens
auauuuuugugcaca

SEQ ID NO: 198448 - RNA, 15 nt, Homo sapiens
auaugauugugcaca

SEQ ID NO: 198449 - RNA, 20 nt, Homo sapiens
ucgcaguguucaaggccauc

SEQ ID NO: 198450 - RNA, 15 nt, Homo sapiens
cuuccucuccacugc

SEQ ID NO: 198451 - RNA, 13 nt, Homo sapiens
uguugacauccaa

SEQ ID NO: 198452 - RNA, 19 nt, Homo sapiens
cauaauuuguacauaugua

SEQ ID NO: 198453 - RNA, 19 nt, Homo sapiens
cugccugcggaccagauga

SEQ ID NO: 198454 - RNA, 14 nt, Homo sapiens
gcagaccacugaua

SEQ ID NO: 198455 - RNA, 19 nt, Homo sapiens
cugucacguagaacuugga

SEQ ID NO: 198456 - RNA, 19 nt, Homo sapiens
uuggaagugugugaucugu

SEQ ID NO: 198457 - RNA, 22 nt, Homo sapiens
acccagucagaguugugcacau

SEQ ID NO: 198458 - RNA, 20 nt, Homo sapiens
uguuuuuguucaaagccagc

SEQ ID NO: 198459 - RNA, 23 nt, Homo sapiens
augucaaagcaggggaguaugca

SEQ ID NO: 198460 - RNA, 21 nt, Homo sapiens
gaugaucuggauccaccaaga

SEQ ID NO: 198461 - RNA, 17 nt, Homo sapiens
caugguggguccauggg

SEQ ID NO: 198462 - RNA, 22 nt, Homo sapiens
cgcuuuugcuggucacugccau

SEQ ID NO: 198463 - RNA, 15 nt, Homo sapiens
agccaagccagucaa

SEQ ID NO: 198464 - RNA, 16 nt, Homo sapiens
ugggcccuuugagugc

SEQ ID NO: 198465 - RNA, 13 nt, Homo sapiens
gcuccauguagaa

SEQ ID NO: 198466 - RNA, 23 nt, Homo sapiens
ugacucuccagaaagcucaucuc

SEQ ID NO: 198467 - RNA, 18 nt, Homo sapiens
acugacuuucucagccuc

SEQ ID NO: 198468 - RNA, 22 nt, Homo sapiens
aucucugauucugucaaugucu

SEQ ID NO: 198469 - RNA, 19 nt, Homo sapiens
ccaugaaccaagaccauug

SEQ ID NO: 198470 - RNA, 23 nt, Homo sapiens
ggcccuuccucuccacugccuuc

SEQ ID NO: 198471 - RNA, 18 nt, Homo sapiens
aaaaacuaacacccaguc

SEQ ID NO: 198472 - RNA, 21 nt, Homo sapiens
agguaugguuaauaaguuuca

SEQ ID NO: 198473 - RNA, 19 nt, Homo sapiens
uguguuuuguuuuguauca

SEQ ID NO: 198474 - RNA, 18 nt, Homo sapiens
acagucuuccauuugcaa

SEQ ID NO: 198475 - RNA, 16 nt, Homo sapiens
cuugauccacuucucu

SEQ ID NO: 198476 - RNA, 19 nt, Homo sapiens
cgagaccagccuggccaac

SEQ ID NO: 198477 - RNA, 17 nt, Homo sapiens
cacggcucucaccagug

SEQ ID NO: 198478 - RNA, 20 nt, Homo sapiens
gugcaugcagcaucuaagua

SEQ ID NO: 198479 - RNA, 22 nt, Homo sapiens
guuaccugaaaacacugugcac

SEQ ID NO: 198480 - RNA, 12 nt, Homo sapiens
caucaagcacag

SEQ ID NO: 198481 - RNA, 12 nt, Homo sapiens
cauuuccaugca

SEQ ID NO: 198482 - RNA, 14 nt, Homo sapiens
ccaucagugcuccc

SEQ ID NO: 198483 - RNA, 19 nt, Homo sapiens
uaugauugugcacauacuu

SEQ ID NO: 198484 - RNA, 16 nt, Homo sapiens
cacuaacaaacucuga

SEQ ID NO: 198485 - RNA, 21 nt, Homo sapiens
caggcccuuccucuccacugc

SEQ ID NO: 198486 - RNA, 14 nt, Homo sapiens
cuccugaagccaca

SEQ ID NO: 198487 - RNA, 17 nt, Homo sapiens
ggaaaauuucacauuaa

SEQ ID NO: 198488 - RNA, 16 nt, Homo sapiens
acagagcuucccugac

SEQ ID NO: 198489 - RNA, 21 nt, Homo sapiens
uggaauauuguccauugucca

SEQ ID NO: 198490 - RNA, 22 nt, Homo sapiens
cccugaaguaagcaaagacuuu

SEQ ID NO: 198491 - RNA, 17 nt, Homo sapiens
gcagucgugccuguguc

SEQ ID NO: 198492 - RNA, 18 nt, Homo sapiens
accagaggacaaagccuu

SEQ ID NO: 198493 - RNA, 13 nt, Homo sapiens
aaaucauagcugg

SEQ ID NO: 198494 - RNA, 12 nt, Homo sapiens
gcaacaguuuuu

SEQ ID NO: 198495 - RNA, 18 nt, Homo sapiens
uuuuuguucaaagccagc

SEQ ID NO: 198496 - RNA, 20 nt, Homo sapiens
acacuauuuaucugugcaaa

SEQ ID NO: 198497 - RNA, 14 nt, Homo sapiens
cccacugcucauuu

SEQ ID NO: 198498 - RNA, 19 nt, Homo sapiens
aagaccugacaccuuucau

SEQ ID NO: 198499 - RNA, 13 nt, Homo sapiens
ugcacacuuugcc

SEQ ID NO: 198500 - RNA, 20 nt, Homo sapiens
gcuuucauguaaacugugca

SEQ ID NO: 198501 - RNA, 17 nt, Homo sapiens
aaaucccuccuucaucc

SEQ ID NO: 198502 - RNA, 14 nt, Homo sapiens
auguaaaugugcau

SEQ ID NO: 198503 - RNA, 14 nt, Homo sapiens
ugcacacuuugcca

SEQ ID NO: 198504 - RNA, 12 nt, Homo sapiens
aaucacaguaua

SEQ ID NO: 198505 - RNA, 20 nt, Homo sapiens
cuaugugggugggaccacag

SEQ ID NO: 198506 - RNA, 17 nt, Homo sapiens
uaccuugagccaguaau

SEQ ID NO: 198507 - RNA, 13 nt, Homo sapiens
auauucauuucaa

SEQ ID NO: 198508 - RNA, 14 nt, Homo sapiens
gaaaacacugugca

SEQ ID NO: 198509 - RNA, 13 nt, Homo sapiens
aguuccacugcug

SEQ ID NO: 198510 - RNA, 18 nt, Homo sapiens
aauaaaguucuguacuca

SEQ ID NO: 198511 - RNA, 18 nt, Homo sapiens
aguuccuugaucuguaua

SEQ ID NO: 198512 - RNA, 22 nt, Homo sapiens
uaugcucagggucaauuucuuu

SEQ ID NO: 198513 - RNA, 18 nt, Homo sapiens
cagucaaggauggaugca

SEQ ID NO: 198514 - RNA, 20 nt, Homo sapiens
ucugcgugucaccugugcuu

SEQ ID NO: 198515 - RNA, 17 nt, Homo sapiens
ucuugaugcaugcacug

SEQ ID NO: 198516 - RNA, 19 nt, Homo sapiens
aacuuuuugcaaggcauuu

SEQ ID NO: 198517 - RNA, 18 nt, Homo sapiens
ccuuugccucaaggacuu

SEQ ID NO: 198518 - RNA, 13 nt, Homo sapiens
uguaccauguaca

SEQ ID NO: 198519 - RNA, 21 nt, Homo sapiens
agacugcccagcuaaagcaau

SEQ ID NO: 198520 - RNA, 20 nt, Homo sapiens
ucuaauaaaaaacaccuucu

SEQ ID NO: 198521 - RNA, 13 nt, Homo sapiens
ucccacaggacau

SEQ ID NO: 198522 - RNA, 16 nt, Homo sapiens
guuuuuaaaacccagu

SEQ ID NO: 198523 - RNA, 23 nt, Homo sapiens
agucacugcacagugcaucucag

SEQ ID NO: 198524 - RNA, 12 nt, Homo sapiens
ccuuccacugag

SEQ ID NO: 198525 - RNA, 14 nt, Homo sapiens
gccucugaagccua

SEQ ID NO: 198526 - RNA, 12 nt, Homo sapiens
gucuuucacuga

SEQ ID NO: 198527 - RNA, 20 nt, Homo sapiens
accuaaauggccucaugugg

SEQ ID NO: 198528 - RNA, 13 nt, Homo sapiens
aggaccagagcua

SEQ ID NO: 198529 - RNA, 14 nt, Homo sapiens
aauaauaccuaagc

SEQ ID NO: 198530 - RNA, 16 nt, Homo sapiens
uauuuaucugugcaaa

SEQ ID NO: 198531 - RNA, 14 nt, Homo sapiens
agaaagcucaucuc

SEQ ID NO: 198532 - RNA, 17 nt, Homo sapiens
gaauguagcagaucccc

SEQ ID NO: 198533 - RNA, 15 nt, Homo sapiens
uugggaacugcaaua

SEQ ID NO: 198534 - RNA, 17 nt, Homo sapiens
aaaauugugaucagacc

SEQ ID NO: 198535 - RNA, 13 nt, Homo sapiens
auuuagcacauac

SEQ ID NO: 198536 - RNA, 23 nt, Homo sapiens
guguauuuaaccuugaaggguuc

SEQ ID NO: 198537 - RNA, 16 nt, Homo sapiens
ccggggcuccacugaa

SEQ ID NO: 198538 - RNA, 21 nt, Homo sapiens
cagcucugcauuaucugaggu

SEQ ID NO: 198539 - RNA, 14 nt, Homo sapiens
uuugacaaccauga

SEQ ID NO: 198540 - RNA, 17 nt, Homo sapiens
gccugaagaacaguaac

SEQ ID NO: 198541 - RNA, 22 nt, Homo sapiens
ucaacagcauuuucaagcaguu

SEQ ID NO: 198542 - RNA, 19 nt, Homo sapiens
ucuccacuucuuguucccc

SEQ ID NO: 198543 - RNA, 22 nt, Homo sapiens
cugugaaaugcuggcauuugca

SEQ ID NO: 198544 - RNA, 22 nt, Homo sapiens
aaauguuauuuuuuaauuauua

SEQ ID NO: 198545 - RNA, 14 nt, Homo sapiens
cacuugcagccucc

SEQ ID NO: 198546 - RNA, 21 nt, Homo sapiens
ucugaaggagccccauuccug

SEQ ID NO: 198547 - RNA, 19 nt, Homo sapiens
aacccuauugguaaagaau

SEQ ID NO: 198548 - RNA, 23 nt, Homo sapiens
ccaaggagggcagaucacuucag

SEQ ID NO: 198549 - RNA, 14 nt, Homo sapiens
uccacuagugcaaa

SEQ ID NO: 198550 - RNA, 20 nt, Homo sapiens
ucaacaucuuuuacauucug

SEQ ID NO: 198551 - RNA, 16 nt, Homo sapiens
uuugcuggucacugcc

SEQ ID NO: 198552 - RNA, 17 nt, Homo sapiens
aaagagagggcuuuaau

SEQ ID NO: 198553 - RNA, 20 nt, Homo sapiens
ucacuugugcaguguugaca

SEQ ID NO: 198554 - RNA, 23 nt, Homo sapiens
uaugaggaugcagagucagcaga

SEQ ID NO: 198555 - RNA, 12 nt, Homo sapiens
aggcuagaugau

SEQ ID NO: 198556 - RNA, 20 nt, Homo sapiens
ccucacagagugcauuguga

SEQ ID NO: 198557 - RNA, 13 nt, Homo sapiens
gauauugcagcuu

SEQ ID NO: 198558 - RNA, 18 nt, Homo sapiens
gcacacagcugcagagac

SEQ ID NO: 198559 - RNA, 14 nt, Homo sapiens
gcaacaguagcaua

SEQ ID NO: 198560 - RNA, 14 nt, Homo sapiens
acccauauuacaga

SEQ ID NO: 198561 - RNA, 20 nt, Homo sapiens
auccaacaugugcucaggga

SEQ ID NO: 198562 - RNA, 22 nt, Homo sapiens
uuccugccugcggaccagauga

SEQ ID NO: 198563 - RNA, 20 nt, Homo sapiens
ccaguguguuucugaucuga

SEQ ID NO: 198564 - RNA, 15 nt, Homo sapiens
cacugcuugaggaaa

SEQ ID NO: 198565 - RNA, 14 nt, Homo sapiens
guaaacugugcacc

SEQ ID NO: 198566 - RNA, 21 nt, Homo sapiens
ggagacuagauuuaugaauac

SEQ ID NO: 198567 - RNA, 19 nt, Homo sapiens
agaggggguagcuagccug

SEQ ID NO: 198568 - RNA, 21 nt, Homo sapiens
agaccauucaggacacaggga

SEQ ID NO: 198569 - RNA, 19 nt, Homo sapiens
ccuucuccauccacauggg

SEQ ID NO: 198570 - RNA, 16 nt, Homo sapiens
uccuuuucccuauuuc

SEQ ID NO: 198571 - RNA, 16 nt, Homo sapiens
agaaugcccagugacc

SEQ ID NO: 198572 - RNA, 22 nt, Homo sapiens
uuuuuaucuccccuucacaugc

SEQ ID NO: 198573 - RNA, 12 nt, Homo sapiens
agaauggagcug

SEQ ID NO: 198574 - RNA, 12 nt, Homo sapiens
cccccugugcag

SEQ ID NO: 198575 - RNA, 15 nt, Homo sapiens
cucugaaaccagugu

SEQ ID NO: 198576 - RNA, 23 nt, Homo sapiens
uugcuggggcucgugcccugcau

SEQ ID NO: 198577 - RNA, 12 nt, Homo sapiens
gugagacccagc

SEQ ID NO: 198578 - RNA, 12 nt, Homo sapiens
gcuuauauucau

SEQ ID NO: 198579 - RNA, 19 nt, Homo sapiens
ucugagcagugaaugauuc

SEQ ID NO: 198580 - RNA, 17 nt, Homo sapiens
gauucugguuccagggu

SEQ ID NO: 198581 - RNA, 14 nt, Homo sapiens
auaucaugcuccau

SEQ ID NO: 198582 - RNA, 14 nt, Homo sapiens
uuuaaucacauucg

SEQ ID NO: 198583 - RNA, 12 nt, Homo sapiens
gaaaaucauauu

SEQ ID NO: 198584 - RNA, 18 nt, Homo sapiens
cuccugccccaugcugcc

SEQ ID NO: 198585 - RNA, 22 nt, Homo sapiens
gaaggguucaccaggucaggga

SEQ ID NO: 198586 - RNA, 13 nt, Homo sapiens
ccugugaaugcca

SEQ ID NO: 198587 - RNA, 19 nt, Homo sapiens
acccucuccccacugcuca

SEQ ID NO: 198588 - RNA, 19 nt, Homo sapiens
auuaccuaguagucauuuc

SEQ ID NO: 198589 - RNA, 15 nt, Homo sapiens
agucgaacaauucau

SEQ ID NO: 198590 - RNA, 14 nt, Homo sapiens
gaaagauggaacuu

SEQ ID NO: 198591 - RNA, 22 nt, Homo sapiens
cuccucuuucaaccucagugau

SEQ ID NO: 198592 - RNA, 14 nt, Homo sapiens
cuuucauaaucuuu

SEQ ID NO: 198593 - RNA, 15 nt, Homo sapiens
gcaagcacaucugca

SEQ ID NO: 198594 - RNA, 23 nt, Homo sapiens
ucuucagggggccaggugcacag

SEQ ID NO: 198595 - RNA, 16 nt, Homo sapiens
gcaggggccuggagau

SEQ ID NO: 198596 - RNA, 14 nt, Homo sapiens
agaccauaauguua

SEQ ID NO: 198597 - RNA, 11 nt, Homo sapiens
gccacauggga

SEQ ID NO: 198598 - RNA, 24 nt, Homo sapiens
gaccagucacugacccugugcaga

SEQ ID NO: 198599 - RNA, 15 nt, Homo sapiens
aggaugagcauuuag

SEQ ID NO: 198600 - RNA, 19 nt, Homo sapiens
aucaauuauagaaagccaa

SEQ ID NO: 198601 - RNA, 15 nt, Homo sapiens
cucuacuuaauccaa

SEQ ID NO: 198602 - RNA, 23 nt, Homo sapiens
aagguuuuauaaggcugauguca

SEQ ID NO: 198603 - RNA, 18 nt, Homo sapiens
gaauguuugucucauccc

SEQ ID NO: 198604 - RNA, 17 nt, Homo sapiens
ccaaagcuuucauguaa

SEQ ID NO: 198605 - RNA, 19 nt, Homo sapiens
uccgagaggugggccaguc

SEQ ID NO: 198606 - RNA, 16 nt, Homo sapiens
acuucucucaggaucc

SEQ ID NO: 198607 - RNA, 18 nt, Homo sapiens
auggggagaaaagacaug

SEQ ID NO: 198608 - RNA, 15 nt, Homo sapiens
cagccaacuuuugca

SEQ ID NO: 198609 - RNA, 21 nt, Homo sapiens
ccaacguggggcagcacagag

SEQ ID NO: 198610 - RNA, 16 nt, Homo sapiens
uucugaucugaugcaa

SEQ ID NO: 198611 - RNA, 18 nt, Homo sapiens
auccaauggguuuuuccc

SEQ ID NO: 198612 - RNA, 18 nt, Homo sapiens
auuaugccauagcaagau

SEQ ID NO: 198613 - RNA, 12 nt, Homo sapiens
cggaaguuuuca

SEQ ID NO: 198614 - RNA, 18 nt, Homo sapiens
aagaaaauaugcaucuaa

SEQ ID NO: 198615 - RNA, 13 nt, Homo sapiens
cuuuagucugcaa

SEQ ID NO: 198616 - RNA, 16 nt, Homo sapiens
uaugugggugggacca

SEQ ID NO: 198617 - RNA, 16 nt, Homo sapiens
caugauuucauuucaa

SEQ ID NO: 198618 - RNA, 16 nt, Homo sapiens
cauguaaacugugcac

SEQ ID NO: 198619 - RNA, 16 nt, Homo sapiens
ugauccacuucucuca

SEQ ID NO: 198620 - RNA, 17 nt, Homo sapiens
cucgaaucucugugccu

SEQ ID NO: 198621 - RNA, 20 nt, Homo sapiens
accuugcacaaacagccccu

SEQ ID NO: 198622 - RNA, 15 nt, Homo sapiens
agguuuuuacuguga

SEQ ID NO: 198623 - RNA, 13 nt, Homo sapiens
cccuccuucaucc

SEQ ID NO: 198624 - RNA, 17 nt, Homo sapiens
aaugcuucugacuucau

SEQ ID NO: 198625 - RNA, 13 nt, Homo sapiens
agacuaaggccau

SEQ ID NO: 198626 - RNA, 20 nt, Homo sapiens
aggugggccagucuguggau

SEQ ID NO: 198627 - RNA, 20 nt, Homo sapiens
gcauuuagacccugcauuua

SEQ ID NO: 198628 - RNA, 17 nt, Homo sapiens
cauucuaguacuuggga

SEQ ID NO: 198629 - RNA, 14 nt, Homo sapiens
cugucugacaaccu

SEQ ID NO: 198630 - RNA, 22 nt, Homo sapiens
cugaagaacaguaacugccauc

SEQ ID NO: 198631 - RNA, 22 nt, Homo sapiens
cuuaguguuuggguauauucau

SEQ ID NO: 198632 - RNA, 14 nt, Homo sapiens
uuuaaaaucuguca

SEQ ID NO: 198633 - RNA, 22 nt, Homo sapiens
ugcuggcauuugcaccuaccuc

SEQ ID NO: 198634 - RNA, 20 nt, Homo sapiens
acagcucgggcccucuguga

SEQ ID NO: 198635 - RNA, 18 nt, Homo sapiens
auggaggaaagugauauc

SEQ ID NO: 198636 - RNA, 18 nt, Homo sapiens
guaccugcccccaaucca

SEQ ID NO: 198637 - RNA, 17 nt, Homo sapiens
acacagccccauguaca

SEQ ID NO: 198638 - RNA, 15 nt, Homo sapiens
gcgcaagcugggagc

SEQ ID NO: 198639 - RNA, 15 nt, Homo sapiens
cuagggaucccucau

SEQ ID NO: 198640 - RNA, 15 nt, Homo sapiens
gauuucaugauuuca

SEQ ID NO: 198641 - RNA, 16 nt, Homo sapiens
accacuguguauuuaa

SEQ ID NO: 198642 - RNA, 17 nt, Homo sapiens
gaccauucaggacacag

SEQ ID NO: 198643 - RNA, 13 nt, Homo sapiens
auuaugaagucau

SEQ ID NO: 198644 - RNA, 13 nt, Homo sapiens
gaagaacaguaac

SEQ ID NO: 198645 - RNA, 15 nt, Homo sapiens
gggaaaucaggguua

SEQ ID NO: 198646 - RNA, 21 nt, Homo sapiens
ucaucccgagcaccuccacau

SEQ ID NO: 198647 - RNA, 20 nt, Homo sapiens
accaggguugaccccagagg

SEQ ID NO: 198648 - RNA, 23 nt, Homo sapiens
ccgcaacaguuuuuuaugcuaau

SEQ ID NO: 198649 - RNA, 19 nt, Homo sapiens
aacagccaaaaaggacuuu

SEQ ID NO: 198650 - RNA, 13 nt, Homo sapiens
acucagggcuccu

SEQ ID NO: 198651 - RNA, 15 nt, Homo sapiens
ucagcuggaucucca

SEQ ID NO: 198652 - RNA, 22 nt, Homo sapiens
aggguucaccaggucagggaga

SEQ ID NO: 198653 - RNA, 19 nt, Homo sapiens
uuguagagauggggucuca

SEQ ID NO: 198654 - RNA, 15 nt, Homo sapiens
gucuuuacagaauca

SEQ ID NO: 198655 - RNA, 17 nt, Homo sapiens
auguagcagauccccag

SEQ ID NO: 198656 - RNA, 18 nt, Homo sapiens
gcucauauuguucccuau

SEQ ID NO: 198657 - RNA, 23 nt, Homo sapiens
uuguucaucagacuccugugcaa

SEQ ID NO: 198658 - RNA, 18 nt, Homo sapiens
aggucuaggaacauacuu

SEQ ID NO: 198659 - RNA, 18 nt, Homo sapiens
auuuuguucuaguuuuca

SEQ ID NO: 198660 - RNA, 11 nt, Homo sapiens
caaagacagaa

SEQ ID NO: 198661 - RNA, 15 nt, Homo sapiens
auguaaacugugcac

SEQ ID NO: 198662 - RNA, 13 nt, Homo sapiens
aagucacugcaca

SEQ ID NO: 198663 - RNA, 22 nt, Homo sapiens
acaucuggccuugaaaccaccu

SEQ ID NO: 198664 - RNA, 21 nt, Homo sapiens
agcagaugaccccuccccuaa

SEQ ID NO: 198665 - RNA, 14 nt, Homo sapiens
cgaacaauucauau

SEQ ID NO: 198666 - RNA, 20 nt, Homo sapiens
gaagccacuauuacugggac

SEQ ID NO: 198667 - RNA, 20 nt, Homo sapiens
ucuaagagaacaaugugcua

SEQ ID NO: 198668 - RNA, 19 nt, Homo sapiens
guauccccccaucuugcuu

SEQ ID NO: 198669 - RNA, 18 nt, Homo sapiens
cucacauccucugucuau

SEQ ID NO: 198670 - RNA, 22 nt, Homo sapiens
aggcuccagagggcacucugcu

SEQ ID NO: 198671 - RNA, 16 nt, Homo sapiens
gcaaggaaacuaugua

SEQ ID NO: 198672 - RNA, 20 nt, Homo sapiens
caaggagggcagaucacuuc

SEQ ID NO: 198673 - RNA, 13 nt, Homo sapiens
uugggucuuugaa

SEQ ID NO: 198674 - RNA, 17 nt, Homo sapiens
aguucauauguaccaug

SEQ ID NO: 198675 - RNA, 20 nt, Homo sapiens
caggcagaucccacuugcag

SEQ ID NO: 198676 - RNA, 16 nt, Homo sapiens
ugccauaaaacauuaa

SEQ ID NO: 198677 - RNA, 14 nt, Homo sapiens
cauuuucaccccac

SEQ ID NO: 198678 - RNA, 21 nt, Homo sapiens
uaauaagcaaagggagcacug

SEQ ID NO: 198679 - RNA, 19 nt, Homo sapiens
cagcuggaagggucaacau

SEQ ID NO: 198680 - RNA, 18 nt, Homo sapiens
accuaguagucauuucau

SEQ ID NO: 198681 - RNA, 18 nt, Homo sapiens
ugggcauucuuguuucaa

SEQ ID NO: 198682 - RNA, 19 nt, Homo sapiens
aguuuauacuucucuauua

SEQ ID NO: 198683 - RNA, 21 nt, Homo sapiens
gcagaccacugauaaaaccau

SEQ ID NO: 198684 - RNA, 22 nt, Homo sapiens
gguuggaaaacaguauuuucca

SEQ ID NO: 198685 - RNA, 15 nt, Homo sapiens
uguacuugccuuauu

SEQ ID NO: 198686 - RNA, 22 nt, Homo sapiens
accaugagaccacuguuaucaa

SEQ ID NO: 198687 - RNA, 13 nt, Homo sapiens
uaaugaaugcaua

SEQ ID NO: 198688 - RNA, 18 nt, Homo sapiens
cuugcugccaaaagccuu

SEQ ID NO: 198689 - RNA, 13 nt, Homo sapiens
cggaaguuuucaa

SEQ ID NO: 198690 - RNA, 23 nt, Homo sapiens
aacuuugacaaccaugagaccac

SEQ ID NO: 198691 - RNA, 17 nt, Homo sapiens
ggacaaggcuagaucau

SEQ ID NO: 198692 - RNA, 12 nt, Homo sapiens
ugcuuguucccu

SEQ ID NO: 198693 - RNA, 20 nt, Homo sapiens
ggccaaggagggcagaucac

SEQ ID NO: 198694 - RNA, 23 nt, Homo sapiens
gaucugaacagaaauaccaaaau

SEQ ID NO: 198695 - RNA, 18 nt, Homo sapiens
uauuauucuucauaacaa

SEQ ID NO: 198696 - RNA, 18 nt, Homo sapiens
uauggcacccaugcaccu

SEQ ID NO: 198697 - RNA, 19 nt, Homo sapiens
gcauagaguucagacuuuu

SEQ ID NO: 198698 - RNA, 22 nt, Homo sapiens
aaaguucugacuugacuuuagu

SEQ ID NO: 198699 - RNA, 13 nt, Homo sapiens
aucaucauucuca

SEQ ID NO: 198700 - RNA, 14 nt, Homo sapiens
aaaacuugcugccu

SEQ ID NO: 198701 - RNA, 20 nt, Homo sapiens
uccuaacaaguagcacccug

SEQ ID NO: 198702 - RNA, 21 nt, Homo sapiens
uuuauuacaguuuaucuaugg

SEQ ID NO: 198703 - RNA, 17 nt, Homo sapiens
gucucacaguguugccc

SEQ ID NO: 198704 - RNA, 20 nt, Homo sapiens
uucgagaccagccuggccaa

SEQ ID NO: 198705 - RNA, 19 nt, Homo sapiens
caaggcuggcagugacaga

SEQ ID NO: 198706 - RNA, 15 nt, Homo sapiens
gcauggagcauggga

SEQ ID NO: 198707 - RNA, 9 nt, Homo sapiens
gauggagcu

SEQ ID NO: 198708 - RNA, 16 nt, Homo sapiens
auaugauuaguaaaga

SEQ ID NO: 198709 - RNA, 18 nt, Homo sapiens
uuuacaauguucauccca

SEQ ID NO: 198710 - RNA, 19 nt, Homo sapiens
ugcacauacuugagacugu

SEQ ID NO: 198711 - RNA, 22 nt, Homo sapiens
uacauucugcaagcacaucugc

SEQ ID NO: 198712 - RNA, 22 nt, Homo sapiens
aaaccaucauaguacagguaag

SEQ ID NO: 198713 - RNA, 18 nt, Homo sapiens
guaaagaguuaguuugag

SEQ ID NO: 198714 - RNA, 20 nt, Homo sapiens
uuuguaucauuaugaaguca

SEQ ID NO: 198715 - RNA, 18 nt, Homo sapiens
gauccacuucucucagga

SEQ ID NO: 198716 - RNA, 19 nt, Homo sapiens
cugguggcccgacagccug

SEQ ID NO: 198717 - RNA, 22 nt, Homo sapiens
aagcuaaauccuuuacuguuag

SEQ ID NO: 198718 - RNA, 17 nt, Homo sapiens
uagucauuucauggguu

SEQ ID NO: 198719 - RNA, 13 nt, Homo sapiens
cacaucugcauuu

SEQ ID NO: 198720 - RNA, 14 nt, Homo sapiens
ccugugaaugccac

SEQ ID NO: 198721 - RNA, 21 nt, Homo sapiens
ucagugcuucgcagauguccu

SEQ ID NO: 198722 - RNA, 18 nt, Homo sapiens
caaucucugauucuguca

SEQ ID NO: 198723 - RNA, 18 nt, Homo sapiens
ucauaauuucuucacuca

SEQ ID NO: 198724 - RNA, 14 nt, Homo sapiens
ucucacuugucuca

SEQ ID NO: 198725 - RNA, 21 nt, Homo sapiens
augcaagcaagaaacacuggg

SEQ ID NO: 198726 - RNA, 20 nt, Homo sapiens
gugggcucccugacugggag

SEQ ID NO: 198727 - RNA, 21 nt, Homo sapiens
augcaaaaguucugacuugac

SEQ ID NO: 198728 - RNA, 19 nt, Homo sapiens
agcuuggcuguagaaggag

SEQ ID NO: 198729 - RNA, 22 nt, Homo sapiens
ugcuaauccucuuuuucuaguc

SEQ ID NO: 198730 - RNA, 18 nt, Homo sapiens
cuugauggagauauuuac

SEQ ID NO: 198731 - RNA, 17 nt, Homo sapiens
agugccucuuucaucca

SEQ ID NO: 198732 - RNA, 14 nt, Homo sapiens
ccagaggacaaagc

SEQ ID NO: 198733 - RNA, 22 nt, Homo sapiens
aucauuucuauuucuccuccau

SEQ ID NO: 198734 - RNA, 14 nt, Homo sapiens
ggagagugcaacag

SEQ ID NO: 198735 - RNA, 20 nt, Homo sapiens
cuugagggugcuuguucccu

SEQ ID NO: 198736 - RNA, 21 nt, Homo sapiens
aacuguuggcaaggugacauu

SEQ ID NO: 198737 - RNA, 13 nt, Homo sapiens
cuuuuucuuugag

SEQ ID NO: 198738 - RNA, 15 nt, Homo sapiens
cauuuccaugcauaa

SEQ ID NO: 198739 - RNA, 23 nt, Homo sapiens
uuuauaaagggagauaacaaucu

SEQ ID NO: 198740 - RNA, 16 nt, Homo sapiens
cuucaguauguuguca

SEQ ID NO: 198741 - RNA, 20 nt, Homo sapiens
cuuacauuugaaaucuauga

SEQ ID NO: 198742 - RNA, 20 nt, Homo sapiens
caagcuuggcuguagaagga

SEQ ID NO: 198743 - RNA, 14 nt, Homo sapiens
cauacacagccugg

SEQ ID NO: 198744 - RNA, 16 nt, Homo sapiens
ugggaccacagacuca

SEQ ID NO: 198745 - RNA, 16 nt, Homo sapiens
uguaucaaaugugaca

SEQ ID NO: 198746 - RNA, 18 nt, Homo sapiens
cccuaagcagaccacuga

SEQ ID NO: 198747 - RNA, 16 nt, Homo sapiens
ucuuguguuaccugaa

SEQ ID NO: 198748 - RNA, 22 nt, Homo sapiens
gacuaugucacccaaugcauau

SEQ ID NO: 198749 - RNA, 14 nt, Homo sapiens
cucuucuccacugg

SEQ ID NO: 198750 - RNA, 15 nt, Homo sapiens
gaccuaggauuucau

SEQ ID NO: 198751 - RNA, 23 nt, Homo sapiens
ccuuaguguuuggguauauucau

SEQ ID NO: 198752 - RNA, 20 nt, Homo sapiens
uuguaagaguggaaccaaca

SEQ ID NO: 198753 - RNA, 17 nt, Homo sapiens
auggcacccaugcaccu

SEQ ID NO: 198754 - RNA, 14 nt, Homo sapiens
uagcagacaguguu

SEQ ID NO: 198755 - RNA, 15 nt, Homo sapiens
gcccuggugcugcca

SEQ ID NO: 198756 - RNA, 24 nt, Homo sapiens
ggucuaggaacauacuucagcuca

SEQ ID NO: 198757 - RNA, 16 nt, Homo sapiens
gugcacaucugugucu

SEQ ID NO: 198758 - RNA, 13 nt, Homo sapiens
gggcacugguggc

SEQ ID NO: 198759 - RNA, 19 nt, Homo sapiens
aucucagcuggaucuccau

SEQ ID NO: 198760 - RNA, 20 nt, Homo sapiens
uagaccagaaccagagcuca

SEQ ID NO: 198761 - RNA, 15 nt, Homo sapiens
cucuggacacagccc

SEQ ID NO: 198762 - RNA, 15 nt, Homo sapiens
uaaauacagucuucc

SEQ ID NO: 198763 - RNA, 23 nt, Homo sapiens
acugcagggaaaauuauuugcau

SEQ ID NO: 198764 - RNA, 14 nt, Homo sapiens
guuugaguuacuau

SEQ ID NO: 198765 - RNA, 22 nt, Homo sapiens
aaguagacuucauuuuuccuaa

SEQ ID NO: 198766 - RNA, 15 nt, Homo sapiens
gacccugggaccaca

SEQ ID NO: 198767 - RNA, 14 nt, Homo sapiens
cuaugugcaugcag

SEQ ID NO: 198768 - RNA, 16 nt, Homo sapiens
ugauugugccuacgaa

SEQ ID NO: 198769 - RNA, 15 nt, Homo sapiens
aaucaaugcuauaac

SEQ ID NO: 198770 - RNA, 13 nt, Homo sapiens
auaggcaaagggg

SEQ ID NO: 198771 - RNA, 16 nt, Homo sapiens
caauggagacugucuc

SEQ ID NO: 198772 - RNA, 18 nt, Homo sapiens
aucaggaauauuuuccaa

SEQ ID NO: 198773 - RNA, 16 nt, Homo sapiens
agguuugccagcauuu

SEQ ID NO: 198774 - RNA, 18 nt, Homo sapiens
aaacucuacuuaauccaa

SEQ ID NO: 198775 - RNA, 23 nt, Homo sapiens
augucccuugcugugagcaagaa

SEQ ID NO: 198776 - RNA, 18 nt, Homo sapiens
gcacagagagggggccac

SEQ ID NO: 198777 - RNA, 23 nt, Homo sapiens
guuuuguagagauggggucucac

SEQ ID NO: 198778 - RNA, 21 nt, Homo sapiens
gggucucgcuuuguugcccag

SEQ ID NO: 198779 - RNA, 16 nt, Homo sapiens
agguaaggugagggaa

SEQ ID NO: 198780 - RNA, 22 nt, Homo sapiens
acagaugugugauucacagugu

SEQ ID NO: 198781 - RNA, 16 nt, Homo sapiens
ucaaucucugauucug

SEQ ID NO: 198782 - RNA, 20 nt, Homo sapiens
aauaaaccaucaucuugcca

SEQ ID NO: 198783 - RNA, 13 nt, Homo sapiens
uuaucugugcaaa

SEQ ID NO: 198784 - RNA, 15 nt, Homo sapiens
guuuauagaccagaa

SEQ ID NO: 198785 - RNA, 15 nt, Homo sapiens
uguauuuaacugccu

SEQ ID NO: 198786 - RNA, 22 nt, Homo sapiens
aucagaccauaauguuacauua

SEQ ID NO: 198787 - RNA, 15 nt, Homo sapiens
ucucuuccuacccuu

SEQ ID NO: 198788 - RNA, 20 nt, Homo sapiens
ccauauuuucaccauuugau

SEQ ID NO: 198789 - RNA, 22 nt, Homo sapiens
agaaauugcauuuccugacaga

SEQ ID NO: 198790 - RNA, 14 nt, Homo sapiens
uuggguucacagaa

SEQ ID NO: 198791 - RNA, 15 nt, Homo sapiens
ccugagagggaaccc

SEQ ID NO: 198792 - RNA, 19 nt, Homo sapiens
auuuuugaauacaggcaua

SEQ ID NO: 198793 - RNA, 17 nt, Homo sapiens
cacauucgaguguuuca

SEQ ID NO: 198794 - RNA, 18 nt, Homo sapiens
ggauacuguaacacuuua

SEQ ID NO: 198795 - RNA, 20 nt, Homo sapiens
gggacagagcagaacuuuca

SEQ ID NO: 198796 - RNA, 12 nt, Homo sapiens
cuacucagggaa

SEQ ID NO: 198797 - RNA, 15 nt, Homo sapiens
ggauuuggguuggaa

SEQ ID NO: 198798 - RNA, 14 nt, Homo sapiens
ugcuggcauuugca

SEQ ID NO: 198799 - RNA, 14 nt, Homo sapiens
uaaguuucugggac

SEQ ID NO: 198800 - RNA, 22 nt, Homo sapiens
aguguugcccaggcuggucuca

SEQ ID NO: 198801 - RNA, 18 nt, Homo sapiens
cuggacacagccccaugu

SEQ ID NO: 198802 - RNA, 15 nt, Homo sapiens
ucuacccaaaggaua

SEQ ID NO: 198803 - RNA, 22 nt, Homo sapiens
ccagaugccuucuccagacaaa

SEQ ID NO: 198804 - RNA, 13 nt, Homo sapiens
ugcagagacagag

SEQ ID NO: 198805 - RNA, 21 nt, Homo sapiens
uagaagccacuauuacuggga

SEQ ID NO: 198806 - RNA, 18 nt, Homo sapiens
cugggagcacaggcacug

SEQ ID NO: 198807 - RNA, 13 nt, Homo sapiens
gcuggcagugaca

SEQ ID NO: 198808 - RNA, 19 nt, Homo sapiens
cuguauauacaauaacaua

SEQ ID NO: 198809 - RNA, 18 nt, Homo sapiens
cccucuccccacugcuca

SEQ ID NO: 198810 - RNA, 18 nt, Homo sapiens
aggacuguugacauccaa

SEQ ID NO: 198811 - RNA, 15 nt, Homo sapiens
gaacuagagaaggac

SEQ ID NO: 198812 - RNA, 19 nt, Homo sapiens
ugagaggagagagacucca

SEQ ID NO: 198813 - RNA, 12 nt, Homo sapiens
uuuguugcccag

SEQ ID NO: 198814 - RNA, 18 nt, Homo sapiens
acuuugggaggccaagga

SEQ ID NO: 198815 - RNA, 15 nt, Homo sapiens
uugauuucauuaaua

SEQ ID NO: 198816 - RNA, 23 nt, Homo sapiens
gugagggauaguggggucagggc

SEQ ID NO: 198817 - RNA, 16 nt, Homo sapiens
cuuuagucugcaaaau

SEQ ID NO: 198818 - RNA, 21 nt, Homo sapiens
auuuacaugaauugcauuuua

SEQ ID NO: 198819 - RNA, 16 nt, Homo sapiens
aucuguauauacaaua

SEQ ID NO: 198820 - RNA, 16 nt, Homo sapiens
augagaaggaauuuga

SEQ ID NO: 198821 - RNA, 14 nt, Homo sapiens
ggacaaagccuuug

SEQ ID NO: 198822 - RNA, 15 nt, Homo sapiens
cagaaccagagcuca

SEQ ID NO: 198823 - RNA, 13 nt, Homo sapiens
cuaugugcaugca

SEQ ID NO: 198824 - RNA, 19 nt, Homo sapiens
gcugcuuccuccuggaaau

SEQ ID NO: 198825 - RNA, 20 nt, Homo sapiens
aagggccagcuggaggugaa

SEQ ID NO: 198826 - RNA, 12 nt, Homo sapiens
gagcucagagag

SEQ ID NO: 198827 - RNA, 21 nt, Homo sapiens
ccuacaaggcuggcagugaca

SEQ ID NO: 198828 - RNA, 14 nt, Homo sapiens
gggcucgugcccug

SEQ ID NO: 198829 - RNA, 19 nt, Homo sapiens
cagggaagcugucccucac

SEQ ID NO: 198830 - RNA, 15 nt, Homo sapiens
gagaucuaggugagg

SEQ ID NO: 198831 - RNA, 16 nt, Homo sapiens
aggacccugggaccac

SEQ ID NO: 198832 - RNA, 14 nt, Homo sapiens
ccaggcagauccca

SEQ ID NO: 198833 - RNA, 17 nt, Homo sapiens
gaaauaucaugcuccau

SEQ ID NO: 198834 - RNA, 18 nt, Homo sapiens
uccuacuguaugugggaa

SEQ ID NO: 198835 - RNA, 21 nt, Homo sapiens
ggaguguucagggccagcccu

SEQ ID NO: 198836 - RNA, 19 nt, Homo sapiens
cuuuugcauaagugcauga

SEQ ID NO: 198837 - RNA, 21 nt, Homo sapiens
cuuuuuucacggaaguuuuca

SEQ ID NO: 198838 - RNA, 23 nt, Homo sapiens
acagccucccacccccaucucuc

SEQ ID NO: 198839 - RNA, 21 nt, Homo sapiens
agcaacacucuauauuuagau

SEQ ID NO: 198840 - RNA, 12 nt, Homo sapiens
gcacccuggauu

SEQ ID NO: 198841 - RNA, 19 nt, Homo sapiens
gaaaucuaugaaauaucau

SEQ ID NO: 198842 - RNA, 20 nt, Homo sapiens
agcaguuaguuccuucauga

SEQ ID NO: 198843 - RNA, 13 nt, Homo sapiens
gaugaucaucucc

SEQ ID NO: 198844 - RNA, 19 nt, Homo sapiens
aaaacccacaaaaguacaa

SEQ ID NO: 198845 - RNA, 17 nt, Homo sapiens
augagaccacuguuauc

SEQ ID NO: 198846 - RNA, 20 nt, Homo sapiens
ggguucaccaggucagggag

SEQ ID NO: 198847 - RNA, 21 nt, Homo sapiens
gcauaaguuucugggaccuca

SEQ ID NO: 198848 - RNA, 13 nt, Homo sapiens
auuucucucugac

SEQ ID NO: 198849 - RNA, 14 nt, Homo sapiens
auugauuaccaagu

SEQ ID NO: 198850 - RNA, 17 nt, Homo sapiens
cuauugcuggcaaagac

SEQ ID NO: 198851 - RNA, 17 nt, Homo sapiens
cagcuuauauucaucca

SEQ ID NO: 198852 - RNA, 18 nt, Homo sapiens
ccucaucccgagcaccuc

SEQ ID NO: 198853 - RNA, 20 nt, Homo sapiens
cugguaauuuaagauuccag

SEQ ID NO: 198854 - RNA, 17 nt, Homo sapiens
aucagacuccugugcaa

SEQ ID NO: 198855 - RNA, 11 nt, Homo sapiens
aaaacacugug

SEQ ID NO: 198856 - RNA, 21 nt, Homo sapiens
gaaccaaaucuggaagccaaa

SEQ ID NO: 198857 - RNA, 22 nt, Homo sapiens
gcagagcuugaacacagucuca

SEQ ID NO: 198858 - RNA, 13 nt, Homo sapiens
cagggccagucuu

SEQ ID NO: 198859 - RNA, 15 nt, Homo sapiens
gcuggcccagccaaa

SEQ ID NO: 198860 - RNA, 21 nt, Homo sapiens
aaugaugucguuugaaucaca

SEQ ID NO: 198861 - RNA, 16 nt, Homo sapiens
cgucaugcuuguguua

SEQ ID NO: 198862 - RNA, 21 nt, Homo sapiens
cuuuugcauaagugcaugaca

SEQ ID NO: 198863 - RNA, 12 nt, Homo sapiens
gaaggagggaga

SEQ ID NO: 198864 - RNA, 13 nt, Homo sapiens
aggcacagaugaa

SEQ ID NO: 198865 - RNA, 17 nt, Homo sapiens
auguuugucucauccca

SEQ ID NO: 198866 - RNA, 15 nt, Homo sapiens
cgugaggaugggaag

SEQ ID NO: 198867 - RNA, 22 nt, Homo sapiens
ucugugcaaauccuugauacug

SEQ ID NO: 198868 - RNA, 13 nt, Homo sapiens
auuaucaacagca

SEQ ID NO: 198869 - RNA, 14 nt, Homo sapiens
ugauuucauuucaa

SEQ ID NO: 198870 - RNA, 13 nt, Homo sapiens
uacaauuugccau

SEQ ID NO: 198871 - RNA, 19 nt, Homo sapiens
gaaguaagcaaagacuuuc

SEQ ID NO: 198872 - RNA, 21 nt, Homo sapiens
cucuuguauaugaugaucugg

SEQ ID NO: 198873 - RNA, 16 nt, Homo sapiens
auaaaauucauuaguu

SEQ ID NO: 198874 - RNA, 13 nt, Homo sapiens
ucacaccuguaau

SEQ ID NO: 198875 - RNA, 20 nt, Homo sapiens
uauuuuauucccuuucacaa

SEQ ID NO: 198876 - RNA, 21 nt, Homo sapiens
gagcuucccugacucauucug

SEQ ID NO: 198877 - RNA, 19 nt, Homo sapiens
uggggaguaggacauacca

SEQ ID NO: 198878 - RNA, 16 nt, Homo sapiens
ccacuucucucaggau

SEQ ID NO: 198879 - RNA, 22 nt, Homo sapiens
aacaguuuuuuaugcuaaucag

SEQ ID NO: 198880 - RNA, 22 nt, Homo sapiens
agcuucuuaauauaacugccuu

SEQ ID NO: 198881 - RNA, 19 nt, Homo sapiens
gaaauugcauuuccugaca

SEQ ID NO: 198882 - RNA, 12 nt, Homo sapiens
ugacaaccucuu

SEQ ID NO: 198883 - RNA, 20 nt, Homo sapiens
aaagaccugacaccuuucau

SEQ ID NO: 198884 - RNA, 23 nt, Homo sapiens
uuccacuuagaaauugcauuucc

SEQ ID NO: 198885 - RNA, 19 nt, Homo sapiens
ucuacagagcuucccugac

SEQ ID NO: 198886 - RNA, 16 nt, Homo sapiens
gcugagugcaccacuu

SEQ ID NO: 198887 - RNA, 21 nt, Homo sapiens
cucugggccaagucaaagaca

SEQ ID NO: 198888 - RNA, 16 nt, Homo sapiens
auuauaugcacuagca

SEQ ID NO: 198889 - RNA, 16 nt, Homo sapiens
ccucagucccaacucc

SEQ ID NO: 198890 - RNA, 15 nt, Homo sapiens
accagggguuucucg

SEQ ID NO: 198891 - RNA, 15 nt, Homo sapiens
cugucuuucacugaa

SEQ ID NO: 198892 - RNA, 15 nt, Homo sapiens
auccuuuacuguuag

SEQ ID NO: 198893 - RNA, 15 nt, Homo sapiens
aauguucacuuuuga

SEQ ID NO: 198894 - RNA, 15 nt, Homo sapiens
aggauuucaugauuu

SEQ ID NO: 198895 - RNA, 17 nt, Homo sapiens
accacugauaaaaccau

SEQ ID NO: 198896 - RNA, 17 nt, Homo sapiens
uauuauucuucauaaca

SEQ ID NO: 198897 - RNA, 18 nt, Homo sapiens
aguuggaagugugugauc

SEQ ID NO: 198898 - RNA, 16 nt, Homo sapiens
ccugggggugccagga

SEQ ID NO: 198899 - RNA, 13 nt, Homo sapiens
auagagccugagg

SEQ ID NO: 198900 - RNA, 20 nt, Homo sapiens
acacgagguaugaggucuag

SEQ ID NO: 198901 - RNA, 18 nt, Homo sapiens
agggaagcugucccucac

SEQ ID NO: 198902 - RNA, 20 nt, Homo sapiens
gucucauaugauugugcaca

SEQ ID NO: 198903 - RNA, 21 nt, Homo sapiens
gccaggcagaucccacuugca

SEQ ID NO: 198904 - RNA, 14 nt, Homo sapiens
gaggaguuccuuga

SEQ ID NO: 198905 - RNA, 12 nt, Homo sapiens
aacccugucuga

SEQ ID NO: 198906 - RNA, 22 nt, Homo sapiens
aucuaugaaauaucaugcucca

SEQ ID NO: 198907 - RNA, 21 nt, Homo sapiens
auaauguuacauuauuaucaa

SEQ ID NO: 198908 - RNA, 17 nt, Homo sapiens
aaugcuggcauuugcac

SEQ ID NO: 198909 - RNA, 21 nt, Homo sapiens
uacuuuugcccuuugauuaaa

SEQ ID NO: 198910 - RNA, 20 nt, Homo sapiens
gggucucacaguguugccca

SEQ ID NO: 198911 - RNA, 13 nt, Homo sapiens
ucugagcugugca

SEQ ID NO: 198912 - RNA, 22 nt, Homo sapiens
agaugugugauucacaguguga

SEQ ID NO: 198913 - RNA, 14 nt, Homo sapiens
acuccuaaaucaag

SEQ ID NO: 198914 - RNA, 18 nt, Homo sapiens
uaugcucagggucaauuu

SEQ ID NO: 198915 - RNA, 15 nt, Homo sapiens
gggcuccauguagaa

SEQ ID NO: 198916 - RNA, 18 nt, Homo sapiens
agcauuuagcacauacua

SEQ ID NO: 198917 - RNA, 13 nt, Homo sapiens
uaucgaucucuua

SEQ ID NO: 198918 - RNA, 17 nt, Homo sapiens
caagaagucaaaguaaa

SEQ ID NO: 198919 - RNA, 17 nt, Homo sapiens
cccauaucugugaaaug

SEQ ID NO: 198920 - RNA, 14 nt, Homo sapiens
uaagugcaugacau

SEQ ID NO: 198921 - RNA, 20 nt, Homo sapiens
uaugugggugggaccacaga

SEQ ID NO: 198922 - RNA, 14 nt, Homo sapiens
augugcucagggaa

SEQ ID NO: 198923 - RNA, 18 nt, Homo sapiens
ccugugcaacuuucccaa

SEQ ID NO: 198924 - RNA, 19 nt, Homo sapiens
ggcuggaguggaguggcgu

SEQ ID NO: 198925 - RNA, 13 nt, Homo sapiens
uucagggggccag

SEQ ID NO: 198926 - RNA, 23 nt, Homo sapiens
gaugucucacauccucugucuau

SEQ ID NO: 198927 - RNA, 15 nt, Homo sapiens
uugugagccaccacg

SEQ ID NO: 198928 - RNA, 22 nt, Homo sapiens
agcuggguuggaaaacaguauu

SEQ ID NO: 198929 - RNA, 18 nt, Homo sapiens
auucucugagcugugcag

SEQ ID NO: 198930 - RNA, 20 nt, Homo sapiens
ccacagaccuaggauuucau

SEQ ID NO: 198931 - RNA, 18 nt, Homo sapiens
uuucagguuccaaucaga

SEQ ID NO: 198932 - RNA, 16 nt, Homo sapiens
caggacccugggacca

SEQ ID NO: 198933 - RNA, 20 nt, Homo sapiens
auuccuauauaguuuauuga

SEQ ID NO: 198934 - RNA, 17 nt, Homo sapiens
uauguugcccagugugu

SEQ ID NO: 198935 - RNA, 18 nt, Homo sapiens
cacugccauggaggcaca

SEQ ID NO: 198936 - RNA, 21 nt, Homo sapiens
aaauacagucuuccauuugca

SEQ ID NO: 198937 - RNA, 11 nt, Homo sapiens
uucaucucuug

SEQ ID NO: 198938 - RNA, 21 nt, Homo sapiens
uacuuugaagucauaccaaug

SEQ ID NO: 198939 - RNA, 22 nt, Homo sapiens
ccacgagcuguuuacuagggau

SEQ ID NO: 198940 - RNA, 21 nt, Homo sapiens
ugugugaucugugggcacauu

SEQ ID NO: 198941 - RNA, 20 nt, Homo sapiens
gagacuuugacucuccagaa

SEQ ID NO: 198942 - RNA, 14 nt, Homo sapiens
uuggcuuuuacuga

SEQ ID NO: 198943 - RNA, 13 nt, Homo sapiens
gacagccuggcac

SEQ ID NO: 198944 - RNA, 14 nt, Homo sapiens
guucagaugcuucu

SEQ ID NO: 198945 - RNA, 17 nt, Homo sapiens
gucaauaggcaaagggg

SEQ ID NO: 198946 - RNA, 21 nt, Homo sapiens
ucauucucugucucauccauc

SEQ ID NO: 198947 - RNA, 14 nt, Homo sapiens
ugccauagcaagau

SEQ ID NO: 198948 - RNA, 19 nt, Homo sapiens
uugacaguucauauguacc

SEQ ID NO: 198949 - RNA, 18 nt, Homo sapiens
aaacuauguaacauguag

SEQ ID NO: 198950 - RNA, 14 nt, Homo sapiens
agacagaagccuca

SEQ ID NO: 198951 - RNA, 18 nt, Homo sapiens
cacacaccuguagcacuu

SEQ ID NO: 198952 - RNA, 17 nt, Homo sapiens
gcacagcacccauggga

SEQ ID NO: 198953 - RNA, 15 nt, Homo sapiens
cuuuguacuuugugc

SEQ ID NO: 198954 - RNA, 22 nt, Homo sapiens
ucuccccacugcucauuuggau

SEQ ID NO: 198955 - RNA, 13 nt, Homo sapiens
ccuugaaggguuc

SEQ ID NO: 198956 - RNA, 10 nt, Homo sapiens
ucaaagccag

SEQ ID NO: 198957 - RNA, 21 nt, Homo sapiens
aagaggaaggccucuguggca

SEQ ID NO: 198958 - RNA, 23 nt, Homo sapiens
cagugacagaacuaagaugauca

SEQ ID NO: 198959 - RNA, 23 nt, Homo sapiens
ugcauuuaaauacagucuuccau

SEQ ID NO: 198960 - RNA, 14 nt, Homo sapiens
uaugauugugcaca

SEQ ID NO: 198961 - RNA, 15 nt, Homo sapiens
aggaaaauuucacau

SEQ ID NO: 198962 - RNA, 13 nt, Homo sapiens
gacuccaguuaaa

SEQ ID NO: 198963 - RNA, 18 nt, Homo sapiens
ugggcaauauagcaagau

SEQ ID NO: 198964 - RNA, 14 nt, Homo sapiens
cacugcucauuugg

SEQ ID NO: 198965 - RNA, 21 nt, Homo sapiens
uucccuauuuugccaguggga

SEQ ID NO: 198966 - RNA, 23 nt, Homo sapiens
guaugaggucuaggaacauacuu

SEQ ID NO: 198967 - RNA, 14 nt, Homo sapiens
acagacucacaucc

SEQ ID NO: 198968 - RNA, 21 nt, Homo sapiens
agagguuucuggcagccagua

SEQ ID NO: 198969 - RNA, 17 nt, Homo sapiens
uuaaguugauggugaug

SEQ ID NO: 198970 - RNA, 23 nt, Homo sapiens
cuuuuaaguugcugaugaacucu

SEQ ID NO: 198971 - RNA, 15 nt, Homo sapiens
cauucgaguguuuca

SEQ ID NO: 198972 - RNA, 23 nt, Homo sapiens
uugcuauggggagaaaagacaug

SEQ ID NO: 198973 - RNA, 14 nt, Homo sapiens
uaucaacagcauuu

SEQ ID NO: 198974 - RNA, 16 nt, Homo sapiens
agacucccaagcugga

SEQ ID NO: 198975 - RNA, 21 nt, Homo sapiens
uacugggacugugcucagaga

SEQ ID NO: 198976 - RNA, 22 nt, Homo sapiens
acugcagggaaaauuauuugca

SEQ ID NO: 198977 - RNA, 14 nt, Homo sapiens
cccuccacguucac

SEQ ID NO: 198978 - RNA, 23 nt, Homo sapiens
ccuggaguguaugacugcacaug

SEQ ID NO: 198979 - RNA, 18 nt, Homo sapiens
gcaggaaaugaaaauguc

SEQ ID NO: 198980 - RNA, 17 nt, Homo sapiens
gagccaccccuaaagag

SEQ ID NO: 198981 - RNA, 16 nt, Homo sapiens
gaugcagagucagcag

SEQ ID NO: 198982 - RNA, 15 nt, Homo sapiens
uuagacccugcauuu

SEQ ID NO: 198983 - RNA, 20 nt, Homo sapiens
guccuuagccccaucugcca

SEQ ID NO: 198984 - RNA, 19 nt, Homo sapiens
ucagucucugagcagugaa

SEQ ID NO: 198985 - RNA, 18 nt, Homo sapiens
acuguaugugggaauuua

SEQ ID NO: 198986 - RNA, 17 nt, Homo sapiens
aacuaagaugcugccug

SEQ ID NO: 198987 - RNA, 13 nt, Homo sapiens
uggguaccuguau

SEQ ID NO: 198988 - RNA, 22 nt, Homo sapiens
augcaucaaguuauugacaaac

SEQ ID NO: 198989 - RNA, 19 nt, Homo sapiens
uacacgagguaugaggucu

SEQ ID NO: 198990 - RNA, 19 nt, Homo sapiens
auaguacuggcaugguacg

SEQ ID NO: 198991 - RNA, 18 nt, Homo sapiens
ucaagcccuuuacuugac

SEQ ID NO: 198992 - RNA, 23 nt, Homo sapiens
ccucacagagugcauugugaggg

SEQ ID NO: 198993 - RNA, 18 nt, Homo sapiens
aauguuacauuauuauca

SEQ ID NO: 198994 - RNA, 21 nt, Homo sapiens
ucaaggcccauaucugugaaa

SEQ ID NO: 198995 - RNA, 16 nt, Homo sapiens
cgugaaaaugcuguau

SEQ ID NO: 198996 - RNA, 16 nt, Homo sapiens
ucagacuccugugcaa

SEQ ID NO: 198997 - RNA, 13 nt, Homo sapiens
agaaacacugggc

SEQ ID NO: 198998 - RNA, 14 nt, Homo sapiens
gacagaacuaagau

SEQ ID NO: 198999 - RNA, 17 nt, Homo sapiens
uccagaccauucaggac

SEQ ID NO: 199000 - RNA, 19 nt, Homo sapiens
gcacugagcaaagcauuga

SEQ ID NO: 199001 - RNA, 21 nt, Homo sapiens
aauuauuauuuauauauguau

SEQ ID NO: 199002 - RNA, 18 nt, Homo sapiens
cauuugcuuacuuugcau

SEQ ID NO: 199003 - RNA, 12 nt, Homo sapiens
uggagagccacc

SEQ ID NO: 199004 - RNA, 17 nt, Homo sapiens
ugaggcaaccacaggca

SEQ ID NO: 199005 - RNA, 18 nt, Homo sapiens
gagcucagagaggcuaga

SEQ ID NO: 199006 - RNA, 17 nt, Homo sapiens
uccugccgcaacaguuu

SEQ ID NO: 199007 - RNA, 18 nt, Homo sapiens
uucauauauuuguaugau

SEQ ID NO: 199008 - RNA, 24 nt, Homo sapiens
cuuucaggccacauggcuaaagaa

SEQ ID NO: 199009 - RNA, 13 nt, Homo sapiens
augugugauucac

SEQ ID NO: 199010 - RNA, 18 nt, Homo sapiens
ugggucuucagggggcca

SEQ ID NO: 199011 - RNA, 19 nt, Homo sapiens
aaauacuucuugaagccga

SEQ ID NO: 199012 - RNA, 20 nt, Homo sapiens
auuucaugauuucauuucaa

SEQ ID NO: 199013 - RNA, 22 nt, Homo sapiens
cuauuuccuucuccuccugucu

SEQ ID NO: 199014 - RNA, 14 nt, Homo sapiens
uagcaugcugugau

SEQ ID NO: 199015 - RNA, 21 nt, Homo sapiens
cacugcucauuuggaucccag

SEQ ID NO: 199016 - RNA, 22 nt, Homo sapiens
ccuuggcuuuuacugaagccuu

SEQ ID NO: 199017 - RNA, 18 nt, Homo sapiens
gagauaauucuagcuuug

SEQ ID NO: 199018 - RNA, 21 nt, Homo sapiens
agacaccuuggacauccuccu

SEQ ID NO: 199019 - RNA, 14 nt, Homo sapiens
cugcaagcacugca

SEQ ID NO: 199020 - RNA, 15 nt, Homo sapiens
aaaucccuccuucau

SEQ ID NO: 199021 - RNA, 16 nt, Homo sapiens
gaggauuucaucucuu

SEQ ID NO: 199022 - RNA, 21 nt, Homo sapiens
acaggcccuuccucuccacug

SEQ ID NO: 199023 - RNA, 23 nt, Homo sapiens
uuaugccauagcaagauugcuua

SEQ ID NO: 199024 - RNA, 19 nt, Homo sapiens
acucuuaguuacucauuca

SEQ ID NO: 199025 - RNA, 16 nt, Homo sapiens
aacaguaacugccauc

SEQ ID NO: 199026 - RNA, 19 nt, Homo sapiens
gcuuuuacugaagccuuuc

SEQ ID NO: 199027 - RNA, 15 nt, Homo sapiens
agcaauaaaaugcua

SEQ ID NO: 199028 - RNA, 15 nt, Homo sapiens
agacacuauuuaucu

SEQ ID NO: 199029 - RNA, 22 nt, Homo sapiens
augccacacggcucucaccagu

SEQ ID NO: 199030 - RNA, 16 nt, Homo sapiens
agccucaagaugaagg

SEQ ID NO: 199031 - RNA, 22 nt, Homo sapiens
uucucucugacccucuccccac

SEQ ID NO: 199032 - RNA, 21 nt, Homo sapiens
acuugcacaaaaucacacagc

SEQ ID NO: 199033 - RNA, 21 nt, Homo sapiens
uugcacaaaaucacacagcca

SEQ ID NO: 199034 - RNA, 14 nt, Homo sapiens
aaucagcauucuca

SEQ ID NO: 199035 - RNA, 14 nt, Homo sapiens
gcggaguugugcac

SEQ ID NO: 199036 - RNA, 16 nt, Homo sapiens
ucuauggcacccaugc

SEQ ID NO: 199037 - RNA, 20 nt, Homo sapiens
aucaccgugggcucccugac

SEQ ID NO: 199038 - RNA, 19 nt, Homo sapiens
agaccugacaccuuucaua

SEQ ID NO: 199039 - RNA, 22 nt, Homo sapiens
cuucaaggcccauaucugugaa

SEQ ID NO: 199040 - RNA, 16 nt, Homo sapiens
uaucucaaacuacugg

SEQ ID NO: 199041 - RNA, 21 nt, Homo sapiens
uuccuucaugaucaucacaau

SEQ ID NO: 199042 - RNA, 14 nt, Homo sapiens
aagcugggagcaca

SEQ ID NO: 199043 - RNA, 18 nt, Homo sapiens
agcccucaggucagggug

SEQ ID NO: 199044 - RNA, 16 nt, Homo sapiens
cugagcaaagcauuga

SEQ ID NO: 199045 - RNA, 18 nt, Homo sapiens
agaauuugagugcucuga

SEQ ID NO: 199046 - RNA, 19 nt, Homo sapiens
ugcagcuuauauucaucca

SEQ ID NO: 199047 - RNA, 17 nt, Homo sapiens
cagcauucucacuccua

SEQ ID NO: 199048 - RNA, 17 nt, Homo sapiens
cuauggcucuacuuuca

SEQ ID NO: 199049 - RNA, 16 nt, Homo sapiens
aaggagccccauuccu

SEQ ID NO: 199050 - RNA, 20 nt, Homo sapiens
guuucugaucugaugcaagc

SEQ ID NO: 199051 - RNA, 15 nt, Homo sapiens
agaaagcucaucuca

SEQ ID NO: 199052 - RNA, 20 nt, Homo sapiens
caaaggagggucaggaagga

SEQ ID NO: 199053 - RNA, 15 nt, Homo sapiens
agugagggucagaga

SEQ ID NO: 199054 - RNA, 17 nt, Homo sapiens
ugacauuauaugcacua

SEQ ID NO: 199055 - RNA, 18 nt, Homo sapiens
cuuacccuccuccagacc

SEQ ID NO: 199056 - RNA, 21 nt, Homo sapiens
auuuaaaaaacuaacacccag

SEQ ID NO: 199057 - RNA, 16 nt, Homo sapiens
augauugugcacauac

SEQ ID NO: 199058 - RNA, 13 nt, Homo sapiens
ugugugaagauca

SEQ ID NO: 199059 - RNA, 14 nt, Homo sapiens
cugacaccuuucau

SEQ ID NO: 199060 - RNA, 23 nt, Homo sapiens
gacucuccagaaagcucaucuca

SEQ ID NO: 199061 - RNA, 17 nt, Homo sapiens
gagucgggacuaaccca

SEQ ID NO: 199062 - RNA, 23 nt, Homo sapiens
gcaaugugcccccagacgcacgu

SEQ ID NO: 199063 - RNA, 14 nt, Homo sapiens
uguuucugaucuga

SEQ ID NO: 199064 - RNA, 16 nt, Homo sapiens
acuaauacagacuaug

SEQ ID NO: 199065 - RNA, 19 nt, Homo sapiens
gcaaggagaccaccaacag

SEQ ID NO: 199066 - RNA, 16 nt, Homo sapiens
uaaugguugacugggu

SEQ ID NO: 199067 - RNA, 15 nt, Homo sapiens
cuagguaggggccca

SEQ ID NO: 199068 - RNA, 22 nt, Homo sapiens
aauuauuugcauaacaauuccu

SEQ ID NO: 199069 - RNA, 15 nt, Homo sapiens
gaacaguaacugcca

SEQ ID NO: 199070 - RNA, 18 nt, Homo sapiens
uccagaccauucaggaca

SEQ ID NO: 199071 - RNA, 22 nt, Homo sapiens
ucuauugcuggcaaagacagaa

SEQ ID NO: 199072 - RNA, 15 nt, Homo sapiens
cuaaaauuagaugaa

SEQ ID NO: 199073 - RNA, 19 nt, Homo sapiens
gguagagacuuugacucuc

SEQ ID NO: 199074 - RNA, 15 nt, Homo sapiens
cccauaucugugaaa

SEQ ID NO: 199075 - RNA, 13 nt, Homo sapiens
cgcaacaguuuuu

SEQ ID NO: 199076 - RNA, 13 nt, Homo sapiens
aaaagcaaaauca

SEQ ID NO: 199077 - RNA, 20 nt, Homo sapiens
ggcagagaggacuguugaca

SEQ ID NO: 199078 - RNA, 19 nt, Homo sapiens
uuaaagcugaaaacugcaa

SEQ ID NO: 199079 - RNA, 15 nt, Homo sapiens
ucauucucauucuca

SEQ ID NO: 199080 - RNA, 23 nt, Homo sapiens
uacaauaacauaauuuguacaua

SEQ ID NO: 199081 - RNA, 22 nt, Homo sapiens
ucuuguuuuuuuuuuccacuua

SEQ ID NO: 199082 - RNA, 16 nt, Homo sapiens
guuucuggcagccagu

SEQ ID NO: 199083 - RNA, 22 nt, Homo sapiens
cuucccugucugccagggccag

SEQ ID NO: 199084 - RNA, 18 nt, Homo sapiens
uggggagaaaagacauga

SEQ ID NO: 199085 - RNA, 19 nt, Homo sapiens
aggcgauccaccugucuca

SEQ ID NO: 199086 - RNA, 13 nt, Homo sapiens
ugaaaaaugccuc

SEQ ID NO: 199087 - RNA, 14 nt, Homo sapiens
aauguuuacacucu

SEQ ID NO: 199088 - RNA, 15 nt, Homo sapiens
cauuaaacuuaccug

SEQ ID NO: 199089 - RNA, 19 nt, Homo sapiens
gacucuccagaaagcucau

SEQ ID NO: 199090 - RNA, 17 nt, Homo sapiens
ugcuuuguaugcacuuu

SEQ ID NO: 199091 - RNA, 15 nt, Homo sapiens
uggcucuacuuucag

SEQ ID NO: 199092 - RNA, 22 nt, Homo sapiens
uagccacugcauaccaaccugg

SEQ ID NO: 199093 - RNA, 21 nt, Homo sapiens
auccugguugguguugcagaa

SEQ ID NO: 199094 - RNA, 21 nt, Homo sapiens
ugguauaaacguccuacugua

SEQ ID NO: 199095 - RNA, 13 nt, Homo sapiens
cauauaauguugu

SEQ ID NO: 199096 - RNA, 11 nt, Homo sapiens
accucagggcu

SEQ ID NO: 199097 - RNA, 13 nt, Homo sapiens
aaacuucaagggu

SEQ ID NO: 199098 - RNA, 12 nt, Homo sapiens
aucaauguuucu

SEQ ID NO: 199099 - RNA, 19 nt, Homo sapiens
agaccuguaaucauauaau

SEQ ID NO: 199100 - RNA, 18 nt, Homo sapiens
gcagauccagagguuucu

SEQ ID NO: 199101 - RNA, 20 nt, Homo sapiens
gugcuaucgcaccacugugu

SEQ ID NO: 199102 - RNA, 18 nt, Homo sapiens
accugggcaauauagcaa

SEQ ID NO: 199103 - RNA, 21 nt, Homo sapiens
aggaugagcauuuagggcaag

SEQ ID NO: 199104 - RNA, 20 nt, Homo sapiens
uuaauacagggcauuuuggu

SEQ ID NO: 199105 - RNA, 15 nt, Homo sapiens
cucacacaugagauc

SEQ ID NO: 199106 - RNA, 18 nt, Homo sapiens
agccugccucuuccagga

SEQ ID NO: 199107 - RNA, 14 nt, Homo sapiens
uuaauauaacugcc

SEQ ID NO: 199108 - RNA, 17 nt, Homo sapiens
agugcugggauuacaau

SEQ ID NO: 199109 - RNA, 17 nt, Homo sapiens
cuccuccagaccauuca

SEQ ID NO: 199110 - RNA, 23 nt, Homo sapiens
uuuacagaaucaaaugcaauuuu

SEQ ID NO: 199111 - RNA, 23 nt, Homo sapiens
agccucaagucuuauuuccucaa

SEQ ID NO: 199112 - RNA, 12 nt, Homo sapiens
gaccuugcacaa

SEQ ID NO: 199113 - RNA, 13 nt, Homo sapiens
ugcuggcauuugc

SEQ ID NO: 199114 - RNA, 13 nt, Homo sapiens
aaagaagguuuca

SEQ ID NO: 199115 - RNA, 23 nt, Homo sapiens
acuuggcucgaaucucugugccu

SEQ ID NO: 199116 - RNA, 15 nt, Homo sapiens
uauugcagcuuauau

SEQ ID NO: 199117 - RNA, 17 nt, Homo sapiens
gcaaagggagcacuggg

SEQ ID NO: 199118 - RNA, 21 nt, Homo sapiens
cuucuuaauauaacugccuua

SEQ ID NO: 199119 - RNA, 12 nt, Homo sapiens
cuuccauuugcu

SEQ ID NO: 199120 - RNA, 21 nt, Homo sapiens
aaaaucauuuuauaugucaaa

SEQ ID NO: 199121 - RNA, 13 nt, Homo sapiens
aucaacagcauuu

SEQ ID NO: 199122 - RNA, 16 nt, Homo sapiens
ucaccaggucagggag

SEQ ID NO: 199123 - RNA, 15 nt, Homo sapiens
agauccugguuggug

SEQ ID NO: 199124 - RNA, 21 nt, Homo sapiens
caucgcaguguucaaggccau

SEQ ID NO: 199125 - RNA, 15 nt, Homo sapiens
ccccaggcauugcca

SEQ ID NO: 199126 - RNA, 21 nt, Homo sapiens
cuaugugcaugcagcaucuaa

SEQ ID NO: 199127 - RNA, 17 nt, Homo sapiens
auuauaauauacuauau

SEQ ID NO: 199128 - RNA, 21 nt, Homo sapiens
ucgguauccccccaucuugcu

SEQ ID NO: 199129 - RNA, 15 nt, Homo sapiens
gaucuuugacucuuu

SEQ ID NO: 199130 - RNA, 11 nt, Homo sapiens
ugugcacauuu

SEQ ID NO: 199131 - RNA, 18 nt, Homo sapiens
gcaauuuccggccaacag

SEQ ID NO: 199132 - RNA, 17 nt, Homo sapiens
cgucccuccacguucac

SEQ ID NO: 199133 - RNA, 21 nt, Homo sapiens
cagugaaugauucaguguuaa

SEQ ID NO: 199134 - RNA, 21 nt, Homo sapiens
cauccauuuauuuggcaucug

SEQ ID NO: 199135 - RNA, 17 nt, Homo sapiens
ugcuauaacuauguuga

SEQ ID NO: 199136 - RNA, 20 nt, Homo sapiens
gccuccuccagaauggagcu

SEQ ID NO: 199137 - RNA, 22 nt, Homo sapiens
gacaaaccagaagcaacagaaa

SEQ ID NO: 199138 - RNA, 16 nt, Homo sapiens
uauaguuuauugacaa

SEQ ID NO: 199139 - RNA, 21 nt, Homo sapiens
gcagauacugucucuuucaug

SEQ ID NO: 199140 - RNA, 14 nt, Homo sapiens
uggcagccaguacc

SEQ ID NO: 199141 - RNA, 21 nt, Homo sapiens
uucuugaguuuagugaucuga

SEQ ID NO: 199142 - RNA, 17 nt, Homo sapiens
aggcccccacuugccuc

SEQ ID NO: 199143 - RNA, 22 nt, Homo sapiens
uacaguaggagcccagcucuga

SEQ ID NO: 199144 - RNA, 19 nt, Homo sapiens
gccucccacccccaucucu

SEQ ID NO: 199145 - RNA, 15 nt, Homo sapiens
uuucucuguauagua

SEQ ID NO: 199146 - RNA, 17 nt, Homo sapiens
caaaggugauugugcca

SEQ ID NO: 199147 - RNA, 18 nt, Homo sapiens
cuugcaguuaaggguuag

SEQ ID NO: 199148 - RNA, 18 nt, Homo sapiens
cugcugagugcaccacuu

SEQ ID NO: 199149 - RNA, 15 nt, Homo sapiens
gugucaccugugcuu

SEQ ID NO: 199150 - RNA, 17 nt, Homo sapiens
acccacaaaaguacaau

SEQ ID NO: 199151 - RNA, 16 nt, Homo sapiens
ugcauaagugcaugac

SEQ ID NO: 199152 - RNA, 18 nt, Homo sapiens
uggccuugaaaccaccuu

SEQ ID NO: 199153 - RNA, 21 nt, Homo sapiens
auguacaugaagaagcuaaau

SEQ ID NO: 199154 - RNA, 15 nt, Homo sapiens
cagaucccacuugca

SEQ ID NO: 199155 - RNA, 14 nt, Homo sapiens
ugcccacucuccac

SEQ ID NO: 199156 - RNA, 22 nt, Homo sapiens
aaucuucuugauccacuucucu

SEQ ID NO: 199157 - RNA, 16 nt, Homo sapiens
cuaaucagcauucuca

SEQ ID NO: 199158 - RNA, 19 nt, Homo sapiens
agguaggggcccacuucac

SEQ ID NO: 199159 - RNA, 23 nt, Homo sapiens
uggggacagagcagaacuuucac

SEQ ID NO: 199160 - RNA, 17 nt, Homo sapiens
gaccacuguuaucaaaa

SEQ ID NO: 199161 - RNA, 20 nt, Homo sapiens
agcaaaauacaugacauuua

SEQ ID NO: 199162 - RNA, 16 nt, Homo sapiens
cagaaggcaaacccau

SEQ ID NO: 199163 - RNA, 14 nt, Homo sapiens
caccuguaauccca

SEQ ID NO: 199164 - RNA, 23 nt, Homo sapiens
ugccacagccuccccugccaggg

SEQ ID NO: 199165 - RNA, 22 nt, Homo sapiens
agaacuggaggaguuccuugau

SEQ ID NO: 199166 - RNA, 16 nt, Homo sapiens
uggcucacaccuguaa

SEQ ID NO: 199167 - RNA, 14 nt, Homo sapiens
aauauaacugccuu

SEQ ID NO: 199168 - RNA, 12 nt, Homo sapiens
cacugcaagcac

SEQ ID NO: 199169 - RNA, 11 nt, Homo sapiens
cuugccucuuc

SEQ ID NO: 199170 - RNA, 19 nt, Homo sapiens
ucucccuccccugccauuu

SEQ ID NO: 199171 - RNA, 15 nt, Homo sapiens
agcccuuuacuugac

SEQ ID NO: 199172 - RNA, 17 nt, Homo sapiens
gacaucaagcacagaag

SEQ ID NO: 199173 - RNA, 22 nt, Homo sapiens
augcacuguucccccugugcag

SEQ ID NO: 199174 - RNA, 13 nt, Homo sapiens
cuccaaacugaag

SEQ ID NO: 199175 - RNA, 21 nt, Homo sapiens
caaacuacuggcaauuuguaa

SEQ ID NO: 199176 - RNA, 11 nt, Homo sapiens
ccagagcucag

SEQ ID NO: 199177 - RNA, 20 nt, Homo sapiens
auauauauuuuugugcacau

SEQ ID NO: 199178 - RNA, 18 nt, Homo sapiens
uguacuugccuuauuaga

SEQ ID NO: 199179 - RNA, 21 nt, Homo sapiens
uuuauagaccagaaccagagc

SEQ ID NO: 199180 - RNA, 17 nt, Homo sapiens
auucucugucucaucca

SEQ ID NO: 199181 - RNA, 22 nt, Homo sapiens
uuggcuguagaaggagacagag

SEQ ID NO: 199182 - RNA, 23 nt, Homo sapiens
ggcccuucccacaggacauuucu

SEQ ID NO: 199183 - RNA, 21 nt, Homo sapiens
ucauaugauugugcacauacu

SEQ ID NO: 199184 - RNA, 18 nt, Homo sapiens
auuaucuaugauaugcua

SEQ ID NO: 199185 - RNA, 18 nt, Homo sapiens
uaaaaccaucauaguaca

SEQ ID NO: 199186 - RNA, 19 nt, Homo sapiens
gggucucacaguguugccc

SEQ ID NO: 199187 - RNA, 19 nt, Homo sapiens
ucuugacuacagucaggaa

SEQ ID NO: 199188 - RNA, 12 nt, Homo sapiens
agaaagccucag

SEQ ID NO: 199189 - RNA, 21 nt, Homo sapiens
gcugaugaacucuuaaucaaa

SEQ ID NO: 199190 - RNA, 20 nt, Homo sapiens
uucccuguaugauuccuuga

SEQ ID NO: 199191 - RNA, 19 nt, Homo sapiens
aauccuuuacuguuaguca

SEQ ID NO: 199192 - RNA, 18 nt, Homo sapiens
uuaucaccgugggcuccc

SEQ ID NO: 199193 - RNA, 19 nt, Homo sapiens
uauaaaccuaaaaaagaua

SEQ ID NO: 199194 - RNA, 14 nt, Homo sapiens
uauccaacaugugc

SEQ ID NO: 199195 - RNA, 20 nt, Homo sapiens
cugaauguauugaacuugga

SEQ ID NO: 199196 - RNA, 16 nt, Homo sapiens
aguaaguggugagaac

SEQ ID NO: 199197 - RNA, 18 nt, Homo sapiens
ccuggcaagugggugaaa

SEQ ID NO: 199198 - RNA, 16 nt, Homo sapiens
aggccaggcagauccc

SEQ ID NO: 199199 - RNA, 16 nt, Homo sapiens
augauccuaaugaaug

SEQ ID NO: 199200 - RNA, 23 nt, Homo sapiens
aacuugcacaaaaucacacagcc

SEQ ID NO: 199201 - RNA, 18 nt, Homo sapiens
cuguaccugugcacguug

SEQ ID NO: 199202 - RNA, 21 nt, Homo sapiens
uguacaguagauuuuccaaau

SEQ ID NO: 199203 - RNA, 15 nt, Homo sapiens
cggggcuccacugaa

SEQ ID NO: 199204 - RNA, 18 nt, Homo sapiens
caacaugugcucagggaa

SEQ ID NO: 199205 - RNA, 15 nt, Homo sapiens
uuagucgagccaagu

SEQ ID NO: 199206 - RNA, 16 nt, Homo sapiens
uggaucaucuauugcu

SEQ ID NO: 199207 - RNA, 13 nt, Homo sapiens
gagagggggccac

SEQ ID NO: 199208 - RNA, 23 nt, Homo sapiens
aggaggugcuaucgcaccacugu

SEQ ID NO: 199209 - RNA, 21 nt, Homo sapiens
cugugaaaugcuggcauuugc

SEQ ID NO: 199210 - RNA, 22 nt, Homo sapiens
caauucauauauuugaagugga

SEQ ID NO: 199211 - RNA, 23 nt, Homo sapiens
uuuacaauaaaacuuugcugcca

SEQ ID NO: 199212 - RNA, 14 nt, Homo sapiens
acaggcagcauuua

SEQ ID NO: 199213 - RNA, 22 nt, Homo sapiens
aucuuugcuuuauaaaagaaca

SEQ ID NO: 199214 - RNA, 13 nt, Homo sapiens
uguuaaguugaug

SEQ ID NO: 199215 - RNA, 16 nt, Homo sapiens
uaauuaguaacaugug

SEQ ID NO: 199216 - RNA, 18 nt, Homo sapiens
auagcaguugaaacaaga

SEQ ID NO: 199217 - RNA, 14 nt, Homo sapiens
uaccuccugagaaa

SEQ ID NO: 199218 - RNA, 21 nt, Homo sapiens
uaucuauggcacccaugcacc

SEQ ID NO: 199219 - RNA, 20 nt, Homo sapiens
uaaauauauauaaaccuaaa

SEQ ID NO: 199220 - RNA, 14 nt, Homo sapiens
ccauaauguuacau

SEQ ID NO: 199221 - RNA, 22 nt, Homo sapiens
uugggcagagcuggcucugagc

SEQ ID NO: 199222 - RNA, 19 nt, Homo sapiens
gcaguccugccucagccuc

SEQ ID NO: 199223 - RNA, 20 nt, Homo sapiens
uccaacguggggcagcacag

SEQ ID NO: 199224 - RNA, 22 nt, Homo sapiens
cucugggccaagucaaagacau

SEQ ID NO: 199225 - RNA, 13 nt, Homo sapiens
cuguuaccagagg

SEQ ID NO: 199226 - RNA, 9 nt, Homo sapiens
cauucaguc

SEQ ID NO: 199227 - RNA, 16 nt, Homo sapiens
gaagucacugcacagu

SEQ ID NO: 199228 - RNA, 11 nt, Homo sapiens
uaucugugaaa

SEQ ID NO: 199229 - RNA, 22 nt, Homo sapiens
uagucacagagauaauucuagc

SEQ ID NO: 199230 - RNA, 16 nt, Homo sapiens
uguucccccugugcag

SEQ ID NO: 199231 - RNA, 22 nt, Homo sapiens
gggucccauagaggugagggaa

SEQ ID NO: 199232 - RNA, 17 nt, Homo sapiens
aaacuaccuuccaguuc

SEQ ID NO: 199233 - RNA, 12 nt, Homo sapiens
acaucaagcaca

SEQ ID NO: 199234 - RNA, 16 nt, Homo sapiens
ugucccucacuguuga

SEQ ID NO: 199235 - RNA, 19 nt, Homo sapiens
uuuaagguuuuuacuguga

SEQ ID NO: 199236 - RNA, 23 nt, Homo sapiens
gcacguaguagggucaggccacg

SEQ ID NO: 199237 - RNA, 15 nt, Homo sapiens
uggaagugugugauc

SEQ ID NO: 199238 - RNA, 20 nt, Homo sapiens
uucucacuccuaccugguaa

SEQ ID NO: 199239 - RNA, 13 nt, Homo sapiens
ugcauuuauagca

SEQ ID NO: 199240 - RNA, 13 nt, Homo sapiens
gcugucaucucag

SEQ ID NO: 199241 - RNA, 19 nt, Homo sapiens
cugucucuuucaugaguuu

SEQ ID NO: 199242 - RNA, 20 nt, Homo sapiens
agaugaauguagcagauccc

SEQ ID NO: 199243 - RNA, 16 nt, Homo sapiens
ggaagcugucccucac

SEQ ID NO: 199244 - RNA, 21 nt, Homo sapiens
aacccaggaguucagggucau

SEQ ID NO: 199245 - RNA, 19 nt, Homo sapiens
gaagaacaguaacugccau

SEQ ID NO: 199246 - RNA, 22 nt, Homo sapiens
acuuuuaaguugcugaugaacu
